United States Patent Application Publication US 2008/0113351 A1 - sequence listing, part 4

SEQ ID NO: 74626 - DNA, 19 bp, Homo sapiens
  siRNA target sequence for C20orf23 (NM_017683.1,646-664).
cggcggaagtcatctaaaa

SEQ ID NO: 74627 - DNA, 19 bp, Homo sapiens
  siRNA target sequence for C20orf23 (NM_017683.1,649-667).
cggaagtcatctaaaacct

SEQ ID NO: 74628 - DNA, 19 bp, Homo sapiens
  siRNA target sequence for C20orf23 (NM_017683.1,693-711).
caaagaaggcccttatgtt

SEQ ID NO: 74629 - DNA, 19 bp, Homo sapiens
  siRNA target sequence for C20orf23 (NM_017683.1,702-720).
cccttatgttgaggattta

SEQ ID NO: 74630 - DNA, 19 bp, Homo sapiens
  siRNA target sequence for C20orf23 (NM_017683.1,712-730).
gaggatttatccaaacatt

SEQ ID NO: 74631 - DNA, 19 bp, Homo sapiens
  siRNA target sequence for C20orf23 (NM_017683.1,746-764).
gtgacgtagaagaacttat

SEQ ID NO: 74632 - DNA, 19 bp, Homo sapiens
  siRNA target sequence for C20orf23 (NM_017683.1,849-867).
gttcactcaggctaaattt

SEQ ID NO: 74633 - DNA, 19 bp, Homo sapiens
  siRNA target sequence for C20orf23 (NM_017683.1,884-902).
gtgaaaccgtcagtaagat

SEQ ID NO: 74634 - DNA, 19 bp, Homo sapiens
  siRNA target sequence for C20orf23 (NM_017683.1,953-971).
ccggggttaggctaaagga

SEQ ID NO: 74635 - DNA, 19 bp, Homo sapiens
  siRNA target sequence for C20orf23 (NM_017683.1,954-972).
cggggttaggctaaaggaa

SEQ ID NO: 74636 - DNA, 19 bp, Homo sapiens
  siRNA target sequence for C20orf23 (NM_017683.1,1022-1040).
ccttagctgatttatctca

SEQ ID NO: 74637 - DNA, 19 bp, Homo sapiens
  siRNA target sequence for C20orf23 (NM_017683.1,1041-1059).
ggatgctgcaaatactctt

SEQ ID NO: 74638 - DNA, 19 bp, Homo sapiens
  siRNA target sequence for C20orf23 (NM_017683.1,1104-1122).
gacttggttgttaaaagat

SEQ ID NO: 74639 - DNA, 19 bp, Homo sapiens
  siRNA target sequence for C20orf23 (NM_017683.1,1166-1184).
cacctgctgatgtcaatta

SEQ ID NO: 74640 - DNA, 19 bp, Homo sapiens
  siRNA target sequence for C20orf23 (NM_017683.1,1236-1254).
caacaagcctaccattaat

SEQ ID NO: 74641 - DNA, 19 bp, Homo sapiens
  siRNA target sequence for C20orf23 (NM_017683.1,1333-1351).
cagattgccctcttagact

SEQ ID NO: 74642 - DNA, 19 bp, Homo sapiens
  siRNA target sequence for C20orf23 (NM_017683.1,1350-1368).
ctcccccacagctttaagt

SEQ ID NO: 74643 - DNA, 19 bp, Homo sapiens
  siRNA target sequence for C20orf23 (NM_017683.1,1386-1404).
gcagaatgaagcaagagtt

SEQ ID NO: 74644 - DNA, 19 bp, Homo sapiens
  siRNA target sequence for C20orf23 (NM_017683.1,1425-1443).
gacaaataagtggaatgaa

SEQ ID NO: 74645 - DNA, 19 bp, Homo sapiens
  siRNA target sequence for C20orf23 (NM_017683.1,1490-1508).
ggattggagttgttttgga

SEQ ID NO: 74646 - DNA, 19 bp, Homo sapiens
  siRNA target sequence for C20orf23 (NM_017683.1,1536-1554).
cgatgatgaccttttgagt

SEQ ID NO: 74647 - DNA, 19 bp, Homo sapiens
  siRNA target sequence for C20orf23 (NM_017683.1,1553-1571).
gtactggaatcatcttata

SEQ ID NO: 74648 - DNA, 19 bp, Homo sapiens
  siRNA target sequence for C20orf23 (NM_017683.1,1556-1574).
ctggaatcatcttatatca

SEQ ID NO: 74649 - DNA, 19 bp, Homo sapiens
  siRNA target sequence for C20orf23 (NM_017683.1,1559-1577).
gaatcatcttatatcattt

SEQ ID NO: 74650 - DNA, 19 bp, Homo sapiens
  siRNA target sequence for C20orf23 (NM_017683.1,1581-1599).
ggaaggtcagacatacgtt

SEQ ID NO: 74651 - DNA, 19 bp, Homo sapiens
  siRNA target sequence for C20orf23 (NM_017683.1,1612-1630).
gcttccacggagcaagata

SEQ ID NO: 74652 - DNA, 19 bp, Homo sapiens
  siRNA target sequence for C20orf23 (NM_017683.1,1613-1631).
cttccacggagcaagatat

SEQ ID NO: 74653 - DNA, 19 bp, Homo sapiens
  siRNA target sequence for C20orf23 (NM_017683.1,1616-1634).
ccacggagcaagatattgt

SEQ ID NO: 74654 - DNA, 19 bp, Homo sapiens
  siRNA target sequence for C20orf23 (NM_017683.1,1662-1680).
gcattgcatctttgaaaat

SEQ ID NO: 74655 - DNA, 19 bp, Homo sapiens
  siRNA target sequence for C20orf23 (NM_017683.1,1686-1704).
ggggacagtgactctgata

SEQ ID NO: 74656 - DNA, 19 bp, Homo sapiens
  siRNA target sequence for C20orf23 (NM_017683.1,1746-1764).
cgtggaggccacacatcta

SEQ ID NO: 74657 - DNA, 19 bp, Homo sapiens
  siRNA target sequence for C20orf23 (NM_017683.1,1749-1767).
ggaggccacacatctaaat

SEQ ID NO: 74658 - DNA, 19 bp, Homo sapiens
  siRNA target sequence for C20orf23 (NM_017683.1,1752-1770).
ggccacacatctaaatcaa

SEQ ID NO: 74659 - DNA, 19 bp, Homo sapiens
  siRNA target sequence for C20orf23 (NM_017683.1,1809-1827).
ctttaaccatccaaaggaa

SEQ ID NO: 74660 - DNA, 19 bp, Homo sapiens
  siRNA target sequence for C20orf23 (NM_017683.1,1932-1950).
gtataaccccggacttgaa

SEQ ID NO: 74661 - DNA, 19 bp, Homo sapiens
  siRNA target sequence for C20orf23 (NM_017683.1,1939-1957).
cccggacttgaatttgaga

SEQ ID NO: 74662 - DNA, 19 bp, Homo sapiens
  siRNA target sequence for C20orf23 (NM_017683.1,1991-2009).
gtaaaaggaaactcataga

SEQ ID NO: 74663 - DNA, 19 bp, Homo sapiens
  siRNA target sequence for C20orf23 (NM_024704.2,2154-2172).
gagaacaagctaaaggatt

SEQ ID NO: 74664 - DNA, 19 bp, Homo sapiens
  siRNA target sequence for C20orf23 (NM_024704.2,2290-2308).
gactcaaagaactcaacaa

SEQ ID NO: 74665 - DNA, 19 bp, Homo sapiens
  siRNA target sequence for C20orf23 (NM_024704.2,2312-2330).
cgagaaggctgagaagttt

SEQ ID NO: 74666 - DNA, 19 bp, Homo sapiens
  siRNA target sequence for C20orf23 (NM_024704.2,2628-2646).
cgtttcttcgaattcaaga

SEQ ID NO: 74667 - DNA, 19 bp, Homo sapiens
  siRNA target sequence for C20orf23 (NM_024704.2,2732-2750).
ggagatcctagagtgttta

SEQ ID NO: 74668 - DNA, 19 bp, Homo sapiens
  siRNA target sequence for C20orf23 (NM_024704.2,2763-2781).
gacaaagaatctagattgt

SEQ ID NO: 74669 - DNA, 19 bp, Homo sapiens
  siRNA target sequence for C20orf23 (NM_024704.2,2826-2844).
caagatttcgagaaaataa

SEQ ID NO: 74670 - DNA, 19 bp, Homo sapiens
  siRNA target sequence for C20orf23 (NM_024704.2,2852-2870).
ggagtacaggctgcaatat

SEQ ID NO: 74671 - DNA, 19 bp, Homo sapiens
  siRNA target sequence for C20orf23 (NM_024704.2,2853-2871).
gagtacaggctgcaatata

SEQ ID NO: 74672 - DNA, 19 bp, Homo sapiens
  siRNA target sequence for C20orf23 (NM_024704.2,2930-2948).
gcagagagcatttgaaatt

SEQ ID NO: 74673 - DNA, 19 bp, Homo sapiens
  siRNA target sequence for C20orf23 (NM_024704.2,2958-2976).
ggccctctcagcttagaca

SEQ ID NO: 74674 - DNA, 19 bp, Homo sapiens
  siRNA target sequence for C20orf23 (NM_024704.2,2959-2977).
gccctctcagcttagacaa

SEQ ID NO: 74675 - DNA, 19 bp, Homo sapiens
  siRNA target sequence for C20orf23 (NM_024704.2,2978-2996).
cactctttatcaagtagaa

SEQ ID NO: 74676 - DNA, 19 bp, Homo sapiens
  siRNA target sequence for C20orf23 (NM_024704.2,3066-3084).
caagccacctttgaattca

SEQ ID NO: 74677 - DNA, 19 bp, Homo sapiens
  siRNA target sequence for C20orf23 (NM_024704.2,3344-3362).
ggaccaggagaggttagaa

SEQ ID NO: 74678 - DNA, 19 bp, Homo sapiens
  siRNA target sequence for C20orf23 (NM_024704.2,3345-3363).
gaccaggagaggttagaat

SEQ ID NO: 74679 - DNA, 19 bp, Homo sapiens
  siRNA target sequence for C20orf23 (NM_024704.2,3355-3373).
ggttagaatatgaaatcca

SEQ ID NO: 74680 - DNA, 19 bp, Homo sapiens
  siRNA target sequence for C20orf23 (NM_024704.2,3396-3414).
gaggtcgatggtgttcaaa

SEQ ID NO: 74681 - DNA, 19 bp, Homo sapiens
  siRNA target sequence for C20orf23 (NM_024704.2,3398-3416).
ggtcgatggtgttcaaaaa

SEQ ID NO: 74682 - DNA, 19 bp, Homo sapiens
  siRNA target sequence for C20orf23 (NM_024704.2,3401-3419).
cgatggtgttcaaaaagat

SEQ ID NO: 74683 - DNA, 19 bp, Homo sapiens
  siRNA target sequence for C20orf23 (NM_024704.2,3497-3515).
catggatgccaggatcaat

SEQ ID NO: 74684 - DNA, 19 bp, Homo sapiens
  siRNA target sequence for C20orf23 (NM_024704.2,3505-3523).
ccaggatcaatgcttacat

SEQ ID NO: 74685 - DNA, 19 bp, Homo sapiens
  siRNA target sequence for C20orf23 (NM_024704.2,3541-3559).
gacgccttcaggatttgca

SEQ ID NO: 74686 - DNA, 19 bp, Homo sapiens
  siRNA target sequence for C20orf23 (NM_024704.2,3551-3569).
ggatttgcatcgtgtgatt

SEQ ID NO: 74687 - DNA, 19 bp, Homo sapiens
  siRNA target sequence for C20orf23 (NM_024704.2,3557-3575).
gcatcgtgtgattagtgaa

SEQ ID NO: 74688 - DNA, 19 bp, Homo sapiens
  siRNA target sequence for C20orf23 (NM_024704.2,3592-3610).
cagacacgatgaaggataa

SEQ ID NO: 74689 - DNA, 19 bp, Homo sapiens
  siRNA target sequence for C20orf23 (NM_024704.2,3628-3646).
gcaccattcaacgtaaact

SEQ ID NO: 74690 - DNA, 19 bp, Homo sapiens
  siRNA target sequence for C20orf23 (NM_024704.2,3629-3647).
caccattcaacgtaaacta

SEQ ID NO: 74691 - DNA, 19 bp, Homo sapiens
  siRNA target sequence for C20orf23 (NM_024704.2,3632-3650).
cattcaacgtaaactaaaa

SEQ ID NO: 74692 - DNA, 19 bp, Homo sapiens
  siRNA target sequence for C20orf23 (NM_024704.2,3671-3689).
ctctttgggcgcaaatcca

SEQ ID NO: 74693 - DNA, 19 bp, Homo sapiens
  siRNA target sequence for C20orf23 (NM_024704.2,3701-3719).
ggacccaattaaaattagt

SEQ ID NO: 74694 - DNA, 19 bp, Homo sapiens
  siRNA target sequence for C20orf23 (NM_024704.2,3792-3810).
gatgagacatggactgtat

SEQ ID NO: 74695 - DNA, 19 bp, Homo sapiens
  siRNA target sequence for C20orf23 (NM_024704.2,3795-3813).
gagacatggactgtattca

SEQ ID NO: 74696 - DNA, 19 bp, Homo sapiens
  siRNA target sequence for C20orf23 (NM_024704.2,3812-3830).
caggcgttacagtcgtttt

SEQ ID NO: 74697 - DNA, 19 bp, Homo sapiens
  siRNA target sequence for C20orf23 (NM_024704.2,3815-3833).
gcgttacagtcgttttcga

SEQ ID NO: 74698 - DNA, 19 bp, Homo sapiens
  siRNA target sequence for C20orf23 (NM_024704.2,3825-3843).
cgttttcgagaaatgcata

SEQ ID NO: 74699 - DNA, 19 bp, Homo sapiens
  siRNA target sequence for C20orf23 (NM_024704.2,3826-3844).
gttttcgagaaatgcataa

SEQ ID NO: 74700 - DNA, 19 bp, Homo sapiens
  siRNA target sequence for C20orf23 (NM_024704.2,3831-3849).
cgagaaatgcataaaacat

SEQ ID NO: 74701 - DNA, 19 bp, Homo sapiens
  siRNA target sequence for C20orf23 (NM_024704.2,3869-3887).
gcttgctgcccttgaattt

SEQ ID NO: 74702 - DNA, 19 bp, Homo sapiens
  siRNA target sequence for C20orf23 (NM_024704.2,3937-3955).
gacgaagtcacttagagaa

SEQ ID NO: 74703 - DNA, 19 bp, Homo sapiens
  siRNA target sequence for C20orf23 (NM_024704.2,3939-3957).
cgaagtcacttagagaaat

SEQ ID NO: 74704 - DNA, 19 bp, Homo sapiens
  siRNA target sequence for C20orf23 (NM_024704.2,3983-4001).
gctccagtccgcaacatct

SEQ ID NO: 74705 - DNA, 19 bp, Homo sapiens
  siRNA target sequence for C20orf23 (NM_024704.2,3997-4015).
catctcccctccacatcaa

SEQ ID NO: 74706 - DNA, 19 bp, Homo sapiens
  siRNA target sequence for C20orf23 (NM_024704.2,4026-4044).
ctgactctctcgaaacata

SEQ ID NO: 74707 - DNA, 19 bp, Homo sapiens
  siRNA target sequence for C20orf23 (NM_024704.2,4030-4048).
ctctctcgaaacataccat

SEQ ID NO: 74708 - DNA, 19 bp, Homo sapiens
  siRNA target sequence for C20orf23 (NM_024704.2,4032-4050).
ctctcgaaacataccattt

SEQ ID NO: 74709 - DNA, 19 bp, Homo sapiens
  siRNA target sequence for C20orf23 (NM_024704.2,4034-4052).
ctcgaaacataccatttgt

SEQ ID NO: 74710 - DNA, 19 bp, Homo sapiens
  siRNA target sequence for C20orf23 (NM_024704.2,4036-4054).
cgaaacataccatttgtga

SEQ ID NO: 74711 - DNA, 19 bp, Homo sapiens
  siRNA target sequence for C20orf64 (NM_033550.2,327-345).
cggagcagccgcttcttga

SEQ ID NO: 74712 - DNA, 19 bp, Homo sapiens
  siRNA target sequence for C20orf64 (NM_033550.2,564-582).
gcttccaactgcttatata

SEQ ID NO: 74713 - DNA, 19 bp, Homo sapiens
  siRNA target sequence for C20orf64 (NM_033550.2,574-592).
gcttatatatggaagaaat

SEQ ID NO: 74714 - DNA, 19 bp, Homo sapiens
  siRNA target sequence for C20orf64 (NM_033550.2,664-682).
ccaacttagccaagacaat

SEQ ID NO: 74715 - DNA, 19 bp, Homo sapiens
  siRNA target sequence for C20orf64 (NM_033550.2,697-715).
ctcgaatgcacgatgaaga

SEQ ID NO: 74716 - DNA, 19 bp, Homo sapiens
  siRNA target sequence for C20orf64 (NM_033550.2,792-810).
gactttgggctgagtttca

SEQ ID NO: 74717 - DNA, 19 bp, Homo sapiens
  siRNA target sequence for C20orf64 (NM_033550.2,875-893).
ccatcccaacactgaaact

SEQ ID NO: 74718 - DNA, 19 bp, Homo sapiens
  siRNA target sequence for C20orf64 (NM_033550.2,884-902).
cactgaaactgtgtttgaa

SEQ ID NO: 74719 - DNA, 19 bp, Homo sapiens
  siRNA target sequence for C20orf64 (NM_033550.2,940-958).
ccaggccagtgctaaaaaa

SEQ ID NO: 74720 - DNA, 19 bp, Homo sapiens
  siRNA target sequence for C20orf64 (NM_033550.2,943-961).
ggccagtgctaaaaaaatt

SEQ ID NO: 74721 - DNA, 19 bp, Homo sapiens
  siRNA target sequence for C20orf97 (NM_021158.2,600-618).
gttggatgacaacttagat

SEQ ID NO: 74722 - DNA, 19 bp, Homo sapiens
  siRNA target sequence for C20orf97 (NM_021158.2,805-823).
cctacaggcactgagtata

SEQ ID NO: 74723 - DNA, 19 bp, Homo sapiens
  siRNA target sequence for C20orf97 (NM_021158.2,1212-1230).
ctacgtgggacctgagata

SEQ ID NO: 74724 - DNA, 19 bp, Homo sapiens
  siRNA target sequence for C6orf199 (NM_145025.2,163-181).
gtccaaacctgtttgcttt

SEQ ID NO: 74725 - DNA, 19 bp, Homo sapiens
  siRNA target sequence for C6orf199 (NM_145025.2,213-231).
caacattagcccgttacat

SEQ ID NO: 74726 - DNA, 19 bp, Homo sapiens
  siRNA target sequence for C6orf199 (NM_145025.2,249-267).
gtattcgtgttgaagcttt

SEQ ID NO: 74727 - DNA, 19 bp, Homo sapiens
  siRNA target sequence for C6orf199 (NM_145025.2,398-416).
gaagtctgtcactttggtt

SEQ ID NO: 74728 - DNA, 19 bp, Homo sapiens
  siRNA target sequence for C6orf199 (NM_145025.2,401-419).
gtctgtcactttggttata

SEQ ID NO: 74729 - DNA, 19 bp, Homo sapiens
  siRNA target sequence for C6orf199 (NM_145025.2,409-427).
ctttggttatattatcact

SEQ ID NO: 74730 - DNA, 19 bp, Homo sapiens
  siRNA target sequence for C6orf199 (NM_145025.2,413-431).
ggttatattatcactgaaa

SEQ ID NO: 74731 - DNA, 19 bp, Homo sapiens
  siRNA target sequence for C6orf199 (NM_145025.2,457-475).
gactaccttacagcaaata

SEQ ID NO: 74732 - DNA, 19 bp, Homo sapiens
  siRNA target sequence for C6orf199 (NM_145025.2,539-557).
gatttgtgccagagaattt

SEQ ID NO: 74733 - DNA, 19 bp, Homo sapiens
  siRNA target sequence for C6orf199 (NM_145025.2,560-578).
gggcaaagacagcacaata

SEQ ID NO: 74734 - DNA, 19 bp, Homo sapiens
  siRNA target sequence for C6orf199 (NM_145025.2,574-592).
caataatacgggatacata

SEQ ID NO: 74735 - DNA, 19 bp, Homo sapiens
  siRNA target sequence for C6orf199 (NM_145025.2,622-640).
cattgagaatcataggaaa

SEQ ID NO: 74736 - DNA, 19 bp, Homo sapiens
  siRNA target sequence for C6orf199 (NM_145025.2,655-673).
ccaaaaggacggaaaagga

SEQ ID NO: 74737 - DNA, 19 bp, Homo sapiens
  siRNA target sequence for C6orf199 (NM_145025.2,714-732).
catttattgccgaaatgca

SEQ ID NO: 74738 - DNA, 19 bp, Homo sapiens
  siRNA target sequence for C6orf199 (NM_145025.2,904-922).
ggagctctttatgattgtt

SEQ ID NO: 74739 - DNA, 19 bp, Homo sapiens
  siRNA target sequence for C6orf199 (NM_145025.2,905-923).
gagctctttatgattgtta

SEQ ID NO: 74740 - DNA, 19 bp, Homo sapiens
  siRNA target sequence for C6orf199 (NM_145025.2,920-938).
gttatggatcgacttaaat

SEQ ID NO: 74741 - DNA, 19 bp, Homo sapiens
  siRNA target sequence for C6orf199 (NM_145025.2,926-944).
gatcgacttaaatatctga

SEQ ID NO: 74742 - DNA, 19 bp, Homo sapiens
  siRNA target sequence for C6orf199 (NM_145025.2,954-972).
gagcagctattctaaccaa

SEQ ID NO: 74743 - DNA, 19 bp, Homo sapiens
  siRNA target sequence for C6orf199 (NM_145025.2,1028-1046).
cgtactcttgcatcttata

SEQ ID NO: 74744 - DNA, 19 bp, Homo sapiens
  siRNA target sequence for C6orf199 (NM_145025.2,1029-1047).
gtactcttgcatcttataa

SEQ ID NO: 74745 - DNA, 19 bp, Homo sapiens
  siRNA target sequence for C6orf199 (NM_145025.2,1091-1109).
cgtacatgtcctgtgaatt

SEQ ID NO: 74746 - DNA, 19 bp, Homo sapiens
  siRNA target sequence for C6orf199 (NM_145025.2,1134-1152).
gattaccagattattctgt

SEQ ID NO: 74747 - DNA, 19 bp, Homo sapiens
  siRNA target sequence for C6orf199 (NM_145025.2,1149-1167).
ctgtgagttttctaggtaa

SEQ ID NO: 74748 - DNA, 19 bp, Homo sapiens
  siRNA target sequence for C6orf199 (NM_145025.2,1182-1200).
catcagaagaagcattaaa

SEQ ID NO: 74749 - DNA, 19 bp, Homo sapiens
  siRNA target sequence for C6orf199 (NM_145025.2,1267-1285).
catacttggacctcaatat

SEQ ID NO: 74750 - DNA, 19 bp, Homo sapiens
  siRNA target sequence for C8FW (NM_025195.2,938-956).
gcaaggtgtttcccattaa

SEQ ID NO: 74751 - DNA, 19 bp, Homo sapiens
  siRNA target sequence for C8FW (NM_025195.2,994-1012).
ccatcgcacagcaacatta

SEQ ID NO: 74752 - DNA, 19 bp, Homo sapiens
  siRNA target sequence for C8FW (NM_025195.2,1233-1251).
gagaacccagcttagacta

SEQ ID NO: 74753 - DNA, 19 bp, Homo sapiens
  siRNA target sequence for C8FW (NM_025195.2,1239-1257).
ccagcttagactagaaagt

SEQ ID NO: 74754 - DNA, 19 bp, Homo sapiens
  siRNA target sequence for C8FW (NM_025195.2,1242-1260).
gcttagactagaaagtcta

SEQ ID NO: 74755 - DNA, 19 bp, Homo sapiens
  siRNA target sequence for C8FW (NM_025195.2,1258-1276).
ctagaagacacacacataa

SEQ ID NO: 74756 - DNA, 19 bp, Homo sapiens
  siRNA target sequence for C8FW (NM_025195.2,1615-1633).
gggtacatcgactcagaaa

SEQ ID NO: 74757 - DNA, 19 bp, Homo sapiens
  siRNA target sequence for C8FW (NM_025195.2,1616-1634).
ggtacatcgactcagaaat

SEQ ID NO: 74758 - DNA, 19 bp, Homo sapiens
  siRNA target sequence for C8FW (NM_025195.2,1617-1635).
gtacatcgactcagaaata

SEQ ID NO: 74759 - DNA, 19 bp, Homo sapiens
  siRNA target sequence for C8FW (NM_025195.2,1620-1638).
catcgactcagaaatagga

SEQ ID NO: 74760 - DNA, 19 bp, Homo sapiens
  siRNA target sequence for C8FW (NM_025195.2,1668-1686).
ggaggacagtgacattagt

SEQ ID NO: 74761 - DNA, 19 bp, Homo sapiens
  siRNA target sequence for C8FW (NM_025195.2,1669-1687).
gaggacagtgacattagtt

SEQ ID NO: 74762 - DNA, 19 bp, Homo sapiens
  siRNA target sequence for CACNA1B (NM_000718.1,264-282).
gccagcgggtcctctacaa

SEQ ID NO: 74763 - DNA, 19 bp, Homo sapiens
  siRNA target sequence for CACNA1B (NM_000718.1,269-287).
cgggtcctctacaagcaat

SEQ ID NO: 74764 - DNA, 19 bp, Homo sapiens
  siRNA target sequence for CACNA1B (NM_000718.1,428-446).
cctccattcgagtatatga

SEQ ID NO: 74765 - DNA, 19 bp, Homo sapiens
  siRNA target sequence for CACNA1B (NM_000718.1,429-447).
ctccattcgagtatatgat

SEQ ID NO: 74766 - DNA, 19 bp, Homo sapiens
  siRNA target sequence for CACNA1B (NM_000718.1,1102-1120).
cctctataatacaaacgat

SEQ ID NO: 74767 - DNA, 19 bp, Homo sapiens
  siRNA target sequence for CACNA1B (NM_000718.1,1518-1536).
cagagagctcgtcatactt

SEQ ID NO: 74768 - DNA, 19 bp, Homo sapiens
  siRNA target sequence for CACNA1B (NM_000718.1,1549-1567).
gaagatgttccggtttttt

SEQ ID NO: 74769 - DNA, 19 bp, Homo sapiens
  siRNA target sequence for CACNA1B (NM_000718.1,1673-1691).
cttaccacgaccctgtatt

SEQ ID NO: 74770 - DNA, 19 bp, Homo sapiens
  siRNA target sequence for CACNA1B (NM_000718.1,1678-1696).
cacgaccctgtattttgca

SEQ ID NO: 74771 - DNA, 19 bp, Homo sapiens
  siRNA target sequence for CACNA1B (NM_000718.1,2189-2207).
ggcatgttctcgtcctttt

SEQ ID NO: 74772 - DNA, 19 bp, Homo sapiens
  siRNA target sequence for CACNA1B (NM_000718.1,2190-2208).
gcatgttctcgtcctttta

SEQ ID NO: 74773 - DNA, 19 bp, Homo sapiens
  siRNA target sequence for CACNA1B (NM_000718.1,3307-3325).
gccagaggatgcagacaat

SEQ ID NO: 74774 - DNA, 19 bp, Homo sapiens
  siRNA target sequence for CACNA1B (NM_000718.1,3357-3375).
ccccagacccgaacactat

SEQ ID NO: 74775 - DNA, 19 bp, Homo sapiens
  siRNA target sequence for CACNA1B (NM_000718.1,3358-3376).
cccagacccgaacactatt

SEQ ID NO: 74776 - DNA, 19 bp, Homo sapiens
  siRNA target sequence for CACNA1B (NM_000718.1,3360-3378).
cagacccgaacactattgt

SEQ ID NO: 74777 - DNA, 19 bp, Homo sapiens
  siRNA target sequence for CACNA1B (NM_000718.1,3364-3382).
cccgaacactattgtacat

SEQ ID NO: 74778 - DNA, 19 bp, Homo sapiens
  siRNA target sequence for CACNA1B (NM_000718.1,3365-3383).
ccgaacactattgtacata

SEQ ID NO: 74779 - DNA, 19 bp, Homo sapiens
  siRNA target sequence for CACNA1B (NM_000718.1,3521-3539).
ccatacagctccatgttct

SEQ ID NO: 74780 - DNA, 19 bp, Homo sapiens
  siRNA target sequence for CACNA1B (NM_000718.1,3679-3697).
caggaacaacgctctgaaa

SEQ ID NO: 74781 - DNA, 19 bp, Homo sapiens
  siRNA target sequence for CACNA1B (NM_000718.1,3681-3699).
ggaacaacgctctgaaata

SEQ ID NO: 74782 - DNA, 19 bp, Homo sapiens
  siRNA target sequence for CACNA1B (NM_000718.1,3838-3856).
ggtggcgtttgctttctca

SEQ ID NO: 74783 - DNA, 19 bp, Homo sapiens
  siRNA target sequence for CACNA1B (NM_000718.1,3866-3884).
gggaaagacatcaatacca

SEQ ID NO: 74784 - DNA, 19 bp, Homo sapiens
  siRNA target sequence for CACNA1B (NM_000718.1,3970-3988).
ggtgaactccctgaagaat

SEQ ID NO: 74785 - DNA, 19 bp, Homo sapiens
  siRNA target sequence for CACNA1B (NM_000718.1,3992-4010).
ctcaacatcttgattgtct

SEQ ID NO: 74786 - DNA, 19 bp, Homo sapiens
  siRNA target sequence for CACNA1B (NM_000718.1,4105-4123).
ggactgcaggggtcagtat

SEQ ID NO: 74787 - DNA, 19 bp, Homo sapiens
  siRNA target sequence for CACNA1B (NM_000718.1,4113-4131).
ggggtcagtatttggatta

SEQ ID NO: 74788 - DNA, 19 bp, Homo sapiens
  siRNA target sequence for CACNA1B (NM_000718.1,4247-4265).
cccatggtgctgaaacact

SEQ ID NO: 74789 - DNA, 19 bp, Homo sapiens
  siRNA target sequence for CACNA1B (NM_000718.1,4447-4465).
gaacgagagggcttgcatt

SEQ ID NO: 74790 - DNA, 19 bp, Homo sapiens
  siRNA target sequence for CACNA1B (NM_000718.1,4515-4533).
ggcagtcgttccagtataa

SEQ ID NO: 74791 - DNA, 19 bp, Homo sapiens
  siRNA target sequence for CACNA1B (NM_000718.1,4517-4535).
cagtcgttccagtataaga

SEQ ID NO: 74792 - DNA, 19 bp, Homo sapiens
  siRNA target sequence for CACNA1B (NM_000718.1,4528-4546).
gtataagacgtggacattt

SEQ ID NO: 74793 - DNA, 19 bp, Homo sapiens
  siRNA target sequence for CACNA1B (NM_000718.1,4559-4577).
ccctttgaatacttcatca

SEQ ID NO: 74794 - DNA, 19 bp, Homo sapiens
  siRNA target sequence for CACNA1B (NM_000718.1,4609-4627).
gatgatgaagttctatgat

SEQ ID NO: 74795 - DNA, 19 bp, Homo sapiens
  siRNA target sequence for CACNA1B (NM_000718.1,4661-4679).
ctgaacatcgtgttcacat

SEQ ID NO: 74796 - DNA, 19 bp, Homo sapiens
  siRNA target sequence for CACNA1B (NM_000718.1,4721-4739).
ggggtgctgaactatttca

SEQ ID NO: 74797 - DNA, 19 bp, Homo sapiens
  siRNA target sequence for CACNA1B (NM_000718.1,4777-4795).
gggaagtattactgatatt

SEQ ID NO: 74798 - DNA, 19 bp, Homo sapiens
  siRNA target sequence for CACNA1B (NM_000718.1,5056-5074).
cttccggacgtttttgcaa

SEQ ID NO: 74799 - DNA, 19 bp, Homo sapiens
  siRNA target sequence for CACNA1B (NM_000718.1,5187-5205).
gtgactttgcctacttcta

SEQ ID NO: 74800 - DNA, 19 bp, Homo sapiens
  siRNA target sequence for CACNA1B (NM_000718.1,5363-5381).
gcgtgtgggcgcatcagtt

SEQ ID NO: 74801 - DNA, 19 bp, Homo sapiens
  siRNA target sequence for CACNA1B (NM_000718.1,5364-5382).
cgtgtgggcgcatcagtta

SEQ ID NO: 74802 - DNA, 19 bp, Homo sapiens
  siRNA target sequence for CACNA1B (NM_000718.1,5367-5385).
gtgggcgcatcagttacaa

SEQ ID NO: 74803 - DNA, 19 bp, Homo sapiens
  siRNA target sequence for CACNA1B (NM_000718.1,5372-5390).
cgcatcagttacaatgaca

SEQ ID NO: 74804 - DNA, 19 bp, Homo sapiens
  siRNA target sequence for CACNA1B (NM_000718.1,5379-5397).
gttacaatgacatgtttga

SEQ ID NO: 74805 - DNA, 19 bp, Homo sapiens
  siRNA target sequence for CACNA1B (NM_000718.1,5442-5460).
gccctgctcgagttgctta

SEQ ID NO: 74806 - DNA, 19 bp, Homo sapiens
  siRNA target sequence for CACNA1B (NM_000718.1,5465-5483).
cgcctggttcgcatgaaca

SEQ ID NO: 74807 - DNA, 19 bp, Homo sapiens
  siRNA target sequence for CACNA1B (NM_000718.1,5466-5484).
gcctggttcgcatgaacat

SEQ ID NO: 74808 - DNA, 19 bp, Homo sapiens
  siRNA target sequence for CACNA1B (NM_000718.1,5544-5562).
ggacggcactggagatcaa

SEQ ID NO: 74809 - DNA, 19 bp, Homo sapiens
  siRNA target sequence for CACNA1B (NM_000718.1,6740-6758).
cccagcatcacctacaaga

SEQ ID NO: 74810 - DNA, 19 bp, Homo sapiens
  siRNA target sequence for CACNA1B (NM_000718.1,6834-6852).
gtgggctttccgaacacaa

SEQ ID NO: 74811 - DNA, 19 bp, Homo sapiens
  siRNA target sequence for CACNA1B (NM_000718.1,6889-6907).
ggcccctggctctcgaatt

SEQ ID NO: 74812 - DNA, 19 bp, Homo sapiens
  siRNA target sequence for CAD (NM_004341.2,208-226).
gcatccccccagatgaaat

SEQ ID NO: 74813 - DNA, 19 bp, Homo sapiens
  siRNA target sequence for CAD (NM_004341.2,212-230).
ccccccagatgaaatggat

SEQ ID NO: 74814 - DNA, 19 bp, Homo sapiens
  siRNA target sequence for CAD (NM_004341.2,501-519).
gtaccagaggtctccatta

SEQ ID NO: 74815 - DNA, 19 bp, Homo sapiens
  siRNA target sequence for CAD (NM_004341.2,521-539).
gactccacgggtattcaat

SEQ ID NO: 74816 - DNA, 19 bp, Homo sapiens
  siRNA target sequence for CAD (NM_004341.2,550-568).
cccctcggatccttgcttt

SEQ ID NO: 74817 - DNA, 19 bp, Homo sapiens
  siRNA target sequence for CAD (NM_004341.2,572-590).
ctgtggcctcaagtataat

SEQ ID NO: 74818 - DNA, 19 bp, Homo sapiens
  siRNA target sequence for CAD (NM_004341.2,574-592).
gtggcctcaagtataatca

SEQ ID NO: 74819 - DNA, 19 bp, Homo sapiens
  siRNA target sequence for CAD (NM_004341.2,576-594).
ggcctcaagtataatcaga

SEQ ID NO: 74820 - DNA, 19 bp, Homo sapiens
  siRNA target sequence for CAD (NM_004341.2,577-595).
gcctcaagtataatcagat

SEQ ID NO: 74821 - DNA, 19 bp, Homo sapiens
  siRNA target sequence for CAD (NM_004341.2,649-667).
cactagacagccaagagta

SEQ ID NO: 74822 - DNA, 19 bp, Homo sapiens
  siRNA target sequence for CAD (NM_004341.2,665-683).
gtatgagggtctcttctta

SEQ ID NO: 74823 - DNA, 19 bp, Homo sapiens
  siRNA target sequence for CAD (NM_004341.2,671-689).
gggtctcttcttaagtaat

SEQ ID NO: 74824 - DNA, 19 bp, Homo sapiens
  siRNA target sequence for CAD (NM_004341.2,808-826).
ccattggggccaagactta

SEQ ID NO: 74825 - DNA, 19 bp, Homo sapiens
  siRNA target sequence for CAD (NM_004341.2,816-834).
gccaagacttacaagatga

SEQ ID NO: 74826 - DNA, 19 bp, Homo sapiens
  siRNA target sequence for CAD (NM_004341.2,821-839).
gacttacaagatgagatat

SEQ ID NO: 74827 - DNA, 19 bp, Homo sapiens
  siRNA target sequence for CAD (NM_004341.2,841-859).
ggaaccgaggccataacca

SEQ ID NO: 74828 - DNA, 19 bp, Homo sapiens
  siRNA target sequence for CAD (NM_004341.2,968-986).
cgccaatgatggttccaat

SEQ ID NO: 74829 - DNA, 19 bp, Homo sapiens
  siRNA target sequence for CAD (NM_004341.2,1065-1083).
gaactgcttttcgatatct

SEQ ID NO: 74830 - DNA, 19 bp, Homo sapiens
  siRNA target sequence for CAD (NM_004341.2,1270-1288).
cgggctctcaggcaattaa

SEQ ID NO: 74831 - DNA, 19 bp, Homo sapiens
  siRNA target sequence for CAD (NM_004341.2,1362-1380).
ctggccgacaaggtctatt

SEQ ID NO: 74832 - DNA, 19 bp, Homo sapiens
  siRNA target sequence for CAD (NM_004341.2,1364-1382).
ggccgacaaggtctatttt

SEQ ID NO: 74833 - DNA, 19 bp, Homo sapiens
  siRNA target sequence for CAD (NM_004341.2,1387-1405).
ccataacacctcattatgt

SEQ ID NO: 74834 - DNA, 19 bp, Homo sapiens
  siRNA target sequence for CAD (NM_004341.2,1388-1406).
cataacacctcattatgta

SEQ ID NO: 74835 - DNA, 19 bp, Homo sapiens
  siRNA target sequence for CAD (NM_004341.2,1404-1422).
gtaacccaggtgatacgta

SEQ ID NO: 74836 - DNA, 19 bp, Homo sapiens
  siRNA target sequence for CAD (NM_004341.2,1409-1427).
ccaggtgatacgtaatgaa

SEQ ID NO: 74837 - DNA, 19 bp, Homo sapiens
  siRNA target sequence for CAD (NM_004341.2,1431-1449).
cccgatggtgtgttactga

SEQ ID NO: 74838 - DNA, 19 bp, Homo sapiens
  siRNA target sequence for CAD (NM_004341.2,1616-1634).
cccgagcgaggcagcaaat

SEQ ID NO: 74839 - DNA, 19 bp, Homo sapiens
  siRNA target sequence for CAD (NM_004341.2,1617-1635).
ccgagcgaggcagcaaatt

SEQ ID NO: 74840 - DNA, 19 bp, Homo sapiens
  siRNA target sequence for CAD (NM_004341.2,1619-1637).
gagcgaggcagcaaattct

SEQ ID NO: 74841 - DNA, 19 bp, Homo sapiens
  siRNA target sequence for CAD (NM_004341.2,1621-1639).
gcgaggcagcaaattctct

SEQ ID NO: 74842 - DNA, 19 bp, Homo sapiens
  siRNA target sequence for CAD (NM_004341.2,2050-2068).
ctgagcagtattacatcat

SEQ ID NO: 74843 - DNA, 19 bp, Homo sapiens
  siRNA target sequence for CAD (NM_004341.2,2054-2072).
gcagtattacatcattgaa

SEQ ID NO: 74844 - DNA, 19 bp, Homo sapiens
  siRNA target sequence for CAD (NM_004341.2,2108-2126).
cagtaaggccacaggttat

SEQ ID NO: 74845 - DNA, 19 bp, Homo sapiens
  siRNA target sequence for CAD (NM_004341.2,2198-2216).
gggtacagcagcctttgaa

SEQ ID NO: 74846 - DNA, 19 bp, Homo sapiens
  siRNA target sequence for CAD (NM_004341.2,2218-2236).
ccagcgtggattattgtgt

SEQ ID NO: 74847 - DNA, 19 bp, Homo sapiens
  siRNA target sequence for CAD (NM_004341.2,2248-2266).
ctcgatgggaccttagcaa

SEQ ID NO: 74848 - DNA, 19 bp, Homo sapiens
  siRNA target sequence for CAD (NM_004341.2,2271-2289).
ctgcgagtcagcacaaaga

SEQ ID NO: 74849 - DNA, 19 bp, Homo sapiens
  siRNA target sequence for CAD (NM_004341.2,2273-2291).
gcgagtcagcacaaagatt

SEQ ID NO: 74850 - DNA, 19 bp, Homo sapiens
  siRNA target sequence for CAD (NM_004341.2,2324-2342).
gggcattgggcgttcattt

SEQ ID NO: 74851 - DNA, 19 bp, Homo sapiens
  siRNA target sequence for CAD (NM_004341.2,2326-2344).
gcattgggcgttcatttga

SEQ ID NO: 74852 - DNA, 19 bp, Homo sapiens
  siRNA target sequence for CAD (NM_004341.2,2393-2411).
ctttgatcacacagtgaaa

SEQ ID NO: 74853 - DNA, 19 bp, Homo sapiens
  siRNA target sequence for CAD (NM_004341.2,2429-2447).
gttggagactccaacagat

SEQ ID NO: 74854 - DNA, 19 bp, Homo sapiens
  siRNA target sequence for CAD (NM_004341.2,2443-2461).
cagataagcggatttttgt

SEQ ID NO: 74855 - DNA, 19 bp, Homo sapiens
  siRNA target sequence for CAD (NM_004341.2,2472-2490).
gctttgtgggctggttatt

SEQ ID NO: 74856 - DNA, 19 bp, Homo sapiens
  siRNA target sequence for CAD (NM_004341.2,2758-2776).
cagcccagacaaattacct

SEQ ID NO: 74857 - DNA, 19 bp, Homo sapiens
  siRNA target sequence for CAD (NM_004341.2,2760-2778).
gcccagacaaattacctat

SEQ ID NO: 74858 - DNA, 19 bp, Homo sapiens
  siRNA target sequence for CAD (NM_004341.2,2802-2820).
catgacctcacctttcgaa

SEQ ID NO: 74859 - DNA, 19 bp, Homo sapiens
  siRNA target sequence for CAD (NM_004341.2,2863-2881).
gctctagcgttgaatttga

SEQ ID NO: 74860 - DNA, 19 bp, Homo sapiens
  siRNA target sequence for CAD (NM_004341.2,2910-2928).
ctccgaaagatgggatata

SEQ ID NO: 74861 - DNA, 19 bp, Homo sapiens
  siRNA target sequence for CAD (NM_004341.2,2913-2931).
cgaaagatgggatataaga

SEQ ID NO: 74862 - DNA, 19 bp, Homo sapiens
  siRNA target sequence for CAD (NM_004341.2,2932-2950).
ccatcatggtgaactataa

SEQ ID NO: 74863 - DNA, 19 bp, Homo sapiens
  siRNA target sequence for CAD (NM_004341.2,2959-2977).
cagtcagcaccgactatga

SEQ ID NO: 74864 - DNA, 19 bp, Homo sapiens
  siRNA target sequence for CAD (NM_004341.2,2961-2979).
gtcagcaccgactatgaca

SEQ ID NO: 74865 - DNA, 19 bp, Homo sapiens
  siRNA target sequence for CAD (NM_004341.2,2981-2999).
gtgtgatcgactctacttt

SEQ ID NO: 74866 - DNA, 19 bp, Homo sapiens
  siRNA target sequence for CAD (NM_004341.2,3048-3066).
cctgaaggtgtgatcctat

SEQ ID NO: 74867 - DNA, 19 bp, Homo sapiens
  siRNA target sequence for CAD (NM_004341.2,3076-3094).
gacagctgcccaacaacat

SEQ ID NO: 74868 - DNA, 19 bp, Homo sapiens
  siRNA target sequence for CAD (NM_004341.2,3157-3175).
cggctgagaaccgtttcaa

SEQ ID NO: 74869 - DNA, 19 bp, Homo sapiens
  siRNA target sequence for CAD (NM_004341.2,3159-3177).
gctgagaaccgtttcaagt

SEQ ID NO: 74870 - DNA, 19 bp, Homo sapiens
  siRNA target sequence for CAD (NM_004341.2,3160-3178).
ctgagaaccgtttcaagtt

SEQ ID NO: 74871 - DNA, 19 bp, Homo sapiens
  siRNA target sequence for CAD (NM_004341.2,3162-3180).
gagaaccgtttcaagtttt

SEQ ID NO: 74872 - DNA, 19 bp, Homo sapiens
  siRNA target sequence for CAD (NM_004341.2,3186-3204).
ctccttgacaccattggta

SEQ ID NO: 74873 - DNA, 19 bp, Homo sapiens
  siRNA target sequence for CAD (NM_004341.2,3240-3258).
gagtctgctcgccaattct

SEQ ID NO: 74874 - DNA, 19 bp, Homo sapiens
  siRNA target sequence for CAD (NM_004341.2,3305-3323).
gagcggtgctgctatgaat

SEQ ID NO: 74875 - DNA, 19 bp, Homo sapiens
  siRNA target sequence for CAD (NM_004341.2,3307-3325).
gcggtgctgctatgaatgt

SEQ ID NO: 74876 - DNA, 19 bp, Homo sapiens
  siRNA target sequence for CAD (NM_004341.2,3608-3626).
ggtcacaggacccttcaat

SEQ ID NO: 74877 - DNA, 19 bp, Homo sapiens
  siRNA target sequence for CAD (NM_004341.2,3650-3668).
ccagctgaaagttattgaa

SEQ ID NO: 74878 - DNA, 19 bp, Homo sapiens
  siRNA target sequence for CAD (NM_004341.2,3651-3669).
cagctgaaagttattgaat

SEQ ID NO: 74879 - DNA, 19 bp, Homo sapiens
  siRNA target sequence for CAD (NM_004341.2,3793-3811).
ctggagtcgtgggagtaaa

SEQ ID NO: 74880 - DNA, 19 bp, Homo sapiens
  siRNA target sequence for CAD (NM_004341.2,3796-3814).
gagtcgtgggagtaaaggt

SEQ ID NO: 74881 - DNA, 19 bp, Homo sapiens
  siRNA target sequence for CAD (NM_004341.2,3975-3993).
ctgaccattggcagctata

SEQ ID NO: 74882 - DNA, 19 bp, Homo sapiens
  siRNA target sequence for CAD (NM_004341.2,4108-4126).
ctgtggactggcactttga

SEQ ID NO: 74883 - DNA, 19 bp, Homo sapiens
  siRNA target sequence for CAD (NM_004341.2,4296-4314).
gtgcccctaatcatcgata

SEQ ID NO: 74884 - DNA, 19 bp, Homo sapiens
  siRNA target sequence for CAD (NM_004341.2,4299-4317).
cccctaatcatcgatatca

SEQ ID NO: 74885 - DNA, 19 bp, Homo sapiens
  siRNA target sequence for CAD (NM_004341.2,4300-4318).
ccctaatcatcgatatcaa

SEQ ID NO: 74886 - DNA, 19 bp, Homo sapiens
  siRNA target sequence for CAD (NM_004341.2,4302-4320).
ctaatcatcgatatcaagt

SEQ ID NO: 74887 - DNA, 19 bp, Homo sapiens
  siRNA target sequence for CAD (NM_004341.2,4369-4387).
ctttgaaggtgcatgttga

SEQ ID NO: 74888 - DNA, 19 bp, Homo sapiens
  siRNA target sequence for CAD (NM_004341.2,4412-4430).
gcgactgccgggattgatt

SEQ ID NO: 74889 - DNA, 19 bp, Homo sapiens
  siRNA target sequence for CAD (NM_004341.2,4414-4432).
gactgccgggattgattga

SEQ ID NO: 74890 - DNA, 19 bp, Homo sapiens
  siRNA target sequence for CAD (NM_004341.2,4456-4474).
caggtgggacacataagga

SEQ ID NO: 74891 - DNA, 19 bp, Homo sapiens
  siRNA target sequence for CAD (NM_004341.2,4524-4542).
gtgtgtgccatgcctaata

SEQ ID NO: 74892 - DNA, 19 bp, Homo sapiens
  siRNA target sequence for CAD (NM_004341.2,4613-4631).
cgactttgcgctattcctt

SEQ ID NO: 74893 - DNA, 19 bp, Homo sapiens
  siRNA target sequence for CAD (NM_004341.2,4634-4652).
ggcctcgtctgaaaatgca

SEQ ID NO: 74894 - DNA, 19 bp, Homo sapiens
  siRNA target sequence for CAD (NM_004341.2,4845-4863).
cagcgctcagtgcacatat

SEQ ID NO: 74895 - DNA, 19 bp, Homo sapiens
  siRNA target sequence for CAD (NM_004341.2,4849-4867).
gctcagtgcacatatgtca

SEQ ID NO: 74896 - DNA, 19 bp, Homo sapiens
  siRNA target sequence for CAD (NM_004341.2,4880-4898).
ggaggagatcctgctaatt

SEQ ID NO: 74897 - DNA, 19 bp, Homo sapiens
  siRNA target sequence for CAD (NM_004341.2,4881-4899).
gaggagatcctgctaatta

SEQ ID NO: 74898 - DNA, 19 bp, Homo sapiens
  siRNA target sequence for CAD (NM_004341.2,4883-4901).
ggagatcctgctaattaaa

SEQ ID NO: 74899 - DNA, 19 bp, Homo sapiens
  siRNA target sequence for CAD (NM_004341.2,5228-5246).
caatcctcggcgcatcttt

SEQ ID NO: 74900 - DNA, 19 bp, Homo sapiens
  siRNA target sequence for CAD (NM_004341.2,5288-5306).
ggagcatgagtggacaatt

SEQ ID NO: 74901 - DNA, 19 bp, Homo sapiens
  siRNA target sequence for CAD (NM_004341.2,5330-5348).
ggcccactggacacctttt

SEQ ID NO: 74902 - DNA, 19 bp, Homo sapiens
  siRNA target sequence for CAD (NM_004341.2,5395-5413).
gggaggttgcctatatcga

SEQ ID NO: 74903 - DNA, 19 bp, Homo sapiens
  siRNA target sequence for CAD (NM_004341.2,5396-5414).
ggaggttgcctatatcgat

SEQ ID NO: 74904 - DNA, 19 bp, Homo sapiens
  siRNA target sequence for CAD (NM_004341.2,5516-5534).
gaccacgacacctgaaaga

SEQ ID NO: 74905 - DNA, 19 bp, Homo sapiens
  siRNA target sequence for CAD (NM_004341.2,5785-5803).
cattagtgggccaacatat

SEQ ID NO: 74906 - DNA, 19 bp, Homo sapiens
  siRNA target sequence for CAD (NM_004341.2,6139-6157).
gccggaggccagtgatcaa

SEQ ID NO: 74907 - DNA, 19 bp, Homo sapiens
  siRNA target sequence for CAD (NM_004341.2,6140-6158).
ccggaggccagtgatcaat

SEQ ID NO: 74908 - DNA, 19 bp, Homo sapiens
  siRNA target sequence for CAD (NM_004341.2,6272-6290).
gcacggacgcacagtacat

SEQ ID NO: 74909 - DNA, 19 bp, Homo sapiens
  siRNA target sequence for CAD (NM_004341.2,6273-6291).
cacggacgcacagtacatt

SEQ ID NO: 74910 - DNA, 19 bp, Homo sapiens
  siRNA target sequence for CAD (NM_004341.2,6494-6512).
ggagtacgaagcttgcttt

SEQ ID NO: 74911 - DNA, 19 bp, Homo sapiens
  siRNA target sequence for CAD (NM_004341.2,6582-6600).
ccccgtgtcaacgagataa

SEQ ID NO: 74912 - DNA, 19 bp, Homo sapiens
  siRNA target sequence for CAD (NM_004341.2,6646-6664).
ctgagaacggcatgtacat

SEQ ID NO: 74913 - DNA, 19 bp, Homo sapiens
  siRNA target sequence for CAD (NM_004341.2,6662-6680).
catccgcatggctctgtta

SEQ ID NO: 74914 - DNA, 19 bp, Homo sapiens
  siRNA target sequence for CAMK1 (NM_003656.3,211-229).
gcaggcggaggacattaga

SEQ ID NO: 74915 - DNA, 19 bp, Homo sapiens
  siRNA target sequence for CAMK1 (NM_003656.3,235-253).
ctacgacttccgagatgtt

SEQ ID NO: 74916 - DNA, 19 bp, Homo sapiens
  siRNA target sequence for CAMK1 (NM_003656.3,394-412).
gatcaagcaccccaacatt

SEQ ID NO: 74917 - DNA, 19 bp, Homo sapiens
  siRNA target sequence for CAMK1 (NM_003656.3,574-592).
gcatgacctgggcattgta

SEQ ID NO: 74918 - DNA, 19 bp, Homo sapiens
  siRNA target sequence for CAMK1 (NM_003656.3,791-809).
ggtgtcatcgcctacatct

SEQ ID NO: 74919 - DNA, 19 bp, Homo sapiens
  siRNA target sequence for CAMK1 (NM_003656.3,828-846).
ccttctatgacgagaatga

SEQ ID NO: 74920 - DNA, 19 bp, Homo sapiens
  siRNA target sequence for CAMK1 (NM_003656.3,829-847).
cttctatgacgagaatgat

SEQ ID NO: 74921 - DNA, 19 bp, Homo sapiens
  siRNA target sequence for CAMK1 (NM_003656.3,1011-1029).
gagatacagctctagataa

SEQ ID NO: 74922 - DNA, 19 bp, Homo sapiens
  siRNA target sequence for CAMK1 (NM_003656.3,1013-1031).
gatacagctctagataaga

SEQ ID NO: 74923 - DNA, 19 bp, Homo sapiens
  siRNA target sequence for CAMK1 (NM_003656.3,1017-1035).
cagctctagataagaatat

SEQ ID NO: 74924 - DNA, 19 bp, Homo sapiens
  siRNA target sequence for CAMK1 (NM_003656.3,1020-1038).
ctctagataagaatatcca

SEQ ID NO: 74925 - DNA, 19 bp, Homo sapiens
  siRNA target sequence for CAMK1 (NM_003656.3,1044-1062).
cggtgagtgagcagatcaa

SEQ ID NO: 74926 - DNA, 19 bp, Homo sapiens
  siRNA target sequence for CAMK1D (NM_020397.1,259-277).
gcgctgaagggcaaggaaa

SEQ ID NO: 74927 - DNA, 19 bp, Homo sapiens
  siRNA target sequence for CAMK1D (NM_020397.1,298-316).
gccgtcctgagaaagatta

SEQ ID NO: 74928 - DNA, 19 bp, Homo sapiens
  siRNA target sequence for CAMK1D (NM_020397.1,299-317).
ccgtcctgagaaagattaa

SEQ ID NO: 74929 - DNA, 19 bp, Homo sapiens
  siRNA target sequence for CAMK1D (NM_020397.1,455-473).
ctctgatccgccaagtctt

SEQ ID NO: 74930 - DNA, 19 bp, Homo sapiens
  siRNA target sequence for CAMK1D (NM_020397.1,471-489).
cttggacgccgtgtactat

SEQ ID NO: 74931 - DNA, 19 bp, Homo sapiens
  siRNA target sequence for CAMK1D (NM_020397.1,699-717).
ctggtccatcggagtgatt

SEQ ID NO: 74932 - DNA, 19 bp, Homo sapiens
  siRNA target sequence for CAMK1D (NM_020397.1,709-727).
ggagtgattgcctacatct

SEQ ID NO: 74933 - DNA, 19 bp, Homo sapiens
  siRNA target sequence for CAMK1D (NM_020397.1,710-728).
gagtgattgcctacatctt

SEQ ID NO: 74934 - DNA, 19 bp, Homo sapiens
  siRNA target sequence for CAMK1D (NM_020397.1,737-755).
gctaccctcctttttatga

SEQ ID NO: 74935 - DNA, 19 bp, Homo sapiens
  siRNA target sequence for CAMK1D (NM_020397.1,738-756).
ctaccctcctttttatgat

SEQ ID NO: 74936 - DNA, 19 bp, Homo sapiens
  siRNA target sequence for CAMK1D (NM_020397.1,787-805).
ctcaaggcggaatatgagt

SEQ ID NO: 74937 - DNA, 19 bp, Homo sapiens
  siRNA target sequence for CAMK1D (NM_020397.1,789-807).
caaggcggaatatgagttt

SEQ ID NO: 74938 - DNA, 19 bp, Homo sapiens
  siRNA target sequence for CAMK1D (NM_020397.1,793-811).
gcggaatatgagtttgact

SEQ ID NO: 74939 - DNA, 19 bp, Homo sapiens
  siRNA target sequence for CAMK1D (NM_020397.1,867-885).
ggagaaggacccgaataaa

SEQ ID NO: 74940 - DNA, 19 bp, Homo sapiens
  siRNA target sequence for CAMK1D (NM_020397.1,870-888).
gaaggacccgaataaaaga

SEQ ID NO: 74941 - DNA, 19 bp, Homo sapiens
  siRNA target sequence for CAMK1D (NM_020397.1,874-892).
gacccgaataaaagataca

SEQ ID NO: 74942 - DNA, 19 bp, Homo sapiens
  siRNA target sequence for CAMK1D (NM_020397.1,935-953).
cagccctcaacaaaaacat

SEQ ID NO: 74943 - DNA, 19 bp, Homo sapiens
  siRNA target sequence for CAMK1D (NM_020397.1,968-986).
gcgcccagatccggaaaaa

SEQ ID NO: 74944 - DNA, 19 bp, Homo sapiens
  siRNA target sequence for CAMK1D (NM_020397.1,970-988).
gcccagatccggaaaaact

SEQ ID NO: 74945 - DNA, 19 bp, Homo sapiens
  siRNA target sequence for CAMK1D (NM_020397.1,971-989).
cccagatccggaaaaactt

SEQ ID NO: 74946 - DNA, 19 bp, Homo sapiens
  siRNA target sequence for CAMK1D (NM_020397.1,998-1016).
gcaaatggagacaagcatt

SEQ ID NO: 74947 - DNA, 19 bp, Homo sapiens
  siRNA target sequence for CAMK1D (NM_020397.1,999-1017).
caaatggagacaagcattt

SEQ ID NO: 74948 - DNA, 19 bp, Homo sapiens
  siRNA target sequence for CAMK1D (NM_020397.1,1106-1124).
gtttggccagccaaaaaga

SEQ ID NO: 74949 - DNA, 19 bp, Homo sapiens
  siRNA target sequence for CAMK1D (NM_020397.1,1125-1143).
ctgtgcgtatgtagcaaaa

SEQ ID NO: 74950 - DNA, 19 bp, Homo sapiens
  siRNA target sequence for CAMK1D (NM_153498.1,1284-1302).
ccacgctctgtagtttcat

SEQ ID NO: 74951 - DNA, 19 bp, Homo sapiens
  siRNA target sequence for CAMK1D (NM_153498.1,1285-1303).
cacgctctgtagtttcatt

SEQ ID NO: 74952 - DNA, 19 bp, Homo sapiens
  siRNA target sequence for CAMK1G (NM_020439.1,123-141).
ggagctttctcagaagttt

SEQ ID NO: 74953 - DNA, 19 bp, Homo sapiens
  siRNA target sequence for CAMK1G (NM_020439.1,124-142).
gagctttctcagaagtttt

SEQ ID NO: 74954 - DNA, 19 bp, Homo sapiens
  siRNA target sequence for CAMK1G (NM_020439.1,177-195).
gctctgaagtgcatcaaga

SEQ ID NO: 74955 - DNA, 19 bp, Homo sapiens
  siRNA target sequence for CAMK1G (NM_020439.1,407-425).
ggtcttgtcggcagtgaaa

SEQ ID NO: 74956 - DNA, 19 bp, Homo sapiens
  siRNA target sequence for CAMK1G (NM_020439.1,408-426).
gtcttgtcggcagtgaaat

SEQ ID NO: 74957 - DNA, 19 bp, Homo sapiens
  siRNA target sequence for CAMK1G (NM_020439.1,413-431).
gtcggcagtgaaataccta

SEQ ID NO: 74958 - DNA, 19 bp, Homo sapiens
  siRNA target sequence for CAMK1G (NM_020439.1,487-505).
cccctgaagagaactctaa

SEQ ID NO: 74959 - DNA, 19 bp, Homo sapiens
  siRNA target sequence for CAMK1G (NM_020439.1,490-508).
ctgaagagaactctaagat

SEQ ID NO: 74960 - DNA, 19 bp, Homo sapiens
  siRNA target sequence for CAMK1G (NM_020439.1,677-695).
ccccccattctatgaagaa

SEQ ID NO: 74961 - DNA, 19 bp, Homo sapiens
  siRNA target sequence for CAMK1G (NM_020439.1,693-711).
gaaacggagtctaagcttt

SEQ ID NO: 74962 - DNA, 19 bp, Homo sapiens
  siRNA target sequence for CAMK1G (NM_020439.1,697-715).
cggagtctaagcttttcga

SEQ ID NO: 74963 - DNA, 19 bp, Homo sapiens
  siRNA target sequence for CAMK1G (NM_020439.1,703-721).
ctaagcttttcgagaagat

SEQ ID NO: 74964 - DNA, 19 bp, Homo sapiens
  siRNA target sequence for CAMK1G (NM_020439.1,719-737).
gatcaaggagggctactat

SEQ ID NO: 74965 - DNA, 19 bp, Homo sapiens
  siRNA target sequence for CAMK1G (NM_020439.1,729-747).
ggctactatgagtttgagt

SEQ ID NO: 74966 - DNA, 19 bp, Homo sapiens
  siRNA target sequence for CAMK1G (NM_020439.1,854-872).
ctggattgacggaaacaca

SEQ ID NO: 74967 - DNA, 19 bp, Homo sapiens
  siRNA target sequence for CAMK1G (NM_020439.1,874-892).
ccctccaccgggacatcta

SEQ ID NO: 74968 - DNA, 19 bp, Homo sapiens
  siRNA target sequence for CAMK1G (NM_020439.1,1385-1403).
ggtcatggtaccagttaaa

SEQ ID NO: 74969 - DNA, 19 bp, Homo sapiens
  siRNA target sequence for CAMK2A (NM_015981.2,358-376).
caacatcgtccgactacat

SEQ ID NO: 74970 - DNA, 19 bp, Homo sapiens
  siRNA target sequence for CAMK2A (NM_015981.2,396-414).
gacaccactacctgatctt

SEQ ID NO: 74971 - DNA, 19 bp, Homo sapiens
  siRNA target sequence for CAMK2A (NM_015981.2,873-891).
cggaagccaaggatctgat

SEQ ID NO: 74972 - DNA, 19 bp, Homo sapiens
  siRNA target sequence for CAMK2A (NM_015981.2,904-922).
gaccattaacccatccaaa

SEQ ID NO: 74973 - DNA, 19 bp, Homo sapiens
  siRNA target sequence for CAMK2A (NM_015981.2,1143-1161).
ccagttccagcgttcagtt

SEQ ID NO: 74974 - DNA, 19 bp, Homo sapiens
  siRNA target sequence for CAMK2A (NM_015981.2,1146-1164).
gttccagcgttcagttaat

SEQ ID NO: 74975 - DNA, 19 bp, Homo sapiens
  siRNA target sequence for CAMK2A (NM_015981.2,1149-1167).
ccagcgttcagttaatgga

SEQ ID NO: 74976 - DNA, 19 bp, Homo sapiens
  siRNA target sequence for CAMK2A (NM_015981.2,1150-1168).
cagcgttcagttaatggaa

SEQ ID NO: 74977 - DNA, 19 bp, Homo sapiens
  siRNA target sequence for CAMK2A (NM_015981.2,1214-1232).
gtgcggaaacaggaaatta

SEQ ID NO: 74978 - DNA, 19 bp, Homo sapiens
  siRNA target sequence for CAMK2A (NM_015981.2,1216-1234).
gcggaaacaggaaattata

SEQ ID NO: 74979 - DNA, 19 bp, Homo sapiens
  siRNA target sequence for CAMK2A (NM_015981.2,1353-1371).
gcctggacttccatcgatt

SEQ ID NO: 74980 - DNA, 19 bp, Homo sapiens
  siRNA target sequence for CAMK2A (NM_015981.2,1357-1375).
ggacttccatcgattctat

SEQ ID NO: 74981 - DNA, 19 bp, Homo sapiens
  siRNA target sequence for CAMK2A (NM_015981.2,1358-1376).
gacttccatcgattctatt

SEQ ID NO: 74982 - DNA, 19 bp, Homo sapiens
  siRNA target sequence for CAMK2A (NM_015981.2,1363-1381).
ccatcgattctattttgaa

SEQ ID NO: 74983 - DNA, 19 bp, Homo sapiens
  siRNA target sequence for CAMK2B (NM_001220.3,246-264).
ccagctctacgaggatatt

SEQ ID NO: 74984 - DNA, 19 bp, Homo sapiens
  siRNA target sequence for CAMK2B (NM_001220.3,306-324).
ctgcaccggccatgagtat

SEQ ID NO: 74985 - DNA, 19 bp, Homo sapiens
  siRNA target sequence for CAMK2B (NM_001220.3,401-419).
gccttctgaagcattccaa

SEQ ID NO: 74986 - DNA, 19 bp, Homo sapiens
  siRNA target sequence for CAMK2B (NM_001220.3,1071-1089).
gtgtctgaaaaagttcaat

SEQ ID NO: 74987 - DNA, 19 bp, Homo sapiens
  siRNA target sequence for CAMK2B (NM_001220.3,1258-1276).
gtcaagccccagacgaata

SEQ ID NO: 74988 - DNA, 19 bp, Homo sapiens
  siRNA target sequence for CAMK2B (NM_001220.3,1267-1285).
cagacgaatagcaccaaaa

SEQ ID NO: 74989 - DNA, 19 bp, Homo sapiens
  siRNA target sequence for CAMK2B (NM_001220.3,1272-1290).
gaatagcaccaaaaacagt

SEQ ID NO: 74990 - DNA, 19 bp, Homo sapiens
  siRNA target sequence for CAMK2B (NM_001220.3,1342-1360).
caaaccaccgtcatccata

SEQ ID NO: 74991 - DNA, 19 bp, Homo sapiens
  siRNA target sequence for CAMK2B (NM_001220.3,1364-1382).
cagtggacgggattaagga

SEQ ID NO: 74992 - DNA, 19 bp, Homo sapiens
  siRNA target sequence for CAMK2B (NM_001220.3,1848-1866).
cgtcaacaacggtgacttt

SEQ ID NO: 74993 - DNA, 19 bp, Homo sapiens
  siRNA target sequence for CAMK2B (NM_001220.3,1867-1885).
gaggcctacgcgaaaatct

SEQ ID NO: 74994 - DNA, 19 bp, Homo sapiens
  siRNA target sequence for CAMK2B (NM_001220.3,1869-1887).
ggcctacgcgaaaatctgt

SEQ ID NO: 74995 - DNA, 19 bp, Homo sapiens
  siRNA target sequence for CAMK2B (NM_001220.3,1940-1958).
ggatggacttccacagatt

SEQ ID NO: 74996 - DNA, 19 bp, Homo sapiens
  siRNA target sequence for CAMK2B (NM_001220.3,2064-2082).
ccggctcacgcagtacatt

SEQ ID NO: 74997 - DNA, 19 bp, Homo sapiens
  siRNA target sequence for CAMK2D (NM_001221.2,536-554).
cggacgagtatcagctttt

SEQ ID NO: 74998 - DNA, 19 bp, Homo sapiens
  siRNA target sequence for CAMK2D (NM_001221.2,579-597).
ctcagtggtgagaagatgt

SEQ ID NO: 74999 - DNA, 19 bp, Homo sapiens
  siRNA target sequence for CAMK2D (NM_001221.2,656-674).
ctgctagggatcatcagaa

SEQ ID NO: 75000 - DNA, 19 bp, Homo sapiens
  siRNA target sequence for CAMK2D (NM_001221.2,726-744).
gcgacttcatgatagcata

SEQ ID NO: 75001 - DNA, 19 bp, Homo sapiens
  siRNA target sequence for CAMK2D (NM_001221.2,727-745).
cgacttcatgatagcatat

SEQ ID NO: 75002 - DNA, 19 bp, Homo sapiens
  siRNA target sequence for CAMK2D (NM_001221.2,768-786).
ggtgtttgatttagttact

SEQ ID NO: 75003 - DNA, 19 bp, Homo sapiens
  siRNA target sequence for CAMK2D (NM_001221.2,861-879).
gattctagaaagtgttaat

SEQ ID NO: 75004 - DNA, 19 bp, Homo sapiens
  siRNA target sequence for CAMK2D (NM_001221.2,975-993).
ctttggcttagccatagaa

SEQ ID NO: 75005 - DNA, 19 bp, Homo sapiens
  siRNA target sequence for CAMK2D (NM_001221.2,980-998).
gcttagccatagaagttca

SEQ ID NO: 75006 - DNA, 19 bp, Homo sapiens
  siRNA target sequence for CAMK2D (NM_001221.2,981-999).
cttagccatagaagttcaa

SEQ ID NO: 75007 - DNA, 19 bp, Homo sapiens
  siRNA target sequence for CAMK2D (NM_001221.2,1052-1070).
cagaagttttacgtaaaga

SEQ ID NO: 75008 - DNA, 19 bp, Homo sapiens
  siRNA target sequence for CAMK2D (NM_001221.2,1063-1081).
cgtaaagatccttatggaa

SEQ ID NO: 75009 - DNA, 19 bp, Homo sapiens
  siRNA target sequence for CAMK2D (NM_001221.2,1237-1255).
gccaaagacctcatcaata

SEQ ID NO: 75010 - DNA, 19 bp, Homo sapiens
  siRNA target sequence for CAMK2D (NM_001221.2,1317-1335).
gatctgtcaacgttctact

SEQ ID NO: 75011 - DNA, 19 bp, Homo sapiens
  siRNA target sequence for CAMK2D (NM_001221.2,1320-1338).
ctgtcaacgttctactgtt

SEQ ID NO: 75012 - DNA, 19 bp, Homo sapiens
  siRNA target sequence for CAMK2D (NM_001221.2,1409-1427).
gtgccatcttgacaactat

SEQ ID NO: 75013 - DNA, 19 bp, Homo sapiens
  siRNA target sequence for CAMK2D (NM_001221.2,1450-1468).
gcagccaagagtttgttga

SEQ ID NO: 75014 - DNA, 19 bp, Homo sapiens
  siRNA target sequence for CAMK2D (NM_001221.2,1537-1555).
gcacgaaagcaagagatta

SEQ ID NO: 75015 - DNA, 19 bp, Homo sapiens
  siRNA target sequence for CAMK2D (NM_001221.2,1538-1556).
cacgaaagcaagagattat

SEQ ID NO: 75016 - DNA, 19 bp, Homo sapiens
  siRNA target sequence for CAMK2D (NM_001221.2,1603-1621).
gaagcctacacaaaaatct

SEQ ID NO: 75017 - DNA, 19 bp, Homo sapiens
  siRNA target sequence for CAMK2D (NM_001221.2,1628-1646).
caggccttactgcttttga

SEQ ID NO: 75018 - DNA, 19 bp, Homo sapiens
  siRNA target sequence for CAMK2D (NM_001221.2,1681-1699).
gattttcaccgattctact

SEQ ID NO: 75019 - DNA, 19 bp, Homo sapiens
  siRNA target sequence for CAMK2D (NM_001221.2,1730-1748).
caatccacactattattct

SEQ ID NO: 75020 - DNA, 19 bp, Homo sapiens
  siRNA target sequence for CAMK2D (NM_001221.2,1780-1798).
gccgcctgcatagcatata

SEQ ID NO: 75021 - DNA, 19 bp, Homo sapiens
  siRNA target sequence for CAMK2D (NM_001221.2,1781-1799).
ccgcctgcatagcatatat

SEQ ID NO: 75022 - DNA, 19 bp, Homo sapiens
  siRNA target sequence for CAMK2D (NM_001221.2,1782-1800).
cgcctgcatagcatatatt

SEQ ID NO: 75023 - DNA, 19 bp, Homo sapiens
  siRNA target sequence for CAMK2D (NM_001221.2,1783-1801).
gcctgcatagcatatatta

SEQ ID NO: 75024 - DNA, 19 bp, Homo sapiens
  siRNA target sequence for CAMK2D (NM_001221.2,1911-1929).
ctcggggtcaccaacagta

SEQ ID NO: 75025 - DNA, 19 bp, Homo sapiens
  siRNA target sequence for CAMK2G (NM_001222.2,204-222).
cgcaggtgtgtgaagaaaa

SEQ ID NO: 75026 - DNA, 19 bp, Homo sapiens
  siRNA target sequence for CAMK2G (NM_001222.2,230-248).
gcaggagtacgcagcaaaa

SEQ ID NO: 75027 - DNA, 19 bp, Homo sapiens
  siRNA target sequence for CAMK2G (NM_001222.2,231-249).
caggagtacgcagcaaaaa

SEQ ID NO: 75028 - DNA, 19 bp, Homo sapiens
  siRNA target sequence for CAMK2G (NM_001222.2,234-252).
gagtacgcagcaaaaatca

SEQ ID NO: 75029 - DNA, 19 bp, Homo sapiens
  siRNA target sequence for CAMK2G (NM_001222.2,239-257).
cgcagcaaaaatcatcaat

SEQ ID NO: 75030 - DNA, 19 bp, Homo sapiens
  siRNA target sequence for CAMK2G (NM_001222.2,308-326).
gatatgtcgacttctgaaa

SEQ ID NO: 75031 - DNA, 19 bp, Homo sapiens
  siRNA target sequence for CAMK2G (NM_001222.2,342-360).
cgcctccatgacagtattt

SEQ ID NO: 75032 - DNA, 19 bp, Homo sapiens
  siRNA target sequence for CAMK2G (NM_001222.2,361-379).
ctgaagaagggtttcacta

SEQ ID NO: 75033 - DNA, 19 bp, Homo sapiens
  siRNA target sequence for CAMK2G (NM_001222.2,381-399).
ctcgtgtttgaccttgtta

SEQ ID NO: 75034 - DNA, 19 bp, Homo sapiens
  siRNA target sequence for CAMK2G (NM_001222.2,457-475).
ccagccactgtatacatca

SEQ ID NO: 75035 - DNA, 19 bp, Homo sapiens
  siRNA target sequence for CAMK2G (NM_001222.2,460-478).
gccactgtatacatcagat

SEQ ID NO: 75036 - DNA, 19 bp, Homo sapiens
  siRNA target sequence for CAMK2G (NM_001222.2,461-479).
ccactgtatacatcagatt

SEQ ID NO: 75037 - DNA, 19 bp, Homo sapiens
  siRNA target sequence for CAMK2G (NM_001222.2,543-561).
ctgctgctggcgagtaaat

SEQ ID NO: 75038 - DNA, 19 bp, Homo sapiens
  siRNA target sequence for CAMK2G (NM_001222.2,595-613).
gcctagccatcgaagtaca

SEQ ID NO: 75039 - DNA, 19 bp, Homo sapiens
  siRNA target sequence for CAMK2G (NM_001222.2,645-663).
ggcaccccaggttacttgt

SEQ ID NO: 75040 - DNA, 19 bp, Homo sapiens
  siRNA target sequence for CAMK2G (NM_001222.2,984-1002).
gagtgtttgcgcaagttca

SEQ ID NO: 75041 - DNA, 19 bp, Homo sapiens
  siRNA target sequence for CAMK2G (NM_001222.2,986-1004).
gtgtttgcgcaagttcaat

SEQ ID NO: 75042 - DNA, 19 bp, Homo sapiens
  siRNA target sequence for CAMK2G (NM_001222.2,1127-1145).
ggtacacaacgctacagat

SEQ ID NO: 75043 - DNA, 19 bp, Homo sapiens
  siRNA target sequence for CAMK2G (NM_001222.2,1205-1223).
gcgaaaacaggagatcatt

SEQ ID NO: 75044 - DNA, 19 bp, Homo sapiens
  siRNA target sequence for CAMK2G (NM_001222.2,1271-1289).
ggcctacacgaagatttgt

SEQ ID NO: 75045 - DNA, 19 bp, Homo sapiens
  siRNA target sequence for CAMK2G (NM_001222.2,1332-1350).
ctcgtggaggggatggatt

SEQ ID NO: 75046 - DNA, 19 bp, Homo sapiens
  siRNA target sequence for CAMK2G (NM_001222.2,1555-1573).
ggctcaatgtccactatca

SEQ ID NO: 75047 - DNA, 19 bp, Homo sapiens
  siRNA target sequence for CAMK2G (NM_172169.1,1161-1179).
ggcggtgtcaagaaaagga

SEQ ID NO: 75048 - DNA, 19 bp, Homo sapiens
  siRNA target sequence for CAMK2G (NM_172169.1,1186-1204).
gttccagcgtgcacctaat

SEQ ID NO: 75049 - DNA, 19 bp, Homo sapiens
  siRNA target sequence for CAMK2G (NM_172169.1,1189-1207).
ccagcgtgcacctaatgga

SEQ ID NO: 75050 - DNA, 19 bp, Homo sapiens
  siRNA target sequence for CAMK2G (NM_172171.1,1378-1396).
cctcagccatgcgaaaaca

SEQ ID NO: 75051 - DNA, 19 bp, Homo sapiens
  siRNA target sequence for CAMK4 (NM_001744.3,218-236).
gatgcgctgagcgatttct

SEQ ID NO: 75052 - DNA, 19 bp, Homo sapiens
  siRNA target sequence for CAMK4 (NM_001744.3,263-281).
ggtgctacatccattgtgt

SEQ ID NO: 75053 - DNA, 19 bp, Homo sapiens
  siRNA target sequence for CAMK4 (NM_001744.3,264-282).
gtgctacatccattgtgta

SEQ ID NO: 75054 - DNA, 19 bp, Homo sapiens
  siRNA target sequence for CAMK4 (NM_001744.3,307-325).
gaagccttatgctctcaaa

SEQ ID NO: 75055 - DNA, 19 bp, Homo sapiens
  siRNA target sequence for CAMK4 (NM_001744.3,339-357).
cagtggacaaaaaaatcgt

SEQ ID NO: 75056 - DNA, 19 bp, Homo sapiens
  siRNA target sequence for CAMK4 (NM_001744.3,390-408).
cacatccaaacattataaa

SEQ ID NO: 75057 - DNA, 19 bp, Homo sapiens
  siRNA target sequence for CAMK4 (NM_001744.3,491-509).
gtggaaaagggatattaca

SEQ ID NO: 75058 - DNA, 19 bp, Homo sapiens
  siRNA target sequence for CAMK4 (NM_001744.3,547-565).
ggaggcagttgcttatcta

SEQ ID NO: 75059 - DNA, 19 bp, Homo sapiens
  siRNA target sequence for CAMK4 (NM_001744.3,688-706).
gctcatgaagacagtatgt

SEQ ID NO: 75060 - DNA, 19 bp, Homo sapiens
  siRNA target sequence for CAMK4 (NM_001744.3,769-787).
catgtggtctgtaggaata

SEQ ID NO: 75061 - DNA, 19 bp, Homo sapiens
  siRNA target sequence for CAMK4 (NM_001744.3,807-825).
gtggatttgaaccattcta

SEQ ID NO: 75062 - DNA, 19 bp, Homo sapiens
  siRNA target sequence for CAMK4 (NM_001744.3,810-828).
gatttgaaccattctatga

SEQ ID NO: 75063 - DNA, 19 bp, Homo sapiens
  siRNA target sequence for CAMK4 (NM_001744.3,836-854).
ggcgatcagttcatgttca

SEQ ID NO: 75064 - DNA, 19 bp, Homo sapiens
  siRNA target sequence for CAMK4 (NM_001744.3,856-874).
gagaattctgaattgtgaa

SEQ ID NO: 75065 - DNA, 19 bp, Homo sapiens
  siRNA target sequence for CAMK4 (NM_001744.3,858-876).
gaattctgaattgtgaata

SEQ ID NO: 75066 - DNA, 19 bp, Homo sapiens
  siRNA target sequence for CAMK4 (NM_001744.3,888-906).
ccccctggtgggatgaagt

SEQ ID NO: 75067 - DNA, 19 bp, Homo sapiens
  siRNA target sequence for CAMK4 (NM_001744.3,890-908).
ccctggtgggatgaagtat

SEQ ID NO: 75068 - DNA, 19 bp, Homo sapiens
  siRNA target sequence for CAMK4 (NM_001744.3,892-910).
ctggtgggatgaagtatct

SEQ ID NO: 75069 - DNA, 19 bp, Homo sapiens
  siRNA target sequence for CAMK4 (NM_001744.3,894-912).
ggtgggatgaagtatctct

SEQ ID NO: 75070 - DNA, 19 bp, Homo sapiens
  siRNA target sequence for CAMK4 (NM_001744.3,895-913).
gtgggatgaagtatctcta

SEQ ID NO: 75071 - DNA, 19 bp, Homo sapiens
  siRNA target sequence for CAMK4 (NM_001744.3,898-916).
ggatgaagtatctctaaat

SEQ ID NO: 75072 - DNA, 19 bp, Homo sapiens
  siRNA target sequence for CAMK4 (NM_001744.3,922-940).
ggacttggtcagaaaatta

SEQ ID NO: 75073 - DNA, 19 bp, Homo sapiens
  siRNA target sequence for CAMK4 (NM_001744.3,923-941).
gacttggtcagaaaattaa

SEQ ID NO: 75074 - DNA, 19 bp, Homo sapiens
  siRNA target sequence for CAMK4 (NM_001744.3,929-947).
gtcagaaaattaattgttt

SEQ ID NO: 75075 - DNA, 19 bp, Homo sapiens
  siRNA target sequence for CAMK4 (NM_001744.3,1297-1315).
cttagagaaagttaaaggt

SEQ ID NO: 75076 - DNA, 19 bp, Homo sapiens
  siRNA target sequence for CAMK4 (NM_001744.3,1307-1325).
gttaaaggtgcagatataa

SEQ ID NO: 75077 - DNA, 19 bp, Homo sapiens
  siRNA target sequence for CAMK4 (NM_001744.3,1468-1486).
ctctgctgtgggttttgaa

SEQ ID NO: 75078 - DNA, 19 bp, Homo sapiens
  siRNA target sequence for CAMKK1 (NM_032294.2,248-266).
ggcccagagcctactagaa

SEQ ID NO: 75079 - DNA, 19 bp, Homo sapiens
  siRNA target sequence for CAMKK1 (NM_032294.2,249-267).
gcccagagcctactagaaa

SEQ ID NO: 75080 - DNA, 19 bp, Homo sapiens
  siRNA target sequence for CAMKK1 (NM_032294.2,305-323).
gtgatccctggcagtactt

SEQ ID NO: 75081 - DNA, 19 bp, Homo sapiens
  siRNA target sequence for CAMKK1 (NM_032294.2,307-325).
gatccctggcagtacttca

SEQ ID NO: 75082 - DNA, 19 bp, Homo sapiens
  siRNA target sequence for CAMKK1 (NM_032294.2,310-328).
ccctggcagtacttcaaga

SEQ ID NO: 75083 - DNA, 19 bp, Homo sapiens
  siRNA target sequence for CAMKK1 (NM_032294.2,580-598).
ggcctacaacgaaagtgaa

SEQ ID NO: 75084 - DNA, 19 bp, Homo sapiens
  siRNA target sequence for CAMKK1 (NM_032294.2,1080-1098).
cgggaaccccagcattcat

SEQ ID NO: 75085 - DNA, 19 bp, Homo sapiens
  siRNA target sequence for CAMKK1 (NM_032294.2,1103-1121).
cccgaggccatttctgatt

SEQ ID NO: 75086 - DNA, 19 bp, Homo sapiens
  siRNA target sequence for CAMKK1 (NM_032294.2,1200-1218).
gcccattcatcgacgattt

SEQ ID NO: 75087 - DNA, 19 bp, Homo sapiens
  siRNA target sequence for CAMKK1 (NM_032294.2,1202-1220).
ccattcatcgacgatttca

SEQ ID NO: 75088 - DNA, 19 bp, Homo sapiens
  siRNA target sequence for CAMKK1 (NM_032294.2,1203-1221).
cattcatcgacgatttcat

SEQ ID NO: 75089 - DNA, 19 bp, Homo sapiens
  siRNA target sequence for CAMKK1 (NM_032294.2,1226-1244).
gccctccacaggaagatca

SEQ ID NO: 75090 - DNA, 19 bp, Homo sapiens
  siRNA target sequence for CAMKK1 (NM_032294.2,1227-1245).
ccctccacaggaagatcaa

SEQ ID NO: 75091 - DNA, 19 bp, Homo sapiens
  siRNA target sequence for CAMKK1 (NM_032294.2,1324-1342).
gaatcccgagacgagaatt

SEQ ID NO: 75092 - DNA, 19 bp, Homo sapiens
  siRNA target sequence for CAMKK1 (NM_032294.2,1344-1362).
gggtgccagacatcaagtt

SEQ ID NO: 75093 - DNA, 19 bp, Homo sapiens
  siRNA target sequence for CAMKK1 (NM_172207.1,849-867).
cccagaatatccagttaga

SEQ ID NO: 75094 - DNA, 19 bp, Homo sapiens
  siRNA target sequence for CAMKK1 (NM_172207.1,859-877).
ccagttagattcaacaaat

SEQ ID NO: 75095 - DNA, 19 bp, Homo sapiens
  siRNA target sequence for CAMKK1 (NM_172207.1,934-952).
ggctgcgcgctcagtgttt

SEQ ID NO: 75096 - DNA, 19 bp, Homo sapiens
  siRNA target sequence for CAMKK1 (NM_172207.1,936-954).
ctgcgcgctcagtgtttga

SEQ ID NO: 75097 - DNA, 19 bp, Homo sapiens
  siRNA target sequence for CAMKK2 (NM_006549.3,970-988).
gggcatggagtccttcatt

SEQ ID NO: 75098 - DNA, 19 bp, Homo sapiens
  siRNA target sequence for CAMKK2 (NM_006549.3,972-990).
gcatggagtccttcattgt

SEQ ID NO: 75099 - DNA, 19 bp, Homo sapiens
  siRNA target sequence for CAMKK2 (NM_006549.3,1369-1387).
gttggcctacaatgaaaat

SEQ ID NO: 75100 - DNA, 19 bp, Homo sapiens
  siRNA target sequence for CAMKK2 (NM_006549.3,1373-1391).
gcctacaatgaaaatgaca

SEQ ID NO: 75101 - DNA, 19 bp, Homo sapiens
  siRNA target sequence for CAMKK2 (NM_006549.3,1388-1406).
gacaatacctactatgcaa

SEQ ID NO: 75102 - DNA, 19 bp, Homo sapiens
  siRNA target sequence for CAMKK2 (NM_006549.3,1725-1743).
gcatcgagtacttacacta

SEQ ID NO: 75103 - DNA, 19 bp, Homo sapiens
  siRNA target sequence for CAMKK2 (NM_006549.3,1791-1809).
gagaagatgggcacatcaa

SEQ ID NO: 75104 - DNA, 19 bp, Homo sapiens
  siRNA target sequence for CAMKK2 (NM_006549.3,1819-1837).
ctttggtgtgagcaatgaa

SEQ ID NO: 75105 - DNA, 19 bp, Homo sapiens
  siRNA target sequence for CAMKK2 (NM_006549.3,1952-1970).
gccatgggtgtgacactat

SEQ ID NO: 75106 - DNA, 19 bp, Homo sapiens
  siRNA target sequence for CAMKK2 (NM_006549.3,1953-1971).
ccatgggtgtgacactata

SEQ ID NO: 75107 - DNA, 19 bp, Homo sapiens
  siRNA target sequence for CAMKK2 (NM_006549.3,1965-1983).
cactatactgctttgtctt

SEQ ID NO: 75108 - DNA, 19 bp, Homo sapiens
  siRNA target sequence for CAMKK2 (NM_006549.3,2003-2021).
gacgagcggatcatgtgtt

SEQ ID NO: 75109 - DNA, 19 bp, Homo sapiens
  siRNA target sequence for CAMKK2 (NM_006549.3,2009-2027).
cggatcatgtgtttacaca

SEQ ID NO: 75110 - DNA, 19 bp, Homo sapiens
  siRNA target sequence for CAMKK2 (NM_006549.3,2019-2037).
gtttacacagtaagatcaa

SEQ ID NO: 75111 - DNA, 19 bp, Homo sapiens
  siRNA target sequence for CAMKK2 (NM_006549.3,2245-2263).
gaactcagtcaaacacatt

SEQ ID NO: 75112 - DNA, 19 bp, Homo sapiens
  siRNA target sequence for CAMKK2 (NM_006549.3,2290-2308).
gaagaccatgatacgtaaa

SEQ ID NO: 75113 - DNA, 19 bp, Homo sapiens
  siRNA target sequence for CARD12 (NM_021209.3,282-300).
caatagccgagcccttatt

SEQ ID NO: 75114 - DNA, 19 bp, Homo sapiens
  siRNA target sequence for CARD12 (NM_021209.3,288-306).
ccgagcccttattcaaaga

SEQ ID NO: 75115 - DNA, 19 bp, Homo sapiens
  siRNA target sequence for CARD12 (NM_021209.3,305-323).
gaatgggaatgactgttat

SEQ ID NO: 75116 - DNA, 19 bp, Homo sapiens
  siRNA target sequence for CARD12 (NM_021209.3,311-329).
gaatgactgttataaagca

SEQ ID NO: 75117 - DNA, 19 bp, Homo sapiens
  siRNA target sequence for CARD12 (NM_021209.3,333-351).
cacagatgacctatttgta

SEQ ID NO: 75118 - DNA, 19 bp, Homo sapiens
  siRNA target sequence for CARD12 (NM_021209.3,361-379).
ctgaatcgcgaagaagtaa

SEQ ID NO: 75119 - DNA, 19 bp, Homo sapiens
  siRNA target sequence for CARD12 (NM_021209.3,368-386).
gcgaagaagtaaacatcat

SEQ ID NO: 75120 - DNA, 19 bp, Homo sapiens
  siRNA target sequence for CARD12 (NM_021209.3,416-434).
ctagagggatcattcacat

SEQ ID NO: 75121 - DNA, 19 bp, Homo sapiens
  siRNA target sequence for CARD12 (NM_021209.3,421-439).
gggatcattcacatgattt

SEQ ID NO: 75122 - DNA, 19 bp, Homo sapiens
  siRNA target sequence for CARD12 (NM_021209.3,422-440).
ggatcattcacatgatttt

SEQ ID NO: 75123 - DNA, 19 bp, Homo sapiens
  siRNA target sequence for CARD12 (NM_021209.3,480-498).
ccttaaggagtggaactat

SEQ ID NO: 75124 - DNA, 19 bp, Homo sapiens
  siRNA target sequence for CARD12 (NM_021209.3,489-507).
gtggaactatcctctattt

SEQ ID NO: 75125 - DNA, 19 bp, Homo sapiens
  siRNA target sequence for CARD12 (NM_021209.3,596-614).
ccccatcttttctgaactt

SEQ ID NO: 75126 - DNA, 19 bp, Homo sapiens
  siRNA target sequence for CARD12 (NM_021209.3,622-640).
cttggtgaagatattgaca

SEQ ID NO: 75127 - DNA, 19 bp, Homo sapiens
  siRNA target sequence for CARD12 (NM_021209.3,750-768).
gagcccctgcatcattgaa

SEQ ID NO: 75128 - DNA, 19 bp, Homo sapiens
  siRNA target sequence for CARD12 (NM_021209.3,842-860).
ctctgaccaagttcaaatt

SEQ ID NO: 75129 - DNA, 19 bp, Homo sapiens
  siRNA target sequence for CARD12 (NM_021209.3,884-902).
gggcccagggtggactttt

SEQ ID NO: 75130 - DNA, 19 bp, Homo sapiens
  siRNA target sequence for CARD12 (NM_021209.3,914-932).
gtgatcaactcctggatat

SEQ ID NO: 75131 - DNA, 19 bp, Homo sapiens
  siRNA target sequence for CARD12 (NM_021209.3,928-946).
gatatacctggcacaatca

SEQ ID NO: 75132 - DNA, 19 bp, Homo sapiens
  siRNA target sequence for CARD12 (NM_021209.3,979-997).
ctgcggcagagggttcttt

SEQ ID NO: 75133 - DNA, 19 bp, Homo sapiens
  siRNA target sequence for CARD12 (NM_021209.3,999-1017).
ccttcttgatggctacaat

SEQ ID NO: 75134 - DNA, 19 bp, Homo sapiens
  siRNA target sequence for CARD12 (NM_021209.3,1032-1050).
gaactgcccagaaatcgaa

SEQ ID NO: 75135 - DNA, 19 bp, Homo sapiens
  siRNA target sequence for CARD12 (NM_021209.3,1042-1060).
gaaatcgaagccctgataa

SEQ ID NO: 75136 - DNA, 19 bp, Homo sapiens
  siRNA target sequence for CARD12 (NM_021209.3,1052-1070).
ccctgataaaggaaaacca

SEQ ID NO: 75137 - DNA, 19 bp, Homo sapiens
  siRNA target sequence for CARD12 (NM_021209.3,1279-1297).
ctctttgtggtcatcactt

SEQ ID NO: 75138 - DNA, 19 bp, Homo sapiens
  siRNA target sequence for CARD12 (NM_021209.3,1343-1361).
caacgctgttccatacctt

SEQ ID NO: 75139 - DNA, 19 bp, Homo sapiens
  siRNA target sequence for CARD12 (NM_021209.3,1347-1365).
gctgttccataccttctat

SEQ ID NO: 75140 - DNA, 19 bp, Homo sapiens
  siRNA target sequence for CARD12 (NM_021209.3,1350-1368).
gttccataccttctatgat

SEQ ID NO: 75141 - DNA, 19 bp, Homo sapiens
  siRNA target sequence for CARD12 (NM_021209.3,1463-1481).
gtgtgttctcccacaagtt

SEQ ID NO: 75142 - DNA, 19 bp, Homo sapiens
  siRNA target sequence for CARD12 (NM_021209.3,1467-1485).
gttctcccacaagtttgat

SEQ ID NO: 75143 - DNA, 19 bp, Homo sapiens
  siRNA target sequence for CARD12 (NM_021209.3,1565-1583).
ggttcaagccaaagtataa

SEQ ID NO: 75144 - DNA, 19 bp, Homo sapiens
  siRNA target sequence for CARD12 (NM_021209.3,1663-1681).
gtgaccaaggggaatggtt

SEQ ID NO: 75145 - DNA, 19 bp, Homo sapiens
  siRNA target sequence for CARD12 (NM_021209.3,1667-1685).
ccaaggggaatggttactt

SEQ ID NO: 75146 - DNA, 19 bp, Homo sapiens
  siRNA target sequence for CARD12 (NM_021209.3,1696-1714).
gtttccatttcggacatta

SEQ ID NO: 75147 - DNA, 19 bp, Homo sapiens
  siRNA target sequence for CARD12 (NM_021209.3,1707-1725).
ggacattacatccacttat

SEQ ID NO: 75148 - DNA, 19 bp, Homo sapiens
  siRNA target sequence for CARD12 (NM_021209.3,1788-1806).
cctcgcagcagtgtatcaa

SEQ ID NO: 75149 - DNA, 19 bp, Homo sapiens
  siRNA target sequence for CARD12 (NM_021209.3,1902-1920).
gaaagccataaacatcaat

SEQ ID NO: 75150 - DNA, 19 bp, Homo sapiens
  siRNA target sequence for CARD12 (NM_021209.3,1930-1948).
gagtgtggcatccatttat

SEQ ID NO: 75151 - DNA, 19 bp, Homo sapiens
  siRNA target sequence for CARD12 (NM_021209.3,1932-1950).
gtgtggcatccatttatat

SEQ ID NO: 75152 - DNA, 19 bp, Homo sapiens
  siRNA target sequence for CARD12 (NM_021209.3,1934-1952).
gtggcatccatttatatca

SEQ ID NO: 75153 - DNA, 19 bp, Homo sapiens
  siRNA target sequence for CARD12 (NM_021209.3,2002-2020).
caaggtaaaagcttatata

SEQ ID NO: 75154 - DNA, 19 bp, Homo sapiens
  siRNA target sequence for CARD12 (NM_021209.3,2029-2047).
gggaacatccccgattact

SEQ ID NO: 75155 - DNA, 19 bp, Homo sapiens
  siRNA target sequence for CARD12 (NM_021209.3,2030-2048).
ggaacatccccgattactt

SEQ ID NO: 75156 - DNA, 19 bp, Homo sapiens
  siRNA target sequence for CARD12 (NM_021209.3,2038-2056).
cccgattacttatttgact

SEQ ID NO: 75157 - DNA, 19 bp, Homo sapiens
  siRNA target sequence for CARD12 (NM_021209.3,2087-2105).
ccctggacttcattaaact

SEQ ID NO: 75158 - DNA, 19 bp, Homo sapiens
  siRNA target sequence for CARD12 (NM_021209.3,2198-2216).
ccagcagggctgtatcttt

SEQ ID NO: 75159 - DNA, 19 bp, Homo sapiens
  siRNA target sequence for CARD12 (NM_021209.3,2204-2222).
gggctgtatctttgttctt

SEQ ID NO: 75160 - DNA, 19 bp, Homo sapiens
  siRNA target sequence for CARD12 (NM_021209.3,2254-2272).
gtcacactccgggatttca

SEQ ID NO: 75161 - DNA, 19 bp, Homo sapiens
  siRNA target sequence for CARD12 (NM_021209.3,2263-2281).
cgggatttcagcaagttga

SEQ ID NO: 75162 - DNA, 19 bp, Homo sapiens
  siRNA target sequence for CARD12 (NM_021209.3,2383-2401).
gtcctcagcacctgtaaga

SEQ ID NO: 75163 - DNA, 19 bp, Homo sapiens
  siRNA target sequence for CARD12 (NM_021209.3,2390-2408).
gcacctgtaagaacattta

SEQ ID NO: 75164 - DNA, 19 bp, Homo sapiens
  siRNA target sequence for CARD12 (NM_021209.3,2391-2409).
cacctgtaagaacatttat

SEQ ID NO: 75165 - DNA, 19 bp, Homo sapiens
  siRNA target sequence for CARD12 (NM_021209.3,2396-2414).
gtaagaacatttattctct

SEQ ID NO: 75166 - DNA, 19 bp, Homo sapiens
  siRNA target sequence for CARD12 (NM_021209.3,2451-2469).
gaggcacatcacatctgta

SEQ ID NO: 75167 - DNA, 19 bp, Homo sapiens
  siRNA target sequence for CARD12 (NM_021209.3,2475-2493).
cctgaaaaccttgagtatt

SEQ ID NO: 75168 - DNA, 19 bp, Homo sapiens
  siRNA target sequence for CARD12 (NM_021209.3,2531-2549).
ctgacagcttgggtaactt

SEQ ID NO: 75169 - DNA, 19 bp, Homo sapiens
  siRNA target sequence for CARD12 (NM_021209.3,2533-2551).
gacagcttgggtaacttga

SEQ ID NO: 75170 - DNA, 19 bp, Homo sapiens
  siRNA target sequence for CARD12 (NM_021209.3,2574-2592).
ggataacataaagatgaat

SEQ ID NO: 75171 - DNA, 19 bp, Homo sapiens
  siRNA target sequence for CARD12 (NM_021209.3,2611-2629).
ctagctgaaggcctgaaaa

SEQ ID NO: 75172 - DNA, 19 bp, Homo sapiens
  siRNA target sequence for CARD12 (NM_021209.3,2632-2650).
ctgaagaagatgtgtttat

SEQ ID NO: 75173 - DNA, 19 bp, Homo sapiens
  siRNA target sequence for CARD12 (NM_021209.3,2658-2676).
gacccacttgtctgacatt

SEQ ID NO: 75174 - DNA, 19 bp, Homo sapiens
  siRNA target sequence for CARD12 (NM_021209.3,2683-2701).
ggaatggattacatagtca

SEQ ID NO: 75175 - DNA, 19 bp, Homo sapiens
  siRNA target sequence for CARD12 (NM_021209.3,2805-2823).
ggtcaaactgagcattctt

SEQ ID NO: 75176 - DNA, 19 bp, Homo sapiens
  siRNA target sequence for CARD12 (NM_021209.3,2808-2826).
caaactgagcattcttgat

SEQ ID NO: 75177 - DNA, 19 bp, Homo sapiens
  siRNA target sequence for CARD12 (NM_021209.3,3090-3108).
gaatttggcgggaaatcgt

SEQ ID NO: 75178 - DNA, 19 bp, Homo sapiens
  siRNA target sequence for CARD12 (NM_021209.3,3131-3149).
ccttcatgggtgtatttga

SEQ ID NO: 75179 - DNA, 19 bp, Homo sapiens
  siRNA target sequence for CARD12 (NM_021209.3,3135-3153).
catgggtgtatttgagaat

SEQ ID NO: 75180 - DNA, 19 bp, Homo sapiens
  siRNA target sequence for CARD12 (NM_021209.3,3160-3178).
caattagtgttttttgact

SEQ ID NO: 75181 - DNA, 19 bp, Homo sapiens
  siRNA target sequence for CARD12 (NM_021209.3,3175-3193).
gactttagtactaaagaat

SEQ ID NO: 75182 - DNA, 19 bp, Homo sapiens
  siRNA target sequence for CARD12 (NM_021209.3,3208-3226).
gcattagtcagaaaactta

SEQ ID NO: 75183 - DNA, 19 bp, Homo sapiens
  siRNA target sequence for CARD12 (NM_021209.3,3267-3285).
gcttgttgggtggcaattt

SEQ ID NO: 75184 - DNA, 19 bp, Homo sapiens
  siRNA target sequence for CARD12 (NM_021209.3,3275-3293).
ggtggcaatttgatgatga

SEQ ID NO: 75185 - DNA, 19 bp, Homo sapiens
  siRNA target sequence for CARD12 (NM_021209.3,3292-3310).
gatgatctcagtgttatta

SEQ ID NO: 75186 - DNA, 19 bp, Homo sapiens
  siRNA target sequence for CARD15 (NM_022162.1,191-209).
gctcgcaggaggcttttca

SEQ ID NO: 75187 - DNA, 19 bp, Homo sapiens
  siRNA target sequence for CARD15 (NM_022162.1,584-602).
gtttcgtcagccagtatga

SEQ ID NO: 75188 - DNA, 19 bp, Homo sapiens
  siRNA target sequence for CARD15 (NM_022162.1,588-606).
cgtcagccagtatgaatgt

SEQ ID NO: 75189 - DNA, 19 bp, Homo sapiens
  siRNA target sequence for CARD15 (NM_022162.1,591-609).
cagccagtatgaatgtgat

SEQ ID NO: 75190 - DNA, 19 bp, Homo sapiens
  siRNA target sequence for CARD15 (NM_022162.1,752-770).
ctgccacatgcaagaagta

SEQ ID NO: 75191 - DNA, 19 bp, Homo sapiens
  siRNA target sequence for CARD15 (NM_022162.1,755-773).
ccacatgcaagaagtatat

SEQ ID NO: 75192 - DNA, 19 bp, Homo sapiens
  siRNA target sequence for CARD15 (NM_022162.1,1062-1080).
gcaagacttccaggaattt

SEQ ID NO: 75193 - DNA, 19 bp, Homo sapiens
  siRNA target sequence for CARD15 (NM_022162.1,1170-1188).
gcctgatgttggtcaagaa

SEQ ID NO: 75194 - DNA, 19 bp, Homo sapiens
  siRNA target sequence for CARD15 (NM_022162.1,1216-1234).
cctgaccgtgtcctgttaa

SEQ ID NO: 75195 - DNA, 19 bp, Homo sapiens
  siRNA target sequence for CARD15 (NM_022162.1,1219-1237).
gaccgtgtcctgttaacct

SEQ ID NO: 75196 - DNA, 19 bp, Homo sapiens
  siRNA target sequence for CARD15 (NM_022162.1,1221-1239).
ccgtgtcctgttaaccttt

SEQ ID NO: 75197 - DNA, 19 bp, Homo sapiens
  siRNA target sequence for CARD15 (NM_022162.1,1623-1641).
cccaaagaccactacagat

SEQ ID NO: 75198 - DNA, 19 bp, Homo sapiens
  siRNA target sequence for CARD15 (NM_022162.1,1903-1921).
gaattccttcacatcactt

SEQ ID NO: 75199 - DNA, 19 bp, Homo sapiens
  siRNA target sequence for CARD15 (NM_022162.1,1980-1998).
gctcagacacctcttcaat

SEQ ID NO: 75200 - DNA, 19 bp, Homo sapiens
  siRNA target sequence for CARD15 (NM_022162.1,2378-2396).
ctgcacgtggcctgaatgt

SEQ ID NO: 75201 - DNA, 19 bp, Homo sapiens
  siRNA target sequence for CARD15 (NM_022162.1,2395-2413).
gttgggcacctcaagttga

SEQ ID NO: 75202 - DNA, 19 bp, Homo sapiens
  siRNA target sequence for CARD15 (NM_022162.1,2399-2417).
ggcacctcaagttgacatt

SEQ ID NO: 75203 - DNA, 19 bp, Homo sapiens
  siRNA target sequence for CARD15 (NM_022162.1,2400-2418).
gcacctcaagttgacattt

SEQ ID NO: 75204 - DNA, 19 bp, Homo sapiens
  siRNA target sequence for CARD15 (NM_022162.1,2502-2520).
caactctgtgggtgacatt

SEQ ID NO: 75205 - DNA, 19 bp, Homo sapiens
  siRNA target sequence for CARD15 (NM_022162.1,2551-2569).
gtctgcaaggctctgtatt

SEQ ID NO: 75206 - DNA, 19 bp, Homo sapiens
  siRNA target sequence for CARD15 (NM_022162.1,2563-2581).
ctgtatttgcgcgataaca

SEQ ID NO: 75207 - DNA, 19 bp, Homo sapiens
  siRNA target sequence for CARD15 (NM_022162.1,2571-2589).
gcgcgataacaatatctca

SEQ ID NO: 75208 - DNA, 19 bp, Homo sapiens
  siRNA target sequence for CARD15 (NM_022162.1,2597-2615).
gcatctgcaagctcattga

SEQ ID NO: 75209 - DNA, 19 bp, Homo sapiens
  siRNA target sequence for CARD15 (NM_022162.1,2621-2639).
ctcttcactgcgagcaatt

SEQ ID NO: 75210 - DNA, 19 bp, Homo sapiens
  siRNA target sequence for CARD15 (NM_022162.1,2653-2671).
ctattcaacaacaaattga

SEQ ID NO: 75211 - DNA, 19 bp, Homo sapiens
  siRNA target sequence for CARD15 (NM_022162.1,2729-2747).
cattgaggctggggaataa

SEQ ID NO: 75212 - DNA, 19 bp, Homo sapiens
  siRNA target sequence for CARD15 (NM_022162.1,2903-2921).
gcctggtggggaacaacat

SEQ ID NO: 75213 - DNA, 19 bp, Homo sapiens
  siRNA target sequence for CARD15 (NM_022162.1,2964-2982).
gaacgtcatgctagaagaa

SEQ ID NO: 75214 - DNA, 19 bp, Homo sapiens
  siRNA target sequence for CARD15 (NM_022162.1,3006-3024).
ccaggatgaaggtgtatgt

SEQ ID NO: 75215 - DNA, 19 bp, Homo sapiens
  siRNA target sequence for CARD15 (NM_022162.1,3037-3055).
ggactgaagaaaaattcaa

SEQ ID NO: 75216 - DNA, 19 bp, Homo sapiens
  siRNA target sequence for CARD15 (NM_022162.1,3159-3177).
ccgagggaacactttctct

SEQ ID NO: 75217 - DNA, 19 bp, Homo sapiens
  siRNA target sequence for CARD4 (NM_006092.1,469-487).
gtctcacccccacattcaa

SEQ ID NO: 75218 - DNA, 19 bp, Homo sapiens
  siRNA target sequence for CARD4 (NM_006092.1,471-489).
ctcacccccacattcaatt

SEQ ID NO: 75219 - DNA, 19 bp, Homo sapiens
  siRNA target sequence for CARD4 (NM_006092.1,476-494).
ccccacattcaattactga

SEQ ID NO: 75220 - DNA, 19 bp, Homo sapiens
  siRNA target sequence for CARD4 (NM_006092.1,478-496).
ccacattcaattactgaaa

SEQ ID NO: 75221 - DNA, 19 bp, Homo sapiens
  siRNA target sequence for CARD4 (NM_006092.1,517-535).
cactcacatccgcaatact

SEQ ID NO: 75222 - DNA, 19 bp, Homo sapiens
  siRNA target sequence for CARD4 (NM_006092.1,519-537).
ctcacatccgcaatactca

SEQ ID NO: 75223 - DNA, 19 bp, Homo sapiens
  siRNA target sequence for CARD4 (NM_006092.1,672-690).
ccgagttcttcctctactt

SEQ ID NO: 75224 - DNA, 19 bp, Homo sapiens
  siRNA target sequence for CARD4 (NM_006092.1,1143-1161).
gctgcttcaaggaaagtga

SEQ ID NO: 75225 - DNA, 19 bp, Homo sapiens
  siRNA target sequence for CARD4 (NM_006092.1,1949-1967).
gaccagcagtcctatgagt

SEQ ID NO: 75226 - DNA, 19 bp, Homo sapiens
  siRNA target sequence for CARD4 (NM_006092.1,1952-1970).
cagcagtcctatgagtttt

SEQ ID NO: 75227 - DNA, 19 bp, Homo sapiens
  siRNA target sequence for CARD4 (NM_006092.1,1981-1999).
cctccaggccttctttaca

SEQ ID NO: 75228 - DNA, 19 bp, Homo sapiens
  siRNA target sequence for CARD4 (NM_006092.1,2147-2165).
cgggaagacctcttcaaga

SEQ ID NO: 75229 - DNA, 19 bp, Homo sapiens
  siRNA target sequence for CARD4 (NM_006092.1,2334-2352).
gcgttcaggtcgaaagctt

SEQ ID NO: 75230 - DNA, 19 bp, Homo sapiens
  siRNA target sequence for CARD4 (NM_006092.1,2511-2529).
ccttcgtcctgcatcactt

SEQ ID NO: 75231 - DNA, 19 bp, Homo sapiens
  siRNA target sequence for CARD4 (NM_006092.1,2546-2564).
ctagacctagacaacaaca

SEQ ID NO: 75232 - DNA, 19 bp, Homo sapiens
  siRNA target sequence for CARD4 (NM_006092.1,2646-2664).
ctgacggtggggtaaaggt

SEQ ID NO: 75233 - DNA, 19 bp, Homo sapiens
  siRNA target sequence for CARD4 (NM_006092.1,2670-2688).
gcgaagagctgaccaaata

SEQ ID NO: 75234 - DNA, 19 bp, Homo sapiens
  siRNA target sequence for CARD4 (NM_006092.1,2696-2714).
gtgacctatttgggtttat

SEQ ID NO: 75235 - DNA, 19 bp, Homo sapiens
  siRNA target sequence for CARD4 (NM_006092.1,2700-2718).
cctatttgggtttatacaa

SEQ ID NO: 75236 - DNA, 19 bp, Homo sapiens
  siRNA target sequence for CARD4 (NM_006092.1,2742-2760).
ccaggtacgtcaccaaaat

SEQ ID NO: 75237 - DNA, 19 bp, Homo sapiens
  siRNA target sequence for CARD4 (NM_006092.1,2778-2796).
gcctcacgcatcttaaact

SEQ ID NO: 75238 - DNA, 19 bp, Homo sapiens
  siRNA target sequence for CARD4 (NM_006092.1,2877-2895).
ggatgtggggcaatcaagt

SEQ ID NO: 75239 - DNA, 19 bp, Homo sapiens
  siRNA target sequence for CARD4 (NM_006092.1,2878-2896).
gatgtggggcaatcaagtt

SEQ ID NO: 75240 - DNA, 19 bp, Homo sapiens
  siRNA target sequence for CARD4 (NM_006092.1,3019-3037).
gcagaacacgtctctagaa

SEQ ID NO: 75241 - DNA, 19 bp, Homo sapiens
  siRNA target sequence for CARD4 (NM_006092.1,3022-3040).
gaacacgtctctagaaata

SEQ ID NO: 75242 - DNA, 19 bp, Homo sapiens
  siRNA target sequence for CARD4 (NM_006092.1,3043-3061).
gtggctgacccaaaatgaa

SEQ ID NO: 75243 - DNA, 19 bp, Homo sapiens
  siRNA target sequence for CARD4 (NM_006092.1,3109-3127).
ccagacgttaaagcattta

SEQ ID NO: 75244 - DNA, 19 bp, Homo sapiens
  siRNA target sequence for CARD4 (NM_006092.1,3187-3205).
gagcaacactggcataaca

SEQ ID NO: 75245 - DNA, 19 bp, Homo sapiens
  siRNA target sequence for CARD4 (NM_006092.1,3244-3262).
ggccaaagtctatgaagat

SEQ ID NO: 75246 - DNA, 19 bp, Homo sapiens
  siRNA target sequence for CARK (NM_015978.1,78-96).
ccaaacttgtactgatgaa

SEQ ID NO: 75247 - DNA, 19 bp, Homo sapiens
  siRNA target sequence for CARK (NM_015978.1,83-101).
cttgtactgatgaatggaa

SEQ ID NO: 75248 - DNA, 19 bp, Homo sapiens
  siRNA target sequence for CARK (NM_015978.1,115-133).
gaatcatatgttatcacaa

SEQ ID NO: 75249 - DNA, 19 bp, Homo sapiens
  siRNA target sequence for CARK (NM_015978.1,119-137).
catatgttatcacaataga

SEQ ID NO: 75250 - DNA, 19 bp, Homo sapiens
  siRNA target sequence for CARK (NM_015978.1,175-193).
ctgacagaactaaggaata

SEQ ID NO: 75251 - DNA, 19 bp, Homo sapiens
  siRNA target sequence for CARK (NM_015978.1,218-236).
gtaaagtcaatttaaatta

SEQ ID NO: 75252 - DNA, 19 bp, Homo sapiens
  siRNA target sequence for CARK (NM_015978.1,250-268).
gggctgtctctacttcatt

SEQ ID NO: 75253 - DNA, 19 bp, Homo sapiens
  siRNA target sequence for CARK (NM_015978.1,252-270).
gctgtctctacttcattta

SEQ ID NO: 75254 - DNA, 19 bp, Homo sapiens
  siRNA target sequence for CARK (NM_015978.1,288-306).
caagaaatcacatattcga

SEQ ID NO: 75255 - DNA, 19 bp, Homo sapiens
  siRNA target sequence for CARK (NM_015978.1,296-314).
cacatattcgaactcttat

SEQ ID NO: 75256 - DNA, 19 bp, Homo sapiens
  siRNA target sequence for CARK (NM_015978.1,298-316).
catattcgaactcttatgt

SEQ ID NO: 75257 - DNA, 19 bp, Homo sapiens
  siRNA target sequence for CARK (NM_015978.1,331-349).
ccatctcgactgacaagaa

SEQ ID NO: 75258 - DNA, 19 bp, Homo sapiens
  siRNA target sequence for CARK (NM_015978.1,337-355).
cgactgacaagaaatggat

SEQ ID NO: 75259 - DNA, 19 bp, Homo sapiens
  siRNA target sequence for CARK (NM_015978.1,338-356).
gactgacaagaaatggatt

SEQ ID NO: 75260 - DNA, 19 bp, Homo sapiens
  siRNA target sequence for CARK (NM_015978.1,465-483).
ccatattgctacaatagct

SEQ ID NO: 75261 - DNA, 19 bp, Homo sapiens
  siRNA target sequence for CARK (NM_015978.1,510-528).
gttgcaacatggagctaat

SEQ ID NO: 75262 - DNA, 19 bp, Homo sapiens
  siRNA target sequence for CARK (NM_015978.1,521-539).
gagctaatgtcaatattca

SEQ ID NO: 75263 - DNA, 19 bp, Homo sapiens
  siRNA target sequence for CARK (NM_015978.1,555-573).
cactccattgcatattgca

SEQ ID NO: 75264 - DNA, 19 bp, Homo sapiens
  siRNA target sequence for CARK (NM_015978.1,564-582).
gcatattgcagcgtactat

SEQ ID NO: 75265 - DNA, 19 bp, Homo sapiens
  siRNA target sequence for CARK (NM_015978.1,575-593).
cgtactatggacatgaaca

SEQ ID NO: 75266 - DNA, 19 bp, Homo sapiens
  siRNA target sequence for CARK (NM_015978.1,592-610).
caggtaactcgccttcttt

SEQ ID NO: 75267 - DNA, 19 bp, Homo sapiens
  siRNA target sequence for CARK (NM_015978.1,595-613).
gtaactcgccttcttttga

SEQ ID NO: 75268 - DNA, 19 bp, Homo sapiens
  siRNA target sequence for CARK (NM_015978.1,663-681).
ccacctagcatctgcaaaa

SEQ ID NO: 75269 - DNA, 19 bp, Homo sapiens
  siRNA target sequence for CARK (NM_015978.1,674-692).
ctgcaaaaggattcttgaa

SEQ ID NO: 75270 - DNA, 19 bp, Homo sapiens
  siRNA target sequence for CARK (NM_015978.1,676-694).
gcaaaaggattcttgaata

SEQ ID NO: 75271 - DNA, 19 bp, Homo sapiens
  siRNA target sequence for CARK (NM_015978.1,682-700).
ggattcttgaatattgcaa

SEQ ID NO: 75272 - DNA, 19 bp, Homo sapiens
  siRNA target sequence for CARK (NM_015978.1,768-786).
ccatttctgttctcgattt

SEQ ID NO: 75273 - DNA, 19 bp, Homo sapiens
  siRNA target sequence for CARK (NM_015978.1,790-808).
caccatgatatagttaagt

SEQ ID NO: 75274 - DNA, 19 bp, Homo sapiens
  siRNA target sequence for CARK (NM_015978.1,792-810).
ccatgatatagttaagtat

SEQ ID NO: 75275 - DNA, 19 bp, Homo sapiens
  siRNA target sequence for CARK (NM_015978.1,835-853).
caacctcatgttgttaata

SEQ ID NO: 75276 - DNA, 19 bp, Homo sapiens
  siRNA target sequence for CARK (NM_015978.1,838-856).
cctcatgttgttaatatct

SEQ ID NO: 75277 - DNA, 19 bp, Homo sapiens
  siRNA target sequence for CARK (NM_015978.1,839-857).
ctcatgttgttaatatcta

SEQ ID NO: 75278 - DNA, 19 bp, Homo sapiens
  siRNA target sequence for CARK (NM_015978.1,1002-1020).
gagcattgacctagtcaaa

SEQ ID NO: 75279 - DNA, 19 bp, Homo sapiens
  siRNA target sequence for CARK (NM_015978.1,1004-1022).
gcattgacctagtcaaatt

SEQ ID NO: 75280 - DNA, 19 bp, Homo sapiens
  siRNA target sequence for CARK (NM_015978.1,1005-1023).
cattgacctagtcaaattt

SEQ ID NO: 75281 - DNA, 19 bp, Homo sapiens
  siRNA target sequence for CARK (NM_015978.1,1139-1157).
gagctgatatgaatctagt

SEQ ID NO: 75282 - DNA, 19 bp, Homo sapiens
  siRNA target sequence for CARK (NM_015978.1,1149-1167).
gaatctagtggcttgtgat

SEQ ID NO: 75283 - DNA, 19 bp, Homo sapiens
  siRNA target sequence for CARK (NM_015978.1,1172-1190).
gcaggtctagtggtgaaaa

SEQ ID NO: 75284 - DNA, 19 bp, Homo sapiens
  siRNA target sequence for CARK (NM_015978.1,1173-1191).
caggtctagtggtgaaaaa

SEQ ID NO: 75285 - DNA, 19 bp, Homo sapiens
  siRNA target sequence for CARK (NM_015978.1,1205-1223).
gtttgatgtgggcttatga

SEQ ID NO: 75286 - DNA, 19 bp, Homo sapiens
  siRNA target sequence for CARK (NM_015978.1,1245-1263).
cacactcctgaagcattat

SEQ ID NO: 75287 - DNA, 19 bp, Homo sapiens
  siRNA target sequence for CARK (NM_015978.1,1247-1265).
cactcctgaagcattataa

SEQ ID NO: 75288 - DNA, 19 bp, Homo sapiens
  siRNA target sequence for CARK (NM_015978.1,1286-1304).
cctgtaatgaatattctca

SEQ ID NO: 75289 - DNA, 19 bp, Homo sapiens
  siRNA target sequence for CARK (NM_015978.1,1342-1360).
cccttggggaagattaaaa

SEQ ID NO: 75290 - DNA, 19 bp, Homo sapiens
  siRNA target sequence for CARK (NM_015978.1,1399-1417).
gctggattgccttcacatt

SEQ ID NO: 75291 - DNA, 19 bp, Homo sapiens
  siRNA target sequence for CARK (NM_015978.1,1426-1444).
cagctctcagaaattgagt

SEQ ID NO: 75292 - DNA, 19 bp, Homo sapiens
  siRNA target sequence for CARK (NM_015978.1,1465-1483).
ggttcttttgggaaagtat

SEQ ID NO: 75293 - DNA, 19 bp, Homo sapiens
  siRNA target sequence for CARK (NM_015978.1,1512-1530).
ggctataaaacgttatcga

SEQ ID NO: 75294 - DNA, 19 bp, Homo sapiens
  siRNA target sequence for CARK (NM_015978.1,1522-1540).
cgttatcgagccaatacct

SEQ ID NO: 75295 - DNA, 19 bp, Homo sapiens
  siRNA target sequence for CARK (NM_015978.1,1523-1541).
gttatcgagccaataccta

SEQ ID NO: 75296 - DNA, 19 bp, Homo sapiens
  siRNA target sequence for CARK (NM_015978.1,1573-1591).
cgagaggtgtccattctct

SEQ ID NO: 75297 - DNA, 19 bp, Homo sapiens
  siRNA target sequence for CARK (NM_015978.1,1599-1617).
caatcatccctgcgtaatt

SEQ ID NO: 75298 - DNA, 19 bp, Homo sapiens
  siRNA target sequence for CARK (NM_015978.1,1607-1625).
cctgcgtaattcagtttgt

SEQ ID NO: 75299 - DNA, 19 bp, Homo sapiens
  siRNA target sequence for CARK (NM_015978.1,1726-1744).
gatttgcagtctaaattaa

SEQ ID NO: 75300 - DNA, 19 bp, Homo sapiens
  siRNA target sequence for CARK (NM_015978.1,1769-1787).
gcatggagtaccttcacaa

SEQ ID NO: 75301 - DNA, 19 bp, Homo sapiens
  siRNA target sequence for CARK (NM_015978.1,1813-1831).
gacttgaacagtcacaata

SEQ ID NO: 75302 - DNA, 19 bp, Homo sapiens
  siRNA target sequence for CARK (NM_015978.1,1815-1833).
cttgaacagtcacaatatt

SEQ ID NO: 75303 - DNA, 19 bp, Homo sapiens
  siRNA target sequence for CARK (NM_015978.1,1818-1836).
gaacagtcacaatattctt

SEQ ID NO: 75304 - DNA, 19 bp, Homo sapiens
  siRNA target sequence for CARK (NM_015978.1,2026-2044).
ctcactggcgaaattccat

SEQ ID NO: 75305 - DNA, 19 bp, Homo sapiens
  siRNA target sequence for CARK (NM_015978.1,2118-2136).
cattcccaagcccatatca

SEQ ID NO: 75306 - DNA, 19 bp, Homo sapiens
  siRNA target sequence for CARK (NM_015978.1,2170-2188).
gaaggaagacccgaatttt

SEQ ID NO: 75307 - DNA, 19 bp, Homo sapiens
  siRNA target sequence for CARK (NM_015978.1,2180-2198).
ccgaattttctgaagttgt

SEQ ID NO: 75308 - DNA, 19 bp, Homo sapiens
  siRNA target sequence for CARK (NM_015978.1,2342-2360).
gaagtcgtttcgaattgga

SEQ ID NO: 75309 - DNA, 19 bp, Homo sapiens
  siRNA target sequence for CARK (NM_015978.1,2345-2363).
gtcgtttcgaattggaata

SEQ ID NO: 75310 - DNA, 19 bp, Homo sapiens
  siRNA target sequence for CARK (NM_015978.1,2358-2376).
ggaatatgctctaaatgca

SEQ ID NO: 75311 - DNA, 19 bp, Homo sapiens
  siRNA target sequence for CARK (NM_015978.1,2473-2491).
gacaaatatggctatgtat

SEQ ID NO: 75312 - DNA, 19 bp, Homo sapiens
  siRNA target sequence for CARK (NM_015978.1,2497-2515).
cccatgagctcaatgcatt

SEQ ID NO: 75313 - DNA, 19 bp, Homo sapiens
  siRNA target sequence for CARK (NM_015978.1,2505-2523).
ctcaatgcattttcattct

SEQ ID NO: 75314 - DNA, 19 bp, Homo sapiens
  siRNA target sequence for CARK (NM_015978.1,2518-2536).
cattcttgccgaaatagta

SEQ ID NO: 75315 - DNA, 19 bp, Homo sapiens
  siRNA target sequence for CASK (NM_003688.1,87-105).
gggtcccttcagtgttgta

SEQ ID NO: 75316 - DNA, 19 bp, Homo sapiens
  siRNA target sequence for CASK (NM_003688.1,98-116).
gtgttgtacgacgatgtat

SEQ ID NO: 75317 - DNA, 19 bp, Homo sapiens
  siRNA target sequence for CASK (NM_003688.1,100-118).
gttgtacgacgatgtatca

SEQ ID NO: 75318 - DNA, 19 bp, Homo sapiens
  siRNA target sequence for CASK (NM_003688.1,103-121).
gtacgacgatgtatcaaca

SEQ ID NO: 75319 - DNA, 19 bp, Homo sapiens
  siRNA target sequence for CASK (NM_003688.1,109-127).
cgatgtatcaacagagaaa

SEQ ID NO: 75320 - DNA, 19 bp, Homo sapiens
  siRNA target sequence for CASK (NM_003688.1,122-140).
gagaaactgggcaacaatt

SEQ ID NO: 75321 - DNA, 19 bp, Homo sapiens
  siRNA target sequence for CASK (NM_003688.1,157-175).
gatgtagccaagttcacat

SEQ ID NO: 75322 - DNA, 19 bp, Homo sapiens
  siRNA target sequence for CASK (NM_003688.1,160-178).
gtagccaagttcacatcaa

SEQ ID NO: 75323 - DNA, 19 bp, Homo sapiens
  siRNA target sequence for CASK (NM_003688.1,185-203).
ggttaagtacagaagatct

SEQ ID NO: 75324 - DNA, 19 bp, Homo sapiens
  siRNA target sequence for CASK (NM_003688.1,186-204).
gttaagtacagaagatcta

SEQ ID NO: 75325 - DNA, 19 bp, Homo sapiens
  siRNA target sequence for CASK (NM_003688.1,215-233).
ccagtatctgtcatatgct

SEQ ID NO: 75326 - DNA, 19 bp, Homo sapiens
  siRNA target sequence for CASK (NM_003688.1,231-249).
gctgaaacatccacacatt

SEQ ID NO: 75327 - DNA, 19 bp, Homo sapiens
  siRNA target sequence for CASK (NM_003688.1,241-259).
ccacacattgtagagttat

SEQ ID NO: 75328 - DNA, 19 bp, Homo sapiens
  siRNA target sequence for CASK (NM_003688.1,242-260).
cacacattgtagagttatt

SEQ ID NO: 75329 - DNA, 19 bp, Homo sapiens
  siRNA target sequence for CASK (NM_003688.1,253-271).
gagttattggagacatata

SEQ ID NO: 75330 - DNA, 19 bp, Homo sapiens
  siRNA target sequence for CASK (NM_003688.1,272-290).
gctcagatggaatgcttta

SEQ ID NO: 75331 - DNA, 19 bp, Homo sapiens
  siRNA target sequence for CASK (NM_003688.1,281-299).
gaatgctttacatggtttt

SEQ ID NO: 75332 - DNA, 19 bp, Homo sapiens
  siRNA target sequence for CASK (NM_003688.1,285-303).
gctttacatggttttcgaa

SEQ ID NO: 75333 - DNA, 19 bp, Homo sapiens
  siRNA target sequence for CASK (NM_003688.1,286-304).
ctttacatggttttcgaat

SEQ ID NO: 75334 - DNA, 19 bp, Homo sapiens
  siRNA target sequence for CASK (NM_003688.1,322-340).
ctgtgttttgaaatcgtaa

SEQ ID NO: 75335 - DNA, 19 bp, Homo sapiens
  siRNA target sequence for CASK (NM_003688.1,342-360).
gcgagctgacgctggtttt

SEQ ID NO: 75336 - DNA, 19 bp, Homo sapiens
  siRNA target sequence for CASK (NM_003688.1,346-364).
gctgacgctggttttgtgt

SEQ ID NO: 75337 - DNA, 19 bp, Homo sapiens
  siRNA target sequence for CASK (NM_003688.1,347-365).
ctgacgctggttttgtgta

SEQ ID NO: 75338 - DNA, 19 bp, Homo sapiens
  siRNA target sequence for CASK (NM_003688.1,373-391).
gctgtagccagccattata

SEQ ID NO: 75339 - DNA, 19 bp, Homo sapiens
  siRNA target sequence for CASK (NM_003688.1,374-392).
ctgtagccagccattatat

SEQ ID NO: 75340 - DNA, 19 bp, Homo sapiens
  siRNA target sequence for CASK (NM_003688.1,376-394).
gtagccagccattatatga

SEQ ID NO: 75341 - DNA, 19 bp, Homo sapiens
  siRNA target sequence for CASK (NM_003688.1,384-402).
ccattatatgagacagata

SEQ ID NO: 75342 - DNA, 19 bp, Homo sapiens
  siRNA target sequence for CASK (NM_003688.1,415-433).
cgctactgccatgataata

SEQ ID NO: 75343 - DNA, 19 bp, Homo sapiens
  siRNA target sequence for CASK (NM_003688.1,512-530).
gctttggggtagctattca

SEQ ID NO: 75344 - DNA, 19 bp, Homo sapiens
  siRNA target sequence for CASK (NM_003688.1,513-531).
ctttggggtagctattcaa

SEQ ID NO: 75345 - DNA, 19 bp, Homo sapiens
  siRNA target sequence for CASK (NM_003688.1,586-604).
gcaccagaagtggtcaaaa

SEQ ID NO: 75346 - DNA, 19 bp, Homo sapiens
  siRNA target sequence for CASK (NM_003688.1,637-655).
gggtgcggtgtgatccttt

SEQ ID NO: 75347 - DNA, 19 bp, Homo sapiens
  siRNA target sequence for CASK (NM_003688.1,638-656).
ggtgcggtgtgatcctttt

SEQ ID NO: 75348 - DNA, 19 bp, Homo sapiens
  siRNA target sequence for CASK (NM_003688.1,639-657).
gtgcggtgtgatccttttt

SEQ ID NO: 75349 - DNA, 19 bp, Homo sapiens
  siRNA target sequence for CASK (NM_003688.1,641-659).
gcggtgtgatcctttttat

SEQ ID NO: 75350 - DNA, 19 bp, Homo sapiens
  siRNA target sequence for CASK (NM_003688.1,644-662).
gtgtgatcctttttatcct

SEQ ID NO: 75351 - DNA, 19 bp, Homo sapiens
  siRNA target sequence for CASK (NM_003688.1,747-765).
gcagtggagccatatctct

SEQ ID NO: 75352 - DNA, 19 bp, Homo sapiens
  siRNA target sequence for CASK (NM_003688.1,811-829).
gctgaaaggatcactgttt

SEQ ID NO: 75353 - DNA, 19 bp, Homo sapiens
  siRNA target sequence for CASK (NM_003688.1,865-883).
gatcgttacgcctacaaga

SEQ ID NO: 75354 - DNA, 19 bp, Homo sapiens
  siRNA target sequence for CASK (NM_003688.1,869-887).
gttacgcctacaagattca

SEQ ID NO: 75355 - DNA, 19 bp, Homo sapiens
  siRNA target sequence for CASK (NM_003688.1,957-975).
cgctgtgtcaagtcacaaa

SEQ ID NO: 75356 - DNA, 19 bp, Homo sapiens
  siRNA target sequence for CASK (NM_003688.1,958-976).
gctgtgtcaagtcacaaat

SEQ ID NO: 75357 - DNA, 19 bp, Homo sapiens
  siRNA target sequence for CASK (NM_003688.1,968-986).
gtcacaaattcaactcatt

SEQ ID NO: 75358 - DNA, 19 bp, Homo sapiens
  siRNA target sequence for CASK (NM_003688.1,992-1010).
gggatccccctgaagagtt

SEQ ID NO: 75359 - DNA, 19 bp, Homo sapiens
  siRNA target sequence for CASK (NM_003688.1,993-1011).
ggatccccctgaagagtta

SEQ ID NO: 75360 - DNA, 19 bp, Homo sapiens
  siRNA target sequence for CASK (NM_003688.1,1174-1192).
ctactagatctgtatgaca

SEQ ID NO: 75361 - DNA, 19 bp, Homo sapiens
  siRNA target sequence for CASK (NM_003688.1,1202-1220).
caaagtcttcaccacaaat

SEQ ID NO: 75362 - DNA, 19 bp, Homo sapiens
  siRNA target sequence for CASK (NM_003688.1,1359-1377).
cgacgtagtggcacatgaa

SEQ ID NO: 75363 - DNA, 19 bp, Homo sapiens
  siRNA target sequence for CASK (NM_003688.1,1362-1380).
cgtagtggcacatgaagtt

SEQ ID NO: 75364 - DNA, 19 bp, Homo sapiens
  siRNA target sequence for CASK (NM_003688.1,1363-1381).
gtagtggcacatgaagttt

SEQ ID NO: 75365 - DNA, 19 bp, Homo sapiens
  siRNA target sequence for CASK (NM_003688.1,1368-1386).
ggcacatgaagtttacagt

SEQ ID NO: 75366 - DNA, 19 bp, Homo sapiens
  siRNA target sequence for CASK (NM_003688.1,1415-1433).
ccacctctccctatttaaa

SEQ ID NO: 75367 - DNA, 19 bp, Homo sapiens
  siRNA target sequence for CASK (NM_003688.1,1487-1505).
gagttcggctggtacagtt

SEQ ID NO: 75368 - DNA, 19 bp, Homo sapiens
  siRNA target sequence for CASK (NM_003688.1,1492-1510).
cggctggtacagtttcaaa

SEQ ID NO: 75369 - DNA, 19 bp, Homo sapiens
  siRNA target sequence for CASK (NM_003688.1,1495-1513).
ctggtacagtttcaaaaga

SEQ ID NO: 75370 - DNA, 19 bp, Homo sapiens
  siRNA target sequence for CASK (NM_003688.1,1522-1540).
gaaccaatgggaatcactt

SEQ ID NO: 75371 - DNA, 19 bp, Homo sapiens
  siRNA target sequence for CASK (NM_003688.1,1565-1583).
gtattgttgcaagaattat

SEQ ID NO: 75372 - DNA, 19 bp, Homo sapiens
  siRNA target sequence for CASK (NM_003688.1,1585-1603).
catgggggcatgattcaca

SEQ ID NO: 75373 - DNA, 19 bp, Homo sapiens
  siRNA target sequence for CASK (NM_003688.1,1604-1622).
ggcaaggtacacttcatgt

SEQ ID NO: 75374 - DNA, 19 bp, Homo sapiens
  siRNA target sequence for CASK (NM_003688.1,1655-1673).
gtgtggctaaccaaacagt

SEQ ID NO: 75375 - DNA, 19 bp, Homo sapiens
  siRNA target sequence for CASK (NM_003688.1,1708-1726).
gggagtattaccttcaaga

SEQ ID NO: 75376 - DNA, 19 bp, Homo sapiens
  siRNA target sequence for CASK (NM_003688.1,1709-1727).
ggagtattaccttcaagat

SEQ ID NO: 75377 - DNA, 19 bp, Homo sapiens
  siRNA target sequence for CASK (NM_003688.1,1710-1728).
gagtattaccttcaagatt

SEQ ID NO: 75378 - DNA, 19 bp, Homo sapiens
  siRNA target sequence for CASK (NM_003688.1,1785-1803).
cagacagtccccagctaat

SEQ ID NO: 75379 - DNA, 19 bp, Homo sapiens
  siRNA target sequence for CASK (NM_003688.1,1804-1822).
ggtcatagcagcactaaca

SEQ ID NO: 75380 - DNA, 19 bp, Homo sapiens
  siRNA target sequence for CASK (NM_003688.1,1811-1829).
gcagcactaacaattctgt

SEQ ID NO: 75381 - DNA, 19 bp, Homo sapiens
  siRNA target sequence for CASK (NM_003688.1,1856-1874).
caaaaggacgacagatcta

SEQ ID NO: 75382 - DNA, 19 bp, Homo sapiens
  siRNA target sequence for CASK (NM_003688.1,1861-1879).
ggacgacagatctatgtaa

SEQ ID NO: 75383 - DNA, 19 bp, Homo sapiens
  siRNA target sequence for CASK (NM_003688.1,1872-1890).
ctatgtaagagcacaattt

SEQ ID NO: 75384 - DNA, 19 bp, Homo sapiens
  siRNA target sequence for CASK (NM_003688.1,1876-1894).
gtaagagcacaatttgaat

SEQ ID NO: 75385 - DNA, 19 bp, Homo sapiens
  siRNA target sequence for CASK (NM_003688.1,1959-1977).
catcatccagattattagt

SEQ ID NO: 75386 - DNA, 19 bp, Homo sapiens
  siRNA target sequence for CASK (NM_003688.1,1965-1983).
ccagattattagtaaggat

SEQ ID NO: 75387 - DNA, 19 bp, Homo sapiens
  siRNA target sequence for CASK (NM_003688.1,1999-2017).
cagggtaaactggaaaact

SEQ ID NO: 75388 - DNA, 19 bp, Homo sapiens
  siRNA target sequence for CASK (NM_003688.1,2180-2198).
cagatcttgtcacatatga

SEQ ID NO: 75389 - DNA, 19 bp, Homo sapiens
  siRNA target sequence for CASK (NM_003688.1,2190-2208).
cacatatgaagaagtagta

SEQ ID NO: 75390 - DNA, 19 bp, Homo sapiens
  siRNA target sequence for CASK (NM_003688.1,2226-2244).
gaggaaaacactagtctta

SEQ ID NO: 75391 - DNA, 19 bp, Homo sapiens
  siRNA target sequence for CASK (NM_003688.1,2228-2246).
ggaaaacactagtcttatt

SEQ ID NO: 75392 - DNA, 19 bp, Homo sapiens
  siRNA target sequence for CASK (NM_003688.1,2260-2278).
gttgggagaagacacataa

SEQ ID NO: 75393 - DNA, 19 bp, Homo sapiens
  siRNA target sequence for CASK (NM_003688.1,2310-2328).
gtttgcgtaccctattcca

SEQ ID NO: 75394 - DNA, 19 bp, Homo sapiens
  siRNA target sequence for CASK (NM_003688.1,2316-2334).
gtaccctattccacataca

SEQ ID NO: 75395 - DNA, 19 bp, Homo sapiens
  siRNA target sequence for CASK (NM_003688.1,2442-2460).
ccacgaggatgcgatgtat

SEQ ID NO: 75396 - DNA, 19 bp, Homo sapiens
  siRNA target sequence for CASK (NM_003688.1,2453-2471).
cgatgtatgggacaaaact

SEQ ID NO: 75397 - DNA, 19 bp, Homo sapiens
  siRNA target sequence for CASK (NM_003688.1,2594-2612).
ctattactccaggtttaaa

SEQ ID NO: 75398 - DNA, 19 bp, Homo sapiens
  siRNA target sequence for CASK (NM_003688.1,2652-2670).
catcttacagagaacatat

SEQ ID NO: 75399 - DNA, 19 bp, Homo sapiens
  siRNA target sequence for CASK (NM_003688.1,2676-2694).
ctacttcgatctcacaatt

SEQ ID NO: 75400 - DNA, 19 bp, Homo sapiens
  siRNA target sequence for CASK (NM_003688.1,2688-2706).
cacaattatcaacaatgaa

SEQ ID NO: 75401 - DNA, 19 bp, Homo sapiens
  siRNA target sequence for CCRK (NM_012119.2,425-443).
gagatggaggacaatcagt

SEQ ID NO: 75402 - DNA, 19 bp, Homo sapiens
  siRNA target sequence for CCRK (NM_012119.2,607-625).
ctgccatgccaacaacatt

SEQ ID NO: 75403 - DNA, 19 bp, Homo sapiens
  siRNA target sequence for CCRK (NM_012119.2,810-828).
gcaagaacgatattgaaca

SEQ ID NO: 75404 - DNA, 19 bp, Homo sapiens
  siRNA target sequence for CCRK (NM_012119.2,890-908).
gagctgccggactacaaca

SEQ ID NO: 75405 - DNA, 19 bp, Homo sapiens
  siRNA target sequence for CCRK (NM_012119.2,896-914).
ccggactacaacaagatct

SEQ ID NO: 75406 - DNA, 19 bp, Homo sapiens
  siRNA target sequence for CCT2 (NM_006431.1,71-89).
cccttgcacctgttaacat

SEQ ID NO: 75407 - DNA, 19 bp, Homo sapiens
  siRNA target sequence for CCT2 (NM_006431.1,73-91).
cttgcacctgttaacatct

SEQ ID NO: 75408 - DNA, 19 bp, Homo sapiens
  siRNA target sequence for CCT2 (NM_006431.1,125-143).
cagctcgtctgacttcttt

SEQ ID NO: 75409 - DNA, 19 bp, Homo sapiens
  siRNA target sequence for CCT2 (NM_006431.1,127-145).
gctcgtctgacttctttta

SEQ ID NO: 75410 - DNA, 19 bp, Homo sapiens
  siRNA target sequence for CCT2 (NM_006431.1,223-241).
ggacgagatgcctctctta

SEQ ID NO: 75411 - DNA, 19 bp, Homo sapiens
  siRNA target sequence for CCT2 (NM_006431.1,229-247).
gatgcctctcttatggtaa

SEQ ID NO: 75412 - DNA, 19 bp, Homo sapiens
  siRNA target sequence for CCT2 (NM_006431.1,233-251).
cctctcttatggtaaccaa

SEQ ID NO: 75413 - DNA, 19 bp, Homo sapiens
  siRNA target sequence for CCT2 (NM_006431.1,253-271).
gatggtgccactattctaa

SEQ ID NO: 75414 - DNA, 19 bp, Homo sapiens
  siRNA target sequence for CCT2 (NM_006431.1,257-275).
gtgccactattctaaaaaa

SEQ ID NO: 75415 - DNA, 19 bp, Homo sapiens
  siRNA target sequence for CCT2 (NM_006431.1,288-306).
caatccagcagctaaagtt

SEQ ID NO: 75416 - DNA, 19 bp, Homo sapiens
  siRNA target sequence for CCT2 (NM_006431.1,298-316).
gctaaagttttagttgata

SEQ ID NO: 75417 - DNA, 19 bp, Homo sapiens
  siRNA target sequence for CCT2 (NM_006431.1,299-317).
ctaaagttttagttgatat

SEQ ID NO: 75418 - DNA, 19 bp, Homo sapiens
  siRNA target sequence for CCT2 (NM_006431.1,365-383).
ccgttttagcagcagaatt

SEQ ID NO: 75419 - DNA, 19 bp, Homo sapiens
  siRNA target sequence for CCT2 (NM_006431.1,366-384).
cgttttagcagcagaatta

SEQ ID NO: 75420 - DNA, 19 bp, Homo sapiens
  siRNA target sequence for CCT2 (NM_006431.1,480-498).
gttgagttctgcagttgat

SEQ ID NO: 75421 - DNA, 19 bp, Homo sapiens
  siRNA target sequence for CCT2 (NM_006431.1,514-532).
gttaaattccgtcaagatt

SEQ ID NO: 75422 - DNA, 19 bp, Homo sapiens
  siRNA target sequence for CCT2 (NM_006431.1,523-541).
cgtcaagatttaatgaata

SEQ ID NO: 75423 - DNA, 19 bp, Homo sapiens
  siRNA target sequence for CCT2 (NM_006431.1,524-542).
gtcaagatttaatgaatat

SEQ ID NO: 75424 - DNA, 19 bp, Homo sapiens
  siRNA target sequence for CCT2 (NM_006431.1,544-562).
gcgggcacaacattatcct

SEQ ID NO: 75425 - DNA, 19 bp, Homo sapiens
  siRNA target sequence for CCT2 (NM_006431.1,549-567).
cacaacattatcctcaaaa

SEQ ID NO: 75426 - DNA, 19 bp, Homo sapiens
  siRNA target sequence for CCT2 (NM_006431.1,638-656).
gcaacctggaggcaattca

SEQ ID NO: 75427 - DNA, 19 bp, Homo sapiens
  siRNA target sequence for CCT2 (NM_006431.1,639-657).
caacctggaggcaattcat

SEQ ID NO: 75428 - DNA, 19 bp, Homo sapiens
  siRNA target sequence for CCT2 (NM_006431.1,677-695).
gaagtttggcagattccta

SEQ ID NO: 75429 - DNA, 19 bp, Homo sapiens
  siRNA target sequence for CCT2 (NM_006431.1,839-857).
cagcaaaggttgcagaaat

SEQ ID NO: 75430 - DNA, 19 bp, Homo sapiens
  siRNA target sequence for CCT2 (NM_006431.1,846-864).
ggttgcagaaatagaacat

SEQ ID NO: 75431 - DNA, 19 bp, Homo sapiens
  siRNA target sequence for CCT2 (NM_006431.1,977-995).
ctggtgtcatggctattga

SEQ ID NO: 75432 - DNA, 19 bp, Homo sapiens
  siRNA target sequence for CCT2 (NM_006431.1,989-1007).
ctattgagcatgcagattt

SEQ ID NO: 75433 - DNA, 19 bp, Homo sapiens
  siRNA target sequence for CCT3 (NM_005998.2,127-145).
cggaagaaaagttcaatct

SEQ ID NO: 75434 - DNA, 19 bp, Homo sapiens
  siRNA target sequence for CCT3 (NM_005998.2,176-194).
gatatcatccgaacatgtt

SEQ ID NO: 75435 - DNA, 19 bp, Homo sapiens
  siRNA target sequence for CCT3 (NM_005998.2,198-216).
gacccaagtccatgatgaa

SEQ ID NO: 75436 - DNA, 19 bp, Homo sapiens
  siRNA target sequence for CCT3 (NM_005998.2,241-259).
cattgtgatgaccaatgat

SEQ ID NO: 75437 - DNA, 19 bp, Homo sapiens
  siRNA target sequence for CCT3 (NM_005998.2,304-322).
caagtccatgatcgaaatt

SEQ ID NO: 75438 - DNA, 19 bp, Homo sapiens
  siRNA target sequence for CCT3 (NM_005998.2,354-372).
ggaccacatcagtaattat

SEQ ID NO: 75439 - DNA, 19 bp, Homo sapiens
  siRNA target sequence for CCT3 (NM_005998.2,355-373).
gaccacatcagtaattatt

SEQ ID NO: 75440 - DNA, 19 bp, Homo sapiens
  siRNA target sequence for CCT3 (NM_005998.2,452-470).
cgcaaggcattggatgata

SEQ ID NO: 75441 - DNA, 19 bp, Homo sapiens
  siRNA target sequence for CCT3 (NM_005998.2,458-476).
gcattggatgatatgatca

SEQ ID NO: 75442 - DNA, 19 bp, Homo sapiens
  siRNA target sequence for CCT3 (NM_005998.2,544-562).
cagctctattactaccaaa

SEQ ID NO: 75443 - DNA, 19 bp, Homo sapiens
  siRNA target sequence for CCT3 (NM_005998.2,634-652).
gaatggtcggaaagagatt

SEQ ID NO: 75444 - DNA, 19 bp, Homo sapiens
  siRNA target sequence for CCT3 (NM_005998.2,719-737).
cgtggagtcatgattaaca

SEQ ID NO: 75445 - DNA, 19 bp, Homo sapiens
  siRNA target sequence for CCT3 (NM_005998.2,720-738).
gtggagtcatgattaacaa

SEQ ID NO: 75446 - DNA, 19 bp, Homo sapiens
  siRNA target sequence for CCT3 (NM_005998.2,1016-1034).
gtccggaagacagacaata

SEQ ID NO: 75447 - DNA, 19 bp, Homo sapiens
  siRNA target sequence for CCT3 (NM_005998.2,1028-1046).
gacaataatcgcattgcta

SEQ ID NO: 75448 - DNA, 19 bp, Homo sapiens
  siRNA target sequence for CCT3 (NM_005998.2,1110-1128).
gagcaggcctgttggaaat

SEQ ID NO: 75449 - DNA, 19 bp, Homo sapiens
  siRNA target sequence for CCT3 (NM_005998.2,1208-1226).
gctagcaaagagattctct

SEQ ID NO: 75450 - DNA, 19 bp, Homo sapiens
  siRNA target sequence for CCT3 (NM_005998.2,1219-1237).
gattctctcggaagtagaa

SEQ ID NO: 75451 - DNA, 19 bp, Homo sapiens
  siRNA target sequence for CCT3 (NM_005998.2,1258-1276).
gcaagtgtgtcgcaatgtt

SEQ ID NO: 75452 - DNA, 19 bp, Homo sapiens
  siRNA target sequence for CCT3 (NM_005998.2,1328-1346).
gcccatgccttgacagaaa

SEQ ID NO: 75453 - DNA, 19 bp, Homo sapiens
  siRNA target sequence for CCT3 (NM_005998.2,1329-1347).
cccatgccttgacagaaaa

SEQ ID NO: 75454 - DNA, 19 bp, Homo sapiens
  siRNA target sequence for CCT3 (NM_005998.2,1330-1348).
ccatgccttgacagaaaaa

SEQ ID NO: 75455 - DNA, 19 bp, Homo sapiens
  siRNA target sequence for CCT3 (NM_005998.2,1444-1462).
cagcaccatccgtctactt

SEQ ID NO: 75456 - DNA, 19 bp, Homo sapiens
  siRNA target sequence for CCT3 (NM_005998.2,1497-1515).
gtgagacctggggtgtaaa

SEQ ID NO: 75457 - DNA, 19 bp, Homo sapiens
  siRNA target sequence for CCT3 (NM_005998.2,1501-1519).
gacctggggtgtaaatggt

SEQ ID NO: 75458 - DNA, 19 bp, Homo sapiens
  siRNA target sequence for CCT3 (NM_005998.2,1527-1545).
gtactttggtggacatgaa

SEQ ID NO: 75459 - DNA, 19 bp, Homo sapiens
  siRNA target sequence for CCT4 (NM_006430.2,329-347).
gattcaagatggaaaaggt

SEQ ID NO: 75460 - DNA, 19 bp, Homo sapiens
  siRNA target sequence for CCT4 (NM_006430.2,486-504).
gctggctccctcttagatt

SEQ ID NO: 75461 - DNA, 19 bp, Homo sapiens
  siRNA target sequence for CCT4 (NM_006430.2,573-591).
gaaaagggcattgaaatct

SEQ ID NO: 75462 - DNA, 19 bp, Homo sapiens
  siRNA target sequence for CCT4 (NM_006430.2,615-633).
gaactgagtgacagagaaa

SEQ ID NO: 75463 - DNA, 19 bp, Homo sapiens
  siRNA target sequence for CCT4 (NM_006430.2,624-642).
gacagagaaactttgttaa

SEQ ID NO: 75464 - DNA, 19 bp, Homo sapiens
  siRNA target sequence for CCT4 (NM_006430.2,671-689).
ggtggtttctcagtattca

SEQ ID NO: 75465 - DNA, 19 bp, Homo sapiens
  siRNA target sequence for CCT4 (NM_006430.2,672-690).
gtggtttctcagtattcaa

SEQ ID NO: 75466 - DNA, 19 bp, Homo sapiens
  siRNA target sequence for CCT4 (NM_006430.2,674-692).
ggtttctcagtattcaagt

SEQ ID NO: 75467 - DNA, 19 bp, Homo sapiens
  siRNA target sequence for CCT4 (NM_006430.2,696-714).
ctttctccaatgagtgtaa

SEQ ID NO: 75468 - DNA, 19 bp, Homo sapiens
  siRNA target sequence for CCT4 (NM_006430.2,745-763).
cagccaccagtgtagatct

SEQ ID NO: 75469 - DNA, 19 bp, Homo sapiens
  siRNA target sequence for CCT4 (NM_006430.2,747-765).
gccaccagtgtagatctta

SEQ ID NO: 75470 - DNA, 19 bp, Homo sapiens
  siRNA target sequence for CCT4 (NM_006430.2,749-767).
caccagtgtagatcttaga

SEQ ID NO: 75471 - DNA, 19 bp, Homo sapiens
  siRNA target sequence for CCT4 (NM_006430.2,754-772).
gtgtagatcttagagatat

SEQ ID NO: 75472 - DNA, 19 bp, Homo sapiens
  siRNA target sequence for CCT4 (NM_006430.2,756-774).
gtagatcttagagatatta

SEQ ID NO: 75473 - DNA, 19 bp, Homo sapiens
  siRNA target sequence for CCT4 (NM_006430.2,831-849).
gttctcacccaaaaagtgt

SEQ ID NO: 75474 - DNA, 19 bp, Homo sapiens
  siRNA target sequence for CCT4 (NM_006430.2,858-876).
ggcataaccagagttgaaa

SEQ ID NO: 75475 - DNA, 19 bp, Homo sapiens
  siRNA target sequence for CCT4 (NM_006430.2,884-902).
gattgggcttattcagttt

SEQ ID NO: 75476 - DNA, 19 bp, Homo sapiens
  siRNA target sequence for CCT4 (NM_006430.2,890-908).
gcttattcagttttgctta

SEQ ID NO: 75477 - DNA, 19 bp, Homo sapiens
  siRNA target sequence for CCT4 (NM_006430.2,916-934).
ccaaaacagacatggataa

SEQ ID NO: 75478 - DNA, 19 bp, Homo sapiens
  siRNA target sequence for CCT4 (NM_006430.2,979-997).
gagaagagagagcctatat

SEQ ID NO: 75479 - DNA, 19 bp, Homo sapiens
  siRNA target sequence for CCT4 (NM_006430.2,1030-1048).
gatgtaatgtccttctcat

SEQ ID NO: 75480 - DNA, 19 bp, Homo sapiens
  siRNA target sequence for CCT4 (NM_006430.2,1038-1056).
gtccttctcatacagaaat

SEQ ID NO: 75481 - DNA, 19 bp, Homo sapiens
  siRNA target sequence for CCT4 (NM_006430.2,1072-1090).
ctcttagtgatcttgcatt

SEQ ID NO: 75482 - DNA, 19 bp, Homo sapiens
  siRNA target sequence for CCT4 (NM_006430.2,1086-1104).
gcattacactttctgaata

SEQ ID NO: 75483 - DNA, 19 bp, Homo sapiens
  siRNA target sequence for CCT4 (NM_006430.2,1118-1136).
ggtgattaaggatattgaa

SEQ ID NO: 75484 - DNA, 19 bp, Homo sapiens
  siRNA target sequence for CCT4 (NM_006430.2,1174-1192).
ccaagccagttgctcatat

SEQ ID NO: 75485 - DNA, 19 bp, Homo sapiens
  siRNA target sequence for CCT4 (NM_006430.2,1175-1193).
caagccagttgctcatatt

SEQ ID NO: 75486 - DNA, 19 bp, Homo sapiens
  siRNA target sequence for CCT4 (NM_006430.2,1185-1203).
gctcatattgaccaattta

SEQ ID NO: 75487 - DNA, 19 bp, Homo sapiens
  siRNA target sequence for CCT4 (NM_006430.2,1214-1232).
gctgggttctgctgagtta

SEQ ID NO: 75488 - DNA, 19 bp, Homo sapiens
  siRNA target sequence for CCT4 (NM_006430.2,1233-1251).
gctgaggaggtcaatttaa

SEQ ID NO: 75489 - DNA, 19 bp, Homo sapiens
  siRNA target sequence for CCT4 (NM_006430.2,1234-1252).
ctgaggaggtcaatttaaa

SEQ ID NO: 75490 - DNA, 19 bp, Homo sapiens
  siRNA target sequence for CCT4 (NM_006430.2,1238-1256).
ggaggtcaatttaaatggt

SEQ ID NO: 75491 - DNA, 19 bp, Homo sapiens
  siRNA target sequence for CCT4 (NM_006430.2,1239-1257).
gaggtcaatttaaatggtt

SEQ ID NO: 75492 - DNA, 19 bp, Homo sapiens
  siRNA target sequence for CCT4 (NM_006430.2,1258-1276).
ctggcaaactgctcaagat

SEQ ID NO: 75493 - DNA, 19 bp, Homo sapiens
  siRNA target sequence for CCT4 (NM_006430.2,1314-1332).
gttgttcgtggttctaaca

SEQ ID NO: 75494 - DNA, 19 bp, Homo sapiens
  siRNA target sequence for CCT4 (NM_006430.2,1327-1345).
ctaacaaactggtgattga

SEQ ID NO: 75495 - DNA, 19 bp, Homo sapiens
  siRNA target sequence for CCT4 (NM_006430.2,1351-1369).
ctgagcgctccattcatga

SEQ ID NO: 75496 - DNA, 19 bp, Homo sapiens
  siRNA target sequence for CCT4 (NM_006430.2,1365-1383).
catgatgccctatgtgtta

SEQ ID NO: 75497 - DNA, 19 bp, Homo sapiens
  siRNA target sequence for CCT4 (NM_006430.2,1371-1389).
gccctatgtgttattcgtt

SEQ ID NO: 75498 - DNA, 19 bp, Homo sapiens
  siRNA target sequence for CCT4 (NM_006430.2,1378-1396).
gtgttattcgttgtttagt

SEQ ID NO: 75499 - DNA, 19 bp, Homo sapiens
  siRNA target sequence for CCT4 (NM_006430.2,1380-1398).
gttattcgttgtttagtga

SEQ ID NO: 75500 - DNA, 19 bp, Homo sapiens
  siRNA target sequence for CCT4 (NM_006430.2,1397-1415).
gaagaagagggctcttatt

SEQ ID NO: 75501 - DNA, 19 bp, Homo sapiens
  siRNA target sequence for CCT4 (NM_006430.2,1400-1418).
gaagagggctcttattgca

SEQ ID NO: 75502 - DNA, 19 bp, Homo sapiens
  siRNA target sequence for CCT4 (NM_006430.2,1423-1441).
gtggtgctccagaaataga

SEQ ID NO: 75503 - DNA, 19 bp, Homo sapiens
  siRNA target sequence for CCT4 (NM_006430.2,1440-1458).
gagttggccctacgattaa

SEQ ID NO: 75504 - DNA, 19 bp, Homo sapiens
  siRNA target sequence for CCT4 (NM_006430.2,1442-1460).
gttggccctacgattaact

SEQ ID NO: 75505 - DNA, 19 bp, Homo sapiens
  siRNA target sequence for CCT4 (NM_006430.2,1445-1463).
ggccctacgattaactgaa

SEQ ID NO: 75506 - DNA, 19 bp, Homo sapiens
  siRNA target sequence for CCT4 (NM_006430.2,1446-1464).
gccctacgattaactgaat

SEQ ID NO: 75507 - DNA, 19 bp, Homo sapiens
  siRNA target sequence for CCT4 (NM_006430.2,1447-1465).
ccctacgattaactgaata

SEQ ID NO: 75508 - DNA, 19 bp, Homo sapiens
  siRNA target sequence for CCT4 (NM_006430.2,1493-1511).
ctactgcgttcgtgctttt

SEQ ID NO: 75509 - DNA, 19 bp, Homo sapiens
  siRNA target sequence for CCT4 (NM_006430.2,1496-1514).
ctgcgttcgtgcttttgca

SEQ ID NO: 75510 - DNA, 19 bp, Homo sapiens
  siRNA target sequence for CCT4 (NM_006430.2,1518-1536).
gctatggaggtcattccat

SEQ ID NO: 75511 - DNA, 19 bp, Homo sapiens
  siRNA target sequence for CCT4 (NM_006430.2,1526-1544).
ggtcattccatctacacta

SEQ ID NO: 75512 - DNA, 19 bp, Homo sapiens
  siRNA target sequence for CCT4 (NM_006430.2,1557-1575).
ggcctgaatcccatttcta

SEQ ID NO: 75513 - DNA, 19 bp, Homo sapiens
  siRNA target sequence for CCT4 (NM_006430.2,1559-1577).
cctgaatcccatttctaca

SEQ ID NO: 75514 - DNA, 19 bp, Homo sapiens
  siRNA target sequence for CCT4 (NM_006430.2,1562-1580).
gaatcccatttctacagta

SEQ ID NO: 75515 - DNA, 19 bp, Homo sapiens
  siRNA target sequence for CCT4 (NM_006430.2,1632-1650).
gtccgaaagggtggtattt

SEQ ID NO: 75516 - DNA, 19 bp, Homo sapiens
  siRNA target sequence for CCT4 (NM_006430.2,1635-1653).
cgaaagggtggtatttcca

SEQ ID NO: 75517 - DNA, 19 bp, Homo sapiens
  siRNA target sequence for CCT4 (NM_006430.2,1636-1654).
gaaagggtggtatttccaa

SEQ ID NO: 75518 - DNA, 19 bp, Homo sapiens
  siRNA target sequence for CCT4 (NM_006430.2,1723-1741).
ctgttcggagcattctgaa

SEQ ID NO: 75519 - DNA, 19 bp, Homo sapiens
  siRNA target sequence for CCT4 (NM_006430.2,1725-1743).
gttcggagcattctgaaaa

SEQ ID NO: 75520 - DNA, 19 bp, Homo sapiens
  siRNA target sequence for CCT5 (NM_012073.2,99-117).
ccctcgccttcgatgaata

SEQ ID NO: 75521 - DNA, 19 bp, Homo sapiens
  siRNA target sequence for CCT5 (NM_012073.2,100-118).
cctcgccttcgatgaatat

SEQ ID NO: 75522 - DNA, 19 bp, Homo sapiens
  siRNA target sequence for CCT5 (NM_012073.2,176-194).
gaggccctcaagtctcata

SEQ ID NO: 75523 - DNA, 19 bp, Homo sapiens
  siRNA target sequence for CCT5 (NM_012073.2,178-196).
ggccctcaagtctcatata

SEQ ID NO: 75524 - DNA, 19 bp, Homo sapiens
  siRNA target sequence for CCT5 (NM_012073.2,179-197).
gccctcaagtctcatataa

SEQ ID NO: 75525 - DNA, 19 bp, Homo sapiens
  siRNA target sequence for CCT5 (NM_012073.2,180-198).
ccctcaagtctcatataat

SEQ ID NO: 75526 - DNA, 19 bp, Homo sapiens
  siRNA target sequence for CCT5 (NM_012073.2,239-257).
ggaccaaatgggcttgata

SEQ ID NO: 75527 - DNA, 19 bp, Homo sapiens
  siRNA target sequence for CCT5 (NM_012073.2,243-261).
caaatgggcttgataagat

SEQ ID NO: 75528 - DNA, 19 bp, Homo sapiens
  siRNA target sequence for CCT5 (NM_012073.2,259-277).
gatgatggtggataaggat

SEQ ID NO: 75529 - DNA, 19 bp, Homo sapiens
  siRNA target sequence for CCT5 (NM_012073.2,415-433).
cctggctggtgccttgtta

SEQ ID NO: 75530 - DNA, 19 bp, Homo sapiens
  siRNA target sequence for CCT5 (NM_012073.2,418-436).
ggctggtgccttgttagaa

SEQ ID NO: 75531 - DNA, 19 bp, Homo sapiens
  siRNA target sequence for CCT5 (NM_012073.2,537-555).
gcgatagcgtccttgttga

SEQ ID NO: 75532 - DNA, 19 bp, Homo sapiens
  siRNA target sequence for CCT5 (NM_012073.2,543-561).
gcgtccttgttgacataaa

SEQ ID NO: 75533 - DNA, 19 bp, Homo sapiens
  siRNA target sequence for CCT5 (NM_012073.2,574-592).
cctgattcagacagcaaaa

SEQ ID NO: 75534 - DNA, 19 bp, Homo sapiens
  siRNA target sequence for CCT5 (NM_012073.2,628-646).
ccgacagatggctgagatt

SEQ ID NO: 75535 - DNA, 19 bp, Homo sapiens
  siRNA target sequence for CCT5 (NM_012073.2,682-700).
gcggagagacgttgacttt

SEQ ID NO: 75536 - DNA, 19 bp, Homo sapiens
  siRNA target sequence for CCT5 (NM_012073.2,684-702).
ggagagacgttgactttga

SEQ ID NO: 75537 - DNA, 19 bp, Homo sapiens
  siRNA target sequence for CCT5 (NM_012073.2,697-715).
ctttgagcttatcaaagta

SEQ ID NO: 75538 - DNA, 19 bp, Homo sapiens
  siRNA target sequence for CCT5 (NM_012073.2,735-753).
ggctggaggacactaaact

SEQ ID NO: 75539 - DNA, 19 bp, Homo sapiens
  siRNA target sequence for CCT5 (NM_012073.2,818-836).
gcgaagattgcaattctca

SEQ ID NO: 75540 - DNA, 19 bp, Homo sapiens
  siRNA target sequence for CCT5 (NM_012073.2,884-902).
gtgacctctgtcgaagatt

SEQ ID NO: 75541 - DNA, 19 bp, Homo sapiens
  siRNA target sequence for CCT5 (NM_012073.2,888-906).
cctctgtcgaagattataa

SEQ ID NO: 75542 - DNA, 19 bp, Homo sapiens
  siRNA target sequence for CCT5 (NM_012073.2,908-926).
gcccttcagaaatacgaaa

SEQ ID NO: 75543 - DNA, 19 bp, Homo sapiens
  siRNA target sequence for CCT5 (NM_012073.2,966-984).
ctggtgctaacctagcaat

SEQ ID NO: 75544 - DNA, 19 bp, Homo sapiens
  siRNA target sequence for CCT5 (NM_012073.2,968-986).
ggtgctaacctagcaattt

SEQ ID NO: 75545 - DNA, 19 bp, Homo sapiens
  siRNA target sequence for CCT5 (NM_012073.2,972-990).
ctaacctagcaatttgtca

SEQ ID NO: 75546 - DNA, 19 bp, Homo sapiens
  siRNA target sequence for CCT5 (NM_012073.2,987-1005).
gtcagtggggctttgatga

SEQ ID NO: 75547 - DNA, 19 bp, Homo sapiens
  siRNA target sequence for CCT5 (NM_012073.2,1053-1071).
gggtaggaggacctgaaat

SEQ ID NO: 75548 - DNA, 19 bp, Homo sapiens
  siRNA target sequence for CCT5 (NM_012073.2,1143-1161).
gctttgctggtcttgtaca

SEQ ID NO: 75549 - DNA, 19 bp, Homo sapiens
  siRNA target sequence for CCT5 (NM_012073.2,1199-1217).
gtcatcgagcagtgtaaga

SEQ ID NO: 75550 - DNA, 19 bp, Homo sapiens
  siRNA target sequence for CCT5 (NM_012073.2,1219-1237).
ctccagagctgtaaccatt

SEQ ID NO: 75551 - DNA, 19 bp, Homo sapiens
  siRNA target sequence for CCT5 (NM_012073.2,1221-1239).
ccagagctgtaaccatttt

SEQ ID NO: 75552 - DNA, 19 bp, Homo sapiens
  siRNA target sequence for CCT5 (NM_012073.2,1251-1269).
gaaataagatgatcattga

SEQ ID NO: 75553 - DNA, 19 bp, Homo sapiens
  siRNA target sequence for CCT5 (NM_012073.2,1281-1299).
gatcccttcacgatgcttt

SEQ ID NO: 75554 - DNA, 19 bp, Homo sapiens
  siRNA target sequence for CCT5 (NM_012073.2,1312-1330).
gaacctcatccgcgataat

SEQ ID NO: 75555 - DNA, 19 bp, Homo sapiens
  siRNA target sequence for CCT5 (NM_012073.2,1315-1333).
cctcatccgcgataatcgt

SEQ ID NO: 75556 - DNA, 19 bp, Homo sapiens
  siRNA target sequence for CCT5 (NM_012073.2,1402-1420).
ccccaccttagaacagtat

SEQ ID NO: 75557 - DNA, 19 bp, Homo sapiens
  siRNA target sequence for CCT5 (NM_012073.2,1462-1480).
ggccctctctgaaaacagt

SEQ ID NO: 75558 - DNA, 19 bp, Homo sapiens
  siRNA target sequence for CCT5 (NM_012073.2,1545-1563).
ctcttggcatcgactgttt

SEQ ID NO: 75559 - DNA, 19 bp, Homo sapiens
  siRNA target sequence for CCT5 (NM_012073.2,1564-1582).
gcacaaggggacaaatgat

SEQ ID NO: 75560 - DNA, 19 bp, Homo sapiens
  siRNA target sequence for CCT5 (NM_012073.2,1644-1662).
cacaaatggttagaatgat

SEQ ID NO: 75561 - DNA, 19 bp, Homo sapiens
  siRNA target sequence for CCT5 (NM_012073.2,1646-1664).
caaatggttagaatgattt

SEQ ID NO: 75562 - DNA, 19 bp, Homo sapiens
  siRNA target sequence for CCT6A (NM_001762.2,110-128).
gcgctggcggtcaacatca

SEQ ID NO: 75563 - DNA, 19 bp, Homo sapiens
  siRNA target sequence for CCT6A (NM_001762.2,201-219).
ctggcgctggagacatcaa

SEQ ID NO: 75564 - DNA, 19 bp, Homo sapiens
  siRNA target sequence for CCT6A (NM_001762.2,204-222).
gcgctggagacatcaaact

SEQ ID NO: 75565 - DNA, 19 bp, Homo sapiens
  siRNA target sequence for CCT6A (NM_001762.2,513-531).
gaacatctcttcgtactaa

SEQ ID NO: 75566 - DNA, 19 bp, Homo sapiens
  siRNA target sequence for CCT6A (NM_001762.2,637-655).
ggagatgaaacataaatct

SEQ ID NO: 75567 - DNA, 19 bp, Homo sapiens
  siRNA target sequence for CCT6A (NM_001762.2,699-717).
gagcacggcatcctgatat

SEQ ID NO: 75568 - DNA, 19 bp, Homo sapiens
  siRNA target sequence for CCT6A (NM_001762.2,701-719).
gcacggcatcctgatatga

SEQ ID NO: 75569 - DNA, 19 bp, Homo sapiens
  siRNA target sequence for CCT6A (NM_001762.2,702-720).
cacggcatcctgatatgaa

SEQ ID NO: 75570 - DNA, 19 bp, Homo sapiens
  siRNA target sequence for CCT6A (NM_001762.2,738-756).
catacatcctcacttgtaa

SEQ ID NO: 75571 - DNA, 19 bp, Homo sapiens
  siRNA target sequence for CCT6A (NM_001762.2,748-766).
cacttgtaacgtgtcatta

SEQ ID NO: 75572 - DNA, 19 bp, Homo sapiens
  siRNA target sequence for CCT6A (NM_001762.2,753-771).
gtaacgtgtcattagagta

SEQ ID NO: 75573 - DNA, 19 bp, Homo sapiens
  siRNA target sequence for CCT6A (NM_001762.2,758-776).
gtgtcattagagtatgaga

SEQ ID NO: 75574 - DNA, 19 bp, Homo sapiens
  siRNA target sequence for CCT6A (NM_001762.2,1529-1547).
gtaggcgtatgggataact

SEQ ID NO: 75575 - DNA, 19 bp, Homo sapiens
  siRNA target sequence for CCT6A (NM_001762.2,1532-1550).
ggcgtatgggataactatt

SEQ ID NO: 75576 - DNA, 19 bp, Homo sapiens
  siRNA target sequence for CCT6A (NM_001762.2,1534-1552).
cgtatgggataactattgt

SEQ ID NO: 75577 - DNA, 19 bp, Homo sapiens
  siRNA target sequence for CCT6B (NM_006584.1,94-112).
ggcagctttggctgtcaat

SEQ ID NO: 75578 - DNA, 19 bp, Homo sapiens
  siRNA target sequence for CCT6B (NM_006584.1,160-178).
ctaaaggcaccatgaaaat

SEQ ID NO: 75579 - DNA, 19 bp, Homo sapiens
  siRNA target sequence for CCT6B (NM_006584.1,190-208).
gtgcaggtgacatcaaact

SEQ ID NO: 75580 - DNA, 19 bp, Homo sapiens
  siRNA target sequence for CCT6B (NM_006584.1,228-246).
ctgctcgatgagatgcaaa

SEQ ID NO: 75581 - DNA, 19 bp, Homo sapiens
  siRNA target sequence for CCT6B (NM_006584.1,230-248).
gctcgatgagatgcaaatt

SEQ ID NO: 75582 - DNA, 19 bp, Homo sapiens
  siRNA target sequence for CCT6B (NM_006584.1,380-398).
cctgcaccctagaataata

SEQ ID NO: 75583 - DNA, 19 bp, Homo sapiens
  siRNA target sequence for CCT6B (NM_006584.1,383-401).
gcaccctagaataatagct

SEQ ID NO: 75584 - DNA, 19 bp, Homo sapiens
  siRNA target sequence for CCT6B (NM_006584.1,485-503).
cttagatgtagctagaaca

SEQ ID NO: 75585 - DNA, 19 bp, Homo sapiens
  siRNA target sequence for CCT6B (NM_006584.1,505-523).
cattacaaactaaagttca

SEQ ID NO: 75586 - DNA, 19 bp, Homo sapiens
  siRNA target sequence for CCT6B (NM_006584.1,600-618).
gatctcttcatggtagaaa

SEQ ID NO: 75587 - DNA, 19 bp, Homo sapiens
  siRNA target sequence for CCT6B (NM_006584.1,632-650).
gcataaattaggaacagat

SEQ ID NO: 75588 - DNA, 19 bp, Homo sapiens
  siRNA target sequence for CCT6B (NM_006584.1,717-735).
gaagatgcatttatcctta

SEQ ID NO: 75589 - DNA, 19 bp, Homo sapiens
  siRNA target sequence for CCT6B (NM_006584.1,739-757).
gcaacgtttcactggaata

SEQ ID NO: 75590 - DNA, 19 bp, Homo sapiens
  siRNA target sequence for CCT6B (NM_006584.1,740-758).
caacgtttcactggaatat

SEQ ID NO: 75591 - DNA, 19 bp, Homo sapiens
  siRNA target sequence for CCT6B (NM_006584.1,882-900).
gtctgtgctcagtcaaata

SEQ ID NO: 75592 - DNA, 19 bp, Homo sapiens
  siRNA target sequence for CCT6B (NM_006584.1,888-906).
gctcagtcaaataaaggat

SEQ ID NO: 75593 - DNA, 19 bp, Homo sapiens
  siRNA target sequence for CCT6B (NM_006584.1,889-907).
ctcagtcaaataaaggatt

SEQ ID NO: 75594 - DNA, 19 bp, Homo sapiens
  siRNA target sequence for CCT6B (NM_006584.1,1026-1044).
ggtggaatggccgtgaatt

SEQ ID NO: 75595 - DNA, 19 bp, Homo sapiens
  siRNA target sequence for CCT6B (NM_006584.1,1050-1068).
gaagatctcactgtagatt

SEQ ID NO: 75596 - DNA, 19 bp, Homo sapiens
  siRNA target sequence for CCT6B (NM_006584.1,1081-1099).
ctggtcttgtgtatgagta

SEQ ID NO: 75597 - DNA, 19 bp, Homo sapiens
  siRNA target sequence for CCT6B (NM_006584.1,1091-1109).
gtatgagtatacattaggt

SEQ ID NO: 75598 - DNA, 19 bp, Homo sapiens
  siRNA target sequence for CCT6B (NM_006584.1,1097-1115).
gtatacattaggtgaagaa

SEQ ID NO: 75599 - DNA, 19 bp, Homo sapiens
  siRNA target sequence for CCT6B (NM_006584.1,1202-1220).
caaggatgccataagagat

SEQ ID NO: 75600 - DNA, 19 bp, Homo sapiens
  siRNA target sequence for CCT6B (NM_006584.1,1221-1239).
ggacttcgtgctatcaaaa

SEQ ID NO: 75601 - DNA, 19 bp, Homo sapiens
  siRNA target sequence for CCT6B (NM_006584.1,1222-1240).
gacttcgtgctatcaaaaa

SEQ ID NO: 75602 - DNA, 19 bp, Homo sapiens
  siRNA target sequence for CCT6B (NM_006584.1,1270-1288).
gagctggtgcaattgaagt

SEQ ID NO: 75603 - DNA, 19 bp, Homo sapiens
  siRNA target sequence for CCT6B (NM_006584.1,1396-1414).
ctcagaatgctggttatga

SEQ ID NO: 75604 - DNA, 19 bp, Homo sapiens
  siRNA target sequence for CCT6B (NM_006584.1,1444-1462).
ctgagcatgtcgagtcaaa

SEQ ID NO: 75605 - DNA, 19 bp, Homo sapiens
  siRNA target sequence for CCT6B (NM_006584.1,1448-1466).
gcatgtcgagtcaaaacaa

SEQ ID NO: 75606 - DNA, 19 bp, Homo sapiens
  siRNA target sequence for CCT6B (NM_006584.1,1464-1482).
caacttgtgggcgtagatt

SEQ ID NO: 75607 - DNA, 19 bp, Homo sapiens
  siRNA target sequence for CCT6B (NM_006584.1,1467-1485).
cttgtgggcgtagatttga

SEQ ID NO: 75608 - DNA, 19 bp, Homo sapiens
  siRNA target sequence for CCT6B (NM_006584.1,1470-1488).
gtgggcgtagatttgaata

SEQ ID NO: 75609 - DNA, 19 bp, Homo sapiens
  siRNA target sequence for CCT6B (NM_006584.1,1472-1490).
gggcgtagatttgaataca

SEQ ID NO: 75610 - DNA, 19 bp, Homo sapiens
  siRNA target sequence for CCT6B (NM_006584.1,1518-1536).
ggagtttgggataattatt

SEQ ID NO: 75611 - DNA, 19 bp, Homo sapiens
  siRNA target sequence for CCT6B (NM_006584.1,1643-1661).
caaaatcaacccttctaga

SEQ ID NO: 75612 - DNA, 19 bp, Homo sapiens
  siRNA target sequence for CCT7 (NM_006429.1,75-93).
cccacaccagttatcctat

SEQ ID NO: 75613 - DNA, 19 bp, Homo sapiens
  siRNA target sequence for CCT7 (NM_006429.1,76-94).
ccacaccagttatcctatt

SEQ ID NO: 75614 - DNA, 19 bp, Homo sapiens
  siRNA target sequence for CCT7 (NM_006429.1,127-145).
cccagcttgtgagtaacat

SEQ ID NO: 75615 - DNA, 19 bp, Homo sapiens
  siRNA target sequence for CCT7 (NM_006429.1,165-183).
gctgaggctgtaagaacta

SEQ ID NO: 75616 - DNA, 19 bp, Homo sapiens
  siRNA target sequence for CCT7 (NM_006429.1,195-213).
cgtggcatggacaagctta

SEQ ID NO: 75617 - DNA, 19 bp, Homo sapiens
  siRNA target sequence for CCT7 (NM_006429.1,196-214).
gtggcatggacaagcttat

SEQ ID NO: 75618 - DNA, 19 bp, Homo sapiens
  siRNA target sequence for CCT7 (NM_006429.1,199-217).
gcatggacaagcttattgt

SEQ ID NO: 75619 - DNA, 19 bp, Homo sapiens
  siRNA target sequence for CCT7 (NM_006429.1,203-221).
ggacaagcttattgtagat

SEQ ID NO: 75620 - DNA, 19 bp, Homo sapiens
  siRNA target sequence for CCT7 (NM_006429.1,228-246).
ggcaaagcaacaatttcta

SEQ ID NO: 75621 - DNA, 19 bp, Homo sapiens
  siRNA target sequence for CCT7 (NM_006429.1,412-430).
gtttacacccccagatcat

SEQ ID NO: 75622 - DNA, 19 bp, Homo sapiens
  siRNA target sequence for CCT7 (NM_006429.1,456-474).
cagctggcagttaacaaga

SEQ ID NO: 75623 - DNA, 19 bp, Homo sapiens
  siRNA target sequence for CCT7 (NM_006429.1,459-477).
ctggcagttaacaagatca

SEQ ID NO: 75624 - DNA, 19 bp, Homo sapiens
  siRNA target sequence for CCT7 (NM_006429.1,461-479).
ggcagttaacaagatcaaa

SEQ ID NO: 75625 - DNA, 19 bp, Homo sapiens
  siRNA target sequence for CCT7 (NM_006429.1,463-481).
cagttaacaagatcaaaga

SEQ ID NO: 75626 - DNA, 19 bp, Homo sapiens
  siRNA target sequence for CCT7 (NM_006429.1,494-512).
cgtgaagaaggcagataaa

SEQ ID NO: 75627 - DNA, 19 bp, Homo sapiens
  siRNA target sequence for CCT7 (NM_006429.1,615-633).
gtgatgatgctcgatgatt

SEQ ID NO: 75628 - DNA, 19 bp, Homo sapiens
  siRNA target sequence for CCT7 (NM_006429.1,639-657).
cagcttaaaatgattggaa

SEQ ID NO: 75629 - DNA, 19 bp, Homo sapiens
  siRNA target sequence for CCT7 (NM_006429.1,676-694).
gagccctcgaggattctca

SEQ ID NO: 75630 - DNA, 19 bp, Homo sapiens
  siRNA target sequence for CCT7 (NM_006429.1,702-720).
gctggtgttgcattcaaga

SEQ ID NO: 75631 - DNA, 19 bp, Homo sapiens
  siRNA target sequence for CCT7 (NM_006429.1,703-721).
ctggtgttgcattcaagaa

SEQ ID NO: 75632 - DNA, 19 bp, Homo sapiens
  siRNA target sequence for CCT7 (NM_006429.1,705-723).
ggtgttgcattcaagaaga

SEQ ID NO: 75633 - DNA, 19 bp, Homo sapiens
  siRNA target sequence for CCT7 (NM_006429.1,708-726).
gttgcattcaagaagactt

SEQ ID NO: 75634 - DNA, 19 bp, Homo sapiens
  siRNA target sequence for CCT7 (NM_006429.1,728-746).
ctcttacgctgggtttgaa

SEQ ID NO: 75635 - DNA, 19 bp, Homo sapiens
  siRNA target sequence for CCT7 (NM_006429.1,730-748).
cttacgctgggtttgaaat

SEQ ID NO: 75636 - DNA, 19 bp, Homo sapiens
  siRNA target sequence for CCT7 (NM_006429.1,744-762).
gaaatgcaacccaaaaagt

SEQ ID NO: 75637 - DNA, 19 bp, Homo sapiens
  siRNA target sequence for CCT7 (NM_006429.1,771-789).
cccaagattgcccttttga

SEQ ID NO: 75638 - DNA, 19 bp, Homo sapiens
  siRNA target sequence for CCT7 (NM_006429.1,851-869).
ggattatcaggcaattgtt

SEQ ID NO: 75639 - DNA, 19 bp, Homo sapiens
  siRNA target sequence for CCT7 (NM_006429.1,873-891).
gctgagtggaacattctct

SEQ ID NO: 75640 - DNA, 19 bp, Homo sapiens
  siRNA target sequence for CCT7 (NM_006429.1,978-996).
gctgacagggacatgttct

SEQ ID NO: 75641 - DNA, 19 bp, Homo sapiens
  siRNA target sequence for CCT7 (NM_006429.1,1128-1146).
ggaggcgagaggtacaatt

SEQ ID NO: 75642 - DNA, 19 bp, Homo sapiens
  siRNA target sequence for CCT7 (NM_006429.1,1129-1147).
gaggcgagaggtacaattt

SEQ ID NO: 75643 - DNA, 19 bp, Homo sapiens
  siRNA target sequence for CCT7 (NM_006429.1,1131-1149).
ggcgagaggtacaattttt

SEQ ID NO: 75644 - DNA, 19 bp, Homo sapiens
  siRNA target sequence for CCT7 (NM_006429.1,1134-1152).
gagaggtacaattttttta

SEQ ID NO: 75645 - DNA, 19 bp, Homo sapiens
  siRNA target sequence for CCT7 (NM_006429.1,1169-1187).
caagacatgcaccttcatt

SEQ ID NO: 75646 - DNA, 19 bp, Homo sapiens
  siRNA target sequence for CCT7 (NM_006429.1,1254-1272).
gtcaggagggccatcaaga

SEQ ID NO: 75647 - DNA, 19 bp, Homo sapiens
  siRNA target sequence for CCT7 (NM_006429.1,1259-1277).
gagggccatcaagaatgat

SEQ ID NO: 75648 - DNA, 19 bp, Homo sapiens
  siRNA target sequence for CCT7 (NM_006429.1,1262-1280).
ggccatcaagaatgattca

SEQ ID NO: 75649 - DNA, 19 bp, Homo sapiens
  siRNA target sequence for CCT7 (NM_006429.1,1322-1340).
gtacctgcgggattactca

SEQ ID NO: 75650 - DNA, 19 bp, Homo sapiens
  siRNA target sequence for CCT7 (NM_006429.1,1331-1349).
ggattactcaaggactatt

SEQ ID NO: 75651 - DNA, 19 bp, Homo sapiens
  siRNA target sequence for CCT7 (NM_006429.1,1430-1448).
ctttgatgccacaaacatt

SEQ ID NO: 75652 - DNA, 19 bp, Homo sapiens
  siRNA target sequence for CCT7 (NM_006429.1,1475-1493).
ccaggggggtacatggtat

SEQ ID NO: 75653 - DNA, 19 bp, Homo sapiens
  siRNA target sequence for CCT7 (NM_006429.1,1486-1504).
catggtatggagtagacat

SEQ ID NO: 75654 - DNA, 19 bp, Homo sapiens
  siRNA target sequence for CCT7 (NM_006429.1,1489-1507).
ggtatggagtagacatcaa

SEQ ID NO: 75655 - DNA, 19 bp, Homo sapiens
  siRNA target sequence for CCT7 (NM_006429.1,1522-1540).
ctgacaactttgaagcttt

SEQ ID NO: 75656 - DNA, 19 bp, Homo sapiens
  siRNA target sequence for CCT8 (NM_006585.1,444-462).
ctcatgagattcttcctaa

SEQ ID NO: 75657 - DNA, 19 bp, Homo sapiens
  siRNA target sequence for CCT8 (NM_006585.1,458-476).
cctaatttggtatgttgtt

SEQ ID NO: 75658 - DNA, 19 bp, Homo sapiens
  siRNA target sequence for CCT8 (NM_006585.1,467-485).
gtatgttgttctgcaaaaa

SEQ ID NO: 75659 - DNA, 19 bp, Homo sapiens
  siRNA target sequence for CCT8 (NM_006585.1,480-498).
caaaaaaccttcgagatat

SEQ ID NO: 75660 - DNA, 19 bp, Homo sapiens
  siRNA target sequence for CCT8 (NM_006585.1,487-505).
ccttcgagatattgatgaa

SEQ ID NO: 75661 - DNA, 19 bp, Homo sapiens
  siRNA target sequence for CCT8 (NM_006585.1,515-533).
ctacttcgtacctccataa

SEQ ID NO: 75662 - DNA, 19 bp, Homo sapiens
  siRNA target sequence for CCT8 (NM_006585.1,518-536).
cttcgtacctccataatga

SEQ ID NO: 75663 - DNA, 19 bp, Homo sapiens
  siRNA target sequence for CCT8 (NM_006585.1,521-539).
cgtacctccataatgagta

SEQ ID NO: 75664 - DNA, 19 bp, Homo sapiens
  siRNA target sequence for CCT8 (NM_006585.1,522-540).
gtacctccataatgagtaa

SEQ ID NO: 75665 - DNA, 19 bp, Homo sapiens
  siRNA target sequence for CCT8 (NM_006585.1,525-543).
cctccataatgagtaaaca

SEQ ID NO: 75666 - DNA, 19 bp, Homo sapiens
  siRNA target sequence for CCT8 (NM_006585.1,526-544).
ctccataatgagtaaacaa

SEQ ID NO: 75667 - DNA, 19 bp, Homo sapiens
  siRNA target sequence for CCT8 (NM_006585.1,535-553).
gagtaaacaatatggtaat

SEQ ID NO: 75668 - DNA, 19 bp, Homo sapiens
  siRNA target sequence for CCT8 (NM_006585.1,579-597).
ctcaggcatgcgtatctat

SEQ ID NO: 75669 - DNA, 19 bp, Homo sapiens
  siRNA target sequence for CCT8 (NM_006585.1,581-599).
caggcatgcgtatctattt

SEQ ID NO: 75670 - DNA, 19 bp, Homo sapiens
  siRNA target sequence for CCT8 (NM_006585.1,583-601).
ggcatgcgtatctattttt

SEQ ID NO: 75671 - DNA, 19 bp, Homo sapiens
  siRNA target sequence for CCT8 (NM_006585.1,602-620).
cctgattccggccatttca

SEQ ID NO: 75672 - DNA, 19 bp, Homo sapiens
  siRNA target sequence for CCT8 (NM_006585.1,603-621).
ctgattccggccatttcaa

SEQ ID NO: 75673 - DNA, 19 bp, Homo sapiens
  siRNA target sequence for CCT8 (NM_006585.1,611-629).
ggccatttcaatgttgata

SEQ ID NO: 75674 - DNA, 19 bp, Homo sapiens
  siRNA target sequence for CCT8 (NM_006585.1,612-630).
gccatttcaatgttgataa

SEQ ID NO: 75675 - DNA, 19 bp, Homo sapiens
  siRNA target sequence for CCT8 (NM_006585.1,666-684).
gttcctcttcagtattgca

SEQ ID NO: 75676 - DNA, 19 bp, Homo sapiens
  siRNA target sequence for CCT8 (NM_006585.1,703-721).
ggaaaccgaaggtgatgta

SEQ ID NO: 75677 - DNA, 19 bp, Homo sapiens
  siRNA target sequence for CCT8 (NM_006585.1,704-722).
gaaaccgaaggtgatgtaa

SEQ ID NO: 75678 - DNA, 19 bp, Homo sapiens
  siRNA target sequence for CCT8 (NM_006585.1,887-905).
ggtgcaaatgtcgtagtaa

SEQ ID NO: 75679 - DNA, 19 bp, Homo sapiens
  siRNA target sequence for CCT8 (NM_006585.1,919-937).
ggcagacatggctcttcat

SEQ ID NO: 75680 - DNA, 19 bp, Homo sapiens
  siRNA target sequence for CCT8 (NM_006585.1,920-938).
gcagacatggctcttcatt

SEQ ID NO: 75681 - DNA, 19 bp, Homo sapiens
  siRNA target sequence for CCT8 (NM_006585.1,961-979).
gttagtgaggctaaactca

SEQ ID NO: 75682 - DNA, 19 bp, Homo sapiens
  siRNA target sequence for CCT8 (NM_006585.1,985-1003).
ggatctccgaagactttgt

SEQ ID NO: 75683 - DNA, 19 bp, Homo sapiens
  siRNA target sequence for CCT8 (NM_006585.1,986-1004).
gatctccgaagactttgta

SEQ ID NO: 75684 - DNA, 19 bp, Homo sapiens
  siRNA target sequence for CCT8 (NM_006585.1,989-1007).
ctccgaagactttgtaaaa

SEQ ID NO: 75685 - DNA, 19 bp, Homo sapiens
  siRNA target sequence for CCT8 (NM_006585.1,991-1009).
ccgaagactttgtaaaact

SEQ ID NO: 75686 - DNA, 19 bp, Homo sapiens
  siRNA target sequence for CCT8 (NM_006585.1,1105-1123).
ggtggtggtttttaagcat

SEQ ID NO: 75687 - DNA, 19 bp, Homo sapiens
  siRNA target sequence for CCT8 (NM_006585.1,1138-1156).
cgccatttctaccatagta

SEQ ID NO: 75688 - DNA, 19 bp, Homo sapiens
  siRNA target sequence for CCT8 (NM_006585.1,1163-1181).
ggctctacagacaatctga

SEQ ID NO: 75689 - DNA, 19 bp, Homo sapiens
  siRNA target sequence for CCT8 (NM_006585.1,1164-1182).
gctctacagacaatctgat

SEQ ID NO: 75690 - DNA, 19 bp, Homo sapiens
  siRNA target sequence for CCT8 (NM_006585.1,1208-1226).
gatggtgttaatactttca

SEQ ID NO: 75691 - DNA, 19 bp, Homo sapiens
  siRNA target sequence for CCT8 (NM_006585.1,1286-1304).
gccaaacagatcacatcat

SEQ ID NO: 75692 - DNA, 19 bp, Homo sapiens
  siRNA target sequence for CCT8 (NM_006585.1,1287-1305).
ccaaacagatcacatcata

SEQ ID NO: 75693 - DNA, 19 bp, Homo sapiens
  siRNA target sequence for CCT8 (NM_006585.1,1288-1306).
caaacagatcacatcatat

SEQ ID NO: 75694 - DNA, 19 bp, Homo sapiens
  siRNA target sequence for CCT8 (NM_006585.1,1322-1340).
ggacttgaacagtatgcta

SEQ ID NO: 75695 - DNA, 19 bp, Homo sapiens
  siRNA target sequence for CCT8 (NM_006585.1,1328-1346).
gaacagtatgctattaaga

SEQ ID NO: 75696 - DNA, 19 bp, Homo sapiens
  siRNA target sequence for CCT8 (NM_006585.1,1331-1349).
cagtatgctattaagaagt

SEQ ID NO: 75697 - DNA, 19 bp, Homo sapiens
  siRNA target sequence for CCT8 (NM_006585.1,1378-1396).
cgcactggcagaaaactct

SEQ ID NO: 75698 - DNA, 19 bp, Homo sapiens
  siRNA target sequence for CCT8 (NM_006585.1,1449-1467).
gaaataaaaacgttggatt

SEQ ID NO: 75699 - DNA, 19 bp, Homo sapiens
  siRNA target sequence for CCT8 (NM_006585.1,1501-1519).
catgctggaagctggtatt

SEQ ID NO: 75700 - DNA, 19 bp, Homo sapiens
  siRNA target sequence for CCT8 (NM_006585.1,1508-1526).
gaagctggtattctagata

SEQ ID NO: 75701 - DNA, 19 bp, Homo sapiens
  siRNA target sequence for CCT8 (NM_006585.1,1511-1529).
gctggtattctagatactt

SEQ ID NO: 75702 - DNA, 19 bp, Homo sapiens
  siRNA target sequence for CCT8 (NM_006585.1,1512-1530).
ctggtattctagatactta

SEQ ID NO: 75703 - DNA, 19 bp, Homo sapiens
  siRNA target sequence for CCT8 (NM_006585.1,1548-1566).
ctatcaaactcgctactaa

SEQ ID NO: 75704 - DNA, 19 bp, Homo sapiens
  siRNA target sequence for CCT8 (NM_006585.1,1552-1570).
caaactcgctactaatgct

SEQ ID NO: 75705 - DNA, 19 bp, Homo sapiens
  siRNA target sequence for CCT8 (NM_006585.1,1568-1586).
gctgcagtcactgtactta

SEQ ID NO: 75706 - DNA, 19 bp, Homo sapiens
  siRNA target sequence for CCT8 (NM_006585.1,1587-1605).
gagtggatcagatcatcat

SEQ ID NO: 75707 - DNA, 19 bp, Homo sapiens
  siRNA target sequence for CCT8 (NM_006585.1,1634-1652).
ccaagtgggaagaaagact

SEQ ID NO: 75708 - DNA, 19 bp, Homo sapiens
  siRNA target sequence for CCT8 (NM_006585.1,1651-1669).
ctgggatgatgaccaaaat

SEQ ID NO: 75709 - DNA, 19 bp, Homo sapiens
  siRNA target sequence for CDC2 (NM_001786.2,167-185).
gtacctatggagttgtgta

SEQ ID NO: 75710 - DNA, 19 bp, Homo sapiens
  siRNA target sequence for CDC2 (NM_001786.2,189-207).
gggtagacacaaaactaca

SEQ ID NO: 75711 - DNA, 19 bp, Homo sapiens
  siRNA target sequence for CDC2 (NM_001786.2,252-270).
ggaaggggttcctagtact

SEQ ID NO: 75712 - DNA, 19 bp, Homo sapiens
  siRNA target sequence for CDC2 (NM_001786.2,272-290).
caattcgggaaatttctct

SEQ ID NO: 75713 - DNA, 19 bp, Homo sapiens
  siRNA target sequence for CDC2 (NM_001786.2,277-295).
cgggaaatttctctattaa

SEQ ID NO: 75714 - DNA, 19 bp, Homo sapiens
  siRNA target sequence for CDC2 (NM_001786.2,304-322).
cgtcatccaaatatagtca

SEQ ID NO: 75715 - DNA, 19 bp, Homo sapiens
  siRNA target sequence for CDC2 (NM_001786.2,423-441).
gtacatggattcttcactt

SEQ ID NO: 75716 - DNA, 19 bp, Homo sapiens
  siRNA target sequence for CDC2 (NM_001786.2,434-452).
cttcacttgttaagagtta

SEQ ID NO: 75717 - DNA, 19 bp, Homo sapiens
  siRNA target sequence for CDC2 (NM_001786.2,465-483).
cctacaggggattgtgttt

SEQ ID NO: 75718 - DNA, 19 bp, Homo sapiens
  siRNA target sequence for CDC2 (NM_001786.2,551-569).
caattaaactggctgattt

SEQ ID NO: 75719 - DNA, 19 bp, Homo sapiens
  siRNA target sequence for CDC2 (NM_001786.2,596-614).
ctatcagagtatatacaca

SEQ ID NO: 75720 - DNA, 19 bp, Homo sapiens
  siRNA target sequence for CDC2 (NM_001786.2,611-629).
cacatgaggtagtaacact

SEQ ID NO: 75721 - DNA, 19 bp, Homo sapiens
  siRNA target sequence for CDC2 (NM_001786.2,622-640).
gtaacactctggtacagat

SEQ ID NO: 75722 - DNA, 19 bp, Homo sapiens
  siRNA target sequence for CDC2 (NM_001786.2,657-675).
ggggtcagctcgttactca

SEQ ID NO: 75723 - DNA, 19 bp, Homo sapiens
  siRNA target sequence for CDC2 (NM_001786.2,658-676).
gggtcagctcgttactcaa

SEQ ID NO: 75724 - DNA, 19 bp, Homo sapiens
  siRNA target sequence for CDC2 (NM_001786.2,672-690).
ctcaactccagttgacatt

SEQ ID NO: 75725 - DNA, 19 bp, Homo sapiens
  siRNA target sequence for CDC2 (NM_001786.2,746-764).
gggattcagaaattgatca

SEQ ID NO: 75726 - DNA, 19 bp, Homo sapiens
  siRNA target sequence for CDC2 (NM_001786.2,813-831).
gccagaagtggaatcttta

SEQ ID NO: 75727 - DNA, 19 bp, Homo sapiens
  siRNA target sequence for CDC2 (NM_001786.2,832-850).
caggactataagaatacat

SEQ ID NO: 75728 - DNA, 19 bp, Homo sapiens
  siRNA target sequence for CDC2 (NM_001786.2,872-890).
gcctagcatcccatgtcaa

SEQ ID NO: 75729 - DNA, 19 bp, Homo sapiens
  siRNA target sequence for CDC2 (NM_001786.2,873-891).
cctagcatcccatgtcaaa

SEQ ID NO: 75730 - DNA, 19 bp, Homo sapiens
  siRNA target sequence for CDC2 (NM_001786.2,877-895).
gcatcccatgtcaaaaact

SEQ ID NO: 75731 - DNA, 19 bp, Homo sapiens
  siRNA target sequence for CDC2 (NM_001786.2,878-896).
catcccatgtcaaaaactt

SEQ ID NO: 75732 - DNA, 19 bp, Homo sapiens
  siRNA target sequence for CDC2 (NM_001786.2,913-931).
gatttgctctcgaaaatgt

SEQ ID NO: 75733 - DNA, 19 bp, Homo sapiens
  siRNA target sequence for CDC2 (NM_001786.2,919-937).
ctctcgaaaatgttaatct

SEQ ID NO: 75734 - DNA, 19 bp, Homo sapiens
  siRNA target sequence for CDC2 (NM_001786.2,921-939).
ctcgaaaatgttaatctat

SEQ ID NO: 75735 - DNA, 19 bp, Homo sapiens
  siRNA target sequence for CDC2 (NM_001786.2,963-981).
caaaatggcactgaatcat

SEQ ID NO: 75736 - DNA, 19 bp, Homo sapiens
  siRNA target sequence for CDC2 (NM_001786.2,969-987).
ggcactgaatcatccatat

SEQ ID NO: 75737 - DNA, 19 bp, Homo sapiens
  siRNA target sequence for CDC2 (NM_001786.2,970-988).
gcactgaatcatccatatt

SEQ ID NO: 75738 - DNA, 19 bp, Homo sapiens
  siRNA target sequence for CDC2 (NM_001786.2,971-989).
cactgaatcatccatattt

SEQ ID NO: 75739 - DNA, 19 bp, Homo sapiens
  siRNA target sequence for CDC2 (NM_001786.2,994-1012).
gatttggacaatcagatta

SEQ ID NO: 75740 - DNA, 19 bp, Homo sapiens
  siRNA target sequence for CDC2L5 (NM_003718.2,967-985).
caccgcagccggactaagt

SEQ ID NO: 75741 - DNA, 19 bp, Homo sapiens
  siRNA target sequence for CDC2L5 (NM_003718.2,1365-1383).
cagaagcccgtattcatct

SEQ ID NO: 75742 - DNA, 19 bp, Homo sapiens
  siRNA target sequence for CDC2L5 (NM_003718.2,1397-1415).
ctcgtagcaggcacagatt

SEQ ID NO: 75743 - DNA, 19 bp, Homo sapiens
  siRNA target sequence for CDC2L5 (NM_003718.2,1399-1417).
cgtagcaggcacagattgt

SEQ ID NO: 75744 - DNA, 19 bp, Homo sapiens
  siRNA target sequence for CDC2L5 (NM_003718.2,1425-1443).
cagaagtcgtcattctagt

SEQ ID NO: 75745 - DNA, 19 bp, Homo sapiens
  siRNA target sequence for CDC2L5 (NM_003718.2,1448-1466).
ctcctagcacactaactct

SEQ ID NO: 75746 - DNA, 19 bp, Homo sapiens
  siRNA target sequence for CDC2L5 (NM_003718.2,1472-1490).
gtagcctggcagctgaatt

SEQ ID NO: 75747 - DNA, 19 bp, Homo sapiens
  siRNA target sequence for CDC2L5 (NM_003718.2,1475-1493).
gcctggcagctgaattgaa

SEQ ID NO: 75748 - DNA, 19 bp, Homo sapiens
  siRNA target sequence for CDC2L5 (NM_003718.2,1623-1641).
ggggaacacggaaactagt

SEQ ID NO: 75749 - DNA, 19 bp, Homo sapiens
  siRNA target sequence for CDC2L5 (NM_003718.2,1643-1661).
ccagtgcatcacaaacaaa

SEQ ID NO: 75750 - DNA, 19 bp, Homo sapiens
  siRNA target sequence for CDC2L5 (NM_003718.2,1709-1727).
cctcaagtggtggaacttt

SEQ ID NO: 75751 - DNA, 19 bp, Homo sapiens
  siRNA target sequence for CDC2L5 (NM_003718.2,1754-1772).
cacctcttcaggtaacgaa

SEQ ID NO: 75752 - DNA, 19 bp, Homo sapiens
  siRNA target sequence for CDC2L5 (NM_003718.2,1854-1872).
ggaggaatcagtatctctt

SEQ ID NO: 75753 - DNA, 19 bp, Homo sapiens
  siRNA target sequence for CDC2L5 (NM_003718.2,1933-1951).
gctttagtcacctctacat

SEQ ID NO: 75754 - DNA, 19 bp, Homo sapiens
  siRNA target sequence for CDC2L5 (NM_003718.2,1973-1991).
ccatgctgcctgaagataa

SEQ ID NO: 75755 - DNA, 19 bp, Homo sapiens
  siRNA target sequence for CDC2L5 (NM_003718.2,1999-2017).
gatagcttacgaggaaata

SEQ ID NO: 75756 - DNA, 19 bp, Homo sapiens
  siRNA target sequence for CDC2L5 (NM_003718.2,2159-2177).
gtaaaaggaggcctaaaat

SEQ ID NO: 75757 - DNA, 19 bp, Homo sapiens
  siRNA target sequence for CDC2L5 (NM_003718.2,2186-2204).
ctcgctatggtgaaaccaa

SEQ ID NO: 75758 - DNA, 19 bp, Homo sapiens
  siRNA target sequence for CDC2L5 (NM_003718.2,2272-2290).
ggtacttacggacaagttt

SEQ ID NO: 75759 - DNA, 19 bp, Homo sapiens
  siRNA target sequence for CDC2L5 (NM_003718.2,2273-2291).
gtacttacggacaagttta

SEQ ID NO: 75760 - DNA, 19 bp, Homo sapiens
  siRNA target sequence for CDC2L5 (NM_003718.2,2276-2294).
cttacggacaagtttacaa

SEQ ID NO: 75761 - DNA, 19 bp, Homo sapiens
  siRNA target sequence for CDC2L5 (NM_003718.2,2315-2333).
gagaaatggtagccttaaa

SEQ ID NO: 75762 - DNA, 19 bp, Homo sapiens
  siRNA target sequence for CDC2L5 (NM_003718.2,2317-2335).
gaaatggtagccttaaaaa

SEQ ID NO: 75763 - DNA, 19 bp, Homo sapiens
  siRNA target sequence for CDC2L5 (NM_003718.2,2338-2356).
gtacgtctggataatgaaa

SEQ ID NO: 75764 - DNA, 19 bp, Homo sapiens
  siRNA target sequence for CDC2L5 (NM_003718.2,2375-2393).
cagcaattcgagaaattaa

SEQ ID NO: 75765 - DNA, 19 bp, Homo sapiens
  siRNA target sequence for CDC2L5 (NM_003718.2,2377-2395).
gcaattcgagaaattaaaa

SEQ ID NO: 75766 - DNA, 19 bp, Homo sapiens
  siRNA target sequence for CDC2L5 (NM_003718.2,2406-2424).
gcttacccatcagagtatt

SEQ ID NO: 75767 - DNA, 19 bp, Homo sapiens
  siRNA target sequence for CDC2L5 (NM_003718.2,2407-2425).
cttacccatcagagtatta

SEQ ID NO: 75768 - DNA, 19 bp, Homo sapiens
  siRNA target sequence for CDC2L5 (NM_003718.2,2411-2429).
cccatcagagtattatcaa

SEQ ID NO: 75769 - DNA, 19 bp, Homo sapiens
  siRNA target sequence for CDC2L5 (NM_003718.2,2416-2434).
cagagtattatcaatatga

SEQ ID NO: 75770 - DNA, 19 bp, Homo sapiens
  siRNA target sequence for CDC2L5 (NM_003718.2,2539-2557).
gaatcaggcttggttcatt

SEQ ID NO: 75771 - DNA, 19 bp, Homo sapiens
  siRNA target sequence for CDC2L5 (NM_003718.2,2543-2561).
caggcttggttcattttaa

SEQ ID NO: 75772 - DNA, 19 bp, Homo sapiens
  siRNA target sequence for CDC2L5 (NM_003718.2,2571-2589).
cataaagtcatttatgaga

SEQ ID NO: 75773 - DNA, 19 bp, Homo sapiens
  siRNA target sequence for CDC2L5 (NM_003718.2,2605-2623).
ctggattattgtcataaga

SEQ ID NO: 75774 - DNA, 19 bp, Homo sapiens
  siRNA target sequence for CDC2L5 (NM_003718.2,2615-2633).
gtcataagaagaacttttt

SEQ ID NO: 75775 - DNA, 19 bp, Homo sapiens
  siRNA target sequence for CDC2L5 (NM_003718.2,2641-2659).
gatattaaatgttccaata

SEQ ID NO: 75776 - DNA, 19 bp, Homo sapiens
  siRNA target sequence for CDC2L5 (NM_003718.2,2682-2700).
gataaaacttgcagacttt

SEQ ID NO: 75777 - DNA, 19 bp, Homo sapiens
  siRNA target sequence for CDC2L5 (NM_003718.2,2704-2722).
cttgctcgattgtatagct

SEQ ID NO: 75778 - DNA, 19 bp, Homo sapiens
  siRNA target sequence for CDC2L5 (NM_003718.2,2728-2746).
gaaagtcggccgtatacta

SEQ ID NO: 75779 - DNA, 19 bp, Homo sapiens
  siRNA target sequence for CDC2L5 (NM_003718.2,2732-2750).
gtcggccgtatactaacaa

SEQ ID NO: 75780 - DNA, 19 bp, Homo sapiens
  siRNA target sequence for CDC2L5 (NM_003718.2,2737-2755).
ccgtatactaacaaggtaa

SEQ ID NO: 75781 - DNA, 19 bp, Homo sapiens
  siRNA target sequence for CDC2L5 (NM_003718.2,2738-2756).
cgtatactaacaaggtaat

SEQ ID NO: 75782 - DNA, 19 bp, Homo sapiens
  siRNA target sequence for CDC2L5 (NM_003718.2,2739-2757).
gtatactaacaaggtaatt

SEQ ID NO: 75783 - DNA, 19 bp, Homo sapiens
  siRNA target sequence for CDC2L5 (NM_003718.2,2744-2762).
ctaacaaggtaattacttt

SEQ ID NO: 75784 - DNA, 19 bp, Homo sapiens
  siRNA target sequence for CDC2L5 (NM_003718.2,2837-2855).
gtatccttggcgaactctt

SEQ ID NO: 75785 - DNA, 19 bp, Homo sapiens
  siRNA target sequence for CDC2L5 (NM_003718.2,2846-2864).
gcgaactcttcactaaaaa

SEQ ID NO: 75786 - DNA, 19 bp, Homo sapiens
  siRNA target sequence for CDC2L5 (NM_003718.2,2851-2869).
ctcttcactaaaaaaccta

SEQ ID NO: 75787 - DNA, 19 bp, Homo sapiens
  siRNA target sequence for CDC2L5 (NM_003718.2,2867-2885).
ctatatttcaagcaaatca

SEQ ID NO: 75788 - DNA, 19 bp, Homo sapiens
  siRNA target sequence for CDC2L5 (NM_003718.2,2887-2905).
gaacttgcacaactagaat

SEQ ID NO: 75789 - DNA, 19 bp, Homo sapiens
  siRNA target sequence for CDC2L5 (NM_003718.2,2902-2920).
gaattaataagccgaatat

SEQ ID NO: 75790 - DNA, 19 bp, Homo sapiens
  siRNA target sequence for CDC2L5 (NM_003718.2,2994-3012).
gcaatatcgtcgaaagtta

SEQ ID NO: 75791 - DNA, 19 bp, Homo sapiens
  siRNA target sequence for CDC2L5 (NM_003718.2,2995-3013).
caatatcgtcgaaagttaa

SEQ ID NO: 75792 - DNA, 19 bp, Homo sapiens
  siRNA target sequence for CDC2L5 (NM_003718.2,3037-3055).
gcagctgcgctagacttat

SEQ ID NO: 75793 - DNA, 19 bp, Homo sapiens
  siRNA target sequence for CDC2L5 (NM_003718.2,3038-3056).
cagctgcgctagacttatt

SEQ ID NO: 75794 - DNA, 19 bp, Homo sapiens
  siRNA target sequence for CDC2L5 (NM_003718.2,3041-3059).
ctgcgctagacttatttga

SEQ ID NO: 75795 - DNA, 19 bp, Homo sapiens
  siRNA target sequence for CDC2L5 (NM_003718.2,3043-3061).
gcgctagacttatttgatt

SEQ ID NO: 75796 - DNA, 19 bp, Homo sapiens
  siRNA target sequence for CDC2L5 (NM_003718.2,3044-3062).
cgctagacttatttgatta

SEQ ID NO: 75797 - DNA, 19 bp, Homo sapiens
  siRNA target sequence for CDC2L5 (NM_003718.2,3130-3148).
gatgtggaaccctcaaaaa

SEQ ID NO: 75798 - DNA, 19 bp, Homo sapiens
  siRNA target sequence for CDC2L5 (NM_003718.2,3167-3185).
ctttatggcaagattgtca

SEQ ID NO: 75799 - DNA, 19 bp, Homo sapiens
  siRNA target sequence for CDC2L5 (NM_003718.2,3225-3243).
gggcatgactgatgatgtt

SEQ ID NO: 75800 - DNA, 19 bp, Homo sapiens
  siRNA target sequence for CDC2L5 (NM_003718.2,3376-3394).
ggccctggacagcacttaa

SEQ ID NO: 75801 - DNA, 19 bp, Homo sapiens
  siRNA target sequence for CDC2L5 (NM_003718.2,3401-3419).
gtgaattggcaattctact

SEQ ID NO: 75802 - DNA, 19 bp, Homo sapiens
  siRNA target sequence for CDC2L5 (NM_003718.2,3418-3436).
ctaaacctactacaatcta

SEQ ID NO: 75803 - DNA, 19 bp, Homo sapiens
  siRNA target sequence for CDC2L5 (NM_003718.2,3434-3452).
ctaaaacaagtgttaatat

SEQ ID NO: 75804 - DNA, 19 bp, Homo sapiens
  siRNA target sequence for CDC2L5 (NM_003718.2,3463-3481).
gtccaagtgttgaacatta

SEQ ID NO: 75805 - DNA, 19 bp, Homo sapiens
  siRNA target sequence for CDC2L5 (NM_003718.2,3469-3487).
gtgttgaacattaaggtaa

SEQ ID NO: 75806 - DNA, 19 bp, Homo sapiens
  siRNA target sequence for CDC2L5 (NM_003718.2,3495-3513).
gactcaacagcagctaaat

SEQ ID NO: 75807 - DNA, 19 bp, Homo sapiens
  siRNA target sequence for CDC2L5 (NM_003718.2,3663-3681).
ggctgtgcagagtgcattt

SEQ ID NO: 75808 - DNA, 19 bp, Homo sapiens
  siRNA target sequence for CDC2L5 (NM_003718.2,3726-3744).
gaaagatgtgctactagaa

SEQ ID NO: 75809 - DNA, 19 bp, Homo sapiens
  siRNA target sequence for CDC2L5 (NM_003718.2,3762-3780).
gggacatgaagcgtcatta

SEQ ID NO: 75810 - DNA, 19 bp, Homo sapiens
  siRNA target sequence for CDC2L5 (NM_003718.2,3764-3782).
gacatgaagcgtcattaca

SEQ ID NO: 75811 - DNA, 19 bp, Homo sapiens
  siRNA target sequence for CDC2L5 (NM_003718.2,3812-3830).
cggtgtcgggacaagatga

SEQ ID NO: 75812 - DNA, 19 bp, Homo sapiens
  siRNA target sequence for CDC2L5 (NM_003718.2,3878-3896).
cagaccggcctcgaattct

SEQ ID NO: 75813 - DNA, 19 bp, Homo sapiens
  siRNA target sequence for CDC2L5 (NM_003718.2,3955-3973).
ctagattatcggacagaaa

SEQ ID NO: 75814 - DNA, 19 bp, Homo sapiens
  siRNA target sequence for CDC2L5 (NM_003718.2,3992-4010).
ccagttcttcattaactga

SEQ ID NO: 75815 - DNA, 19 bp, Homo sapiens
  siRNA target sequence for CDC2L5 (NM_003718.2,4130-4148).
cagactacaaggacaactt

SEQ ID NO: 75816 - DNA, 19 bp, Homo sapiens
  siRNA target sequence for CDC2L5 (NM_003718.2,4169-4187).
ctgctccttatgttagcaa

SEQ ID NO: 75817 - DNA, 19 bp, Homo sapiens
  siRNA target sequence for CDC2L5 (NM_003718.2,4217-4235).
cactagaacgacgtagttt

SEQ ID NO: 75818 - DNA, 19 bp, Homo sapiens
  siRNA target sequence for CDC2L5 (NM_003718.2,4219-4237).
ctagaacgacgtagtttca

SEQ ID NO: 75819 - DNA, 19 bp, Homo sapiens
  siRNA target sequence for CDC2L5 (NM_003718.2,4225-4243).
cgacgtagtttcattggaa

SEQ ID NO: 75820 - DNA, 19 bp, Homo sapiens
  siRNA target sequence for CDC2L5 (NM_003718.2,4226-4244).
gacgtagtttcattggaaa

SEQ ID NO: 75821 - DNA, 19 bp, Homo sapiens
  siRNA target sequence for CDC2L5 (NM_003718.2,4228-4246).
cgtagtttcattggaaatt

SEQ ID NO: 75822 - DNA, 19 bp, Homo sapiens
  siRNA target sequence for CDC2L5 (NM_003718.2,4249-4267).
gatattcagtctttggata

SEQ ID NO: 75823 - DNA, 19 bp, Homo sapiens
  siRNA target sequence for CDC2L5 (NM_003718.2,4326-4344).
gtcatttcccagttcagta

SEQ ID NO: 75824 - DNA, 19 bp, Homo sapiens
  siRNA target sequence for CDC2L5 (NM_003718.2,4346-4364).
ctggatatggagacattta

SEQ ID NO: 75825 - DNA, 19 bp, Homo sapiens
  siRNA target sequence for CDC2L5 (NM_003718.2,4372-4390).
gctggtcccatgttgttta

SEQ ID NO: 75826 - DNA, 19 bp, Homo sapiens
  siRNA target sequence for CDC2L5 (NM_003718.2,4402-4420).
gaccatagatttgaatata

SEQ ID NO: 75827 - DNA, 19 bp, Homo sapiens
  siRNA target sequence for CDC2L5 (NM_003718.2,4495-4513).
gcaaagatgcacaactata

SEQ ID NO: 75828 - DNA, 19 bp, Homo sapiens
  siRNA target sequence for CDC2L5 (NM_003718.2,4595-4613).
ctggatattcacaaggata

SEQ ID NO: 75829 - DNA, 19 bp, Homo sapiens
  siRNA target sequence for CDC2L5 (NM_003718.2,4618-4636).
ggacatattagcacatcaa

SEQ ID NO: 75830 - DNA, 19 bp, Homo sapiens
  siRNA target sequence for CDC2L5 (NM_003718.2,4649-4667).
gaggcagagggttaccata

SEQ ID NO: 75831 - DNA, 19 bp, Homo sapiens
  siRNA target sequence for CDC42BPA (NM_003607.2,968-986).
cagttggagcagtttattt

SEQ ID NO: 75832 - DNA, 19 bp, Homo sapiens
  siRNA target sequence for CDC42BPA (NM_003607.2,1018-1036).
cttcagtgtggagacatta

SEQ ID NO: 75833 - DNA, 19 bp, Homo sapiens
  siRNA target sequence for CDC42BPA (NM_003607.2,1048-1066).
catctgcctttatgatgaa

SEQ ID NO: 75834 - DNA, 19 bp, Homo sapiens
  siRNA target sequence for CDC42BPA (NM_003607.2,1053-1071).
gcctttatgatgaatgcaa

SEQ ID NO: 75835 - DNA, 19 bp, Homo sapiens
  siRNA target sequence for CDC42BPA (NM_003607.2,1055-1073).
ctttatgatgaatgcaata

SEQ ID NO: 75836 - DNA, 19 bp, Homo sapiens
  siRNA target sequence for CDC42BPA (NM_003607.2,1069-1087).
caataattctccattgaga

SEQ ID NO: 75837 - DNA, 19 bp, Homo sapiens
  siRNA target sequence for CDC42BPA (NM_003607.2,1120-1138).
ggctaaaccatttacttct

SEQ ID NO: 75838 - DNA, 19 bp, Homo sapiens
  siRNA target sequence for CDC42BPA (NM_003607.2,1144-1162).
gaaacaaatgcgattacat

SEQ ID NO: 75839 - DNA, 19 bp, Homo sapiens
  siRNA target sequence for CDC42BPA (NM_003607.2,1189-1207).
gattggtcgaggagctttt

SEQ ID NO: 75840 - DNA, 19 bp, Homo sapiens
  siRNA target sequence for CDC42BPA (NM_003607.2,1209-1227).
gggaggttgctgtagtaaa

SEQ ID NO: 75841 - DNA, 19 bp, Homo sapiens
  siRNA target sequence for CDC42BPA (NM_003607.2,1210-1228).
ggaggttgctgtagtaaaa

SEQ ID NO: 75842 - DNA, 19 bp, Homo sapiens
  siRNA target sequence for CDC42BPA (NM_003607.2,1247-1265).
gtgtttgccatgaaaatat

SEQ ID NO: 75843 - DNA, 19 bp, Homo sapiens
  siRNA target sequence for CDC42BPA (NM_003607.2,1316-1334).
gaaagggatgtattagtga

SEQ ID NO: 75844 - DNA, 19 bp, Homo sapiens
  siRNA target sequence for CDC42BPA (NM_003607.2,1340-1358).
gacaataaatggattacaa

SEQ ID NO: 75845 - DNA, 19 bp, Homo sapiens
  siRNA target sequence for CDC42BPA (NM_003607.2,1375-1393).
ccaggatgacaataactta

SEQ ID NO: 75846 - DNA, 19 bp, Homo sapiens
  siRNA target sequence for CDC42BPA (NM_003607.2,1376-1394).
caggatgacaataacttat

SEQ ID NO: 75847 - DNA, 19 bp, Homo sapiens
  siRNA target sequence for CDC42BPA (NM_003607.2,1390-1408).
cttatacctggttatggat

SEQ ID NO: 75848 - DNA, 19 bp, Homo sapiens
  siRNA target sequence for CDC42BPA (NM_003607.2,1415-1433).
gttggtggggatttgctta

SEQ ID NO: 75849 - DNA, 19 bp, Homo sapiens
  siRNA target sequence for CDC42BPA (NM_003607.2,1454-1472).
gatagattgcctgaagata

SEQ ID NO: 75850 - DNA, 19 bp, Homo sapiens
  siRNA target sequence for CDC42BPA (NM_003607.2,1464-1482).
ctgaagatatggctagatt

SEQ ID NO: 75851 - DNA, 19 bp, Homo sapiens
  siRNA target sequence for CDC42BPA (NM_003607.2,1469-1487).
gatatggctagattttact

SEQ ID NO: 75852 - DNA, 19 bp, Homo sapiens
  siRNA target sequence for CDC42BPA (NM_003607.2,1589-1607).
cggttagcagattttggtt

SEQ ID NO: 75853 - DNA, 19 bp, Homo sapiens
  siRNA target sequence for CDC42BPA (NM_003607.2,1653-1671).
ctgtaggaactccagatta

SEQ ID NO: 75854 - DNA, 19 bp, Homo sapiens
  siRNA target sequence for CDC42BPA (NM_003607.2,1655-1673).
gtaggaactccagattata

SEQ ID NO: 75855 - DNA, 19 bp, Homo sapiens
  siRNA target sequence for CDC42BPA (NM_003607.2,1716-1734).
gatatggacctgaatgtga

SEQ ID NO: 75856 - DNA, 19 bp, Homo sapiens
  siRNA target sequence for CDC42BPA (NM_003607.2,1740-1758).
ggtctttgggggtctgtat

SEQ ID NO: 75857 - DNA, 19 bp, Homo sapiens
  siRNA target sequence for CDC42BPA (NM_003607.2,1743-1761).
ctttgggggtctgtatgta

SEQ ID NO: 75858 - DNA, 19 bp, Homo sapiens
  siRNA target sequence for CDC42BPA (NM_003607.2,1748-1766).
ggggtctgtatgtatgaaa

SEQ ID NO: 75859 - DNA, 19 bp, Homo sapiens
  siRNA target sequence for CDC42BPA (NM_003607.2,1749-1767).
gggtctgtatgtatgaaat

SEQ ID NO: 75860 - DNA, 19 bp, Homo sapiens
  siRNA target sequence for CDC42BPA (NM_003607.2,1873-1891).
gtctgaaaatgctaaggat

SEQ ID NO: 75861 - DNA, 19 bp, Homo sapiens
  siRNA target sequence for CDC42BPA (NM_003607.2,1892-1910).
cttattcgaaggctcattt

SEQ ID NO: 75862 - DNA, 19 bp, Homo sapiens
  siRNA target sequence for CDC42BPA (NM_003607.2,1925-1943).
cgacttggtcaaaatggaa

SEQ ID NO: 75863 - DNA, 19 bp, Homo sapiens
  siRNA target sequence for CDC42BPA (NM_003607.2,1999-2017).
gaactgtgaagcaccttat

SEQ ID NO: 75864 - DNA, 19 bp, Homo sapiens
  siRNA target sequence for CDC42BPA (NM_003607.2,2046-2064).
catcgaattttgatgtaga

SEQ ID NO: 75865 - DNA, 19 bp, Homo sapiens
  siRNA target sequence for CDC42BPA (NM_003607.2,2124-2142).
gccaccatctgccatttgt

SEQ ID NO: 75866 - DNA, 19 bp, Homo sapiens
  siRNA target sequence for CDC42BPA (NM_003607.2,2144-2162).
ggttttacatatactagta

SEQ ID NO: 75867 - DNA, 19 bp, Homo sapiens
  siRNA target sequence for CDC42BPA (NM_003607.2,2160-2178).
gtagctgtgtactttctga

SEQ ID NO: 75868 - DNA, 19 bp, Homo sapiens
  siRNA target sequence for CDC42BPA (NM_003607.2,2180-2198).
cggagctgtttaagagtta

SEQ ID NO: 75869 - DNA, 19 bp, Homo sapiens
  siRNA target sequence for CDC42BPA (NM_003607.2,2218-2236).
ggatcttgatgttaatgtt

SEQ ID NO: 75870 - DNA, 19 bp, Homo sapiens
  siRNA target sequence for CDC42BPA (NM_003607.2,2246-2264).
ctagacaacaacttagcaa

SEQ ID NO: 75871 - DNA, 19 bp, Homo sapiens
  siRNA target sequence for CDC42BPA (NM_003607.2,2257-2275).
cttagcaactgaagcttat

SEQ ID NO: 75872 - DNA, 19 bp, Homo sapiens
  siRNA target sequence for CDC42BPA (NM_003607.2,2261-2279).
gcaactgaagcttatgaaa

SEQ ID NO: 75873 - DNA, 19 bp, Homo sapiens
  siRNA target sequence for CDC42BPA (NM_003607.2,2292-2310).
gccttgagcaagaaaaact

SEQ ID NO: 75874 - DNA, 19 bp, Homo sapiens
  siRNA target sequence for CDC42BPA (NM_003607.2,2350-2368).
ccaagctctgcagtattca

SEQ ID NO: 75875 - DNA, 19 bp, Homo sapiens
  siRNA target sequence for CDC42BPA (NM_003607.2,2359-2377).
gcagtattcaactgttgat

SEQ ID NO: 75876 - DNA, 19 bp, Homo sapiens
  siRNA target sequence for CDC42BPA (NM_003607.2,2450-2468).
gtaacagaatcaagtcatt

SEQ ID NO: 75877 - DNA, 19 bp, Homo sapiens
  siRNA target sequence for CDC42BPA (NM_003607.2,2516-2534).
gatgcttttagacaaatca

SEQ ID NO: 75878 - DNA, 19 bp, Homo sapiens
  siRNA target sequence for CDC42BPA (NM_003607.2,2559-2577).
cgttacaacaagaaagaga

SEQ ID NO: 75879 - DNA, 19 bp, Homo sapiens
  siRNA target sequence for CDC42BPA (NM_003607.2,2600-2618).
caggctagtgagcgattaa

SEQ ID NO: 75880 - DNA, 19 bp, Homo sapiens
  siRNA target sequence for CDC42BPA (NM_003607.2,2613-2631).
gattaaaaaaccaatccaa

SEQ ID NO: 75881 - DNA, 19 bp, Homo sapiens
  siRNA target sequence for CDC42BPA (NM_003607.2,2689-2707).
caatgagcggctaacagaa

SEQ ID NO: 75882 - DNA, 19 bp, Homo sapiens
  siRNA target sequence for CDC42BPA (NM_003607.2,2736-2754).
gccatgtccgagataagga

SEQ ID NO: 75883 - DNA, 19 bp, Homo sapiens
  siRNA target sequence for CDC42BPA (NM_003607.2,2770-2788).
ggtgatgcaaaaagttgaa

SEQ ID NO: 75884 - DNA, 19 bp, Homo sapiens
  siRNA target sequence for CDC42BPA (NM_003607.2,2891-2909).
gaacagagtgagcactatt

SEQ ID NO: 75885 - DNA, 19 bp, Homo sapiens
  siRNA target sequence for CDC42BPA (NM_003607.2,2970-2988).
gagtatgcagcatagaaca

SEQ ID NO: 75886 - DNA, 19 bp, Homo sapiens
  siRNA target sequence for CDC42BPA (NM_003607.2,2987-3005).
catcagcaagagataacca

SEQ ID NO: 75887 - DNA, 19 bp, Homo sapiens
  siRNA target sequence for CDC42BPA (NM_003607.2,2992-3010).
gcaagagataaccaaacta

SEQ ID NO: 75888 - DNA, 19 bp, Homo sapiens
  siRNA target sequence for CDC42BPA (NM_003607.2,2993-3011).
caagagataaccaaactaa

SEQ ID NO: 75889 - DNA, 19 bp, Homo sapiens
  siRNA target sequence for CDC42BPA (NM_003607.2,2998-3016).
gataaccaaactaaagact

SEQ ID NO: 75890 - DNA, 19 bp, Homo sapiens
  siRNA target sequence for CDC42BPA (NM_003607.2,3028-3046).
gaaaagtatcttttatgaa

SEQ ID NO: 75891 - DNA, 19 bp, Homo sapiens
  siRNA target sequence for CDC42BPA (NM_003607.2,3127-3145).
gcaacttgctctcaacaaa

SEQ ID NO: 75892 - DNA, 19 bp, Homo sapiens
  siRNA target sequence for CDC42BPA (NM_003607.2,3137-3155).
ctcaacaaagaaattatga

SEQ ID NO: 75893 - DNA, 19 bp, Homo sapiens
  siRNA target sequence for CDC42BPA (NM_003607.2,3277-3295).
gctgacgagtgaacttgat

SEQ ID NO: 75894 - DNA, 19 bp, Homo sapiens
  siRNA target sequence for CDC42BPA (NM_003607.2,3278-3296).
ctgacgagtgaacttgata

SEQ ID NO: 75895 - DNA, 19 bp, Homo sapiens
  siRNA target sequence for CDC42BPA (NM_003607.2,3290-3308).
cttgataagcttactactt

SEQ ID NO: 75896 - DNA, 19 bp, Homo sapiens
  siRNA target sequence for CDC42BPA (NM_003607.2,3293-3311).
gataagcttactactttgt

SEQ ID NO: 75897 - DNA, 19 bp, Homo sapiens
  siRNA target sequence for CDC42BPA (NM_003607.2,3310-3328).
gtatgagaacttaagtata

SEQ ID NO: 75898 - DNA, 19 bp, Homo sapiens
  siRNA target sequence for CDC42BPA (NM_003607.2,3340-3358).
gttagaagaagaggttaaa

SEQ ID NO: 75899 - DNA, 19 bp, Homo sapiens
  siRNA target sequence for CDC42BPA (NM_003607.2,3362-3380).
ctagcagacaagaaagaat

SEQ ID NO: 75900 - DNA, 19 bp, Homo sapiens
  siRNA target sequence for CDC42BPA (NM_003607.2,3419-3437).
cagtgggtcagcgatgaaa

SEQ ID NO: 75901 - DNA, 19 bp, Homo sapiens
  siRNA target sequence for CDC42BPA (NM_003607.2,3423-3441).
gggtcagcgatgaaaagga

SEQ ID NO: 75902 - DNA, 19 bp, Homo sapiens
  siRNA target sequence for CDC42BPA (NM_003607.2,3424-3442).
ggtcagcgatgaaaaggat

SEQ ID NO: 75903 - DNA, 19 bp, Homo sapiens
  siRNA target sequence for CDC42BPA (NM_003607.2,3439-3457).
ggatgcacgagggtatctt

SEQ ID NO: 75904 - DNA, 19 bp, Homo sapiens
  siRNA target sequence for CDC42BPA (NM_003607.2,3458-3476).
caggccttagcttctaaaa

SEQ ID NO: 75905 - DNA, 19 bp, Homo sapiens
  siRNA target sequence for CDC42BPA (NM_003607.2,3461-3479).
gccttagcttctaaaatga

SEQ ID NO: 75906 - DNA, 19 bp, Homo sapiens
  siRNA target sequence for CDC42BPA (NM_003607.2,3463-3481).
cttagcttctaaaatgact

SEQ ID NO: 75907 - DNA, 19 bp, Homo sapiens
  siRNA target sequence for CDC42BPA (NM_003607.2,3491-3509).
gaggcattaagaaattcca

SEQ ID NO: 75908 - DNA, 19 bp, Homo sapiens
  siRNA target sequence for CDC42BPA (NM_003607.2,3515-3533).
ggtacacgagcaacagata

SEQ ID NO: 75909 - DNA, 19 bp, Homo sapiens
  siRNA target sequence for CDC42BPA (NM_003607.2,3516-3534).
gtacacgagcaacagatat

SEQ ID NO: 75910 - DNA, 19 bp, Homo sapiens
  siRNA target sequence for CDC42BPA (NM_003607.2,3552-3570).
gttttgcgaaactggatat

SEQ ID NO: 75911 - DNA, 19 bp, Homo sapiens
  siRNA target sequence for CDC42BPA (NM_003607.2,3650-3668).
gttaaagcatctaatatca

SEQ ID NO: 75912 - DNA, 19 bp, Homo sapiens
  siRNA target sequence for CDC42BPA (NM_003607.2,3657-3675).
catctaatatcataacaga

SEQ ID NO: 75913 - DNA, 19 bp, Homo sapiens
  siRNA target sequence for CDC42BPA (NM_003607.2,3674-3692).
gaatgtaaactaaaagatt

SEQ ID NO: 75914 - DNA, 19 bp, Homo sapiens
  siRNA target sequence for CDC42BPA (NM_003607.2,3785-3803).
gactcacagcattctttct

SEQ ID NO: 75915 - DNA, 19 bp, Homo sapiens
  siRNA target sequence for CDC42BPA (NM_003607.2,3825-3843).
ccgatgctctggatcaatt

SEQ ID NO: 75916 - DNA, 19 bp, Homo sapiens
  siRNA target sequence for CDC42BPA (NM_003607.2,3826-3844).
cgatgctctggatcaattt

SEQ ID NO: 75917 - DNA, 19 bp, Homo sapiens
  siRNA target sequence for CDC42BPA (NM_003607.2,3872-3890).
gttcacacaccaaccttaa

SEQ ID NO: 75918 - DNA, 19 bp, Homo sapiens
  siRNA target sequence for CDC42BPA (NM_003607.2,3875-3893).
cacacaccaaccttaagga

SEQ ID NO: 75919 - DNA, 19 bp, Homo sapiens
  siRNA target sequence for CDC42BPA (NM_003607.2,3932-3950).
cgcaagactcaccagtttt

SEQ ID NO: 75920 - DNA, 19 bp, Homo sapiens
  siRNA target sequence for CDC42BPA (NM_003607.2,3934-3952).
caagactcaccagtttttt

SEQ ID NO: 75921 - DNA, 19 bp, Homo sapiens
  siRNA target sequence for CDC42BPA (NM_003607.2,3997-4015).
cttgatggtgggtttaata

SEQ ID NO: 75922 - DNA, 19 bp, Homo sapiens
  siRNA target sequence for CDC42BPA (NM_003607.2,4123-4141).
gggtatagatcctcagaaa

SEQ ID NO: 75923 - DNA, 19 bp, Homo sapiens
  siRNA target sequence for CDC42BPA (NM_003607.2,4143-4161).
gaataggaacagcatatga

SEQ ID NO: 75924 - DNA, 19 bp, Homo sapiens
  siRNA target sequence for CDC42BPA (NM_003607.2,4163-4181).
ggtcatgtcaggattccta

SEQ ID NO: 75925 - DNA, 19 bp, Homo sapiens
  siRNA target sequence for CDC42BPA (NM_003607.2,4164-4182).
gtcatgtcaggattcctaa

SEQ ID NO: 75926 - DNA, 19 bp, Homo sapiens
  siRNA target sequence for CDC42BPA (NM_003607.2,4275-4293).
ctcagcccagtgttgtcat

SEQ ID NO: 75927 - DNA, 19 bp, Homo sapiens
  siRNA target sequence for CDC42BPA (NM_003607.2,4279-4297).
gcccagtgttgtcattagt

SEQ ID NO: 75928 - DNA, 19 bp, Homo sapiens
  siRNA target sequence for CDC42BPA (NM_003607.2,4281-4299).
ccagtgttgtcattagtca

SEQ ID NO: 75929 - DNA, 19 bp, Homo sapiens
  siRNA target sequence for CDC42BPA (NM_003607.2,4360-4378).
ccatgcaagtcggaaagat

SEQ ID NO: 75930 - DNA, 19 bp, Homo sapiens
  siRNA target sequence for CDC42BPA (NM_003607.2,4372-4390).
gaaagatataccctgtata

SEQ ID NO: 75931 - DNA, 19 bp, Homo sapiens
  siRNA target sequence for CDC42BPA (NM_003607.2,4412-4430).
ctctcagcatctaataaca

SEQ ID NO: 75932 - DNA, 19 bp, Homo sapiens
  siRNA target sequence for CDC42BPA (NM_003607.2,4481-4499).
gtgggagtgctgagtgaat

SEQ ID NO: 75933 - DNA, 19 bp, Homo sapiens
  siRNA target sequence for CDC42BPA (NM_003607.2,4492-4510).
gagtgaattgcacaagatt

SEQ ID NO: 75934 - DNA, 19 bp, Homo sapiens
  siRNA target sequence for CDC42BPA (NM_003607.2,4530-4548).
gagaccgctcagtctatgt

SEQ ID NO: 75935 - DNA, 19 bp, Homo sapiens
  siRNA target sequence for CDC42BPA (NM_003607.2,4569-4587).
gcactctacccctcattaa

SEQ ID NO: 75936 - DNA, 19 bp, Homo sapiens
  siRNA target sequence for CDC42BPA (NM_003607.2,4570-4588).
cactctacccctcattaaa

SEQ ID NO: 75937 - DNA, 19 bp, Homo sapiens
  siRNA target sequence for CDC42BPA (NM_003607.2,4594-4612).
ccaggcagccgcaatcata

SEQ ID NO: 75938 - DNA, 19 bp, Homo sapiens
  siRNA target sequence for CDC42BPA (NM_003607.2,4597-4615).
ggcagccgcaatcatagat

SEQ ID NO: 75939 - DNA, 19 bp, Homo sapiens
  siRNA target sequence for CDC42BPA (NM_003607.2,4599-4617).
cagccgcaatcatagatca

SEQ ID NO: 75940 - DNA, 19 bp, Homo sapiens
  siRNA target sequence for CDC42BPA (NM_003607.2,4602-4620).
ccgcaatcatagatcatga

SEQ ID NO: 75941 - DNA, 19 bp, Homo sapiens
  siRNA target sequence for CDC42BPA (NM_003607.2,4603-4621).
cgcaatcatagatcatgaa

SEQ ID NO: 75942 - DNA, 19 bp, Homo sapiens
  siRNA target sequence for CDC42BPA (NM_003607.2,4750-4768).
gatctcaggacgaaatcgt

SEQ ID NO: 75943 - DNA, 19 bp, Homo sapiens
  siRNA target sequence for CDC42BPA (NM_003607.2,4769-4787).
catgtacgactttttccta

SEQ ID NO: 75944 - DNA, 19 bp, Homo sapiens
  siRNA target sequence for CDC42BPA (NM_003607.2,4802-4820).
gggcgagagaccgattttt

SEQ ID NO: 75945 - DNA, 19 bp, Homo sapiens
  siRNA target sequence for CDC42BPA (NM_003607.2,4803-4821).
ggcgagagaccgattttta

SEQ ID NO: 75946 - DNA, 19 bp, Homo sapiens
  siRNA target sequence for CDC42BPA (NM_003607.2,4805-4823).
cgagagaccgatttttaca

SEQ ID NO: 75947 - DNA, 19 bp, Homo sapiens
  siRNA target sequence for CDC42BPA (NM_003607.2,4806-4824).
gagagaccgatttttacaa

SEQ ID NO: 75948 - DNA, 19 bp, Homo sapiens
  siRNA target sequence for CDC42BPA (NM_003607.2,4832-4850).
gaaactaaagggtgtcaaa

SEQ ID NO: 75949 - DNA, 19 bp, Homo sapiens
  siRNA target sequence for CDC42BPA (NM_003607.2,4841-4859).
gggtgtcaaaccgtaactt

SEQ ID NO: 75950 - DNA, 19 bp, Homo sapiens
  siRNA target sequence for CDC42BPA (NM_003607.2,4911-4929).
ggcaggtcctctgttatga

SEQ ID NO: 75951 - DNA, 19 bp, Homo sapiens
  siRNA target sequence for CDC42BPA (NM_003607.2,4916-4934).
gtcctctgttatgaactat

SEQ ID NO: 75952 - DNA, 19 bp, Homo sapiens
  siRNA target sequence for CDC42BPA (NM_003607.2,4918-4936).
cctctgttatgaactattt

SEQ ID NO: 75953 - DNA, 19 bp, Homo sapiens
  siRNA target sequence for CDC42BPA (NM_003607.2,4942-4960).
caagacccgtcacagaaaa

SEQ ID NO: 75954 - DNA, 19 bp, Homo sapiens
  siRNA target sequence for CDC42BPA (NM_003607.2,5001-5019).
caatcttcagtgaacaact

SEQ ID NO: 75955 - DNA, 19 bp, Homo sapiens
  siRNA target sequence for CDC42BPA (NM_003607.2,5032-5050).
ccagtcaggatttctaaga

SEQ ID NO: 75956 - DNA, 19 bp, Homo sapiens
  siRNA target sequence for CDC42BPA (NM_003607.2,5080-5098).
cagtatgctccattcaaat

SEQ ID NO: 75957 - DNA, 19 bp, Homo sapiens
  siRNA target sequence for CDC42BPA (NM_003607.2,5082-5100).
gtatgctccattcaaatga

SEQ ID NO: 75958 - DNA, 19 bp, Homo sapiens
  siRNA target sequence for CDC42BPA (NM_003607.2,5099-5117).
gaccatacactatcattta

SEQ ID NO: 75959 - DNA, 19 bp, Homo sapiens
  siRNA target sequence for CDC42BPA (NM_003607.2,5139-5157).
ctatctgcgcagttgagat

SEQ ID NO: 75960 - DNA, 19 bp, Homo sapiens
  siRNA target sequence for CDC42BPA (NM_003607.2,5212-5230).
ccagggccgaagatctaga

SEQ ID NO: 75961 - DNA, 19 bp, Homo sapiens
  siRNA target sequence for CDC42BPA (NM_003607.2,5215-5233).
gggccgaagatctagacaa

SEQ ID NO: 75962 - DNA, 19 bp, Homo sapiens
  siRNA target sequence for CDC42BPA (NM_003607.2,5242-5260).
gatgtggccagcaaatcct

SEQ ID NO: 75963 - DNA, 19 bp, Homo sapiens
  siRNA target sequence for CDC42BPA (NM_003607.2,5271-5289).
gttacaatgcaccatatct

SEQ ID NO: 75964 - DNA, 19 bp, Homo sapiens
  siRNA target sequence for CDC42BPA (NM_003607.2,5383-5401).
caatgaaggatcattaaat

SEQ ID NO: 75965 - DNA, 19 bp, Homo sapiens
  siRNA target sequence for CDC42BPA (NM_003607.2,5387-5405).
gaaggatcattaaatcttt

SEQ ID NO: 75966 - DNA, 19 bp, Homo sapiens
  siRNA target sequence for CDC42BPA (NM_003607.2,5408-5426).
gggttggagaccattagat

SEQ ID NO: 75967 - DNA, 19 bp, Homo sapiens
  siRNA target sequence for CDC42BPA (NM_003607.2,5409-5427).
ggttggagaccattagatt

SEQ ID NO: 75968 - DNA, 19 bp, Homo sapiens
  siRNA target sequence for CDC42BPA (NM_003607.2,5410-5428).
gttggagaccattagatta

SEQ ID NO: 75969 - DNA, 19 bp, Homo sapiens
  siRNA target sequence for CDC42BPA (NM_003607.2,5467-5485).
ggtagtacctgaaacatca

SEQ ID NO: 75970 - DNA, 19 bp, Homo sapiens
  siRNA target sequence for CDC42BPA (NM_003607.2,5486-5504).
gataatagtcggaaacaaa

SEQ ID NO: 75971 - DNA, 19 bp, Homo sapiens
  siRNA target sequence for CDC42BPA (NM_003607.2,5501-5519).
caaatggttagaaacatta

SEQ ID NO: 75972 - DNA, 19 bp, Homo sapiens
  siRNA target sequence for CDC42BPA (NM_003607.2,5708-5726).
caggaaagtcggacagtat

SEQ ID NO: 75973 - DNA, 19 bp, Homo sapiens
  siRNA target sequence for CDC42BPA (NM_003607.2,5732-5750).
ggctcagtcagtattccat

SEQ ID NO: 75974 - DNA, 19 bp, Homo sapiens
  siRNA target sequence for CDC42BPA (NM_003607.2,5738-5756).
gtcagtattccatctatca

SEQ ID NO: 75975 - DNA, 19 bp, Homo sapiens
  siRNA target sequence for CDC42BPA (NM_003607.2,5926-5944).
catggaccaaggaagtgat

SEQ ID NO: 75976 - DNA, 19 bp, Homo sapiens
  siRNA target sequence for CDC42BPA (NM_003607.2,5946-5964).
ccccagcgagggactttga

SEQ ID NO: 75977 - DNA, 19 bp, Homo sapiens
  siRNA target sequence for CDC42BPA (NM_003607.2,6035-6053).
ccagcttcaccccgaaaaa

SEQ ID NO: 75978 - DNA, 19 bp, Homo sapiens
  siRNA target sequence for CDC42BPB (NM_006035.2,462-480).
gggctaaaccatttacaca

SEQ ID NO: 75979 - DNA, 19 bp, Homo sapiens
  siRNA target sequence for CDC42BPB (NM_006035.2,574-592).
gaagaatactgaacgaatt

SEQ ID NO: 75980 - DNA, 19 bp, Homo sapiens
  siRNA target sequence for CDC42BPB (NM_006035.2,797-815).
gacaagcttccggaagata

SEQ ID NO: 75981 - DNA, 19 bp, Homo sapiens
  siRNA target sequence for CDC42BPB (NM_006035.2,812-830).
gatatggcgaggttctaca

SEQ ID NO: 75982 - DNA, 19 bp, Homo sapiens
  siRNA target sequence for CDC42BPB (NM_006035.2,1207-1225).
cacggatgtatctgaagaa

SEQ ID NO: 75983 - DNA, 19 bp, Homo sapiens
  siRNA target sequence for CDC42BPB (NM_006035.2,1309-1327).
gttttttgaaggtctaaat

SEQ ID NO: 75984 - DNA, 19 bp, Homo sapiens
  siRNA target sequence for CDC42BPB (NM_006035.2,1409-1427).
gacgacgtgctgagaaaca

SEQ ID NO: 75985 - DNA, 19 bp, Homo sapiens
  siRNA target sequence for CDC42BPB (NM_006035.2,1420-1438).
gagaaacacggaaatatta

SEQ ID NO: 75986 - DNA, 19 bp, Homo sapiens
  siRNA target sequence for CDC42BPB (NM_006035.2,1472-1490).
catttgccattcattggtt

SEQ ID NO: 75987 - DNA, 19 bp, Homo sapiens
  siRNA target sequence for CDC42BPB (NM_006035.2,1526-1544).
ggctctctgaagagcataa

SEQ ID NO: 75988 - DNA, 19 bp, Homo sapiens
  siRNA target sequence for CDC42BPB (NM_006035.2,1547-1565).
cagtccaacacattaacca

SEQ ID NO: 75989 - DNA, 19 bp, Homo sapiens
  siRNA target sequence for CDC42BPB (NM_006035.2,1943-1961).
gcctcagagcggttgaaat

SEQ ID NO: 75990 - DNA, 19 bp, Homo sapiens
  siRNA target sequence for CDC42BPB (NM_006035.2,2409-2427).
cccatgtgctagaagtgaa

SEQ ID NO: 75991 - DNA, 19 bp, Homo sapiens
  siRNA target sequence for CDC42BPB (NM_006035.2,2437-2455).
gaaggaggtgcatgattca

SEQ ID NO: 75992 - DNA, 19 bp, Homo sapiens
  siRNA target sequence for CDC42BPB (NM_006035.2,2545-2563).
ggaggcagtaggtacaata

SEQ ID NO: 75993 - DNA, 19 bp, Homo sapiens
  siRNA target sequence for CDC42BPB (NM_006035.2,2546-2564).
gaggcagtaggtacaataa

SEQ ID NO: 75994 - DNA, 19 bp, Homo sapiens
  siRNA target sequence for CDC42BPB (NM_006035.2,2548-2566).
ggcagtaggtacaataaaa

SEQ ID NO: 75995 - DNA, 19 bp, Homo sapiens
  siRNA target sequence for CDC42BPB (NM_006035.2,2559-2577).
caataaaagataaatacga

SEQ ID NO: 75996 - DNA, 19 bp, Homo sapiens
  siRNA target sequence for CDC42BPB (NM_006035.2,2735-2753).
gctcagattgcggaaatca

SEQ ID NO: 75997 - DNA, 19 bp, Homo sapiens
  siRNA target sequence for CDC42BPB (NM_006035.2,2736-2754).
ctcagattgcggaaatcat

SEQ ID NO: 75998 - DNA, 19 bp, Homo sapiens
  siRNA target sequence for CDC42BPB (NM_006035.2,2761-2779).
ggtcagtgacgagaaagat

SEQ ID NO: 75999 - DNA, 19 bp, Homo sapiens
  siRNA target sequence for CDC42BPB (NM_006035.2,3102-3120).
cagatactgggctcaaact

SEQ ID NO: 76000 - DNA, 19 bp, Homo sapiens
  siRNA target sequence for CDC42BPB (NM_006035.2,3111-3129).
ggctcaaacttccagattt

SEQ ID NO: 76001 - DNA, 19 bp, Homo sapiens
  siRNA target sequence for CDC42BPB (NM_006035.2,3173-3191).
catgacctgacatttagaa

SEQ ID NO: 76002 - DNA, 19 bp, Homo sapiens
  siRNA target sequence for CDC42BPB (NM_006035.2,3454-3472).
ctgcgaggtgtgttccttt

SEQ ID NO: 76003 - DNA, 19 bp, Homo sapiens
  siRNA target sequence for CDC42BPB (NM_006035.2,3568-3586).
catcggaacagcctacaaa

SEQ ID NO: 76004 - DNA, 19 bp, Homo sapiens
  siRNA target sequence for CDC42BPB (NM_006035.2,3697-3715).
cacccagcctggtgtcatt

SEQ ID NO: 76005 - DNA, 19 bp, Homo sapiens
  siRNA target sequence for CDC42BPB (NM_006035.2,3734-3752).
ctcagagatgacgagtttt

SEQ ID NO: 76006 - DNA, 19 bp, Homo sapiens
  siRNA target sequence for CDC42BPB (NM_006035.2,3820-3838).
ggtgacggcctctctctta

SEQ ID NO: 76007 - DNA, 19 bp, Homo sapiens
  siRNA target sequence for CDC42BPB (NM_006035.2,3898-3916).
gaagtgggttgggattcta

SEQ ID NO: 76008 - DNA, 19 bp, Homo sapiens
  siRNA target sequence for CDC42BPB (NM_006035.2,3901-3919).
gtgggttgggattctagaa

SEQ ID NO: 76009 - DNA, 19 bp, Homo sapiens
  siRNA target sequence for CDC42BPB (NM_006035.2,3925-3943).
ccagtccatccttcataaa

SEQ ID NO: 76010 - DNA, 19 bp, Homo sapiens
  siRNA target sequence for CDC42BPB (NM_006035.2,3993-4011).
gctcgctgcctctcatcaa

SEQ ID NO: 76011 - DNA, 19 bp, Homo sapiens
  siRNA target sequence for CDC42BPB (NM_006035.2,4109-4127).
cgtgccgctgactgtaaga

SEQ ID NO: 76012 - DNA, 19 bp, Homo sapiens
  siRNA target sequence for CDC42BPB (NM_006035.2,4110-4128).
gtgccgctgactgtaagaa

SEQ ID NO: 76013 - DNA, 19 bp, Homo sapiens
  siRNA target sequence for CDC42BPB (NM_006035.2,4152-4170).
ccagggagaagatcgtaat

SEQ ID NO: 76014 - DNA, 19 bp, Homo sapiens
  siRNA target sequence for CDC42BPB (NM_006035.2,4155-4173).
gggagaagatcgtaatcct

SEQ ID NO: 76015 - DNA, 19 bp, Homo sapiens
  siRNA target sequence for CDC42BPB (NM_006035.2,4229-4247).
gcggaaggcagctttgaca

SEQ ID NO: 76016 - DNA, 19 bp, Homo sapiens
  siRNA target sequence for CDC42BPB (NM_006035.2,4230-4248).
cggaaggcagctttgacat

SEQ ID NO: 76017 - DNA, 19 bp, Homo sapiens
  siRNA target sequence for CDC42BPB (NM_006035.2,4249-4267).
caagcttccggaaaccaaa

SEQ ID NO: 76018 - DNA, 19 bp, Homo sapiens
  siRNA target sequence for CDC42BPB (NM_006035.2,4340-4358).
ctgatcctttgctatgaga

SEQ ID NO: 76019 - DNA, 19 bp, Homo sapiens
  siRNA target sequence for CDC42BPB (NM_006035.2,4368-4386).
cgaagccattccacagaaa

SEQ ID NO: 76020 - DNA, 19 bp, Homo sapiens
  siRNA target sequence for CDC42BPB (NM_006035.2,4501-4519).
gcctctaaacctggtaaat

SEQ ID NO: 76021 - DNA, 19 bp, Homo sapiens
  siRNA target sequence for CDC42BPB (NM_006035.2,4841-4859).
gagcctccacgcttgatct

SEQ ID NO: 76022 - DNA, 19 bp, Homo sapiens
  siRNA target sequence for CDC42BPB (NM_006035.2,4847-4865).
ccacgcttgatctacttca

SEQ ID NO: 76023 - DNA, 19 bp, Homo sapiens
  siRNA target sequence for CDC42BPB (NM_006035.2,4848-4866).
cacgcttgatctacttcaa

SEQ ID NO: 76024 - DNA, 19 bp, Homo sapiens
  siRNA target sequence for CDC42BPB (NM_006035.2,4991-5009).
cagaggcgagagatgctta

SEQ ID NO: 76025 - DNA, 19 bp, Homo sapiens
  siRNA target sequence for CDC42BPB (NM_006035.2,5025-5043).
gatccaaaatgatatccaa

SEQ ID NO: 76026 - DNA, 19 bp, Homo sapiens
  siRNA target sequence for CDC42BPB (NM_006035.2,5315-5333).
cactcaactccatcgaata

SEQ ID NO: 76027 - DNA, 19 bp, Homo sapiens
  siRNA target sequence for CDC6 (NM_001254.2,229-247).
caggcacaggctacaatca

SEQ ID NO: 76028 - DNA, 19 bp, Homo sapiens
  siRNA target sequence for CDC6 (NM_001254.2,232-250).
gcacaggctacaatcagtt

SEQ ID NO: 76029 - DNA, 19 bp, Homo sapiens
  siRNA target sequence for CDC6 (NM_001254.2,233-251).
cacaggctacaatcagttt

SEQ ID NO: 76030 - DNA, 19 bp, Homo sapiens
  siRNA target sequence for CDC6 (NM_001254.2,267-285).
gtctcgggcattgaacaaa

SEQ ID NO: 76031 - DNA, 19 bp, Homo sapiens
  siRNA target sequence for CDC6 (NM_001254.2,271-289).
cgggcattgaacaaagcta

SEQ ID NO: 76032 - DNA, 19 bp, Homo sapiens
  siRNA target sequence for CDC6 (NM_001254.2,272-290).
gggcattgaacaaagctaa

SEQ ID NO: 76033 - DNA, 19 bp, Homo sapiens
  siRNA target sequence for CDC6 (NM_001254.2,274-292).
gcattgaacaaagctaaaa

SEQ ID NO: 76034 - DNA, 19 bp, Homo sapiens
  siRNA target sequence for CDC6 (NM_001254.2,294-312).
ctccagtgatgccaaacta

SEQ ID NO: 76035 - DNA, 19 bp, Homo sapiens
  siRNA target sequence for CDC6 (NM_001254.2,338-356).
cctgttctcctcgtgtaaa

SEQ ID NO: 76036 - DNA, 19 bp, Homo sapiens
  siRNA target sequence for CDC6 (NM_001254.2,339-357).
ctgttctcctcgtgtaaaa

SEQ ID NO: 76037 - DNA, 19 bp, Homo sapiens
  siRNA target sequence for CDC6 (NM_001254.2,385-403).
ctgggcgatgacaacctat

SEQ ID NO: 76038 - DNA, 19 bp, Homo sapiens
  siRNA target sequence for CDC6 (NM_001254.2,389-407).
gcgatgacaacctatgcaa

SEQ ID NO: 76039 - DNA, 19 bp, Homo sapiens
  siRNA target sequence for CDC6 (NM_001254.2,460-478).
ggtccccctcactcacata

SEQ ID NO: 76040 - DNA, 19 bp, Homo sapiens
  siRNA target sequence for CDC6 (NM_001254.2,467-485).
ctcactcacatacacttaa

SEQ ID NO: 76041 - DNA, 19 bp, Homo sapiens
  siRNA target sequence for CDC6 (NM_001254.2,479-497).
cacttaagggacgaagatt

SEQ ID NO: 76042 - DNA, 19 bp, Homo sapiens
  siRNA target sequence for CDC6 (NM_001254.2,486-504).
gggacgaagattggtattt

SEQ ID NO: 76043 - DNA, 19 bp, Homo sapiens
  siRNA target sequence for CDC6 (NM_001254.2,488-506).
gacgaagattggtatttga

SEQ ID NO: 76044 - DNA, 19 bp, Homo sapiens
  siRNA target sequence for CDC6 (NM_001254.2,525-543).
gtctcctagcaaaagagaa

SEQ ID NO: 76045 - DNA, 19 bp, Homo sapiens
  siRNA target sequence for CDC6 (NM_001254.2,548-566).
ccaaagttcaccaaaacaa

SEQ ID NO: 76046 - DNA, 19 bp, Homo sapiens
  siRNA target sequence for CDC6 (NM_001254.2,564-582).
caaaatactttcttcagtt

SEQ ID NO: 76047 - DNA, 19 bp, Homo sapiens
  siRNA target sequence for CDC6 (NM_001254.2,641-659).
ctgcatgtgtgagactatt

SEQ ID NO: 76048 - DNA, 19 bp, Homo sapiens
  siRNA target sequence for CDC6 (NM_001254.2,644-662).
catgtgtgagactattcaa

SEQ ID NO: 76049 - DNA, 19 bp, Homo sapiens
  siRNA target sequence for CDC6 (NM_001254.2,893-911).
ctatcatgctgaattgcat

SEQ ID NO: 76050 - DNA, 19 bp, Homo sapiens
  siRNA target sequence for CDC6 (NM_001254.2,1039-1057).
cccatgattgtgttggtat

SEQ ID NO: 76051 - DNA, 19 bp, Homo sapiens
  siRNA target sequence for CDC6 (NM_001254.2,1087-1105).
ggccaggatgtattgtaca

SEQ ID NO: 76052 - DNA, 19 bp, Homo sapiens
  siRNA target sequence for CDC6 (NM_001254.2,1143-1161).
ggtgctgattggtattgct

SEQ ID NO: 76053 - DNA, 19 bp, Homo sapiens
  siRNA target sequence for CDC6 (NM_001254.2,1144-1162).
gtgctgattggtattgcta

SEQ ID NO: 76054 - DNA, 19 bp, Homo sapiens
  siRNA target sequence for CDC6 (NM_001254.2,1147-1165).
ctgattggtattgctaata

SEQ ID NO: 76055 - DNA, 19 bp, Homo sapiens
  siRNA target sequence for CDC6 (NM_001254.2,1167-1185).
cctggatctcacagataga

SEQ ID NO: 76056 - DNA, 19 bp, Homo sapiens
  siRNA target sequence for CDC6 (NM_001254.2,1217-1235).
gtaagccacagctgttgaa

SEQ ID NO: 76057 - DNA, 19 bp, Homo sapiens
  siRNA target sequence for CDC6 (NM_001254.2,1253-1271).
gaaatcagatagtcactat

SEQ ID NO: 76058 - DNA, 19 bp, Homo sapiens
  siRNA target sequence for CDC6 (NM_001254.2,1260-1278).
gatagtcactattttgcaa

SEQ ID NO: 76059 - DNA, 19 bp, Homo sapiens
  siRNA target sequence for CDC6 (NM_001254.2,1314-1332).
ggacaatgctgcagttcaa

SEQ ID NO: 76060 - DNA, 19 bp, Homo sapiens
  siRNA target sequence for CDC6 (NM_001254.2,1372-1390).
cgcaaagcactggatgttt

SEQ ID NO: 76061 - DNA, 19 bp, Homo sapiens
  siRNA target sequence for CDC6 (NM_001254.2,1392-1410).
caggagagctattgaaatt

SEQ ID NO: 76062 - DNA, 19 bp, Homo sapiens
  siRNA target sequence for CDC6 (NM_001254.2,1395-1413).
gagagctattgaaattgta

SEQ ID NO: 76063 - DNA, 19 bp, Homo sapiens
  siRNA target sequence for CDC6 (NM_001254.2,1397-1415).
gagctattgaaattgtaga

SEQ ID NO: 76064 - DNA, 19 bp, Homo sapiens
  siRNA target sequence for CDC6 (NM_001254.2,1443-1461).
caaaccactgtctgaatgt

SEQ ID NO: 76065 - DNA, 19 bp, Homo sapiens
  siRNA target sequence for CDC6 (NM_001254.2,1493-1511).
gggttggtcttattcacat

SEQ ID NO: 76066 - DNA, 19 bp, Homo sapiens
  siRNA target sequence for CDC6 (NM_001254.2,1494-1512).
ggttggtcttattcacata

SEQ ID NO: 76067 - DNA, 19 bp, Homo sapiens
  siRNA target sequence for CDC6 (NM_001254.2,1626-1644).
caggcagttgaaaatcaaa

SEQ ID NO: 76068 - DNA, 19 bp, Homo sapiens
  siRNA target sequence for CDC6 (NM_001254.2,1652-1670).
ctctggggaagttatatga

SEQ ID NO: 76069 - DNA, 19 bp, Homo sapiens
  siRNA target sequence for CDC6 (NM_001254.2,1753-1771).
gccaggggcattttaggat

SEQ ID NO: 76070 - DNA, 19 bp, Homo sapiens
  siRNA target sequence for CDC6 (NM_001254.2,1755-1773).
caggggcattttaggatta

SEQ ID NO: 76071 - DNA, 19 bp, Homo sapiens
  siRNA target sequence for CDC6 (NM_001254.2,1757-1775).
ggggcattttaggattaaa

SEQ ID NO: 76072 - DNA, 19 bp, Homo sapiens
  siRNA target sequence for CDC6 (NM_001254.2,1792-1810).
cgtttgacaaaggtgtttt

SEQ ID NO: 76073 - DNA, 19 bp, Homo sapiens
  siRNA target sequence for CDC6 (NM_001254.2,1834-1852).
gaacatgctctgaaagata

SEQ ID NO: 76074 - DNA, 19 bp, Homo sapiens
  siRNA target sequence for CDC7 (NM_003503.2,153-171).
gatgagccaatggcttttt

SEQ ID NO: 76075 - DNA, 19 bp, Homo sapiens
  siRNA target sequence for CDC7 (NM_003503.2,196-214).
ctgaaggctctttaaaaaa

SEQ ID NO: 76076 - DNA, 19 bp, Homo sapiens
  siRNA target sequence for CDC7 (NM_003503.2,273-291).
gctgtaccacagcttagta

SEQ ID NO: 76077 - DNA, 19 bp, Homo sapiens
  siRNA target sequence for CDC7 (NM_003503.2,274-292).
ctgtaccacagcttagtaa

SEQ ID NO: 76078 - DNA, 19 bp, Homo sapiens
  siRNA target sequence for CDC7 (NM_003503.2,326-344).
cactttcagctctgtttat

SEQ ID NO: 76079 - DNA, 19 bp, Homo sapiens
  siRNA target sequence for CDC7 (NM_003503.2,347-365).
ggccacagcacagttacaa

SEQ ID NO: 76080 - DNA, 19 bp, Homo sapiens
  siRNA target sequence for CDC7 (NM_003503.2,349-367).
ccacagcacagttacaagt

SEQ ID NO: 76081 - DNA, 19 bp, Homo sapiens
  siRNA target sequence for CDC7 (NM_003503.2,366-384).
gtaggacctgaagagaaaa

SEQ ID NO: 76082 - DNA, 19 bp, Homo sapiens
  siRNA target sequence for CDC7 (NM_003503.2,390-408).
ctaaaacacttgattccaa

SEQ ID NO: 76083 - DNA, 19 bp, Homo sapiens
  siRNA target sequence for CDC7 (NM_003503.2,405-423).
ccaacaagtcatcctataa

SEQ ID NO: 76084 - DNA, 19 bp, Homo sapiens
  siRNA target sequence for CDC7 (NM_003503.2,474-492).
gtcatgggagttaaatact

SEQ ID NO: 76085 - DNA, 19 bp, Homo sapiens
  siRNA target sequence for CDC7 (NM_003503.2,483-501).
gttaaatactgctttagga

SEQ ID NO: 76086 - DNA, 19 bp, Homo sapiens
  siRNA target sequence for CDC7 (NM_003503.2,499-517).
ggaagaatgatcatgtagt

SEQ ID NO: 76087 - DNA, 19 bp, Homo sapiens
  siRNA target sequence for CDC7 (NM_003503.2,534-552).
ctggagcatgagtcgtttt

SEQ ID NO: 76088 - DNA, 19 bp, Homo sapiens
  siRNA target sequence for CDC7 (NM_003503.2,547-565).
cgtttttggacattctgaa

SEQ ID NO: 76089 - DNA, 19 bp, Homo sapiens
  siRNA target sequence for CDC7 (NM_003503.2,585-603).
gtacgggaatatatgctta

SEQ ID NO: 76090 - DNA, 19 bp, Homo sapiens
  siRNA target sequence for CDC7 (NM_003503.2,589-607).
gggaatatatgcttaatct

SEQ ID NO: 76091 - DNA, 19 bp, Homo sapiens
  siRNA target sequence for CDC7 (NM_003503.2,620-638).
gaaacgcattcatcagttt

SEQ ID NO: 76092 - DNA, 19 bp, Homo sapiens
  siRNA target sequence for CDC7 (NM_003503.2,624-642).
cgcattcatcagtttggta

SEQ ID NO: 76093 - DNA, 19 bp, Homo sapiens
  siRNA target sequence for CDC7 (NM_003503.2,625-643).
gcattcatcagtttggtat

SEQ ID NO: 76094 - DNA, 19 bp, Homo sapiens
  siRNA target sequence for CDC7 (NM_003503.2,626-644).
cattcatcagtttggtatt

SEQ ID NO: 76095 - DNA, 19 bp, Homo sapiens
  siRNA target sequence for CDC7 (NM_003503.2,654-672).
gatgttaagcccagcaatt

SEQ ID NO: 76096 - DNA, 19 bp, Homo sapiens
  siRNA target sequence for CDC7 (NM_003503.2,698-716).
gtatgccttggtagacttt

SEQ ID NO: 76097 - DNA, 19 bp, Homo sapiens
  siRNA target sequence for CDC7 (NM_003503.2,723-741).
gcccaaggaacccatgata

SEQ ID NO: 76098 - DNA, 19 bp, Homo sapiens
  siRNA target sequence for CDC7 (NM_003503.2,729-747).
ggaacccatgatacgaaaa

SEQ ID NO: 76099 - DNA, 19 bp, Homo sapiens
  siRNA target sequence for CDC7 (NM_003503.2,730-748).
gaacccatgatacgaaaat

SEQ ID NO: 76100 - DNA, 19 bp, Homo sapiens
  siRNA target sequence for CDC7 (NM_003503.2,733-751).
cccatgatacgaaaataga

SEQ ID NO: 76101 - DNA, 19 bp, Homo sapiens
  siRNA target sequence for CDC7 (NM_003503.2,782-800).
gcaggaaaggtgttcacaa

SEQ ID NO: 76102 - DNA, 19 bp, Homo sapiens
  siRNA target sequence for CDC7 (NM_003503.2,803-821).
caaatcccacataatcaca

SEQ ID NO: 76103 - DNA, 19 bp, Homo sapiens
  siRNA target sequence for CDC7 (NM_003503.2,891-909).
gttaaaagaccctacacaa

SEQ ID NO: 76104 - DNA, 19 bp, Homo sapiens
  siRNA target sequence for CDC7 (NM_003503.2,901-919).
cctacacaaatgcacaaat

SEQ ID NO: 76105 - DNA, 19 bp, Homo sapiens
  siRNA target sequence for CDC7 (NM_003503.2,913-931).
cacaaattcagattaaaca

SEQ ID NO: 76106 - DNA, 19 bp, Homo sapiens
  siRNA target sequence for CDC7 (NM_003503.2,967-985).
ctgtccagcgctctgtttt

SEQ ID NO: 76107 - DNA, 19 bp, Homo sapiens
  siRNA target sequence for CDC7 (NM_003503.2,971-989).
ccagcgctctgtttttgga

SEQ ID NO: 76108 - DNA, 19 bp, Homo sapiens
  siRNA target sequence for CDC7 (NM_003503.2,1030-1048).
gccctgcagtgaaactcat

SEQ ID NO: 76109 - DNA, 19 bp, Homo sapiens
  siRNA target sequence for CDC7 (NM_003503.2,1179-1197).
gactgctatgcaacagata

SEQ ID NO: 76110 - DNA, 19 bp, Homo sapiens
  siRNA target sequence for CDC7 (NM_003503.2,1316-1334).
gtggtctgcaggtgtcata

SEQ ID NO: 76111 - DNA, 19 bp, Homo sapiens
  siRNA target sequence for CDC7 (NM_003503.2,1346-1364).
gcttagtggacgatatcca

SEQ ID NO: 76112 - DNA, 19 bp, Homo sapiens
  siRNA target sequence for CDC7 (NM_003503.2,1347-1365).
cttagtggacgatatccat

SEQ ID NO: 76113 - DNA, 19 bp, Homo sapiens
  siRNA target sequence for CDC7 (NM_003503.2,1351-1369).
gtggacgatatccatttta

SEQ ID NO: 76114 - DNA, 19 bp, Homo sapiens
  siRNA target sequence for CDC7 (NM_003503.2,1353-1371).
ggacgatatccattttata

SEQ ID NO: 76115 - DNA, 19 bp, Homo sapiens
  siRNA target sequence for CDC7 (NM_003503.2,1390-1408).
ctgctttggcccaaattat

SEQ ID NO: 76116 - DNA, 19 bp, Homo sapiens
  siRNA target sequence for CDC7 (NM_003503.2,1392-1410).
gctttggcccaaattatga

SEQ ID NO: 76117 - DNA, 19 bp, Homo sapiens
  siRNA target sequence for CDC7 (NM_003503.2,1417-1435).
ggggatccagagaaactat

SEQ ID NO: 76118 - DNA, 19 bp, Homo sapiens
  siRNA target sequence for CDC7 (NM_003503.2,1486-1504).
cagcacaagacttgagaaa

SEQ ID NO: 76119 - DNA, 19 bp, Homo sapiens
  siRNA target sequence for CDC7 (NM_003503.2,1518-1536).
ctcaggggtatggattcta

SEQ ID NO: 76120 - DNA, 19 bp, Homo sapiens
  siRNA target sequence for CDC7 (NM_003503.2,1730-1748).
gaatgaggtacctgatgaa

SEQ ID NO: 76121 - DNA, 19 bp, Homo sapiens
  siRNA target sequence for CDC7 (NM_003503.2,1750-1768).
cttatgacctgcttgataa

SEQ ID NO: 76122 - DNA, 19 bp, Homo sapiens
  siRNA target sequence for CDC7 (NM_003503.2,1757-1775).
cctgcttgataaacttcta

SEQ ID NO: 76123 - DNA, 19 bp, Homo sapiens
  siRNA target sequence for CDC7 (NM_003503.2,1760-1778).
gcttgataaacttctagat

SEQ ID NO: 76124 - DNA, 19 bp, Homo sapiens
  siRNA target sequence for CDK10 (NM_003674.2,291-309).
ggtacctacggcattgtgt

SEQ ID NO: 76125 - DNA, 19 bp, Homo sapiens
  siRNA target sequence for CDK10 (NM_003674.2,292-310).
gtacctacggcattgtgta

SEQ ID NO: 76126 - DNA, 19 bp, Homo sapiens
  siRNA target sequence for CDK10 (NM_003674.2,709-727).
cctatggtgtcccagtaaa

SEQ ID NO: 76127 - DNA, 19 bp, Homo sapiens
  siRNA target sequence for CDK10 (NM_003674.2,981-999).
cggaagcagccctacaaca

SEQ ID NO: 76128 - DNA, 19 bp, Homo sapiens
  siRNA target sequence for CDK10 (NM_003674.2,982-1000).
ggaagcagccctacaacaa

SEQ ID NO: 76129 - DNA, 19 bp, Homo sapiens
  siRNA target sequence for CDK10 (NM_003674.2,1101-1119).
ctggagagctcctatttca

SEQ ID NO: 76130 - DNA, 19 bp, Homo sapiens
  siRNA target sequence for CDK10 (NM_003674.2,1208-1226).
ccagagcaagcgctgtaaa

SEQ ID NO: 76131 - DNA, 19 bp, Homo sapiens
  siRNA target sequence for CDK2 (NM_001798.2,317-335).
ggtggtggcgcttaagaaa

SEQ ID NO: 76132 - DNA, 19 bp, Homo sapiens
  siRNA target sequence for CDK2 (NM_001798.2,401-419).
ggagcttaaccatcctaat

SEQ ID NO: 76133 - DNA, 19 bp, Homo sapiens
  siRNA target sequence for CDK2 (NM_001798.2,402-420).
gagcttaaccatcctaata

SEQ ID NO: 76134 - DNA, 19 bp, Homo sapiens
  siRNA target sequence for CDK2 (NM_001798.2,691-709).
gagtccctgttcgtactta

SEQ ID NO: 76135 - DNA, 19 bp, Homo sapiens
  siRNA target sequence for CDK2 (NM_001798.2,693-711).
gtccctgttcgtacttaca

SEQ ID NO: 76136 - DNA, 19 bp, Homo sapiens
  siRNA target sequence for CDK2 (NM_001798.2,756-774).
ctgggctgcaaatattatt

SEQ ID NO: 76137 - DNA, 19 bp, Homo sapiens
  siRNA target sequence for CDK2 (NM_001798.2,908-926).
ggtgtggccaggagttact

SEQ ID NO: 76138 - DNA, 19 bp, Homo sapiens
  siRNA target sequence for CDK2 (NM_001798.2,909-927).
gtgtggccaggagttactt

SEQ ID NO: 76139 - DNA, 19 bp, Homo sapiens
  siRNA target sequence for CDK2 (NM_001798.2,925-943).
cttctatgcctgattacaa

SEQ ID NO: 76140 - DNA, 19 bp, Homo sapiens
  siRNA target sequence for CDK2 (NM_001798.2,934-952).
ctgattacaagccaagttt

SEQ ID NO: 76141 - DNA, 19 bp, Homo sapiens
  siRNA target sequence for CDK2 (NM_001798.2,1005-1023).
gatggacggagcttgttat

SEQ ID NO: 76142 - DNA, 19 bp, Homo sapiens
  siRNA target sequence for CDK2 (NM_001798.2,1015-1033).
gcttgttatcgcaaatgct

SEQ ID NO: 76143 - DNA, 19 bp, Homo sapiens
  siRNA target sequence for CDK3 (NM_001258.1,614-632).
ggcagcaagttctatacca

SEQ ID NO: 76144 - DNA, 19 bp, Homo sapiens
  siRNA target sequence for CDK3 (NM_001258.1,649-667).
gagcattggttgcatcttt

SEQ ID NO: 76145 - DNA, 19 bp, Homo sapiens
  siRNA target sequence for CDK4 (NM_000075.2,248-266).
gccagtggctgaaattggt

SEQ ID NO: 76146 - DNA, 19 bp, Homo sapiens
  siRNA target sequence for CDK4 (NM_000075.2,390-408).
cgtgaggtggctttactga

SEQ ID NO: 76147 - DNA, 19 bp, Homo sapiens
  siRNA target sequence for CDK4 (NM_000075.2,409-427).
ggcgactggaggcttttga

SEQ ID NO: 76148 - DNA, 19 bp, Homo sapiens
  siRNA target sequence for CDK4 (NM_000075.2,477-495).
gaccgggagatcaaggtaa

SEQ ID NO: 76149 - DNA, 19 bp, Homo sapiens
  siRNA target sequence for CDK4 (NM_000075.2,559-577).
gcttgccagccgaaacgat

SEQ ID NO: 76150 - DNA, 19 bp, Homo sapiens
  siRNA target sequence for CDK4 (NM_000075.2,585-603).
ctgatgcgccagtttctaa

SEQ ID NO: 76151 - DNA, 19 bp, Homo sapiens
  siRNA target sequence for CDK4 (NM_000075.2,738-756).
cttacacccgtggttgtta

SEQ ID NO: 76152 - DNA, 19 bp, Homo sapiens
  siRNA target sequence for CDK4 (NM_000075.2,742-760).
cacccgtggttgttacact

SEQ ID NO: 76153 - DNA, 19 bp, Homo sapiens
  siRNA target sequence for CDK4 (NM_000075.2,786-804).
ctgcagtccacatatgcaa

SEQ ID NO: 76154 - DNA, 19 bp, Homo sapiens
  siRNA target sequence for CDK4 (NM_000075.2,886-904).
ccgaccagttgggcaaaat

SEQ ID NO: 76155 - DNA, 19 bp, Homo sapiens
  siRNA target sequence for CDK4 (NM_000075.2,888-906).
gaccagttgggcaaaatct

SEQ ID NO: 76156 - DNA, 19 bp, Homo sapiens
  siRNA target sequence for CDK4 (NM_000075.2,936-954).
gactggcctcgagatgtat

SEQ ID NO: 76157 - DNA, 19 bp, Homo sapiens
  siRNA target sequence for CDK4 (NM_000075.2,1043-1061).
gctggaaatgctgactttt

SEQ ID NO: 76158 - DNA, 19 bp, Homo sapiens
  siRNA target sequence for CDK4 (NM_000075.2,1064-1082).
cccacacaagcgaatctct

SEQ ID NO: 76159 - DNA, 19 bp, Homo sapiens
  siRNA target sequence for CDK4 (NM_000075.2,1097-1115).
gcagcactcttatctacat

SEQ ID NO: 76160 - DNA, 19 bp, Homo sapiens
  siRNA target sequence for CDK4 (NM_000075.2,1098-1116).
cagcactcttatctacata

SEQ ID NO: 76161 - DNA, 19 bp, Homo sapiens
  siRNA target sequence for CDK4 (NM_000075.2,1103-1121).
ctcttatctacataaggat

SEQ ID NO: 76162 - DNA, 19 bp, Homo sapiens
  siRNA target sequence for CDK5 (NM_004935.2,102-120).
cctacggaactgtgttcaa

SEQ ID NO: 76163 - DNA, 19 bp, Homo sapiens
  siRNA target sequence for CDK5 (NM_004935.2,276-294).
gcgacaagaagctgacttt

SEQ ID NO: 76164 - DNA, 19 bp, Homo sapiens
  siRNA target sequence for CDK5 (NM_004935.2,352-370).
cctcgatcctgagattgta

SEQ ID NO: 76165 - DNA, 19 bp, Homo sapiens
  siRNA target sequence for CDK5 (NM_004935.2,353-371).
ctcgatcctgagattgtaa

SEQ ID NO: 76166 - DNA, 19 bp, Homo sapiens
  siRNA target sequence for CDK5 (NM_004935.2,356-374).
gatcctgagattgtaaagt

SEQ ID NO: 76167 - DNA, 19 bp, Homo sapiens
  siRNA target sequence for CDK5 (NM_004935.2,398-416).
gggctgggattctgtcata

SEQ ID NO: 76168 - DNA, 19 bp, Homo sapiens
  siRNA target sequence for CDK5 (NM_004935.2,449-467).
cagaacctgctaataaaca

SEQ ID NO: 76169 - DNA, 19 bp, Homo sapiens
  siRNA target sequence for CDK5 (NM_004935.2,683-701).
gtcgatgaccagttgaaga

SEQ ID NO: 76170 - DNA, 19 bp, Homo sapiens
  siRNA target sequence for CDK5 (NM_004935.2,811-829).
cgtcgtgcccaaactcaat

SEQ ID NO: 76171 - DNA, 19 bp, Homo sapiens
  siRNA target sequence for CDK6 (NM_001259.2,140-158).
gctgaccagcagtacgaat

SEQ ID NO: 76172 - DNA, 19 bp, Homo sapiens
  siRNA target sequence for CDK6 (NM_001259.2,340-358).
cgtggtcaggttgtttgat

SEQ ID NO: 76173 - DNA, 19 bp, Homo sapiens
  siRNA target sequence for CDK6 (NM_001259.2,422-440).
caagacttgaccacttact

SEQ ID NO: 76174 - DNA, 19 bp, Homo sapiens
  siRNA target sequence for CDK6 (NM_001259.2,430-448).
gaccacttacttggataaa

SEQ ID NO: 76175 - DNA, 19 bp, Homo sapiens
  siRNA target sequence for CDK6 (NM_001259.2,462-480).
gagtgcccactgaaaccat

SEQ ID NO: 76176 - DNA, 19 bp, Homo sapiens
  siRNA target sequence for CDK6 (NM_001259.2,464-482).
gtgcccactgaaaccataa

SEQ ID NO: 76177 - DNA, 19 bp, Homo sapiens
  siRNA target sequence for CDK6 (NM_001259.2,536-554).
gtagtgcatcgcgatctaa

SEQ ID NO: 76178 - DNA, 19 bp, Homo sapiens
  siRNA target sequence for CDK6 (NM_001259.2,607-625).
cggccttgcccgcatctat

SEQ ID NO: 76179 - DNA, 19 bp, Homo sapiens
  siRNA target sequence for CDK6 (NM_001259.2,608-626).
ggccttgcccgcatctata

SEQ ID NO: 76180 - DNA, 19 bp, Homo sapiens
  siRNA target sequence for CDK6 (NM_001259.2,610-628).
ccttgcccgcatctatagt

SEQ ID NO: 76181 - DNA, 19 bp, Homo sapiens
  siRNA target sequence for CDK6 (NM_001259.2,611-629).
cttgcccgcatctatagtt

SEQ ID NO: 76182 - DNA, 19 bp, Homo sapiens
  siRNA target sequence for CDK6 (NM_001259.2,788-806).
gttgatcaactaggaaaaa

SEQ ID NO: 76183 - DNA, 19 bp, Homo sapiens
  siRNA target sequence for CDK6 (NM_001259.2,882-900).
caaaatctgcccaaccaat

SEQ ID NO: 76184 - DNA, 19 bp, Homo sapiens
  siRNA target sequence for CDK6 (NM_001259.2,902-920).
gagaagtttgtaacagata

SEQ ID NO: 76185 - DNA, 19 bp, Homo sapiens
  siRNA target sequence for CDK6 (NM_001259.2,907-925).
gtttgtaacagatatcgat

SEQ ID NO: 76186 - DNA, 19 bp, Homo sapiens
  siRNA target sequence for CDK7 (NM_001799.2,110-128).
cgggcaaagcgttatgaga

SEQ ID NO: 76187 - DNA, 19 bp, Homo sapiens
  siRNA target sequence for CDK7 (NM_001799.2,111-129).
gggcaaagcgttatgagaa

SEQ ID NO: 76188 - DNA, 19 bp, Homo sapiens
  siRNA target sequence for CDK7 (NM_001799.2,139-157).
ccttggggagggacagttt

SEQ ID NO: 76189 - DNA, 19 bp, Homo sapiens
  siRNA target sequence for CDK7 (NM_001799.2,194-212).
caaattgtcgccattaaga

SEQ ID NO: 76190 - DNA, 19 bp, Homo sapiens
  siRNA target sequence for CDK7 (NM_001799.2,217-235).
caaacttggacatagatca

SEQ ID NO: 76191 - DNA, 19 bp, Homo sapiens
  siRNA target sequence for CDK7 (NM_001799.2,225-243).
gacatagatcagaagctaa

SEQ ID NO: 76192 - DNA, 19 bp, Homo sapiens
  siRNA target sequence for CDK7 (NM_001799.2,236-254).
gaagctaaagatggtataa

SEQ ID NO: 76193 - DNA, 19 bp, Homo sapiens
  siRNA target sequence for CDK7 (NM_001799.2,261-279).
ccgccttaagagagataaa

SEQ ID NO: 76194 - DNA, 19 bp, Homo sapiens
  siRNA target sequence for CDK7 (NM_001799.2,270-288).
gagagataaaattattaca

SEQ ID NO: 76195 - DNA, 19 bp, Homo sapiens
  siRNA target sequence for CDK7 (NM_001799.2,290-308).
gagctaagtcatccaaata

SEQ ID NO: 76196 - DNA, 19 bp, Homo sapiens
  siRNA target sequence for CDK7 (NM_001799.2,323-341).
gatgcttttggacataaat

SEQ ID NO: 76197 - DNA, 19 bp, Homo sapiens
  siRNA target sequence for CDK7 (NM_001799.2,375-393).
ctgatctagaggttataat

SEQ ID NO: 76198 - DNA, 19 bp, Homo sapiens
  siRNA target sequence for CDK7 (NM_001799.2,377-395).
gatctagaggttataataa

SEQ ID NO: 76199 - DNA, 19 bp, Homo sapiens
  siRNA target sequence for CDK7 (NM_001799.2,383-401).
gaggttataataaaggata

SEQ ID NO: 76200 - DNA, 19 bp, Homo sapiens
  siRNA target sequence for CDK7 (NM_001799.2,445-463).
gatgactcttcaaggatta

SEQ ID NO: 76201 - DNA, 19 bp, Homo sapiens
  siRNA target sequence for CDK7 (NM_001799.2,476-494).
caacattggatcctacata

SEQ ID NO: 76202 - DNA, 19 bp, Homo sapiens
  siRNA target sequence for CDK7 (NM_001799.2,487-505).
cctacatagggatctgaaa

SEQ ID NO: 76203 - DNA, 19 bp, Homo sapiens
  siRNA target sequence for CDK7 (NM_001799.2,511-529).
caacttgttgctagatgaa

SEQ ID NO: 76204 - DNA, 19 bp, Homo sapiens
  siRNA target sequence for CDK7 (NM_001799.2,577-595).
gagccccaatagagcttat

SEQ ID NO: 76205 - DNA, 19 bp, Homo sapiens
  siRNA target sequence for CDK7 (NM_001799.2,580-598).
ccccaatagagcttataca

SEQ ID NO: 76206 - DNA, 19 bp, Homo sapiens
  siRNA target sequence for CDK7 (NM_001799.2,582-600).
ccaatagagcttatacaca

SEQ ID NO: 76207 - DNA, 19 bp, Homo sapiens
  siRNA target sequence for CDK7 (NM_001799.2,583-601).
caatagagcttatacacat

SEQ ID NO: 76208 - DNA, 19 bp, Homo sapiens
  siRNA target sequence for CDK7 (NM_001799.2,690-708).
gtatattagcagagttact

SEQ ID NO: 76209 - DNA, 19 bp, Homo sapiens
  siRNA target sequence for CDK7 (NM_001799.2,732-750).
gagattcagaccttgatca

SEQ ID NO: 76210 - DNA, 19 bp, Homo sapiens
  siRNA target sequence for CDK7 (NM_001799.2,740-758).
gaccttgatcagctaacaa

SEQ ID NO: 76211 - DNA, 19 bp, Homo sapiens
  siRNA target sequence for CDK7 (NM_001799.2,799-817).
gccggacatgtgtagtctt

SEQ ID NO: 76212 - DNA, 19 bp, Homo sapiens
  siRNA target sequence for CDK7 (NM_001799.2,819-837).
cagattatgtgacatttaa

SEQ ID NO: 76213 - DNA, 19 bp, Homo sapiens
  siRNA target sequence for CDK7 (NM_001799.2,840-858).
gtttccctggaataccttt

SEQ ID NO: 76214 - DNA, 19 bp, Homo sapiens
  siRNA target sequence for CDK7 (NM_001799.2,844-862).
ccctggaatacctttgcat

SEQ ID NO: 76215 - DNA, 19 bp, Homo sapiens
  siRNA target sequence for CDK7 (NM_001799.2,879-897).
caggagacgacttactaga

SEQ ID NO: 76216 - DNA, 19 bp, Homo sapiens
  siRNA target sequence for CDK7 (NM_001799.2,882-900).
gagacgacttactagatct

SEQ ID NO: 76217 - DNA, 19 bp, Homo sapiens
  siRNA target sequence for CDK7 (NM_001799.2,886-904).
cgacttactagatctcata

SEQ ID NO: 76218 - DNA, 19 bp, Homo sapiens
  siRNA target sequence for CDK7 (NM_001799.2,889-907).
cttactagatctcatacaa

SEQ ID NO: 76219 - DNA, 19 bp, Homo sapiens
  siRNA target sequence for CDK7 (NM_001799.2,899-917).
ctcatacaaggcttattct

SEQ ID NO: 76220 - DNA, 19 bp, Homo sapiens
  siRNA target sequence for CDK7 (NM_001799.2,901-919).
catacaaggcttattctta

SEQ ID NO: 76221 - DNA, 19 bp, Homo sapiens
  siRNA target sequence for CDK7 (NM_001799.2,956-974).
ctgaaaatgaagtatttca

SEQ ID NO: 76222 - DNA, 19 bp, Homo sapiens
  siRNA target sequence for CDK7 (NM_001799.2,1021-1039).
ctgtccagtggaaacctta

SEQ ID NO: 76223 - DNA, 19 bp, Homo sapiens
  siRNA target sequence for CDK7 (NM_001799.2,1023-1041).
gtccagtggaaaccttaaa

SEQ ID NO: 76224 - DNA, 19 bp, Homo sapiens
  siRNA target sequence for CDK7 (NM_001799.2,1026-1044).
cagtggaaaccttaaagga

SEQ ID NO: 76225 - DNA, 19 bp, Homo sapiens
  siRNA target sequence for CDK7 (NM_001799.2,1035-1053).
ccttaaaggagcaatcaaa

SEQ ID NO: 76226 - DNA, 19 bp, Homo sapiens
  siRNA target sequence for CDK7 (NM_001799.2,1103-1121).
ggattgcccaagaaactaa

SEQ ID NO: 76227 - DNA, 19 bp, Homo sapiens
  siRNA target sequence for CDK8 (NM_001260.1,154-172).
ggaaggatgataaagacta

SEQ ID NO: 76228 - DNA, 19 bp, Homo sapiens
  siRNA target sequence for CDK8 (NM_001260.1,189-207).
gaaggaactgggatctcta

SEQ ID NO: 76229 - DNA, 19 bp, Homo sapiens
  siRNA target sequence for CDK8 (NM_001260.1,203-221).
ctctatgtcggcatgtaga

SEQ ID NO: 76230 - DNA, 19 bp, Homo sapiens
  siRNA target sequence for CDK8 (NM_001260.1,229-247).
cattacttcgagagcttaa

SEQ ID NO: 76231 - DNA, 19 bp, Homo sapiens
  siRNA target sequence for CDK8 (NM_001260.1,248-266).
gcatccaaacgtcatttct

SEQ ID NO: 76232 - DNA, 19 bp, Homo sapiens
  siRNA target sequence for CDK8 (NM_001260.1,336-354).
ctctggcatataatcaagt

SEQ ID NO: 76233 - DNA, 19 bp, Homo sapiens
  siRNA target sequence for CDK8 (NM_001260.1,353-371).
gtttcacagagcttctaaa

SEQ ID NO: 76234 - DNA, 19 bp, Homo sapiens
  siRNA target sequence for CDK8 (NM_001260.1,377-395).
caagaagccagttcagtta

SEQ ID NO: 76235 - DNA, 19 bp, Homo sapiens
  siRNA target sequence for CDK8 (NM_001260.1,403-421).
gaatggtgaagtcactatt

SEQ ID NO: 76236 - DNA, 19 bp, Homo sapiens
  siRNA target sequence for CDK8 (NM_001260.1,407-425).
ggtgaagtcactattatat

SEQ ID NO: 76237 - DNA, 19 bp, Homo sapiens
  siRNA target sequence for CDK8 (NM_001260.1,463-481).
gggtgttgcacagagattt

SEQ ID NO: 76238 - DNA, 19 bp, Homo sapiens
  siRNA target sequence for CDK8 (NM_001260.1,517-535).
ctgagcgaggaagagtaaa

SEQ ID NO: 76239 - DNA, 19 bp, Homo sapiens
  siRNA target sequence for CDK8 (NM_001260.1,652-670).
ggcattataccaaagctat

SEQ ID NO: 76240 - DNA, 19 bp, Homo sapiens
  siRNA target sequence for CDK8 (NM_001260.1,708-726).
ctaacgtcagaaccaatat

SEQ ID NO: 76241 - DNA, 19 bp, Homo sapiens
  siRNA target sequence for CDK8 (NM_001260.1,712-730).
cgtcagaaccaatatttca

SEQ ID NO: 76242 - DNA, 19 bp, Homo sapiens
  siRNA target sequence for CDK8 (NM_001260.1,733-751).
gtcgacaagaggacatcaa

SEQ ID NO: 76243 - DNA, 19 bp, Homo sapiens
  siRNA target sequence for CDK8 (NM_001260.1,738-756).
caagaggacatcaaaacta

SEQ ID NO: 76244 - DNA, 19 bp, Homo sapiens
  siRNA target sequence for CDK8 (NM_001260.1,746-764).
catcaaaactagtaatcct

SEQ ID NO: 76245 - DNA, 19 bp, Homo sapiens
  siRNA target sequence for CDK8 (NM_001260.1,774-792).
gaccagctggacagaatat

SEQ ID NO: 76246 - DNA, 19 bp, Homo sapiens
  siRNA target sequence for CDK8 (NM_001260.1,777-795).
cagctggacagaatattca

SEQ ID NO: 76247 - DNA, 19 bp, Homo sapiens
  siRNA target sequence for CDK8 (NM_001260.1,794-812).
caatgtaatgggatttcct

SEQ ID NO: 76248 - DNA, 19 bp, Homo sapiens
  siRNA target sequence for CDK8 (NM_001260.1,842-860).
gatgcctgaacattcaaca

SEQ ID NO: 76249 - DNA, 19 bp, Homo sapiens
  siRNA target sequence for CDK8 (NM_001260.1,877-895).
gaagaaatacgtataccaa

SEQ ID NO: 76250 - DNA, 19 bp, Homo sapiens
  siRNA target sequence for CDK8 (NM_001260.1,896-914).
ctgcagccttatcaagtat

SEQ ID NO: 76251 - DNA, 19 bp, Homo sapiens
  siRNA target sequence for CDK8 (NM_001260.1,981-999).
gacccaataaagcgaatta

SEQ ID NO: 76252 - DNA, 19 bp, Homo sapiens
  siRNA target sequence for CDK8 (NM_001260.1,984-1002).
ccaataaagcgaattacct

SEQ ID NO: 76253 - DNA, 19 bp, Homo sapiens
  siRNA target sequence for CDK8 (NM_001260.1,1016-1034).
gcaggacccctatttctta

SEQ ID NO: 76254 - DNA, 19 bp, Homo sapiens
  siRNA target sequence for CDK8 (NM_001260.1,1019-1037).
ggacccctatttcttagaa

SEQ ID NO: 76255 - DNA, 19 bp, Homo sapiens
  siRNA target sequence for CDK8 (NM_001260.1,1058-1076).
cgtttttgccggttgtcaa

SEQ ID NO: 76256 - DNA, 19 bp, Homo sapiens
  siRNA target sequence for CDK8 (NM_001260.1,1059-1077).
gtttttgccggttgtcaaa

SEQ ID NO: 76257 - DNA, 19 bp, Homo sapiens
  siRNA target sequence for CDK8 (NM_001260.1,1160-1178).
caataaccacactaatgga

SEQ ID NO: 76258 - DNA, 19 bp, Homo sapiens
  siRNA target sequence for CDK8 (NM_001260.1,1219-1237).
gacccccgttgaagaaagt

SEQ ID NO: 76259 - DNA, 19 bp, Homo sapiens
  siRNA target sequence for CDK8 (NM_001260.1,1261-1279).
cctcaggtggacttatcat

SEQ ID NO: 76260 - DNA, 19 bp, Homo sapiens
  siRNA target sequence for CDK8 (NM_001260.1,1352-1370).
gagcagcatgggatactca

SEQ ID NO: 76261 - DNA, 19 bp, Homo sapiens
  siRNA target sequence for CDK9 (NM_001261.2,125-143).
gtgccctttttgtgatgaa

SEQ ID NO: 76262 - DNA, 19 bp, Homo sapiens
  siRNA target sequence for CDK9 (NM_001261.2,283-301).
cagccttgcgggagatcaa

SEQ ID NO: 76263 - DNA, 19 bp, Homo sapiens
  siRNA target sequence for CDK9 (NM_001261.2,330-348).
gtggtcaacttgattgaga

SEQ ID NO: 76264 - DNA, 19 bp, Homo sapiens
  siRNA target sequence for CDK9 (NM_001261.2,377-395).
ccgctgcaagggtagtata

SEQ ID NO: 76265 - DNA, 19 bp, Homo sapiens
  siRNA target sequence for CDK9 (NM_001261.2,378-396).
cgctgcaagggtagtatat

SEQ ID NO: 76266 - DNA, 19 bp, Homo sapiens
  siRNA target sequence for CDK9 (NM_001261.2,379-397).
gctgcaagggtagtatata

SEQ ID NO: 76267 - DNA, 19 bp, Homo sapiens
  siRNA target sequence for CDK9 (NM_001261.2,382-400).
gcaagggtagtatatacct

SEQ ID NO: 76268 - DNA, 19 bp, Homo sapiens
  siRNA target sequence for CDK9 (NM_001261.2,432-450).
gggctgttgagcaatgttt

SEQ ID NO: 76269 - DNA, 19 bp, Homo sapiens
  siRNA target sequence for CDK9 (NM_001261.2,442-460).
gcaatgttttggtcaagtt

SEQ ID NO: 76270 - DNA, 19 bp, Homo sapiens
  siRNA target sequence for CDK9 (NM_001261.2,498-516).
cttaacggcctctactaca

SEQ ID NO: 76271 - DNA, 19 bp, Homo sapiens
  siRNA target sequence for CDK9 (NM_001261.2,542-560).
ggacatgaaggctgctaat

SEQ ID NO: 76272 - DNA, 19 bp, Homo sapiens
  siRNA target sequence for CDK9 (NM_001261.2,552-570).
gctgctaatgtgcttatca

SEQ ID NO: 76273 - DNA, 19 bp, Homo sapiens
  siRNA target sequence for CDK9 (NM_001261.2,856-874).
ggccaaacgtggacaacta

SEQ ID NO: 76274 - DNA, 19 bp, Homo sapiens
  siRNA target sequence for CDK9 (NM_001261.2,857-875).
gccaaacgtggacaactat

SEQ ID NO: 76275 - DNA, 19 bp, Homo sapiens
  siRNA target sequence for CDKL1 (NM_004196.3,133-151).
gtttctggaatcagaagat

SEQ ID NO: 76276 - DNA, 19 bp, Homo sapiens
  siRNA target sequence for CDKL1 (NM_004196.3,146-164).
gaagatgaccctgtcataa

SEQ ID NO: 76277 - DNA, 19 bp, Homo sapiens
  siRNA target sequence for CDKL1 (NM_004196.3,318-336).
gaggggtaccagaacatct

SEQ ID NO: 76278 - DNA, 19 bp, Homo sapiens
  siRNA target sequence for CDKL1 (NM_004196.3,332-350).
catctcgtgaagagcataa

SEQ ID NO: 76279 - DNA, 19 bp, Homo sapiens
  siRNA target sequence for CDKL1 (NM_004196.3,358-376).
gacactgcaagctgtaaat

SEQ ID NO: 76280 - DNA, 19 bp, Homo sapiens
  siRNA target sequence for CDKL1 (NM_004196.3,360-378).
cactgcaagctgtaaattt

SEQ ID NO: 76281 - DNA, 19 bp, Homo sapiens
  siRNA target sequence for CDKL1 (NM_004196.3,381-399).
gccataaacacaattgcat

SEQ ID NO: 76282 - DNA, 19 bp, Homo sapiens
  siRNA target sequence for CDKL1 (NM_004196.3,435-453).
cgaaacattccgtgattaa

SEQ ID NO: 76283 - DNA, 19 bp, Homo sapiens
  siRNA target sequence for CDKL1 (NM_004196.3,440-458).
cattccgtgattaagcttt

SEQ ID NO: 76284 - DNA, 19 bp, Homo sapiens
  siRNA target sequence for CDKL1 (NM_004196.3,444-462).
ccgtgattaagctttgtga

SEQ ID NO: 76285 - DNA, 19 bp, Homo sapiens
  siRNA target sequence for CDKL1 (NM_004196.3,488-506).
ggaccgagtgactactata

SEQ ID NO: 76286 - DNA, 19 bp, Homo sapiens
  siRNA target sequence for CDKL1 (NM_004196.3,492-510).
cgagtgactactatacaga

SEQ ID NO: 76287 - DNA, 19 bp, Homo sapiens
  siRNA target sequence for CDKL1 (NM_004196.3,655-673).
ggatcagctgtatctgatt

SEQ ID NO: 76288 - DNA, 19 bp, Homo sapiens
  siRNA target sequence for CDKL1 (NM_004196.3,656-674).
gatcagctgtatctgatta

SEQ ID NO: 76289 - DNA, 19 bp, Homo sapiens
  siRNA target sequence for CDKL1 (NM_004196.3,679-697).
gaccttgggggatctcatt

SEQ ID NO: 76290 - DNA, 19 bp, Homo sapiens
  siRNA target sequence for CDKL1 (NM_004196.3,699-717).
ctaggcaccagcaagtgtt

SEQ ID NO: 76291 - DNA, 19 bp, Homo sapiens
  siRNA target sequence for CDKL1 (NM_004196.3,713-731).
gtgtttagcacgaatcagt

SEQ ID NO: 76292 - DNA, 19 bp, Homo sapiens
  siRNA target sequence for CDKL1 (NM_004196.3,790-808).
cccaaacatctcttatcct

SEQ ID NO: 76293 - DNA, 19 bp, Homo sapiens
  siRNA target sequence for CDKL1 (NM_004196.3,835-853).
ccacatggaccctactcaa

SEQ ID NO: 76294 - DNA, 19 bp, Homo sapiens
  siRNA target sequence for CDKL1 (NM_004196.3,836-854).
cacatggaccctactcaaa

SEQ ID NO: 76295 - DNA, 19 bp, Homo sapiens
  siRNA target sequence for CDKL1 (NM_004196.3,872-890).
ctgttgcatcacccatatt

SEQ ID NO: 76296 - DNA, 19 bp, Homo sapiens
  siRNA target sequence for CDKL1 (NM_004196.3,965-983).
cgaaagcaccactgcttta

SEQ ID NO: 76297 - DNA, 19 bp, Homo sapiens
  siRNA target sequence for CDKL1 (NM_004196.3,973-991).
ccactgctttacagaaaca

SEQ ID NO: 76298 - DNA, 19 bp, Homo sapiens
  siRNA target sequence for CDKL1 (NM_004196.3,1040-1058).
gctttggataataagaagt

SEQ ID NO: 76299 - DNA, 19 bp, Homo sapiens
  siRNA target sequence for CDKL1 (NM_004196.3,1041-1059).
ctttggataataagaagta

SEQ ID NO: 76300 - DNA, 19 bp, Homo sapiens
  siRNA target sequence for CDKL1 (NM_004196.3,1065-1083).
gtgataccaagaaacttaa

SEQ ID NO: 76301 - DNA, 19 bp, Homo sapiens
  siRNA target sequence for CDKL1 (NM_004196.3,1067-1085).
gataccaagaaacttaact

SEQ ID NO: 76302 - DNA, 19 bp, Homo sapiens
  siRNA target sequence for CDKL1 (NM_004196.3,1079-1097).
cttaactaccgttttccaa

SEQ ID NO: 76303 - DNA, 19 bp, Homo sapiens
  siRNA target sequence for CDKL1 (NM_004196.3,1084-1102).
ctaccgttttccaaacatt

SEQ ID NO: 76304 - DNA, 19 bp, Homo sapiens
  siRNA target sequence for CDKL2 (NM_003948.2,426-444).
ggtgatgaagtgtaggaat

SEQ ID NO: 76305 - DNA, 19 bp, Homo sapiens
  siRNA target sequence for CDKL2 (NM_003948.2,432-450).
gaagtgtaggaataaagat

SEQ ID NO: 76306 - DNA, 19 bp, Homo sapiens
  siRNA target sequence for CDKL2 (NM_003948.2,484-502).
gaaagtgacgatgacaaaa

SEQ ID NO: 76307 - DNA, 19 bp, Homo sapiens
  siRNA target sequence for CDKL2 (NM_003948.2,488-506).
gtgacgatgacaaaatggt

SEQ ID NO: 76308 - DNA, 19 bp, Homo sapiens
  siRNA target sequence for CDKL2 (NM_003948.2,490-508).
gacgatgacaaaatggtta

SEQ ID NO: 76309 - DNA, 19 bp, Homo sapiens
  siRNA target sequence for CDKL2 (NM_003948.2,517-535).
gcaatgcgagaaatcaagt

SEQ ID NO: 76310 - DNA, 19 bp, Homo sapiens
  siRNA target sequence for CDKL2 (NM_003948.2,523-541).
cgagaaatcaagttactaa

SEQ ID NO: 76311 - DNA, 19 bp, Homo sapiens
  siRNA target sequence for CDKL2 (NM_003948.2,602-620).
ggtacctagtctttgaatt

SEQ ID NO: 76312 - DNA, 19 bp, Homo sapiens
  siRNA target sequence for CDKL2 (NM_003948.2,665-683).
gactagactaccaagtagt

SEQ ID NO: 76313 - DNA, 19 bp, Homo sapiens
  siRNA target sequence for CDKL2 (NM_003948.2,670-688).
gactaccaagtagttcaaa

SEQ ID NO: 76314 - DNA, 19 bp, Homo sapiens
  siRNA target sequence for CDKL2 (NM_003948.2,725-743).
gtcacagtcacaatatcat

SEQ ID NO: 76315 - DNA, 19 bp, Homo sapiens
  siRNA target sequence for CDKL2 (NM_003948.2,760-778).
ccagagaatatattagtct

SEQ ID NO: 76316 - DNA, 19 bp, Homo sapiens
  siRNA target sequence for CDKL2 (NM_003948.2,798-816).
gctatgcgattttggattt

SEQ ID NO: 76317 - DNA, 19 bp, Homo sapiens
  siRNA target sequence for CDKL2 (NM_003948.2,839-857).
gggaggtttatactgatta

SEQ ID NO: 76318 - DNA, 19 bp, Homo sapiens
  siRNA target sequence for CDKL2 (NM_003948.2,840-858).
ggaggtttatactgattat

SEQ ID NO: 76319 - DNA, 19 bp, Homo sapiens
  siRNA target sequence for CDKL2 (NM_003948.2,878-896).
gagctccagaactattggt

SEQ ID NO: 76320 - DNA, 19 bp, Homo sapiens
  siRNA target sequence for CDKL2 (NM_003948.2,909-927).
gtatggcaaggctgttgat

SEQ ID NO: 76321 - DNA, 19 bp, Homo sapiens
  siRNA target sequence for CDKL2 (NM_003948.2,946-964).
ctggtaactgaaatgttca

SEQ ID NO: 76322 - DNA, 19 bp, Homo sapiens
  siRNA target sequence for CDKL2 (NM_003948.2,963-981).
catgggggaacccctattt

SEQ ID NO: 76323 - DNA, 19 bp, Homo sapiens
  siRNA target sequence for CDKL2 (NM_003948.2,992-1010).
ctgatattgatcagctata

SEQ ID NO: 76324 - DNA, 19 bp, Homo sapiens
  siRNA target sequence for CDKL2 (NM_003948.2,1000-1018).
gatcagctatatcatatta

SEQ ID NO: 76325 - DNA, 19 bp, Homo sapiens
  siRNA target sequence for CDKL2 (NM_003948.2,1006-1024).
ctatatcatattatgatgt

SEQ ID NO: 76326 - DNA, 19 bp, Homo sapiens
  siRNA target sequence for CDKL2 (NM_003948.2,1020-1038).
gatgtgtttaggtaatcta

SEQ ID NO: 76327 - DNA, 19 bp, Homo sapiens
  siRNA target sequence for CDKL2 (NM_003948.2,1023-1041).
gtgtttaggtaatctaatt

SEQ ID NO: 76328 - DNA, 19 bp, Homo sapiens
  siRNA target sequence for CDKL2 (NM_003948.2,1047-1065).
gcatcaggagctttttaat

SEQ ID NO: 76329 - DNA, 19 bp, Homo sapiens
  siRNA target sequence for CDKL2 (NM_003948.2,1048-1066).
catcaggagctttttaata

SEQ ID NO: 76330 - DNA, 19 bp, Homo sapiens
  siRNA target sequence for CDKL2 (NM_003948.2,1085-1103).
gagtaaggttgcctgaaat

SEQ ID NO: 76331 - DNA, 19 bp, Homo sapiens
  siRNA target sequence for CDKL2 (NM_003948.2,1087-1105).
gtaaggttgcctgaaatca

SEQ ID NO: 76332 - DNA, 19 bp, Homo sapiens
  siRNA target sequence for CDKL2 (NM_003948.2,1108-1126).
gaaagagaacctcttgaaa

SEQ ID NO: 76333 - DNA, 19 bp, Homo sapiens
  siRNA target sequence for CDKL2 (NM_003948.2,1120-1138).
cttgaaagacgctatccta

SEQ ID NO: 76334 - DNA, 19 bp, Homo sapiens
  siRNA target sequence for CDKL2 (NM_003948.2,1150-1168).
gtggtgatagatttagcaa

SEQ ID NO: 76335 - DNA, 19 bp, Homo sapiens
  siRNA target sequence for CDKL2 (NM_003948.2,1180-1198).
catattgaccccgacaaaa

SEQ ID NO: 76336 - DNA, 19 bp, Homo sapiens
  siRNA target sequence for CDKL2 (NM_003948.2,1213-1231).
gagctcctacaccatgatt

SEQ ID NO: 76337 - DNA, 19 bp, Homo sapiens
  siRNA target sequence for CDKL2 (NM_003948.2,1218-1236).
cctacaccatgatttcttt

SEQ ID NO: 76338 - DNA, 19 bp, Homo sapiens
  siRNA target sequence for CDKL2 (NM_003948.2,1265-1283).
cccaagaactacagttaaa

SEQ ID NO: 76339 - DNA, 19 bp, Homo sapiens
  siRNA target sequence for CDKL2 (NM_003948.2,1294-1312).
gatgccagaaatgtttctt

SEQ ID NO: 76340 - DNA, 19 bp, Homo sapiens
  siRNA target sequence for CDKL2 (NM_003948.2,1400-1418).
ccaatgctgatcccaaaat

SEQ ID NO: 76341 - DNA, 19 bp, Homo sapiens
  siRNA target sequence for CDKL2 (NM_003948.2,1401-1419).
caatgctgatcccaaaatt

SEQ ID NO: 76342 - DNA, 19 bp, Homo sapiens
  siRNA target sequence for CDKL2 (NM_003948.2,1521-1539).
gacaagccacaacaaaata

SEQ ID NO: 76343 - DNA, 19 bp, Homo sapiens
  siRNA target sequence for CDKL2 (NM_003948.2,1523-1541).
caagccacaacaaaatagt

SEQ ID NO: 76344 - DNA, 19 bp, Homo sapiens
  siRNA target sequence for CDKL2 (NM_003948.2,1578-1596).
cgtggaccacacaaggaat

SEQ ID NO: 76345 - DNA, 19 bp, Homo sapiens
  siRNA target sequence for CDKL2 (NM_003948.2,1613-1631).
ccccacttacacacaatct

SEQ ID NO: 76346 - DNA, 19 bp, Homo sapiens
  siRNA target sequence for CDKL2 (NM_003948.2,1637-1655).
cagttgctcccagcattaa

SEQ ID NO: 76347 - DNA, 19 bp, Homo sapiens
  siRNA target sequence for CDKL2 (NM_003948.2,1639-1657).
gttgctcccagcattaatt

SEQ ID NO: 76348 - DNA, 19 bp, Homo sapiens
  siRNA target sequence for CDKL2 (NM_003948.2,1667-1685).
ggactgagactataccaat

SEQ ID NO: 76349 - DNA, 19 bp, Homo sapiens
  siRNA target sequence for CDKL2 (NM_003948.2,1735-1753).
gttaaaccgaacagacatt

SEQ ID NO: 76350 - DNA, 19 bp, Homo sapiens
  siRNA target sequence for CDKL2 (NM_003948.2,1754-1772).
ccccatcaggcatttataa

SEQ ID NO: 76351 - DNA, 19 bp, Homo sapiens
  siRNA target sequence for CDKL2 (NM_003948.2,1757-1775).
catcaggcatttataacat

SEQ ID NO: 76352 - DNA, 19 bp, Homo sapiens
  siRNA target sequence for CDKL2 (NM_003948.2,1801-1819).
cctcccctgtcagatgatt

SEQ ID NO: 76353 - DNA, 19 bp, Homo sapiens
  siRNA target sequence for CDKL2 (NM_003948.2,1823-1841).
gggctgatttgcctcaaat

SEQ ID NO: 76354 - DNA, 19 bp, Homo sapiens
  siRNA target sequence for CDKL2 (NM_003948.2,1826-1844).
ctgatttgcctcaaatgga

SEQ ID NO: 76355 - DNA, 19 bp, Homo sapiens
  siRNA target sequence for CDKL3 (NM_016508.2,80-98).
ggcagatagtggccattaa

SEQ ID NO: 76356 - DNA, 19 bp, Homo sapiens
  siRNA target sequence for CDKL3 (NM_016508.2,140-158).
cgatgagagaaataaagtt

SEQ ID NO: 76357 - DNA, 19 bp, Homo sapiens
  siRNA target sequence for CDKL3 (NM_016508.2,183-201).
cctggtcaatctgattgaa

SEQ ID NO: 76358 - DNA, 19 bp, Homo sapiens
  siRNA target sequence for CDKL3 (NM_016508.2,252-270).
cacagtattagatgagtta

SEQ ID NO: 76359 - DNA, 19 bp, Homo sapiens
  siRNA target sequence for CDKL3 (NM_016508.2,262-280).
gatgagttacaacattatt

SEQ ID NO: 76360 - DNA, 19 bp, Homo sapiens
  siRNA target sequence for CDKL3 (NM_016508.2,281-299).
gtcatggactagagagtaa

SEQ ID NO: 76361 - DNA, 19 bp, Homo sapiens
  siRNA target sequence for CDKL3 (NM_016508.2,292-310).
gagagtaagcgacttagaa

SEQ ID NO: 76362 - DNA, 19 bp, Homo sapiens
  siRNA target sequence for CDKL3 (NM_016508.2,327-345).
ccttcgagcaattgactat

SEQ ID NO: 76363 - DNA, 19 bp, Homo sapiens
  siRNA target sequence for CDKL3 (NM_016508.2,332-350).
gagcaattgactatcttca

SEQ ID NO: 76364 - DNA, 19 bp, Homo sapiens
  siRNA target sequence for CDKL3 (NM_016508.2,340-358).
gactatcttcacagtaata

SEQ ID NO: 76365 - DNA, 19 bp, Homo sapiens
  siRNA target sequence for CDKL3 (NM_016508.2,401-419).
cccagtcaggaattactaa

SEQ ID NO: 76366 - DNA, 19 bp, Homo sapiens
  siRNA target sequence for CDKL3 (NM_016508.2,495-513).
gtatagagctcccgaatta

SEQ ID NO: 76367 - DNA, 19 bp, Homo sapiens
  siRNA target sequence for CDKL3 (NM_016508.2,500-518).
gagctcccgaattagtatt

SEQ ID NO: 76368 - DNA, 19 bp, Homo sapiens
  siRNA target sequence for CDKL3 (NM_016508.2,502-520).
gctcccgaattagtattaa

SEQ ID NO: 76369 - DNA, 19 bp, Homo sapiens
  siRNA target sequence for CDKL3 (NM_016508.2,506-524).
ccgaattagtattaaaaga

SEQ ID NO: 76370 - DNA, 19 bp, Homo sapiens
  siRNA target sequence for CDKL3 (NM_016508.2,507-525).
cgaattagtattaaaagat

SEQ ID NO: 76371 - DNA, 19 bp, Homo sapiens
  siRNA target sequence for CDKL3 (NM_016508.2,556-574).
gctttgggctgtatgatca

SEQ ID NO: 76372 - DNA, 19 bp, Homo sapiens
  siRNA target sequence for CDKL3 (NM_016508.2,562-580).
ggctgtatgatcattgaga

SEQ ID NO: 76373 - DNA, 19 bp, Homo sapiens
  siRNA target sequence for CDKL3 (NM_016508.2,563-581).
gctgtatgatcattgagat

SEQ ID NO: 76374 - DNA, 19 bp, Homo sapiens
  siRNA target sequence for CDKL3 (NM_016508.2,595-613).
ccctatcttcctagtagtt

SEQ ID NO: 76375 - DNA, 19 bp, Homo sapiens
  siRNA target sequence for CDKL3 (NM_016508.2,597-615).
ctatcttcctagtagttct

SEQ ID NO: 76376 - DNA, 19 bp, Homo sapiens
  siRNA target sequence for CDKL3 (NM_016508.2,601-619).
cttcctagtagttctgatt

SEQ ID NO: 76377 - DNA, 19 bp, Homo sapiens
  siRNA target sequence for CDKL3 (NM_016508.2,628-646).
ctccataaaattgttttga

SEQ ID NO: 76378 - DNA, 19 bp, Homo sapiens
  siRNA target sequence for CDKL3 (NM_016508.2,687-705).
caagagccccatttttgct

SEQ ID NO: 76379 - DNA, 19 bp, Homo sapiens
  siRNA target sequence for CDKL3 (NM_016508.2,770-788).
gattgttggcagatatagt

SEQ ID NO: 76380 - DNA, 19 bp, Homo sapiens
  siRNA target sequence for CDKL3 (NM_016508.2,774-792).
gttggcagatatagttcat

SEQ ID NO: 76381 - DNA, 19 bp, Homo sapiens
  siRNA target sequence for CDKL3 (NM_016508.2,814-832).
gctgacaggatatcatcta

SEQ ID NO: 76382 - DNA, 19 bp, Homo sapiens
  siRNA target sequence for CDKL3 (NM_016508.2,822-840).
gatatcatctagtgatctt

SEQ ID NO: 76383 - DNA, 19 bp, Homo sapiens
  siRNA target sequence for CDKL3 (NM_016508.2,827-845).
catctagtgatcttttgca

SEQ ID NO: 76384 - DNA, 19 bp, Homo sapiens
  siRNA target sequence for CDKL3 (NM_016508.2,953-971).
gttctaaagaaaatgaact

SEQ ID NO: 76385 - DNA, 19 bp, Homo sapiens
  siRNA target sequence for CDKL3 (NM_016508.2,1002-1020).
caatacactgctaagtagt

SEQ ID NO: 76386 - DNA, 19 bp, Homo sapiens
  siRNA target sequence for CDKL3 (NM_016508.2,1009-1027).
ctgctaagtagttcagttt

SEQ ID NO: 76387 - DNA, 19 bp, Homo sapiens
  siRNA target sequence for CDKL3 (NM_016508.2,1177-1195).
cctatgtctccagatacaa

SEQ ID NO: 76388 - DNA, 19 bp, Homo sapiens
  siRNA target sequence for CDKL3 (NM_016508.2,1186-1204).
ccagatacaaaacttgtaa

SEQ ID NO: 76389 - DNA, 19 bp, Homo sapiens
  siRNA target sequence for CDKL3 (NM_016508.2,1227-1245).
caatcccagcactaactgt

SEQ ID NO: 76390 - DNA, 19 bp, Homo sapiens
  siRNA target sequence for CDKL3 (NM_016508.2,1271-1289).
gcggaggttctgtgacaat

SEQ ID NO: 76391 - DNA, 19 bp, Homo sapiens
  siRNA target sequence for CDKL3 (NM_016508.2,1290-1308).
gccacccatcaatctaact

SEQ ID NO: 76392 - DNA, 19 bp, Homo sapiens
  siRNA target sequence for CDKL3 (NM_016508.2,1292-1310).
cacccatcaatctaactaa

SEQ ID NO: 76393 - DNA, 19 bp, Homo sapiens
  siRNA target sequence for CDKL3 (NM_016508.2,1294-1312).
cccatcaatctaactaaca

SEQ ID NO: 76394 - DNA, 19 bp, Homo sapiens
  siRNA target sequence for CDKL3 (NM_016508.2,1299-1317).
caatctaactaacagtaat

SEQ ID NO: 76395 - DNA, 19 bp, Homo sapiens
  siRNA target sequence for CDKL3 (NM_016508.2,1303-1321).
ctaactaacagtaatttga

SEQ ID NO: 76396 - DNA, 19 bp, Homo sapiens
  siRNA target sequence for CDKL3 (NM_016508.2,1324-1342).
gctgcaaatctcagttcaa

SEQ ID NO: 76397 - DNA, 19 bp, Homo sapiens
  siRNA target sequence for CDKL5 (NM_003159.1,227-245).
gattcctaacattggtaat

SEQ ID NO: 76398 - DNA, 19 bp, Homo sapiens
  siRNA target sequence for CDKL5 (NM_003159.1,240-258).
ggtaatgtgatgaataaat

SEQ ID NO: 76399 - DNA, 19 bp, Homo sapiens
  siRNA target sequence for CDKL5 (NM_003159.1,288-306).
gcctatggagttgtactta

SEQ ID NO: 76400 - DNA, 19 bp, Homo sapiens
  siRNA target sequence for CDKL5 (NM_003159.1,289-307).
cctatggagttgtacttaa

SEQ ID NO: 76401 - DNA, 19 bp, Homo sapiens
  siRNA target sequence for CDKL5 (NM_003159.1,290-308).
ctatggagttgtacttaaa

SEQ ID NO: 76402 - DNA, 19 bp, Homo sapiens
  siRNA target sequence for CDKL5 (NM_003159.1,330-348).
gaaattgtggcgatcaaga

SEQ ID NO: 76403 - DNA, 19 bp, Homo sapiens
  siRNA target sequence for CDKL5 (NM_003159.1,380-398).
caaagaaacgactttacga

SEQ ID NO: 76404 - DNA, 19 bp, Homo sapiens
  siRNA target sequence for CDKL5 (NM_003159.1,460-478).
gtcggaggggaaagttgta

SEQ ID NO: 76405 - DNA, 19 bp, Homo sapiens
  siRNA target sequence for CDKL5 (NM_003159.1,510-528).
ctcgaattgctggaagaaa

SEQ ID NO: 76406 - DNA, 19 bp, Homo sapiens
  siRNA target sequence for CDKL5 (NM_003159.1,540-558).
gttccacctgagaaagtaa

SEQ ID NO: 76407 - DNA, 19 bp, Homo sapiens
  siRNA target sequence for CDKL5 (NM_003159.1,543-561).
ccacctgagaaagtaaaaa

SEQ ID NO: 76408 - DNA, 19 bp, Homo sapiens
  siRNA target sequence for CDKL5 (NM_003159.1,562-580).
gctacatctatcagctaat

SEQ ID NO: 76409 - DNA, 19 bp, Homo sapiens
  siRNA target sequence for CDKL5 (NM_003159.1,644-662).
cttaatcagccacaatgat

SEQ ID NO: 76410 - DNA, 19 bp, Homo sapiens
  siRNA target sequence for CDKL5 (NM_003159.1,652-670).
gccacaatgatgtcctaaa

SEQ ID NO: 76411 - DNA, 19 bp, Homo sapiens
  siRNA target sequence for CDKL5 (NM_003159.1,680-698).
ctttggttttgctcgtaat

SEQ ID NO: 76412 - DNA, 19 bp, Homo sapiens
  siRNA target sequence for CDKL5 (NM_003159.1,684-702).
ggttttgctcgtaatctgt

SEQ ID NO: 76413 - DNA, 19 bp, Homo sapiens
  siRNA target sequence for CDKL5 (NM_003159.1,705-723).
gaaggcaataatgctaatt

SEQ ID NO: 76414 - DNA, 19 bp, Homo sapiens
  siRNA target sequence for CDKL5 (NM_003159.1,708-726).
ggcaataatgctaattaca

SEQ ID NO: 76415 - DNA, 19 bp, Homo sapiens
  siRNA target sequence for CDKL5 (NM_003159.1,771-789).
cttggcgctccctatggaa

SEQ ID NO: 76416 - DNA, 19 bp, Homo sapiens
  siRNA target sequence for CDKL5 (NM_003159.1,803-821).
gtggtcggtgggctgtatt

SEQ ID NO: 76417 - DNA, 19 bp, Homo sapiens
  siRNA target sequence for CDKL5 (NM_003159.1,835-853).
gcgatggacagcctttatt

SEQ ID NO: 76418 - DNA, 19 bp, Homo sapiens
  siRNA target sequence for CDKL5 (NM_003159.1,867-885).
gaaattgaccaacttttta

SEQ ID NO: 76419 - DNA, 19 bp, Homo sapiens
  siRNA target sequence for CDKL5 (NM_003159.1,1003-1021).
gataccttggaattttgaa

SEQ ID NO: 76420 - DNA, 19 bp, Homo sapiens
  siRNA target sequence for CDKL5 (NM_003159.1,1026-1044).
gttctacttgacctaatga

SEQ ID NO: 76421 - DNA, 19 bp, Homo sapiens
  siRNA target sequence for CDKL5 (NM_003159.1,1082-1100).
gacagaacagtgtttgaat

SEQ ID NO: 76422 - DNA, 19 bp, Homo sapiens
  siRNA target sequence for CDKL5 (NM_003159.1,1093-1111).
gtttgaatcaccctacatt

SEQ ID NO: 76423 - DNA, 19 bp, Homo sapiens
  siRNA target sequence for CDKL5 (NM_003159.1,1097-1115).
gaatcaccctacatttcaa

SEQ ID NO: 76424 - DNA, 19 bp, Homo sapiens
  siRNA target sequence for CDKL5 (NM_003159.1,1175-1193).
ggaaagcagcacattgtct

SEQ ID NO: 76425 - DNA, 19 bp, Homo sapiens
  siRNA target sequence for CDKL5 (NM_003159.1,1176-1194).
gaaagcagcacattgtcta

SEQ ID NO: 76426 - DNA, 19 bp, Homo sapiens
  siRNA target sequence for CDKL5 (NM_003159.1,1202-1220).
ccaagccggcaaaagtact

SEQ ID NO: 76427 - DNA, 19 bp, Homo sapiens
  siRNA target sequence for CDKL5 (NM_003159.1,1305-1323).
gccaatgaaagcttcctaa

SEQ ID NO: 76428 - DNA, 19 bp, Homo sapiens
  siRNA target sequence for CDKL5 (NM_003159.1,1457-1475).
gtcaaaaacagagtttgat

SEQ ID NO: 76429 - DNA, 19 bp, Homo sapiens
  siRNA target sequence for CDKL5 (NM_003159.1,1545-1563).
cagaaccgccactcattca

SEQ ID NO: 76430 - DNA, 19 bp, Homo sapiens
  siRNA target sequence for CDKL5 (NM_003159.1,1551-1569).
cgccactcattcatggaaa

SEQ ID NO: 76431 - DNA, 19 bp, Homo sapiens
  siRNA target sequence for CDKL5 (NM_003159.1,1610-1628).
gcagagtcggcatagctat

SEQ ID NO: 76432 - DNA, 19 bp, Homo sapiens
  siRNA target sequence for CDKL5 (NM_003159.1,1613-1631).
gagtcggcatagctatatt

SEQ ID NO: 76433 - DNA, 19 bp, Homo sapiens
  siRNA target sequence for CDKL5 (NM_003159.1,1615-1633).
gtcggcatagctatattga

SEQ ID NO: 76434 - DNA, 19 bp, Homo sapiens
  siRNA target sequence for CDKL5 (NM_003159.1,1774-1792).
catctagctgcttagactt

SEQ ID NO: 76435 - DNA, 19 bp, Homo sapiens
  siRNA target sequence for CDKL5 (NM_003159.1,1824-1842).
cacagtgacacgagaactt

SEQ ID NO: 76436 - DNA, 19 bp, Homo sapiens
  siRNA target sequence for CDKL5 (NM_003159.1,1896-1914).
cgaaccacaaccagacatt

SEQ ID NO: 76437 - DNA, 19 bp, Homo sapiens
  siRNA target sequence for CDKL5 (NM_003159.1,1900-1918).
ccacaaccagacattctaa

SEQ ID NO: 76438 - DNA, 19 bp, Homo sapiens
  siRNA target sequence for CDKL5 (NM_003159.1,1915-1933).
ctaagacgatggaggaatt

SEQ ID NO: 76439 - DNA, 19 bp, Homo sapiens
  siRNA target sequence for CDKL5 (NM_003159.1,1978-1996).
ctgcacctcacgaatcttt

SEQ ID NO: 76440 - DNA, 19 bp, Homo sapiens
  siRNA target sequence for CDKL5 (NM_003159.1,2040-2058).
cgtcctcataggcattcta

SEQ ID NO: 76441 - DNA, 19 bp, Homo sapiens
  siRNA target sequence for CDKL5 (NM_003159.1,2041-2059).
gtcctcataggcattctat

SEQ ID NO: 76442 - DNA, 19 bp, Homo sapiens
  siRNA target sequence for CDKL5 (NM_003159.1,2043-2061).
cctcataggcattctatgt

SEQ ID NO: 76443 - DNA, 19 bp, Homo sapiens
  siRNA target sequence for CDKL5 (NM_003159.1,2044-2062).
ctcataggcattctatgta

SEQ ID NO: 76444 - DNA, 19 bp, Homo sapiens
  siRNA target sequence for CDKL5 (NM_003159.1,2060-2078).
gtatgtgacccgtgacaaa

SEQ ID NO: 76445 - DNA, 19 bp, Homo sapiens
  siRNA target sequence for CDKL5 (NM_003159.1,2200-2218).
caagatcttcggtcaaaga

SEQ ID NO: 76446 - DNA, 19 bp, Homo sapiens
  siRNA target sequence for CDKL5 (NM_003159.1,2350-2368).
ggagagttggtagctttta

SEQ ID NO: 76447 - DNA, 19 bp, Homo sapiens
  siRNA target sequence for CDKL5 (NM_003159.1,2406-2424).
gaaaataatgtgtcaacta

SEQ ID NO: 76448 - DNA, 19 bp, Homo sapiens
  siRNA target sequence for CDKL5 (NM_003159.1,2484-2502).
gcattcgatccatggaaaa

SEQ ID NO: 76449 - DNA, 19 bp, Homo sapiens
  siRNA target sequence for CDKL5 (NM_003159.1,2494-2512).
catggaaaagtcctgaaaa

SEQ ID NO: 76450 - DNA, 19 bp, Homo sapiens
  siRNA target sequence for CDKL5 (NM_003159.1,2503-2521).
gtcctgaaaatattagtca

SEQ ID NO: 76451 - DNA, 19 bp, Homo sapiens
  siRNA target sequence for CDKL5 (NM_003159.1,2554-2572).
gatttttcaggtcaatgaa

SEQ ID NO: 76452 - DNA, 19 bp, Homo sapiens
  siRNA target sequence for CDKL5 (NM_003159.1,2622-2640).
cttctgacgttgcagaaat

SEQ ID NO: 76453 - DNA, 19 bp, Homo sapiens
  siRNA target sequence for CDKL5 (NM_003159.1,2627-2645).
gacgttgcagaaatccatt

SEQ ID NO: 76454 - DNA, 19 bp, Homo sapiens
  siRNA target sequence for CDKL5 (NM_003159.1,2630-2648).
gttgcagaaatccattcat

SEQ ID NO: 76455 - DNA, 19 bp, Homo sapiens
  siRNA target sequence for CDKL5 (NM_003159.1,2792-2810).
ccgcttccagcccttaaca

SEQ ID NO: 76456 - DNA, 19 bp, Homo sapiens
  siRNA target sequence for CDKL5 (NM_003159.1,2930-2948).
gccagacggtggatgtgat

SEQ ID NO: 76457 - DNA, 19 bp, Homo sapiens
  siRNA target sequence for CDKL5 (NM_003159.1,2967-2985).
cattctggaccccaagata

SEQ ID NO: 76458 - DNA, 19 bp, Homo sapiens
  siRNA target sequence for CDKL5 (NM_003159.1,2982-3000).
gatagacgcttcatgttaa

SEQ ID NO: 76459 - DNA, 19 bp, Homo sapiens
  siRNA target sequence for CDKL5 (NM_003159.1,2996-3014).
gttaaggacgacagaacaa

SEQ ID NO: 76460 - DNA, 19 bp, Homo sapiens
  siRNA target sequence for CDKL5 (NM_003159.1,3012-3030).
caacaaggagaatacttct

SEQ ID NO: 76461 - DNA, 19 bp, Homo sapiens
  siRNA target sequence for CDKL5 (NM_003159.1,3195-3213).
caatccgggttctctttct

SEQ ID NO: 76462 - DNA, 19 bp, Homo sapiens
  siRNA target sequence for CDKL5 (NM_003159.1,3275-3293).
cctgacataccatgagaat

SEQ ID NO: 76463 - DNA, 19 bp, Homo sapiens
  siRNA target sequence for CENPE (NM_001813.1,169-187).
gcccaagtttactggaaaa

SEQ ID NO: 76464 - DNA, 19 bp, Homo sapiens
  siRNA target sequence for CENPE (NM_001813.1,217-235).
ggaagtaaatccttcaatt

SEQ ID NO: 76465 - DNA, 19 bp, Homo sapiens
  siRNA target sequence for CENPE (NM_001813.1,242-260).
gtgtctttcatggtaatga

SEQ ID NO: 76466 - DNA, 19 bp, Homo sapiens
  siRNA target sequence for CENPE (NM_001813.1,289-307).
gcagcaccaatcatcgatt

SEQ ID NO: 76467 - DNA, 19 bp, Homo sapiens
  siRNA target sequence for CENPE (NM_001813.1,410-428).
ccagggcaattcatgacat

SEQ ID NO: 76468 - DNA, 19 bp, Homo sapiens
  siRNA target sequence for CENPE (NM_001813.1,413-431).
gggcaattcatgacatttt

SEQ ID NO: 76469 - DNA, 19 bp, Homo sapiens
  siRNA target sequence for CENPE (NM_001813.1,553-571).
cgagaagatgtcaatagga

SEQ ID NO: 76470 - DNA, 19 bp, Homo sapiens
  siRNA target sequence for CENPE (NM_001813.1,559-577).
gatgtcaataggaatgtgt

SEQ ID NO: 76471 - DNA, 19 bp, Homo sapiens
  siRNA target sequence for CENPE (NM_001813.1,564-582).
caataggaatgtgtatgtt

SEQ ID NO: 76472 - DNA, 19 bp, Homo sapiens
  siRNA target sequence for CENPE (NM_001813.1,591-609).
cacagaagaagttgtatat

SEQ ID NO: 76473 - DNA, 19 bp, Homo sapiens
  siRNA target sequence for CENPE (NM_001813.1,656-674).
ggcattatggagaaacaaa

SEQ ID NO: 76474 - DNA, 19 bp, Homo sapiens
  siRNA target sequence for CENPE (NM_001813.1,689-707).
gcagtcgttctcataccat

SEQ ID NO: 76475 - DNA, 19 bp, Homo sapiens
  siRNA target sequence for CENPE (NM_001813.1,698-716).
ctcataccatctttaggat

SEQ ID NO: 76476 - DNA, 19 bp, Homo sapiens
  siRNA target sequence for CENPE (NM_001813.1,735-753).
gaagggtgaaccttctaat

SEQ ID NO: 76477 - DNA, 19 bp, Homo sapiens
  siRNA target sequence for CENPE (NM_001813.1,738-756).
gggtgaaccttctaattgt

SEQ ID NO: 76478 - DNA, 19 bp, Homo sapiens
  siRNA target sequence for CENPE (NM_001813.1,740-758).
gtgaaccttctaattgtga

SEQ ID NO: 76479 - DNA, 19 bp, Homo sapiens
  siRNA target sequence for CENPE (NM_001813.1,755-773).
gtgaaggatctgttaaggt

SEQ ID NO: 76480 - DNA, 19 bp, Homo sapiens
  siRNA target sequence for CENPE (NM_001813.1,853-871).
ggctgtaatataaatcgaa

SEQ ID NO: 76481 - DNA, 19 bp, Homo sapiens
  siRNA target sequence for CENPE (NM_001813.1,885-903).
gggacaagtgatcaagaaa

SEQ ID NO: 76482 - DNA, 19 bp, Homo sapiens
  siRNA target sequence for CENPE (NM_001813.1,1008-1026).
cacaattactccagtatct

SEQ ID NO: 76483 - DNA, 19 bp, Homo sapiens
  siRNA target sequence for CENPE (NM_001813.1,1010-1028).
caattactccagtatcttt

SEQ ID NO: 76484 - DNA, 19 bp, Homo sapiens
  siRNA target sequence for CENPE (NM_001813.1,1016-1034).
ctccagtatcttttgatga

SEQ ID NO: 76485 - DNA, 19 bp, Homo sapiens
  siRNA target sequence for CENPE (NM_001813.1,1058-1076).
ccagtactgctaaatatat

SEQ ID NO: 76486 - DNA, 19 bp, Homo sapiens
  siRNA target sequence for CENPE (NM_001813.1,1168-1186).
gaggaggtttctttagaga

SEQ ID NO: 76487 - DNA, 19 bp, Homo sapiens
  siRNA target sequence for CENPE (NM_001813.1,1321-1339).
caggaattaaaggctaaaa

SEQ ID NO: 76488 - DNA, 19 bp, Homo sapiens
  siRNA target sequence for CENPE (NM_001813.1,1395-1413).
ctatgcagatcaatttaat

SEQ ID NO: 76489 - DNA, 19 bp, Homo sapiens
  siRNA target sequence for CENPE (NM_001813.1,1492-1510).
gagtctgatgttttcagta

SEQ ID NO: 76490 - DNA, 19 bp, Homo sapiens
  siRNA target sequence for CENPE (NM_001813.1,1508-1526).
gtaacactcttgatacatt

SEQ ID NO: 76491 - DNA, 19 bp, Homo sapiens
  siRNA target sequence for CENPE (NM_001813.1,1512-1530).
cactcttgatacattaagt

SEQ ID NO: 76492 - DNA, 19 bp, Homo sapiens
  siRNA target sequence for CENPE (NM_001813.1,1542-1560).
gaatccagcaacaaagcta

SEQ ID NO: 76493 - DNA, 19 bp, Homo sapiens
  siRNA target sequence for CENPE (NM_001813.1,1550-1568).
caacaaagctactaaatca

SEQ ID NO: 76494 - DNA, 19 bp, Homo sapiens
  siRNA target sequence for CENPE (NM_001813.1,1597-1615).
cttcgtgctgactatgata

SEQ ID NO: 76495 - DNA, 19 bp, Homo sapiens
  siRNA target sequence for CENPE (NM_001813.1,1612-1630).
gataatctggtattagact

SEQ ID NO: 76496 - DNA, 19 bp, Homo sapiens
  siRNA target sequence for CENPE (NM_001813.1,1729-1747).
gatcaagagatgcaactaa

SEQ ID NO: 76497 - DNA, 19 bp, Homo sapiens
  siRNA target sequence for CENPE (NM_001813.1,1753-1771).
gaaatttcgaacttaaaga

SEQ ID NO: 76498 - DNA, 19 bp, Homo sapiens
  siRNA target sequence for CENPE (NM_001813.1,1760-1778).
cgaacttaaagaatttagt

SEQ ID NO: 76499 - DNA, 19 bp, Homo sapiens
  siRNA target sequence for CENPE (NM_001813.1,1870-1888).
ctacaggaatacatagact

SEQ ID NO: 76500 - DNA, 19 bp, Homo sapiens
  siRNA target sequence for CENPE (NM_001813.1,1926-1944).
ctcattggaaagcattgaa

SEQ ID NO: 76501 - DNA, 19 bp, Homo sapiens
  siRNA target sequence for CENPE (NM_001813.1,1937-1955).
gcattgaagacccaaaaca

SEQ ID NO: 76502 - DNA, 19 bp, Homo sapiens
  siRNA target sequence for CENPE (NM_001813.1,1959-1977).
gaagcagactctgtttgat

SEQ ID NO: 76503 - DNA, 19 bp, Homo sapiens
  siRNA target sequence for CENPE (NM_001813.1,2004-2022).
gagagaatcagcctttctt

SEQ ID NO: 76504 - DNA, 19 bp, Homo sapiens
  siRNA target sequence for CENPE (NM_001813.1,2065-2083).
gcaactacatacaagcaaa

SEQ ID NO: 76505 - DNA, 19 bp, Homo sapiens
  siRNA target sequence for CENPE (NM_001813.1,2092-2110).
gatattcagttatatcaaa

SEQ ID NO: 76506 - DNA, 19 bp, Homo sapiens
  siRNA target sequence for CENPE (NM_001813.1,2196-2214).
ccttatagatggcaaagtt

SEQ ID NO: 76507 - DNA, 19 bp, Homo sapiens
  siRNA target sequence for CENPE (NM_001813.1,2229-2247).
ctgtaatttggaattggaa

SEQ ID NO: 76508 - DNA, 19 bp, Homo sapiens
  siRNA target sequence for CENPE (NM_001813.1,2303-2321).
ctttgcgggaagaagtcat

SEQ ID NO: 76509 - DNA, 19 bp, Homo sapiens
  siRNA target sequence for CENPE (NM_001813.1,2456-2474).
gtagagttcaaggtttact

SEQ ID NO: 76510 - DNA, 19 bp, Homo sapiens
  siRNA target sequence for CENPE (NM_001813.1,2459-2477).
gagttcaaggtttacttga

SEQ ID NO: 76511 - DNA, 19 bp, Homo sapiens
  siRNA target sequence for CENPE (NM_001813.1,2506-2524).
gcaactacacagtcgaatt

SEQ ID NO: 76512 - DNA, 19 bp, Homo sapiens
  siRNA target sequence for CENPE (NM_001813.1,2507-2525).
caactacacagtcgaatta

SEQ ID NO: 76513 - DNA, 19 bp, Homo sapiens
  siRNA target sequence for CENPE (NM_001813.1,2510-2528).
ctacacagtcgaattataa

SEQ ID NO: 76514 - DNA, 19 bp, Homo sapiens
  siRNA target sequence for CENPE (NM_001813.1,2515-2533).
cagtcgaattataaaagca

SEQ ID NO: 76515 - DNA, 19 bp, Homo sapiens
  siRNA target sequence for CENPE (NM_001813.1,2531-2549).
gcactgatcaagaattcca

SEQ ID NO: 76516 - DNA, 19 bp, Homo sapiens
  siRNA target sequence for CENPE (NM_001813.1,2647-2665).
gaagcccaaaaatttgatt

SEQ ID NO: 76517 - DNA, 19 bp, Homo sapiens
  siRNA target sequence for CENPE (NM_001813.1,2666-2684).
cgagtttgggtgctttgaa

SEQ ID NO: 76518 - DNA, 19 bp, Homo sapiens
  siRNA target sequence for CENPE (NM_001813.1,2696-2714).
cttacaagacccaagaact

SEQ ID NO: 76519 - DNA, 19 bp, Homo sapiens
  siRNA target sequence for CENPE (NM_001813.1,2947-2965).
cacgatactgttaacatga

SEQ ID NO: 76520 - DNA, 19 bp, Homo sapiens
  siRNA target sequence for CENPE (NM_001813.1,2949-2967).
cgatactgttaacatgaat

SEQ ID NO: 76521 - DNA, 19 bp, Homo sapiens
  siRNA target sequence for CENPE (NM_001813.1,2964-2982).
gaatatagatactcaagaa

SEQ ID NO: 76522 - DNA, 19 bp, Homo sapiens
  siRNA target sequence for CENPE (NM_001813.1,3147-3165).
ggatttggaagctaaaaat

SEQ ID NO: 76523 - DNA, 19 bp, Homo sapiens
  siRNA target sequence for CENPE (NM_001813.1,3158-3176).
ctaaaaatacccaaacact

SEQ ID NO: 76524 - DNA, 19 bp, Homo sapiens
  siRNA target sequence for CENPE (NM_001813.1,3187-3205).
gttaaggataatgagataa

SEQ ID NO: 76525 - DNA, 19 bp, Homo sapiens
  siRNA target sequence for CENPE (NM_001813.1,3199-3217).
gagataattgagcaacaaa

SEQ ID NO: 76526 - DNA, 19 bp, Homo sapiens
  siRNA target sequence for CENPE (NM_001813.1,3208-3226).
gagcaacaaaggaagatat

SEQ ID NO: 76527 - DNA, 19 bp, Homo sapiens
  siRNA target sequence for CENPE (NM_001813.1,3259-3277).
caaatgttagagagtgtta

SEQ ID NO: 76528 - DNA, 19 bp, Homo sapiens
  siRNA target sequence for CENPE (NM_001813.1,3264-3282).
gttagagagtgttatagca

SEQ ID NO: 76529 - DNA, 19 bp, Homo sapiens
  siRNA target sequence for CENPE (NM_001813.1,3300-3318).
gactgacctaaaggaaaat

SEQ ID NO: 76530 - DNA, 19 bp, Homo sapiens
  siRNA target sequence for CENPE (NM_001813.1,3452-3470).
gactggcagaagttgaaga

SEQ ID NO: 76531 - DNA, 19 bp, Homo sapiens
  siRNA target sequence for CENPE (NM_001813.1,3601-3619).
gaattgacattggaacata

SEQ ID NO: 76532 - DNA, 19 bp, Homo sapiens
  siRNA target sequence for CENPE (NM_001813.1,3606-3624).
gacattggaacatatggaa

SEQ ID NO: 76533 - DNA, 19 bp, Homo sapiens
  siRNA target sequence for CENPE (NM_001813.1,3633-3651).
gcttgagttggctcagaaa

SEQ ID NO: 76534 - DNA, 19 bp, Homo sapiens
  siRNA target sequence for CENPE (NM_001813.1,3637-3655).
gagttggctcagaaactta

SEQ ID NO: 76535 - DNA, 19 bp, Homo sapiens
  siRNA target sequence for CENPE (NM_001813.1,3667-3685).
gaggaagtgaaatctataa

SEQ ID NO: 76536 - DNA, 19 bp, Homo sapiens
  siRNA target sequence for CENPE (NM_001813.1,3739-3757).
gaccaccttagaggatata

SEQ ID NO: 76537 - DNA, 19 bp, Homo sapiens
  siRNA target sequence for CENPE (NM_001813.1,3741-3759).
ccaccttagaggatatata

SEQ ID NO: 76538 - DNA, 19 bp, Homo sapiens
  siRNA target sequence for CENPE (NM_001813.1,3742-3760).
caccttagaggatatataa

SEQ ID NO: 76539 - DNA, 19 bp, Homo sapiens
  siRNA target sequence for CENPE (NM_001813.1,3744-3762).
ccttagaggatatataaga

SEQ ID NO: 76540 - DNA, 19 bp, Homo sapiens
  siRNA target sequence for CENPE (NM_001813.1,3773-3791).
ctacaggcctacaaaccaa

SEQ ID NO: 76541 - DNA, 19 bp, Homo sapiens
  siRNA target sequence for CENPE (NM_001813.1,3878-3896).
ctcaaataataaatactca

SEQ ID NO: 76542 - DNA, 19 bp, Homo sapiens
  siRNA target sequence for CENPE (NM_001813.1,3958-3976).
gagttactgcctaatgtga

SEQ ID NO: 76543 - DNA, 19 bp, Homo sapiens
  siRNA target sequence for CENPE (NM_001813.1,3960-3978).
gttactgcctaatgtgaaa

SEQ ID NO: 76544 - DNA, 19 bp, Homo sapiens
  siRNA target sequence for CENPE (NM_001813.1,3988-4006).
gagactcaggaaacaatga

SEQ ID NO: 76545 - DNA, 19 bp, Homo sapiens
  siRNA target sequence for CENPE (NM_001813.1,4005-4023).
gaatgaactggagttatta

SEQ ID NO: 76546 - DNA, 19 bp, Homo sapiens
  siRNA target sequence for CENPE (NM_001813.1,4055-4073).
cactggcaagaatagaaat

SEQ ID NO: 76547 - DNA, 19 bp, Homo sapiens
  siRNA target sequence for CENPE (NM_001813.1,4144-4162).
gacaaccttaaaacgataa

SEQ ID NO: 76548 - DNA, 19 bp, Homo sapiens
  siRNA target sequence for CENPE (NM_001813.1,4146-4164).
caaccttaaaacgataaaa

SEQ ID NO: 76549 - DNA, 19 bp, Homo sapiens
  siRNA target sequence for CENPE (NM_001813.1,4191-4209).
gctgaaagaacatattaga

SEQ ID NO: 76550 - DNA, 19 bp, Homo sapiens
  siRNA target sequence for CENPE (NM_001813.1,4334-4352).
cactactaaggatagaaat

SEQ ID NO: 76551 - DNA, 19 bp, Homo sapiens
  siRNA target sequence for CENPE (NM_001813.1,4359-4377).
gctcggattgtccaaaaga

SEQ ID NO: 76552 - DNA, 19 bp, Homo sapiens
  siRNA target sequence for CENPE (NM_001813.1,4362-4380).
cggattgtccaaaagactt

SEQ ID NO: 76553 - DNA, 19 bp, Homo sapiens
  siRNA target sequence for CENPE (NM_001813.1,4434-4452).
gaggctgcaagaagttctt

SEQ ID NO: 76554 - DNA, 19 bp, Homo sapiens
  siRNA target sequence for CENPE (NM_001813.1,4440-4458).
gcaagaagttcttcaatct

SEQ ID NO: 76555 - DNA, 19 bp, Homo sapiens
  siRNA target sequence for CENPE (NM_001813.1,4541-4559).
gttgcctgaaagaacaaga

SEQ ID NO: 76556 - DNA, 19 bp, Homo sapiens
  siRNA target sequence for CENPE (NM_001813.1,4552-4570).
gaacaagaggaaactatta

SEQ ID NO: 76557 - DNA, 19 bp, Homo sapiens
  siRNA target sequence for CENPE (NM_001813.1,4560-4578).
ggaaactattaatgagtta

SEQ ID NO: 76558 - DNA, 19 bp, Homo sapiens
  siRNA target sequence for CENPE (NM_001813.1,4565-4583).
ctattaatgagttaagagt

SEQ ID NO: 76559 - DNA, 19 bp, Homo sapiens
  siRNA target sequence for CENPE (NM_001813.1,4573-4591).
gagttaagagtgaatcttt

SEQ ID NO: 76560 - DNA, 19 bp, Homo sapiens
  siRNA target sequence for CENPE (NM_001813.1,4637-4655).
caatcaatgataaattaca

SEQ ID NO: 76561 - DNA, 19 bp, Homo sapiens
  siRNA target sequence for CENPE (NM_001813.1,4756-4774).
catcgcaaagccaaggatt

SEQ ID NO: 76562 - DNA, 19 bp, Homo sapiens
  siRNA target sequence for CENPE (NM_001813.1,4770-4788).
ggattcagcactacaaagt

SEQ ID NO: 76563 - DNA, 19 bp, Homo sapiens
  siRNA target sequence for CENPE (NM_001813.1,4780-4798).
ctacaaagtatagaaagta

SEQ ID NO: 76564 - DNA, 19 bp, Homo sapiens
  siRNA target sequence for CENPE (NM_001813.1,4783-4801).
caaagtatagaaagtaaga

SEQ ID NO: 76565 - DNA, 19 bp, Homo sapiens
  siRNA target sequence for CENPE (NM_001813.1,4809-4827).
gttgaccaacagacttcaa

SEQ ID NO: 76566 - DNA, 19 bp, Homo sapiens
  siRNA target sequence for CENPE (NM_001813.1,4846-4864).
caaattatgattaaggaaa

SEQ ID NO: 76567 - DNA, 19 bp, Homo sapiens
  siRNA target sequence for CENPE (NM_001813.1,4888-4906).
gaggcccttcagatagaga

SEQ ID NO: 76568 - DNA, 19 bp, Homo sapiens
  siRNA target sequence for CENPE (NM_001813.1,5061-5079).
gttaaacctggaaaacata

SEQ ID NO: 76569 - DNA, 19 bp, Homo sapiens
  siRNA target sequence for CENPE (NM_001813.1,5076-5094).
catagaaacggagaatata

SEQ ID NO: 76570 - DNA, 19 bp, Homo sapiens
  siRNA target sequence for CENPE (NM_001813.1,5080-5098).
gaaacggagaatataaggt

SEQ ID NO: 76571 - DNA, 19 bp, Homo sapiens
  siRNA target sequence for CENPE (NM_001813.1,5096-5114).
ggttgactcagatactaca

SEQ ID NO: 76572 - DNA, 19 bp, Homo sapiens
  siRNA target sequence for CENPE (NM_001813.1,5487-5505).
gaagacagataaactatca

SEQ ID NO: 76573 - DNA, 19 bp, Homo sapiens
  siRNA target sequence for CENPE (NM_001813.1,5570-5588).
caaatgaacatcaacttat

SEQ ID NO: 76574 - DNA, 19 bp, Homo sapiens
  siRNA target sequence for CENPE (NM_001813.1,5575-5593).
gaacatcaacttattacgt

SEQ ID NO: 76575 - DNA, 19 bp, Homo sapiens
  siRNA target sequence for CENPE (NM_001813.1,5578-5596).
catcaacttattacgttaa

SEQ ID NO: 76576 - DNA, 19 bp, Homo sapiens
  siRNA target sequence for CENPE (NM_001813.1,5581-5599).
caacttattacgttaaaaa

SEQ ID NO: 76577 - DNA, 19 bp, Homo sapiens
  siRNA target sequence for CENPE (NM_001813.1,5669-5687).
gcttaactctgagtaaatt

SEQ ID NO: 76578 - DNA, 19 bp, Homo sapiens
  siRNA target sequence for CENPE (NM_001813.1,5670-5688).
cttaactctgagtaaatta

SEQ ID NO: 76579 - DNA, 19 bp, Homo sapiens
  siRNA target sequence for CENPE (NM_001813.1,5873-5891).
ctgctcgtatgctatcaaa

SEQ ID NO: 76580 - DNA, 19 bp, Homo sapiens
  siRNA target sequence for CENPE (NM_001813.1,5876-5894).
ctcgtatgctatcaaaaga

SEQ ID NO: 76581 - DNA, 19 bp, Homo sapiens
  siRNA target sequence for CENPE (NM_001813.1,6036-6054).
gcttagagtgaaagaagat

SEQ ID NO: 76582 - DNA, 19 bp, Homo sapiens
  siRNA target sequence for CENPE (NM_001813.1,6052-6070).
gatgtcaatatgagtcata

SEQ ID NO: 76583 - DNA, 19 bp, Homo sapiens
  siRNA target sequence for CENPE (NM_001813.1,6139-6157).
gataacttccagttgacta

SEQ ID NO: 76584 - DNA, 19 bp, Homo sapiens
  siRNA target sequence for CENPE (NM_001813.1,6144-6162).
cttccagttgactaagaaa

SEQ ID NO: 76585 - DNA, 19 bp, Homo sapiens
  siRNA target sequence for CENPE (NM_001813.1,6150-6168).
gttgactaagaaacttcat

SEQ ID NO: 76586 - DNA, 19 bp, Homo sapiens
  siRNA target sequence for CENPE (NM_001813.1,6253-6271).
caattcatagcaaccttaa

SEQ ID NO: 76587 - DNA, 19 bp, Homo sapiens
  siRNA target sequence for CENPE (NM_001813.1,6307-6325).
gtaaaacctgaaaaaaggt

SEQ ID NO: 76588 - DNA, 19 bp, Homo sapiens
  siRNA target sequence for CENPE (NM_001813.1,6388-6406).
gagcttttgaagagatact

SEQ ID NO: 76589 - DNA, 19 bp, Homo sapiens
  siRNA target sequence for CENPE (NM_001813.1,6390-6408).
gcttttgaagagatactca

SEQ ID NO: 76590 - DNA, 19 bp, Homo sapiens
  siRNA target sequence for CENPE (NM_001813.1,6407-6425).
cagagatggatgatcatta

SEQ ID NO: 76591 - DNA, 19 bp, Homo sapiens
  siRNA target sequence for CENPE (NM_001813.1,6421-6439).
cattatgagtgcttgaata

SEQ ID NO: 76592 - DNA, 19 bp, Homo sapiens
  siRNA target sequence for CENPE (NM_001813.1,6493-6511).
ctgaagtatgtgttaagct

SEQ ID NO: 76593 - DNA, 19 bp, Homo sapiens
  siRNA target sequence for CENPE (NM_001813.1,6502-6520).
gtgttaagctatgttacaa

SEQ ID NO: 76594 - DNA, 19 bp, Homo sapiens
  siRNA target sequence for CENPE (NM_001813.1,6634-6652).
gatgtaccatccagagaat

SEQ ID NO: 76595 - DNA, 19 bp, Homo sapiens
  siRNA target sequence for CENPE (NM_001813.1,6649-6667).
gaattaagggatctcaaat

SEQ ID NO: 76596 - DNA, 19 bp, Homo sapiens
  siRNA target sequence for CENPE (NM_001813.1,6661-6679).
ctcaaattgaaccagaata

SEQ ID NO: 76597 - DNA, 19 bp, Homo sapiens
  siRNA target sequence for CENPE (NM_001813.1,6722-6740).
gtgagttccctagcataaa

SEQ ID NO: 76598 - DNA, 19 bp, Homo sapiens
  siRNA target sequence for CENPE (NM_001813.1,6724-6742).
gagttccctagcataaaga

SEQ ID NO: 76599 - DNA, 19 bp, Homo sapiens
  siRNA target sequence for CENPE (NM_001813.1,6726-6744).
gttccctagcataaagact

SEQ ID NO: 76600 - DNA, 19 bp, Homo sapiens
  siRNA target sequence for CENPE (NM_001813.1,6730-6748).
cctagcataaagactgaat

SEQ ID NO: 76601 - DNA, 19 bp, Homo sapiens
  siRNA target sequence for CENPE (NM_001813.1,6735-6753).
cataaagactgaatttcaa

SEQ ID NO: 76602 - DNA, 19 bp, Homo sapiens
  siRNA target sequence for CENPE (NM_001813.1,6798-6816).
gtggttaaatactcgtttt

SEQ ID NO: 76603 - DNA, 19 bp, Homo sapiens
  siRNA target sequence for CENPE (NM_001813.1,6800-6818).
ggttaaatactcgttttga

SEQ ID NO: 76604 - DNA, 19 bp, Homo sapiens
  siRNA target sequence for CENPE (NM_001813.1,6801-6819).
gttaaatactcgttttgat

SEQ ID NO: 76605 - DNA, 19 bp, Homo sapiens
  siRNA target sequence for CENPE (NM_001813.1,6871-6889).
gtgaataacttctttaata

SEQ ID NO: 76606 - DNA, 19 bp, Homo sapiens
  siRNA target sequence for CENPE (NM_001813.1,6940-6958).
gctaccatatccaaagagt

SEQ ID NO: 76607 - DNA, 19 bp, Homo sapiens
  siRNA target sequence for CENPE (NM_001813.1,6966-6984).
ggacctgaaatcactgaaa

SEQ ID NO: 76608 - DNA, 19 bp, Homo sapiens
  siRNA target sequence for CENPE (NM_001813.1,7057-7075).
cctaccacacaagacaata

SEQ ID NO: 76609 - DNA, 19 bp, Homo sapiens
  siRNA target sequence for CENPE (NM_001813.1,7062-7080).
cacacaagacaataagaat

SEQ ID NO: 76610 - DNA, 19 bp, Homo sapiens
  siRNA target sequence for CENPE (NM_001813.1,7077-7095).
gaatcctcatgttacatca

SEQ ID NO: 76611 - DNA, 19 bp, Homo sapiens
  siRNA target sequence for CENPE (NM_001813.1,7127-7145).
gagagctggaaaattcact

SEQ ID NO: 76612 - DNA, 19 bp, Homo sapiens
  siRNA target sequence for CENPE (NM_001813.1,7171-7189).
cataaggaaagcaagatta

SEQ ID NO: 76613 - DNA, 19 bp, Homo sapiens
  siRNA target sequence for CENPE (NM_001813.1,7210-7228).
gaggtgactaatgacataa

SEQ ID NO: 76614 - DNA, 19 bp, Homo sapiens
  siRNA target sequence for CENPE (NM_001813.1,7212-7230).
ggtgactaatgacataata

SEQ ID NO: 76615 - DNA, 19 bp, Homo sapiens
  siRNA target sequence for CENPE (NM_001813.1,7217-7235).
ctaatgacataatagcaaa

SEQ ID NO: 76616 - DNA, 19 bp, Homo sapiens
  siRNA target sequence for CENPE (NM_001813.1,7305-7323).
ggacaaagttgctttagga

SEQ ID NO: 76617 - DNA, 19 bp, Homo sapiens
  siRNA target sequence for CENPE (NM_001813.1,7435-7453).
gccactgtagaatatcaaa

SEQ ID NO: 76618 - DNA, 19 bp, Homo sapiens
  siRNA target sequence for CENPE (NM_001813.1,7456-7474).
gaagttataaggctattga

SEQ ID NO: 76619 - DNA, 19 bp, Homo sapiens
  siRNA target sequence for CENPE (NM_001813.1,7466-7484).
ggctattgagagaaaatct

SEQ ID NO: 76620 - DNA, 19 bp, Homo sapiens
  siRNA target sequence for CENPE (NM_001813.1,7468-7486).
ctattgagagaaaatctca

SEQ ID NO: 76621 - DNA, 19 bp, Homo sapiens
  siRNA target sequence for CENPE (NM_001813.1,7503-7521).
ccaagatacctcagtgata

SEQ ID NO: 76622 - DNA, 19 bp, Homo sapiens
  siRNA target sequence for CENPE (NM_001813.1,7504-7522).
caagatacctcagtgatat

SEQ ID NO: 76623 - DNA, 19 bp, Homo sapiens
  siRNA target sequence for CENPE (NM_001813.1,7571-7589).
gtggcagcggcattgtaca

SEQ ID NO: 76624 - DNA, 19 bp, Homo sapiens
  siRNA target sequence for CENPE (NM_001813.1,7573-7591).
ggcagcggcattgtacaaa

SEQ ID NO: 76625 - DNA, 19 bp, Homo sapiens
  siRNA target sequence for CENPE (NM_001813.1,7574-7592).
gcagcggcattgtacaaaa

SEQ ID NO: 76626 - DNA, 19 bp, Homo sapiens
  siRNA target sequence for CENPE (NM_001813.1,7578-7596).
cggcattgtacaaaacaca

SEQ ID NO: 76627 - DNA, 19 bp, Homo sapiens
  siRNA target sequence for CENPE (NM_001813.1,7618-7636).
gaacatataaggctagaaa

SEQ ID NO: 76628 - DNA, 19 bp, Homo sapiens
  siRNA target sequence for CENPE (NM_001813.1,7629-7647).
gctagaaaaagaaatttct

SEQ ID NO: 76629 - DNA, 19 bp, Homo sapiens
  siRNA target sequence for CENPE (NM_001813.1,7671-7689).
gctaataaaacaaaagaat

SEQ ID NO: 76630 - DNA, 19 bp, Homo sapiens
  siRNA target sequence for CENPE (NM_001813.1,7790-7808).
ctccaaagtctcctaaagt

SEQ ID NO: 76631 - DNA, 19 bp, Homo sapiens
  siRNA target sequence for CENPE (NM_001813.1,7811-7829).
ctggaacagcttctaaaaa

SEQ ID NO: 76632 - DNA, 19 bp, Homo sapiens
  siRNA target sequence for CENPE (NM_001813.1,7834-7852).
caaattacaccctctcaat

SEQ ID NO: 76633 - DNA, 19 bp, Homo sapiens
  siRNA target sequence for CENPE (NM_001813.1,7912-7930).
gatagccgatcaaagtctt

SEQ ID NO: 76634 - DNA, 19 bp, Homo sapiens
  siRNA target sequence for CENPE (NM_001813.1,7917-7935).
ccgatcaaagtctttacca

SEQ ID NO: 76635 - DNA, 19 bp, Homo sapiens
  siRNA target sequence for CENPE (NM_001813.1,7918-7936).
cgatcaaagtctttaccat

SEQ ID NO: 76636 - DNA, 19 bp, Homo sapiens
  siRNA target sequence for CENPE (NM_001813.1,7948-7966).
gttcgctattttgataact

SEQ ID NO: 76637 - DNA, 19 bp, Homo sapiens
  siRNA target sequence for CENPE (NM_001813.1,7951-7969).
cgctattttgataactcaa

SEQ ID NO: 76638 - DNA, 19 bp, Homo sapiens
  siRNA target sequence for CENPE (NM_001813.1,8056-8074).
gatgtgcctgagtgcaaaa

SEQ ID NO: 76639 - DNA, 19 bp, Homo sapiens
  siRNA target sequence for CFTR (NM_000492.2,161-179).
gcgttgtctccaaactttt

SEQ ID NO: 76640 - DNA, 19 bp, Homo sapiens
  siRNA target sequence for CFTR (NM_000492.2,162-180).
cgttgtctccaaacttttt

SEQ ID NO: 76641 - DNA, 19 bp, Homo sapiens
  siRNA target sequence for CFTR (NM_000492.2,183-201).
cagctggaccagaccaatt

SEQ ID NO: 76642 - DNA, 19 bp, Homo sapiens
  siRNA target sequence for CFTR (NM_000492.2,197-215).
caattttgaggaaaggata

SEQ ID NO: 76643 - DNA, 19 bp, Homo sapiens
  siRNA target sequence for CFTR (NM_000492.2,226-244).
ctggaattgtcagacatat

SEQ ID NO: 76644 - DNA, 19 bp, Homo sapiens
  siRNA target sequence for CFTR (NM_000492.2,347-365).
cccttcggcgatgtttttt

SEQ ID NO: 76645 - DNA, 19 bp, Homo sapiens
  siRNA target sequence for CFTR (NM_000492.2,366-384).
ctggagatttatgttctat

SEQ ID NO: 76646 - DNA, 19 bp, Homo sapiens
  siRNA target sequence for CFTR (NM_000492.2,371-389).
gatttatgttctatggaat

SEQ ID NO: 76647 - DNA, 19 bp, Homo sapiens
  siRNA target sequence for CFTR (NM_000492.2,378-396).
gttctatggaatcttttta

SEQ ID NO: 76648 - DNA, 19 bp, Homo sapiens
  siRNA target sequence for CFTR (NM_000492.2,482-500).
gctctatcgcgatttatct

SEQ ID NO: 76649 - DNA, 19 bp, Homo sapiens
  siRNA target sequence for CFTR (NM_000492.2,483-501).
ctctatcgcgatttatcta

SEQ ID NO: 76650 - DNA, 19 bp, Homo sapiens
  siRNA target sequence for CFTR (NM_000492.2,508-526).
ggcttatgccttctcttta

SEQ ID NO: 76651 - DNA, 19 bp, Homo sapiens
  siRNA target sequence for CFTR (NM_000492.2,509-527).
gcttatgccttctctttat

SEQ ID NO: 76652 - DNA, 19 bp, Homo sapiens
  siRNA target sequence for CFTR (NM_000492.2,563-581).
gccttcatcacattggaat

SEQ ID NO: 76653 - DNA, 19 bp, Homo sapiens
  siRNA target sequence for CFTR (NM_000492.2,588-606).
gagaatagctatgtttagt

SEQ ID NO: 76654 - DNA, 19 bp, Homo sapiens
  siRNA target sequence for CFTR (NM_000492.2,638-656).
gccgtgttctagataaaat

SEQ ID NO: 76655 - DNA, 19 bp, Homo sapiens
  siRNA target sequence for CFTR (NM_000492.2,643-661).
gttctagataaaataagta

SEQ ID NO: 76656 - DNA, 19 bp, Homo sapiens
  siRNA target sequence for CFTR (NM_000492.2,760-778).
ctcctcatggggctaatct

SEQ ID NO: 76657 - DNA, 19 bp, Homo sapiens
  siRNA target sequence for CFTR (NM_000492.2,771-789).
gctaatctgggagttgtta

SEQ ID NO: 76658 - DNA, 19 bp, Homo sapiens
  siRNA target sequence for CFTR (NM_000492.2,809-827).
gacttggtttcctgatagt

SEQ ID NO: 76659 - DNA, 19 bp, Homo sapiens
  siRNA target sequence for CFTR (NM_000492.2,822-840).
gatagtccttgcccttttt

SEQ ID NO: 76660 - DNA, 19 bp, Homo sapiens
  siRNA target sequence for CFTR (NM_000492.2,848-866).
ggctagggagaatgatgat

SEQ ID NO: 76661 - DNA, 19 bp, Homo sapiens
  siRNA target sequence for CFTR (NM_000492.2,850-868).
ctagggagaatgatgatga

SEQ ID NO: 76662 - DNA, 19 bp, Homo sapiens
  siRNA target sequence for CFTR (NM_000492.2,910-928).
gtgattacctcagaaatga

SEQ ID NO: 76663 - DNA, 19 bp, Homo sapiens
  siRNA target sequence for CFTR (NM_000492.2,1030-1048).
gcctatgtgagatacttca

SEQ ID NO: 76664 - DNA, 19 bp, Homo sapiens
  siRNA target sequence for CFTR (NM_000492.2,1032-1050).
ctatgtgagatacttcaat

SEQ ID NO: 76665 - DNA, 19 bp, Homo sapiens
  siRNA target sequence for CFTR (NM_000492.2,1121-1139).
gaatcatcctccggaaaat

SEQ ID NO: 76666 - DNA, 19 bp, Homo sapiens
  siRNA target sequence for CFTR (NM_000492.2,1149-1167).
catctcattctgcattgtt

SEQ ID NO: 76667 - DNA, 19 bp, Homo sapiens
  siRNA target sequence for CFTR (NM_000492.2,1176-1194).
ggcggtcactcggcaattt

SEQ ID NO: 76668 - DNA, 19 bp, Homo sapiens
  siRNA target sequence for CFTR (NM_000492.2,1219-1237).
gactctcttggagcaataa

SEQ ID NO: 76669 - DNA, 19 bp, Homo sapiens
  siRNA target sequence for CFTR (NM_000492.2,1290-1308).
cttaacgactacagaagta

SEQ ID NO: 76670 - DNA, 19 bp, Homo sapiens
  siRNA target sequence for CFTR (NM_000492.2,1295-1313).
cgactacagaagtagtgat

SEQ ID NO: 76671 - DNA, 19 bp, Homo sapiens
  siRNA target sequence for CFTR (NM_000492.2,1448-1466).
ctgtcctgaaagatattaa

SEQ ID NO: 76672 - DNA, 19 bp, Homo sapiens
  siRNA target sequence for CFTR (NM_000492.2,1565-1583).
cagagggtaaaattaagca

SEQ ID NO: 76673 - DNA, 19 bp, Homo sapiens
  siRNA target sequence for CFTR (NM_000492.2,1660-1678).
gtttcctatgatgaatata

SEQ ID NO: 76674 - DNA, 19 bp, Homo sapiens
  siRNA target sequence for CFTR (NM_000492.2,1664-1682).
cctatgatgaatatagata

SEQ ID NO: 76675 - DNA, 19 bp, Homo sapiens
  siRNA target sequence for CFTR (NM_000492.2,1695-1713).
caaagcatgccaactagaa

SEQ ID NO: 76676 - DNA, 19 bp, Homo sapiens
  siRNA target sequence for CFTR (NM_000492.2,1783-1801).
ggtcaacgagcaagaattt

SEQ ID NO: 76677 - DNA, 19 bp, Homo sapiens
  siRNA target sequence for CFTR (NM_000492.2,1786-1804).
caacgagcaagaatttctt

SEQ ID NO: 76678 - DNA, 19 bp, Homo sapiens
  siRNA target sequence for CFTR (NM_000492.2,1898-1916).
gctgtgtctgtaaactgat

SEQ ID NO: 76679 - DNA, 19 bp, Homo sapiens
  siRNA target sequence for CFTR (NM_000492.2,1917-1935).
ggctaacaaaactaggatt

SEQ ID NO: 76680 - DNA, 19 bp, Homo sapiens
  siRNA target sequence for CFTR (NM_000492.2,1993-2011).
gaaggtagcagctattttt

SEQ ID NO: 76681 - DNA, 19 bp, Homo sapiens
  siRNA target sequence for CFTR (NM_000492.2,2045-2063).
cagactttagctcaaaact

SEQ ID NO: 76682 - DNA, 19 bp, Homo sapiens
  siRNA target sequence for CFTR (NM_000492.2,2047-2065).
gactttagctcaaaactca

SEQ ID NO: 76683 - DNA, 19 bp, Homo sapiens
  siRNA target sequence for CFTR (NM_000492.2,2062-2080).
ctcatgggatgtgattctt

SEQ ID NO: 76684 - DNA, 19 bp, Homo sapiens
  siRNA target sequence for CFTR (NM_000492.2,2072-2090).
gtgattctttcgaccaatt

SEQ ID NO: 76685 - DNA, 19 bp, Homo sapiens
  siRNA target sequence for CFTR (NM_000492.2,2074-2092).
gattctttcgaccaattta

SEQ ID NO: 76686 - DNA, 19 bp, Homo sapiens
  siRNA target sequence for CFTR (NM_000492.2,2223-2241).
gaagaattctattctcaat

SEQ ID NO: 76687 - DNA, 19 bp, Homo sapiens
  siRNA target sequence for CFTR (NM_000492.2,2242-2260).
ccaatcaactctatacgaa

SEQ ID NO: 76688 - DNA, 19 bp, Homo sapiens
  siRNA target sequence for CFTR (NM_000492.2,2243-2261).
caatcaactctatacgaaa

SEQ ID NO: 76689 - DNA, 19 bp, Homo sapiens
  siRNA target sequence for CFTR (NM_000492.2,2247-2265).
caactctatacgaaaattt

SEQ ID NO: 76690 - DNA, 19 bp, Homo sapiens
  siRNA target sequence for CFTR (NM_000492.2,2252-2270).
ctatacgaaaattttccat

SEQ ID NO: 76691 - DNA, 19 bp, Homo sapiens
  siRNA target sequence for CFTR (NM_000492.2,2274-2292).
gcaaaagactcccttacaa

SEQ ID NO: 76692 - DNA, 19 bp, Homo sapiens
  siRNA target sequence for CFTR (NM_000492.2,2301-2319).
catcgaagaggattctgat

SEQ ID NO: 76693 - DNA, 19 bp, Homo sapiens
  siRNA target sequence for CFTR (NM_000492.2,2340-2358).
gtccttagtaccagattct

SEQ ID NO: 76694 - DNA, 19 bp, Homo sapiens
  siRNA target sequence for CFTR (NM_000492.2,2342-2360).
ccttagtaccagattctga

SEQ ID NO: 76695 - DNA, 19 bp, Homo sapiens
  siRNA target sequence for CFTR (NM_000492.2,2446-2464).
ctgatgacacactcagtta

SEQ ID NO: 76696 - DNA, 19 bp, Homo sapiens
  siRNA target sequence for CFTR (NM_000492.2,2535-2553).
cttgactgaactggatata

SEQ ID NO: 76697 - DNA, 19 bp, Homo sapiens
  siRNA target sequence for CFTR (NM_000492.2,2538-2556).
gactgaactggatatatat

SEQ ID NO: 76698 - DNA, 19 bp, Homo sapiens
  siRNA target sequence for CFTR (NM_000492.2,2669-2687).
ggaacacataccttcgata

SEQ ID NO: 76699 - DNA, 19 bp, Homo sapiens
  siRNA target sequence for CFTR (NM_000492.2,2670-2688).
gaacacataccttcgatat

SEQ ID NO: 76700 - DNA, 19 bp, Homo sapiens
  siRNA target sequence for CFTR (NM_000492.2,2719-2737).
ctaatttggtgcttagtaa

SEQ ID NO: 76701 - DNA, 19 bp, Homo sapiens
  siRNA target sequence for CFTR (NM_000492.2,2805-2823).
caaagggaatagtactcat

SEQ ID NO: 76702 - DNA, 19 bp, Homo sapiens
  siRNA target sequence for CFTR (NM_000492.2,2811-2829).
gaatagtactcatagtaga

SEQ ID NO: 76703 - DNA, 19 bp, Homo sapiens
  siRNA target sequence for CFTR (NM_000492.2,2853-2871).
caccagcaccagttcgtat

SEQ ID NO: 76704 - DNA, 19 bp, Homo sapiens
  siRNA target sequence for CFTR (NM_000492.2,2855-2873).
ccagcaccagttcgtatta

SEQ ID NO: 76705 - DNA, 19 bp, Homo sapiens
  siRNA target sequence for CFTR (NM_000492.2,2856-2874).
cagcaccagttcgtattat

SEQ ID NO: 76706 - DNA, 19 bp, Homo sapiens
  siRNA target sequence for CFTR (NM_000492.2,2858-2876).
gcaccagttcgtattatgt

SEQ ID NO: 76707 - DNA, 19 bp, Homo sapiens
  siRNA target sequence for CFTR (NM_000492.2,2861-2879).
ccagttcgtattatgtgtt

SEQ ID NO: 76708 - DNA, 19 bp, Homo sapiens
  siRNA target sequence for CFTR (NM_000492.2,2862-2880).
cagttcgtattatgtgttt

SEQ ID NO: 76709 - DNA, 19 bp, Homo sapiens
  siRNA target sequence for CFTR (NM_000492.2,2900-2918).
ccgacactttgcttgctat

SEQ ID NO: 76710 - DNA, 19 bp, Homo sapiens
  siRNA target sequence for CFTR (NM_000492.2,2938-2956).
ccactggtgcatactctaa

SEQ ID NO: 76711 - DNA, 19 bp, Homo sapiens
  siRNA target sequence for CFTR (NM_000492.2,2939-2957).
cactggtgcatactctaat

SEQ ID NO: 76712 - DNA, 19 bp, Homo sapiens
  siRNA target sequence for CFTR (NM_000492.2,2941-2959).
ctggtgcatactctaatca

SEQ ID NO: 76713 - DNA, 19 bp, Homo sapiens
  siRNA target sequence for CFTR (NM_000492.2,2953-2971).
ctaatcacagtgtcgaaaa

SEQ ID NO: 76714 - DNA, 19 bp, Homo sapiens
  siRNA target sequence for CFTR (NM_000492.2,3037-3055).
gcaggtgggattcttaata

SEQ ID NO: 76715 - DNA, 19 bp, Homo sapiens
  siRNA target sequence for CFTR (NM_000492.2,3040-3058).
ggtgggattcttaatagat

SEQ ID NO: 76716 - DNA, 19 bp, Homo sapiens
  siRNA target sequence for CFTR (NM_000492.2,3041-3059).
gtgggattcttaatagatt

SEQ ID NO: 76717 - DNA, 19 bp, Homo sapiens
  siRNA target sequence for CFTR (NM_000492.2,3043-3061).
gggattcttaatagattct

SEQ ID NO: 76718 - DNA, 19 bp, Homo sapiens
  siRNA target sequence for CFTR (NM_000492.2,3060-3078).
ctccaaagatatagcaatt

SEQ ID NO: 76719 - DNA, 19 bp, Homo sapiens
  siRNA target sequence for CFTR (NM_000492.2,3111-3129).
cttcatccagttgttatta

SEQ ID NO: 76720 - DNA, 19 bp, Homo sapiens
  siRNA target sequence for CFTR (NM_000492.2,3268-3286).
gaaggcaggagtccaattt

SEQ ID NO: 76721 - DNA, 19 bp, Homo sapiens
  siRNA target sequence for CFTR (NM_000492.2,3336-3354).
cggacggcagccttacttt

SEQ ID NO: 76722 - DNA, 19 bp, Homo sapiens
  siRNA target sequence for CFTR (NM_000492.2,3338-3356).
gacggcagccttactttga

SEQ ID NO: 76723 - DNA, 19 bp, Homo sapiens
  siRNA target sequence for CFTR (NM_000492.2,3340-3358).
cggcagccttactttgaaa

SEQ ID NO: 76724 - DNA, 19 bp, Homo sapiens
  siRNA target sequence for CFTR (NM_000492.2,3389-3407).
ctgccaactggttcttgta

SEQ ID NO: 76725 - DNA, 19 bp, Homo sapiens
  siRNA target sequence for CFTR (NM_000492.2,3416-3434).
cactgcgctggttccaaat

SEQ ID NO: 76726 - DNA, 19 bp, Homo sapiens
  siRNA target sequence for CFTR (NM_000492.2,3418-3436).
ctgcgctggttccaaatga

SEQ ID NO: 76727 - DNA, 19 bp, Homo sapiens
  siRNA target sequence for CFTR (NM_000492.2,3425-3443).
ggttccaaatgagaataga

SEQ ID NO: 76728 - DNA, 19 bp, Homo sapiens
  siRNA target sequence for CFTR (NM_000492.2,3506-3524).
gagaaggaagagttggtat

SEQ ID NO: 76729 - DNA, 19 bp, Homo sapiens
  siRNA target sequence for CFTR (NM_000492.2,3512-3530).
gaagagttggtattatcct

SEQ ID NO: 76730 - DNA, 19 bp, Homo sapiens
  siRNA target sequence for CFTR (NM_000492.2,3557-3575).
cattgcagtgggctgtaaa

SEQ ID NO: 76731 - DNA, 19 bp, Homo sapiens
  siRNA target sequence for CFTR (NM_000492.2,3581-3599).
gcatagatgtggatagctt

SEQ ID NO: 76732 - DNA, 19 bp, Homo sapiens
  siRNA target sequence for CFTR (NM_000492.2,3617-3635).
gagtctttaagttcattga

SEQ ID NO: 76733 - DNA, 19 bp, Homo sapiens
  siRNA target sequence for CFTR (NM_000492.2,3649-3667).
ggtaaacctaccaagtcaa

SEQ ID NO: 76734 - DNA, 19 bp, Homo sapiens
  siRNA target sequence for CFTR (NM_000492.2,3659-3677).
ccaagtcaaccaaaccata

SEQ ID NO: 76735 - DNA, 19 bp, Homo sapiens
  siRNA target sequence for CFTR (NM_000492.2,3686-3704).
gccaactctcgaaagttat

SEQ ID NO: 76736 - DNA, 19 bp, Homo sapiens
  siRNA target sequence for CFTR (NM_000492.2,3688-3706).
caactctcgaaagttatga

SEQ ID NO: 76737 - DNA, 19 bp, Homo sapiens
  siRNA target sequence for CFTR (NM_000492.2,3691-3709).
ctctcgaaagttatgatta

SEQ ID NO: 76738 - DNA, 19 bp, Homo sapiens
  siRNA target sequence for CFTR (NM_000492.2,3693-3711).
ctcgaaagttatgattatt

SEQ ID NO: 76739 - DNA, 19 bp, Homo sapiens
  siRNA target sequence for CFTR (NM_000492.2,3799-3817).
ggaaatgccatattagaga

SEQ ID NO: 76740 - DNA, 19 bp, Homo sapiens
  siRNA target sequence for CFTR (NM_000492.2,3800-3818).
gaaatgccatattagagaa

SEQ ID NO: 76741 - DNA, 19 bp, Homo sapiens
  siRNA target sequence for CFTR (NM_000492.2,3852-3870).
gggcctcttgggaagaact

SEQ ID NO: 76742 - DNA, 19 bp, Homo sapiens
  siRNA target sequence for CFTR (NM_000492.2,3871-3889).
ggatcagggaagagtactt

SEQ ID NO: 76743 - DNA, 19 bp, Homo sapiens
  siRNA target sequence for CFTR (NM_000492.2,3943-3961).
ggtgtgtcttgggattcaa

SEQ ID NO: 76744 - DNA, 19 bp, Homo sapiens
  siRNA target sequence for CFTR (NM_000492.2,3944-3962).
gtgtgtcttgggattcaat

SEQ ID NO: 76745 - DNA, 19 bp, Homo sapiens
  siRNA target sequence for CFTR (NM_000492.2,3946-3964).
gtgtcttgggattcaataa

SEQ ID NO: 76746 - DNA, 19 bp, Homo sapiens
  siRNA target sequence for CFTR (NM_000492.2,3948-3966).
gtcttgggattcaataact

SEQ ID NO: 76747 - DNA, 19 bp, Homo sapiens
  siRNA target sequence for CFTR (NM_000492.2,4057-4075).
cagtggagtgatcaagaaa

SEQ ID NO: 76748 - DNA, 19 bp, Homo sapiens
  siRNA target sequence for CFTR (NM_000492.2,4100-4118).
ggctcagatctgtgataga

SEQ ID NO: 76749 - DNA, 19 bp, Homo sapiens
  siRNA target sequence for CFTR (NM_000492.2,4101-4119).
gctcagatctgtgatagaa

SEQ ID NO: 76750 - DNA, 19 bp, Homo sapiens
  siRNA target sequence for CFTR (NM_000492.2,4191-4209).
gatgtgcttggctagatct

SEQ ID NO: 76751 - DNA, 19 bp, Homo sapiens
  siRNA target sequence for CFTR (NM_000492.2,4194-4212).
gtgcttggctagatctgtt

SEQ ID NO: 76752 - DNA, 19 bp, Homo sapiens
  siRNA target sequence for CFTR (NM_000492.2,4213-4231).
ctcagtaaggcgaagatct

SEQ ID NO: 76753 - DNA, 19 bp, Homo sapiens
  siRNA target sequence for CFTR (NM_000492.2,4260-4278).
ggatccagtaacataccaa

SEQ ID NO: 76754 - DNA, 19 bp, Homo sapiens
  siRNA target sequence for CFTR (NM_000492.2,4261-4279).
gatccagtaacataccaaa

SEQ ID NO: 76755 - DNA, 19 bp, Homo sapiens
  siRNA target sequence for CFTR (NM_000492.2,4264-4282).
ccagtaacataccaaataa

SEQ ID NO: 76756 - DNA, 19 bp, Homo sapiens
  siRNA target sequence for CFTR (NM_000492.2,4265-4283).
cagtaacataccaaataat

SEQ ID NO: 76757 - DNA, 19 bp, Homo sapiens
  siRNA target sequence for CFTR (NM_000492.2,4267-4285).
gtaacataccaaataatta

SEQ ID NO: 76758 - DNA, 19 bp, Homo sapiens
  siRNA target sequence for CFTR (NM_000492.2,4310-4328).
ctgattgcacagtaattct

SEQ ID NO: 76759 - DNA, 19 bp, Homo sapiens
  siRNA target sequence for CFTR (NM_000492.2,4353-4371).
gctggaatgccaacaattt

SEQ ID NO: 76760 - DNA, 19 bp, Homo sapiens
  siRNA target sequence for CFTR (NM_000492.2,4496-4514).
caagcaagtgcaagtctaa

SEQ ID NO: 76761 - DNA, 19 bp, Homo sapiens
  siRNA target sequence for CFTR (NM_000492.2,4518-4536).
ccagattgctgctctgaaa

SEQ ID NO: 76762 - DNA, 19 bp, Homo sapiens
  siRNA target sequence for CFTR (NM_000492.2,4549-4567).
gaagaggtgcaagatacaa

SEQ ID NO: 76763 - DNA, 19 bp, Homo sapiens
  siRNA target sequence for CGI-04 (NM_015936.1,41-59).
gtggtctggtaccctaaat

SEQ ID NO: 76764 - DNA, 19 bp, Homo sapiens
  siRNA target sequence for CGI-04 (NM_015936.1,43-61).
ggtctggtaccctaaatct

SEQ ID NO: 76765 - DNA, 19 bp, Homo sapiens
  siRNA target sequence for CGI-04 (NM_015936.1,139-157).
gtctgttcaaggacttctt

SEQ ID NO: 76766 - DNA, 19 bp, Homo sapiens
  siRNA target sequence for CGI-04 (NM_015936.1,160-178).
cggagacggggacgaaaat

SEQ ID NO: 76767 - DNA, 19 bp, Homo sapiens
  siRNA target sequence for CGI-04 (NM_015936.1,161-179).
ggagacggggacgaaaata

SEQ ID NO: 76768 - DNA, 19 bp, Homo sapiens
  siRNA target sequence for CGI-04 (NM_015936.1,200-218).
ccgtggcacggcgagtttt

SEQ ID NO: 76769 - DNA, 19 bp, Homo sapiens
  siRNA target sequence for CGI-04 (NM_015936.1,250-268).
cggcagactcgcttcatgt

SEQ ID NO: 76770 - DNA, 19 bp, Homo sapiens
  siRNA target sequence for CGI-04 (NM_015936.1,674-692).
ccaggcctatgacttctat

SEQ ID NO: 76771 - DNA, 19 bp, Homo sapiens
  siRNA target sequence for CGI-04 (NM_015936.1,675-693).
caggcctatgacttctatt

SEQ ID NO: 76772 - DNA, 19 bp, Homo sapiens
  siRNA target sequence for CGI-04 (NM_015936.1,679-697).
cctatgacttctattacct

SEQ ID NO: 76773 - DNA, 19 bp, Homo sapiens
  siRNA target sequence for CGI-04 (NM_015936.1,695-713).
cctcttccagcgttatgga

SEQ ID NO: 76774 - DNA, 19 bp, Homo sapiens
  siRNA target sequence for CGI-04 (NM_015936.1,696-714).
ctcttccagcgttatggat

SEQ ID NO: 76775 - DNA, 19 bp, Homo sapiens
  siRNA target sequence for CGI-04 (NM_015936.1,722-740).
ccagctgggcggatctgat

SEQ ID NO: 76776 - DNA, 19 bp, Homo sapiens
  siRNA target sequence for CGI-04 (NM_015936.1,725-743).
gctgggcggatctgatcaa

SEQ ID NO: 76777 - DNA, 19 bp, Homo sapiens
  siRNA target sequence for CGI-04 (NM_015936.1,728-746).
gggcggatctgatcaacta

SEQ ID NO: 76778 - DNA, 19 bp, Homo sapiens
  siRNA target sequence for CGI-04 (NM_015936.1,741-759).
caactaggcaacatcatgt

SEQ ID NO: 76779 - DNA, 19 bp, Homo sapiens
  siRNA target sequence for CGI-04 (NM_015936.1,760-778).
ccggatatgagttcatcaa

SEQ ID NO: 76780 - DNA, 19 bp, Homo sapiens
  siRNA target sequence for CGI-04 (NM_015936.1,785-803).
gactggagaagatgtattt

SEQ ID NO: 76781 - DNA, 19 bp, Homo sapiens
  siRNA target sequence for CGI-04 (NM_015936.1,866-884).
cgctgtttggctaaacaga

SEQ ID NO: 76782 - DNA, 19 bp, Homo sapiens
  siRNA target sequence for CGI-04 (NM_015936.1,870-888).
gtttggctaaacagagata

SEQ ID NO: 76783 - DNA, 19 bp, Homo sapiens
  siRNA target sequence for CGI-04 (NM_015936.1,897-915).
ccatttgaattgtatcaat

SEQ ID NO: 76784 - DNA, 19 bp, Homo sapiens
  siRNA target sequence for CGI-04 (NM_015936.1,998-1016).
catgcagctgcatgtcaaa

SEQ ID NO: 76785 - DNA, 19 bp, Homo sapiens
  siRNA target sequence for CGI-04 (NM_015936.1,1044-1062).
cgactggcagcagaagtaa

SEQ ID NO: 76786 - DNA, 19 bp, Homo sapiens
  siRNA target sequence for CGI-04 (NM_015936.1,1106-1124).
gtgtacacaagccctttat

SEQ ID NO: 76787 - DNA, 19 bp, Homo sapiens
  siRNA target sequence for CGI-04 (NM_015936.1,1108-1126).
gtacacaagccctttatca

SEQ ID NO: 76788 - DNA, 19 bp, Homo sapiens
  siRNA target sequence for CGI-04 (NM_015936.1,1118-1136).
cctttatcacagtagcata

SEQ ID NO: 76789 - DNA, 19 bp, Homo sapiens
  siRNA target sequence for CGI-04 (NM_015936.1,1164-1182).
gagttaaaagagttgttta

SEQ ID NO: 76790 - DNA, 19 bp, Homo sapiens
  siRNA target sequence for CGI-04 (NM_015936.1,1218-1236).
ggaacaagtgtcctagata

SEQ ID NO: 76791 - DNA, 19 bp, Homo sapiens
  siRNA target sequence for CGI-04 (NM_015936.1,1233-1251).
gatacttgccgcaaagcaa

SEQ ID NO: 76792 - DNA, 19 bp, Homo sapiens
  siRNA target sequence for CGI-04 (NM_015936.1,1266-1284).
ggtccccgagggtatcgaa

SEQ ID NO: 76793 - DNA, 19 bp, Homo sapiens
  siRNA target sequence for CGI-04 (NM_015936.1,1267-1285).
gtccccgagggtatcgaat

SEQ ID NO: 76794 - DNA, 19 bp, Homo sapiens
  siRNA target sequence for CGI-04 (NM_015936.1,1270-1288).
cccgagggtatcgaatgat

SEQ ID NO: 76795 - DNA, 19 bp, Homo sapiens
  siRNA target sequence for CGI-04 (NM_015936.1,1271-1289).
ccgagggtatcgaatgata

SEQ ID NO: 76796 - DNA, 19 bp, Homo sapiens
  siRNA target sequence for CGI-04 (NM_015936.1,1272-1290).
cgagggtatcgaatgataa

SEQ ID NO: 76797 - DNA, 19 bp, Homo sapiens
  siRNA target sequence for CGI-04 (NM_015936.1,1276-1294).
ggtatcgaatgataacaga

SEQ ID NO: 76798 - DNA, 19 bp, Homo sapiens
  siRNA target sequence for CGI-04 (NM_015936.1,1307-1325).
cataaatcaccaacaagta

SEQ ID NO: 76799 - DNA, 19 bp, Homo sapiens
  siRNA target sequence for CGI-04 (NM_015936.1,1316-1334).
ccaacaagtaacaaatcct

SEQ ID NO: 76800 - DNA, 19 bp, Homo sapiens
  siRNA target sequence for CGI-04 (NM_015936.1,1333-1351).
ctgagagtgttttaattgt

SEQ ID NO: 76801 - DNA, 19 bp, Homo sapiens
  siRNA target sequence for CGI-04 (NM_015936.1,1350-1368).
gttggacaacatattctca

SEQ ID NO: 76802 - DNA, 19 bp, Homo sapiens
  siRNA target sequence for CGI-04 (NM_015936.1,1367-1385).
caagaatggactttcctta

SEQ ID NO: 76803 - DNA, 19 bp, Homo sapiens
  siRNA target sequence for CGI-152 (NM_020410.1,78-96).
ggtgccaacccccaacaat

SEQ ID NO: 76804 - DNA, 19 bp, Homo sapiens
  siRNA target sequence for CGI-152 (NM_020410.1,148-166).
gaggtgctgtccttcgaat

SEQ ID NO: 76805 - DNA, 19 bp, Homo sapiens
  siRNA target sequence for CGI-152 (NM_020410.1,158-176).
ccttcgaattccagaagat

SEQ ID NO: 76806 - DNA, 19 bp, Homo sapiens
  siRNA target sequence for CGI-152 (NM_020410.1,232-250).
gtgggaaacgccttctcat

SEQ ID NO: 76807 - DNA, 19 bp, Homo sapiens
  siRNA target sequence for CGI-152 (NM_020410.1,235-253).
ggaaacgccttctcatact

SEQ ID NO: 76808 - DNA, 19 bp, Homo sapiens
  siRNA target sequence for CGI-152 (NM_020410.1,236-254).
gaaacgccttctcatacta

SEQ ID NO: 76809 - DNA, 19 bp, Homo sapiens
  siRNA target sequence for CGI-152 (NM_020410.1,241-259).
gccttctcatactatcaga

SEQ ID NO: 76810 - DNA, 19 bp, Homo sapiens
  siRNA target sequence for CGI-152 (NM_020410.1,341-359).
ctgacttctcggagctttt

SEQ ID NO: 76811 - DNA, 19 bp, Homo sapiens
  siRNA target sequence for CGI-152 (NM_020410.1,343-361).
gacttctcggagcttttca

SEQ ID NO: 76812 - DNA, 19 bp, Homo sapiens
  siRNA target sequence for CGI-152 (NM_020410.1,443-461).
gcgtctttacgctatccat

SEQ ID NO: 76813 - DNA, 19 bp, Homo sapiens
  siRNA target sequence for CGI-152 (NM_020410.1,782-800).
cccggctgcacgtcatctt

SEQ ID NO: 76814 - DNA, 19 bp, Homo sapiens
  siRNA target sequence for CGI-152 (NM_020410.1,1326-1344).
gtccagcatccctgtagaa

SEQ ID NO: 76815 - DNA, 19 bp, Homo sapiens
  siRNA target sequence for CGI-152 (NM_020410.1,1331-1349).
gcatccctgtagaaacaca

SEQ ID NO: 76816 - DNA, 19 bp, Homo sapiens
  siRNA target sequence for CGI-152 (NM_020410.1,1443-1461).
ctggacgctgaccaaagat

SEQ ID NO: 76817 - DNA, 19 bp, Homo sapiens
  siRNA target sequence for CGI-152 (NM_020410.1,1445-1463).
ggacgctgaccaaagatga

SEQ ID NO: 76818 - DNA, 19 bp, Homo sapiens
  siRNA target sequence for CGI-152 (NM_020410.1,1448-1466).
cgctgaccaaagatgagaa

SEQ ID NO: 76819 - DNA, 19 bp, Homo sapiens
  siRNA target sequence for CGI-152 (NM_020410.1,1452-1470).
gaccaaagatgagaaagta

SEQ ID NO: 76820 - DNA, 19 bp, Homo sapiens
  siRNA target sequence for CGI-152 (NM_020410.1,1475-1493).
cccgaagtattaaaactca

SEQ ID NO: 76821 - DNA, 19 bp, Homo sapiens
  siRNA target sequence for CGI-152 (NM_020410.1,1785-1803).
caagttcgtcggcttcatt

SEQ ID NO: 76822 - DNA, 19 bp, Homo sapiens
  siRNA target sequence for CGI-152 (NM_020410.1,2476-2494).
gagagtacgcccattgtga

SEQ ID NO: 76823 - DNA, 19 bp, Homo sapiens
  siRNA target sequence for CGI-152 (NM_020410.1,2478-2496).
gagtacgcccattgtgaaa

SEQ ID NO: 76824 - DNA, 19 bp, Homo sapiens
  siRNA target sequence for CGI-152 (NM_020410.1,2480-2498).
gtacgcccattgtgaaact

SEQ ID NO: 76825 - DNA, 19 bp, Homo sapiens
  siRNA target sequence for CGI-152 (NM_020410.1,2552-2570).
gcatctgccacgtgatcaa

SEQ ID NO: 76826 - DNA, 19 bp, Homo sapiens
  siRNA target sequence for CGI-152 (NM_020410.1,2816-2834).
ccgtcatgctccagttctt

SEQ ID NO: 76827 - DNA, 19 bp, Homo sapiens
  siRNA target sequence for CGI-152 (NM_020410.1,2817-2835).
cgtcatgctccagttcttt

SEQ ID NO: 76828 - DNA, 19 bp, Homo sapiens
  siRNA target sequence for CGI-152 (NM_020410.1,2902-2920).
cagttcgtggacttgtaca

SEQ ID NO: 76829 - DNA, 19 bp, Homo sapiens
  siRNA target sequence for CGI-152 (NM_020410.1,2983-3001).
gccaccttcgccatcaatt

SEQ ID NO: 76830 - DNA, 19 bp, Homo sapiens
  siRNA target sequence for CGI-152 (NM_020410.1,2984-3002).
ccaccttcgccatcaatta

SEQ ID NO: 76831 - DNA, 19 bp, Homo sapiens
  siRNA target sequence for CGI-152 (NM_020410.1,3053-3071).
ggagtctggcagtttcact

SEQ ID NO: 76832 - DNA, 19 bp, Homo sapiens
  siRNA target sequence for CGI-152 (NM_020410.1,3233-3251).
ggaccccgaagctgaaagt

SEQ ID NO: 76833 - DNA, 19 bp, Homo sapiens
  siRNA target sequence for CHEK1 (NM_001274.2,225-243).
gttcaacttgctgtgaata

SEQ ID NO: 76834 - DNA, 19 bp, Homo sapiens
  siRNA target sequence for CHEK1 (NM_001274.2,235-253).
ctgtgaatagagtaactga

SEQ ID NO: 76835 - DNA, 19 bp, Homo sapiens
  siRNA target sequence for CHEK1 (NM_001274.2,259-277).
cagtcgcagtgaagattgt

SEQ ID NO: 76836 - DNA, 19 bp, Homo sapiens
  siRNA target sequence for CHEK1 (NM_001274.2,263-281).
cgcagtgaagattgtagat

SEQ ID NO: 76837 - DNA, 19 bp, Homo sapiens
  siRNA target sequence for CHEK1 (NM_001274.2,267-285).
gtgaagattgtagatatga

SEQ ID NO: 76838 - DNA, 19 bp, Homo sapiens
  siRNA target sequence for CHEK1 (NM_001274.2,292-310).
ccgtagactgtccagaaaa

SEQ ID NO: 76839 - DNA, 19 bp, Homo sapiens
  siRNA target sequence for CHEK1 (NM_001274.2,297-315).
gactgtccagaaaatatta

SEQ ID NO: 76840 - DNA, 19 bp, Homo sapiens
  siRNA target sequence for CHEK1 (NM_001274.2,317-335).
gaaagagatctgtatcaat

SEQ ID NO: 76841 - DNA, 19 bp, Homo sapiens
  siRNA target sequence for CHEK1 (NM_001274.2,379-397).
ggagagaaggcaatatcca

SEQ ID NO: 76842 - DNA, 19 bp, Homo sapiens
  siRNA target sequence for CHEK1 (NM_001274.2,380-398).
gagagaaggcaatatccaa

SEQ ID NO: 76843 - DNA, 19 bp, Homo sapiens
  siRNA target sequence for CHEK1 (NM_001274.2,388-406).
gcaatatccaatatttatt

SEQ ID NO: 76844 - DNA, 19 bp, Homo sapiens
  siRNA target sequence for CHEK1 (NM_001274.2,418-436).
gtagtggaggagagctttt

SEQ ID NO: 76845 - DNA, 19 bp, Homo sapiens
  siRNA target sequence for CHEK1 (NM_001274.2,440-458).
cagaatagagccagacata

SEQ ID NO: 76846 - DNA, 19 bp, Homo sapiens
  siRNA target sequence for CHEK1 (NM_001274.2,512-530).
ggtttatctgcatggtatt

SEQ ID NO: 76847 - DNA, 19 bp, Homo sapiens
  siRNA target sequence for CHEK1 (NM_001274.2,576-594).
gaaagggataacctcaaaa

SEQ ID NO: 76848 - DNA, 19 bp, Homo sapiens
  siRNA target sequence for CHEK1 (NM_001274.2,613-631).
caacagtatttcggtataa

SEQ ID NO: 76849 - DNA, 19 bp, Homo sapiens
  siRNA target sequence for CHEK1 (NM_001274.2,642-660).
cgtttgttgaacaagatgt

SEQ ID NO: 76850 - DNA, 19 bp, Homo sapiens
  siRNA target sequence for CHEK1 (NM_001274.2,653-671).
caagatgtgtggtacttta

SEQ ID NO: 76851 - DNA, 19 bp, Homo sapiens
  siRNA target sequence for CHEK1 (NM_001274.2,656-674).
gatgtgtggtactttacca

SEQ ID NO: 76852 - DNA, 19 bp, Homo sapiens
  siRNA target sequence for CHEK1 (NM_001274.2,737-755).
ctgtggaatagtacttact

SEQ ID NO: 76853 - DNA, 19 bp, Homo sapiens
  siRNA target sequence for CHEK1 (NM_001274.2,757-775).
caatgctcgctggagaatt

SEQ ID NO: 76854 - DNA, 19 bp, Homo sapiens
  siRNA target sequence for CHEK1 (NM_001274.2,795-813).
gacagctgtcaggagtatt

SEQ ID NO: 76855 - DNA, 19 bp, Homo sapiens
  siRNA target sequence for CHEK1 (NM_001274.2,871-889).
ctctagctctgctgcataa

SEQ ID NO: 76856 - DNA, 19 bp, Homo sapiens
  siRNA target sequence for CHEK1 (NM_001274.2,873-891).
ctagctctgctgcataaaa

SEQ ID NO: 76857 - DNA, 19 bp, Homo sapiens
  siRNA target sequence for CHEK1 (NM_001274.2,881-899).
gctgcataaaatcttagtt

SEQ ID NO: 76858 - DNA, 19 bp, Homo sapiens
  siRNA target sequence for CHEK1 (NM_001274.2,906-924).
ccatcagcaagaattacca

SEQ ID NO: 76859 - DNA, 19 bp, Homo sapiens
  siRNA target sequence for CHEK1 (NM_001274.2,907-925).
catcagcaagaattaccat

SEQ ID NO: 76860 - DNA, 19 bp, Homo sapiens
  siRNA target sequence for CHEK1 (NM_001274.2,1011-1029).
gagtctcccagtggatttt

SEQ ID NO: 76861 - DNA, 19 bp, Homo sapiens
  siRNA target sequence for CHEK1 (NM_001274.2,1013-1031).
gtctcccagtggattttct

SEQ ID NO: 76862 - DNA, 19 bp, Homo sapiens
  siRNA target sequence for CHEK1 (NM_001274.2,1120-1138).
cccgcacaggtctttcctt

SEQ ID NO: 76863 - DNA, 19 bp, Homo sapiens
  siRNA target sequence for CHEK1 (NM_001274.2,1121-1139).
ccgcacaggtctttcctta

SEQ ID NO: 76864 - DNA, 19 bp, Homo sapiens
  siRNA target sequence for CHEK1 (NM_001274.2,1122-1140).
cgcacaggtctttccttat

SEQ ID NO: 76865 - DNA, 19 bp, Homo sapiens
  siRNA target sequence for CHEK1 (NM_001274.2,1147-1165).
ccagcccctcatacattga

SEQ ID NO: 76866 - DNA, 19 bp, Homo sapiens
  siRNA target sequence for CHEK1 (NM_001274.2,1150-1168).
gcccctcatacattgataa

SEQ ID NO: 76867 - DNA, 19 bp, Homo sapiens
  siRNA target sequence for CHEK1 (NM_001274.2,1151-1169).
cccctcatacattgataaa

SEQ ID NO: 76868 - DNA, 19 bp, Homo sapiens
  siRNA target sequence for CHEK1 (NM_001274.2,1156-1174).
catacattgataaattggt

SEQ ID NO: 76869 - DNA, 19 bp, Homo sapiens
  siRNA target sequence for CHEK1 (NM_001274.2,1173-1191).
gtacaagggatcagctttt

SEQ ID NO: 76870 - DNA, 19 bp, Homo sapiens
  siRNA target sequence for CHEK1 (NM_001274.2,1198-1216).
ccacatgtcctgatcatat

SEQ ID NO: 76871 - DNA, 19 bp, Homo sapiens
  siRNA target sequence for CHEK1 (NM_001274.2,1209-1227).
gatcatatgcttttgaata

SEQ ID NO: 76872 - DNA, 19 bp, Homo sapiens
  siRNA target sequence for CHEK1 (NM_001274.2,1268-1286).
gcagcggttggtcaaaaga

SEQ ID NO: 76873 - DNA, 19 bp, Homo sapiens
  siRNA target sequence for CHEK1 (NM_001274.2,1269-1287).
cagcggttggtcaaaagaa

SEQ ID NO: 76874 - DNA, 19 bp, Homo sapiens
  siRNA target sequence for CHEK1 (NM_001274.2,1294-1312).
gattctttaccaaattgga

SEQ ID NO: 76875 - DNA, 19 bp, Homo sapiens
  siRNA target sequence for CHEK1 (NM_001274.2,1310-1328).
ggatgcagacaaatcttat

SEQ ID NO: 76876 - DNA, 19 bp, Homo sapiens
  siRNA target sequence for CHEK1 (NM_001274.2,1324-1342).
cttatcaatgcctgaaaga

SEQ ID NO: 76877 - DNA, 19 bp, Homo sapiens
  siRNA target sequence for CHEK1 (NM_001274.2,1350-1368).
gagaagttgggctatcaat

SEQ ID NO: 76878 - DNA, 19 bp, Homo sapiens
  siRNA target sequence for CHEK1 (NM_001274.2,1389-1407).
caggttactatatcaacaa

SEQ ID NO: 76879 - DNA, 19 bp, Homo sapiens
  siRNA target sequence for CHEK1 (NM_001274.2,1415-1433).
gagaaacaataaactcatt

SEQ ID NO: 76880 - DNA, 19 bp, Homo sapiens
  siRNA target sequence for CHEK1 (NM_001274.2,1495-1513).
gtgatggattggagttcaa

SEQ ID NO: 76881 - DNA, 19 bp, Homo sapiens
  siRNA target sequence for CHEK2 (NM_007194.2,962-980).
cactcaggaactctattct

SEQ ID NO: 76882 - DNA, 19 bp, Homo sapiens
  siRNA target sequence for CHEK2 (NM_007194.2,1032-1050).
gccccctgggctcgattat

SEQ ID NO: 76883 - DNA, 19 bp, Homo sapiens
  siRNA target sequence for CHEK2 (NM_007194.2,1051-1069).
gggcccttcaggatggatt

SEQ ID NO: 76884 - DNA, 19 bp, Homo sapiens
  siRNA target sequence for CHEK2 (NM_007194.2,1052-1070).
ggcccttcaggatggattt

SEQ ID NO: 76885 - DNA, 19 bp, Homo sapiens
  siRNA target sequence for CHEK2 (NM_007194.2,1061-1079).
ggatggatttgccaatctt

SEQ ID NO: 76886 - DNA, 19 bp, Homo sapiens
  siRNA target sequence for CHEK2 (NM_007194.2,1149-1167).
ctgaaaagaacagataaat

SEQ ID NO: 76887 - DNA, 19 bp, Homo sapiens
  siRNA target sequence for CHEK2 (NM_007194.2,1159-1177).
cagataaataccgaacata

SEQ ID NO: 76888 - DNA, 19 bp, Homo sapiens
  siRNA target sequence for CHEK2 (NM_007194.2,1202-1220).
cagggaagtgggtcctaaa

SEQ ID NO: 76889 - DNA, 19 bp, Homo sapiens
  siRNA target sequence for CHEK2 (NM_007194.2,1204-1222).
gggaagtgggtcctaaaaa

SEQ ID NO: 76890 - DNA, 19 bp, Homo sapiens
  siRNA target sequence for CHEK2 (NM_007194.2,1212-1230).
ggtcctaaaaactcttaca

SEQ ID NO: 76891 - DNA, 19 bp, Homo sapiens
  siRNA target sequence for CHEK2 (NM_007194.2,1245-1263).
gatcacagtggcaatggaa

SEQ ID NO: 76892 - DNA, 19 bp, Homo sapiens
  siRNA target sequence for CHEK2 (NM_007194.2,1294-1312).
gaaaacgccgtcctttgaa

SEQ ID NO: 76893 - DNA, 19 bp, Homo sapiens
  siRNA target sequence for CHEK2 (NM_007194.2,1299-1317).
cgccgtcctttgaataaca

SEQ ID NO: 76894 - DNA, 19 bp, Homo sapiens
  siRNA target sequence for CHEK2 (NM_007194.2,1300-1318).
gccgtcctttgaataacaa

SEQ ID NO: 76895 - DNA, 19 bp, Homo sapiens
  siRNA target sequence for CHEK2 (NM_007194.2,1301-1319).
ccgtcctttgaataacaat

SEQ ID NO: 76896 - DNA, 19 bp, Homo sapiens
  siRNA target sequence for CHEK2 (NM_007194.2,1302-1320).
cgtcctttgaataacaatt

SEQ ID NO: 76897 - DNA, 19 bp, Homo sapiens
  siRNA target sequence for CHEK2 (NM_007194.2,1323-1341).
gaaattgcactgtcactaa

SEQ ID NO: 76898 - DNA, 19 bp, Homo sapiens
  siRNA target sequence for CHEK2 (NM_007194.2,1377-1395).
gtagatgatcagtcagttt

SEQ ID NO: 76899 - DNA, 19 bp, Homo sapiens
  siRNA target sequence for CHEK2 (NM_007194.2,1383-1401).
gatcagtcagtttatccta

SEQ ID NO: 76900 - DNA, 19 bp, Homo sapiens
  siRNA target sequence for CHEK2 (NM_007194.2,1413-1431).
gatgaatacatcatgtcaa

SEQ ID NO: 76901 - DNA, 19 bp, Homo sapiens
  siRNA target sequence for CHEK2 (NM_007194.2,1421-1439).
catcatgtcaaaaactctt

SEQ ID NO: 76902 - DNA, 19 bp, Homo sapiens
  siRNA target sequence for CHEK2 (NM_007194.2,1447-1465).
gtgcctgtggagaggtaaa

SEQ ID NO: 76903 - DNA, 19 bp, Homo sapiens
  siRNA target sequence for CHEK2 (NM_007194.2,1450-1468).
cctgtggagaggtaaagct

SEQ ID NO: 76904 - DNA, 19 bp, Homo sapiens
  siRNA target sequence for CHEK2 (NM_007194.2,1467-1485).
ctggctttcgagaggaaaa

SEQ ID NO: 76905 - DNA, 19 bp, Homo sapiens
  siRNA target sequence for CHEK2 (NM_007194.2,1470-1488).
gctttcgagaggaaaacat

SEQ ID NO: 76906 - DNA, 19 bp, Homo sapiens
  siRNA target sequence for CHEK2 (NM_007194.2,1705-1723).
ggaataaacgcctgaaaga

SEQ ID NO: 76907 - DNA, 19 bp, Homo sapiens
  siRNA target sequence for CHEK2 (NM_007194.2,1725-1743).
gctacctgcaagctctatt

SEQ ID NO: 76908 - DNA, 19 bp, Homo sapiens
  siRNA target sequence for CHEK2 (NM_007194.2,1732-1750).
gcaagctctatttttacca

SEQ ID NO: 76909 - DNA, 19 bp, Homo sapiens
  siRNA target sequence for CHEK2 (NM_007194.2,1764-1782).
gtgcagtaccttcatgaaa

SEQ ID NO: 76910 - DNA, 19 bp, Homo sapiens
  siRNA target sequence for CHEK2 (NM_007194.2,1773-1791).
cttcatgaaaacggtatta

SEQ ID NO: 76911 - DNA, 19 bp, Homo sapiens
  siRNA target sequence for CHEK2 (NM_007194.2,1809-1827).
ccagagaatgttttactgt

SEQ ID NO: 76912 - DNA, 19 bp, Homo sapiens
  siRNA target sequence for CHEK2 (NM_007194.2,1842-1860).
gactgtcttataaagatta

SEQ ID NO: 76913 - DNA, 19 bp, Homo sapiens
  siRNA target sequence for CHEK2 (NM_007194.2,1846-1864).
gtcttataaagattactga

SEQ ID NO: 76914 - DNA, 19 bp, Homo sapiens
  siRNA target sequence for CHUK (NM_001278.2,236-254).
cctagagctaagtaccaaa

SEQ ID NO: 76915 - DNA, 19 bp, Homo sapiens
  siRNA target sequence for CHUK (NM_001278.2,242-260).
gctaagtaccaaaaacaga

SEQ ID NO: 76916 - DNA, 19 bp, Homo sapiens
  siRNA target sequence for CHUK (NM_001278.2,271-289).
gccatgaaatccagattat

SEQ ID NO: 76917 - DNA, 19 bp, Homo sapiens
  siRNA target sequence for CHUK (NM_001278.2,273-291).
catgaaatccagattatga

SEQ ID NO: 76918 - DNA, 19 bp, Homo sapiens
  siRNA target sequence for CHUK (NM_001278.2,299-317).
gaaccatgccaatgttgta

SEQ ID NO: 76919 - DNA, 19 bp, Homo sapiens
  siRNA target sequence for CHUK (NM_001278.2,366-384).
cctcttctagcaatggaat

SEQ ID NO: 76920 - DNA, 19 bp, Homo sapiens
  siRNA target sequence for CHUK (NM_001278.2,367-385).
ctcttctagcaatggaata

SEQ ID NO: 76921 - DNA, 19 bp, Homo sapiens
  siRNA target sequence for CHUK (NM_001278.2,480-498).
gggtctgggattcgatatt

SEQ ID NO: 76922 - DNA, 19 bp, Homo sapiens
  siRNA target sequence for CHUK (NM_001278.2,481-499).
ggtctgggattcgatattt

SEQ ID NO: 76923 - DNA, 19 bp, Homo sapiens
  siRNA target sequence for CHUK (NM_001278.2,484-502).
ctgggattcgatatttgca

SEQ ID NO: 76924 - DNA, 19 bp, Homo sapiens
  siRNA target sequence for CHUK (NM_001278.2,593-611).
gggatatgccaaagatgtt

SEQ ID NO: 76925 - DNA, 19 bp, Homo sapiens
  siRNA target sequence for CHUK (NM_001278.2,615-633).
caaggaagtctgtgtacat

SEQ ID NO: 76926 - DNA, 19 bp, Homo sapiens
  siRNA target sequence for CHUK (NM_001278.2,618-636).
ggaagtctgtgtacatctt

SEQ ID NO: 76927 - DNA, 19 bp, Homo sapiens
  siRNA target sequence for CHUK (NM_001278.2,689-707).
cacagccactgttgattat

SEQ ID NO: 76928 - DNA, 19 bp, Homo sapiens
  siRNA target sequence for CHUK (NM_001278.2,693-711).
gccactgttgattattgga

SEQ ID NO: 76929 - DNA, 19 bp, Homo sapiens
  siRNA target sequence for CHUK (NM_001278.2,712-730).
gctttgggaccatggtatt

SEQ ID NO: 76930 - DNA, 19 bp, Homo sapiens
  siRNA target sequence for CHUK (NM_001278.2,713-731).
ctttgggaccatggtattt

SEQ ID NO: 76931 - DNA, 19 bp, Homo sapiens
  siRNA target sequence for CHUK (NM_001278.2,725-743).
ggtatttgaatgtattgct

SEQ ID NO: 76932 - DNA, 19 bp, Homo sapiens
  siRNA target sequence for CHUK (NM_001278.2,741-759).
gctggatataggccttttt

SEQ ID NO: 76933 - DNA, 19 bp, Homo sapiens
  siRNA target sequence for CHUK (NM_001278.2,781-799).
cctggcatgagaagattaa

SEQ ID NO: 76934 - DNA, 19 bp, Homo sapiens
  siRNA target sequence for CHUK (NM_001278.2,803-821).
gaaggatccaaagtgtata

SEQ ID NO: 76935 - DNA, 19 bp, Homo sapiens
  siRNA target sequence for CHUK (NM_001278.2,843-861).
ggagaagttcggtttagta

SEQ ID NO: 76936 - DNA, 19 bp, Homo sapiens
  siRNA target sequence for CHUK (NM_001278.2,876-894).
ccaaatagcctttgtagtt

SEQ ID NO: 76937 - DNA, 19 bp, Homo sapiens
  siRNA target sequence for CHUK (NM_001278.2,900-918).
gtagaacccatggaaaact

SEQ ID NO: 76938 - DNA, 19 bp, Homo sapiens
  siRNA target sequence for CHUK (NM_001278.2,960-978).
ggacctgttgaccttactt

SEQ ID NO: 76939 - DNA, 19 bp, Homo sapiens
  siRNA target sequence for CHUK (NM_001278.2,961-979).
gacctgttgaccttacttt

SEQ ID NO: 76940 - DNA, 19 bp, Homo sapiens
  siRNA target sequence for CHUK (NM_001278.2,963-981).
cctgttgaccttactttga

SEQ ID NO: 76941 - DNA, 19 bp, Homo sapiens
  siRNA target sequence for CHUK (NM_001278.2,964-982).
ctgttgaccttactttgaa

SEQ ID NO: 76942 - DNA, 19 bp, Homo sapiens
  siRNA target sequence for CHUK (NM_001278.2,1028-1046).
gatagtacacatcctaaat

SEQ ID NO: 76943 - DNA, 19 bp, Homo sapiens
  siRNA target sequence for CHUK (NM_001278.2,1032-1050).
gtacacatcctaaatatga

SEQ ID NO: 76944 - DNA, 19 bp, Homo sapiens
  siRNA target sequence for CHUK (NM_001278.2,1083-1101).
cctgatgaaagtcttcatt

SEQ ID NO: 76945 - DNA, 19 bp, Homo sapiens
  siRNA target sequence for CHUK (NM_001278.2,1102-1120).
cactacagtctcgtattga

SEQ ID NO: 76946 - DNA, 19 bp, Homo sapiens
  siRNA target sequence for CHUK (NM_001278.2,1119-1137).
gagcgtgaaactggaataa

SEQ ID NO: 76947 - DNA, 19 bp, Homo sapiens
  siRNA target sequence for CHUK (NM_001278.2,1121-1139).
gcgtgaaactggaataaat

SEQ ID NO: 76948 - DNA, 19 bp, Homo sapiens
  siRNA target sequence for CHUK (NM_001278.2,1143-1161).
ggttctcaagaacttcttt

SEQ ID NO: 76949 - DNA, 19 bp, Homo sapiens
  siRNA target sequence for CHUK (NM_001278.2,1225-1243).
gaggctgtgatagctatat

SEQ ID NO: 76950 - DNA, 19 bp, Homo sapiens
  siRNA target sequence for CHUK (NM_001278.2,1228-1246).
gctgtgatagctatatggt

SEQ ID NO: 76951 - DNA, 19 bp, Homo sapiens
  siRNA target sequence for CHUK (NM_001278.2,1229-1247).
ctgtgatagctatatggtt

SEQ ID NO: 76952 - DNA, 19 bp, Homo sapiens
  siRNA target sequence for CHUK (NM_001278.2,1231-1249).
gtgatagctatatggttta

SEQ ID NO: 76953 - DNA, 19 bp, Homo sapiens
  siRNA target sequence for CHUK (NM_001278.2,1233-1251).
gatagctatatggtttatt

SEQ ID NO: 76954 - DNA, 19 bp, Homo sapiens
  siRNA target sequence for CHUK (NM_001278.2,1237-1255).
gctatatggtttatttgtt

SEQ ID NO: 76955 - DNA, 19 bp, Homo sapiens
  siRNA target sequence for CHUK (NM_001278.2,1285-1303).
catttgcttccagaagttt

SEQ ID NO: 76956 - DNA, 19 bp, Homo sapiens
  siRNA target sequence for CHUK (NM_001278.2,1336-1354).
gcaaaatacagcttccaat

SEQ ID NO: 76957 - DNA, 19 bp, Homo sapiens
  siRNA target sequence for CHUK (NM_001278.2,1380-1398).
gaagcagtgcactatgtgt

SEQ ID NO: 76958 - DNA, 19 bp, Homo sapiens
  siRNA target sequence for CHUK (NM_001278.2,1451-1469).
gttaagtcttcttagatat

SEQ ID NO: 76959 - DNA, 19 bp, Homo sapiens
  siRNA target sequence for CHUK (NM_001278.2,1560-1578).
cttgacttggagagataca

SEQ ID NO: 76960 - DNA, 19 bp, Homo sapiens
  siRNA target sequence for CHUK (NM_001278.2,1586-1604).
gatgacgtatgggatatct

SEQ ID NO: 76961 - DNA, 19 bp, Homo sapiens
  siRNA target sequence for CHUK (NM_001278.2,1662-1680).
gaggttggtgtcattggat

SEQ ID NO: 76962 - DNA, 19 bp, Homo sapiens
  siRNA target sequence for CHUK (NM_001278.2,1678-1696).
gatacctggaggatcagat

SEQ ID NO: 76963 - DNA, 19 bp, Homo sapiens
  siRNA target sequence for CHUK (NM_001278.2,1683-1701).
ctggaggatcagattatgt

SEQ ID NO: 76964 - DNA, 19 bp, Homo sapiens
  siRNA target sequence for CHUK (NM_001278.2,1747-1765).
gacgtcagggagacttgat

SEQ ID NO: 76965 - DNA, 19 bp, Homo sapiens
  siRNA target sequence for CHUK (NM_001278.2,1775-1793).
ggaacagcgtgccattgat

SEQ ID NO: 76966 - DNA, 19 bp, Homo sapiens
  siRNA target sequence for CHUK (NM_001278.2,1779-1797).
cagcgtgccattgatctat

SEQ ID NO: 76967 - DNA, 19 bp, Homo sapiens
  siRNA target sequence for CHUK (NM_001278.2,1781-1799).
gcgtgccattgatctatat

SEQ ID NO: 76968 - DNA, 19 bp, Homo sapiens
  siRNA target sequence for CHUK (NM_001278.2,1782-1800).
cgtgccattgatctatata

SEQ ID NO: 76969 - DNA, 19 bp, Homo sapiens
  siRNA target sequence for CHUK (NM_001278.2,1786-1804).
ccattgatctatataagca

SEQ ID NO: 76970 - DNA, 19 bp, Homo sapiens
  siRNA target sequence for CHUK (NM_001278.2,1933-1951).
gctgtaagcagaagattat

SEQ ID NO: 76971 - DNA, 19 bp, Homo sapiens
  siRNA target sequence for CHUK (NM_001278.2,1934-1952).
ctgtaagcagaagattatt

SEQ ID NO: 76972 - DNA, 19 bp, Homo sapiens
  siRNA target sequence for CHUK (NM_001278.2,1970-1988).
ggaagtggccctcagtaat

SEQ ID NO: 76973 - DNA, 19 bp, Homo sapiens
  siRNA target sequence for CHUK (NM_001278.2,1971-1989).
gaagtggccctcagtaata

SEQ ID NO: 76974 - DNA, 19 bp, Homo sapiens
  siRNA target sequence for CHUK (NM_001278.2,1974-1992).
gtggccctcagtaatatca

SEQ ID NO: 76975 - DNA, 19 bp, Homo sapiens
  siRNA target sequence for CHUK (NM_001278.2,2001-2019).
gacaatactgtcatgttca

SEQ ID NO: 76976 - DNA, 19 bp, Homo sapiens
  siRNA target sequence for CHUK (NM_001278.2,2207-2225).
gacttcagcacaaatgata

SEQ ID NO: 76977 - DNA, 19 bp, Homo sapiens
  siRNA target sequence for CHUK (NM_001278.2,2247-2265).
ggccatttaagcactatta

SEQ ID NO: 76978 - DNA, 19 bp, Homo sapiens
  siRNA target sequence for CHUK (NM_001278.2,2286-2304).
cagggcaatagtatgatga

SEQ ID NO: 76979 - DNA, 19 bp, Homo sapiens
  siRNA target sequence for CHUK (NM_001278.2,2288-2306).
gggcaatagtatgatgaat

SEQ ID NO: 76980 - DNA, 19 bp, Homo sapiens
  siRNA target sequence for CHUK (NM_001278.2,2290-2308).
gcaatagtatgatgaatct

SEQ ID NO: 76981 - DNA, 19 bp, Homo sapiens
  siRNA target sequence for CIT (NM_007174.1,150-168).
gggaaaccaccctttatga

SEQ ID NO: 76982 - DNA, 19 bp, Homo sapiens
  siRNA target sequence for CIT (NM_007174.1,152-170).
gaaaccaccctttatgact

SEQ ID NO: 76983 - DNA, 19 bp, Homo sapiens
  siRNA target sequence for CIT (NM_007174.1,193-211).
cccgagaagggatattaga

SEQ ID NO: 76984 - DNA, 19 bp, Homo sapiens
  siRNA target sequence for CIT (NM_007174.1,194-212).
ccgagaagggatattagat

SEQ ID NO: 76985 - DNA, 19 bp, Homo sapiens
  siRNA target sequence for CIT (NM_007174.1,245-263).
gcctgctctgatgaagatt

SEQ ID NO: 76986 - DNA, 19 bp, Homo sapiens
  siRNA target sequence for CIT (NM_007174.1,275-293).
caactttgtccggaagtat

SEQ ID NO: 76987 - DNA, 19 bp, Homo sapiens
  siRNA target sequence for CIT (NM_007174.1,296-314).
cgacaccatagctgagtta

SEQ ID NO: 76988 - DNA, 19 bp, Homo sapiens
  siRNA target sequence for CIT (NM_007174.1,409-427).
ccggggacatctatgctat

SEQ ID NO: 76989 - DNA, 19 bp, Homo sapiens
  siRNA target sequence for CIT (NM_007174.1,412-430).
gggacatctatgctatgaa

SEQ ID NO: 76990 - DNA, 19 bp, Homo sapiens
  siRNA target sequence for CIT (NM_007174.1,456-474).
gcccaggagcaggtttcat

SEQ ID NO: 76991 - DNA, 19 bp, Homo sapiens
  siRNA target sequence for CIT (NM_007174.1,457-475).
cccaggagcaggtttcatt

SEQ ID NO: 76992 - DNA, 19 bp, Homo sapiens
  siRNA target sequence for CIT (NM_007174.1,458-476).
ccaggagcaggtttcattt

SEQ ID NO: 76993 - DNA, 19 bp, Homo sapiens
  siRNA target sequence for CIT (NM_007174.1,515-533).
cccgtggatcccccaatta

SEQ ID NO: 76994 - DNA, 19 bp, Homo sapiens
  siRNA target sequence for CIT (NM_007174.1,517-535).
cgtggatcccccaattaca

SEQ ID NO: 76995 - DNA, 19 bp, Homo sapiens
  siRNA target sequence for CIT (NM_007174.1,521-539).
gatcccccaattacagtat

SEQ ID NO: 76996 - DNA, 19 bp, Homo sapiens
  siRNA target sequence for CIT (NM_007174.1,594-612).
gacttgctgtcacttttga

SEQ ID NO: 76997 - DNA, 19 bp, Homo sapiens
  siRNA target sequence for CIT (NM_007174.1,596-614).
cttgctgtcacttttgaat

SEQ ID NO: 76998 - DNA, 19 bp, Homo sapiens
  siRNA target sequence for CIT (NM_007174.1,599-617).
gctgtcacttttgaataga

SEQ ID NO: 76999 - DNA, 19 bp, Homo sapiens
  siRNA target sequence for CIT (NM_007174.1,600-618).
ctgtcacttttgaatagat

SEQ ID NO: 77000 - DNA, 19 bp, Homo sapiens
  siRNA target sequence for CIT (NM_007174.1,633-651).
gatgaaaacctgatacagt

SEQ ID NO: 77001 - DNA, 19 bp, Homo sapiens
  siRNA target sequence for CIT (NM_007174.1,774-792).
ggatctgccgcgaaaatga

SEQ ID NO: 77002 - DNA, 19 bp, Homo sapiens
  siRNA target sequence for CIT (NM_007174.1,775-793).
gatctgccgcgaaaatgaa

SEQ ID NO: 77003 - DNA, 19 bp, Homo sapiens
  siRNA target sequence for CIT (NM_007174.1,781-799).
ccgcgaaaatgaattcaaa

SEQ ID NO: 77004 - DNA, 19 bp, Homo sapiens
  siRNA target sequence for CIT (NM_007174.1,823-841).
cgattgggaccccagatta

SEQ ID NO: 77005 - DNA, 19 bp, Homo sapiens
  siRNA target sequence for CIT (NM_007174.1,866-884).
gatgaacggggatggaaaa

SEQ ID NO: 77006 - DNA, 19 bp, Homo sapiens
  siRNA target sequence for CIT (NM_007174.1,921-939).
ggcgtgattgcctatgaga

SEQ ID NO: 77007 - DNA, 19 bp, Homo sapiens
  siRNA target sequence for CIT (NM_007174.1,922-940).
gcgtgattgcctatgagat

SEQ ID NO: 77008 - DNA, 19 bp, Homo sapiens
  siRNA target sequence for CIT (NM_007174.1,976-994).
ctgccagaaccttcaataa

SEQ ID NO: 77009 - DNA, 19 bp, Homo sapiens
  siRNA target sequence for CIT (NM_007174.1,1007-1025).
ccagcggtttttgaaattt

SEQ ID NO: 77010 - DNA, 19 bp, Homo sapiens
  siRNA target sequence for CIT (NM_007174.1,1062-1080).
ctgattcaaagcttgttgt

SEQ ID NO: 77011 - DNA, 19 bp, Homo sapiens
  siRNA target sequence for CIT (NM_007174.1,1143-1161).
gactggaacaacattcgta

SEQ ID NO: 77012 - DNA, 19 bp, Homo sapiens
  siRNA target sequence for CIT (NM_007174.1,1197-1215).
gacgatgacacctccaatt

SEQ ID NO: 77013 - DNA, 19 bp, Homo sapiens
  siRNA target sequence for CIT (NM_007174.1,1199-1217).
cgatgacacctccaatttt

SEQ ID NO: 77014 - DNA, 19 bp, Homo sapiens
  siRNA target sequence for CIT (NM_007174.1,1205-1223).
cacctccaattttgatgaa

SEQ ID NO: 77015 - DNA, 19 bp, Homo sapiens
  siRNA target sequence for CIT (NM_007174.1,1221-1239).
gaaccagagaagaattcgt

SEQ ID NO: 77016 - DNA, 19 bp, Homo sapiens
  siRNA target sequence for CIT (NM_007174.1,1276-1294).
gcttctcgggtgaagaact

SEQ ID NO: 77017 - DNA, 19 bp, Homo sapiens
  siRNA target sequence for CIT (NM_007174.1,1296-1314).
ccgtttgtggggttttcgt

SEQ ID NO: 77018 - DNA, 19 bp, Homo sapiens
  siRNA target sequence for CIT (NM_007174.1,1297-1315).
cgtttgtggggttttcgta

SEQ ID NO: 77019 - DNA, 19 bp, Homo sapiens
  siRNA target sequence for CIT (NM_007174.1,1328-1346).
ggggattcttggtagatct

SEQ ID NO: 77020 - DNA, 19 bp, Homo sapiens
  siRNA target sequence for CIT (NM_007174.1,1368-1386).
gactcccctgccaagacta

SEQ ID NO: 77021 - DNA, 19 bp, Homo sapiens
  siRNA target sequence for CIT (NM_007174.1,1384-1402).
ctagctccatggaaaagaa

SEQ ID NO: 77022 - DNA, 19 bp, Homo sapiens
  siRNA target sequence for CIT (NM_007174.1,1463-1481).
ggaaatgacccggttacat

SEQ ID NO: 77023 - DNA, 19 bp, Homo sapiens
  siRNA target sequence for CIT (NM_007174.1,1586-1604).
cacagaatgcagtagctta

SEQ ID NO: 77024 - DNA, 19 bp, Homo sapiens
  siRNA target sequence for CIT (NM_007174.1,1588-1606).
cagaatgcagtagcttaaa

SEQ ID NO: 77025 - DNA, 19 bp, Homo sapiens
  siRNA target sequence for CIT (NM_007174.1,1662-1680).
cagcttctccatgatatca

SEQ ID NO: 77026 - DNA, 19 bp, Homo sapiens
  siRNA target sequence for CIT (NM_007174.1,1690-1708).
gccggaagctccaagaaat

SEQ ID NO: 77027 - DNA, 19 bp, Homo sapiens
  siRNA target sequence for CIT (NM_007174.1,1737-1755).
gaagaaatgaggttgatga

SEQ ID NO: 77028 - DNA, 19 bp, Homo sapiens
  siRNA target sequence for CIT (NM_007174.1,1789-1807).
gaagacggagtgatctcta

SEQ ID NO: 77029 - DNA, 19 bp, Homo sapiens
  siRNA target sequence for CIT (NM_007174.1,1794-1812).
cggagtgatctctacgaat

SEQ ID NO: 77030 - DNA, 19 bp, Homo sapiens
  siRNA target sequence for CIT (NM_007174.1,1830-1848).
cggcttgctgctgaagaat

SEQ ID NO: 77031 - DNA, 19 bp, Homo sapiens
  siRNA target sequence for CIT (NM_007174.1,1831-1849).
ggcttgctgctgaagaatt

SEQ ID NO: 77032 - DNA, 19 bp, Homo sapiens
  siRNA target sequence for CIT (NM_007174.1,1853-1871).
gcggaaagcgacagaatgt

SEQ ID NO: 77033 - DNA, 19 bp, Homo sapiens
  siRNA target sequence for CIT (NM_007174.1,1855-1873).
ggaaagcgacagaatgtca

SEQ ID NO: 77034 - DNA, 19 bp, Homo sapiens
  siRNA target sequence for CIT (NM_007174.1,1861-1879).
cgacagaatgtcagcataa

SEQ ID NO: 77035 - DNA, 19 bp, Homo sapiens
  siRNA target sequence for CIT (NM_007174.1,1866-1884).
gaatgtcagcataaactgt

SEQ ID NO: 77036 - DNA, 19 bp, Homo sapiens
  siRNA target sequence for CIT (NM_007174.1,2082-2100).
cagaaccgagaggattctt

SEQ ID NO: 77037 - DNA, 19 bp, Homo sapiens
  siRNA target sequence for CIT (NM_007174.1,2084-2102).
gaaccgagaggattcttct

SEQ ID NO: 77038 - DNA, 19 bp, Homo sapiens
  siRNA target sequence for CIT (NM_007174.1,2135-2153).
ggagctcgaagagaaacat

SEQ ID NO: 77039 - DNA, 19 bp, Homo sapiens
  siRNA target sequence for CIT (NM_007174.1,2316-2334).
gagaagggcaaaattctca

SEQ ID NO: 77040 - DNA, 19 bp, Homo sapiens
  siRNA target sequence for CIT (NM_007174.1,2348-2366).
gatgatcaatgctatggat

SEQ ID NO: 77041 - DNA, 19 bp, Homo sapiens
  siRNA target sequence for CIT (NM_007174.1,2358-2376).
gctatggattccaagatca

SEQ ID NO: 77042 - DNA, 19 bp, Homo sapiens
  siRNA target sequence for CIT (NM_007174.1,2427-2445).
gcaaatagcagtcttttta

SEQ ID NO: 77043 - DNA, 19 bp, Homo sapiens
  siRNA target sequence for CIT (NM_007174.1,2822-2840).
ggcactcacggcacataga

SEQ ID NO: 77044 - DNA, 19 bp, Homo sapiens
  siRNA target sequence for CIT (NM_007174.1,2824-2842).
cactcacggcacatagaga

SEQ ID NO: 77045 - DNA, 19 bp, Homo sapiens
  siRNA target sequence for CIT (NM_007174.1,2828-2846).
cacggcacatagagatgaa

SEQ ID NO: 77046 - DNA, 19 bp, Homo sapiens
  siRNA target sequence for CIT (NM_007174.1,2830-2848).
cggcacatagagatgaaat

SEQ ID NO: 77047 - DNA, 19 bp, Homo sapiens
  siRNA target sequence for CIT (NM_007174.1,2871-2889).
cgtaacagctgtactgtaa

SEQ ID NO: 77048 - DNA, 19 bp, Homo sapiens
  siRNA target sequence for CIT (NM_007174.1,2876-2894).
cagctgtactgtaatcaca

SEQ ID NO: 77049 - DNA, 19 bp, Homo sapiens
  siRNA target sequence for CIT (NM_007174.1,2990-3008).
cgccaacgacgagattgta

SEQ ID NO: 77050 - DNA, 19 bp, Homo sapiens
  siRNA target sequence for CIT (NM_007174.1,2992-3010).
ccaacgacgagattgtaca

SEQ ID NO: 77051 - DNA, 19 bp, Homo sapiens
  siRNA target sequence for CIT (NM_007174.1,3066-3084).
cttaccagccagaagcaaa

SEQ ID NO: 77052 - DNA, 19 bp, Homo sapiens
  siRNA target sequence for CIT (NM_007174.1,3197-3215).
cgtcctgggtgatgagaaa

SEQ ID NO: 77053 - DNA, 19 bp, Homo sapiens
  siRNA target sequence for CIT (NM_007174.1,3198-3216).
gtcctgggtgatgagaaat

SEQ ID NO: 77054 - DNA, 19 bp, Homo sapiens
  siRNA target sequence for CIT (NM_007174.1,3428-3446).
gaagaagcatgctatgctt

SEQ ID NO: 77055 - DNA, 19 bp, Homo sapiens
  siRNA target sequence for CIT (NM_007174.1,3486-3504).
gaacgagagctcaaacaga

SEQ ID NO: 77056 - DNA, 19 bp, Homo sapiens
  siRNA target sequence for CIT (NM_007174.1,3653-3671).
cattcaggttctctattct

SEQ ID NO: 77057 - DNA, 19 bp, Homo sapiens
  siRNA target sequence for CIT (NM_007174.1,3697-3715).
ctatttctcaacaaaccaa

SEQ ID NO: 77058 - DNA, 19 bp, Homo sapiens
  siRNA target sequence for CIT (NM_007174.1,3761-3779).
gaaaaagggtttatttagt

SEQ ID NO: 77059 - DNA, 19 bp, Homo sapiens
  siRNA target sequence for CIT (NM_007174.1,3812-3830).
ggttcctctgcagtacaat

SEQ ID NO: 77060 - DNA, 19 bp, Homo sapiens
  siRNA target sequence for CIT (NM_007174.1,4068-4086).
cgcagaaaggagtcttcaa

SEQ ID NO: 77061 - DNA, 19 bp, Homo sapiens
  siRNA target sequence for CIT (NM_007174.1,4070-4088).
cagaaaggagtcttcaact

SEQ ID NO: 77062 - DNA, 19 bp, Homo sapiens
  siRNA target sequence for CIT (NM_007174.1,4116-4134).
gaacgcatgcaccacaata

SEQ ID NO: 77063 - DNA, 19 bp, Homo sapiens
  siRNA target sequence for CIT (NM_007174.1,4121-4139).
catgcaccacaatattcct

SEQ ID NO: 77064 - DNA, 19 bp, Homo sapiens
  siRNA target sequence for CIT (NM_007174.1,4163-4181).
catgcgagccacaaagtgt

SEQ ID NO: 77065 - DNA, 19 bp, Homo sapiens
  siRNA target sequence for CIT (NM_007174.1,4209-4227).
ggacgccaggcatccaaat

SEQ ID NO: 77066 - DNA, 19 bp, Homo sapiens
  siRNA target sequence for CIT (NM_007174.1,4213-4231).
gccaggcatccaaatgtct

SEQ ID NO: 77067 - DNA, 19 bp, Homo sapiens
  siRNA target sequence for CIT (NM_007174.1,4222-4240).
ccaaatgtctcgaatgtca

SEQ ID NO: 77068 - DNA, 19 bp, Homo sapiens
  siRNA target sequence for CIT (NM_007174.1,4285-4303).
gcggcttgcctgctgaata

SEQ ID NO: 77069 - DNA, 19 bp, Homo sapiens
  siRNA target sequence for CIT (NM_007174.1,4323-4341).
gccttctgccgtgacaaaa

SEQ ID NO: 77070 - DNA, 19 bp, Homo sapiens
  siRNA target sequence for CIT (NM_007174.1,4324-4342).
ccttctgccgtgacaaaat

SEQ ID NO: 77071 - DNA, 19 bp, Homo sapiens
  siRNA target sequence for CIT (NM_007174.1,4468-4486).
gatcaaaagtcctcattta

SEQ ID NO: 77072 - DNA, 19 bp, Homo sapiens
  siRNA target sequence for CIT (NM_007174.1,4542-4560).
cttcccgacggggatgtat

SEQ ID NO: 77073 - DNA, 19 bp, Homo sapiens
  siRNA target sequence for CIT (NM_007174.1,4545-4563).
cccgacggggatgtatcta

SEQ ID NO: 77074 - DNA, 19 bp, Homo sapiens
  siRNA target sequence for CIT (NM_007174.1,4546-4564).
ccgacggggatgtatctat

SEQ ID NO: 77075 - DNA, 19 bp, Homo sapiens
  siRNA target sequence for CIT (NM_007174.1,4547-4565).
cgacggggatgtatctatt

SEQ ID NO: 77076 - DNA, 19 bp, Homo sapiens
  siRNA target sequence for CIT (NM_007174.1,4550-4568).
cggggatgtatctattcat

SEQ ID NO: 77077 - DNA, 19 bp, Homo sapiens
  siRNA target sequence for CIT (NM_007174.1,4581-4599).
gcttccgaactcgcaaata

SEQ ID NO: 77078 - DNA, 19 bp, Homo sapiens
  siRNA target sequence for CIT (NM_007174.1,4609-4627).
cagatgtcccatacatact

SEQ ID NO: 77079 - DNA, 19 bp, Homo sapiens
  siRNA target sequence for CIT (NM_007174.1,4712-4730).
ctgggtcaccgccttagaa

SEQ ID NO: 77080 - DNA, 19 bp, Homo sapiens
  siRNA target sequence for CIT (NM_007174.1,4715-4733).
ggtcaccgccttagaatca

SEQ ID NO: 77081 - DNA, 19 bp, Homo sapiens
  siRNA target sequence for CIT (NM_007174.1,4718-4736).
caccgccttagaatcagtt

SEQ ID NO: 77082 - DNA, 19 bp, Homo sapiens
  siRNA target sequence for CIT (NM_007174.1,4792-4810).
gaaactccctgctgaaact

SEQ ID NO: 77083 - DNA, 19 bp, Homo sapiens
  siRNA target sequence for CIT (NM_007174.1,4816-4834).
gtgatgaccgtctagacat

SEQ ID NO: 77084 - DNA, 19 bp, Homo sapiens
  siRNA target sequence for CIT (NM_007174.1,4821-4839).
gaccgtctagacatgaact

SEQ ID NO: 77085 - DNA, 19 bp, Homo sapiens
  siRNA target sequence for CIT (NM_007174.1,4888-4906).
ggctctacgccctgaatgt

SEQ ID NO: 77086 - DNA, 19 bp, Homo sapiens
  siRNA target sequence for CIT (NM_007174.1,4890-4908).
ctctacgccctgaatgtct

SEQ ID NO: 77087 - DNA, 19 bp, Homo sapiens
  siRNA target sequence for CIT (NM_007174.1,4976-4994).
ggagaagctactcatgata

SEQ ID NO: 77088 - DNA, 19 bp, Homo sapiens
  siRNA target sequence for CIT (NM_007174.1,5017-5035).
gtcttgtggacgtgaagaa

SEQ ID NO: 77089 - DNA, 19 bp, Homo sapiens
  siRNA target sequence for CIT (NM_007174.1,5078-5096).
cgacatctcacccaacatt

SEQ ID NO: 77090 - DNA, 19 bp, Homo sapiens
  siRNA target sequence for CIT (NM_007174.1,5079-5097).
gacatctcacccaacattt

SEQ ID NO: 77091 - DNA, 19 bp, Homo sapiens
  siRNA target sequence for CIT (NM_007174.1,5127-5145).
ggggcaggcaagattgaga

SEQ ID NO: 77092 - DNA, 19 bp, Homo sapiens
  siRNA target sequence for CIT (NM_007174.1,5173-5191).
ccagcaaagtcgtcattct

SEQ ID NO: 77093 - DNA, 19 bp, Homo sapiens
  siRNA target sequence for CIT (NM_007174.1,5221-5239).
gcatccggaaagagataga

SEQ ID NO: 77094 - DNA, 19 bp, Homo sapiens
  siRNA target sequence for CIT (NM_007174.1,5339-5357).
ggaattcctggataagaat

SEQ ID NO: 77095 - DNA, 19 bp, Homo sapiens
  siRNA target sequence for CIT (NM_007174.1,5459-5477).
gtgtttccacgaatttgga

SEQ ID NO: 77096 - DNA, 19 bp, Homo sapiens
  siRNA target sequence for CIT (NM_007174.1,5475-5493).
ggagtgttcgtggattctt

SEQ ID NO: 77097 - DNA, 19 bp, Homo sapiens
  siRNA target sequence for CIT (NM_007174.1,5506-5524).
gccgcacagacgatctcaa

SEQ ID NO: 77098 - DNA, 19 bp, Homo sapiens
  siRNA target sequence for CIT (NM_007174.1,5557-5575).
gagaaccctatctgtttgt

SEQ ID NO: 77099 - DNA, 19 bp, Homo sapiens
  siRNA target sequence for CIT (NM_007174.1,5559-5577).
gaaccctatctgtttgtga

SEQ ID NO: 77100 - DNA, 19 bp, Homo sapiens
  siRNA target sequence for CIT (NM_007174.1,5585-5603).
caactcactcgaagtaatt

SEQ ID NO: 77101 - DNA, 19 bp, Homo sapiens
  siRNA target sequence for CIT (NM_007174.1,5689-5707).
cctcaggagcgatttactt

SEQ ID NO: 77102 - DNA, 19 bp, Homo sapiens
  siRNA target sequence for CIT (NM_007174.1,5714-5732).
ctcataccaggataaatta

SEQ ID NO: 77103 - DNA, 19 bp, Homo sapiens
  siRNA target sequence for CLK1 (NM_004071.1,160-178).
gacactcaaagagaactta

SEQ ID NO: 77104 - DNA, 19 bp, Homo sapiens
  siRNA target sequence for CLK1 (NM_004071.1,164-182).
ctcaaagagaacttactgt

SEQ ID NO: 77105 - DNA, 19 bp, Homo sapiens
  siRNA target sequence for CLK1 (NM_004071.1,273-291).
gagaacaagcgctgcaaat

SEQ ID NO: 77106 - DNA, 19 bp, Homo sapiens
  siRNA target sequence for CLK1 (NM_004071.1,278-296).
caagcgctgcaaatacaat

SEQ ID NO: 77107 - DNA, 19 bp, Homo sapiens
  siRNA target sequence for CLK1 (NM_004071.1,282-300).
cgctgcaaatacaatcact

SEQ ID NO: 77108 - DNA, 19 bp, Homo sapiens
  siRNA target sequence for CLK1 (NM_004071.1,286-304).
gcaaatacaatcactctaa

SEQ ID NO: 77109 - DNA, 19 bp, Homo sapiens
  siRNA target sequence for CLK1 (NM_004071.1,312-330).
gatagccattatttggaaa

SEQ ID NO: 77110 - DNA, 19 bp, Homo sapiens
  siRNA target sequence for CLK1 (NM_004071.1,361-379).
gtcgacgctacattgatga

SEQ ID NO: 77111 - DNA, 19 bp, Homo sapiens
  siRNA target sequence for CLK1 (NM_004071.1,364-382).
gacgctacattgatgagta

SEQ ID NO: 77112 - DNA, 19 bp, Homo sapiens
  siRNA target sequence for CLK1 (NM_004071.1,432-450).
catgaaagccggtatcaga

SEQ ID NO: 77113 - DNA, 19 bp, Homo sapiens
  siRNA target sequence for CLK1 (NM_004071.1,441-459).
cggtatcagaaccatagta

SEQ ID NO: 77114 - DNA, 19 bp, Homo sapiens
  siRNA target sequence for CLK1 (NM_004071.1,461-479).
caagtcttctggtagaagt

SEQ ID NO: 77115 - DNA, 19 bp, Homo sapiens
  siRNA target sequence for CLK1 (NM_004071.1,611-629).
gagtggagacgtactaagt

SEQ ID NO: 77116 - DNA, 19 bp, Homo sapiens
  siRNA target sequence for CLK1 (NM_004071.1,681-699).
gtggagtgcatcgatcata

SEQ ID NO: 77117 - DNA, 19 bp, Homo sapiens
  siRNA target sequence for CLK1 (NM_004071.1,712-730).
gacatgtagcagtaaaaat

SEQ ID NO: 77118 - DNA, 19 bp, Homo sapiens
  siRNA target sequence for CLK1 (NM_004071.1,760-778).
ctgctcgctcagaaataca

SEQ ID NO: 77119 - DNA, 19 bp, Homo sapiens
  siRNA target sequence for CLK1 (NM_004071.1,930-948).
ccatttcgactggatcata

SEQ ID NO: 77120 - DNA, 19 bp, Homo sapiens
  siRNA target sequence for CLK1 (NM_004071.1,931-949).
catttcgactggatcatat

SEQ ID NO: 77121 - DNA, 19 bp, Homo sapiens
  siRNA target sequence for CLK1 (NM_004071.1,936-954).
cgactggatcatatcagaa

SEQ ID NO: 77122 - DNA, 19 bp, Homo sapiens
  siRNA target sequence for CLK1 (NM_004071.1,937-955).
gactggatcatatcagaaa

SEQ ID NO: 77123 - DNA, 19 bp, Homo sapiens
  siRNA target sequence for CLK1 (NM_004071.1,952-970).
gaaagatggcatatcagat

SEQ ID NO: 77124 - DNA, 19 bp, Homo sapiens
  siRNA target sequence for CLK1 (NM_004071.1,968-986).
gatatgcaagtctgtgaat

SEQ ID NO: 77125 - DNA, 19 bp, Homo sapiens
  siRNA target sequence for CLK1 (NM_004071.1,1004-1022).
gttgactcacacagactta

SEQ ID NO: 77126 - DNA, 19 bp, Homo sapiens
  siRNA target sequence for CLK1 (NM_004071.1,1025-1043).
gcctgaaaacatcttattt

SEQ ID NO: 77127 - DNA, 19 bp, Homo sapiens
  siRNA target sequence for CLK1 (NM_004071.1,1055-1073).
ctacacagaggcgtataat

SEQ ID NO: 77128 - DNA, 19 bp, Homo sapiens
  siRNA target sequence for CLK1 (NM_004071.1,1064-1082).
ggcgtataatcccaaaata

SEQ ID NO: 77129 - DNA, 19 bp, Homo sapiens
  siRNA target sequence for CLK1 (NM_004071.1,1086-1104).
cgtgatgaacgcaccttaa

SEQ ID NO: 77130 - DNA, 19 bp, Homo sapiens
  siRNA target sequence for CLK1 (NM_004071.1,1087-1105).
gtgatgaacgcaccttaat

SEQ ID NO: 77131 - DNA, 19 bp, Homo sapiens
  siRNA target sequence for CLK1 (NM_004071.1,1163-1181).
cagtacattggtatctaca

SEQ ID NO: 77132 - DNA, 19 bp, Homo sapiens
  siRNA target sequence for CLK1 (NM_004071.1,1172-1190).
ggtatctacaagacattat

SEQ ID NO: 77133 - DNA, 19 bp, Homo sapiens
  siRNA target sequence for CLK1 (NM_004071.1,1278-1296).
gggtttaccgtatttccaa

SEQ ID NO: 77134 - DNA, 19 bp, Homo sapiens
  siRNA target sequence for CLK1 (NM_004071.1,1301-1319).
cgatagtaaggagcattta

SEQ ID NO: 77135 - DNA, 19 bp, Homo sapiens
  siRNA target sequence for CLK1 (NM_004071.1,1306-1324).
gtaaggagcatttagcaat

SEQ ID NO: 77136 - DNA, 19 bp, Homo sapiens
  siRNA target sequence for CLK1 (NM_004071.1,1341-1359).
ggacctctaccaaaacata

SEQ ID NO: 77137 - DNA, 19 bp, Homo sapiens
  siRNA target sequence for CLK1 (NM_004071.1,1342-1360).
gacctctaccaaaacatat

SEQ ID NO: 77138 - DNA, 19 bp, Homo sapiens
  siRNA target sequence for CLK1 (NM_004071.1,1350-1368).
ccaaaacatatgatacaga

SEQ ID NO: 77139 - DNA, 19 bp, Homo sapiens
  siRNA target sequence for CLK1 (NM_004071.1,1356-1374).
catatgatacagaaaacca

SEQ ID NO: 77140 - DNA, 19 bp, Homo sapiens
  siRNA target sequence for CLK1 (NM_004071.1,1365-1383).
cagaaaaccaggaaacgta

SEQ ID NO: 77141 - DNA, 19 bp, Homo sapiens
  siRNA target sequence for CLK1 (NM_004071.1,1392-1410).
caccacgatcgattagact

SEQ ID NO: 77142 - DNA, 19 bp, Homo sapiens
  siRNA target sequence for CLK1 (NM_004071.1,1402-1420).
gattagactgggatgaaca

SEQ ID NO: 77143 - DNA, 19 bp, Homo sapiens
  siRNA target sequence for CLK1 (NM_004071.1,1428-1446).
gccggcagatatgtttcaa

SEQ ID NO: 77144 - DNA, 19 bp, Homo sapiens
  siRNA target sequence for CLK1 (NM_004071.1,1453-1471).
gtaaacctctgaaggaatt

SEQ ID NO: 77145 - DNA, 19 bp, Homo sapiens
  siRNA target sequence for CLK1 (NM_004071.1,1509-1527).
gacctcattcagaaaatgt

SEQ ID NO: 77146 - DNA, 19 bp, Homo sapiens
  siRNA target sequence for CLK1 (NM_004071.1,1567-1585).
ccttaaagcatcctttctt

SEQ ID NO: 77147 - DNA, 19 bp, Homo sapiens
  siRNA target sequence for CLK2 (NM_001291.1,207-225).
gcataagcgacgaagaagt

SEQ ID NO: 77148 - DNA, 19 bp, Homo sapiens
  siRNA target sequence for CLK2 (NM_001291.1,288-306).
ccgttctcgaagcagttat

SEQ ID NO: 77149 - DNA, 19 bp, Homo sapiens
  siRNA target sequence for CLK2 (NM_001291.1,290-308).
gttctcgaagcagttatga

SEQ ID NO: 77150 - DNA, 19 bp, Homo sapiens
  siRNA target sequence for CLK2 (NM_001291.1,293-311).
ctcgaagcagttatgatga

SEQ ID NO: 77151 - DNA, 19 bp, Homo sapiens
  siRNA target sequence for CLK2 (NM_001291.1,320-338).
ccgaccggagggtgtatga

SEQ ID NO: 77152 - DNA, 19 bp, Homo sapiens
  siRNA target sequence for CLK2 (NM_001291.1,333-351).
gtatgaccggcgatactgt

SEQ ID NO: 77153 - DNA, 19 bp, Homo sapiens
  siRNA target sequence for CLK2 (NM_001291.1,356-374).
gctacagacgcaacgatta

SEQ ID NO: 77154 - DNA, 19 bp, Homo sapiens
  siRNA target sequence for CLK2 (NM_001291.1,357-375).
ctacagacgcaacgattat

SEQ ID NO: 77155 - DNA, 19 bp, Homo sapiens
  siRNA target sequence for CLK2 (NM_001291.1,386-404).
ggggagatgcctactatga

SEQ ID NO: 77156 - DNA, 19 bp, Homo sapiens
  siRNA target sequence for CLK2 (NM_001291.1,388-406).
ggagatgcctactatgaca

SEQ ID NO: 77157 - DNA, 19 bp, Homo sapiens
  siRNA target sequence for CLK2 (NM_001291.1,407-425).
cagactatcggcattccta

SEQ ID NO: 77158 - DNA, 19 bp, Homo sapiens
  siRNA target sequence for CLK2 (NM_001291.1,411-429).
ctatcggcattcctatgaa

SEQ ID NO: 77159 - DNA, 19 bp, Homo sapiens
  siRNA target sequence for CLK2 (NM_001291.1,416-434).
ggcattcctatgaatatca

SEQ ID NO: 77160 - DNA, 19 bp, Homo sapiens
  siRNA target sequence for CLK2 (NM_001291.1,516-534).
ccgctcatcttcgatgaaa

SEQ ID NO: 77161 - DNA, 19 bp, Homo sapiens
  siRNA target sequence for CLK2 (NM_001291.1,517-535).
cgctcatcttcgatgaaat

SEQ ID NO: 77162 - DNA, 19 bp, Homo sapiens
  siRNA target sequence for CLK2 (NM_001291.1,521-539).
catcttcgatgaaatcgtt

SEQ ID NO: 77163 - DNA, 19 bp, Homo sapiens
  siRNA target sequence for CLK3 (NM_001292.1,179-197).
gcctcccccacgaagatct

SEQ ID NO: 77164 - DNA, 19 bp, Homo sapiens
  siRNA target sequence for CLK3 (NM_001292.1,246-264).
cgccgtgacagcgatacat

SEQ ID NO: 77165 - DNA, 19 bp, Homo sapiens
  siRNA target sequence for CLK3 (NM_001292.1,247-265).
gccgtgacagcgatacata

SEQ ID NO: 77166 - DNA, 19 bp, Homo sapiens
  siRNA target sequence for CLK3 (NM_001292.1,393-411).
cgccgcaccaggtcttgta

SEQ ID NO: 77167 - DNA, 19 bp, Homo sapiens
  siRNA target sequence for CLK3 (NM_001292.1,415-433).
gcgcctcctcgatgagatt

SEQ ID NO: 77168 - DNA, 19 bp, Homo sapiens
  siRNA target sequence for CLK3 (NM_001292.1,417-435).
gcctcctcgatgagattgt

SEQ ID NO: 77169 - DNA, 19 bp, Homo sapiens
  siRNA target sequence for CLK3 (NM_003992.1,512-530).
ccaagagcgatatgagatt

SEQ ID NO: 77170 - DNA, 19 bp, Homo sapiens
  siRNA target sequence for CLK3 (NM_003992.1,657-675).
gaaatcaacgtgctcaaaa

SEQ ID NO: 77171 - DNA, 19 bp, Homo sapiens
  siRNA target sequence for CLK3 (NM_003992.1,774-792).
ggcaagaacacctttgagt

SEQ ID NO: 77172 - DNA, 19 bp, Homo sapiens
  siRNA target sequence for CLK3 (NM_003992.1,855-873).
ctctgccacgcccttagat

SEQ ID NO: 77173 - DNA, 19 bp, Homo sapiens
  siRNA target sequence for CLK3 (NM_003992.1,857-875).
ctgccacgcccttagattt

SEQ ID NO: 77174 - DNA, 19 bp, Homo sapiens
  siRNA target sequence for CLK3 (NM_003992.1,859-877).
gccacgcccttagatttct

SEQ ID NO: 77175 - DNA, 19 bp, Homo sapiens
  siRNA target sequence for CLK3 (NM_003992.1,893-911).
gacccatacagacttgaaa

SEQ ID NO: 77176 - DNA, 19 bp, Homo sapiens
  siRNA target sequence for CLK3 (NM_003992.1,1132-1150).
gcattggctgcattctctt

SEQ ID NO: 77177 - DNA, 19 bp, Homo sapiens
  siRNA target sequence for CLK4 (NM_020666.1,46-64).
gaaagctggggacatgaaa

SEQ ID NO: 77178 - DNA, 19 bp, Homo sapiens
  siRNA target sequence for CLK4 (NM_020666.1,51-69).
ctggggacatgaaagctat

SEQ ID NO: 77179 - DNA, 19 bp, Homo sapiens
  siRNA target sequence for CLK4 (NM_020666.1,117-135).
gaacaggcattgtaaacca

SEQ ID NO: 77180 - DNA, 19 bp, Homo sapiens
  siRNA target sequence for CLK4 (NM_020666.1,155-173).
ctgattgtcattatttaga

SEQ ID NO: 77181 - DNA, 19 bp, Homo sapiens
  siRNA target sequence for CLK4 (NM_020666.1,209-227).
ggagatacgttgacgaata

SEQ ID NO: 77182 - DNA, 19 bp, Homo sapiens
  siRNA target sequence for CLK4 (NM_020666.1,220-238).
gacgaatacaggaatgact

SEQ ID NO: 77183 - DNA, 19 bp, Homo sapiens
  siRNA target sequence for CLK4 (NM_020666.1,237-255).
ctactgtgaaggatatgtt

SEQ ID NO: 77184 - DNA, 19 bp, Homo sapiens
  siRNA target sequence for CLK4 (NM_020666.1,253-271).
gttcctagacattatcaca

SEQ ID NO: 77185 - DNA, 19 bp, Homo sapiens
  siRNA target sequence for CLK4 (NM_020666.1,324-342).
caggagaagcagtcctaaa

SEQ ID NO: 77186 - DNA, 19 bp, Homo sapiens
  siRNA target sequence for CLK4 (NM_020666.1,329-347).
gaagcagtcctaaaaggaa

SEQ ID NO: 77187 - DNA, 19 bp, Homo sapiens
  siRNA target sequence for CLK4 (NM_020666.1,351-369).
caatagacactgttcaagt

SEQ ID NO: 77188 - DNA, 19 bp, Homo sapiens
  siRNA target sequence for CLK4 (NM_020666.1,556-574).
gtagcagtgaaaatcgtaa

SEQ ID NO: 77189 - DNA, 19 bp, Homo sapiens
  siRNA target sequence for CLK4 (NM_020666.1,599-617).
cagctcgttcagaaatcca

SEQ ID NO: 77190 - DNA, 19 bp, Homo sapiens
  siRNA target sequence for CLK4 (NM_020666.1,604-622).
cgttcagaaatccaagtat

SEQ ID NO: 77191 - DNA, 19 bp, Homo sapiens
  siRNA target sequence for CLK4 (NM_020666.1,616-634).
caagtattagagcacttaa

SEQ ID NO: 77192 - DNA, 19 bp, Homo sapiens
  siRNA target sequence for CLK4 (NM_020666.1,627-645).
gcacttaaatagtactgat

SEQ ID NO: 77193 - DNA, 19 bp, Homo sapiens
  siRNA target sequence for CLK4 (NM_020666.1,638-656).
gtactgatcccaatagtgt

SEQ ID NO: 77194 - DNA, 19 bp, Homo sapiens
  siRNA target sequence for CLK4 (NM_020666.1,672-690).
gatgctagaatggtttgat

SEQ ID NO: 77195 - DNA, 19 bp, Homo sapiens
  siRNA target sequence for CLK4 (NM_020666.1,688-706).
gatcatcatggtcatgttt

SEQ ID NO: 77196 - DNA, 19 bp, Homo sapiens
  siRNA target sequence for CLK4 (NM_020666.1,791-809).
ggcagatggcgtatcagat

SEQ ID NO: 77197 - DNA, 19 bp, Homo sapiens
  siRNA target sequence for CLK4 (NM_020666.1,805-823).
cagatctgccagtcaataa

SEQ ID NO: 77198 - DNA, 19 bp, Homo sapiens
  siRNA target sequence for CLK4 (NM_020666.1,818-836).
caataaattttttacatca

SEQ ID NO: 77199 - DNA, 19 bp, Homo sapiens
  siRNA target sequence for CLK4 (NM_020666.1,888-906).
gtctgactatgtagtcaaa

SEQ ID NO: 77200 - DNA, 19 bp, Homo sapiens
  siRNA target sequence for CLK4 (NM_020666.1,898-916).
gtagtcaaatataattcta

SEQ ID NO: 77201 - DNA, 19 bp, Homo sapiens
  siRNA target sequence for CLK4 (NM_020666.1,1042-1060).
gtcattttggctttaggtt

SEQ ID NO: 77202 - DNA, 19 bp, Homo sapiens
  siRNA target sequence for CLK4 (NM_020666.1,1113-1131).
ccttggtttcacagtcttt

SEQ ID NO: 77203 - DNA, 19 bp, Homo sapiens
  siRNA target sequence for CLK4 (NM_020666.1,1181-1199).
gacccataccacaacacat

SEQ ID NO: 77204 - DNA, 19 bp, Homo sapiens
  siRNA target sequence for CLK4 (NM_020666.1,1184-1202).
ccataccacaacacatgat

SEQ ID NO: 77205 - DNA, 19 bp, Homo sapiens
  siRNA target sequence for CLK4 (NM_020666.1,1192-1210).
caacacatgattcagaaaa

SEQ ID NO: 77206 - DNA, 19 bp, Homo sapiens
  siRNA target sequence for CLK4 (NM_020666.1,1293-1311).
caaaccgttgaaggaattt

SEQ ID NO: 77207 - DNA, 19 bp, Homo sapiens
  siRNA target sequence for CLK4 (NM_020666.1,1353-1371).
ggttcgaagaatgttagaa

SEQ ID NO: 77208 - DNA, 19 bp, Homo sapiens
  siRNA target sequence for CLK4 (NM_020666.1,1354-1372).
gttcgaagaatgttagaat

SEQ ID NO: 77209 - DNA, 19 bp, Homo sapiens
  siRNA target sequence for CLK4 (NM_020666.1,1378-1396).
ccaactcaaagaattacct

SEQ ID NO: 77210 - DNA, 19 bp, Homo sapiens
  siRNA target sequence for CLK4 (NM_020666.1,1379-1397).
caactcaaagaattacctt

SEQ ID NO: 77211 - DNA, 19 bp, Homo sapiens
  siRNA target sequence for CLPX (NM_006660.3,138-156).
ctccgcgcagagaggtatt

SEQ ID NO: 77212 - DNA, 19 bp, Homo sapiens
  siRNA target sequence for CLPX (NM_006660.3,160-178).
ggtggtcgcattcatatgt

SEQ ID NO: 77213 - DNA, 19 bp, Homo sapiens
  siRNA target sequence for CLPX (NM_006660.3,226-244).
gctcctcttagatccttta

SEQ ID NO: 77214 - DNA, 19 bp, Homo sapiens
  siRNA target sequence for CLPX (NM_006660.3,232-250).
cttagatcctttacagaaa

SEQ ID NO: 77215 - DNA, 19 bp, Homo sapiens
  siRNA target sequence for CLPX (NM_006660.3,267-285).
ctcaaaagatgggataagt

SEQ ID NO: 77216 - DNA, 19 bp, Homo sapiens
  siRNA target sequence for CLPX (NM_006660.3,399-417).
cgacttgtgcacacatgta

SEQ ID NO: 77217 - DNA, 19 bp, Homo sapiens
  siRNA target sequence for CLPX (NM_006660.3,412-430).
catgtagagacctttgtat

SEQ ID NO: 77218 - DNA, 19 bp, Homo sapiens
  siRNA target sequence for CLPX (NM_006660.3,415-433).
gtagagacctttgtatcat

SEQ ID NO: 77219 - DNA, 19 bp, Homo sapiens
  siRNA target sequence for CLPX (NM_006660.3,439-457).
cgttttgtcaagtgtgaaa

SEQ ID NO: 77220 - DNA, 19 bp, Homo sapiens
  siRNA target sequence for CLPX (NM_006660.3,450-468).
gtgtgaaaagtgtcatcat

SEQ ID NO: 77221 - DNA, 19 bp, Homo sapiens
  siRNA target sequence for CLPX (NM_006660.3,571-589).
cctccccctaagaagattt

SEQ ID NO: 77222 - DNA, 19 bp, Homo sapiens
  siRNA target sequence for CLPX (NM_006660.3,572-590).
ctccccctaagaagattta

SEQ ID NO: 77223 - DNA, 19 bp, Homo sapiens
  siRNA target sequence for CLPX (NM_006660.3,594-612).
ctacctcgacaagtatgtt

SEQ ID NO: 77224 - DNA, 19 bp, Homo sapiens
  siRNA target sequence for CLPX (NM_006660.3,597-615).
cctcgacaagtatgttgtt

SEQ ID NO: 77225 - DNA, 19 bp, Homo sapiens
  siRNA target sequence for CLPX (NM_006660.3,613-631).
gttggccagtcatttgcta

SEQ ID NO: 77226 - DNA, 19 bp, Homo sapiens
  siRNA target sequence for CLPX (NM_006660.3,629-647).
ctaagaaggtgctttcagt

SEQ ID NO: 77227 - DNA, 19 bp, Homo sapiens
  siRNA target sequence for CLPX (NM_006660.3,649-667).
gctgtgtacaatcattata

SEQ ID NO: 77228 - DNA, 19 bp, Homo sapiens
  siRNA target sequence for CLPX (NM_006660.3,652-670).
gtgtacaatcattataaga

SEQ ID NO: 77229 - DNA, 19 bp, Homo sapiens
  siRNA target sequence for CLPX (NM_006660.3,654-672).
gtacaatcattataagaga

SEQ ID NO: 77230 - DNA, 19 bp, Homo sapiens
  siRNA target sequence for CLPX (NM_006660.3,718-736).
gagaagcagacatcattaa

SEQ ID NO: 77231 - DNA, 19 bp, Homo sapiens
  siRNA target sequence for CLPX (NM_006660.3,763-781).
cgggaggatgagtacagat

SEQ ID NO: 77232 - DNA, 19 bp, Homo sapiens
  siRNA target sequence for CLPX (NM_006660.3,766-784).
gaggatgagtacagattta

SEQ ID NO: 77233 - DNA, 19 bp, Homo sapiens
  siRNA target sequence for CLPX (NM_006660.3,768-786).
ggatgagtacagatttaca

SEQ ID NO: 77234 - DNA, 19 bp, Homo sapiens
  siRNA target sequence for CLPX (NM_006660.3,806-824).
gaattagcccacatggtaa

SEQ ID NO: 77235 - DNA, 19 bp, Homo sapiens
  siRNA target sequence for CLPX (NM_006660.3,886-904).
ggtgaagtattggattctt

SEQ ID NO: 77236 - DNA, 19 bp, Homo sapiens
  siRNA target sequence for CLPX (NM_006660.3,905-923).
ctcatgatgacataaaact

SEQ ID NO: 77237 - DNA, 19 bp, Homo sapiens
  siRNA target sequence for CLPX (NM_006660.3,978-996).
ggcacaaaccctagctaaa

SEQ ID NO: 77238 - DNA, 19 bp, Homo sapiens
  siRNA target sequence for CLPX (NM_006660.3,979-997).
gcacaaaccctagctaaat

SEQ ID NO: 77239 - DNA, 19 bp, Homo sapiens
  siRNA target sequence for CLPX (NM_006660.3,1038-1056).
gactcaggctggatatgta

SEQ ID NO: 77240 - DNA, 19 bp, Homo sapiens
  siRNA target sequence for CLPX (NM_006660.3,1054-1072).
gtaggcgaagatattgaat

SEQ ID NO: 77241 - DNA, 19 bp, Homo sapiens
  siRNA target sequence for CLPX (NM_006660.3,1058-1076).
gcgaagatattgaatctgt

SEQ ID NO: 77242 - DNA, 19 bp, Homo sapiens
  siRNA target sequence for CLPX (NM_006660.3,1073-1091).
ctgtgattgcaaaactact

SEQ ID NO: 77243 - DNA, 19 bp, Homo sapiens
  siRNA target sequence for CLPX (NM_006660.3,1120-1138).
gcacaacaaggaattgtct

SEQ ID NO: 77244 - DNA, 19 bp, Homo sapiens
  siRNA target sequence for CLPX (NM_006660.3,1121-1139).
cacaacaaggaattgtctt

SEQ ID NO: 77245 - DNA, 19 bp, Homo sapiens
  siRNA target sequence for CLPX (NM_006660.3,1143-1161).
ggatgaagtagataagatt

SEQ ID NO: 77246 - DNA, 19 bp, Homo sapiens
  siRNA target sequence for CLPX (NM_006660.3,1168-1186).
gtgccaggcattcatcaat

SEQ ID NO: 77247 - DNA, 19 bp, Homo sapiens
  siRNA target sequence for CLPX (NM_006660.3,1208-1226).
gcgttcagcaaggcttatt

SEQ ID NO: 77248 - DNA, 19 bp, Homo sapiens
  siRNA target sequence for CLPX (NM_006660.3,1210-1228).
gttcagcaaggcttattaa

SEQ ID NO: 77249 - DNA, 19 bp, Homo sapiens
  siRNA target sequence for CLPX (NM_006660.3,1215-1233).
gcaaggcttattaaaacta

SEQ ID NO: 77250 - DNA, 19 bp, Homo sapiens
  siRNA target sequence for CLPX (NM_006660.3,1326-1344).
ggcatctggtgctttcaat

SEQ ID NO: 77251 - DNA, 19 bp, Homo sapiens
  siRNA target sequence for CLPX (NM_006660.3,1334-1352).
gtgctttcaatggtttaga

SEQ ID NO: 77252 - DNA, 19 bp, Homo sapiens
  siRNA target sequence for CLPX (NM_006660.3,1345-1363).
ggtttagacagaatcatca

SEQ ID NO: 77253 - DNA, 19 bp, Homo sapiens
  siRNA target sequence for CLPX (NM_006660.3,1441-1459).
gcagaccttgctaatcgaa

SEQ ID NO: 77254 - DNA, 19 bp, Homo sapiens
  siRNA target sequence for CLPX (NM_006660.3,1460-1478).
gtggggaatcgaatactca

SEQ ID NO: 77255 - DNA, 19 bp, Homo sapiens
  siRNA target sequence for CLPX (NM_006660.3,1469-1487).
cgaatactcaccaagacat

SEQ ID NO: 77256 - DNA, 19 bp, Homo sapiens
  siRNA target sequence for CLPX (NM_006660.3,1470-1488).
gaatactcaccaagacatt

SEQ ID NO: 77257 - DNA, 19 bp, Homo sapiens
  siRNA target sequence for CLPX (NM_006660.3,1522-1540).
gccagagatctgattgagt

SEQ ID NO: 77258 - DNA, 19 bp, Homo sapiens
  siRNA target sequence for CLPX (NM_006660.3,1523-1541).
ccagagatctgattgagtt

SEQ ID NO: 77259 - DNA, 19 bp, Homo sapiens
  siRNA target sequence for CLPX (NM_006660.3,1533-1551).
gattgagtttggcatgatt

SEQ ID NO: 77260 - DNA, 19 bp, Homo sapiens
  siRNA target sequence for CLPX (NM_006660.3,1576-1594).
gtggtggttccattgcata

SEQ ID NO: 77261 - DNA, 19 bp, Homo sapiens
  siRNA target sequence for CLPX (NM_006660.3,1590-1608).
gcatagcctagatgagaaa

SEQ ID NO: 77262 - DNA, 19 bp, Homo sapiens
  siRNA target sequence for CLPX (NM_006660.3,1591-1609).
catagcctagatgagaaaa

SEQ ID NO: 77263 - DNA, 19 bp, Homo sapiens
  siRNA target sequence for CLPX (NM_006660.3,1632-1650).
gccacgaaatgctgttatt

SEQ ID NO: 77264 - DNA, 19 bp, Homo sapiens
  siRNA target sequence for CLPX (NM_006660.3,1727-1745).
gattggcactagaacgaaa

SEQ ID NO: 77265 - DNA, 19 bp, Homo sapiens
  siRNA target sequence for CLPX (NM_006660.3,1756-1774).
cgaggccttcggtccataa

SEQ ID NO: 77266 - DNA, 19 bp, Homo sapiens
  siRNA target sequence for CLPX (NM_006660.3,1757-1775).
gaggccttcggtccataat

SEQ ID NO: 77267 - DNA, 19 bp, Homo sapiens
  siRNA target sequence for CLPX (NM_006660.3,1809-1827).
ccctaattctgatatcgta

SEQ ID NO: 77268 - DNA, 19 bp, Homo sapiens
  siRNA target sequence for CLPX (NM_006660.3,1810-1828).
cctaattctgatatcgtat

SEQ ID NO: 77269 - DNA, 19 bp, Homo sapiens
  siRNA target sequence for CLPX (NM_006660.3,1878-1896).
catccgggctccaacaaaa

SEQ ID NO: 77270 - DNA, 19 bp, Homo sapiens
  siRNA target sequence for CLPX (NM_006660.3,1882-1900).
cgggctccaacaaaagaat

SEQ ID NO: 77271 - DNA, 19 bp, Homo sapiens
  siRNA target sequence for CNK (NM_004073.1,174-192).
cagcgcctacgctgtcaaa

SEQ ID NO: 77272 - DNA, 19 bp, Homo sapiens
  siRNA target sequence for CNK (NM_004073.1,176-194).
gcgcctacgctgtcaaagt

SEQ ID NO: 77273 - DNA, 19 bp, Homo sapiens
  siRNA target sequence for CNK (NM_004073.1,179-197).
cctacgctgtcaaagtcat

SEQ ID NO: 77274 - DNA, 19 bp, Homo sapiens
  siRNA target sequence for CNK (NM_004073.1,221-239).
cgcatcagcgcgagaagat

SEQ ID NO: 77275 - DNA, 19 bp, Homo sapiens
  siRNA target sequence for CNK (NM_004073.1,226-244).
cagcgcgagaagatcctaa

SEQ ID NO: 77276 - DNA, 19 bp, Homo sapiens
  siRNA target sequence for CNK (NM_004073.1,228-246).
gcgcgagaagatcctaaat

SEQ ID NO: 77277 - DNA, 19 bp, Homo sapiens
  siRNA target sequence for CNK (NM_004073.1,230-248).
gcgagaagatcctaaatga

SEQ ID NO: 77278 - DNA, 19 bp, Homo sapiens
  siRNA target sequence for CNK (NM_004073.1,277-295).
cgccacatcgtgcgttttt

SEQ ID NO: 77279 - DNA, 19 bp, Homo sapiens
  siRNA target sequence for CNK (NM_004073.1,475-493).
ctcaagttgggaaattttt

SEQ ID NO: 77280 - DNA, 19 bp, Homo sapiens
  siRNA target sequence for CNK (NM_004073.1,579-597).
ctgtggcacccccaactat

SEQ ID NO: 77281 - DNA, 19 bp, Homo sapiens
  siRNA target sequence for CNK (NM_004073.1,581-599).
gtggcacccccaactatgt

SEQ ID NO: 77282 - DNA, 19 bp, Homo sapiens
  siRNA target sequence for CNK (NM_004073.1,933-951).
cccagctaggagtctgttt

SEQ ID NO: 77283 - DNA, 19 bp, Homo sapiens
  siRNA target sequence for CNK (NM_004073.1,1319-1337).
gggttgactactccaataa

SEQ ID NO: 77284 - DNA, 19 bp, Homo sapiens
  siRNA target sequence for CNK (NM_004073.1,1321-1339).
gttgactactccaataagt

SEQ ID NO: 77285 - DNA, 19 bp, Homo sapiens
  siRNA target sequence for CNK (NM_004073.1,1405-1423).
gccctgtcggccaacagaa

SEQ ID NO: 77286 - DNA, 19 bp, Homo sapiens
  siRNA target sequence for CNK (NM_004073.1,1406-1424).
ccctgtcggccaacagaaa

SEQ ID NO: 77287 - DNA, 19 bp, Homo sapiens
  siRNA target sequence for CNK (NM_004073.1,1408-1426).
ctgtcggccaacagaaaga

SEQ ID NO: 77288 - DNA, 19 bp, Homo sapiens
  siRNA target sequence for CNK (NM_004073.1,1410-1428).
gtcggccaacagaaagact

SEQ ID NO: 77289 - DNA, 19 bp, Homo sapiens
  siRNA target sequence for CNK (NM_004073.1,1633-1651).
gctctcctcatgctgttta

SEQ ID NO: 77290 - DNA, 19 bp, Homo sapiens
  siRNA target sequence for CNK (NM_004073.1,1687-1705).
cacaccaagctgattctca

SEQ ID NO: 77291 - DNA, 19 bp, Homo sapiens
  siRNA target sequence for CNTN6 (NM_014461.2,295-313).
ctgctgccactcataaact

SEQ ID NO: 77292 - DNA, 19 bp, Homo sapiens
  siRNA target sequence for CNTN6 (NM_014461.2,297-315).
gctgccactcataaactct

SEQ ID NO: 77293 - DNA, 19 bp, Homo sapiens
  siRNA target sequence for CNTN6 (NM_014461.2,298-316).
ctgccactcataaactctt

SEQ ID NO: 77294 - DNA, 19 bp, Homo sapiens
  siRNA target sequence for CNTN6 (NM_014461.2,331-349).
cttttaagccgtcctattt

SEQ ID NO: 77295 - DNA, 19 bp, Homo sapiens
  siRNA target sequence for CNTN6 (NM_014461.2,338-356).
gccgtcctatttttactca

SEQ ID NO: 77296 - DNA, 19 bp, Homo sapiens
  siRNA target sequence for CNTN6 (NM_014461.2,408-426).
cctgaattgtgctgctaat

SEQ ID NO: 77297 - DNA, 19 bp, Homo sapiens
  siRNA target sequence for CNTN6 (NM_014461.2,411-429).
gaattgtgctgctaatggt

SEQ ID NO: 77298 - DNA, 19 bp, Homo sapiens
  siRNA target sequence for CNTN6 (NM_014461.2,428-446).
gttacccttcgcctcatta

SEQ ID NO: 77299 - DNA, 19 bp, Homo sapiens
  siRNA target sequence for CNTN6 (NM_014461.2,433-451).
ccttcgcctcattataggt

SEQ ID NO: 77300 - DNA, 19 bp, Homo sapiens
  siRNA target sequence for CNTN6 (NM_014461.2,442-460).
cattataggtggaagcaaa

SEQ ID NO: 77301 - DNA, 19 bp, Homo sapiens
  siRNA target sequence for CNTN6 (NM_014461.2,463-481).
ggcacagacattgatttta

SEQ ID NO: 77302 - DNA, 19 bp, Homo sapiens
  siRNA target sequence for CNTN6 (NM_014461.2,511-529).
ggcagtcttgcaatcaata

SEQ ID NO: 77303 - DNA, 19 bp, Homo sapiens
  siRNA target sequence for CNTN6 (NM_014461.2,607-625).
gcaaagctccaatttgcat

SEQ ID NO: 77304 - DNA, 19 bp, Homo sapiens
  siRNA target sequence for CNTN6 (NM_014461.2,608-626).
caaagctccaatttgcata

SEQ ID NO: 77305 - DNA, 19 bp, Homo sapiens
  siRNA target sequence for CNTN6 (NM_014461.2,698-716).
gtggcccaccgccacattt

SEQ ID NO: 77306 - DNA, 19 bp, Homo sapiens
  siRNA target sequence for CNTN6 (NM_014461.2,733-751).
gcatggaccttcaatgata

SEQ ID NO: 77307 - DNA, 19 bp, Homo sapiens
  siRNA target sequence for CNTN6 (NM_014461.2,771-789).
ggacaataggcgatttgta

SEQ ID NO: 77308 - DNA, 19 bp, Homo sapiens
  siRNA target sequence for CNTN6 (NM_014461.2,772-790).
gacaataggcgatttgtat

SEQ ID NO: 77309 - DNA, 19 bp, Homo sapiens
  siRNA target sequence for CNTN6 (NM_014461.2,796-814).
gagacgggaaacttgtaca

SEQ ID NO: 77310 - DNA, 19 bp, Homo sapiens
  siRNA target sequence for CNTN6 (NM_014461.2,843-861).
caactacacttgctttata

SEQ ID NO: 77311 - DNA, 19 bp, Homo sapiens
  siRNA target sequence for CNTN6 (NM_014461.2,851-869).
cttgctttataactaacaa

SEQ ID NO: 77312 - DNA, 19 bp, Homo sapiens
  siRNA target sequence for CNTN6 (NM_014461.2,893-911).
gtccacccactccattagt

SEQ ID NO: 77313 - DNA, 19 bp, Homo sapiens
  siRNA target sequence for CNTN6 (NM_014461.2,960-978).
gcgttttcctgaaactata

SEQ ID NO: 77314 - DNA, 19 bp, Homo sapiens
  siRNA target sequence for CNTN6 (NM_014461.2,985-1003).
gcaaaggattcatctgtaa

SEQ ID NO: 77315 - DNA, 19 bp, Homo sapiens
  siRNA target sequence for CNTN6 (NM_014461.2,1030-1048).
ccagtccccgatattagtt

SEQ ID NO: 77316 - DNA, 19 bp, Homo sapiens
  siRNA target sequence for CNTN6 (NM_014461.2,1100-1118).
cccaagctatccttgaaat

SEQ ID NO: 77317 - DNA, 19 bp, Homo sapiens
  siRNA target sequence for CNTN6 (NM_014461.2,1247-1265).
cacacctctctatctatga

SEQ ID NO: 77318 - DNA, 19 bp, Homo sapiens
  siRNA target sequence for CNTN6 (NM_014461.2,1272-1290).
gctctgggaatgtaaagct

SEQ ID NO: 77319 - DNA, 19 bp, Homo sapiens
  siRNA target sequence for CNTN6 (NM_014461.2,1273-1291).
ctctgggaatgtaaagcta

SEQ ID NO: 77320 - DNA, 19 bp, Homo sapiens
  siRNA target sequence for CNTN6 (NM_014461.2,1305-1323).
cccttggtatacatggtta

SEQ ID NO: 77321 - DNA, 19 bp, Homo sapiens
  siRNA target sequence for CNTN6 (NM_014461.2,1306-1324).
ccttggtatacatggttaa

SEQ ID NO: 77322 - DNA, 19 bp, Homo sapiens
  siRNA target sequence for CNTN6 (NM_014461.2,1307-1325).
cttggtatacatggttaaa

SEQ ID NO: 77323 - DNA, 19 bp, Homo sapiens
  siRNA target sequence for CNTN6 (NM_014461.2,1345-1363).
ccagaggagagaattcaaa

SEQ ID NO: 77324 - DNA, 19 bp, Homo sapiens
  siRNA target sequence for CNTN6 (NM_014461.2,1372-1390).
gggacactcatcataacga

SEQ ID NO: 77325 - DNA, 19 bp, Homo sapiens
  siRNA target sequence for CNTN6 (NM_014461.2,1373-1391).
ggacactcatcataacgat

SEQ ID NO: 77326 - DNA, 19 bp, Homo sapiens
  siRNA target sequence for CNTN6 (NM_014461.2,1549-1567).
gttatcggatgcaaaccaa

SEQ ID NO: 77327 - DNA, 19 bp, Homo sapiens
  siRNA target sequence for CNTN6 (NM_014461.2,1554-1572).
cggatgcaaaccaaatgct

SEQ ID NO: 77328 - DNA, 19 bp, Homo sapiens
  siRNA target sequence for CNTN6 (NM_014461.2,1555-1573).
ggatgcaaaccaaatgctt

SEQ ID NO: 77329 - DNA, 19 bp, Homo sapiens
  siRNA target sequence for CNTN6 (NM_014461.2,1604-1622).
gaacggagacccttagaca

SEQ ID NO: 77330 - DNA, 19 bp, Homo sapiens
  siRNA target sequence for CNTN6 (NM_014461.2,1679-1697).
ggtcagatgctggatcata

SEQ ID NO: 77331 - DNA, 19 bp, Homo sapiens
  siRNA target sequence for CNTN6 (NM_014461.2,1680-1698).
gtcagatgctggatcatat

SEQ ID NO: 77332 - DNA, 19 bp, Homo sapiens
  siRNA target sequence for CNTN6 (NM_014461.2,1684-1702).
gatgctggatcatatacat

SEQ ID NO: 77333 - DNA, 19 bp, Homo sapiens
  siRNA target sequence for CNTN6 (NM_014461.2,1700-1718).
catgcatagccacaaatca

SEQ ID NO: 77334 - DNA, 19 bp, Homo sapiens
  siRNA target sequence for CNTN6 (NM_014461.2,1703-1721).
gcatagccacaaatcagtt

SEQ ID NO: 77335 - DNA, 19 bp, Homo sapiens
  siRNA target sequence for CNTN6 (NM_014461.2,1704-1722).
catagccacaaatcagttt

SEQ ID NO: 77336 - DNA, 19 bp, Homo sapiens
  siRNA target sequence for CNTN6 (NM_014461.2,1802-1820).
cagttggcgagagtatagt

SEQ ID NO: 77337 - DNA, 19 bp, Homo sapiens
  siRNA target sequence for CNTN6 (NM_014461.2,1851-1869).
cattgaagtggtatttgta

SEQ ID NO: 77338 - DNA, 19 bp, Homo sapiens
  siRNA target sequence for CNTN6 (NM_014461.2,1883-1901).
gagatgtcatagacttaaa

SEQ ID NO: 77339 - DNA, 19 bp, Homo sapiens
  siRNA target sequence for CNTN6 (NM_014461.2,1906-1924).
ggagtggctcattttgaaa

SEQ ID NO: 77340 - DNA, 19 bp, Homo sapiens
  siRNA target sequence for CNTN6 (NM_014461.2,1926-1944).
gattggaggagaatctgtt

SEQ ID NO: 77341 - DNA, 19 bp, Homo sapiens
  siRNA target sequence for CNTN6 (NM_014461.2,1936-1954).
gaatctgttggggatttga

SEQ ID NO: 77342 - DNA, 19 bp, Homo sapiens
  siRNA target sequence for CNTN6 (NM_014461.2,1945-1963).
ggggatttgatgataagga

SEQ ID NO: 77343 - DNA, 19 bp, Homo sapiens
  siRNA target sequence for CNTN6 (NM_014461.2,1956-1974).
gataaggaatattcagtta

SEQ ID NO: 77344 - DNA, 19 bp, Homo sapiens
  siRNA target sequence for CNTN6 (NM_014461.2,2030-2048).
cagtagccgatatcattgt

SEQ ID NO: 77345 - DNA, 19 bp, Homo sapiens
  siRNA target sequence for CNTN6 (NM_014461.2,2032-2050).
gtagccgatatcattgtta

SEQ ID NO: 77346 - DNA, 19 bp, Homo sapiens
  siRNA target sequence for CNTN6 (NM_014461.2,2077-2095).
gtgcaagtggaagacattt

SEQ ID NO: 77347 - DNA, 19 bp, Homo sapiens
  siRNA target sequence for CNTN6 (NM_014461.2,2120-2138).
ggagagcaggcccagataa

SEQ ID NO: 77348 - DNA, 19 bp, Homo sapiens
  siRNA target sequence for CNTN6 (NM_014461.2,2121-2139).
gagagcaggcccagataat

SEQ ID NO: 77349 - DNA, 19 bp, Homo sapiens
  siRNA target sequence for CNTN6 (NM_014461.2,2167-2185).
cagactcggacaccatttt

SEQ ID NO: 77350 - DNA, 19 bp, Homo sapiens
  siRNA target sequence for CNTN6 (NM_014461.2,2215-2233).
ccagaaattctcaatggta

SEQ ID NO: 77351 - DNA, 19 bp, Homo sapiens
  siRNA target sequence for CNTN6 (NM_014461.2,2226-2244).
caatggtaagacatacaat

SEQ ID NO: 77352 - DNA, 19 bp, Homo sapiens
  siRNA target sequence for CNTN6 (NM_014461.2,2262-2280).
gagtccttgggtggaatat

SEQ ID NO: 77353 - DNA, 19 bp, Homo sapiens
  siRNA target sequence for CNTN6 (NM_014461.2,2323-2341).
ccaagtgaaccatcagaat

SEQ ID NO: 77354 - DNA, 19 bp, Homo sapiens
  siRNA target sequence for CNTN6 (NM_014461.2,2324-2342).
caagtgaaccatcagaatt

SEQ ID NO: 77355 - DNA, 19 bp, Homo sapiens
  siRNA target sequence for CNTN6 (NM_014461.2,2407-2425).
cggtctgaactcgtcatta

SEQ ID NO: 77356 - DNA, 19 bp, Homo sapiens
  siRNA target sequence for CNTN6 (NM_014461.2,2421-2439).
cattacgtgggagtcaatt

SEQ ID NO: 77357 - DNA, 19 bp, Homo sapiens
  siRNA target sequence for CNTN6 (NM_014461.2,2458-2476).
ggggagggatttggatata

SEQ ID NO: 77358 - DNA, 19 bp, Homo sapiens
  siRNA target sequence for CNTN6 (NM_014461.2,2459-2477).
gggagggatttggatatat

SEQ ID NO: 77359 - DNA, 19 bp, Homo sapiens
  siRNA target sequence for CNTN6 (NM_014461.2,2465-2483).
gatttggatatatcatcat

SEQ ID NO: 77360 - DNA, 19 bp, Homo sapiens
  siRNA target sequence for CNTN6 (NM_014461.2,2526-2544).
gtcatctgtggaatcatca

SEQ ID NO: 77361 - DNA, 19 bp, Homo sapiens
  siRNA target sequence for CNTN6 (NM_014461.2,2536-2554).
gaatcatcaaggtttgtct

SEQ ID NO: 77362 - DNA, 19 bp, Homo sapiens
  siRNA target sequence for CNTN6 (NM_014461.2,2601-2619).
gggtgtgtataataatgaa

SEQ ID NO: 77363 - DNA, 19 bp, Homo sapiens
  siRNA target sequence for CNTN6 (NM_014461.2,2690-2708).
gaacttctctccagagttt

SEQ ID NO: 77364 - DNA, 19 bp, Homo sapiens
  siRNA target sequence for CNTN6 (NM_014461.2,2725-2743).
gaggtttcatggaatgcta

SEQ ID NO: 77365 - DNA, 19 bp, Homo sapiens
  siRNA target sequence for CNTN6 (NM_014461.2,2727-2745).
ggtttcatggaatgctatt

SEQ ID NO: 77366 - DNA, 19 bp, Homo sapiens
  siRNA target sequence for CNTN6 (NM_014461.2,2740-2758).
gctattgcctggaatagaa

SEQ ID NO: 77367 - DNA, 19 bp, Homo sapiens
  siRNA target sequence for CNTN6 (NM_014461.2,2741-2759).
ctattgcctggaatagaaa

SEQ ID NO: 77368 - DNA, 19 bp, Homo sapiens
  siRNA target sequence for CNTN6 (NM_014461.2,2773-2791).
ctgggctatgaggtcttat

SEQ ID NO: 77369 - DNA, 19 bp, Homo sapiens
  siRNA target sequence for CNTN6 (NM_014461.2,2805-2823).
ctccaaagaatccatgata

SEQ ID NO: 77370 - DNA, 19 bp, Homo sapiens
  siRNA target sequence for CNTN6 (NM_014461.2,2812-2830).
gaatccatgataggtaaaa

SEQ ID NO: 77371 - DNA, 19 bp, Homo sapiens
  siRNA target sequence for CNTN6 (NM_014461.2,2865-2883).
cacggggctgaaagctaat

SEQ ID NO: 77372 - DNA, 19 bp, Homo sapiens
  siRNA target sequence for CNTN6 (NM_014461.2,2897-2915).
cttccgtaagagcttacaa

SEQ ID NO: 77373 - DNA, 19 bp, Homo sapiens
  siRNA target sequence for CNTN6 (NM_014461.2,2978-2996).
gccaaccaccagcaaacat

SEQ ID NO: 77374 - DNA, 19 bp, Homo sapiens
  siRNA target sequence for CNTN6 (NM_014461.2,2979-2997).
ccaaccaccagcaaacatt

SEQ ID NO: 77375 - DNA, 19 bp, Homo sapiens
  siRNA target sequence for CNTN6 (NM_014461.2,3000-3018).
ctggaagctgacaaactct

SEQ ID NO: 77376 - DNA, 19 bp, Homo sapiens
  siRNA target sequence for CNTN6 (NM_014461.2,3035-3053).
gggagcatgtaaaaaccat

SEQ ID NO: 77377 - DNA, 19 bp, Homo sapiens
  siRNA target sequence for CNTN6 (NM_014461.2,3161-3179).
catttgaagaagactactt

SEQ ID NO: 77378 - DNA, 19 bp, Homo sapiens
  siRNA target sequence for CNTN6 (NM_014461.2,3221-3239).
gcagtgaggaaattaggat

SEQ ID NO: 77379 - DNA, 19 bp, Homo sapiens
  siRNA target sequence for CNTN6 (NM_014461.2,3263-3281).
ccagaggaattcaattctt

SEQ ID NO: 77380 - DNA, 19 bp, Homo sapiens
  siRNA target sequence for CNTN6 (NM_014461.2,3264-3282).
cagaggaattcaattctta

SEQ ID NO: 77381 - DNA, 19 bp, Homo sapiens
  siRNA target sequence for CNTN6 (NM_014461.2,3291-3309).
cacccattttctttccatt

SEQ ID NO: 77382 - DNA, 19 bp, Homo sapiens
  siRNA target sequence for CNTN6 (NM_014461.2,3334-3352).
gctattcagccacttatct

SEQ ID NO: 77383 - DNA, 19 bp, Homo sapiens
  siRNA target sequence for CPS1 (NM_001875.2,194-212).
ctgcacaccaaaaatggaa

SEQ ID NO: 77384 - DNA, 19 bp, Homo sapiens
  siRNA target sequence for CPS1 (NM_001875.2,271-289).
ctggaagatggaactaaga

SEQ ID NO: 77385 - DNA, 19 bp, Homo sapiens
  siRNA target sequence for CPS1 (NM_001875.2,281-299).
gaactaagatgaaaggtta

SEQ ID NO: 77386 - DNA, 19 bp, Homo sapiens
  siRNA target sequence for CPS1 (NM_001875.2,356-374).
gagggtacccagaagctat

SEQ ID NO: 77387 - DNA, 19 bp, Homo sapiens
  siRNA target sequence for CPS1 (NM_001875.2,360-378).
gtacccagaagctattact

SEQ ID NO: 77388 - DNA, 19 bp, Homo sapiens
  siRNA target sequence for CPS1 (NM_001875.2,407-425).
caatggccaaccctattat

SEQ ID NO: 77389 - DNA, 19 bp, Homo sapiens
  siRNA target sequence for CPS1 (NM_001875.2,433-451).
ggtggagctcctgatacta

SEQ ID NO: 77390 - DNA, 19 bp, Homo sapiens
  siRNA target sequence for CPS1 (NM_001875.2,517-535).
ctggtgctggattatagta

SEQ ID NO: 77391 - DNA, 19 bp, Homo sapiens
  siRNA target sequence for CPS1 (NM_001875.2,551-569).
ggctggctaccaagagttt

SEQ ID NO: 77392 - DNA, 19 bp, Homo sapiens
  siRNA target sequence for CPS1 (NM_001875.2,552-570).
gctggctaccaagagttta

SEQ ID NO: 77393 - DNA, 19 bp, Homo sapiens
  siRNA target sequence for CPS1 (NM_001875.2,594-612).
ggttcctgcaatttatgga

SEQ ID NO: 77394 - DNA, 19 bp, Homo sapiens
  siRNA target sequence for CPS1 (NM_001875.2,620-638).
caagaatgctgactaaaat

SEQ ID NO: 77395 - DNA, 19 bp, Homo sapiens
  siRNA target sequence for CPS1 (NM_001875.2,656-674).
ccatgcttgggaagattga

SEQ ID NO: 77396 - DNA, 19 bp, Homo sapiens
  siRNA target sequence for CPS1 (NM_001875.2,657-675).
catgcttgggaagattgaa

SEQ ID NO: 77397 - DNA, 19 bp, Homo sapiens
  siRNA target sequence for CPS1 (NM_001875.2,740-758).
ccaaggatgtcaaagtgta

SEQ ID NO: 77398 - DNA, 19 bp, Homo sapiens
  siRNA target sequence for CPS1 (NM_001875.2,814-832).
gtaatccgcctgctagtaa

SEQ ID NO: 77399 - DNA, 19 bp, Homo sapiens
  siRNA target sequence for CPS1 (NM_001875.2,839-857).
gagctgaagtgcacttagt

SEQ ID NO: 77400 - DNA, 19 bp, Homo sapiens
  siRNA target sequence for CPS1 (NM_001875.2,859-877).
ccctggaaccatgatttca

SEQ ID NO: 77401 - DNA, 19 bp, Homo sapiens
  siRNA target sequence for CPS1 (NM_001875.2,934-952).
gcagaaccactaattcaga

SEQ ID NO: 77402 - DNA, 19 bp, Homo sapiens
  siRNA target sequence for CPS1 (NM_001875.2,1030-1048).
gctgctggtgccaaaacct

SEQ ID NO: 77403 - DNA, 19 bp, Homo sapiens
  siRNA target sequence for CPS1 (NM_001875.2,1036-1054).
ggtgccaaaacctacaaga

SEQ ID NO: 77404 - DNA, 19 bp, Homo sapiens
  siRNA target sequence for CPS1 (NM_001875.2,1039-1057).
gccaaaacctacaagatgt

SEQ ID NO: 77405 - DNA, 19 bp, Homo sapiens
  siRNA target sequence for CPS1 (NM_001875.2,1075-1093).
cagaatcagcctgttttga

SEQ ID NO: 77406 - DNA, 19 bp, Homo sapiens
  siRNA target sequence for CPS1 (NM_001875.2,1084-1102).
cctgttttgaatatcacaa

SEQ ID NO: 77407 - DNA, 19 bp, Homo sapiens
  siRNA target sequence for CPS1 (NM_001875.2,1116-1134).
cattactgctcagaatcat

SEQ ID NO: 77408 - DNA, 19 bp, Homo sapiens
  siRNA target sequence for CPS1 (NM_001875.2,1185-1203).
gaatgtcaacgatcaaaca

SEQ ID NO: 77409 - DNA, 19 bp, Homo sapiens
  siRNA target sequence for CPS1 (NM_001875.2,1376-1394).
ctcgggttgaggtttccaa

SEQ ID NO: 77410 - DNA, 19 bp, Homo sapiens
  siRNA target sequence for CPS1 (NM_001875.2,1670-1688).
gtggagtggaactattcaa

SEQ ID NO: 77411 - DNA, 19 bp, Homo sapiens
  siRNA target sequence for CPS1 (NM_001875.2,1691-1709).
gaggtgtgctcaaggaata

SEQ ID NO: 77412 - DNA, 19 bp, Homo sapiens
  siRNA target sequence for CPS1 (NM_001875.2,1730-1748).
cttcagttgagtccattat

SEQ ID NO: 77413 - DNA, 19 bp, Homo sapiens
  siRNA target sequence for CPS1 (NM_001875.2,1922-1940).
gtcccaacagagagacttt

SEQ ID NO: 77414 - DNA, 19 bp, Homo sapiens
  siRNA target sequence for CPS1 (NM_001875.2,1952-1970).
gcacaaaggcctttgctat

SEQ ID NO: 77415 - DNA, 19 bp, Homo sapiens
  siRNA target sequence for CPS1 (NM_001875.2,2035-2053).
cgagatgctgatgacaatt

SEQ ID NO: 77416 - DNA, 19 bp, Homo sapiens
  siRNA target sequence for CPS1 (NM_001875.2,2102-2120).
caggtgactcagttgttgt

SEQ ID NO: 77417 - DNA, 19 bp, Homo sapiens
  siRNA target sequence for CPS1 (NM_001875.2,2141-2159).
ccaatgccgagtttcagat

SEQ ID NO: 77418 - DNA, 19 bp, Homo sapiens
  siRNA target sequence for CPS1 (NM_001875.2,2146-2164).
gccgagtttcagatgttga

SEQ ID NO: 77419 - DNA, 19 bp, Homo sapiens
  siRNA target sequence for CPS1 (NM_001875.2,2157-2175).
gatgttgagacgtacttca

SEQ ID NO: 77420 - DNA, 19 bp, Homo sapiens
  siRNA target sequence for CPS1 (NM_001875.2,2165-2183).
gacgtacttcaatcaatgt

SEQ ID NO: 77421 - DNA, 19 bp, Homo sapiens
  siRNA target sequence for CPS1 (NM_001875.2,2247-2265).
ggaatactgcatcattgaa

SEQ ID NO: 77422 - DNA, 19 bp, Homo sapiens
  siRNA target sequence for CPS1 (NM_001875.2,2354-2372).
gaatcccacttccagaaat

SEQ ID NO: 77423 - DNA, 19 bp, Homo sapiens
  siRNA target sequence for CPS1 (NM_001875.2,2380-2398).
gtcgtatccgggaagacat

SEQ ID NO: 77424 - DNA, 19 bp, Homo sapiens
  siRNA target sequence for CPS1 (NM_001875.2,2394-2412).
gacatcagcctgttttgaa

SEQ ID NO: 77425 - DNA, 19 bp, Homo sapiens
  siRNA target sequence for CPS1 (NM_001875.2,2410-2428).
gaacctagcctggattaca

SEQ ID NO: 77426 - DNA, 19 bp, Homo sapiens
  siRNA target sequence for CPS1 (NM_001875.2,2461-2479).
cgttttcatggaacatcta

SEQ ID NO: 77427 - DNA, 19 bp, Homo sapiens
  siRNA target sequence for CPS1 (NM_001875.2,2482-2500).
cgaattggtagctctatga

SEQ ID NO: 77428 - DNA, 19 bp, Homo sapiens
  siRNA target sequence for CPS1 (NM_001875.2,2520-2538).
ggctattggtcgtaccttt

SEQ ID NO: 77429 - DNA, 19 bp, Homo sapiens
  siRNA target sequence for CPS1 (NM_001875.2,2531-2549).
gtacctttgaggagagttt

SEQ ID NO: 77430 - DNA, 19 bp, Homo sapiens
  siRNA target sequence for CPS1 (NM_001875.2,2542-2560).
gagagtttccagaaagctt

SEQ ID NO: 77431 - DNA, 19 bp, Homo sapiens
  siRNA target sequence for CPS1 (NM_001875.2,2564-2582).
ggatgtgccacccatctat

SEQ ID NO: 77432 - DNA, 19 bp, Homo sapiens
  siRNA target sequence for CPS1 (NM_001875.2,2565-2583).
gatgtgccacccatctata

SEQ ID NO: 77433 - DNA, 19 bp, Homo sapiens
  siRNA target sequence for CPS1 (NM_001875.2,2568-2586).
gtgccacccatctatagaa

SEQ ID NO: 77434 - DNA, 19 bp, Homo sapiens
  siRNA target sequence for CPS1 (NM_001875.2,2594-2612).
ctccccgtctcccaatgaa

SEQ ID NO: 77435 - DNA, 19 bp, Homo sapiens
  siRNA target sequence for CPS1 (NM_001875.2,2596-2614).
ccccgtctcccaatgaaca

SEQ ID NO: 77436 - DNA, 19 bp, Homo sapiens
  siRNA target sequence for CPS1 (NM_001875.2,2597-2615).
cccgtctcccaatgaacaa

SEQ ID NO: 77437 - DNA, 19 bp, Homo sapiens
  siRNA target sequence for CPS1 (NM_001875.2,2600-2618).
gtctcccaatgaacaaaga

SEQ ID NO: 77438 - DNA, 19 bp, Homo sapiens
  siRNA target sequence for CPS1 (NM_001875.2,2621-2639).
ggccatctaatttagatct

SEQ ID NO: 77439 - DNA, 19 bp, Homo sapiens
  siRNA target sequence for CPS1 (NM_001875.2,2622-2640).
gccatctaatttagatctt

SEQ ID NO: 77440 - DNA, 19 bp, Homo sapiens
  siRNA target sequence for CPS1 (NM_001875.2,2623-2641).
ccatctaatttagatctta

SEQ ID NO: 77441 - DNA, 19 bp, Homo sapiens
  siRNA target sequence for CPS1 (NM_001875.2,2660-2678).
caagcagcacgcgtatcta

SEQ ID NO: 77442 - DNA, 19 bp, Homo sapiens
  siRNA target sequence for CPS1 (NM_001875.2,2757-2775).
gtataagatgcgtgatatt

SEQ ID NO: 77443 - DNA, 19 bp, Homo sapiens
  siRNA target sequence for CPS1 (NM_001875.2,2906-2924).
caagggagctgaggttaaa

SEQ ID NO: 77444 - DNA, 19 bp, Homo sapiens
  siRNA target sequence for CPS1 (NM_001875.2,2931-2949).
catccacccttgggttaaa

SEQ ID NO: 77445 - DNA, 19 bp, Homo sapiens
  siRNA target sequence for CPS1 (NM_001875.2,2937-2955).
cccttgggttaaacagatt

SEQ ID NO: 77446 - DNA, 19 bp, Homo sapiens
  siRNA target sequence for CPS1 (NM_001875.2,3016-3034).
caggagcatgatgtcaatt

SEQ ID NO: 77447 - DNA, 19 bp, Homo sapiens
  siRNA target sequence for CPS1 (NM_001875.2,3018-3036).
ggagcatgatgtcaatttt

SEQ ID NO: 77448 - DNA, 19 bp, Homo sapiens
  siRNA target sequence for CPS1 (NM_001875.2,3057-3075).
gctaggctgtggtccatat

SEQ ID NO: 77449 - DNA, 19 bp, Homo sapiens
  siRNA target sequence for CPS1 (NM_001875.2,3061-3079).
ggctgtggtccatatcaca

SEQ ID NO: 77450 - DNA, 19 bp, Homo sapiens
  siRNA target sequence for CPS1 (NM_001875.2,3062-3080).
gctgtggtccatatcacat

SEQ ID NO: 77451 - DNA, 19 bp, Homo sapiens
  siRNA target sequence for CPS1 (NM_001875.2,3083-3101).
gcagcagtgtggaatttga

SEQ ID NO: 77452 - DNA, 19 bp, Homo sapiens
  siRNA target sequence for CPS1 (NM_001875.2,3104-3122).
ggtgtgctgtctctagtat

SEQ ID NO: 77453 - DNA, 19 bp, Homo sapiens
  siRNA target sequence for CPS1 (NM_001875.2,3133-3151).
cgtcaacttggcaagaaga

SEQ ID NO: 77454 - DNA, 19 bp, Homo sapiens
  siRNA target sequence for CPS1 (NM_001875.2,3152-3170).
cggtggtggtgaattgcaa

SEQ ID NO: 77455 - DNA, 19 bp, Homo sapiens
  siRNA target sequence for CPS1 (NM_001875.2,3196-3214).
gatgagtgtgacaaactgt

SEQ ID NO: 77456 - DNA, 19 bp, Homo sapiens
  siRNA target sequence for CPS1 (NM_001875.2,3201-3219).
gtgtgacaaactgtacttt

SEQ ID NO: 77457 - DNA, 19 bp, Homo sapiens
  siRNA target sequence for CPS1 (NM_001875.2,3203-3221).
gtgacaaactgtactttga

SEQ ID NO: 77458 - DNA, 19 bp, Homo sapiens
  siRNA target sequence for CPS1 (NM_001875.2,3293-3311).
gaggccagattccaaacaa

SEQ ID NO: 77459 - DNA, 19 bp, Homo sapiens
  siRNA target sequence for CPS1 (NM_001875.2,3313-3331).
ctggcagttcctctataca

SEQ ID NO: 77460 - DNA, 19 bp, Homo sapiens
  siRNA target sequence for CPS1 (NM_001875.2,3490-3508).
gactacccctgcttgttga

SEQ ID NO: 77461 - DNA, 19 bp, Homo sapiens
  siRNA target sequence for CPS1 (NM_001875.2,3533-3551).
ctgctatgaatgtggtatt

SEQ ID NO: 77462 - DNA, 19 bp, Homo sapiens
  siRNA target sequence for CPS1 (NM_001875.2,3535-3553).
gctatgaatgtggtattct

SEQ ID NO: 77463 - DNA, 19 bp, Homo sapiens
  siRNA target sequence for CPS1 (NM_001875.2,3580-3598).
gaagaggcgactagagttt

SEQ ID NO: 77464 - DNA, 19 bp, Homo sapiens
  siRNA target sequence for CPS1 (NM_001875.2,3657-3675).
ggacgctgttggcaaagat

SEQ ID NO: 77465 - DNA, 19 bp, Homo sapiens
  siRNA target sequence for CPS1 (NM_001875.2,3795-3813).
ggatgctacccggaagatt

SEQ ID NO: 77466 - DNA, 19 bp, Homo sapiens
  siRNA target sequence for CPS1 (NM_001875.2,3799-3817).
gctacccggaagattgcaa

SEQ ID NO: 77467 - DNA, 19 bp, Homo sapiens
  siRNA target sequence for CPS1 (NM_001875.2,3800-3818).
ctacccggaagattgcaaa

SEQ ID NO: 77468 - DNA, 19 bp, Homo sapiens
  siRNA target sequence for CPS1 (NM_001875.2,3836-3854).
gtccattcaacgtccaatt

SEQ ID NO: 77469 - DNA, 19 bp, Homo sapiens
  siRNA target sequence for CPS1 (NM_001875.2,3839-3857).
cattcaacgtccaatttct

SEQ ID NO: 77470 - DNA, 19 bp, Homo sapiens
  siRNA target sequence for CPS1 (NM_001875.2,3846-3864).
cgtccaatttcttgtcaaa

SEQ ID NO: 77471 - DNA, 19 bp, Homo sapiens
  siRNA target sequence for CPS1 (NM_001875.2,3871-3889).
gatgtcttggtgattgagt

SEQ ID NO: 77472 - DNA, 19 bp, Homo sapiens
  siRNA target sequence for CPS1 (NM_001875.2,3932-3950).
ctcttggggttgacttcat

SEQ ID NO: 77473 - DNA, 19 bp, Homo sapiens
  siRNA target sequence for CPS1 (NM_001875.2,3938-3956).
gggttgacttcattgatgt

SEQ ID NO: 77474 - DNA, 19 bp, Homo sapiens
  siRNA target sequence for CPS1 (NM_001875.2,4020-4038).
cataattcctgctgactat

SEQ ID NO: 77475 - DNA, 19 bp, Homo sapiens
  siRNA target sequence for CPS1 (NM_001875.2,4028-4046).
ctgctgactatgttgcaat

SEQ ID NO: 77476 - DNA, 19 bp, Homo sapiens
  siRNA target sequence for CPS1 (NM_001875.2,4245-4263).
ccttggtgtggctgaacaa

SEQ ID NO: 77477 - DNA, 19 bp, Homo sapiens
  siRNA target sequence for CPS1 (NM_001875.2,4246-4264).
cttggtgtggctgaacaat

SEQ ID NO: 77478 - DNA, 19 bp, Homo sapiens
  siRNA target sequence for CPS1 (NM_001875.2,4254-4272).
ggctgaacaattacacaat

SEQ ID NO: 77479 - DNA, 19 bp, Homo sapiens
  siRNA target sequence for CPS1 (NM_001875.2,4311-4329).
ctggctcaacgccaacaat

SEQ ID NO: 77480 - DNA, 19 bp, Homo sapiens
  siRNA target sequence for CPS1 (NM_001875.2,4313-4331).
ggctcaacgccaacaatgt

SEQ ID NO: 77481 - DNA, 19 bp, Homo sapiens
  siRNA target sequence for CPS1 (NM_001875.2,4347-4365).
ggcatggccgtctcaagaa

SEQ ID NO: 77482 - DNA, 19 bp, Homo sapiens
  siRNA target sequence for CPS1 (NM_001875.2,4412-4430).
gcagcattgacctagtgat

SEQ ID NO: 77483 - DNA, 19 bp, Homo sapiens
  siRNA target sequence for CPS1 (NM_001875.2,4451-4469).
ctaaatttgtccatgataa

SEQ ID NO: 77484 - DNA, 19 bp, Homo sapiens
  siRNA target sequence for CPS1 (NM_001875.2,4502-4520).
gaatccctctcctcactaa

SEQ ID NO: 77485 - DNA, 19 bp, Homo sapiens
  siRNA target sequence for CPS1 (NM_001875.2,4570-4588).
gtggactccaagagtcttt

SEQ ID NO: 77486 - DNA, 19 bp, Homo sapiens
  siRNA target sequence for CRK7 (NM_016507.1,133-151).
gagcgtcaccgcttggtat

SEQ ID NO: 77487 - DNA, 19 bp, Homo sapiens
  siRNA target sequence for CRK7 (NM_016507.1,137-155).
gtcaccgcttggtatcgaa

SEQ ID NO: 77488 - DNA, 19 bp, Homo sapiens
  siRNA target sequence for CRK7 (NM_016507.1,163-181).
cggcataagtccaaacact

SEQ ID NO: 77489 - DNA, 19 bp, Homo sapiens
  siRNA target sequence for CRK7 (NM_016507.1,223-241).
ggcacagttatcaaacctt

SEQ ID NO: 77490 - DNA, 19 bp, Homo sapiens
  siRNA target sequence for CRK7 (NM_016507.1,224-242).
gcacagttatcaaaccttt

SEQ ID NO: 77491 - DNA, 19 bp, Homo sapiens
  siRNA target sequence for CRK7 (NM_016507.1,285-303).
cgatgacatggccttcaaa

SEQ ID NO: 77492 - DNA, 19 bp, Homo sapiens
  siRNA target sequence for CRK7 (NM_016507.1,347-365).
gcgaccgcctgcacaaaca

SEQ ID NO: 77493 - DNA, 19 bp, Homo sapiens
  siRNA target sequence for CRK7 (NM_016507.1,348-366).
cgaccgcctgcacaaacat

SEQ ID NO: 77494 - DNA, 19 bp, Homo sapiens
  siRNA target sequence for CRK7 (NM_016507.1,383-401).
ggcgttcccgggacttact

SEQ ID NO: 77495 - DNA, 19 bp, Homo sapiens
  siRNA target sequence for CRK7 (NM_016507.1,384-402).
gcgttcccgggacttacta

SEQ ID NO: 77496 - DNA, 19 bp, Homo sapiens
  siRNA target sequence for CRK7 (NM_016507.1,385-403).
cgttcccgggacttactaa

SEQ ID NO: 77497 - DNA, 19 bp, Homo sapiens
  siRNA target sequence for CRK7 (NM_016507.1,386-404).
gttcccgggacttactaaa

SEQ ID NO: 77498 - DNA, 19 bp, Homo sapiens
  siRNA target sequence for CRK7 (NM_016507.1,390-408).
ccgggacttactaaaagct

SEQ ID NO: 77499 - DNA, 19 bp, Homo sapiens
  siRNA target sequence for CRK7 (NM_016507.1,391-409).
cgggacttactaaaagcta

SEQ ID NO: 77500 - DNA, 19 bp, Homo sapiens
  siRNA target sequence for CRK7 (NM_016507.1,392-410).
gggacttactaaaagctaa

SEQ ID NO: 77501 - DNA, 19 bp, Homo sapiens
  siRNA target sequence for CRK7 (NM_016507.1,393-411).
ggacttactaaaagctaaa

SEQ ID NO: 77502 - DNA, 19 bp, Homo sapiens
  siRNA target sequence for CRK7 (NM_016507.1,468-486).
ccggatatcgggaagttca

SEQ ID NO: 77503 - DNA, 19 bp, Homo sapiens
  siRNA target sequence for CRK7 (NM_016507.1,469-487).
cggatatcgggaagttcaa

SEQ ID NO: 77504 - DNA, 19 bp, Homo sapiens
  siRNA target sequence for CRK7 (NM_016507.1,470-488).
ggatatcgggaagttcaaa

SEQ ID NO: 77505 - DNA, 19 bp, Homo sapiens
  siRNA target sequence for CRK7 (NM_016507.1,523-541).
gcgcaggtagccaaaagca

SEQ ID NO: 77506 - DNA, 19 bp, Homo sapiens
  siRNA target sequence for CRK7 (NM_016507.1,613-631).
cacaaagaccggagtaaaa

SEQ ID NO: 77507 - DNA, 19 bp, Homo sapiens
  siRNA target sequence for CRK7 (NM_016507.1,623-641).
ggagtaaaagtcatcgaaa

SEQ ID NO: 77508 - DNA, 19 bp, Homo sapiens
  siRNA target sequence for CRK7 (NM_016507.1,741-759).
cccctcgggagcttcttat

SEQ ID NO: 77509 - DNA, 19 bp, Homo sapiens
  siRNA target sequence for CRK7 (NM_016507.1,791-809).
ctcatacctcgagcaatta

SEQ ID NO: 77510 - DNA, 19 bp, Homo sapiens
  siRNA target sequence for CRK7 (NM_016507.1,854-872).
cggtcagtcccccttacaa

SEQ ID NO: 77511 - DNA, 19 bp, Homo sapiens
  siRNA target sequence for CRK7 (NM_016507.1,958-976).
cggtcgtccagctacgaaa

SEQ ID NO: 77512 - DNA, 19 bp, Homo sapiens
  siRNA target sequence for CRK7 (NM_016507.1,963-981).
gtccagctacgaaagaagt

SEQ ID NO: 77513 - DNA, 19 bp, Homo sapiens
  siRNA target sequence for CRK7 (NM_016507.1,1114-1132).
gcatattcaagacattcat

SEQ ID NO: 77514 - DNA, 19 bp, Homo sapiens
  siRNA target sequence for CRK7 (NM_016507.1,1292-1310).
ccaagggttcacctgtatt

SEQ ID NO: 77515 - DNA, 19 bp, Homo sapiens
  siRNA target sequence for CRK7 (NM_016507.1,1293-1311).
caagggttcacctgtattt

SEQ ID NO: 77516 - DNA, 19 bp, Homo sapiens
  siRNA target sequence for CRK7 (NM_016507.1,1352-1370).
caggtttggagtctaaaaa

SEQ ID NO: 77517 - DNA, 19 bp, Homo sapiens
  siRNA target sequence for CRK7 (NM_016507.1,1371-1389).
gttacccagaagtgtaaaa

SEQ ID NO: 77518 - DNA, 19 bp, Homo sapiens
  siRNA target sequence for CRK7 (NM_016507.1,1419-1437).
ggtgaatgtaacacatcta

SEQ ID NO: 77519 - DNA, 19 bp, Homo sapiens
  siRNA target sequence for CRK7 (NM_016507.1,1420-1438).
gtgaatgtaacacatctaa

SEQ ID NO: 77520 - DNA, 19 bp, Homo sapiens
  siRNA target sequence for CRK7 (NM_016507.1,1491-1509).
ctccgagaagcatcttgtt

SEQ ID NO: 77521 - DNA, 19 bp, Homo sapiens
  siRNA target sequence for CRK7 (NM_016507.1,1493-1511).
ccgagaagcatcttgttaa

SEQ ID NO: 77522 - DNA, 19 bp, Homo sapiens
  siRNA target sequence for CRK7 (NM_016507.1,1642-1660).
ccccctctaccaactacta

SEQ ID NO: 77523 - DNA, 19 bp, Homo sapiens
  siRNA target sequence for CRK7 (NM_016507.1,1789-1807).
ccttctactcactcaaaga

SEQ ID NO: 77524 - DNA, 19 bp, Homo sapiens
  siRNA target sequence for CRK7 (NM_016507.1,1818-1836).
gtcctctcaggcaaattct

SEQ ID NO: 77525 - DNA, 19 bp, Homo sapiens
  siRNA target sequence for CRK7 (NM_016507.1,1860-1878).
gaagactcaagtatctgta

SEQ ID NO: 77526 - DNA, 19 bp, Homo sapiens
  siRNA target sequence for CRK7 (NM_016507.1,1863-1881).
gactcaagtatctgtaaca

SEQ ID NO: 77527 - DNA, 19 bp, Homo sapiens
  siRNA target sequence for CRK7 (NM_016507.1,1885-1903).
gctattccacacctgaaaa

SEQ ID NO: 77528 - DNA, 19 bp, Homo sapiens
  siRNA target sequence for CRK7 (NM_016507.1,1923-1941).
gcccctcccacccttatta

SEQ ID NO: 77529 - DNA, 19 bp, Homo sapiens
  siRNA target sequence for CRK7 (NM_016507.1,1956-1974).
catggatagtccaaaagaa

SEQ ID NO: 77530 - DNA, 19 bp, Homo sapiens
  siRNA target sequence for CRK7 (NM_016507.1,2108-2126).
caccacctcagcaaccata

SEQ ID NO: 77531 - DNA, 19 bp, Homo sapiens
  siRNA target sequence for CRK7 (NM_016507.1,2113-2131).
cctcagcaaccatataaaa

SEQ ID NO: 77532 - DNA, 19 bp, Homo sapiens
  siRNA target sequence for CRK7 (NM_016507.1,2114-2132).
ctcagcaaccatataaaaa

SEQ ID NO: 77533 - DNA, 19 bp, Homo sapiens
  siRNA target sequence for CRK7 (NM_016507.1,2240-2258).
gaacctatggccaagtata

SEQ ID NO: 77534 - DNA, 19 bp, Homo sapiens
  siRNA target sequence for CRK7 (NM_016507.1,2244-2262).
ctatggccaagtatataaa

SEQ ID NO: 77535 - DNA, 19 bp, Homo sapiens
  siRNA target sequence for CRK7 (NM_016507.1,2307-2325).
gagactagacaatgagaaa

SEQ ID NO: 77536 - DNA, 19 bp, Homo sapiens
  siRNA target sequence for CRK7 (NM_016507.1,2342-2360).
cagccattcgtgaaatcaa

SEQ ID NO: 77537 - DNA, 19 bp, Homo sapiens
  siRNA target sequence for CRK7 (NM_016507.1,2345-2363).
ccattcgtgaaatcaaaat

SEQ ID NO: 77538 - DNA, 19 bp, Homo sapiens
  siRNA target sequence for CRK7 (NM_016507.1,2358-2376).
caaaatccttcgtcagtta

SEQ ID NO: 77539 - DNA, 19 bp, Homo sapiens
  siRNA target sequence for CRK7 (NM_016507.1,2380-2398).
caccgaagtgttgttaaca

SEQ ID NO: 77540 - DNA, 19 bp, Homo sapiens
  siRNA target sequence for CRK7 (NM_016507.1,2448-2466).
caaaggtgccttttacctt

SEQ ID NO: 77541 - DNA, 19 bp, Homo sapiens
  siRNA target sequence for CRK7 (NM_016507.1,2546-2564).
cgttcatgaaacagctaat

SEQ ID NO: 77542 - DNA, 19 bp, Homo sapiens
  siRNA target sequence for CRK7 (NM_016507.1,2550-2568).
catgaaacagctaatggaa

SEQ ID NO: 77543 - DNA, 19 bp, Homo sapiens
  siRNA target sequence for CRK7 (NM_016507.1,2559-2577).
gctaatggaaggattggaa

SEQ ID NO: 77544 - DNA, 19 bp, Homo sapiens
  siRNA target sequence for CRK7 (NM_016507.1,2599-2617).
ctgcatcgggatattaagt

SEQ ID NO: 77545 - DNA, 19 bp, Homo sapiens
  siRNA target sequence for CRK7 (NM_016507.1,2601-2619).
gcatcgggatattaagtgt

SEQ ID NO: 77546 - DNA, 19 bp, Homo sapiens
  siRNA target sequence for CRK7 (NM_016507.1,2602-2620).
catcgggatattaagtgtt

SEQ ID NO: 77547 - DNA, 19 bp, Homo sapiens
  siRNA target sequence for CRK7 (NM_016507.1,2605-2623).
cgggatattaagtgttcta

SEQ ID NO: 77548 - DNA, 19 bp, Homo sapiens
  siRNA target sequence for CRK7 (NM_016507.1,2640-2658).
cagtgggcaaatcaaacta

SEQ ID NO: 77549 - DNA, 19 bp, Homo sapiens
  siRNA target sequence for CRK7 (NM_016507.1,2668-2686).
ggacttgctcggctctata

SEQ ID NO: 77550 - DNA, 19 bp, Homo sapiens
  siRNA target sequence for CRK7 (NM_016507.1,2669-2687).
gacttgctcggctctataa

SEQ ID NO: 77551 - DNA, 19 bp, Homo sapiens
  siRNA target sequence for CRK7 (NM_016507.1,2671-2689).
cttgctcggctctataact

SEQ ID NO: 77552 - DNA, 19 bp, Homo sapiens
  siRNA target sequence for CRK7 (NM_016507.1,2695-2713).
gagagtcgcccttacacaa

SEQ ID NO: 77553 - DNA, 19 bp, Homo sapiens
  siRNA target sequence for CRK7 (NM_016507.1,2699-2717).
gtcgcccttacacaaacaa

SEQ ID NO: 77554 - DNA, 19 bp, Homo sapiens
  siRNA target sequence for CRK7 (NM_016507.1,2702-2720).
gcccttacacaaacaaagt

SEQ ID NO: 77555 - DNA, 19 bp, Homo sapiens
  siRNA target sequence for CRK7 (NM_016507.1,2704-2722).
ccttacacaaacaaagtca

SEQ ID NO: 77556 - DNA, 19 bp, Homo sapiens
  siRNA target sequence for CRK7 (NM_016507.1,2709-2727).
cacaaacaaagtcattact

SEQ ID NO: 77557 - DNA, 19 bp, Homo sapiens
  siRNA target sequence for CRK7 (NM_016507.1,2804-2822).
gtattcttggggaactatt

SEQ ID NO: 77558 - DNA, 19 bp, Homo sapiens
  siRNA target sequence for CRK7 (NM_016507.1,2823-2841).
cacaaagaagcctattttt

SEQ ID NO: 77559 - DNA, 19 bp, Homo sapiens
  siRNA target sequence for CRK7 (NM_016507.1,2953-2971).
ccgaagaagcaatatcgaa

SEQ ID NO: 77560 - DNA, 19 bp, Homo sapiens
  siRNA target sequence for CRK7 (NM_016507.1,2972-2990).
ggcgtctacgagaagaatt

SEQ ID NO: 77561 - DNA, 19 bp, Homo sapiens
  siRNA target sequence for CRK7 (NM_016507.1,2977-2995).
ctacgagaagaattctctt

SEQ ID NO: 77562 - DNA, 19 bp, Homo sapiens
  siRNA target sequence for CRK7 (NM_016507.1,3001-3019).
ccttctgcagcacttgatt

SEQ ID NO: 77563 - DNA, 19 bp, Homo sapiens
  siRNA target sequence for CRK7 (NM_016507.1,3002-3020).
cttctgcagcacttgattt

SEQ ID NO: 77564 - DNA, 19 bp, Homo sapiens
  siRNA target sequence for CRK7 (NM_016507.1,3027-3045).
ccacatgctgacactagat

SEQ ID NO: 77565 - DNA, 19 bp, Homo sapiens
  siRNA target sequence for CRK7 (NM_016507.1,3081-3099).
gagcgacttccttaaagat

SEQ ID NO: 77566 - DNA, 19 bp, Homo sapiens
  siRNA target sequence for CRK7 (NM_016507.1,3083-3101).
gcgacttccttaaagatgt

SEQ ID NO: 77567 - DNA, 19 bp, Homo sapiens
  siRNA target sequence for CRK7 (NM_016507.1,3097-3115).
gatgtcgaactcagcaaaa

SEQ ID NO: 77568 - DNA, 19 bp, Homo sapiens
  siRNA target sequence for CRK7 (NM_016507.1,3174-3192).
gcgacgtcagcgacaaagt

SEQ ID NO: 77569 - DNA, 19 bp, Homo sapiens
  siRNA target sequence for CRK7 (NM_016507.1,3928-3946).
gccgccttgctgcaacttt

SEQ ID NO: 77570 - DNA, 19 bp, Homo sapiens
  siRNA target sequence for CRK7 (NM_016507.1,3929-3947).
ccgccttgctgcaactttt

SEQ ID NO: 77571 - DNA, 19 bp, Homo sapiens
  siRNA target sequence for CRK7 (NM_016507.1,3930-3948).
cgccttgctgcaactttta

SEQ ID NO: 77572 - DNA, 19 bp, Homo sapiens
  siRNA target sequence for CRK7 (NM_016507.1,4029-4047).
ccgtccaaacaggacttat

SEQ ID NO: 77573 - DNA, 19 bp, Homo sapiens
  siRNA target sequence for CRK7 (NM_016507.1,4089-4107).
cactgatgaacgaaactct

SEQ ID NO: 77574 - DNA, 19 bp, Homo sapiens
  siRNA target sequence for CRK7 (NM_016507.1,4274-4292).
cggtggtcgggcaaccatt

SEQ ID NO: 77575 - DNA, 19 bp, Homo sapiens
  siRNA target sequence for CRK7 (NM_016507.1,4300-4318).
gctgagggaagcagcaatt

SEQ ID NO: 77576 - DNA, 19 bp, Homo sapiens
  siRNA target sequence for CRK7 (NM_016507.1,4430-4448).
ctgcttatggaaaactcta

SEQ ID NO: 77577 - DNA, 19 bp, Homo sapiens
  siRNA target sequence for CSF1R (NM_005211.2,579-597).
ccatccacctctatgtcaa

SEQ ID NO: 77578 - DNA, 19 bp, Homo sapiens
  siRNA target sequence for CSF1R (NM_005211.2,580-598).
catccacctctatgtcaaa

SEQ ID NO: 77579 - DNA, 19 bp, Homo sapiens
  siRNA target sequence for CSF1R (NM_005211.2,803-821).
cagagccaggactatcaat

SEQ ID NO: 77580 - DNA, 19 bp, Homo sapiens
  siRNA target sequence for CSF1R (NM_005211.2,966-984).
cagccagcagcgttgatgt

SEQ ID NO: 77581 - DNA, 19 bp, Homo sapiens
  siRNA target sequence for CSF1R (NM_005211.2,968-986).
gccagcagcgttgatgtta

SEQ ID NO: 77582 - DNA, 19 bp, Homo sapiens
  siRNA target sequence for CSF1R (NM_005211.2,972-990).
gcagcgttgatgttaactt

SEQ ID NO: 77583 - DNA, 19 bp, Homo sapiens
  siRNA target sequence for CSF1R (NM_005211.2,973-991).
cagcgttgatgttaacttt

SEQ ID NO: 77584 - DNA, 19 bp, Homo sapiens
  siRNA target sequence for CSF1R (NM_005211.2,975-993).
gcgttgatgttaactttga

SEQ ID NO: 77585 - DNA, 19 bp, Homo sapiens
  siRNA target sequence for CSF1R (NM_005211.2,1021-1039).
gctcgcaatccctcaacaa

SEQ ID NO: 77586 - DNA, 19 bp, Homo sapiens
  siRNA target sequence for CSF1R (NM_005211.2,1024-1042).
cgcaatccctcaacaatct

SEQ ID NO: 77587 - DNA, 19 bp, Homo sapiens
  siRNA target sequence for CSF1R (NM_005211.2,1030-1048).
ccctcaacaatctgacttt

SEQ ID NO: 77588 - DNA, 19 bp, Homo sapiens
  siRNA target sequence for CSF1R (NM_005211.2,1049-1067).
cataataaccgttaccaaa

SEQ ID NO: 77589 - DNA, 19 bp, Homo sapiens
  siRNA target sequence for CSF1R (NM_005211.2,1077-1095).
ccctcaacctcgatcaagt

SEQ ID NO: 77590 - DNA, 19 bp, Homo sapiens
  siRNA target sequence for CSF1R (NM_005211.2,1081-1099).
caacctcgatcaagtagat

SEQ ID NO: 77591 - DNA, 19 bp, Homo sapiens
  siRNA target sequence for CSF1R (NM_005211.2,1103-1121).
caacatgccggcaactact

SEQ ID NO: 77592 - DNA, 19 bp, Homo sapiens
  siRNA target sequence for CSF1R (NM_005211.2,1181-1199).
gagagtgcctacttgaact

SEQ ID NO: 77593 - DNA, 19 bp, Homo sapiens
  siRNA target sequence for CSF1R (NM_005211.2,1277-1295).
ccaggcctgcaaggtttta

SEQ ID NO: 77594 - DNA, 19 bp, Homo sapiens
  siRNA target sequence for CSF1R (NM_005211.2,1278-1296).
caggcctgcaaggttttaa

SEQ ID NO: 77595 - DNA, 19 bp, Homo sapiens
  siRNA target sequence for CSF1R (NM_005211.2,1280-1298).
ggcctgcaaggttttaact

SEQ ID NO: 77596 - DNA, 19 bp, Homo sapiens
  siRNA target sequence for CSF1R (NM_005211.2,1332-1350).
ctgagcccaagcttgctaa

SEQ ID NO: 77597 - DNA, 19 bp, Homo sapiens
  siRNA target sequence for CSF1R (NM_005211.2,1496-1514).
ccagaggtaagcgtcatat

SEQ ID NO: 77598 - DNA, 19 bp, Homo sapiens
  siRNA target sequence for CSF1R (NM_005211.2,1506-1524).
gcgtcatatggacattcat

SEQ ID NO: 77599 - DNA, 19 bp, Homo sapiens
  siRNA target sequence for CSF1R (NM_005211.2,1931-1949).
caggtccgctggaagatca

SEQ ID NO: 77600 - DNA, 19 bp, Homo sapiens
  siRNA target sequence for CSF1R (NM_005211.2,1989-2007).
ccacgcagctgccttacaa

SEQ ID NO: 77601 - DNA, 19 bp, Homo sapiens
  siRNA target sequence for CSF1R (NM_005211.2,2154-2172).
cggcccatgctgatgagaa

SEQ ID NO: 77602 - DNA, 19 bp, Homo sapiens
  siRNA target sequence for CSF1R (NM_005211.2,2273-2291).
gtcatcacggagtactgtt

SEQ ID NO: 77603 - DNA, 19 bp, Homo sapiens
  siRNA target sequence for CSF1R (NM_005211.2,2372-2390).
gagggaggcgtcgactata

SEQ ID NO: 77604 - DNA, 19 bp, Homo sapiens
  siRNA target sequence for CSF1R (NM_005211.2,2375-2393).
ggaggcgtcgactataaga

SEQ ID NO: 77605 - DNA, 19 bp, Homo sapiens
  siRNA target sequence for CSF1R (NM_005211.2,2376-2394).
gaggcgtcgactataagaa

SEQ ID NO: 77606 - DNA, 19 bp, Homo sapiens
  siRNA target sequence for CSF1R (NM_005211.2,2378-2396).
ggcgtcgactataagaaca

SEQ ID NO: 77607 - DNA, 19 bp, Homo sapiens
  siRNA target sequence for CSF1R (NM_005211.2,2379-2397).
gcgtcgactataagaacat

SEQ ID NO: 77608 - DNA, 19 bp, Homo sapiens
  siRNA target sequence for CSF1R (NM_005211.2,2398-2416).
ccacctcgagaagaaatat

SEQ ID NO: 77609 - DNA, 19 bp, Homo sapiens
  siRNA target sequence for CSF1R (NM_005211.2,2685-2703).
ggctggctagggacatcat

SEQ ID NO: 77610 - DNA, 19 bp, Homo sapiens
  siRNA target sequence for CSF1R (NM_005211.2,2689-2707).
ggctagggacatcatgaat

SEQ ID NO: 77611 - DNA, 19 bp, Homo sapiens
  siRNA target sequence for CSF1R (NM_005211.2,2704-2722).
gaatgactccaactacatt

SEQ ID NO: 77612 - DNA, 19 bp, Homo sapiens
  siRNA target sequence for CSF1R (NM_005211.2,2708-2726).
gactccaactacattgtca

SEQ ID NO: 77613 - DNA, 19 bp, Homo sapiens
  siRNA target sequence for CSF1R (NM_005211.2,2875-2893).
gaacagcaagttctataaa

SEQ ID NO: 77614 - DNA, 19 bp, Homo sapiens
  siRNA target sequence for CSF1R (NM_005211.2,2927-2945).
gcatttgccccaaagaata

SEQ ID NO: 77615 - DNA, 19 bp, Homo sapiens
  siRNA target sequence for CSF1R (NM_005211.2,3048-3066).
gagagcgggactataccaa

SEQ ID NO: 77616 - DNA, 19 bp, Homo sapiens
  siRNA target sequence for CSF1R (NM_005211.2,3185-3203).
cagcccaacaactatcagt

SEQ ID NO: 77617 - DNA, 19 bp, Homo sapiens
  siRNA target sequence for CSK (NM_004383.1,433-451).
ctggccatccggtacagaa

SEQ ID NO: 77618 - DNA, 19 bp, Homo sapiens
  siRNA target sequence for CSK (NM_004383.1,436-454).
gccatccggtacagaatgt

SEQ ID NO: 77619 - DNA, 19 bp, Homo sapiens
  siRNA target sequence for CSK (NM_004383.1,437-455).
ccatccggtacagaatgta

SEQ ID NO: 77620 - DNA, 19 bp, Homo sapiens
  siRNA target sequence for CSK (NM_004383.1,438-456).
catccggtacagaatgtat

SEQ ID NO: 77621 - DNA, 19 bp, Homo sapiens
  siRNA target sequence for CSK (NM_004383.1,541-559).
ggaccccaactggtacaaa

SEQ ID NO: 77622 - DNA, 19 bp, Homo sapiens
  siRNA target sequence for CSK (NM_004383.1,622-640).
cgtgaaggcgggtaccaaa

SEQ ID NO: 77623 - DNA, 19 bp, Homo sapiens
  siRNA target sequence for CSK (NM_004383.1,791-809).
gagcactaccgcatcatgt

SEQ ID NO: 77624 - DNA, 19 bp, Homo sapiens
  siRNA target sequence for CSK (NM_004383.1,832-850).
cgacgaggaggtgtacttt

SEQ ID NO: 77625 - DNA, 19 bp, Homo sapiens
  siRNA target sequence for CSK (NM_004383.1,899-917).
ctctgtacgcgcctcatta

SEQ ID NO: 77626 - DNA, 19 bp, Homo sapiens
  siRNA target sequence for CSK (NM_004383.1,901-919).
ctgtacgcgcctcattaaa

SEQ ID NO: 77627 - DNA, 19 bp, Homo sapiens
  siRNA target sequence for CSK (NM_004383.1,906-924).
cgcgcctcattaaaccaaa

SEQ ID NO: 77628 - DNA, 19 bp, Homo sapiens
  siRNA target sequence for CSK (NM_004383.1,1048-1066).
cgattaccgagggaacaaa

SEQ ID NO: 77629 - DNA, 19 bp, Homo sapiens
  siRNA target sequence for CSK (NM_004383.1,1134-1152).
cgcaactgcggcatagcaa

SEQ ID NO: 77630 - DNA, 19 bp, Homo sapiens
  siRNA target sequence for CSK (NM_004383.1,1495-1513).
gaaattctccactaagtct

SEQ ID NO: 77631 - DNA, 19 bp, Homo sapiens
  siRNA target sequence for CSK (NM_004383.1,1519-1537).
gtggagtttcggaatcctt

SEQ ID NO: 77632 - DNA, 19 bp, Homo sapiens
  siRNA target sequence for CSK (NM_004383.1,1563-1581).
gagtgccttatccaagaat

SEQ ID NO: 77633 - DNA, 19 bp, Homo sapiens
  siRNA target sequence for CSK (NM_004383.1,1727-1745).
cagcttgagcacatcaaaa

SEQ ID NO: 77634 - DNA, 19 bp, Homo sapiens
  siRNA target sequence for CSNK1A1 (NM_001892.3,144-162).
gcggctccaaggctgaatt

SEQ ID NO: 77635 - DNA, 19 bp, Homo sapiens
  siRNA target sequence for CSNK1A1 (NM_001892.3,312-330).
gcaagctctataagattct

SEQ ID NO: 77636 - DNA, 19 bp, Homo sapiens
  siRNA target sequence for CSNK1A1 (NM_001892.3,313-331).
caagctctataagattctt

SEQ ID NO: 77637 - DNA, 19 bp, Homo sapiens
  siRNA target sequence for CSNK1A1 (NM_001892.3,316-334).
gctctataagattcttcaa

SEQ ID NO: 77638 - DNA, 19 bp, Homo sapiens
  siRNA target sequence for CSNK1A1 (NM_001892.3,739-757).
catggaatcattaggatat

SEQ ID NO: 77639 - DNA, 19 bp, Homo sapiens
  siRNA target sequence for CSNK1A1 (NM_001892.3,742-760).
ggaatcattaggatatgtt

SEQ ID NO: 77640 - DNA, 19 bp, Homo sapiens
  siRNA target sequence for CSNK1A1 (NM_001892.3,798-816).
ggctaaaggctgcaacaaa

SEQ ID NO: 77641 - DNA, 19 bp, Homo sapiens
  siRNA target sequence for CSNK1A1 (NM_001892.3,893-911).
gaatttgcgatgtacttaa

SEQ ID NO: 77642 - DNA, 19 bp, Homo sapiens
  siRNA target sequence for CSNK1A1 (NM_001892.3,899-917).
gcgatgtacttaaactatt

SEQ ID NO: 77643 - DNA, 19 bp, Homo sapiens
  siRNA target sequence for CSNK1D (NM_001893.3,419-437).
gttgccatcaagcttgaat

SEQ ID NO: 77644 - DNA, 19 bp, Homo sapiens
  siRNA target sequence for CSNK1D (NM_001893.3,455-473).
cctcagctccacattgaga

SEQ ID NO: 77645 - DNA, 19 bp, Homo sapiens
  siRNA target sequence for CSNK1D (NM_001893.3,464-482).
cacattgagagcaaaatct

SEQ ID NO: 77646 - DNA, 19 bp, Homo sapiens
  siRNA target sequence for CSNK1D (NM_001893.3,531-549).
gggcagagggggactacaa

SEQ ID NO: 77647 - DNA, 19 bp, Homo sapiens
  siRNA target sequence for CSNK1D (NM_001893.3,638-656).
cttgctgaccaaatgatca

SEQ ID NO: 77648 - DNA, 19 bp, Homo sapiens
  siRNA target sequence for CSNK1D (NM_001893.3,655-673).
cagtcgcatcgaatacatt

SEQ ID NO: 77649 - DNA, 19 bp, Homo sapiens
  siRNA target sequence for CSNK1D (NM_001893.3,657-675).
gtcgcatcgaatacattca

SEQ ID NO: 77650 - DNA, 19 bp, Homo sapiens
  siRNA target sequence for CSNK1D (NM_001893.3,659-677).
cgcatcgaatacattcatt

SEQ ID NO: 77651 - DNA, 19 bp, Homo sapiens
  siRNA target sequence for CSNK1D (NM_001893.3,661-679).
catcgaatacattcattca

SEQ ID NO: 77652 - DNA, 19 bp, Homo sapiens
  siRNA target sequence for CSNK1D (NM_001893.3,812-830).
ccctatcgtgagaacaaga

SEQ ID NO: 77653 - DNA, 19 bp, Homo sapiens
  siRNA target sequence for CSNK1D (NM_001893.3,813-831).
cctatcgtgagaacaagaa

SEQ ID NO: 77654 - DNA, 19 bp, Homo sapiens
  siRNA target sequence for CSNK1D (NM_001893.3,867-885).
cgcaccttggaattgaaca

SEQ ID NO: 77655 - DNA, 19 bp, Homo sapiens
  siRNA target sequence for CSNK1D (NM_001893.3,868-886).
gcaccttggaattgaacaa

SEQ ID NO: 77656 - DNA, 19 bp, Homo sapiens
  siRNA target sequence for CSNK1D (NM_001893.3,909-927).
ctctgggctacgtgctaat

SEQ ID NO: 77657 - DNA, 19 bp, Homo sapiens
  siRNA target sequence for CSNK1D (NM_001893.3,975-993).
ccaagagacagaaatacga

SEQ ID NO: 77658 - DNA, 19 bp, Homo sapiens
  siRNA target sequence for CSNK1D (NM_001893.3,1022-1040).
cccatcgaagtgttgtgta

SEQ ID NO: 77659 - DNA, 19 bp, Homo sapiens
  siRNA target sequence for CSNK1D (NM_001893.3,1023-1041).
ccatcgaagtgttgtgtaa

SEQ ID NO: 77660 - DNA, 19 bp, Homo sapiens
  siRNA target sequence for CSNK1D (NM_001893.3,1024-1042).
catcgaagtgttgtgtaaa

SEQ ID NO: 77661 - DNA, 19 bp, Homo sapiens
  siRNA target sequence for CSNK1D (NM_001893.3,1080-1098).
gccgttccttgcgttttga

SEQ ID NO: 77662 - DNA, 19 bp, Homo sapiens
  siRNA target sequence for CSNK1D (NM_001893.3,1116-1134).
cgtacctgcggcagctttt

SEQ ID NO: 77663 - DNA, 19 bp, Homo sapiens
  siRNA target sequence for CSNK1D (NM_001893.3,1410-1428).
gagagcggaaagtgagtat

SEQ ID NO: 77664 - DNA, 19 bp, Homo sapiens
  siRNA target sequence for CSNK1D (NM_139062.1,1513-1531).
gaatagcattcctttcgaa

SEQ ID NO: 77665 - DNA, 19 bp, Homo sapiens
  siRNA target sequence for CSNK1E (NM_001894.4,118-136).
ctacgtgtggggaacaagt

SEQ ID NO: 77666 - DNA, 19 bp, Homo sapiens
  siRNA target sequence for CSNK1E (NM_001894.4,301-319).
gggatcccgtccatcaagt

SEQ ID NO: 77667 - DNA, 19 bp, Homo sapiens
  siRNA target sequence for CSNK1E (NM_001894.4,326-344).
gagctgagggcgactacaa

SEQ ID NO: 77668 - DNA, 19 bp, Homo sapiens
  siRNA target sequence for CSNK1E (NM_001894.4,452-470).
gccgcatcgagtatatcca

SEQ ID NO: 77669 - DNA, 19 bp, Homo sapiens
  siRNA target sequence for CSNK1E (NM_001894.4,768-786).
caccaagcgccagaagtat

SEQ ID NO: 77670 - DNA, 19 bp, Homo sapiens
  siRNA target sequence for CSNK1E (NM_001894.4,838-856).
ggctatccctccgaattct

SEQ ID NO: 77671 - DNA, 19 bp, Homo sapiens
  siRNA target sequence for CSNK1E (NM_001894.4,845-863).
cctccgaattctcaacata

SEQ ID NO: 77672 - DNA, 19 bp, Homo sapiens
  siRNA target sequence for CSNK1E (NM_001894.4,900-918).
gcccgactactcttaccta

SEQ ID NO: 77673 - DNA, 19 bp, Homo sapiens
  siRNA target sequence for CSNK1E (NM_001894.4,1179-1197).
ccagccggctggcaatact

SEQ ID NO: 77674 - DNA, 19 bp, Homo sapiens
  siRNA target sequence for CSNK1E (NM_001894.4,1180-1198).
cagccggctggcaatactt

SEQ ID NO: 77675 - DNA, 19 bp, Homo sapiens
  siRNA target sequence for CSNK1E (NM_001894.4,1182-1200).
gccggctggcaatacttct

SEQ ID NO: 77676 - DNA, 19 bp, Homo sapiens
  siRNA target sequence for CSNK1G1 (NM_022048.1,156-174).
gaaagacaacggacaacta

SEQ ID NO: 77677 - DNA, 19 bp, Homo sapiens
  siRNA target sequence for CSNK1G1 (NM_022048.1,293-311).
cggagagctcagattaggt

SEQ ID NO: 77678 - DNA, 19 bp, Homo sapiens
  siRNA target sequence for CSNK1G1 (NM_022048.1,294-312).
ggagagctcagattaggta

SEQ ID NO: 77679 - DNA, 19 bp, Homo sapiens
  siRNA target sequence for CSNK1G1 (NM_022048.1,295-313).
gagagctcagattaggtaa

SEQ ID NO: 77680 - DNA, 19 bp, Homo sapiens
  siRNA target sequence for CSNK1G1 (NM_022048.1,299-317).
gctcagattaggtaaaaat

SEQ ID NO: 77681 - DNA, 19 bp, Homo sapiens
  siRNA target sequence for CSNK1G1 (NM_022048.1,426-444).
ggtctcccacaggtgtatt

SEQ ID NO: 77682 - DNA, 19 bp, Homo sapiens
  siRNA target sequence for CSNK1G1 (NM_022048.1,431-449).
cccacaggtgtattacttt

SEQ ID NO: 77683 - DNA, 19 bp, Homo sapiens
  siRNA target sequence for CSNK1G1 (NM_022048.1,450-468).
ggaccatgtgggaaatata

SEQ ID NO: 77684 - DNA, 19 bp, Homo sapiens
  siRNA target sequence for CSNK1G1 (NM_022048.1,518-536).
cctctgtgaccgaacattt

SEQ ID NO: 77685 - DNA, 19 bp, Homo sapiens
  siRNA target sequence for CSNK1G1 (NM_022048.1,525-543).
gaccgaacatttactttga

SEQ ID NO: 77686 - DNA, 19 bp, Homo sapiens
  siRNA target sequence for CSNK1G1 (NM_022048.1,528-546).
cgaacatttactttgaaga

SEQ ID NO: 77687 - DNA, 19 bp, Homo sapiens
  siRNA target sequence for CSNK1G1 (NM_022048.1,569-587).
gctgctttctcgaatggaa

SEQ ID NO: 77688 - DNA, 19 bp, Homo sapiens
  siRNA target sequence for CSNK1G1 (NM_022048.1,645-663).
ggtcgacaaggcaataaga

SEQ ID NO: 77689 - DNA, 19 bp, Homo sapiens
  siRNA target sequence for CSNK1G1 (NM_022048.1,646-664).
gtcgacaaggcaataagaa

SEQ ID NO: 77690 - DNA, 19 bp, Homo sapiens
  siRNA target sequence for CSNK1G1 (NM_022048.1,724-742).
ccaaaaaacacatacctta

SEQ ID NO: 77691 - DNA, 19 bp, Homo sapiens
  siRNA target sequence for CSNK1G1 (NM_022048.1,771-789).
gcaagatatatgtctatca

SEQ ID NO: 77692 - DNA, 19 bp, Homo sapiens
  siRNA target sequence for CSNK1G1 (NM_022048.1,886-904).
gactcaaggctgacacatt

SEQ ID NO: 77693 - DNA, 19 bp, Homo sapiens
  siRNA target sequence for CSNK1G1 (NM_022048.1,911-929).
gagatatcaaaaaattggt

SEQ ID NO: 77694 - DNA, 19 bp, Homo sapiens
  siRNA target sequence for CSNK1G1 (NM_022048.1,986-1004).
ggcaacctaccttcgatat

SEQ ID NO: 77695 - DNA, 19 bp, Homo sapiens
  siRNA target sequence for CSNK1G1 (NM_022048.1,988-1006).
caacctaccttcgatatgt

SEQ ID NO: 77696 - DNA, 19 bp, Homo sapiens
  siRNA target sequence for CSNK1G1 (NM_022048.1,1007-1025).
caggcgactggacttcttt

SEQ ID NO: 77697 - DNA, 19 bp, Homo sapiens
  siRNA target sequence for CSNK1G1 (NM_022048.1,1010-1028).
gcgactggacttctttgaa

SEQ ID NO: 77698 - DNA, 19 bp, Homo sapiens
  siRNA target sequence for CSNK1G1 (NM_022048.1,1113-1131).
gttgggagacctattccta

SEQ ID NO: 77699 - DNA, 19 bp, Homo sapiens
  siRNA target sequence for CSNK1G1 (NM_022048.1,1140-1158).
gggtcagttcacgtagatt

SEQ ID NO: 77700 - DNA, 19 bp, Homo sapiens
  siRNA target sequence for CSNK1G1 (NM_022048.1,1233-1251).
cagagccttaggactgtta

SEQ ID NO: 77701 - DNA, 19 bp, Homo sapiens
  siRNA target sequence for CSNK1G1 (NM_022048.1,1235-1253).
gagccttaggactgttaca

SEQ ID NO: 77702 - DNA, 19 bp, Homo sapiens
  siRNA target sequence for CSNK1G1 (NM_022048.1,1252-1270).
cagctgagcattatgatgt

SEQ ID NO: 77703 - DNA, 19 bp, Homo sapiens
  siRNA target sequence for CSNK1G2 (NM_001319.5,230-248).
gctccgcctaggaaagaat

SEQ ID NO: 77704 - DNA, 19 bp, Homo sapiens
  siRNA target sequence for CSNK1G2 (NM_001319.5,235-253).
gcctaggaaagaatctcta

SEQ ID NO: 77705 - DNA, 19 bp, Homo sapiens
  siRNA target sequence for CSNK1G3 (NM_004384.1,186-204).
caattttggagaattacga

SEQ ID NO: 77706 - DNA, 19 bp, Homo sapiens
  siRNA target sequence for CSNK1G3 (NM_004384.1,269-287).
caccacagctacatttgga

SEQ ID NO: 77707 - DNA, 19 bp, Homo sapiens
  siRNA target sequence for CSNK1G3 (NM_004384.1,274-292).
cagctacatttggaataca

SEQ ID NO: 77708 - DNA, 19 bp, Homo sapiens
  siRNA target sequence for CSNK1G3 (NM_004384.1,276-294).
gctacatttggaatacaga

SEQ ID NO: 77709 - DNA, 19 bp, Homo sapiens
  siRNA target sequence for CSNK1G3 (NM_004384.1,323-341).
gtatacctcaagtttacta

SEQ ID NO: 77710 - DNA, 19 bp, Homo sapiens
  siRNA target sequence for CSNK1G3 (NM_004384.1,384-402).
gctgggacctagtttggaa

SEQ ID NO: 77711 - DNA, 19 bp, Homo sapiens
  siRNA target sequence for CSNK1G3 (NM_004384.1,453-471).
gatagctatacaactgatt

SEQ ID NO: 77712 - DNA, 19 bp, Homo sapiens
  siRNA target sequence for CSNK1G3 (NM_004384.1,468-486).
gatttctcgcatggaatat

SEQ ID NO: 77713 - DNA, 19 bp, Homo sapiens
  siRNA target sequence for CSNK1G3 (NM_004384.1,487-505).
gtccattcaaagaacttga

SEQ ID NO: 77714 - DNA, 19 bp, Homo sapiens
  siRNA target sequence for CSNK1G3 (NM_004384.1,561-579).
ccagcaagttattcacatt

SEQ ID NO: 77715 - DNA, 19 bp, Homo sapiens
  siRNA target sequence for CSNK1G3 (NM_004384.1,594-612).
ggcaaaggaatatattgat

SEQ ID NO: 77716 - DNA, 19 bp, Homo sapiens
  siRNA target sequence for CSNK1G3 (NM_004384.1,614-632).
cggagacaaagaaacacat

SEQ ID NO: 77717 - DNA, 19 bp, Homo sapiens
  siRNA target sequence for CSNK1G3 (NM_004384.1,659-677).
caggaacagctagatatat

SEQ ID NO: 77718 - DNA, 19 bp, Homo sapiens
  siRNA target sequence for CSNK1G3 (NM_004384.1,668-686).
ctagatatatgagcataaa

SEQ ID NO: 77719 - DNA, 19 bp, Homo sapiens
  siRNA target sequence for CSNK1G3 (NM_004384.1,710-728).
gtagaagagacgatttaga

SEQ ID NO: 77720 - DNA, 19 bp, Homo sapiens
  siRNA target sequence for CSNK1G3 (NM_004384.1,720-738).
cgatttagaagctttaggt

SEQ ID NO: 77721 - DNA, 19 bp, Homo sapiens
  siRNA target sequence for CSNK1G3 (NM_004384.1,727-745).
gaagctttaggtcatatgt

SEQ ID NO: 77722 - DNA, 19 bp, Homo sapiens
  siRNA target sequence for CSNK1G3 (NM_004384.1,836-854).
gggctacaccaatagaagt

SEQ ID NO: 77723 - DNA, 19 bp, Homo sapiens
  siRNA target sequence for CSNK1G3 (NM_004384.1,879-897).
ggcaacatatcttcgttat

SEQ ID NO: 77724 - DNA, 19 bp, Homo sapiens
  siRNA target sequence for CSNK1G3 (NM_004384.1,898-916).
gtaagaaggctagattttt

SEQ ID NO: 77725 - DNA, 19 bp, Homo sapiens
  siRNA target sequence for CSNK1G3 (NM_004384.1,939-957).
cttaagaaagctttttact

SEQ ID NO: 77726 - DNA, 19 bp, Homo sapiens
  siRNA target sequence for CSNK1G3 (NM_004384.1,960-978).
cttgtttgatcgaaaagga

SEQ ID NO: 77727 - DNA, 19 bp, Homo sapiens
  siRNA target sequence for CSNK1G3 (NM_004384.1,963-981).
gtttgatcgaaaaggatat

SEQ ID NO: 77728 - DNA, 19 bp, Homo sapiens
  siRNA target sequence for CSNK1G3 (NM_004384.1,967-985).
gatcgaaaaggatatatgt

SEQ ID NO: 77729 - DNA, 19 bp, Homo sapiens
  siRNA target sequence for CSNK1G3 (NM_004384.1,994-1012).
gaatatgactggattggta

SEQ ID NO: 77730 - DNA, 19 bp, Homo sapiens
  siRNA target sequence for CSNK1G3 (NM_004384.1,1000-1018).
gactggattggtaaacagt

SEQ ID NO: 77731 - DNA, 19 bp, Homo sapiens
  siRNA target sequence for CSNK1G3 (NM_004384.1,1051-1069).
cctgctctgtcatcaaaca

SEQ ID NO: 77732 - DNA, 19 bp, Homo sapiens
  siRNA target sequence for CSNK1G3 (NM_004384.1,1201-1219).
ggctcggtacaggttgtaa

SEQ ID NO: 77733 - DNA, 19 bp, Homo sapiens
  siRNA target sequence for CSNK1G3 (NM_004384.1,1203-1221).
ctcggtacaggttgtaagt

SEQ ID NO: 77734 - DNA, 19 bp, Homo sapiens
  siRNA target sequence for CSNK1G3 (NM_004384.1,1206-1224).
ggtacaggttgtaagttct

SEQ ID NO: 77735 - DNA, 19 bp, Homo sapiens
  siRNA target sequence for CSNK1G3 (NM_004384.1,1210-1228).
caggttgtaagttctacaa

SEQ ID NO: 77736 - DNA, 19 bp, Homo sapiens
  siRNA target sequence for CSNK1G3 (NM_004384.1,1253-1271).
ccaccgcaggacgttcaaa

SEQ ID NO: 77737 - DNA, 19 bp, Homo sapiens
  siRNA target sequence for CSNK1G3 (NM_004384.1,1254-1272).
caccgcaggacgttcaaat

SEQ ID NO: 77738 - DNA, 19 bp, Homo sapiens
  siRNA target sequence for CSNK1G3 (NM_004384.1,1257-1275).
cgcaggacgttcaaatgca

SEQ ID NO: 77739 - DNA, 19 bp, Homo sapiens
  siRNA target sequence for CSNK1G3 (NM_004384.1,1281-1299).
cacagcccctactgaagta

SEQ ID NO: 77740 - DNA, 19 bp, Homo sapiens
  siRNA target sequence for CSNK1G3 (NM_004384.1,1286-1304).
cccctactgaagtagaagt

SEQ ID NO: 77741 - DNA, 19 bp, Homo sapiens
  siRNA target sequence for CSNK2A2 (NM_001896.2,262-280).
ccaactggttcgaaaactt

SEQ ID NO: 77742 - DNA, 19 bp, Homo sapiens
  siRNA target sequence for CSNK2A2 (NM_001896.2,282-300).
gtcggggaaaatatagtga

SEQ ID NO: 77743 - DNA, 19 bp, Homo sapiens
  siRNA target sequence for CSNK2A2 (NM_001896.2,332-350).
gagagagtggttgtaaaaa

SEQ ID NO: 77744 - DNA, 19 bp, Homo sapiens
  siRNA target sequence for CSNK2A2 (NM_001896.2,417-435).
gaacaaatatcattaagct

SEQ ID NO: 77745 - DNA, 19 bp, Homo sapiens
  siRNA target sequence for CSNK2A2 (NM_001896.2,451-469).
ggaccccgtgtcaaagaca

SEQ ID NO: 77746 - DNA, 19 bp, Homo sapiens
  siRNA target sequence for CSNK2A2 (NM_001896.2,535-553).
ctttgatatccggttttat

SEQ ID NO: 77747 - DNA, 19 bp, Homo sapiens
  siRNA target sequence for CSNK2A2 (NM_001896.2,539-557).
gatatccggttttatatgt

SEQ ID NO: 77748 - DNA, 19 bp, Homo sapiens
  siRNA target sequence for CSNK2A2 (NM_001896.2,544-562).
ccggttttatatgtatgaa

SEQ ID NO: 77749 - DNA, 19 bp, Homo sapiens
  siRNA target sequence for CSNK2A2 (NM_001896.2,566-584).
cttaaagctctggattact

SEQ ID NO: 77750 - DNA, 19 bp, Homo sapiens
  siRNA target sequence for CSNK2A2 (NM_001896.2,601-619).
catgcacagggatgtgaaa

SEQ ID NO: 77751 - DNA, 19 bp, Homo sapiens
  siRNA target sequence for CSNK2A2 (NM_001896.2,610-628).
ggatgtgaaacctcacaat

SEQ ID NO: 77752 - DNA, 19 bp, Homo sapiens
  siRNA target sequence for CSNK2A2 (NM_001896.2,614-632).
gtgaaacctcacaatgtca

SEQ ID NO: 77753 - DNA, 19 bp, Homo sapiens
  siRNA target sequence for CSNK2A2 (NM_001896.2,621-639).
ctcacaatgtcatgataga

SEQ ID NO: 77754 - DNA, 19 bp, Homo sapiens
  siRNA target sequence for CSNK2A2 (NM_001896.2,634-652).
gatagatcaccaacagaaa

SEQ ID NO: 77755 - DNA, 19 bp, Homo sapiens
  siRNA target sequence for CSNK2A2 (NM_001896.2,649-667).
gaaaaagctgcgactgata

SEQ ID NO: 77756 - DNA, 19 bp, Homo sapiens
  siRNA target sequence for CSNK2A2 (NM_001896.2,672-690).
ggggtctggcagaattcta

SEQ ID NO: 77757 - DNA, 19 bp, Homo sapiens
  siRNA target sequence for CSNK2A2 (NM_001896.2,673-691).
gggtctggcagaattctat

SEQ ID NO: 77758 - DNA, 19 bp, Homo sapiens
  siRNA target sequence for CSNK2A2 (NM_001896.2,719-737).
gtagcctcaaggtacttca

SEQ ID NO: 77759 - DNA, 19 bp, Homo sapiens
  siRNA target sequence for CSNK2A2 (NM_001896.2,808-826).
gttagcaagcatgatcttt

SEQ ID NO: 77760 - DNA, 19 bp, Homo sapiens
  siRNA target sequence for CSNK2A2 (NM_001896.2,941-959).
gatccacacttcaacgata

SEQ ID NO: 77761 - DNA, 19 bp, Homo sapiens
  siRNA target sequence for CSNK2A2 (NM_001896.2,945-963).
cacacttcaacgatatcct

SEQ ID NO: 77762 - DNA, 19 bp, Homo sapiens
  siRNA target sequence for CSNK2A2 (NM_001896.2,955-973).
cgatatcctgggacaacat

SEQ ID NO: 77763 - DNA, 19 bp, Homo sapiens
  siRNA target sequence for CSNK2A2 (NM_001896.2,956-974).
gatatcctgggacaacatt

SEQ ID NO: 77764 - DNA, 19 bp, Homo sapiens
  siRNA target sequence for CSPG4 (NM_001897.2,904-922).
cagtaccctacgcatactt

SEQ ID NO: 77765 - DNA, 19 bp, Homo sapiens
  siRNA target sequence for CSPG4 (NM_001897.2,3200-3218).
gtatcgtggccgtagatga

SEQ ID NO: 77766 - DNA, 19 bp, Homo sapiens
  siRNA target sequence for CSPG4 (NM_001897.2,3808-3826).
ccacctgcagacatcgtat

SEQ ID NO: 77767 - DNA, 19 bp, Homo sapiens
  siRNA target sequence for CSPG4 (NM_001897.2,3809-3827).
cacctgcagacatcgtatt

SEQ ID NO: 77768 - DNA, 19 bp, Homo sapiens
  siRNA target sequence for CSPG4 (NM_001897.2,4075-4093).
ccactagaggcgcaaaact

SEQ ID NO: 77769 - DNA, 19 bp, Homo sapiens
  siRNA target sequence for CSPG4 (NM_001897.2,4076-4094).
cactagaggcgcaaaactt

SEQ ID NO: 77770 - DNA, 19 bp, Homo sapiens
  siRNA target sequence for CSPG4 (NM_001897.2,4078-4096).
ctagaggcgcaaaacttca

SEQ ID NO: 77771 - DNA, 19 bp, Homo sapiens
  siRNA target sequence for CSPG4 (NM_001897.2,4316-4334).
cactgacagacagttttgt

SEQ ID NO: 77772 - DNA, 19 bp, Homo sapiens
  siRNA target sequence for CSPG4 (NM_001897.2,4417-4435).
ccccccatcctcactacaa

SEQ ID NO: 77773 - DNA, 19 bp, Homo sapiens
  siRNA target sequence for CSPG4 (NM_001897.2,4418-4436).
cccccatcctcactacaaa

SEQ ID NO: 77774 - DNA, 19 bp, Homo sapiens
  siRNA target sequence for CSPG4 (NM_001897.2,5895-5913).
gctccgggtggtttcagat

SEQ ID NO: 77775 - DNA, 19 bp, Homo sapiens
  siRNA target sequence for CSPG4 (NM_001897.2,6088-6106).
gctaggggtgtcaatgcat

SEQ ID NO: 77776 - DNA, 19 bp, Homo sapiens
  siRNA target sequence for CSPG4 (NM_001897.2,6736-6754).
ctccgaaaacgcaacaaga

SEQ ID NO: 77777 - DNA, 19 bp, Homo sapiens
  siRNA target sequence for CSPG6 (NM_005445.2,109-127).
gattatccagggttttcga

SEQ ID NO: 77778 - DNA, 19 bp, Homo sapiens
  siRNA target sequence for CSPG6 (NM_005445.2,116-134).
cagggttttcgaagttaca

SEQ ID NO: 77779 - DNA, 19 bp, Homo sapiens
  siRNA target sequence for CSPG6 (NM_005445.2,162-180).
gttcaaaacataatgtgat

SEQ ID NO: 77780 - DNA, 19 bp, Homo sapiens
  siRNA target sequence for CSPG6 (NM_005445.2,266-284).
gaacagcggttggctttat

SEQ ID NO: 77781 - DNA, 19 bp, Homo sapiens
  siRNA target sequence for CSPG6 (NM_005445.2,271-289).
gcggttggctttattgcat

SEQ ID NO: 77782 - DNA, 19 bp, Homo sapiens
  siRNA target sequence for CSPG6 (NM_005445.2,294-312).
gtactggtcctcgtgttat

SEQ ID NO: 77783 - DNA, 19 bp, Homo sapiens
  siRNA target sequence for CSPG6 (NM_005445.2,328-346).
gattatttttgataattca

SEQ ID NO: 77784 - DNA, 19 bp, Homo sapiens
  siRNA target sequence for CSPG6 (NM_005445.2,345-363).
cagacaaccggttaccaat

SEQ ID NO: 77785 - DNA, 19 bp, Homo sapiens
  siRNA target sequence for CSPG6 (NM_005445.2,349-367).
caaccggttaccaatcgat

SEQ ID NO: 77786 - DNA, 19 bp, Homo sapiens
  siRNA target sequence for CSPG6 (NM_005445.2,352-370).
ccggttaccaatcgataaa

SEQ ID NO: 77787 - DNA, 19 bp, Homo sapiens
  siRNA target sequence for CSPG6 (NM_005445.2,354-372).
ggttaccaatcgataaaga

SEQ ID NO: 77788 - DNA, 19 bp, Homo sapiens
  siRNA target sequence for CSPG6 (NM_005445.2,364-382).
cgataaagaggaagtttca

SEQ ID NO: 77789 - DNA, 19 bp, Homo sapiens
  siRNA target sequence for CSPG6 (NM_005445.2,377-395).
gtttcacttcgaagagtta

SEQ ID NO: 77790 - DNA, 19 bp, Homo sapiens
  siRNA target sequence for CSPG6 (NM_005445.2,401-419).
gccaaaaaggatcagtatt

SEQ ID NO: 77791 - DNA, 19 bp, Homo sapiens
  siRNA target sequence for CSPG6 (NM_005445.2,402-420).
ccaaaaaggatcagtattt

SEQ ID NO: 77792 - DNA, 19 bp, Homo sapiens
  siRNA target sequence for CSPG6 (NM_005445.2,430-448).
gaagatggtcacgaaaaat

SEQ ID NO: 77793 - DNA, 19 bp, Homo sapiens
  siRNA target sequence for CSPG6 (NM_005445.2,433-451).
gatggtcacgaaaaatgat

SEQ ID NO: 77794 - DNA, 19 bp, Homo sapiens
  siRNA target sequence for CSPG6 (NM_005445.2,490-508).
caatccttattatattgtt

SEQ ID NO: 77795 - DNA, 19 bp, Homo sapiens
  siRNA target sequence for CSPG6 (NM_005445.2,534-552).
caacagcaccagattctca

SEQ ID NO: 77796 - DNA, 19 bp, Homo sapiens
  siRNA target sequence for CSPG6 (NM_005445.2,555-573).
gattaaagctattaagaga

SEQ ID NO: 77797 - DNA, 19 bp, Homo sapiens
  siRNA target sequence for CSPG6 (NM_005445.2,592-610).
gtatgacgaacgaaaggaa

SEQ ID NO: 77798 - DNA, 19 bp, Homo sapiens
  siRNA target sequence for CSPG6 (NM_005445.2,611-629).
gaaagcatctccttaatga

SEQ ID NO: 77799 - DNA, 19 bp, Homo sapiens
  siRNA target sequence for CSPG6 (NM_005445.2,716-734).
gaactagctcagtatcaga

SEQ ID NO: 77800 - DNA, 19 bp, Homo sapiens
  siRNA target sequence for CSPG6 (NM_005445.2,727-745).
gtatcagaagtgggataaa

SEQ ID NO: 77801 - DNA, 19 bp, Homo sapiens
  siRNA target sequence for CSPG6 (NM_005445.2,752-770).
cgagccctggaatatacca

SEQ ID NO: 77802 - DNA, 19 bp, Homo sapiens
  siRNA target sequence for CSPG6 (NM_005445.2,753-771).
gagccctggaatataccat

SEQ ID NO: 77803 - DNA, 19 bp, Homo sapiens
  siRNA target sequence for CSPG6 (NM_005445.2,756-774).
ccctggaatataccattta

SEQ ID NO: 77804 - DNA, 19 bp, Homo sapiens
  siRNA target sequence for CSPG6 (NM_005445.2,758-776).
ctggaatataccatttaca

SEQ ID NO: 77805 - DNA, 19 bp, Homo sapiens
  siRNA target sequence for CSPG6 (NM_005445.2,760-778).
ggaatataccatttacaat

SEQ ID NO: 77806 - DNA, 19 bp, Homo sapiens
  siRNA target sequence for CSPG6 (NM_005445.2,795-813).
ctcgtgccaaacttgatga

SEQ ID NO: 77807 - DNA, 19 bp, Homo sapiens
  siRNA target sequence for CSPG6 (NM_005445.2,896-914).
gatatcgaacgccaagtta

SEQ ID NO: 77808 - DNA, 19 bp, Homo sapiens
  siRNA target sequence for CSPG6 (NM_005445.2,905-923).
cgccaagttagagaattga

SEQ ID NO: 77809 - DNA, 19 bp, Homo sapiens
  siRNA target sequence for CSPG6 (NM_005445.2,906-924).
gccaagttagagaattgaa

SEQ ID NO: 77810 - DNA, 19 bp, Homo sapiens
  siRNA target sequence for CSPG6 (NM_005445.2,961-979).
gcttagtgctgaaagacaa

SEQ ID NO: 77811 - DNA, 19 bp, Homo sapiens
  siRNA target sequence for CSPG6 (NM_005445.2,996-1014).
ggactaagttggagcttaa

SEQ ID NO: 77812 - DNA, 19 bp, Homo sapiens
  siRNA target sequence for CSPG6 (NM_005445.2,1009-1027).
gcttaaagccaaggattta

SEQ ID NO: 77813 - DNA, 19 bp, Homo sapiens
  siRNA target sequence for CSPG6 (NM_005445.2,1050-1068).
gtgaacaaaggaaacgttt

SEQ ID NO: 77814 - DNA, 19 bp, Homo sapiens
  siRNA target sequence for CSPG6 (NM_005445.2,1163-1181).
gaagaacgaggaattgcta

SEQ ID NO: 77815 - DNA, 19 bp, Homo sapiens
  siRNA target sequence for CSPG6 (NM_005445.2,1201-1219).
ggaaagaacggatctttat

SEQ ID NO: 77816 - DNA, 19 bp, Homo sapiens
  siRNA target sequence for CSPG6 (NM_005445.2,1206-1224).
gaacggatctttatgcaaa

SEQ ID NO: 77817 - DNA, 19 bp, Homo sapiens
  siRNA target sequence for CSPG6 (NM_005445.2,1229-1247).
ggtcgaggaagccagttta

SEQ ID NO: 77818 - DNA, 19 bp, Homo sapiens
  siRNA target sequence for CSPG6 (NM_005445.2,1232-1250).
cgaggaagccagtttacat

SEQ ID NO: 77819 - DNA, 19 bp, Homo sapiens
  siRNA target sequence for CSPG6 (NM_005445.2,1259-1277).
gaaagggataagtggatta

SEQ ID NO: 77820 - DNA, 19 bp, Homo sapiens
  siRNA target sequence for CSPG6 (NM_005445.2,1293-1311).
ctttagatcaggctattaa

SEQ ID NO: 77821 - DNA, 19 bp, Homo sapiens
  siRNA target sequence for CSPG6 (NM_005445.2,1298-1316).
gatcaggctattaatgaca

SEQ ID NO: 77822 - DNA, 19 bp, Homo sapiens
  siRNA target sequence for CSPG6 (NM_005445.2,1323-1341).
gacagattgctgctataca

SEQ ID NO: 77823 - DNA, 19 bp, Homo sapiens
  siRNA target sequence for CSPG6 (NM_005445.2,1402-1420).
ggaccaggatcttaatgaa

SEQ ID NO: 77824 - DNA, 19 bp, Homo sapiens
  siRNA target sequence for CSPG6 (NM_005445.2,1444-1462).
ggacagaaaatattacgaa

SEQ ID NO: 77825 - DNA, 19 bp, Homo sapiens
  siRNA target sequence for CSPG6 (NM_005445.2,1600-1618).
ggccattttaaatggaata

SEQ ID NO: 77826 - DNA, 19 bp, Homo sapiens
  siRNA target sequence for CSPG6 (NM_005445.2,1613-1631).
ggaatagacagcataaaca

SEQ ID NO: 77827 - DNA, 19 bp, Homo sapiens
  siRNA target sequence for CSPG6 (NM_005445.2,1614-1632).
gaatagacagcataaacaa

SEQ ID NO: 77828 - DNA, 19 bp, Homo sapiens
  siRNA target sequence for CSPG6 (NM_005445.2,1642-1660).
ccacttccgtcgaaaagga

SEQ ID NO: 77829 - DNA, 19 bp, Homo sapiens
  siRNA target sequence for CSPG6 (NM_005445.2,1643-1661).
cacttccgtcgaaaaggaa

SEQ ID NO: 77830 - DNA, 19 bp, Homo sapiens
  siRNA target sequence for CSPG6 (NM_005445.2,1659-1677).
gaataaaccagcatgttca

SEQ ID NO: 77831 - DNA, 19 bp, Homo sapiens
  siRNA target sequence for CSPG6 (NM_005445.2,1682-1700).
ggctatcatggtattgtaa

SEQ ID NO: 77832 - DNA, 19 bp, Homo sapiens
  siRNA target sequence for CSPG6 (NM_005445.2,1683-1701).
gctatcatggtattgtaat

SEQ ID NO: 77833 - DNA, 19 bp, Homo sapiens
  siRNA target sequence for CSPG6 (NM_005445.2,1749-1767).
ctgctggaaacaggttatt

SEQ ID NO: 77834 - DNA, 19 bp, Homo sapiens
  siRNA target sequence for CSPG6 (NM_005445.2,1793-1811).
gtcagcacgaagattttaa

SEQ ID NO: 77835 - DNA, 19 bp, Homo sapiens
  siRNA target sequence for CSPG6 (NM_005445.2,1857-1875).
ctcttaacaagttagatgt

SEQ ID NO: 77836 - DNA, 19 bp, Homo sapiens
  siRNA target sequence for CSPG6 (NM_005445.2,1899-1917).
ccaatgatgctattcctat

SEQ ID NO: 77837 - DNA, 19 bp, Homo sapiens
  siRNA target sequence for CSPG6 (NM_005445.2,1930-1948).
gaggtacaatcccagattt

SEQ ID NO: 77838 - DNA, 19 bp, Homo sapiens
  siRNA target sequence for CSPG6 (NM_005445.2,1932-1950).
ggtacaatcccagatttga

SEQ ID NO: 77839 - DNA, 19 bp, Homo sapiens
  siRNA target sequence for CSPG6 (NM_005445.2,1940-1958).
cccagatttgacaaagctt

SEQ ID NO: 77840 - DNA, 19 bp, Homo sapiens
  siRNA target sequence for CSPG6 (NM_005445.2,1991-2009).
cgtagcatggaagtttcaa

SEQ ID NO: 77841 - DNA, 19 bp, Homo sapiens
  siRNA target sequence for CSPG6 (NM_005445.2,2014-2032).
gctggcccgtgctttcact

SEQ ID NO: 77842 - DNA, 19 bp, Homo sapiens
  siRNA target sequence for CSPG6 (NM_005445.2,2015-2033).
ctggcccgtgctttcacta

SEQ ID NO: 77843 - DNA, 19 bp, Homo sapiens
  siRNA target sequence for CSPG6 (NM_005445.2,2025-2043).
ctttcactatggactgtat

SEQ ID NO: 77844 - DNA, 19 bp, Homo sapiens
  siRNA target sequence for CSPG6 (NM_005445.2,2029-2047).
cactatggactgtattact

SEQ ID NO: 77845 - DNA, 19 bp, Homo sapiens
  siRNA target sequence for CSPG6 (NM_005445.2,2031-2049).
ctatggactgtattacttt

SEQ ID NO: 77846 - DNA, 19 bp, Homo sapiens
  siRNA target sequence for CSPG6 (NM_005445.2,2068-2086).
ccatcggggtgctctaact

SEQ ID NO: 77847 - DNA, 19 bp, Homo sapiens
  siRNA target sequence for CSPG6 (NM_005445.2,2078-2096).
gctctaactgggggttatt

SEQ ID NO: 77848 - DNA, 19 bp, Homo sapiens
  siRNA target sequence for CSPG6 (NM_005445.2,2079-2097).
ctctaactgggggttatta

SEQ ID NO: 77849 - DNA, 19 bp, Homo sapiens
  siRNA target sequence for CSPG6 (NM_005445.2,2110-2128).
gtctcgacttgaattgcaa

SEQ ID NO: 77850 - DNA, 19 bp, Homo sapiens
  siRNA target sequence for CSPG6 (NM_005445.2,2183-2201).
gaaaacctgcgcagaaata

SEQ ID NO: 77851 - DNA, 19 bp, Homo sapiens
  siRNA target sequence for CSPG6 (NM_005445.2,2188-2206).
cctgcgcagaaatattgaa

SEQ ID NO: 77852 - DNA, 19 bp, Homo sapiens
  siRNA target sequence for CSPG6 (NM_005445.2,2208-2226).
ggattaataatgaaattga

SEQ ID NO: 77853 - DNA, 19 bp, Homo sapiens
  siRNA target sequence for CSPG6 (NM_005445.2,2280-2298).
catctagagatagcatatt

SEQ ID NO: 77854 - DNA, 19 bp, Homo sapiens
  siRNA target sequence for CSPG6 (NM_005445.2,2286-2304).
gagatagcatattatcaga

SEQ ID NO: 77855 - DNA, 19 bp, Homo sapiens
  siRNA target sequence for CSPG6 (NM_005445.2,2292-2310).
gcatattatcagaaatgaa

SEQ ID NO: 77856 - DNA, 19 bp, Homo sapiens
  siRNA target sequence for CSPG6 (NM_005445.2,2353-2371).
gcctaagcaacgtagctta

SEQ ID NO: 77857 - DNA, 19 bp, Homo sapiens
  siRNA target sequence for CSPG6 (NM_005445.2,2476-2494).
gagagtagatgcactgaat

SEQ ID NO: 77858 - DNA, 19 bp, Homo sapiens
  siRNA target sequence for CSPG6 (NM_005445.2,2568-2586).
ctcgagtagagacttatct

SEQ ID NO: 77859 - DNA, 19 bp, Homo sapiens
  siRNA target sequence for CSPG6 (NM_005445.2,2607-2625).
gcttggaccaagtagaaca

SEQ ID NO: 77860 - DNA, 19 bp, Homo sapiens
  siRNA target sequence for CSPG6 (NM_005445.2,2724-2742).
cacgatcagaagatttgga

SEQ ID NO: 77861 - DNA, 19 bp, Homo sapiens
  siRNA target sequence for CSPG6 (NM_005445.2,2790-2808).
gtatggagcgctggaaaaa

SEQ ID NO: 77862 - DNA, 19 bp, Homo sapiens
  siRNA target sequence for CSPG6 (NM_005445.2,2874-2892).
ggcaaggcatgctattgaa

SEQ ID NO: 77863 - DNA, 19 bp, Homo sapiens
  siRNA target sequence for CSPG6 (NM_005445.2,2876-2894).
caaggcatgctattgaaga

SEQ ID NO: 77864 - DNA, 19 bp, Homo sapiens
  siRNA target sequence for CSPG6 (NM_005445.2,2911-2929).
gaagaaaattcgagaactt

SEQ ID NO: 77865 - DNA, 19 bp, Homo sapiens
  siRNA target sequence for CSPG6 (NM_005445.2,2977-2995).
caaacagttgtttcgaaaa

SEQ ID NO: 77866 - DNA, 19 bp, Homo sapiens
  siRNA target sequence for CSPG6 (NM_005445.2,3001-3019).
gcagtgcaacacagaatta

SEQ ID NO: 77867 - DNA, 19 bp, Homo sapiens
  siRNA target sequence for CSPG6 (NM_005445.2,3002-3020).
cagtgcaacacagaattaa

SEQ ID NO: 77868 - DNA, 19 bp, Homo sapiens
  siRNA target sequence for CSPG6 (NM_005445.2,3025-3043).
gtacagccatgttaacaaa

SEQ ID NO: 77869 - DNA, 19 bp, Homo sapiens
  siRNA target sequence for CSPG6 (NM_005445.2,3046-3064).
ggctttggatcagtttgta

SEQ ID NO: 77870 - DNA, 19 bp, Homo sapiens
  siRNA target sequence for CSPG6 (NM_005445.2,3048-3066).
ctttggatcagtttgtaaa

SEQ ID NO: 77871 - DNA, 19 bp, Homo sapiens
  siRNA target sequence for CSPG6 (NM_005445.2,3073-3091).
cgagcagaaagaaaagtta

SEQ ID NO: 77872 - DNA, 19 bp, Homo sapiens
  siRNA target sequence for CSPG6 (NM_005445.2,3088-3106).
gttaataaagcgtcaagaa

SEQ ID NO: 77873 - DNA, 19 bp, Homo sapiens
  siRNA target sequence for CSPG6 (NM_005445.2,3097-3115).
gcgtcaagaagagttagat

SEQ ID NO: 77874 - DNA, 19 bp, Homo sapiens
  siRNA target sequence for CSPG6 (NM_005445.2,3098-3116).
cgtcaagaagagttagata

SEQ ID NO: 77875 - DNA, 19 bp, Homo sapiens
  siRNA target sequence for CSPG6 (NM_005445.2,3109-3127).
gttagataggggttacaaa

SEQ ID NO: 77876 - DNA, 19 bp, Homo sapiens
  siRNA target sequence for CSPG6 (NM_005445.2,3142-3160).
gatgaatgtacttgaactt

SEQ ID NO: 77877 - DNA, 19 bp, Homo sapiens
  siRNA target sequence for CSPG6 (NM_005445.2,3173-3191).
gctattcagttaactttca

SEQ ID NO: 77878 - DNA, 19 bp, Homo sapiens
  siRNA target sequence for CSPG6 (NM_005445.2,3174-3192).
ctattcagttaactttcaa

SEQ ID NO: 77879 - DNA, 19 bp, Homo sapiens
  siRNA target sequence for DAPK1 (NM_004938.1,355-373).
gaaaacgtggatgattact

SEQ ID NO: 77880 - DNA, 19 bp, Homo sapiens
  siRNA target sequence for DAPK1 (NM_004938.1,401-419).
gacagtttgcggttgtgaa

SEQ ID NO: 77881 - DNA, 19 bp, Homo sapiens
  siRNA target sequence for DAPK1 (NM_004938.1,417-435).
gaagaaatgccgtgagaaa

SEQ ID NO: 77882 - DNA, 19 bp, Homo sapiens
  siRNA target sequence for DAPK1 (NM_004938.1,448-466).
cagtatgccgccaaattca

SEQ ID NO: 77883 - DNA, 19 bp, Homo sapiens
  siRNA target sequence for DAPK1 (NM_004938.1,596-614).
cggacgtcatcctgatctt

SEQ ID NO: 77884 - DNA, 19 bp, Homo sapiens
  siRNA target sequence for DAPK1 (NM_004938.1,633-651).
cgagctgtttgacttctta

SEQ ID NO: 77885 - DNA, 19 bp, Homo sapiens
  siRNA target sequence for DAPK1 (NM_004938.1,760-778).
cctgagaacataatgcttt

SEQ ID NO: 77886 - DNA, 19 bp, Homo sapiens
  siRNA target sequence for DAPK1 (NM_004938.1,800-818).
ctcggatcaagatcattga

SEQ ID NO: 77887 - DNA, 19 bp, Homo sapiens
  siRNA target sequence for DAPK1 (NM_004938.1,802-820).
cggatcaagatcattgact

SEQ ID NO: 77888 - DNA, 19 bp, Homo sapiens
  siRNA target sequence for DAPK1 (NM_004938.1,828-846).
ggcccataaaattgacttt

SEQ ID NO: 77889 - DNA, 19 bp, Homo sapiens
  siRNA target sequence for DAPK1 (NM_004938.1,882-900).
gtttgtcgctcctgagata

SEQ ID NO: 77890 - DNA, 19 bp, Homo sapiens
  siRNA target sequence for DAPK1 (NM_004938.1,886-904).
gtcgctcctgagatagtca

SEQ ID NO: 77891 - DNA, 19 bp, Homo sapiens
  siRNA target sequence for DAPK1 (NM_004938.1,890-908).
ctcctgagatagtcaacta

SEQ ID NO: 77892 - DNA, 19 bp, Homo sapiens
  siRNA target sequence for DAPK1 (NM_004938.1,919-937).
ggtcttgaggcagatatgt

SEQ ID NO: 77893 - DNA, 19 bp, Homo sapiens
  siRNA target sequence for DAPK1 (NM_004938.1,936-954).
gtggagtatcggggtaata

SEQ ID NO: 77894 - DNA, 19 bp, Homo sapiens
  siRNA target sequence for DAPK1 (NM_004938.1,941-959).
gtatcggggtaataaccta

SEQ ID NO: 77895 - DNA, 19 bp, Homo sapiens
  siRNA target sequence for DAPK1 (NM_004938.1,947-965).
gggtaataacctatatcct

SEQ ID NO: 77896 - DNA, 19 bp, Homo sapiens
  siRNA target sequence for DAPK1 (NM_004938.1,983-1001).
catttcttggagacactaa

SEQ ID NO: 77897 - DNA, 19 bp, Homo sapiens
  siRNA target sequence for DAPK1 (NM_004938.1,996-1014).
cactaagcaagaaacgtta

SEQ ID NO: 77898 - DNA, 19 bp, Homo sapiens
  siRNA target sequence for DAPK1 (NM_004938.1,1002-1020).
gcaagaaacgttagcaaat

SEQ ID NO: 77899 - DNA, 19 bp, Homo sapiens
  siRNA target sequence for DAPK1 (NM_004938.1,1006-1024).
gaaacgttagcaaatgtat

SEQ ID NO: 77900 - DNA, 19 bp, Homo sapiens
  siRNA target sequence for DAPK1 (NM_004938.1,1025-1043).
ccgctgtcaactacgaatt

SEQ ID NO: 77901 - DNA, 19 bp, Homo sapiens
  siRNA target sequence for DAPK1 (NM_004938.1,1026-1044).
cgctgtcaactacgaattt

SEQ ID NO: 77902 - DNA, 19 bp, Homo sapiens
  siRNA target sequence for DAPK1 (NM_004938.1,1028-1046).
ctgtcaactacgaatttga

SEQ ID NO: 77903 - DNA, 19 bp, Homo sapiens
  siRNA target sequence for DAPK1 (NM_004938.1,1039-1057).
gaatttgaggatgaatact

SEQ ID NO: 77904 - DNA, 19 bp, Homo sapiens
  siRNA target sequence for DAPK1 (NM_004938.1,1045-1063).
gaggatgaatacttcagta

SEQ ID NO: 77905 - DNA, 19 bp, Homo sapiens
  siRNA target sequence for DAPK1 (NM_004938.1,1047-1065).
ggatgaatacttcagtaat

SEQ ID NO: 77906 - DNA, 19 bp, Homo sapiens
  siRNA target sequence for DAPK1 (NM_004938.1,1051-1069).
gaatacttcagtaatacca

SEQ ID NO: 77907 - DNA, 19 bp, Homo sapiens
  siRNA target sequence for DAPK1 (NM_004938.1,1068-1086).
cagtgccctagccaaagat

SEQ ID NO: 77908 - DNA, 19 bp, Homo sapiens
  siRNA target sequence for DAPK1 (NM_004938.1,1070-1088).
gtgccctagccaaagattt

SEQ ID NO: 77909 - DNA, 19 bp, Homo sapiens
  siRNA target sequence for DAPK1 (NM_004938.1,1072-1090).
gccctagccaaagatttca

SEQ ID NO: 77910 - DNA, 19 bp, Homo sapiens
  siRNA target sequence for DAPK1 (NM_004938.1,1182-1200).
ggcacttagtagaaaagca

SEQ ID NO: 77911 - DNA, 19 bp, Homo sapiens
  siRNA target sequence for DAPK1 (NM_004938.1,1324-1342).
gttgccagaagcgatgata

SEQ ID NO: 77912 - DNA, 19 bp, Homo sapiens
  siRNA target sequence for DAPK1 (NM_004938.1,1328-1346).
ccagaagcgatgatactct

SEQ ID NO: 77913 - DNA, 19 bp, Homo sapiens
  siRNA target sequence for DAPK1 (NM_004938.1,1388-1406).
ccatcaacgatgacaatgt

SEQ ID NO: 77914 - DNA, 19 bp, Homo sapiens
  siRNA target sequence for DAPK1 (NM_004938.1,1419-1437).
gcaccttctgggctcatta

SEQ ID NO: 77915 - DNA, 19 bp, Homo sapiens
  siRNA target sequence for DAPK1 (NM_004938.1,1428-1446).
gggctcattatccaactat

SEQ ID NO: 77916 - DNA, 19 bp, Homo sapiens
  siRNA target sequence for DAPK1 (NM_004938.1,1430-1448).
gctcattatccaactatga

SEQ ID NO: 77917 - DNA, 19 bp, Homo sapiens
  siRNA target sequence for DAPK1 (NM_004938.1,1431-1449).
ctcattatccaactatgat

SEQ ID NO: 77918 - DNA, 19 bp, Homo sapiens
  siRNA target sequence for DAPK1 (NM_004938.1,1439-1457).
ccaactatgatgttaacca

SEQ ID NO: 77919 - DNA, 19 bp, Homo sapiens
  siRNA target sequence for DAPK1 (NM_004938.1,1440-1458).
caactatgatgttaaccaa

SEQ ID NO: 77920 - DNA, 19 bp, Homo sapiens
  siRNA target sequence for DAPK1 (NM_004938.1,1471-1489).
gggacacctccattactca

SEQ ID NO: 77921 - DNA, 19 bp, Homo sapiens
  siRNA target sequence for DAPK1 (NM_004938.1,1472-1490).
ggacacctccattactcat

SEQ ID NO: 77922 - DNA, 19 bp, Homo sapiens
  siRNA target sequence for DAPK1 (NM_004938.1,1473-1491).
gacacctccattactcatt

SEQ ID NO: 77923 - DNA, 19 bp, Homo sapiens
  siRNA target sequence for DAPK1 (NM_004938.1,1505-1523).
ggaatattcaaatactaca

SEQ ID NO: 77924 - DNA, 19 bp, Homo sapiens
  siRNA target sequence for DAPK1 (NM_004938.1,1605-1623).
ccacgtcgataccttgaaa

SEQ ID NO: 77925 - DNA, 19 bp, Homo sapiens
  siRNA target sequence for DAPK1 (NM_004938.1,1606-1624).
cacgtcgataccttgaaat

SEQ ID NO: 77926 - DNA, 19 bp, Homo sapiens
  siRNA target sequence for DAPK1 (NM_004938.1,1645-1663).
cctttggatgtgaaagaca

SEQ ID NO: 77927 - DNA, 19 bp, Homo sapiens
  siRNA target sequence for DAPK1 (NM_004938.1,1793-1811).
ctgcttggcacggctatta

SEQ ID NO: 77928 - DNA, 19 bp, Homo sapiens
  siRNA target sequence for DAPK1 (NM_004938.1,1795-1813).
gcttggcacggctattact

SEQ ID NO: 77929 - DNA, 19 bp, Homo sapiens
  siRNA target sequence for DAPK1 (NM_004938.1,1838-1856).
ccggctgtaacgtgaacat

SEQ ID NO: 77930 - DNA, 19 bp, Homo sapiens
  siRNA target sequence for DAPK1 (NM_004938.1,1844-1862).
gtaacgtgaacatcaagaa

SEQ ID NO: 77931 - DNA, 19 bp, Homo sapiens
  siRNA target sequence for DAPK1 (NM_004938.1,1939-1957).
ggagccgaccttaatgctt

SEQ ID NO: 77932 - DNA, 19 bp, Homo sapiens
  siRNA target sequence for DAPK1 (NM_004938.1,1980-1998).
ccttcatctggctgtaaga

SEQ ID NO: 77933 - DNA, 19 bp, Homo sapiens
  siRNA target sequence for DAPK1 (NM_004938.1,2039-2057).
ggtgtttcgtcgattatca

SEQ ID NO: 77934 - DNA, 19 bp, Homo sapiens
  siRNA target sequence for DAPK1 (NM_004938.1,2040-2058).
gtgtttcgtcgattatcaa

SEQ ID NO: 77935 - DNA, 19 bp, Homo sapiens
  siRNA target sequence for DAPK1 (NM_004938.1,2042-2060).
gtttcgtcgattatcaaga

SEQ ID NO: 77936 - DNA, 19 bp, Homo sapiens
  siRNA target sequence for DAPK1 (NM_004938.1,2078-2096).
ccctccatgtggcatgtaa

SEQ ID NO: 77937 - DNA, 19 bp, Homo sapiens
  siRNA target sequence for DAPK1 (NM_004938.1,2082-2100).
ccatgtggcatgtaaagat

SEQ ID NO: 77938 - DNA, 19 bp, Homo sapiens
  siRNA target sequence for DAPK1 (NM_004938.1,2190-2208).
ggccaacaacggaatccta

SEQ ID NO: 77939 - DNA, 19 bp, Homo sapiens
  siRNA target sequence for DAPK1 (NM_004938.1,2209-2227).
gacgtggtccggtatctct

SEQ ID NO: 77940 - DNA, 19 bp, Homo sapiens
  siRNA target sequence for DAPK1 (NM_004938.1,2265-2283).
cggaaagacggcagaagat

SEQ ID NO: 77941 - DNA, 19 bp, Homo sapiens
  siRNA target sequence for DAPK1 (NM_004938.1,2267-2285).
gaaagacggcagaagatct

SEQ ID NO: 77942 - DNA, 19 bp, Homo sapiens
  siRNA target sequence for DAPK1 (NM_004938.1,2345-2363).
cgcaccgaggactcttcat

SEQ ID NO: 77943 - DNA, 19 bp, Homo sapiens
  siRNA target sequence for DAPK1 (NM_004938.1,2435-2453).
ggaaaaccacccttgtaga

SEQ ID NO: 77944 - DNA, 19 bp, Homo sapiens
  siRNA target sequence for DAPK1 (NM_004938.1,2441-2459).
ccacccttgtagaatctct

SEQ ID NO: 77945 - DNA, 19 bp, Homo sapiens
  siRNA target sequence for DAPK1 (NM_004938.1,2634-2652).
cgagccgggtcttaccaaa

SEQ ID NO: 77946 - DNA, 19 bp, Homo sapiens
  siRNA target sequence for DAPK1 (NM_004938.1,2728-2746).
gacatccagaacgcttatt

SEQ ID NO: 77947 - DNA, 19 bp, Homo sapiens
  siRNA target sequence for DAPK1 (NM_004938.1,2733-2751).
ccagaacgcttatttgaat

SEQ ID NO: 77948 - DNA, 19 bp, Homo sapiens
  siRNA target sequence for DAPK1 (NM_004938.1,2772-2790).
gtgggagttctctggaaat

SEQ ID NO: 77949 - DNA, 19 bp, Homo sapiens
  siRNA target sequence for DAPK1 (NM_004938.1,2775-2793).
ggagttctctggaaatcct

SEQ ID NO: 77950 - DNA, 19 bp, Homo sapiens
  siRNA target sequence for DAPK1 (NM_004938.1,2837-2855).
cgtcaatccatgttgttgt

SEQ ID NO: 77951 - DNA, 19 bp, Homo sapiens
  siRNA target sequence for DAPK1 (NM_004938.1,2922-2940).
gtcccttgtcccagttgaa

SEQ ID NO: 77952 - DNA, 19 bp, Homo sapiens
  siRNA target sequence for DAPK1 (NM_004938.1,3031-3049).
gctggaggcgagtttggat

SEQ ID NO: 77953 - DNA, 19 bp, Homo sapiens
  siRNA target sequence for DAPK1 (NM_004938.1,3032-3050).
ctggaggcgagtttggata

SEQ ID NO: 77954 - DNA, 19 bp, Homo sapiens
  siRNA target sequence for DAPK1 (NM_004938.1,3038-3056).
gcgagtttggatatgacaa

SEQ ID NO: 77955 - DNA, 19 bp, Homo sapiens
  siRNA target sequence for DAPK1 (NM_004938.1,3039-3057).
cgagtttggatatgacaaa

SEQ ID NO: 77956 - DNA, 19 bp, Homo sapiens
  siRNA target sequence for DAPK1 (NM_004938.1,3083-3101).
ggaacaggtttggaaatga

SEQ ID NO: 77957 - DNA, 19 bp, Homo sapiens
  siRNA target sequence for DAPK1 (NM_004938.1,3084-3102).
gaacaggtttggaaatgat

SEQ ID NO: 77958 - DNA, 19 bp, Homo sapiens
  siRNA target sequence for DAPK1 (NM_004938.1,3159-3177).
catgaaggtacttcgaaat

SEQ ID NO: 77959 - DNA, 19 bp, Homo sapiens
  siRNA target sequence for DAPK1 (NM_004938.1,3162-3180).
gaaggtacttcgaaatcat

SEQ ID NO: 77960 - DNA, 19 bp, Homo sapiens
  siRNA target sequence for DAPK1 (NM_004938.1,3389-3407).
gcacaggcgagatcaacat

SEQ ID NO: 77961 - DNA, 19 bp, Homo sapiens
  siRNA target sequence for DAPK1 (NM_004938.1,3397-3415).
gagatcaacatcatgcaaa

SEQ ID NO: 77962 - DNA, 19 bp, Homo sapiens
  siRNA target sequence for DAPK1 (NM_004938.1,3646-3664).
gtcccagccctgatcaaga

SEQ ID NO: 77963 - DNA, 19 bp, Homo sapiens
  siRNA target sequence for DAPK1 (NM_004938.1,3756-3774).
cttcccatgtggcatcttt

SEQ ID NO: 77964 - DNA, 19 bp, Homo sapiens
  siRNA target sequence for DAPK1 (NM_004938.1,4349-4367).
ctgacctcgtggcaaagta

SEQ ID NO: 77965 - DNA, 19 bp, Homo sapiens
  siRNA target sequence for DAPK1 (NM_004938.1,4591-4609).
ggcacctcttacaattcca

SEQ ID NO: 77966 - DNA, 19 bp, Homo sapiens
  siRNA target sequence for DAPK2 (NM_014326.2,160-178).
gagcacggggcttgagtat

SEQ ID NO: 77967 - DNA, 19 bp, Homo sapiens
  siRNA target sequence for DAPK2 (NM_014326.2,354-372).
gaggagagctcttcgattt

SEQ ID NO: 77968 - DNA, 19 bp, Homo sapiens
  siRNA target sequence for DAPK2 (NM_014326.2,408-426).
ccaccagcttcattaagca

SEQ ID NO: 77969 - DNA, 19 bp, Homo sapiens
  siRNA target sequence for DAPK2 (NM_014326.2,525-543).
cacacatcaagctgattga

SEQ ID NO: 77970 - DNA, 19 bp, Homo sapiens
  siRNA target sequence for DAPK2 (NM_014326.2,553-571).
ggctcacgaaatagaagat

SEQ ID NO: 77971 - DNA, 19 bp, Homo sapiens
  siRNA target sequence for DAPK2 (NM_014326.2,573-591).
gagttgaatttaagaatat

SEQ ID NO: 77972 - DNA, 19 bp, Homo sapiens
  siRNA target sequence for DAPK2 (NM_014326.2,679-697).
cacctacatcctcttaagt

SEQ ID NO: 77973 - DNA, 19 bp, Homo sapiens
  siRNA target sequence for DAPK2 (NM_014326.2,840-858).
cccggaaacggctcacaat

SEQ ID NO: 77974 - DNA, 19 bp, Homo sapiens
  siRNA target sequence for DAPK2 (NM_014326.2,844-862).
gaaacggctcacaatccaa

SEQ ID NO: 77975 - DNA, 19 bp, Homo sapiens
  siRNA target sequence for DAPK2 (NM_014326.2,969-987).
ggcggtggaagctttcctt

SEQ ID NO: 77976 - DNA, 19 bp, Homo sapiens
  siRNA target sequence for DAPK3 (NM_001348.1,118-136).
gtggaggaccattatgaga

SEQ ID NO: 77977 - DNA, 19 bp, Homo sapiens
  siRNA target sequence for DAPK3 (NM_001348.1,605-623).
ggaacgagttcaagaacat

SEQ ID NO: 77978 - DNA, 19 bp, Homo sapiens
  siRNA target sequence for DAPK3 (NM_001348.1,868-886).
gatcccaagcggagaatga

SEQ ID NO: 77979 - DNA, 19 bp, Homo sapiens
  siRNA target sequence for DCAMKL1 (NM_004734.1,258-276).
gataaggcgcagagataca

SEQ ID NO: 77980 - DNA, 19 bp, Homo sapiens
  siRNA target sequence for DCAMKL1 (NM_004734.1,400-418).
gaaacggagatcgatactt

SEQ ID NO: 77981 - DNA, 19 bp, Homo sapiens
  siRNA target sequence for DCAMKL1 (NM_004734.1,404-422).
cggagatcgatacttcaaa

SEQ ID NO: 77982 - DNA, 19 bp, Homo sapiens
  siRNA target sequence for DCAMKL1 (NM_004734.1,445-463).
cagaccggttccgatcttt

SEQ ID NO: 77983 - DNA, 19 bp, Homo sapiens
  siRNA target sequence for DCAMKL1 (NM_004734.1,490-508).
gaactctgtcggataacgt

SEQ ID NO: 77984 - DNA, 19 bp, Homo sapiens
  siRNA target sequence for DCAMKL1 (NM_004734.1,495-513).
ctgtcggataacgtgaatt

SEQ ID NO: 77985 - DNA, 19 bp, Homo sapiens
  siRNA target sequence for DCAMKL1 (NM_004734.1,585-603).
gaaggagagagttatgtat

SEQ ID NO: 77986 - DNA, 19 bp, Homo sapiens
  siRNA target sequence for DCAMKL1 (NM_004734.1,733-751).
cagaggtgcgagagaataa

SEQ ID NO: 77987 - DNA, 19 bp, Homo sapiens
  siRNA target sequence for DCAMKL1 (NM_004734.1,982-1000).
catgtggaccggagaagtt

SEQ ID NO: 77988 - DNA, 19 bp, Homo sapiens
  siRNA target sequence for DCAMKL1 (NM_004734.1,1003-1021).
gttaccaggatgatttctt

SEQ ID NO: 77989 - DNA, 19 bp, Homo sapiens
  siRNA target sequence for DCAMKL1 (NM_004734.1,1022-1040).
gctagatgaaagtgaatgt

SEQ ID NO: 77990 - DNA, 19 bp, Homo sapiens
  siRNA target sequence for DCAMKL1 (NM_004734.1,1035-1053).
gaatgtcgagtggtaaagt

SEQ ID NO: 77991 - DNA, 19 bp, Homo sapiens
  siRNA target sequence for DCAMKL1 (NM_004734.1,1064-1082).
caccaaaatagcttcatca

SEQ ID NO: 77992 - DNA, 19 bp, Homo sapiens
  siRNA target sequence for DCAMKL1 (NM_004734.1,1138-1156).
cctccaccagctcagttaa

SEQ ID NO: 77993 - DNA, 19 bp, Homo sapiens
  siRNA target sequence for DCAMKL1 (NM_004734.1,1139-1157).
ctccaccagctcagttaat

SEQ ID NO: 77994 - DNA, 19 bp, Homo sapiens
  siRNA target sequence for DCAMKL1 (NM_004734.1,1278-1296).
cttgcgtccaccaaagtct

SEQ ID NO: 77995 - DNA, 19 bp, Homo sapiens
  siRNA target sequence for DCAMKL1 (NM_004734.1,1355-1373).
gattccagctacaataaca

SEQ ID NO: 77996 - DNA, 19 bp, Homo sapiens
  siRNA target sequence for DCAMKL1 (NM_004734.1,1363-1381).
ctacaataacagaacgata

SEQ ID NO: 77997 - DNA, 19 bp, Homo sapiens
  siRNA target sequence for DCAMKL1 (NM_004734.1,1492-1510).
gaggcaaagagcacatgat

SEQ ID NO: 77998 - DNA, 19 bp, Homo sapiens
  siRNA target sequence for DCAMKL1 (NM_004734.1,1574-1592).
gatggatgtgccaactgaa

SEQ ID NO: 77999 - DNA, 19 bp, Homo sapiens
  siRNA target sequence for DCAMKL1 (NM_004734.1,1583-1601).
gccaactgaactgtatctt

SEQ ID NO: 78000 - DNA, 19 bp, Homo sapiens
  siRNA target sequence for DCAMKL1 (NM_004734.1,1599-1617).
cttgtcatggaattagtaa

SEQ ID NO: 78001 - DNA, 19 bp, Homo sapiens
  siRNA target sequence for DCAMKL1 (NM_004734.1,1628-1646).
cctttttgatgccattact

SEQ ID NO: 78002 - DNA, 19 bp, Homo sapiens
  siRNA target sequence for DCAMKL1 (NM_004734.1,1638-1656).
gccattacttccactaaca

SEQ ID NO: 78003 - DNA, 19 bp, Homo sapiens
  siRNA target sequence for DCAMKL1 (NM_004734.1,1675-1693).
ccagtgggatgctgtacaa

SEQ ID NO: 78004 - DNA, 19 bp, Homo sapiens
  siRNA target sequence for DCAMKL1 (NM_004734.1,1694-1712).
cctagccagcgccatcaaa

SEQ ID NO: 78005 - DNA, 19 bp, Homo sapiens
  siRNA target sequence for DCAMKL1 (NM_004734.1,1695-1713).
ctagccagcgccatcaaat

SEQ ID NO: 78006 - DNA, 19 bp, Homo sapiens
  siRNA target sequence for DCAMKL1 (NM_004734.1,1699-1717).
ccagcgccatcaaatacct

SEQ ID NO: 78007 - DNA, 19 bp, Homo sapiens
  siRNA target sequence for DCAMKL1 (NM_004734.1,2022-2040).
gggcaggtggactttcctt

SEQ ID NO: 78008 - DNA, 19 bp, Homo sapiens
  siRNA target sequence for DCAMKL1 (NM_004734.1,2043-2061).
ccatactgggataatgttt

SEQ ID NO: 78009 - DNA, 19 bp, Homo sapiens
  siRNA target sequence for DCAMKL1 (NM_004734.1,2093-2111).
gctgttggtcgatgtagat

SEQ ID NO: 78010 - DNA, 19 bp, Homo sapiens
  siRNA target sequence for DCAMKL1 (NM_004734.1,2103-2121).
gatgtagatcagcgatttt

SEQ ID NO: 78011 - DNA, 19 bp, Homo sapiens
  siRNA target sequence for DCAMKL1 (NM_004734.1,2114-2132).
gcgattttctgctgttcaa

SEQ ID NO: 78012 - DNA, 19 bp, Homo sapiens
  siRNA target sequence for DCAMKL1 (NM_004734.1,2226-2244).
ggccccaagccgaatagca

SEQ ID NO: 78013 - DNA, 19 bp, Homo sapiens
  siRNA target sequence for DCAMKL1 (NM_004734.1,2271-2289).
ctggaccacgggtttacca

SEQ ID NO: 78014 - DNA, 19 bp, Homo sapiens
  siRNA target sequence for DCAMKL1 (NM_004734.1,2277-2295).
cacgggtttaccatcaaga

SEQ ID NO: 78015 - DNA, 19 bp, Homo sapiens
  siRNA target sequence for DCAMKL1 (NM_004734.1,2318-2336).
ccagcaaccaggaatgtat

SEQ ID NO: 78016 - DNA, 19 bp, Homo sapiens
  siRNA target sequence for DCAMKL1 (NM_004734.1,2325-2343).
ccaggaatgtattggataa

SEQ ID NO: 78017 - DNA, 19 bp, Homo sapiens
  siRNA target sequence for DCAMKL1 (NM_004734.1,2346-2364).
ccaccgctcttgataagga

SEQ ID NO: 78018 - DNA, 19 bp, Homo sapiens
  siRNA target sequence for DCK (NM_000788.1,212-230).
ggacccgcatcaagaaaat

SEQ ID NO: 78019 - DNA, 19 bp, Homo sapiens
  siRNA target sequence for DCK (NM_000788.1,263-281).
caacatttgtgaatatcct

SEQ ID NO: 78020 - DNA, 19 bp, Homo sapiens
  siRNA target sequence for DCK (NM_000788.1,326-344).
ccagatggtgcaatgttca

SEQ ID NO: 78021 - DNA, 19 bp, Homo sapiens
  siRNA target sequence for DCK (NM_000788.1,392-410).
gtgggaatgttcttcagat

SEQ ID NO: 78022 - DNA, 19 bp, Homo sapiens
  siRNA target sequence for DCK (NM_000788.1,395-413).
ggaatgttcttcagatgat

SEQ ID NO: 78023 - DNA, 19 bp, Homo sapiens
  siRNA target sequence for DCK (NM_000788.1,427-445).
gaacgatggtcttttacct

SEQ ID NO: 78024 - DNA, 19 bp, Homo sapiens
  siRNA target sequence for DCK (NM_000788.1,437-455).
cttttaccttccaaacata

SEQ ID NO: 78025 - DNA, 19 bp, Homo sapiens
  siRNA target sequence for DCK (NM_000788.1,459-477).
ctgtctcagtcgaataaga

SEQ ID NO: 78026 - DNA, 19 bp, Homo sapiens
  siRNA target sequence for DCK (NM_000788.1,514-532).
gcagagaaacctgtattat

SEQ ID NO: 78027 - DNA, 19 bp, Homo sapiens
  siRNA target sequence for DCK (NM_000788.1,606-624).
gacagagtggacaatttat

SEQ ID NO: 78028 - DNA, 19 bp, Homo sapiens
  siRNA target sequence for DCK (NM_000788.1,608-626).
cagagtggacaatttatca

SEQ ID NO: 78029 - DNA, 19 bp, Homo sapiens
  siRNA target sequence for DCK (NM_000788.1,632-650).
ggcatgactggatgaataa

SEQ ID NO: 78030 - DNA, 19 bp, Homo sapiens
  siRNA target sequence for DCK (NM_000788.1,637-655).
gactggatgaataaccaat

SEQ ID NO: 78031 - DNA, 19 bp, Homo sapiens
  siRNA target sequence for DCK (NM_000788.1,699-717).
cactccagagacatgctta

SEQ ID NO: 78032 - DNA, 19 bp, Homo sapiens
  siRNA target sequence for DCK (NM_000788.1,706-724).
gagacatgcttacatagaa

SEQ ID NO: 78033 - DNA, 19 bp, Homo sapiens
  siRNA target sequence for DCK (NM_000788.1,708-726).
gacatgcttacatagaata

SEQ ID NO: 78034 - DNA, 19 bp, Homo sapiens
  siRNA target sequence for DCK (NM_000788.1,807-825).
cctgcataggacactgaaa

SEQ ID NO: 78035 - DNA, 19 bp, Homo sapiens
  siRNA target sequence for DCK (NM_000788.1,822-840).
gaaaaccaacttcgattat

SEQ ID NO: 78036 - DNA, 19 bp, Homo sapiens
  siRNA target sequence for DCK (NM_000788.1,844-862).
caagaggtgcctatcttaa

SEQ ID NO: 78037 - DNA, 19 bp, Homo sapiens
  siRNA target sequence for DCK (NM_000788.1,867-885).
ggatgttaatgaagacttt

SEQ ID NO: 78038 - DNA, 19 bp, Homo sapiens
  siRNA target sequence for DDR1 (NM_001954.3,383-401).
gtggagatgctgacatgaa

SEQ ID NO: 78039 - DNA, 19 bp, Homo sapiens
  siRNA target sequence for DDR1 (NM_001954.3,392-410).
ctgacatgaagggacattt

SEQ ID NO: 78040 - DNA, 19 bp, Homo sapiens
  siRNA target sequence for DDR1 (NM_001954.3,898-916).
gatggactcctgtcttaca

SEQ ID NO: 78041 - DNA, 19 bp, Homo sapiens
  siRNA target sequence for DDR1 (NM_001954.3,923-941).
ctgtggggcagacaatgta

SEQ ID NO: 78042 - DNA, 19 bp, Homo sapiens
  siRNA target sequence for DDR1 (NM_001954.3,925-943).
gtggggcagacaatgtatt

SEQ ID NO: 78043 - DNA, 19 bp, Homo sapiens
  siRNA target sequence for DDR1 (NM_001954.3,928-946).
gggcagacaatgtatttat

SEQ ID NO: 78044 - DNA, 19 bp, Homo sapiens
  siRNA target sequence for DDR1 (NM_001954.3,1039-1057).
gtggggctggatgacttta

SEQ ID NO: 78045 - DNA, 19 bp, Homo sapiens
  siRNA target sequence for DDR1 (NM_001954.3,1178-1196).
ctatgcaggtccactgtaa

SEQ ID NO: 78046 - DNA, 19 bp, Homo sapiens
  siRNA target sequence for DDR1 (NM_001954.3,1847-1865).
cctacagtggggactatat

SEQ ID NO: 78047 - DNA, 19 bp, Homo sapiens
  siRNA target sequence for DDR1 (NM_001954.3,1930-1948).
gccgaggctgacattgtta

SEQ ID NO: 78048 - DNA, 19 bp, Homo sapiens
  siRNA target sequence for DDR1 (NM_001954.3,2106-2124).
ggtcgacagccctcaagat

SEQ ID NO: 78049 - DNA, 19 bp, Homo sapiens
  siRNA target sequence for DDR1 (NM_001954.3,2117-2135).
ctcaagatctggttagtct

SEQ ID NO: 78050 - DNA, 19 bp, Homo sapiens
  siRNA target sequence for DDR1 (NM_001954.3,2122-2140).
gatctggttagtcttgatt

SEQ ID NO: 78051 - DNA, 19 bp, Homo sapiens
  siRNA target sequence for DDR1 (NM_001954.3,2304-2322).
cgaccccctctgcatgatt

SEQ ID NO: 78052 - DNA, 19 bp, Homo sapiens
  siRNA target sequence for DDR1 (NM_001954.3,2305-2323).
gaccccctctgcatgatta

SEQ ID NO: 78053 - DNA, 19 bp, Homo sapiens
  siRNA target sequence for DDR1 (NM_001954.3,2309-2327).
ccctctgcatgattactga

SEQ ID NO: 78054 - DNA, 19 bp, Homo sapiens
  siRNA target sequence for DDR1 (NM_001954.3,2493-2511).
ggccacactcaactttgta

SEQ ID NO: 78055 - DNA, 19 bp, Homo sapiens
  siRNA target sequence for DDR1 (NM_001954.3,2535-2553).
ctgcctagttggggaaaat

SEQ ID NO: 78056 - DNA, 19 bp, Homo sapiens
  siRNA target sequence for DDR1 (NM_001954.3,2849-2867).
gcccgcagggcctatatga

SEQ ID NO: 78057 - DNA, 19 bp, Homo sapiens
  siRNA target sequence for DDR2 (NM_006182.1,423-441).
caggttaatccagctatat

SEQ ID NO: 78058 - DNA, 19 bp, Homo sapiens
  siRNA target sequence for DDR2 (NM_006182.1,697-715).
cccccatgtacaagatcaa

SEQ ID NO: 78059 - DNA, 19 bp, Homo sapiens
  siRNA target sequence for DDR2 (NM_006182.1,699-717).
cccatgtacaagatcaatt

SEQ ID NO: 78060 - DNA, 19 bp, Homo sapiens
  siRNA target sequence for DDR2 (NM_006182.1,770-788).
ggtgctggatggaaatagt

SEQ ID NO: 78061 - DNA, 19 bp, Homo sapiens
  siRNA target sequence for DDR2 (NM_006182.1,771-789).
gtgctggatggaaatagta

SEQ ID NO: 78062 - DNA, 19 bp, Homo sapiens
  siRNA target sequence for DDR2 (NM_006182.1,787-805).
gtaacccctatgacatttt

SEQ ID NO: 78063 - DNA, 19 bp, Homo sapiens
  siRNA target sequence for DDR2 (NM_006182.1,791-809).
cccctatgacattttccta

SEQ ID NO: 78064 - DNA, 19 bp, Homo sapiens
  siRNA target sequence for DDR2 (NM_006182.1,824-842).
gcccattgtagccagattt

SEQ ID NO: 78065 - DNA, 19 bp, Homo sapiens
  siRNA target sequence for DDR2 (NM_006182.1,826-844).
ccattgtagccagatttgt

SEQ ID NO: 78066 - DNA, 19 bp, Homo sapiens
  siRNA target sequence for DDR2 (NM_006182.1,836-854).
cagatttgtccggttcatt

SEQ ID NO: 78067 - DNA, 19 bp, Homo sapiens
  siRNA target sequence for DDR2 (NM_006182.1,862-880).
ccgaccactccatgaatgt

SEQ ID NO: 78068 - DNA, 19 bp, Homo sapiens
  siRNA target sequence for DDR2 (NM_006182.1,864-882).
gaccactccatgaatgtgt

SEQ ID NO: 78069 - DNA, 19 bp, Homo sapiens
  siRNA target sequence for DDR2 (NM_006182.1,883-901).
gtatgagagtggagcttta

SEQ ID NO: 78070 - DNA, 19 bp, Homo sapiens
  siRNA target sequence for DDR2 (NM_006182.1,918-936).
gatggcttggtgtcttaca

SEQ ID NO: 78071 - DNA, 19 bp, Homo sapiens
  siRNA target sequence for DDR2 (NM_006182.1,946-964).
ctgggcagcagtttgtact

SEQ ID NO: 78072 - DNA, 19 bp, Homo sapiens
  siRNA target sequence for DDR2 (NM_006182.1,966-984).
cctggaggttccatcattt

SEQ ID NO: 78073 - DNA, 19 bp, Homo sapiens
  siRNA target sequence for DDR2 (NM_006182.1,967-985).
ctggaggttccatcattta

SEQ ID NO: 78074 - DNA, 19 bp, Homo sapiens
  siRNA target sequence for DDR2 (NM_006182.1,970-988).
gaggttccatcatttatct

SEQ ID NO: 78075 - DNA, 19 bp, Homo sapiens
  siRNA target sequence for DDR2 (NM_006182.1,980-998).
catttatctgaatgattct

SEQ ID NO: 78076 - DNA, 19 bp, Homo sapiens
  siRNA target sequence for DDR2 (NM_006182.1,1032-1050).
gaagggctaggccaattga

SEQ ID NO: 78077 - DNA, 19 bp, Homo sapiens
  siRNA target sequence for DDR2 (NM_006182.1,1144-1162).
ccaccaatggctacattga

SEQ ID NO: 78078 - DNA, 19 bp, Homo sapiens
  siRNA target sequence for DDR2 (NM_006182.1,1153-1171).
gctacattgagatcatgtt

SEQ ID NO: 78079 - DNA, 19 bp, Homo sapiens
  siRNA target sequence for DDR2 (NM_006182.1,1154-1172).
ctacattgagatcatgttt

SEQ ID NO: 78080 - DNA, 19 bp, Homo sapiens
  siRNA target sequence for DDR2 (NM_006182.1,1179-1197).
gaccgcatcaggaatttca

SEQ ID NO: 78081 - DNA, 19 bp, Homo sapiens
  siRNA target sequence for DDR2 (NM_006182.1,1181-1199).
ccgcatcaggaatttcact

SEQ ID NO: 78082 - DNA, 19 bp, Homo sapiens
  siRNA target sequence for DDR2 (NM_006182.1,1182-1200).
cgcatcaggaatttcacta

SEQ ID NO: 78083 - DNA, 19 bp, Homo sapiens
  siRNA target sequence for DDR2 (NM_006182.1,1387-1405).
ccatcaagtgtcaatacca

SEQ ID NO: 78084 - DNA, 19 bp, Homo sapiens
  siRNA target sequence for DDR2 (NM_006182.1,1391-1409).
caagtgtcaataccatttt

SEQ ID NO: 78085 - DNA, 19 bp, Homo sapiens
  siRNA target sequence for DDR2 (NM_006182.1,1394-1412).
gtgtcaataccattttgca

SEQ ID NO: 78086 - DNA, 19 bp, Homo sapiens
  siRNA target sequence for DDR2 (NM_006182.1,1452-1470).
gatgctgcaatgtacaaca

SEQ ID NO: 78087 - DNA, 19 bp, Homo sapiens
  siRNA target sequence for DDR2 (NM_006182.1,1455-1473).
gctgcaatgtacaacaact

SEQ ID NO: 78088 - DNA, 19 bp, Homo sapiens
  siRNA target sequence for DDR2 (NM_006182.1,1499-1517).
ggcacccacaacctatgat

SEQ ID NO: 78089 - DNA, 19 bp, Homo sapiens
  siRNA target sequence for DDR2 (NM_006182.1,1510-1528).
cctatgatccaatgcttaa

SEQ ID NO: 78090 - DNA, 19 bp, Homo sapiens
  siRNA target sequence for DDR2 (NM_006182.1,1519-1537).
caatgcttaaagttgatga

SEQ ID NO: 78091 - DNA, 19 bp, Homo sapiens
  siRNA target sequence for DDR2 (NM_006182.1,1654-1672).
ggaggatgctggatgatga

SEQ ID NO: 78092 - DNA, 19 bp, Homo sapiens
  siRNA target sequence for DDR2 (NM_006182.1,1655-1673).
gaggatgctggatgatgaa

SEQ ID NO: 78093 - DNA, 19 bp, Homo sapiens
  siRNA target sequence for DDR2 (NM_006182.1,1661-1679).
gctggatgatgaaatgaca

SEQ ID NO: 78094 - DNA, 19 bp, Homo sapiens
  siRNA target sequence for DDR2 (NM_006182.1,1686-1704).
ctttccctgccaagtgatt

SEQ ID NO: 78095 - DNA, 19 bp, Homo sapiens
  siRNA target sequence for DDR2 (NM_006182.1,1701-1719).
gattctagcatgttcaaca

SEQ ID NO: 78096 - DNA, 19 bp, Homo sapiens
  siRNA target sequence for DDR2 (NM_006182.1,1705-1723).
ctagcatgttcaacaataa

SEQ ID NO: 78097 - DNA, 19 bp, Homo sapiens
  siRNA target sequence for DDR2 (NM_006182.1,1751-1769).
gtccaactcgacttacgat

SEQ ID NO: 78098 - DNA, 19 bp, Homo sapiens
  siRNA target sequence for DDR2 (NM_006182.1,1760-1778).
gacttacgatcgcatcttt

SEQ ID NO: 78099 - DNA, 19 bp, Homo sapiens
  siRNA target sequence for DDR2 (NM_006182.1,1804-1822).
catccaggctgatacgaaa

SEQ ID NO: 78100 - DNA, 19 bp, Homo sapiens
  siRNA target sequence for DDR2 (NM_006182.1,1807-1825).
ccaggctgatacgaaaact

SEQ ID NO: 78101 - DNA, 19 bp, Homo sapiens
  siRNA target sequence for DDR2 (NM_006182.1,1858-1876).
gctgcagcggtgttgtgaa

SEQ ID NO: 78102 - DNA, 19 bp, Homo sapiens
  siRNA target sequence for DDR2 (NM_006182.1,1913-1931).
ctatgcagaggctgacata

SEQ ID NO: 78103 - DNA, 19 bp, Homo sapiens
  siRNA target sequence for DDR2 (NM_006182.1,1918-1936).
cagaggctgacatagtgaa

SEQ ID NO: 78104 - DNA, 19 bp, Homo sapiens
  siRNA target sequence for DDR2 (NM_006182.1,2100-2118).
gagggaatggaaaaattca

SEQ ID NO: 78105 - DNA, 19 bp, Homo sapiens
  siRNA target sequence for DDR2 (NM_006182.1,2295-2313).
gaccctctctgtatgatca

SEQ ID NO: 78106 - DNA, 19 bp, Homo sapiens
  siRNA target sequence for DDR2 (NM_006182.1,2355-2373).
cgccacgagccccctaatt

SEQ ID NO: 78107 - DNA, 19 bp, Homo sapiens
  siRNA target sequence for DDR2 (NM_006182.1,2357-2375).
ccacgagccccctaattct

SEQ ID NO: 78108 - DNA, 19 bp, Homo sapiens
  siRNA target sequence for DDR2 (NM_006182.1,2358-2376).
cacgagccccctaattctt

SEQ ID NO: 78109 - DNA, 19 bp, Homo sapiens
  siRNA target sequence for DDR2 (NM_006182.1,2388-2406).
gtacgcactgtcagttaca

SEQ ID NO: 78110 - DNA, 19 bp, Homo sapiens
  siRNA target sequence for DDR2 (NM_006182.1,2601-2619).
cctatccgctggatgtctt

SEQ ID NO: 78111 - DNA, 19 bp, Homo sapiens
  siRNA target sequence for DDR2 (NM_006182.1,2812-2830).
gtcctgactctgtgtataa

SEQ ID NO: 78112 - DNA, 19 bp, Homo sapiens
  siRNA target sequence for DDR2 (NM_006182.1,2815-2833).
ctgactctgtgtataagct

SEQ ID NO: 78113 - DNA, 19 bp, Homo sapiens
  siRNA target sequence for DDR2 (NM_006182.1,2864-2882).
gaaccgtccctcattccaa

SEQ ID NO: 78114 - DNA, 19 bp, Homo sapiens
  siRNA target sequence for DDR2 (NM_006182.1,2868-2886).
cgtccctcattccaagaaa

SEQ ID NO: 78115 - DNA, 19 bp, Homo sapiens
  siRNA target sequence for DDX32 (NM_018180.2,621-639).
gatggattgccatattcat

SEQ ID NO: 78116 - DNA, 19 bp, Homo sapiens
  siRNA target sequence for DDX32 (NM_018180.2,629-647).
gccatattcatcacgttat

SEQ ID NO: 78117 - DNA, 19 bp, Homo sapiens
  siRNA target sequence for DDX32 (NM_018180.2,631-649).
catattcatcacgttatta

SEQ ID NO: 78118 - DNA, 19 bp, Homo sapiens
  siRNA target sequence for DDX32 (NM_018180.2,784-802).
ggtgtgctgaatattgtct

SEQ ID NO: 78119 - DNA, 19 bp, Homo sapiens
  siRNA target sequence for DDX32 (NM_018180.2,873-891).
ctgcgggtggcggatgaaa

SEQ ID NO: 78120 - DNA, 19 bp, Homo sapiens
  siRNA target sequence for DDX32 (NM_018180.2,882-900).
gcggatgaaatggatgtta

SEQ ID NO: 78121 - DNA, 19 bp, Homo sapiens
  siRNA target sequence for DDX32 (NM_018180.2,962-980).
cctgaggtattgtactgat

SEQ ID NO: 78122 - DNA, 19 bp, Homo sapiens
  siRNA target sequence for DDX32 (NM_018180.2,965-983).
gaggtattgtactgatgat

SEQ ID NO: 78123 - DNA, 19 bp, Homo sapiens
  siRNA target sequence for DDX32 (NM_018180.2,967-985).
ggtattgtactgatgatat

SEQ ID NO: 78124 - DNA, 19 bp, Homo sapiens
  siRNA target sequence for DDX32 (NM_018180.2,1024-1042).
gctatggggtcatcatctt

SEQ ID NO: 78125 - DNA, 19 bp, Homo sapiens
  siRNA target sequence for DDX32 (NM_018180.2,1025-1043).
ctatggggtcatcatctta

SEQ ID NO: 78126 - DNA, 19 bp, Homo sapiens
  siRNA target sequence for DDX32 (NM_018180.2,1031-1049).
ggtcatcatcttagatgat

SEQ ID NO: 78127 - DNA, 19 bp, Homo sapiens
  siRNA target sequence for DDX32 (NM_018180.2,1063-1081).
gcattgcaactgatgtgtt

SEQ ID NO: 78128 - DNA, 19 bp, Homo sapiens
  siRNA target sequence for DDX32 (NM_018180.2,1077-1095).
gtgttacttggacttctta

SEQ ID NO: 78129 - DNA, 19 bp, Homo sapiens
  siRNA target sequence for DDX32 (NM_018180.2,1117-1135).
cagaactgaagctcataat

SEQ ID NO: 78130 - DNA, 19 bp, Homo sapiens
  siRNA target sequence for DDX32 (NM_018180.2,1119-1137).
gaactgaagctcataatta

SEQ ID NO: 78131 - DNA, 19 bp, Homo sapiens
  siRNA target sequence for DDX32 (NM_018180.2,1149-1167).
cacctgatcagcaaactca

SEQ ID NO: 78132 - DNA, 19 bp, Homo sapiens
  siRNA target sequence for DDX32 (NM_018180.2,1157-1175).
cagcaaactcaattcttat

SEQ ID NO: 78133 - DNA, 19 bp, Homo sapiens
  siRNA target sequence for DDX32 (NM_018180.2,1160-1178).
caaactcaattcttattat

SEQ ID NO: 78134 - DNA, 19 bp, Homo sapiens
  siRNA target sequence for DDX32 (NM_018180.2,1218-1236).
gtggaggttgtgtacctta

SEQ ID NO: 78135 - DNA, 19 bp, Homo sapiens
  siRNA target sequence for DDX32 (NM_018180.2,1239-1257).
gaggctcaaaaggattctt

SEQ ID NO: 78136 - DNA, 19 bp, Homo sapiens
  siRNA target sequence for DDX32 (NM_018180.2,1241-1259).
ggctcaaaaggattctttt

SEQ ID NO: 78137 - DNA, 19 bp, Homo sapiens
  siRNA target sequence for DDX32 (NM_018180.2,1264-1282).
ctattttacgccttatctt

SEQ ID NO: 78138 - DNA, 19 bp, Homo sapiens
  siRNA target sequence for DDX32 (NM_018180.2,1410-1428).
gttgttcctttgtatccaa

SEQ ID NO: 78139 - DNA, 19 bp, Homo sapiens
  siRNA target sequence for DDX32 (NM_018180.2,1448-1466).
caagccactcgatgaaaca

SEQ ID NO: 78140 - DNA, 19 bp, Homo sapiens
  siRNA target sequence for DDX32 (NM_018180.2,1451-1469).
gccactcgatgaaacagaa

SEQ ID NO: 78141 - DNA, 19 bp, Homo sapiens
  siRNA target sequence for DDX32 (NM_018180.2,1537-1555).
gcaactcagtcagatttgt

SEQ ID NO: 78142 - DNA, 19 bp, Homo sapiens
  siRNA target sequence for DDX32 (NM_018180.2,1543-1561).
cagtcagatttgttatcga

SEQ ID NO: 78143 - DNA, 19 bp, Homo sapiens
  siRNA target sequence for DDX32 (NM_018180.2,1583-1601).
ggtgtacaacccgagaata

SEQ ID NO: 78144 - DNA, 19 bp, Homo sapiens
  siRNA target sequence for DDX32 (NM_018180.2,1584-1602).
gtgtacaacccgagaataa

SEQ ID NO: 78145 - DNA, 19 bp, Homo sapiens
  siRNA target sequence for DDX32 (NM_018180.2,1586-1604).
gtacaacccgagaataaga

SEQ ID NO: 78146 - DNA, 19 bp, Homo sapiens
  siRNA target sequence for DDX32 (NM_018180.2,1649-1667).
gatacgcaagcagattctt

SEQ ID NO: 78147 - DNA, 19 bp, Homo sapiens
  siRNA target sequence for DDX32 (NM_018180.2,1835-1853).
cagaccagcaccagaaagt

SEQ ID NO: 78148 - DNA, 19 bp, Homo sapiens
  siRNA target sequence for DDX32 (NM_018180.2,1862-1880).
ggcattggaagacttagat

SEQ ID NO: 78149 - DNA, 19 bp, Homo sapiens
  siRNA target sequence for DDX32 (NM_018180.2,1863-1881).
gcattggaagacttagatt

SEQ ID NO: 78150 - DNA, 19 bp, Homo sapiens
  siRNA target sequence for DDX32 (NM_018180.2,1954-1972).
cacaactctcgaagtctat

SEQ ID NO: 78151 - DNA, 19 bp, Homo sapiens
  siRNA target sequence for DDX32 (NM_018180.2,1956-1974).
caactctcgaagtctatct

SEQ ID NO: 78152 - DNA, 19 bp, Homo sapiens
  siRNA target sequence for DDX32 (NM_018180.2,1973-1991).
cttagcgtcctgtgaattt

SEQ ID NO: 78153 - DNA, 19 bp, Homo sapiens
  siRNA target sequence for DDX32 (NM_018180.2,1998-2016).
gtagatgaagtgctaacaa

SEQ ID NO: 78154 - DNA, 19 bp, Homo sapiens
  siRNA target sequence for DDX32 (NM_018180.2,2070-2088).
gaagaggctgccttgactt

SEQ ID NO: 78155 - DNA, 19 bp, Homo sapiens
  siRNA target sequence for DDX32 (NM_018180.2,2138-2156).
catttacaaggcttaccaa

SEQ ID NO: 78156 - DNA, 19 bp, Homo sapiens
  siRNA target sequence for DDX32 (NM_018180.2,2154-2172).
caagacacaactctgaatt

SEQ ID NO: 78157 - DNA, 19 bp, Homo sapiens
  siRNA target sequence for DDX32 (NM_018180.2,2179-2197).
gtgagtactgtgtggaaaa

SEQ ID NO: 78158 - DNA, 19 bp, Homo sapiens
  siRNA target sequence for DDX32 (NM_018180.2,2181-2199).
gagtactgtgtggaaaagt

SEQ ID NO: 78159 - DNA, 19 bp, Homo sapiens
  siRNA target sequence for DDX32 (NM_018180.2,2253-2271).
cgagctgaactcttagaaa

SEQ ID NO: 78160 - DNA, 19 bp, Homo sapiens
  siRNA target sequence for DDX32 (NM_018180.2,2349-2367).
cttctgtccggttacttta

SEQ ID NO: 78161 - DNA, 19 bp, Homo sapiens
  siRNA target sequence for DDX32 (NM_018180.2,2388-2406).
gatggatcaggtaactact

SEQ ID NO: 78162 - DNA, 19 bp, Homo sapiens
  siRNA target sequence for DDX32 (NM_018180.2,2391-2409).
ggatcaggtaactacttaa

SEQ ID NO: 78163 - DNA, 19 bp, Homo sapiens
  siRNA target sequence for DDX32 (NM_018180.2,2445-2463).
ctgtctggttactcaatca

SEQ ID NO: 78164 - DNA, 19 bp, Homo sapiens
  siRNA target sequence for DDX32 (NM_018180.2,2503-2521).
gcatttctgagaacaacta

SEQ ID NO: 78165 - DNA, 19 bp, Homo sapiens
  siRNA target sequence for DDX32 (NM_018180.2,2538-2556).
gaaatctctcctgaactat

SEQ ID NO: 78166 - DNA, 19 bp, Homo sapiens
  siRNA target sequence for DDX32 (NM_018180.2,2565-2583).
ctggtaccacaatactatt

SEQ ID NO: 78167 - DNA, 19 bp, Homo sapiens
  siRNA target sequence for DDX32 (NM_018180.2,2592-2610).
ctgcctcctagtgaaagta

SEQ ID NO: 78168 - DNA, 19 bp, Homo sapiens
  siRNA target sequence for DDX32 (NM_018180.2,2602-2620).
gtgaaagtaaggacattct

SEQ ID NO: 78169 - DNA, 19 bp, Homo sapiens
  siRNA target sequence for DDX32 (NM_018180.2,2646-2664).
cctgtgtcaacaatgaata

SEQ ID NO: 78170 - DNA, 19 bp, Homo sapiens
  siRNA target sequence for DGKE (NM_003647.1,140-158).
cggacgggcacctgatctt

SEQ ID NO: 78171 - DNA, 19 bp, Homo sapiens
  siRNA target sequence for DGKE (NM_003647.1,142-160).
gacgggcacctgatcttgt

SEQ ID NO: 78172 - DNA, 19 bp, Homo sapiens
  siRNA target sequence for DGKE (NM_003647.1,178-196).
ctgctgccggtgttcatca

SEQ ID NO: 78173 - DNA, 19 bp, Homo sapiens
  siRNA target sequence for DGKE (NM_003647.1,414-432).
ggagattatgctcaagaat

SEQ ID NO: 78174 - DNA, 19 bp, Homo sapiens
  siRNA target sequence for DGKE (NM_003647.1,484-502).
cccctgtgcagttactgta

SEQ ID NO: 78175 - DNA, 19 bp, Homo sapiens
  siRNA target sequence for DGKE (NM_003647.1,485-503).
ccctgtgcagttactgtat

SEQ ID NO: 78176 - DNA, 19 bp, Homo sapiens
  siRNA target sequence for DGKE (NM_003647.1,489-507).
gtgcagttactgtatggtt

SEQ ID NO: 78177 - DNA, 19 bp, Homo sapiens
  siRNA target sequence for DGKE (NM_003647.1,494-512).
gttactgtatggtttgcaa

SEQ ID NO: 78178 - DNA, 19 bp, Homo sapiens
  siRNA target sequence for DGKE (NM_003647.1,523-541).
ggctgtcaacccaagcttt

SEQ ID NO: 78179 - DNA, 19 bp, Homo sapiens
  siRNA target sequence for DGKE (NM_003647.1,555-573).
catttggtgccagaaaaca

SEQ ID NO: 78180 - DNA, 19 bp, Homo sapiens
  siRNA target sequence for DGKE (NM_003647.1,626-644).
gagaattcaaaaacctaat

SEQ ID NO: 78181 - DNA, 19 bp, Homo sapiens
  siRNA target sequence for DGKE (NM_003647.1,628-646).
gaattcaaaaacctaatca

SEQ ID NO: 78182 - DNA, 19 bp, Homo sapiens
  siRNA target sequence for DGKE (NM_003647.1,676-694).
cagatgcgtaaagacaaaa

SEQ ID NO: 78183 - DNA, 19 bp, Homo sapiens
  siRNA target sequence for DGKE (NM_003647.1,732-750).
gcagtggaccccattaata

SEQ ID NO: 78184 - DNA, 19 bp, Homo sapiens
  siRNA target sequence for DGKE (NM_003647.1,733-751).
cagtggaccccattaataa

SEQ ID NO: 78185 - DNA, 19 bp, Homo sapiens
  siRNA target sequence for DGKE (NM_003647.1,737-755).
ggaccccattaataatcct

SEQ ID NO: 78186 - DNA, 19 bp, Homo sapiens
  siRNA target sequence for DGKE (NM_003647.1,762-780).
ctctcgtagtggaactaat

SEQ ID NO: 78187 - DNA, 19 bp, Homo sapiens
  siRNA target sequence for DGKE (NM_003647.1,764-782).
ctcgtagtggaactaatat

SEQ ID NO: 78188 - DNA, 19 bp, Homo sapiens
  siRNA target sequence for DGKE (NM_003647.1,793-811).
ctgttgggagaatttagga

SEQ ID NO: 78189 - DNA, 19 bp, Homo sapiens
  siRNA target sequence for DGKE (NM_003647.1,799-817).
ggagaatttaggatcttgt

SEQ ID NO: 78190 - DNA, 19 bp, Homo sapiens
  siRNA target sequence for DGKE (NM_003647.1,802-820).
gaatttaggatcttgttga

SEQ ID NO: 78191 - DNA, 19 bp, Homo sapiens
  siRNA target sequence for DGKE (NM_003647.1,824-842).
cagtccaggtttttgatgt

SEQ ID NO: 78192 - DNA, 19 bp, Homo sapiens
  siRNA target sequence for DGKE (NM_003647.1,845-863).
ctaaaactcctcctatcaa

SEQ ID NO: 78193 - DNA, 19 bp, Homo sapiens
  siRNA target sequence for DGKE (NM_003647.1,857-875).
ctatcaaagccctacaact

SEQ ID NO: 78194 - DNA, 19 bp, Homo sapiens
  siRNA target sequence for DGKE (NM_003647.1,953-971).
cagttgatgacatgaagat

SEQ ID NO: 78195 - DNA, 19 bp, Homo sapiens
  siRNA target sequence for DGKE (NM_003647.1,1018-1036).
ggaacaggcaacgatctat

SEQ ID NO: 78196 - DNA, 19 bp, Homo sapiens
  siRNA target sequence for DGKE (NM_003647.1,1022-1040).
caggcaacgatctatccaa

SEQ ID NO: 78197 - DNA, 19 bp, Homo sapiens
  siRNA target sequence for DGKE (NM_003647.1,1024-1042).
ggcaacgatctatccaata

SEQ ID NO: 78198 - DNA, 19 bp, Homo sapiens
  siRNA target sequence for DGKE (NM_003647.1,1047-1065).
gggttggggtacaggttat

SEQ ID NO: 78199 - DNA, 19 bp, Homo sapiens
  siRNA target sequence for DGKE (NM_003647.1,1085-1103).
cgcaggttttgcgaaatgt

SEQ ID NO: 78200 - DNA, 19 bp, Homo sapiens
  siRNA target sequence for DGKE (NM_003647.1,1086-1104).
gcaggttttgcgaaatgta

SEQ ID NO: 78201 - DNA, 19 bp, Homo sapiens
  siRNA target sequence for DGKE (NM_003647.1,1087-1105).
caggttttgcgaaatgtaa

SEQ ID NO: 78202 - DNA, 19 bp, Homo sapiens
  siRNA target sequence for DGKE (NM_003647.1,1132-1150).
cgatggaaagttcaagtaa

SEQ ID NO: 78203 - DNA, 19 bp, Homo sapiens
  siRNA target sequence for DGKE (NM_003647.1,1151-1169).
caaataaaggatactacaa

SEQ ID NO: 78204 - DNA, 19 bp, Homo sapiens
  siRNA target sequence for DGKE (NM_003647.1,1159-1177).
ggatactacaacttaagaa

SEQ ID NO: 78205 - DNA, 19 bp, Homo sapiens
  siRNA target sequence for DGKE (NM_003647.1,1260-1278).
gaaggcaccatctctgttt

SEQ ID NO: 78206 - DNA, 19 bp, Homo sapiens
  siRNA target sequence for DGKE (NM_003647.1,1291-1309).
cttaataaggcggtttact

SEQ ID NO: 78207 - DNA, 19 bp, Homo sapiens
  siRNA target sequence for DGKE (NM_003647.1,1299-1317).
ggcggtttacttattctat

SEQ ID NO: 78208 - DNA, 19 bp, Homo sapiens
  siRNA target sequence for DGKE (NM_003647.1,1314-1332).
ctatggaaccaaagattgt

SEQ ID NO: 78209 - DNA, 19 bp, Homo sapiens
  siRNA target sequence for DGKE (NM_003647.1,1327-1345).
gattgtttagtgcaagaat

SEQ ID NO: 78210 - DNA, 19 bp, Homo sapiens
  siRNA target sequence for DGKE (NM_003647.1,1406-1424).
gcttggaaggtattatagt

SEQ ID NO: 78211 - DNA, 19 bp, Homo sapiens
  siRNA target sequence for DGKE (NM_003647.1,1518-1536).
ggaagtcgttggagtatat

SEQ ID NO: 78212 - DNA, 19 bp, Homo sapiens
  siRNA target sequence for DGKE (NM_003647.1,1550-1568).
gtgctcagattcaagtaaa

SEQ ID NO: 78213 - DNA, 19 bp, Homo sapiens
  siRNA target sequence for DGKE (NM_003647.1,1570-1588).
ctggctaatccttttcgaa

SEQ ID NO: 78214 - DNA, 19 bp, Homo sapiens
  siRNA target sequence for DGKE (NM_003647.1,1572-1590).
ggctaatccttttcgaata

SEQ ID NO: 78215 - DNA, 19 bp, Homo sapiens
  siRNA target sequence for DGKE (NM_003647.1,1600-1618).
catacagtgaggctgattt

SEQ ID NO: 78216 - DNA, 19 bp, Homo sapiens
  siRNA target sequence for DGKE (NM_003647.1,1691-1709).
ctcacaagacacatgcaat

SEQ ID NO: 78217 - DNA, 19 bp, Homo sapiens
  siRNA target sequence for DGKE (NM_003647.1,1698-1716).
gacacatgcaatgatgtta

SEQ ID NO: 78218 - DNA, 19 bp, Homo sapiens
  siRNA target sequence for DGKE (NM_003647.1,1700-1718).
cacatgcaatgatgttata

SEQ ID NO: 78219 - DNA, 19 bp, Homo sapiens
  siRNA target sequence for DGKE (NM_003647.1,1722-1740).
ctctggagaacaaacagat

SEQ ID NO: 78220 - DNA, 19 bp, Homo sapiens
  siRNA target sequence for DGKE (NM_003647.1,1741-1759).
gatgacatctctagtactt

SEQ ID NO: 78221 - DNA, 19 bp, Homo sapiens
  siRNA target sequence for DGKE (NM_003647.1,1751-1769).
ctagtacttcggatcaaga

SEQ ID NO: 78222 - DNA, 19 bp, Homo sapiens
  siRNA target sequence for DGKE (NM_003647.1,1757-1775).
cttcggatcaagaagatat

SEQ ID NO: 78223 - DNA, 19 bp, Homo sapiens
  siRNA target sequence for DGKE (NM_003647.1,1771-1789).
gatataaaggcgactgaat

SEQ ID NO: 78224 - DNA, 19 bp, Homo sapiens
  siRNA target sequence for DGKZ (NM_003646.1,355-373).
gagcgagtcagcgacatat

SEQ ID NO: 78225 - DNA, 19 bp, Homo sapiens
  siRNA target sequence for DGKZ (NM_003646.1,477-495).
gcgcagcctgcaagattgt

SEQ ID NO: 78226 - DNA, 19 bp, Homo sapiens
  siRNA target sequence for DGKZ (NM_003646.1,547-565).
gccgtccttccgtgaatca

SEQ ID NO: 78227 - DNA, 19 bp, Homo sapiens
  siRNA target sequence for DGKZ (NM_003646.1,580-598).
ccgcgagccaacctttgta

SEQ ID NO: 78228 - DNA, 19 bp, Homo sapiens
  siRNA target sequence for DGKZ (NM_003646.1,834-852).
ggaggccccagaatactct

SEQ ID NO: 78229 - DNA, 19 bp, Homo sapiens
  siRNA target sequence for DGKZ (NM_003646.1,838-856).
gccccagaatactctgaaa

SEQ ID NO: 78230 - DNA, 19 bp, Homo sapiens
  siRNA target sequence for DGKZ (NM_003646.1,923-941).
cgctggagacccttcatca

SEQ ID NO: 78231 - DNA, 19 bp, Homo sapiens
  siRNA target sequence for DGKZ (NM_003646.1,924-942).
gctggagacccttcatcat

SEQ ID NO: 78232 - DNA, 19 bp, Homo sapiens
  siRNA target sequence for DGKZ (NM_003646.1,1017-1035).
caaagatcatccagtcttt

SEQ ID NO: 78233 - DNA, 19 bp, Homo sapiens
  siRNA target sequence for DGKZ (NM_003646.1,1515-1533).
gccgctttcggaataagat

SEQ ID NO: 78234 - DNA, 19 bp, Homo sapiens
  siRNA target sequence for DGKZ (NM_003646.1,1517-1535).
cgctttcggaataagatgt

SEQ ID NO: 78235 - DNA, 19 bp, Homo sapiens
  siRNA target sequence for DGKZ (NM_003646.1,1518-1536).
gctttcggaataagatgtt

SEQ ID NO: 78236 - DNA, 19 bp, Homo sapiens
  siRNA target sequence for DGKZ (NM_003646.1,2202-2220).
ccccgacatgccagaaact

SEQ ID NO: 78237 - DNA, 19 bp, Homo sapiens
  siRNA target sequence for DGKZ (NM_003646.1,2204-2222).
ccgacatgccagaaactgt

SEQ ID NO: 78238 - DNA, 19 bp, Homo sapiens
  siRNA target sequence for DGKZ (NM_003646.1,2311-2329).
gatcgcacaggatgagatt

SEQ ID NO: 78239 - DNA, 19 bp, Homo sapiens
  siRNA target sequence for DGUOK (NM_001929.2,230-248).
ctgcactgcccaaagtctt

SEQ ID NO: 78240 - DNA, 19 bp, Homo sapiens
  siRNA target sequence for DGUOK (NM_001929.2,238-256).
cccaaagtcttggaaactt

SEQ ID NO: 78241 - DNA, 19 bp, Homo sapiens
  siRNA target sequence for DGUOK (NM_001929.2,250-268).
gaaacttgctggatatgat

SEQ ID NO: 78242 - DNA, 19 bp, Homo sapiens
  siRNA target sequence for DGUOK (NM_001929.2,282-300).
gcacgatggtcctacacat

SEQ ID NO: 78243 - DNA, 19 bp, Homo sapiens
  siRNA target sequence for DGUOK (NM_001929.2,283-301).
cacgatggtcctacacatt

SEQ ID NO: 78244 - DNA, 19 bp, Homo sapiens
  siRNA target sequence for DGUOK (NM_001929.2,292-310).
cctacacattccagacatt

SEQ ID NO: 78245 - DNA, 19 bp, Homo sapiens
  siRNA target sequence for DGUOK (NM_080915.1,236-254).
ctcaagcaaatcagaatga

SEQ ID NO: 78246 - DNA, 19 bp, Homo sapiens
  siRNA target sequence for DGUOK (NM_080916.1,238-256).
gtccacgtttgtgaagtta

SEQ ID NO: 78247 - DNA, 19 bp, Homo sapiens
  siRNA target sequence for DGUOK (NM_080916.1,248-266).
gtgaagttactcacgaaaa

SEQ ID NO: 78248 - DNA, 19 bp, Homo sapiens
  siRNA target sequence for DGUOK (NM_080916.1,250-268).
gaagttactcacgaaaact

SEQ ID NO: 78249 - DNA, 19 bp, Homo sapiens
  siRNA target sequence for DGUOK (NM_080916.1,459-477).
ccttccctgagaaactctt

SEQ ID NO: 78250 - DNA, 19 bp, Homo sapiens
  siRNA target sequence for DGUOK (NM_080916.1,460-478).
cttccctgagaaactctta

SEQ ID NO: 78251 - DNA, 19 bp, Homo sapiens
  siRNA target sequence for DGUOK (NM_080916.1,627-645).
ccagccggatcacattaca

SEQ ID NO: 78252 - DNA, 19 bp, Homo sapiens
  siRNA target sequence for DGUOK (NM_080916.1,669-687).
ctccccaggtttgtttgaa

SEQ ID NO: 78253 - DNA, 19 bp, Homo sapiens
  siRNA target sequence for DGUOK (NM_080916.1,786-804).
caacgaagctccactttga

SEQ ID NO: 78254 - DNA, 19 bp, Homo sapiens
  siRNA target sequence for DGUOK (NM_080916.1,890-908).
gaggtaaacacctttgtaa

SEQ ID NO: 78255 - DNA, 19 bp, Homo sapiens
  siRNA target sequence for DKFZP434C131 (NM_015518.1,95-113).
cgtacgccacggtgtacaa

SEQ ID NO: 78256 - DNA, 19 bp, Homo sapiens
  siRNA target sequence for DKFZP434C131 (NM_015518.1,158-176).
gtgtagccaagaaaagtct

SEQ ID NO: 78257 - DNA, 19 bp, Homo sapiens
  siRNA target sequence for DKFZP434C131 (NM_015518.1,199-217).
ctcctcacggagattgaga

SEQ ID NO: 78258 - DNA, 19 bp, Homo sapiens
  siRNA target sequence for DKFZP434C131 (NM_015518.1,319-337).
ctgtctcgcttcatccata

SEQ ID NO: 78259 - DNA, 19 bp, Homo sapiens
  siRNA target sequence for DKFZp434C1418 (NM_173655.1,373-391).
ctgtactggcttaatgaaa

SEQ ID NO: 78260 - DNA, 19 bp, Homo sapiens
  siRNA target sequence for DKFZp434C1418 (NM_173655.1,462-480).
cgctgttggcggattcact

SEQ ID NO: 78261 - DNA, 19 bp, Homo sapiens
  siRNA target sequence for DKFZp434C1418 (NM_173655.1,483-501).
cctcgtcatcctcacttta

SEQ ID NO: 78262 - DNA, 19 bp, Homo sapiens
  siRNA target sequence for DKFZp434C1418 (NM_173655.1,519-537).
gagatgtcagtggtacata

SEQ ID NO: 78263 - DNA, 19 bp, Homo sapiens
  siRNA target sequence for DKFZp434C1418 (NM_173655.1,521-539).
gatgtcagtggtacataaa

SEQ ID NO: 78264 - DNA, 19 bp, Homo sapiens
  siRNA target sequence for DKFZp434C1418 (NM_173655.1,594-612).
gcgcttcccgggaattaaa

SEQ ID NO: 78265 - DNA, 19 bp, Homo sapiens
  siRNA target sequence for DKFZp434C1418 (NM_173655.1,595-613).
cgcttcccgggaattaaaa

SEQ ID NO: 78266 - DNA, 19 bp, Homo sapiens
  siRNA target sequence for DKFZp434C1418 (NM_173655.1,601-619).
ccgggaattaaaacttaca

SEQ ID NO: 78267 - DNA, 19 bp, Homo sapiens
  siRNA target sequence for DKFZp434C1418 (NM_173655.1,602-620).
cgggaattaaaacttacat

SEQ ID NO: 78268 - DNA, 19 bp, Homo sapiens
  siRNA target sequence for DKFZp434C1418 (NM_173655.1,673-691).
gagattgatccctcaagaa

SEQ ID NO: 78269 - DNA, 19 bp, Homo sapiens
  siRNA target sequence for DKFZp434C1418 (NM_173655.1,675-693).
gattgatccctcaagaatt

SEQ ID NO: 78270 - DNA, 19 bp, Homo sapiens
  siRNA target sequence for DKFZp434C1418 (NM_173655.1,679-697).
gatccctcaagaattcgta

SEQ ID NO: 78271 - DNA, 19 bp, Homo sapiens
  siRNA target sequence for DKFZp434C1418 (NM_173655.1,683-701).
cctcaagaattcgtattga

SEQ ID NO: 78272 - DNA, 19 bp, Homo sapiens
  siRNA target sequence for DKFZp434C1418 (NM_173655.1,775-793).
ccagttgccattaaaactt

SEQ ID NO: 78273 - DNA, 19 bp, Homo sapiens
  siRNA target sequence for DKFZp434C1418 (NM_173655.1,807-825).
catggatcggcaaagaaga

SEQ ID NO: 78274 - DNA, 19 bp, Homo sapiens
  siRNA target sequence for DKFZp434C1418 (NM_173655.1,811-829).
gatcggcaaagaagagatt

SEQ ID NO: 78275 - DNA, 19 bp, Homo sapiens
  siRNA target sequence for DKFZp434C1418 (NM_173655.1,951-969).
gagggcagggtttttaaat

SEQ ID NO: 78276 - DNA, 19 bp, Homo sapiens
  siRNA target sequence for DKFZp434C1418 (NM_173655.1,1025-1043).
ctgctggcagaccagtaat

SEQ ID NO: 78277 - DNA, 19 bp, Homo sapiens
  siRNA target sequence for DKFZp434C1418 (NM_173655.1,1027-1045).
gctggcagaccagtaatga

SEQ ID NO: 78278 - DNA, 19 bp, Homo sapiens
  siRNA target sequence for DKFZp434C1418 (NM_173655.1,1028-1046).
ctggcagaccagtaatgat

SEQ ID NO: 78279 - DNA, 19 bp, Homo sapiens
  siRNA target sequence for DKFZp434C1418 (NM_173655.1,1069-1087).
ggatccctagactcctttt

SEQ ID NO: 78280 - DNA, 19 bp, Homo sapiens
  siRNA target sequence for DKFZp434C1418 (NM_173655.1,1194-1212).
cctagcggctcggaatata

SEQ ID NO: 78281 - DNA, 19 bp, Homo sapiens
  siRNA target sequence for DKFZp434C1418 (NM_173655.1,1204-1222).
cggaatatactggtcaata

SEQ ID NO: 78282 - DNA, 19 bp, Homo sapiens
  siRNA target sequence for DKFZp434C1418 (NM_173655.1,1215-1233).
ggtcaatagcaacttagta

SEQ ID NO: 78283 - DNA, 19 bp, Homo sapiens
  siRNA target sequence for DKFZp434C1418 (NM_173655.1,1216-1234).
gtcaatagcaacttagtat

SEQ ID NO: 78284 - DNA, 19 bp, Homo sapiens
  siRNA target sequence for DKFZp434C1418 (NM_173655.1,1224-1242).
caacttagtatgcaaagtt

SEQ ID NO: 78285 - DNA, 19 bp, Homo sapiens
  siRNA target sequence for DKFZP434G2226 (NM_031217.2,102-120).
gacctgtgccaccatatga

SEQ ID NO: 78286 - DNA, 19 bp, Homo sapiens
  siRNA target sequence for DKFZP434G2226 (NM_031217.2,110-128).
ccaccatatgaaagtagta

SEQ ID NO: 78287 - DNA, 19 bp, Homo sapiens
  siRNA target sequence for DKFZP434G2226 (NM_031217.2,113-131).
ccatatgaaagtagtagtt

SEQ ID NO: 78288 - DNA, 19 bp, Homo sapiens
  siRNA target sequence for DKFZP434G2226 (NM_031217.2,132-150).
cgtgtacgtccggaaaaca

SEQ ID NO: 78289 - DNA, 19 bp, Homo sapiens
  siRNA target sequence for DKFZP434G2226 (NM_031217.2,135-153).
gtacgtccggaaaacacta

SEQ ID NO: 78290 - DNA, 19 bp, Homo sapiens
  siRNA target sequence for DKFZP434G2226 (NM_031217.2,332-350).
gtcaactcagtcagaagtt

SEQ ID NO: 78291 - DNA, 19 bp, Homo sapiens
  siRNA target sequence for DKFZP434G2226 (NM_031217.2,348-366).
gtttttgaacacactacta

SEQ ID NO: 78292 - DNA, 19 bp, Homo sapiens
  siRNA target sequence for DKFZP434G2226 (NM_031217.2,359-377).
cactactaagccaattctt

SEQ ID NO: 78293 - DNA, 19 bp, Homo sapiens
  siRNA target sequence for DKFZP434G2226 (NM_031217.2,369-387).
ccaattcttcgtagttttt

SEQ ID NO: 78294 - DNA, 19 bp, Homo sapiens
  siRNA target sequence for DKFZP434G2226 (NM_031217.2,382-400).
gttttttgaatggatataa

SEQ ID NO: 78295 - DNA, 19 bp, Homo sapiens
  siRNA target sequence for DKFZP434G2226 (NM_031217.2,437-455).
gaagacccacactatgcta

SEQ ID NO: 78296 - DNA, 19 bp, Homo sapiens
  siRNA target sequence for DKFZP434G2226 (NM_031217.2,452-470).
gctaggatcagctgatgaa

SEQ ID NO: 78297 - DNA, 19 bp, Homo sapiens
  siRNA target sequence for DKFZP434G2226 (NM_031217.2,474-492).
ggagtgatgtatctaacaa

SEQ ID NO: 78298 - DNA, 19 bp, Homo sapiens
  siRNA target sequence for DKFZP434G2226 (NM_031217.2,475-493).
gagtgatgtatctaacaat

SEQ ID NO: 78299 - DNA, 19 bp, Homo sapiens
  siRNA target sequence for DKFZP434G2226 (NM_031217.2,477-495).
gtgatgtatctaacaatgt

SEQ ID NO: 78300 - DNA, 19 bp, Homo sapiens
  siRNA target sequence for DKFZP434G2226 (NM_031217.2,479-497).
gatgtatctaacaatgtta

SEQ ID NO: 78301 - DNA, 19 bp, Homo sapiens
  siRNA target sequence for DKFZP434G2226 (NM_031217.2,490-508).
caatgttacacctttacaa

SEQ ID NO: 78302 - DNA, 19 bp, Homo sapiens
  siRNA target sequence for DKFZP434G2226 (NM_031217.2,541-559).
gtagtactgcagtttcata

SEQ ID NO: 78303 - DNA, 19 bp, Homo sapiens
  siRNA target sequence for DKFZP434G2226 (NM_031217.2,544-562).
gtactgcagtttcatatct

SEQ ID NO: 78304 - DNA, 19 bp, Homo sapiens
  siRNA target sequence for DKFZP434G2226 (NM_031217.2,581-599).
gattcgtgatctcttagta

SEQ ID NO: 78305 - DNA, 19 bp, Homo sapiens
  siRNA target sequence for DKFZP434G2226 (NM_031217.2,620-638).
ccgggaagatacccaaaaa

SEQ ID NO: 78306 - DNA, 19 bp, Homo sapiens
  siRNA target sequence for DKFZP434G2226 (NM_031217.2,644-662).
ggtcgttcatggacttact

SEQ ID NO: 78307 - DNA, 19 bp, Homo sapiens
  siRNA target sequence for DKFZP434G2226 (NM_031217.2,645-663).
gtcgttcatggacttactt

SEQ ID NO: 78308 - DNA, 19 bp, Homo sapiens
  siRNA target sequence for DKFZP434G2226 (NM_031217.2,647-665).
cgttcatggacttacttta

SEQ ID NO: 78309 - DNA, 19 bp, Homo sapiens
  siRNA target sequence for DKFZP434G2226 (NM_031217.2,808-826).
cagcaagtatcaatcaaaa

SEQ ID NO: 78310 - DNA, 19 bp, Homo sapiens
  siRNA target sequence for DKFZP434G2226 (NM_031217.2,828-846).
gtccgtattgccaagatgt

SEQ ID NO: 78311 - DNA, 19 bp, Homo sapiens
  siRNA target sequence for DKFZP434G2226 (NM_031217.2,892-910).
ctaaggggacccgatttgt

SEQ ID NO: 78312 - DNA, 19 bp, Homo sapiens
  siRNA target sequence for DKFZP434G2226 (NM_031217.2,896-914).
ggggacccgatttgtagaa

SEQ ID NO: 78313 - DNA, 19 bp, Homo sapiens
  siRNA target sequence for DKFZP434G2226 (NM_031217.2,909-927).
gtagaaggcacaaatatta

SEQ ID NO: 78314 - DNA, 19 bp, Homo sapiens
  siRNA target sequence for DKFZP434G2226 (NM_031217.2,915-933).
ggcacaaatattaatagat

SEQ ID NO: 78315 - DNA, 19 bp, Homo sapiens
  siRNA target sequence for DKFZP434G2226 (NM_031217.2,917-935).
cacaaatattaatagatca

SEQ ID NO: 78316 - DNA, 19 bp, Homo sapiens
  siRNA target sequence for DKFZP434G2226 (NM_031217.2,963-981).
gccttagcagattcaaaga

SEQ ID NO: 78317 - DNA, 19 bp, Homo sapiens
  siRNA target sequence for DKFZP434G2226 (NM_031217.2,965-983).
cttagcagattcaaagaga

SEQ ID NO: 78318 - DNA, 19 bp, Homo sapiens
  siRNA target sequence for DKFZP434G2226 (NM_031217.2,990-1008).
cagcatatcccttacagaa

SEQ ID NO: 78319 - DNA, 19 bp, Homo sapiens
  siRNA target sequence for DKFZP434G2226 (NM_031217.2,993-1011).
catatcccttacagaaata

SEQ ID NO: 78320 - DNA, 19 bp, Homo sapiens
  siRNA target sequence for DKFZP434G2226 (NM_031217.2,1024-1042).
gcttgttaaaggattctct

SEQ ID NO: 78321 - DNA, 19 bp, Homo sapiens
  siRNA target sequence for DKFZP434G2226 (NM_031217.2,1100-1118).
cgatgacacatataacact

SEQ ID NO: 78322 - DNA, 19 bp, Homo sapiens
  siRNA target sequence for DKFZP434G2226 (NM_031217.2,1104-1122).
gacacatataacactctta

SEQ ID NO: 78323 - DNA, 19 bp, Homo sapiens
  siRNA target sequence for DKFZP434G2226 (NM_031217.2,1108-1126).
catataacactcttaagta

SEQ ID NO: 78324 - DNA, 19 bp, Homo sapiens
  siRNA target sequence for DKFZP434G2226 (NM_031217.2,1133-1151).
ccgggcaaaggacattaaa

SEQ ID NO: 78325 - DNA, 19 bp, Homo sapiens
  siRNA target sequence for DKFZP434G2226 (NM_031217.2,1134-1152).
cgggcaaaggacattaaat

SEQ ID NO: 78326 - DNA, 19 bp, Homo sapiens
  siRNA target sequence for DKFZP434G2226 (NM_031217.2,1173-1191).
cttaatgtcaataatcata

SEQ ID NO: 78327 - DNA, 19 bp, Homo sapiens
  siRNA target sequence for DKFZP434G2226 (NM_031217.2,1181-1199).
caataatcatataactcaa

SEQ ID NO: 78328 - DNA, 19 bp, Homo sapiens
  siRNA target sequence for DKFZP434G2226 (NM_031217.2,1188-1206).
catataactcaatatgtaa

SEQ ID NO: 78329 - DNA, 19 bp, Homo sapiens
  siRNA target sequence for DKFZP434G2226 (NM_031217.2,1197-1215).
caatatgtaaagatctgta

SEQ ID NO: 78330 - DNA, 19 bp, Homo sapiens
  siRNA target sequence for DKFZP434G2226 (NM_031217.2,1296-1314).
gaccaagcaaagttaatga

SEQ ID NO: 78331 - DNA, 19 bp, Homo sapiens
  siRNA target sequence for DKFZP434G2226 (NM_031217.2,1373-1391).
ccagaatcgagaagaaatt

SEQ ID NO: 78332 - DNA, 19 bp, Homo sapiens
  siRNA target sequence for DKFZP434G2226 (NM_031217.2,1374-1392).
cagaatcgagaagaaatta

SEQ ID NO: 78333 - DNA, 19 bp, Homo sapiens
  siRNA target sequence for DKFZP434G2226 (NM_031217.2,1593-1611).
caatttgatgagaatacta

SEQ ID NO: 78334 - DNA, 19 bp, Homo sapiens
  siRNA target sequence for DKFZP434G2226 (NM_031217.2,1615-1633).
ggctccatcgtgtcgaaaa

SEQ ID NO: 78335 - DNA, 19 bp, Homo sapiens
  siRNA target sequence for DKFZP434G2226 (NM_031217.2,1616-1634).
gctccatcgtgtcgaaaaa

SEQ ID NO: 78336 - DNA, 19 bp, Homo sapiens
  siRNA target sequence for DKFZP434G2226 (NM_031217.2,1620-1638).
catcgtgtcgaaaaagaaa

SEQ ID NO: 78337 - DNA, 19 bp, Homo sapiens
  siRNA target sequence for DKFZP434G2226 (NM_031217.2,1653-1671).
caaaacggtcatattccaa

SEQ ID NO: 78338 - DNA, 19 bp, Homo sapiens
  siRNA target sequence for DKFZP434G2226 (NM_031217.2,1679-1697).
caagaaagatcttcattgt

SEQ ID NO: 78339 - DNA, 19 bp, Homo sapiens
  siRNA target sequence for DKFZP434G2226 (NM_031217.2,1748-1766).
gatggatctagcttgtctt

SEQ ID NO: 78340 - DNA, 19 bp, Homo sapiens
  siRNA target sequence for DKFZP434G2226 (NM_031217.2,1783-1801).
ggcagactgaagcagtatt

SEQ ID NO: 78341 - DNA, 19 bp, Homo sapiens
  siRNA target sequence for DKFZP434G2226 (NM_031217.2,1787-1805).
gactgaagcagtattgaat

SEQ ID NO: 78342 - DNA, 19 bp, Homo sapiens
  siRNA target sequence for DKFZP434G2226 (NM_031217.2,1815-1833).
ccaaccctaagaaaacaat

SEQ ID NO: 78343 - DNA, 19 bp, Homo sapiens
  siRNA target sequence for DKFZP434G2226 (NM_031217.2,1816-1834).
caaccctaagaaaacaata

SEQ ID NO: 78344 - DNA, 19 bp, Homo sapiens
  siRNA target sequence for DKFZP434G2226 (NM_031217.2,2038-2056).
cttcaggtggaactaatct

SEQ ID NO: 78345 - DNA, 19 bp, Homo sapiens
  siRNA target sequence for DKFZP434G2226 (NM_031217.2,2057-2075).
ggttaagattcctacagaa

SEQ ID NO: 78346 - DNA, 19 bp, Homo sapiens
  siRNA target sequence for DKFZP434G2226 (NM_031217.2,2080-2098).
gaactcggagaaaactaat

SEQ ID NO: 78347 - DNA, 19 bp, Homo sapiens
  siRNA target sequence for DKFZP434G2226 (NM_031217.2,2132-2150).
gtctccaccatctcaaagt

SEQ ID NO: 78348 - DNA, 19 bp, Homo sapiens
  siRNA target sequence for DKFZP434G2226 (NM_031217.2,2178-2196).
gaacttcagcctattgtat

SEQ ID NO: 78349 - DNA, 19 bp, Homo sapiens
  siRNA target sequence for DKFZP434G2226 (NM_031217.2,2200-2218).
caccagaagactgtagaaa

SEQ ID NO: 78350 - DNA, 19 bp, Homo sapiens
  siRNA target sequence for DKFZP434G2226 (NM_031217.2,2233-2251).
cgtctacagtaaccttaat

SEQ ID NO: 78351 - DNA, 19 bp, Homo sapiens
  siRNA target sequence for DKFZP434G2226 (NM_031217.2,2282-2300).
ggctatcagctcaaacata

SEQ ID NO: 78352 - DNA, 19 bp, Homo sapiens
  siRNA target sequence for DKFZP434G2226 (NM_031217.2,2283-2301).
gctatcagctcaaacataa

SEQ ID NO: 78353 - DNA, 19 bp, Homo sapiens
  siRNA target sequence for DKFZP434G2226 (NM_031217.2,2303-2321).
cagtgataattgtctgaaa

SEQ ID NO: 78354 - DNA, 19 bp, Homo sapiens
  siRNA target sequence for DKFZP434G2226 (NM_031217.2,2305-2323).
gtgataattgtctgaaaat

SEQ ID NO: 78355 - DNA, 19 bp, Homo sapiens
  siRNA target sequence for DKFZP434G2226 (NM_031217.2,2334-2352).
gtagctatccctcataata

SEQ ID NO: 78356 - DNA, 19 bp, Homo sapiens
  siRNA target sequence for DKFZP434G2226 (NM_031217.2,2337-2355).
gctatccctcataatagaa

SEQ ID NO: 78357 - DNA, 19 bp, Homo sapiens
  siRNA target sequence for DKFZP434G2226 (NM_031217.2,2381-2399).
ggactctacatttactata

SEQ ID NO: 78358 - DNA, 19 bp, Homo sapiens
  siRNA target sequence for DKFZP434G2226 (NM_031217.2,2411-2429).
caagagctcgaagtgtaaa

SEQ ID NO: 78359 - DNA, 19 bp, Homo sapiens
  siRNA target sequence for DKFZP434G2226 (NM_031217.2,2414-2432).
gagctcgaagtgtaaatta

SEQ ID NO: 78360 - DNA, 19 bp, Homo sapiens
  siRNA target sequence for DKFZP434G2226 (NM_031217.2,2425-2443).
gtaaattacccgaacaaga

SEQ ID NO: 78361 - DNA, 19 bp, Homo sapiens
  siRNA target sequence for DKFZP434G2226 (NM_031217.2,2442-2460).
gaatcactaccaaatgata

SEQ ID NO: 78362 - DNA, 19 bp, Homo sapiens
  siRNA target sequence for DKFZP434G2226 (NM_031217.2,2479-2497).
ggcttgatccttcttcatt

SEQ ID NO: 78363 - DNA, 19 bp, Homo sapiens
  siRNA target sequence for DKFZP434G2226 (NM_031217.2,2605-2623).
cgttaactgcagacgtaaa

SEQ ID NO: 78364 - DNA, 19 bp, Homo sapiens
  siRNA target sequence for DKFZP434G2226 (NM_031217.2,2606-2624).
gttaactgcagacgtaaat

SEQ ID NO: 78365 - DNA, 19 bp, Homo sapiens
  siRNA target sequence for DKFZP434G2226 (NM_031217.2,2636-2654).
caaacgtgttcgacaagat

SEQ ID NO: 78366 - DNA, 19 bp, Homo sapiens
  siRNA target sequence for DKFZP434G2226 (NM_031217.2,2640-2658).
cgtgttcgacaagataatt

SEQ ID NO: 78367 - DNA, 19 bp, Homo sapiens
  siRNA target sequence for DKFZP434G2226 (NM_031217.2,2643-2661).
gttcgacaagataattcaa

SEQ ID NO: 78368 - DNA, 19 bp, Homo sapiens
  siRNA target sequence for DKFZP434G2226 (NM_031217.2,2662-2680).
gtgagaagcacttacaaga

SEQ ID NO: 78369 - DNA, 19 bp, Homo sapiens
  siRNA target sequence for DKFZp727A071 (NM_152268.2,140-158).
ccagctctctgggtatgtt

SEQ ID NO: 78370 - DNA, 19 bp, Homo sapiens
  siRNA target sequence for DKFZp727A071 (NM_152268.2,257-275).
cctgcaggacaaatctgat

SEQ ID NO: 78371 - DNA, 19 bp, Homo sapiens
  siRNA target sequence for DKFZp727A071 (NM_152268.2,380-398).
gaagctcgtgcgagtgata

SEQ ID NO: 78372 - DNA, 19 bp, Homo sapiens
  siRNA target sequence for DKFZp727A071 (NM_152268.2,475-493).
ccaaccggtgggacttgat

SEQ ID NO: 78373 - DNA, 19 bp, Homo sapiens
  siRNA target sequence for DKFZp727A071 (NM_152268.2,496-514).
gcaaagagctgctaagact

SEQ ID NO: 78374 - DNA, 19 bp, Homo sapiens
  siRNA target sequence for DKFZp727A071 (NM_152268.2,497-515).
caaagagctgctaagactt

SEQ ID NO: 78375 - DNA, 19 bp, Homo sapiens
  siRNA target sequence for DKFZp727A071 (NM_152268.2,519-537).
gacaggcatggcaaggaat

SEQ ID NO: 78376 - DNA, 19 bp, Homo sapiens
  siRNA target sequence for DKFZp727A071 (NM_152268.2,681-699).
cgtggccgagagttttaca

SEQ ID NO: 78377 - DNA, 19 bp, Homo sapiens
  siRNA target sequence for DKFZp727A071 (NM_152268.2,682-700).
gtggccgagagttttacat

SEQ ID NO: 78378 - DNA, 19 bp, Homo sapiens
  siRNA target sequence for DKFZp727A071 (NM_152268.2,684-702).
ggccgagagttttacatga

SEQ ID NO: 78379 - DNA, 19 bp, Homo sapiens
  siRNA target sequence for DKFZp727A071 (NM_152268.2,860-878).
ccagctcccagtggatatt

SEQ ID NO: 78380 - DNA, 19 bp, Homo sapiens
  siRNA target sequence for DKFZp727A071 (NM_152268.2,863-881).
gctcccagtggatattgga

SEQ ID NO: 78381 - DNA, 19 bp, Homo sapiens
  siRNA target sequence for DKFZp727A071 (NM_152268.2,967-985).
gccagggcccattgactaa

SEQ ID NO: 78382 - DNA, 19 bp, Homo sapiens
  siRNA target sequence for DKFZp727A071 (NM_152268.2,973-991).
gcccattgactaaaaccaa

SEQ ID NO: 78383 - DNA, 19 bp, Homo sapiens
  siRNA target sequence for DKFZp727A071 (NM_152268.2,1031-1049).
gtactcatccattttcaat

SEQ ID NO: 78384 - DNA, 19 bp, Homo sapiens
  siRNA target sequence for DKFZp727A071 (NM_152268.2,1178-1196).
cctactggccccttaccaa

SEQ ID NO: 78385 - DNA, 19 bp, Homo sapiens
  siRNA target sequence for DKFZp727A071 (NM_152268.2,1201-1219).
gcctcatcccccctaagaa

SEQ ID NO: 78386 - DNA, 19 bp, Homo sapiens
  siRNA target sequence for DKFZp727A071 (NM_152268.2,1334-1352).
catcggaaacagactgaaa

SEQ ID NO: 78387 - DNA, 19 bp, Homo sapiens
  siRNA target sequence for DKFZp727A071 (NM_152268.2,1368-1386).
ggctacccctttgtgataa

SEQ ID NO: 78388 - DNA, 19 bp, Homo sapiens
  siRNA target sequence for DKFZp727A071 (NM_152268.2,1369-1387).
gctacccctttgtgataat

SEQ ID NO: 78389 - DNA, 19 bp, Homo sapiens
  siRNA target sequence for DKFZp727A071 (NM_152268.2,1406-1424).
ggaggaccctgcacatttt

SEQ ID NO: 78390 - DNA, 19 bp, Homo sapiens
  siRNA target sequence for DKFZp727A071 (NM_152268.2,1473-1491).
ggagtcatggatttactga

SEQ ID NO: 78391 - DNA, 19 bp, Homo sapiens
  siRNA target sequence for DKFZp761P1010 (NM_018423.1,354-372).
gtcccaactttgttggtta

SEQ ID NO: 78392 - DNA, 19 bp, Homo sapiens
  siRNA target sequence for DKFZp761P1010 (NM_018423.1,357-375).
ccaactttgttggttacta

SEQ ID NO: 78393 - DNA, 19 bp, Homo sapiens
  siRNA target sequence for DKFZp761P1010 (NM_018423.1,361-379).
ctttgttggttactatctt

SEQ ID NO: 78394 - DNA, 19 bp, Homo sapiens
  siRNA target sequence for DKFZp761P1010 (NM_018423.1,395-413).
ggtcatcctgtggcttttt

SEQ ID NO: 78395 - DNA, 19 bp, Homo sapiens
  siRNA target sequence for DKFZp761P1010 (NM_018423.1,396-414).
gtcatcctgtggcttttta

SEQ ID NO: 78396 - DNA, 19 bp, Homo sapiens
  siRNA target sequence for DKFZp761P1010 (NM_018423.1,538-556).
catccgtggaaaactttct

SEQ ID NO: 78397 - DNA, 19 bp, Homo sapiens
  siRNA target sequence for DKFZp761P1010 (NM_018423.1,731-749).
gctccatgaggtacaagat

SEQ ID NO: 78398 - DNA, 19 bp, Homo sapiens
  siRNA target sequence for DKFZp761P1010 (NM_018423.1,732-750).
ctccatgaggtacaagatt

SEQ ID NO: 78399 - DNA, 19 bp, Homo sapiens
  siRNA target sequence for DKFZp761P1010 (NM_018423.1,735-753).
catgaggtacaagatttct

SEQ ID NO: 78400 - DNA, 19 bp, Homo sapiens
  siRNA target sequence for DKFZp761P1010 (NM_018423.1,759-777).
cgaatccaattccatcaat

SEQ ID NO: 78401 - DNA, 19 bp, Homo sapiens
  siRNA target sequence for DKFZp761P1010 (NM_018423.1,774-792).
caatacctggggaaacaca

SEQ ID NO: 78402 - DNA, 19 bp, Homo sapiens
  siRNA target sequence for DKFZp761P1010 (NM_018423.1,825-843).
gaaaagctgccactctata

SEQ ID NO: 78403 - DNA, 19 bp, Homo sapiens
  siRNA target sequence for DKFZp761P1010 (NM_018423.1,913-931).
ctatggatggtcttctcta

SEQ ID NO: 78404 - DNA, 19 bp, Homo sapiens
  siRNA target sequence for DKFZp761P1010 (NM_018423.1,917-935).
ggatggtcttctctatgat

SEQ ID NO: 78405 - DNA, 19 bp, Homo sapiens
  siRNA target sequence for DKFZp761P1010 (NM_018423.1,1027-1045).
cagccaggaatattctgat

SEQ ID NO: 78406 - DNA, 19 bp, Homo sapiens
  siRNA target sequence for DKFZp761P1010 (NM_018423.1,1109-1127).
ggccatctcctctactcaa

SEQ ID NO: 78407 - DNA, 19 bp, Homo sapiens
  siRNA target sequence for DKFZp761P1010 (NM_018423.1,1110-1128).
gccatctcctctactcaaa

SEQ ID NO: 78408 - DNA, 19 bp, Homo sapiens
  siRNA target sequence for DKFZp761P1010 (NM_018423.1,1115-1133).
ctcctctactcaaaccata

SEQ ID NO: 78409 - DNA, 19 bp, Homo sapiens
  siRNA target sequence for DKFZp761P1010 (NM_018423.1,1311-1329).
cccagtagctgcacacata

SEQ ID NO: 78410 - DNA, 19 bp, Homo sapiens
  siRNA target sequence for DKFZp761P1010 (NM_018423.1,1315-1333).
gtagctgcacacataccat

SEQ ID NO: 78411 - DNA, 19 bp, Homo sapiens
  siRNA target sequence for DKFZp761P1010 (NM_018423.1,1406-1424).
cctagaagctgccattaaa

SEQ ID NO: 78412 - DNA, 19 bp, Homo sapiens
  siRNA target sequence for DKFZp761P1010 (NM_018423.1,1436-1454).
cgaggctgtgttacaagta

SEQ ID NO: 78413 - DNA, 19 bp, Homo sapiens
  siRNA target sequence for DKFZp761P1010 (NM_018423.1,1463-1481).
ggtggtacctgaactgtat

SEQ ID NO: 78414 - DNA, 19 bp, Homo sapiens
  siRNA target sequence for DKFZp761P1010 (NM_018423.1,1506-1524).
gagagcctcttctacaact

SEQ ID NO: 78415 - DNA, 19 bp, Homo sapiens
  siRNA target sequence for DKFZp761P1010 (NM_018423.1,1512-1530).
ctcttctacaactatagca

SEQ ID NO: 78416 - DNA, 19 bp, Homo sapiens
  siRNA target sequence for DLAT (NM_001931.2,45-63).
cgcgacgggctcagaatgt

SEQ ID NO: 78417 - DNA, 19 bp, Homo sapiens
  siRNA target sequence for DLAT (NM_001931.2,46-64).
gcgacgggctcagaatgta

SEQ ID NO: 78418 - DNA, 19 bp, Homo sapiens
  siRNA target sequence for DLAT (NM_001931.2,297-315).
cgcatcagaaggttccatt

SEQ ID NO: 78419 - DNA, 19 bp, Homo sapiens
  siRNA target sequence for DLAT (NM_001931.2,349-367).
catagcccgttgggaaaaa

SEQ ID NO: 78420 - DNA, 19 bp, Homo sapiens
  siRNA target sequence for DLAT (NM_001931.2,398-416).
ctaattgcagaggttgaaa

SEQ ID NO: 78421 - DNA, 19 bp, Homo sapiens
  siRNA target sequence for DLAT (NM_001931.2,404-422).
gcagaggttgaaactgata

SEQ ID NO: 78422 - DNA, 19 bp, Homo sapiens
  siRNA target sequence for DLAT (NM_001931.2,405-423).
cagaggttgaaactgataa

SEQ ID NO: 78423 - DNA, 19 bp, Homo sapiens
  siRNA target sequence for DLAT (NM_001931.2,454-472).
gtgttatatggcaaagata

SEQ ID NO: 78424 - DNA, 19 bp, Homo sapiens
  siRNA target sequence for DLAT (NM_001931.2,500-518).
cccatcggagcgatcatct

SEQ ID NO: 78425 - DNA, 19 bp, Homo sapiens
  siRNA target sequence for DLAT (NM_001931.2,541-559).
ggatattgaggcctttaaa

SEQ ID NO: 78426 - DNA, 19 bp, Homo sapiens
  siRNA target sequence for DLAT (NM_001931.2,678-696).
ctcacatgcaggtacttct

SEQ ID NO: 78427 - DNA, 19 bp, Homo sapiens
  siRNA target sequence for DLAT (NM_001931.2,754-772).
gggtgagaagctaagtgaa

SEQ ID NO: 78428 - DNA, 19 bp, Homo sapiens
  siRNA target sequence for DLAT (NM_001931.2,763-781).
gctaagtgaaggagactta

SEQ ID NO: 78429 - DNA, 19 bp, Homo sapiens
  siRNA target sequence for DLAT (NM_001931.2,778-796).
cttactggcagagatagaa

SEQ ID NO: 78430 - DNA, 19 bp, Homo sapiens
  siRNA target sequence for DLAT (NM_001931.2,802-820).
caaagccactataggtttt

SEQ ID NO: 78431 - DNA, 19 bp, Homo sapiens
  siRNA target sequence for DLAT (NM_001931.2,808-826).
cactataggttttgaagta

SEQ ID NO: 78432 - DNA, 19 bp, Homo sapiens
  siRNA target sequence for DLAT (NM_001931.2,833-851).
gaaggttatctggcaaaaa

SEQ ID NO: 78433 - DNA, 19 bp, Homo sapiens
  siRNA target sequence for DLAT (NM_001931.2,837-855).
gttatctggcaaaaatcct

SEQ ID NO: 78434 - DNA, 19 bp, Homo sapiens
  siRNA target sequence for DLAT (NM_001931.2,888-906).
gaaccccactctgtatcat

SEQ ID NO: 78435 - DNA, 19 bp, Homo sapiens
  siRNA target sequence for DLAT (NM_001931.2,894-912).
cactctgtatcattgtaga

SEQ ID NO: 78436 - DNA, 19 bp, Homo sapiens
  siRNA target sequence for DLAT (NM_001931.2,948-966).
ggccaaccgaagtaacaga

SEQ ID NO: 78437 - DNA, 19 bp, Homo sapiens
  siRNA target sequence for DLAT (NM_001931.2,950-968).
ccaaccgaagtaacagatt

SEQ ID NO: 78438 - DNA, 19 bp, Homo sapiens
  siRNA target sequence for DLAT (NM_001931.2,951-969).
caaccgaagtaacagattt

SEQ ID NO: 78439 - DNA, 19 bp, Homo sapiens
  siRNA target sequence for DLAT (NM_001931.2,1101-1119).
gccctcttgcaaagaagtt

SEQ ID NO: 78440 - DNA, 19 bp, Homo sapiens
  siRNA target sequence for DLAT (NM_001931.2,1114-1132).
gaagttggcagtagagaaa

SEQ ID NO: 78441 - DNA, 19 bp, Homo sapiens
  siRNA target sequence for DLAT (NM_001931.2,1127-1145).
gagaaagggattgatctta

SEQ ID NO: 78442 - DNA, 19 bp, Homo sapiens
  siRNA target sequence for DLAT (NM_001931.2,1135-1153).
gattgatcttacacaagta

SEQ ID NO: 78443 - DNA, 19 bp, Homo sapiens
  siRNA target sequence for DLAT (NM_001931.2,1161-1179).
caggaccagatggtagaat

SEQ ID NO: 78444 - DNA, 19 bp, Homo sapiens
  siRNA target sequence for DLAT (NM_001931.2,1176-1194).
gaatcaccaagaaggatat

SEQ ID NO: 78445 - DNA, 19 bp, Homo sapiens
  siRNA target sequence for DLAT (NM_001931.2,1198-1216).
ctcttttgtgcctagtaaa

SEQ ID NO: 78446 - DNA, 19 bp, Homo sapiens
  siRNA target sequence for DLAT (NM_001931.2,1306-1324).
caacattcgtcgggttatt

SEQ ID NO: 78447 - DNA, 19 bp, Homo sapiens
  siRNA target sequence for DLAT (NM_001931.2,1309-1327).
cattcgtcgggttattgca

SEQ ID NO: 78448 - DNA, 19 bp, Homo sapiens
  siRNA target sequence for DLAT (NM_001931.2,1319-1337).
gttattgcacagcgattaa

SEQ ID NO: 78449 - DNA, 19 bp, Homo sapiens
  siRNA target sequence for DLAT (NM_001931.2,1325-1343).
gcacagcgattaatgcaat

SEQ ID NO: 78450 - DNA, 19 bp, Homo sapiens
  siRNA target sequence for DLAT (NM_001931.2,1349-1367).
caaaccatacctcattatt

SEQ ID NO: 78451 - DNA, 19 bp, Homo sapiens
  siRNA target sequence for DLAT (NM_001931.2,1353-1371).
ccatacctcattattacct

SEQ ID NO: 78452 - DNA, 19 bp, Homo sapiens
  siRNA target sequence for DLAT (NM_001931.2,1369-1387).
cctttctatcgatgtaaat

SEQ ID NO: 78453 - DNA, 19 bp, Homo sapiens
  siRNA target sequence for DLAT (NM_001931.2,1370-1388).
ctttctatcgatgtaaata

SEQ ID NO: 78454 - DNA, 19 bp, Homo sapiens
  siRNA target sequence for DLAT (NM_001931.2,1402-1420).
gttggtacggaaagaactt

SEQ ID NO: 78455 - DNA, 19 bp, Homo sapiens
  siRNA target sequence for DLAT (NM_001931.2,1405-1423).
ggtacggaaagaacttaat

SEQ ID NO: 78456 - DNA, 19 bp, Homo sapiens
  siRNA target sequence for DLAT (NM_001931.2,1406-1424).
gtacggaaagaacttaata

SEQ ID NO: 78457 - DNA, 19 bp, Homo sapiens
  siRNA target sequence for DLAT (NM_001931.2,1409-1427).
cggaaagaacttaataaga

SEQ ID NO: 78458 - DNA, 19 bp, Homo sapiens
  siRNA target sequence for DLAT (NM_001931.2,1460-1478).
gacttcatcataaaagctt

SEQ ID NO: 78459 - DNA, 19 bp, Homo sapiens
  siRNA target sequence for DLAT (NM_001931.2,1525-1543).
ggacacagttataagacaa

SEQ ID NO: 78460 - DNA, 19 bp, Homo sapiens
  siRNA target sequence for DLAT (NM_001931.2,1526-1544).
gacacagttataagacaaa

SEQ ID NO: 78461 - DNA, 19 bp, Homo sapiens
  siRNA target sequence for DLAT (NM_001931.2,1528-1546).
cacagttataagacaaaat

SEQ ID NO: 78462 - DNA, 19 bp, Homo sapiens
  siRNA target sequence for DLAT (NM_001931.2,1589-1607).
ctcatcacacctattgtgt

SEQ ID NO: 78463 - DNA, 19 bp, Homo sapiens
  siRNA target sequence for DLAT (NM_001931.2,1604-1622).
gtgtttaatgcacatataa

SEQ ID NO: 78464 - DNA, 19 bp, Homo sapiens
  siRNA target sequence for DLAT (NM_001931.2,1625-1643).
ggagtggaaaccattgcta

SEQ ID NO: 78465 - DNA, 19 bp, Homo sapiens
  siRNA target sequence for DLAT (NM_001931.2,1640-1658).
gctaatgatgttgtttctt

SEQ ID NO: 78466 - DNA, 19 bp, Homo sapiens
  siRNA target sequence for DLAT (NM_001931.2,1671-1689).
caagagagggtaaactaca

SEQ ID NO: 78467 - DNA, 19 bp, Homo sapiens
  siRNA target sequence for DLAT (NM_001931.2,1703-1721).
cagggtggcacttttacga

SEQ ID NO: 78468 - DNA, 19 bp, Homo sapiens
  siRNA target sequence for DLAT (NM_001931.2,1713-1731).
cttttacgatctccaattt

SEQ ID NO: 78469 - DNA, 19 bp, Homo sapiens
  siRNA target sequence for DLAT (NM_001931.2,1853-1871).
gctagcatgatgtctgtta

SEQ ID NO: 78470 - DNA, 19 bp, Homo sapiens
  siRNA target sequence for DLAT (NM_001931.2,1857-1875).
gcatgatgtctgttacact

SEQ ID NO: 78471 - DNA, 19 bp, Homo sapiens
  siRNA target sequence for DLAT (NM_001931.2,1918-1936).
gtggcttgctgagtttaga

SEQ ID NO: 78472 - DNA, 19 bp, Homo sapiens
  siRNA target sequence for DLAT (NM_001931.2,1920-1938).
ggcttgctgagtttagaaa

SEQ ID NO: 78473 - DNA, 19 bp, Homo sapiens
  siRNA target sequence for DLAT (NM_001931.2,1952-1970).
cctatcactatgttgttgt

SEQ ID NO: 78474 - DNA, 19 bp, Homo sapiens
  siRNA target sequence for DMPK (NM_004409.1,981-999).
gacgacttcgagattctga

SEQ ID NO: 78475 - DNA, 19 bp, Homo sapiens
  siRNA target sequence for DMPK (NM_004409.1,1024-1042).
gcgaggtagcggtagtgaa

SEQ ID NO: 78476 - DNA, 19 bp, Homo sapiens
  siRNA target sequence for DMPK (NM_004409.1,1568-1586).
gggtgtattcgcctatgaa

SEQ ID NO: 78477 - DNA, 19 bp, Homo sapiens
  siRNA target sequence for DMPK (NM_004409.1,1569-1587).
ggtgtattcgcctatgaaa

SEQ ID NO: 78478 - DNA, 19 bp, Homo sapiens
  siRNA target sequence for DMPK (NM_004409.1,1572-1590).
gtattcgcctatgaaatgt

SEQ ID NO: 78479 - DNA, 19 bp, Homo sapiens
  siRNA target sequence for DMPK (NM_004409.1,1639-1657).
gcaagatcgtccactacaa

SEQ ID NO: 78480 - DNA, 19 bp, Homo sapiens
  siRNA target sequence for DMPK (NM_004409.1,1834-1852).
cctttacaccggatttcga

SEQ ID NO: 78481 - DNA, 19 bp, Homo sapiens
  siRNA target sequence for DMPK (NM_004409.1,1835-1853).
ctttacaccggatttcgaa

SEQ ID NO: 78482 - DNA, 19 bp, Homo sapiens
  siRNA target sequence for DMPK (NM_004409.1,2254-2272).
gcacggacaaccagaactt

SEQ ID NO: 78483 - DNA, 19 bp, Homo sapiens
  siRNA target sequence for DMPK (NM_004409.1,2267-2285).
gaacttcgccagtcaacta

SEQ ID NO: 78484 - DNA, 19 bp, Homo sapiens
  siRNA target sequence for DNAH11 (NM_003777.1,386-404).
ccaagagatgcaaaccata

SEQ ID NO: 78485 - DNA, 19 bp, Homo sapiens
  siRNA target sequence for DNAH11 (NM_003777.1,539-557).
gttctttctaataagaaca

SEQ ID NO: 78486 - DNA, 19 bp, Homo sapiens
  siRNA target sequence for DNAH11 (NM_003777.1,546-564).
ctaataagaacaaccataa

SEQ ID NO: 78487 - DNA, 19 bp, Homo sapiens
  siRNA target sequence for DNAH11 (NM_003777.1,576-594).
gttttacttcacaagatat

SEQ ID NO: 78488 - DNA, 19 bp, Homo sapiens
  siRNA target sequence for DNAH11 (NM_003777.1,640-658).
gggcaaaatgtctagaaga

SEQ ID NO: 78489 - DNA, 19 bp, Homo sapiens
  siRNA target sequence for DNAH11 (NM_003777.1,675-693).
ccactgttgcaggaaagat

SEQ ID NO: 78490 - DNA, 19 bp, Homo sapiens
  siRNA target sequence for DNAH11 (NM_003777.1,741-759).
ggataatacttcatgcaat

SEQ ID NO: 78491 - DNA, 19 bp, Homo sapiens
  siRNA target sequence for DNAH11 (NM_003777.1,742-760).
gataatacttcatgcaatt

SEQ ID NO: 78492 - DNA, 19 bp, Homo sapiens
  siRNA target sequence for DNAH11 (NM_003777.1,756-774).
caattgaatctgtggttat

SEQ ID NO: 78493 - DNA, 19 bp, Homo sapiens
  siRNA target sequence for DNAH11 (NM_003777.1,816-834).
cagtgcagcgtttgttgaa

SEQ ID NO: 78494 - DNA, 19 bp, Homo sapiens
  siRNA target sequence for DNAH11 (NM_003777.1,847-865).
gtctcctcaagcagaacta

SEQ ID NO: 78495 - DNA, 19 bp, Homo sapiens
  siRNA target sequence for DNAH11 (NM_003777.1,941-959).
gttaagatcctgacaacta

SEQ ID NO: 78496 - DNA, 19 bp, Homo sapiens
  siRNA target sequence for DNAH11 (NM_003777.1,978-996).
ctactctgaaggacatttt

SEQ ID NO: 78497 - DNA, 19 bp, Homo sapiens
  siRNA target sequence for DNAH11 (NM_003777.1,1105-1123).
catattaatcgctccatta

SEQ ID NO: 78498 - DNA, 19 bp, Homo sapiens
  siRNA target sequence for DNAH11 (NM_003777.1,1151-1169).
cattccaagttttataaca

SEQ ID NO: 78499 - DNA, 19 bp, Homo sapiens
  siRNA target sequence for DNAH11 (NM_003777.1,1170-1188).
ccccagctcgggttatagt

SEQ ID NO: 78500 - DNA, 19 bp, Homo sapiens
  siRNA target sequence for DNAH11 (NM_003777.1,1171-1189).
cccagctcgggttatagtt

SEQ ID NO: 78501 - DNA, 19 bp, Homo sapiens
  siRNA target sequence for DNAH11 (NM_003777.1,1172-1190).
ccagctcgggttatagttt

SEQ ID NO: 78502 - DNA, 19 bp, Homo sapiens
  siRNA target sequence for DNAH11 (NM_003777.1,1173-1191).
cagctcgggttatagtttt

SEQ ID NO: 78503 - DNA, 19 bp, Homo sapiens
  siRNA target sequence for DNAH11 (NM_003777.1,1222-1240).
ccaggcaacagcttacctt

SEQ ID NO: 78504 - DNA, 19 bp, Homo sapiens
  siRNA target sequence for DNAH11 (NM_003777.1,1223-1241).
caggcaacagcttaccttt

SEQ ID NO: 78505 - DNA, 19 bp, Homo sapiens
  siRNA target sequence for DNAH11 (NM_003777.1,1397-1415).
cagtctcatctggtgtttt

SEQ ID NO: 78506 - DNA, 19 bp, Homo sapiens
  siRNA target sequence for DNAH11 (NM_003777.1,1426-1444).
caagtttcttgatcgttta

SEQ ID NO: 78507 - DNA, 19 bp, Homo sapiens
  siRNA target sequence for DNAH11 (NM_003777.1,1429-1447).
gtttcttgatcgtttaata

SEQ ID NO: 78508 - DNA, 19 bp, Homo sapiens
  siRNA target sequence for DNAH11 (NM_003777.1,1467-1485).
ccaccactttggaatttga

SEQ ID NO: 78509 - DNA, 19 bp, Homo sapiens
  siRNA target sequence for DNAH11 (NM_003777.1,1492-1510).
ggaaagactggaatttggt

SEQ ID NO: 78510 - DNA, 19 bp, Homo sapiens
  siRNA target sequence for DNAH11 (NM_003777.1,1546-1564).
cgagatgagtgaagaactt

SEQ ID NO: 78511 - DNA, 19 bp, Homo sapiens
  siRNA target sequence for DNAH11 (NM_003777.1,1547-1565).
gagatgagtgaagaactta

SEQ ID NO: 78512 - DNA, 19 bp, Homo sapiens
  siRNA target sequence for DNAH11 (NM_003777.1,1594-1612).
cacttatgacccatctgat

SEQ ID NO: 78513 - DNA, 19 bp, Homo sapiens
  siRNA target sequence for DNAH11 (NM_003777.1,1605-1623).
catctgattgcactaacat

SEQ ID NO: 78514 - DNA, 19 bp, Homo sapiens
  siRNA target sequence for DNAH11 (NM_003777.1,1614-1632).
gcactaacatggagtttga

SEQ ID NO: 78515 - DNA, 19 bp, Homo sapiens
  siRNA target sequence for DNAH11 (NM_003777.1,1624-1642).
ggagtttgaaagtgattat

SEQ ID NO: 78516 - DNA, 19 bp, Homo sapiens
  siRNA target sequence for DNAH11 (NM_003777.1,1809-1827).
gcacactagtgcatatgtt

SEQ ID NO: 78517 - DNA, 19 bp, Homo sapiens
  siRNA target sequence for DNAH11 (NM_003777.1,1812-1830).
cactagtgcatatgtttaa

SEQ ID NO: 78518 - DNA, 19 bp, Homo sapiens
  siRNA target sequence for DNAH11 (NM_003777.1,1846-1864).
gtgtaagcaactgtataat

SEQ ID NO: 78519 - DNA, 19 bp, Homo sapiens
  siRNA target sequence for DNAH11 (NM_003777.1,1887-1905).
gtggtcatgtagttcttaa

SEQ ID NO: 78520 - DNA, 19 bp, Homo sapiens
  siRNA target sequence for DNAH11 (NM_003777.1,1889-1907).
ggtcatgtagttcttaaca

SEQ ID NO: 78521 - DNA, 19 bp, Homo sapiens
  siRNA target sequence for DNAH11 (NM_003777.1,1890-1908).
gtcatgtagttcttaacaa

SEQ ID NO: 78522 - DNA, 19 bp, Homo sapiens
  siRNA target sequence for DNAH11 (NM_003777.1,1951-1969).
ggttctccaacgacttcaa

SEQ ID NO: 78523 - DNA, 19 bp, Homo sapiens
  siRNA target sequence for DNAH11 (NM_003777.1,1961-1979).
cgacttcaaatgttttggt

SEQ ID NO: 78524 - DNA, 19 bp, Homo sapiens
  siRNA target sequence for DNAH11 (NM_003777.1,2018-2036).
cctgatcacgctttagttt

SEQ ID NO: 78525 - DNA, 19 bp, Homo sapiens
  siRNA target sequence for DNAH11 (NM_003777.1,2024-2042).
cacgctttagtttatcaaa

SEQ ID NO: 78526 - DNA, 19 bp, Homo sapiens
  siRNA target sequence for DNAH11 (NM_003777.1,2056-2074).
gaccactttgcttgatcaa

SEQ ID NO: 78527 - DNA, 19 bp, Homo sapiens
  siRNA target sequence for DNAH11 (NM_003777.1,2061-2079).
ctttgcttgatcaatttga

SEQ ID NO: 78528 - DNA, 19 bp, Homo sapiens
  siRNA target sequence for DNAH11 (NM_003777.1,2085-2103).
gtatctataatgaatggaa

SEQ ID NO: 78529 - DNA, 19 bp, Homo sapiens
  siRNA target sequence for DNAH11 (NM_003777.1,2137-2155).
gaatcaacccttggttaaa

SEQ ID NO: 78530 - DNA, 19 bp, Homo sapiens
  siRNA target sequence for DNAH11 (NM_003777.1,2141-2159).
caacccttggttaaattca

SEQ ID NO: 78531 - DNA, 19 bp, Homo sapiens
  siRNA target sequence for DNAH11 (NM_003777.1,2172-2190).
gtcttctctgtgtcaattt

SEQ ID NO: 78532 - DNA, 19 bp, Homo sapiens
  siRNA target sequence for DNAH11 (NM_003777.1,2196-2214).
caaagctagtggctgtatt

SEQ ID NO: 78533 - DNA, 19 bp, Homo sapiens
  siRNA target sequence for DNAH11 (NM_003777.1,2222-2240).
gtgaaatatcttttgatgt

SEQ ID NO: 78534 - DNA, 19 bp, Homo sapiens
  siRNA target sequence for DNAH11 (NM_003777.1,2254-2272).
cataccagattcagcttta

SEQ ID NO: 78535 - DNA, 19 bp, Homo sapiens
  siRNA target sequence for DNAH11 (NM_003777.1,2267-2285).
gctttagccatcttcaaga

SEQ ID NO: 78536 - DNA, 19 bp, Homo sapiens
  siRNA target sequence for DNAH11 (NM_003777.1,2327-2345).
cttgtgcaagggtataata

SEQ ID NO: 78537 - DNA, 19 bp, Homo sapiens
  siRNA target sequence for DNAH11 (NM_003777.1,2358-2376).
cgctcctggaagttgaata

SEQ ID NO: 78538 - DNA, 19 bp, Homo sapiens
  siRNA target sequence for DNAH11 (NM_003777.1,2621-2639).
gaggacaagggtgatttgt

SEQ ID NO: 78539 - DNA, 19 bp, Homo sapiens
  siRNA target sequence for DNAH11 (NM_003777.1,2784-2802).
gcttttttcaggctataat

SEQ ID NO: 78540 - DNA, 19 bp, Homo sapiens
  siRNA target sequence for DNAH11 (NM_003777.1,2796-2814).
ctataatgcacgacttaga

SEQ ID NO: 78541 - DNA, 19 bp, Homo sapiens
  siRNA target sequence for DNAH11 (NM_003777.1,2803-2821).
gcacgacttagacttcttt

SEQ ID NO: 78542 - DNA, 19 bp, Homo sapiens
  siRNA target sequence for DNAH11 (NM_003777.1,2845-2863).
gaaaccggcaccgtttttt

SEQ ID NO: 78543 - DNA, 19 bp, Homo sapiens
  siRNA target sequence for DNAH11 (NM_003777.1,2878-2896).
cttgttgcctcctgagatt

SEQ ID NO: 78544 - DNA, 19 bp, Homo sapiens
  siRNA target sequence for DNAH11 (NM_003777.1,2891-2909).
gagattgtgtttaaacctt

SEQ ID NO: 78545 - DNA, 19 bp, Homo sapiens
  siRNA target sequence for DNAH11 (NM_003777.1,2928-2946).
gggatggcttctatgatct

SEQ ID NO: 78546 - DNA, 19 bp, Homo sapiens
  siRNA target sequence for DNAH11 (NM_003777.1,2934-2952).
gcttctatgatcttgtaga

SEQ ID NO: 78547 - DNA, 19 bp, Homo sapiens
  siRNA target sequence for DNAH11 (NM_003777.1,3065-3083).
gtcaggcaggagatcatga

SEQ ID NO: 78548 - DNA, 19 bp, Homo sapiens
  siRNA target sequence for DNAH11 (NM_003777.1,3158-3176).
gatgatcgagctgagttta

SEQ ID NO: 78549 - DNA, 19 bp, Homo sapiens
  siRNA target sequence for DNAH11 (NM_003777.1,3161-3179).
gatcgagctgagtttatga

SEQ ID NO: 78550 - DNA, 19 bp, Homo sapiens
  siRNA target sequence for DNAH11 (NM_003777.1,3203-3221).
gctgtgtcttccgatgaaa

SEQ ID NO: 78551 - DNA, 19 bp, Homo sapiens
  siRNA target sequence for DNAH11 (NM_003777.1,3299-3317).
gaagctttgtatgttcaaa

SEQ ID NO: 78552 - DNA, 19 bp, Homo sapiens
  siRNA target sequence for DNAH11 (NM_003777.1,3334-3352).
ctttagagtgtttgatagt

SEQ ID NO: 78553 - DNA, 19 bp, Homo sapiens
  siRNA target sequence for DNAH11 (NM_003777.1,3385-3403).
gagcttgttaaccataatt

SEQ ID NO: 78554 - DNA, 19 bp, Homo sapiens
  siRNA target sequence for DNAH11 (NM_003777.1,3495-3513).
ccggacttcagagagaatt

SEQ ID NO: 78555 - DNA, 19 bp, Homo sapiens
  siRNA target sequence for DNAH11 (NM_003777.1,3496-3514).
cggacttcagagagaatta

SEQ ID NO: 78556 - DNA, 19 bp, Homo sapiens
  siRNA target sequence for DNAH11 (NM_003777.1,3574-3592).
ccgacagagagctactgat

SEQ ID NO: 78557 - DNA, 19 bp, Homo sapiens
  siRNA target sequence for DNAH11 (NM_003777.1,3720-3738).
caactgtcagacatgaagt

SEQ ID NO: 78558 - DNA, 19 bp, Homo sapiens
  siRNA target sequence for DNAH11 (NM_003777.1,3755-3773).
gcggaagtcactcttataa

SEQ ID NO: 78559 - DNA, 19 bp, Homo sapiens
  siRNA target sequence for DNAH11 (NM_003777.1,3758-3776).
gaagtcactcttataagga

SEQ ID NO: 78560 - DNA, 19 bp, Homo sapiens
  siRNA target sequence for DNAH11 (NM_003777.1,3838-3856).
ccctcttggatttaatgca

SEQ ID NO: 78561 - DNA, 19 bp, Homo sapiens
  siRNA target sequence for DNAH11 (NM_003777.1,3863-3881).
ccatacacagcgcttgata

SEQ ID NO: 78562 - DNA, 19 bp, Homo sapiens
  siRNA target sequence for DNAH11 (NM_003777.1,3864-3882).
catacacagcgcttgataa

SEQ ID NO: 78563 - DNA, 19 bp, Homo sapiens
  siRNA target sequence for DNAH11 (NM_003777.1,3873-3891).
cgcttgataaggcaaatga

SEQ ID NO: 78564 - DNA, 19 bp, Homo sapiens
  siRNA target sequence for DNAH11 (NM_003777.1,3922-3940).
gcagatgcaagaatctact

SEQ ID NO: 78565 - DNA, 19 bp, Homo sapiens
  siRNA target sequence for DNAH11 (NM_003777.1,3936-3954).
ctactcgtctttttgaagt

SEQ ID NO: 78566 - DNA, 19 bp, Homo sapiens
  siRNA target sequence for DNAH11 (NM_003777.1,4012-4030).
gggactgtgggatgtcatt

SEQ ID NO: 78567 - DNA, 19 bp, Homo sapiens
  siRNA target sequence for DNAH11 (NM_003777.1,4016-4034).
ctgtgggatgtcattattt

SEQ ID NO: 78568 - DNA, 19 bp, Homo sapiens
  siRNA target sequence for DNAH11 (NM_003777.1,4037-4055).
gttcgaagaagcattgata

SEQ ID NO: 78569 - DNA, 19 bp, Homo sapiens
  siRNA target sequence for DNAH11 (NM_003777.1,4040-4058).
cgaagaagcattgataatt

SEQ ID NO: 78570 - DNA, 19 bp, Homo sapiens
  siRNA target sequence for DNAH11 (NM_003777.1,4048-4066).
cattgataattggactaaa

SEQ ID NO: 78571 - DNA, 19 bp, Homo sapiens
  siRNA target sequence for DNAH11 (NM_003777.1,4121-4139).
gccaaggcgagttccataa

SEQ ID NO: 78572 - DNA, 19 bp, Homo sapiens
  siRNA target sequence for DNAH11 (NM_003777.1,4126-4144).
ggcgagttccataactgaa

SEQ ID NO: 78573 - DNA, 19 bp, Homo sapiens
  siRNA target sequence for DNAH11 (NM_003777.1,4127-4145).
gcgagttccataactgaaa

SEQ ID NO: 78574 - DNA, 19 bp, Homo sapiens
  siRNA target sequence for DNAH11 (NM_003777.1,4128-4146).
cgagttccataactgaaat

SEQ ID NO: 78575 - DNA, 19 bp, Homo sapiens
  siRNA target sequence for DNAH11 (NM_003777.1,4230-4248).
gggccatcacagagttaca

SEQ ID NO: 78576 - DNA, 19 bp, Homo sapiens
  siRNA target sequence for DNAH11 (NM_003777.1,4292-4310).
gctattggggtcaagtttt

SEQ ID NO: 78577 - DNA, 19 bp, Homo sapiens
  siRNA target sequence for DNAH11 (NM_003777.1,4298-4316).
ggggtcaagtttttaataa

SEQ ID NO: 78578 - DNA, 19 bp, Homo sapiens
  siRNA target sequence for DNAH11 (NM_003777.1,4323-4341).
ccacaactttggcagattt

SEQ ID NO: 78579 - DNA, 19 bp, Homo sapiens
  siRNA target sequence for DNAH11 (NM_003777.1,4411-4429).
ggggactgagaaggttatt

SEQ ID NO: 78580 - DNA, 19 bp, Homo sapiens
  siRNA target sequence for DNAH11 (NM_003777.1,4418-4436).
gagaaggttattactgaaa

SEQ ID NO: 78581 - DNA, 19 bp, Homo sapiens
  siRNA target sequence for DNAH11 (NM_003777.1,4450-4468).
ggcaaccatgaagttttct

SEQ ID NO: 78582 - DNA, 19 bp, Homo sapiens
  siRNA target sequence for DNAH11 (NM_003777.1,4456-4474).
catgaagttttcttacgaa

SEQ ID NO: 78583 - DNA, 19 bp, Homo sapiens
  siRNA target sequence for DNAH11 (NM_003777.1,4552-4570).
gttgcagactcttcttcaa

SEQ ID NO: 78584 - DNA, 19 bp, Homo sapiens
  siRNA target sequence for DNAH11 (NM_003777.1,4601-4619).
gtgttaagctggcaaaata

SEQ ID NO: 78585 - DNA, 19 bp, Homo sapiens
  siRNA target sequence for DNAH11 (NM_003777.1,4716-4734).
gaatccagcttgtgaaaga

SEQ ID NO: 78586 - DNA, 19 bp, Homo sapiens
  siRNA target sequence for DNAH11 (NM_003777.1,4751-4769).
ggggtggatgctgaattta

SEQ ID NO: 78587 - DNA, 19 bp, Homo sapiens
  siRNA target sequence for DNAH11 (NM_003777.1,4760-4778).
gctgaatttaaggagttaa

SEQ ID NO: 78588 - DNA, 19 bp, Homo sapiens
  siRNA target sequence for DNAH11 (NM_003777.1,4790-4808).
gccaaagtagaaaatgtgt

SEQ ID NO: 78589 - DNA, 19 bp, Homo sapiens
  siRNA target sequence for DNAH11 (NM_003777.1,4916-4934).
gcctttcctcgcttctatt

SEQ ID NO: 78590 - DNA, 19 bp, Homo sapiens
  siRNA target sequence for DNAH11 (NM_003777.1,4917-4935).
cctttcctcgcttctattt

SEQ ID NO: 78591 - DNA, 19 bp, Homo sapiens
  siRNA target sequence for DNAH11 (NM_003777.1,5113-5131).
ccaagccgagtgtgaatgt

SEQ ID NO: 78592 - DNA, 19 bp, Homo sapiens
  siRNA target sequence for DNAH11 (NM_003777.1,5151-5169).
ggcttctgcaacttgaaca

SEQ ID NO: 78593 - DNA, 19 bp, Homo sapiens
  siRNA target sequence for DNAH11 (NM_003777.1,5180-5198).
gaaacggtgcgtcattcta

SEQ ID NO: 78594 - DNA, 19 bp, Homo sapiens
  siRNA target sequence for DNAH11 (NM_003777.1,5185-5203).
ggtgcgtcattctataaca

SEQ ID NO: 78595 - DNA, 19 bp, Homo sapiens
  siRNA target sequence for DNAH11 (NM_003777.1,5215-5233).
ggcctacgaggaaaaacct

SEQ ID NO: 78596 - DNA, 19 bp, Homo sapiens
  siRNA target sequence for DNAH11 (NM_003777.1,5216-5234).
gcctacgaggaaaaaccta

SEQ ID NO: 78597 - DNA, 19 bp, Homo sapiens
  siRNA target sequence for DNAH11 (NM_003777.1,5231-5249).
cctagggaactgtggattt

SEQ ID NO: 78598 - DNA, 19 bp, Homo sapiens
  siRNA target sequence for DNAH11 (NM_003777.1,5232-5250).
ctagggaactgtggatttt

SEQ ID NO: 78599 - DNA, 19 bp, Homo sapiens
  siRNA target sequence for DNAH11 (NM_003777.1,5235-5253).
gggaactgtggatttttga

SEQ ID NO: 78600 - DNA, 19 bp, Homo sapiens
  siRNA target sequence for DNAH11 (NM_003777.1,5306-5324).
gtaggaatagccttcagta

SEQ ID NO: 78601 - DNA, 19 bp, Homo sapiens
  siRNA target sequence for DNAH11 (NM_003777.1,5327-5345).
ctggaagaaggctacgaaa

SEQ ID NO: 78602 - DNA, 19 bp, Homo sapiens
  siRNA target sequence for DNAH11 (NM_003777.1,5342-5360).
gaaacagccctgaaggatt

SEQ ID NO: 78603 - DNA, 19 bp, Homo sapiens
  siRNA target sequence for DNAH11 (NM_003777.1,5386-5404).
gaatacactgattacactt

SEQ ID NO: 78604 - DNA, 19 bp, Homo sapiens
  siRNA target sequence for DNAH11 (NM_003777.1,5433-5451).
gacagaagatcatgacaat

SEQ ID NO: 78605 - DNA, 19 bp, Homo sapiens
  siRNA target sequence for DNAH11 (NM_003777.1,5477-5495).
gacgtggtggcaaaactta

SEQ ID NO: 78606 - DNA, 19 bp, Homo sapiens
  siRNA target sequence for DNAH11 (NM_003777.1,5479-5497).
cgtggtggcaaaacttatt

SEQ ID NO: 78607 - DNA, 19 bp, Homo sapiens
  siRNA target sequence for DNAH11 (NM_003777.1,5516-5534).
gtcagtccccaagctttta

SEQ ID NO: 78608 - DNA, 19 bp, Homo sapiens
  siRNA target sequence for DNAH11 (NM_003777.1,5562-5580).
gggaggatacccagaaaca

SEQ ID NO: 78609 - DNA, 19 bp, Homo sapiens
  siRNA target sequence for DNAH11 (NM_003777.1,5605-5623).
ccagttccagtacttctat

SEQ ID NO: 78610 - DNA, 19 bp, Homo sapiens
  siRNA target sequence for DNAH11 (NM_003777.1,5614-5632).
gtacttctatgaatactta

SEQ ID NO: 78611 - DNA, 19 bp, Homo sapiens
  siRNA target sequence for DNAH11 (NM_003777.1,5669-5687).
gacaggtgttatattacct

SEQ ID NO: 78612 - DNA, 19 bp, Homo sapiens
  siRNA target sequence for DNAH11 (NM_003777.1,5671-5689).
caggtgttatattacctta

SEQ ID NO: 78613 - DNA, 19 bp, Homo sapiens
  siRNA target sequence for DNAH11 (NM_003777.1,5674-5692).
gtgttatattaccttaact

SEQ ID NO: 78614 - DNA, 19 bp, Homo sapiens
  siRNA target sequence for DNAH11 (NM_003777.1,5686-5704).
cttaactcaatcacttcat

SEQ ID NO: 78615 - DNA, 19 bp, Homo sapiens
  siRNA target sequence for DNAH11 (NM_003777.1,5811-5829).
cagagcaaatggactacaa

SEQ ID NO: 78616 - DNA, 19 bp, Homo sapiens
  siRNA target sequence for DNAH11 (NM_003777.1,5813-5831).
gagcaaatggactacaaat

SEQ ID NO: 78617 - DNA, 19 bp, Homo sapiens
  siRNA target sequence for DNAH11 (NM_003777.1,5816-5834).
caaatggactacaaatcca

SEQ ID NO: 78618 - DNA, 19 bp, Homo sapiens
  siRNA target sequence for DNAH11 (NM_003777.1,5898-5916).
gaatctctgtggaagttct

SEQ ID NO: 78619 - DNA, 19 bp, Homo sapiens
  siRNA target sequence for DNAH11 (NM_003777.1,6007-6025).
gaagccatcagttggaata

SEQ ID NO: 78620 - DNA, 19 bp, Homo sapiens
  siRNA target sequence for DNAH11 (NM_003777.1,6010-6028).
gccatcagttggaatattt

SEQ ID NO: 78621 - DNA, 19 bp, Homo sapiens
  siRNA target sequence for DNAH11 (NM_003777.1,6011-6029).
ccatcagttggaatattta

SEQ ID NO: 78622 - DNA, 19 bp, Homo sapiens
  siRNA target sequence for DNAH11 (NM_003777.1,6179-6197).
gcccgaaagttcattacgt

SEQ ID NO: 78623 - DNA, 19 bp, Homo sapiens
  siRNA target sequence for DNAH11 (NM_003777.1,6180-6198).
cccgaaagttcattacgtt

SEQ ID NO: 78624 - DNA, 19 bp, Homo sapiens
  siRNA target sequence for DNAH11 (NM_003777.1,6195-6213).
cgttgtacacgctttgcaa

SEQ ID NO: 78625 - DNA, 19 bp, Homo sapiens
  siRNA target sequence for DNAH11 (NM_003777.1,6244-6262).
ctggggacttcgtgctatt

SEQ ID NO: 78626 - DNA, 19 bp, Homo sapiens
  siRNA target sequence for DNAH11 (NM_003777.1,6246-6264).
ggggacttcgtgctattaa

SEQ ID NO: 78627 - DNA, 19 bp, Homo sapiens
  siRNA target sequence for DNAH11 (NM_003777.1,6248-6266).
ggacttcgtgctattaagt

SEQ ID NO: 78628 - DNA, 19 bp, Homo sapiens
  siRNA target sequence for DNAH11 (NM_003777.1,6315-6333).
ccgaagatcaggtactcat

SEQ ID NO: 78629 - DNA, 19 bp, Homo sapiens
  siRNA target sequence for DNAH11 (NM_003777.1,6325-6343).
ggtactcatgagagcatta

SEQ ID NO: 78630 - DNA, 19 bp, Homo sapiens
  siRNA target sequence for DNAH11 (NM_003777.1,6505-6523).
gagcttcatcctcaaagtt

SEQ ID NO: 78631 - DNA, 19 bp, Homo sapiens
  siRNA target sequence for DNAH11 (NM_003777.1,6507-6525).
gcttcatcctcaaagttgt

SEQ ID NO: 78632 - DNA, 19 bp, Homo sapiens
  siRNA target sequence for DNAH11 (NM_003777.1,6558-6576).
cggtctttgtagttggaaa

SEQ ID NO: 78633 - DNA, 19 bp, Homo sapiens
  siRNA target sequence for DNAH11 (NM_003777.1,6562-6580).
ctttgtagttggaaatgca

SEQ ID NO: 78634 - DNA, 19 bp, Homo sapiens
  siRNA target sequence for DNAH11 (NM_003777.1,6582-6600).
gcacaggaaagagtaagat

SEQ ID NO: 78635 - DNA, 19 bp, Homo sapiens
  siRNA target sequence for DNAH11 (NM_003777.1,6583-6601).
cacaggaaagagtaagatt

SEQ ID NO: 78636 - DNA, 19 bp, Homo sapiens
  siRNA target sequence for DNAH11 (NM_003777.1,6606-6624).
gaacactgaaccgaacata

SEQ ID NO: 78637 - DNA, 19 bp, Homo sapiens
  siRNA target sequence for DNAH11 (NM_003777.1,6609-6627).
cactgaaccgaacatatgt

SEQ ID NO: 78638 - DNA, 19 bp, Homo sapiens
  siRNA target sequence for DNAH11 (NM_003777.1,6611-6629).
ctgaaccgaacatatgtta

SEQ ID NO: 78639 - DNA, 19 bp, Homo sapiens
  siRNA target sequence for DNAH11 (NM_003777.1,6617-6635).
cgaacatatgttaacatga

SEQ ID NO: 78640 - DNA, 19 bp, Homo sapiens
  siRNA target sequence for DNAH11 (NM_003777.1,6643-6661).
gccggtttggaatgactta

SEQ ID NO: 78641 - DNA, 19 bp, Homo sapiens
  siRNA target sequence for DNAH11 (NM_003777.1,6645-6663).
cggtttggaatgacttaaa

SEQ ID NO: 78642 - DNA, 19 bp, Homo sapiens
  siRNA target sequence for DNAH11 (NM_003777.1,6691-6709).
ctttggtttcatacatcat

SEQ ID NO: 78643 - DNA, 19 bp, Homo sapiens
  siRNA target sequence for DNAH11 (NM_003777.1,6917-6935).
gcactcactcccttcatga

SEQ ID NO: 78644 - DNA, 19 bp, Homo sapiens
  siRNA target sequence for DNAH11 (NM_003777.1,6927-6945).
ccttcatgaggcttctgtt

SEQ ID NO: 78645 - DNA, 19 bp, Homo sapiens
  siRNA target sequence for DNAH11 (NM_003777.1,6937-6955).
gcttctgtttgagatacat

SEQ ID NO: 78646 - DNA, 19 bp, Homo sapiens
  siRNA target sequence for DNAH11 (NM_003777.1,6992-7010).
gctggtattctgtatgtga

SEQ ID NO: 78647 - DNA, 19 bp, Homo sapiens
  siRNA target sequence for DNAH11 (NM_003777.1,7003-7021).
gtatgtgaacccacaagat

SEQ ID NO: 78648 - DNA, 19 bp, Homo sapiens
  siRNA target sequence for DNAH11 (NM_003777.1,7059-7077).
gaaggcggcatcaatcaga

SEQ ID NO: 78649 - DNA, 19 bp, Homo sapiens
  siRNA target sequence for DNAH11 (NM_003777.1,7062-7080).
ggcggcatcaatcagaaaa

SEQ ID NO: 78650 - DNA, 19 bp, Homo sapiens
  siRNA target sequence for DNAH11 (NM_003777.1,7076-7094).
gaaaaggccaatttgacta

SEQ ID NO: 78651 - DNA, 19 bp, Homo sapiens
  siRNA target sequence for DNAH11 (NM_003777.1,7114-7132).
ccctgcatgcttggataaa

SEQ ID NO: 78652 - DNA, 19 bp, Homo sapiens
  siRNA target sequence for DNAH11 (NM_003777.1,7116-7134).
ctgcatgcttggataaact

SEQ ID NO: 78653 - DNA, 19 bp, Homo sapiens
  siRNA target sequence for DNAH11 (NM_003777.1,7118-7136).
gcatgcttggataaactga

SEQ ID NO: 78654 - DNA, 19 bp, Homo sapiens
  siRNA target sequence for DNAH11 (NM_003777.1,7184-7202).
cagactctatgtgttcttt

SEQ ID NO: 78655 - DNA, 19 bp, Homo sapiens
  siRNA target sequence for DNAH11 (NM_003777.1,7299-7317).
gcaccctgctacaagatca

SEQ ID NO: 78656 - DNA, 19 bp, Homo sapiens
  siRNA target sequence for DNAH11 (NM_003777.1,7382-7400).
ccgtcgcagggaacaatct

SEQ ID NO: 78657 - DNA, 19 bp, Homo sapiens
  siRNA target sequence for DNAH11 (NM_003777.1,7383-7401).
cgtcgcagggaacaatctt

SEQ ID NO: 78658 - DNA, 19 bp, Homo sapiens
  siRNA target sequence for DNAH11 (NM_003777.1,7384-7402).
gtcgcagggaacaatcttt

SEQ ID NO: 78659 - DNA, 19 bp, Homo sapiens
  siRNA target sequence for DNAH11 (NM_003777.1,7386-7404).
cgcagggaacaatctttga

SEQ ID NO: 78660 - DNA, 19 bp, Homo sapiens
  siRNA target sequence for DNAH11 (NM_003777.1,7387-7405).
gcagggaacaatctttgat

SEQ ID NO: 78661 - DNA, 19 bp, Homo sapiens
  siRNA target sequence for DNAH11 (NM_003777.1,7414-7432).
ggaccacaaaactaagaaa

SEQ ID NO: 78662 - DNA, 19 bp, Homo sapiens
  siRNA target sequence for DNAH11 (NM_003777.1,7417-7435).
ccacaaaactaagaaatta

SEQ ID NO: 78663 - DNA, 19 bp, Homo sapiens
  siRNA target sequence for DNAH11 (NM_003777.1,7514-7532).
gagacagctcgtcttagat

SEQ ID NO: 78664 - DNA, 19 bp, Homo sapiens
  siRNA target sequence for DNAH11 (NM_003777.1,7516-7534).
gacagctcgtcttagatat

SEQ ID NO: 78665 - DNA, 19 bp, Homo sapiens
  siRNA target sequence for DNAH11 (NM_003777.1,7518-7536).
cagctcgtcttagatattt

SEQ ID NO: 78666 - DNA, 19 bp, Homo sapiens
  siRNA target sequence for DNAH11 (NM_003777.1,7520-7538).
gctcgtcttagatatttca

SEQ ID NO: 78667 - DNA, 19 bp, Homo sapiens
  siRNA target sequence for DNAH11 (NM_003777.1,7530-7548).
gatatttcatggagttgtt

SEQ ID NO: 78668 - DNA, 19 bp, Homo sapiens
  siRNA target sequence for DNAH11 (NM_003777.1,7633-7651).
ctctgaggattacatagta

SEQ ID NO: 78669 - DNA, 19 bp, Homo sapiens
  siRNA target sequence for DNAH11 (NM_003777.1,7656-7674).
gtgtgcctttcaactacta

SEQ ID NO: 78670 - DNA, 19 bp, Homo sapiens
  siRNA target sequence for DNAH11 (NM_003777.1,7792-7810).
gcctgaagtggacttatat

SEQ ID NO: 78671 - DNA, 19 bp, Homo sapiens
  siRNA target sequence for DNAH11 (NM_003777.1,7837-7855).
ccggcagcatattgattat

SEQ ID NO: 78672 - DNA, 19 bp, Homo sapiens
  siRNA target sequence for DNAH11 (NM_003777.1,7909-7927).
gtatgtcgcctgcatgaat

SEQ ID NO: 78673 - DNA, 19 bp, Homo sapiens
  siRNA target sequence for DNAH11 (NM_003777.1,7998-8016).
catctttggatgcactaaa

SEQ ID NO: 78674 - DNA, 19 bp, Homo sapiens
  siRNA target sequence for DNAH11 (NM_003777.1,8019-8037).
ccatctatggccaaatctt

SEQ ID NO: 78675 - DNA, 19 bp, Homo sapiens
  siRNA target sequence for DNAH11 (NM_003777.1,8094-8112).
ctttgatccaggcaacaat

SEQ ID NO: 78676 - DNA, 19 bp, Homo sapiens
  siRNA target sequence for DNAH11 (NM_003777.1,8098-8116).
gatccaggcaacaatagca

SEQ ID NO: 78677 - DNA, 19 bp, Homo sapiens
  siRNA target sequence for DNAH11 (NM_003777.1,8104-8122).
ggcaacaatagcattccat

SEQ ID NO: 78678 - DNA, 19 bp, Homo sapiens
  siRNA target sequence for DNAH11 (NM_003777.1,8148-8166).
ccacggctattaaattcca

SEQ ID NO: 78679 - DNA, 19 bp, Homo sapiens
  siRNA target sequence for DNAH11 (NM_003777.1,8165-8183).
cactacatctttaatctga

SEQ ID NO: 78680 - DNA, 19 bp, Homo sapiens
  siRNA target sequence for DNAH11 (NM_003777.1,8197-8215).
cgtcttccaggggatttta

SEQ ID NO: 78681 - DNA, 19 bp, Homo sapiens
  siRNA target sequence for DNAH11 (NM_003777.1,8244-8262).
cacttgatttaatacatct

SEQ ID NO: 78682 - DNA, 19 bp, Homo sapiens
  siRNA target sequence for DNAH11 (NM_003777.1,8281-8299).
ccgtgtttatggagacaaa

SEQ ID NO: 78683 - DNA, 19 bp, Homo sapiens
  siRNA target sequence for DNAH11 (NM_003777.1,8283-8301).
gtgtttatggagacaaact

SEQ ID NO: 78684 - DNA, 19 bp, Homo sapiens
  siRNA target sequence for DNAH11 (NM_003777.1,8342-8360).
ctggaaactgcttataaat

SEQ ID NO: 78685 - DNA, 19 bp, Homo sapiens
  siRNA target sequence for DNAH11 (NM_003777.1,8379-8397).
gtcacatgctgcttcaaca

SEQ ID NO: 78686 - DNA, 19 bp, Homo sapiens
  siRNA target sequence for DNAH11 (NM_003777.1,8393-8411).
caacagcccctcatttatt

SEQ ID NO: 78687 - DNA, 19 bp, Homo sapiens
  siRNA target sequence for DNAH11 (NM_003777.1,8427-8445).
gagggaaggacccacatta

SEQ ID NO: 78688 - DNA, 19 bp, Homo sapiens
  siRNA target sequence for DNAH11 (NM_003777.1,8430-8448).
ggaaggacccacattacat

SEQ ID NO: 78689 - DNA, 19 bp, Homo sapiens
  siRNA target sequence for DNAH11 (NM_003777.1,8478-8496).
cgattcttacagaaacgtt

SEQ ID NO: 78690 - DNA, 19 bp, Homo sapiens
  siRNA target sequence for DNAH11 (NM_003777.1,8479-8497).
gattcttacagaaacgtta

SEQ ID NO: 78691 - DNA, 19 bp, Homo sapiens
  siRNA target sequence for DNAH11 (NM_003777.1,8483-8501).
cttacagaaacgttagaca

SEQ ID NO: 78692 - DNA, 19 bp, Homo sapiens
  siRNA target sequence for DNAH11 (NM_003777.1,8487-8505).
cagaaacgttagacaacta

SEQ ID NO: 78693 - DNA, 19 bp, Homo sapiens
  siRNA target sequence for DNAH11 (NM_003777.1,8489-8507).
gaaacgttagacaactaca

SEQ ID NO: 78694 - DNA, 19 bp, Homo sapiens
  siRNA target sequence for DNAH11 (NM_003777.1,8498-8516).
gacaactacaatgaactaa

SEQ ID NO: 78695 - DNA, 19 bp, Homo sapiens
  siRNA target sequence for DNAH11 (NM_003777.1,8519-8537).
gctgccatgcacctagttt

SEQ ID NO: 78696 - DNA, 19 bp, Homo sapiens
  siRNA target sequence for DNAH11 (NM_003777.1,8523-8541).
ccatgcacctagttttgtt

SEQ ID NO: 78697 - DNA, 19 bp, Homo sapiens
  siRNA target sequence for DNAH11 (NM_003777.1,8527-8545).
gcacctagttttgtttgaa

SEQ ID NO: 78698 - DNA, 19 bp, Homo sapiens
  siRNA target sequence for DNAH11 (NM_003777.1,8693-8711).
ctgaccgagggctatggaa

SEQ ID NO: 78699 - DNA, 19 bp, Homo sapiens
  siRNA target sequence for DNAH11 (NM_003777.1,8716-8734).
ggaacttcgggtagatctt

SEQ ID NO: 78700 - DNA, 19 bp, Homo sapiens
  siRNA target sequence for DNAH11 (NM_003777.1,8724-8742).
gggtagatcttgccaattt

SEQ ID NO: 78701 - DNA, 19 bp, Homo sapiens
  siRNA target sequence for DNAH11 (NM_003777.1,8729-8747).
gatcttgccaatttgtaca

SEQ ID NO: 78702 - DNA, 19 bp, Homo sapiens
  siRNA target sequence for DNAH11 (NM_003777.1,8750-8768).
cgaactggagccaagaaca

SEQ ID NO: 78703 - DNA, 19 bp, Homo sapiens
  siRNA target sequence for DNAH11 (NM_003777.1,8815-8833).
cttcctcgtgctgattaat

SEQ ID NO: 78704 - DNA, 19 bp, Homo sapiens
  siRNA target sequence for DNAH11 (NM_003777.1,8819-8837).
ctcgtgctgattaatgact

SEQ ID NO: 78705 - DNA, 19 bp, Homo sapiens
  siRNA target sequence for DNAH11 (NM_003777.1,8943-8961).
gggaaaactgttggaaatt

SEQ ID NO: 78706 - DNA, 19 bp, Homo sapiens
  siRNA target sequence for DNAH11 (NM_003777.1,8978-8996).
cgactacagctcaaaatca

SEQ ID NO: 78707 - DNA, 19 bp, Homo sapiens
  siRNA target sequence for DNAH11 (NM_003777.1,8979-8997).
gactacagctcaaaatcat

SEQ ID NO: 78708 - DNA, 19 bp, Homo sapiens
  siRNA target sequence for DNAH11 (NM_003777.1,9017-9035).
ggtcgcacgctgagagtta

SEQ ID NO: 78709 - DNA, 19 bp, Homo sapiens
  siRNA target sequence for DNAH11 (NM_003777.1,9115-9133).
cgtcagcaggaggttcatt

SEQ ID NO: 78710 - DNA, 19 bp, Homo sapiens
  siRNA target sequence for DNAH11 (NM_003777.1,9126-9144).
ggttcattgaggaaaccaa

SEQ ID NO: 78711 - DNA, 19 bp, Homo sapiens
  siRNA target sequence for DNAH11 (NM_003777.1,9156-9174).
cagtgcacaaagactctat

SEQ ID NO: 78712 - DNA, 19 bp, Homo sapiens
  siRNA target sequence for DNAH11 (NM_003777.1,9158-9176).
gtgcacaaagactctatta

SEQ ID NO: 78713 - DNA, 19 bp, Homo sapiens
  siRNA target sequence for DNAH11 (NM_003777.1,9202-9220).
cactgtaaatgaaatgagt

SEQ ID NO: 78714 - DNA, 19 bp, Homo sapiens
  siRNA target sequence for DNAH11 (NM_003777.1,9212-9230).
gaaatgagtaccagatatt

SEQ ID NO: 78715 - DNA, 19 bp, Homo sapiens
  siRNA target sequence for DNAH11 (NM_003777.1,9253-9271).
ctataccaccccaaagagt

SEQ ID NO: 78716 - DNA, 19 bp, Homo sapiens
  siRNA target sequence for DNAH11 (NM_003777.1,9325-9343).
ggtatccgagaaaaaagaa

SEQ ID NO: 78717 - DNA, 19 bp, Homo sapiens
  siRNA target sequence for DNAH11 (NM_003777.1,9347-9365).
ctggtgaacggcatccaaa

SEQ ID NO: 78718 - DNA, 19 bp, Homo sapiens
  siRNA target sequence for DNAH11 (NM_003777.1,9352-9370).
gaacggcatccaaaagcta

SEQ ID NO: 78719 - DNA, 19 bp, Homo sapiens
  siRNA target sequence for DNAH11 (NM_003777.1,9355-9373).
cggcatccaaaagctaaaa

SEQ ID NO: 78720 - DNA, 19 bp, Homo sapiens
  siRNA target sequence for DNAH11 (NM_003777.1,9426-9444).
ccgagctgcaactgagaaa

SEQ ID NO: 78721 - DNA, 19 bp, Homo sapiens
  siRNA target sequence for DNAH11 (NM_003777.1,9427-9445).
cgagctgcaactgagaaat

SEQ ID NO: 78722 - DNA, 19 bp, Homo sapiens
  siRNA target sequence for DNAH11 (NM_003777.1,9453-9471).
ccgaagctctgatcacaaa

SEQ ID NO: 78723 - DNA, 19 bp, Homo sapiens
  siRNA target sequence for DNAH11 (NM_003777.1,9477-9495).
gccttcagacggagaaagt

SEQ ID NO: 78724 - DNA, 19 bp, Homo sapiens
  siRNA target sequence for DNAH11 (NM_003777.1,9579-9597).
gtgaagctgacttactcaa

SEQ ID NO: 78725 - DNA, 19 bp, Homo sapiens
  siRNA target sequence for DNAH11 (NM_003777.1,9684-9702).
ctcccatcgcagttaccaa

SEQ ID NO: 78726 - DNA, 19 bp, Homo sapiens
  siRNA target sequence for DNAH11 (NM_003777.1,9688-9706).
catcgcagttaccaatgtt

SEQ ID NO: 78727 - DNA, 19 bp, Homo sapiens
  siRNA target sequence for DNAH11 (NM_003777.1,9691-9709).
cgcagttaccaatgttact

SEQ ID NO: 78728 - DNA, 19 bp, Homo sapiens
  siRNA target sequence for DNAH11 (NM_003777.1,9762-9780).
gttggaaagcagctaaagt

SEQ ID NO: 78729 - DNA, 19 bp, Homo sapiens
  siRNA target sequence for DNAH11 (NM_003777.1,9788-9806).
ggaaaggttgatgattttt

SEQ ID NO: 78730 - DNA, 19 bp, Homo sapiens
  siRNA target sequence for DNAH11 (NM_003777.1,9812-9830).
gcattaattaactatgaca

SEQ ID NO: 78731 - DNA, 19 bp, Homo sapiens
  siRNA target sequence for DNAH11 (NM_003777.1,9813-9831).
cattaattaactatgacaa

SEQ ID NO: 78732 - DNA, 19 bp, Homo sapiens
  siRNA target sequence for DNAH11 (NM_003777.1,9860-9878).
gtggtgaatgaacactatt

SEQ ID NO: 78733 - DNA, 19 bp, Homo sapiens
  siRNA target sequence for DNAH11 (NM_003777.1,9865-9883).
gaatgaacactatttgaaa

SEQ ID NO: 78734 - DNA, 19 bp, Homo sapiens
  siRNA target sequence for DNAH11 (NM_003777.1,9904-9922).
cctgattcgaaccaaatct

SEQ ID NO: 78735 - DNA, 19 bp, Homo sapiens
  siRNA target sequence for DNAH11 (NM_003777.1,9905-9923).
ctgattcgaaccaaatctt

SEQ ID NO: 78736 - DNA, 19 bp, Homo sapiens
  siRNA target sequence for DNAH11 (NM_003777.1,9907-9925).
gattcgaaccaaatctttt

SEQ ID NO: 78737 - DNA, 19 bp, Homo sapiens
  siRNA target sequence for DNAH11 (NM_003777.1,9942-9960).
gtgcctgggtcatcaacat

SEQ ID NO: 78738 - DNA, 19 bp, Homo sapiens
  siRNA target sequence for DNAH11 (NM_003777.1,10014-10032).
cccaagcaaacttagaact

SEQ ID NO: 78739 - DNA, 19 bp, Homo sapiens
  siRNA target sequence for DNAH11 (NM_003777.1,10079-10097).
gatctggatcgaaatctga

SEQ ID NO: 78740 - DNA, 19 bp, Homo sapiens
  siRNA target sequence for DNAH11 (NM_003777.1,10098-10116).
gcagactcacggcttcatt

SEQ ID NO: 78741 - DNA, 19 bp, Homo sapiens
  siRNA target sequence for DNAH11 (NM_003777.1,10099-10117).
cagactcacggcttcattt

SEQ ID NO: 78742 - DNA, 19 bp, Homo sapiens
  siRNA target sequence for DNAH11 (NM_003777.1,10103-10121).
ctcacggcttcatttgaaa

SEQ ID NO: 78743 - DNA, 19 bp, Homo sapiens
  siRNA target sequence for DNAH11 (NM_003777.1,10171-10189).
caaaaccatcaaattagct

SEQ ID NO: 78744 - DNA, 19 bp, Homo sapiens
  siRNA target sequence for DNAH11 (NM_003777.1,10177-10195).
catcaaattagctaacaga

SEQ ID NO: 78745 - DNA, 19 bp, Homo sapiens
  siRNA target sequence for DNAH11 (NM_003777.1,10226-10244).
cgctggggtcaatccatta

SEQ ID NO: 78746 - DNA, 19 bp, Homo sapiens
  siRNA target sequence for DNAH11 (NM_003777.1,10227-10245).
gctggggtcaatccattaa

SEQ ID NO: 78747 - DNA, 19 bp, Homo sapiens
  siRNA target sequence for DNAH11 (NM_003777.1,10402-10420).
cgaaggcctggacttgata

SEQ ID NO: 78748 - DNA, 19 bp, Homo sapiens
  siRNA target sequence for DNAH11 (NM_003777.1,10403-10421).
gaaggcctggacttgatat

SEQ ID NO: 78749 - DNA, 19 bp, Homo sapiens
  siRNA target sequence for DNAH11 (NM_003777.1,10412-10430).
gacttgatatccatgttga

SEQ ID NO: 78750 - DNA, 19 bp, Homo sapiens
  siRNA target sequence for DNAH11 (NM_003777.1,10429-10447).
gacggatgatgctacaatt

SEQ ID NO: 78751 - DNA, 19 bp, Homo sapiens
  siRNA target sequence for DNAH11 (NM_003777.1,10443-10461).
caattgccgcctggaataa

SEQ ID NO: 78752 - DNA, 19 bp, Homo sapiens
  siRNA target sequence for DNAH11 (NM_003777.1,10467-10485).
gactgcccagtgacagaat

SEQ ID NO: 78753 - DNA, 19 bp, Homo sapiens
  siRNA target sequence for DNAH11 (NM_003777.1,10493-10511).
gaaaatgccgctatcctaa

SEQ ID NO: 78754 - DNA, 19 bp, Homo sapiens
  siRNA target sequence for DNAH11 (NM_003777.1,10545-10563).
cccagcaacagggaattaa

SEQ ID NO: 78755 - DNA, 19 bp, Homo sapiens
  siRNA target sequence for DNAH11 (NM_003777.1,10651-10669).
ctttggtgatgtcatctta

SEQ ID NO: 78756 - DNA, 19 bp, Homo sapiens
  siRNA target sequence for DNAH11 (NM_003777.1,10783-10801).
gaactttcgccttatcctt

SEQ ID NO: 78757 - DNA, 19 bp, Homo sapiens
  siRNA target sequence for DNAH11 (NM_003777.1,10792-10810).
ccttatccttcacacaaaa

SEQ ID NO: 78758 - DNA, 19 bp, Homo sapiens
  siRNA target sequence for DNAH11 (NM_003777.1,10804-10822).
cacaaaattggcaaatcct

SEQ ID NO: 78759 - DNA, 19 bp, Homo sapiens
  siRNA target sequence for DNAH11 (NM_003777.1,10847-10865).
cagacaactctcctcaatt

SEQ ID NO: 78760 - DNA, 19 bp, Homo sapiens
  siRNA target sequence for DNAH11 (NM_003777.1,10903-10921).
ggcagaggttgtcagtatt

SEQ ID NO: 78761 - DNA, 19 bp, Homo sapiens
  siRNA target sequence for DNAH11 (NM_003777.1,10907-10925).
gaggttgtcagtattgaaa

SEQ ID NO: 78762 - DNA, 19 bp, Homo sapiens
  siRNA target sequence for DNAH11 (NM_003777.1,10937-10955).
gagaaacttaagttggtat

SEQ ID NO: 78763 - DNA, 19 bp, Homo sapiens
  siRNA target sequence for DNAH11 (NM_003777.1,11088-11106).
ccaccgtggcagagataga

SEQ ID NO: 78764 - DNA, 19 bp, Homo sapiens
  siRNA target sequence for DNAH11 (NM_003777.1,11146-11164).
caacgaggcccgagaatgt

SEQ ID NO: 78765 - DNA, 19 bp, Homo sapiens
  siRNA target sequence for DNAH11 (NM_003777.1,11150-11168).
gaggcccgagaatgttaca

SEQ ID NO: 78766 - DNA, 19 bp, Homo sapiens
  siRNA target sequence for DNAH11 (NM_003777.1,11152-11170).
ggcccgagaatgttacaga

SEQ ID NO: 78767 - DNA, 19 bp, Homo sapiens
  siRNA target sequence for DNAH11 (NM_003777.1,11181-11199).
caagagcatctcttcttta

SEQ ID NO: 78768 - DNA, 19 bp, Homo sapiens
  siRNA target sequence for DNAH11 (NM_003777.1,11247-11265).
ctttgaaggcttttaacgt

SEQ ID NO: 78769 - DNA, 19 bp, Homo sapiens
  siRNA target sequence for DNAH11 (NM_003777.1,11450-11468).
gaccctcttgaattggatt

SEQ ID NO: 78770 - DNA, 19 bp, Homo sapiens
  siRNA target sequence for DNAH11 (NM_003777.1,11473-11491).
gcttcgattcacagttgaa

SEQ ID NO: 78771 - DNA, 19 bp, Homo sapiens
  siRNA target sequence for DNAH11 (NM_003777.1,11507-11525).
cccgttgacttcctaactt

SEQ ID NO: 78772 - DNA, 19 bp, Homo sapiens
  siRNA target sequence for DNAH11 (NM_003777.1,11557-11575).
cgtcatggaagaatttcga

SEQ ID NO: 78773 - DNA, 19 bp, Homo sapiens
  siRNA target sequence for DNAH11 (NM_003777.1,11709-11727).
caatgcgccctgacagaat

SEQ ID NO: 78774 - DNA, 19 bp, Homo sapiens
  siRNA target sequence for DNAH11 (NM_003777.1,11728-11746).
gacgtatgctctcagaaat

SEQ ID NO: 78775 - DNA, 19 bp, Homo sapiens
  siRNA target sequence for DNAH11 (NM_003777.1,11730-11748).
cgtatgctctcagaaattt

SEQ ID NO: 78776 - DNA, 19 bp, Homo sapiens
  siRNA target sequence for DNAH11 (NM_003777.1,11785-11803).
gaccagattggacttagtt

SEQ ID NO: 78777 - DNA, 19 bp, Homo sapiens
  siRNA target sequence for DNAH11 (NM_003777.1,11787-11805).
ccagattggacttagttaa

SEQ ID NO: 78778 - DNA, 19 bp, Homo sapiens
  siRNA target sequence for DNAH11 (NM_003777.1,11788-11806).
cagattggacttagttaaa

SEQ ID NO: 78779 - DNA, 19 bp, Homo sapiens
  siRNA target sequence for DNAH11 (NM_003777.1,11797-11815).
cttagttaaagcattcgaa

SEQ ID NO: 78780 - DNA, 19 bp, Homo sapiens
  siRNA target sequence for DNAH11 (NM_003777.1,11823-11841).
gcccagccacccccatatt

SEQ ID NO: 78781 - DNA, 19 bp, Homo sapiens
  siRNA target sequence for DNAH11 (NM_003777.1,11859-11877).
gggtagatgcccttaaaga

SEQ ID NO: 78782 - DNA, 19 bp, Homo sapiens
  siRNA target sequence for DNAH11 (NM_003777.1,11898-11916).
gacttggctttacaattga

SEQ ID NO: 78783 - DNA, 19 bp, Homo sapiens
  siRNA target sequence for DNAH11 (NM_003777.1,11929-11947).
ccacaatgtgtctttagga

SEQ ID NO: 78784 - DNA, 19 bp, Homo sapiens
  siRNA target sequence for DNAH11 (NM_003777.1,12004-12022).
ctgggtcatcctccaaaat

SEQ ID NO: 78785 - DNA, 19 bp, Homo sapiens
  siRNA target sequence for DNAH11 (NM_003777.1,12006-12024).
gggtcatcctccaaaatgt

SEQ ID NO: 78786 - DNA, 19 bp, Homo sapiens
  siRNA target sequence for DNAH11 (NM_003777.1,12007-12025).
ggtcatcctccaaaatgtt

SEQ ID NO: 78787 - DNA, 19 bp, Homo sapiens
  siRNA target sequence for DNAH11 (NM_003777.1,12201-12219).
cagggatgctggccaattt

SEQ ID NO: 78788 - DNA, 19 bp, Homo sapiens
  siRNA target sequence for DNAH11 (NM_003777.1,12228-12246).
ccctgtacaactttgatca

SEQ ID NO: 78789 - DNA, 19 bp, Homo sapiens
  siRNA target sequence for DNAH11 (NM_003777.1,12238-12256).
ctttgatcaggatacactt

SEQ ID NO: 78790 - DNA, 19 bp, Homo sapiens
  siRNA target sequence for DNAH11 (NM_003777.1,12352-12370).
gggctggagccgaagctat

SEQ ID NO: 78791 - DNA, 19 bp, Homo sapiens
  siRNA target sequence for DNAH11 (NM_003777.1,12358-12376).
gagccgaagctatcctttt

SEQ ID NO: 78792 - DNA, 19 bp, Homo sapiens
  siRNA target sequence for DNAH11 (NM_003777.1,12401-12419).
gccagtgtcctctacaact

SEQ ID NO: 78793 - DNA, 19 bp, Homo sapiens
  siRNA target sequence for DNAH11 (NM_003777.1,12596-12614).
gccccaccctacctagatt

SEQ ID NO: 78794 - DNA, 19 bp, Homo sapiens
  siRNA target sequence for DNAH11 (NM_003777.1,12598-12616).
cccaccctacctagattat

SEQ ID NO: 78795 - DNA, 19 bp, Homo sapiens
  siRNA target sequence for DNAH11 (NM_003777.1,12618-12636).
caggctaccaccagtacat

SEQ ID NO: 78796 - DNA, 19 bp, Homo sapiens
  siRNA target sequence for DNAH11 (NM_003777.1,12621-12639).
gctaccaccagtacataga

SEQ ID NO: 78797 - DNA, 19 bp, Homo sapiens
  siRNA target sequence for DNAH11 (NM_003777.1,12679-12697).
ccacccaaatgctgaaata

SEQ ID NO: 78798 - DNA, 19 bp, Homo sapiens
  siRNA target sequence for DNAH11 (NM_003777.1,12935-12953).
ctcattcgggaaatacgta

SEQ ID NO: 78799 - DNA, 19 bp, Homo sapiens
  siRNA target sequence for DNAH11 (NM_003777.1,12942-12960).
gggaaatacgtatatcact

SEQ ID NO: 78800 - DNA, 19 bp, Homo sapiens
  siRNA target sequence for DNAH11 (NM_003777.1,12965-12983).
caactggaccttagtttga

SEQ ID NO: 78801 - DNA, 19 bp, Homo sapiens
  siRNA target sequence for DNAH11 (NM_003777.1,13019-13037).
cagcagtttgcattgagtt

SEQ ID NO: 78802 - DNA, 19 bp, Homo sapiens
  siRNA target sequence for DNAH11 (NM_003777.1,13021-13039).
gcagtttgcattgagttat

SEQ ID NO: 78803 - DNA, 19 bp, Homo sapiens
  siRNA target sequence for DNAH11 (NM_003777.1,13069-13087).
ggcttatccttctacttat

SEQ ID NO: 78804 - DNA, 19 bp, Homo sapiens
  siRNA target sequence for DNAH11 (NM_003777.1,13090-13108).
cctagcccagtggttcaat

SEQ ID NO: 78805 - DNA, 19 bp, Homo sapiens
  siRNA target sequence for DNAH11 (NM_003777.1,13203-13221).
ccttcttaactgcaatcat

SEQ ID NO: 78806 - DNA, 19 bp, Homo sapiens
  siRNA target sequence for DNAH11 (NM_003777.1,13223-13241).
cagacgatggctcgaaaaa

SEQ ID NO: 78807 - DNA, 19 bp, Homo sapiens
  siRNA target sequence for DNAH11 (NM_003777.1,13225-13243).
gacgatggctcgaaaaaat

SEQ ID NO: 78808 - DNA, 19 bp, Homo sapiens
  siRNA target sequence for DNAH11 (NM_003777.1,13227-13245).
cgatggctcgaaaaaatga

SEQ ID NO: 78809 - DNA, 19 bp, Homo sapiens
  siRNA target sequence for DNAH11 (NM_003777.1,13264-13282).
gcgcttgactgctgatgtt

SEQ ID NO: 78810 - DNA, 19 bp, Homo sapiens
  siRNA target sequence for DNAH11 (NM_003777.1,13265-13283).
cgcttgactgctgatgtta

SEQ ID NO: 78811 - DNA, 19 bp, Homo sapiens
  siRNA target sequence for DNAH11 (NM_003777.1,13369-13387).
cacccaagcaggaaccatt

SEQ ID NO: 78812 - DNA, 19 bp, Homo sapiens
  siRNA target sequence for DNAH11 (NM_003777.1,13372-13390).
ccaagcaggaaccattgtt

SEQ ID NO: 78813 - DNA, 19 bp, Homo sapiens
  siRNA target sequence for DNAH11 (NM_003777.1,13416-13434).
gccctatgccggtcatctt

SEQ ID NO: 78814 - DNA, 19 bp, Homo sapiens
  siRNA target sequence for DNAH11 (NM_003777.1,13477-13495).
ctacgagtgccctgtgtat

SEQ ID NO: 78815 - DNA, 19 bp, Homo sapiens
  siRNA target sequence for DNAH11 (NM_003777.1,13480-13498).
cgagtgccctgtgtataga

SEQ ID NO: 78816 - DNA, 19 bp, Homo sapiens
  siRNA target sequence for DNAH11 (NM_003777.1,13481-13499).
gagtgccctgtgtatagaa

SEQ ID NO: 78817 - DNA, 19 bp, Homo sapiens
  siRNA target sequence for DNAH11 (NM_003777.1,13486-13504).
ccctgtgtatagaaccaaa

SEQ ID NO: 78818 - DNA, 19 bp, Homo sapiens
  siRNA target sequence for DNAH3 (NM_017539.1,56-74).
cagcctttcagcgttcaaa

SEQ ID NO: 78819 - DNA, 19 bp, Homo sapiens
  siRNA target sequence for DNAH3 (NM_017539.1,201-219).
ggaaccgtctggactctat

SEQ ID NO: 78820 - DNA, 19 bp, Homo sapiens
  siRNA target sequence for DNAH3 (NM_017539.1,281-299).
ctgcacccttcaaagaaca

SEQ ID NO: 78821 - DNA, 19 bp, Homo sapiens
  siRNA target sequence for DNAH3 (NM_017539.1,311-329).
gtggacccagtgattccat

SEQ ID NO: 78822 - DNA, 19 bp, Homo sapiens
  siRNA target sequence for DNAH3 (NM_017539.1,322-340).
gattccatcgccaacaact

SEQ ID NO: 78823 - DNA, 19 bp, Homo sapiens
  siRNA target sequence for DNAH3 (NM_017539.1,357-375).
ggacctgaagctgaaagat

SEQ ID NO: 78824 - DNA, 19 bp, Homo sapiens
  siRNA target sequence for DNAH3 (NM_017539.1,438-456).
gccatcatcaggaaataga

SEQ ID NO: 78825 - DNA, 19 bp, Homo sapiens
  siRNA target sequence for DNAH3 (NM_017539.1,464-482).
cagagcccatgaggaaaaa

SEQ ID NO: 78826 - DNA, 19 bp, Homo sapiens
  siRNA target sequence for DNAH3 (NM_017539.1,511-529).
gattccactaggatcaagt

SEQ ID NO: 78827 - DNA, 19 bp, Homo sapiens
  siRNA target sequence for DNAH3 (NM_017539.1,532-550).
gccttcaagacgtcaatct

SEQ ID NO: 78828 - DNA, 19 bp, Homo sapiens
  siRNA target sequence for DNAH3 (NM_017539.1,621-639).
gcagctcgatgtcatgtta

SEQ ID NO: 78829 - DNA, 19 bp, Homo sapiens
  siRNA target sequence for DNAH3 (NM_017539.1,686-704).
cggacctggagagatacta

SEQ ID NO: 78830 - DNA, 19 bp, Homo sapiens
  siRNA target sequence for DNAH3 (NM_017539.1,688-706).
gacctggagagatactatt

SEQ ID NO: 78831 - DNA, 19 bp, Homo sapiens
  siRNA target sequence for DNAH3 (NM_017539.1,722-740).
gaattcgcaaagacatgat

SEQ ID NO: 78832 - DNA, 19 bp, Homo sapiens
  siRNA target sequence for DNAH3 (NM_017539.1,760-778).
gtgatggttcggatttcaa

SEQ ID NO: 78833 - DNA, 19 bp, Homo sapiens
  siRNA target sequence for DNAH3 (NM_017539.1,903-921).
ggacccaatggagagaaaa

SEQ ID NO: 78834 - DNA, 19 bp, Homo sapiens
  siRNA target sequence for DNAH3 (NM_017539.1,913-931).
gagagaaaacggctcttta

SEQ ID NO: 78835 - DNA, 19 bp, Homo sapiens
  siRNA target sequence for DNAH3 (NM_017539.1,917-935).
gaaaacggctctttattga

SEQ ID NO: 78836 - DNA, 19 bp, Homo sapiens
  siRNA target sequence for DNAH3 (NM_017539.1,945-963).
ccgcttgtttcctcaaaga

SEQ ID NO: 78837 - DNA, 19 bp, Homo sapiens
  siRNA target sequence for DNAH3 (NM_017539.1,1050-1068).
gatgctcaggctgaaagaa

SEQ ID NO: 78838 - DNA, 19 bp, Homo sapiens
  siRNA target sequence for DNAH3 (NM_017539.1,1114-1132).
gaaatactagcgggaaaat

SEQ ID NO: 78839 - DNA, 19 bp, Homo sapiens
  siRNA target sequence for DNAH3 (NM_017539.1,1217-1235).
ccacctgcgcccagctttt

SEQ ID NO: 78840 - DNA, 19 bp, Homo sapiens
  siRNA target sequence for DNAH3 (NM_017539.1,1218-1236).
cacctgcgcccagcttttt

SEQ ID NO: 78841 - DNA, 19 bp, Homo sapiens
  siRNA target sequence for DNAH3 (NM_017539.1,1268-1286).
ctcccaagagcaactatga

SEQ ID NO: 78842 - DNA, 19 bp, Homo sapiens
  siRNA target sequence for DNAH3 (NM_017539.1,1292-1310).
gtcgaaacattgaggaata

SEQ ID NO: 78843 - DNA, 19 bp, Homo sapiens
  siRNA target sequence for DNAH3 (NM_017539.1,1294-1312).
cgaaacattgaggaatatt

SEQ ID NO: 78844 - DNA, 19 bp, Homo sapiens
  siRNA target sequence for DNAH3 (NM_017539.1,1316-1334).
cttctgtggcatcattcat

SEQ ID NO: 78845 - DNA, 19 bp, Homo sapiens
  siRNA target sequence for DNAH3 (NM_017539.1,1345-1363).
cttagggagctggtcatta

SEQ ID NO: 78846 - DNA, 19 bp, Homo sapiens
  siRNA target sequence for DNAH3 (NM_017539.1,1350-1368).
ggagctggtcattaagtca

SEQ ID NO: 78847 - DNA, 19 bp, Homo sapiens
  siRNA target sequence for DNAH3 (NM_017539.1,1385-1403).
cccttttcatgatacacaa

SEQ ID NO: 78848 - DNA, 19 bp, Homo sapiens
  siRNA target sequence for DNAH3 (NM_017539.1,1386-1404).
ccttttcatgatacacaaa

SEQ ID NO: 78849 - DNA, 19 bp, Homo sapiens
  siRNA target sequence for DNAH3 (NM_017539.1,1427-1445).
cctaccaagagatgaagtt

SEQ ID NO: 78850 - DNA, 19 bp, Homo sapiens
  siRNA target sequence for DNAH3 (NM_017539.1,1428-1446).
ctaccaagagatgaagttt

SEQ ID NO: 78851 - DNA, 19 bp, Homo sapiens
  siRNA target sequence for DNAH3 (NM_017539.1,1453-1471).
cctcagctaatcatgatca

SEQ ID NO: 78852 - DNA, 19 bp, Homo sapiens
  siRNA target sequence for DNAH3 (NM_017539.1,1578-1596).
ccccaagctgaaatacata

SEQ ID NO: 78853 - DNA, 19 bp, Homo sapiens
  siRNA target sequence for DNAH3 (NM_017539.1,1625-1643).
ctgctgatcggcaatgtgt

SEQ ID NO: 78854 - DNA, 19 bp, Homo sapiens
  siRNA target sequence for DNAH3 (NM_017539.1,1717-1735).
ctgctccttggaactgtta

SEQ ID NO: 78855 - DNA, 19 bp, Homo sapiens
  siRNA target sequence for DNAH3 (NM_017539.1,1737-1755).
cgcagaagaaaaacttgtt

SEQ ID NO: 78856 - DNA, 19 bp, Homo sapiens
  siRNA target sequence for DNAH3 (NM_017539.1,1801-1819).
gttggcccctgcaaatatt

SEQ ID NO: 78857 - DNA, 19 bp, Homo sapiens
  siRNA target sequence for DNAH3 (NM_017539.1,1804-1822).
ggcccctgcaaatatttaa

SEQ ID NO: 78858 - DNA, 19 bp, Homo sapiens
  siRNA target sequence for DNAH3 (NM_017539.1,1805-1823).
gcccctgcaaatatttaaa

SEQ ID NO: 78859 - DNA, 19 bp, Homo sapiens
  siRNA target sequence for DNAH3 (NM_017539.1,1836-1854).
gtatgttgacttattggat

SEQ ID NO: 78860 - DNA, 19 bp, Homo sapiens
  siRNA target sequence for DNAH3 (NM_017539.1,1876-1894).
gctgcgttcctgaaagaaa

SEQ ID NO: 78861 - DNA, 19 bp, Homo sapiens
  siRNA target sequence for DNAH3 (NM_017539.1,1942-1960).
cggagaaatgaaattgcat

SEQ ID NO: 78862 - DNA, 19 bp, Homo sapiens
  siRNA target sequence for DNAH3 (NM_017539.1,2003-2021).
ctacggccctaaatcatga

SEQ ID NO: 78863 - DNA, 19 bp, Homo sapiens
  siRNA target sequence for DNAH3 (NM_017539.1,2006-2024).
cggccctaaatcatgatct

SEQ ID NO: 78864 - DNA, 19 bp, Homo sapiens
  siRNA target sequence for DNAH3 (NM_017539.1,2025-2043).
ctgtgagcgagctcaaaat

SEQ ID NO: 78865 - DNA, 19 bp, Homo sapiens
  siRNA target sequence for DNAH3 (NM_017539.1,2027-2045).
gtgagcgagctcaaaatct

SEQ ID NO: 78866 - DNA, 19 bp, Homo sapiens
  siRNA target sequence for DNAH3 (NM_017539.1,2086-2104).
gacaccaataccagcattt

SEQ ID NO: 78867 - DNA, 19 bp, Homo sapiens
  siRNA target sequence for DNAH3 (NM_017539.1,2090-2108).
ccaataccagcatttgtaa

SEQ ID NO: 78868 - DNA, 19 bp, Homo sapiens
  siRNA target sequence for DNAH3 (NM_017539.1,2096-2114).
ccagcatttgtaatcagta

SEQ ID NO: 78869 - DNA, 19 bp, Homo sapiens
  siRNA target sequence for DNAH3 (NM_017539.1,2119-2137).
cacatcgcagacaaagtca

SEQ ID NO: 78870 - DNA, 19 bp, Homo sapiens
  siRNA target sequence for DNAH3 (NM_017539.1,2163-2181).
gctggtatccctcattgaa

SEQ ID NO: 78871 - DNA, 19 bp, Homo sapiens
  siRNA target sequence for DNAH3 (NM_017539.1,2164-2182).
ctggtatccctcattgaat

SEQ ID NO: 78872 - DNA, 19 bp, Homo sapiens
  siRNA target sequence for DNAH3 (NM_017539.1,2173-2191).
ctcattgaattcctaaaga

SEQ ID NO: 78873 - DNA, 19 bp, Homo sapiens
  siRNA target sequence for DNAH3 (NM_017539.1,2280-2298).
gccgtaccagattgaagat

SEQ ID NO: 78874 - DNA, 19 bp, Homo sapiens
  siRNA target sequence for DNAH3 (NM_017539.1,2281-2299).
ccgtaccagattgaagata

SEQ ID NO: 78875 - DNA, 19 bp, Homo sapiens
  siRNA target sequence for DNAH3 (NM_017539.1,2282-2300).
cgtaccagattgaagatat

SEQ ID NO: 78876 - DNA, 19 bp, Homo sapiens
  siRNA target sequence for DNAH3 (NM_017539.1,2344-2362).
gcagaaatggatctgatta

SEQ ID NO: 78877 - DNA, 19 bp, Homo sapiens
  siRNA target sequence for DNAH3 (NM_017539.1,2501-2519).
gggcgtttgcagagtttga

SEQ ID NO: 78878 - DNA, 19 bp, Homo sapiens
  siRNA target sequence for DNAH3 (NM_017539.1,2503-2521).
gcgtttgcagagtttgagt

SEQ ID NO: 78879 - DNA, 19 bp, Homo sapiens
  siRNA target sequence for DNAH3 (NM_017539.1,2618-2636).
ggtcgacagcctatgagtt

SEQ ID NO: 78880 - DNA, 19 bp, Homo sapiens
  siRNA target sequence for DNAH3 (NM_017539.1,2718-2736).
gtggaggacaacgtataaa

SEQ ID NO: 78881 - DNA, 19 bp, Homo sapiens
  siRNA target sequence for DNAH3 (NM_017539.1,2720-2738).
ggaggacaacgtataaact

SEQ ID NO: 78882 - DNA, 19 bp, Homo sapiens
  siRNA target sequence for DNAH3 (NM_017539.1,2726-2744).
caacgtataaactgatcaa

SEQ ID NO: 78883 - DNA, 19 bp, Homo sapiens
  siRNA target sequence for DNAH3 (NM_017539.1,2769-2787).
caggcgcttagcagagaat

SEQ ID NO: 78884 - DNA, 19 bp, Homo sapiens
  siRNA target sequence for DNAH3 (NM_017539.1,2841-2859).
ctgcaacccaggaatgaaa

SEQ ID NO: 78885 - DNA, 19 bp, Homo sapiens
  siRNA target sequence for DNAH3 (NM_017539.1,2843-2861).
gcaacccaggaatgaaaga

SEQ ID NO: 78886 - DNA, 19 bp, Homo sapiens
  siRNA target sequence for DNAH3 (NM_017539.1,2874-2892).
gcagatcagtgagattgtt

SEQ ID NO: 78887 - DNA, 19 bp, Homo sapiens
  siRNA target sequence for DNAH3 (NM_017539.1,2884-2902).
gagattgttggctatgaga

SEQ ID NO: 78888 - DNA, 19 bp, Homo sapiens
  siRNA target sequence for DNAH3 (NM_017539.1,2921-2939).
cctgcctctcaaatatgct

SEQ ID NO: 78889 - DNA, 19 bp, Homo sapiens
  siRNA target sequence for DNAH3 (NM_017539.1,2952-2970).
cggcaaattcgttgaaaaa

SEQ ID NO: 78890 - DNA, 19 bp, Homo sapiens
  siRNA target sequence for DNAH3 (NM_017539.1,3077-3095).
gggacactgatacaaacat

SEQ ID NO: 78891 - DNA, 19 bp, Homo sapiens
  siRNA target sequence for DNAH3 (NM_017539.1,3079-3097).
gacactgatacaaacatct

SEQ ID NO: 78892 - DNA, 19 bp, Homo sapiens
  siRNA target sequence for DNAH3 (NM_017539.1,3093-3111).
catcttgtgtgcaattgat

SEQ ID NO: 78893 - DNA, 19 bp, Homo sapiens
  siRNA target sequence for DNAH3 (NM_017539.1,3127-3145).
cttgatgatcacgtgataa

SEQ ID NO: 78894 - DNA, 19 bp, Homo sapiens
  siRNA target sequence for DNAH3 (NM_017539.1,3130-3148).
gatgatcacgtgataaaga

SEQ ID NO: 78895 - DNA, 19 bp, Homo sapiens
  siRNA target sequence for DNAH3 (NM_017539.1,3167-3185).
ccccattcatcaaaccaat

SEQ ID NO: 78896 - DNA, 19 bp, Homo sapiens
  siRNA target sequence for DNAH3 (NM_017539.1,3269-3287).
ggctgtacctggaaccaat

SEQ ID NO: 78897 - DNA, 19 bp, Homo sapiens
  siRNA target sequence for DNAH3 (NM_017539.1,3277-3295).
ctggaaccaatcttcagtt

SEQ ID NO: 78898 - DNA, 19 bp, Homo sapiens
  siRNA target sequence for DNAH3 (NM_017539.1,3340-3358).
ggcattgttgatagttact

SEQ ID NO: 78899 - DNA, 19 bp, Homo sapiens
  siRNA target sequence for DNAH3 (NM_017539.1,3374-3392).
cccaagcggtgaaagataa

SEQ ID NO: 78900 - DNA, 19 bp, Homo sapiens
  siRNA target sequence for DNAH3 (NM_017539.1,3376-3394).
caagcggtgaaagataaca

SEQ ID NO: 78901 - DNA, 19 bp, Homo sapiens
  siRNA target sequence for DNAH3 (NM_017539.1,3522-3540).
cttcttcctatcaaacgat

SEQ ID NO: 78902 - DNA, 19 bp, Homo sapiens
  siRNA target sequence for DNAH3 (NM_017539.1,3581-3599).
gagtgcagccgcacttgaa

SEQ ID NO: 78903 - DNA, 19 bp, Homo sapiens
  siRNA target sequence for DNAH3 (NM_017539.1,3614-3632).
gaattgccaagcttgagtt

SEQ ID NO: 78904 - DNA, 19 bp, Homo sapiens
  siRNA target sequence for DNAH3 (NM_017539.1,3624-3642).
gcttgagtttacagacaat

SEQ ID NO: 78905 - DNA, 19 bp, Homo sapiens
  siRNA target sequence for DNAH3 (NM_017539.1,3646-3664).
gaaattgtgggcatgatca

SEQ ID NO: 78906 - DNA, 19 bp, Homo sapiens
  siRNA target sequence for DNAH3 (NM_017539.1,3657-3675).
catgatcagctcggaaaaa

SEQ ID NO: 78907 - DNA, 19 bp, Homo sapiens
  siRNA target sequence for DNAH3 (NM_017539.1,3663-3681).
cagctcggaaaaagaaact

SEQ ID NO: 78908 - DNA, 19 bp, Homo sapiens
  siRNA target sequence for DNAH3 (NM_017539.1,3665-3683).
gctcggaaaaagaaactgt

SEQ ID NO: 78909 - DNA, 19 bp, Homo sapiens
  siRNA target sequence for DNAH3 (NM_017539.1,3696-3714).
gaaaatctacccagctaat

SEQ ID NO: 78910 - DNA, 19 bp, Homo sapiens
  siRNA target sequence for DNAH3 (NM_017539.1,3767-3785).
ccagtatgcgagaagtcat

SEQ ID NO: 78911 - DNA, 19 bp, Homo sapiens
  siRNA target sequence for DNAH3 (NM_017539.1,3788-3806).
gacttgggattgaagcata

SEQ ID NO: 78912 - DNA, 19 bp, Homo sapiens
  siRNA target sequence for DNAH3 (NM_017539.1,3793-3811).
gggattgaagcatatgtca

SEQ ID NO: 78913 - DNA, 19 bp, Homo sapiens
  siRNA target sequence for DNAH3 (NM_017539.1,3821-3839).
gaaatcactgggtcttaca

SEQ ID NO: 78914 - DNA, 19 bp, Homo sapiens
  siRNA target sequence for DNAH3 (NM_017539.1,3842-3860).
ggcctggacaggtggttat

SEQ ID NO: 78915 - DNA, 19 bp, Homo sapiens
  siRNA target sequence for DNAH3 (NM_017539.1,3844-3862).
cctggacaggtggttatct

SEQ ID NO: 78916 - DNA, 19 bp, Homo sapiens
  siRNA target sequence for DNAH3 (NM_017539.1,3897-3915).
ccaagccctggcggaaaat

SEQ ID NO: 78917 - DNA, 19 bp, Homo sapiens
  siRNA target sequence for DNAH3 (NM_017539.1,3901-3919).
gccctggcggaaaatacct

SEQ ID NO: 78918 - DNA, 19 bp, Homo sapiens
  siRNA target sequence for DNAH3 (NM_017539.1,3902-3920).
ccctggcggaaaatacctt

SEQ ID NO: 78919 - DNA, 19 bp, Homo sapiens
  siRNA target sequence for DNAH3 (NM_017539.1,3903-3921).
cctggcggaaaatacctta

SEQ ID NO: 78920 - DNA, 19 bp, Homo sapiens
  siRNA target sequence for DNAH3 (NM_017539.1,4045-4063).
gacgtggtggccaagttat

SEQ ID NO: 78921 - DNA, 19 bp, Homo sapiens
  siRNA target sequence for DNAH3 (NM_017539.1,4047-4065).
cgtggtggccaagttatct

SEQ ID NO: 78922 - DNA, 19 bp, Homo sapiens
  siRNA target sequence for DNAH3 (NM_017539.1,4071-4089).
cagggtctccgatctgaat

SEQ ID NO: 78923 - DNA, 19 bp, Homo sapiens
  siRNA target sequence for DNAH3 (NM_017539.1,4073-4091).
gggtctccgatctgaatga

SEQ ID NO: 78924 - DNA, 19 bp, Homo sapiens
  siRNA target sequence for DNAH3 (NM_017539.1,4074-4092).
ggtctccgatctgaatgat

SEQ ID NO: 78925 - DNA, 19 bp, Homo sapiens
  siRNA target sequence for DNAH3 (NM_017539.1,4075-4093).
gtctccgatctgaatgatt

SEQ ID NO: 78926 - DNA, 19 bp, Homo sapiens
  siRNA target sequence for DNAH3 (NM_017539.1,4079-4097).
ccgatctgaatgatttcca

SEQ ID NO: 78927 - DNA, 19 bp, Homo sapiens
  siRNA target sequence for DNAH3 (NM_017539.1,4080-4098).
cgatctgaatgatttccaa

SEQ ID NO: 78928 - DNA, 19 bp, Homo sapiens
  siRNA target sequence for DNAH3 (NM_017539.1,4081-4099).
gatctgaatgatttccaat

SEQ ID NO: 78929 - DNA, 19 bp, Homo sapiens
  siRNA target sequence for DNAH3 (NM_017539.1,4372-4390).
ggtttggattacaaagcta

SEQ ID NO: 78930 - DNA, 19 bp, Homo sapiens
  siRNA target sequence for DNAH3 (NM_017539.1,4373-4391).
gtttggattacaaagctat

SEQ ID NO: 78931 - DNA, 19 bp, Homo sapiens
  siRNA target sequence for DNAH3 (NM_017539.1,4568-4586).
caacctgcgctgtgttcat

SEQ ID NO: 78932 - DNA, 19 bp, Homo sapiens
  siRNA target sequence for DNAH3 (NM_017539.1,4618-4636).
gaactgcccgacaatctca

SEQ ID NO: 78933 - DNA, 19 bp, Homo sapiens
  siRNA target sequence for DNAH3 (NM_017539.1,4678-4696).
gccctcattggagaaatct

SEQ ID NO: 78934 - DNA, 19 bp, Homo sapiens
  siRNA target sequence for DNAH3 (NM_017539.1,4727-4745).
gaagtctcgcccagaagat

SEQ ID NO: 78935 - DNA, 19 bp, Homo sapiens
  siRNA target sequence for DNAH3 (NM_017539.1,4884-4902).
gctgctccgggcattgctt

SEQ ID NO: 78936 - DNA, 19 bp, Homo sapiens
  siRNA target sequence for DNAH3 (NM_017539.1,4892-4910).
gggcattgcttgatgtcaa

SEQ ID NO: 78937 - DNA, 19 bp, Homo sapiens
  siRNA target sequence for DNAH3 (NM_017539.1,4893-4911).
ggcattgcttgatgtcaat

SEQ ID NO: 78938 - DNA, 19 bp, Homo sapiens
  siRNA target sequence for DNAH3 (NM_017539.1,4895-4913).
cattgcttgatgtcaatct

SEQ ID NO: 78939 - DNA, 19 bp, Homo sapiens
  siRNA target sequence for DNAH3 (NM_017539.1,4906-4924).
gtcaatctggccaagttct

SEQ ID NO: 78940 - DNA, 19 bp, Homo sapiens
  siRNA target sequence for DNAH3 (NM_017539.1,4929-4947).
gcaagatgtccctctgttt

SEQ ID NO: 78941 - DNA, 19 bp, Homo sapiens
  siRNA target sequence for DNAH3 (NM_017539.1,4973-4991).
ctggagttgttcttccaaa

SEQ ID NO: 78942 - DNA, 19 bp, Homo sapiens
  siRNA target sequence for DNAH3 (NM_017539.1,5050-5068).
cagccagtaccttggttta

SEQ ID NO: 78943 - DNA, 19 bp, Homo sapiens
  siRNA target sequence for DNAH3 (NM_017539.1,5072-5090).
ggaaaattatccagatcta

SEQ ID NO: 78944 - DNA, 19 bp, Homo sapiens
  siRNA target sequence for DNAH3 (NM_017539.1,5104-5122).
gtgagacatggctatatga

SEQ ID NO: 78945 - DNA, 19 bp, Homo sapiens
  siRNA target sequence for DNAH3 (NM_017539.1,5106-5124).
gagacatggctatatgatt

SEQ ID NO: 78946 - DNA, 19 bp, Homo sapiens
  siRNA target sequence for DNAH3 (NM_017539.1,5108-5126).
gacatggctatatgattgt

SEQ ID NO: 78947 - DNA, 19 bp, Homo sapiens
  siRNA target sequence for DNAH3 (NM_017539.1,5142-5160).
cggcaagacctctgcttat

SEQ ID NO: 78948 - DNA, 19 bp, Homo sapiens
  siRNA target sequence for DNAH3 (NM_017539.1,5150-5168).
cctctgcttataaagtgtt

SEQ ID NO: 78949 - DNA, 19 bp, Homo sapiens
  siRNA target sequence for DNAH3 (NM_017539.1,5174-5192).
cagctctcggcgatttaca

SEQ ID NO: 78950 - DNA, 19 bp, Homo sapiens
  siRNA target sequence for DNAH3 (NM_017539.1,5356-5374).
gatcgcaagtggattatat

SEQ ID NO: 78951 - DNA, 19 bp, Homo sapiens
  siRNA target sequence for DNAH3 (NM_017539.1,5360-5378).
gcaagtggattatatttga

SEQ ID NO: 78952 - DNA, 19 bp, Homo sapiens
  siRNA target sequence for DNAH3 (NM_017539.1,5380-5398).
gggccagtggatgctattt

SEQ ID NO: 78953 - DNA, 19 bp, Homo sapiens
  siRNA target sequence for DNAH3 (NM_017539.1,5392-5410).
gctatttggattgaaaata

SEQ ID NO: 78954 - DNA, 19 bp, Homo sapiens
  siRNA target sequence for DNAH3 (NM_017539.1,5393-5411).
ctatttggattgaaaatat

SEQ ID NO: 78955 - DNA, 19 bp, Homo sapiens
  siRNA target sequence for DNAH3 (NM_017539.1,5540-5558).
ggtgtgggatgatctacat

SEQ ID NO: 78956 - DNA, 19 bp, Homo sapiens
  siRNA target sequence for DNAH3 (NM_017539.1,5686-5704).
gaatttggtcgccttcatt

SEQ ID NO: 78957 - DNA, 19 bp, Homo sapiens
  siRNA target sequence for DNAH3 (NM_017539.1,5692-5710).
ggtcgccttcattgtaaat

SEQ ID NO: 78958 - DNA, 19 bp, Homo sapiens
  siRNA target sequence for DNAH3 (NM_017539.1,5822-5840).
gcctgtcaagtcaacagat

SEQ ID NO: 78959 - DNA, 19 bp, Homo sapiens
  siRNA target sequence for DNAH3 (NM_017539.1,5975-5993).
ggcccaaaagcgtcaaact

SEQ ID NO: 78960 - DNA, 19 bp, Homo sapiens
  siRNA target sequence for DNAH3 (NM_017539.1,5984-6002).
gcgtcaaactcaccaaaaa

SEQ ID NO: 78961 - DNA, 19 bp, Homo sapiens
  siRNA target sequence for DNAH3 (NM_017539.1,5986-6004).
gtcaaactcaccaaaaaca

SEQ ID NO: 78962 - DNA, 19 bp, Homo sapiens
  siRNA target sequence for DNAH3 (NM_017539.1,6163-6181).
cggcagtccttcttcttga

SEQ ID NO: 78963 - DNA, 19 bp, Homo sapiens
  siRNA target sequence for DNAH3 (NM_017539.1,6164-6182).
ggcagtccttcttcttgaa

SEQ ID NO: 78964 - DNA, 19 bp, Homo sapiens
  siRNA target sequence for DNAH3 (NM_017539.1,6165-6183).
gcagtccttcttcttgaaa

SEQ ID NO: 78965 - DNA, 19 bp, Homo sapiens
  siRNA target sequence for DNAH3 (NM_017539.1,6185-6203).
cctacttagaccatgagat

SEQ ID NO: 78966 - DNA, 19 bp, Homo sapiens
  siRNA target sequence for DNAH3 (NM_017539.1,6186-6204).
ctacttagaccatgagatt

SEQ ID NO: 78967 - DNA, 19 bp, Homo sapiens
  siRNA target sequence for DNAH3 (NM_017539.1,6268-6286).
caccttcccaaaaatacgt

SEQ ID NO: 78968 - DNA, 19 bp, Homo sapiens
  siRNA target sequence for DNAH3 (NM_017539.1,6288-6306).
cctacccaactgcatcaat

SEQ ID NO: 78969 - DNA, 19 bp, Homo sapiens
  siRNA target sequence for DNAH3 (NM_017539.1,6289-6307).
ctacccaactgcatcaatt

SEQ ID NO: 78970 - DNA, 19 bp, Homo sapiens
  siRNA target sequence for DNAH3 (NM_017539.1,6292-6310).
cccaactgcatcaatttct

SEQ ID NO: 78971 - DNA, 19 bp, Homo sapiens
  siRNA target sequence for DNAH3 (NM_017539.1,6326-6344).
ccaatcagacccaggatat

SEQ ID NO: 78972 - DNA, 19 bp, Homo sapiens
  siRNA target sequence for DNAH3 (NM_017539.1,6605-6623).
gattcactcgccatctgaa

SEQ ID NO: 78973 - DNA, 19 bp, Homo sapiens
  siRNA target sequence for DNAH3 (NM_017539.1,6611-6629).
ctcgccatctgaatatcat

SEQ ID NO: 78974 - DNA, 19 bp, Homo sapiens
  siRNA target sequence for DNAH3 (NM_017539.1,6621-6639).
gaatatcatttccatcaat

SEQ ID NO: 78975 - DNA, 19 bp, Homo sapiens
  siRNA target sequence for DNAH3 (NM_017539.1,6663-6681).
caagattttcagttcgatt

SEQ ID NO: 78976 - DNA, 19 bp, Homo sapiens
  siRNA target sequence for DNAH3 (NM_017539.1,6666-6684).
gattttcagttcgattgtt

SEQ ID NO: 78977 - DNA, 19 bp, Homo sapiens
  siRNA target sequence for DNAH3 (NM_017539.1,6741-6759).
ggtccaagctactaagaca

SEQ ID NO: 78978 - DNA, 19 bp, Homo sapiens
  siRNA target sequence for DNAH3 (NM_017539.1,6742-6760).
gtccaagctactaagacaa

SEQ ID NO: 78979 - DNA, 19 bp, Homo sapiens
  siRNA target sequence for DNAH3 (NM_017539.1,6744-6762).
ccaagctactaagacaatt

SEQ ID NO: 78980 - DNA, 19 bp, Homo sapiens
  siRNA target sequence for DNAH3 (NM_017539.1,6745-6763).
caagctactaagacaattt

SEQ ID NO: 78981 - DNA, 19 bp, Homo sapiens
  siRNA target sequence for DNAH3 (NM_017539.1,6794-6812).
ctccctcgaagtcacatta

SEQ ID NO: 78982 - DNA, 19 bp, Homo sapiens
  siRNA target sequence for DNAH3 (NM_017539.1,6797-6815).
cctcgaagtcacattacgt

SEQ ID NO: 78983 - DNA, 19 bp, Homo sapiens
  siRNA target sequence for DNAH3 (NM_017539.1,6828-6846).
ggacttctcacgagtgatt

SEQ ID NO: 78984 - DNA, 19 bp, Homo sapiens
  siRNA target sequence for DNAH3 (NM_017539.1,6831-6849).
cttctcacgagtgattcaa

SEQ ID NO: 78985 - DNA, 19 bp, Homo sapiens
  siRNA target sequence for DNAH3 (NM_017539.1,6918-6936).
ggtttatcgggtcttctat

SEQ ID NO: 78986 - DNA, 19 bp, Homo sapiens
  siRNA target sequence for DNAH3 (NM_017539.1,6930-6948).
cttctatgatcgtctgatt

SEQ ID NO: 78987 - DNA, 19 bp, Homo sapiens
  siRNA target sequence for DNAH3 (NM_017539.1,6955-6973).
gaggacagacaggtctttt

SEQ ID NO: 78988 - DNA, 19 bp, Homo sapiens
  siRNA target sequence for DNAH3 (NM_017539.1,7043-7061).
cacccactggaaagatagt

SEQ ID NO: 78989 - DNA, 19 bp, Homo sapiens
  siRNA target sequence for DNAH3 (NM_017539.1,7060-7078).
gtcgatgataacattcgaa

SEQ ID NO: 78990 - DNA, 19 bp, Homo sapiens
  siRNA target sequence for DNAH3 (NM_017539.1,7079-7097).
gcctcttctttggagatta

SEQ ID NO: 78991 - DNA, 19 bp, Homo sapiens
  siRNA target sequence for DNAH3 (NM_017539.1,7081-7099).
ctcttctttggagattatt

SEQ ID NO: 78992 - DNA, 19 bp, Homo sapiens
  siRNA target sequence for DNAH3 (NM_017539.1,7171-7189).
cactatctggaagaattca

SEQ ID NO: 78993 - DNA, 19 bp, Homo sapiens
  siRNA target sequence for DNAH3 (NM_017539.1,7360-7378).
gagctataccagattgaga

SEQ ID NO: 78994 - DNA, 19 bp, Homo sapiens
  siRNA target sequence for DNAH3 (NM_017539.1,7398-7416).
caatgactggcgagaagat

SEQ ID NO: 78995 - DNA, 19 bp, Homo sapiens
  siRNA target sequence for DNAH3 (NM_017539.1,7402-7420).
gactggcgagaagatctta

SEQ ID NO: 78996 - DNA, 19 bp, Homo sapiens
  siRNA target sequence for DNAH3 (NM_017539.1,7408-7426).
cgagaagatcttaagaaga

SEQ ID NO: 78997 - DNA, 19 bp, Homo sapiens
  siRNA target sequence for DNAH3 (NM_017539.1,7482-7500).
ccagatcaaggatgaatca

SEQ ID NO: 78998 - DNA, 19 bp, Homo sapiens
  siRNA target sequence for DNAH3 (NM_017539.1,7483-7501).
cagatcaaggatgaatcat

SEQ ID NO: 78999 - DNA, 19 bp, Homo sapiens
  siRNA target sequence for DNAH3 (NM_017539.1,7499-7517).
cattcgtggaggacatcaa

SEQ ID NO: 79000 - DNA, 19 bp, Homo sapiens
  siRNA target sequence for DNAH3 (NM_017539.1,7532-7550).
caggtgacgtgcctaacat

SEQ ID NO: 79001 - DNA, 19 bp, Homo sapiens
  siRNA target sequence for DNAH3 (NM_017539.1,7534-7552).
ggtgacgtgcctaacatct

SEQ ID NO: 79002 - DNA, 19 bp, Homo sapiens
  siRNA target sequence for DNAH3 (NM_017539.1,7633-7651).
cctctttctatgtataact

SEQ ID NO: 79003 - DNA, 19 bp, Homo sapiens
  siRNA target sequence for DNAH3 (NM_017539.1,7660-7678).
gagagggtaattaacaaaa

SEQ ID NO: 79004 - DNA, 19 bp, Homo sapiens
  siRNA target sequence for DNAH3 (NM_017539.1,7741-7759).
ccttcgctgatcaattgct

SEQ ID NO: 79005 - DNA, 19 bp, Homo sapiens
  siRNA target sequence for DNAH3 (NM_017539.1,7752-7770).
caattgctgtacgattgat

SEQ ID NO: 79006 - DNA, 19 bp, Homo sapiens
  siRNA target sequence for DNAH3 (NM_017539.1,7803-7821).
gttggtggctaacaaattt

SEQ ID NO: 79007 - DNA, 19 bp, Homo sapiens
  siRNA target sequence for DNAH3 (NM_017539.1,7806-7824).
ggtggctaacaaatttcta

SEQ ID NO: 79008 - DNA, 19 bp, Homo sapiens
  siRNA target sequence for DNAH3 (NM_017539.1,7861-7879).
gtcgtgtccatgtgcaaat

SEQ ID NO: 79009 - DNA, 19 bp, Homo sapiens
  siRNA target sequence for DNAH3 (NM_017539.1,7863-7881).
cgtgtccatgtgcaaatat

SEQ ID NO: 79010 - DNA, 19 bp, Homo sapiens
  siRNA target sequence for DNAH3 (NM_017539.1,7864-7882).
gtgtccatgtgcaaatatt

SEQ ID NO: 79011 - DNA, 19 bp, Homo sapiens
  siRNA target sequence for DNAH3 (NM_017539.1,7899-7917).
gaagctgtcactcgattat

SEQ ID NO: 79012 - DNA, 19 bp, Homo sapiens
  siRNA target sequence for DNAH3 (NM_017539.1,7903-7921).
ctgtcactcgattattaca

SEQ ID NO: 79013 - DNA, 19 bp, Homo sapiens
  siRNA target sequence for DNAH3 (NM_017539.1,7907-7925).
cactcgattattacaacaa

SEQ ID NO: 79014 - DNA, 19 bp, Homo sapiens
  siRNA target sequence for DNAH3 (NM_017539.1,7952-7970).
ccacctcctaccttgaatt

SEQ ID NO: 79015 - DNA, 19 bp, Homo sapiens
  siRNA target sequence for DNAH3 (NM_017539.1,7955-7973).
cctcctaccttgaattgat

SEQ ID NO: 79016 - DNA, 19 bp, Homo sapiens
  siRNA target sequence for DNAH3 (NM_017539.1,7958-7976).
cctaccttgaattgattct

SEQ ID NO: 79017 - DNA, 19 bp, Homo sapiens
  siRNA target sequence for DNAH3 (NM_017539.1,7959-7977).
ctaccttgaattgattcta

SEQ ID NO: 79018 - DNA, 19 bp, Homo sapiens
  siRNA target sequence for DNAH3 (NM_017539.1,8072-8090).
ctcaggtagcggttatgca

SEQ ID NO: 79019 - DNA, 19 bp, Homo sapiens
  siRNA target sequence for DNAH3 (NM_017539.1,8074-8092).
caggtagcggttatgcaaa

SEQ ID NO: 79020 - DNA, 19 bp, Homo sapiens
  siRNA target sequence for DNAH3 (NM_017539.1,8200-8218).
ctggtgcaggcagatgaaa

SEQ ID NO: 79021 - DNA, 19 bp, Homo sapiens
  siRNA target sequence for DNAH3 (NM_017539.1,8237-8255).
ctgccattgcccaaggaat

SEQ ID NO: 79022 - DNA, 19 bp, Homo sapiens
  siRNA target sequence for DNAH3 (NM_017539.1,8248-8266).
caaggaatcaagaacgaat

SEQ ID NO: 79023 - DNA, 19 bp, Homo sapiens
  siRNA target sequence for DNAH3 (NM_017539.1,8252-8270).
gaatcaagaacgaatgtga

SEQ ID NO: 79024 - DNA, 19 bp, Homo sapiens
  siRNA target sequence for DNAH3 (NM_017539.1,8370-8388).
cccaccaggccctgtcaaa

SEQ ID NO: 79025 - DNA, 19 bp, Homo sapiens
  siRNA target sequence for DNAH3 (NM_017539.1,8447-8465).
ccagtggctccggtaagat

SEQ ID NO: 79026 - DNA, 19 bp, Homo sapiens
  siRNA target sequence for DNAH3 (NM_017539.1,8450-8468).
gtggctccggtaagatgat

SEQ ID NO: 79027 - DNA, 19 bp, Homo sapiens
  siRNA target sequence for DNAH3 (NM_017539.1,8453-8471).
gctccggtaagatgataga

SEQ ID NO: 79028 - DNA, 19 bp, Homo sapiens
  siRNA target sequence for DNAH3 (NM_017539.1,8454-8472).
ctccggtaagatgatagaa

SEQ ID NO: 79029 - DNA, 19 bp, Homo sapiens
  siRNA target sequence for DNAH3 (NM_017539.1,8481-8499).
gggggtatccaaaaagatt

SEQ ID NO: 79030 - DNA, 19 bp, Homo sapiens
  siRNA target sequence for DNAH3 (NM_017539.1,8500-8518).
cttggggatctgaaattct

SEQ ID NO: 79031 - DNA, 19 bp, Homo sapiens
  siRNA target sequence for DNAH3 (NM_017539.1,8571-8589).
gcggatccgggaaaggttt

SEQ ID NO: 79032 - DNA, 19 bp, Homo sapiens
  siRNA target sequence for DNAH3 (NM_017539.1,8572-8590).
cggatccgggaaaggttta

SEQ ID NO: 79033 - DNA, 19 bp, Homo sapiens
  siRNA target sequence for DNAH3 (NM_017539.1,8573-8591).
ggatccgggaaaggtttat

SEQ ID NO: 79034 - DNA, 19 bp, Homo sapiens
  siRNA target sequence for DNAH3 (NM_017539.1,8577-8595).
ccgggaaaggtttatcaat

SEQ ID NO: 79035 - DNA, 19 bp, Homo sapiens
  siRNA target sequence for DNAH3 (NM_017539.1,8612-8630).
cagctgtcattaaaaatgt

SEQ ID NO: 79036 - DNA, 19 bp, Homo sapiens
  siRNA target sequence for DNAH3 (NM_017539.1,8893-8911).
gtcagggcagagaaactga

SEQ ID NO: 79037 - DNA, 19 bp, Homo sapiens
  siRNA target sequence for DNAH3 (NM_017539.1,8961-8979).
gctggggatccgctatact

SEQ ID NO: 79038 - DNA, 19 bp, Homo sapiens
  siRNA target sequence for DNAH3 (NM_017539.1,8962-8980).
ctggggatccgctatacta

SEQ ID NO: 79039 - DNA, 19 bp, Homo sapiens
  siRNA target sequence for DNAH3 (NM_017539.1,8964-8982).
ggggatccgctatactaat

SEQ ID NO: 79040 - DNA, 19 bp, Homo sapiens
  siRNA target sequence for DNAH3 (NM_017539.1,9019-9037).
gcttacctgggcgctttta

SEQ ID NO: 79041 - DNA, 19 bp, Homo sapiens
  siRNA target sequence for DNAH3 (NM_017539.1,9131-9149).
cgttaggggatcccataaa

SEQ ID NO: 79042 - DNA, 19 bp, Homo sapiens
  siRNA target sequence for DNAH3 (NM_017539.1,9132-9150).
gttaggggatcccataaaa

SEQ ID NO: 79043 - DNA, 19 bp, Homo sapiens
  siRNA target sequence for DNAH3 (NM_017539.1,9198-9216).
cgacaatggcatcattgta

SEQ ID NO: 79044 - DNA, 19 bp, Homo sapiens
  siRNA target sequence for DNAH3 (NM_017539.1,9199-9217).
gacaatggcatcattgtat

SEQ ID NO: 79045 - DNA, 19 bp, Homo sapiens
  siRNA target sequence for DNAH3 (NM_017539.1,9224-9242).
ccagacgctgggccttaat

SEQ ID NO: 79046 - DNA, 19 bp, Homo sapiens
  siRNA target sequence for DNAH3 (NM_017539.1,9227-9245).
gacgctgggccttaatgat

SEQ ID NO: 79047 - DNA, 19 bp, Homo sapiens
  siRNA target sequence for DNAH3 (NM_017539.1,9230-9248).
gctgggccttaatgattga

SEQ ID NO: 79048 - DNA, 19 bp, Homo sapiens
  siRNA target sequence for DNAH3 (NM_017539.1,9256-9274).
gggcaggccaataaatgga

SEQ ID NO: 79049 - DNA, 19 bp, Homo sapiens
  siRNA target sequence for DNAH3 (NM_017539.1,9282-9300).
catggagaaggcgaataaa

SEQ ID NO: 79050 - DNA, 19 bp, Homo sapiens
  siRNA target sequence for DNAH3 (NM_017539.1,9365-9383).
gcacccctgtcttgattga

SEQ ID NO: 79051 - DNA, 19 bp, Homo sapiens
  siRNA target sequence for DNAH3 (NM_017539.1,9366-9384).
cacccctgtcttgattgaa

SEQ ID NO: 79052 - DNA, 19 bp, Homo sapiens
  siRNA target sequence for DNAH3 (NM_017539.1,9407-9425).
cttctatcgaacctatctt

SEQ ID NO: 79053 - DNA, 19 bp, Homo sapiens
  siRNA target sequence for DNAH3 (NM_017539.1,9448-9466).
caaggagttgagtacatga

SEQ ID NO: 79054 - DNA, 19 bp, Homo sapiens
  siRNA target sequence for DNAH3 (NM_017539.1,9471-9489).
gggtgaaaacatcattgaa

SEQ ID NO: 79055 - DNA, 19 bp, Homo sapiens
  siRNA target sequence for DNAH3 (NM_017539.1,9472-9490).
ggtgaaaacatcattgaat

SEQ ID NO: 79056 - DNA, 19 bp, Homo sapiens
  siRNA target sequence for DNAH3 (NM_017539.1,9487-9505).
gaatattccagggatttta

SEQ ID NO: 79057 - DNA, 19 bp, Homo sapiens
  siRNA target sequence for DNAH3 (NM_017539.1,9524-9542).
gtttgaggaatccacatta

SEQ ID NO: 79058 - DNA, 19 bp, Homo sapiens
  siRNA target sequence for DNAH3 (NM_017539.1,9569-9587).
gtctcctcaacttcatgat

SEQ ID NO: 79059 - DNA, 19 bp, Homo sapiens
  siRNA target sequence for DNAH3 (NM_017539.1,9571-9589).
ctcctcaacttcatgatca

SEQ ID NO: 79060 - DNA, 19 bp, Homo sapiens
  siRNA target sequence for DNAH3 (NM_017539.1,9593-9611).
ccttgggtctccaagatca

SEQ ID NO: 79061 - DNA, 19 bp, Homo sapiens
  siRNA target sequence for DNAH3 (NM_017539.1,9594-9612).
cttgggtctccaagatcaa

SEQ ID NO: 79062 - DNA, 19 bp, Homo sapiens
  siRNA target sequence for DNAH3 (NM_017539.1,9794-9812).
cctccaaagtgctatctga

SEQ ID NO: 79063 - DNA, 19 bp, Homo sapiens
  siRNA target sequence for DNAH3 (NM_017539.1,9904-9922).
gccaccatcttcttttgta

SEQ ID NO: 79064 - DNA, 19 bp, Homo sapiens
  siRNA target sequence for DNAH3 (NM_017539.1,9968-9986).
cttggttcataaatctcta

SEQ ID NO: 79065 - DNA, 19 bp, Homo sapiens
  siRNA target sequence for DNAH3 (NM_017539.1,10032-10050).
gcgcatcaagtacatcatt

SEQ ID NO: 79066 - DNA, 19 bp, Homo sapiens
  siRNA target sequence for DNAH3 (NM_017539.1,10133-10151).
ccatcggcatcatgaaaca

SEQ ID NO: 79067 - DNA, 19 bp, Homo sapiens
  siRNA target sequence for DNAH3 (NM_017539.1,10391-10409).
ggaagttctctcaaggatt

SEQ ID NO: 79068 - DNA, 19 bp, Homo sapiens
  siRNA target sequence for DNAH3 (NM_017539.1,10433-10451).
gtttgcggcctgacaaaat

SEQ ID NO: 79069 - DNA, 19 bp, Homo sapiens
  siRNA target sequence for DNAH3 (NM_017539.1,10488-10506).
gggaaagctgtatatcgaa

SEQ ID NO: 79070 - DNA, 19 bp, Homo sapiens
  siRNA target sequence for DNAH3 (NM_017539.1,10524-10542).
ccagggatcctacaatgat

SEQ ID NO: 79071 - DNA, 19 bp, Homo sapiens
  siRNA target sequence for DNAH3 (NM_017539.1,10525-10543).
cagggatcctacaatgatt

SEQ ID NO: 79072 - DNA, 19 bp, Homo sapiens
  siRNA target sequence for DNAH3 (NM_017539.1,10547-10565).
gctgctgtgcgcctttgat

SEQ ID NO: 79073 - DNA, 19 bp, Homo sapiens
  siRNA target sequence for DNAH3 (NM_017539.1,10550-10568).
gctgtgcgcctttgatttt

SEQ ID NO: 79074 - DNA, 19 bp, Homo sapiens
  siRNA target sequence for DNAH3 (NM_017539.1,10553-10571).
gtgcgcctttgatttttgt

SEQ ID NO: 79075 - DNA, 19 bp, Homo sapiens
  siRNA target sequence for DNAH3 (NM_017539.1,10555-10573).
gcgcctttgatttttgtgt

SEQ ID NO: 79076 - DNA, 19 bp, Homo sapiens
  siRNA target sequence for DNAH3 (NM_017539.1,10678-10696).
cctattgctgccaaaatga

SEQ ID NO: 79077 - DNA, 19 bp, Homo sapiens
  siRNA target sequence for DNAH3 (NM_017539.1,10718-10736).
ggacctgggtggtcttaca

SEQ ID NO: 79078 - DNA, 19 bp, Homo sapiens
  siRNA target sequence for DNAH3 (NM_017539.1,10721-10739).
cctgggtggtcttacagaa

SEQ ID NO: 79079 - DNA, 19 bp, Homo sapiens
  siRNA target sequence for DNAH3 (NM_017539.1,10809-10827).
caccaatgccagattcaga

SEQ ID NO: 79080 - DNA, 19 bp, Homo sapiens
  siRNA target sequence for DNAH3 (NM_017539.1,10841-10859).
gctatccatcagagaagtt

SEQ ID NO: 79081 - DNA, 19 bp, Homo sapiens
  siRNA target sequence for DNAH3 (NM_017539.1,10842-10860).
ctatccatcagagaagttt

SEQ ID NO: 79082 - DNA, 19 bp, Homo sapiens
  siRNA target sequence for DNAH3 (NM_017539.1,11028-11046).
cttccacgccgttgttcaa

SEQ ID NO: 79083 - DNA, 19 bp, Homo sapiens
  siRNA target sequence for DNAH3 (NM_017539.1,11098-11116).
gaatctgacctgaggatta

SEQ ID NO: 79084 - DNA, 19 bp, Homo sapiens
  siRNA target sequence for DNAH3 (NM_017539.1,11102-11120).
ctgacctgaggattagtat

SEQ ID NO: 79085 - DNA, 19 bp, Homo sapiens
  siRNA target sequence for DNAH3 (NM_017539.1,11104-11122).
gacctgaggattagtatgt

SEQ ID NO: 79086 - DNA, 19 bp, Homo sapiens
  siRNA target sequence for DNAH3 (NM_017539.1,11131-11149).
cagatgtttctcaatgact

SEQ ID NO: 79087 - DNA, 19 bp, Homo sapiens
  siRNA target sequence for DNAH3 (NM_017539.1,11251-11269).
ctgtccatgttctactgta

SEQ ID NO: 79088 - DNA, 19 bp, Homo sapiens
  siRNA target sequence for DNAH3 (NM_017539.1,11299-11317).
gctcctggagacacttact

SEQ ID NO: 79089 - DNA, 19 bp, Homo sapiens
  siRNA target sequence for DNAH3 (NM_017539.1,11300-11318).
ctcctggagacacttacta

SEQ ID NO: 79090 - DNA, 19 bp, Homo sapiens
  siRNA target sequence for DNAH3 (NM_017539.1,11303-11321).
ctggagacacttactacat

SEQ ID NO: 79091 - DNA, 19 bp, Homo sapiens
  siRNA target sequence for DNAH3 (NM_017539.1,11336-11354).
cctaccagtcctatatcga

SEQ ID NO: 79092 - DNA, 19 bp, Homo sapiens
  siRNA target sequence for DNAH3 (NM_017539.1,11523-11541).
ggagttggcacaagacatt

SEQ ID NO: 79093 - DNA, 19 bp, Homo sapiens
  siRNA target sequence for DNAH3 (NM_017539.1,11589-11607).
gtaccccgtggtctatgaa

SEQ ID NO: 79094 - DNA, 19 bp, Homo sapiens
  siRNA target sequence for DNAH3 (NM_017539.1,11601-11619).
ctatgaagaatccatgaat

SEQ ID NO: 79095 - DNA, 19 bp, Homo sapiens
  siRNA target sequence for DNAH3 (NM_017539.1,11630-11648).
ggcaggagctcatcagatt

SEQ ID NO: 79096 - DNA, 19 bp, Homo sapiens
  siRNA target sequence for DNAH3 (NM_017539.1,11635-11653).
gagctcatcagattcaaca

SEQ ID NO: 79097 - DNA, 19 bp, Homo sapiens
  siRNA target sequence for DNAH3 (NM_017539.1,11673-11691).
gaggagcctcatcaatctt

SEQ ID NO: 79098 - DNA, 19 bp, Homo sapiens
  siRNA target sequence for DNAH3 (NM_017539.1,11728-11746).
gagctagaggaagtcttta

SEQ ID NO: 79099 - DNA, 19 bp, Homo sapiens
  siRNA target sequence for DNAH3 (NM_017539.1,11731-11749).
ctagaggaagtctttaaca

SEQ ID NO: 79100 - DNA, 19 bp, Homo sapiens
  siRNA target sequence for DNAH3 (NM_017539.1,11907-11925).
ctacttcacacagtctttt

SEQ ID NO: 79101 - DNA, 19 bp, Homo sapiens
  siRNA target sequence for DNAH3 (NM_017539.1,11930-11948).
ctggcgtctctcaaaatta

SEQ ID NO: 79102 - DNA, 19 bp, Homo sapiens
  siRNA target sequence for DNAH3 (NM_017539.1,11974-11992).
gaccacattggatttgagt

SEQ ID NO: 79103 - DNA, 19 bp, Homo sapiens
  siRNA target sequence for DNAH3 (NM_017539.1,12034-12052).
gaagatggggcctacatca

SEQ ID NO: 79104 - DNA, 19 bp, Homo sapiens
  siRNA target sequence for DNAH3 (NM_017539.1,12048-12066).
catcaaagggctcttctta

SEQ ID NO: 79105 - DNA, 19 bp, Homo sapiens
  siRNA target sequence for DNAH3 (NM_017539.1,12051-12069).
caaagggctcttcttagaa

SEQ ID NO: 79106 - DNA, 19 bp, Homo sapiens
  siRNA target sequence for DNAH3 (NM_017539.1,12181-12199).
catcaggacatctatgtgt

SEQ ID NO: 79107 - DNA, 19 bp, Homo sapiens
  siRNA target sequence for DNAH3 (NM_017539.1,12295-12313).
ccccagaagcactggataa

SEQ ID NO: 79108 - DNA, 19 bp, Homo sapiens
  siRNA target sequence for DNAH3 (NM_017539.1,12296-12314).
cccagaagcactggataaa

SEQ ID NO: 79109 - DNA, 19 bp, Homo sapiens
  siRNA target sequence for DNAH5 (NM_001369.1,89-107).
gagttttaacgcaaagact

SEQ ID NO: 79110 - DNA, 19 bp, Homo sapiens
  siRNA target sequence for DNAH5 (NM_001369.1,142-160).
gatgcgaggcataactact

SEQ ID NO: 79111 - DNA, 19 bp, Homo sapiens
  siRNA target sequence for DNAH5 (NM_001369.1,145-163).
gcgaggcataactacttat

SEQ ID NO: 79112 - DNA, 19 bp, Homo sapiens
  siRNA target sequence for DNAH5 (NM_001369.1,146-164).
cgaggcataactacttatt

SEQ ID NO: 79113 - DNA, 19 bp, Homo sapiens
  siRNA target sequence for DNAH5 (NM_001369.1,150-168).
gcataactacttatttgca

SEQ ID NO: 79114 - DNA, 19 bp, Homo sapiens
  siRNA target sequence for DNAH5 (NM_001369.1,151-169).
cataactacttatttgcaa

SEQ ID NO: 79115 - DNA, 19 bp, Homo sapiens
  siRNA target sequence for DNAH5 (NM_001369.1,234-252).
gattgaaagaattgatcaa

SEQ ID NO: 79116 - DNA, 19 bp, Homo sapiens
  siRNA target sequence for DNAH5 (NM_001369.1,269-287).
gtctccgacacctcatgtt

SEQ ID NO: 79117 - DNA, 19 bp, Homo sapiens
  siRNA target sequence for DNAH5 (NM_001369.1,271-289).
ctccgacacctcatgtttt

SEQ ID NO: 79118 - DNA, 19 bp, Homo sapiens
  siRNA target sequence for DNAH5 (NM_001369.1,274-292).
cgacacctcatgttttact

SEQ ID NO: 79119 - DNA, 19 bp, Homo sapiens
  siRNA target sequence for DNAH5 (NM_001369.1,275-293).
gacacctcatgttttacta

SEQ ID NO: 79120 - DNA, 19 bp, Homo sapiens
  siRNA target sequence for DNAH5 (NM_001369.1,337-355).
ggaggggtaaatcttgttt

SEQ ID NO: 79121 - DNA, 19 bp, Homo sapiens
  siRNA target sequence for DNAH5 (NM_001369.1,384-402).
cgtgaccgagggaaacgat

SEQ ID NO: 79122 - DNA, 19 bp, Homo sapiens
  siRNA target sequence for DNAH5 (NM_001369.1,416-434).
gggtatgtgtgttcttcat

SEQ ID NO: 79123 - DNA, 19 bp, Homo sapiens
  siRNA target sequence for DNAH5 (NM_001369.1,435-453).
caggactgacccttccaaa

SEQ ID NO: 79124 - DNA, 19 bp, Homo sapiens
  siRNA target sequence for DNAH5 (NM_001369.1,481-499).
gaggtgagttttaacatgt

SEQ ID NO: 79125 - DNA, 19 bp, Homo sapiens
  siRNA target sequence for DNAH5 (NM_001369.1,539-557).
gtttgctgtcggacatctt

SEQ ID NO: 79126 - DNA, 19 bp, Homo sapiens
  siRNA target sequence for DNAH5 (NM_001369.1,543-561).
gctgtcggacatcttcatt

SEQ ID NO: 79127 - DNA, 19 bp, Homo sapiens
  siRNA target sequence for DNAH5 (NM_001369.1,713-731).
gaaagtgtgacatacttga

SEQ ID NO: 79128 - DNA, 19 bp, Homo sapiens
  siRNA target sequence for DNAH5 (NM_001369.1,721-739).
gacatacttgaactgaaaa

SEQ ID NO: 79129 - DNA, 19 bp, Homo sapiens
  siRNA target sequence for DNAH5 (NM_001369.1,748-766).
gaacctacggactacttga

SEQ ID NO: 79130 - DNA, 19 bp, Homo sapiens
  siRNA target sequence for DNAH5 (NM_001369.1,802-820).
gaggattgcatgaaagtat

SEQ ID NO: 79131 - DNA, 19 bp, Homo sapiens
  siRNA target sequence for DNAH5 (NM_001369.1,930-948).
gtttaactaccttttggaa

SEQ ID NO: 79132 - DNA, 19 bp, Homo sapiens
  siRNA target sequence for DNAH5 (NM_001369.1,1019-1037).
cttggcgggagatggatat

SEQ ID NO: 79133 - DNA, 19 bp, Homo sapiens
  siRNA target sequence for DNAH5 (NM_001369.1,1023-1041).
gcgggagatggatattcga

SEQ ID NO: 79134 - DNA, 19 bp, Homo sapiens
  siRNA target sequence for DNAH5 (NM_001369.1,1024-1042).
cgggagatggatattcgaa

SEQ ID NO: 79135 - DNA, 19 bp, Homo sapiens
  siRNA target sequence for DNAH5 (NM_001369.1,1025-1043).
gggagatggatattcgaat

SEQ ID NO: 79136 - DNA, 19 bp, Homo sapiens
  siRNA target sequence for DNAH5 (NM_001369.1,1029-1047).
gatggatattcgaatcact

SEQ ID NO: 79137 - DNA, 19 bp, Homo sapiens
  siRNA target sequence for DNAH5 (NM_001369.1,1121-1139).
gcagtgatcccctatccat

SEQ ID NO: 79138 - DNA, 19 bp, Homo sapiens
  siRNA target sequence for DNAH5 (NM_001369.1,1143-1161).
ggatgctattcctacactt

SEQ ID NO: 79139 - DNA, 19 bp, Homo sapiens
  siRNA target sequence for DNAH5 (NM_001369.1,1154-1172).
ctacacttataaatgcaat

SEQ ID NO: 79140 - DNA, 19 bp, Homo sapiens
  siRNA target sequence for DNAH5 (NM_001369.1,1168-1186).
gcaattaaaatgatctata

SEQ ID NO: 79141 - DNA, 19 bp, Homo sapiens
  siRNA target sequence for DNAH5 (NM_001369.1,1187-1205).
gtatctctcattactataa

SEQ ID NO: 79142 - DNA, 19 bp, Homo sapiens
  siRNA target sequence for DNAH5 (NM_001369.1,1230-1248).
gtttgtaaaggtgacaaat

SEQ ID NO: 79143 - DNA, 19 bp, Homo sapiens
  siRNA target sequence for DNAH5 (NM_001369.1,1239-1257).
ggtgacaaatcagattata

SEQ ID NO: 79144 - DNA, 19 bp, Homo sapiens
  siRNA target sequence for DNAH5 (NM_001369.1,1240-1258).
gtgacaaatcagattatat

SEQ ID NO: 79145 - DNA, 19 bp, Homo sapiens
  siRNA target sequence for DNAH5 (NM_001369.1,1272-1290).
ctatattaccaataatgga

SEQ ID NO: 79146 - DNA, 19 bp, Homo sapiens
  siRNA target sequence for DNAH5 (NM_001369.1,1339-1357).
ctatctgcgattaaactga

SEQ ID NO: 79147 - DNA, 19 bp, Homo sapiens
  siRNA target sequence for DNAH5 (NM_001369.1,1429-1447).
gattttagcgagatgtata

SEQ ID NO: 79148 - DNA, 19 bp, Homo sapiens
  siRNA target sequence for DNAH5 (NM_001369.1,1437-1455).
cgagatgtatatttttgga

SEQ ID NO: 79149 - DNA, 19 bp, Homo sapiens
  siRNA target sequence for DNAH5 (NM_001369.1,1473-1491).
ccgacgccttgccaagata

SEQ ID NO: 79150 - DNA, 19 bp, Homo sapiens
  siRNA target sequence for DNAH5 (NM_001369.1,1474-1492).
cgacgccttgccaagataa

SEQ ID NO: 79151 - DNA, 19 bp, Homo sapiens
  siRNA target sequence for DNAH5 (NM_001369.1,1485-1503).
caagataatagacatcttt

SEQ ID NO: 79152 - DNA, 19 bp, Homo sapiens
  siRNA target sequence for DNAH5 (NM_001369.1,1508-1526).
ccctcaagacgtattcagt

SEQ ID NO: 79153 - DNA, 19 bp, Homo sapiens
  siRNA target sequence for DNAH5 (NM_001369.1,1530-1548).
gcaagattccacaattgaa

SEQ ID NO: 79154 - DNA, 19 bp, Homo sapiens
  siRNA target sequence for DNAH5 (NM_001369.1,1578-1596).
gggcattgtggcaaccata

SEQ ID NO: 79155 - DNA, 19 bp, Homo sapiens
  siRNA target sequence for DNAH5 (NM_001369.1,1659-1677).
gttttgcaagcagactaat

SEQ ID NO: 79156 - DNA, 19 bp, Homo sapiens
  siRNA target sequence for DNAH5 (NM_001369.1,1673-1691).
ctaatgaccttcataacga

SEQ ID NO: 79157 - DNA, 19 bp, Homo sapiens
  siRNA target sequence for DNAH5 (NM_001369.1,1696-1714).
cggaagttcatggatgtta

SEQ ID NO: 79158 - DNA, 19 bp, Homo sapiens
  siRNA target sequence for DNAH5 (NM_001369.1,1741-1759).
caagctctaagaatgttga

SEQ ID NO: 79159 - DNA, 19 bp, Homo sapiens
  siRNA target sequence for DNAH5 (NM_001369.1,1768-1786).
gaaagattgaatataccta

SEQ ID NO: 79160 - DNA, 19 bp, Homo sapiens
  siRNA target sequence for DNAH5 (NM_001369.1,1798-1816).
gatgacaaatatcaactta

SEQ ID NO: 79161 - DNA, 19 bp, Homo sapiens
  siRNA target sequence for DNAH5 (NM_001369.1,1803-1821).
caaatatcaacttatcctt

SEQ ID NO: 79162 - DNA, 19 bp, Homo sapiens
  siRNA target sequence for DNAH5 (NM_001369.1,1827-1845).
ctatggggctgacattgat

SEQ ID NO: 79163 - DNA, 19 bp, Homo sapiens
  siRNA target sequence for DNAH5 (NM_001369.1,1837-1855).
gacattgatatgatttcaa

SEQ ID NO: 79164 - DNA, 19 bp, Homo sapiens
  siRNA target sequence for DNAH5 (NM_001369.1,1858-1876).
ctgtatacaaagcagaaat

SEQ ID NO: 79165 - DNA, 19 bp, Homo sapiens
  siRNA target sequence for DNAH5 (NM_001369.1,1904-1922).
ctcccatcgctggaaagat

SEQ ID NO: 79166 - DNA, 19 bp, Homo sapiens
  siRNA target sequence for DNAH5 (NM_001369.1,1906-1924).
cccatcgctggaaagattt

SEQ ID NO: 79167 - DNA, 19 bp, Homo sapiens
  siRNA target sequence for DNAH5 (NM_001369.1,2014-2032).
cctataattcgcagttaca

SEQ ID NO: 79168 - DNA, 19 bp, Homo sapiens
  siRNA target sequence for DNAH5 (NM_001369.1,2079-2097).
ggcgtggcttcggcaaatt

SEQ ID NO: 79169 - DNA, 19 bp, Homo sapiens
  siRNA target sequence for DNAH5 (NM_001369.1,2081-2099).
cgtggcttcggcaaattga

SEQ ID NO: 79170 - DNA, 19 bp, Homo sapiens
  siRNA target sequence for DNAH5 (NM_001369.1,2082-2100).
gtggcttcggcaaattgaa

SEQ ID NO: 79171 - DNA, 19 bp, Homo sapiens
  siRNA target sequence for DNAH5 (NM_001369.1,2113-2131).
ggtcttgaggcttcattat

SEQ ID NO: 79172 - DNA, 19 bp, Homo sapiens
  siRNA target sequence for DNAH5 (NM_001369.1,2114-2132).
gtcttgaggcttcattatt

SEQ ID NO: 79173 - DNA, 19 bp, Homo sapiens
  siRNA target sequence for DNAH5 (NM_001369.1,2173-2191).
gaccctcagatattaatct

SEQ ID NO: 79174 - DNA, 19 bp, Homo sapiens
  siRNA target sequence for DNAH5 (NM_001369.1,2256-2274).
cttccagaaacgagataga

SEQ ID NO: 79175 - DNA, 19 bp, Homo sapiens
  siRNA target sequence for DNAH5 (NM_001369.1,2260-2278).
cagaaacgagatagataca

SEQ ID NO: 79176 - DNA, 19 bp, Homo sapiens
  siRNA target sequence for DNAH5 (NM_001369.1,2262-2280).
gaaacgagatagatacaaa

SEQ ID NO: 79177 - DNA, 19 bp, Homo sapiens
  siRNA target sequence for DNAH5 (NM_001369.1,2266-2284).
cgagatagatacaaaagga

SEQ ID NO: 79178 - DNA, 19 bp, Homo sapiens
  siRNA target sequence for DNAH5 (NM_001369.1,2282-2300).
ggaacttcagtaacatgaa

SEQ ID NO: 79179 - DNA, 19 bp, Homo sapiens
  siRNA target sequence for DNAH5 (NM_001369.1,2301-2319).
gatgatgctagctgaatat

SEQ ID NO: 79180 - DNA, 19 bp, Homo sapiens
  siRNA target sequence for DNAH5 (NM_001369.1,2345-2363).
ctgccattgagcaattgat

SEQ ID NO: 79181 - DNA, 19 bp, Homo sapiens
  siRNA target sequence for DNAH5 (NM_001369.1,2494-2512).
gacagggtcaatgatttga

SEQ ID NO: 79182 - DNA, 19 bp, Homo sapiens
  siRNA target sequence for DNAH5 (NM_001369.1,2498-2516).
gggtcaatgatttgattga

SEQ ID NO: 79183 - DNA, 19 bp, Homo sapiens
  siRNA target sequence for DNAH5 (NM_001369.1,2511-2529).
gattgagttccgcattgat

SEQ ID NO: 79184 - DNA, 19 bp, Homo sapiens
  siRNA target sequence for DNAH5 (NM_001369.1,2520-2538).
ccgcattgatgccattcta

SEQ ID NO: 79185 - DNA, 19 bp, Homo sapiens
  siRNA target sequence for DNAH5 (NM_001369.1,2530-2548).
gccattctagaagaaatga

SEQ ID NO: 79186 - DNA, 19 bp, Homo sapiens
  siRNA target sequence for DNAH5 (NM_001369.1,2619-2637).
ggatctttgtgtaaatggt

SEQ ID NO: 79187 - DNA, 19 bp, Homo sapiens
  siRNA target sequence for DNAH5 (NM_001369.1,2704-2722).
ctggatgtggaagttttat

SEQ ID NO: 79188 - DNA, 19 bp, Homo sapiens
  siRNA target sequence for DNAH5 (NM_001369.1,2809-2827).
gacaccttgacatcatcta

SEQ ID NO: 79189 - DNA, 19 bp, Homo sapiens
  siRNA target sequence for DNAH5 (NM_001369.1,2811-2829).
caccttgacatcatctatt

SEQ ID NO: 79190 - DNA, 19 bp, Homo sapiens
  siRNA target sequence for DNAH5 (NM_001369.1,2858-2876).
cgacagtcacgaggaaaaa

SEQ ID NO: 79191 - DNA, 19 bp, Homo sapiens
  siRNA target sequence for DNAH5 (NM_001369.1,2908-2926).
cgcgagttactctctcatt

SEQ ID NO: 79192 - DNA, 19 bp, Homo sapiens
  siRNA target sequence for DNAH5 (NM_001369.1,2909-2927).
gcgagttactctctcattt

SEQ ID NO: 79193 - DNA, 19 bp, Homo sapiens
  siRNA target sequence for DNAH5 (NM_001369.1,2921-2939).
ctcatttcaaccatcagaa

SEQ ID NO: 79194 - DNA, 19 bp, Homo sapiens
  siRNA target sequence for DNAH5 (NM_001369.1,2943-2961).
ggatgctcttctgaaagtt

SEQ ID NO: 79195 - DNA, 19 bp, Homo sapiens
  siRNA target sequence for DNAH5 (NM_001369.1,2977-2995).
gaggccattcgcaaacgta

SEQ ID NO: 79196 - DNA, 19 bp, Homo sapiens
  siRNA target sequence for DNAH5 (NM_001369.1,2979-2997).
ggccattcgcaaacgtatt

SEQ ID NO: 79197 - DNA, 19 bp, Homo sapiens
  siRNA target sequence for DNAH5 (NM_001369.1,2981-2999).
ccattcgcaaacgtattca

SEQ ID NO: 79198 - DNA, 19 bp, Homo sapiens
  siRNA target sequence for DNAH5 (NM_001369.1,2998-3016).
cattcctctcacacaatta

SEQ ID NO: 79199 - DNA, 19 bp, Homo sapiens
  siRNA target sequence for DNAH5 (NM_001369.1,3002-3020).
cctctcacacaattaactt

SEQ ID NO: 79200 - DNA, 19 bp, Homo sapiens
  siRNA target sequence for DNAH5 (NM_001369.1,3245-3263).
ctttgcagagtaatgaaga

SEQ ID NO: 79201 - DNA, 19 bp, Homo sapiens
  siRNA target sequence for DNAH5 (NM_001369.1,3304-3322).
gataccttggagatagcat

SEQ ID NO: 79202 - DNA, 19 bp, Homo sapiens
  siRNA target sequence for DNAH5 (NM_001369.1,3335-3353).
ccattcccgtgcaaaccaa

SEQ ID NO: 79203 - DNA, 19 bp, Homo sapiens
  siRNA target sequence for DNAH5 (NM_001369.1,3340-3358).
cccgtgcaaaccaagaact

SEQ ID NO: 79204 - DNA, 19 bp, Homo sapiens
  siRNA target sequence for DNAH5 (NM_001369.1,3341-3359).
ccgtgcaaaccaagaacta

SEQ ID NO: 79205 - DNA, 19 bp, Homo sapiens
  siRNA target sequence for DNAH5 (NM_001369.1,3343-3361).
gtgcaaaccaagaactatt

SEQ ID NO: 79206 - DNA, 19 bp, Homo sapiens
  siRNA target sequence for DNAH5 (NM_001369.1,3354-3372).
gaactattataagaatgtt

SEQ ID NO: 79207 - DNA, 19 bp, Homo sapiens
  siRNA target sequence for DNAH5 (NM_001369.1,3376-3394).
gaaaacaaagagattgtaa

SEQ ID NO: 79208 - DNA, 19 bp, Homo sapiens
  siRNA target sequence for DNAH5 (NM_001369.1,3406-3424).
gtgcttagcacaattatca

SEQ ID NO: 79209 - DNA, 19 bp, Homo sapiens
  siRNA target sequence for DNAH5 (NM_001369.1,3461-3479).
gcttcaaacgctacaatca

SEQ ID NO: 79210 - DNA, 19 bp, Homo sapiens
  siRNA target sequence for DNAH5 (NM_001369.1,3465-3483).
caaacgctacaatcacatt

SEQ ID NO: 79211 - DNA, 19 bp, Homo sapiens
  siRNA target sequence for DNAH5 (NM_001369.1,3502-3520).
gaagccattaagacattta

SEQ ID NO: 79212 - DNA, 19 bp, Homo sapiens
  siRNA target sequence for DNAH5 (NM_001369.1,3505-3523).
gccattaagacatttatta

SEQ ID NO: 79213 - DNA, 19 bp, Homo sapiens
  siRNA target sequence for DNAH5 (NM_001369.1,3528-3546).
gagccccttgctttctgaa

SEQ ID NO: 79214 - DNA, 19 bp, Homo sapiens
  siRNA target sequence for DNAH5 (NM_001369.1,3694-3712).
ggacgccactgtaacaaaa

SEQ ID NO: 79215 - DNA, 19 bp, Homo sapiens
  siRNA target sequence for DNAH5 (NM_001369.1,3695-3713).
gacgccactgtaacaaaaa

SEQ ID NO: 79216 - DNA, 19 bp, Homo sapiens
  siRNA target sequence for DNAH5 (NM_001369.1,3697-3715).
cgccactgtaacaaaaaat

SEQ ID NO: 79217 - DNA, 19 bp, Homo sapiens
  siRNA target sequence for DNAH5 (NM_001369.1,3720-3738).
gagtgagatggaaaacatt

SEQ ID NO: 79218 - DNA, 19 bp, Homo sapiens
  siRNA target sequence for DNAH5 (NM_001369.1,3735-3753).
catttttatgcttattgaa

SEQ ID NO: 79219 - DNA, 19 bp, Homo sapiens
  siRNA target sequence for DNAH5 (NM_001369.1,3759-3777).
caataagaaactaaatcgt

SEQ ID NO: 79220 - DNA, 19 bp, Homo sapiens
  siRNA target sequence for DNAH5 (NM_001369.1,3765-3783).
gaaactaaatcgtccaatt

SEQ ID NO: 79221 - DNA, 19 bp, Homo sapiens
  siRNA target sequence for DNAH5 (NM_001369.1,3779-3797).
caattaaggacctagatga

SEQ ID NO: 79222 - DNA, 19 bp, Homo sapiens
  siRNA target sequence for DNAH5 (NM_001369.1,3814-3832).
gcagcgctgaaagaaataa

SEQ ID NO: 79223 - DNA, 19 bp, Homo sapiens
  siRNA target sequence for DNAH5 (NM_001369.1,3855-3873).
ctttcaagtaggacctatt

SEQ ID NO: 79224 - DNA, 19 bp, Homo sapiens
  siRNA target sequence for DNAH5 (NM_001369.1,3865-3883).
ggacctattgaggaatctt

SEQ ID NO: 79225 - DNA, 19 bp, Homo sapiens
  siRNA target sequence for DNAH5 (NM_001369.1,3866-3884).
gacctattgaggaatctta

SEQ ID NO: 79226 - DNA, 19 bp, Homo sapiens
  siRNA target sequence for DNAH5 (NM_001369.1,3888-3906).
cctgcttaacagatatgga

SEQ ID NO: 79227 - DNA, 19 bp, Homo sapiens
  siRNA target sequence for DNAH5 (NM_001369.1,3912-3930).
gatagcaagggaagagata

SEQ ID NO: 79228 - DNA, 19 bp, Homo sapiens
  siRNA target sequence for DNAH5 (NM_001369.1,3979-3997).
gctggcgaagtccagaata

SEQ ID NO: 79229 - DNA, 19 bp, Homo sapiens
  siRNA target sequence for DNAH5 (NM_001369.1,3980-3998).
ctggcgaagtccagaataa

SEQ ID NO: 79230 - DNA, 19 bp, Homo sapiens
  siRNA target sequence for DNAH5 (NM_001369.1,3982-4000).
ggcgaagtccagaataaat

SEQ ID NO: 79231 - DNA, 19 bp, Homo sapiens
  siRNA target sequence for DNAH5 (NM_001369.1,3988-4006).
gtccagaataaattagtct

SEQ ID NO: 79232 - DNA, 19 bp, Homo sapiens
  siRNA target sequence for DNAH5 (NM_001369.1,4019-4037).
gtttcaagaaagagcttat

SEQ ID NO: 79233 - DNA, 19 bp, Homo sapiens
  siRNA target sequence for DNAH5 (NM_001369.1,4040-4058).
gtgctgtggaggtattcct

SEQ ID NO: 79234 - DNA, 19 bp, Homo sapiens
  siRNA target sequence for DNAH5 (NM_001369.1,4050-4068).
ggtattcctccaagattgt

SEQ ID NO: 79235 - DNA, 19 bp, Homo sapiens
  siRNA target sequence for DNAH5 (NM_001369.1,4133-4151).
ccagtgacaggcttatcat

SEQ ID NO: 79236 - DNA, 19 bp, Homo sapiens
  siRNA target sequence for DNAH5 (NM_001369.1,4260-4278).
gaagcaactaaatcttcta

SEQ ID NO: 79237 - DNA, 19 bp, Homo sapiens
  siRNA target sequence for DNAH5 (NM_001369.1,4296-4314).
gtacaacagtgtcatagaa

SEQ ID NO: 79238 - DNA, 19 bp, Homo sapiens
  siRNA target sequence for DNAH5 (NM_001369.1,4302-4320).
cagtgtcatagaaactgta

SEQ ID NO: 79239 - DNA, 19 bp, Homo sapiens
  siRNA target sequence for DNAH5 (NM_001369.1,4304-4322).
gtgtcatagaaactgtaaa

SEQ ID NO: 79240 - DNA, 19 bp, Homo sapiens
  siRNA target sequence for DNAH5 (NM_001369.1,4318-4336).
gtaaatagctattatgata

SEQ ID NO: 79241 - DNA, 19 bp, Homo sapiens
  siRNA target sequence for DNAH5 (NM_001369.1,4343-4361).
ggtcagaggtgaatattga

SEQ ID NO: 79242 - DNA, 19 bp, Homo sapiens
  siRNA target sequence for DNAH5 (NM_001369.1,4344-4362).
gtcagaggtgaatattgaa

SEQ ID NO: 79243 - DNA, 19 bp, Homo sapiens
  siRNA target sequence for DNAH5 (NM_001369.1,4350-4368).
ggtgaatattgaaaaaatt

SEQ ID NO: 79244 - DNA, 19 bp, Homo sapiens
  siRNA target sequence for DNAH5 (NM_001369.1,4443-4461).
ggacctgaagaagatcatt

SEQ ID NO: 79245 - DNA, 19 bp, Homo sapiens
  siRNA target sequence for DNAH5 (NM_001369.1,4521-4539).
gcggcactgggaaaggata

SEQ ID NO: 79246 - DNA, 19 bp, Homo sapiens
  siRNA target sequence for DNAH5 (NM_001369.1,4522-4540).
cggcactgggaaaggataa

SEQ ID NO: 79247 - DNA, 19 bp, Homo sapiens
  siRNA target sequence for DNAH5 (NM_001369.1,4561-4579).
ctggatgtggggaatgaaa

SEQ ID NO: 79248 - DNA, 19 bp, Homo sapiens
  siRNA target sequence for DNAH5 (NM_001369.1,4570-4588).
gggaatgaaagctttaagt

SEQ ID NO: 79249 - DNA, 19 bp, Homo sapiens
  siRNA target sequence for DNAH5 (NM_001369.1,4646-4664).
gtatcagtgcggtgaaaga

SEQ ID NO: 79250 - DNA, 19 bp, Homo sapiens
  siRNA target sequence for DNAH5 (NM_001369.1,4768-4786).
gacagtacctcggaaatca

SEQ ID NO: 79251 - DNA, 19 bp, Homo sapiens
  siRNA target sequence for DNAH5 (NM_001369.1,4828-4846).
ctgagcaacaggtacaata

SEQ ID NO: 79252 - DNA, 19 bp, Homo sapiens
  siRNA target sequence for DNAH5 (NM_001369.1,4839-4857).
gtacaatatgccattcaaa

SEQ ID NO: 79253 - DNA, 19 bp, Homo sapiens
  siRNA target sequence for DNAH5 (NM_001369.1,4874-4892).
gggtgcagtacctttccaa

SEQ ID NO: 79254 - DNA, 19 bp, Homo sapiens
  siRNA target sequence for DNAH5 (NM_001369.1,4889-4907).
ccaactcaacagacatcat

SEQ ID NO: 79255 - DNA, 19 bp, Homo sapiens
  siRNA target sequence for DNAH5 (NM_001369.1,4924-4942).
gtgcaaaacctgtggattt

SEQ ID NO: 79256 - DNA, 19 bp, Homo sapiens
  siRNA target sequence for DNAH5 (NM_001369.1,4992-5010).
ggaagccaagcggttttct

SEQ ID NO: 79257 - DNA, 19 bp, Homo sapiens
  siRNA target sequence for DNAH5 (NM_001369.1,4993-5011).
gaagccaagcggttttcta

SEQ ID NO: 79258 - DNA, 19 bp, Homo sapiens
  siRNA target sequence for DNAH5 (NM_001369.1,4996-5014).
gccaagcggttttctaaca

SEQ ID NO: 79259 - DNA, 19 bp, Homo sapiens
  siRNA target sequence for DNAH5 (NM_001369.1,4997-5015).
ccaagcggttttctaacat

SEQ ID NO: 79260 - DNA, 19 bp, Homo sapiens
  siRNA target sequence for DNAH5 (NM_001369.1,5037-5055).
catgactcgggcacatgaa

SEQ ID NO: 79261 - DNA, 19 bp, Homo sapiens
  siRNA target sequence for DNAH5 (NM_001369.1,5119-5137).
ctggaccagttggaaatat

SEQ ID NO: 79262 - DNA, 19 bp, Homo sapiens
  siRNA target sequence for DNAH5 (NM_001369.1,5153-5171).
ctgggtacttggagaaaaa

SEQ ID NO: 79263 - DNA, 19 bp, Homo sapiens
  siRNA target sequence for DNAH5 (NM_001369.1,5210-5228).
ctgcccttctagagattct

SEQ ID NO: 79264 - DNA, 19 bp, Homo sapiens
  siRNA target sequence for DNAH5 (NM_001369.1,5237-5255).
cgtcggactcccacactat

SEQ ID NO: 79265 - DNA, 19 bp, Homo sapiens
  siRNA target sequence for DNAH5 (NM_001369.1,5238-5256).
gtcggactcccacactata

SEQ ID NO: 79266 - DNA, 19 bp, Homo sapiens
  siRNA target sequence for DNAH5 (NM_001369.1,5240-5258).
cggactcccacactataca

SEQ ID NO: 79267 - DNA, 19 bp, Homo sapiens
  siRNA target sequence for DNAH5 (NM_001369.1,5261-5279).
cccatttgctgaatgtgtt

SEQ ID NO: 79268 - DNA, 19 bp, Homo sapiens
  siRNA target sequence for DNAH5 (NM_001369.1,5296-5314).
gtcaagttccacgaaaaga

SEQ ID NO: 79269 - DNA, 19 bp, Homo sapiens
  siRNA target sequence for DNAH5 (NM_001369.1,5320-5338).
gatcgaattctgtcaattt

SEQ ID NO: 79270 - DNA, 19 bp, Homo sapiens
  siRNA target sequence for DNAH5 (NM_001369.1,5323-5341).
cgaattctgtcaatttcct

SEQ ID NO: 79271 - DNA, 19 bp, Homo sapiens
  siRNA target sequence for DNAH5 (NM_001369.1,5386-5404).
gagggcaatgtggaagttt

SEQ ID NO: 79272 - DNA, 19 bp, Homo sapiens
  siRNA target sequence for DNAH5 (NM_001369.1,5401-5419).
gtttggcttaattctcttt

SEQ ID NO: 79273 - DNA, 19 bp, Homo sapiens
  siRNA target sequence for DNAH5 (NM_001369.1,5405-5423).
ggcttaattctcttttgga

SEQ ID NO: 79274 - DNA, 19 bp, Homo sapiens
  siRNA target sequence for DNAH5 (NM_001369.1,5455-5473).
cgccaggcagccgcaaata

SEQ ID NO: 79275 - DNA, 19 bp, Homo sapiens
  siRNA target sequence for DNAH5 (NM_001369.1,5456-5474).
gccaggcagccgcaaatat

SEQ ID NO: 79276 - DNA, 19 bp, Homo sapiens
  siRNA target sequence for DNAH5 (NM_001369.1,5457-5475).
ccaggcagccgcaaatatt

SEQ ID NO: 79277 - DNA, 19 bp, Homo sapiens
  siRNA target sequence for DNAH5 (NM_001369.1,5462-5480).
cagccgcaaatattcaaga

SEQ ID NO: 79278 - DNA, 19 bp, Homo sapiens
  siRNA target sequence for DNAH5 (NM_001369.1,5464-5482).
gccgcaaatattcaagaaa

SEQ ID NO: 79279 - DNA, 19 bp, Homo sapiens
  siRNA target sequence for DNAH5 (NM_001369.1,5485-5503).
ggtttccaactaactgaat

SEQ ID NO: 79280 - DNA, 19 bp, Homo sapiens
  siRNA target sequence for DNAH5 (NM_001369.1,5486-5504).
gtttccaactaactgaatt

SEQ ID NO: 79281 - DNA, 19 bp, Homo sapiens
  siRNA target sequence for DNAH5 (NM_001369.1,5517-5535).
ccctgctcaggttggatta

SEQ ID NO: 79282 - DNA, 19 bp, Homo sapiens
  siRNA target sequence for DNAH5 (NM_001369.1,5518-5536).
cctgctcaggttggattat

SEQ ID NO: 79283 - DNA, 19 bp, Homo sapiens
  siRNA target sequence for DNAH5 (NM_001369.1,5556-5574).
gacacgggattcagaagaa

SEQ ID NO: 79284 - DNA, 19 bp, Homo sapiens
  siRNA target sequence for DNAH5 (NM_001369.1,5567-5585).
cagaagaagcccttagaaa

SEQ ID NO: 79285 - DNA, 19 bp, Homo sapiens
  siRNA target sequence for DNAH5 (NM_001369.1,5577-5595).
ccttagaaatgccaagttt

SEQ ID NO: 79286 - DNA, 19 bp, Homo sapiens
  siRNA target sequence for DNAH5 (NM_001369.1,5632-5650).
ctggagctactcaatacat

SEQ ID NO: 79287 - DNA, 19 bp, Homo sapiens
  siRNA target sequence for DNAH5 (NM_001369.1,5684-5702).
cggaacgagtgaaatacga

SEQ ID NO: 79288 - DNA, 19 bp, Homo sapiens
  siRNA target sequence for DNAH5 (NM_001369.1,5700-5718).
cgagactctgattactatt

SEQ ID NO: 79289 - DNA, 19 bp, Homo sapiens
  siRNA target sequence for DNAH5 (NM_001369.1,5703-5721).
gactctgattactattcat

SEQ ID NO: 79290 - DNA, 19 bp, Homo sapiens
  siRNA target sequence for DNAH5 (NM_001369.1,5705-5723).
ctctgattactattcatgt

SEQ ID NO: 79291 - DNA, 19 bp, Homo sapiens
  siRNA target sequence for DNAH5 (NM_001369.1,5722-5740).
gtgcaccaaagggatatct

SEQ ID NO: 79292 - DNA, 19 bp, Homo sapiens
  siRNA target sequence for DNAH5 (NM_001369.1,5727-5745).
ccaaagggatatctttgat

SEQ ID NO: 79293 - DNA, 19 bp, Homo sapiens
  siRNA target sequence for DNAH5 (NM_001369.1,5801-5819).
gcagattttactttaacga

SEQ ID NO: 79294 - DNA, 19 bp, Homo sapiens
  siRNA target sequence for DNAH5 (NM_001369.1,5847-5865).
cacagatgtggcgttcata

SEQ ID NO: 79295 - DNA, 19 bp, Homo sapiens
  siRNA target sequence for DNAH5 (NM_001369.1,5849-5867).
cagatgtggcgttcatata

SEQ ID NO: 79296 - DNA, 19 bp, Homo sapiens
  siRNA target sequence for DNAH5 (NM_001369.1,5858-5876).
cgttcatataccagaatga

SEQ ID NO: 79297 - DNA, 19 bp, Homo sapiens
  siRNA target sequence for DNAH5 (NM_001369.1,5862-5880).
catataccagaatgaattt

SEQ ID NO: 79298 - DNA, 19 bp, Homo sapiens
  siRNA target sequence for DNAH5 (NM_001369.1,5888-5906).
gcactgacaggcttgtaat

SEQ ID NO: 79299 - DNA, 19 bp, Homo sapiens
  siRNA target sequence for DNAH5 (NM_001369.1,5889-5907).
cactgacaggcttgtaata

SEQ ID NO: 79300 - DNA, 19 bp, Homo sapiens
  siRNA target sequence for DNAH5 (NM_001369.1,5911-5929).
ccacttacagacagatgtt

SEQ ID NO: 79301 - DNA, 19 bp, Homo sapiens
  siRNA target sequence for DNAH5 (NM_001369.1,6026-6044).
gatgcctcgggaaatacgt

SEQ ID NO: 79302 - DNA, 19 bp, Homo sapiens
  siRNA target sequence for DNAH5 (NM_001369.1,6035-6053).
ggaaatacgtcgtggtttt

SEQ ID NO: 79303 - DNA, 19 bp, Homo sapiens
  siRNA target sequence for DNAH5 (NM_001369.1,6042-6060).
cgtcgtggttttcaattgt

SEQ ID NO: 79304 - DNA, 19 bp, Homo sapiens
  siRNA target sequence for DNAH5 (NM_001369.1,6080-6098).
gaggacttggacggatttt

SEQ ID NO: 79305 - DNA, 19 bp, Homo sapiens
  siRNA target sequence for DNAH5 (NM_001369.1,6082-6100).
ggacttggacggattttta

SEQ ID NO: 79306 - DNA, 19 bp, Homo sapiens
  siRNA target sequence for DNAH5 (NM_001369.1,6083-6101).
gacttggacggatttttaa

SEQ ID NO: 79307 - DNA, 19 bp, Homo sapiens
  siRNA target sequence for DNAH5 (NM_001369.1,6116-6134).
ctggatcctggggttgttt

SEQ ID NO: 79308 - DNA, 19 bp, Homo sapiens
  siRNA target sequence for DNAH5 (NM_001369.1,6170-6188).
cggttgcagcccagcaaat

SEQ ID NO: 79309 - DNA, 19 bp, Homo sapiens
  siRNA target sequence for DNAH5 (NM_001369.1,6171-6189).
ggttgcagcccagcaaatt

SEQ ID NO: 79310 - DNA, 19 bp, Homo sapiens
  siRNA target sequence for DNAH5 (NM_001369.1,6172-6190).
gttgcagcccagcaaattt

SEQ ID NO: 79311 - DNA, 19 bp, Homo sapiens
  siRNA target sequence for DNAH5 (NM_001369.1,6178-6196).
gcccagcaaatttccatta

SEQ ID NO: 79312 - DNA, 19 bp, Homo sapiens
  siRNA target sequence for DNAH5 (NM_001369.1,6313-6331).
caggaactccctgaaaact

SEQ ID NO: 79313 - DNA, 19 bp, Homo sapiens
  siRNA target sequence for DNAH5 (NM_001369.1,6323-6341).
ctgaaaacttgaagattaa

SEQ ID NO: 79314 - DNA, 19 bp, Homo sapiens
  siRNA target sequence for DNAH5 (NM_001369.1,6363-6381).
ggtgcctgaccgtcagatt

SEQ ID NO: 79315 - DNA, 19 bp, Homo sapiens
  siRNA target sequence for DNAH5 (NM_001369.1,6364-6382).
gtgcctgaccgtcagatta

SEQ ID NO: 79316 - DNA, 19 bp, Homo sapiens
  siRNA target sequence for DNAH5 (NM_001369.1,6367-6385).
cctgaccgtcagattatca

SEQ ID NO: 79317 - DNA, 19 bp, Homo sapiens
  siRNA target sequence for DNAH5 (NM_001369.1,6368-6386).
ctgaccgtcagattatcat

SEQ ID NO: 79318 - DNA, 19 bp, Homo sapiens
  siRNA target sequence for DNAH5 (NM_001369.1,6370-6388).
gaccgtcagattatcataa

SEQ ID NO: 79319 - DNA, 19 bp, Homo sapiens
  siRNA target sequence for DNAH5 (NM_001369.1,6399-6417).
ggctagttgtggcttcatt

SEQ ID NO: 79320 - DNA, 19 bp, Homo sapiens
  siRNA target sequence for DNAH5 (NM_001369.1,6401-6419).
ctagttgtggcttcattga

SEQ ID NO: 79321 - DNA, 19 bp, Homo sapiens
  siRNA target sequence for DNAH5 (NM_001369.1,6545-6563).
caaaaagagccaatccaat

SEQ ID NO: 79322 - DNA, 19 bp, Homo sapiens
  siRNA target sequence for DNAH5 (NM_001369.1,6569-6587).
cggagtccacgattgtcat

SEQ ID NO: 79323 - DNA, 19 bp, Homo sapiens
  siRNA target sequence for DNAH5 (NM_001369.1,6579-6597).
gattgtcatgcgtgtacta

SEQ ID NO: 79324 - DNA, 19 bp, Homo sapiens
  siRNA target sequence for DNAH5 (NM_001369.1,6590-6608).
gtgtactacgggacatgaa

SEQ ID NO: 79325 - DNA, 19 bp, Homo sapiens
  siRNA target sequence for DNAH5 (NM_001369.1,6595-6613).
ctacgggacatgaatcttt

SEQ ID NO: 79326 - DNA, 19 bp, Homo sapiens
  siRNA target sequence for DNAH5 (NM_001369.1,6598-6616).
cgggacatgaatctttcta

SEQ ID NO: 79327 - DNA, 19 bp, Homo sapiens
  siRNA target sequence for DNAH5 (NM_001369.1,6628-6646).
gaggatgaacccttgtttt

SEQ ID NO: 79328 - DNA, 19 bp, Homo sapiens
  siRNA target sequence for DNAH5 (NM_001369.1,6637-6655).
cccttgtttttgagtttga

SEQ ID NO: 79329 - DNA, 19 bp, Homo sapiens
  siRNA target sequence for DNAH5 (NM_001369.1,6733-6751).
gaagaagctggtttaatca

SEQ ID NO: 79330 - DNA, 19 bp, Homo sapiens
  siRNA target sequence for DNAH5 (NM_001369.1,6750-6768).
caaccatcctccttggaaa

SEQ ID NO: 79331 - DNA, 19 bp, Homo sapiens
  siRNA target sequence for DNAH5 (NM_001369.1,6954-6972).
gctggacgttgccacaaat

SEQ ID NO: 79332 - DNA, 19 bp, Homo sapiens
  siRNA target sequence for DNAH5 (NM_001369.1,6958-6976).
gacgttgccacaaatgact

SEQ ID NO: 79333 - DNA, 19 bp, Homo sapiens
  siRNA target sequence for DNAH5 (NM_001369.1,6998-7016).
cgctttggaggaaaacatt

SEQ ID NO: 79334 - DNA, 19 bp, Homo sapiens
  siRNA target sequence for DNAH5 (NM_001369.1,7031-7049).
gggaacatatctggataat

SEQ ID NO: 79335 - DNA, 19 bp, Homo sapiens
  siRNA target sequence for DNAH5 (NM_001369.1,7101-7119).
ggatgataacaaaactcta

SEQ ID NO: 79336 - DNA, 19 bp, Homo sapiens
  siRNA target sequence for DNAH5 (NM_001369.1,7150-7168).
gctccaaactgcaagatca

SEQ ID NO: 79337 - DNA, 19 bp, Homo sapiens
  siRNA target sequence for DNAH5 (NM_001369.1,7176-7194).
gcctcataacattgacaat

SEQ ID NO: 79338 - DNA, 19 bp, Homo sapiens
  siRNA target sequence for DNAH5 (NM_001369.1,7202-7220).
ctgccaccgtctcaagaaa

SEQ ID NO: 79339 - DNA, 19 bp, Homo sapiens
  siRNA target sequence for DNAH5 (NM_001369.1,7233-7251).
catgagctcttctatcctt

SEQ ID NO: 79340 - DNA, 19 bp, Homo sapiens
  siRNA target sequence for DNAH5 (NM_001369.1,7248-7266).
ccttgattggagtcctatt

SEQ ID NO: 79341 - DNA, 19 bp, Homo sapiens
  siRNA target sequence for DNAH5 (NM_001369.1,7342-7360).
gacttgtatcgcttctgta

SEQ ID NO: 79342 - DNA, 19 bp, Homo sapiens
  siRNA target sequence for DNAH5 (NM_001369.1,7620-7638).
caccgccttcgactactat

SEQ ID NO: 79343 - DNA, 19 bp, Homo sapiens
  siRNA target sequence for DNAH5 (NM_001369.1,7622-7640).
ccgccttcgactactatgt

SEQ ID NO: 79344 - DNA, 19 bp, Homo sapiens
  siRNA target sequence for DNAH5 (NM_001369.1,7673-7691).
cgcgtacccaggaatacct

SEQ ID NO: 79345 - DNA, 19 bp, Homo sapiens
  siRNA target sequence for DNAH5 (NM_001369.1,7710-7728).
cccagagtatggttctatt

SEQ ID NO: 79346 - DNA, 19 bp, Homo sapiens
  siRNA target sequence for DNAH5 (NM_001369.1,7790-7808).
gcaaggctgtgctattaat

SEQ ID NO: 79347 - DNA, 19 bp, Homo sapiens
  siRNA target sequence for DNAH5 (NM_001369.1,7791-7809).
caaggctgtgctattaatt

SEQ ID NO: 79348 - DNA, 19 bp, Homo sapiens
  siRNA target sequence for DNAH5 (NM_001369.1,7794-7812).
ggctgtgctattaattggt

SEQ ID NO: 79349 - DNA, 19 bp, Homo sapiens
  siRNA target sequence for DNAH5 (NM_001369.1,7867-7885).
cctgaatgtcacatgatca

SEQ ID NO: 79350 - DNA, 19 bp, Homo sapiens
  siRNA target sequence for DNAH5 (NM_001369.1,7868-7886).
ctgaatgtcacatgatcaa

SEQ ID NO: 79351 - DNA, 19 bp, Homo sapiens
  siRNA target sequence for DNAH5 (NM_001369.1,7878-7896).
catgatcaagagtctgaat

SEQ ID NO: 79352 - DNA, 19 bp, Homo sapiens
  siRNA target sequence for DNAH5 (NM_001369.1,7907-7925).
caaccaccccactgatgtt

SEQ ID NO: 79353 - DNA, 19 bp, Homo sapiens
  siRNA target sequence for DNAH5 (NM_001369.1,7976-7994).
gccctcctgcgggaaagaa

SEQ ID NO: 79354 - DNA, 19 bp, Homo sapiens
  siRNA target sequence for DNAH5 (NM_001369.1,7979-7997).
ctcctgcgggaaagaagat

SEQ ID NO: 79355 - DNA, 19 bp, Homo sapiens
  siRNA target sequence for DNAH5 (NM_001369.1,7981-7999).
cctgcgggaaagaagatga

SEQ ID NO: 79356 - DNA, 19 bp, Homo sapiens
  siRNA target sequence for DNAH5 (NM_001369.1,8014-8032).
gatgtgaatatgccaataa

SEQ ID NO: 79357 - DNA, 19 bp, Homo sapiens
  siRNA target sequence for DNAH5 (NM_001369.1,8019-8037).
gaatatgccaataatcaat

SEQ ID NO: 79358 - DNA, 19 bp, Homo sapiens
  siRNA target sequence for DNAH5 (NM_001369.1,8043-8061).
gggagatcaggttacgaat

SEQ ID NO: 79359 - DNA, 19 bp, Homo sapiens
  siRNA target sequence for DNAH5 (NM_001369.1,8047-8065).
gatcaggttacgaatgaga

SEQ ID NO: 79360 - DNA, 19 bp, Homo sapiens
  siRNA target sequence for DNAH5 (NM_001369.1,8082-8100).
ggaacaaaatggattctat

SEQ ID NO: 79361 - DNA, 19 bp, Homo sapiens
  siRNA target sequence for DNAH5 (NM_001369.1,8083-8101).
gaacaaaatggattctata

SEQ ID NO: 79362 - DNA, 19 bp, Homo sapiens
  siRNA target sequence for DNAH5 (NM_001369.1,8171-8189).
gtggtggacgcaatgacat

SEQ ID NO: 79363 - DNA, 19 bp, Homo sapiens
  siRNA target sequence for DNAH5 (NM_001369.1,8202-8220).
caagaggcagttctctata

SEQ ID NO: 79364 - DNA, 19 bp, Homo sapiens
  siRNA target sequence for DNAH5 (NM_001369.1,8205-8223).
gaggcagttctctatattt

SEQ ID NO: 79365 - DNA, 19 bp, Homo sapiens
  siRNA target sequence for DNAH5 (NM_001369.1,8207-8225).
ggcagttctctatatttaa

SEQ ID NO: 79366 - DNA, 19 bp, Homo sapiens
  siRNA target sequence for DNAH5 (NM_001369.1,8208-8226).
gcagttctctatatttaat

SEQ ID NO: 79367 - DNA, 19 bp, Homo sapiens
  siRNA target sequence for DNAH5 (NM_001369.1,8275-8293).
ggggtaggccactactgta

SEQ ID NO: 79368 - DNA, 19 bp, Homo sapiens
  siRNA target sequence for DNAH5 (NM_001369.1,8300-8318).
ggggtttctcagaagaagt

SEQ ID NO: 79369 - DNA, 19 bp, Homo sapiens
  siRNA target sequence for DNAH5 (NM_001369.1,8321-8339).
gagattctgtgacaaaatt

SEQ ID NO: 79370 - DNA, 19 bp, Homo sapiens
  siRNA target sequence for DNAH5 (NM_001369.1,8363-8381).
ggcagatgaccaagattaa

SEQ ID NO: 79371 - DNA, 19 bp, Homo sapiens
  siRNA target sequence for DNAH5 (NM_001369.1,8390-8408).
ctacccctgcaaaattcca

SEQ ID NO: 79372 - DNA, 19 bp, Homo sapiens
  siRNA target sequence for DNAH5 (NM_001369.1,8415-8433).
gtttaacctacgagatctt

SEQ ID NO: 79373 - DNA, 19 bp, Homo sapiens
  siRNA target sequence for DNAH5 (NM_001369.1,8508-8526).
gaagcatgagtgtaaacgt

SEQ ID NO: 79374 - DNA, 19 bp, Homo sapiens
  siRNA target sequence for DNAH5 (NM_001369.1,8517-8535).
gtgtaaacgtgttatagct

SEQ ID NO: 79375 - DNA, 19 bp, Homo sapiens
  siRNA target sequence for DNAH5 (NM_001369.1,8713-8731).
gctgaaacacctaaaattt

SEQ ID NO: 79376 - DNA, 19 bp, Homo sapiens
  siRNA target sequence for DNAH5 (NM_001369.1,8757-8775).
cctaaaagagcgtctgaat

SEQ ID NO: 79377 - DNA, 19 bp, Homo sapiens
  siRNA target sequence for DNAH5 (NM_001369.1,8758-8776).
ctaaaagagcgtctgaata

SEQ ID NO: 79378 - DNA, 19 bp, Homo sapiens
  siRNA target sequence for DNAH5 (NM_001369.1,8842-8860).
gccatggttcacttagtca

SEQ ID NO: 79379 - DNA, 19 bp, Homo sapiens
  siRNA target sequence for DNAH5 (NM_001369.1,8843-8861).
ccatggttcacttagtcaa

SEQ ID NO: 79380 - DNA, 19 bp, Homo sapiens
  siRNA target sequence for DNAH5 (NM_001369.1,8859-8877).
caagatctctcgtgtcatt

SEQ ID NO: 79381 - DNA, 19 bp, Homo sapiens
  siRNA target sequence for DNAH5 (NM_001369.1,8939-8957).
cgaggttggcttcattcat

SEQ ID NO: 79382 - DNA, 19 bp, Homo sapiens
  siRNA target sequence for DNAH5 (NM_001369.1,9008-9026).
caaatctgatggaagatct

SEQ ID NO: 79383 - DNA, 19 bp, Homo sapiens
  siRNA target sequence for DNAH5 (NM_001369.1,9025-9043).
ctgaaggttttgtatcgaa

SEQ ID NO: 79384 - DNA, 19 bp, Homo sapiens
  siRNA target sequence for DNAH5 (NM_001369.1,9093-9111).
gattaaagatgagtcattt

SEQ ID NO: 79385 - DNA, 19 bp, Homo sapiens
  siRNA target sequence for DNAH5 (NM_001369.1,9115-9133).
gaatatatgaacaatgttt

SEQ ID NO: 79386 - DNA, 19 bp, Homo sapiens
  siRNA target sequence for DNAH5 (NM_001369.1,9142-9160).
ggtgaggtctctaacctat

SEQ ID NO: 79387 - DNA, 19 bp, Homo sapiens
  siRNA target sequence for DNAH5 (NM_001369.1,9143-9161).
gtgaggtctctaacctatt

SEQ ID NO: 79388 - DNA, 19 bp, Homo sapiens
  siRNA target sequence for DNAH5 (NM_001369.1,9147-9165).
ggtctctaacctatttgct

SEQ ID NO: 79389 - DNA, 19 bp, Homo sapiens
  siRNA target sequence for DNAH5 (NM_001369.1,9156-9174).
cctatttgctcgagatgaa

SEQ ID NO: 79390 - DNA, 19 bp, Homo sapiens
  siRNA target sequence for DNAH5 (NM_001369.1,9230-9248).
gccttcctaccaatgagaa

SEQ ID NO: 79391 - DNA, 19 bp, Homo sapiens
  siRNA target sequence for DNAH5 (NM_001369.1,9250-9268).
ctgcacgactacttcatga

SEQ ID NO: 79392 - DNA, 19 bp, Homo sapiens
  siRNA target sequence for DNAH5 (NM_001369.1,9274-9292).
gtccgacagaaccttcata

SEQ ID NO: 79393 - DNA, 19 bp, Homo sapiens
  siRNA target sequence for DNAH5 (NM_001369.1,9276-9294).
ccgacagaaccttcatatt

SEQ ID NO: 79394 - DNA, 19 bp, Homo sapiens
  siRNA target sequence for DNAH5 (NM_001369.1,9308-9326).
cgccagtgggggagaaatt

SEQ ID NO: 79395 - DNA, 19 bp, Homo sapiens
  siRNA target sequence for DNAH5 (NM_001369.1,9309-9327).
gccagtgggggagaaattt

SEQ ID NO: 79396 - DNA, 19 bp, Homo sapiens
  siRNA target sequence for DNAH5 (NM_001369.1,9345-9363).
gttccctgccctaatttca

SEQ ID NO: 79397 - DNA, 19 bp, Homo sapiens
  siRNA target sequence for DNAH5 (NM_001369.1,9384-9402).
cagccgatggcccaaagat

SEQ ID NO: 79398 - DNA, 19 bp, Homo sapiens
  siRNA target sequence for DNAH5 (NM_001369.1,9389-9407).
gatggcccaaagatgcttt

SEQ ID NO: 79399 - DNA, 19 bp, Homo sapiens
  siRNA target sequence for DNAH5 (NM_001369.1,9429-9447).
cctcacttcctatgatatt

SEQ ID NO: 79400 - DNA, 19 bp, Homo sapiens
  siRNA target sequence for DNAH5 (NM_001369.1,9514-9532).
gagaagtgtgttgattatt

SEQ ID NO: 79401 - DNA, 19 bp, Homo sapiens
  siRNA target sequence for DNAH5 (NM_001369.1,9555-9573).
ccacgtgacgcccaaatca

SEQ ID NO: 79402 - DNA, 19 bp, Homo sapiens
  siRNA target sequence for DNAH5 (NM_001369.1,9556-9574).
cacgtgacgcccaaatcat

SEQ ID NO: 79403 - DNA, 19 bp, Homo sapiens
  siRNA target sequence for DNAH5 (NM_001369.1,9591-9609).
gggctataagttcatatat

SEQ ID NO: 79404 - DNA, 19 bp, Homo sapiens
  siRNA target sequence for DNAH5 (NM_001369.1,9631-9649).
cggaccctggccaacagaa

SEQ ID NO: 79405 - DNA, 19 bp, Homo sapiens
  siRNA target sequence for DNAH5 (NM_001369.1,9639-9657).
ggccaacagaatgaatact

SEQ ID NO: 79406 - DNA, 19 bp, Homo sapiens
  siRNA target sequence for DNAH5 (NM_001369.1,9695-9713).
cagccttgagtaaagaact

SEQ ID NO: 79407 - DNA, 19 bp, Homo sapiens
  siRNA target sequence for DNAH5 (NM_001369.1,9733-9751).
ctacaagtggccaacgata

SEQ ID NO: 79408 - DNA, 19 bp, Homo sapiens
  siRNA target sequence for DNAH5 (NM_001369.1,9756-9774).
cgacatggtcttaaaagaa

SEQ ID NO: 79409 - DNA, 19 bp, Homo sapiens
  siRNA target sequence for DNAH5 (NM_001369.1,10093-10111).
caggaatccttaaaattga

SEQ ID NO: 79410 - DNA, 19 bp, Homo sapiens
  siRNA target sequence for DNAH5 (NM_001369.1,10096-10114).
gaatccttaaaattgatga

SEQ ID NO: 79411 - DNA, 19 bp, Homo sapiens
  siRNA target sequence for DNAH5 (NM_001369.1,10110-10128).
gatgactgcagggaacttt

SEQ ID NO: 79412 - DNA, 19 bp, Homo sapiens
  siRNA target sequence for DNAH5 (NM_001369.1,10113-10131).
gactgcagggaacttttta

SEQ ID NO: 79413 - DNA, 19 bp, Homo sapiens
  siRNA target sequence for DNAH5 (NM_001369.1,10173-10191).
ggtgatagaatttttgagt

SEQ ID NO: 79414 - DNA, 19 bp, Homo sapiens
  siRNA target sequence for DNAH5 (NM_001369.1,10207-10225).
cctgactataacatcgaaa

SEQ ID NO: 79415 - DNA, 19 bp, Homo sapiens
  siRNA target sequence for DNAH5 (NM_001369.1,10262-10280).
gttcctggacgaaagctat

SEQ ID NO: 79416 - DNA, 19 bp, Homo sapiens
  siRNA target sequence for DNAH5 (NM_001369.1,10419-10437).
cgtggtgcaggctgagtat

SEQ ID NO: 79417 - DNA, 19 bp, Homo sapiens
  siRNA target sequence for DNAH5 (NM_001369.1,10523-10541).
gtggcttggcaggtgaaaa

SEQ ID NO: 79418 - DNA, 19 bp, Homo sapiens
  siRNA target sequence for DNAH5 (NM_001369.1,10526-10544).
gcttggcaggtgaaaaaga

SEQ ID NO: 79419 - DNA, 19 bp, Homo sapiens
  siRNA target sequence for DNAH5 (NM_001369.1,10574-10592).
ctgcacaaactaaaagact

SEQ ID NO: 79420 - DNA, 19 bp, Homo sapiens
  siRNA target sequence for DNAH5 (NM_001369.1,10589-10607).
gacttgtaggggatgtact

SEQ ID NO: 79421 - DNA, 19 bp, Homo sapiens
  siRNA target sequence for DNAH5 (NM_001369.1,10647-10665).
ccaagagtttcgtgatctt

SEQ ID NO: 79422 - DNA, 19 bp, Homo sapiens
  siRNA target sequence for DNAH5 (NM_001369.1,10653-10671).
gtttcgtgatcttctgtta

SEQ ID NO: 79423 - DNA, 19 bp, Homo sapiens
  siRNA target sequence for DNAH5 (NM_001369.1,10658-10676).
gtgatcttctgttaaatga

SEQ ID NO: 79424 - DNA, 19 bp, Homo sapiens
  siRNA target sequence for DNAH5 (NM_001369.1,10743-10761).
gattgatgctcctactatt

SEQ ID NO: 79425 - DNA, 19 bp, Homo sapiens
  siRNA target sequence for DNAH5 (NM_001369.1,10750-10768).
gctcctactattagtgaat

SEQ ID NO: 79426 - DNA, 19 bp, Homo sapiens
  siRNA target sequence for DNAH5 (NM_001369.1,10754-10772).
ctactattagtgaatggaa

SEQ ID NO: 79427 - DNA, 19 bp, Homo sapiens
  siRNA target sequence for DNAH5 (NM_001369.1,10802-10820).
ccattcaaaatggaattat

SEQ ID NO: 79428 - DNA, 19 bp, Homo sapiens
  siRNA target sequence for DNAH5 (NM_001369.1,10832-10850).
catctcgttaccctttgtt

SEQ ID NO: 79429 - DNA, 19 bp, Homo sapiens
  siRNA target sequence for DNAH5 (NM_001369.1,10835-10853).
ctcgttaccctttgttaat

SEQ ID NO: 79430 - DNA, 19 bp, Homo sapiens
  siRNA target sequence for DNAH5 (NM_001369.1,10909-10927).
ctccagatcacgtctttaa

SEQ ID NO: 79431 - DNA, 19 bp, Homo sapiens
  siRNA target sequence for DNAH5 (NM_001369.1,10911-10929).
ccagatcacgtctttaaat

SEQ ID NO: 79432 - DNA, 19 bp, Homo sapiens
  siRNA target sequence for DNAH5 (NM_001369.1,10919-10937).
cgtctttaaatcacaagta

SEQ ID NO: 79433 - DNA, 19 bp, Homo sapiens
  siRNA target sequence for DNAH5 (NM_001369.1,11054-11072).
ctgggtctacctttaaggt

SEQ ID NO: 79434 - DNA, 19 bp, Homo sapiens
  siRNA target sequence for DNAH5 (NM_001369.1,11107-11125).
ggctttagactctacatta

SEQ ID NO: 79435 - DNA, 19 bp, Homo sapiens
  siRNA target sequence for DNAH5 (NM_001369.1,11168-11186).
cccgtacctccatcattga

SEQ ID NO: 79436 - DNA, 19 bp, Homo sapiens
  siRNA target sequence for DNAH5 (NM_001369.1,11170-11188).
cgtacctccatcattgact

SEQ ID NO: 79437 - DNA, 19 bp, Homo sapiens
  siRNA target sequence for DNAH5 (NM_001369.1,11171-11189).
gtacctccatcattgactt

SEQ ID NO: 79438 - DNA, 19 bp, Homo sapiens
  siRNA target sequence for DNAH5 (NM_001369.1,11207-11225).
gtctagaagatcagttact

SEQ ID NO: 79439 - DNA, 19 bp, Homo sapiens
  siRNA target sequence for DNAH5 (NM_001369.1,11273-11291).
ctcatctgatggaagatgt

SEQ ID NO: 79440 - DNA, 19 bp, Homo sapiens
  siRNA target sequence for DNAH5 (NM_001369.1,11275-11293).
catctgatggaagatgtaa

SEQ ID NO: 79441 - DNA, 19 bp, Homo sapiens
  siRNA target sequence for DNAH5 (NM_001369.1,11306-11324).
gaaggatgaaggaactaga

SEQ ID NO: 79442 - DNA, 19 bp, Homo sapiens
  siRNA target sequence for DNAH5 (NM_001369.1,11320-11338).
ctagaagataacttgcttt

SEQ ID NO: 79443 - DNA, 19 bp, Homo sapiens
  siRNA target sequence for DNAH5 (NM_001369.1,11360-11378).
ggtccctggtagaagatga

SEQ ID NO: 79444 - DNA, 19 bp, Homo sapiens
  siRNA target sequence for DNAH5 (NM_001369.1,11361-11379).
gtccctggtagaagatgaa

SEQ ID NO: 79445 - DNA, 19 bp, Homo sapiens
  siRNA target sequence for DNAH5 (NM_001369.1,11389-11407).
gtcgtgctgagtaacacaa

SEQ ID NO: 79446 - DNA, 19 bp, Homo sapiens
  siRNA target sequence for DNAH5 (NM_001369.1,11425-11443).
gtgacacagaagctagaaa

SEQ ID NO: 79447 - DNA, 19 bp, Homo sapiens
  siRNA target sequence for DNAH5 (NM_001369.1,11452-11470).
gagacagaagttcaaatta

SEQ ID NO: 79448 - DNA, 19 bp, Homo sapiens
  siRNA target sequence for DNAH5 (NM_001369.1,11534-11552).
ctgagatgcgcttggttaa

SEQ ID NO: 79449 - DNA, 19 bp, Homo sapiens
  siRNA target sequence for DNAH5 (NM_001369.1,11543-11561).
gcttggttaatgagatgta

SEQ ID NO: 79450 - DNA, 19 bp, Homo sapiens
  siRNA target sequence for DNAH5 (NM_001369.1,11544-11562).
cttggttaatgagatgtat

SEQ ID NO: 79451 - DNA, 19 bp, Homo sapiens
  siRNA target sequence for DNAH5 (NM_001369.1,11567-11585).
cttcgcttcgccagtttct

SEQ ID NO: 79452 - DNA, 19 bp, Homo sapiens
  siRNA target sequence for DNAH5 (NM_001369.1,11664-11682).
catgacctacgaggtttat

SEQ ID NO: 79453 - DNA, 19 bp, Homo sapiens
  siRNA target sequence for DNAH5 (NM_001369.1,11669-11687).
cctacgaggtttataagta

SEQ ID NO: 79454 - DNA, 19 bp, Homo sapiens
  siRNA target sequence for DNAH5 (NM_001369.1,11670-11688).
ctacgaggtttataagtat

SEQ ID NO: 79455 - DNA, 19 bp, Homo sapiens
  siRNA target sequence for DNAH5 (NM_001369.1,11701-11719).
ctgtacgaggagcacaaat

SEQ ID NO: 79456 - DNA, 19 bp, Homo sapiens
  siRNA target sequence for DNAH5 (NM_001369.1,11737-11755).
cttaccctaaagattgaca

SEQ ID NO: 79457 - DNA, 19 bp, Homo sapiens
  siRNA target sequence for DNAH5 (NM_001369.1,11836-11854).
ccaaaaccatcaaaatgga

SEQ ID NO: 79458 - DNA, 19 bp, Homo sapiens
  siRNA target sequence for DNAH5 (NM_001369.1,11837-11855).
caaaaccatcaaaatggat

SEQ ID NO: 79459 - DNA, 19 bp, Homo sapiens
  siRNA target sequence for DNAH5 (NM_001369.1,11860-11878).
gacataacatggctgaatt

SEQ ID NO: 79460 - DNA, 19 bp, Homo sapiens
  siRNA target sequence for DNAH5 (NM_001369.1,11872-11890).
ctgaatttggtggaactta

SEQ ID NO: 79461 - DNA, 19 bp, Homo sapiens
  siRNA target sequence for DNAH5 (NM_001369.1,11892-11910).
caaactcagacagttttca

SEQ ID NO: 79462 - DNA, 19 bp, Homo sapiens
  siRNA target sequence for DNAH5 (NM_001369.1,11911-11929).
gatgtccttgaccagatat

SEQ ID NO: 79463 - DNA, 19 bp, Homo sapiens
  siRNA target sequence for DNAH5 (NM_001369.1,11914-11932).
gtccttgaccagatatcga

SEQ ID NO: 79464 - DNA, 19 bp, Homo sapiens
  siRNA target sequence for DNAH5 (NM_001369.1,11923-11941).
cagatatcgagaaatgaga

SEQ ID NO: 79465 - DNA, 19 bp, Homo sapiens
  siRNA target sequence for DNAH5 (NM_001369.1,12024-12042).
cagacgtcttctccttatt

SEQ ID NO: 79466 - DNA, 19 bp, Homo sapiens
  siRNA target sequence for DNAH5 (NM_001369.1,12028-12046).
cgtcttctccttattagat

SEQ ID NO: 79467 - DNA, 19 bp, Homo sapiens
  siRNA target sequence for DNAH5 (NM_001369.1,12116-12134).
ccgaaggtgttattttaga

SEQ ID NO: 79468 - DNA, 19 bp, Homo sapiens
  siRNA target sequence for DNAH5 (NM_001369.1,12144-12162).
gacgtgggaggaatctgat

SEQ ID NO: 79469 - DNA, 19 bp, Homo sapiens
  siRNA target sequence for DNAH5 (NM_001369.1,12204-12222).
ccccacagattccatcatt

SEQ ID NO: 79470 - DNA, 19 bp, Homo sapiens
  siRNA target sequence for DNAH5 (NM_001369.1,12378-12396).
gatggacataatcatagaa

SEQ ID NO: 79471 - DNA, 19 bp, Homo sapiens
  siRNA target sequence for DNAH5 (NM_001369.1,12381-12399).
ggacataatcatagaaact

SEQ ID NO: 79472 - DNA, 19 bp, Homo sapiens
  siRNA target sequence for DNAH5 (NM_001369.1,12458-12476).
ccattacactccttcagat

SEQ ID NO: 79473 - DNA, 19 bp, Homo sapiens
  siRNA target sequence for DNAH5 (NM_001369.1,12466-12484).
ctccttcagatgtccatta

SEQ ID NO: 79474 - DNA, 19 bp, Homo sapiens
  siRNA target sequence for DNAH5 (NM_001369.1,12514-12532).
cgggcaggactgaaaagaa

SEQ ID NO: 79475 - DNA, 19 bp, Homo sapiens
  siRNA target sequence for DNAH5 (NM_001369.1,12520-12538).
ggactgaaaagaacatata

SEQ ID NO: 79476 - DNA, 19 bp, Homo sapiens
  siRNA target sequence for DNAH5 (NM_001369.1,12646-12664).
ggtgccctggggtggaata

SEQ ID NO: 79477 - DNA, 19 bp, Homo sapiens
  siRNA target sequence for DNAH5 (NM_001369.1,12666-12684).
cccctacgaatttaaccaa

SEQ ID NO: 79478 - DNA, 19 bp, Homo sapiens
  siRNA target sequence for DNAH5 (NM_001369.1,12761-12779).
ccaccatccgctacatgat

SEQ ID NO: 79479 - DNA, 19 bp, Homo sapiens
  siRNA target sequence for DNAH5 (NM_001369.1,12762-12780).
caccatccgctacatgata

SEQ ID NO: 79480 - DNA, 19 bp, Homo sapiens
  siRNA target sequence for DNAH5 (NM_001369.1,12803-12821).
gagtcactgacgactatga

SEQ ID NO: 79481 - DNA, 19 bp, Homo sapiens
  siRNA target sequence for DNAH5 (NM_001369.1,12811-12829).
gacgactatgataagagat

SEQ ID NO: 79482 - DNA, 19 bp, Homo sapiens
  siRNA target sequence for DNAH5 (NM_001369.1,12814-12832).
gactatgataagagattgt

SEQ ID NO: 79483 - DNA, 19 bp, Homo sapiens
  siRNA target sequence for DNAH5 (NM_001369.1,12820-12838).
gataagagattgttgaaca

SEQ ID NO: 79484 - DNA, 19 bp, Homo sapiens
  siRNA target sequence for DNAH5 (NM_001369.1,12834-12852).
gaacacatttgctaaggtt

SEQ ID NO: 79485 - DNA, 19 bp, Homo sapiens
  siRNA target sequence for DNAH5 (NM_001369.1,12839-12857).
catttgctaaggtttggtt

SEQ ID NO: 79486 - DNA, 19 bp, Homo sapiens
  siRNA target sequence for DNAH5 (NM_001369.1,12874-12892).
ggaccagatttcagttttt

SEQ ID NO: 79487 - DNA, 19 bp, Homo sapiens
  siRNA target sequence for DNAH5 (NM_001369.1,12895-12913).
caaggatacaatattccaa

SEQ ID NO: 79488 - DNA, 19 bp, Homo sapiens
  siRNA target sequence for DNAH5 (NM_001369.1,12917-12935).
gcagcacagtggataacta

SEQ ID NO: 79489 - DNA, 19 bp, Homo sapiens
  siRNA target sequence for DNAH5 (NM_001369.1,12920-12938).
gcacagtggataactatct

SEQ ID NO: 79490 - DNA, 19 bp, Homo sapiens
  siRNA target sequence for DNAH5 (NM_001369.1,12927-12945).
ggataactatcttcagtat

SEQ ID NO: 79491 - DNA, 19 bp, Homo sapiens
  siRNA target sequence for DNAH5 (NM_001369.1,13193-13211).
ggccattccagcctatgaa

SEQ ID NO: 79492 - DNA, 19 bp, Homo sapiens
  siRNA target sequence for DNAH5 (NM_001369.1,13195-13213).
ccattccagcctatgaaca

SEQ ID NO: 79493 - DNA, 19 bp, Homo sapiens
  siRNA target sequence for DNAH5 (NM_001369.1,13196-13214).
cattccagcctatgaacat

SEQ ID NO: 79494 - DNA, 19 bp, Homo sapiens
  siRNA target sequence for DNAH5 (NM_001369.1,13328-13346).
gagatgcattggattgcat

SEQ ID NO: 79495 - DNA, 19 bp, Homo sapiens
  siRNA target sequence for DNAH5 (NM_001369.1,13413-13431).
gtttactgaacttatagaa

SEQ ID NO: 79496 - DNA, 19 bp, Homo sapiens
  siRNA target sequence for DNAH5 (NM_001369.1,13468-13486).
cgacctcactgcttttgga

SEQ ID NO: 79497 - DNA, 19 bp, Homo sapiens
  siRNA target sequence for DNAH5 (NM_001369.1,13522-13540).
gcaatgcgacaggaaataa

SEQ ID NO: 79498 - DNA, 19 bp, Homo sapiens
  siRNA target sequence for DNAH5 (NM_001369.1,13555-13573).
ggctgggctctggacaata

SEQ ID NO: 79499 - DNA, 19 bp, Homo sapiens
  siRNA target sequence for DNAH5 (NM_001369.1,13602-13620).
gatgaaggacgacatttct

SEQ ID NO: 79500 - DNA, 19 bp, Homo sapiens
  siRNA target sequence for DNAH5 (NM_001369.1,13631-13649).
cagagggtgtctatgtcta

SEQ ID NO: 79501 - DNA, 19 bp, Homo sapiens
  siRNA target sequence for DNAH5 (NM_001369.1,13685-13703).
ggaacatgaaactcattga

SEQ ID NO: 79502 - DNA, 19 bp, Homo sapiens
  siRNA target sequence for DNAH5 (NM_001369.1,13731-13749).
gatgcctgtcataaggatt

SEQ ID NO: 79503 - DNA, 19 bp, Homo sapiens
  siRNA target sequence for DNAH5 (NM_001369.1,13771-13789).
cgagatcctcggttttact

SEQ ID NO: 79504 - DNA, 19 bp, Homo sapiens
  siRNA target sequence for DNAH5 (NM_001369.1,13790-13808).
cctgtcccatctataagaa

SEQ ID NO: 79505 - DNA, 19 bp, Homo sapiens
  siRNA target sequence for DNAH5 (NM_001369.1,13811-13829).
cagttcgaacggacttgaa

SEQ ID NO: 79506 - DNA, 19 bp, Homo sapiens
  siRNA target sequence for DNAH5 (NM_001369.1,13813-13831).
gttcgaacggacttgaact

SEQ ID NO: 79507 - DNA, 19 bp, Homo sapiens
  siRNA target sequence for DNAH5 (NM_001369.1,13816-13834).
cgaacggacttgaactaca

SEQ ID NO: 79508 - DNA, 19 bp, Homo sapiens
  siRNA target sequence for DNAH5 (NM_001369.1,13817-13835).
gaacggacttgaactacat

SEQ ID NO: 79509 - DNA, 19 bp, Homo sapiens
  siRNA target sequence for DNAH7 (NM_018897.1,204-222).
ggcaccagcaagagcttta

SEQ ID NO: 79510 - DNA, 19 bp, Homo sapiens
  siRNA target sequence for DNAH7 (NM_018897.1,229-247).
ctgtctatggtgagtacaa

SEQ ID NO: 79511 - DNA, 19 bp, Homo sapiens
  siRNA target sequence for DNAH7 (NM_018897.1,304-322).
gagagtccagaaccattta

SEQ ID NO: 79512 - DNA, 19 bp, Homo sapiens
  siRNA target sequence for DNAH7 (NM_018897.1,306-324).
gagtccagaaccatttagt

SEQ ID NO: 79513 - DNA, 19 bp, Homo sapiens
  siRNA target sequence for DNAH7 (NM_018897.1,347-365).
ctgaatacatggaacgttt

SEQ ID NO: 79514 - DNA, 19 bp, Homo sapiens
  siRNA target sequence for DNAH7 (NM_018897.1,385-403).
ccccaccaagttgatgata

SEQ ID NO: 79515 - DNA, 19 bp, Homo sapiens
  siRNA target sequence for DNAH7 (NM_018897.1,388-406).
caccaagttgatgatagtt

SEQ ID NO: 79516 - DNA, 19 bp, Homo sapiens
  siRNA target sequence for DNAH7 (NM_018897.1,435-453).
gggcaaatctccacataaa

SEQ ID NO: 79517 - DNA, 19 bp, Homo sapiens
  siRNA target sequence for DNAH7 (NM_018897.1,438-456).
caaatctccacataaagaa

SEQ ID NO: 79518 - DNA, 19 bp, Homo sapiens
  siRNA target sequence for DNAH7 (NM_018897.1,457-475).
cgagaaaactttagaagta

SEQ ID NO: 79519 - DNA, 19 bp, Homo sapiens
  siRNA target sequence for DNAH7 (NM_018897.1,495-513).
gcaacaagatgctgactta

SEQ ID NO: 79520 - DNA, 19 bp, Homo sapiens
  siRNA target sequence for DNAH7 (NM_018897.1,499-517).
caagatgctgacttagact

SEQ ID NO: 79521 - DNA, 19 bp, Homo sapiens
  siRNA target sequence for DNAH7 (NM_018897.1,560-578).
ctgctatagagaaagacat

SEQ ID NO: 79522 - DNA, 19 bp, Homo sapiens
  siRNA target sequence for DNAH7 (NM_018897.1,574-592).
gacatcttgagatattact

SEQ ID NO: 79523 - DNA, 19 bp, Homo sapiens
  siRNA target sequence for DNAH7 (NM_018897.1,576-594).
catcttgagatattactat

SEQ ID NO: 79524 - DNA, 19 bp, Homo sapiens
  siRNA target sequence for DNAH7 (NM_018897.1,690-708).
cttcactgacagcatagtt

SEQ ID NO: 79525 - DNA, 19 bp, Homo sapiens
  siRNA target sequence for DNAH7 (NM_018897.1,699-717).
cagcatagttacattatct

SEQ ID NO: 79526 - DNA, 19 bp, Homo sapiens
  siRNA target sequence for DNAH7 (NM_018897.1,701-719).
gcatagttacattatctga

SEQ ID NO: 79527 - DNA, 19 bp, Homo sapiens
  siRNA target sequence for DNAH7 (NM_018897.1,706-724).
gttacattatctgatgaaa

SEQ ID NO: 79528 - DNA, 19 bp, Homo sapiens
  siRNA target sequence for DNAH7 (NM_018897.1,739-757).
cttcttagtgtaaggaaat

SEQ ID NO: 79529 - DNA, 19 bp, Homo sapiens
  siRNA target sequence for DNAH7 (NM_018897.1,827-845).
cccatcgtgctgaaatgga

SEQ ID NO: 79530 - DNA, 19 bp, Homo sapiens
  siRNA target sequence for DNAH7 (NM_018897.1,828-846).
ccatcgtgctgaaatggaa

SEQ ID NO: 79531 - DNA, 19 bp, Homo sapiens
  siRNA target sequence for DNAH7 (NM_018897.1,864-882).
gaggaaatcttttttagct

SEQ ID NO: 79532 - DNA, 19 bp, Homo sapiens
  siRNA target sequence for DNAH7 (NM_018897.1,880-898).
gctgcaagcagttatatta

SEQ ID NO: 79533 - DNA, 19 bp, Homo sapiens
  siRNA target sequence for DNAH7 (NM_018897.1,899-917).
gggatcacttgaatgcaat

SEQ ID NO: 79534 - DNA, 19 bp, Homo sapiens
  siRNA target sequence for DNAH7 (NM_018897.1,924-942).
cacaatgctggctgtacta

SEQ ID NO: 79535 - DNA, 19 bp, Homo sapiens
  siRNA target sequence for DNAH7 (NM_018897.1,926-944).
caatgctggctgtactaga

SEQ ID NO: 79536 - DNA, 19 bp, Homo sapiens
  siRNA target sequence for DNAH7 (NM_018897.1,931-949).
ctggctgtactagatttgt

SEQ ID NO: 79537 - DNA, 19 bp, Homo sapiens
  siRNA target sequence for DNAH7 (NM_018897.1,943-961).
gatttgtggcacactaatt

SEQ ID NO: 79538 - DNA, 19 bp, Homo sapiens
  siRNA target sequence for DNAH7 (NM_018897.1,948-966).
gtggcacactaattttaaa

SEQ ID NO: 79539 - DNA, 19 bp, Homo sapiens
  siRNA target sequence for DNAH7 (NM_018897.1,1012-1030).
gcattagagctgtcaagtt

SEQ ID NO: 79540 - DNA, 19 bp, Homo sapiens
  siRNA target sequence for DNAH7 (NM_018897.1,1063-1081).
gccaaagagactctactta

SEQ ID NO: 79541 - DNA, 19 bp, Homo sapiens
  siRNA target sequence for DNAH7 (NM_018897.1,1148-1166).
gtgacagcagtgccaaatt

SEQ ID NO: 79542 - DNA, 19 bp, Homo sapiens
  siRNA target sequence for DNAH7 (NM_018897.1,1159-1177).
gccaaattggaatcttttt

SEQ ID NO: 79543 - DNA, 19 bp, Homo sapiens
  siRNA target sequence for DNAH7 (NM_018897.1,1160-1178).
ccaaattggaatctttttt

SEQ ID NO: 79544 - DNA, 19 bp, Homo sapiens
  siRNA target sequence for DNAH7 (NM_018897.1,1186-1204).
gctgctgcacttatgactt

SEQ ID NO: 79545 - DNA, 19 bp, Homo sapiens
  siRNA target sequence for DNAH7 (NM_018897.1,1261-1279).
caacccccagattctgtta

SEQ ID NO: 79546 - DNA, 19 bp, Homo sapiens
  siRNA target sequence for DNAH7 (NM_018897.1,1274-1292).
ctgttagagcttttgaaca

SEQ ID NO: 79547 - DNA, 19 bp, Homo sapiens
  siRNA target sequence for DNAH7 (NM_018897.1,1291-1309).
catccaggtttcatcatga

SEQ ID NO: 79548 - DNA, 19 bp, Homo sapiens
  siRNA target sequence for DNAH7 (NM_018897.1,1302-1320).
catcatgaggctgattctt

SEQ ID NO: 79549 - DNA, 19 bp, Homo sapiens
  siRNA target sequence for DNAH7 (NM_018897.1,1308-1326).
gaggctgattcttgataat

SEQ ID NO: 79550 - DNA, 19 bp, Homo sapiens
  siRNA target sequence for DNAH7 (NM_018897.1,1310-1328).
ggctgattcttgataatga

SEQ ID NO: 79551 - DNA, 19 bp, Homo sapiens
  siRNA target sequence for DNAH7 (NM_018897.1,1346-1364).
ctgagttgagtgactatat

SEQ ID NO: 79552 - DNA, 19 bp, Homo sapiens
  siRNA target sequence for DNAH7 (NM_018897.1,1381-1399).
gtttatgacgtcatgatta

SEQ ID NO: 79553 - DNA, 19 bp, Homo sapiens
  siRNA target sequence for DNAH7 (NM_018897.1,1421-1439).
gagttgagacaaaattgta

SEQ ID NO: 79554 - DNA, 19 bp, Homo sapiens
  siRNA target sequence for DNAH7 (NM_018897.1,1469-1487).
caaccttgaagcccataat

SEQ ID NO: 79555 - DNA, 19 bp, Homo sapiens
  siRNA target sequence for DNAH7 (NM_018897.1,1476-1494).
gaagcccataattctgaat

SEQ ID NO: 79556 - DNA, 19 bp, Homo sapiens
  siRNA target sequence for DNAH7 (NM_018897.1,1501-1519).
gtagatgctcacaaagaaa

SEQ ID NO: 79557 - DNA, 19 bp, Homo sapiens
  siRNA target sequence for DNAH7 (NM_018897.1,1571-1589).
gactctatgacaagtatga

SEQ ID NO: 79558 - DNA, 19 bp, Homo sapiens
  siRNA target sequence for DNAH7 (NM_018897.1,1573-1591).
ctctatgacaagtatgact

SEQ ID NO: 79559 - DNA, 19 bp, Homo sapiens
  siRNA target sequence for DNAH7 (NM_018897.1,1610-1628).
ctgagcgagatgttgataa

SEQ ID NO: 79560 - DNA, 19 bp, Homo sapiens
  siRNA target sequence for DNAH7 (NM_018897.1,1612-1630).
gagcgagatgttgataact

SEQ ID NO: 79561 - DNA, 19 bp, Homo sapiens
  siRNA target sequence for DNAH7 (NM_018897.1,1629-1647).
cttcctcgcagaaaatcat

SEQ ID NO: 79562 - DNA, 19 bp, Homo sapiens
  siRNA target sequence for DNAH7 (NM_018897.1,1632-1650).
cctcgcagaaaatcatagt

SEQ ID NO: 79563 - DNA, 19 bp, Homo sapiens
  siRNA target sequence for DNAH7 (NM_018897.1,1633-1651).
ctcgcagaaaatcatagtt

SEQ ID NO: 79564 - DNA, 19 bp, Homo sapiens
  siRNA target sequence for DNAH7 (NM_018897.1,1705-1723).
cagtacacatccataaaga

SEQ ID NO: 79565 - DNA, 19 bp, Homo sapiens
  siRNA target sequence for DNAH7 (NM_018897.1,1707-1725).
gtacacatccataaagact

SEQ ID NO: 79566 - DNA, 19 bp, Homo sapiens
  siRNA target sequence for DNAH7 (NM_018897.1,1710-1728).
cacatccataaagactatt

SEQ ID NO: 79567 - DNA, 19 bp, Homo sapiens
  siRNA target sequence for DNAH7 (NM_018897.1,1715-1733).
ccataaagactattcgttt

SEQ ID NO: 79568 - DNA, 19 bp, Homo sapiens
  siRNA target sequence for DNAH7 (NM_018897.1,1716-1734).
cataaagactattcgttta

SEQ ID NO: 79569 - DNA, 19 bp, Homo sapiens
  siRNA target sequence for DNAH7 (NM_018897.1,1779-1797).
gaagcgagcagatattatt

SEQ ID NO: 79570 - DNA, 19 bp, Homo sapiens
  siRNA target sequence for DNAH7 (NM_018897.1,1782-1800).
gcgagcagatattatttgt

SEQ ID NO: 79571 - DNA, 19 bp, Homo sapiens
  siRNA target sequence for DNAH7 (NM_018897.1,1799-1817).
gtgggaaacttctagctaa

SEQ ID NO: 79572 - DNA, 19 bp, Homo sapiens
  siRNA target sequence for DNAH7 (NM_018897.1,1801-1819).
gggaaacttctagctaaaa

SEQ ID NO: 79573 - DNA, 19 bp, Homo sapiens
  siRNA target sequence for DNAH7 (NM_018897.1,1847-1865).
caagattatgcgatgaatt

SEQ ID NO: 79574 - DNA, 19 bp, Homo sapiens
  siRNA target sequence for DNAH7 (NM_018897.1,1945-1963).
gtggaggtaactgatatga

SEQ ID NO: 79575 - DNA, 19 bp, Homo sapiens
  siRNA target sequence for DNAH7 (NM_018897.1,1950-1968).
ggtaactgatatgattgaa

SEQ ID NO: 79576 - DNA, 19 bp, Homo sapiens
  siRNA target sequence for DNAH7 (NM_018897.1,1955-1973).
ctgatatgattgaactaga

SEQ ID NO: 79577 - DNA, 19 bp, Homo sapiens
  siRNA target sequence for DNAH7 (NM_018897.1,1977-1995).
gagattagtggattccaaa

SEQ ID NO: 79578 - DNA, 19 bp, Homo sapiens
  siRNA target sequence for DNAH7 (NM_018897.1,2013-2031).
catcgagtatgtcaacttt

SEQ ID NO: 79579 - DNA, 19 bp, Homo sapiens
  siRNA target sequence for DNAH7 (NM_018897.1,2016-2034).
cgagtatgtcaacttttct

SEQ ID NO: 79580 - DNA, 19 bp, Homo sapiens
  siRNA target sequence for DNAH7 (NM_018897.1,2041-2059).
gacatgaggctaaataata

SEQ ID NO: 79581 - DNA, 19 bp, Homo sapiens
  siRNA target sequence for DNAH7 (NM_018897.1,2175-2193).
ggaggaattggagagttat

SEQ ID NO: 79582 - DNA, 19 bp, Homo sapiens
  siRNA target sequence for DNAH7 (NM_018897.1,2178-2196).
ggaattggagagttatgct

SEQ ID NO: 79583 - DNA, 19 bp, Homo sapiens
  siRNA target sequence for DNAH7 (NM_018897.1,2179-2197).
gaattggagagttatgcta

SEQ ID NO: 79584 - DNA, 19 bp, Homo sapiens
  siRNA target sequence for DNAH7 (NM_018897.1,2189-2207).
gttatgctaagcaatcaga

SEQ ID NO: 79585 - DNA, 19 bp, Homo sapiens
  siRNA target sequence for DNAH7 (NM_018897.1,2195-2213).
ctaagcaatcagaagaatt

SEQ ID NO: 79586 - DNA, 19 bp, Homo sapiens
  siRNA target sequence for DNAH7 (NM_018897.1,2236-2254).
gatgttcagcggtacctaa

SEQ ID NO: 79587 - DNA, 19 bp, Homo sapiens
  siRNA target sequence for DNAH7 (NM_018897.1,2239-2257).
gttcagcggtacctaaaaa

SEQ ID NO: 79588 - DNA, 19 bp, Homo sapiens
  siRNA target sequence for DNAH7 (NM_018897.1,2340-2358).
gctaccatctgtatatcct

SEQ ID NO: 79589 - DNA, 19 bp, Homo sapiens
  siRNA target sequence for DNAH7 (NM_018897.1,2348-2366).
ctgtatatcctcaacgtaa

SEQ ID NO: 79590 - DNA, 19 bp, Homo sapiens
  siRNA target sequence for DNAH7 (NM_018897.1,2350-2368).
gtatatcctcaacgtaaaa

SEQ ID NO: 79591 - DNA, 19 bp, Homo sapiens
  siRNA target sequence for DNAH7 (NM_018897.1,2388-2406).
cccttatcttcgtctttat

SEQ ID NO: 79592 - DNA, 19 bp, Homo sapiens
  siRNA target sequence for DNAH7 (NM_018897.1,2390-2408).
cttatcttcgtctttatga

SEQ ID NO: 79593 - DNA, 19 bp, Homo sapiens
  siRNA target sequence for DNAH7 (NM_018897.1,2407-2425).
gaaactgctgtcgaattta

SEQ ID NO: 79594 - DNA, 19 bp, Homo sapiens
  siRNA target sequence for DNAH7 (NM_018897.1,2418-2436).
cgaatttagcagcaactat

SEQ ID NO: 79595 - DNA, 19 bp, Homo sapiens
  siRNA target sequence for DNAH7 (NM_018897.1,2419-2437).
gaatttagcagcaactata

SEQ ID NO: 79596 - DNA, 19 bp, Homo sapiens
  siRNA target sequence for DNAH7 (NM_018897.1,2444-2462).
ggacagaagggccatatca

SEQ ID NO: 79597 - DNA, 19 bp, Homo sapiens
  siRNA target sequence for DNAH7 (NM_018897.1,2445-2463).
gacagaagggccatatcat

SEQ ID NO: 79598 - DNA, 19 bp, Homo sapiens
  siRNA target sequence for DNAH7 (NM_018897.1,2453-2471).
ggccatatcataaagtgaa

SEQ ID NO: 79599 - DNA, 19 bp, Homo sapiens
  siRNA target sequence for DNAH7 (NM_018897.1,2454-2472).
gccatatcataaagtgaat

SEQ ID NO: 79600 - DNA, 19 bp, Homo sapiens
  siRNA target sequence for DNAH7 (NM_018897.1,2488-2506).
gcagatattggaaattact

SEQ ID NO: 79601 - DNA, 19 bp, Homo sapiens
  siRNA target sequence for DNAH7 (NM_018897.1,2661-2679).
ggccatgtctgccattgtt

SEQ ID NO: 79602 - DNA, 19 bp, Homo sapiens
  siRNA target sequence for DNAH7 (NM_018897.1,2685-2703).
ccctttgcagccatcagat

SEQ ID NO: 79603 - DNA, 19 bp, Homo sapiens
  siRNA target sequence for DNAH7 (NM_018897.1,2709-2727).
cacagtctcctctttttta

SEQ ID NO: 79604 - DNA, 19 bp, Homo sapiens
  siRNA target sequence for DNAH7 (NM_018897.1,2717-2735).
cctcttttttagacatgaa

SEQ ID NO: 79605 - DNA, 19 bp, Homo sapiens
  siRNA target sequence for DNAH7 (NM_018897.1,2720-2738).
cttttttagacatgaatct

SEQ ID NO: 79606 - DNA, 19 bp, Homo sapiens
  siRNA target sequence for DNAH7 (NM_018897.1,2754-2772).
ccgatttgaaggtattagt

SEQ ID NO: 79607 - DNA, 19 bp, Homo sapiens
  siRNA target sequence for DNAH7 (NM_018897.1,2806-2824).
gcgatggagaagatgatta

SEQ ID NO: 79608 - DNA, 19 bp, Homo sapiens
  siRNA target sequence for DNAH7 (NM_018897.1,2886-2904).
ggcatcagttgatgaaatt

SEQ ID NO: 79609 - DNA, 19 bp, Homo sapiens
  siRNA target sequence for DNAH7 (NM_018897.1,2891-2909).
cagttgatgaaattcagat

SEQ ID NO: 79610 - DNA, 19 bp, Homo sapiens
  siRNA target sequence for DNAH7 (NM_018897.1,2910-2928).
gttgttggatgaccatatt

SEQ ID NO: 79611 - DNA, 19 bp, Homo sapiens
  siRNA target sequence for DNAH7 (NM_018897.1,2913-2931).
gttggatgaccatattatt

SEQ ID NO: 79612 - DNA, 19 bp, Homo sapiens
  siRNA target sequence for DNAH7 (NM_018897.1,3081-3099).
ctctccagacattatgtct

SEQ ID NO: 79613 - DNA, 19 bp, Homo sapiens
  siRNA target sequence for DNAH7 (NM_018897.1,3161-3179).
gaagtgtcatgcaggataa

SEQ ID NO: 79614 - DNA, 19 bp, Homo sapiens
  siRNA target sequence for DNAH7 (NM_018897.1,3164-3182).
gtgtcatgcaggataaaca

SEQ ID NO: 79615 - DNA, 19 bp, Homo sapiens
  siRNA target sequence for DNAH7 (NM_018897.1,3221-3239).
ggctgaaaaaatctaatga

SEQ ID NO: 79616 - DNA, 19 bp, Homo sapiens
  siRNA target sequence for DNAH7 (NM_018897.1,3225-3243).
gaaaaaatctaatgaactt

SEQ ID NO: 79617 - DNA, 19 bp, Homo sapiens
  siRNA target sequence for DNAH7 (NM_018897.1,3320-3338).
ccaatgatgaacttcttga

SEQ ID NO: 79618 - DNA, 19 bp, Homo sapiens
  siRNA target sequence for DNAH7 (NM_018897.1,3339-3357).
gatactatctgagactaaa

SEQ ID NO: 79619 - DNA, 19 bp, Homo sapiens
  siRNA target sequence for DNAH7 (NM_018897.1,3368-3386).
gggtgcaacctcacttgaa

SEQ ID NO: 79620 - DNA, 19 bp, Homo sapiens
  siRNA target sequence for DNAH7 (NM_018897.1,3400-3418).
ggaatcgcaaaggtagaat

SEQ ID NO: 79621 - DNA, 19 bp, Homo sapiens
  siRNA target sequence for DNAH7 (NM_018897.1,3401-3419).
gaatcgcaaaggtagaatt

SEQ ID NO: 79622 - DNA, 19 bp, Homo sapiens
  siRNA target sequence for DNAH7 (NM_018897.1,3455-3473).
gcgaaggagaggttgtaga

SEQ ID NO: 79623 - DNA, 19 bp, Homo sapiens
  siRNA target sequence for DNAH7 (NM_018897.1,3456-3474).
cgaaggagaggttgtagaa

SEQ ID NO: 79624 - DNA, 19 bp, Homo sapiens
  siRNA target sequence for DNAH7 (NM_018897.1,3538-3556).
gagagagttatgattaact

SEQ ID NO: 79625 - DNA, 19 bp, Homo sapiens
  siRNA target sequence for DNAH7 (NM_018897.1,3580-3598).
gcaacttttgcctatacaa

SEQ ID NO: 79626 - DNA, 19 bp, Homo sapiens
  siRNA target sequence for DNAH7 (NM_018897.1,3646-3664).
ctctgtgtatcccaaatct

SEQ ID NO: 79627 - DNA, 19 bp, Homo sapiens
  siRNA target sequence for DNAH7 (NM_018897.1,3709-3727).
gctcttgagcaatacttga

SEQ ID NO: 79628 - DNA, 19 bp, Homo sapiens
  siRNA target sequence for DNAH7 (NM_018897.1,3715-3733).
gagcaatacttgaaaacat

SEQ ID NO: 79629 - DNA, 19 bp, Homo sapiens
  siRNA target sequence for DNAH7 (NM_018897.1,3740-3758).
gacaaattgatgatattgt

SEQ ID NO: 79630 - DNA, 19 bp, Homo sapiens
  siRNA target sequence for DNAH7 (NM_018897.1,3879-3897).
ctctgactttgaatggtta

SEQ ID NO: 79631 - DNA, 19 bp, Homo sapiens
  siRNA target sequence for DNAH7 (NM_018897.1,3893-3911).
ggttaagtcagcttaggta

SEQ ID NO: 79632 - DNA, 19 bp, Homo sapiens
  siRNA target sequence for DNAH7 (NM_018897.1,3952-3970).
gctggtttgcgatatggat

SEQ ID NO: 79633 - DNA, 19 bp, Homo sapiens
  siRNA target sequence for DNAH7 (NM_018897.1,3956-3974).
gtttgcgatatggatatga

SEQ ID NO: 79634 - DNA, 19 bp, Homo sapiens
  siRNA target sequence for DNAH7 (NM_018897.1,4009-4027).
ccactcacggatagatgtt

SEQ ID NO: 79635 - DNA, 19 bp, Homo sapiens
  siRNA target sequence for DNAH7 (NM_018897.1,4010-4028).
cactcacggatagatgtta

SEQ ID NO: 79636 - DNA, 19 bp, Homo sapiens
  siRNA target sequence for DNAH7 (NM_018897.1,4012-4030).
ctcacggatagatgttaca

SEQ ID NO: 79637 - DNA, 19 bp, Homo sapiens
  siRNA target sequence for DNAH7 (NM_018897.1,4014-4032).
cacggatagatgttacaga

SEQ ID NO: 79638 - DNA, 19 bp, Homo sapiens
  siRNA target sequence for DNAH7 (NM_018897.1,4089-4107).
cactgggaagactgaaact

SEQ ID NO: 79639 - DNA, 19 bp, Homo sapiens
  siRNA target sequence for DNAH7 (NM_018897.1,4138-4156).
caatgtgttgttttcaact

SEQ ID NO: 79640 - DNA, 19 bp, Homo sapiens
  siRNA target sequence for DNAH7 (NM_018897.1,4158-4176).
ctctgatgggttggattat

SEQ ID NO: 79641 - DNA, 19 bp, Homo sapiens
  siRNA target sequence for DNAH7 (NM_018897.1,4272-4290).
ggttgctcaacaaatcctt

SEQ ID NO: 79642 - DNA, 19 bp, Homo sapiens
  siRNA target sequence for DNAH7 (NM_018897.1,4292-4310).
ctatccaaagaggtattaa

SEQ ID NO: 79643 - DNA, 19 bp, Homo sapiens
  siRNA target sequence for DNAH7 (NM_018897.1,4312-4330).
gcaggtgctgatatactga

SEQ ID NO: 79644 - DNA, 19 bp, Homo sapiens
  siRNA target sequence for DNAH7 (NM_018897.1,4362-4380).
cacatgtgctgtctttata

SEQ ID NO: 79645 - DNA, 19 bp, Homo sapiens
  siRNA target sequence for DNAH7 (NM_018897.1,4395-4413).
gtatgctgggcgatcagaa

SEQ ID NO: 79646 - DNA, 19 bp, Homo sapiens
  siRNA target sequence for DNAH7 (NM_018897.1,4406-4424).
gatcagaactgccagataa

SEQ ID NO: 79647 - DNA, 19 bp, Homo sapiens
  siRNA target sequence for DNAH7 (NM_018897.1,4409-4427).
cagaactgccagataacct

SEQ ID NO: 79648 - DNA, 19 bp, Homo sapiens
  siRNA target sequence for DNAH7 (NM_018897.1,4480-4498).
gctgaaatagtcctatact

SEQ ID NO: 79649 - DNA, 19 bp, Homo sapiens
  siRNA target sequence for DNAH7 (NM_018897.1,4543-4561).
gctacgtatcgcttgtgtt

SEQ ID NO: 79650 - DNA, 19 bp, Homo sapiens
  siRNA target sequence for DNAH7 (NM_018897.1,4587-4605).
ctacgactatggaatgaga

SEQ ID NO: 79651 - DNA, 19 bp, Homo sapiens
  siRNA target sequence for DNAH7 (NM_018897.1,4677-4695).
gctgcttagatctatcatt

SEQ ID NO: 79652 - DNA, 19 bp, Homo sapiens
  siRNA target sequence for DNAH7 (NM_018897.1,4680-4698).
gcttagatctatcattgat

SEQ ID NO: 79653 - DNA, 19 bp, Homo sapiens
  siRNA target sequence for DNAH7 (NM_018897.1,4685-4703).
gatctatcattgatgtaaa

SEQ ID NO: 79654 - DNA, 19 bp, Homo sapiens
  siRNA target sequence for DNAH7 (NM_018897.1,4688-4706).
ctatcattgatgtaaatct

SEQ ID NO: 79655 - DNA, 19 bp, Homo sapiens
  siRNA target sequence for DNAH7 (NM_018897.1,4732-4750).
ccactctttgagggaatta

SEQ ID NO: 79656 - DNA, 19 bp, Homo sapiens
  siRNA target sequence for DNAH7 (NM_018897.1,4765-4783).
cctggggtaaaattaccaa

SEQ ID NO: 79657 - DNA, 19 bp, Homo sapiens
  siRNA target sequence for DNAH7 (NM_018897.1,4787-4805).
cagattacaatgatttgct

SEQ ID NO: 79658 - DNA, 19 bp, Homo sapiens
  siRNA target sequence for DNAH7 (NM_018897.1,4806-4824).
ggcagctatcaaagacaat

SEQ ID NO: 79659 - DNA, 19 bp, Homo sapiens
  siRNA target sequence for DNAH7 (NM_018897.1,4821-4839).
caattgtgcctccatgaat

SEQ ID NO: 79660 - DNA, 19 bp, Homo sapiens
  siRNA target sequence for DNAH7 (NM_018897.1,4853-4871).
cattcttttccgagaagat

SEQ ID NO: 79661 - DNA, 19 bp, Homo sapiens
  siRNA target sequence for DNAH7 (NM_018897.1,4862-4880).
ccgagaagattcttcaagt

SEQ ID NO: 79662 - DNA, 19 bp, Homo sapiens
  siRNA target sequence for DNAH7 (NM_018897.1,4863-4881).
cgagaagattcttcaagta

SEQ ID NO: 79663 - DNA, 19 bp, Homo sapiens
  siRNA target sequence for DNAH7 (NM_018897.1,4864-4882).
gagaagattcttcaagtat

SEQ ID NO: 79664 - DNA, 19 bp, Homo sapiens
  siRNA target sequence for DNAH7 (NM_018897.1,4876-4894).
caagtatatgaaatgatga

SEQ ID NO: 79665 - DNA, 19 bp, Homo sapiens
  siRNA target sequence for DNAH7 (NM_018897.1,4893-4911).
gattgtgcgtcatggtttt

SEQ ID NO: 79666 - DNA, 19 bp, Homo sapiens
  siRNA target sequence for DNAH7 (NM_018897.1,4897-4915).
gtgcgtcatggttttatga

SEQ ID NO: 79667 - DNA, 19 bp, Homo sapiens
  siRNA target sequence for DNAH7 (NM_018897.1,4899-4917).
gcgtcatggttttatgatt

SEQ ID NO: 79668 - DNA, 19 bp, Homo sapiens
  siRNA target sequence for DNAH7 (NM_018897.1,4964-4982).
ctggagcactaaatgatat

SEQ ID NO: 79669 - DNA, 19 bp, Homo sapiens
  siRNA target sequence for DNAH7 (NM_018897.1,5059-5077).
ctgtacggacagtttgatt

SEQ ID NO: 79670 - DNA, 19 bp, Homo sapiens
  siRNA target sequence for DNAH7 (NM_018897.1,5061-5079).
gtacggacagtttgattca

SEQ ID NO: 79671 - DNA, 19 bp, Homo sapiens
  siRNA target sequence for DNAH7 (NM_018897.1,5074-5092).
gattcagtgtcccatgaat

SEQ ID NO: 79672 - DNA, 19 bp, Homo sapiens
  siRNA target sequence for DNAH7 (NM_018897.1,5103-5121).
ggtccttgctgtcagtttt

SEQ ID NO: 79673 - DNA, 19 bp, Homo sapiens
  siRNA target sequence for DNAH7 (NM_018897.1,5188-5206).
gtgtggattgagaatatga

SEQ ID NO: 79674 - DNA, 19 bp, Homo sapiens
  siRNA target sequence for DNAH7 (NM_018897.1,5311-5329).
gcttcccctgccactgttt

SEQ ID NO: 79675 - DNA, 19 bp, Homo sapiens
  siRNA target sequence for DNAH7 (NM_018897.1,5333-5351).
gatgtggcatgatttacat

SEQ ID NO: 79676 - DNA, 19 bp, Homo sapiens
  siRNA target sequence for DNAH7 (NM_018897.1,5349-5367).
catggagcctcacatgtta

SEQ ID NO: 79677 - DNA, 19 bp, Homo sapiens
  siRNA target sequence for DNAH7 (NM_018897.1,5388-5406).
gtcctgggtgaatctgtta

SEQ ID NO: 79678 - DNA, 19 bp, Homo sapiens
  siRNA target sequence for DNAH7 (NM_018897.1,5466-5484).
ccctgtttcggttgaattt

SEQ ID NO: 79679 - DNA, 19 bp, Homo sapiens
  siRNA target sequence for DNAH7 (NM_018897.1,5467-5485).
cctgtttcggttgaattta

SEQ ID NO: 79680 - DNA, 19 bp, Homo sapiens
  siRNA target sequence for DNAH7 (NM_018897.1,5468-5486).
ctgtttcggttgaatttat

SEQ ID NO: 79681 - DNA, 19 bp, Homo sapiens
  siRNA target sequence for DNAH7 (NM_018897.1,5493-5511).
gcatacaaaggaattatct

SEQ ID NO: 79682 - DNA, 19 bp, Homo sapiens
  siRNA target sequence for DNAH7 (NM_018897.1,5510-5528).
ctcctacttccgatacaaa

SEQ ID NO: 79683 - DNA, 19 bp, Homo sapiens
  siRNA target sequence for DNAH7 (NM_018897.1,5512-5530).
cctacttccgatacaaact

SEQ ID NO: 79684 - DNA, 19 bp, Homo sapiens
  siRNA target sequence for DNAH7 (NM_018897.1,5532-5550).
ggtccggtccttaatgaat

SEQ ID NO: 79685 - DNA, 19 bp, Homo sapiens
  siRNA target sequence for DNAH7 (NM_018897.1,5535-5553).
ccggtccttaatgaatcta

SEQ ID NO: 79686 - DNA, 19 bp, Homo sapiens
  siRNA target sequence for DNAH7 (NM_018897.1,5536-5554).
cggtccttaatgaatctaa

SEQ ID NO: 79687 - DNA, 19 bp, Homo sapiens
  siRNA target sequence for DNAH7 (NM_018897.1,5624-5642).
ctttgcttgagggcatttt

SEQ ID NO: 79688 - DNA, 19 bp, Homo sapiens
  siRNA target sequence for DNAH7 (NM_018897.1,5629-5647).
cttgagggcatttttctgt

SEQ ID NO: 79689 - DNA, 19 bp, Homo sapiens
  siRNA target sequence for DNAH7 (NM_018897.1,5661-5679).
gtccgttggtgcttcttgt

SEQ ID NO: 79690 - DNA, 19 bp, Homo sapiens
  siRNA target sequence for DNAH7 (NM_018897.1,5664-5682).
cgttggtgcttcttgtaca

SEQ ID NO: 79691 - DNA, 19 bp, Homo sapiens
  siRNA target sequence for DNAH7 (NM_018897.1,5678-5696).
gtacagatgatgatcgatt

SEQ ID NO: 79692 - DNA, 19 bp, Homo sapiens
  siRNA target sequence for DNAH7 (NM_018897.1,5681-5699).
cagatgatgatcgattgaa

SEQ ID NO: 79693 - DNA, 19 bp, Homo sapiens
  siRNA target sequence for DNAH7 (NM_018897.1,5683-5701).
gatgatgatcgattgaaat

SEQ ID NO: 79694 - DNA, 19 bp, Homo sapiens
  siRNA target sequence for DNAH7 (NM_018897.1,5689-5707).
gatcgattgaaatttaata

SEQ ID NO: 79695 - DNA, 19 bp, Homo sapiens
  siRNA target sequence for DNAH7 (NM_018897.1,5743-5761).
gatcgaactcgaaatacgt

SEQ ID NO: 79696 - DNA, 19 bp, Homo sapiens
  siRNA target sequence for DNAH7 (NM_018897.1,5746-5764).
cgaactcgaaatacgttta

SEQ ID NO: 79697 - DNA, 19 bp, Homo sapiens
  siRNA target sequence for DNAH7 (NM_018897.1,5750-5768).
ctcgaaatacgtttaaatt

SEQ ID NO: 79698 - DNA, 19 bp, Homo sapiens
  siRNA target sequence for DNAH7 (NM_018897.1,5908-5926).
ccaattcctaaagatgtaa

SEQ ID NO: 79699 - DNA, 19 bp, Homo sapiens
  siRNA target sequence for DNAH7 (NM_018897.1,5920-5938).
gatgtaatgtttaatgaaa

SEQ ID NO: 79700 - DNA, 19 bp, Homo sapiens
  siRNA target sequence for DNAH7 (NM_018897.1,5951-5969).
ctctggacacaattcgata

SEQ ID NO: 79701 - DNA, 19 bp, Homo sapiens
  siRNA target sequence for DNAH7 (NM_018897.1,5966-5984).
gatactctgcattaatgga

SEQ ID NO: 79702 - DNA, 19 bp, Homo sapiens
  siRNA target sequence for DNAH7 (NM_018897.1,5996-6014).
cccatcaaaagccttcaat

SEQ ID NO: 79703 - DNA, 19 bp, Homo sapiens
  siRNA target sequence for DNAH7 (NM_018897.1,5997-6015).
ccatcaaaagccttcaata

SEQ ID NO: 79704 - DNA, 19 bp, Homo sapiens
  siRNA target sequence for DNAH7 (NM_018897.1,6044-6062).
gtgtttacattacgaattt

SEQ ID NO: 79705 - DNA, 19 bp, Homo sapiens
  siRNA target sequence for DNAH7 (NM_018897.1,6142-6160).
cagaatattgtcatgtcaa

SEQ ID NO: 79706 - DNA, 19 bp, Homo sapiens
  siRNA target sequence for DNAH7 (NM_018897.1,6194-6212).
ctcctttgggcaagagaat

SEQ ID NO: 79707 - DNA, 19 bp, Homo sapiens
  siRNA target sequence for DNAH7 (NM_018897.1,6213-6231).
ggttgtctttgtagatgat

SEQ ID NO: 79708 - DNA, 19 bp, Homo sapiens
  siRNA target sequence for DNAH7 (NM_018897.1,6240-6258).
gcctgctcgggaggtatat

SEQ ID NO: 79709 - DNA, 19 bp, Homo sapiens
  siRNA target sequence for DNAH7 (NM_018897.1,6262-6280).
gctcaacctcccattgagt

SEQ ID NO: 79710 - DNA, 19 bp, Homo sapiens
  siRNA target sequence for DNAH7 (NM_018897.1,6263-6281).
ctcaacctcccattgagtt

SEQ ID NO: 79711 - DNA, 19 bp, Homo sapiens
  siRNA target sequence for DNAH7 (NM_018897.1,6268-6286).
cctcccattgagttactta

SEQ ID NO: 79712 - DNA, 19 bp, Homo sapiens
  siRNA target sequence for DNAH7 (NM_018897.1,6272-6290).
ccattgagttacttagaca

SEQ ID NO: 79713 - DNA, 19 bp, Homo sapiens
  siRNA target sequence for DNAH7 (NM_018897.1,6305-6323).
ggaactggtatgatctaaa

SEQ ID NO: 79714 - DNA, 19 bp, Homo sapiens
  siRNA target sequence for DNAH7 (NM_018897.1,6312-6330).
gtatgatctaaaagattgt

SEQ ID NO: 79715 - DNA, 19 bp, Homo sapiens
  siRNA target sequence for DNAH7 (NM_018897.1,6398-6416).
cagtaactcctcgatacat

SEQ ID NO: 79716 - DNA, 19 bp, Homo sapiens
  siRNA target sequence for DNAH7 (NM_018897.1,6407-6425).
ctcgatacatgcgacattt

SEQ ID NO: 79717 - DNA, 19 bp, Homo sapiens
  siRNA target sequence for DNAH7 (NM_018897.1,6409-6427).
cgatacatgcgacatttca

SEQ ID NO: 79718 - DNA, 19 bp, Homo sapiens
  siRNA target sequence for DNAH7 (NM_018897.1,6410-6428).
gatacatgcgacatttcaa

SEQ ID NO: 79719 - DNA, 19 bp, Homo sapiens
  siRNA target sequence for DNAH7 (NM_018897.1,6414-6432).
catgcgacatttcaatatt

SEQ ID NO: 79720 - DNA, 19 bp, Homo sapiens
  siRNA target sequence for DNAH7 (NM_018897.1,6417-6435).
gcgacatttcaatattata

SEQ ID NO: 79721 - DNA, 19 bp, Homo sapiens
  siRNA target sequence for DNAH7 (NM_018897.1,6418-6436).
cgacatttcaatattataa

SEQ ID NO: 79722 - DNA, 19 bp, Homo sapiens
  siRNA target sequence for DNAH7 (NM_018897.1,6495-6513).
gcatttagaaatctgttat

SEQ ID NO: 79723 - DNA, 19 bp, Homo sapiens
  siRNA target sequence for DNAH7 (NM_018897.1,6532-6550).
ctagatttgaccacacaaa

SEQ ID NO: 79724 - DNA, 19 bp, Homo sapiens
  siRNA target sequence for DNAH7 (NM_018897.1,6540-6558).
gaccacacaaatcgtaaat

SEQ ID NO: 79725 - DNA, 19 bp, Homo sapiens
  siRNA target sequence for DNAH7 (NM_018897.1,6552-6570).
cgtaaatggcacaatgact

SEQ ID NO: 79726 - DNA, 19 bp, Homo sapiens
  siRNA target sequence for DNAH7 (NM_018897.1,6560-6578).
gcacaatgactctgtataa

SEQ ID NO: 79727 - DNA, 19 bp, Homo sapiens
  siRNA target sequence for DNAH7 (NM_018897.1,6602-6620).
ctactccagctaaatctca

SEQ ID NO: 79728 - DNA, 19 bp, Homo sapiens
  siRNA target sequence for DNAH7 (NM_018897.1,6611-6629).
ctaaatctcactacttgtt

SEQ ID NO: 79729 - DNA, 19 bp, Homo sapiens
  siRNA target sequence for DNAH7 (NM_018897.1,6658-6676).
caaggtgtttgtttgtcaa

SEQ ID NO: 79730 - DNA, 19 bp, Homo sapiens
  siRNA target sequence for DNAH7 (NM_018897.1,6691-6709).
gaaaccacagaagtgatta

SEQ ID NO: 79731 - DNA, 19 bp, Homo sapiens
  siRNA target sequence for DNAH7 (NM_018897.1,6696-6714).
cacagaagtgattaaacgt

SEQ ID NO: 79732 - DNA, 19 bp, Homo sapiens
  siRNA target sequence for DNAH7 (NM_018897.1,6727-6745).
gaggtccttcgagtgtatt

SEQ ID NO: 79733 - DNA, 19 bp, Homo sapiens
  siRNA target sequence for DNAH7 (NM_018897.1,6729-6747).
ggtccttcgagtgtattat

SEQ ID NO: 79734 - DNA, 19 bp, Homo sapiens
  siRNA target sequence for DNAH7 (NM_018897.1,6773-6791).
gaagctggctcatcaacta

SEQ ID NO: 79735 - DNA, 19 bp, Homo sapiens
  siRNA target sequence for DNAH7 (NM_018897.1,6923-6941).
ccaagagggaggataccaa

SEQ ID NO: 79736 - DNA, 19 bp, Homo sapiens
  siRNA target sequence for DNAH7 (NM_018897.1,6954-6972).
cgcagatgtggataatctt

SEQ ID NO: 79737 - DNA, 19 bp, Homo sapiens
  siRNA target sequence for DNAH7 (NM_018897.1,7000-7018).
gaatacaacaatataagca

SEQ ID NO: 79738 - DNA, 19 bp, Homo sapiens
  siRNA target sequence for DNAH7 (NM_018897.1,7025-7043).
ccatgaaccttgtcttgtt

SEQ ID NO: 79739 - DNA, 19 bp, Homo sapiens
  siRNA target sequence for DNAH7 (NM_018897.1,7157-7175).
ctgcccacatggctgatta

SEQ ID NO: 79740 - DNA, 19 bp, Homo sapiens
  siRNA target sequence for DNAH7 (NM_018897.1,7159-7177).
gcccacatggctgattatt

SEQ ID NO: 79741 - DNA, 19 bp, Homo sapiens
  siRNA target sequence for DNAH7 (NM_018897.1,7197-7215).
ctctaaggggtatgatact

SEQ ID NO: 79742 - DNA, 19 bp, Homo sapiens
  siRNA target sequence for DNAH7 (NM_018897.1,7203-7221).
ggggtatgatactactgaa

SEQ ID NO: 79743 - DNA, 19 bp, Homo sapiens
  siRNA target sequence for DNAH7 (NM_018897.1,7204-7222).
gggtatgatactactgaat

SEQ ID NO: 79744 - DNA, 19 bp, Homo sapiens
  siRNA target sequence for DNAH7 (NM_018897.1,7214-7232).
ctactgaatggcatgaaga

SEQ ID NO: 79745 - DNA, 19 bp, Homo sapiens
  siRNA target sequence for DNAH7 (NM_018897.1,7273-7291).
cagggtgtcttcctgttta

SEQ ID NO: 79746 - DNA, 19 bp, Homo sapiens
  siRNA target sequence for DNAH7 (NM_018897.1,7275-7293).
gggtgtcttcctgtttaca

SEQ ID NO: 79747 - DNA, 19 bp, Homo sapiens
  siRNA target sequence for DNAH7 (NM_018897.1,7332-7350).
cagtaatctgctaaatgct

SEQ ID NO: 79748 - DNA, 19 bp, Homo sapiens
  siRNA target sequence for DNAH7 (NM_018897.1,7352-7370).
gggagattccaaatctctt

SEQ ID NO: 79749 - DNA, 19 bp, Homo sapiens
  siRNA target sequence for DNAH7 (NM_018897.1,7361-7379).
caaatctctttgcattaga

SEQ ID NO: 79750 - DNA, 19 bp, Homo sapiens
  siRNA target sequence for DNAH7 (NM_018897.1,7417-7435).
gatcgccagcgggataaaa

SEQ ID NO: 79751 - DNA, 19 bp, Homo sapiens
  siRNA target sequence for DNAH7 (NM_018897.1,7420-7438).
cgccagcgggataaaacca

SEQ ID NO: 79752 - DNA, 19 bp, Homo sapiens
  siRNA target sequence for DNAH7 (NM_018897.1,7421-7439).
gccagcgggataaaaccaa

SEQ ID NO: 79753 - DNA, 19 bp, Homo sapiens
  siRNA target sequence for DNAH7 (NM_018897.1,7462-7480).
gcccttttcaacatgttta

SEQ ID NO: 79754 - DNA, 19 bp, Homo sapiens
  siRNA target sequence for DNAH7 (NM_018897.1,7463-7481).
cccttttcaacatgtttat

SEQ ID NO: 79755 - DNA, 19 bp, Homo sapiens
  siRNA target sequence for DNAH7 (NM_018897.1,7682-7700).
gctgtatcgacatgtgtaa

SEQ ID NO: 79756 - DNA, 19 bp, Homo sapiens
  siRNA target sequence for DNAH7 (NM_018897.1,7703-7721).
gcttccacacttctactat

SEQ ID NO: 79757 - DNA, 19 bp, Homo sapiens
  siRNA target sequence for DNAH7 (NM_018897.1,7704-7722).
cttccacacttctactata

SEQ ID NO: 79758 - DNA, 19 bp, Homo sapiens
  siRNA target sequence for DNAH7 (NM_018897.1,7707-7725).
ccacacttctactatagat

SEQ ID NO: 79759 - DNA, 19 bp, Homo sapiens
  siRNA target sequence for DNAH7 (NM_018897.1,7710-7728).
cacttctactatagattta

SEQ ID NO: 79760 - DNA, 19 bp, Homo sapiens
  siRNA target sequence for DNAH7 (NM_018897.1,7715-7733).
ctactatagatttatccaa

SEQ ID NO: 79761 - DNA, 19 bp, Homo sapiens
  siRNA target sequence for DNAH7 (NM_018897.1,7778-7796).
cctcttacctcgaattaat

SEQ ID NO: 79762 - DNA, 19 bp, Homo sapiens
  siRNA target sequence for DNAH7 (NM_018897.1,7917-7935).
ggagttggaggcactacat

SEQ ID NO: 79763 - DNA, 19 bp, Homo sapiens
  siRNA target sequence for DNAH7 (NM_018897.1,7927-7945).
gcactacatcctcaattaa

SEQ ID NO: 79764 - DNA, 19 bp, Homo sapiens
  siRNA target sequence for DNAH7 (NM_018897.1,7928-7946).
cactacatcctcaattaaa

SEQ ID NO: 79765 - DNA, 19 bp, Homo sapiens
  siRNA target sequence for DNAH7 (NM_018897.1,7955-7973).
gcaaagaggttgatgaaat

SEQ ID NO: 79766 - DNA, 19 bp, Homo sapiens
  siRNA target sequence for DNAH7 (NM_018897.1,7962-7980).
ggttgatgaaatgatgata

SEQ ID NO: 79767 - DNA, 19 bp, Homo sapiens
  siRNA target sequence for DNAH7 (NM_018897.1,7989-8007).
gaaagagtctgtagaagtt

SEQ ID NO: 79768 - DNA, 19 bp, Homo sapiens
  siRNA target sequence for DNAH7 (NM_018897.1,8104-8122).
gcaggtgccttgccaatat

SEQ ID NO: 79769 - DNA, 19 bp, Homo sapiens
  siRNA target sequence for DNAH7 (NM_018897.1,8105-8123).
caggtgccttgccaatatt

SEQ ID NO: 79770 - DNA, 19 bp, Homo sapiens
  siRNA target sequence for DNAH7 (NM_018897.1,8173-8191).
gtggtaaaatccatgaaga

SEQ ID NO: 79771 - DNA, 19 bp, Homo sapiens
  siRNA target sequence for DNAH7 (NM_018897.1,8211-8229).
gcttgttatggaagctata

SEQ ID NO: 79772 - DNA, 19 bp, Homo sapiens
  siRNA target sequence for DNAH7 (NM_018897.1,8212-8230).
cttgttatggaagctatat

SEQ ID NO: 79773 - DNA, 19 bp, Homo sapiens
  siRNA target sequence for DNAH7 (NM_018897.1,8307-8325).
cccagctaagagacttctt

SEQ ID NO: 79774 - DNA, 19 bp, Homo sapiens
  siRNA target sequence for DNAH7 (NM_018897.1,8337-8355).
gtttctgcagtcacttcat

SEQ ID NO: 79775 - DNA, 19 bp, Homo sapiens
  siRNA target sequence for DNAH7 (NM_018897.1,8343-8361).
gcagtcacttcatgaatat

SEQ ID NO: 79776 - DNA, 19 bp, Homo sapiens
  siRNA target sequence for DNAH7 (NM_018897.1,8378-8396).
ctccagcttatatgaatat

SEQ ID NO: 79777 - DNA, 19 bp, Homo sapiens
  siRNA target sequence for DNAH7 (NM_018897.1,8477-8495).
gcaaatgggtcatagcaat

SEQ ID NO: 79778 - DNA, 19 bp, Homo sapiens
  siRNA target sequence for DNAH7 (NM_018897.1,8554-8572).
gctgaaggggagcttaaaa

SEQ ID NO: 79779 - DNA, 19 bp, Homo sapiens
  siRNA target sequence for DNAH7 (NM_018897.1,8555-8573).
ctgaaggggagcttaaaat

SEQ ID NO: 79780 - DNA, 19 bp, Homo sapiens
  siRNA target sequence for DNAH7 (NM_018897.1,8646-8664).
cacacttgaattaaataaa

SEQ ID NO: 79781 - DNA, 19 bp, Homo sapiens
  siRNA target sequence for DNAH7 (NM_018897.1,8854-8872).
gccttcacatccacctata

SEQ ID NO: 79782 - DNA, 19 bp, Homo sapiens
  siRNA target sequence for DNAH7 (NM_018897.1,8856-8874).
cttcacatccacctataga

SEQ ID NO: 79783 - DNA, 19 bp, Homo sapiens
  siRNA target sequence for DNAH7 (NM_018897.1,8930-8948).
cagatgattgctctcttat

SEQ ID NO: 79784 - DNA, 19 bp, Homo sapiens
  siRNA target sequence for DNAH7 (NM_018897.1,8962-8980).
gaagctgtgacaattcgaa

SEQ ID NO: 79785 - DNA, 19 bp, Homo sapiens
  siRNA target sequence for DNAH7 (NM_018897.1,8970-8988).
gacaattcgaacttggaat

SEQ ID NO: 79786 - DNA, 19 bp, Homo sapiens
  siRNA target sequence for DNAH7 (NM_018897.1,8972-8990).
caattcgaacttggaatat

SEQ ID NO: 79787 - DNA, 19 bp, Homo sapiens
  siRNA target sequence for DNAH7 (NM_018897.1,9017-9035).
ccattgataatgggataat

SEQ ID NO: 79788 - DNA, 19 bp, Homo sapiens
  siRNA target sequence for DNAH7 (NM_018897.1,9063-9081).
gatgatagatcctcaaagt

SEQ ID NO: 79789 - DNA, 19 bp, Homo sapiens
  siRNA target sequence for DNAH7 (NM_018897.1,9073-9091).
cctcaaagtcaggctaata

SEQ ID NO: 79790 - DNA, 19 bp, Homo sapiens
  siRNA target sequence for DNAH7 (NM_018897.1,9108-9126).
ggaaaaagccaatagtctt

SEQ ID NO: 79791 - DNA, 19 bp, Homo sapiens
  siRNA target sequence for DNAH7 (NM_018897.1,9109-9127).
gaaaaagccaatagtcttt

SEQ ID NO: 79792 - DNA, 19 bp, Homo sapiens
  siRNA target sequence for DNAH7 (NM_018897.1,9115-9133).
gccaatagtctttatgtga

SEQ ID NO: 79793 - DNA, 19 bp, Homo sapiens
  siRNA target sequence for DNAH7 (NM_018897.1,9116-9134).
ccaatagtctttatgtgat

SEQ ID NO: 79794 - DNA, 19 bp, Homo sapiens
  siRNA target sequence for DNAH7 (NM_018897.1,9117-9135).
caatagtctttatgtgatt

SEQ ID NO: 79795 - DNA, 19 bp, Homo sapiens
  siRNA target sequence for DNAH7 (NM_018897.1,9161-9179).
ggactctggaaaattgcat

SEQ ID NO: 79796 - DNA, 19 bp, Homo sapiens
  siRNA target sequence for DNAH7 (NM_018897.1,9215-9233).
gcgaagaactagatcctat

SEQ ID NO: 79797 - DNA, 19 bp, Homo sapiens
  siRNA target sequence for DNAH7 (NM_018897.1,9216-9234).
cgaagaactagatcctatt

SEQ ID NO: 79798 - DNA, 19 bp, Homo sapiens
  siRNA target sequence for DNAH7 (NM_018897.1,9268-9286).
cagggtgggagtacatgta

SEQ ID NO: 79799 - DNA, 19 bp, Homo sapiens
  siRNA target sequence for DNAH7 (NM_018897.1,9300-9318).
ctccacaattgaatatgca

SEQ ID NO: 79800 - DNA, 19 bp, Homo sapiens
  siRNA target sequence for DNAH7 (NM_018897.1,9333-9351).
ctatattactaccaagtta

SEQ ID NO: 79801 - DNA, 19 bp, Homo sapiens
  siRNA target sequence for DNAH7 (NM_018897.1,9348-9366).
gttaagaaatcctcattat

SEQ ID NO: 79802 - DNA, 19 bp, Homo sapiens
  siRNA target sequence for DNAH7 (NM_018897.1,9371-9389).
ctgaaacatcagtaaaggt

SEQ ID NO: 79803 - DNA, 19 bp, Homo sapiens
  siRNA target sequence for DNAH7 (NM_018897.1,9416-9434).
ctgagggaatgcaagatca

SEQ ID NO: 79804 - DNA, 19 bp, Homo sapiens
  siRNA target sequence for DNAH7 (NM_018897.1,9563-9581).
catcttcggaaggcaatat

SEQ ID NO: 79805 - DNA, 19 bp, Homo sapiens
  siRNA target sequence for DNAH7 (NM_018897.1,9566-9584).
cttcggaaggcaatatatt

SEQ ID NO: 79806 - DNA, 19 bp, Homo sapiens
  siRNA target sequence for DNAH7 (NM_018897.1,9569-9587).
cggaaggcaatatattaga

SEQ ID NO: 79807 - DNA, 19 bp, Homo sapiens
  siRNA target sequence for DNAH7 (NM_018897.1,9589-9607).
gatgaaactgctattaaga

SEQ ID NO: 79808 - DNA, 19 bp, Homo sapiens
  siRNA target sequence for DNAH7 (NM_018897.1,9620-9638).
ccaaggccttggctaatga

SEQ ID NO: 79809 - DNA, 19 bp, Homo sapiens
  siRNA target sequence for DNAH7 (NM_018897.1,9625-9643).
gccttggctaatgagattt

SEQ ID NO: 79810 - DNA, 19 bp, Homo sapiens
  siRNA target sequence for DNAH7 (NM_018897.1,9706-9724).
cgtcctattgccatccatt

SEQ ID NO: 79811 - DNA, 19 bp, Homo sapiens
  siRNA target sequence for DNAH7 (NM_018897.1,9768-9786).
gcccatgtaccagtattca

SEQ ID NO: 79812 - DNA, 19 bp, Homo sapiens
  siRNA target sequence for DNAH7 (NM_018897.1,9785-9803).
cactgacctggtttattaa

SEQ ID NO: 79813 - DNA, 19 bp, Homo sapiens
  siRNA target sequence for DNAH7 (NM_018897.1,9868-9886).
ctcaaggatcactttactt

SEQ ID NO: 79814 - DNA, 19 bp, Homo sapiens
  siRNA target sequence for DNAH7 (NM_018897.1,9884-9902).
cttattcactgtatgttaa

SEQ ID NO: 79815 - DNA, 19 bp, Homo sapiens
  siRNA target sequence for DNAH7 (NM_018897.1,9906-9924).
ctgccggtcactctttgaa

SEQ ID NO: 79816 - DNA, 19 bp, Homo sapiens
  siRNA target sequence for DNAH7 (NM_018897.1,9908-9926).
gccggtcactctttgaaaa

SEQ ID NO: 79817 - DNA, 19 bp, Homo sapiens
  siRNA target sequence for DNAH7 (NM_018897.1,9928-9946).
gataagctgctcttttcct

SEQ ID NO: 79818 - DNA, 19 bp, Homo sapiens
  siRNA target sequence for DNAH7 (NM_018897.1,9945-9963).
cttttgtctaaccataaat

SEQ ID NO: 79819 - DNA, 19 bp, Homo sapiens
  siRNA target sequence for DNAH7 (NM_018897.1,10023-10041).
cattggactggataatcct

SEQ ID NO: 79820 - DNA, 19 bp, Homo sapiens
  siRNA target sequence for DNAH7 (NM_018897.1,10080-10098).
ggatgaaatatgtcgatta

SEQ ID NO: 79821 - DNA, 19 bp, Homo sapiens
  siRNA target sequence for DNAH7 (NM_018897.1,10107-10125).
gcctgccttcaaaaccatt

SEQ ID NO: 79822 - DNA, 19 bp, Homo sapiens
  siRNA target sequence for DNAH7 (NM_018897.1,10111-10129).
gccttcaaaaccattcgta

SEQ ID NO: 79823 - DNA, 19 bp, Homo sapiens
  siRNA target sequence for DNAH7 (NM_018897.1,10130-10148).
gagagtttatgcgcttaaa

SEQ ID NO: 79824 - DNA, 19 bp, Homo sapiens
  siRNA target sequence for DNAH7 (NM_018897.1,10279-10297).
ccaatgttgcaggaattta

SEQ ID NO: 79825 - DNA, 19 bp, Homo sapiens
  siRNA target sequence for DNAH7 (NM_018897.1,10280-10298).
caatgttgcaggaatttat

SEQ ID NO: 79826 - DNA, 19 bp, Homo sapiens
  siRNA target sequence for DNAH7 (NM_018897.1,10307-10325).
gattgggacgtgcattcat

SEQ ID NO: 79827 - DNA, 19 bp, Homo sapiens
  siRNA target sequence for DNAH7 (NM_018897.1,10311-10329).
gggacgtgcattcattgaa

SEQ ID NO: 79828 - DNA, 19 bp, Homo sapiens
  siRNA target sequence for DNAH7 (NM_018897.1,10376-10394).
gtgcaccactgattttcgt

SEQ ID NO: 79829 - DNA, 19 bp, Homo sapiens
  siRNA target sequence for DNAH7 (NM_018897.1,10416-10434).
catggctgcccttctaaaa

SEQ ID NO: 79830 - DNA, 19 bp, Homo sapiens
  siRNA target sequence for DNAH7 (NM_018897.1,10449-10467).
gggatatgggggatcaaaa

SEQ ID NO: 79831 - DNA, 19 bp, Homo sapiens
  siRNA target sequence for DNAH7 (NM_018897.1,10451-10469).
gatatgggggatcaaaact

SEQ ID NO: 79832 - DNA, 19 bp, Homo sapiens
  siRNA target sequence for DNAH7 (NM_018897.1,10498-10516).
gggcccattgctatgaaga

SEQ ID NO: 79833 - DNA, 19 bp, Homo sapiens
  siRNA target sequence for DNAH7 (NM_018897.1,10499-10517).
ggcccattgctatgaagat

SEQ ID NO: 79834 - DNA, 19 bp, Homo sapiens
  siRNA target sequence for DNAH7 (NM_018897.1,10541-10559).
gaacatgggttgttcttca

SEQ ID NO: 79835 - DNA, 19 bp, Homo sapiens
  siRNA target sequence for DNAH7 (NM_018897.1,10548-10566).
ggttgttcttcagaattgt

SEQ ID NO: 79836 - DNA, 19 bp, Homo sapiens
  siRNA target sequence for DNAH7 (NM_018897.1,10588-10606).
ccaacccttgagaaagtct

SEQ ID NO: 79837 - DNA, 19 bp, Homo sapiens
  siRNA target sequence for DNAH7 (NM_018897.1,10659-10677).
gagttacccatctccaaat

SEQ ID NO: 79838 - DNA, 19 bp, Homo sapiens
  siRNA target sequence for DNAH7 (NM_018897.1,10713-10731).
gaccaatgaagcaccaaaa

SEQ ID NO: 79839 - DNA, 19 bp, Homo sapiens
  siRNA target sequence for DNAH7 (NM_018897.1,10732-10750).
ggtttacgggctaatatca

SEQ ID NO: 79840 - DNA, 19 bp, Homo sapiens
  siRNA target sequence for DNAH7 (NM_018897.1,10733-10751).
gtttacgggctaatatcat

SEQ ID NO: 79841 - DNA, 19 bp, Homo sapiens
  siRNA target sequence for DNAH7 (NM_018897.1,10738-10756).
cgggctaatatcattcgat

SEQ ID NO: 79842 - DNA, 19 bp, Homo sapiens
  siRNA target sequence for DNAH7 (NM_018897.1,10742-10760).
ctaatatcattcgatcata

SEQ ID NO: 79843 - DNA, 19 bp, Homo sapiens
  siRNA target sequence for DNAH7 (NM_018897.1,10776-10794).
ctctgatccggagttcttt

SEQ ID NO: 79844 - DNA, 19 bp, Homo sapiens
  siRNA target sequence for DNAH7 (NM_018897.1,10987-11005).
gaggctctgcggtacatga

SEQ ID NO: 79845 - DNA, 19 bp, Homo sapiens
  siRNA target sequence for DNAH7 (NM_018897.1,11055-11073).
cacgctgcgcagcattcta

SEQ ID NO: 79846 - DNA, 19 bp, Homo sapiens
  siRNA target sequence for DNAH7 (NM_018897.1,11057-11075).
cgctgcgcagcattctaaa

SEQ ID NO: 79847 - DNA, 19 bp, Homo sapiens
  siRNA target sequence for DNAH7 (NM_018897.1,11082-11100).
cttcaatcccgaattagtt

SEQ ID NO: 79848 - DNA, 19 bp, Homo sapiens
  siRNA target sequence for DNAH7 (NM_018897.1,11085-11103).
caatcccgaattagttgaa

SEQ ID NO: 79849 - DNA, 19 bp, Homo sapiens
  siRNA target sequence for DNAH7 (NM_018897.1,11089-11107).
cccgaattagttgaaaatt

SEQ ID NO: 79850 - DNA, 19 bp, Homo sapiens
  siRNA target sequence for DNAH7 (NM_018897.1,11098-11116).
gttgaaaattcagactata

SEQ ID NO: 79851 - DNA, 19 bp, Homo sapiens
  siRNA target sequence for DNAH7 (NM_018897.1,11121-11139).
cgactcaagtggcatctat

SEQ ID NO: 79852 - DNA, 19 bp, Homo sapiens
  siRNA target sequence for DNAH7 (NM_018897.1,11124-11142).
ctcaagtggcatctatttt

SEQ ID NO: 79853 - DNA, 19 bp, Homo sapiens
  siRNA target sequence for DNAH7 (NM_018897.1,11126-11144).
caagtggcatctattttgt

SEQ ID NO: 79854 - DNA, 19 bp, Homo sapiens
  siRNA target sequence for DNAH7 (NM_018897.1,11153-11171).
ctggtgatcacaaaagcta

SEQ ID NO: 79855 - DNA, 19 bp, Homo sapiens
  siRNA target sequence for DNAH7 (NM_018897.1,11172-11190).
catcgaatacacaaagact

SEQ ID NO: 79856 - DNA, 19 bp, Homo sapiens
  siRNA target sequence for DNAH7 (NM_018897.1,11271-11289).
gctatttgataacattctt

SEQ ID NO: 79857 - DNA, 19 bp, Homo sapiens
  siRNA target sequence for DNAH7 (NM_018897.1,11311-11329).
ggtgctggtgcaaaatcat

SEQ ID NO: 79858 - DNA, 19 bp, Homo sapiens
  siRNA target sequence for DNAH7 (NM_018897.1,11408-11426).
ggaggtacccaacaactta

SEQ ID NO: 79859 - DNA, 19 bp, Homo sapiens
  siRNA target sequence for DNAH7 (NM_018897.1,11409-11427).
gaggtacccaacaacttat

SEQ ID NO: 79860 - DNA, 19 bp, Homo sapiens
  siRNA target sequence for DNAH7 (NM_018897.1,11463-11481).
gggacggttcaataagtta

SEQ ID NO: 79861 - DNA, 19 bp, Homo sapiens
  siRNA target sequence for DNAH7 (NM_018897.1,11467-11485).
cggttcaataagttactga

SEQ ID NO: 79862 - DNA, 19 bp, Homo sapiens
  siRNA target sequence for DNAH7 (NM_018897.1,11495-11513).
gagattcgtgcgtaaatat

SEQ ID NO: 79863 - DNA, 19 bp, Homo sapiens
  siRNA target sequence for DNAH7 (NM_018897.1,11501-11519).
cgtgcgtaaatattcaaaa

SEQ ID NO: 79864 - DNA, 19 bp, Homo sapiens
  siRNA target sequence for DNAH7 (NM_018897.1,11530-11548).
gggcttgcagtcatgtcta

SEQ ID NO: 79865 - DNA, 19 bp, Homo sapiens
  siRNA target sequence for DNAH7 (NM_018897.1,11653-11671).
gacttccttgcaagactaa

SEQ ID NO: 79866 - DNA, 19 bp, Homo sapiens
  siRNA target sequence for DNAH7 (NM_018897.1,11655-11673).
cttccttgcaagactaaaa

SEQ ID NO: 79867 - DNA, 19 bp, Homo sapiens
  siRNA target sequence for DNAH7 (NM_018897.1,11753-11771).
ccggtgcccagcagaacta

SEQ ID NO: 79868 - DNA, 19 bp, Homo sapiens
  siRNA target sequence for DNAH7 (NM_018897.1,11764-11782).
cagaactacgccaggaaat

SEQ ID NO: 79869 - DNA, 19 bp, Homo sapiens
  siRNA target sequence for DNAH7 (NM_018897.1,11769-11787).
ctacgccaggaaatacaca

SEQ ID NO: 79870 - DNA, 19 bp, Homo sapiens
  siRNA target sequence for DNAH7 (NM_018897.1,11784-11802).
cacaattcctattgatctt

SEQ ID NO: 79871 - DNA, 19 bp, Homo sapiens
  siRNA target sequence for DNAH7 (NM_018897.1,11807-11825).
ggtttgactatgaagtgat

SEQ ID NO: 79872 - DNA, 19 bp, Homo sapiens
  siRNA target sequence for DNAH7 (NM_018897.1,11887-11905).
gatggagcttcctggaata

SEQ ID NO: 79873 - DNA, 19 bp, Homo sapiens
  siRNA target sequence for DNAH7 (NM_018897.1,11891-11909).
gagcttcctggaatagaaa

SEQ ID NO: 79874 - DNA, 19 bp, Homo sapiens
  siRNA target sequence for DNAH7 (NM_018897.1,11894-11912).
cttcctggaatagaaagat

SEQ ID NO: 79875 - DNA, 19 bp, Homo sapiens
  siRNA target sequence for DNAH7 (NM_018897.1,11897-11915).
cctggaatagaaagatcaa

SEQ ID NO: 79876 - DNA, 19 bp, Homo sapiens
  siRNA target sequence for DNAH7 (NM_018897.1,11924-11942).
cagaatcgcatcccaaaat

SEQ ID NO: 79877 - DNA, 19 bp, Homo sapiens
  siRNA target sequence for DNAH7 (NM_018897.1,11985-12003).
gagggcagatataccaaaa

SEQ ID NO: 79878 - DNA, 19 bp, Homo sapiens
  siRNA target sequence for DNAH7 (NM_018897.1,11999-12017).
caaaacggccaagttatgt

SEQ ID NO: 79879 - DNA, 19 bp, Homo sapiens
  siRNA target sequence for DNAH7 (NM_018897.1,12016-12034).
gttgctccattgtataaga

SEQ ID NO: 79880 - DNA, 19 bp, Homo sapiens
  siRNA target sequence for DNAH7 (NM_018897.1,12019-12037).
gctccattgtataagacaa

SEQ ID NO: 79881 - DNA, 19 bp, Homo sapiens
  siRNA target sequence for DNAH7 (NM_018897.1,12038-12056).
gtgagcggagaggagtatt

SEQ ID NO: 79882 - DNA, 19 bp, Homo sapiens
  siRNA target sequence for DNAH7 (NM_018897.1,12040-12058).
gagcggagaggagtattat

SEQ ID NO: 79883 - DNA, 19 bp, Homo sapiens
  siRNA target sequence for DNAH7 (NM_018897.1,12043-12061).
cggagaggagtattatcca

SEQ ID NO: 79884 - DNA, 19 bp, Homo sapiens
  siRNA target sequence for DNAH7 (NM_018897.1,12068-12086).
gccattccacgaattttgt

SEQ ID NO: 79885 - DNA, 19 bp, Homo sapiens
  siRNA target sequence for DNAH7 (NM_018897.1,12070-12088).
cattccacgaattttgtga

SEQ ID NO: 79886 - DNA, 19 bp, Homo sapiens
  siRNA target sequence for DNAH7 (NM_018897.1,12136-12154).
cgaggtgtagcactgttat

SEQ ID NO: 79887 - DNA, 19 bp, Homo sapiens
  siRNA target sequence for DNAH7 (NM_018897.1,12140-12158).
gtgtagcactgttatgtca

SEQ ID NO: 79888 - DNA, 19 bp, Homo sapiens
  siRNA target sequence for DNAH7 (NM_018897.1,12145-12163).
gcactgttatgtcaactta

SEQ ID NO: 79889 - DNA, 19 bp, Homo sapiens
  siRNA target sequence for DNAH7 (NM_018897.1,12148-12166).
ctgttatgtcaacttaatt

SEQ ID NO: 79890 - DNA, 19 bp, Homo sapiens
  siRNA target sequence for DNAH8 (NM_001371.1,260-278).
gaaattgtatatagacaat

SEQ ID NO: 79891 - DNA, 19 bp, Homo sapiens
  siRNA target sequence for DNAH8 (NM_001371.1,327-345).
cgtaatgatgttgctataa

SEQ ID NO: 79892 - DNA, 19 bp, Homo sapiens
  siRNA target sequence for DNAH8 (NM_001371.1,360-378).
caagaggaagcgctcttta

SEQ ID NO: 79893 - DNA, 19 bp, Homo sapiens
  siRNA target sequence for DNAH8 (NM_001371.1,391-409).
cgtcgaaaggactcttaaa

SEQ ID NO: 79894 - DNA, 19 bp, Homo sapiens
  siRNA target sequence for DNAH8 (NM_001371.1,392-410).
gtcgaaaggactcttaaat

SEQ ID NO: 79895 - DNA, 19 bp, Homo sapiens
  siRNA target sequence for DNAH8 (NM_001371.1,395-413).
gaaaggactcttaaatgga

SEQ ID NO: 79896 - DNA, 19 bp, Homo sapiens
  siRNA target sequence for DNAH8 (NM_001371.1,419-437).
ggatatgttggcaaatata

SEQ ID NO: 79897 - DNA, 19 bp, Homo sapiens
  siRNA target sequence for DNAH8 (NM_001371.1,450-468).
gttcttgcaacaaacaact

SEQ ID NO: 79898 - DNA, 19 bp, Homo sapiens
  siRNA target sequence for DNAH8 (NM_001371.1,488-506).
caagcagggagaatctgaa

SEQ ID NO: 79899 - DNA, 19 bp, Homo sapiens
  siRNA target sequence for DNAH8 (NM_001371.1,708-726).
cagatcgaacaggtactta

SEQ ID NO: 79900 - DNA, 19 bp, Homo sapiens
  siRNA target sequence for DNAH8 (NM_001371.1,710-728).
gatcgaacaggtacttatt

SEQ ID NO: 79901 - DNA, 19 bp, Homo sapiens
  siRNA target sequence for DNAH8 (NM_001371.1,714-732).
gaacaggtacttattgaga

SEQ ID NO: 79902 - DNA, 19 bp, Homo sapiens
  siRNA target sequence for DNAH8 (NM_001371.1,800-818).
gtcagccaagttcaactat

SEQ ID NO: 79903 - DNA, 19 bp, Homo sapiens
  siRNA target sequence for DNAH8 (NM_001371.1,802-820).
cagccaagttcaactatat

SEQ ID NO: 79904 - DNA, 19 bp, Homo sapiens
  siRNA target sequence for DNAH8 (NM_001371.1,804-822).
gccaagttcaactatatca

SEQ ID NO: 79905 - DNA, 19 bp, Homo sapiens
  siRNA target sequence for DNAH8 (NM_001371.1,805-823).
ccaagttcaactatatcat

SEQ ID NO: 79906 - DNA, 19 bp, Homo sapiens
  siRNA target sequence for DNAH8 (NM_001371.1,830-848).
gattaaagggccaagttgt

SEQ ID NO: 79907 - DNA, 19 bp, Homo sapiens
  siRNA target sequence for DNAH8 (NM_001371.1,844-862).
gttgtaaggctgtcataaa

SEQ ID NO: 79908 - DNA, 19 bp, Homo sapiens
  siRNA target sequence for DNAH8 (NM_001371.1,847-865).
gtaaggctgtcataaatgt

SEQ ID NO: 79909 - DNA, 19 bp, Homo sapiens
  siRNA target sequence for DNAH8 (NM_001371.1,877-895).
cacactccaaactgctaaa

SEQ ID NO: 79910 - DNA, 19 bp, Homo sapiens
  siRNA target sequence for DNAH8 (NM_001371.1,879-897).
cactccaaactgctaaaga

SEQ ID NO: 79911 - DNA, 19 bp, Homo sapiens
  siRNA target sequence for DNAH8 (NM_001371.1,904-922).
gtgatttggatgcaagaat

SEQ ID NO: 79912 - DNA, 19 bp, Homo sapiens
  siRNA target sequence for DNAH8 (NM_001371.1,906-924).
gatttggatgcaagaatca

SEQ ID NO: 79913 - DNA, 19 bp, Homo sapiens
  siRNA target sequence for DNAH8 (NM_001371.1,944-962).
caaagataatgtcagatat

SEQ ID NO: 79914 - DNA, 19 bp, Homo sapiens
  siRNA target sequence for DNAH8 (NM_001371.1,985-1003).
gtcaacctctctataacca

SEQ ID NO: 79915 - DNA, 19 bp, Homo sapiens
  siRNA target sequence for DNAH8 (NM_001371.1,1020-1038).
gcacatggaatacaaaatt

SEQ ID NO: 79916 - DNA, 19 bp, Homo sapiens
  siRNA target sequence for DNAH8 (NM_001371.1,1062-1080).
cacggtgtgtcaaggtatt

SEQ ID NO: 79917 - DNA, 19 bp, Homo sapiens
  siRNA target sequence for DNAH8 (NM_001371.1,1064-1082).
cggtgtgtcaaggtattat

SEQ ID NO: 79918 - DNA, 19 bp, Homo sapiens
  siRNA target sequence for DNAH8 (NM_001371.1,1065-1083).
ggtgtgtcaaggtattata

SEQ ID NO: 79919 - DNA, 19 bp, Homo sapiens
  siRNA target sequence for DNAH8 (NM_001371.1,1068-1086).
gtgtcaaggtattataata

SEQ ID NO: 79920 - DNA, 19 bp, Homo sapiens
  siRNA target sequence for DNAH8 (NM_001371.1,1109-1127).
gtttatcaaggtaacaaat

SEQ ID NO: 79921 - DNA, 19 bp, Homo sapiens
  siRNA target sequence for DNAH8 (NM_001371.1,1133-1151).
ggtaacagcatgtaaagca

SEQ ID NO: 79922 - DNA, 19 bp, Homo sapiens
  siRNA target sequence for DNAH8 (NM_001371.1,1134-1152).
gtaacagcatgtaaagcat

SEQ ID NO: 79923 - DNA, 19 bp, Homo sapiens
  siRNA target sequence for DNAH8 (NM_001371.1,1159-1177).
ctgatggaggattaaacca

SEQ ID NO: 79924 - DNA, 19 bp, Homo sapiens
  siRNA target sequence for DNAH8 (NM_001371.1,1164-1182).
ggaggattaaaccatgtat

SEQ ID NO: 79925 - DNA, 19 bp, Homo sapiens
  siRNA target sequence for DNAH8 (NM_001371.1,1190-1208).
ggaaacgccagttgtacta

SEQ ID NO: 79926 - DNA, 19 bp, Homo sapiens
  siRNA target sequence for DNAH8 (NM_001371.1,1218-1236).
caggactgcatttttctat

SEQ ID NO: 79927 - DNA, 19 bp, Homo sapiens
  siRNA target sequence for DNAH8 (NM_001371.1,1221-1239).
gactgcatttttctattca

SEQ ID NO: 79928 - DNA, 19 bp, Homo sapiens
  siRNA target sequence for DNAH8 (NM_001371.1,1396-1414).
catattcaaccttgagtaa

SEQ ID NO: 79929 - DNA, 19 bp, Homo sapiens
  siRNA target sequence for DNAH8 (NM_001371.1,1409-1427).
gagtaattctaccatagaa

SEQ ID NO: 79930 - DNA, 19 bp, Homo sapiens
  siRNA target sequence for DNAH8 (NM_001371.1,1417-1435).
ctaccatagaaggaataga

SEQ ID NO: 79931 - DNA, 19 bp, Homo sapiens
  siRNA target sequence for DNAH8 (NM_001371.1,1420-1438).
ccatagaaggaatagatat

SEQ ID NO: 79932 - DNA, 19 bp, Homo sapiens
  siRNA target sequence for DNAH8 (NM_001371.1,1558-1576).
gtttagaggtacaaataca

SEQ ID NO: 79933 - DNA, 19 bp, Homo sapiens
  siRNA target sequence for DNAH8 (NM_001371.1,1575-1593).
caggcatttatgaacagta

SEQ ID NO: 79934 - DNA, 19 bp, Homo sapiens
  siRNA target sequence for DNAH8 (NM_001371.1,1688-1706).
cacaatagagcgtattctt

SEQ ID NO: 79935 - DNA, 19 bp, Homo sapiens
  siRNA target sequence for DNAH8 (NM_001371.1,1690-1708).
caatagagcgtattcttca

SEQ ID NO: 79936 - DNA, 19 bp, Homo sapiens
  siRNA target sequence for DNAH8 (NM_001371.1,1697-1715).
gcgtattcttcagtactat

SEQ ID NO: 79937 - DNA, 19 bp, Homo sapiens
  siRNA target sequence for DNAH8 (NM_001371.1,1709-1727).
gtactatgtggctgaactt

SEQ ID NO: 79938 - DNA, 19 bp, Homo sapiens
  siRNA target sequence for DNAH8 (NM_001371.1,1722-1740).
gaacttgatgctactaaga

SEQ ID NO: 79939 - DNA, 19 bp, Homo sapiens
  siRNA target sequence for DNAH8 (NM_001371.1,1781-1799).
caacatgccccctatagca

SEQ ID NO: 79940 - DNA, 19 bp, Homo sapiens
  siRNA target sequence for DNAH8 (NM_001371.1,1787-1805).
gccccctatagcaggaaaa

SEQ ID NO: 79941 - DNA, 19 bp, Homo sapiens
  siRNA target sequence for DNAH8 (NM_001371.1,1790-1808).
ccctatagcaggaaaaata

SEQ ID NO: 79942 - DNA, 19 bp, Homo sapiens
  siRNA target sequence for DNAH8 (NM_001371.1,1823-1841).
gctctatcgccggataagt

SEQ ID NO: 79943 - DNA, 19 bp, Homo sapiens
  siRNA target sequence for DNAH8 (NM_001371.1,1835-1853).
gataagtgagcccatcaat

SEQ ID NO: 79944 - DNA, 19 bp, Homo sapiens
  siRNA target sequence for DNAH8 (NM_001371.1,1899-1917).
gctgtcatccgtcagtata

SEQ ID NO: 79945 - DNA, 19 bp, Homo sapiens
  siRNA target sequence for DNAH8 (NM_001371.1,1900-1918).
ctgtcatccgtcagtataa

SEQ ID NO: 79946 - DNA, 19 bp, Homo sapiens
  siRNA target sequence for DNAH8 (NM_001371.1,1908-1926).
cgtcagtataacaagatct

SEQ ID NO: 79947 - DNA, 19 bp, Homo sapiens
  siRNA target sequence for DNAH8 (NM_001371.1,1977-1995).
gagatttcacagttgcatt

SEQ ID NO: 79948 - DNA, 19 bp, Homo sapiens
  siRNA target sequence for DNAH8 (NM_001371.1,2042-2060).
gttgctggttaatttcgat

SEQ ID NO: 79949 - DNA, 19 bp, Homo sapiens
  siRNA target sequence for DNAH8 (NM_001371.1,2057-2075).
cgatcccaaaattttggaa

SEQ ID NO: 79950 - DNA, 19 bp, Homo sapiens
  siRNA target sequence for DNAH8 (NM_001371.1,2073-2091).
gaagttgttcgggaaacta

SEQ ID NO: 79951 - DNA, 19 bp, Homo sapiens
  siRNA target sequence for DNAH8 (NM_001371.1,2076-2094).
gttgttcgggaaactaagt

SEQ ID NO: 79952 - DNA, 19 bp, Homo sapiens
  siRNA target sequence for DNAH8 (NM_001371.1,2122-2140).
cagaacaggcaaagagatt

SEQ ID NO: 79953 - DNA, 19 bp, Homo sapiens
  siRNA target sequence for DNAH8 (NM_001371.1,2127-2145).
caggcaaagagattgctaa

SEQ ID NO: 79954 - DNA, 19 bp, Homo sapiens
  siRNA target sequence for DNAH8 (NM_001371.1,2167-2185).
cagacaaactgtatttgca

SEQ ID NO: 79955 - DNA, 19 bp, Homo sapiens
  siRNA target sequence for DNAH8 (NM_001371.1,2186-2204).
gggtcttctgcaatattat

SEQ ID NO: 79956 - DNA, 19 bp, Homo sapiens
  siRNA target sequence for DNAH8 (NM_001371.1,2188-2206).
gtcttctgcaatattatga

SEQ ID NO: 79957 - DNA, 19 bp, Homo sapiens
  siRNA target sequence for DNAH8 (NM_001371.1,2289-2307).
ggactcacagtgttaacat

SEQ ID NO: 79958 - DNA, 19 bp, Homo sapiens
  siRNA target sequence for DNAH8 (NM_001371.1,2305-2323).
catggtcgtctttaacact

SEQ ID NO: 79959 - DNA, 19 bp, Homo sapiens
  siRNA target sequence for DNAH8 (NM_001371.1,2333-2351).
ctttcaagaagtcgaatta

SEQ ID NO: 79960 - DNA, 19 bp, Homo sapiens
  siRNA target sequence for DNAH8 (NM_001371.1,2343-2361).
gtcgaattagttttggata

SEQ ID NO: 79961 - DNA, 19 bp, Homo sapiens
  siRNA target sequence for DNAH8 (NM_001371.1,2357-2375).
ggatatgttcaatcaactt

SEQ ID NO: 79962 - DNA, 19 bp, Homo sapiens
  siRNA target sequence for DNAH8 (NM_001371.1,2389-2407).
gtgacttgtgtgaaatgca

SEQ ID NO: 79963 - DNA, 19 bp, Homo sapiens
  siRNA target sequence for DNAH8 (NM_001371.1,2496-2514).
ctcaatgagacatacacaa

SEQ ID NO: 79964 - DNA, 19 bp, Homo sapiens
  siRNA target sequence for DNAH8 (NM_001371.1,2521-2539).
gggctgacattctaaacca

SEQ ID NO: 79965 - DNA, 19 bp, Homo sapiens
  siRNA target sequence for DNAH8 (NM_001371.1,2562-2580).
gctgtcagagaacttatat

SEQ ID NO: 79966 - DNA, 19 bp, Homo sapiens
  siRNA target sequence for DNAH8 (NM_001371.1,2569-2587).
gagaacttatatcaatatt

SEQ ID NO: 79967 - DNA, 19 bp, Homo sapiens
  siRNA target sequence for DNAH8 (NM_001371.1,2592-2610).
cagatttatgaagtgaaat

SEQ ID NO: 79968 - DNA, 19 bp, Homo sapiens
  siRNA target sequence for DNAH8 (NM_001371.1,2651-2669).
cgttgtttttggaagtgaa

SEQ ID NO: 79969 - DNA, 19 bp, Homo sapiens
  siRNA target sequence for DNAH8 (NM_001371.1,2678-2696).
gggtgaaaacaatgactat

SEQ ID NO: 79970 - DNA, 19 bp, Homo sapiens
  siRNA target sequence for DNAH8 (NM_001371.1,2687-2705).
caatgactatgaagctaat

SEQ ID NO: 79971 - DNA, 19 bp, Homo sapiens
  siRNA target sequence for DNAH8 (NM_001371.1,2701-2719).
ctaatattgtgaatgagtt

SEQ ID NO: 79972 - DNA, 19 bp, Homo sapiens
  siRNA target sequence for DNAH8 (NM_001371.1,2711-2729).
gaatgagtttgatactcat

SEQ ID NO: 79973 - DNA, 19 bp, Homo sapiens
  siRNA target sequence for DNAH8 (NM_001371.1,2818-2836).
ggttatctctggacacaat

SEQ ID NO: 79974 - DNA, 19 bp, Homo sapiens
  siRNA target sequence for DNAH8 (NM_001371.1,2871-2889).
cgaaagcagtcagaagata

SEQ ID NO: 79975 - DNA, 19 bp, Homo sapiens
  siRNA target sequence for DNAH8 (NM_001371.1,2939-2957).
gatgattcctagtttggat

SEQ ID NO: 79976 - DNA, 19 bp, Homo sapiens
  siRNA target sequence for DNAH8 (NM_001371.1,3036-3054).
caaatccgtcccatcaagt

SEQ ID NO: 79977 - DNA, 19 bp, Homo sapiens
  siRNA target sequence for DNAH8 (NM_001371.1,3079-3097).
ctgacgtgacccatcaaaa

SEQ ID NO: 79978 - DNA, 19 bp, Homo sapiens
  siRNA target sequence for DNAH8 (NM_001371.1,3081-3099).
gacgtgacccatcaaaaca

SEQ ID NO: 79979 - DNA, 19 bp, Homo sapiens
  siRNA target sequence for DNAH8 (NM_001371.1,3083-3101).
cgtgacccatcaaaacaca

SEQ ID NO: 79980 - DNA, 19 bp, Homo sapiens
  siRNA target sequence for DNAH8 (NM_001371.1,3150-3168).
gcgaggaagctgaagaatt

SEQ ID NO: 79981 - DNA, 19 bp, Homo sapiens
  siRNA target sequence for DNAH8 (NM_001371.1,3151-3169).
cgaggaagctgaagaattt

SEQ ID NO: 79982 - DNA, 19 bp, Homo sapiens
  siRNA target sequence for DNAH8 (NM_001371.1,3180-3198).
gtagcggagcacaaggata

SEQ ID NO: 79983 - DNA, 19 bp, Homo sapiens
  siRNA target sequence for DNAH8 (NM_001371.1,3298-3316).
cagaggaccgcgatgtgaa

SEQ ID NO: 79984 - DNA, 19 bp, Homo sapiens
  siRNA target sequence for DNAH8 (NM_001371.1,3303-3321).
gaccgcgatgtgaaagtga

SEQ ID NO: 79985 - DNA, 19 bp, Homo sapiens
  siRNA target sequence for DNAH8 (NM_001371.1,3402-3420).
gatgagttgaagcctatta

SEQ ID NO: 79986 - DNA, 19 bp, Homo sapiens
  siRNA target sequence for DNAH8 (NM_001371.1,3410-3428).
gaagcctattattgttgta

SEQ ID NO: 79987 - DNA, 19 bp, Homo sapiens
  siRNA target sequence for DNAH8 (NM_001371.1,3429-3447).
ggagcacttgaattacata

SEQ ID NO: 79988 - DNA, 19 bp, Homo sapiens
  siRNA target sequence for DNAH8 (NM_001371.1,3433-3451).
cacttgaattacatacaga

SEQ ID NO: 79989 - DNA, 19 bp, Homo sapiens
  siRNA target sequence for DNAH8 (NM_001371.1,3481-3499).
ccaaggcatggaagatgtt

SEQ ID NO: 79990 - DNA, 19 bp, Homo sapiens
  siRNA target sequence for DNAH8 (NM_001371.1,3494-3512).
gatgttactctgtcgatat

SEQ ID NO: 79991 - DNA, 19 bp, Homo sapiens
  siRNA target sequence for DNAH8 (NM_001371.1,3503-3521).
ctgtcgatatctgaatgaa

SEQ ID NO: 79992 - DNA, 19 bp, Homo sapiens
  siRNA target sequence for DNAH8 (NM_001371.1,3505-3523).
gtcgatatctgaatgaaga

SEQ ID NO: 79993 - DNA, 19 bp, Homo sapiens
  siRNA target sequence for DNAH8 (NM_001371.1,3578-3596).
gttatctagacctattcgt

SEQ ID NO: 79994 - DNA, 19 bp, Homo sapiens
  siRNA target sequence for DNAH8 (NM_001371.1,3583-3601).
ctagacctattcgtgattt

SEQ ID NO: 79995 - DNA, 19 bp, Homo sapiens
  siRNA target sequence for DNAH8 (NM_001371.1,3586-3604).
gacctattcgtgatttaga

SEQ ID NO: 79996 - DNA, 19 bp, Homo sapiens
  siRNA target sequence for DNAH8 (NM_001371.1,3632-3650).
gtcttgcatacgtgataat

SEQ ID NO: 79997 - DNA, 19 bp, Homo sapiens
  siRNA target sequence for DNAH8 (NM_001371.1,3634-3652).
cttgcatacgtgataatga

SEQ ID NO: 79998 - DNA, 19 bp, Homo sapiens
  siRNA target sequence for DNAH8 (NM_001371.1,3668-3686).
gactttgggaccaattgaa

SEQ ID NO: 79999 - DNA, 19 bp, Homo sapiens
  siRNA target sequence for DNAH8 (NM_001371.1,3670-3688).
ctttgggaccaattgaaga

SEQ ID NO: 80000 - DNA, 19 bp, Homo sapiens
  siRNA target sequence for DNAH8 (NM_001371.1,3684-3702).
gaagaagcctatgctattt

SEQ ID NO: 80001 - DNA, 19 bp, Homo sapiens
  siRNA target sequence for DNAH8 (NM_001371.1,3739-3757).
cagaagcagttgatacctt

SEQ ID NO: 80002 - DNA, 19 bp, Homo sapiens
  siRNA target sequence for DNAH8 (NM_001371.1,3741-3759).
gaagcagttgataccttaa

SEQ ID NO: 80003 - DNA, 19 bp, Homo sapiens
  siRNA target sequence for DNAH8 (NM_001371.1,3744-3762).
gcagttgataccttaagat

SEQ ID NO: 80004 - DNA, 19 bp, Homo sapiens
  siRNA target sequence for DNAH8 (NM_001371.1,3745-3763).
cagttgataccttaagata

SEQ ID NO: 80005 - DNA, 19 bp, Homo sapiens
  siRNA target sequence for DNAH8 (NM_001371.1,3747-3765).
gttgataccttaagatatt

SEQ ID NO: 80006 - DNA, 19 bp, Homo sapiens
  siRNA target sequence for DNAH8 (NM_001371.1,3867-3885).
cgtgaggacgtgataaact

SEQ ID NO: 80007 - DNA, 19 bp, Homo sapiens
  siRNA target sequence for DNAH8 (NM_001371.1,3868-3886).
gtgaggacgtgataaactt

SEQ ID NO: 80008 - DNA, 19 bp, Homo sapiens
  siRNA target sequence for DNAH8 (NM_001371.1,3947-3965).
caacaggctacagatattt

SEQ ID NO: 80009 - DNA, 19 bp, Homo sapiens
  siRNA target sequence for DNAH8 (NM_001371.1,3988-4006).
ggaggaaatttgttacgta

SEQ ID NO: 80010 - DNA, 19 bp, Homo sapiens
  siRNA target sequence for DNAH8 (NM_001371.1,3989-4007).
gaggaaatttgttacgtat

SEQ ID NO: 80011 - DNA, 19 bp, Homo sapiens
  siRNA target sequence for DNAH8 (NM_001371.1,4029-4047).
ggattgcctgtgactgatt

SEQ ID NO: 80012 - DNA, 19 bp, Homo sapiens
  siRNA target sequence for DNAH8 (NM_001371.1,4030-4048).
gattgcctgtgactgatta

SEQ ID NO: 80013 - DNA, 19 bp, Homo sapiens
  siRNA target sequence for DNAH8 (NM_001371.1,4095-4113).
ctgtatggattgtatgaca

SEQ ID NO: 80014 - DNA, 19 bp, Homo sapiens
  siRNA target sequence for DNAH8 (NM_001371.1,4115-4133).
cgtaatgagcagtattagt

SEQ ID NO: 80015 - DNA, 19 bp, Homo sapiens
  siRNA target sequence for DNAH8 (NM_001371.1,4149-4167).
ctttggggagatgtagata

SEQ ID NO: 80016 - DNA, 19 bp, Homo sapiens
  siRNA target sequence for DNAH8 (NM_001371.1,4293-4311).
cctctactggaaatgatga

SEQ ID NO: 80017 - DNA, 19 bp, Homo sapiens
  siRNA target sequence for DNAH8 (NM_001371.1,4310-4328).
gaccaataaggccatgaaa

SEQ ID NO: 80018 - DNA, 19 bp, Homo sapiens
  siRNA target sequence for DNAH8 (NM_001371.1,4312-4330).
ccaataaggccatgaaaca

SEQ ID NO: 80019 - DNA, 19 bp, Homo sapiens
  siRNA target sequence for DNAH8 (NM_001371.1,4341-4359).
gatagaatctccgagttaa

SEQ ID NO: 80020 - DNA, 19 bp, Homo sapiens
  siRNA target sequence for DNAH8 (NM_001371.1,4360-4378).
ctggaaccccatttgatgt

SEQ ID NO: 80021 - DNA, 19 bp, Homo sapiens
  siRNA target sequence for DNAH8 (NM_001371.1,4377-4395).
gtggaatctgattcttttt

SEQ ID NO: 80022 - DNA, 19 bp, Homo sapiens
  siRNA target sequence for DNAH8 (NM_001371.1,4416-4434).
gcaccactccttaaacata

SEQ ID NO: 80023 - DNA, 19 bp, Homo sapiens
  siRNA target sequence for DNAH8 (NM_001371.1,4417-4435).
caccactccttaaacataa

SEQ ID NO: 80024 - DNA, 19 bp, Homo sapiens
  siRNA target sequence for DNAH8 (NM_001371.1,4425-4443).
cttaaacataaggatgata

SEQ ID NO: 80025 - DNA, 19 bp, Homo sapiens
  siRNA target sequence for DNAH8 (NM_001371.1,4464-4482).
gccattaaggagaaggata

SEQ ID NO: 80026 - DNA, 19 bp, Homo sapiens
  siRNA target sequence for DNAH8 (NM_001371.1,4465-4483).
ccattaaggagaaggatat

SEQ ID NO: 80027 - DNA, 19 bp, Homo sapiens
  siRNA target sequence for DNAH8 (NM_001371.1,4576-4594).
gaaccgaatcgggagaaat

SEQ ID NO: 80028 - DNA, 19 bp, Homo sapiens
  siRNA target sequence for DNAH8 (NM_001371.1,4579-4597).
ccgaatcgggagaaattat

SEQ ID NO: 80029 - DNA, 19 bp, Homo sapiens
  siRNA target sequence for DNAH8 (NM_001371.1,4581-4599).
gaatcgggagaaattatca

SEQ ID NO: 80030 - DNA, 19 bp, Homo sapiens
  siRNA target sequence for DNAH8 (NM_001371.1,4633-4651).
ctttactcagcaacagata

SEQ ID NO: 80031 - DNA, 19 bp, Homo sapiens
  siRNA target sequence for DNAH8 (NM_001371.1,4676-4694).
ccagaattgggtgtataaa

SEQ ID NO: 80032 - DNA, 19 bp, Homo sapiens
  siRNA target sequence for DNAH8 (NM_001371.1,4697-4715).
gtccacttcctcagatata

SEQ ID NO: 80033 - DNA, 19 bp, Homo sapiens
  siRNA target sequence for DNAH8 (NM_001371.1,4699-4717).
ccacttcctcagatataat

SEQ ID NO: 80034 - DNA, 19 bp, Homo sapiens
  siRNA target sequence for DNAH8 (NM_001371.1,4728-4746).
ctcgtagtacagaaccttt

SEQ ID NO: 80035 - DNA, 19 bp, Homo sapiens
  siRNA target sequence for DNAH8 (NM_001371.1,4766-4784).
ctttgtaggtggagatatt

SEQ ID NO: 80036 - DNA, 19 bp, Homo sapiens
  siRNA target sequence for DNAH8 (NM_001371.1,4796-4814).
gcctcaggaagcaaaacgt

SEQ ID NO: 80037 - DNA, 19 bp, Homo sapiens
  siRNA target sequence for DNAH8 (NM_001371.1,4797-4815).
cctcaggaagcaaaacgtt

SEQ ID NO: 80038 - DNA, 19 bp, Homo sapiens
  siRNA target sequence for DNAH8 (NM_001371.1,4798-4816).
ctcaggaagcaaaacgttt

SEQ ID NO: 80039 - DNA, 19 bp, Homo sapiens
  siRNA target sequence for DNAH8 (NM_001371.1,4827-4845).
gacaagtcttggataaaaa

SEQ ID NO: 80040 - DNA, 19 bp, Homo sapiens
  siRNA target sequence for DNAH8 (NM_001371.1,4850-4868).
gcagcgagctcatgagaat

SEQ ID NO: 80041 - DNA, 19 bp, Homo sapiens
  siRNA target sequence for DNAH8 (NM_001371.1,4863-4881).
gagaatcccaatgtgatta

SEQ ID NO: 80042 - DNA, 19 bp, Homo sapiens
  siRNA target sequence for DNAH8 (NM_001371.1,4865-4883).
gaatcccaatgtgattaat

SEQ ID NO: 80043 - DNA, 19 bp, Homo sapiens
  siRNA target sequence for DNAH8 (NM_001371.1,4904-4922).
catgggacaacttttacct

SEQ ID NO: 80044 - DNA, 19 bp, Homo sapiens
  siRNA target sequence for DNAH8 (NM_001371.1,4909-4927).
gacaacttttacctcattt

SEQ ID NO: 80045 - DNA, 19 bp, Homo sapiens
  siRNA target sequence for DNAH8 (NM_001371.1,5133-5151).
cgcatcatggccgtcatat

SEQ ID NO: 80046 - DNA, 19 bp, Homo sapiens
  siRNA target sequence for DNAH8 (NM_001371.1,5138-5156).
catggccgtcatatcaaga

SEQ ID NO: 80047 - DNA, 19 bp, Homo sapiens
  siRNA target sequence for DNAH8 (NM_001371.1,5141-5159).
ggccgtcatatcaagagaa

SEQ ID NO: 80048 - DNA, 19 bp, Homo sapiens
  siRNA target sequence for DNAH8 (NM_001371.1,5215-5233).
ggctactggatttgttaaa

SEQ ID NO: 80049 - DNA, 19 bp, Homo sapiens
  siRNA target sequence for DNAH8 (NM_001371.1,5266-5284).
gatccgctttctatcaaat

SEQ ID NO: 80050 - DNA, 19 bp, Homo sapiens
  siRNA target sequence for DNAH8 (NM_001371.1,5270-5288).
cgctttctatcaaatcagt

SEQ ID NO: 80051 - DNA, 19 bp, Homo sapiens
  siRNA target sequence for DNAH8 (NM_001371.1,5276-5294).
ctatcaaatcagtgattca

SEQ ID NO: 80052 - DNA, 19 bp, Homo sapiens
  siRNA target sequence for DNAH8 (NM_001371.1,5341-5359).
gacttctgggaattcagat

SEQ ID NO: 80053 - DNA, 19 bp, Homo sapiens
  siRNA target sequence for DNAH8 (NM_001371.1,5377-5395).
cagaagaggctttacgtaa

SEQ ID NO: 80054 - DNA, 19 bp, Homo sapiens
  siRNA target sequence for DNAH8 (NM_001371.1,5384-5402).
ggctttacgtaatgcaaaa

SEQ ID NO: 80055 - DNA, 19 bp, Homo sapiens
  siRNA target sequence for DNAH8 (NM_001371.1,5386-5404).
ctttacgtaatgcaaaaga

SEQ ID NO: 80056 - DNA, 19 bp, Homo sapiens
  siRNA target sequence for DNAH8 (NM_001371.1,5467-5485).
gtcagacaacacatgatct

SEQ ID NO: 80057 - DNA, 19 bp, Homo sapiens
  siRNA target sequence for DNAH8 (NM_001371.1,5473-5491).
caacacatgatctaagcaa

SEQ ID NO: 80058 - DNA, 19 bp, Homo sapiens
  siRNA target sequence for DNAH8 (NM_001371.1,5481-5499).
gatctaagcaagtttgata

SEQ ID NO: 80059 - DNA, 19 bp, Homo sapiens
  siRNA target sequence for DNAH8 (NM_001371.1,5502-5520).
gtgaagttcgagactctaa

SEQ ID NO: 80060 - DNA, 19 bp, Homo sapiens
  siRNA target sequence for DNAH8 (NM_001371.1,5504-5522).
gaagttcgagactctaatt

SEQ ID NO: 80061 - DNA, 19 bp, Homo sapiens
  siRNA target sequence for DNAH8 (NM_001371.1,5532-5550).
gtgcatcagagagatattt

SEQ ID NO: 80062 - DNA, 19 bp, Homo sapiens
  siRNA target sequence for DNAH8 (NM_001371.1,5599-5617).
ggctaaaacagagtagatt

SEQ ID NO: 80063 - DNA, 19 bp, Homo sapiens
  siRNA target sequence for DNAH8 (NM_001371.1,5648-5666).
ggtgtctattacagatgtt

SEQ ID NO: 80064 - DNA, 19 bp, Homo sapiens
  siRNA target sequence for DNAH8 (NM_001371.1,5664-5682).
gttgattttatttaccaaa

SEQ ID NO: 80065 - DNA, 19 bp, Homo sapiens
  siRNA target sequence for DNAH8 (NM_001371.1,5709-5727).
cttgttatcactccattaa

SEQ ID NO: 80066 - DNA, 19 bp, Homo sapiens
  siRNA target sequence for DNAH8 (NM_001371.1,5959-5977).
gaattgaattgcctgtatt

SEQ ID NO: 80067 - DNA, 19 bp, Homo sapiens
  siRNA target sequence for DNAH8 (NM_001371.1,5980-5998).
cagtggcagcacaacaaat

SEQ ID NO: 80068 - DNA, 19 bp, Homo sapiens
  siRNA target sequence for DNAH8 (NM_001371.1,6055-6073).
gtgattgtgttgatttaaa

SEQ ID NO: 80069 - DNA, 19 bp, Homo sapiens
  siRNA target sequence for DNAH8 (NM_001371.1,6178-6196).
ctgatagacagatcattat

SEQ ID NO: 80070 - DNA, 19 bp, Homo sapiens
  siRNA target sequence for DNAH8 (NM_001371.1,6180-6198).
gatagacagatcattatga

SEQ ID NO: 80071 - DNA, 19 bp, Homo sapiens
  siRNA target sequence for DNAH8 (NM_001371.1,6188-6206).
gatcattatgagagttaaa

SEQ ID NO: 80072 - DNA, 19 bp, Homo sapiens
  siRNA target sequence for DNAH8 (NM_001371.1,6191-6209).
cattatgagagttaaactt

SEQ ID NO: 80073 - DNA, 19 bp, Homo sapiens
  siRNA target sequence for DNAH8 (NM_001371.1,6242-6260).
ggctcaaaaattttacgtt

SEQ ID NO: 80074 - DNA, 19 bp, Homo sapiens
  siRNA target sequence for DNAH8 (NM_001371.1,6274-6292).
gtgaagagcaacttactaa

SEQ ID NO: 80075 - DNA, 19 bp, Homo sapiens
  siRNA target sequence for DNAH8 (NM_001371.1,6400-6418).
gaggactaagagatatgaa

SEQ ID NO: 80076 - DNA, 19 bp, Homo sapiens
  siRNA target sequence for DNAH8 (NM_001371.1,6409-6427).
gagatatgaacctttccaa

SEQ ID NO: 80077 - DNA, 19 bp, Homo sapiens
  siRNA target sequence for DNAH8 (NM_001371.1,6425-6443).
caaactggttgatgaagat

SEQ ID NO: 80078 - DNA, 19 bp, Homo sapiens
  siRNA target sequence for DNAH8 (NM_001371.1,6450-6468).
ctgttcctcagcttaatca

SEQ ID NO: 80079 - DNA, 19 bp, Homo sapiens
  siRNA target sequence for DNAH8 (NM_001371.1,6483-6501).
ggactgcaactggatagta

SEQ ID NO: 80080 - DNA, 19 bp, Homo sapiens
  siRNA target sequence for DNAH8 (NM_001371.1,6488-6506).
gcaactggatagtaatact

SEQ ID NO: 80081 - DNA, 19 bp, Homo sapiens
  siRNA target sequence for DNAH8 (NM_001371.1,6489-6507).
caactggatagtaatactt

SEQ ID NO: 80082 - DNA, 19 bp, Homo sapiens
  siRNA target sequence for DNAH8 (NM_001371.1,6532-6550).
cccatcaggttcagataga

SEQ ID NO: 80083 - DNA, 19 bp, Homo sapiens
  siRNA target sequence for DNAH8 (NM_001371.1,6543-6561).
cagatagagggtttgatta

SEQ ID NO: 80084 - DNA, 19 bp, Homo sapiens
  siRNA target sequence for DNAH8 (NM_001371.1,6579-6597).
ctgaaactcgtgcagttat

SEQ ID NO: 80085 - DNA, 19 bp, Homo sapiens
  siRNA target sequence for DNAH8 (NM_001371.1,6581-6599).
gaaactcgtgcagttatat

SEQ ID NO: 80086 - DNA, 19 bp, Homo sapiens
  siRNA target sequence for DNAH8 (NM_001371.1,6697-6715).
gcggaaggcctcatagaga

SEQ ID NO: 80087 - DNA, 19 bp, Homo sapiens
  siRNA target sequence for DNAH8 (NM_001371.1,6884-6902).
ctggattgagaacttaaat

SEQ ID NO: 80088 - DNA, 19 bp, Homo sapiens
  siRNA target sequence for DNAH8 (NM_001371.1,6955-6973).
ccatggcccctagttgtaa

SEQ ID NO: 80089 - DNA, 19 bp, Homo sapiens
  siRNA target sequence for DNAH8 (NM_001371.1,6959-6977).
ggcccctagttgtaagctt

SEQ ID NO: 80090 - DNA, 19 bp, Homo sapiens
  siRNA target sequence for DNAH8 (NM_001371.1,7196-7214).
gctcttggagtgcaactat

SEQ ID NO: 80091 - DNA, 19 bp, Homo sapiens
  siRNA target sequence for DNAH8 (NM_001371.1,7197-7215).
ctcttggagtgcaactata

SEQ ID NO: 80092 - DNA, 19 bp, Homo sapiens
  siRNA target sequence for DNAH8 (NM_001371.1,7277-7295).
ctgtgtcgaacatcttcat

SEQ ID NO: 80093 - DNA, 19 bp, Homo sapiens
  siRNA target sequence for DNAH8 (NM_001371.1,7279-7297).
gtgtcgaacatcttcataa

SEQ ID NO: 80094 - DNA, 19 bp, Homo sapiens
  siRNA target sequence for DNAH8 (NM_001371.1,7281-7299).
gtcgaacatcttcataaat

SEQ ID NO: 80095 - DNA, 19 bp, Homo sapiens
  siRNA target sequence for DNAH8 (NM_001371.1,7283-7301).
cgaacatcttcataaatta

SEQ ID NO: 80096 - DNA, 19 bp, Homo sapiens
  siRNA target sequence for DNAH8 (NM_001371.1,7330-7348).
gagcccttctggaattaga

SEQ ID NO: 80097 - DNA, 19 bp, Homo sapiens
  siRNA target sequence for DNAH8 (NM_001371.1,7332-7350).
gcccttctggaattagaaa

SEQ ID NO: 80098 - DNA, 19 bp, Homo sapiens
  siRNA target sequence for DNAH8 (NM_001371.1,7421-7439).
ctcaaatcaaaccatgtat

SEQ ID NO: 80099 - DNA, 19 bp, Homo sapiens
  siRNA target sequence for DNAH8 (NM_001371.1,7433-7451).
catgtatgagttttatgtt

SEQ ID NO: 80100 - DNA, 19 bp, Homo sapiens
  siRNA target sequence for DNAH8 (NM_001371.1,7436-7454).
gtatgagttttatgttact

SEQ ID NO: 80101 - DNA, 19 bp, Homo sapiens
  siRNA target sequence for DNAH8 (NM_001371.1,7464-7482).
gattgggagcactggaata

SEQ ID NO: 80102 - DNA, 19 bp, Homo sapiens
  siRNA target sequence for DNAH8 (NM_001371.1,7472-7490).
gcactggaataagaaactt

SEQ ID NO: 80103 - DNA, 19 bp, Homo sapiens
  siRNA target sequence for DNAH8 (NM_001371.1,7484-7502).
gaaacttcagccttattat

SEQ ID NO: 80104 - DNA, 19 bp, Homo sapiens
  siRNA target sequence for DNAH8 (NM_001371.1,7514-7532).
cagtattccggaatattca

SEQ ID NO: 80105 - DNA, 19 bp, Homo sapiens
  siRNA target sequence for DNAH8 (NM_001371.1,7521-7539).
ccggaatattcatcaattt

SEQ ID NO: 80106 - DNA, 19 bp, Homo sapiens
  siRNA target sequence for DNAH8 (NM_001371.1,7522-7540).
cggaatattcatcaatttt

SEQ ID NO: 80107 - DNA, 19 bp, Homo sapiens
  siRNA target sequence for DNAH8 (NM_001371.1,7577-7595).
gatagacaccattgcaaaa

SEQ ID NO: 80108 - DNA, 19 bp, Homo sapiens
  siRNA target sequence for DNAH8 (NM_001371.1,7625-7643).
gcagggaactgcaaaaact

SEQ ID NO: 80109 - DNA, 19 bp, Homo sapiens
  siRNA target sequence for DNAH8 (NM_001371.1,7689-7707).
ctatccaaaagtctaaact

SEQ ID NO: 80110 - DNA, 19 bp, Homo sapiens
  siRNA target sequence for DNAH8 (NM_001371.1,7720-7738).
cagaaccaatgatgtttca

SEQ ID NO: 80111 - DNA, 19 bp, Homo sapiens
  siRNA target sequence for DNAH8 (NM_001371.1,7758-7776).
gtggataagcgaattggaa

SEQ ID NO: 80112 - DNA, 19 bp, Homo sapiens
  siRNA target sequence for DNAH8 (NM_001371.1,7766-7784).
gcgaattggaagcacatat

SEQ ID NO: 80113 - DNA, 19 bp, Homo sapiens
  siRNA target sequence for DNAH8 (NM_001371.1,7853-7871).
gggagatcagataactaat

SEQ ID NO: 80114 - DNA, 19 bp, Homo sapiens
  siRNA target sequence for DNAH8 (NM_001371.1,7923-7941).
cctggagacttcactacta

SEQ ID NO: 80115 - DNA, 19 bp, Homo sapiens
  siRNA target sequence for DNAH8 (NM_001371.1,7927-7945).
gagacttcactactattgt

SEQ ID NO: 80116 - DNA, 19 bp, Homo sapiens
  siRNA target sequence for DNAH8 (NM_001371.1,7931-7949).
cttcactactattgttgat

SEQ ID NO: 80117 - DNA, 19 bp, Homo sapiens
  siRNA target sequence for DNAH8 (NM_001371.1,7976-7994).
ccctggaggtggtcgaaat

SEQ ID NO: 80118 - DNA, 19 bp, Homo sapiens
  siRNA target sequence for DNAH8 (NM_001371.1,7981-7999).
gaggtggtcgaaatgatat

SEQ ID NO: 80119 - DNA, 19 bp, Homo sapiens
  siRNA target sequence for DNAH8 (NM_001371.1,7995-8013).
gatattccacaacgtttaa

SEQ ID NO: 80120 - DNA, 19 bp, Homo sapiens
  siRNA target sequence for DNAH8 (NM_001371.1,8050-8068).
caaatgcttcaatagacaa

SEQ ID NO: 80121 - DNA, 19 bp, Homo sapiens
  siRNA target sequence for DNAH8 (NM_001371.1,8055-8073).
gcttcaatagacaaaattt

SEQ ID NO: 80122 - DNA, 19 bp, Homo sapiens
  siRNA target sequence for DNAH8 (NM_001371.1,8100-8118).
gatccttgtagaagtttca

SEQ ID NO: 80123 - DNA, 19 bp, Homo sapiens
  siRNA target sequence for DNAH8 (NM_001371.1,8195-8213).
gctgccaactccttctaaa

SEQ ID NO: 80124 - DNA, 19 bp, Homo sapiens
  siRNA target sequence for DNAH8 (NM_001371.1,8203-8221).
ctccttctaaatttcatta

SEQ ID NO: 80125 - DNA, 19 bp, Homo sapiens
  siRNA target sequence for DNAH8 (NM_001371.1,8235-8253).
cgagatctttccagaattt

SEQ ID NO: 80126 - DNA, 19 bp, Homo sapiens
  siRNA target sequence for DNAH8 (NM_001371.1,8322-8340).
cacgagtgcagcagagtaa

SEQ ID NO: 80127 - DNA, 19 bp, Homo sapiens
  siRNA target sequence for DNAH8 (NM_001371.1,8337-8355).
gtaattgcagacagattta

SEQ ID NO: 80128 - DNA, 19 bp, Homo sapiens
  siRNA target sequence for DNAH8 (NM_001371.1,8585-8603).
ccagagacagttcaatgaa

SEQ ID NO: 80129 - DNA, 19 bp, Homo sapiens
  siRNA target sequence for DNAH8 (NM_001371.1,8586-8604).
cagagacagttcaatgaaa

SEQ ID NO: 80130 - DNA, 19 bp, Homo sapiens
  siRNA target sequence for DNAH8 (NM_001371.1,8606-8624).
cattagaggaacatctctt

SEQ ID NO: 80131 - DNA, 19 bp, Homo sapiens
  siRNA target sequence for DNAH8 (NM_001371.1,8611-8629).
gaggaacatctcttgatct

SEQ ID NO: 80132 - DNA, 19 bp, Homo sapiens
  siRNA target sequence for DNAH8 (NM_001371.1,8651-8669).
gactcatcttattaagatt

SEQ ID NO: 80133 - DNA, 19 bp, Homo sapiens
  siRNA target sequence for DNAH8 (NM_001371.1,8666-8684).
gatttcacgaataattcga

SEQ ID NO: 80134 - DNA, 19 bp, Homo sapiens
  siRNA target sequence for DNAH8 (NM_001371.1,8686-8704).
cgtcgtgtggaaatgcatt

SEQ ID NO: 80135 - DNA, 19 bp, Homo sapiens
  siRNA target sequence for DNAH8 (NM_001371.1,8722-8740).
gttccggaaaacaaagtct

SEQ ID NO: 80136 - DNA, 19 bp, Homo sapiens
  siRNA target sequence for DNAH8 (NM_001371.1,8810-8828).
gactaatctaacagatgat

SEQ ID NO: 80137 - DNA, 19 bp, Homo sapiens
  siRNA target sequence for DNAH8 (NM_001371.1,8812-8830).
ctaatctaacagatgattt

SEQ ID NO: 80138 - DNA, 19 bp, Homo sapiens
  siRNA target sequence for DNAH8 (NM_001371.1,8859-8877).
gatggaaaaggcatcactt

SEQ ID NO: 80139 - DNA, 19 bp, Homo sapiens
  siRNA target sequence for DNAH8 (NM_001371.1,8882-8900).
ctttactgacagtgaaata

SEQ ID NO: 80140 - DNA, 19 bp, Homo sapiens
  siRNA target sequence for DNAH8 (NM_001371.1,8904-8922).
gatgaggcatttctagaat

SEQ ID NO: 80141 - DNA, 19 bp, Homo sapiens
  siRNA target sequence for DNAH8 (NM_001371.1,8916-8934).
ctagaataccttaacaact

SEQ ID NO: 80142 - DNA, 19 bp, Homo sapiens
  siRNA target sequence for DNAH8 (NM_001371.1,9076-9094).
gatcaaggaagaacttaca

SEQ ID NO: 80143 - DNA, 19 bp, Homo sapiens
  siRNA target sequence for DNAH8 (NM_001371.1,9093-9111).
catgttgttctctgctttt

SEQ ID NO: 80144 - DNA, 19 bp, Homo sapiens
  siRNA target sequence for DNAH8 (NM_001371.1,9131-9149).
ccgtgcccgttctttgaaa

SEQ ID NO: 80145 - DNA, 19 bp, Homo sapiens
  siRNA target sequence for DNAH8 (NM_001371.1,9132-9150).
cgtgcccgttctttgaaat

SEQ ID NO: 80146 - DNA, 19 bp, Homo sapiens
  siRNA target sequence for DNAH8 (NM_001371.1,9133-9151).
gtgcccgttctttgaaatt

SEQ ID NO: 80147 - DNA, 19 bp, Homo sapiens
  siRNA target sequence for DNAH8 (NM_001371.1,9137-9155).
ccgttctttgaaatttcct

SEQ ID NO: 80148 - DNA, 19 bp, Homo sapiens
  siRNA target sequence for DNAH8 (NM_001371.1,9233-9251).
cctttcagactataatatt

SEQ ID NO: 80149 - DNA, 19 bp, Homo sapiens
  siRNA target sequence for DNAH8 (NM_001371.1,9252-9270).
gtctgctctagtgaaatta

SEQ ID NO: 80150 - DNA, 19 bp, Homo sapiens
  siRNA target sequence for DNAH8 (NM_001371.1,9257-9275).
ctctagtgaaattaaaaga

SEQ ID NO: 80151 - DNA, 19 bp, Homo sapiens
  siRNA target sequence for DNAH8 (NM_001371.1,9289-9307).
caatgggcctgtttcatga

SEQ ID NO: 80152 - DNA, 19 bp, Homo sapiens
  siRNA target sequence for DNAH8 (NM_001371.1,9380-9398).
cctctcatttataaatggt

SEQ ID NO: 80153 - DNA, 19 bp, Homo sapiens
  siRNA target sequence for DNAH8 (NM_001371.1,9441-9459).
caggctgaacgtatgaata

SEQ ID NO: 80154 - DNA, 19 bp, Homo sapiens
  siRNA target sequence for DNAH8 (NM_001371.1,9455-9473).
gaatattggtcttgataaa

SEQ ID NO: 80155 - DNA, 19 bp, Homo sapiens
  siRNA target sequence for DNAH8 (NM_001371.1,9463-9481).
gtcttgataaactaatgga

SEQ ID NO: 80156 - DNA, 19 bp, Homo sapiens
  siRNA target sequence for DNAH8 (NM_001371.1,9596-9614).
ggcttcagccaaaattaaa

SEQ ID NO: 80157 - DNA, 19 bp, Homo sapiens
  siRNA target sequence for DNAH8 (NM_001371.1,9597-9615).
gcttcagccaaaattaaaa

SEQ ID NO: 80158 - DNA, 19 bp, Homo sapiens
  siRNA target sequence for DNAH8 (NM_001371.1,9692-9710).
caagcttgaggcagctaaa

SEQ ID NO: 80159 - DNA, 19 bp, Homo sapiens
  siRNA target sequence for DNAH8 (NM_001371.1,9732-9750).
gcagccctgaatactatca

SEQ ID NO: 80160 - DNA, 19 bp, Homo sapiens
  siRNA target sequence for DNAH8 (NM_001371.1,9745-9763).
ctatcaagccaaatgatat

SEQ ID NO: 80161 - DNA, 19 bp, Homo sapiens
  siRNA target sequence for DNAH8 (NM_001371.1,9815-9833).
ggactgtgttctgttacta

SEQ ID NO: 80162 - DNA, 19 bp, Homo sapiens
  siRNA target sequence for DNAH8 (NM_001371.1,9816-9834).
gactgtgttctgttactat

SEQ ID NO: 80163 - DNA, 19 bp, Homo sapiens
  siRNA target sequence for DNAH8 (NM_001371.1,9820-9838).
gtgttctgttactatttca

SEQ ID NO: 80164 - DNA, 19 bp, Homo sapiens
  siRNA target sequence for DNAH8 (NM_001371.1,9889-9907).
catcatggggagagtcatt

SEQ ID NO: 80165 - DNA, 19 bp, Homo sapiens
  siRNA target sequence for DNAH8 (NM_001371.1,9892-9910).
catggggagagtcattaaa

SEQ ID NO: 80166 - DNA, 19 bp, Homo sapiens
  siRNA target sequence for DNAH8 (NM_001371.1,9895-9913).
ggggagagtcattaaagtt

SEQ ID NO: 80167 - DNA, 19 bp, Homo sapiens
  siRNA target sequence for DNAH8 (NM_001371.1,9897-9915).
ggagagtcattaaagttga

SEQ ID NO: 80168 - DNA, 19 bp, Homo sapiens
  siRNA target sequence for DNAH8 (NM_001371.1,9898-9916).
gagagtcattaaagttgat

SEQ ID NO: 80169 - DNA, 19 bp, Homo sapiens
  siRNA target sequence for DNAH8 (NM_001371.1,9950-9968).
gttccctaaggacactata

SEQ ID NO: 80170 - DNA, 19 bp, Homo sapiens
  siRNA target sequence for DNAH8 (NM_001371.1,9953-9971).
ccctaaggacactataaat

SEQ ID NO: 80171 - DNA, 19 bp, Homo sapiens
  siRNA target sequence for DNAH8 (NM_001371.1,9990-10008).
ctacagccatattttaata

SEQ ID NO: 80172 - DNA, 19 bp, Homo sapiens
  siRNA target sequence for DNAH8 (NM_001371.1,10075-10093).
cacttgctatggcaatatt

SEQ ID NO: 80173 - DNA, 19 bp, Homo sapiens
  siRNA target sequence for DNAH8 (NM_001371.1,10150-10168).
gccggttagcagttgctaa

SEQ ID NO: 80174 - DNA, 19 bp, Homo sapiens
  siRNA target sequence for DNAH8 (NM_001371.1,10151-10169).
ccggttagcagttgctaat

SEQ ID NO: 80175 - DNA, 19 bp, Homo sapiens
  siRNA target sequence for DNAH8 (NM_001371.1,10282-10300).
ctgatacgtgccggaaaaa

SEQ ID NO: 80176 - DNA, 19 bp, Homo sapiens
  siRNA target sequence for DNAH8 (NM_001371.1,10284-10302).
gatacgtgccggaaaaaga

SEQ ID NO: 80177 - DNA, 19 bp, Homo sapiens
  siRNA target sequence for DNAH8 (NM_001371.1,10350-10368).
cggtggacccagcaaagta

SEQ ID NO: 80178 - DNA, 19 bp, Homo sapiens
  siRNA target sequence for DNAH8 (NM_001371.1,10351-10369).
ggtggacccagcaaagtaa

SEQ ID NO: 80179 - DNA, 19 bp, Homo sapiens
  siRNA target sequence for DNAH8 (NM_001371.1,10352-10370).
gtggacccagcaaagtaaa

SEQ ID NO: 80180 - DNA, 19 bp, Homo sapiens
  siRNA target sequence for DNAH8 (NM_001371.1,10393-10411).
gacttgtaggtgatattct

SEQ ID NO: 80181 - DNA, 19 bp, Homo sapiens
  siRNA target sequence for DNAH8 (NM_001371.1,10417-10435).
gcacgggattcctttccta

SEQ ID NO: 80182 - DNA, 19 bp, Homo sapiens
  siRNA target sequence for DNAH8 (NM_001371.1,10437-10455).
cttggtcctttcaatcaga

SEQ ID NO: 80183 - DNA, 19 bp, Homo sapiens
  siRNA target sequence for DNAH8 (NM_001371.1,10440-10458).
ggtcctttcaatcagatat

SEQ ID NO: 80184 - DNA, 19 bp, Homo sapiens
  siRNA target sequence for DNAH8 (NM_001371.1,10443-10461).
cctttcaatcagatattta

SEQ ID NO: 80185 - DNA, 19 bp, Homo sapiens
  siRNA target sequence for DNAH8 (NM_001371.1,10466-10484).
ctatttgcttaaagatcaa

SEQ ID NO: 80186 - DNA, 19 bp, Homo sapiens
  siRNA target sequence for DNAH8 (NM_001371.1,10496-10514).
gttgagagcacggaaaatt

SEQ ID NO: 80187 - DNA, 19 bp, Homo sapiens
  siRNA target sequence for DNAH8 (NM_001371.1,10499-10517).
gagagcacggaaaattcct

SEQ ID NO: 80188 - DNA, 19 bp, Homo sapiens
  siRNA target sequence for DNAH8 (NM_001371.1,10501-10519).
gagcacggaaaattccttt

SEQ ID NO: 80189 - DNA, 19 bp, Homo sapiens
  siRNA target sequence for DNAH8 (NM_001371.1,10530-10548).
ctgaatcttatttcaatgt

SEQ ID NO: 80190 - DNA, 19 bp, Homo sapiens
  siRNA target sequence for DNAH8 (NM_001371.1,10550-10568).
ggtggatcctccaactatt

SEQ ID NO: 80191 - DNA, 19 bp, Homo sapiens
  siRNA target sequence for DNAH8 (NM_001371.1,10577-10595).
ggggctacagggattacca

SEQ ID NO: 80192 - DNA, 19 bp, Homo sapiens
  siRNA target sequence for DNAH8 (NM_001371.1,10588-10606).
gattaccaggagatgatct

SEQ ID NO: 80193 - DNA, 19 bp, Homo sapiens
  siRNA target sequence for DNAH8 (NM_001371.1,10599-10617).
gatgatctctcaattcaga

SEQ ID NO: 80194 - DNA, 19 bp, Homo sapiens
  siRNA target sequence for DNAH8 (NM_001371.1,10655-10673).
cctcatagacccacaaact

SEQ ID NO: 80195 - DNA, 19 bp, Homo sapiens
  siRNA target sequence for DNAH8 (NM_001371.1,10658-10676).
catagacccacaaactcaa

SEQ ID NO: 80196 - DNA, 19 bp, Homo sapiens
  siRNA target sequence for DNAH8 (NM_001371.1,10674-10692).
caaggcaaaacttggatta

SEQ ID NO: 80197 - DNA, 19 bp, Homo sapiens
  siRNA target sequence for DNAH8 (NM_001371.1,10778-10796).
gggccgaccccttctcatt

SEQ ID NO: 80198 - DNA, 19 bp, Homo sapiens
  siRNA target sequence for DNAH8 (NM_001371.1,10780-10798).
gccgaccccttctcattga

SEQ ID NO: 80199 - DNA, 19 bp, Homo sapiens
  siRNA target sequence for DNAH8 (NM_001371.1,10867-10885).
ccactttcaaggtgaaagt

SEQ ID NO: 80200 - DNA, 19 bp, Homo sapiens
  siRNA target sequence for DNAH8 (NM_001371.1,10886-10904).
cggtgataaggaatgtgat

SEQ ID NO: 80201 - DNA, 19 bp, Homo sapiens
  siRNA target sequence for DNAH8 (NM_001371.1,10902-10920).
gatatcatggatacattta

SEQ ID NO: 80202 - DNA, 19 bp, Homo sapiens
  siRNA target sequence for DNAH8 (NM_001371.1,10960-10978).
ccccagagattaatgctaa

SEQ ID NO: 80203 - DNA, 19 bp, Homo sapiens
  siRNA target sequence for DNAH8 (NM_001371.1,10975-10993).
ctaaaacgtcagtcattga

SEQ ID NO: 80204 - DNA, 19 bp, Homo sapiens
  siRNA target sequence for DNAH8 (NM_001371.1,11014-11032).
gacttgagaatcagttact

SEQ ID NO: 80205 - DNA, 19 bp, Homo sapiens
  siRNA target sequence for DNAH8 (NM_001371.1,11016-11034).
cttgagaatcagttactaa

SEQ ID NO: 80206 - DNA, 19 bp, Homo sapiens
  siRNA target sequence for DNAH8 (NM_001371.1,11069-11087).
ggctgagagggttaaactt

SEQ ID NO: 80207 - DNA, 19 bp, Homo sapiens
  siRNA target sequence for DNAH8 (NM_001371.1,11070-11088).
gctgagagggttaaacttt

SEQ ID NO: 80208 - DNA, 19 bp, Homo sapiens
  siRNA target sequence for DNAH8 (NM_001371.1,11130-11148).
gaagataacctcctctata

SEQ ID NO: 80209 - DNA, 19 bp, Homo sapiens
  siRNA target sequence for DNAH8 (NM_001371.1,11221-11239).
cagcagctgaggtaagtga

SEQ ID NO: 80210 - DNA, 19 bp, Homo sapiens
  siRNA target sequence for DNAH8 (NM_001371.1,11226-11244).
gctgaggtaagtgaaaagt

SEQ ID NO: 80211 - DNA, 19 bp, Homo sapiens
  siRNA target sequence for DNAH8 (NM_001371.1,11227-11245).
ctgaggtaagtgaaaagtt

SEQ ID NO: 80212 - DNA, 19 bp, Homo sapiens
  siRNA target sequence for DNAH8 (NM_001371.1,11350-11368).
gcatggtcaacatcatgta

SEQ ID NO: 80213 - DNA, 19 bp, Homo sapiens
  siRNA target sequence for DNAH8 (NM_001371.1,11351-11369).
catggtcaacatcatgtat

SEQ ID NO: 80214 - DNA, 19 bp, Homo sapiens
  siRNA target sequence for DNAH8 (NM_001371.1,11374-11392).
cgtcattggcccagttctt

SEQ ID NO: 80215 - DNA, 19 bp, Homo sapiens
  siRNA target sequence for DNAH8 (NM_001371.1,11377-11395).
cattggcccagttcttgaa

SEQ ID NO: 80216 - DNA, 19 bp, Homo sapiens
  siRNA target sequence for DNAH8 (NM_001371.1,11382-11400).
gcccagttcttgaagttat

SEQ ID NO: 80217 - DNA, 19 bp, Homo sapiens
  siRNA target sequence for DNAH8 (NM_001371.1,11436-11454).
ctacctcaaaagagaatta

SEQ ID NO: 80218 - DNA, 19 bp, Homo sapiens
  siRNA target sequence for DNAH8 (NM_001371.1,11439-11457).
cctcaaaagagaattacaa

SEQ ID NO: 80219 - DNA, 19 bp, Homo sapiens
  siRNA target sequence for DNAH8 (NM_001371.1,11449-11467).
gaattacaaatattatcga

SEQ ID NO: 80220 - DNA, 19 bp, Homo sapiens
  siRNA target sequence for DNAH8 (NM_001371.1,11468-11486).
gtacctgacatatgaagtt

SEQ ID NO: 80221 - DNA, 19 bp, Homo sapiens
  siRNA target sequence for DNAH8 (NM_001371.1,11471-11489).
cctgacatatgaagttttt

SEQ ID NO: 80222 - DNA, 19 bp, Homo sapiens
  siRNA target sequence for DNAH8 (NM_001371.1,11497-11515).
ctgtcagaggcctatacga

SEQ ID NO: 80223 - DNA, 19 bp, Homo sapiens
  siRNA target sequence for DNAH8 (NM_001371.1,11499-11517).
gtcagaggcctatacgaaa

SEQ ID NO: 80224 - DNA, 19 bp, Homo sapiens
  siRNA target sequence for DNAH8 (NM_001371.1,11508-11526).
ctatacgaaaaccacaaat

SEQ ID NO: 80225 - DNA, 19 bp, Homo sapiens
  siRNA target sequence for DNAH8 (NM_001371.1,11535-11553).
gtactcctcatgaccttaa

SEQ ID NO: 80226 - DNA, 19 bp, Homo sapiens
  siRNA target sequence for DNAH8 (NM_001371.1,11562-11580).
cttcagagagggacagtta

SEQ ID NO: 80227 - DNA, 19 bp, Homo sapiens
  siRNA target sequence for DNAH8 (NM_001371.1,11726-11744).
gaaccagatatctcgtaat

SEQ ID NO: 80228 - DNA, 19 bp, Homo sapiens
  siRNA target sequence for DNAH8 (NM_001371.1,11730-11748).
cagatatctcgtaatgaga

SEQ ID NO: 80229 - DNA, 19 bp, Homo sapiens
  siRNA target sequence for DNAH8 (NM_001371.1,11798-11816).
ccctgatggatataatgat

SEQ ID NO: 80230 - DNA, 19 bp, Homo sapiens
  siRNA target sequence for DNAH8 (NM_001371.1,11799-11817).
cctgatggatataatgatt

SEQ ID NO: 80231 - DNA, 19 bp, Homo sapiens
  siRNA target sequence for DNAH8 (NM_001371.1,11827-11845).
cctgccataaacttttact

SEQ ID NO: 80232 - DNA, 19 bp, Homo sapiens
  siRNA target sequence for DNAH8 (NM_001371.1,11830-11848).
gccataaacttttacttat

SEQ ID NO: 80233 - DNA, 19 bp, Homo sapiens
  siRNA target sequence for DNAH8 (NM_001371.1,11832-11850).
cataaacttttacttatca

SEQ ID NO: 80234 - DNA, 19 bp, Homo sapiens
  siRNA target sequence for DNAH8 (NM_001371.1,11858-11876).
gtgcccagaccgtactgtt

SEQ ID NO: 80235 - DNA, 19 bp, Homo sapiens
  siRNA target sequence for DNAH8 (NM_001371.1,11860-11878).
gcccagaccgtactgtttt

SEQ ID NO: 80236 - DNA, 19 bp, Homo sapiens
  siRNA target sequence for DNAH8 (NM_001371.1,11861-11879).
cccagaccgtactgttttt

SEQ ID NO: 80237 - DNA, 19 bp, Homo sapiens
  siRNA target sequence for DNAH8 (NM_001371.1,11863-11881).
cagaccgtactgtttttca

SEQ ID NO: 80238 - DNA, 19 bp, Homo sapiens
  siRNA target sequence for DNAH8 (NM_001371.1,11921-11939).
cacagaaccagttatctta

SEQ ID NO: 80239 - DNA, 19 bp, Homo sapiens
  siRNA target sequence for DNAH8 (NM_001371.1,11923-11941).
cagaaccagttatcttaaa

SEQ ID NO: 80240 - DNA, 19 bp, Homo sapiens
  siRNA target sequence for DNAH8 (NM_001371.1,11973-11991).
cggacacctctgatatgct

SEQ ID NO: 80241 - DNA, 19 bp, Homo sapiens
  siRNA target sequence for DNAH8 (NM_001371.1,11974-11992).
ggacacctctgatatgctt

SEQ ID NO: 80242 - DNA, 19 bp, Homo sapiens
  siRNA target sequence for DNAH8 (NM_001371.1,12011-12029).
ccccaccaatcaaattgat

SEQ ID NO: 80243 - DNA, 19 bp, Homo sapiens
  siRNA target sequence for DNAH8 (NM_001371.1,12016-12034).
ccaatcaaattgatgcatt

SEQ ID NO: 80244 - DNA, 19 bp, Homo sapiens
  siRNA target sequence for DNAH8 (NM_001371.1,12030-12048).
gcattggccaagaaactga

SEQ ID NO: 80245 - DNA, 19 bp, Homo sapiens
  siRNA target sequence for DNAH8 (NM_001371.1,12045-12063).
ctgaaactggaatgtagaa

SEQ ID NO: 80246 - DNA, 19 bp, Homo sapiens
  siRNA target sequence for DNAH8 (NM_001371.1,12051-12069).
ctggaatgtagaactatct

SEQ ID NO: 80247 - DNA, 19 bp, Homo sapiens
  siRNA target sequence for DNAH8 (NM_001371.1,12096-12114).
gctcgaaagctgattcaga

SEQ ID NO: 80248 - DNA, 19 bp, Homo sapiens
  siRNA target sequence for DNAH8 (NM_001371.1,12097-12115).
ctcgaaagctgattcagat

SEQ ID NO: 80249 - DNA, 19 bp, Homo sapiens
  siRNA target sequence for DNAH8 (NM_001371.1,12125-12143).
gcagggtggttgggtatta

SEQ ID NO: 80250 - DNA, 19 bp, Homo sapiens
  siRNA target sequence for DNAH8 (NM_001371.1,12128-12146).
gggtggttgggtattacta

SEQ ID NO: 80251 - DNA, 19 bp, Homo sapiens
  siRNA target sequence for DNAH8 (NM_001371.1,12130-12148).
gtggttgggtattactaca

SEQ ID NO: 80252 - DNA, 19 bp, Homo sapiens
  siRNA target sequence for DNAH8 (NM_001371.1,12133-12151).
gttgggtattactacaaaa

SEQ ID NO: 80253 - DNA, 19 bp, Homo sapiens
  siRNA target sequence for DNAH8 (NM_001371.1,12165-12183).
ctggaattcatggaagaat

SEQ ID NO: 80254 - DNA, 19 bp, Homo sapiens
  siRNA target sequence for DNAH8 (NM_001371.1,12186-12204).
ctagagacgctaattacca

SEQ ID NO: 80255 - DNA, 19 bp, Homo sapiens
  siRNA target sequence for DNAH8 (NM_001371.1,12207-12225).
gaagccagtgatgattctt

SEQ ID NO: 80256 - DNA, 19 bp, Homo sapiens
  siRNA target sequence for DNAH8 (NM_001371.1,12244-12262).
cggagccccatgatcgatt

SEQ ID NO: 80257 - DNA, 19 bp, Homo sapiens
  siRNA target sequence for DNAH8 (NM_001371.1,12250-12268).
cccatgatcgatttccaat

SEQ ID NO: 80258 - DNA, 19 bp, Homo sapiens
  siRNA target sequence for DNAH8 (NM_001371.1,12251-12269).
ccatgatcgatttccaatt

SEQ ID NO: 80259 - DNA, 19 bp, Homo sapiens
  siRNA target sequence for DNAH8 (NM_001371.1,12252-12270).
catgatcgatttccaatta

SEQ ID NO: 80260 - DNA, 19 bp, Homo sapiens
  siRNA target sequence for DNAH8 (NM_001371.1,12255-12273).
gatcgatttccaattacat

SEQ ID NO: 80261 - DNA, 19 bp, Homo sapiens
  siRNA target sequence for DNAH8 (NM_001371.1,12275-12293).
gcttcagacctctctcaaa

SEQ ID NO: 80262 - DNA, 19 bp, Homo sapiens
  siRNA target sequence for DNAH8 (NM_001371.1,12281-12299).
gacctctctcaaattcact

SEQ ID NO: 80263 - DNA, 19 bp, Homo sapiens
  siRNA target sequence for DNAH8 (NM_001371.1,12284-12302).
ctctctcaaattcactaat

SEQ ID NO: 80264 - DNA, 19 bp, Homo sapiens
  siRNA target sequence for DNAH8 (NM_001371.1,12316-12334).
gtgtacgcgcaggtttgaa

SEQ ID NO: 80265 - DNA, 19 bp, Homo sapiens
  siRNA target sequence for DNAH8 (NM_001371.1,12323-12341).
cgcaggtttgaaaagaaca

SEQ ID NO: 80266 - DNA, 19 bp, Homo sapiens
  siRNA target sequence for DNAH8 (NM_001371.1,12337-12355).
gaacatttgctggaattaa

SEQ ID NO: 80267 - DNA, 19 bp, Homo sapiens
  siRNA target sequence for DNAH8 (NM_001371.1,12392-12410).
gaagccgatgctttacaca

SEQ ID NO: 80268 - DNA, 19 bp, Homo sapiens
  siRNA target sequence for DNAH8 (NM_001371.1,12401-12419).
gctttacacagtagcattt

SEQ ID NO: 80269 - DNA, 19 bp, Homo sapiens
  siRNA target sequence for DNAH8 (NM_001371.1,12402-12420).
ctttacacagtagcatttt

SEQ ID NO: 80270 - DNA, 19 bp, Homo sapiens
  siRNA target sequence for DNAH8 (NM_001371.1,12432-12450).
gtgcaggagcgacgaaaat

SEQ ID NO: 80271 - DNA, 19 bp, Homo sapiens
  siRNA target sequence for DNAH8 (NM_001371.1,12485-12503).
caattctgctgacttttca

SEQ ID NO: 80272 - DNA, 19 bp, Homo sapiens
  siRNA target sequence for DNAH8 (NM_001371.1,12502-12520).
cagccagtgttcagtttat

SEQ ID NO: 80273 - DNA, 19 bp, Homo sapiens
  siRNA target sequence for DNAH8 (NM_001371.1,12534-12552).
gatgaatgcgatattaaga

SEQ ID NO: 80274 - DNA, 19 bp, Homo sapiens
  siRNA target sequence for DNAH8 (NM_001371.1,12581-12599).
catgatcggagaagtacaa

SEQ ID NO: 80275 - DNA, 19 bp, Homo sapiens
  siRNA target sequence for DNAH8 (NM_001371.1,12584-12602).
gatcggagaagtacaatat

SEQ ID NO: 80276 - DNA, 19 bp, Homo sapiens
  siRNA target sequence for DNAH8 (NM_001371.1,12610-12628).
gagtgacagatgactttga

SEQ ID NO: 80277 - DNA, 19 bp, Homo sapiens
  siRNA target sequence for DNAH8 (NM_001371.1,12623-12641).
ctttgacaaacgtctactt

SEQ ID NO: 80278 - DNA, 19 bp, Homo sapiens
  siRNA target sequence for DNAH8 (NM_001371.1,12627-12645).
gacaaacgtctacttaatt

SEQ ID NO: 80279 - DNA, 19 bp, Homo sapiens
  siRNA target sequence for DNAH8 (NM_001371.1,12681-12699).
gaaccgtcattctgctttt

SEQ ID NO: 80280 - DNA, 19 bp, Homo sapiens
  siRNA target sequence for DNAH8 (NM_001371.1,12684-12702).
ccgtcattctgcttttata

SEQ ID NO: 80281 - DNA, 19 bp, Homo sapiens
  siRNA target sequence for DNAH8 (NM_001371.1,12686-12704).
gtcattctgcttttatact

SEQ ID NO: 80282 - DNA, 19 bp, Homo sapiens
  siRNA target sequence for DNAH8 (NM_001371.1,12807-12825).
gctgatatcacgtatcaga

SEQ ID NO: 80283 - DNA, 19 bp, Homo sapiens
  siRNA target sequence for DNAH8 (NM_001371.1,12815-12833).
cacgtatcagagtaacact

SEQ ID NO: 80284 - DNA, 19 bp, Homo sapiens
  siRNA target sequence for DNAH8 (NM_001371.1,12903-12921).
cgggaggctattgtttata

SEQ ID NO: 80285 - DNA, 19 bp, Homo sapiens
  siRNA target sequence for DNAH8 (NM_001371.1,12908-12926).
ggctattgtttatagatta

SEQ ID NO: 80286 - DNA, 19 bp, Homo sapiens
  siRNA target sequence for DNAH8 (NM_001371.1,12943-12961).
gtaaactccctcctgatta

SEQ ID NO: 80287 - DNA, 19 bp, Homo sapiens
  siRNA target sequence for DNAH8 (NM_001371.1,13075-13093).
gtagcctgagtgatctaaa

SEQ ID NO: 80288 - DNA, 19 bp, Homo sapiens
  siRNA target sequence for DNAH8 (NM_001371.1,13151-13169).
catgtatgatgctcgtata

SEQ ID NO: 80289 - DNA, 19 bp, Homo sapiens
  siRNA target sequence for DNAH8 (NM_001371.1,13154-13172).
gtatgatgctcgtatacct

SEQ ID NO: 80290 - DNA, 19 bp, Homo sapiens
  siRNA target sequence for DNAH8 (NM_001371.1,13219-13237).
ggttcactgaacttttgga

SEQ ID NO: 80291 - DNA, 19 bp, Homo sapiens
  siRNA target sequence for DNAH8 (NM_001371.1,13235-13253).
ggaaagaaatgctcagttt

SEQ ID NO: 80292 - DNA, 19 bp, Homo sapiens
  siRNA target sequence for DNAH8 (NM_001371.1,13250-13268).
gttttctacgtggatattt

SEQ ID NO: 80293 - DNA, 19 bp, Homo sapiens
  siRNA target sequence for DNAH8 (NM_001371.1,13269-13287).
gaagggaggcctaatgtgt

SEQ ID NO: 80294 - DNA, 19 bp, Homo sapiens
  siRNA target sequence for DNAH8 (NM_001371.1,13384-13402).
ccatccacaatgaagttct

SEQ ID NO: 80295 - DNA, 19 bp, Homo sapiens
  siRNA target sequence for DNAH8 (NM_001371.1,13434-13452).
cctggggaaggtgtgtata

SEQ ID NO: 80296 - DNA, 19 bp, Homo sapiens
  siRNA target sequence for DNAH8 (NM_001371.1,13435-13453).
ctggggaaggtgtgtatat

SEQ ID NO: 80297 - DNA, 19 bp, Homo sapiens
  siRNA target sequence for DNAH8 (NM_001371.1,13592-13610).
gctgtatgtgtgtcctatt

SEQ ID NO: 80298 - DNA, 19 bp, Homo sapiens
  siRNA target sequence for DNAH8 (NM_001371.1,13593-13611).
ctgtatgtgtgtcctattt

SEQ ID NO: 80299 - DNA, 19 bp, Homo sapiens
  siRNA target sequence for DNAH8 (NM_001371.1,13599-13617).
gtgtgtcctatttacaaga

SEQ ID NO: 80300 - DNA, 19 bp, Homo sapiens
  siRNA target sequence for DNAH8 (NM_001371.1,13620-13638).
cccaggcgaactgatttga

SEQ ID NO: 80301 - DNA, 19 bp, Homo sapiens
  siRNA target sequence for DNAH8 (NM_001371.1,13643-13661).
catcactgtggtatattta

SEQ ID NO: 80302 - DNA, 19 bp, Homo sapiens
  siRNA target sequence for DNAH8 (NM_001371.1,13646-13664).
cactgtggtatatttacga

SEQ ID NO: 80303 - DNA, 19 bp, Homo sapiens
  siRNA target sequence for DNAH9 (NM_001372.2,357-375).
ggcgctaaggcgctttttt

SEQ ID NO: 80304 - DNA, 19 bp, Homo sapiens
  siRNA target sequence for DNAH9 (NM_001372.2,358-376).
gcgctaaggcgcttttttt

SEQ ID NO: 80305 - DNA, 19 bp, Homo sapiens
  siRNA target sequence for DNAH9 (NM_001372.2,476-494).
gttctcggaggttgttcta

SEQ ID NO: 80306 - DNA, 19 bp, Homo sapiens
  siRNA target sequence for DNAH9 (NM_001372.2,527-545).
ctggccccacatgatatgt

SEQ ID NO: 80307 - DNA, 19 bp, Homo sapiens
  siRNA target sequence for DNAH9 (NM_001372.2,529-547).
ggccccacatgatatgtga

SEQ ID NO: 80308 - DNA, 19 bp, Homo sapiens
  siRNA target sequence for DNAH9 (NM_001372.2,634-652).
cagcaggctcagaaaaaat

SEQ ID NO: 80309 - DNA, 19 bp, Homo sapiens
  siRNA target sequence for DNAH9 (NM_001372.2,656-674).
gtttgcggattccaaaagt

SEQ ID NO: 80310 - DNA, 19 bp, Homo sapiens
  siRNA target sequence for DNAH9 (NM_001372.2,677-695).
gacagtcttggattctata

SEQ ID NO: 80311 - DNA, 19 bp, Homo sapiens
  siRNA target sequence for DNAH9 (NM_001372.2,681-699).
gtcttggattctatagata

SEQ ID NO: 80312 - DNA, 19 bp, Homo sapiens
  siRNA target sequence for DNAH9 (NM_001372.2,686-704).
ggattctatagataagtca

SEQ ID NO: 80313 - DNA, 19 bp, Homo sapiens
  siRNA target sequence for DNAH9 (NM_001372.2,720-738).
gagtctgcagtgatcaaat

SEQ ID NO: 80314 - DNA, 19 bp, Homo sapiens
  siRNA target sequence for DNAH9 (NM_001372.2,949-967).
ccatgtacagagatgttgt

SEQ ID NO: 80315 - DNA, 19 bp, Homo sapiens
  siRNA target sequence for DNAH9 (NM_001372.2,1086-1104).
cacgtggtctgtctgattt

SEQ ID NO: 80316 - DNA, 19 bp, Homo sapiens
  siRNA target sequence for DNAH9 (NM_001372.2,1175-1193).
catccagcaggcctctaat

SEQ ID NO: 80317 - DNA, 19 bp, Homo sapiens
  siRNA target sequence for DNAH9 (NM_001372.2,1254-1272).
gtggtctcagacactttga

SEQ ID NO: 80318 - DNA, 19 bp, Homo sapiens
  siRNA target sequence for DNAH9 (NM_001372.2,1303-1321).
gggagaatctccacactta

SEQ ID NO: 80319 - DNA, 19 bp, Homo sapiens
  siRNA target sequence for DNAH9 (NM_001372.2,1305-1323).
gagaatctccacacttact

SEQ ID NO: 80320 - DNA, 19 bp, Homo sapiens
  siRNA target sequence for DNAH9 (NM_001372.2,1370-1388).
ggtctttgtgcgattggat

SEQ ID NO: 80321 - DNA, 19 bp, Homo sapiens
  siRNA target sequence for DNAH9 (NM_001372.2,1638-1656).
cgaagattggggactatct

SEQ ID NO: 80322 - DNA, 19 bp, Homo sapiens
  siRNA target sequence for DNAH9 (NM_001372.2,1639-1657).
gaagattggggactatctt

SEQ ID NO: 80323 - DNA, 19 bp, Homo sapiens
  siRNA target sequence for DNAH9 (NM_001372.2,1696-1714).
cctttaagctgctagacat

SEQ ID NO: 80324 - DNA, 19 bp, Homo sapiens
  siRNA target sequence for DNAH9 (NM_001372.2,1740-1758).
ctggtagcgagggatacat

SEQ ID NO: 80325 - DNA, 19 bp, Homo sapiens
  siRNA target sequence for DNAH9 (NM_001372.2,1742-1760).
ggtagcgagggatacatct

SEQ ID NO: 80326 - DNA, 19 bp, Homo sapiens
  siRNA target sequence for DNAH9 (NM_001372.2,1770-1788).
ctggtcctcatccaaatgt

SEQ ID NO: 80327 - DNA, 19 bp, Homo sapiens
  siRNA target sequence for DNAH9 (NM_001372.2,1773-1791).
gtcctcatccaaatgttca

SEQ ID NO: 80328 - DNA, 19 bp, Homo sapiens
  siRNA target sequence for DNAH9 (NM_001372.2,1803-1821).
gatgcagtgaggatgatct

SEQ ID NO: 80329 - DNA, 19 bp, Homo sapiens
  siRNA target sequence for DNAH9 (NM_001372.2,2024-2042).
gtcattgctagaaaagtat

SEQ ID NO: 80330 - DNA, 19 bp, Homo sapiens
  siRNA target sequence for DNAH9 (NM_001372.2,2065-2083).
ggtgccggacagtatcaga

SEQ ID NO: 80331 - DNA, 19 bp, Homo sapiens
  siRNA target sequence for DNAH9 (NM_001372.2,2084-2102).
gaagtcacagtacaatctt

SEQ ID NO: 80332 - DNA, 19 bp, Homo sapiens
  siRNA target sequence for DNAH9 (NM_001372.2,2130-2148).
gagacgaaggagatcacta

SEQ ID NO: 80333 - DNA, 19 bp, Homo sapiens
  siRNA target sequence for DNAH9 (NM_001372.2,2134-2152).
cgaaggagatcactatcaa

SEQ ID NO: 80334 - DNA, 19 bp, Homo sapiens
  siRNA target sequence for DNAH9 (NM_001372.2,2138-2156).
ggagatcactatcaacttt

SEQ ID NO: 80335 - DNA, 19 bp, Homo sapiens
  siRNA target sequence for DNAH9 (NM_001372.2,2139-2157).
gagatcactatcaacttta

SEQ ID NO: 80336 - DNA, 19 bp, Homo sapiens
  siRNA target sequence for DNAH9 (NM_001372.2,2271-2289).
cttgtggctaatttagagt

SEQ ID NO: 80337 - DNA, 19 bp, Homo sapiens
  siRNA target sequence for DNAH9 (NM_001372.2,2286-2304).
gagttgatggcaaattggt

SEQ ID NO: 80338 - DNA, 19 bp, Homo sapiens
  siRNA target sequence for DNAH9 (NM_001372.2,2421-2439).
ggcatttgcgattatgtca

SEQ ID NO: 80339 - DNA, 19 bp, Homo sapiens
  siRNA target sequence for DNAH9 (NM_001372.2,2428-2446).
gcgattatgtcactgaaat

SEQ ID NO: 80340 - DNA, 19 bp, Homo sapiens
  siRNA target sequence for DNAH9 (NM_001372.2,2447-2465).
caccagtagtattcatgat

SEQ ID NO: 80341 - DNA, 19 bp, Homo sapiens
  siRNA target sequence for DNAH9 (NM_001372.2,2452-2470).
gtagtattcatgatcttga

SEQ ID NO: 80342 - DNA, 19 bp, Homo sapiens
  siRNA target sequence for DNAH9 (NM_001372.2,2505-2523).
gagatccaaaacatcatga

SEQ ID NO: 80343 - DNA, 19 bp, Homo sapiens
  siRNA target sequence for DNAH9 (NM_001372.2,2510-2528).
ccaaaacatcatgaaaaca

SEQ ID NO: 80344 - DNA, 19 bp, Homo sapiens
  siRNA target sequence for DNAH9 (NM_001372.2,2527-2545).
catgggtgactccaatatt

SEQ ID NO: 80345 - DNA, 19 bp, Homo sapiens
  siRNA target sequence for DNAH9 (NM_001372.2,2592-2610).
cggcatgatcgaatggaaa

SEQ ID NO: 80346 - DNA, 19 bp, Homo sapiens
  siRNA target sequence for DNAH9 (NM_001372.2,2593-2611).
ggcatgatcgaatggaaaa

SEQ ID NO: 80347 - DNA, 19 bp, Homo sapiens
  siRNA target sequence for DNAH9 (NM_001372.2,2607-2625).
gaaaaatattacaatctca

SEQ ID NO: 80348 - DNA, 19 bp, Homo sapiens
  siRNA target sequence for DNAH9 (NM_001372.2,2688-2706).
gacccaacctccaatatct

SEQ ID NO: 80349 - DNA, 19 bp, Homo sapiens
  siRNA target sequence for DNAH9 (NM_001372.2,2708-2726).
gaagacttatgttaactct

SEQ ID NO: 80350 - DNA, 19 bp, Homo sapiens
  siRNA target sequence for DNAH9 (NM_001372.2,2711-2729).
gacttatgttaactctatt

SEQ ID NO: 80351 - DNA, 19 bp, Homo sapiens
  siRNA target sequence for DNAH9 (NM_001372.2,2718-2736).
gttaactctattgacaatt

SEQ ID NO: 80352 - DNA, 19 bp, Homo sapiens
  siRNA target sequence for DNAH9 (NM_001372.2,2768-2786).
gtgctccctcaagtatctt

SEQ ID NO: 80353 - DNA, 19 bp, Homo sapiens
  siRNA target sequence for DNAH9 (NM_001372.2,2770-2788).
gctccctcaagtatcttct

SEQ ID NO: 80354 - DNA, 19 bp, Homo sapiens
  siRNA target sequence for DNAH9 (NM_001372.2,2808-2826).
gcaggacttaccccaatat

SEQ ID NO: 80355 - DNA, 19 bp, Homo sapiens
  siRNA target sequence for DNAH9 (NM_001372.2,2812-2830).
gacttaccccaatatttga

SEQ ID NO: 80356 - DNA, 19 bp, Homo sapiens
  siRNA target sequence for DNAH9 (NM_001372.2,2852-2870).
cccagagctagttttctat

SEQ ID NO: 80357 - DNA, 19 bp, Homo sapiens
  siRNA target sequence for DNAH9 (NM_001372.2,2894-2912).
ggggggtttctgtgacatt

SEQ ID NO: 80358 - DNA, 19 bp, Homo sapiens
  siRNA target sequence for DNAH9 (NM_001372.2,2959-2977).
cacggctttccccacaaaa

SEQ ID NO: 80359 - DNA, 19 bp, Homo sapiens
  siRNA target sequence for DNAH9 (NM_001372.2,2999-3017).
cgacctggacggtatacca

SEQ ID NO: 80360 - DNA, 19 bp, Homo sapiens
  siRNA target sequence for DNAH9 (NM_001372.2,3235-3253).
ctcagtttaaagtgcaaat

SEQ ID NO: 80361 - DNA, 19 bp, Homo sapiens
  siRNA target sequence for DNAH9 (NM_001372.2,3249-3267).
caaatcgactcctatgaaa

SEQ ID NO: 80362 - DNA, 19 bp, Homo sapiens
  siRNA target sequence for DNAH9 (NM_001372.2,3308-3326).
gtttgacggctggatgaaa

SEQ ID NO: 80363 - DNA, 19 bp, Homo sapiens
  siRNA target sequence for DNAH9 (NM_001372.2,3317-3335).
ctggatgaaaattgatatt

SEQ ID NO: 80364 - DNA, 19 bp, Homo sapiens
  siRNA target sequence for DNAH9 (NM_001372.2,3373-3391).
ggtggagcctcctgttcaa

SEQ ID NO: 80365 - DNA, 19 bp, Homo sapiens
  siRNA target sequence for DNAH9 (NM_001372.2,3454-3472).
gtgagagcggcttactcaa

SEQ ID NO: 80366 - DNA, 19 bp, Homo sapiens
  siRNA target sequence for DNAH9 (NM_001372.2,3458-3476).
gagcggcttactcaagaaa

SEQ ID NO: 80367 - DNA, 19 bp, Homo sapiens
  siRNA target sequence for DNAH9 (NM_001372.2,3517-3535).
gacaccttatggctgttaa

SEQ ID NO: 80368 - DNA, 19 bp, Homo sapiens
  siRNA target sequence for DNAH9 (NM_001372.2,3521-3539).
ccttatggctgttaaagaa

SEQ ID NO: 80369 - DNA, 19 bp, Homo sapiens
  siRNA target sequence for DNAH9 (NM_001372.2,3571-3589).
ccttaaagcagactattga

SEQ ID NO: 80370 - DNA, 19 bp, Homo sapiens
  siRNA target sequence for DNAH9 (NM_001372.2,3661-3679).
ggaacaacataaaaaaggt

SEQ ID NO: 80371 - DNA, 19 bp, Homo sapiens
  siRNA target sequence for DNAH9 (NM_001372.2,3781-3799).
gggagcaattccacaaaga

SEQ ID NO: 80372 - DNA, 19 bp, Homo sapiens
  siRNA target sequence for DNAH9 (NM_001372.2,3805-3823).
cgttcaggtttgatagcat

SEQ ID NO: 80373 - DNA, 19 bp, Homo sapiens
  siRNA target sequence for DNAH9 (NM_001372.2,3820-3838).
gcatccaccctcatcaaat

SEQ ID NO: 80374 - DNA, 19 bp, Homo sapiens
  siRNA target sequence for DNAH9 (NM_001372.2,3878-3896).
cactatggcctccatttct

SEQ ID NO: 80375 - DNA, 19 bp, Homo sapiens
  siRNA target sequence for DNAH9 (NM_001372.2,3895-3913).
ctgagtctgccagcttatt

SEQ ID NO: 80376 - DNA, 19 bp, Homo sapiens
  siRNA target sequence for DNAH9 (NM_001372.2,3918-3936).
gtcaatgtccctgactata

SEQ ID NO: 80377 - DNA, 19 bp, Homo sapiens
  siRNA target sequence for DNAH9 (NM_001372.2,4065-4083).
gagttggagtgcaaacagt

SEQ ID NO: 80378 - DNA, 19 bp, Homo sapiens
  siRNA target sequence for DNAH9 (NM_001372.2,4067-4085).
gttggagtgcaaacagttt

SEQ ID NO: 80379 - DNA, 19 bp, Homo sapiens
  siRNA target sequence for DNAH9 (NM_001372.2,4121-4139).
ggcctgggatgcattcaca

SEQ ID NO: 80380 - DNA, 19 bp, Homo sapiens
  siRNA target sequence for DNAH9 (NM_001372.2,4246-4264).
ccggtgtgagcttcactat

SEQ ID NO: 80381 - DNA, 19 bp, Homo sapiens
  siRNA target sequence for DNAH9 (NM_001372.2,4459-4477).
ctgatgaggacctcataga

SEQ ID NO: 80382 - DNA, 19 bp, Homo sapiens
  siRNA target sequence for DNAH9 (NM_001372.2,4478-4496).
ggttctggaggataatcaa

SEQ ID NO: 80383 - DNA, 19 bp, Homo sapiens
  siRNA target sequence for DNAH9 (NM_001372.2,4514-4532).
ggtgatgtccaagtatgtt

SEQ ID NO: 80384 - DNA, 19 bp, Homo sapiens
  siRNA target sequence for DNAH9 (NM_001372.2,4629-4647).
cacctggaaagcatattca

SEQ ID NO: 80385 - DNA, 19 bp, Homo sapiens
  siRNA target sequence for DNAH9 (NM_001372.2,4640-4658).
catattcactggatctgaa

SEQ ID NO: 80386 - DNA, 19 bp, Homo sapiens
  siRNA target sequence for DNAH9 (NM_001372.2,4677-4695).
ccccaggattctaaaaggt

SEQ ID NO: 80387 - DNA, 19 bp, Homo sapiens
  siRNA target sequence for DNAH9 (NM_001372.2,4894-4912).
cctccgatctgttagacat

SEQ ID NO: 80388 - DNA, 19 bp, Homo sapiens
  siRNA target sequence for DNAH9 (NM_001372.2,5299-5317).
gtgccatgaaggactatta

SEQ ID NO: 80389 - DNA, 19 bp, Homo sapiens
  siRNA target sequence for DNAH9 (NM_001372.2,5301-5319).
gccatgaaggactattata

SEQ ID NO: 80390 - DNA, 19 bp, Homo sapiens
  siRNA target sequence for DNAH9 (NM_001372.2,5302-5320).
ccatgaaggactattataa

SEQ ID NO: 80391 - DNA, 19 bp, Homo sapiens
  siRNA target sequence for DNAH9 (NM_001372.2,5380-5398).
gagaccggcagaagattat

SEQ ID NO: 80392 - DNA, 19 bp, Homo sapiens
  siRNA target sequence for DNAH9 (NM_001372.2,5384-5402).
ccggcagaagattatgact

SEQ ID NO: 80393 - DNA, 19 bp, Homo sapiens
  siRNA target sequence for DNAH9 (NM_001372.2,5385-5403).
cggcagaagattatgacta

SEQ ID NO: 80394 - DNA, 19 bp, Homo sapiens
  siRNA target sequence for DNAH9 (NM_001372.2,5511-5529).
gatgacgaggtcaaacact

SEQ ID NO: 80395 - DNA, 19 bp, Homo sapiens
  siRNA target sequence for DNAH9 (NM_001372.2,5545-5563).
gtgatgcccagtttttgta

SEQ ID NO: 80396 - DNA, 19 bp, Homo sapiens
  siRNA target sequence for DNAH9 (NM_001372.2,5597-5615).
ggtgatcacacctttgact

SEQ ID NO: 80397 - DNA, 19 bp, Homo sapiens
  siRNA target sequence for DNAH9 (NM_001372.2,5758-5776).
cggagcagatggattacaa

SEQ ID NO: 80398 - DNA, 19 bp, Homo sapiens
  siRNA target sequence for DNAH9 (NM_001372.2,5763-5781).
cagatggattacaagtctt

SEQ ID NO: 80399 - DNA, 19 bp, Homo sapiens
  siRNA target sequence for DNAH9 (NM_001372.2,5779-5797).
cttgtggcaacatctacaa

SEQ ID NO: 80400 - DNA, 19 bp, Homo sapiens
  siRNA target sequence for DNAH9 (NM_001372.2,5874-5892).
gcagtgcaggtaaaaagca

SEQ ID NO: 80401 - DNA, 19 bp, Homo sapiens
  siRNA target sequence for DNAH9 (NM_001372.2,5959-5977).
cttctgtcggtatcttcat

SEQ ID NO: 80402 - DNA, 19 bp, Homo sapiens
  siRNA target sequence for DNAH9 (NM_001372.2,6053-6071).
ggtggttccagactttgaa

SEQ ID NO: 80403 - DNA, 19 bp, Homo sapiens
  siRNA target sequence for DNAH9 (NM_001372.2,6060-6078).
ccagactttgaattgatct

SEQ ID NO: 80404 - DNA, 19 bp, Homo sapiens
  siRNA target sequence for DNAH9 (NM_001372.2,6069-6087).
gaattgatctgtgaaatca

SEQ ID NO: 80405 - DNA, 19 bp, Homo sapiens
  siRNA target sequence for DNAH9 (NM_001372.2,6117-6135).
cagtcattagccagaaagt

SEQ ID NO: 80406 - DNA, 19 bp, Homo sapiens
  siRNA target sequence for DNAH9 (NM_001372.2,6130-6148).
gaaagttcatcactcttta

SEQ ID NO: 80407 - DNA, 19 bp, Homo sapiens
  siRNA target sequence for DNAH9 (NM_001372.2,6195-6213).
ggcctacgggccatcaagt

SEQ ID NO: 80408 - DNA, 19 bp, Homo sapiens
  siRNA target sequence for DNAH9 (NM_001372.2,6282-6300).
cgctccttgcgggatttca

SEQ ID NO: 80409 - DNA, 19 bp, Homo sapiens
  siRNA target sequence for DNAH9 (NM_001372.2,6283-6301).
gctccttgcgggatttcaa

SEQ ID NO: 80410 - DNA, 19 bp, Homo sapiens
  siRNA target sequence for DNAH9 (NM_001372.2,6395-6413).
caacttcgaagctttggtt

SEQ ID NO: 80411 - DNA, 19 bp, Homo sapiens
  siRNA target sequence for DNAH9 (NM_001372.2,6723-6741).
gatgggcccaagtggattt

SEQ ID NO: 80412 - DNA, 19 bp, Homo sapiens
  siRNA target sequence for DNAH9 (NM_001372.2,6727-6745).
ggcccaagtggattttact

SEQ ID NO: 80413 - DNA, 19 bp, Homo sapiens
  siRNA target sequence for DNAH9 (NM_001372.2,6913-6931).
cagggatcttgtacatcaa

SEQ ID NO: 80414 - DNA, 19 bp, Homo sapiens
  siRNA target sequence for DNAH9 (NM_001372.2,6992-7010).
gacagagagagccaactta

SEQ ID NO: 80415 - DNA, 19 bp, Homo sapiens
  siRNA target sequence for DNAH9 (NM_001372.2,6998-7016).
gagagccaacttaaccatt

SEQ ID NO: 80416 - DNA, 19 bp, Homo sapiens
  siRNA target sequence for DNAH9 (NM_001372.2,7002-7020).
gccaacttaaccattttgt

SEQ ID NO: 80417 - DNA, 19 bp, Homo sapiens
  siRNA target sequence for DNAH9 (NM_001372.2,7012-7030).
ccattttgttcgacaagta

SEQ ID NO: 80418 - DNA, 19 bp, Homo sapiens
  siRNA target sequence for DNAH9 (NM_001372.2,7013-7031).
cattttgttcgacaagtat

SEQ ID NO: 80419 - DNA, 19 bp, Homo sapiens
  siRNA target sequence for DNAH9 (NM_001372.2,7057-7075).
gaaccaggtttaagaagat

SEQ ID NO: 80420 - DNA, 19 bp, Homo sapiens
  siRNA target sequence for DNAH9 (NM_001372.2,7155-7173).
gcagactgccctaaggaaa

SEQ ID NO: 80421 - DNA, 19 bp, Homo sapiens
  siRNA target sequence for DNAH9 (NM_001372.2,7156-7174).
cagactgccctaaggaaat

SEQ ID NO: 80422 - DNA, 19 bp, Homo sapiens
  siRNA target sequence for DNAH9 (NM_001372.2,7162-7180).
gccctaaggaaatttatga

SEQ ID NO: 80423 - DNA, 19 bp, Homo sapiens
  siRNA target sequence for DNAH9 (NM_001372.2,7274-7292).
gctgactgagttcaaaaca

SEQ ID NO: 80424 - DNA, 19 bp, Homo sapiens
  siRNA target sequence for DNAH9 (NM_001372.2,7371-7389).
ctcgtcccccagttcgaat

SEQ ID NO: 80425 - DNA, 19 bp, Homo sapiens
  siRNA target sequence for DNAH9 (NM_001372.2,7373-7391).
cgtcccccagttcgaattt

SEQ ID NO: 80426 - DNA, 19 bp, Homo sapiens
  siRNA target sequence for DNAH9 (NM_001372.2,7564-7582).
catacctggtgaaaaacgt

SEQ ID NO: 80427 - DNA, 19 bp, Homo sapiens
  siRNA target sequence for DNAH9 (NM_001372.2,7676-7694).
gaacaagaaactcatctat

SEQ ID NO: 80428 - DNA, 19 bp, Homo sapiens
  siRNA target sequence for DNAH9 (NM_001372.2,7891-7909).
gtcacttcagcgtgtttgt

SEQ ID NO: 80429 - DNA, 19 bp, Homo sapiens
  siRNA target sequence for DNAH9 (NM_001372.2,7932-7950).
gccctgtcctctatctaca

SEQ ID NO: 80430 - DNA, 19 bp, Homo sapiens
  siRNA target sequence for DNAH9 (NM_001372.2,8071-8089).
ccacaggaatcaaattcca

SEQ ID NO: 80431 - DNA, 19 bp, Homo sapiens
  siRNA target sequence for DNAH9 (NM_001372.2,8205-8223).
cgagtttatcgggataaga

SEQ ID NO: 80432 - DNA, 19 bp, Homo sapiens
  siRNA target sequence for DNAH9 (NM_001372.2,8206-8224).
gagtttatcgggataagat

SEQ ID NO: 80433 - DNA, 19 bp, Homo sapiens
  siRNA target sequence for DNAH9 (NM_001372.2,8273-8291).
gctcaagaaaacttttgat

SEQ ID NO: 80434 - DNA, 19 bp, Homo sapiens
  siRNA target sequence for DNAH9 (NM_001372.2,8323-8341).
gcccgaacctgtattgtca

SEQ ID NO: 80435 - DNA, 19 bp, Homo sapiens
  siRNA target sequence for DNAH9 (NM_001372.2,8331-8349).
ctgtattgtcactttgcaa

SEQ ID NO: 80436 - DNA, 19 bp, Homo sapiens
  siRNA target sequence for DNAH9 (NM_001372.2,8338-8356).
gtcactttgcaaatggtat

SEQ ID NO: 80437 - DNA, 19 bp, Homo sapiens
  siRNA target sequence for DNAH9 (NM_001372.2,8446-8464).
cagtgatggacctagttct

SEQ ID NO: 80438 - DNA, 19 bp, Homo sapiens
  siRNA target sequence for DNAH9 (NM_001372.2,8481-8499).
cgccatgtctgccatatca

SEQ ID NO: 80439 - DNA, 19 bp, Homo sapiens
  siRNA target sequence for DNAH9 (NM_001372.2,8679-8697).
gctggagtgaagaatctca

SEQ ID NO: 80440 - DNA, 19 bp, Homo sapiens
  siRNA target sequence for DNAH9 (NM_001372.2,8740-8758).
ggttccttgtgctcatcaa

SEQ ID NO: 80441 - DNA, 19 bp, Homo sapiens
  siRNA target sequence for DNAH9 (NM_001372.2,8748-8766).
gtgctcatcaatgatcttt

SEQ ID NO: 80442 - DNA, 19 bp, Homo sapiens
  siRNA target sequence for DNAH9 (NM_001372.2,8824-8842).
gcaatgtgaggaatgaagt

SEQ ID NO: 80443 - DNA, 19 bp, Homo sapiens
  siRNA target sequence for DNAH9 (NM_001372.2,8937-8955).
cctgtgggaaacaagctaa

SEQ ID NO: 80444 - DNA, 19 bp, Homo sapiens
  siRNA target sequence for DNAH9 (NM_001372.2,9087-9105).
gtaaagcagtcgattagca

SEQ ID NO: 80445 - DNA, 19 bp, Homo sapiens
  siRNA target sequence for DNAH9 (NM_001372.2,9093-9111).
cagtcgattagcaaattca

SEQ ID NO: 80446 - DNA, 19 bp, Homo sapiens
  siRNA target sequence for DNAH9 (NM_001372.2,9123-9141).
cacacaagtgtcaaccaaa

SEQ ID NO: 80447 - DNA, 19 bp, Homo sapiens
  siRNA target sequence for DNAH9 (NM_001372.2,9137-9155).
ccaaacatcccagtcttat

SEQ ID NO: 80448 - DNA, 19 bp, Homo sapiens
  siRNA target sequence for DNAH9 (NM_001372.2,9165-9183).
gaacagcgctacaactata

SEQ ID NO: 80449 - DNA, 19 bp, Homo sapiens
  siRNA target sequence for DNAH9 (NM_001372.2,9168-9186).
cagcgctacaactatacaa

SEQ ID NO: 80450 - DNA, 19 bp, Homo sapiens
  siRNA target sequence for DNAH9 (NM_001372.2,9170-9188).
gcgctacaactatacaact

SEQ ID NO: 80451 - DNA, 19 bp, Homo sapiens
  siRNA target sequence for DNAH9 (NM_001372.2,9739-9757).
cgctaataaacttcaacaa

SEQ ID NO: 80452 - DNA, 19 bp, Homo sapiens
  siRNA target sequence for DNAH9 (NM_001372.2,9825-9843).
gagtttgtggccaccaaat

SEQ ID NO: 80453 - DNA, 19 bp, Homo sapiens
  siRNA target sequence for DNAH9 (NM_001372.2,9991-10009).
ccaagatcgctcaccttaa

SEQ ID NO: 80454 - DNA, 19 bp, Homo sapiens
  siRNA target sequence for DNAH9 (NM_001372.2,9992-10010).
caagatcgctcaccttaat

SEQ ID NO: 80455 - DNA, 19 bp, Homo sapiens
  siRNA target sequence for DNAH9 (NM_001372.2,9995-10013).
gatcgctcaccttaatgaa

SEQ ID NO: 80456 - DNA, 19 bp, Homo sapiens
  siRNA target sequence for DNAH9 (NM_001372.2,10000-10018).
ctcaccttaatgaaaacct

SEQ ID NO: 80457 - DNA, 19 bp, Homo sapiens
  siRNA target sequence for DNAH9 (NM_001372.2,10125-10143).
ggaggactcgcttctgaaa

SEQ ID NO: 80458 - DNA, 19 bp, Homo sapiens
  siRNA target sequence for DNAH9 (NM_001372.2,10129-10147).
gactcgcttctgaaaacgt

SEQ ID NO: 80459 - DNA, 19 bp, Homo sapiens
  siRNA target sequence for DNAH9 (NM_001372.2,10156-10174).
cagatgccgtgcagaactt

SEQ ID NO: 80460 - DNA, 19 bp, Homo sapiens
  siRNA target sequence for DNAH9 (NM_001372.2,10162-10180).
ccgtgcagaacttcaaaca

SEQ ID NO: 80461 - DNA, 19 bp, Homo sapiens
  siRNA target sequence for DNAH9 (NM_001372.2,10181-10199).
gcaggaaaggacgttatgt

SEQ ID NO: 80462 - DNA, 19 bp, Homo sapiens
  siRNA target sequence for DNAH9 (NM_001372.2,10190-10208).
gacgttatgtggagacatt

SEQ ID NO: 80463 - DNA, 19 bp, Homo sapiens
  siRNA target sequence for DNAH9 (NM_001372.2,10192-10210).
cgttatgtggagacatttt

SEQ ID NO: 80464 - DNA, 19 bp, Homo sapiens
  siRNA target sequence for DNAH9 (NM_001372.2,10212-10230).
cttataacggctttcattt

SEQ ID NO: 80465 - DNA, 19 bp, Homo sapiens
  siRNA target sequence for DNAH9 (NM_001372.2,10473-10491).
cagctacaaggcatcaaat

SEQ ID NO: 80466 - DNA, 19 bp, Homo sapiens
  siRNA target sequence for DNAH9 (NM_001372.2,10476-10494).
ctacaaggcatcaaatgga

SEQ ID NO: 80467 - DNA, 19 bp, Homo sapiens
  siRNA target sequence for DNAH9 (NM_001372.2,10526-10544).
cacgcagattggtcagaaa

SEQ ID NO: 80468 - DNA, 19 bp, Homo sapiens
  siRNA target sequence for DNAH9 (NM_001372.2,10539-10557).
cagaaaggctaccttcaaa

SEQ ID NO: 80469 - DNA, 19 bp, Homo sapiens
  siRNA target sequence for DNAH9 (NM_001372.2,10589-10607).
ggtgctgattgaaaatcta

SEQ ID NO: 80470 - DNA, 19 bp, Homo sapiens
  siRNA target sequence for DNAH9 (NM_001372.2,10641-10659).
cttgggagagaagtcatta

SEQ ID NO: 80471 - DNA, 19 bp, Homo sapiens
  siRNA target sequence for DNAH9 (NM_001372.2,11023-11041).
ccgaagttgagaaaaaggt

SEQ ID NO: 80472 - DNA, 19 bp, Homo sapiens
  siRNA target sequence for DNAH9 (NM_001372.2,11146-11164).
gcaagatccatccaatgta

SEQ ID NO: 80473 - DNA, 19 bp, Homo sapiens
  siRNA target sequence for DNAH9 (NM_001372.2,11243-11261).
gcgggtggccaacctaata

SEQ ID NO: 80474 - DNA, 19 bp, Homo sapiens
  siRNA target sequence for DNAH9 (NM_001372.2,11245-11263).
gggtggccaacctaataga

SEQ ID NO: 80475 - DNA, 19 bp, Homo sapiens
  siRNA target sequence for DNAH9 (NM_001372.2,11256-11274).
ctaatagacagcataacct

SEQ ID NO: 80476 - DNA, 19 bp, Homo sapiens
  siRNA target sequence for DNAH9 (NM_001372.2,11301-11319).
gggctctttgagtgtgata

SEQ ID NO: 80477 - DNA, 19 bp, Homo sapiens
  siRNA target sequence for DNAH9 (NM_001372.2,11463-11481).
ggagctgtcaaggtacttt

SEQ ID NO: 80478 - DNA, 19 bp, Homo sapiens
  siRNA target sequence for DNAH9 (NM_001372.2,11466-11484).
gctgtcaaggtactttcat

SEQ ID NO: 80479 - DNA, 19 bp, Homo sapiens
  siRNA target sequence for DNAH9 (NM_001372.2,11469-11487).
gtcaaggtactttcatcaa

SEQ ID NO: 80480 - DNA, 19 bp, Homo sapiens
  siRNA target sequence for DNAH9 (NM_001372.2,11529-11547).
gctaagagctggaaaaagt

SEQ ID NO: 80481 - DNA, 19 bp, Homo sapiens
  siRNA target sequence for DNAH9 (NM_001372.2,11646-11664).
gaccggatgacctatgctt

SEQ ID NO: 80482 - DNA, 19 bp, Homo sapiens
  siRNA target sequence for DNAH9 (NM_001372.2,11656-11674).
cctatgctttgcgagattt

SEQ ID NO: 80483 - DNA, 19 bp, Homo sapiens
  siRNA target sequence for DNAH9 (NM_001372.2,11708-11726).
gggaagagccctagatttt

SEQ ID NO: 80484 - DNA, 19 bp, Homo sapiens
  siRNA target sequence for DNAH9 (NM_001372.2,11751-11769).
ccagccactcctatgtttt

SEQ ID NO: 80485 - DNA, 19 bp, Homo sapiens
  siRNA target sequence for DNAH9 (NM_001372.2,11754-11772).
gccactcctatgtttttca

SEQ ID NO: 80486 - DNA, 19 bp, Homo sapiens
  siRNA target sequence for DNAH9 (NM_001372.2,11755-11773).
ccactcctatgtttttcat

SEQ ID NO: 80487 - DNA, 19 bp, Homo sapiens
  siRNA target sequence for DNAH9 (NM_001372.2,11826-11844).
cttggatacaccttcaaca

SEQ ID NO: 80488 - DNA, 19 bp, Homo sapiens
  siRNA target sequence for DNAH9 (NM_001372.2,11830-11848).
gatacaccttcaacaatca

SEQ ID NO: 80489 - DNA, 19 bp, Homo sapiens
  siRNA target sequence for DNAH9 (NM_001372.2,11926-11944).
gtcactgggttattttgca

SEQ ID NO: 80490 - DNA, 19 bp, Homo sapiens
  siRNA target sequence for DNAH9 (NM_001372.2,11932-11950).
gggttattttgcagaacat

SEQ ID NO: 80491 - DNA, 19 bp, Homo sapiens
  siRNA target sequence for DNAH9 (NM_001372.2,11933-11951).
ggttattttgcagaacatt

SEQ ID NO: 80492 - DNA, 19 bp, Homo sapiens
  siRNA target sequence for DNAH9 (NM_001372.2,12195-12213).
cgggagacggagtttaaga

SEQ ID NO: 80493 - DNA, 19 bp, Homo sapiens
  siRNA target sequence for DNAH9 (NM_001372.2,12288-12306).
cgctcatacccctttaaca

SEQ ID NO: 80494 - DNA, 19 bp, Homo sapiens
  siRNA target sequence for DNAH9 (NM_001372.2,12359-12377).
cgcaaaggtcccctatgat

SEQ ID NO: 80495 - DNA, 19 bp, Homo sapiens
  siRNA target sequence for DNAH9 (NM_001372.2,12361-12379).
caaaggtcccctatgatga

SEQ ID NO: 80496 - DNA, 19 bp, Homo sapiens
  siRNA target sequence for DNAH9 (NM_001372.2,12454-12472).
cctacctgggggaattcat

SEQ ID NO: 80497 - DNA, 19 bp, Homo sapiens
  siRNA target sequence for DNAH9 (NM_001372.2,12470-12488).
cattcgaccagaaatgtta

SEQ ID NO: 80498 - DNA, 19 bp, Homo sapiens
  siRNA target sequence for DNAH9 (NM_001372.2,12536-12554).
ggactacaatggttatcat

SEQ ID NO: 80499 - DNA, 19 bp, Homo sapiens
  siRNA target sequence for DNAH9 (NM_001372.2,12759-12777).
cgggtgacagacgagttta

SEQ ID NO: 80500 - DNA, 19 bp, Homo sapiens
  siRNA target sequence for DNAH9 (NM_001372.2,12760-12778).
gggtgacagacgagtttaa

SEQ ID NO: 80501 - DNA, 19 bp, Homo sapiens
  siRNA target sequence for DNAH9 (NM_001372.2,12762-12780).
gtgacagacgagtttaaca

SEQ ID NO: 80502 - DNA, 19 bp, Homo sapiens
  siRNA target sequence for DNAH9 (NM_001372.2,12806-12824).
ggagcgcaccccttacatt

SEQ ID NO: 80503 - DNA, 19 bp, Homo sapiens
  siRNA target sequence for DNAH9 (NM_001372.2,12811-12829).
gcaccccttacattgtagt

SEQ ID NO: 80504 - DNA, 19 bp, Homo sapiens
  siRNA target sequence for DNAH9 (NM_001372.2,12839-12857).
ggagtgtggccggatgaat

SEQ ID NO: 80505 - DNA, 19 bp, Homo sapiens
  siRNA target sequence for DNAH9 (NM_001372.2,12840-12858).
gagtgtggccggatgaata

SEQ ID NO: 80506 - DNA, 19 bp, Homo sapiens
  siRNA target sequence for DNAH9 (NM_001372.2,12844-12862).
gtggccggatgaatatcct

SEQ ID NO: 80507 - DNA, 19 bp, Homo sapiens
  siRNA target sequence for DNAH9 (NM_001372.2,12931-12949).
gccacatggagaacttaca

SEQ ID NO: 80508 - DNA, 19 bp, Homo sapiens
  siRNA target sequence for DNAH9 (NM_001372.2,13064-13082).
ggcttggacgggtgacttt

SEQ ID NO: 80509 - DNA, 19 bp, Homo sapiens
  siRNA target sequence for DNAH9 (NM_001372.2,13065-13083).
gcttggacgggtgacttta

SEQ ID NO: 80510 - DNA, 19 bp, Homo sapiens
  siRNA target sequence for DNAH9 (NM_001372.2,13151-13169).
gtccacggctcgcaagaat

SEQ ID NO: 80511 - DNA, 19 bp, Homo sapiens
  siRNA target sequence for DNAH9 (NM_001372.2,13153-13171).
ccacggctcgcaagaatga

SEQ ID NO: 80512 - DNA, 19 bp, Homo sapiens
  siRNA target sequence for DNAH9 (NM_001372.2,13369-13387).
ccattcctgcagataagca

SEQ ID NO: 80513 - DNA, 19 bp, Homo sapiens
  siRNA target sequence for DNAH9 (NM_001372.2,13388-13406).
ggactgccgcagtgtctat

SEQ ID NO: 80514 - DNA, 19 bp, Homo sapiens
  siRNA target sequence for DNAH9 (NM_001372.2,13389-13407).
gactgccgcagtgtctatt

SEQ ID NO: 80515 - DNA, 19 bp, Homo sapiens
  siRNA target sequence for DNCH1 (NM_001376.2,235-253).
cagatgcgcaagttccttt

SEQ ID NO: 80516 - DNA, 19 bp, Homo sapiens
  siRNA target sequence for DNCH1 (NM_001376.2,367-385).
cattatggggttaaatcca

SEQ ID NO: 80517 - DNA, 19 bp, Homo sapiens
  siRNA target sequence for DNCH1 (NM_001376.2,373-391).
ggggttaaatccaatagct

SEQ ID NO: 80518 - DNA, 19 bp, Homo sapiens
  siRNA target sequence for DNCH1 (NM_001376.2,383-401).
ccaatagcttggcattcat

SEQ ID NO: 80519 - DNA, 19 bp, Homo sapiens
  siRNA target sequence for DNCH1 (NM_001376.2,384-402).
caatagcttggcattcatt

SEQ ID NO: 80520 - DNA, 19 bp, Homo sapiens
  siRNA target sequence for DNCH1 (NM_001376.2,413-431).
ccgtgattgatgcagataa

SEQ ID NO: 80521 - DNA, 19 bp, Homo sapiens
  siRNA target sequence for DNCH1 (NM_001376.2,414-432).
cgtgattgatgcagataaa

SEQ ID NO: 80522 - DNA, 19 bp, Homo sapiens
  siRNA target sequence for DNCH1 (NM_001376.2,469-487).
gaagactcgccctacgaaa

SEQ ID NO: 80523 - DNA, 19 bp, Homo sapiens
  siRNA target sequence for DNCH1 (NM_001376.2,477-495).
gccctacgaaactttgcat

SEQ ID NO: 80524 - DNA, 19 bp, Homo sapiens
  siRNA target sequence for DNCH1 (NM_001376.2,478-496).
ccctacgaaactttgcatt

SEQ ID NO: 80525 - DNA, 19 bp, Homo sapiens
  siRNA target sequence for DNCH1 (NM_001376.2,484-502).
gaaactttgcattctttca

SEQ ID NO: 80526 - DNA, 19 bp, Homo sapiens
  siRNA target sequence for DNCH1 (NM_001376.2,492-510).
gcattctttcattagcaat

SEQ ID NO: 80527 - DNA, 19 bp, Homo sapiens
  siRNA target sequence for DNCH1 (NM_001376.2,507-525).
caatgcagtggctcctttt

SEQ ID NO: 80528 - DNA, 19 bp, Homo sapiens
  siRNA target sequence for DNCH1 (NM_001376.2,657-675).
gatcagcctgccgattcat

SEQ ID NO: 80529 - DNA, 19 bp, Homo sapiens
  siRNA target sequence for DNCH1 (NM_001376.2,662-680).
gcctgccgattcatccaat

SEQ ID NO: 80530 - DNA, 19 bp, Homo sapiens
  siRNA target sequence for DNCH1 (NM_001376.2,667-685).
ccgattcatccaatgatca

SEQ ID NO: 80531 - DNA, 19 bp, Homo sapiens
  siRNA target sequence for DNCH1 (NM_001376.2,723-741).
gccaaaagttacagacttt

SEQ ID NO: 80532 - DNA, 19 bp, Homo sapiens
  siRNA target sequence for DNCH1 (NM_001376.2,760-778).
ccaacatttcttaatcagt

SEQ ID NO: 80533 - DNA, 19 bp, Homo sapiens
  siRNA target sequence for DNCH1 (NM_001376.2,797-815).
gctggatccgagaaattca

SEQ ID NO: 80534 - DNA, 19 bp, Homo sapiens
  siRNA target sequence for DNCH1 (NM_001376.2,798-816).
ctggatccgagaaattcaa

SEQ ID NO: 80535 - DNA, 19 bp, Homo sapiens
  siRNA target sequence for DNCH1 (NM_001376.2,801-819).
gatccgagaaattcaaaaa

SEQ ID NO: 80536 - DNA, 19 bp, Homo sapiens
  siRNA target sequence for DNCH1 (NM_001376.2,856-874).
gccttacaggaaattagtt

SEQ ID NO: 80537 - DNA, 19 bp, Homo sapiens
  siRNA target sequence for DNCH1 (NM_001376.2,857-875).
ccttacaggaaattagttt

SEQ ID NO: 80538 - DNA, 19 bp, Homo sapiens
  siRNA target sequence for DNCH1 (NM_001376.2,858-876).
cttacaggaaattagtttt

SEQ ID NO: 80539 - DNA, 19 bp, Homo sapiens
  siRNA target sequence for DNCH1 (NM_001376.2,940-958).
ctgactctggatatcttga

SEQ ID NO: 80540 - DNA, 19 bp, Homo sapiens
  siRNA target sequence for DNCH1 (NM_001376.2,942-960).
gactctggatatcttgaaa

SEQ ID NO: 80541 - DNA, 19 bp, Homo sapiens
  siRNA target sequence for DNCH1 (NM_001376.2,979-997).
gccaccgtcagttttgaca

SEQ ID NO: 80542 - DNA, 19 bp, Homo sapiens
  siRNA target sequence for DNCH1 (NM_001376.2,998-1016).
ctgacacaggtctaaaaca

SEQ ID NO: 80543 - DNA, 19 bp, Homo sapiens
  siRNA target sequence for DNCH1 (NM_001376.2,1053-1071).
gaaagatttccctctgaat

SEQ ID NO: 80544 - DNA, 19 bp, Homo sapiens
  siRNA target sequence for DNCH1 (NM_001376.2,1057-1075).
gatttccctctgaatgatt

SEQ ID NO: 80545 - DNA, 19 bp, Homo sapiens
  siRNA target sequence for DNCH1 (NM_001376.2,1086-1104).
cacggagctggacaaaata

SEQ ID NO: 80546 - DNA, 19 bp, Homo sapiens
  siRNA target sequence for DNCH1 (NM_001376.2,1111-1129).
gcgcttgttgccattttca

SEQ ID NO: 80547 - DNA, 19 bp, Homo sapiens
  siRNA target sequence for DNCH1 (NM_001376.2,1180-1198).
cgtttggtggaggcaattt

SEQ ID NO: 80548 - DNA, 19 bp, Homo sapiens
  siRNA target sequence for DNCH1 (NM_001376.2,1211-1229).
gttctcaattactcaaagt

SEQ ID NO: 80549 - DNA, 19 bp, Homo sapiens
  siRNA target sequence for DNCH1 (NM_001376.2,1214-1232).
ctcaattactcaaagtatt

SEQ ID NO: 80550 - DNA, 19 bp, Homo sapiens
  siRNA target sequence for DNCH1 (NM_001376.2,1251-1269).
gcatgttgcttatgaagaa

SEQ ID NO: 80551 - DNA, 19 bp, Homo sapiens
  siRNA target sequence for DNCH1 (NM_001376.2,1285-1303).
gtagcatgctttgaagttt

SEQ ID NO: 80552 - DNA, 19 bp, Homo sapiens
  siRNA target sequence for DNCH1 (NM_001376.2,1429-1447).
cgccttgaccagatgagaa

SEQ ID NO: 80553 - DNA, 19 bp, Homo sapiens
  siRNA target sequence for DNCH1 (NM_001376.2,1511-1529).
cggcagttgcacaacagaa

SEQ ID NO: 80554 - DNA, 19 bp, Homo sapiens
  siRNA target sequence for DNCH1 (NM_001376.2,1512-1530).
ggcagttgcacaacagaat

SEQ ID NO: 80555 - DNA, 19 bp, Homo sapiens
  siRNA target sequence for DNCH1 (NM_001376.2,1543-1561).
cctgaaccccaagatatga

SEQ ID NO: 80556 - DNA, 19 bp, Homo sapiens
  siRNA target sequence for DNCH1 (NM_001376.2,1601-1619).
ccattgaggaagtaaacct

SEQ ID NO: 80557 - DNA, 19 bp, Homo sapiens
  siRNA target sequence for DNCH1 (NM_001376.2,1602-1620).
cattgaggaagtaaacctt

SEQ ID NO: 80558 - DNA, 19 bp, Homo sapiens
  siRNA target sequence for DNCH1 (NM_001376.2,1679-1697).
cctgggaggctgctatgaa

SEQ ID NO: 80559 - DNA, 19 bp, Homo sapiens
  siRNA target sequence for DNCH1 (NM_001376.2,1758-1776).
gcttggcacagccaagaat

SEQ ID NO: 80560 - DNA, 19 bp, Homo sapiens
  siRNA target sequence for DNCH1 (NM_001376.2,1773-1791).
gaatgccaacgagatgttt

SEQ ID NO: 80561 - DNA, 19 bp, Homo sapiens
  siRNA target sequence for DNCH1 (NM_001376.2,1777-1795).
gccaacgagatgtttagga

SEQ ID NO: 80562 - DNA, 19 bp, Homo sapiens
  siRNA target sequence for DNCH1 (NM_001376.2,1778-1796).
ccaacgagatgtttaggat

SEQ ID NO: 80563 - DNA, 19 bp, Homo sapiens
  siRNA target sequence for DNCH1 (NM_001376.2,1803-1821).
caggtttaatgcactgttt

SEQ ID NO: 80564 - DNA, 19 bp, Homo sapiens
  siRNA target sequence for DNCH1 (NM_001376.2,1841-1859).
gggccattcgcgaatacca

SEQ ID NO: 80565 - DNA, 19 bp, Homo sapiens
  siRNA target sequence for DNCH1 (NM_001376.2,1875-1893).
gcgcgtgaaagatgacatt

SEQ ID NO: 80566 - DNA, 19 bp, Homo sapiens
  siRNA target sequence for DNCH1 (NM_001376.2,1898-1916).
ctcttcacgacaagttcaa

SEQ ID NO: 80567 - DNA, 19 bp, Homo sapiens
  siRNA target sequence for DNCH1 (NM_001376.2,1928-1946).
cacagagtcaggcttgtaa

SEQ ID NO: 80568 - DNA, 19 bp, Homo sapiens
  siRNA target sequence for DNCH1 (NM_001376.2,1973-1991).
ctgtgtcagggtctatcat

SEQ ID NO: 80569 - DNA, 19 bp, Homo sapiens
  siRNA target sequence for DNCH1 (NM_001376.2,1985-2003).
ctatcatctgggctaaaca

SEQ ID NO: 80570 - DNA, 19 bp, Homo sapiens
  siRNA target sequence for DNCH1 (NM_001376.2,2014-2032).
cagctgacggcctacatga

SEQ ID NO: 80571 - DNA, 19 bp, Homo sapiens
  siRNA target sequence for DNCH1 (NM_001376.2,2191-2209).
cgcattttcaccatcgaaa

SEQ ID NO: 80572 - DNA, 19 bp, Homo sapiens
  siRNA target sequence for DNCH1 (NM_001376.2,2228-2246).
gaactggaaatgtgcttaa

SEQ ID NO: 80573 - DNA, 19 bp, Homo sapiens
  siRNA target sequence for DNCH1 (NM_001376.2,2239-2257).
gtgcttaagctgaaagtta

SEQ ID NO: 80574 - DNA, 19 bp, Homo sapiens
  siRNA target sequence for DNCH1 (NM_001376.2,2266-2284).
cctgagattatcacactat

SEQ ID NO: 80575 - DNA, 19 bp, Homo sapiens
  siRNA target sequence for DNCH1 (NM_001376.2,2271-2289).
gattatcacactatccaaa

SEQ ID NO: 80576 - DNA, 19 bp, Homo sapiens
  siRNA target sequence for DNCH1 (NM_001376.2,2290-2308).
gaagtccggaacctcaaat

SEQ ID NO: 80577 - DNA, 19 bp, Homo sapiens
  siRNA target sequence for DNCH1 (NM_001376.2,2391-2409).
cgagagcgttcgtacctat

SEQ ID NO: 80578 - DNA, 19 bp, Homo sapiens
  siRNA target sequence for DNCH1 (NM_001376.2,2394-2412).
gagcgttcgtacctatgaa

SEQ ID NO: 80579 - DNA, 19 bp, Homo sapiens
  siRNA target sequence for DNCH1 (NM_001376.2,2431-2449).
gaggagcggaacaccattt

SEQ ID NO: 80580 - DNA, 19 bp, Homo sapiens
  siRNA target sequence for DNCH1 (NM_001376.2,2526-2544).
caaacttgacccatatgta

SEQ ID NO: 80581 - DNA, 19 bp, Homo sapiens
  siRNA target sequence for DNCH1 (NM_001376.2,2586-2604).
ggatgatctgctgatcatt

SEQ ID NO: 80582 - DNA, 19 bp, Homo sapiens
  siRNA target sequence for DNCH1 (NM_001376.2,2628-2646).
ccgttccttggaaacttgt

SEQ ID NO: 80583 - DNA, 19 bp, Homo sapiens
  siRNA target sequence for DNCH1 (NM_001376.2,2629-2647).
cgttccttggaaacttgta

SEQ ID NO: 80584 - DNA, 19 bp, Homo sapiens
  siRNA target sequence for DNCH1 (NM_001376.2,2691-2709).
gaaagcagtggatgactta

SEQ ID NO: 80585 - DNA, 19 bp, Homo sapiens
  siRNA target sequence for DNCH1 (NM_001376.2,2713-2731).
ctgcactcctattccaatt

SEQ ID NO: 80586 - DNA, 19 bp, Homo sapiens
  siRNA target sequence for DNCH1 (NM_001376.2,2807-2825).
cttggacgcaggttcttct

SEQ ID NO: 80587 - DNA, 19 bp, Homo sapiens
  siRNA target sequence for DNCH1 (NM_001376.2,2862-2880).
cacagatgctccacaagtt

SEQ ID NO: 80588 - DNA, 19 bp, Homo sapiens
  siRNA target sequence for DNCH1 (NM_001376.2,2894-2912).
gtggagagccaaagatcaa

SEQ ID NO: 80589 - DNA, 19 bp, Homo sapiens
  siRNA target sequence for DNCH1 (NM_001376.2,2919-2937).
cgttcatgagctaagaata

SEQ ID NO: 80590 - DNA, 19 bp, Homo sapiens
  siRNA target sequence for DNCH1 (NM_001376.2,2939-2957).
ccaatcaggtaatctactt

SEQ ID NO: 80591 - DNA, 19 bp, Homo sapiens
  siRNA target sequence for DNCH1 (NM_001376.2,2952-2970).
ctacttgaatccaccaatt

SEQ ID NO: 80592 - DNA, 19 bp, Homo sapiens
  siRNA target sequence for DNCH1 (NM_001376.2,2978-2996).
gcagatacaagctgtatca

SEQ ID NO: 80593 - DNA, 19 bp, Homo sapiens
  siRNA target sequence for DNCH1 (NM_001376.2,3060-3078).
ggtgggtgtacattacgaa

SEQ ID NO: 80594 - DNA, 19 bp, Homo sapiens
  siRNA target sequence for DNCH1 (NM_001376.2,3061-3079).
gtgggtgtacattacgaat

SEQ ID NO: 80595 - DNA, 19 bp, Homo sapiens
  siRNA target sequence for DNCH1 (NM_001376.2,3064-3082).
ggtgtacattacgaattga

SEQ ID NO: 80596 - DNA, 19 bp, Homo sapiens
  siRNA target sequence for DNCH1 (NM_001376.2,3099-3117).
ctatcggaatgctttaaca

SEQ ID NO: 80597 - DNA, 19 bp, Homo sapiens
  siRNA target sequence for DNCH1 (NM_001376.2,3141-3159).
cctggaagagtcgtattct

SEQ ID NO: 80598 - DNA, 19 bp, Homo sapiens
  siRNA target sequence for DNCH1 (NM_001376.2,3165-3183).
catgggcattgtatctgaa

SEQ ID NO: 80599 - DNA, 19 bp, Homo sapiens
  siRNA target sequence for DNCH1 (NM_001376.2,3179-3197).
ctgaagttgaacagtatgt

SEQ ID NO: 80600 - DNA, 19 bp, Homo sapiens
  siRNA target sequence for DNCH1 (NM_001376.2,3202-3220).
gtttggcttcagtatcagt

SEQ ID NO: 80601 - DNA, 19 bp, Homo sapiens
  siRNA target sequence for DNCH1 (NM_001376.2,3207-3225).
gcttcagtatcagtgttta

SEQ ID NO: 80602 - DNA, 19 bp, Homo sapiens
  siRNA target sequence for DNCH1 (NM_001376.2,3208-3226).
cttcagtatcagtgtttat

SEQ ID NO: 80603 - DNA, 19 bp, Homo sapiens
  siRNA target sequence for DNCH1 (NM_001376.2,3219-3237).
gtgtttatgggatatgcaa

SEQ ID NO: 80604 - DNA, 19 bp, Homo sapiens
  siRNA target sequence for DNCH1 (NM_001376.2,3235-3253).
caagctgaaaacatctata

SEQ ID NO: 80605 - DNA, 19 bp, Homo sapiens
  siRNA target sequence for DNCH1 (NM_001376.2,3286-3304).
gctctcctggtccaaataa

SEQ ID NO: 80606 - DNA, 19 bp, Homo sapiens
  siRNA target sequence for DNCH1 (NM_001376.2,3289-3307).
ctcctggtccaaataagga

SEQ ID NO: 80607 - DNA, 19 bp, Homo sapiens
  siRNA target sequence for DNCH1 (NM_001376.2,3306-3324).
gaaggccagaggaaccttt

SEQ ID NO: 80608 - DNA, 19 bp, Homo sapiens
  siRNA target sequence for DNCH1 (NM_001376.2,3312-3330).
cagaggaacctttgacaat

SEQ ID NO: 80609 - DNA, 19 bp, Homo sapiens
  siRNA target sequence for DNCH1 (NM_001376.2,3346-3364).
gagtttggaccagtagtta

SEQ ID NO: 80610 - DNA, 19 bp, Homo sapiens
  siRNA target sequence for DNCH1 (NM_001376.2,3352-3370).
ggaccagtagttatagatt

SEQ ID NO: 80611 - DNA, 19 bp, Homo sapiens
  siRNA target sequence for DNCH1 (NM_001376.2,3353-3371).
gaccagtagttatagatta

SEQ ID NO: 80612 - DNA, 19 bp, Homo sapiens
  siRNA target sequence for DNCH1 (NM_001376.2,3367-3385).
gattatggcaaggtacaat

SEQ ID NO: 80613 - DNA, 19 bp, Homo sapiens
  siRNA target sequence for DNCH1 (NM_001376.2,3382-3400).
caatctaaggtgaacttga

SEQ ID NO: 80614 - DNA, 19 bp, Homo sapiens
  siRNA target sequence for DNCH1 (NM_001376.2,3386-3404).
ctaaggtgaacttgaaata

SEQ ID NO: 80615 - DNA, 19 bp, Homo sapiens
  siRNA target sequence for DNCH1 (NM_001376.2,3440-3458).
ggcagatgctaggatcaaa

SEQ ID NO: 80616 - DNA, 19 bp, Homo sapiens
  siRNA target sequence for DNCH1 (NM_001376.2,3485-3503).
caaagtcccgccaagagtt

SEQ ID NO: 80617 - DNA, 19 bp, Homo sapiens
  siRNA target sequence for DNCH1 (NM_001376.2,3538-3556).
gatgcagtgaccttcatca

SEQ ID NO: 80618 - DNA, 19 bp, Homo sapiens
  siRNA target sequence for DNCH1 (NM_001376.2,3623-3641).
gccagcgcttactggaaaa

SEQ ID NO: 80619 - DNA, 19 bp, Homo sapiens
  siRNA target sequence for DNCH1 (NM_001376.2,3627-3645).
gcgcttactggaaaagcaa

SEQ ID NO: 80620 - DNA, 19 bp, Homo sapiens
  siRNA target sequence for DNCH1 (NM_001376.2,3658-3676).
ccaccttcctggctttata

SEQ ID NO: 80621 - DNA, 19 bp, Homo sapiens
  siRNA target sequence for DNCH1 (NM_001376.2,3659-3677).
caccttcctggctttatat

SEQ ID NO: 80622 - DNA, 19 bp, Homo sapiens
  siRNA target sequence for DNCH1 (NM_001376.2,3662-3680).
cttcctggctttatattga

SEQ ID NO: 80623 - DNA, 19 bp, Homo sapiens
  siRNA target sequence for DNCH1 (NM_001376.2,3698-3716).
ggggagccttcaatgacat

SEQ ID NO: 80624 - DNA, 19 bp, Homo sapiens
  siRNA target sequence for DNCH1 (NM_001376.2,3952-3970).
gcgctggaattgacagata

SEQ ID NO: 80625 - DNA, 19 bp, Homo sapiens
  siRNA target sequence for DNCH1 (NM_001376.2,4005-4023).
ggtggccttagaagaatta

SEQ ID NO: 80626 - DNA, 19 bp, Homo sapiens
  siRNA target sequence for DNCH1 (NM_001376.2,4039-4057).
gtttggtcagaactttcta

SEQ ID NO: 80627 - DNA, 19 bp, Homo sapiens
  siRNA target sequence for DNCH1 (NM_001376.2,4059-4077).
ggtttgggagcaaatcgat

SEQ ID NO: 80628 - DNA, 19 bp, Homo sapiens
  siRNA target sequence for DNCH1 (NM_001376.2,4089-4107).
gcaaccctgggtttcagta

SEQ ID NO: 80629 - DNA, 19 bp, Homo sapiens
  siRNA target sequence for DNCH1 (NM_001376.2,4112-4130).
ctcgaaagcttcgacaaaa

SEQ ID NO: 80630 - DNA, 19 bp, Homo sapiens
  siRNA target sequence for DNCH1 (NM_001376.2,4114-4132).
cgaaagcttcgacaaaatt

SEQ ID NO: 80631 - DNA, 19 bp, Homo sapiens
  siRNA target sequence for DNCH1 (NM_001376.2,4119-4137).
gcttcgacaaaatttggat

SEQ ID NO: 80632 - DNA, 19 bp, Homo sapiens
  siRNA target sequence for DNCH1 (NM_001376.2,4141-4159).
ctcctgaaccagctgaaaa

SEQ ID NO: 80633 - DNA, 19 bp, Homo sapiens
  siRNA target sequence for DNCH1 (NM_001376.2,4180-4198).
cagtatgcgtcctatgagt

SEQ ID NO: 80634 - DNA, 19 bp, Homo sapiens
  siRNA target sequence for DNCH1 (NM_001376.2,4182-4200).
gtatgcgtcctatgagttt

SEQ ID NO: 80635 - DNA, 19 bp, Homo sapiens
  siRNA target sequence for DNCH1 (NM_001376.2,4187-4205).
cgtcctatgagtttgttca

SEQ ID NO: 80636 - DNA, 19 bp, Homo sapiens
  siRNA target sequence for DNCH1 (NM_001376.2,4215-4233).
gaaaggttacatgaagata

SEQ ID NO: 80637 - DNA, 19 bp, Homo sapiens
  siRNA target sequence for DNCH1 (NM_001376.2,4239-4257).
gctggtgattgaactgaaa

SEQ ID NO: 80638 - DNA, 19 bp, Homo sapiens
  siRNA target sequence for DNCH1 (NM_001376.2,4254-4272).
gaaatccgaagcacttaaa

SEQ ID NO: 80639 - DNA, 19 bp, Homo sapiens
  siRNA target sequence for DNCH1 (NM_001376.2,4296-4314).
gaaaaggcttcacgttaat

SEQ ID NO: 80640 - DNA, 19 bp, Homo sapiens
  siRNA target sequence for DNCH1 (NM_001376.2,4306-4324).
cacgttaattgggttgttt

SEQ ID NO: 80641 - DNA, 19 bp, Homo sapiens
  siRNA target sequence for DNCH1 (NM_001376.2,4308-4326).
cgttaattgggttgtttct

SEQ ID NO: 80642 - DNA, 19 bp, Homo sapiens
  siRNA target sequence for DNCH1 (NM_001376.2,4330-4348).
ctaacccttggccaaatct

SEQ ID NO: 80643 - DNA, 19 bp, Homo sapiens
  siRNA target sequence for DNCH1 (NM_001376.2,4376-4394).
cgattgtcaaggatgtact

SEQ ID NO: 80644 - DNA, 19 bp, Homo sapiens
  siRNA target sequence for DNCH1 (NM_001376.2,4445-4463).
gagaagtgtggaatactta

SEQ ID NO: 80645 - DNA, 19 bp, Homo sapiens
  siRNA target sequence for DNCH1 (NM_001376.2,4465-4483).
gaactagacttggttaatt

SEQ ID NO: 80646 - DNA, 19 bp, Homo sapiens
  siRNA target sequence for DNCH1 (NM_001376.2,4574-4592).
ctccgtattacaaggtttt

SEQ ID NO: 80647 - DNA, 19 bp, Homo sapiens
  siRNA target sequence for DNCH1 (NM_001376.2,4577-4595).
cgtattacaaggtttttga

SEQ ID NO: 80648 - DNA, 19 bp, Homo sapiens
  siRNA target sequence for DNCH1 (NM_001376.2,4578-4596).
gtattacaaggtttttgaa

SEQ ID NO: 80649 - DNA, 19 bp, Homo sapiens
  siRNA target sequence for DNCH1 (NM_001376.2,4676-4694).
gggtctacctggaaggtat

SEQ ID NO: 80650 - DNA, 19 bp, Homo sapiens
  siRNA target sequence for DNCH1 (NM_001376.2,4754-4772).
gcatcagcactgagttttt

SEQ ID NO: 80651 - DNA, 19 bp, Homo sapiens
  siRNA target sequence for DNCH1 (NM_001376.2,4774-4792).
gctctaatgaaaaaagtgt

SEQ ID NO: 80652 - DNA, 19 bp, Homo sapiens
  siRNA target sequence for DNCH1 (NM_001376.2,4859-4877).
cagacctgctaggaaagat

SEQ ID NO: 80653 - DNA, 19 bp, Homo sapiens
  siRNA target sequence for DNCH1 (NM_001376.2,4903-4921).
gaaagagagcggtcatctt

SEQ ID NO: 80654 - DNA, 19 bp, Homo sapiens
  siRNA target sequence for DNCH1 (NM_001376.2,5040-5058).
cctgaacgaggataactct

SEQ ID NO: 80655 - DNA, 19 bp, Homo sapiens
  siRNA target sequence for DNCH1 (NM_001376.2,5046-5064).
cgaggataactctgttgtt

SEQ ID NO: 80656 - DNA, 19 bp, Homo sapiens
  siRNA target sequence for DNCH1 (NM_001376.2,5059-5077).
gttgttttgggtatttcat

SEQ ID NO: 80657 - DNA, 19 bp, Homo sapiens
  siRNA target sequence for DNCH1 (NM_001376.2,5083-5101).
gaaggagaggaggttatgt

SEQ ID NO: 80658 - DNA, 19 bp, Homo sapiens
  siRNA target sequence for DNCH1 (NM_001376.2,5147-5165).
ggctcacattggtagaaaa

SEQ ID NO: 80659 - DNA, 19 bp, Homo sapiens
  siRNA target sequence for DNCH1 (NM_001376.2,5191-5209).
ctgcttgctgagtctgtta

SEQ ID NO: 80660 - DNA, 19 bp, Homo sapiens
  siRNA target sequence for DNCH1 (NM_001376.2,5204-5222).
ctgttacggaagttgagat

SEQ ID NO: 80661 - DNA, 19 bp, Homo sapiens
  siRNA target sequence for DNCH1 (NM_001376.2,5206-5224).
gttacggaagttgagattt

SEQ ID NO: 80662 - DNA, 19 bp, Homo sapiens
  siRNA target sequence for DNCH1 (NM_001376.2,5240-5258).
caattgacccaaataccta

SEQ ID NO: 80663 - DNA, 19 bp, Homo sapiens
  siRNA target sequence for DNCH1 (NM_001376.2,5248-5266).
ccaaatacctacatcactt

SEQ ID NO: 80664 - DNA, 19 bp, Homo sapiens
  siRNA target sequence for DNCH1 (NM_001376.2,5256-5274).
ctacatcacttggattgat

SEQ ID NO: 80665 - DNA, 19 bp, Homo sapiens
  siRNA target sequence for DNCH1 (NM_001376.2,5403-5421).
ggtcaccctcaatgtgtta

SEQ ID NO: 80666 - DNA, 19 bp, Homo sapiens
  siRNA target sequence for DNCH1 (NM_001376.2,5459-5477).
ggcggaagctagaacactt

SEQ ID NO: 80667 - DNA, 19 bp, Homo sapiens
  siRNA target sequence for DNCH1 (NM_001376.2,5466-5484).
gctagaacacttgattaca

SEQ ID NO: 80668 - DNA, 19 bp, Homo sapiens
  siRNA target sequence for DNCH1 (NM_001376.2,5565-5583).
ccagatgcgattttacttt

SEQ ID NO: 80669 - DNA, 19 bp, Homo sapiens
  siRNA target sequence for DNCH1 (NM_001376.2,5701-5719).
gaccgctgctatttgacaa

SEQ ID NO: 80670 - DNA, 19 bp, Homo sapiens
  siRNA target sequence for DNCH1 (NM_001376.2,5704-5722).
cgctgctatttgacaatga

SEQ ID NO: 80671 - DNA, 19 bp, Homo sapiens
  siRNA target sequence for DNCH1 (NM_001376.2,5809-5827).
cagcttggacggtttgttt

SEQ ID NO: 80672 - DNA, 19 bp, Homo sapiens
  siRNA target sequence for DNCH1 (NM_001376.2,5811-5829).
gcttggacggtttgtttta

SEQ ID NO: 80673 - DNA, 19 bp, Homo sapiens
  siRNA target sequence for DNCH1 (NM_001376.2,6021-6039).
gacctctgcccccattact

SEQ ID NO: 80674 - DNA, 19 bp, Homo sapiens
  siRNA target sequence for DNCH1 (NM_001376.2,6038-6056).
cttgtgagctgctgaacaa

SEQ ID NO: 80675 - DNA, 19 bp, Homo sapiens
  siRNA target sequence for DNCH1 (NM_001376.2,6246-6264).
caaaatcgtcccgtttttt

SEQ ID NO: 80676 - DNA, 19 bp, Homo sapiens
  siRNA target sequence for DNCH1 (NM_001376.2,6252-6270).
cgtcccgttttttaaacta

SEQ ID NO: 80677 - DNA, 19 bp, Homo sapiens
  siRNA target sequence for DNCH1 (NM_001376.2,6253-6271).
gtcccgttttttaaactat

SEQ ID NO: 80678 - DNA, 19 bp, Homo sapiens
  siRNA target sequence for DNCH1 (NM_001376.2,6285-6303).
ctcttcccaaagccattat

SEQ ID NO: 80679 - DNA, 19 bp, Homo sapiens
  siRNA target sequence for DNCH1 (NM_001376.2,6310-6328).
ggtcttcgggctttgaaga

SEQ ID NO: 80680 - DNA, 19 bp, Homo sapiens
  siRNA target sequence for DNCH1 (NM_001376.2,6440-6458).
ctgaacaagagattctgat

SEQ ID NO: 80681 - DNA, 19 bp, Homo sapiens
  siRNA target sequence for DNCH1 (NM_001376.2,6598-6616).
gtgtgtcaggagatgtatt

SEQ ID NO: 80682 - DNA, 19 bp, Homo sapiens
  siRNA target sequence for DNCH1 (NM_001376.2,6609-6627).
gatgtatttgacatatgga

SEQ ID NO: 80683 - DNA, 19 bp, Homo sapiens
  siRNA target sequence for DNCH1 (NM_001376.2,6681-6699).
gatcacccagatcaatcat

SEQ ID NO: 80684 - DNA, 19 bp, Homo sapiens
  siRNA target sequence for DNCH1 (NM_001376.2,6971-6989).
cagagtgggttgagaactt

SEQ ID NO: 80685 - DNA, 19 bp, Homo sapiens
  siRNA target sequence for DNCH1 (NM_001376.2,6973-6991).
gagtgggttgagaacttga

SEQ ID NO: 80686 - DNA, 19 bp, Homo sapiens
  siRNA target sequence for DNCH1 (NM_001376.2,7051-7069).
ccacccaatgtgagaataa

SEQ ID NO: 80687 - DNA, 19 bp, Homo sapiens
  siRNA target sequence for DNCH1 (NM_001376.2,7055-7073).
ccaatgtgagaataatgtt

SEQ ID NO: 80688 - DNA, 19 bp, Homo sapiens
  siRNA target sequence for DNCH1 (NM_001376.2,7157-7175).
ccgacatgatcttcaacaa

SEQ ID NO: 80689 - DNA, 19 bp, Homo sapiens
  siRNA target sequence for DNCH1 (NM_001376.2,7276-7294).
cccatgctgcagatccaaa

SEQ ID NO: 80690 - DNA, 19 bp, Homo sapiens
  siRNA target sequence for DNCH1 (NM_001376.2,7444-7462).
cgcaacgtggcgcagtata

SEQ ID NO: 80691 - DNA, 19 bp, Homo sapiens
  siRNA target sequence for DNCH1 (NM_001376.2,7445-7463).
gcaacgtggcgcagtataa

SEQ ID NO: 80692 - DNA, 19 bp, Homo sapiens
  siRNA target sequence for DNCH1 (NM_001376.2,7508-7526).
gctacattcagcgatatct

SEQ ID NO: 80693 - DNA, 19 bp, Homo sapiens
  siRNA target sequence for DNCH1 (NM_001376.2,7555-7573).
ggagacagccggctaaaaa

SEQ ID NO: 80694 - DNA, 19 bp, Homo sapiens
  siRNA target sequence for DNCH1 (NM_001376.2,7556-7574).
gagacagccggctaaaaat

SEQ ID NO: 80695 - DNA, 19 bp, Homo sapiens
  siRNA target sequence for DNCH1 (NM_001376.2,7558-7576).
gacagccggctaaaaatga

SEQ ID NO: 80696 - DNA, 19 bp, Homo sapiens
  siRNA target sequence for DNCH1 (NM_001376.2,7560-7578).
cagccggctaaaaatgaga

SEQ ID NO: 80697 - DNA, 19 bp, Homo sapiens
  siRNA target sequence for DNCH1 (NM_001376.2,7585-7603).
ctgggtgaatacatcagaa

SEQ ID NO: 80698 - DNA, 19 bp, Homo sapiens
  siRNA target sequence for DNCH1 (NM_001376.2,7588-7606).
ggtgaatacatcagaagaa

SEQ ID NO: 80699 - DNA, 19 bp, Homo sapiens
  siRNA target sequence for DNCH1 (NM_001376.2,7591-7609).
gaatacatcagaagaatca

SEQ ID NO: 80700 - DNA, 19 bp, Homo sapiens
  siRNA target sequence for DNCH1 (NM_001376.2,7623-7641).
gcccactgcgcccaacata

SEQ ID NO: 80701 - DNA, 19 bp, Homo sapiens
  siRNA target sequence for DNCH1 (NM_001376.2,7635-7653).
caacatacccattatcgat

SEQ ID NO: 80702 - DNA, 19 bp, Homo sapiens
  siRNA target sequence for DNCH1 (NM_001376.2,7638-7656).
catacccattatcgattat

SEQ ID NO: 80703 - DNA, 19 bp, Homo sapiens
  siRNA target sequence for DNCH1 (NM_001376.2,7695-7713).
caaggtgcctcagattgaa

SEQ ID NO: 80704 - DNA, 19 bp, Homo sapiens
  siRNA target sequence for DNCH1 (NM_001376.2,7772-7790).
gccacgaagccctcttgta

SEQ ID NO: 80705 - DNA, 19 bp, Homo sapiens
  siRNA target sequence for DNCH1 (NM_001376.2,7774-7792).
cacgaagccctcttgtaca

SEQ ID NO: 80706 - DNA, 19 bp, Homo sapiens
  siRNA target sequence for DNCH1 (NM_001376.2,7777-7795).
gaagccctcttgtacactt

SEQ ID NO: 80707 - DNA, 19 bp, Homo sapiens
  siRNA target sequence for DNCH1 (NM_001376.2,7793-7811).
cttggctggccgaacacaa

SEQ ID NO: 80708 - DNA, 19 bp, Homo sapiens
  siRNA target sequence for DNCH1 (NM_001376.2,7976-7994).
cacctaatggggtggtttt

SEQ ID NO: 80709 - DNA, 19 bp, Homo sapiens
  siRNA target sequence for DNCH1 (NM_001376.2,8043-8061).
caacttgccagatatggat

SEQ ID NO: 80710 - DNA, 19 bp, Homo sapiens
  siRNA target sequence for DNCH1 (NM_001376.2,8068-8086).
gggacccagagggtcatat

SEQ ID NO: 80711 - DNA, 19 bp, Homo sapiens
  siRNA target sequence for DNCH1 (NM_001376.2,8124-8142).
ccgtacctcagatcaaaca

SEQ ID NO: 80712 - DNA, 19 bp, Homo sapiens
  siRNA target sequence for DNCH1 (NM_001376.2,8125-8143).
cgtacctcagatcaaacat

SEQ ID NO: 80713 - DNA, 19 bp, Homo sapiens
  siRNA target sequence for DNCH1 (NM_001376.2,8154-8172).
ggagagaatccagtttgtt

SEQ ID NO: 80714 - DNA, 19 bp, Homo sapiens
  siRNA target sequence for DNCH1 (NM_001376.2,8240-8258).
ctgtcgtgtatgtggatta

SEQ ID NO: 80715 - DNA, 19 bp, Homo sapiens
  siRNA target sequence for DNCH1 (NM_001376.2,8270-8288).
cctccctcacacagatcta

SEQ ID NO: 80716 - DNA, 19 bp, Homo sapiens
  siRNA target sequence for DNCH1 (NM_001376.2,8357-8375).
ctgccatggtggagttcta

SEQ ID NO: 80717 - DNA, 19 bp, Homo sapiens
  siRNA target sequence for DNCH1 (NM_001376.2,8378-8396).
ccatgtctcaggagagatt

SEQ ID NO: 80718 - DNA, 19 bp, Homo sapiens
  siRNA target sequence for DNCH1 (NM_001376.2,8403-8421).
ggatacacaacctcactat

SEQ ID NO: 80719 - DNA, 19 bp, Homo sapiens
  siRNA target sequence for DNCH1 (NM_001376.2,8404-8422).
gatacacaacctcactata

SEQ ID NO: 80720 - DNA, 19 bp, Homo sapiens
  siRNA target sequence for DNCH1 (NM_001376.2,8410-8428).
caacctcactatatctatt

SEQ ID NO: 80721 - DNA, 19 bp, Homo sapiens
  siRNA target sequence for DNCH1 (NM_001376.2,8450-8468).
gggtgagaggcatctttga

SEQ ID NO: 80722 - DNA, 19 bp, Homo sapiens
  siRNA target sequence for DNCH1 (NM_001376.2,8451-8469).
ggtgagaggcatctttgaa

SEQ ID NO: 80723 - DNA, 19 bp, Homo sapiens
  siRNA target sequence for DNCH1 (NM_001376.2,8484-8502).
ggagaccctgcctgttgaa

SEQ ID NO: 80724 - DNA, 19 bp, Homo sapiens
  siRNA target sequence for DNCH1 (NM_001376.2,8533-8551).
ctgcgtctcttccaagata

SEQ ID NO: 80725 - DNA, 19 bp, Homo sapiens
  siRNA target sequence for DNCH1 (NM_001376.2,8537-8555).
gtctcttccaagatagact

SEQ ID NO: 80726 - DNA, 19 bp, Homo sapiens
  siRNA target sequence for DNCH1 (NM_001376.2,8728-8746).
gctaggctgaaggtctttt

SEQ ID NO: 80727 - DNA, 19 bp, Homo sapiens
  siRNA target sequence for DNCH1 (NM_001376.2,8729-8747).
ctaggctgaaggtctttta

SEQ ID NO: 80728 - DNA, 19 bp, Homo sapiens
  siRNA target sequence for DNCH1 (NM_001376.2,8764-8782).
gttccgctggtgctgttta

SEQ ID NO: 80729 - DNA, 19 bp, Homo sapiens
  siRNA target sequence for DNCH1 (NM_001376.2,8768-8786).
cgctggtgctgtttaatga

SEQ ID NO: 80730 - DNA, 19 bp, Homo sapiens
  siRNA target sequence for DNCH1 (NM_001376.2,8797-8815).
cacgtgctgaggattgaca

SEQ ID NO: 80731 - DNA, 19 bp, Homo sapiens
  siRNA target sequence for DNCH1 (NM_001376.2,8985-9003).
gagacgttctggctgtaaa

SEQ ID NO: 80732 - DNA, 19 bp, Homo sapiens
  siRNA target sequence for DNCH1 (NM_001376.2,8987-9005).
gacgttctggctgtaaaaa

SEQ ID NO: 80733 - DNA, 19 bp, Homo sapiens
  siRNA target sequence for DNCH1 (NM_001376.2,9027-9045).
ggatgaatctaatgtgtta

SEQ ID NO: 80734 - DNA, 19 bp, Homo sapiens
  siRNA target sequence for DNCH1 (NM_001376.2,9031-9049).
gaatctaatgtgttagatt

SEQ ID NO: 80735 - DNA, 19 bp, Homo sapiens
  siRNA target sequence for DNCH1 (NM_001376.2,9053-9071).
gattcctggagcgaatgaa

SEQ ID NO: 80736 - DNA, 19 bp, Homo sapiens
  siRNA target sequence for DNCH1 (NM_001376.2,9287-9305).
catcaccagcacttttcaa

SEQ ID NO: 80737 - DNA, 19 bp, Homo sapiens
  siRNA target sequence for DNCH1 (NM_001376.2,9308-9326).
ggtgtgtgttgaattggtt

SEQ ID NO: 80738 - DNA, 19 bp, Homo sapiens
  siRNA target sequence for DNCH1 (NM_001376.2,9460-9478).
catcgggaagccattgtga

SEQ ID NO: 80739 - DNA, 19 bp, Homo sapiens
  siRNA target sequence for DNCH1 (NM_001376.2,9515-9533).
cgaatgctcggctagcaaa

SEQ ID NO: 80740 - DNA, 19 bp, Homo sapiens
  siRNA target sequence for DNCH1 (NM_001376.2,9677-9695).
cagtcgaccaggtagaaga

SEQ ID NO: 80741 - DNA, 19 bp, Homo sapiens
  siRNA target sequence for DNCH1 (NM_001376.2,9700-9718).
cgtcgtgacttgaggataa

SEQ ID NO: 80742 - DNA, 19 bp, Homo sapiens
  siRNA target sequence for DNCH1 (NM_001376.2,9703-9721).
cgtgacttgaggataaaga

SEQ ID NO: 80743 - DNA, 19 bp, Homo sapiens
  siRNA target sequence for DNCH1 (NM_001376.2,9849-9867).
ggaggtaattgcagacaaa

SEQ ID NO: 80744 - DNA, 19 bp, Homo sapiens
  siRNA target sequence for DNCH1 (NM_001376.2,9875-9893).
gtgtcaaagaagatcttga

SEQ ID NO: 80745 - DNA, 19 bp, Homo sapiens
  siRNA target sequence for DNCH1 (NM_001376.2,10161-10179).
gtccaatccaagttacaat

SEQ ID NO: 80746 - DNA, 19 bp, Homo sapiens
  siRNA target sequence for DNCH1 (NM_001376.2,10221-10239).
ggtgaaatgggcaattgca

SEQ ID NO: 80747 - DNA, 19 bp, Homo sapiens
  siRNA target sequence for DNCH1 (NM_001376.2,10229-10247).
gggcaattgcacagcttaa

SEQ ID NO: 80748 - DNA, 19 bp, Homo sapiens
  siRNA target sequence for DNCH1 (NM_001376.2,10445-10463).
ctgtcgaggcaaaagtaaa

SEQ ID NO: 80749 - DNA, 19 bp, Homo sapiens
  siRNA target sequence for DNCH1 (NM_001376.2,10569-10587).
cttgtcagctgcgttcatt

SEQ ID NO: 80750 - DNA, 19 bp, Homo sapiens
  siRNA target sequence for DNCH1 (NM_001376.2,10589-10607).
cctacgcgggttactttga

SEQ ID NO: 80751 - DNA, 19 bp, Homo sapiens
  siRNA target sequence for DNCH1 (NM_001376.2,10612-10630).
cagatgcgtcagaacttgt

SEQ ID NO: 80752 - DNA, 19 bp, Homo sapiens
  siRNA target sequence for DNCH1 (NM_001376.2,10618-10636).
cgtcagaacttgttcacta

SEQ ID NO: 80753 - DNA, 19 bp, Homo sapiens
  siRNA target sequence for DNCH1 (NM_001376.2,10665-10683).
catccagttccgtacagat

SEQ ID NO: 80754 - DNA, 19 bp, Homo sapiens
  siRNA target sequence for DNCH1 (NM_001376.2,10687-10705).
gccaggacggaataccttt

SEQ ID NO: 80755 - DNA, 19 bp, Homo sapiens
  siRNA target sequence for DNCH1 (NM_001376.2,10775-10793).
ccatcatgctgaaacgatt

SEQ ID NO: 80756 - DNA, 19 bp, Homo sapiens
  siRNA target sequence for DNCH1 (NM_001376.2,10779-10797).
catgctgaaacgattcaat

SEQ ID NO: 80757 - DNA, 19 bp, Homo sapiens
  siRNA target sequence for DNCH1 (NM_001376.2,10783-10801).
ctgaaacgattcaataggt

SEQ ID NO: 80758 - DNA, 19 bp, Homo sapiens
  siRNA target sequence for DNCH1 (NM_001376.2,10799-10817).
ggtatccgctgatcattga

SEQ ID NO: 80759 - DNA, 19 bp, Homo sapiens
  siRNA target sequence for DNCH1 (NM_001376.2,10826-10844).
gacaggccacagaattcat

SEQ ID NO: 80760 - DNA, 19 bp, Homo sapiens
  siRNA target sequence for DNCH1 (NM_001376.2,10828-10846).
caggccacagaattcatta

SEQ ID NO: 80761 - DNA, 19 bp, Homo sapiens
  siRNA target sequence for DNCH1 (NM_001376.2,10831-10849).
gccacagaattcattatga

SEQ ID NO: 80762 - DNA, 19 bp, Homo sapiens
  siRNA target sequence for DNCH1 (NM_001376.2,10894-10912).
gacgccttcagaaagaact

SEQ ID NO: 80763 - DNA, 19 bp, Homo sapiens
  siRNA target sequence for DNCH1 (NM_001376.2,10964-10982).
gctacgatccagttttgaa

SEQ ID NO: 80764 - DNA, 19 bp, Homo sapiens
  siRNA target sequence for DNCH1 (NM_001376.2,11056-11074).
ctgtcgccatcgtttgtca

SEQ ID NO: 80765 - DNA, 19 bp, Homo sapiens
  siRNA target sequence for DNCH1 (NM_001376.2,11119-11137).
ctctgttcccgggttactt

SEQ ID NO: 80766 - DNA, 19 bp, Homo sapiens
  siRNA target sequence for DNCH1 (NM_001376.2,11121-11139).
ctgttcccgggttactttt

SEQ ID NO: 80767 - DNA, 19 bp, Homo sapiens
  siRNA target sequence for DNCH1 (NM_001376.2,11126-11144).
cccgggttacttttgtaaa

SEQ ID NO: 80768 - DNA, 19 bp, Homo sapiens
  siRNA target sequence for DNCH1 (NM_001376.2,11128-11146).
cgggttacttttgtaaact

SEQ ID NO: 80769 - DNA, 19 bp, Homo sapiens
  siRNA target sequence for DNCH1 (NM_001376.2,11174-11192).
gccagtgtctaaatgaagt

SEQ ID NO: 80770 - DNA, 19 bp, Homo sapiens
  siRNA target sequence for DNCH1 (NM_001376.2,11217-11235).
ggacgagaaacgatctgat

SEQ ID NO: 80771 - DNA, 19 bp, Homo sapiens
  siRNA target sequence for DNCH1 (NM_001376.2,11220-11238).
cgagaaacgatctgatctt

SEQ ID NO: 80772 - DNA, 19 bp, Homo sapiens
  siRNA target sequence for DNCH1 (NM_001376.2,11223-11241).
gaaacgatctgatcttctt

SEQ ID NO: 80773 - DNA, 19 bp, Homo sapiens
  siRNA target sequence for DNCH1 (NM_001376.2,11228-11246).
gatctgatcttcttaaact

SEQ ID NO: 80774 - DNA, 19 bp, Homo sapiens
  siRNA target sequence for DNCH1 (NM_001376.2,11271-11289).
gcgtcagctggaaaaatct

SEQ ID NO: 80775 - DNA, 19 bp, Homo sapiens
  siRNA target sequence for DNCH1 (NM_001376.2,11313-11331).
gaaagggcgcattttggat

SEQ ID NO: 80776 - DNA, 19 bp, Homo sapiens
  siRNA target sequence for DNCH1 (NM_001376.2,11328-11346).
ggatgacgacacgatcata

SEQ ID NO: 80777 - DNA, 19 bp, Homo sapiens
  siRNA target sequence for DNCH1 (NM_001376.2,11329-11347).
gatgacgacacgatcataa

SEQ ID NO: 80778 - DNA, 19 bp, Homo sapiens
  siRNA target sequence for DNCH1 (NM_001376.2,11332-11350).
gacgacacgatcataacca

SEQ ID NO: 80779 - DNA, 19 bp, Homo sapiens
  siRNA target sequence for DNCH1 (NM_001376.2,11398-11416).
gaggagacggacattgtca

SEQ ID NO: 80780 - DNA, 19 bp, Homo sapiens
  siRNA target sequence for DNCH1 (NM_001376.2,11521-11539).
cagtactccctccagtttt

SEQ ID NO: 80781 - DNA, 19 bp, Homo sapiens
  siRNA target sequence for DNCH1 (NM_001376.2,11603-11621).
cacagcgcctgtccattat

SEQ ID NO: 80782 - DNA, 19 bp, Homo sapiens
  siRNA target sequence for DNCH1 (NM_001376.2,11605-11623).
cagcgcctgtccattataa

SEQ ID NO: 80783 - DNA, 19 bp, Homo sapiens
  siRNA target sequence for DNCH1 (NM_001376.2,11607-11625).
gcgcctgtccattataaca

SEQ ID NO: 80784 - DNA, 19 bp, Homo sapiens
  siRNA target sequence for DNCH1 (NM_001376.2,11608-11626).
cgcctgtccattataacaa

SEQ ID NO: 80785 - DNA, 19 bp, Homo sapiens
  siRNA target sequence for DNCH1 (NM_001376.2,11671-11689).
ctgcatcaggaccacatta

SEQ ID NO: 80786 - DNA, 19 bp, Homo sapiens
  siRNA target sequence for DNCH1 (NM_001376.2,12077-12095).
caaaccttggggagtcttt

SEQ ID NO: 80787 - DNA, 19 bp, Homo sapiens
  siRNA target sequence for DNCH1 (NM_001376.2,12234-12252).
cacgcagatcacttcaatt

SEQ ID NO: 80788 - DNA, 19 bp, Homo sapiens
  siRNA target sequence for DNCH1 (NM_001376.2,12272-12290).
gctttaaccaagcagataa

SEQ ID NO: 80789 - DNA, 19 bp, Homo sapiens
  siRNA target sequence for DNCH1 (NM_001376.2,12293-12311).
caataaacaccgctgtaaa

SEQ ID NO: 80790 - DNA, 19 bp, Homo sapiens
  siRNA target sequence for DNCH1 (NM_001376.2,12539-12557).
ccgtctcacggatatgcaa

SEQ ID NO: 80791 - DNA, 19 bp, Homo sapiens
  siRNA target sequence for DNCH1 (NM_001376.2,12642-12660).
ggggtggtcaaagaagtat

SEQ ID NO: 80792 - DNA, 19 bp, Homo sapiens
  siRNA target sequence for DNCH1 (NM_001376.2,12647-12665).
ggtcaaagaagtatgaatt

SEQ ID NO: 80793 - DNA, 19 bp, Homo sapiens
  siRNA target sequence for DNCH1 (NM_001376.2,12760-12778).
ccgtggtctgcactaaaga

SEQ ID NO: 80794 - DNA, 19 bp, Homo sapiens
  siRNA target sequence for DNCH1 (NM_001376.2,12809-12827).
gcgtggacaacgagtttga

SEQ ID NO: 80795 - DNA, 19 bp, Homo sapiens
  siRNA target sequence for DNCH1 (NM_001376.2,12875-12893).
gtttcgacagtgagtttaa

SEQ ID NO: 80796 - DNA, 19 bp, Homo sapiens
  siRNA target sequence for DNCH1 (NM_001376.2,12902-12920).
gcaaggtcgacggacataa

SEQ ID NO: 80797 - DNA, 19 bp, Homo sapiens
  siRNA target sequence for DNCH1 (NM_001376.2,12903-12921).
caaggtcgacggacataaa

SEQ ID NO: 80798 - DNA, 19 bp, Homo sapiens
  siRNA target sequence for DNCH1 (NM_001376.2,12907-12925).
gtcgacggacataaagaca

SEQ ID NO: 80799 - DNA, 19 bp, Homo sapiens
  siRNA target sequence for DNCH1 (NM_001376.2,12909-12927).
cgacggacataaagacatt

SEQ ID NO: 80800 - DNA, 19 bp, Homo sapiens
  siRNA target sequence for DNCH1 (NM_001376.2,12912-12930).
cggacataaagacattcaa

SEQ ID NO: 80801 - DNA, 19 bp, Homo sapiens
  siRNA target sequence for DNCH1 (NM_001376.2,13052-13070).
gtgtggacatgatcagtaa

SEQ ID NO: 80802 - DNA, 19 bp, Homo sapiens
  siRNA target sequence for DNCH1 (NM_001376.2,13488-13506).
cttcagcgagaggatcaaa

SEQ ID NO: 80803 - DNA, 19 bp, Homo sapiens
  siRNA target sequence for DNCH1 (NM_001376.2,13591-13609).
gtgcctgaggcgtacatca

SEQ ID NO: 80804 - DNA, 19 bp, Homo sapiens
  siRNA target sequence for DNCH1 (NM_001376.2,13610-13628).
ctgccaccaggcagtatgt

SEQ ID NO: 80805 - DNA, 19 bp, Homo sapiens
  siRNA target sequence for DNCH1 (NM_001376.2,13719-13737).
cggagtcacgggtttgaaa

SEQ ID NO: 80806 - DNA, 19 bp, Homo sapiens
  siRNA target sequence for DNCH1 (NM_001376.2,13721-13739).
gagtcacgggtttgaaact

SEQ ID NO: 80807 - DNA, 19 bp, Homo sapiens
  siRNA target sequence for DNCH1 (NM_001376.2,13745-13763).
gggccacgtgcaacaacaa

SEQ ID NO: 80808 - DNA, 19 bp, Homo sapiens
  siRNA target sequence for DNCH1 (NM_001376.2,13888-13906).
cgtgcagacctcatcttca

SEQ ID NO: 80809 - DNA, 19 bp, Homo sapiens
  siRNA target sequence for DNCH1 (NM_001376.2,13905-13923).
caccgtggacttcgaaatt

SEQ ID NO: 80810 - DNA, 19 bp, Homo sapiens
  siRNA target sequence for DNCH1 (NM_001376.2,13908-13926).
cgtggacttcgaaattgct

SEQ ID NO: 80811 - DNA, 19 bp, Homo sapiens
  siRNA target sequence for DNCH1 (NM_001376.2,13909-13927).
gtggacttcgaaattgcta

SEQ ID NO: 80812 - DNA, 19 bp, Homo sapiens
  siRNA target sequence for DNCLI2 (NM_006141.2,134-152).
ctatggtcctccattctga

SEQ ID NO: 80813 - DNA, 19 bp, Homo sapiens
  siRNA target sequence for DNCLI2 (NM_006141.2,182-200).
ctgccgtccggcaagaaca

SEQ ID NO: 80814 - DNA, 19 bp, Homo sapiens
  siRNA target sequence for DNCLI2 (NM_006141.2,202-220).
cctggtcttcggtgaagat

SEQ ID NO: 80815 - DNA, 19 bp, Homo sapiens
  siRNA target sequence for DNCLI2 (NM_006141.2,218-236).
gatggttctggtaaaacaa

SEQ ID NO: 80816 - DNA, 19 bp, Homo sapiens
  siRNA target sequence for DNCLI2 (NM_006141.2,238-256).
cctcatgactaaactacaa

SEQ ID NO: 80817 - DNA, 19 bp, Homo sapiens
  siRNA target sequence for DNCLI2 (NM_006141.2,282-300).
gaggcctagaatatctcta

SEQ ID NO: 80818 - DNA, 19 bp, Homo sapiens
  siRNA target sequence for DNCLI2 (NM_006141.2,455-473).
ccttggactgtgatggaat

SEQ ID NO: 80819 - DNA, 19 bp, Homo sapiens
  siRNA target sequence for DNCLI2 (NM_006141.2,481-499).
gaaatgggctagtgtttta

SEQ ID NO: 80820 - DNA, 19 bp, Homo sapiens
  siRNA target sequence for DNCLI2 (NM_006141.2,548-566).
ctggaacggaagtttgtga

SEQ ID NO: 80821 - DNA, 19 bp, Homo sapiens
  siRNA target sequence for DNCLI2 (NM_006141.2,554-572).
cggaagtttgtgaaagatt

SEQ ID NO: 80822 - DNA, 19 bp, Homo sapiens
  siRNA target sequence for DNCLI2 (NM_006141.2,642-660).
gctccgatgaagaaaatgt

SEQ ID NO: 80823 - DNA, 19 bp, Homo sapiens
  siRNA target sequence for DNCLI2 (NM_006141.2,677-695).
gacaatgtgctgactcata

SEQ ID NO: 80824 - DNA, 19 bp, Homo sapiens
  siRNA target sequence for DNCLI2 (NM_006141.2,807-825).
ggaggttctgccttcagta

SEQ ID NO: 80825 - DNA, 19 bp, Homo sapiens
  siRNA target sequence for DNCLI2 (NM_006141.2,869-887).
ctcgacttgttgtataagt

SEQ ID NO: 80826 - DNA, 19 bp, Homo sapiens
  siRNA target sequence for DNCLI2 (NM_006141.2,880-898).
gtataagtatattgttcat

SEQ ID NO: 80827 - DNA, 19 bp, Homo sapiens
  siRNA target sequence for DNCLI2 (NM_006141.2,927-945).
ctgccttagttgtggaaaa

SEQ ID NO: 80828 - DNA, 19 bp, Homo sapiens
  siRNA target sequence for DNCLI2 (NM_006141.2,931-949).
cttagttgtggaaaaggat

SEQ ID NO: 80829 - DNA, 19 bp, Homo sapiens
  siRNA target sequence for DNCLI2 (NM_006141.2,1021-1039).
gaagccggaagatgcatat

SEQ ID NO: 80830 - DNA, 19 bp, Homo sapiens
  siRNA target sequence for DNCLI2 (NM_006141.2,1073-1091).
ctggtccacgacaaagagt

SEQ ID NO: 80831 - DNA, 19 bp, Homo sapiens
  siRNA target sequence for DNCLI2 (NM_006141.2,1162-1180).
cacgagagcttctgaatct

SEQ ID NO: 80832 - DNA, 19 bp, Homo sapiens
  siRNA target sequence for DNCLI2 (NM_006141.2,1251-1269).
ccccaggcacgtcagtaaa

SEQ ID NO: 80833 - DNA, 19 bp, Homo sapiens
  siRNA target sequence for DNCLI2 (NM_006141.2,1252-1270).
cccaggcacgtcagtaaaa

SEQ ID NO: 80834 - DNA, 19 bp, Homo sapiens
  siRNA target sequence for DNCLI2 (NM_006141.2,1273-1291).
gccggacccaaacatcaaa

SEQ ID NO: 80835 - DNA, 19 bp, Homo sapiens
  siRNA target sequence for DNCLI2 (NM_006141.2,1398-1416).
ccaagaagtcaggacaaaa

SEQ ID NO: 80836 - DNA, 19 bp, Homo sapiens
  siRNA target sequence for DNCLI2 (NM_006141.2,1417-1435).
gactgtgttgtcaaatgtt

SEQ ID NO: 80837 - DNA, 19 bp, Homo sapiens
  siRNA target sequence for DNCLI2 (NM_006141.2,1467-1485).
cagactctatggtaacaaa

SEQ ID NO: 80838 - DNA, 19 bp, Homo sapiens
  siRNA target sequence for DNCLI2 (NM_006141.2,1469-1487).
gactctatggtaacaaact

SEQ ID NO: 80839 - DNA, 19 bp, Homo sapiens
  siRNA target sequence for DPCK (NM_025233.3,206-224).
ggtgaatcacacactctat

SEQ ID NO: 80840 - DNA, 19 bp, Homo sapiens
  siRNA target sequence for DPCK (NM_025233.3,289-307).
ccacgtttgaggttcttga

SEQ ID NO: 80841 - DNA, 19 bp, Homo sapiens
  siRNA target sequence for DPCK (NM_025233.3,290-308).
cacgtttgaggttcttgat

SEQ ID NO: 80842 - DNA, 19 bp, Homo sapiens
  siRNA target sequence for DPCK (NM_025233.3,297-315).
gaggttcttgatttcatca

SEQ ID NO: 80843 - DNA, 19 bp, Homo sapiens
  siRNA target sequence for DPCK (NM_025233.3,361-379).
gaatcctactgaccaatat

SEQ ID NO: 80844 - DNA, 19 bp, Homo sapiens
  siRNA target sequence for DPCK (NM_025233.3,444-462).
gaagtcgtgttgacagatt

SEQ ID NO: 80845 - DNA, 19 bp, Homo sapiens
  siRNA target sequence for DPCK (NM_025233.3,1062-1080).
ctgaaggacctcagacata

SEQ ID NO: 80846 - DNA, 19 bp, Homo sapiens
  siRNA target sequence for DPCK (NM_025233.3,1064-1082).
gaaggacctcagacataca

SEQ ID NO: 80847 - DNA, 19 bp, Homo sapiens
  siRNA target sequence for DPCK (NM_025233.3,1114-1132).
gcttccgccagcgaatgtt

SEQ ID NO: 80848 - DNA, 19 bp, Homo sapiens
  siRNA target sequence for DPCK (NM_025233.3,1142-1160).
gcttcggcctccatatgaa

SEQ ID NO: 80849 - DNA, 19 bp, Homo sapiens
  siRNA target sequence for DPCK (NM_025233.3,1143-1161).
cttcggcctccatatgaaa

SEQ ID NO: 80850 - DNA, 19 bp, Homo sapiens
  siRNA target sequence for DPCK (NM_025233.3,1172-1190).
ccccacatgtctctatgta

SEQ ID NO: 80851 - DNA, 19 bp, Homo sapiens
  siRNA target sequence for DPCK (NM_025233.3,1173-1191).
cccacatgtctctatgtaa

SEQ ID NO: 80852 - DNA, 19 bp, Homo sapiens
  siRNA target sequence for DPCK (NM_025233.3,1174-1192).
ccacatgtctctatgtaat

SEQ ID NO: 80853 - DNA, 19 bp, Homo sapiens
  siRNA target sequence for DPCK (NM_025233.3,1175-1193).
cacatgtctctatgtaatt

SEQ ID NO: 80854 - DNA, 19 bp, Homo sapiens
  siRNA target sequence for DPCK (NM_025233.3,1331-1349).
ggaggcctttggaacagat

SEQ ID NO: 80855 - DNA, 19 bp, Homo sapiens
  siRNA target sequence for DPCK (NM_025233.3,1345-1363).
cagatattctccataaaga

SEQ ID NO: 80856 - DNA, 19 bp, Homo sapiens
  siRNA target sequence for DPCK (NM_025233.3,1393-1411).
gccgggtgtttgggaataa

SEQ ID NO: 80857 - DNA, 19 bp, Homo sapiens
  siRNA target sequence for DPCK (NM_025233.3,1395-1413).
cgggtgtttgggaataaga

SEQ ID NO: 80858 - DNA, 19 bp, Homo sapiens
  siRNA target sequence for DQX1 (NM_133637.1,563-581).
ggggcgtgctggtactaga

SEQ ID NO: 80859 - DNA, 19 bp, Homo sapiens
  siRNA target sequence for DQX1 (NM_133637.1,564-582).
gggcgtgctggtactagat

SEQ ID NO: 80860 - DNA, 19 bp, Homo sapiens
  siRNA target sequence for DQX1 (NM_133637.1,566-584).
gcgtgctggtactagatga

SEQ ID NO: 80861 - DNA, 19 bp, Homo sapiens
  siRNA target sequence for DQX1 (NM_133637.1,594-612).
gcggtcggtggcatcagat

SEQ ID NO: 80862 - DNA, 19 bp, Homo sapiens
  siRNA target sequence for DQX1 (NM_133637.1,595-613).
cggtcggtggcatcagatt

SEQ ID NO: 80863 - DNA, 19 bp, Homo sapiens
  siRNA target sequence for DQX1 (NM_133637.1,597-615).
gtcggtggcatcagattca

SEQ ID NO: 80864 - DNA, 19 bp, Homo sapiens
  siRNA target sequence for DQX1 (NM_133637.1,599-617).
cggtggcatcagattcact

SEQ ID NO: 80865 - DNA, 19 bp, Homo sapiens
  siRNA target sequence for DQX1 (NM_133637.1,719-737).
ggggcaatcctcctattgt

SEQ ID NO: 80866 - DNA, 19 bp, Homo sapiens
  siRNA target sequence for DQX1 (NM_133637.1,1014-1032).
catggatgcccgaaaggtt

SEQ ID NO: 80867 - DNA, 19 bp, Homo sapiens
  siRNA target sequence for DQX1 (NM_133637.1,1107-1125).
gctccgaagtgtttacaat

SEQ ID NO: 80868 - DNA, 19 bp, Homo sapiens
  siRNA target sequence for DQX1 (NM_133637.1,1130-1148).
ggatccgagcagaattcca

SEQ ID NO: 80869 - DNA, 19 bp, Homo sapiens
  siRNA target sequence for DQX1 (NM_133637.1,1223-1241).
gcctctgcctgtatcctaa

SEQ ID NO: 80870 - DNA, 19 bp, Homo sapiens
  siRNA target sequence for DQX1 (NM_133637.1,1233-1251).
gtatcctaagtccttctta

SEQ ID NO: 80871 - DNA, 19 bp, Homo sapiens
  siRNA target sequence for DQX1 (NM_133637.1,1238-1256).
ctaagtccttcttagaact

SEQ ID NO: 80872 - DNA, 19 bp, Homo sapiens
  siRNA target sequence for DQX1 (NM_133637.1,1242-1260).
gtccttcttagaactagaa

SEQ ID NO: 80873 - DNA, 19 bp, Homo sapiens
  siRNA target sequence for DQX1 (NM_133637.1,1446-1464).
gtcagatctgggtgtcata

SEQ ID NO: 80874 - DNA, 19 bp, Homo sapiens
  siRNA target sequence for DQX1 (NM_133637.1,1448-1466).
cagatctgggtgtcatact

SEQ ID NO: 80875 - DNA, 19 bp, Homo sapiens
  siRNA target sequence for DQX1 (NM_133637.1,1450-1468).
gatctgggtgtcatactat

SEQ ID NO: 80876 - DNA, 19 bp, Homo sapiens
  siRNA target sequence for DQX1 (NM_133637.1,1457-1475).
gtgtcatactatcagaatt

SEQ ID NO: 80877 - DNA, 19 bp, Homo sapiens
  siRNA target sequence for DQX1 (NM_133637.1,1510-1528).
gcctcatgcgagtttgact

SEQ ID NO: 80878 - DNA, 19 bp, Homo sapiens
  siRNA target sequence for DQX1 (NM_133637.1,1665-1683).
ggtgtatgaagcctttata

SEQ ID NO: 80879 - DNA, 19 bp, Homo sapiens
  siRNA target sequence for DQX1 (NM_133637.1,1710-1728).
ccaggctcgaggtctgaat

SEQ ID NO: 80880 - DNA, 19 bp, Homo sapiens
  siRNA target sequence for DQX1 (NM_133637.1,1763-1781).
gagaactcctagaactcat

SEQ ID NO: 80881 - DNA, 19 bp, Homo sapiens
  siRNA target sequence for DQX1 (NM_133637.1,1779-1797).
catgcaacgaattgaactt

SEQ ID NO: 80882 - DNA, 19 bp, Homo sapiens
  siRNA target sequence for DQX1 (NM_133637.1,1892-1910).
cagacgggactggaaatta

SEQ ID NO: 80883 - DNA, 19 bp, Homo sapiens
  siRNA target sequence for DQX1 (NM_133637.1,1896-1914).
cgggactggaaattacctt

SEQ ID NO: 80884 - DNA, 19 bp, Homo sapiens
  siRNA target sequence for DQX1 (NM_133637.1,1997-2015).
gggtgctctaccacaattt

SEQ ID NO: 80885 - DNA, 19 bp, Homo sapiens
  siRNA target sequence for DQX1 (NM_133637.1,2042-2060).
ccattgtttctgagattca

SEQ ID NO: 80886 - DNA, 19 bp, Homo sapiens
  siRNA target sequence for DQX1 (NM_133637.1,2089-2107).
ccatacttcctgagtaact

SEQ ID NO: 80887 - DNA, 19 bp, Homo sapiens
  siRNA target sequence for DTYMK (NM_012145.1,142-160).
ctccggttcccggaaagat

SEQ ID NO: 80888 - DNA, 19 bp, Homo sapiens
  siRNA target sequence for DTYMK (NM_012145.1,164-182).
ctgaaatcggcaaacttct

SEQ ID NO: 80889 - DNA, 19 bp, Homo sapiens
  siRNA target sequence for DTYMK (NM_012145.1,222-240).
ctcggtgcacctgcttttt

SEQ ID NO: 80890 - DNA, 19 bp, Homo sapiens
  siRNA target sequence for DTYMK (NM_012145.1,225-243).
ggtgcacctgcttttttct

SEQ ID NO: 80891 - DNA, 19 bp, Homo sapiens
  siRNA target sequence for DTYMK (NM_012145.1,245-263).
caaatcgctgggaacaagt

SEQ ID NO: 80892 - DNA, 19 bp, Homo sapiens
  siRNA target sequence for DTYMK (NM_012145.1,254-272).
gggaacaagtgccgttaat

SEQ ID NO: 80893 - DNA, 19 bp, Homo sapiens
  siRNA target sequence for DTYMK (NM_012145.1,255-273).
ggaacaagtgccgttaatt

SEQ ID NO: 80894 - DNA, 19 bp, Homo sapiens
  siRNA target sequence for DTYMK (NM_012145.1,256-274).
gaacaagtgccgttaatta

SEQ ID NO: 80895 - DNA, 19 bp, Homo sapiens
  siRNA target sequence for DTYMK (NM_012145.1,262-280).
gtgccgttaattaaggaaa

SEQ ID NO: 80896 - DNA, 19 bp, Homo sapiens
  siRNA target sequence for DTYMK (NM_012145.1,265-283).
ccgttaattaaggaaaagt

SEQ ID NO: 80897 - DNA, 19 bp, Homo sapiens
  siRNA target sequence for DTYMK (NM_012145.1,266-284).
cgttaattaaggaaaagtt

SEQ ID NO: 80898 - DNA, 19 bp, Homo sapiens
  siRNA target sequence for DTYMK (NM_012145.1,299-317).
ccctcgtcgtggacagata

SEQ ID NO: 80899 - DNA, 19 bp, Homo sapiens
  siRNA target sequence for DTYMK (NM_012145.1,307-325).
gtggacagatacgcatttt

SEQ ID NO: 80900 - DNA, 19 bp, Homo sapiens
  siRNA target sequence for DTYMK (NM_012145.1,309-327).
ggacagatacgcattttct

SEQ ID NO: 80901 - DNA, 19 bp, Homo sapiens
  siRNA target sequence for DTYMK (NM_012145.1,464-482).
gccatgagcgctatgagaa

SEQ ID NO: 80902 - DNA, 19 bp, Homo sapiens
  siRNA target sequence for DTYMK (NM_012145.1,512-530).
gtttccaccagctcatgaa

SEQ ID NO: 80903 - DNA, 19 bp, Homo sapiens
  siRNA target sequence for DTYMK (NM_012145.1,641-659).
cgctgggggagctatggaa

SEQ ID NO: 80904 - DNA, 19 bp, Homo sapiens
  siRNA target sequence for DYRK1A (NM_001396.2,121-139).
cggcttgcaccgtcatttt

SEQ ID NO: 80905 - DNA, 19 bp, Homo sapiens
  siRNA target sequence for DYRK1A (NM_001396.2,124-142).
cttgcaccgtcattttcat

SEQ ID NO: 80906 - DNA, 19 bp, Homo sapiens
  siRNA target sequence for DYRK1A (NM_001396.2,201-219).
ccgtcgccagccaaacata

SEQ ID NO: 80907 - DNA, 19 bp, Homo sapiens
  siRNA target sequence for DYRK1A (NM_001396.2,202-220).
cgtcgccagccaaacataa

SEQ ID NO: 80908 - DNA, 19 bp, Homo sapiens
  siRNA target sequence for DYRK1A (NM_001396.2,206-224).
gccagccaaacataagtga

SEQ ID NO: 80909 - DNA, 19 bp, Homo sapiens
  siRNA target sequence for DYRK1A (NM_001396.2,229-247).
caggtttctgccttatcat

SEQ ID NO: 80910 - DNA, 19 bp, Homo sapiens
  siRNA target sequence for DYRK1A (NM_001396.2,231-249).
ggtttctgccttatcatat

SEQ ID NO: 80911 - DNA, 19 bp, Homo sapiens
  siRNA target sequence for DYRK1A (NM_001396.2,245-263).
catattctgaccagattca

SEQ ID NO: 80912 - DNA, 19 bp, Homo sapiens
  siRNA target sequence for DYRK1A (NM_001396.2,283-301).
gtgatgcctgatattgtca

SEQ ID NO: 80913 - DNA, 19 bp, Homo sapiens
  siRNA target sequence for DYRK1A (NM_001396.2,290-308).
ctgatattgtcatgttaca

SEQ ID NO: 80914 - DNA, 19 bp, Homo sapiens
  siRNA target sequence for DYRK1A (NM_001396.2,311-329).
ggcggatgccccaaacctt

SEQ ID NO: 80915 - DNA, 19 bp, Homo sapiens
  siRNA target sequence for DYRK1A (NM_001396.2,367-385).
gttgacttgatcaaaacat

SEQ ID NO: 80916 - DNA, 19 bp, Homo sapiens
  siRNA target sequence for DYRK1A (NM_001396.2,445-463).
ggagacgattctagtcata

SEQ ID NO: 80917 - DNA, 19 bp, Homo sapiens
  siRNA target sequence for DYRK1A (NM_001396.2,446-464).
gagacgattctagtcataa

SEQ ID NO: 80918 - DNA, 19 bp, Homo sapiens
  siRNA target sequence for DYRK1A (NM_001396.2,448-466).
gacgattctagtcataaga

SEQ ID NO: 80919 - DNA, 19 bp, Homo sapiens
  siRNA target sequence for DYRK1A (NM_001396.2,537-555).
gtggatggatcgttacgaa

SEQ ID NO: 80920 - DNA, 19 bp, Homo sapiens
  siRNA target sequence for DYRK1A (NM_001396.2,539-557).
ggatggatcgttacgaaat

SEQ ID NO: 80921 - DNA, 19 bp, Homo sapiens
  siRNA target sequence for DYRK1A (NM_001396.2,540-558).
gatggatcgttacgaaatt

SEQ ID NO: 80922 - DNA, 19 bp, Homo sapiens
  siRNA target sequence for DYRK1A (NM_001396.2,654-672).
gaaggcttttctgaatcaa

SEQ ID NO: 80923 - DNA, 19 bp, Homo sapiens
  siRNA target sequence for DYRK1A (NM_001396.2,678-696).
gatagaagtgcgacttctt

SEQ ID NO: 80924 - DNA, 19 bp, Homo sapiens
  siRNA target sequence for DYRK1A (NM_001396.2,691-709).
cttcttgagctcatgaaca

SEQ ID NO: 80925 - DNA, 19 bp, Homo sapiens
  siRNA target sequence for DYRK1A (NM_001396.2,742-760).
catttgaaacgccacttta

SEQ ID NO: 80926 - DNA, 19 bp, Homo sapiens
  siRNA target sequence for DYRK1A (NM_001396.2,747-765).
gaaacgccactttatgttt

SEQ ID NO: 80927 - DNA, 19 bp, Homo sapiens
  siRNA target sequence for DYRK1A (NM_001396.2,751-769).
cgccactttatgtttcgaa

SEQ ID NO: 80928 - DNA, 19 bp, Homo sapiens
  siRNA target sequence for DYRK1A (NM_001396.2,752-770).
gccactttatgtttcgaaa

SEQ ID NO: 80929 - DNA, 19 bp, Homo sapiens
  siRNA target sequence for DYRK1A (NM_001396.2,863-881).
gaaagtttgcgcaacagat

SEQ ID NO: 80930 - DNA, 19 bp, Homo sapiens
  siRNA target sequence for DYRK1A (NM_001396.2,901-919).
cttgcgactccagaactta

SEQ ID NO: 80931 - DNA, 19 bp, Homo sapiens
  siRNA target sequence for DYRK1A (NM_001396.2,904-922).
gcgactccagaacttagta

SEQ ID NO: 80932 - DNA, 19 bp, Homo sapiens
  siRNA target sequence for DYRK1A (NM_001396.2,905-923).
cgactccagaacttagtat

SEQ ID NO: 80933 - DNA, 19 bp, Homo sapiens
  siRNA target sequence for DYRK1A (NM_001396.2,908-926).
ctccagaacttagtatcat

SEQ ID NO: 80934 - DNA, 19 bp, Homo sapiens
  siRNA target sequence for DYRK1A (NM_001396.2,913-931).
gaacttagtatcattcact

SEQ ID NO: 80935 - DNA, 19 bp, Homo sapiens
  siRNA target sequence for DYRK1A (NM_001396.2,968-986).
ccaaacgcagtgcaatcaa

SEQ ID NO: 80936 - DNA, 19 bp, Homo sapiens
  siRNA target sequence for DYRK1A (NM_001396.2,975-993).
cagtgcaatcaagatagtt

SEQ ID NO: 80937 - DNA, 19 bp, Homo sapiens
  siRNA target sequence for DYRK1A (NM_001396.2,1107-1125).
gtggtccctcgggtgtatt

SEQ ID NO: 80938 - DNA, 19 bp, Homo sapiens
  siRNA target sequence for DYRK1A (NM_001396.2,1109-1127).
ggtccctcgggtgtatttt

SEQ ID NO: 80939 - DNA, 19 bp, Homo sapiens
  siRNA target sequence for DYRK1A (NM_001396.2,1112-1130).
ccctcgggtgtattttggt

SEQ ID NO: 80940 - DNA, 19 bp, Homo sapiens
  siRNA target sequence for DYRK1A (NM_001396.2,1117-1135).
gggtgtattttggttgaaa

SEQ ID NO: 80941 - DNA, 19 bp, Homo sapiens
  siRNA target sequence for DYRK1A (NM_001396.2,1118-1136).
ggtgtattttggttgaaat

SEQ ID NO: 80942 - DNA, 19 bp, Homo sapiens
  siRNA target sequence for DYRK1A (NM_001396.2,1163-1181).
gtgccaatgaggtagatca

SEQ ID NO: 80943 - DNA, 19 bp, Homo sapiens
  siRNA target sequence for DYRK1A (NM_001396.2,1171-1189).
gaggtagatcagatgaata

SEQ ID NO: 80944 - DNA, 19 bp, Homo sapiens
  siRNA target sequence for DYRK1A (NM_001396.2,1273-1291).
gatggcacttggaacttaa

SEQ ID NO: 80945 - DNA, 19 bp, Homo sapiens
  siRNA target sequence for DYRK1A (NM_001396.2,1325-1343).
caccaggaacccgtaaact

SEQ ID NO: 80946 - DNA, 19 bp, Homo sapiens
  siRNA target sequence for DYRK1A (NM_001396.2,1328-1346).
caggaacccgtaaacttca

SEQ ID NO: 80947 - DNA, 19 bp, Homo sapiens
  siRNA target sequence for DYRK1A (NM_001396.2,1330-1348).
ggaacccgtaaacttcata

SEQ ID NO: 80948 - DNA, 19 bp, Homo sapiens
  siRNA target sequence for DYRK1A (NM_001396.2,1331-1349).
gaacccgtaaacttcataa

SEQ ID NO: 80949 - DNA, 19 bp, Homo sapiens
  siRNA target sequence for DYRK1A (NM_001396.2,1409-1427).
cggtcgctgactacttgaa

SEQ ID NO: 80950 - DNA, 19 bp, Homo sapiens
  siRNA target sequence for DYRK1A (NM_001396.2,1411-1429).
gtcgctgactacttgaagt

SEQ ID NO: 80951 - DNA, 19 bp, Homo sapiens
  siRNA target sequence for DYRK1A (NM_001396.2,1522-1540).
gctgatgaaggtacaaata

SEQ ID NO: 80952 - DNA, 19 bp, Homo sapiens
  siRNA target sequence for DYRK1A (NM_001396.2,1535-1553).
caaatacaagtaatagtgt

SEQ ID NO: 80953 - DNA, 19 bp, Homo sapiens
  siRNA target sequence for DYRK1A (NM_001396.2,1591-1609).
ggcaccacctccagtacat

SEQ ID NO: 80954 - DNA, 19 bp, Homo sapiens
  siRNA target sequence for DYRK1A (NM_001396.2,1850-1868).
cccctcaacagaatgcatt

SEQ ID NO: 80955 - DNA, 19 bp, Homo sapiens
  siRNA target sequence for DYRK1A (NM_001396.2,1958-1976).
ccaggccaagggtctacaa

SEQ ID NO: 80956 - DNA, 19 bp, Homo sapiens
  siRNA target sequence for DYRK1A (NM_001396.2,1971-1989).
ctacaattctccaacgaat

SEQ ID NO: 80957 - DNA, 19 bp, Homo sapiens
  siRNA target sequence for DYRK1A (NM_001396.2,1992-2010).
ctcctctacccaagattct

SEQ ID NO: 80958 - DNA, 19 bp, Homo sapiens
  siRNA target sequence for DYRK1A (NM_001396.2,2082-2100).
ctcctctactggtaaccaa

SEQ ID NO: 80959 - DNA, 19 bp, Homo sapiens
  siRNA target sequence for DYRK1A (NM_001396.2,2122-2140).
cgcccagtggctgctaata

SEQ ID NO: 80960 - DNA, 19 bp, Homo sapiens
  siRNA target sequence for DYRK1A (NM_001396.2,2161-2179).
ggagctatggacgttaatt

SEQ ID NO: 80961 - DNA, 19 bp, Homo sapiens
  siRNA target sequence for DYRK1A (NM_001396.2,2162-2180).
gagctatggacgttaattt

SEQ ID NO: 80962 - DNA, 19 bp, Homo sapiens
  siRNA target sequence for DYRK1A (NM_001396.2,2164-2182).
gctatggacgttaatttga

SEQ ID NO: 80963 - DNA, 19 bp, Homo sapiens
  siRNA target sequence for DYRK1A (NM_001396.2,2221-2239).
ggacatccaacataccaat

SEQ ID NO: 80964 - DNA, 19 bp, Homo sapiens
  siRNA target sequence for DYRK1A (NM_001396.2,2222-2240).
gacatccaacataccaatt

SEQ ID NO: 80965 - DNA, 19 bp, Homo sapiens
  siRNA target sequence for DYRK1A (NM_001396.2,2224-2242).
catccaacataccaatttt

SEQ ID NO: 80966 - DNA, 19 bp, Homo sapiens
  siRNA target sequence for DYRK1A (NM_001396.2,2254-2272).
ggtcctgcacattacatga

SEQ ID NO: 80967 - DNA, 19 bp, Homo sapiens
  siRNA target sequence for DYRK1A (NM_001396.2,2319-2337).
ccccatgacaggagtttgt

SEQ ID NO: 80968 - DNA, 19 bp, Homo sapiens
  siRNA target sequence for DYRK1A (NM_101395.1,1925-1943).
gctcgcacgtggttcattt

SEQ ID NO: 80969 - DNA, 19 bp, Homo sapiens
  siRNA target sequence for DYRK1A (NM_101395.1,1928-1946).
cgcacgtggttcatttgct

SEQ ID NO: 80970 - DNA, 19 bp, Homo sapiens
  siRNA target sequence for DYRK1A (NM_101395.1,1929-1947).
gcacgtggttcatttgctt

SEQ ID NO: 80971 - DNA, 19 bp, Homo sapiens
  siRNA target sequence for DYRK1A (NM_101395.1,1982-2000).
gatgccaggtgcctttaga

SEQ ID NO: 80972 - DNA, 19 bp, Homo sapiens
  siRNA target sequence for DYRK1B (NM_004714.1,452-470).
cacatcaatgaggtatact

SEQ ID NO: 80973 - DNA, 19 bp, Homo sapiens
  siRNA target sequence for DYRK1B (NM_004714.1,464-482).
gtatactatgcgaagaaga

SEQ ID NO: 80974 - DNA, 19 bp, Homo sapiens
  siRNA target sequence for DYRK1B (NM_004714.1,538-556).
ggtcctgaaccatggttat

SEQ ID NO: 80975 - DNA, 19 bp, Homo sapiens
  siRNA target sequence for DYRK1B (NM_004714.1,541-559).
cctgaaccatggttatgat

SEQ ID NO: 80976 - DNA, 19 bp, Homo sapiens
  siRNA target sequence for DYRK1B (NM_004714.1,600-618).
ggctggagcgctacgaaat

SEQ ID NO: 80977 - DNA, 19 bp, Homo sapiens
  siRNA target sequence for DYRK1B (NM_004714.1,601-619).
gctggagcgctacgaaatt

SEQ ID NO: 80978 - DNA, 19 bp, Homo sapiens
  siRNA target sequence for DYRK1B (NM_004714.1,778-796).
cacggagatgaagtactat

SEQ ID NO: 80979 - DNA, 19 bp, Homo sapiens
  siRNA target sequence for DYRK1B (NM_004714.1,780-798).
cggagatgaagtactatat

SEQ ID NO: 80980 - DNA, 19 bp, Homo sapiens
  siRNA target sequence for DYRK1B (NM_004714.1,784-802).
gatgaagtactatatagta

SEQ ID NO: 80981 - DNA, 19 bp, Homo sapiens
  siRNA target sequence for DYRK1B (NM_004714.1,806-824).
ctgaagcggcacttcatgt

SEQ ID NO: 80982 - DNA, 19 bp, Homo sapiens
  siRNA target sequence for DYRK1B (NM_004714.1,1035-1053).
gcagcgccatcaagattgt

SEQ ID NO: 80983 - DNA, 19 bp, Homo sapiens
  siRNA target sequence for DYRK1B (NM_004714.1,1301-1319).
cccaaggctcgcaagtact

SEQ ID NO: 80984 - DNA, 19 bp, Homo sapiens
  siRNA target sequence for DYRK1B (NM_004714.1,1303-1321).
caaggctcgcaagtacttt

SEQ ID NO: 80985 - DNA, 19 bp, Homo sapiens
  siRNA target sequence for DYRK1B (NM_004714.1,1348-1366).
cctacgaaggacgaaagaa

SEQ ID NO: 80986 - DNA, 19 bp, Homo sapiens
  siRNA target sequence for DYRK1B (NM_004714.1,1730-1748).
cgctacagcaaccgatatt

SEQ ID NO: 80987 - DNA, 19 bp, Homo sapiens
  siRNA target sequence for DYRK2 (NM_003583.2,275-293).
ccaggttcaacagttgttt

SEQ ID NO: 80988 - DNA, 19 bp, Homo sapiens
  siRNA target sequence for DYRK2 (NM_003583.2,285-303).
cagttgtttgaggataaca

SEQ ID NO: 80989 - DNA, 19 bp, Homo sapiens
  siRNA target sequence for DYRK2 (NM_003583.2,320-338).
gctcacgacacaaccaaat

SEQ ID NO: 80990 - DNA, 19 bp, Homo sapiens
  siRNA target sequence for DYRK2 (NM_003583.2,330-348).
caaccaaatgggcttacaa

SEQ ID NO: 80991 - DNA, 19 bp, Homo sapiens
  siRNA target sequence for DYRK2 (NM_003583.2,387-405).
cagctggacagcattcata

SEQ ID NO: 80992 - DNA, 19 bp, Homo sapiens
  siRNA target sequence for DYRK2 (NM_003583.2,467-485).
ccccatgacacctgaacaa

SEQ ID NO: 80993 - DNA, 19 bp, Homo sapiens
  siRNA target sequence for DYRK2 (NM_003583.2,541-559).
gctaccctgaaatatattt

SEQ ID NO: 80994 - DNA, 19 bp, Homo sapiens
  siRNA target sequence for DYRK2 (NM_003583.2,593-611).
gacaggtgggcccaacaat

SEQ ID NO: 80995 - DNA, 19 bp, Homo sapiens
  siRNA target sequence for DYRK2 (NM_003583.2,722-740).
caaggcctacgatcacaaa

SEQ ID NO: 80996 - DNA, 19 bp, Homo sapiens
  siRNA target sequence for DYRK2 (NM_003583.2,837-855).
caggacaaggataacacaa

SEQ ID NO: 80997 - DNA, 19 bp, Homo sapiens
  siRNA target sequence for DYRK2 (NM_003583.2,840-858).
gacaaggataacacaatga

SEQ ID NO: 80998 - DNA, 19 bp, Homo sapiens
  siRNA target sequence for DYRK2 (NM_003583.2,842-860).
caaggataacacaatgaat

SEQ ID NO: 80999 - DNA, 19 bp, Homo sapiens
  siRNA target sequence for DYRK2 (NM_003583.2,846-864).
gataacacaatgaatgtca

SEQ ID NO: 81000 - DNA, 19 bp, Homo sapiens
  siRNA target sequence for DYRK2 (NM_003583.2,1086-1104).
cagggtagaagcggtatta

SEQ ID NO: 81001 - DNA, 19 bp, Homo sapiens
  siRNA target sequence for DYRK2 (NM_003583.2,1093-1111).
gaagcggtattaaagtaat

SEQ ID NO: 81002 - DNA, 19 bp, Homo sapiens
  siRNA target sequence for DYRK2 (NM_003583.2,1096-1114).
gcggtattaaagtaattga

SEQ ID NO: 81003 - DNA, 19 bp, Homo sapiens
  siRNA target sequence for DYRK2 (NM_003583.2,1205-1223).
gtatggcatgcccattgat

SEQ ID NO: 81004 - DNA, 19 bp, Homo sapiens
  siRNA target sequence for DYRK2 (NM_003583.2,1209-1227).
ggcatgcccattgatatgt

SEQ ID NO: 81005 - DNA, 19 bp, Homo sapiens
  siRNA target sequence for DYRK2 (NM_003583.2,1301-1319).
gctggcctgtatgattgaa

SEQ ID NO: 81006 - DNA, 19 bp, Homo sapiens
  siRNA target sequence for DYRK2 (NM_003583.2,1325-1343).
gggcatgccctcacagaaa

SEQ ID NO: 81007 - DNA, 19 bp, Homo sapiens
  siRNA target sequence for DYRK2 (NM_003583.2,1354-1372).
catccaaacgagccaaaaa

SEQ ID NO: 81008 - DNA, 19 bp, Homo sapiens
  siRNA target sequence for DYRK2 (NM_003583.2,1358-1376).
caaacgagccaaaaatttt

SEQ ID NO: 81009 - DNA, 19 bp, Homo sapiens
  siRNA target sequence for DYRK2 (NM_003583.2,1362-1380).
cgagccaaaaattttgtga

SEQ ID NO: 81010 - DNA, 19 bp, Homo sapiens
  siRNA target sequence for DYRK2 (NM_003583.2,1638-1656).
cccaccggggagaaaacgt

SEQ ID NO: 81011 - DNA, 19 bp, Homo sapiens
  siRNA target sequence for DYRK2 (NM_003583.2,1676-1694).
gagcaccggtgctatcaca

SEQ ID NO: 81012 - DNA, 19 bp, Homo sapiens
  siRNA target sequence for DYRK2 (NM_003583.2,1682-1700).
cggtgctatcacatctata

SEQ ID NO: 81013 - DNA, 19 bp, Homo sapiens
  siRNA target sequence for DYRK2 (NM_003583.2,1683-1701).
ggtgctatcacatctatat

SEQ ID NO: 81014 - DNA, 19 bp, Homo sapiens
  siRNA target sequence for DYRK2 (NM_003583.2,1687-1705).
ctatcacatctatatccaa

SEQ ID NO: 81015 - DNA, 19 bp, Homo sapiens
  siRNA target sequence for DYRK2 (NM_003583.2,1691-1709).
cacatctatatccaagtta

SEQ ID NO: 81016 - DNA, 19 bp, Homo sapiens
  siRNA target sequence for DYRK2 (NM_003583.2,1732-1750).
ccaaactgaggactaattt

SEQ ID NO: 81017 - DNA, 19 bp, Homo sapiens
  siRNA target sequence for DYRK2 (NM_003583.2,1792-1810).
cagtgttgccaaaacttgt

SEQ ID NO: 81018 - DNA, 19 bp, Homo sapiens
  siRNA target sequence for DYRK2 (NM_003583.2,1794-1812).
gtgttgccaaaacttgtta

SEQ ID NO: 81019 - DNA, 19 bp, Homo sapiens
  siRNA target sequence for DYRK2 (NM_006482.1,363-381).
gcggcagtaagcacacaat

SEQ ID NO: 81020 - DNA, 19 bp, Homo sapiens
  siRNA target sequence for DYRK3 (NM_003582.1,317-335).
ctccacccagaagactaaa

SEQ ID NO: 81021 - DNA, 19 bp, Homo sapiens
  siRNA target sequence for DYRK3 (NM_003582.1,319-337).
ccacccagaagactaaata

SEQ ID NO: 81022 - DNA, 19 bp, Homo sapiens
  siRNA target sequence for DYRK3 (NM_003582.1,320-338).
cacccagaagactaaatat

SEQ ID NO: 81023 - DNA, 19 bp, Homo sapiens
  siRNA target sequence for DYRK3 (NM_003582.1,351-369).
gtttacaggagatcatact

SEQ ID NO: 81024 - DNA, 19 bp, Homo sapiens
  siRNA target sequence for DYRK3 (NM_003582.1,361-379).
gatcatactcagcactttt

SEQ ID NO: 81025 - DNA, 19 bp, Homo sapiens
  siRNA target sequence for DYRK3 (NM_003582.1,399-417).
ggtagaacagctgtttcaa

SEQ ID NO: 81026 - DNA, 19 bp, Homo sapiens
  siRNA target sequence for DYRK3 (NM_003582.1,496-514).
cagggtaaaagttcagatt

SEQ ID NO: 81027 - DNA, 19 bp, Homo sapiens
  siRNA target sequence for DYRK3 (NM_003582.1,511-529).
gattgcttgaatacagtaa

SEQ ID NO: 81028 - DNA, 19 bp, Homo sapiens
  siRNA target sequence for DYRK3 (NM_003582.1,725-743).
cagatggggcctatattca

SEQ ID NO: 81029 - DNA, 19 bp, Homo sapiens
  siRNA target sequence for DYRK3 (NM_003582.1,749-767).
ctcgagaccatctagctta

SEQ ID NO: 81030 - DNA, 19 bp, Homo sapiens
  siRNA target sequence for DYRK3 (NM_003582.1,754-772).
gaccatctagcttatcgat

SEQ ID NO: 81031 - DNA, 19 bp, Homo sapiens
  siRNA target sequence for DYRK3 (NM_003582.1,756-774).
ccatctagcttatcgatat

SEQ ID NO: 81032 - DNA, 19 bp, Homo sapiens
  siRNA target sequence for DYRK3 (NM_003582.1,770-788).
gatatgaggtgctgaaaat

SEQ ID NO: 81033 - DNA, 19 bp, Homo sapiens
  siRNA target sequence for DYRK3 (NM_003582.1,818-836).
ccagggtctatgatcacaa

SEQ ID NO: 81034 - DNA, 19 bp, Homo sapiens
  siRNA target sequence for DYRK3 (NM_003582.1,819-837).
cagggtctatgatcacaaa

SEQ ID NO: 81035 - DNA, 19 bp, Homo sapiens
  siRNA target sequence for DYRK3 (NM_003582.1,822-840).
ggtctatgatcacaaactt

SEQ ID NO: 81036 - DNA, 19 bp, Homo sapiens
  siRNA target sequence for DYRK3 (NM_003582.1,870-888).
caatgagaagcgctttcat

SEQ ID NO: 81037 - DNA, 19 bp, Homo sapiens
  siRNA target sequence for DYRK3 (NM_003582.1,910-928).
cggattttggagcatctta

SEQ ID NO: 81038 - DNA, 19 bp, Homo sapiens
  siRNA target sequence for DYRK3 (NM_003582.1,911-929).
ggattttggagcatcttaa

SEQ ID NO: 81039 - DNA, 19 bp, Homo sapiens
  siRNA target sequence for DYRK3 (NM_003582.1,937-955).
gataaaactggtagtatga

SEQ ID NO: 81040 - DNA, 19 bp, Homo sapiens
  siRNA target sequence for DYRK3 (NM_003582.1,944-962).
ctggtagtatgaacgttat

SEQ ID NO: 81041 - DNA, 19 bp, Homo sapiens
  siRNA target sequence for DYRK3 (NM_003582.1,947-965).
gtagtatgaacgttatcca

SEQ ID NO: 81042 - DNA, 19 bp, Homo sapiens
  siRNA target sequence for DYRK3 (NM_003582.1,1074-1092).
ccagttggtacgcaagttt

SEQ ID NO: 81043 - DNA, 19 bp, Homo sapiens
  siRNA target sequence for DYRK3 (NM_003582.1,1120-1138).
gccctccacaaaaataaga

SEQ ID NO: 81044 - DNA, 19 bp, Homo sapiens
  siRNA target sequence for DYRK3 (NM_003582.1,1236-1254).
ccagaagctctacacatat

SEQ ID NO: 81045 - DNA, 19 bp, Homo sapiens
  siRNA target sequence for DYRK3 (NM_003582.1,1299-1317).
ccgctacagcacaccaatt

SEQ ID NO: 81046 - DNA, 19 bp, Homo sapiens
  siRNA target sequence for DYRK3 (NM_003582.1,1301-1319).
gctacagcacaccaattga

SEQ ID NO: 81047 - DNA, 19 bp, Homo sapiens
  siRNA target sequence for DYRK3 (NM_003582.1,1305-1323).
cagcacaccaattgacata

SEQ ID NO: 81048 - DNA, 19 bp, Homo sapiens
  siRNA target sequence for DYRK3 (NM_003582.1,1341-1359).
ccttgcagaacttttaaca

SEQ ID NO: 81049 - DNA, 19 bp, Homo sapiens
  siRNA target sequence for DYRK3 (NM_003582.1,1459-1477).
cgtgccaagtactttatta

SEQ ID NO: 81050 - DNA, 19 bp, Homo sapiens
  siRNA target sequence for DYRK3 (NM_003582.1,1549-1567).
cgctcacgtaggggtaaaa

SEQ ID NO: 81051 - DNA, 19 bp, Homo sapiens
  siRNA target sequence for DYRK3 (NM_003582.1,1550-1568).
gctcacgtaggggtaaaaa

SEQ ID NO: 81052 - DNA, 19 bp, Homo sapiens
  siRNA target sequence for DYRK3 (NM_003582.1,1621-1639).
gactacttgtttatagagt

SEQ ID NO: 81053 - DNA, 19 bp, Homo sapiens
  siRNA target sequence for DYRK3 (NM_003582.1,1683-1701).
cccagctcaagcattaaga

SEQ ID NO: 81054 - DNA, 19 bp, Homo sapiens
  siRNA target sequence for DYRK3 (NM_003582.1,1685-1703).
cagctcaagcattaagaca

SEQ ID NO: 81055 - DNA, 19 bp, Homo sapiens
  siRNA target sequence for DYRK3 (NM_003582.1,1700-1718).
gacacccttggattagcaa

SEQ ID NO: 81056 - DNA, 19 bp, Homo sapiens
  siRNA target sequence for DYRK3 (NM_003582.1,1757-1775).
cagggaaacgggtagttaa

SEQ ID NO: 81057 - DNA, 19 bp, Homo sapiens
  siRNA target sequence for DYRK3 (NM_003582.1,1761-1779).
gaaacgggtagttaatcct

SEQ ID NO: 81058 - DNA, 19 bp, Homo sapiens
  siRNA target sequence for DYRK3 (NM_003582.1,1825-1843).
ggaatagccaataagctta

SEQ ID NO: 81059 - DNA, 19 bp, Homo sapiens
  siRNA target sequence for DYRK3 (NM_003582.1,1826-1844).
gaatagccaataagcttaa

SEQ ID NO: 81060 - DNA, 19 bp, Homo sapiens
  siRNA target sequence for DYRK3 (NM_003582.1,1831-1849).
gccaataagcttaaagcta

SEQ ID NO: 81061 - DNA, 19 bp, Homo sapiens
  siRNA target sequence for DYRK3 (NM_003582.1,1846-1864).
gctaacttaatgtcagaaa

SEQ ID NO: 81062 - DNA, 19 bp, Homo sapiens
  siRNA target sequence for DYRK3 (NM_003582.1,1851-1869).
cttaatgtcagaaaccaat

SEQ ID NO: 81063 - DNA, 19 bp, Homo sapiens
  siRNA target sequence for DYRK3 (NM_003582.1,1886-1904).
gcagtgtattgccaaaact

SEQ ID NO: 81064 - DNA, 19 bp, Homo sapiens
  siRNA target sequence for DYRK3 (NM_003582.1,1891-1909).
gtattgccaaaactgatta

SEQ ID NO: 81065 - DNA, 19 bp, Homo sapiens
  siRNA target sequence for DYRK4 (NM_003845.1,175-193).
gctcaaggcttcagaaata

SEQ ID NO: 81066 - DNA, 19 bp, Homo sapiens
  siRNA target sequence for DYRK4 (NM_003845.1,195-213).
ctttccaccctagcattaa

SEQ ID NO: 81067 - DNA, 19 bp, Homo sapiens
  siRNA target sequence for DYRK4 (NM_003845.1,278-296).
gaggccctaaagcttttta

SEQ ID NO: 81068 - DNA, 19 bp, Homo sapiens
  siRNA target sequence for DYRK4 (NM_003845.1,304-322).
gctgtctccatatgaacaa

SEQ ID NO: 81069 - DNA, 19 bp, Homo sapiens
  siRNA target sequence for DYRK4 (NM_003845.1,307-325).
gtctccatatgaacaaagt

SEQ ID NO: 81070 - DNA, 19 bp, Homo sapiens
  siRNA target sequence for DYRK4 (NM_003845.1,311-329).
ccatatgaacaaagtgaaa

SEQ ID NO: 81071 - DNA, 19 bp, Homo sapiens
  siRNA target sequence for DYRK4 (NM_003845.1,379-397).
cgacacggctcctgagaaa

SEQ ID NO: 81072 - DNA, 19 bp, Homo sapiens
  siRNA target sequence for DYRK4 (NM_003845.1,380-398).
gacacggctcctgagaaat

SEQ ID NO: 81073 - DNA, 19 bp, Homo sapiens
  siRNA target sequence for DYRK4 (NM_003845.1,402-420).
gcaagacgagttttgatga

SEQ ID NO: 81074 - DNA, 19 bp, Homo sapiens
  siRNA target sequence for DYRK4 (NM_003845.1,403-421).
caagacgagttttgatgat

SEQ ID NO: 81075 - DNA, 19 bp, Homo sapiens
  siRNA target sequence for DYRK4 (NM_003845.1,422-440).
gagcatggcttctatctga

SEQ ID NO: 81076 - DNA, 19 bp, Homo sapiens
  siRNA target sequence for DYRK4 (NM_003845.1,517-535).
caagtgcttggatcacaaa

SEQ ID NO: 81077 - DNA, 19 bp, Homo sapiens
  siRNA target sequence for DYRK4 (NM_003845.1,522-540).
gcttggatcacaaaaacaa

SEQ ID NO: 81078 - DNA, 19 bp, Homo sapiens
  siRNA target sequence for DYRK4 (NM_003845.1,637-655).
caaagacaacacctacaat

SEQ ID NO: 81079 - DNA, 19 bp, Homo sapiens
  siRNA target sequence for DYRK4 (NM_003845.1,659-677).
gtgcatatgaaggactttt

SEQ ID NO: 81080 - DNA, 19 bp, Homo sapiens
  siRNA target sequence for DYRK4 (NM_003845.1,713-731).
ctcctgggaatcaacttgt

SEQ ID NO: 81081 - DNA, 19 bp, Homo sapiens
  siRNA target sequence for DYRK4 (NM_003845.1,739-757).
gatgaagaataacaacttt

SEQ ID NO: 81082 - DNA, 19 bp, Homo sapiens
  siRNA target sequence for DYRK4 (NM_003845.1,742-760).
gaagaataacaactttcaa

SEQ ID NO: 81083 - DNA, 19 bp, Homo sapiens
  siRNA target sequence for DYRK4 (NM_003845.1,885-903).
gccaagcctctgttaaagt

SEQ ID NO: 81084 - DNA, 19 bp, Homo sapiens
  siRNA target sequence for DYRK4 (NM_003845.1,887-905).
caagcctctgttaaagtca

SEQ ID NO: 81085 - DNA, 19 bp, Homo sapiens
  siRNA target sequence for DYRK4 (NM_003845.1,910-928).
ctttggatcaagctgttat

SEQ ID NO: 81086 - DNA, 19 bp, Homo sapiens
  siRNA target sequence for DYRK4 (NM_003845.1,941-959).
gtatacacgtacatccaaa

SEQ ID NO: 81087 - DNA, 19 bp, Homo sapiens
  siRNA target sequence for DYRK4 (NM_003845.1,1126-1144).
gccgccagccggcttcatt

SEQ ID NO: 81088 - DNA, 19 bp, Homo sapiens
  siRNA target sequence for DYRK4 (NM_003845.1,1128-1146).
cgccagccggcttcattca

SEQ ID NO: 81089 - DNA, 19 bp, Homo sapiens
  siRNA target sequence for DYRK4 (NM_003845.1,1248-1266).
cgatggtgctgaaaaccta

SEQ ID NO: 81090 - DNA, 19 bp, Homo sapiens
  siRNA target sequence for DYRK4 (NM_003845.1,1289-1307).
ctcagaaggtgtttggtat

SEQ ID NO: 81091 - DNA, 19 bp, Homo sapiens
  siRNA target sequence for DYRK4 (NM_003845.1,1303-1321).
ggtatgggaaccttctctt

SEQ ID NO: 81092 - DNA, 19 bp, Homo sapiens
  siRNA target sequence for DYRK4 (NM_003845.1,1342-1360).
cctcaagcatgcttggatt

SEQ ID NO: 81093 - DNA, 19 bp, Homo sapiens
  siRNA target sequence for DYRK4 (NM_003845.1,1524-1542).
gccccacgaagcatgttca

SEQ ID NO: 81094 - DNA, 19 bp, Homo sapiens
  siRNA target sequence for DYRK4 (NM_003845.1,1607-1625).
gtagacgctcccaagaagt

SEQ ID NO: 81095 - DNA, 19 bp, Homo sapiens
  siRNA target sequence for DYRK4 (NM_003845.1,1665-1683).
caggacagagcaaaaactt

SEQ ID NO: 81096 - DNA, 19 bp, Homo sapiens
  siRNA target sequence for DYRK4 (NM_003845.1,1702-1720).
cgttttaccccctattgta

SEQ ID NO: 81097 - DNA, 19 bp, Homo sapiens
  siRNA target sequence for DYT1 (NM_000113.1,286-304).
gccgtgtttggtttcataa

SEQ ID NO: 81098 - DNA, 19 bp, Homo sapiens
  siRNA target sequence for DYT1 (NM_000113.1,287-305).
ccgtgtttggtttcataaa

SEQ ID NO: 81099 - DNA, 19 bp, Homo sapiens
  siRNA target sequence for DYT1 (NM_000113.1,353-371).
caggcaccggcaaaaattt

SEQ ID NO: 81100 - DNA, 19 bp, Homo sapiens
  siRNA target sequence for DYT1 (NM_000113.1,356-374).
gcaccggcaaaaatttcgt

SEQ ID NO: 81101 - DNA, 19 bp, Homo sapiens
  siRNA target sequence for DYT1 (NM_000113.1,381-399).
gatcatcgcagagaatatt

SEQ ID NO: 81102 - DNA, 19 bp, Homo sapiens
  siRNA target sequence for DYT1 (NM_000113.1,476-494).
ccttgtacaaggatcagtt

SEQ ID NO: 81103 - DNA, 19 bp, Homo sapiens
  siRNA target sequence for DYT1 (NM_000113.1,477-495).
cttgtacaaggatcagtta

SEQ ID NO: 81104 - DNA, 19 bp, Homo sapiens
  siRNA target sequence for DYT1 (NM_000113.1,527-545).
gtgcgaggtccatcttcat

SEQ ID NO: 81105 - DNA, 19 bp, Homo sapiens
  siRNA target sequence for DYT1 (NM_000113.1,529-547).
gcgaggtccatcttcatat

SEQ ID NO: 81106 - DNA, 19 bp, Homo sapiens
  siRNA target sequence for DYT1 (NM_000113.1,530-548).
cgaggtccatcttcatatt

SEQ ID NO: 81107 - DNA, 19 bp, Homo sapiens
  siRNA target sequence for DYT1 (NM_000113.1,531-549).
gaggtccatcttcatattt

SEQ ID NO: 81108 - DNA, 19 bp, Homo sapiens
  siRNA target sequence for DYT1 (NM_000113.1,534-552).
gtccatcttcatatttgat

SEQ ID NO: 81109 - DNA, 19 bp, Homo sapiens
  siRNA target sequence for DYT1 (NM_000113.1,594-612).
gcctttcctcgactattat

SEQ ID NO: 81110 - DNA, 19 bp, Homo sapiens
  siRNA target sequence for DYT1 (NM_000113.1,596-614).
ctttcctcgactattatga

SEQ ID NO: 81111 - DNA, 19 bp, Homo sapiens
  siRNA target sequence for DYT1 (NM_000113.1,766-784).
gtgtcggttttcaataaca

SEQ ID NO: 81112 - DNA, 19 bp, Homo sapiens
  siRNA target sequence for DYT1 (NM_000113.1,770-788).
cggttttcaataacaagaa

SEQ ID NO: 81113 - DNA, 19 bp, Homo sapiens
  siRNA target sequence for DYT1 (NM_000113.1,819-837).
ccggaacctcattgattat

SEQ ID NO: 81114 - DNA, 19 bp, Homo sapiens
  siRNA target sequence for DYT1 (NM_000113.1,820-838).
cggaacctcattgattatt

SEQ ID NO: 81115 - DNA, 19 bp, Homo sapiens
  siRNA target sequence for DYT1 (NM_000113.1,821-839).
ggaacctcattgattattt

SEQ ID NO: 81116 - DNA, 19 bp, Homo sapiens
  siRNA target sequence for DYT1 (NM_000113.1,897-915).
gcagtcccgaggctatgaa

SEQ ID NO: 81117 - DNA, 19 bp, Homo sapiens
  siRNA target sequence for DYT1 (NM_000113.1,902-920).
cccgaggctatgaaattga

SEQ ID NO: 81118 - DNA, 19 bp, Homo sapiens
  siRNA target sequence for DYT1 (NM_000113.1,1004-1022).
cggtgttcaccaagttaga

SEQ ID NO: 81119 - DNA, 19 bp, Homo sapiens
  siRNA target sequence for DYT1 (NM_000113.1,1006-1024).
gtgttcaccaagttagatt

SEQ ID NO: 81120 - DNA, 19 bp, Homo sapiens
  siRNA target sequence for DYT1 (NM_000113.1,1008-1026).
gttcaccaagttagattat

SEQ ID NO: 81121 - DNA, 19 bp, Homo sapiens
  siRNA target sequence for DYT1 (NM_000113.1,1013-1031).
ccaagttagattattacta

SEQ ID NO: 81122 - DNA, 19 bp, Homo sapiens
  siRNA target sequence for EGFR (NM_005228.2,231-249).
gtcgggctctggaggaaaa

SEQ ID NO: 81123 - DNA, 19 bp, Homo sapiens
  siRNA target sequence for EGFR (NM_005228.2,258-276).
gccaaggcacgagtaacaa

SEQ ID NO: 81124 - DNA, 19 bp, Homo sapiens
  siRNA target sequence for EGFR (NM_005228.2,280-298).
cacgcagttgggcactttt

SEQ ID NO: 81125 - DNA, 19 bp, Homo sapiens
  siRNA target sequence for EGFR (NM_005228.2,282-300).
cgcagttgggcacttttga

SEQ ID NO: 81126 - DNA, 19 bp, Homo sapiens
  siRNA target sequence for EGFR (NM_005228.2,286-304).
gttgggcacttttgaagat

SEQ ID NO: 81127 - DNA, 19 bp, Homo sapiens
  siRNA target sequence for EGFR (NM_005228.2,289-307).
gggcacttttgaagatcat

SEQ ID NO: 81128 - DNA, 19 bp, Homo sapiens
  siRNA target sequence for EGFR (NM_005228.2,354-372).
ggaatttggaaattaccta

SEQ ID NO: 81129 - DNA, 19 bp, Homo sapiens
  siRNA target sequence for EGFR (NM_005228.2,450-468).
cagtggagcgaattccttt

SEQ ID NO: 81130 - DNA, 19 bp, Homo sapiens
  siRNA target sequence for EGFR (NM_005228.2,499-517).
gtactacgaaaattcctat

SEQ ID NO: 81131 - DNA, 19 bp, Homo sapiens
  siRNA target sequence for EGFR (NM_005228.2,514-532).
ctatgccttagcagtctta

SEQ ID NO: 81132 - DNA, 19 bp, Homo sapiens
  siRNA target sequence for EGFR (NM_005228.2,518-536).
gccttagcagtcttatcta

SEQ ID NO: 81133 - DNA, 19 bp, Homo sapiens
  siRNA target sequence for EGFR (NM_005228.2,519-537).
ccttagcagtcttatctaa

SEQ ID NO: 81134 - DNA, 19 bp, Homo sapiens
  siRNA target sequence for EGFR (NM_005228.2,566-584).
gagctgcccatgagaaatt

SEQ ID NO: 81135 - DNA, 19 bp, Homo sapiens
  siRNA target sequence for EGFR (NM_005228.2,579-597).
gaaatttacaggaaatcct

SEQ ID NO: 81136 - DNA, 19 bp, Homo sapiens
  siRNA target sequence for EGFR (NM_005228.2,653-671).
cagtggcgggacatagtca

SEQ ID NO: 81137 - DNA, 19 bp, Homo sapiens
  siRNA target sequence for EGFR (NM_005228.2,716-734).
ctgggcagctgccaaaagt

SEQ ID NO: 81138 - DNA, 19 bp, Homo sapiens
  siRNA target sequence for EGFR (NM_005228.2,909-927).
gcctggtctgccgcaaatt

SEQ ID NO: 81139 - DNA, 19 bp, Homo sapiens
  siRNA target sequence for EGFR (NM_005228.2,1029-1047).
gtgccacctgcgtgaagaa

SEQ ID NO: 81140 - DNA, 19 bp, Homo sapiens
  siRNA target sequence for EGFR (NM_005228.2,1130-1148).
ggcgtccgcaagtgtaaga

SEQ ID NO: 81141 - DNA, 19 bp, Homo sapiens
  siRNA target sequence for EGFR (NM_005228.2,1131-1149).
gcgtccgcaagtgtaagaa

SEQ ID NO: 81142 - DNA, 19 bp, Homo sapiens
  siRNA target sequence for EGFR (NM_005228.2,1133-1151).
gtccgcaagtgtaagaagt

SEQ ID NO: 81143 - DNA, 19 bp, Homo sapiens
  siRNA target sequence for EGFR (NM_005228.2,1161-1179).
cttgccgcaaagtgtgtaa

SEQ ID NO: 81144 - DNA, 19 bp, Homo sapiens
  siRNA target sequence for EGFR (NM_005228.2,1172-1190).
gtgtgtaacggaataggta

SEQ ID NO: 81145 - DNA, 19 bp, Homo sapiens
  siRNA target sequence for EGFR (NM_005228.2,1174-1192).
gtgtaacggaataggtatt

SEQ ID NO: 81146 - DNA, 19 bp, Homo sapiens
  siRNA target sequence for EGFR (NM_005228.2,1182-1200).
gaataggtattggtgaatt

SEQ ID NO: 81147 - DNA, 19 bp, Homo sapiens
  siRNA target sequence for EGFR (NM_005228.2,1207-1225).
ctcactctccataaatgct

SEQ ID NO: 81148 - DNA, 19 bp, Homo sapiens
  siRNA target sequence for EGFR (NM_005228.2,1215-1233).
ccataaatgctacgaatat

SEQ ID NO: 81149 - DNA, 19 bp, Homo sapiens
  siRNA target sequence for EGFR (NM_005228.2,1216-1234).
cataaatgctacgaatatt

SEQ ID NO: 81150 - DNA, 19 bp, Homo sapiens
  siRNA target sequence for EGFR (NM_005228.2,1223-1241).
gctacgaatattaaacact

SEQ ID NO: 81151 - DNA, 19 bp, Homo sapiens
  siRNA target sequence for EGFR (NM_005228.2,1224-1242).
ctacgaatattaaacactt

SEQ ID NO: 81152 - DNA, 19 bp, Homo sapiens
  siRNA target sequence for EGFR (NM_005228.2,1332-1350).
cacaggaactggatattct

SEQ ID NO: 81153 - DNA, 19 bp, Homo sapiens
  siRNA target sequence for EGFR (NM_005228.2,1482-1500).
cagtcgtcagcctgaacat

SEQ ID NO: 81154 - DNA, 19 bp, Homo sapiens
  siRNA target sequence for EGFR (NM_005228.2,1484-1502).
gtcgtcagcctgaacataa

SEQ ID NO: 81155 - DNA, 19 bp, Homo sapiens
  siRNA target sequence for EGFR (NM_005228.2,1486-1504).
cgtcagcctgaacataaca

SEQ ID NO: 81156 - DNA, 19 bp, Homo sapiens
  siRNA target sequence for EGFR (NM_005228.2,1487-1505).
gtcagcctgaacataacat

SEQ ID NO: 81157 - DNA, 19 bp, Homo sapiens
  siRNA target sequence for EGFR (NM_005228.2,1517-1535).
cgctccctcaaggagataa

SEQ ID NO: 81158 - DNA, 19 bp, Homo sapiens
  siRNA target sequence for EGFR (NM_005228.2,1519-1537).
ctccctcaaggagataagt

SEQ ID NO: 81159 - DNA, 19 bp, Homo sapiens
  siRNA target sequence for EGFR (NM_005228.2,1610-1628).
gggacctccggtcagaaaa

SEQ ID NO: 81160 - DNA, 19 bp, Homo sapiens
  siRNA target sequence for EGFR (NM_005228.2,1620-1638).
gtcagaaaaccaaaattat

SEQ ID NO: 81161 - DNA, 19 bp, Homo sapiens
  siRNA target sequence for EGFR (NM_005228.2,1736-1754).
gtctcttgccggaatgtca

SEQ ID NO: 81162 - DNA, 19 bp, Homo sapiens
  siRNA target sequence for EGFR (NM_005228.2,1853-1871).
ctgcctcaggccatgaaca

SEQ ID NO: 81163 - DNA, 19 bp, Homo sapiens
  siRNA target sequence for EGFR (NM_005228.2,1886-1904).
cggggaccagacaactgta

SEQ ID NO: 81164 - DNA, 19 bp, Homo sapiens
  siRNA target sequence for EGFR (NM_005228.2,1887-1905).
ggggaccagacaactgtat

SEQ ID NO: 81165 - DNA, 19 bp, Homo sapiens
  siRNA target sequence for EGFR (NM_005228.2,2076-2094).
caacgaatgggcctaagat

SEQ ID NO: 81166 - DNA, 19 bp, Homo sapiens
  siRNA target sequence for EGFR (NM_005228.2,2295-2313).
ctgaattcaaaaagatcaa

SEQ ID NO: 81167 - DNA, 19 bp, Homo sapiens
  siRNA target sequence for EGFR (NM_005228.2,2330-2348).
gcgttcggcacggtgtata

SEQ ID NO: 81168 - DNA, 19 bp, Homo sapiens
  siRNA target sequence for EGFR (NM_005228.2,2331-2349).
cgttcggcacggtgtataa

SEQ ID NO: 81169 - DNA, 19 bp, Homo sapiens
  siRNA target sequence for EGFR (NM_005228.2,2387-2405).
cccgtcgctatcaaggaat

SEQ ID NO: 81170 - DNA, 19 bp, Homo sapiens
  siRNA target sequence for EGFR (NM_005228.2,2388-2406).
ccgtcgctatcaaggaatt

SEQ ID NO: 81171 - DNA, 19 bp, Homo sapiens
  siRNA target sequence for EGFR (NM_005228.2,2389-2407).
cgtcgctatcaaggaatta

SEQ ID NO: 81172 - DNA, 19 bp, Homo sapiens
  siRNA target sequence for EGFR (NM_005228.2,2390-2408).
gtcgctatcaaggaattaa

SEQ ID NO: 81173 - DNA, 19 bp, Homo sapiens
  siRNA target sequence for EGFR (NM_005228.2,2392-2410).
cgctatcaaggaattaaga

SEQ ID NO: 81174 - DNA, 19 bp, Homo sapiens
  siRNA target sequence for EGFR (NM_005228.2,2570-2588).
gtccgggaacacaaagaca

SEQ ID NO: 81175 - DNA, 19 bp, Homo sapiens
  siRNA target sequence for EGFR (NM_005228.2,2572-2590).
ccgggaacacaaagacaat

SEQ ID NO: 81176 - DNA, 19 bp, Homo sapiens
  siRNA target sequence for EGFR (NM_005228.2,2573-2591).
cgggaacacaaagacaata

SEQ ID NO: 81177 - DNA, 19 bp, Homo sapiens
  siRNA target sequence for EGFR (NM_005228.2,2630-2648).
gcaaagggcatgaactact

SEQ ID NO: 81178 - DNA, 19 bp, Homo sapiens
  siRNA target sequence for EGFR (NM_005228.2,2689-2707).
gaacgtactggtgaaaaca

SEQ ID NO: 81179 - DNA, 19 bp, Homo sapiens
  siRNA target sequence for EGFR (NM_005228.2,2708-2726).
ccgcagcatgtcaagatca

SEQ ID NO: 81180 - DNA, 19 bp, Homo sapiens
  siRNA target sequence for EGFR (NM_005228.2,2753-2771).
ggtgcggaagagaaagaat

SEQ ID NO: 81181 - DNA, 19 bp, Homo sapiens
  siRNA target sequence for EGFR (NM_005228.2,2882-2900).
gagttgatgacctttggat

SEQ ID NO: 81182 - DNA, 19 bp, Homo sapiens
  siRNA target sequence for EGFR (NM_005228.2,3019-3037).
gatgatagacgcagatagt

SEQ ID NO: 81183 - DNA, 19 bp, Homo sapiens
  siRNA target sequence for EGFR (NM_005228.2,3030-3048).
cagatagtcgcccaaagtt

SEQ ID NO: 81184 - DNA, 19 bp, Homo sapiens
  siRNA target sequence for EGFR (NM_005228.2,3042-3060).
caaagttccgtgagttgat

SEQ ID NO: 81185 - DNA, 19 bp, Homo sapiens
  siRNA target sequence for EGFR (NM_005228.2,3050-3068).
cgtgagttgatcatcgaat

SEQ ID NO: 81186 - DNA, 19 bp, Homo sapiens
  siRNA target sequence for EGFR (NM_005228.2,3051-3069).
gtgagttgatcatcgaatt

SEQ ID NO: 81187 - DNA, 19 bp, Homo sapiens
  siRNA target sequence for EGFR (NM_005228.2,3053-3071).
gagttgatcatcgaattct

SEQ ID NO: 81188 - DNA, 19 bp, Homo sapiens
  siRNA target sequence for EGFR (NM_005228.2,3090-3108).
cccagcgctaccttgtcat

SEQ ID NO: 81189 - DNA, 19 bp, Homo sapiens
  siRNA target sequence for EGFR (NM_005228.2,3091-3109).
ccagcgctaccttgtcatt

SEQ ID NO: 81190 - DNA, 19 bp, Homo sapiens
  siRNA target sequence for EGFR (NM_005228.2,3114-3132).
gggatgaaagaatgcattt

SEQ ID NO: 81191 - DNA, 19 bp, Homo sapiens
  siRNA target sequence for EGFR (NM_005228.2,3141-3159).
ctacagactccaacttcta

SEQ ID NO: 81192 - DNA, 19 bp, Homo sapiens
  siRNA target sequence for EGFR (NM_005228.2,3304-3322).
cgtggcttgcattgataga

SEQ ID NO: 81193 - DNA, 19 bp, Homo sapiens
  siRNA target sequence for EGFR (NM_005228.2,3428-3446).
ccagtgcctgaatacataa

SEQ ID NO: 81194 - DNA, 19 bp, Homo sapiens
  siRNA target sequence for EGFR (NM_005228.2,3429-3447).
cagtgcctgaatacataaa

SEQ ID NO: 81195 - DNA, 19 bp, Homo sapiens
  siRNA target sequence for EGFR (NM_005228.2,3484-3502).
gaatcctgtctatcacaat

SEQ ID NO: 81196 - DNA, 19 bp, Homo sapiens
  siRNA target sequence for EGFR (NM_005228.2,3566-3584).
ggcaaccccgagtatctca

SEQ ID NO: 81197 - DNA, 19 bp, Homo sapiens
  siRNA target sequence for EGFR (NM_005228.2,3567-3585).
gcaaccccgagtatctcaa

SEQ ID NO: 81198 - DNA, 19 bp, Homo sapiens
  siRNA target sequence for EGFR (NM_005228.2,3767-3785).
gcgccacaaagcagtgaat

SEQ ID NO: 81199 - DNA, 19 bp, Homo sapiens
  siRNA target sequence for EGFR (NM_005228.2,3769-3787).
gccacaaagcagtgaattt

SEQ ID NO: 81200 - DNA, 19 bp, Homo sapiens
  siRNA target sequence for EHD4 (NM_139265.2,347-365).
cttcatcgccgtgatgtat

SEQ ID NO: 81201 - DNA, 19 bp, Homo sapiens
  siRNA target sequence for EHD4 (NM_139265.2,383-401).
caccccagggaatgcttta

SEQ ID NO: 81202 - DNA, 19 bp, Homo sapiens
  siRNA target sequence for EHD4 (NM_139265.2,411-429).
cccaaaaagccgtttagaa

SEQ ID NO: 81203 - DNA, 19 bp, Homo sapiens
  siRNA target sequence for EHD4 (NM_139265.2,1004-1022).
gaaggagatgccaagtgta

SEQ ID NO: 81204 - DNA, 19 bp, Homo sapiens
  siRNA target sequence for EHD4 (NM_139265.2,1057-1075).
gcaggctaccggaaatcta

SEQ ID NO: 81205 - DNA, 19 bp, Homo sapiens
  siRNA target sequence for EHD4 (NM_139265.2,1060-1078).
ggctaccggaaatctacat

SEQ ID NO: 81206 - DNA, 19 bp, Homo sapiens
  siRNA target sequence for EHD4 (NM_139265.2,1061-1079).
gctaccggaaatctacatt

SEQ ID NO: 81207 - DNA, 19 bp, Homo sapiens
  siRNA target sequence for EHD4 (NM_139265.2,1139-1157).
ggaacagcttgagaactat

SEQ ID NO: 81208 - DNA, 19 bp, Homo sapiens
  siRNA target sequence for EHD4 (NM_139265.2,1375-1393).
gggtcgtggccaaagacaa

SEQ ID NO: 81209 - DNA, 19 bp, Homo sapiens
  siRNA target sequence for EHD4 (NM_139265.2,1418-1436).
cactctgtcgcccatcaat

SEQ ID NO: 81210 - DNA, 19 bp, Homo sapiens
  siRNA target sequence for EHD4 (NM_139265.2,1427-1445).
gcccatcaatggcaagata

SEQ ID NO: 81211 - DNA, 19 bp, Homo sapiens
  siRNA target sequence for EIF2AK3 (NM_004836.2,602-620).
cggcaggtcattagtaatt

SEQ ID NO: 81212 - DNA, 19 bp, Homo sapiens
  siRNA target sequence for EIF2AK3 (NM_004836.2,603-621).
ggcaggtcattagtaatta

SEQ ID NO: 81213 - DNA, 19 bp, Homo sapiens
  siRNA target sequence for EIF2AK3 (NM_004836.2,649-667).
ccttggatcctgaaaatca

SEQ ID NO: 81214 - DNA, 19 bp, Homo sapiens
  siRNA target sequence for EIF2AK3 (NM_004836.2,808-826).
gcatggaaacagttccttt

SEQ ID NO: 81215 - DNA, 19 bp, Homo sapiens
  siRNA target sequence for EIF2AK3 (NM_004836.2,812-830).
ggaaacagttcctttcaca

SEQ ID NO: 81216 - DNA, 19 bp, Homo sapiens
  siRNA target sequence for EIF2AK3 (NM_004836.2,829-847).
cagttgaatcacttcttga

SEQ ID NO: 81217 - DNA, 19 bp, Homo sapiens
  siRNA target sequence for EIF2AK3 (NM_004836.2,834-852).
gaatcacttcttgaatctt

SEQ ID NO: 81218 - DNA, 19 bp, Homo sapiens
  siRNA target sequence for EIF2AK3 (NM_004836.2,925-943).
gtggaaaggtgaggtatat

SEQ ID NO: 81219 - DNA, 19 bp, Homo sapiens
  siRNA target sequence for EIF2AK3 (NM_004836.2,927-945).
ggaaaggtgaggtatatct

SEQ ID NO: 81220 - DNA, 19 bp, Homo sapiens
  siRNA target sequence for EIF2AK3 (NM_004836.2,961-979).
gtcgccaatgggatagtga

SEQ ID NO: 81221 - DNA, 19 bp, Homo sapiens
  siRNA target sequence for EIF2AK3 (NM_004836.2,970-988).
gggatagtgacgaaatgga

SEQ ID NO: 81222 - DNA, 19 bp, Homo sapiens
  siRNA target sequence for EIF2AK3 (NM_004836.2,971-989).
ggatagtgacgaaatggaa

SEQ ID NO: 81223 - DNA, 19 bp, Homo sapiens
  siRNA target sequence for EIF2AK3 (NM_004836.2,976-994).
gtgacgaaatggaacaaga

SEQ ID NO: 81224 - DNA, 19 bp, Homo sapiens
  siRNA target sequence for EIF2AK3 (NM_004836.2,1011-1029).
ctacagcgtacccaaaaaa

SEQ ID NO: 81225 - DNA, 19 bp, Homo sapiens
  siRNA target sequence for EIF2AK3 (NM_004836.2,1016-1034).
gcgtacccaaaaaactgtt

SEQ ID NO: 81226 - DNA, 19 bp, Homo sapiens
  siRNA target sequence for EIF2AK3 (NM_004836.2,1048-1066).
ctcgcagtggcaatgagaa

SEQ ID NO: 81227 - DNA, 19 bp, Homo sapiens
  siRNA target sequence for EIF2AK3 (NM_004836.2,1088-1106).
ctttgaacttcggtatatt

SEQ ID NO: 81228 - DNA, 19 bp, Homo sapiens
  siRNA target sequence for EIF2AK3 (NM_004836.2,1116-1134).
gaaacgagagccggattta

SEQ ID NO: 81229 - DNA, 19 bp, Homo sapiens
  siRNA target sequence for EIF2AK3 (NM_004836.2,1120-1138).
cgagagccggatttattga

SEQ ID NO: 81230 - DNA, 19 bp, Homo sapiens
  siRNA target sequence for EIF2AK3 (NM_004836.2,1144-1162).
cctttaagcccaatgagaa

SEQ ID NO: 81231 - DNA, 19 bp, Homo sapiens
  siRNA target sequence for EIF2AK3 (NM_004836.2,1238-1256).
ggttgctgactggaaagtt

SEQ ID NO: 81232 - DNA, 19 bp, Homo sapiens
  siRNA target sequence for EIF2AK3 (NM_004836.2,1292-1310).
ggagtaccagttttgtact

SEQ ID NO: 81233 - DNA, 19 bp, Homo sapiens
  siRNA target sequence for EIF2AK3 (NM_004836.2,1301-1319).
gttttgtactccaattgca

SEQ ID NO: 81234 - DNA, 19 bp, Homo sapiens
  siRNA target sequence for EIF2AK3 (NM_004836.2,1317-1335).
gcatctgcctggttactta

SEQ ID NO: 81235 - DNA, 19 bp, Homo sapiens
  siRNA target sequence for EIF2AK3 (NM_004836.2,1318-1336).
catctgcctggttacttaa

SEQ ID NO: 81236 - DNA, 19 bp, Homo sapiens
  siRNA target sequence for EIF2AK3 (NM_004836.2,1321-1339).
ctgcctggttacttaagga

SEQ ID NO: 81237 - DNA, 19 bp, Homo sapiens
  siRNA target sequence for EIF2AK3 (NM_004836.2,1368-1386).
gatgatacaagttatacat

SEQ ID NO: 81238 - DNA, 19 bp, Homo sapiens
  siRNA target sequence for EIF2AK3 (NM_004836.2,1371-1389).
gatacaagttatacatcta

SEQ ID NO: 81239 - DNA, 19 bp, Homo sapiens
  siRNA target sequence for EIF2AK3 (NM_004836.2,1378-1396).
gttatacatctaatgatga

SEQ ID NO: 81240 - DNA, 19 bp, Homo sapiens
  siRNA target sequence for EIF2AK3 (NM_004836.2,1562-1580).
cgcaattattcctttacca

SEQ ID NO: 81241 - DNA, 19 bp, Homo sapiens
  siRNA target sequence for EIF2AK3 (NM_004836.2,1572-1590).
cctttaccaacaatcaaat

SEQ ID NO: 81242 - DNA, 19 bp, Homo sapiens
  siRNA target sequence for EIF2AK3 (NM_004836.2,1628-1646).
cttggtaggatctgatgaa

SEQ ID NO: 81243 - DNA, 19 bp, Homo sapiens
  siRNA target sequence for EIF2AK3 (NM_004836.2,1631-1649).
ggtaggatctgatgaattt

SEQ ID NO: 81244 - DNA, 19 bp, Homo sapiens
  siRNA target sequence for EIF2AK3 (NM_004836.2,1636-1654).
gatctgatgaatttgacaa

SEQ ID NO: 81245 - DNA, 19 bp, Homo sapiens
  siRNA target sequence for EIF2AK3 (NM_004836.2,1659-1677).
ctcagtaatgataagtttt

SEQ ID NO: 81246 - DNA, 19 bp, Homo sapiens
  siRNA target sequence for EIF2AK3 (NM_004836.2,1661-1679).
cagtaatgataagttttct

SEQ ID NO: 81247 - DNA, 19 bp, Homo sapiens
  siRNA target sequence for EIF2AK3 (NM_004836.2,1803-1821).
gacaacccacattacaaca

SEQ ID NO: 81248 - DNA, 19 bp, Homo sapiens
  siRNA target sequence for EIF2AK3 (NM_004836.2,1869-1887).
gaaatagttgcaacgattt

SEQ ID NO: 81249 - DNA, 19 bp, Homo sapiens
  siRNA target sequence for EIF2AK3 (NM_004836.2,1954-1972).
ggaaggagtctgaaactca

SEQ ID NO: 81250 - DNA, 19 bp, Homo sapiens
  siRNA target sequence for EIF2AK3 (NM_004836.2,2019-2037).
gacagtagctggaatgaca

SEQ ID NO: 81251 - DNA, 19 bp, Homo sapiens
  siRNA target sequence for EIF2AK3 (NM_004836.2,2050-2068).
gatatatatcacgatatct

SEQ ID NO: 81252 - DNA, 19 bp, Homo sapiens
  siRNA target sequence for EIF2AK3 (NM_004836.2,2059-2077).
cacgatatctaactgattt

SEQ ID NO: 81253 - DNA, 19 bp, Homo sapiens
  siRNA target sequence for EIF2AK3 (NM_004836.2,2113-2131).
gagttgtttttgaagctaa

SEQ ID NO: 81254 - DNA, 19 bp, Homo sapiens
  siRNA target sequence for EIF2AK3 (NM_004836.2,2204-2222).
ggtaatgcgagaagttaaa

SEQ ID NO: 81255 - DNA, 19 bp, Homo sapiens
  siRNA target sequence for EIF2AK3 (NM_004836.2,2224-2242).
ccttagccaagcttgaaca

SEQ ID NO: 81256 - DNA, 19 bp, Homo sapiens
  siRNA target sequence for EIF2AK3 (NM_004836.2,2480-2498).
ctgtgaccagacaagttca

SEQ ID NO: 81257 - DNA, 19 bp, Homo sapiens
  siRNA target sequence for EIF2AK3 (NM_004836.2,2513-2531).
ctcaccactggaattctca

SEQ ID NO: 81258 - DNA, 19 bp, Homo sapiens
  siRNA target sequence for EIF2AK3 (NM_004836.2,2612-2630).
ggaagatgggactatggat

SEQ ID NO: 81259 - DNA, 19 bp, Homo sapiens
  siRNA target sequence for EIF2AK3 (NM_004836.2,2699-2717).
gagaacctcctcttcaata

SEQ ID NO: 81260 - DNA, 19 bp, Homo sapiens
  siRNA target sequence for EIF2AK3 (NM_004836.2,2701-2719).
gaacctcctcttcaatagt

SEQ ID NO: 81261 - DNA, 19 bp, Homo sapiens
  siRNA target sequence for EIF2AK3 (NM_004836.2,2704-2722).
cctcctcttcaatagtatt

SEQ ID NO: 81262 - DNA, 19 bp, Homo sapiens
  siRNA target sequence for EIF2AK3 (NM_004836.2,2705-2723).
ctcctcttcaatagtattt

SEQ ID NO: 81263 - DNA, 19 bp, Homo sapiens
  siRNA target sequence for EIF2AK3 (NM_004836.2,2707-2725).
cctcttcaatagtatttga

SEQ ID NO: 81264 - DNA, 19 bp, Homo sapiens
  siRNA target sequence for EIF2AK3 (NM_004836.2,2708-2726).
ctcttcaatagtatttgaa

SEQ ID NO: 81265 - DNA, 19 bp, Homo sapiens
  siRNA target sequence for EIF2AK3 (NM_004836.2,2760-2778).
gagccgaaaactaatcgat

SEQ ID NO: 81266 - DNA, 19 bp, Homo sapiens
  siRNA target sequence for EIF2AK3 (NM_004836.2,2788-2806).
gcaaccattgtgctaataa

SEQ ID NO: 81267 - DNA, 19 bp, Homo sapiens
  siRNA target sequence for EIF2AK3 (NM_004836.2,2792-2810).
ccattgtgctaataaacta

SEQ ID NO: 81268 - DNA, 19 bp, Homo sapiens
  siRNA target sequence for EIF2AK3 (NM_004836.2,2822-2840).
gcccaccagtagcaaatct

SEQ ID NO: 81269 - DNA, 19 bp, Homo sapiens
  siRNA target sequence for EIF2AK3 (NM_004836.2,2825-2843).
caccagtagcaaatcttct

SEQ ID NO: 81270 - DNA, 19 bp, Homo sapiens
  siRNA target sequence for EIF2AK3 (NM_004836.2,2871-2889).
ccaagaccaaccactttaa

SEQ ID NO: 81271 - DNA, 19 bp, Homo sapiens
  siRNA target sequence for EIF2AK3 (NM_004836.2,2875-2893).
gaccaaccactttaagttt

SEQ ID NO: 81272 - DNA, 19 bp, Homo sapiens
  siRNA target sequence for EIF2AK3 (NM_004836.2,2881-2899).
ccactttaagtttagatct

SEQ ID NO: 81273 - DNA, 19 bp, Homo sapiens
  siRNA target sequence for EIF2AK3 (NM_004836.2,2932-2950).
gttcaccaaaggtgtatct

SEQ ID NO: 81274 - DNA, 19 bp, Homo sapiens
  siRNA target sequence for EIF2AK3 (NM_004836.2,2942-2960).
ggtgtatctttacattcaa

SEQ ID NO: 81275 - DNA, 19 bp, Homo sapiens
  siRNA target sequence for EIF2AK3 (NM_004836.2,2984-3002).
cctcaaagactggatgaat

SEQ ID NO: 81276 - DNA, 19 bp, Homo sapiens
  siRNA target sequence for EIF2AK3 (NM_004836.2,2999-3017).
gaatggacgatgtaccata

SEQ ID NO: 81277 - DNA, 19 bp, Homo sapiens
  siRNA target sequence for EIF2AK3 (NM_004836.2,3111-3129).
ctcaagccatccaacatat

SEQ ID NO: 81278 - DNA, 19 bp, Homo sapiens
  siRNA target sequence for EIF2AK3 (NM_004836.2,3117-3135).
ccatccaacatattcttta

SEQ ID NO: 81279 - DNA, 19 bp, Homo sapiens
  siRNA target sequence for EIF2AK3 (NM_004836.2,3121-3139).
ccaacatattctttacaat

SEQ ID NO: 81280 - DNA, 19 bp, Homo sapiens
  siRNA target sequence for EIF2AK3 (NM_004836.2,3159-3177).
ggagactttgggttagtga

SEQ ID NO: 81281 - DNA, 19 bp, Homo sapiens
  siRNA target sequence for EIF2AK3 (NM_004836.2,3215-3233).
gaccccaatgccagcttat

SEQ ID NO: 81282 - DNA, 19 bp, Homo sapiens
  siRNA target sequence for EIF2AK3 (NM_004836.2,3277-3295).
cagagcagattcatggaaa

SEQ ID NO: 81283 - DNA, 19 bp, Homo sapiens
  siRNA target sequence for EIF2AK3 (NM_004836.2,3379-3397).
gagtcaggaccttaactga

SEQ ID NO: 81284 - DNA, 19 bp, Homo sapiens
  siRNA target sequence for EIF2AK3 (NM_004836.2,3383-3401).
caggaccttaactgatgta

SEQ ID NO: 81285 - DNA, 19 bp, Homo sapiens
  siRNA target sequence for EIF2AK3 (NM_004836.2,3408-3426).
ctcaaatttccaccattat

SEQ ID NO: 81286 - DNA, 19 bp, Homo sapiens
  siRNA target sequence for EIF2AK3 (NM_004836.2,3488-3506).
ggaacgacctgaagctata

SEQ ID NO: 81287 - DNA, 19 bp, Homo sapiens
  siRNA target sequence for EIF2AK3 (NM_004836.2,3489-3507).
gaacgacctgaagctataa

SEQ ID NO: 81288 - DNA, 19 bp, Homo sapiens
  siRNA target sequence for EIF2AK3 (NM_004836.2,3584-3602).
gagttcatcgggaacaaaa

SEQ ID NO: 81289 - DNA, 19 bp, Homo sapiens
  siRNA target sequence for EIF2AK3 (NM_004836.2,3586-3604).
gttcatcgggaacaaaaca

SEQ ID NO: 81290 - DNA, 19 bp, Homo sapiens
  siRNA target sequence for EPB42 (NM_000119.1,520-538).
gcagcatcacctgttttca

SEQ ID NO: 81291 - DNA, 19 bp, Homo sapiens
  siRNA target sequence for EPB42 (NM_000119.1,726-744).
ggccctcactgcacaaact

SEQ ID NO: 81292 - DNA, 19 bp, Homo sapiens
  siRNA target sequence for EPB42 (NM_000119.1,775-793).
caagccacattcccaattt

SEQ ID NO: 81293 - DNA, 19 bp, Homo sapiens
  siRNA target sequence for EPB42 (NM_000119.1,1007-1025).
ctcagcgcatggagtactt

SEQ ID NO: 81294 - DNA, 19 bp, Homo sapiens
  siRNA target sequence for EPB42 (NM_000119.1,1009-1027).
cagcgcatggagtacttgt

SEQ ID NO: 81295 - DNA, 19 bp, Homo sapiens
  siRNA target sequence for EPB42 (NM_000119.1,1012-1030).
cgcatggagtacttgttga

SEQ ID NO: 81296 - DNA, 19 bp, Homo sapiens
  siRNA target sequence for EPB42 (NM_000119.1,1194-1212).
gggtgccttgctgcatttt

SEQ ID NO: 81297 - DNA, 19 bp, Homo sapiens
  siRNA target sequence for EPB42 (NM_000119.1,1325-1343).
gaggccgacctgtgtatga

SEQ ID NO: 81298 - DNA, 19 bp, Homo sapiens
  siRNA target sequence for EPB42 (NM_000119.1,1442-1460).
ccggtgggcgtcttctcat

SEQ ID NO: 81299 - DNA, 19 bp, Homo sapiens
  siRNA target sequence for EPB42 (NM_000119.1,1443-1461).
cggtgggcgtcttctcata

SEQ ID NO: 81300 - DNA, 19 bp, Homo sapiens
  siRNA target sequence for EPB42 (NM_000119.1,1445-1463).
gtgggcgtcttctcataga

SEQ ID NO: 81301 - DNA, 19 bp, Homo sapiens
  siRNA target sequence for EPB42 (NM_000119.1,1449-1467).
gcgtcttctcatagatgaa

SEQ ID NO: 81302 - DNA, 19 bp, Homo sapiens
  siRNA target sequence for EPB42 (NM_000119.1,1450-1468).
cgtcttctcatagatgaat

SEQ ID NO: 81303 - DNA, 19 bp, Homo sapiens
  siRNA target sequence for EPB42 (NM_000119.1,1451-1469).
gtcttctcatagatgaata

SEQ ID NO: 81304 - DNA, 19 bp, Homo sapiens
  siRNA target sequence for EPB42 (NM_000119.1,1458-1476).
catagatgaatactataat

SEQ ID NO: 81305 - DNA, 19 bp, Homo sapiens
  siRNA target sequence for EPB42 (NM_000119.1,2028-2046).
ctcagtgacgctggttaat

SEQ ID NO: 81306 - DNA, 19 bp, Homo sapiens
  siRNA target sequence for EPB42 (NM_000119.1,2030-2048).
cagtgacgctggttaatca

SEQ ID NO: 81307 - DNA, 19 bp, Homo sapiens
  siRNA target sequence for EPB42 (NM_000119.1,2032-2050).
gtgacgctggttaatcaca

SEQ ID NO: 81308 - DNA, 19 bp, Homo sapiens
  siRNA target sequence for EPB42 (NM_000119.1,2084-2102).
gggtccaggctgtacacta

SEQ ID NO: 81309 - DNA, 19 bp, Homo sapiens
  siRNA target sequence for EPB42 (NM_000119.1,2218-2236).
cccgagaacaccttcctta

SEQ ID NO: 81310 - DNA, 19 bp, Homo sapiens
  siRNA target sequence for EPB42 (NM_000119.1,2257-2275).
cactctgaatccaacctta

SEQ ID NO: 81311 - DNA, 19 bp, Homo sapiens
  siRNA target sequence for EPB42 (NM_000119.1,2290-2308).
gaagacattgccatttgta

SEQ ID NO: 81312 - DNA, 19 bp, Homo sapiens
  siRNA target sequence for EPB42 (NM_000119.1,2312-2330).
cacaccttgccatcaagat

SEQ ID NO: 81313 - DNA, 19 bp, Homo sapiens
  siRNA target sequence for EPB42 (NM_000119.1,2568-2586).
ccagaacctaaccaactat

SEQ ID NO: 81314 - DNA, 19 bp, Homo sapiens
  siRNA target sequence for EPHA1 (NM_005232.2,216-234).
gctggatcccccaaaagat

SEQ ID NO: 81315 - DNA, 19 bp, Homo sapiens
  siRNA target sequence for EPHA1 (NM_005232.2,265-283).
gggacacccctgtacatgt

SEQ ID NO: 81316 - DNA, 19 bp, Homo sapiens
  siRNA target sequence for EPHA1 (NM_005232.2,266-284).
ggacacccctgtacatgta

SEQ ID NO: 81317 - DNA, 19 bp, Homo sapiens
  siRNA target sequence for EPHA1 (NM_005232.2,322-340).
cactggcttcgctccaatt

SEQ ID NO: 81318 - DNA, 19 bp, Homo sapiens
  siRNA target sequence for EPHA1 (NM_005232.2,326-344).
ggcttcgctccaattggat

SEQ ID NO: 81319 - DNA, 19 bp, Homo sapiens
  siRNA target sequence for EPHA1 (NM_005232.2,394-412).
gtgcgggactgcaagagtt

SEQ ID NO: 81320 - DNA, 19 bp, Homo sapiens
  siRNA target sequence for EPHA1 (NM_005232.2,1166-1184).
gacgccaggatgtcagata

SEQ ID NO: 81321 - DNA, 19 bp, Homo sapiens
  siRNA target sequence for EPHA1 (NM_005232.2,1168-1186).
cgccaggatgtcagataca

SEQ ID NO: 81322 - DNA, 19 bp, Homo sapiens
  siRNA target sequence for EPHA1 (NM_005232.2,1170-1188).
ccaggatgtcagatacagt

SEQ ID NO: 81323 - DNA, 19 bp, Homo sapiens
  siRNA target sequence for EPHA1 (NM_005232.2,1289-1307).
cacctgcagtgcatgtcaa

SEQ ID NO: 81324 - DNA, 19 bp, Homo sapiens
  siRNA target sequence for EPHA1 (NM_005232.2,1315-1333).
gaaccttatgccaactaca

SEQ ID NO: 81325 - DNA, 19 bp, Homo sapiens
  siRNA target sequence for EPHA1 (NM_005232.2,1662-1680).
ccctttctcccctgatcat

SEQ ID NO: 81326 - DNA, 19 bp, Homo sapiens
  siRNA target sequence for EPHA1 (NM_005232.2,1728-1746).
gattgtagccgtcatcttt

SEQ ID NO: 81327 - DNA, 19 bp, Homo sapiens
  siRNA target sequence for EPHA1 (NM_005232.2,2036-2054).
gcaagactgtggccattaa

SEQ ID NO: 81328 - DNA, 19 bp, Homo sapiens
  siRNA target sequence for EPHA1 (NM_005232.2,2124-2142).
gtttagccacccgcatatt

SEQ ID NO: 81329 - DNA, 19 bp, Homo sapiens
  siRNA target sequence for EPHA1 (NM_005232.2,2170-2188).
cgaaagccgatcatgatca

SEQ ID NO: 81330 - DNA, 19 bp, Homo sapiens
  siRNA target sequence for EPHA1 (NM_005232.2,2171-2189).
gaaagccgatcatgatcat

SEQ ID NO: 81331 - DNA, 19 bp, Homo sapiens
  siRNA target sequence for EPHA1 (NM_005232.2,2294-2312).
gcatgaactacctcagtaa

SEQ ID NO: 81332 - DNA, 19 bp, Homo sapiens
  siRNA target sequence for EPHA1 (NM_005232.2,2757-2775).
gcggaccattgccaacttt

SEQ ID NO: 81333 - DNA, 19 bp, Homo sapiens
  siRNA target sequence for EPHA1 (NM_005232.2,2759-2777).
ggaccattgccaactttga

SEQ ID NO: 81334 - DNA, 19 bp, Homo sapiens
  siRNA target sequence for EPHA1 (NM_005232.2,2946-2964).
gacgcagatgggaatcaca

SEQ ID NO: 81335 - DNA, 19 bp, Homo sapiens
  siRNA target sequence for EPHA1 (NM_005232.2,2973-2991).
gcaccagaagcgcattctt

SEQ ID NO: 81336 - DNA, 19 bp, Homo sapiens
  siRNA target sequence for EPHA2 (NM_004431.2,318-336).
gacatgccgatctacatgt

SEQ ID NO: 81337 - DNA, 19 bp, Homo sapiens
  siRNA target sequence for EPHA2 (NM_004431.2,403-421).
gagaggctgagcgtatctt

SEQ ID NO: 81338 - DNA, 19 bp, Homo sapiens
  siRNA target sequence for EPHA2 (NM_004431.2,409-427).
ctgagcgtatcttcattga

SEQ ID NO: 81339 - DNA, 19 bp, Homo sapiens
  siRNA target sequence for EPHA2 (NM_004431.2,422-440).
cattgagctcaagtttact

SEQ ID NO: 81340 - DNA, 19 bp, Homo sapiens
  siRNA target sequence for EPHA2 (NM_004431.2,545-563).
gcgcctgttcaccaagatt

SEQ ID NO: 81341 - DNA, 19 bp, Homo sapiens
  siRNA target sequence for EPHA2 (NM_004431.2,547-565).
gcctgttcaccaagattga

SEQ ID NO: 81342 - DNA, 19 bp, Homo sapiens
  siRNA target sequence for EPHA2 (NM_004431.2,715-733).
ccgtccgtgtctactacaa

SEQ ID NO: 81343 - DNA, 19 bp, Homo sapiens
  siRNA target sequence for EPHA2 (NM_004431.2,959-977).
ggcctgctcgcctggattt

SEQ ID NO: 81344 - DNA, 19 bp, Homo sapiens
  siRNA target sequence for EPHA2 (NM_004431.2,960-978).
gcctgctcgcctggatttt

SEQ ID NO: 81345 - DNA, 19 bp, Homo sapiens
  siRNA target sequence for EPHA2 (NM_004431.2,961-979).
cctgctcgcctggattttt

SEQ ID NO: 81346 - DNA, 19 bp, Homo sapiens
  siRNA target sequence for EPHA2 (NM_004431.2,962-980).
ctgctcgcctggatttttt

SEQ ID NO: 81347 - DNA, 19 bp, Homo sapiens
  siRNA target sequence for EPHA2 (NM_004431.2,967-985).
cgcctggattttttaagtt

SEQ ID NO: 81348 - DNA, 19 bp, Homo sapiens
  siRNA target sequence for EPHA2 (NM_004431.2,1537-1555).
ggaagtacgaggtcactta

SEQ ID NO: 81349 - DNA, 19 bp, Homo sapiens
  siRNA target sequence for EPHA2 (NM_004431.2,1690-1708).
gcagcaaggtgcacgaatt

SEQ ID NO: 81350 - DNA, 19 bp, Homo sapiens
  siRNA target sequence for EPHA2 (NM_004431.2,1693-1711).
gcaaggtgcacgaattcca

SEQ ID NO: 81351 - DNA, 19 bp, Homo sapiens
  siRNA target sequence for EPHA2 (NM_004431.2,1791-1809).
gcaggagttggcttcttta

SEQ ID NO: 81352 - DNA, 19 bp, Homo sapiens
  siRNA target sequence for EPHA2 (NM_004431.2,1846-1864).
ccccggaggacgtttactt

SEQ ID NO: 81353 - DNA, 19 bp, Homo sapiens
  siRNA target sequence for EPHA2 (NM_004431.2,1848-1866).
ccggaggacgtttacttct

SEQ ID NO: 81354 - DNA, 19 bp, Homo sapiens
  siRNA target sequence for EPHA2 (NM_004431.2,1901-1919).
cgtggacccccacacatat

SEQ ID NO: 81355 - DNA, 19 bp, Homo sapiens
  siRNA target sequence for EPHA2 (NM_004431.2,2172-2190).
gagggcgtcatctccaaat

SEQ ID NO: 81356 - DNA, 19 bp, Homo sapiens
  siRNA target sequence for EPHA2 (NM_004431.2,2603-2621).
caaccacgaggtgatgaaa

SEQ ID NO: 81357 - DNA, 19 bp, Homo sapiens
  siRNA target sequence for EPHA3 (NM_005233.3,276-294).
cagcttcggggaactgatt

SEQ ID NO: 81358 - DNA, 19 bp, Homo sapiens
  siRNA target sequence for EPHA3 (NM_005233.3,291-309).
gattccgcagccttccaat

SEQ ID NO: 81359 - DNA, 19 bp, Homo sapiens
  siRNA target sequence for EPHA3 (NM_005233.3,296-314).
cgcagccttccaatgaagt

SEQ ID NO: 81360 - DNA, 19 bp, Homo sapiens
  siRNA target sequence for EPHA3 (NM_005233.3,302-320).
cttccaatgaagtcaatct

SEQ ID NO: 81361 - DNA, 19 bp, Homo sapiens
  siRNA target sequence for EPHA3 (NM_005233.3,324-342).
ggattcaaaaacaattcaa

SEQ ID NO: 81362 - DNA, 19 bp, Homo sapiens
  siRNA target sequence for EPHA3 (NM_005233.3,348-366).
gctgggctggatctcttat

SEQ ID NO: 81363 - DNA, 19 bp, Homo sapiens
  siRNA target sequence for EPHA3 (NM_005233.3,352-370).
ggctggatctcttatccat

SEQ ID NO: 81364 - DNA, 19 bp, Homo sapiens
  siRNA target sequence for EPHA3 (NM_005233.3,357-375).
gatctcttatccatcacat

SEQ ID NO: 81365 - DNA, 19 bp, Homo sapiens
  siRNA target sequence for EPHA3 (NM_005233.3,390-408).
cagtggtgtggatgaacat

SEQ ID NO: 81366 - DNA, 19 bp, Homo sapiens
  siRNA target sequence for EPHA3 (NM_005233.3,392-410).
gtggtgtggatgaacatta

SEQ ID NO: 81367 - DNA, 19 bp, Homo sapiens
  siRNA target sequence for EPHA3 (NM_005233.3,495-513).
ctcagctcagaagatttat

SEQ ID NO: 81368 - DNA, 19 bp, Homo sapiens
  siRNA target sequence for EPHA3 (NM_005233.3,532-550).
ctacgagactgcaatagca

SEQ ID NO: 81369 - DNA, 19 bp, Homo sapiens
  siRNA target sequence for EPHA3 (NM_005233.3,543-561).
caatagcattccattggtt

SEQ ID NO: 81370 - DNA, 19 bp, Homo sapiens
  siRNA target sequence for EPHA3 (NM_005233.3,581-599).
cattcaacctgtactacat

SEQ ID NO: 81371 - DNA, 19 bp, Homo sapiens
  siRNA target sequence for EPHA3 (NM_005233.3,636-654).
gcatcagtttacaaagatt

SEQ ID NO: 81372 - DNA, 19 bp, Homo sapiens
  siRNA target sequence for EPHA3 (NM_005233.3,694-712).
cttggggaccgtattctga

SEQ ID NO: 81373 - DNA, 19 bp, Homo sapiens
  siRNA target sequence for EPHA3 (NM_005233.3,714-732).
gctcaacactgagattaga

SEQ ID NO: 81374 - DNA, 19 bp, Homo sapiens
  siRNA target sequence for EPHA3 (NM_005233.3,717-735).
caacactgagattagagaa

SEQ ID NO: 81375 - DNA, 19 bp, Homo sapiens
  siRNA target sequence for EPHA3 (NM_005233.3,736-754).
gtaggtcctgtcaacaaga

SEQ ID NO: 81376 - DNA, 19 bp, Homo sapiens
  siRNA target sequence for EPHA3 (NM_005233.3,802-820).
gtgtctgtgagagtatact

SEQ ID NO: 81377 - DNA, 19 bp, Homo sapiens
  siRNA target sequence for EPHA3 (NM_005233.3,808-826).
gtgagagtatacttcaaaa

SEQ ID NO: 81378 - DNA, 19 bp, Homo sapiens
  siRNA target sequence for EPHA3 (NM_005233.3,822-840).
caaaaagtgcccatttaca

SEQ ID NO: 81379 - DNA, 19 bp, Homo sapiens
  siRNA target sequence for EPHA3 (NM_005233.3,909-927).
gtcttgtgtcaacaattct

SEQ ID NO: 81380 - DNA, 19 bp, Homo sapiens
  siRNA target sequence for EPHA3 (NM_005233.3,911-929).
cttgtgtcaacaattctaa

SEQ ID NO: 81381 - DNA, 19 bp, Homo sapiens
  siRNA target sequence for EPHA3 (NM_005233.3,979-997).
gtacccattggcaagtgtt

SEQ ID NO: 81382 - DNA, 19 bp, Homo sapiens
  siRNA target sequence for EPHA3 (NM_005233.3,1040-1058).
cttgtcgaccaggtttcta

SEQ ID NO: 81383 - DNA, 19 bp, Homo sapiens
  siRNA target sequence for EPHA3 (NM_005233.3,1043-1061).
gtcgaccaggtttctacaa

SEQ ID NO: 81384 - DNA, 19 bp, Homo sapiens
  siRNA target sequence for EPHA3 (NM_005233.3,1059-1077).
caaggcattggatggtaat

SEQ ID NO: 81385 - DNA, 19 bp, Homo sapiens
  siRNA target sequence for EPHA3 (NM_005233.3,1063-1081).
gcattggatggtaatatga

SEQ ID NO: 81386 - DNA, 19 bp, Homo sapiens
  siRNA target sequence for EPHA3 (NM_005233.3,1064-1082).
cattggatggtaatatgaa

SEQ ID NO: 81387 - DNA, 19 bp, Homo sapiens
  siRNA target sequence for EPHA3 (NM_005233.3,1139-1157).
ggtgtgagaataattactt

SEQ ID NO: 81388 - DNA, 19 bp, Homo sapiens
  siRNA target sequence for EPHA3 (NM_005233.3,1210-1228).
ccaagaaatgttatctcta

SEQ ID NO: 81389 - DNA, 19 bp, Homo sapiens
  siRNA target sequence for EPHA3 (NM_005233.3,1279-1297).
ggaggccggaaagatgtta

SEQ ID NO: 81390 - DNA, 19 bp, Homo sapiens
  siRNA target sequence for EPHA3 (NM_005233.3,1283-1301).
gccggaaagatgttacctt

SEQ ID NO: 81391 - DNA, 19 bp, Homo sapiens
  siRNA target sequence for EPHA3 (NM_005233.3,1294-1312).
gttaccttcaacatcatat

SEQ ID NO: 81392 - DNA, 19 bp, Homo sapiens
  siRNA target sequence for EPHA3 (NM_005233.3,1298-1316).
ccttcaacatcatatgtaa

SEQ ID NO: 81393 - DNA, 19 bp, Homo sapiens
  siRNA target sequence for EPHA3 (NM_005233.3,1324-1342).
gggtggaatataaaacagt

SEQ ID NO: 81394 - DNA, 19 bp, Homo sapiens
  siRNA target sequence for EPHA3 (NM_005233.3,1417-1435).
gaccttctggcacatacta

SEQ ID NO: 81395 - DNA, 19 bp, Homo sapiens
  siRNA target sequence for EPHA3 (NM_005233.3,1482-1500).
ctccccaccaagacagttt

SEQ ID NO: 81396 - DNA, 19 bp, Homo sapiens
  siRNA target sequence for EPHA3 (NM_005233.3,1501-1519).
gctgcggtcagcatcacaa

SEQ ID NO: 81397 - DNA, 19 bp, Homo sapiens
  siRNA target sequence for EPHA3 (NM_005233.3,1504-1522).
gcggtcagcatcacaacta

SEQ ID NO: 81398 - DNA, 19 bp, Homo sapiens
  siRNA target sequence for EPHA3 (NM_005233.3,1505-1523).
cggtcagcatcacaactaa

SEQ ID NO: 81399 - DNA, 19 bp, Homo sapiens
  siRNA target sequence for EPHA3 (NM_005233.3,1506-1524).
ggtcagcatcacaactaat

SEQ ID NO: 81400 - DNA, 19 bp, Homo sapiens
  siRNA target sequence for EPHA3 (NM_005233.3,1538-1556).
cacctgtcctgacgattaa

SEQ ID NO: 81401 - DNA, 19 bp, Homo sapiens
  siRNA target sequence for EPHA3 (NM_005233.3,1540-1558).
cctgtcctgacgattaaga

SEQ ID NO: 81402 - DNA, 19 bp, Homo sapiens
  siRNA target sequence for EPHA3 (NM_005233.3,1541-1559).
ctgtcctgacgattaagaa

SEQ ID NO: 81403 - DNA, 19 bp, Homo sapiens
  siRNA target sequence for EPHA3 (NM_005233.3,1561-1579).
gatcggacctccagaaata

SEQ ID NO: 81404 - DNA, 19 bp, Homo sapiens
  siRNA target sequence for EPHA3 (NM_005233.3,1609-1627).
catcctaatgggatcatat

SEQ ID NO: 81405 - DNA, 19 bp, Homo sapiens
  siRNA target sequence for EPHA3 (NM_005233.3,1613-1631).
ctaatgggatcatattgga

SEQ ID NO: 81406 - DNA, 19 bp, Homo sapiens
  siRNA target sequence for EPHA3 (NM_005233.3,1660-1678).
gaacaagaaacaagttata

SEQ ID NO: 81407 - DNA, 19 bp, Homo sapiens
  siRNA target sequence for EPHA3 (NM_005233.3,1663-1681).
caagaaacaagttatacca

SEQ ID NO: 81408 - DNA, 19 bp, Homo sapiens
  siRNA target sequence for EPHA3 (NM_005233.3,1688-1706).
gggcaagaggcacaaatgt

SEQ ID NO: 81409 - DNA, 19 bp, Homo sapiens
  siRNA target sequence for EPHA3 (NM_005233.3,1718-1736).
gcctcaagcctgacactat

SEQ ID NO: 81410 - DNA, 19 bp, Homo sapiens
  siRNA target sequence for EPHA3 (NM_005233.3,1719-1737).
cctcaagcctgacactata

SEQ ID NO: 81411 - DNA, 19 bp, Homo sapiens
  siRNA target sequence for EPHA3 (NM_005233.3,1720-1738).
ctcaagcctgacactatat

SEQ ID NO: 81412 - DNA, 19 bp, Homo sapiens
  siRNA target sequence for EPHA3 (NM_005233.3,1725-1743).
gcctgacactatatacgta

SEQ ID NO: 81413 - DNA, 19 bp, Homo sapiens
  siRNA target sequence for EPHA3 (NM_005233.3,1726-1744).
cctgacactatatacgtat

SEQ ID NO: 81414 - DNA, 19 bp, Homo sapiens
  siRNA target sequence for EPHA3 (NM_005233.3,1731-1749).
cactatatacgtattccaa

SEQ ID NO: 81415 - DNA, 19 bp, Homo sapiens
  siRNA target sequence for EPHA3 (NM_005233.3,1733-1751).
ctatatacgtattccaaat

SEQ ID NO: 81416 - DNA, 19 bp, Homo sapiens
  siRNA target sequence for EPHA3 (NM_005233.3,1758-1776).
ccgaacagccgctggatat

SEQ ID NO: 81417 - DNA, 19 bp, Homo sapiens
  siRNA target sequence for EPHA3 (NM_005233.3,1779-1797).
gacgaacagccgcaagttt

SEQ ID NO: 81418 - DNA, 19 bp, Homo sapiens
  siRNA target sequence for EPHA3 (NM_005233.3,1788-1806).
ccgcaagtttgagtttgaa

SEQ ID NO: 81419 - DNA, 19 bp, Homo sapiens
  siRNA target sequence for EPHA3 (NM_005233.3,1841-1859).
gtagccaagtggtcatgat

SEQ ID NO: 81420 - DNA, 19 bp, Homo sapiens
  siRNA target sequence for EPHA3 (NM_005233.3,1977-1995).
caatgggcatttaaaactt

SEQ ID NO: 81421 - DNA, 19 bp, Homo sapiens
  siRNA target sequence for EPHA3 (NM_005233.3,2000-2018).
gtctcaggacttatgttga

SEQ ID NO: 81422 - DNA, 19 bp, Homo sapiens
  siRNA target sequence for EPHA3 (NM_005233.3,2042-2060).
cccaagctgttcatgagtt

SEQ ID NO: 81423 - DNA, 19 bp, Homo sapiens
  siRNA target sequence for EPHA3 (NM_005233.3,2043-2061).
ccaagctgttcatgagttt

SEQ ID NO: 81424 - DNA, 19 bp, Homo sapiens
  siRNA target sequence for EPHA3 (NM_005233.3,2079-2097).
caccaacatatccattgat

SEQ ID NO: 81425 - DNA, 19 bp, Homo sapiens
  siRNA target sequence for EPHA3 (NM_005233.3,2132-2150).
gcagtggtcgcttaaaact

SEQ ID NO: 81426 - DNA, 19 bp, Homo sapiens
  siRNA target sequence for EPHA3 (NM_005233.3,2285-2303).
gagttgttaccaaaagtaa

SEQ ID NO: 81427 - DNA, 19 bp, Homo sapiens
  siRNA target sequence for EPHA3 (NM_005233.3,2300-2318).
gtaagccagttatgattgt

SEQ ID NO: 81428 - DNA, 19 bp, Homo sapiens
  siRNA target sequence for EPHA3 (NM_005233.3,2372-2390).
cccagtttactgtcattca

SEQ ID NO: 81429 - DNA, 19 bp, Homo sapiens
  siRNA target sequence for EPHA3 (NM_005233.3,2464-2482).
ctcgctgctcggaacatct

SEQ ID NO: 81430 - DNA, 19 bp, Homo sapiens
  siRNA target sequence for EPHA3 (NM_005233.3,2467-2485).
gctgctcggaacatcttga

SEQ ID NO: 81431 - DNA, 19 bp, Homo sapiens
  siRNA target sequence for EPHA3 (NM_005233.3,2468-2486).
ctgctcggaacatcttgat

SEQ ID NO: 81432 - DNA, 19 bp, Homo sapiens
  siRNA target sequence for EPHA3 (NM_005233.3,2470-2488).
gctcggaacatcttgatca

SEQ ID NO: 81433 - DNA, 19 bp, Homo sapiens
  siRNA target sequence for EPHA3 (NM_005233.3,2471-2489).
ctcggaacatcttgatcaa

SEQ ID NO: 81434 - DNA, 19 bp, Homo sapiens
  siRNA target sequence for EPHA3 (NM_005233.3,2473-2491).
cggaacatcttgatcaaca

SEQ ID NO: 81435 - DNA, 19 bp, Homo sapiens
  siRNA target sequence for EPHA3 (NM_005233.3,2594-2612).
ggacatcaccagaagctat

SEQ ID NO: 81436 - DNA, 19 bp, Homo sapiens
  siRNA target sequence for EPHA3 (NM_005233.3,2595-2613).
gacatcaccagaagctata

SEQ ID NO: 81437 - DNA, 19 bp, Homo sapiens
  siRNA target sequence for EPHA3 (NM_005233.3,2648-2666).
ggagttatgggattgttct

SEQ ID NO: 81438 - DNA, 19 bp, Homo sapiens
  siRNA target sequence for EPHA3 (NM_005233.3,2835-2853).
gtttgagcagattgttagt

SEQ ID NO: 81439 - DNA, 19 bp, Homo sapiens
  siRNA target sequence for EPHA3 (NM_005233.3,2910-2928).
cgcaaggccatcaaacctt

SEQ ID NO: 81440 - DNA, 19 bp, Homo sapiens
  siRNA target sequence for EPHA3 (NM_005233.3,3104-3122).
ggccacagaagaagatcat

SEQ ID NO: 81441 - DNA, 19 bp, Homo sapiens
  siRNA target sequence for EPHA3 (NM_005233.3,3106-3124).
ccacagaagaagatcatca

SEQ ID NO: 81442 - DNA, 19 bp, Homo sapiens
  siRNA target sequence for EPHA3 (NM_005233.3,3136-3154).
gctctagaaacgcaatcaa

SEQ ID NO: 81443 - DNA, 19 bp, Homo sapiens
  siRNA target sequence for EPHA3 (NM_005233.3,3137-3155).
ctctagaaacgcaatcaaa

SEQ ID NO: 81444 - DNA, 19 bp, Homo sapiens
  siRNA target sequence for EPHA3 (NM_182644.1,1670-1688).
ctagtccagactgtatgta

SEQ ID NO: 81445 - DNA, 19 bp, Homo sapiens
  siRNA target sequence for EPHA3 (NM_182644.1,1673-1691).
gtccagactgtatgtatta

SEQ ID NO: 81446 - DNA, 19 bp, Homo sapiens
  siRNA target sequence for EPHA3 (NM_182644.1,1678-1696).
gactgtatgtattatttca

SEQ ID NO: 81447 - DNA, 19 bp, Homo sapiens
  siRNA target sequence for EPHA4 (NM_004438.2,123-141).
cgcgaatgaagttacctta

SEQ ID NO: 81448 - DNA, 19 bp, Homo sapiens
  siRNA target sequence for EPHA4 (NM_004438.2,125-143).
cgaatgaagttaccttatt

SEQ ID NO: 81449 - DNA, 19 bp, Homo sapiens
  siRNA target sequence for EPHA4 (NM_004438.2,166-184).
gaacttgggtggatagcaa

SEQ ID NO: 81450 - DNA, 19 bp, Homo sapiens
  siRNA target sequence for EPHA4 (NM_004438.2,271-289).
gaacccagccagaataact

SEQ ID NO: 81451 - DNA, 19 bp, Homo sapiens
  siRNA target sequence for EPHA4 (NM_004438.2,290-308).
ggctacgaactgattggat

SEQ ID NO: 81452 - DNA, 19 bp, Homo sapiens
  siRNA target sequence for EPHA4 (NM_004438.2,320-338).
gggctcagagggtgtatat

SEQ ID NO: 81453 - DNA, 19 bp, Homo sapiens
  siRNA target sequence for EPHA4 (NM_004438.2,321-339).
ggctcagagggtgtatatt

SEQ ID NO: 81454 - DNA, 19 bp, Homo sapiens
  siRNA target sequence for EPHA4 (NM_004438.2,325-343).
cagagggtgtatattgaga

SEQ ID NO: 81455 - DNA, 19 bp, Homo sapiens
  siRNA target sequence for EPHA4 (NM_004438.2,327-345).
gagggtgtatattgagatt

SEQ ID NO: 81456 - DNA, 19 bp, Homo sapiens
  siRNA target sequence for EPHA4 (NM_004438.2,404-422).
cgtttaacctgtactacta

SEQ ID NO: 81457 - DNA, 19 bp, Homo sapiens
  siRNA target sequence for EPHA4 (NM_004438.2,405-423).
gtttaacctgtactactat

SEQ ID NO: 81458 - DNA, 19 bp, Homo sapiens
  siRNA target sequence for EPHA4 (NM_004438.2,553-571).
cgggatgtagggccattaa

SEQ ID NO: 81459 - DNA, 19 bp, Homo sapiens
  siRNA target sequence for EPHA4 (NM_004438.2,556-574).
gatgtagggccattaagca

SEQ ID NO: 81460 - DNA, 19 bp, Homo sapiens
  siRNA target sequence for EPHA4 (NM_004438.2,631-649).
gtccgtgtgttctataaaa

SEQ ID NO: 81461 - DNA, 19 bp, Homo sapiens
  siRNA target sequence for EPHA4 (NM_004438.2,856-874).
gaatgccaagcttgcaaaa

SEQ ID NO: 81462 - DNA, 19 bp, Homo sapiens
  siRNA target sequence for EPHA4 (NM_004438.2,1086-1104).
gagtagccctcagaataca

SEQ ID NO: 81463 - DNA, 19 bp, Homo sapiens
  siRNA target sequence for EPHA4 (NM_004438.2,1111-1129).
cgccaggacatttcctata

SEQ ID NO: 81464 - DNA, 19 bp, Homo sapiens
  siRNA target sequence for EPHA4 (NM_004438.2,1112-1130).
gccaggacatttcctataa

SEQ ID NO: 81465 - DNA, 19 bp, Homo sapiens
  siRNA target sequence for EPHA4 (NM_004438.2,1113-1131).
ccaggacatttcctataat

SEQ ID NO: 81466 - DNA, 19 bp, Homo sapiens
  siRNA target sequence for EPHA4 (NM_004438.2,1249-1267).
ctcctagctcataccaatt

SEQ ID NO: 81467 - DNA, 19 bp, Homo sapiens
  siRNA target sequence for EPHA4 (NM_004438.2,1252-1270).
ctagctcataccaattaca

SEQ ID NO: 81468 - DNA, 19 bp, Homo sapiens
  siRNA target sequence for EPHA4 (NM_004438.2,1360-1378).
gcaccatcatccattgctt

SEQ ID NO: 81469 - DNA, 19 bp, Homo sapiens
  siRNA target sequence for EPHA4 (NM_004438.2,1497-1515).
gcgaagctatcgtatagtt

SEQ ID NO: 81470 - DNA, 19 bp, Homo sapiens
  siRNA target sequence for EPHA4 (NM_004438.2,1551-1569).
gaaccctctcacttcctat

SEQ ID NO: 81471 - DNA, 19 bp, Homo sapiens
  siRNA target sequence for EPHA4 (NM_004438.2,1714-1732).
gtgctggtggtaattctca

SEQ ID NO: 81472 - DNA, 19 bp, Homo sapiens
  siRNA target sequence for EPHA4 (NM_004438.2,1751-1769).
gccggagacggagtaaata

SEQ ID NO: 81473 - DNA, 19 bp, Homo sapiens
  siRNA target sequence for EPHA4 (NM_004438.2,1755-1773).
gagacggagtaaatacagt

SEQ ID NO: 81474 - DNA, 19 bp, Homo sapiens
  siRNA target sequence for EPHA4 (NM_004438.2,1891-1909).
gacgcatcctgcattaaga

SEQ ID NO: 81475 - DNA, 19 bp, Homo sapiens
  siRNA target sequence for EPHA4 (NM_004438.2,1893-1911).
cgcatcctgcattaagatt

SEQ ID NO: 81476 - DNA, 19 bp, Homo sapiens
  siRNA target sequence for EPHA4 (NM_004438.2,1908-1926).
gattgaaaaagttatagga

SEQ ID NO: 81477 - DNA, 19 bp, Homo sapiens
  siRNA target sequence for EPHA4 (NM_004438.2,1949-1967).
gcagtgggcgtctcaaagt

SEQ ID NO: 81478 - DNA, 19 bp, Homo sapiens
  siRNA target sequence for EPHA4 (NM_004438.2,2012-2030).
ctggttatacagacaaaca

SEQ ID NO: 81479 - DNA, 19 bp, Homo sapiens
  siRNA target sequence for EPHA4 (NM_004438.2,2077-2095).
catccgaacatcattcact

SEQ ID NO: 81480 - DNA, 19 bp, Homo sapiens
  siRNA target sequence for EPHA4 (NM_004438.2,2101-2119).
ggcgtggtcactaaatgta

SEQ ID NO: 81481 - DNA, 19 bp, Homo sapiens
  siRNA target sequence for EPHA4 (NM_004438.2,2102-2120).
gcgtggtcactaaatgtaa

SEQ ID NO: 81482 - DNA, 19 bp, Homo sapiens
  siRNA target sequence for EPHA4 (NM_004438.2,2111-2129).
ctaaatgtaaaccagtaat

SEQ ID NO: 81483 - DNA, 19 bp, Homo sapiens
  siRNA target sequence for EPHA4 (NM_004438.2,2189-2207).
gcagatttacagtcattca

SEQ ID NO: 81484 - DNA, 19 bp, Homo sapiens
  siRNA target sequence for EPHA4 (NM_004438.2,2234-2252).
ggtctgggatgaagtattt

SEQ ID NO: 81485 - DNA, 19 bp, Homo sapiens
  siRNA target sequence for EPHA4 (NM_004438.2,2382-2400).
caccaggggtggcaagatt

SEQ ID NO: 81486 - DNA, 19 bp, Homo sapiens
  siRNA target sequence for EPHA4 (NM_004438.2,2422-2440).
gaagcaattgcctatcgta

SEQ ID NO: 81487 - DNA, 19 bp, Homo sapiens
  siRNA target sequence for EPHA4 (NM_004438.2,2425-2443).
gcaattgcctatcgtaaat

SEQ ID NO: 81488 - DNA, 19 bp, Homo sapiens
  siRNA target sequence for EPHA4 (NM_004438.2,2426-2444).
caattgcctatcgtaaatt

SEQ ID NO: 81489 - DNA, 19 bp, Homo sapiens
  siRNA target sequence for EPHA4 (NM_004438.2,2656-2674).
gggcagattgtcaacatgt

SEQ ID NO: 81490 - DNA, 19 bp, Homo sapiens
  siRNA target sequence for EPHA4 (NM_004438.2,2724-2742).
gagctccagacctaacact

SEQ ID NO: 81491 - DNA, 19 bp, Homo sapiens
  siRNA target sequence for EPHA4 (NM_004438.2,2818-2836).
gaccggtataaggataact

SEQ ID NO: 81492 - DNA, 19 bp, Homo sapiens
  siRNA target sequence for EPHA4 (NM_004438.2,2921-2939).
cgcaccagaataagatttt

SEQ ID NO: 81493 - DNA, 19 bp, Homo sapiens
  siRNA target sequence for EPHA4 (NM_004438.2,2954-2972).
caatgcgaacccaaatgca

SEQ ID NO: 81494 - DNA, 19 bp, Homo sapiens
  siRNA target sequence for EPHA4 (NM_004438.2,2976-2994).
gatgcacggcagaatggtt

SEQ ID NO: 81495 - DNA, 19 bp, Homo sapiens
  siRNA target sequence for EPHA5 (NM_004439.3,226-244).
cgaagtgaatttattggat

SEQ ID NO: 81496 - DNA, 19 bp, Homo sapiens
  siRNA target sequence for EPHA5 (NM_004439.3,263-281).
gacctgggatggattgctt

SEQ ID NO: 81497 - DNA, 19 bp, Homo sapiens
  siRNA target sequence for EPHA5 (NM_004439.3,265-283).
cctgggatggattgctttt

SEQ ID NO: 81498 - DNA, 19 bp, Homo sapiens
  siRNA target sequence for EPHA5 (NM_004439.3,269-287).
ggatggattgcttttccaa

SEQ ID NO: 81499 - DNA, 19 bp, Homo sapiens
  siRNA target sequence for EPHA5 (NM_004439.3,270-288).
gatggattgcttttccaaa

SEQ ID NO: 81500 - DNA, 19 bp, Homo sapiens
  siRNA target sequence for EPHA5 (NM_004439.3,413-431).
ggtgcttccagaatcttca

SEQ ID NO: 81501 - DNA, 19 bp, Homo sapiens
  siRNA target sequence for EPHA5 (NM_004439.3,414-432).
gtgcttccagaatcttcat

SEQ ID NO: 81502 - DNA, 19 bp, Homo sapiens
  siRNA target sequence for EPHA5 (NM_004439.3,493-511).
ggaaacctttaatatgtat

SEQ ID NO: 81503 - DNA, 19 bp, Homo sapiens
  siRNA target sequence for EPHA5 (NM_004439.3,585-603).
ccgatgaaagctttacaga

SEQ ID NO: 81504 - DNA, 19 bp, Homo sapiens
  siRNA target sequence for EPHA5 (NM_004439.3,586-604).
cgatgaaagctttacagaa

SEQ ID NO: 81505 - DNA, 19 bp, Homo sapiens
  siRNA target sequence for EPHA5 (NM_004439.3,594-612).
gctttacagaacttgatct

SEQ ID NO: 81506 - DNA, 19 bp, Homo sapiens
  siRNA target sequence for EPHA5 (NM_004439.3,611-629).
cttggtgaccgtgttatga

SEQ ID NO: 81507 - DNA, 19 bp, Homo sapiens
  siRNA target sequence for EPHA5 (NM_004439.3,617-635).
gaccgtgttatgaaactga

SEQ ID NO: 81508 - DNA, 19 bp, Homo sapiens
  siRNA target sequence for EPHA5 (NM_004439.3,619-637).
ccgtgttatgaaactgaat

SEQ ID NO: 81509 - DNA, 19 bp, Homo sapiens
  siRNA target sequence for EPHA5 (NM_004439.3,620-638).
cgtgttatgaaactgaata

SEQ ID NO: 81510 - DNA, 19 bp, Homo sapiens
  siRNA target sequence for EPHA5 (NM_004439.3,653-671).
gtaggacctctaagcaaaa

SEQ ID NO: 81511 - DNA, 19 bp, Homo sapiens
  siRNA target sequence for EPHA5 (NM_004439.3,719-737).
gtttctgtgcgtgtatact

SEQ ID NO: 81512 - DNA, 19 bp, Homo sapiens
  siRNA target sequence for EPHA5 (NM_004439.3,831-849).
cctgtgtcaaccattctgt

SEQ ID NO: 81513 - DNA, 19 bp, Homo sapiens
  siRNA target sequence for EPHA5 (NM_004439.3,852-870).
ccgatgaacctcccaaaat

SEQ ID NO: 81514 - DNA, 19 bp, Homo sapiens
  siRNA target sequence for EPHA5 (NM_004439.3,916-934).
catgtgcaaggcaggatat

SEQ ID NO: 81515 - DNA, 19 bp, Homo sapiens
  siRNA target sequence for EPHA5 (NM_004439.3,1130-1148).
cctcggaatgccatctcaa

SEQ ID NO: 81516 - DNA, 19 bp, Homo sapiens
  siRNA target sequence for EPHA5 (NM_004439.3,1131-1149).
ctcggaatgccatctcaaa

SEQ ID NO: 81517 - DNA, 19 bp, Homo sapiens
  siRNA target sequence for EPHA5 (NM_004439.3,1203-1221).
gaaggaaagacgtgtcata

SEQ ID NO: 81518 - DNA, 19 bp, Homo sapiens
  siRNA target sequence for EPHA5 (NM_004439.3,1206-1224).
ggaaagacgtgtcatatta

SEQ ID NO: 81519 - DNA, 19 bp, Homo sapiens
  siRNA target sequence for EPHA5 (NM_004439.3,1298-1316).
cggcaaagcggcctgaaaa

SEQ ID NO: 81520 - DNA, 19 bp, Homo sapiens
  siRNA target sequence for EPHA5 (NM_004439.3,1340-1358).
ctactcgctcacacaaact

SEQ ID NO: 81521 - DNA, 19 bp, Homo sapiens
  siRNA target sequence for EPHA5 (NM_004439.3,1343-1361).
ctcgctcacacaaactata

SEQ ID NO: 81522 - DNA, 19 bp, Homo sapiens
  siRNA target sequence for EPHA5 (NM_004439.3,1346-1364).
gctcacacaaactatacct

SEQ ID NO: 81523 - DNA, 19 bp, Homo sapiens
  siRNA target sequence for EPHA5 (NM_004439.3,1412-1430).
cggcagtatgtgtctgtaa

SEQ ID NO: 81524 - DNA, 19 bp, Homo sapiens
  siRNA target sequence for EPHA5 (NM_004439.3,1414-1432).
gcagtatgtgtctgtaaat

SEQ ID NO: 81525 - DNA, 19 bp, Homo sapiens
  siRNA target sequence for EPHA5 (NM_004439.3,1524-1542).
cagatcgtcccaatggaat

SEQ ID NO: 81526 - DNA, 19 bp, Homo sapiens
  siRNA target sequence for EPHA5 (NM_004439.3,1583-1601).
gagaccagctacacgatta

SEQ ID NO: 81527 - DNA, 19 bp, Homo sapiens
  siRNA target sequence for EPHA5 (NM_004439.3,1587-1605).
ccagctacacgattatcaa

SEQ ID NO: 81528 - DNA, 19 bp, Homo sapiens
  siRNA target sequence for EPHA5 (NM_004439.3,1588-1606).
cagctacacgattatcaaa

SEQ ID NO: 81529 - DNA, 19 bp, Homo sapiens
  siRNA target sequence for EPHA5 (NM_004439.3,1596-1614).
cgattatcaaatctaaaga

SEQ ID NO: 81530 - DNA, 19 bp, Homo sapiens
  siRNA target sequence for EPHA5 (NM_004439.3,1636-1654).
cttgaaaccagcttcagtt

SEQ ID NO: 81531 - DNA, 19 bp, Homo sapiens
  siRNA target sequence for EPHA5 (NM_004439.3,1650-1668).
cagtttatgtcttccaaat

SEQ ID NO: 81532 - DNA, 19 bp, Homo sapiens
  siRNA target sequence for EPHA5 (NM_004439.3,1702-1720).
cagtcgaagatttgagttt

SEQ ID NO: 81533 - DNA, 19 bp, Homo sapiens
  siRNA target sequence for EPHA5 (NM_004439.3,1784-1802).
gtgacagtgggagtcattt

SEQ ID NO: 81534 - DNA, 19 bp, Homo sapiens
  siRNA target sequence for EPHA5 (NM_004439.3,1886-1904).
gcccatccaagcctaatat

SEQ ID NO: 81535 - DNA, 19 bp, Homo sapiens
  siRNA target sequence for EPHA5 (NM_004439.3,1979-1997).
ctgccaggagtaagaactt

SEQ ID NO: 81536 - DNA, 19 bp, Homo sapiens
  siRNA target sequence for EPHA5 (NM_004439.3,2014-2032).
ctatgaggatcccaatcaa

SEQ ID NO: 81537 - DNA, 19 bp, Homo sapiens
  siRNA target sequence for EPHA5 (NM_004439.3,2033-2051).
gctgtccacgaatttgcta

SEQ ID NO: 81538 - DNA, 19 bp, Homo sapiens
  siRNA target sequence for EPHA5 (NM_004439.3,2053-2071).
ggagatagaagcatcatgt

SEQ ID NO: 81539 - DNA, 19 bp, Homo sapiens
  siRNA target sequence for EPHA5 (NM_004439.3,2054-2072).
gagatagaagcatcatgta

SEQ ID NO: 81540 - DNA, 19 bp, Homo sapiens
  siRNA target sequence for EPHA5 (NM_004439.3,2074-2092).
caccattgagagagttatt

SEQ ID NO: 81541 - DNA, 19 bp, Homo sapiens
  siRNA target sequence for EPHA5 (NM_004439.3,2173-2191).
ccttaaagtaggctatact

SEQ ID NO: 81542 - DNA, 19 bp, Homo sapiens
  siRNA target sequence for EPHA5 (NM_004439.3,2296-2314).
gatgatcgtgacagagtat

SEQ ID NO: 81543 - DNA, 19 bp, Homo sapiens
  siRNA target sequence for EPHA5 (NM_004439.3,2320-2338).
gaatggctctttagataca

SEQ ID NO: 81544 - DNA, 19 bp, Homo sapiens
  siRNA target sequence for EPHA5 (NM_004439.3,2405-2423).
gcaggaatgaagtaccttt

SEQ ID NO: 81545 - DNA, 19 bp, Homo sapiens
  siRNA target sequence for EPHA5 (NM_004439.3,2600-2618).
gctttccgaaagtttactt

SEQ ID NO: 81546 - DNA, 19 bp, Homo sapiens
  siRNA target sequence for EPHA5 (NM_004439.3,2632-2650).
ctggagttatggaatagta

SEQ ID NO: 81547 - DNA, 19 bp, Homo sapiens
  siRNA target sequence for EPHA5 (NM_004439.3,2759-2777).
cctgctgctctctatcagt

SEQ ID NO: 81548 - DNA, 19 bp, Homo sapiens
  siRNA target sequence for EPHA5 (NM_004439.3,2763-2781).
ctgctctctatcagttaat

SEQ ID NO: 81549 - DNA, 19 bp, Homo sapiens
  siRNA target sequence for EPHA5 (NM_004439.3,2814-2832).
ggcccaagtttgatgaaat

SEQ ID NO: 81550 - DNA, 19 bp, Homo sapiens
  siRNA target sequence for EPHA5 (NM_004439.3,2854-2872).
gatacgtaacccaagtagt

SEQ ID NO: 81551 - DNA, 19 bp, Homo sapiens
  siRNA target sequence for EPHA5 (NM_004439.3,2936-2954).
ggatctggggcctacagat

SEQ ID NO: 81552 - DNA, 19 bp, Homo sapiens
  siRNA target sequence for EPHA5 (NM_004439.3,2990-3008).
cggtatacagagattttca

SEQ ID NO: 81553 - DNA, 19 bp, Homo sapiens
  siRNA target sequence for EPHA5 (NM_004439.3,2991-3009).
ggtatacagagattttcat

SEQ ID NO: 81554 - DNA, 19 bp, Homo sapiens
  siRNA target sequence for EPHA7 (NM_004440.2,229-247).
cggtacccttcatggatta

SEQ ID NO: 81555 - DNA, 19 bp, Homo sapiens
  siRNA target sequence for EPHA7 (NM_004440.2,230-248).
ggtacccttcatggattat

SEQ ID NO: 81556 - DNA, 19 bp, Homo sapiens
  siRNA target sequence for EPHA7 (NM_004440.2,231-249).
gtacccttcatggattatt

SEQ ID NO: 81557 - DNA, 19 bp, Homo sapiens
  siRNA target sequence for EPHA7 (NM_004440.2,297-315).
ggctgcgaaggaagtacta

SEQ ID NO: 81558 - DNA, 19 bp, Homo sapiens
  siRNA target sequence for EPHA7 (NM_004440.2,299-317).
ctgcgaaggaagtactact

SEQ ID NO: 81559 - DNA, 19 bp, Homo sapiens
  siRNA target sequence for EPHA7 (NM_004440.2,310-328).
gtactactgctggattcta

SEQ ID NO: 81560 - DNA, 19 bp, Homo sapiens
  siRNA target sequence for EPHA7 (NM_004440.2,321-339).
ggattctaaagcacaacaa

SEQ ID NO: 81561 - DNA, 19 bp, Homo sapiens
  siRNA target sequence for EPHA7 (NM_004440.2,322-340).
gattctaaagcacaacaaa

SEQ ID NO: 81562 - DNA, 19 bp, Homo sapiens
  siRNA target sequence for EPHA7 (NM_004440.2,343-361).
gagttggagtggatttcct

SEQ ID NO: 81563 - DNA, 19 bp, Homo sapiens
  siRNA target sequence for EPHA7 (NM_004440.2,466-484).
ctgcggactaactggattt

SEQ ID NO: 81564 - DNA, 19 bp, Homo sapiens
  siRNA target sequence for EPHA7 (NM_004440.2,469-487).
cggactaactggatttcca

SEQ ID NO: 81565 - DNA, 19 bp, Homo sapiens
  siRNA target sequence for EPHA7 (NM_004440.2,492-510).
caatgcacaaaggattttt

SEQ ID NO: 81566 - DNA, 19 bp, Homo sapiens
  siRNA target sequence for EPHA7 (NM_004440.2,503-521).
ggatttttgtagaattgaa

SEQ ID NO: 81567 - DNA, 19 bp, Homo sapiens
  siRNA target sequence for EPHA7 (NM_004440.2,504-522).
gatttttgtagaattgaaa

SEQ ID NO: 81568 - DNA, 19 bp, Homo sapiens
  siRNA target sequence for EPHA7 (NM_004440.2,610-628).
gacactggcaggaatataa

SEQ ID NO: 81569 - DNA, 19 bp, Homo sapiens
  siRNA target sequence for EPHA7 (NM_004440.2,612-630).
cactggcaggaatataaga

SEQ ID NO: 81570 - DNA, 19 bp, Homo sapiens
  siRNA target sequence for EPHA7 (NM_004440.2,637-655).
ctctatgtaaaaatagaca

SEQ ID NO: 81571 - DNA, 19 bp, Homo sapiens
  siRNA target sequence for EPHA7 (NM_004440.2,688-706).
gaccttggtgaaagaaaga

SEQ ID NO: 81572 - DNA, 19 bp, Homo sapiens
  siRNA target sequence for EPHA7 (NM_004440.2,774-792).
ggatgtaggggcttgcata

SEQ ID NO: 81573 - DNA, 19 bp, Homo sapiens
  siRNA target sequence for EPHA7 (NM_004440.2,778-796).
gtaggggcttgcatagctt

SEQ ID NO: 81574 - DNA, 19 bp, Homo sapiens
  siRNA target sequence for EPHA7 (NM_004440.2,803-821).
ctgtcaaagtgtactacaa

SEQ ID NO: 81575 - DNA, 19 bp, Homo sapiens
  siRNA target sequence for EPHA7 (NM_004440.2,805-823).
gtcaaagtgtactacaaga

SEQ ID NO: 81576 - DNA, 19 bp, Homo sapiens
  siRNA target sequence for EPHA7 (NM_004440.2,830-848).
ggtccattattgagaactt

SEQ ID NO: 81577 - DNA, 19 bp, Homo sapiens
  siRNA target sequence for EPHA7 (NM_004440.2,868-886).
gtgactggttcagaatttt

SEQ ID NO: 81578 - DNA, 19 bp, Homo sapiens
  siRNA target sequence for EPHA7 (NM_004440.2,980-998).
ggttagtgcccattggaaa

SEQ ID NO: 81579 - DNA, 19 bp, Homo sapiens
  siRNA target sequence for EPHA7 (NM_004440.2,981-999).
gttagtgcccattggaaaa

SEQ ID NO: 81580 - DNA, 19 bp, Homo sapiens
  siRNA target sequence for EPHA7 (NM_004440.2,1051-1069).
ggccgtgggttctacaagt

SEQ ID NO: 81581 - DNA, 19 bp, Homo sapiens
  siRNA target sequence for EPHA7 (NM_004440.2,1054-1072).
cgtgggttctacaagtctt

SEQ ID NO: 81582 - DNA, 19 bp, Homo sapiens
  siRNA target sequence for EPHA7 (NM_004440.2,1065-1083).
caagtcttcctctcaagat

SEQ ID NO: 81583 - DNA, 19 bp, Homo sapiens
  siRNA target sequence for EPHA7 (NM_004440.2,1213-1231).
gcaccacagaacctcattt

SEQ ID NO: 81584 - DNA, 19 bp, Homo sapiens
  siRNA target sequence for EPHA7 (NM_004440.2,1266-1284).
gagtcctcctgcagacaat

SEQ ID NO: 81585 - DNA, 19 bp, Homo sapiens
  siRNA target sequence for EPHA7 (NM_004440.2,1302-1320).
gacctacagaatattgtgt

SEQ ID NO: 81586 - DNA, 19 bp, Homo sapiens
  siRNA target sequence for EPHA7 (NM_004440.2,1351-1369).
gttccctgtgggagtaaca

SEQ ID NO: 81587 - DNA, 19 bp, Homo sapiens
  siRNA target sequence for EPHA7 (NM_004440.2,1358-1376).
gtgggagtaacattggata

SEQ ID NO: 81588 - DNA, 19 bp, Homo sapiens
  siRNA target sequence for EPHA7 (NM_004440.2,1361-1379).
ggagtaacattggatacat

SEQ ID NO: 81589 - DNA, 19 bp, Homo sapiens
  siRNA target sequence for EPHA7 (NM_004440.2,1391-1409).
ctggattagaggataacta

SEQ ID NO: 81590 - DNA, 19 bp, Homo sapiens
  siRNA target sequence for EPHA7 (NM_004440.2,1394-1412).
gattagaggataactatgt

SEQ ID NO: 81591 - DNA, 19 bp, Homo sapiens
  siRNA target sequence for EPHA7 (NM_004440.2,1426-1444).
ctgctagcccacgctaatt

SEQ ID NO: 81592 - DNA, 19 bp, Homo sapiens
  siRNA target sequence for EPHA7 (NM_004440.2,1428-1446).
gctagcccacgctaattat

SEQ ID NO: 81593 - DNA, 19 bp, Homo sapiens
  siRNA target sequence for EPHA7 (NM_004440.2,1429-1447).
ctagcccacgctaattata

SEQ ID NO: 81594 - DNA, 19 bp, Homo sapiens
  siRNA target sequence for EPHA7 (NM_004440.2,1432-1450).
gcccacgctaattatactt

SEQ ID NO: 81595 - DNA, 19 bp, Homo sapiens
  siRNA target sequence for EPHA7 (NM_004440.2,1433-1451).
cccacgctaattatacttt

SEQ ID NO: 81596 - DNA, 19 bp, Homo sapiens
  siRNA target sequence for EPHA7 (NM_004440.2,1437-1455).
cgctaattatacttttgaa

SEQ ID NO: 81597 - DNA, 19 bp, Homo sapiens
  siRNA target sequence for EPHA7 (NM_004440.2,1675-1693).
cggacctactcaacagtaa

SEQ ID NO: 81598 - DNA, 19 bp, Homo sapiens
  siRNA target sequence for EPHA7 (NM_004440.2,1703-1721).
ctacttcagcctccattaa

SEQ ID NO: 81599 - DNA, 19 bp, Homo sapiens
  siRNA target sequence for EPHA7 (NM_004440.2,1706-1724).
cttcagcctccattaataa

SEQ ID NO: 81600 - DNA, 19 bp, Homo sapiens
  siRNA target sequence for EPHA7 (NM_004440.2,1709-1727).
cagcctccattaataatct

SEQ ID NO: 81601 - DNA, 19 bp, Homo sapiens
  siRNA target sequence for EPHA7 (NM_004440.2,1711-1729).
gcctccattaataatctga

SEQ ID NO: 81602 - DNA, 19 bp, Homo sapiens
  siRNA target sequence for EPHA7 (NM_004440.2,1712-1730).
cctccattaataatctgaa

SEQ ID NO: 81603 - DNA, 19 bp, Homo sapiens
  siRNA target sequence for EPHA7 (NM_004440.2,1771-1789).
gctgctggttatggaaatt

SEQ ID NO: 81604 - DNA, 19 bp, Homo sapiens
  siRNA target sequence for EPHA7 (NM_004440.2,1772-1790).
ctgctggttatggaaatta

SEQ ID NO: 81605 - DNA, 19 bp, Homo sapiens
  siRNA target sequence for EPHA7 (NM_004440.2,1791-1809).
cagtcccagacttgatgtt

SEQ ID NO: 81606 - DNA, 19 bp, Homo sapiens
  siRNA target sequence for EPHA7 (NM_004440.2,1819-1837).
gaggaagctacaggtaaaa

SEQ ID NO: 81607 - DNA, 19 bp, Homo sapiens
  siRNA target sequence for EPHA7 (NM_004440.2,1822-1840).
gaagctacaggtaaaatgt

SEQ ID NO: 81608 - DNA, 19 bp, Homo sapiens
  siRNA target sequence for EPHA7 (NM_004440.2,1987-2005).
ggcgatgaagagctttact

SEQ ID NO: 81609 - DNA, 19 bp, Homo sapiens
  siRNA target sequence for EPHA7 (NM_004440.2,1988-2006).
gcgatgaagagctttactt

SEQ ID NO: 81610 - DNA, 19 bp, Homo sapiens
  siRNA target sequence for EPHA7 (NM_004440.2,1989-2007).
cgatgaagagctttacttt

SEQ ID NO: 81611 - DNA, 19 bp, Homo sapiens
  siRNA target sequence for EPHA7 (NM_004440.2,1993-2011).
gaagagctttactttcatt

SEQ ID NO: 81612 - DNA, 19 bp, Homo sapiens
  siRNA target sequence for EPHA7 (NM_004440.2,2037-2055).
cattgaccctgaaacctat

SEQ ID NO: 81613 - DNA, 19 bp, Homo sapiens
  siRNA target sequence for EPHA7 (NM_004440.2,2052-2070).
ctatgaggacccaaataga

SEQ ID NO: 81614 - DNA, 19 bp, Homo sapiens
  siRNA target sequence for EPHA7 (NM_004440.2,2102-2120).
cctcctgtattaaaattga

SEQ ID NO: 81615 - DNA, 19 bp, Homo sapiens
  siRNA target sequence for EPHA7 (NM_004440.2,2299-2317).
catttggaaggggttgtta

SEQ ID NO: 81616 - DNA, 19 bp, Homo sapiens
  siRNA target sequence for EPHA7 (NM_004440.2,2325-2343).
gaaaccagtcatgatagta

SEQ ID NO: 81617 - DNA, 19 bp, Homo sapiens
  siRNA target sequence for EPHA7 (NM_004440.2,2330-2348).
cagtcatgatagtaataga

SEQ ID NO: 81618 - DNA, 19 bp, Homo sapiens
  siRNA target sequence for EPHA7 (NM_004440.2,2332-2350).
gtcatgatagtaatagagt

SEQ ID NO: 81619 - DNA, 19 bp, Homo sapiens
  siRNA target sequence for EPHA7 (NM_004440.2,2396-2414).
ggcaatttacagtcattca

SEQ ID NO: 81620 - DNA, 19 bp, Homo sapiens
  siRNA target sequence for EPHA7 (NM_004440.2,2440-2458).
gctgctggaatgagatatt

SEQ ID NO: 81621 - DNA, 19 bp, Homo sapiens
  siRNA target sequence for EPHA7 (NM_004440.2,2460-2478).
ggctgatatgggatatgtt

SEQ ID NO: 81622 - DNA, 19 bp, Homo sapiens
  siRNA target sequence for EPHA7 (NM_004440.2,2492-2510).
cagctcgcaatattcttgt

SEQ ID NO: 81623 - DNA, 19 bp, Homo sapiens
  siRNA target sequence for EPHA7 (NM_004440.2,2514-2532).
cagcaatctcgtttgtaaa

SEQ ID NO: 81624 - DNA, 19 bp, Homo sapiens
  siRNA target sequence for EPHA7 (NM_004440.2,2516-2534).
gcaatctcgtttgtaaagt

SEQ ID NO: 81625 - DNA, 19 bp, Homo sapiens
  siRNA target sequence for EPHA7 (NM_004440.2,2546-2564).
gcctgtcccgagttataga

SEQ ID NO: 81626 - DNA, 19 bp, Homo sapiens
  siRNA target sequence for EPHA7 (NM_004440.2,2803-2821).
ggccttcaccagctaatgt

SEQ ID NO: 81627 - DNA, 19 bp, Homo sapiens
  siRNA target sequence for EPHA7 (NM_004440.2,2842-2860).
cgtgctgaaaggccaaaat

SEQ ID NO: 81628 - DNA, 19 bp, Homo sapiens
  siRNA target sequence for EPHA7 (NM_004440.2,2843-2861).
gtgctgaaaggccaaaatt

SEQ ID NO: 81629 - DNA, 19 bp, Homo sapiens
  siRNA target sequence for EPHA7 (NM_004440.2,2875-2893).
ggaattctagacaaaatga

SEQ ID NO: 81630 - DNA, 19 bp, Homo sapiens
  siRNA target sequence for EPHA7 (NM_004440.2,2892-2910).
gattcgaaacccaaatagt

SEQ ID NO: 81631 - DNA, 19 bp, Homo sapiens
  siRNA target sequence for EPHA7 (NM_004440.2,2901-2919).
cccaaatagtctgaaaact

SEQ ID NO: 81632 - DNA, 19 bp, Homo sapiens
  siRNA target sequence for EPHA7 (NM_004440.2,2971-2989).
cctgatttcactacctttt

SEQ ID NO: 81633 - DNA, 19 bp, Homo sapiens
  siRNA target sequence for EPHA7 (NM_004440.2,3045-3063).
cacggcagctggctacaat

SEQ ID NO: 81634 - DNA, 19 bp, Homo sapiens
  siRNA target sequence for EPHA7 (NM_004440.2,3055-3073).
ggctacaattcccttgaat

SEQ ID NO: 81635 - DNA, 19 bp, Homo sapiens
  siRNA target sequence for EPHA7 (NM_004440.2,3060-3078).
caattcccttgaatcagta

SEQ ID NO: 81636 - DNA, 19 bp, Homo sapiens
  siRNA target sequence for EPHA7 (NM_004440.2,3117-3135).
cacactggttggtcatcaa

SEQ ID NO: 81637 - DNA, 19 bp, Homo sapiens
  siRNA target sequence for EPHA7 (NM_004440.2,3119-3137).
cactggttggtcatcaaaa

SEQ ID NO: 81638 - DNA, 19 bp, Homo sapiens
  siRNA target sequence for EPHA7 (NM_004440.2,3128-3146).
gtcatcaaaagaaaatcat

SEQ ID NO: 81639 - DNA, 19 bp, Homo sapiens
  siRNA target sequence for EPHA7 (NM_004440.2,3150-3168).
cagcattcagactatgaga

SEQ ID NO: 81640 - DNA, 19 bp, Homo sapiens
  siRNA target sequence for EPHA8 (NM_020526.2,399-417).
gcgtctatgctgagatcaa

SEQ ID NO: 81641 - DNA, 19 bp, Homo sapiens
  siRNA target sequence for EPHA8 (NM_020526.2,403-421).
ctatgctgagatcaagttt

SEQ ID NO: 81642 - DNA, 19 bp, Homo sapiens
  siRNA target sequence for EPHA8 (NM_020526.2,697-715).
ctctctccgcatctactat

SEQ ID NO: 81643 - DNA, 19 bp, Homo sapiens
  siRNA target sequence for EPHA8 (NM_020526.2,699-717).
ctctccgcatctactataa

SEQ ID NO: 81644 - DNA, 19 bp, Homo sapiens
  siRNA target sequence for EPHA8 (NM_020526.2,701-719).
ctccgcatctactataaga

SEQ ID NO: 81645 - DNA, 19 bp, Homo sapiens
  siRNA target sequence for EPHA8 (NM_020526.2,830-848).
cgggacacacccaagatgt

SEQ ID NO: 81646 - DNA, 19 bp, Homo sapiens
  siRNA target sequence for EPHA8 (NM_020526.2,831-849).
gggacacacccaagatgta

SEQ ID NO: 81647 - DNA, 19 bp, Homo sapiens
  siRNA target sequence for EPHA8 (NM_020526.2,833-851).
gacacacccaagatgtact

SEQ ID NO: 81648 - DNA, 19 bp, Homo sapiens
  siRNA target sequence for EPHA8 (NM_020526.2,1114-1132).
cctgatctccagtgtgaat

SEQ ID NO: 81649 - DNA, 19 bp, Homo sapiens
  siRNA target sequence for EPHA8 (NM_020526.2,1316-1334).
ctgctggcccacatgaact

SEQ ID NO: 81650 - DNA, 19 bp, Homo sapiens
  siRNA target sequence for EPHA8 (NM_020526.2,1319-1337).
ctggcccacatgaactact

SEQ ID NO: 81651 - DNA, 19 bp, Homo sapiens
  siRNA target sequence for EPHA8 (NM_020526.2,1850-1868).
gagaagatgcactatcaga

SEQ ID NO: 81652 - DNA, 19 bp, Homo sapiens
  siRNA target sequence for EPHA8 (NM_020526.2,2013-2031).
ggatccacatcgagaaaat

SEQ ID NO: 81653 - DNA, 19 bp, Homo sapiens
  siRNA target sequence for EPHA8 (NM_020526.2,2231-2249).
cgcctggcaatgattgtga

SEQ ID NO: 81654 - DNA, 19 bp, Homo sapiens
  siRNA target sequence for EPHB1 (NM_004441.2,217-235).
ggccctggattatctacta

SEQ ID NO: 81655 - DNA, 19 bp, Homo sapiens
  siRNA target sequence for EPHB1 (NM_004441.2,219-237).
ccctggattatctactact

SEQ ID NO: 81656 - DNA, 19 bp, Homo sapiens
  siRNA target sequence for EPHB1 (NM_004441.2,264-282).
cgatggaagaaacgttaat

SEQ ID NO: 81657 - DNA, 19 bp, Homo sapiens
  siRNA target sequence for EPHB1 (NM_004441.2,330-348).
cgtccgggtgggaagaagt

SEQ ID NO: 81658 - DNA, 19 bp, Homo sapiens
  siRNA target sequence for EPHB1 (NM_004441.2,501-519).
gcagcagcctccctaatgt

SEQ ID NO: 81659 - DNA, 19 bp, Homo sapiens
  siRNA target sequence for EPHB1 (NM_004441.2,713-731).
cctcttactcggaatggtt

SEQ ID NO: 81660 - DNA, 19 bp, Homo sapiens
  siRNA target sequence for EPHB1 (NM_004441.2,714-732).
ctcttactcggaatggttt

SEQ ID NO: 81661 - DNA, 19 bp, Homo sapiens
  siRNA target sequence for EPHB1 (NM_004441.2,716-734).
cttactcggaatggttttt

SEQ ID NO: 81662 - DNA, 19 bp, Homo sapiens
  siRNA target sequence for EPHB1 (NM_004441.2,720-738).
ctcggaatggtttttacct

SEQ ID NO: 81663 - DNA, 19 bp, Homo sapiens
  siRNA target sequence for EPHB1 (NM_004441.2,739-757).
cgcttttcaggattatgga

SEQ ID NO: 81664 - DNA, 19 bp, Homo sapiens
  siRNA target sequence for EPHB1 (NM_004441.2,803-821).
cccagcattgtgcaaaatt

SEQ ID NO: 81665 - DNA, 19 bp, Homo sapiens
  siRNA target sequence for EPHB1 (NM_004441.2,808-826).
cattgtgcaaaattttgca

SEQ ID NO: 81666 - DNA, 19 bp, Homo sapiens
  siRNA target sequence for EPHB1 (NM_004441.2,911-929).
gacgtgcccatcaaactct

SEQ ID NO: 81667 - DNA, 19 bp, Homo sapiens
  siRNA target sequence for EPHB1 (NM_004441.2,1119-1137).
cctgtcggaccggttatta

SEQ ID NO: 81668 - DNA, 19 bp, Homo sapiens
  siRNA target sequence for EPHB1 (NM_004441.2,1185-1203).
caggtccccgcaatgttat

SEQ ID NO: 81669 - DNA, 19 bp, Homo sapiens
  siRNA target sequence for EPHB1 (NM_004441.2,1187-1205).
ggtccccgcaatgttatct

SEQ ID NO: 81670 - DNA, 19 bp, Homo sapiens
  siRNA target sequence for EPHB1 (NM_004441.2,1274-1292).
gtgacctacaacatcatct

SEQ ID NO: 81671 - DNA, 19 bp, Homo sapiens
  siRNA target sequence for EPHB1 (NM_004441.2,1326-1344).
cccgctgtgacgacaatgt

SEQ ID NO: 81672 - DNA, 19 bp, Homo sapiens
  siRNA target sequence for EPHB1 (NM_004441.2,1413-1431).
ccccctacacctttgacat

SEQ ID NO: 81673 - DNA, 19 bp, Homo sapiens
  siRNA target sequence for EPHB1 (NM_004441.2,1612-1630).
ctatgagatccggtactat

SEQ ID NO: 81674 - DNA, 19 bp, Homo sapiens
  siRNA target sequence for EPHB1 (NM_004441.2,1678-1696).
caacacagcaaggattgat

SEQ ID NO: 81675 - DNA, 19 bp, Homo sapiens
  siRNA target sequence for EPHB1 (NM_004441.2,1702-1720).
gcggcctggcatggtatat

SEQ ID NO: 81676 - DNA, 19 bp, Homo sapiens
  siRNA target sequence for EPHB1 (NM_004441.2,1704-1722).
ggcctggcatggtatatgt

SEQ ID NO: 81677 - DNA, 19 bp, Homo sapiens
  siRNA target sequence for EPHB1 (NM_004441.2,1748-1766).
gctggctacggcaagttca

SEQ ID NO: 81678 - DNA, 19 bp, Homo sapiens
  siRNA target sequence for EPHB1 (NM_004441.2,1788-1806).
ctctgactgacgatgatta

SEQ ID NO: 81679 - DNA, 19 bp, Homo sapiens
  siRNA target sequence for EPHB1 (NM_004441.2,1790-1808).
ctgactgacgatgattaca

SEQ ID NO: 81680 - DNA, 19 bp, Homo sapiens
  siRNA target sequence for EPHB1 (NM_004441.2,1908-1926).
ggaaacgggcttatagcaa

SEQ ID NO: 81681 - DNA, 19 bp, Homo sapiens
  siRNA target sequence for EPHB1 (NM_004441.2,1932-1950).
ctgtgtacagcgataagct

SEQ ID NO: 81682 - DNA, 19 bp, Homo sapiens
  siRNA target sequence for EPHB1 (NM_004441.2,1941-1959).
gcgataagctccagcatta

SEQ ID NO: 81683 - DNA, 19 bp, Homo sapiens
  siRNA target sequence for EPHB1 (NM_004441.2,1943-1961).
gataagctccagcattaca

SEQ ID NO: 81684 - DNA, 19 bp, Homo sapiens
  siRNA target sequence for EPHB1 (NM_004441.2,2045-2063).
gccaaggagattgatgtat

SEQ ID NO: 81685 - DNA, 19 bp, Homo sapiens
  siRNA target sequence for EPHB1 (NM_004441.2,2283-2301).
gtcggcctgtcatgatcat

SEQ ID NO: 81686 - DNA, 19 bp, Homo sapiens
  siRNA target sequence for EPHB1 (NM_004441.2,2315-2333).
gagaatggtgcattggatt

SEQ ID NO: 81687 - DNA, 19 bp, Homo sapiens
  siRNA target sequence for EPHB1 (NM_004441.2,2413-2431).
gtacctggctgagatgaat

SEQ ID NO: 81688 - DNA, 19 bp, Homo sapiens
  siRNA target sequence for EPHB1 (NM_004441.2,2822-2840).
cggtttgcggagattgtca

SEQ ID NO: 81689 - DNA, 19 bp, Homo sapiens
  siRNA target sequence for EPHB1 (NM_004441.2,2939-2957).
gacttcacggcctttacca

SEQ ID NO: 81690 - DNA, 19 bp, Homo sapiens
  siRNA target sequence for EPHB1 (NM_004441.2,2970-2988).
ggctcagcgccatcaaaat

SEQ ID NO: 81691 - DNA, 19 bp, Homo sapiens
  siRNA target sequence for EPHB1 (NM_004441.2,3106-3124).
gatcctgaacagcattcat

SEQ ID NO: 81692 - DNA, 19 bp, Homo sapiens
  siRNA target sequence for EPHB2 (NM_004442.4,199-217).
gtgtgcaacgtgtttgagt

SEQ ID NO: 81693 - DNA, 19 bp, Homo sapiens
  siRNA target sequence for EPHB2 (NM_004442.4,231-249).
ctggctacggaccaagttt

SEQ ID NO: 81694 - DNA, 19 bp, Homo sapiens
  siRNA target sequence for EPHB2 (NM_004442.4,233-251).
ggctacggaccaagtttat

SEQ ID NO: 81695 - DNA, 19 bp, Homo sapiens
  siRNA target sequence for EPHB2 (NM_004442.4,277-295).
cacgtggagatgaagtttt

SEQ ID NO: 81696 - DNA, 19 bp, Homo sapiens
  siRNA target sequence for EPHB2 (NM_004442.4,481-499).
cgcgtcatgaaaatcaaca

SEQ ID NO: 81697 - DNA, 19 bp, Homo sapiens
  siRNA target sequence for EPHB2 (NM_004442.4,795-813).
cttcgaggccgttgagaat

SEQ ID NO: 81698 - DNA, 19 bp, Homo sapiens
  siRNA target sequence for EPHB2 (NM_004442.4,1076-1094).
gagaggacctcgtctacaa

SEQ ID NO: 81699 - DNA, 19 bp, Homo sapiens
  siRNA target sequence for EPHB2 (NM_004442.4,1081-1099).
gacctcgtctacaacatca

SEQ ID NO: 81700 - DNA, 19 bp, Homo sapiens
  siRNA target sequence for EPHB2 (NM_004442.4,1136-1154).
cccgctgcggggacaatgt

SEQ ID NO: 81701 - DNA, 19 bp, Homo sapiens
  siRNA target sequence for EPHB2 (NM_004442.4,1137-1155).
ccgctgcggggacaatgta

SEQ ID NO: 81702 - DNA, 19 bp, Homo sapiens
  siRNA target sequence for EPHB2 (NM_004442.4,1139-1157).
gctgcggggacaatgtaca

SEQ ID NO: 81703 - DNA, 19 bp, Homo sapiens
  siRNA target sequence for EPHB2 (NM_004442.4,1142-1160).
gcggggacaatgtacagta

SEQ ID NO: 81704 - DNA, 19 bp, Homo sapiens
  siRNA target sequence for EPHB2 (NM_004442.4,1186-1204).
gagccacgcatttacatca

SEQ ID NO: 81705 - DNA, 19 bp, Homo sapiens
  siRNA target sequence for EPHB2 (NM_004442.4,1247-1265).
ctgtgaacggcgttactga

SEQ ID NO: 81706 - DNA, 19 bp, Homo sapiens
  siRNA target sequence for EPHB2 (NM_004442.4,1357-1375).
cgcaccgtggacagcatta

SEQ ID NO: 81707 - DNA, 19 bp, Homo sapiens
  siRNA target sequence for EPHB2 (NM_004442.4,1422-1440).
ctatgagctgcagtactat

SEQ ID NO: 81708 - DNA, 19 bp, Homo sapiens
  siRNA target sequence for EPHB2 (NM_004442.4,1570-1588).
cgctacagcggcaagatgt

SEQ ID NO: 81709 - DNA, 19 bp, Homo sapiens
  siRNA target sequence for EPHB2 (NM_004442.4,1622-1640).
caagcatccaggagaagtt

SEQ ID NO: 81710 - DNA, 19 bp, Homo sapiens
  siRNA target sequence for EPHB2 (NM_004442.4,1754-1772).
cggacaagctgcaacacta

SEQ ID NO: 81711 - DNA, 19 bp, Homo sapiens
  siRNA target sequence for EPHB2 (NM_004442.4,1870-1888).
gacatctcctgtgtcaaaa

SEQ ID NO: 81712 - DNA, 19 bp, Homo sapiens
  siRNA target sequence for EPHB2 (NM_004442.4,2096-2114).
gcacacctgtgatgatcat

SEQ ID NO: 81713 - DNA, 19 bp, Homo sapiens
  siRNA target sequence for EPHB2 (NM_004442.4,2147-2165).
cctttctccggcaaaacga

SEQ ID NO: 81714 - DNA, 19 bp, Homo sapiens
  siRNA target sequence for EPHB2 (NM_004442.4,2148-2166).
ctttctccggcaaaacgat

SEQ ID NO: 81715 - DNA, 19 bp, Homo sapiens
  siRNA target sequence for EPHB2 (NM_004442.4,2232-2250).
ggcagacatgaactatgtt

SEQ ID NO: 81716 - DNA, 19 bp, Homo sapiens
  siRNA target sequence for EPHB2 (NM_004442.4,2318-2336).
ggctctcacgctttctaga

SEQ ID NO: 81717 - DNA, 19 bp, Homo sapiens
  siRNA target sequence for EPHB2 (NM_004442.4,2631-2649).
gcccaagttcggccaaatt

SEQ ID NO: 81718 - DNA, 19 bp, Homo sapiens
  siRNA target sequence for EPHB2 (NM_004442.4,2749-2767).
cccgactacaccagcttta

SEQ ID NO: 81719 - DNA, 19 bp, Homo sapiens
  siRNA target sequence for EPHB2 (NM_017449.1,3142-3160).
gaggattctcataaggaaa

SEQ ID NO: 81720 - DNA, 19 bp, Homo sapiens
  siRNA target sequence for EPHB2 (NM_017449.1,3157-3175).
gaaagcaatgactgttctt

SEQ ID NO: 81721 - DNA, 19 bp, Homo sapiens
  siRNA target sequence for EPHB3 (NM_004443.3,569-587).
cacaaaatgggtaacatct

SEQ ID NO: 81722 - DNA, 19 bp, Homo sapiens
  siRNA target sequence for EPHB3 (NM_004443.3,590-608).
gttggcgtggacatctcat

SEQ ID NO: 81723 - DNA, 19 bp, Homo sapiens
  siRNA target sequence for EPHB3 (NM_004443.3,711-729).
cttcgcacggggttcatct

SEQ ID NO: 81724 - DNA, 19 bp, Homo sapiens
  siRNA target sequence for EPHB3 (NM_004443.3,1470-1488).
ggtgtgatctccaatgtga

SEQ ID NO: 81725 - DNA, 19 bp, Homo sapiens
  siRNA target sequence for EPHB3 (NM_004443.3,1475-1493).
gatctccaatgtgaatgaa

SEQ ID NO: 81726 - DNA, 19 bp, Homo sapiens
  siRNA target sequence for EPHB3 (NM_004443.3,1540-1558).
gggatgacctcctgtacaa

SEQ ID NO: 81727 - DNA, 19 bp, Homo sapiens
  siRNA target sequence for EPHB3 (NM_004443.3,1742-1760).
ccctctgccgcctcgttat

SEQ ID NO: 81728 - DNA, 19 bp, Homo sapiens
  siRNA target sequence for EPHB3 (NM_004443.3,1892-1910).
ctacgagatgaagtacttt

SEQ ID NO: 81729 - DNA, 19 bp, Homo sapiens
  siRNA target sequence for EPHB3 (NM_004443.3,2128-2146).
ctacagctgggcttgtctt

SEQ ID NO: 81730 - DNA, 19 bp, Homo sapiens
  siRNA target sequence for EPHB3 (NM_004443.3,2190-2208).
cagcgacacggctctgatt

SEQ ID NO: 81731 - DNA, 19 bp, Homo sapiens
  siRNA target sequence for EPHB3 (NM_004443.3,2244-2262).
cctggaatgaaggtttata

SEQ ID NO: 81732 - DNA, 19 bp, Homo sapiens
  siRNA target sequence for EPHB3 (NM_004443.3,2378-2396).
gtgccgtggtcgactgaaa

SEQ ID NO: 81733 - DNA, 19 bp, Homo sapiens
  siRNA target sequence for EPHB3 (NM_004443.3,2380-2398).
gccgtggtcgactgaaaca

SEQ ID NO: 81734 - DNA, 19 bp, Homo sapiens
  siRNA target sequence for EPHB3 (NM_004443.3,2681-2699).
cctgtccgagatgaactat

SEQ ID NO: 81735 - DNA, 19 bp, Homo sapiens
  siRNA target sequence for EPHB3 (NM_004443.3,3192-3210).
cgcacggtcccagattaca

SEQ ID NO: 81736 - DNA, 19 bp, Homo sapiens
  siRNA target sequence for EPHB3 (NM_004443.3,3194-3212).
cacggtcccagattacaca

SEQ ID NO: 81737 - DNA, 19 bp, Homo sapiens
  siRNA target sequence for EPHB3 (NM_004443.3,3276-3294).
gtcagtgcggggtttgcat

SEQ ID NO: 81738 - DNA, 19 bp, Homo sapiens
  siRNA target sequence for EPHB3 (NM_004443.3,3280-3298).
gtgcggggtttgcatcttt

SEQ ID NO: 81739 - DNA, 19 bp, Homo sapiens
  siRNA target sequence for EPHB3 (NM_004443.3,3283-3301).
cggggtttgcatcttttga

SEQ ID NO: 81740 - DNA, 19 bp, Homo sapiens
  siRNA target sequence for EPHB4 (NM_004444.3,408-426).
gttggccgcagctttggaa

SEQ ID NO: 81741 - DNA, 19 bp, Homo sapiens
  siRNA target sequence for EPHB4 (NM_004444.3,1241-1259).
cagccaatagccactctaa

SEQ ID NO: 81742 - DNA, 19 bp, Homo sapiens
  siRNA target sequence for EPHB4 (NM_004444.3,1243-1261).
gccaatagccactctaaca

SEQ ID NO: 81743 - DNA, 19 bp, Homo sapiens
  siRNA target sequence for EPHB4 (NM_004444.3,1252-1270).
cactctaacaccattggat

SEQ ID NO: 81744 - DNA, 19 bp, Homo sapiens
  siRNA target sequence for EPHB4 (NM_004444.3,1635-1653).
cccatttgagcctgtcaat

SEQ ID NO: 81745 - DNA, 19 bp, Homo sapiens
  siRNA target sequence for EPHB4 (NM_004444.3,1925-1943).
ccttcggccaggaacatca

SEQ ID NO: 81746 - DNA, 19 bp, Homo sapiens
  siRNA target sequence for EPHB4 (NM_004444.3,2090-2108).
cagaatattcggacaaaca

SEQ ID NO: 81747 - DNA, 19 bp, Homo sapiens
  siRNA target sequence for EPHB4 (NM_004444.3,2148-2166).
cgaccccttcacttatgaa

SEQ ID NO: 81748 - DNA, 19 bp, Homo sapiens
  siRNA target sequence for EPHB4 (NM_004444.3,2179-2197).
gctgtgagggaatttgcaa

SEQ ID NO: 81749 - DNA, 19 bp, Homo sapiens
  siRNA target sequence for EPHB4 (NM_004444.3,2211-2229).
ctcctacgtcaagattgaa

SEQ ID NO: 81750 - DNA, 19 bp, Homo sapiens
  siRNA target sequence for EPHB4 (NM_004444.3,2213-2231).
cctacgtcaagattgaaga

SEQ ID NO: 81751 - DNA, 19 bp, Homo sapiens
  siRNA target sequence for EPHB4 (NM_004444.3,2430-2448).
cagcatgcccgtcatgatt

SEQ ID NO: 81752 - DNA, 19 bp, Homo sapiens
  siRNA target sequence for EPHB4 (NM_004444.3,2432-2450).
gcatgcccgtcatgattct

SEQ ID NO: 81753 - DNA, 19 bp, Homo sapiens
  siRNA target sequence for EPHB4 (NM_004444.3,2703-2721).
ctccctgggaggaaagatt

SEQ ID NO: 81754 - DNA, 19 bp, Homo sapiens
  siRNA target sequence for EPHB4 (NM_004444.3,2786-2804).
ggagttacgggattgtgat

SEQ ID NO: 81755 - DNA, 19 bp, Homo sapiens
  siRNA target sequence for EPHB4 (NM_004444.3,2850-2868).
caatcaggacgtgatcaat

SEQ ID NO: 81756 - DNA, 19 bp, Homo sapiens
  siRNA target sequence for EPHB4 (NM_004444.3,2859-2877).
cgtgatcaatgccattgaa

SEQ ID NO: 81757 - DNA, 19 bp, Homo sapiens
  siRNA target sequence for EPHB4 (NM_004444.3,3119-3137).
ggcttcgggccatcaaaat

SEQ ID NO: 81758 - DNA, 19 bp, Homo sapiens
  siRNA target sequence for EPHB4 (NM_004444.3,3138-3156).
gggaagatacgaagaaagt

SEQ ID NO: 81759 - DNA, 19 bp, Homo sapiens
  siRNA target sequence for EPHB6 (NM_004445.1,963-981).
gacctttgaggcatgtcat

SEQ ID NO: 81760 - DNA, 19 bp, Homo sapiens
  siRNA target sequence for EPHB6 (NM_004445.1,1000-1018).
ggcaccgggcaggacaatt

SEQ ID NO: 81761 - DNA, 19 bp, Homo sapiens
  siRNA target sequence for EPHB6 (NM_004445.1,1019-1037).
ggttgcagacacactttgt

SEQ ID NO: 81762 - DNA, 19 bp, Homo sapiens
  siRNA target sequence for EPHB6 (NM_004445.1,1208-1226).
ggaccaaggtggacacaat

SEQ ID NO: 81763 - DNA, 19 bp, Homo sapiens
  siRNA target sequence for EPHB6 (NM_004445.1,1209-1227).
gaccaaggtggacacaatt

SEQ ID NO: 81764 - DNA, 19 bp, Homo sapiens
  siRNA target sequence for EPHB6 (NM_004445.1,1212-1230).
caaggtggacacaattgca

SEQ ID NO: 81765 - DNA, 19 bp, Homo sapiens
  siRNA target sequence for EPHB6 (NM_004445.1,1319-1337).
gggctggactgcaactgaa

SEQ ID NO: 81766 - DNA, 19 bp, Homo sapiens
  siRNA target sequence for EPHB6 (NM_004445.1,1946-1964).
gaggggacctgctcttcaa

SEQ ID NO: 81767 - DNA, 19 bp, Homo sapiens
  siRNA target sequence for EPHB6 (NM_004445.1,2073-2091).
gactgagagccgagtgtta

SEQ ID NO: 81768 - DNA, 19 bp, Homo sapiens
  siRNA target sequence for EPHB6 (NM_004445.1,2075-2093).
ctgagagccgagtgttagt

SEQ ID NO: 81769 - DNA, 19 bp, Homo sapiens
  siRNA target sequence for EPHB6 (NM_004445.1,2313-2331).
ctatcagctccgctactat

SEQ ID NO: 81770 - DNA, 19 bp, Homo sapiens
  siRNA target sequence for EPHB6 (NM_004445.1,2666-2684).
caggactcggggtgaagta

SEQ ID NO: 81771 - DNA, 19 bp, Homo sapiens
  siRNA target sequence for EPHB6 (NM_004445.1,2668-2686).
ggactcggggtgaagtatt

SEQ ID NO: 81772 - DNA, 19 bp, Homo sapiens
  siRNA target sequence for EPHB6 (NM_004445.1,2669-2687).
gactcggggtgaagtatta

SEQ ID NO: 81773 - DNA, 19 bp, Homo sapiens
  siRNA target sequence for EPHB6 (NM_004445.1,2671-2689).
ctcggggtgaagtattaca

SEQ ID NO: 81774 - DNA, 19 bp, Homo sapiens
  siRNA target sequence for EPHB6 (NM_004445.1,2746-2764).
gtcgatcctgcttatatca

SEQ ID NO: 81775 - DNA, 19 bp, Homo sapiens
  siRNA target sequence for EPHB6 (NM_004445.1,3205-3223).
cctcagggcccaagttgtt

SEQ ID NO: 81776 - DNA, 19 bp, Homo sapiens
  siRNA target sequence for EPHB6 (NM_004445.1,3206-3224).
ctcagggcccaagttgttt

SEQ ID NO: 81777 - DNA, 19 bp, Homo sapiens
  siRNA target sequence for EPHB6 (NM_004445.1,3309-3327).
ggaagtgatgagttatgga

SEQ ID NO: 81778 - DNA, 19 bp, Homo sapiens
  siRNA target sequence for EPHB6 (NM_004445.1,3350-3368).
gtgagcaggaggtactaaa

SEQ ID NO: 81779 - DNA, 19 bp, Homo sapiens
  siRNA target sequence for EPHB6 (NM_004445.1,3413-3431).
ctcctggattacatctact

SEQ ID NO: 81780 - DNA, 19 bp, Homo sapiens
  siRNA target sequence for EPHB6 (NM_004445.1,3415-3433).
cctggattacatctactta

SEQ ID NO: 81781 - DNA, 19 bp, Homo sapiens
  siRNA target sequence for EPHB6 (NM_004445.1,3416-3434).
ctggattacatctacttat

SEQ ID NO: 81782 - DNA, 19 bp, Homo sapiens
  siRNA target sequence for EPRS (NM_004446.1,91-109).
gttcagtgctacaaaatta

SEQ ID NO: 81783 - DNA, 19 bp, Homo sapiens
  siRNA target sequence for EPRS (NM_004446.1,119-137).
gattcctttacttctacaa

SEQ ID NO: 81784 - DNA, 19 bp, Homo sapiens
  siRNA target sequence for EPRS (NM_004446.1,132-150).
ctacaattaatgaactcaa

SEQ ID NO: 81785 - DNA, 19 bp, Homo sapiens
  siRNA target sequence for EPRS (NM_004446.1,179-197).
gttggaaactccttgagtt

SEQ ID NO: 81786 - DNA, 19 bp, Homo sapiens
  siRNA target sequence for EPRS (NM_004446.1,190-208).
cttgagtttagcagattta

SEQ ID NO: 81787 - DNA, 19 bp, Homo sapiens
  siRNA target sequence for EPRS (NM_004446.1,241-259).
ctggcaagaacagttgaaa

SEQ ID NO: 81788 - DNA, 19 bp, Homo sapiens
  siRNA target sequence for EPRS (NM_004446.1,272-290).
ccagttcatgtaaaacgtt

SEQ ID NO: 81789 - DNA, 19 bp, Homo sapiens
  siRNA target sequence for EPRS (NM_004446.1,288-306).
gttggtttggctttcttga

SEQ ID NO: 81790 - DNA, 19 bp, Homo sapiens
  siRNA target sequence for EPRS (NM_004446.1,332-350).
ggtaccaagtgggatgttt

SEQ ID NO: 81791 - DNA, 19 bp, Homo sapiens
  siRNA target sequence for EPRS (NM_004446.1,365-383).
cgagtggcacctgagaaaa

SEQ ID NO: 81792 - DNA, 19 bp, Homo sapiens
  siRNA target sequence for EPRS (NM_004446.1,419-437).
gcggagatgggaaaggtta

SEQ ID NO: 81793 - DNA, 19 bp, Homo sapiens
  siRNA target sequence for EPRS (NM_004446.1,433-451).
ggttaccgtcagatttcct

SEQ ID NO: 81794 - DNA, 19 bp, Homo sapiens
  siRNA target sequence for EPRS (NM_004446.1,475-493).
cattgggcatgcaaaagct

SEQ ID NO: 81795 - DNA, 19 bp, Homo sapiens
  siRNA target sequence for EPRS (NM_004446.1,506-524).
cagcactaccaggttaact

SEQ ID NO: 81796 - DNA, 19 bp, Homo sapiens
  siRNA target sequence for EPRS (NM_004446.1,508-526).
gcactaccaggttaacttt

SEQ ID NO: 81797 - DNA, 19 bp, Homo sapiens
  siRNA target sequence for EPRS (NM_004446.1,530-548).
gggaaactgatcatgagat

SEQ ID NO: 81798 - DNA, 19 bp, Homo sapiens
  siRNA target sequence for EPRS (NM_004446.1,531-549).
ggaaactgatcatgagatt

SEQ ID NO: 81799 - DNA, 19 bp, Homo sapiens
  siRNA target sequence for EPRS (NM_004446.1,532-550).
gaaactgatcatgagattt

SEQ ID NO: 81800 - DNA, 19 bp, Homo sapiens
  siRNA target sequence for EPRS (NM_004446.1,544-562).
gagatttgatgacacaaat

SEQ ID NO: 81801 - DNA, 19 bp, Homo sapiens
  siRNA target sequence for EPRS (NM_004446.1,605-623).
gatgttgcaatgttgcata

SEQ ID NO: 81802 - DNA, 19 bp, Homo sapiens
  siRNA target sequence for EPRS (NM_004446.1,608-626).
gttgcaatgttgcatatca

SEQ ID NO: 81803 - DNA, 19 bp, Homo sapiens
  siRNA target sequence for EPRS (NM_004446.1,619-637).
gcatatcaaaccagatcaa

SEQ ID NO: 81804 - DNA, 19 bp, Homo sapiens
  siRNA target sequence for EPRS (NM_004446.1,706-724).
ggcttatgtggatgatact

SEQ ID NO: 81805 - DNA, 19 bp, Homo sapiens
  siRNA target sequence for EPRS (NM_004446.1,784-802).
ccctattgagaagaatcta

SEQ ID NO: 81806 - DNA, 19 bp, Homo sapiens
  siRNA target sequence for EPRS (NM_004446.1,786-804).
ctattgagaagaatctaca

SEQ ID NO: 81807 - DNA, 19 bp, Homo sapiens
  siRNA target sequence for EPRS (NM_004446.1,847-865).
ctgttgtttgcgagcaaaa

SEQ ID NO: 81808 - DNA, 19 bp, Homo sapiens
  siRNA target sequence for EPRS (NM_004446.1,852-870).
gtttgcgagcaaaaattga

SEQ ID NO: 81809 - DNA, 19 bp, Homo sapiens
  siRNA target sequence for EPRS (NM_004446.1,959-977).
gtttatccaacatatgatt

SEQ ID NO: 81810 - DNA, 19 bp, Homo sapiens
  siRNA target sequence for EPRS (NM_004446.1,1083-1101).
gcataagaaaaccatatat

SEQ ID NO: 81811 - DNA, 19 bp, Homo sapiens
  siRNA target sequence for EPRS (NM_004446.1,1105-1123).
ggaatatagtcggctaaat

SEQ ID NO: 81812 - DNA, 19 bp, Homo sapiens
  siRNA target sequence for EPRS (NM_004446.1,1113-1131).
gtcggctaaatctcaacaa

SEQ ID NO: 81813 - DNA, 19 bp, Homo sapiens
  siRNA target sequence for EPRS (NM_004446.1,1284-1302).
cacgttcagtcgtgaacat

SEQ ID NO: 81814 - DNA, 19 bp, Homo sapiens
  siRNA target sequence for EPRS (NM_004446.1,1320-1338).
gggcgtttaacaaaaaggt

SEQ ID NO: 81815 - DNA, 19 bp, Homo sapiens
  siRNA target sequence for EPRS (NM_004446.1,1322-1340).
gcgtttaacaaaaaggtta

SEQ ID NO: 81816 - DNA, 19 bp, Homo sapiens
  siRNA target sequence for EPRS (NM_004446.1,1345-1363).
cccagtggctccacgatat

SEQ ID NO: 81817 - DNA, 19 bp, Homo sapiens
  siRNA target sequence for EPRS (NM_004446.1,1347-1365).
cagtggctccacgatatgt

SEQ ID NO: 81818 - DNA, 19 bp, Homo sapiens
  siRNA target sequence for EPRS (NM_004446.1,1353-1371).
ctccacgatatgttgcatt

SEQ ID NO: 81819 - DNA, 19 bp, Homo sapiens
  siRNA target sequence for EPRS (NM_004446.1,1356-1374).
cacgatatgttgcattact

SEQ ID NO: 81820 - DNA, 19 bp, Homo sapiens
  siRNA target sequence for EPRS (NM_004446.1,1474-1492).
gtggtatagtcccaaagtt

SEQ ID NO: 81821 - DNA, 19 bp, Homo sapiens
  siRNA target sequence for EPRS (NM_004446.1,1476-1494).
ggtatagtcccaaagtttt

SEQ ID NO: 81822 - DNA, 19 bp, Homo sapiens
  siRNA target sequence for EPRS (NM_004446.1,1482-1500).
gtcccaaagttttcattga

SEQ ID NO: 81823 - DNA, 19 bp, Homo sapiens
  siRNA target sequence for EPRS (NM_004446.1,1526-1544).
gagggtgagatggttacat

SEQ ID NO: 81824 - DNA, 19 bp, Homo sapiens
  siRNA target sequence for EPRS (NM_004446.1,1528-1546).
gggtgagatggttacattt

SEQ ID NO: 81825 - DNA, 19 bp, Homo sapiens
  siRNA target sequence for EPRS (NM_004446.1,1734-1752).
caaagccagtgctaggaaa

SEQ ID NO: 81826 - DNA, 19 bp, Homo sapiens
  siRNA target sequence for EPRS (NM_004446.1,1748-1766).
ggaaaagacgaggacttta

SEQ ID NO: 81827 - DNA, 19 bp, Homo sapiens
  siRNA target sequence for EPRS (NM_004446.1,1788-1806).
gtaagcatgaagagctaat

SEQ ID NO: 81828 - DNA, 19 bp, Homo sapiens
  siRNA target sequence for EPRS (NM_004446.1,1792-1810).
gcatgaagagctaatgcta

SEQ ID NO: 81829 - DNA, 19 bp, Homo sapiens
  siRNA target sequence for EPRS (NM_004446.1,1812-1830).
gggatccctgccttaagga

SEQ ID NO: 81830 - DNA, 19 bp, Homo sapiens
  siRNA target sequence for EPRS (NM_004446.1,1813-1831).
ggatccctgccttaaggat

SEQ ID NO: 81831 - DNA, 19 bp, Homo sapiens
  siRNA target sequence for EPRS (NM_004446.1,1818-1836).
cctgccttaaggatttgaa

SEQ ID NO: 81832 - DNA, 19 bp, Homo sapiens
  siRNA target sequence for EPRS (NM_004446.1,1876-1894).
catatgtgatcaaccttat

SEQ ID NO: 81833 - DNA, 19 bp, Homo sapiens
  siRNA target sequence for EPRS (NM_004446.1,1895-1913).
gaacctgttagcccatata

SEQ ID NO: 81834 - DNA, 19 bp, Homo sapiens
  siRNA target sequence for EPRS (NM_004446.1,1898-1916).
cctgttagcccatatagtt

SEQ ID NO: 81835 - DNA, 19 bp, Homo sapiens
  siRNA target sequence for EPRS (NM_004446.1,1925-1943).
gccccgtgtgttttgatat

SEQ ID NO: 81836 - DNA, 19 bp, Homo sapiens
  siRNA target sequence for EPRS (NM_004446.1,1926-1944).
ccccgtgtgttttgatata

SEQ ID NO: 81837 - DNA, 19 bp, Homo sapiens
  siRNA target sequence for EPRS (NM_004446.1,1929-1947).
cgtgtgttttgatatacat

SEQ ID NO: 81838 - DNA, 19 bp, Homo sapiens
  siRNA target sequence for EPRS (NM_004446.1,2052-2070).
caccttctctgaataataa

SEQ ID NO: 81839 - DNA, 19 bp, Homo sapiens
  siRNA target sequence for EPRS (NM_004446.1,2126-2144).
gatgtggttcgtgaattaa

SEQ ID NO: 81840 - DNA, 19 bp, Homo sapiens
  siRNA target sequence for EPRS (NM_004446.1,2199-2217).
ctttgaaagctgaatataa

SEQ ID NO: 81841 - DNA, 19 bp, Homo sapiens
  siRNA target sequence for EPRS (NM_004446.1,2221-2239).
gaaaactggccaggaatat

SEQ ID NO: 81842 - DNA, 19 bp, Homo sapiens
  siRNA target sequence for EPRS (NM_004446.1,2267-2285).
ggacagaatatttcttcta

SEQ ID NO: 81843 - DNA, 19 bp, Homo sapiens
  siRNA target sequence for EPRS (NM_004446.1,2344-2362).
ggaggtggttcgtaagcta

SEQ ID NO: 81844 - DNA, 19 bp, Homo sapiens
  siRNA target sequence for EPRS (NM_004446.1,2345-2363).
gaggtggttcgtaagctaa

SEQ ID NO: 81845 - DNA, 19 bp, Homo sapiens
  siRNA target sequence for EPRS (NM_004446.1,2347-2365).
ggtggttcgtaagctaaaa

SEQ ID NO: 81846 - DNA, 19 bp, Homo sapiens
  siRNA target sequence for EPRS (NM_004446.1,2350-2368).
ggttcgtaagctaaaagct

SEQ ID NO: 81847 - DNA, 19 bp, Homo sapiens
  siRNA target sequence for EPRS (NM_004446.1,2399-2417).
gctgtagaatgcttactgt

SEQ ID NO: 81848 - DNA, 19 bp, Homo sapiens
  siRNA target sequence for EPRS (NM_004446.1,2416-2434).
gtccctgaaggctcagtat

SEQ ID NO: 81849 - DNA, 19 bp, Homo sapiens
  siRNA target sequence for EPRS (NM_004446.1,2418-2436).
ccctgaaggctcagtataa

SEQ ID NO: 81850 - DNA, 19 bp, Homo sapiens
  siRNA target sequence for EPRS (NM_004446.1,2419-2437).
cctgaaggctcagtataaa

SEQ ID NO: 81851 - DNA, 19 bp, Homo sapiens
  siRNA target sequence for EPRS (NM_004446.1,2466-2484).
gtcagcccccattatctca

SEQ ID NO: 81852 - DNA, 19 bp, Homo sapiens
  siRNA target sequence for EPRS (NM_004446.1,2468-2486).
cagcccccattatctcaaa

SEQ ID NO: 81853 - DNA, 19 bp, Homo sapiens
  siRNA target sequence for EPRS (NM_004446.1,2470-2488).
gcccccattatctcaaagt

SEQ ID NO: 81854 - DNA, 19 bp, Homo sapiens
  siRNA target sequence for EPRS (NM_004446.1,2471-2489).
cccccattatctcaaagtt

SEQ ID NO: 81855 - DNA, 19 bp, Homo sapiens
  siRNA target sequence for EPRS (NM_004446.1,2499-2517).
gcccaaccagaaattctga

SEQ ID NO: 81856 - DNA, 19 bp, Homo sapiens
  siRNA target sequence for EPRS (NM_004446.1,2537-2555).
ccagaagcgaaagtacttt

SEQ ID NO: 81857 - DNA, 19 bp, Homo sapiens
  siRNA target sequence for EPRS (NM_004446.1,2582-2600).
gtagttcggaaacttaaaa

SEQ ID NO: 81858 - DNA, 19 bp, Homo sapiens
  siRNA target sequence for EPRS (NM_004446.1,2588-2606).
cggaaacttaaaactgaaa

SEQ ID NO: 81859 - DNA, 19 bp, Homo sapiens
  siRNA target sequence for EPRS (NM_004446.1,2610-2628).
cccctaaggatcaagtaga

SEQ ID NO: 81860 - DNA, 19 bp, Homo sapiens
  siRNA target sequence for EPRS (NM_004446.1,2613-2631).
ctaaggatcaagtagatat

SEQ ID NO: 81861 - DNA, 19 bp, Homo sapiens
  siRNA target sequence for EPRS (NM_004446.1,2654-2672).
ctaaaggcacagtacaagt

SEQ ID NO: 81862 - DNA, 19 bp, Homo sapiens
  siRNA target sequence for EPRS (NM_004446.1,2660-2678).
gcacagtacaagtctttga

SEQ ID NO: 81863 - DNA, 19 bp, Homo sapiens
  siRNA target sequence for EPRS (NM_004446.1,2673-2691).
ctttgataggagtagagta

SEQ ID NO: 81864 - DNA, 19 bp, Homo sapiens
  siRNA target sequence for EPRS (NM_004446.1,2822-2840).
ggaggtgggctctcatcaa

SEQ ID NO: 81865 - DNA, 19 bp, Homo sapiens
  siRNA target sequence for EPRS (NM_004446.1,2953-2971).
gattgaataccatgacata

SEQ ID NO: 81866 - DNA, 19 bp, Homo sapiens
  siRNA target sequence for EPRS (NM_004446.1,2966-2984).
gacataagtggctgttata

SEQ ID NO: 81867 - DNA, 19 bp, Homo sapiens
  siRNA target sequence for EPRS (NM_004446.1,3018-3036).
ccatcaaggacttttttga

SEQ ID NO: 81868 - DNA, 19 bp, Homo sapiens
  siRNA target sequence for EPRS (NM_004446.1,3077-3095).
cccatgtttgtgtctcaaa

SEQ ID NO: 81869 - DNA, 19 bp, Homo sapiens
  siRNA target sequence for EPRS (NM_004446.1,3171-3189).
ccgagctggcagaaccaat

SEQ ID NO: 81870 - DNA, 19 bp, Homo sapiens
  siRNA target sequence for EPRS (NM_004446.1,3193-3211).
cattcgtcctactagtgaa

SEQ ID NO: 81871 - DNA, 19 bp, Homo sapiens
  siRNA target sequence for EPRS (NM_004446.1,3198-3216).
gtcctactagtgaaacagt

SEQ ID NO: 81872 - DNA, 19 bp, Homo sapiens
  siRNA target sequence for EPRS (NM_004446.1,3200-3218).
cctactagtgaaacagtaa

SEQ ID NO: 81873 - DNA, 19 bp, Homo sapiens
  siRNA target sequence for EPRS (NM_004446.1,3201-3219).
ctactagtgaaacagtaat

SEQ ID NO: 81874 - DNA, 19 bp, Homo sapiens
  siRNA target sequence for EPRS (NM_004446.1,3204-3222).
ctagtgaaacagtaatgta

SEQ ID NO: 81875 - DNA, 19 bp, Homo sapiens
  siRNA target sequence for EPRS (NM_004446.1,3220-3238).
gtatcctgcatatgcaaaa

SEQ ID NO: 81876 - DNA, 19 bp, Homo sapiens
  siRNA target sequence for EPRS (NM_004446.1,3263-3281).
cccatcaagctcaatcagt

SEQ ID NO: 81877 - DNA, 19 bp, Homo sapiens
  siRNA target sequence for EPRS (NM_004446.1,3290-3308).
gtggtgcgttgggaattca

SEQ ID NO: 81878 - DNA, 19 bp, Homo sapiens
  siRNA target sequence for EPRS (NM_004446.1,3325-3343).
cctacgtactcgtgaattt

SEQ ID NO: 81879 - DNA, 19 bp, Homo sapiens
  siRNA target sequence for EPRS (NM_004446.1,3329-3347).
cgtactcgtgaatttcttt

SEQ ID NO: 81880 - DNA, 19 bp, Homo sapiens
  siRNA target sequence for EPRS (NM_004446.1,3352-3370).
ggaagggcacagtgctttt

SEQ ID NO: 81881 - DNA, 19 bp, Homo sapiens
  siRNA target sequence for EPRS (NM_004446.1,3400-3418).
cttgcagatacttgactta

SEQ ID NO: 81882 - DNA, 19 bp, Homo sapiens
  siRNA target sequence for EPRS (NM_004446.1,3442-3460).
cctggcaattcctgttgtt

SEQ ID NO: 81883 - DNA, 19 bp, Homo sapiens
  siRNA target sequence for EPRS (NM_004446.1,3491-3509).
gcaggaggagactatacaa

SEQ ID NO: 81884 - DNA, 19 bp, Homo sapiens
  siRNA target sequence for EPRS (NM_004446.1,3494-3512).
ggaggagactatacaacta

SEQ ID NO: 81885 - DNA, 19 bp, Homo sapiens
  siRNA target sequence for EPRS (NM_004446.1,3497-3515).
ggagactatacaactacaa

SEQ ID NO: 81886 - DNA, 19 bp, Homo sapiens
  siRNA target sequence for EPRS (NM_004446.1,3498-3516).
gagactatacaactacaat

SEQ ID NO: 81887 - DNA, 19 bp, Homo sapiens
  siRNA target sequence for EPRS (NM_004446.1,3502-3520).
ctatacaactacaatagaa

SEQ ID NO: 81888 - DNA, 19 bp, Homo sapiens
  siRNA target sequence for EPRS (NM_004446.1,3554-3572).
ggaggaacatcacatcatt

SEQ ID NO: 81889 - DNA, 19 bp, Homo sapiens
  siRNA target sequence for EPRS (NM_004446.1,3634-3652).
gaagcaatttgcctatcaa

SEQ ID NO: 81890 - DNA, 19 bp, Homo sapiens
  siRNA target sequence for EPRS (NM_004446.1,3663-3681).
gcctgacaactcgaactat

SEQ ID NO: 81891 - DNA, 19 bp, Homo sapiens
  siRNA target sequence for EPRS (NM_004446.1,3664-3682).
cctgacaactcgaactatt

SEQ ID NO: 81892 - DNA, 19 bp, Homo sapiens
  siRNA target sequence for EPRS (NM_004446.1,3667-3685).
gacaactcgaactattggt

SEQ ID NO: 81893 - DNA, 19 bp, Homo sapiens
  siRNA target sequence for EPRS (NM_004446.1,3672-3690).
ctcgaactattggtgttat

SEQ ID NO: 81894 - DNA, 19 bp, Homo sapiens
  siRNA target sequence for EPRS (NM_004446.1,3674-3692).
cgaactattggtgttatga

SEQ ID NO: 81895 - DNA, 19 bp, Homo sapiens
  siRNA target sequence for EPRS (NM_004446.1,3706-3724).
ggacaacatgggtttagta

SEQ ID NO: 81896 - DNA, 19 bp, Homo sapiens
  siRNA target sequence for EPRS (NM_004446.1,3707-3725).
gacaacatgggtttagtat

SEQ ID NO: 81897 - DNA, 19 bp, Homo sapiens
  siRNA target sequence for EPRS (NM_004446.1,3712-3730).
catgggtttagtattacca

SEQ ID NO: 81898 - DNA, 19 bp, Homo sapiens
  siRNA target sequence for EPRS (NM_004446.1,3772-3790).
cattaccaatgcactttct

SEQ ID NO: 81899 - DNA, 19 bp, Homo sapiens
  siRNA target sequence for EPRS (NM_004446.1,3806-3824).
gcgctgattgcaaaatgca

SEQ ID NO: 81900 - DNA, 19 bp, Homo sapiens
  siRNA target sequence for EPRS (NM_004446.1,3807-3825).
cgctgattgcaaaatgcaa

SEQ ID NO: 81901 - DNA, 19 bp, Homo sapiens
  siRNA target sequence for EPRS (NM_004446.1,3837-3855).
ggcgattactcagtgttaa

SEQ ID NO: 81902 - DNA, 19 bp, Homo sapiens
  siRNA target sequence for EPRS (NM_004446.1,3839-3857).
cgattactcagtgttaaca

SEQ ID NO: 81903 - DNA, 19 bp, Homo sapiens
  siRNA target sequence for EPRS (NM_004446.1,3840-3858).
gattactcagtgttaacat

SEQ ID NO: 81904 - DNA, 19 bp, Homo sapiens
  siRNA target sequence for EPRS (NM_004446.1,3862-3880).
cgttagagctgatttacga

SEQ ID NO: 81905 - DNA, 19 bp, Homo sapiens
  siRNA target sequence for EPRS (NM_004446.1,3867-3885).
gagctgatttacgagataa

SEQ ID NO: 81906 - DNA, 19 bp, Homo sapiens
  siRNA target sequence for EPRS (NM_004446.1,3869-3887).
gctgatttacgagataatt

SEQ ID NO: 81907 - DNA, 19 bp, Homo sapiens
  siRNA target sequence for EPRS (NM_004446.1,3870-3888).
ctgatttacgagataatta

SEQ ID NO: 81908 - DNA, 19 bp, Homo sapiens
  siRNA target sequence for EPRS (NM_004446.1,3896-3914).
ggttggaaattcaatcact

SEQ ID NO: 81909 - DNA, 19 bp, Homo sapiens
  siRNA target sequence for EPRS (NM_004446.1,3947-3965).
gttgggccacgtgatatga

SEQ ID NO: 81910 - DNA, 19 bp, Homo sapiens
  siRNA target sequence for EPRS (NM_004446.1,3950-3968).
gggccacgtgatatgaaga

SEQ ID NO: 81911 - DNA, 19 bp, Homo sapiens
  siRNA target sequence for EPRS (NM_004446.1,4036-4054).
gactaaacttcaagctatt

SEQ ID NO: 81912 - DNA, 19 bp, Homo sapiens
  siRNA target sequence for EPRS (NM_004446.1,4067-4085).
caggtcacccttttcacaa

SEQ ID NO: 81913 - DNA, 19 bp, Homo sapiens
  siRNA target sequence for EPRS (NM_004446.1,4086-4104).
gggcttctgaagaccttaa

SEQ ID NO: 81914 - DNA, 19 bp, Homo sapiens
  siRNA target sequence for EPRS (NM_004446.1,4094-4112).
gaagaccttaagactcata

SEQ ID NO: 81915 - DNA, 19 bp, Homo sapiens
  siRNA target sequence for EPRS (NM_004446.1,4099-4117).
ccttaagactcatatggtt

SEQ ID NO: 81916 - DNA, 19 bp, Homo sapiens
  siRNA target sequence for EPRS (NM_004446.1,4122-4140).
ctaatacaatggaagactt

SEQ ID NO: 81917 - DNA, 19 bp, Homo sapiens
  siRNA target sequence for EPRS (NM_004446.1,4198-4216).
ctgtgaggactggatcaaa

SEQ ID NO: 81918 - DNA, 19 bp, Homo sapiens
  siRNA target sequence for EPRS (NM_004446.1,4224-4242).
ctgccagggatcaagatct

SEQ ID NO: 81919 - DNA, 19 bp, Homo sapiens
  siRNA target sequence for EPRS (NM_004446.1,4228-4246).
cagggatcaagatcttgaa

SEQ ID NO: 81920 - DNA, 19 bp, Homo sapiens
  siRNA target sequence for EPRS (NM_004446.1,4256-4274).
ccatccatgggagctaaaa

SEQ ID NO: 81921 - DNA, 19 bp, Homo sapiens
  siRNA target sequence for EPRS (NM_004446.1,4346-4364).
gccaagtactacaccttat

SEQ ID NO: 81922 - DNA, 19 bp, Homo sapiens
  siRNA target sequence for EPRS (NM_004446.1,4351-4369).
gtactacaccttatttggt

SEQ ID NO: 81923 - DNA, 19 bp, Homo sapiens
  siRNA target sequence for ERBB2 (NM_004448.1,508-526).
ggagacccgctgaacaata

SEQ ID NO: 81924 - DNA, 19 bp, Homo sapiens
  siRNA target sequence for ERBB2 (NM_004448.1,511-529).
gacccgctgaacaatacca

SEQ ID NO: 81925 - DNA, 19 bp, Homo sapiens
  siRNA target sequence for ERBB2 (NM_004448.1,635-653).
gctaccaggacacgatttt

SEQ ID NO: 81926 - DNA, 19 bp, Homo sapiens
  siRNA target sequence for ERBB2 (NM_004448.1,684-702).
gctggctctcacactgata

SEQ ID NO: 81927 - DNA, 19 bp, Homo sapiens
  siRNA target sequence for ERBB2 (NM_004448.1,688-706).
gctctcacactgatagaca

SEQ ID NO: 81928 - DNA, 19 bp, Homo sapiens
  siRNA target sequence for ERBB2 (NM_004448.1,1048-1066).
ccctacaactacctttcta

SEQ ID NO: 81929 - DNA, 19 bp, Homo sapiens
  siRNA target sequence for ERBB2 (NM_004448.1,1214-1232).
cagttaccagtgccaatat

SEQ ID NO: 81930 - DNA, 19 bp, Homo sapiens
  siRNA target sequence for ERBB2 (NM_004448.1,1546-1564).
gccctcatccaccataaca

SEQ ID NO: 81931 - DNA, 19 bp, Homo sapiens
  siRNA target sequence for ERBB2 (NM_004448.1,1866-1884).
ctcagtgacctgttttgga

SEQ ID NO: 81932 - DNA, 19 bp, Homo sapiens
  siRNA target sequence for ERBB2 (NM_004448.1,1907-1925).
cctgtgcccactataagga

SEQ ID NO: 81933 - DNA, 19 bp, Homo sapiens
  siRNA target sequence for ERBB2 (NM_004448.1,1980-1998).
catgcccatctggaagttt

SEQ ID NO: 81934 - DNA, 19 bp, Homo sapiens
  siRNA target sequence for ERBB2 (NM_004448.1,2371-2389).
cctgatggggagaatgtga

SEQ ID NO: 81935 - DNA, 19 bp, Homo sapiens
  siRNA target sequence for ERBB2 (NM_004448.1,2477-2495).
gtgtgggctccccatatgt

SEQ ID NO: 81936 - DNA, 19 bp, Homo sapiens
  siRNA target sequence for ERBB2 (NM_004448.1,2479-2497).
gtgggctccccatatgtct

SEQ ID NO: 81937 - DNA, 19 bp, Homo sapiens
  siRNA target sequence for ERBB2 (NM_004448.1,2712-2730).
gagtcccaaccatgtcaaa

SEQ ID NO: 81938 - DNA, 19 bp, Homo sapiens
  siRNA target sequence for ERBB2 (NM_004448.1,2714-2732).
gtcccaaccatgtcaaaat

SEQ ID NO: 81939 - DNA, 19 bp, Homo sapiens
  siRNA target sequence for ERBB2 (NM_004448.1,3059-3077).
gggagttggtgtctgaatt

SEQ ID NO: 81940 - DNA, 19 bp, Homo sapiens
  siRNA target sequence for ERBB2 (NM_004448.1,3388-3406).
ggggctggctccgatgtat

SEQ ID NO: 81941 - DNA, 19 bp, Homo sapiens
  siRNA target sequence for ERBB2 (NM_004448.1,3389-3407).
gggctggctccgatgtatt

SEQ ID NO: 81942 - DNA, 19 bp, Homo sapiens
  siRNA target sequence for ERBB2 (NM_004448.1,3390-3408).
ggctggctccgatgtattt

SEQ ID NO: 81943 - DNA, 19 bp, Homo sapiens
  siRNA target sequence for ERBB2 (NM_004448.1,3686-3704).
gggtcgtcaaagacgtttt

SEQ ID NO: 81944 - DNA, 19 bp, Homo sapiens
  siRNA target sequence for ERBB2 (NM_004448.1,3687-3705).
ggtcgtcaaagacgttttt

SEQ ID NO: 81945 - DNA, 19 bp, Homo sapiens
  siRNA target sequence for ERBB2 (NM_004448.1,3796-3814).
gccttcgacaacctctatt

SEQ ID NO: 81946 - DNA, 19 bp, Homo sapiens
  siRNA target sequence for ERBB2 (NM_004448.1,3797-3815).
ccttcgacaacctctatta

SEQ ID NO: 81947 - DNA, 19 bp, Homo sapiens
  siRNA target sequence for ERBB3 (NM_001982.1,544-562).
gccatcttcgtcatgttga

SEQ ID NO: 81948 - DNA, 19 bp, Homo sapiens
  siRNA target sequence for ERBB3 (NM_001982.1,549-567).
cttcgtcatgttgaactat

SEQ ID NO: 81949 - DNA, 19 bp, Homo sapiens
  siRNA target sequence for ERBB3 (NM_001982.1,553-571).
gtcatgttgaactataaca

SEQ ID NO: 81950 - DNA, 19 bp, Homo sapiens
  siRNA target sequence for ERBB3 (NM_001982.1,608-626).
ctcagctcaccgagattct

SEQ ID NO: 81951 - DNA, 19 bp, Homo sapiens
  siRNA target sequence for ERBB3 (NM_001982.1,632-650).
ggggtgtttatattgagaa

SEQ ID NO: 81952 - DNA, 19 bp, Homo sapiens
  siRNA target sequence for ERBB3 (NM_001982.1,667-685).
cacatggacacaattgact

SEQ ID NO: 81953 - DNA, 19 bp, Homo sapiens
  siRNA target sequence for ERBB3 (NM_001982.1,752-770).
cctgtcatgaggtttgcaa

SEQ ID NO: 81954 - DNA, 19 bp, Homo sapiens
  siRNA target sequence for ERBB3 (NM_001982.1,794-812).
cagaagactgccagacatt

SEQ ID NO: 81955 - DNA, 19 bp, Homo sapiens
  siRNA target sequence for ERBB3 (NM_001982.1,932-950).
cctgccggcacttcaatga

SEQ ID NO: 81956 - DNA, 19 bp, Homo sapiens
  siRNA target sequence for ERBB3 (NM_001982.1,977-995).
cacagcctcttgtctacaa

SEQ ID NO: 81957 - DNA, 19 bp, Homo sapiens
  siRNA target sequence for ERBB3 (NM_001982.1,979-997).
cagcctcttgtctacaaca

SEQ ID NO: 81958 - DNA, 19 bp, Homo sapiens
  siRNA target sequence for ERBB3 (NM_001982.1,1041-1059).
gtatggaggagtttgtgta

SEQ ID NO: 81959 - DNA, 19 bp, Homo sapiens
  siRNA target sequence for ERBB3 (NM_001982.1,1064-1082).
gctgtccccataactttgt

SEQ ID NO: 81960 - DNA, 19 bp, Homo sapiens
  siRNA target sequence for ERBB3 (NM_001982.1,1120-1138).
gacaagatggaagtagata

SEQ ID NO: 81961 - DNA, 19 bp, Homo sapiens
  siRNA target sequence for ERBB3 (NM_001982.1,1161-1179).
gccttgtgggggactatgt

SEQ ID NO: 81962 - DNA, 19 bp, Homo sapiens
  siRNA target sequence for ERBB3 (NM_001982.1,1227-1245).
ggactcgagcaacattgat

SEQ ID NO: 81963 - DNA, 19 bp, Homo sapiens
  siRNA target sequence for ERBB3 (NM_001982.1,1232-1250).
cgagcaacattgatggatt

SEQ ID NO: 81964 - DNA, 19 bp, Homo sapiens
  siRNA target sequence for ERBB3 (NM_001982.1,1235-1253).
gcaacattgatggatttgt

SEQ ID NO: 81965 - DNA, 19 bp, Homo sapiens
  siRNA target sequence for ERBB3 (NM_001982.1,1307-1325).
gagacccctggcacaagat

SEQ ID NO: 81966 - DNA, 19 bp, Homo sapiens
  siRNA target sequence for ERBB3 (NM_001982.1,1477-1495).
ggcttctcattgttgatca

SEQ ID NO: 81967 - DNA, 19 bp, Homo sapiens
  siRNA target sequence for ERBB3 (NM_001982.1,1478-1496).
gcttctcattgttgatcat

SEQ ID NO: 81968 - DNA, 19 bp, Homo sapiens
  siRNA target sequence for ERBB3 (NM_001982.1,1527-1545).
ccgatccctgaaggaaatt

SEQ ID NO: 81969 - DNA, 19 bp, Homo sapiens
  siRNA target sequence for ERBB3 (NM_001982.1,1528-1546).
cgatccctgaaggaaatta

SEQ ID NO: 81970 - DNA, 19 bp, Homo sapiens
  siRNA target sequence for ERBB3 (NM_001982.1,1586-1604).
gctaccaccactctttgaa

SEQ ID NO: 81971 - DNA, 19 bp, Homo sapiens
  siRNA target sequence for ERBB3 (NM_001982.1,1631-1649).
cggaagagcgactagacat

SEQ ID NO: 81972 - DNA, 19 bp, Homo sapiens
  siRNA target sequence for ERBB3 (NM_001982.1,1639-1657).
cgactagacatcaagcata

SEQ ID NO: 81973 - DNA, 19 bp, Homo sapiens
  siRNA target sequence for ERBB3 (NM_001982.1,1640-1658).
gactagacatcaagcataa

SEQ ID NO: 81974 - DNA, 19 bp, Homo sapiens
  siRNA target sequence for ERBB3 (NM_001982.1,1746-1764).
gtgcttgtcctgtcgaaat

SEQ ID NO: 81975 - DNA, 19 bp, Homo sapiens
  siRNA target sequence for ERBB3 (NM_001982.1,1829-1847).
cccatgaggccgaatgctt

SEQ ID NO: 81976 - DNA, 19 bp, Homo sapiens
  siRNA target sequence for ERBB3 (NM_001982.1,1878-1896).
gggcactgccacatgcaat

SEQ ID NO: 81977 - DNA, 19 bp, Homo sapiens
  siRNA target sequence for ERBB3 (NM_001982.1,1899-1917).
ctcgggctctgatacttgt

SEQ ID NO: 81978 - DNA, 19 bp, Homo sapiens
  siRNA target sequence for ERBB3 (NM_001982.1,1982-2000).
gtgccaagggcccaatcta

SEQ ID NO: 81979 - DNA, 19 bp, Homo sapiens
  siRNA target sequence for ERBB3 (NM_001982.1,1998-2016).
ctacaagtacccagatgtt

SEQ ID NO: 81980 - DNA, 19 bp, Homo sapiens
  siRNA target sequence for ERBB3 (NM_001982.1,2004-2022).
gtacccagatgttcagaat

SEQ ID NO: 81981 - DNA, 19 bp, Homo sapiens
  siRNA target sequence for ERBB3 (NM_001982.1,2027-2045).
gtcggccctgccatgagaa

SEQ ID NO: 81982 - DNA, 19 bp, Homo sapiens
  siRNA target sequence for ERBB3 (NM_001982.1,2111-2129).
gcaaaacccatctgacaat

SEQ ID NO: 81983 - DNA, 19 bp, Homo sapiens
  siRNA target sequence for ERBB3 (NM_001982.1,2222-2240).
gggctatgaggcgatactt

SEQ ID NO: 81984 - DNA, 19 bp, Homo sapiens
  siRNA target sequence for ERBB3 (NM_001982.1,2278-2296).
gagaaggctaacaaagtct

SEQ ID NO: 81985 - DNA, 19 bp, Homo sapiens
  siRNA target sequence for ERBB3 (NM_001982.1,2295-2313).
cttggccagaatcttcaaa

SEQ ID NO: 81986 - DNA, 19 bp, Homo sapiens
  siRNA target sequence for ERBB3 (NM_001982.1,2299-2317).
gccagaatcttcaaagaga

SEQ ID NO: 81987 - DNA, 19 bp, Homo sapiens
  siRNA target sequence for ERBB3 (NM_001982.1,2340-2358).
gcttggctcgggtgtcttt

SEQ ID NO: 81988 - DNA, 19 bp, Homo sapiens
  siRNA target sequence for ERBB3 (NM_001982.1,2389-2407).
gagggtgaatcaatcaaga

SEQ ID NO: 81989 - DNA, 19 bp, Homo sapiens
  siRNA target sequence for ERBB3 (NM_001982.1,2411-2429).
cagtctgcattaaagtcat

SEQ ID NO: 81990 - DNA, 19 bp, Homo sapiens
  siRNA target sequence for ERBB3 (NM_001982.1,2439-2457).
gagtggacggcagagtttt

SEQ ID NO: 81991 - DNA, 19 bp, Homo sapiens
  siRNA target sequence for ERBB3 (NM_001982.1,2496-2514).
ggaccatgcccacattgta

SEQ ID NO: 81992 - DNA, 19 bp, Homo sapiens
  siRNA target sequence for ERBB3 (NM_001982.1,2497-2515).
gaccatgcccacattgtaa

SEQ ID NO: 81993 - DNA, 19 bp, Homo sapiens
  siRNA target sequence for ERBB3 (NM_001982.1,2545-2563).
ctgcagcttgtcactcaat

SEQ ID NO: 81994 - DNA, 19 bp, Homo sapiens
  siRNA target sequence for ERBB3 (NM_001982.1,2547-2565).
gcagcttgtcactcaatat

SEQ ID NO: 81995 - DNA, 19 bp, Homo sapiens
  siRNA target sequence for ERBB3 (NM_001982.1,2632-2650).
ctcaactggggagtacaaa

SEQ ID NO: 81996 - DNA, 19 bp, Homo sapiens
  siRNA target sequence for ERBB3 (NM_001982.1,2634-2652).
caactggggagtacaaatt

SEQ ID NO: 81997 - DNA, 19 bp, Homo sapiens
  siRNA target sequence for ERBB3 (NM_001982.1,2680-2698).
catggtatggtgcatagaa

SEQ ID NO: 81998 - DNA, 19 bp, Homo sapiens
  siRNA target sequence for ERBB3 (NM_001982.1,2785-2803).
gataagcagctgctataca

SEQ ID NO: 81999 - DNA, 19 bp, Homo sapiens
  siRNA target sequence for ERBB3 (NM_001982.1,2809-2827).
gccaagactccaattaagt

SEQ ID NO: 82000 - DNA, 19 bp, Homo sapiens
  siRNA target sequence for ERBB3 (NM_001982.1,2828-2846).
ggatggcccttgagagtat

SEQ ID NO: 82001 - DNA, 19 bp, Homo sapiens
  siRNA target sequence for ERBB3 (NM_001982.1,2843-2861).
gtatccactttgggaaata

SEQ ID NO: 82002 - DNA, 19 bp, Homo sapiens
  siRNA target sequence for ERBB3 (NM_001982.1,2930-2948).
cctatgcagggctacgatt

SEQ ID NO: 82003 - DNA, 19 bp, Homo sapiens
  siRNA target sequence for ERBB3 (NM_001982.1,2940-2958).
gctacgattggctgaagta

SEQ ID NO: 82004 - DNA, 19 bp, Homo sapiens
  siRNA target sequence for ERBB3 (NM_001982.1,3054-3072).
gaacattcgcccaaccttt

SEQ ID NO: 82005 - DNA, 19 bp, Homo sapiens
  siRNA target sequence for ERBB3 (NM_001982.1,3115-3133).
ccacggtatctggtcataa

SEQ ID NO: 82006 - DNA, 19 bp, Homo sapiens
  siRNA target sequence for ERBB3 (NM_001982.1,3118-3136).
cggtatctggtcataaaga

SEQ ID NO: 82007 - DNA, 19 bp, Homo sapiens
  siRNA target sequence for ERBB3 (NM_001982.1,3172-3190).
ccccatggtctgacaaaca

SEQ ID NO: 82008 - DNA, 19 bp, Homo sapiens
  siRNA target sequence for ERBB3 (NM_001982.1,3173-3191).
cccatggtctgacaaacaa

SEQ ID NO: 82009 - DNA, 19 bp, Homo sapiens
  siRNA target sequence for ERBB3 (NM_001982.1,3175-3193).
catggtctgacaaacaaga

SEQ ID NO: 82010 - DNA, 19 bp, Homo sapiens
  siRNA target sequence for ERBB3 (NM_001982.1,3295-3313).
ctaccagttggaacactta

SEQ ID NO: 82011 - DNA, 19 bp, Homo sapiens
  siRNA target sequence for ERBB3 (NM_001982.1,3365-3383).
ccatgaaccagggtaatct

SEQ ID NO: 82012 - DNA, 19 bp, Homo sapiens
  siRNA target sequence for ERBB3 (NM_001982.1,3366-3384).
catgaaccagggtaatctt

SEQ ID NO: 82013 - DNA, 19 bp, Homo sapiens
  siRNA target sequence for ERBB3 (NM_001982.1,3525-3543).
ggagaaagtgtcaatgtgt

SEQ ID NO: 82014 - DNA, 19 bp, Homo sapiens
  siRNA target sequence for ERBB3 (NM_001982.1,3526-3544).
gagaaagtgtcaatgtgta

SEQ ID NO: 82015 - DNA, 19 bp, Homo sapiens
  siRNA target sequence for ERBB3 (NM_001982.1,3580-3598).
ggagatagcgcctaccatt

SEQ ID NO: 82016 - DNA, 19 bp, Homo sapiens
  siRNA target sequence for ERBB3 (NM_001982.1,3661-3679).
gatgtcaacggttatgtca

SEQ ID NO: 82017 - DNA, 19 bp, Homo sapiens
  siRNA target sequence for ERBB3 (NM_001982.1,3715-3733).
cgggaaggcaccctttctt

SEQ ID NO: 82018 - DNA, 19 bp, Homo sapiens
  siRNA target sequence for ERBB3 (NM_001982.1,3970-3988).
gaagactatgaatatatga

SEQ ID NO: 82019 - DNA, 19 bp, Homo sapiens
  siRNA target sequence for ERBB3 (NM_001982.1,4007-4025).
gtggtcctgggggtgatta

SEQ ID NO: 82020 - DNA, 19 bp, Homo sapiens
  siRNA target sequence for ERBB3 (NM_001982.1,4154-4172).
cagactctgcctttgataa

SEQ ID NO: 82021 - DNA, 19 bp, Homo sapiens
  siRNA target sequence for ERBB3 (NM_001982.1,4163-4181).
cctttgataaccctgatta

SEQ ID NO: 82022 - DNA, 19 bp, Homo sapiens
  siRNA target sequence for ERBB4 (NM_005235.1,172-190).
cgagccttgcgcaagtact

SEQ ID NO: 82023 - DNA, 19 bp, Homo sapiens
  siRNA target sequence for ERBB4 (NM_005235.1,173-191).
gagccttgcgcaagtacta

SEQ ID NO: 82024 - DNA, 19 bp, Homo sapiens
  siRNA target sequence for ERBB4 (NM_005235.1,177-195).
cttgcgcaagtactatgaa

SEQ ID NO: 82025 - DNA, 19 bp, Homo sapiens
  siRNA target sequence for ERBB4 (NM_005235.1,181-199).
cgcaagtactatgaaaact

SEQ ID NO: 82026 - DNA, 19 bp, Homo sapiens
  siRNA target sequence for ERBB4 (NM_005235.1,301-319).
gctcttaatcagtttcgtt

SEQ ID NO: 82027 - DNA, 19 bp, Homo sapiens
  siRNA target sequence for ERBB4 (NM_005235.1,321-339).
cctgcctctggagaattta

SEQ ID NO: 82028 - DNA, 19 bp, Homo sapiens
  siRNA target sequence for ERBB4 (NM_005235.1,330-348).
ggagaatttacgcattatt

SEQ ID NO: 82029 - DNA, 19 bp, Homo sapiens
  siRNA target sequence for ERBB4 (NM_005235.1,333-351).
gaatttacgcattattcgt

SEQ ID NO: 82030 - DNA, 19 bp, Homo sapiens
  siRNA target sequence for ERBB4 (NM_005235.1,350-368).
gtgggacaaaactttatga

SEQ ID NO: 82031 - DNA, 19 bp, Homo sapiens
  siRNA target sequence for ERBB4 (NM_005235.1,373-391).
cgatatgccttggcaatat

SEQ ID NO: 82032 - DNA, 19 bp, Homo sapiens
  siRNA target sequence for ERBB4 (NM_005235.1,422-440).
gacttcaagaacttggatt

SEQ ID NO: 82033 - DNA, 19 bp, Homo sapiens
  siRNA target sequence for ERBB4 (NM_005235.1,459-477).
cctaaatggtggagtctat

SEQ ID NO: 82034 - DNA, 19 bp, Homo sapiens
  siRNA target sequence for ERBB4 (NM_005235.1,562-580).
cttgtgtcaacaaatggta

SEQ ID NO: 82035 - DNA, 19 bp, Homo sapiens
  siRNA target sequence for ERBB4 (NM_005235.1,770-788).
gctttgcctgcatgaattt

SEQ ID NO: 82036 - DNA, 19 bp, Homo sapiens
  siRNA target sequence for ERBB4 (NM_005235.1,882-900).
cacatatggagcattctgt

SEQ ID NO: 82037 - DNA, 19 bp, Homo sapiens
  siRNA target sequence for ERBB4 (NM_005235.1,906-924).
gaaatgtccacataacttt

SEQ ID NO: 82038 - DNA, 19 bp, Homo sapiens
  siRNA target sequence for ERBB4 (NM_005235.1,925-943).
gtggtagattccagttctt

SEQ ID NO: 82039 - DNA, 19 bp, Homo sapiens
  siRNA target sequence for ERBB4 (NM_005235.1,1040-1058).
gcattggcacaggatcatt

SEQ ID NO: 82040 - DNA, 19 bp, Homo sapiens
  siRNA target sequence for ERBB4 (NM_005235.1,1045-1063).
ggcacaggatcattgatgt

SEQ ID NO: 82041 - DNA, 19 bp, Homo sapiens
  siRNA target sequence for ERBB4 (NM_005235.1,1082-1100).
ccagtaacattgacaaatt

SEQ ID NO: 82042 - DNA, 19 bp, Homo sapiens
  siRNA target sequence for ERBB4 (NM_005235.1,1093-1111).
gacaaattcataaactgta

SEQ ID NO: 82043 - DNA, 19 bp, Homo sapiens
  siRNA target sequence for ERBB4 (NM_005235.1,1112-1130).
ccaagatcaatgggaattt

SEQ ID NO: 82044 - DNA, 19 bp, Homo sapiens
  siRNA target sequence for ERBB4 (NM_005235.1,1119-1137).
caatgggaatttgatcttt

SEQ ID NO: 82045 - DNA, 19 bp, Homo sapiens
  siRNA target sequence for ERBB4 (NM_005235.1,1134-1152).
ctttctagtcactggtatt

SEQ ID NO: 82046 - DNA, 19 bp, Homo sapiens
  siRNA target sequence for ERBB4 (NM_005235.1,1156-1174).
ggggacccttacaatgcaa

SEQ ID NO: 82047 - DNA, 19 bp, Homo sapiens
  siRNA target sequence for ERBB4 (NM_005235.1,1157-1175).
gggacccttacaatgcaat

SEQ ID NO: 82048 - DNA, 19 bp, Homo sapiens
  siRNA target sequence for ERBB4 (NM_005235.1,1158-1176).
ggacccttacaatgcaatt

SEQ ID NO: 82049 - DNA, 19 bp, Homo sapiens
  siRNA target sequence for ERBB4 (NM_005235.1,1266-1284).
gactgacttcagtgttttt

SEQ ID NO: 82050 - DNA, 19 bp, Homo sapiens
  siRNA target sequence for ERBB4 (NM_005235.1,1303-1321).
ggtggaagagtactctata

SEQ ID NO: 82051 - DNA, 19 bp, Homo sapiens
  siRNA target sequence for ERBB4 (NM_005235.1,1322-1340).
gtggcctgtccttgcttat

SEQ ID NO: 82052 - DNA, 19 bp, Homo sapiens
  siRNA target sequence for ERBB4 (NM_005235.1,1325-1343).
gcctgtccttgcttatcct

SEQ ID NO: 82053 - DNA, 19 bp, Homo sapiens
  siRNA target sequence for ERBB4 (NM_005235.1,1433-1451).
gttattatcataccattaa

SEQ ID NO: 82054 - DNA, 19 bp, Homo sapiens
  siRNA target sequence for ERBB4 (NM_005235.1,1460-1478).
cactcttcagcacaatcaa

SEQ ID NO: 82055 - DNA, 19 bp, Homo sapiens
  siRNA target sequence for ERBB4 (NM_005235.1,1469-1487).
gcacaatcaaccagagaat

SEQ ID NO: 82056 - DNA, 19 bp, Homo sapiens
  siRNA target sequence for ERBB4 (NM_005235.1,1489-1507).
gtaatccgggacaacagaa

SEQ ID NO: 82057 - DNA, 19 bp, Homo sapiens
  siRNA target sequence for ERBB4 (NM_005235.1,1494-1512).
ccgggacaacagaaaagct

SEQ ID NO: 82058 - DNA, 19 bp, Homo sapiens
  siRNA target sequence for ERBB4 (NM_005235.1,1577-1595).
ctgggccagaccaatgtct

SEQ ID NO: 82059 - DNA, 19 bp, Homo sapiens
  siRNA target sequence for ERBB4 (NM_005235.1,1618-1636).
ggaaggatctgcatagagt

SEQ ID NO: 82060 - DNA, 19 bp, Homo sapiens
  siRNA target sequence for ERBB4 (NM_005235.1,1635-1653).
gtcttgtaacctctatgat

SEQ ID NO: 82061 - DNA, 19 bp, Homo sapiens
  siRNA target sequence for ERBB4 (NM_005235.1,1655-1673).
gtgaatttcgggagtttga

SEQ ID NO: 82062 - DNA, 19 bp, Homo sapiens
  siRNA target sequence for ERBB4 (NM_005235.1,1791-1809).
cccaaactgtgtggaaaaa

SEQ ID NO: 82063 - DNA, 19 bp, Homo sapiens
  siRNA target sequence for ERBB4 (NM_005235.1,1821-1839).
cttacagggggcaaacagt

SEQ ID NO: 82064 - DNA, 19 bp, Homo sapiens
  siRNA target sequence for ERBB4 (NM_005235.1,1825-1843).
cagggggcaaacagtttca

SEQ ID NO: 82065 - DNA, 19 bp, Homo sapiens
  siRNA target sequence for ERBB4 (NM_005235.1,1922-1940).
gtcatgactgcatttacta

SEQ ID NO: 82066 - DNA, 19 bp, Homo sapiens
  siRNA target sequence for ERBB4 (NM_005235.1,2112-2130).
gttggtggaaccattaact

SEQ ID NO: 82067 - DNA, 19 bp, Homo sapiens
  siRNA target sequence for ERBB4 (NM_005235.1,2152-2170).
caagctcaacttcgtattt

SEQ ID NO: 82068 - DNA, 19 bp, Homo sapiens
  siRNA target sequence for ERBB4 (NM_005235.1,2155-2173).
gctcaacttcgtattttga

SEQ ID NO: 82069 - DNA, 19 bp, Homo sapiens
  siRNA target sequence for ERBB4 (NM_005235.1,2222-2240).
gaacggtttataaaggtat

SEQ ID NO: 82070 - DNA, 19 bp, Homo sapiens
  siRNA target sequence for ERBB4 (NM_005235.1,2275-2293).
gtggctattaagattctta

SEQ ID NO: 82071 - DNA, 19 bp, Homo sapiens
  siRNA target sequence for ERBB4 (NM_005235.1,2277-2295).
ggctattaagattcttaat

SEQ ID NO: 82072 - DNA, 19 bp, Homo sapiens
  siRNA target sequence for ERBB4 (NM_005235.1,2279-2297).
ctattaagattcttaatga

SEQ ID NO: 82073 - DNA, 19 bp, Homo sapiens
  siRNA target sequence for ERBB4 (NM_005235.1,2343-2361).
gatcatggcaagtatggat

SEQ ID NO: 82074 - DNA, 19 bp, Homo sapiens
  siRNA target sequence for ERBB4 (NM_005235.1,2405-2423).
ccatccagctggttactca

SEQ ID NO: 82075 - DNA, 19 bp, Homo sapiens
  siRNA target sequence for ERBB4 (NM_005235.1,2410-2428).
cagctggttactcaactta

SEQ ID NO: 82076 - DNA, 19 bp, Homo sapiens
  siRNA target sequence for ERBB4 (NM_005235.1,2438-2456).
gctgcctgttggagtatgt

SEQ ID NO: 82077 - DNA, 19 bp, Homo sapiens
  siRNA target sequence for ERBB4 (NM_005235.1,2458-2476).
cacgagcacaaggataaca

SEQ ID NO: 82078 - DNA, 19 bp, Homo sapiens
  siRNA target sequence for ERBB4 (NM_005235.1,2460-2478).
cgagcacaaggataacatt

SEQ ID NO: 82079 - DNA, 19 bp, Homo sapiens
  siRNA target sequence for ERBB4 (NM_005235.1,2469-2487).
ggataacattggatcacaa

SEQ ID NO: 82080 - DNA, 19 bp, Homo sapiens
  siRNA target sequence for ERBB4 (NM_005235.1,2480-2498).
gatcacaactgctgcttaa

SEQ ID NO: 82081 - DNA, 19 bp, Homo sapiens
  siRNA target sequence for ERBB4 (NM_005235.1,2565-2583).
ggcagcccgtaatgtctta

SEQ ID NO: 82082 - DNA, 19 bp, Homo sapiens
  siRNA target sequence for ERBB4 (NM_005235.1,2567-2585).
cagcccgtaatgtcttagt

SEQ ID NO: 82083 - DNA, 19 bp, Homo sapiens
  siRNA target sequence for ERBB4 (NM_005235.1,2569-2587).
gcccgtaatgtcttagtga

SEQ ID NO: 82084 - DNA, 19 bp, Homo sapiens
  siRNA target sequence for ERBB4 (NM_005235.1,2570-2588).
cccgtaatgtcttagtgaa

SEQ ID NO: 82085 - DNA, 19 bp, Homo sapiens
  siRNA target sequence for ERBB4 (NM_005235.1,2571-2589).
ccgtaatgtcttagtgaaa

SEQ ID NO: 82086 - DNA, 19 bp, Homo sapiens
  siRNA target sequence for ERBB4 (NM_005235.1,2572-2590).
cgtaatgtcttagtgaaat

SEQ ID NO: 82087 - DNA, 19 bp, Homo sapiens
  siRNA target sequence for ERBB4 (NM_005235.1,2593-2611).
ccaaaccatgtgaaaatca

SEQ ID NO: 82088 - DNA, 19 bp, Homo sapiens
  siRNA target sequence for ERBB4 (NM_005235.1,2690-2708).
ggatggctctggagtgtat

SEQ ID NO: 82089 - DNA, 19 bp, Homo sapiens
  siRNA target sequence for ERBB4 (NM_005235.1,2691-2709).
gatggctctggagtgtata

SEQ ID NO: 82090 - DNA, 19 bp, Homo sapiens
  siRNA target sequence for ERBB4 (NM_005235.1,2694-2712).
ggctctggagtgtatacat

SEQ ID NO: 82091 - DNA, 19 bp, Homo sapiens
  siRNA target sequence for ERBB4 (NM_005235.1,2696-2714).
ctctggagtgtatacatta

SEQ ID NO: 82092 - DNA, 19 bp, Homo sapiens
  siRNA target sequence for ERBB4 (NM_005235.1,2698-2716).
ctggagtgtatacattaca

SEQ ID NO: 82093 - DNA, 19 bp, Homo sapiens
  siRNA target sequence for ERBB4 (NM_005235.1,2745-2763).
gagctatggagttactata

SEQ ID NO: 82094 - DNA, 19 bp, Homo sapiens
  siRNA target sequence for ERBB4 (NM_005235.1,2801-2819).
gaattccaacgcgagaaat

SEQ ID NO: 82095 - DNA, 19 bp, Homo sapiens
  siRNA target sequence for ERBB4 (NM_005235.1,2810-2828).
cgcgagaaatccctgattt

SEQ ID NO: 82096 - DNA, 19 bp, Homo sapiens
  siRNA target sequence for ERBB4 (NM_005235.1,2811-2829).
gcgagaaatccctgattta

SEQ ID NO: 82097 - DNA, 19 bp, Homo sapiens
  siRNA target sequence for ERBB4 (NM_005235.1,2812-2830).
cgagaaatccctgatttat

SEQ ID NO: 82098 - DNA, 19 bp, Homo sapiens
  siRNA target sequence for ERBB4 (NM_005235.1,2867-2885).
gcactattgacgtttacat

SEQ ID NO: 82099 - DNA, 19 bp, Homo sapiens
  siRNA target sequence for ERBB4 (NM_005235.1,2915-2933).
ctgacagtagacctaaatt

SEQ ID NO: 82100 - DNA, 19 bp, Homo sapiens
  siRNA target sequence for ERBB4 (NM_005235.1,2917-2935).
gacagtagacctaaattta

SEQ ID NO: 82101 - DNA, 19 bp, Homo sapiens
  siRNA target sequence for ERBB4 (NM_005235.1,2921-2939).
gtagacctaaatttaagga

SEQ ID NO: 82102 - DNA, 19 bp, Homo sapiens
  siRNA target sequence for ERBB4 (NM_005235.1,2974-2992).
cctcaaagatacctagtta

SEQ ID NO: 82103 - DNA, 19 bp, Homo sapiens
  siRNA target sequence for ERBB4 (NM_005235.1,3012-3030).
gaagcttcccagtccaaat

SEQ ID NO: 82104 - DNA, 19 bp, Homo sapiens
  siRNA target sequence for ERBB4 (NM_005235.1,3025-3043).
ccaaatgacagcaagttct

SEQ ID NO: 82105 - DNA, 19 bp, Homo sapiens
  siRNA target sequence for ERBB4 (NM_005235.1,3103-3121).
gtccctcaggctttcaaca

SEQ ID NO: 82106 - DNA, 19 bp, Homo sapiens
  siRNA target sequence for ERBB4 (NM_005235.1,3148-3166).
gcaagaattgactcgaata

SEQ ID NO: 82107 - DNA, 19 bp, Homo sapiens
  siRNA target sequence for ERBB4 (NM_005235.1,3157-3175).
gactcgaataggagtgaaa

SEQ ID NO: 82108 - DNA, 19 bp, Homo sapiens
  siRNA target sequence for ERBB4 (NM_005235.1,3159-3177).
ctcgaataggagtgaaatt

SEQ ID NO: 82109 - DNA, 19 bp, Homo sapiens
  siRNA target sequence for ERBB4 (NM_005235.1,3282-3300).
cccaactagcacaattcca

SEQ ID NO: 82110 - DNA, 19 bp, Homo sapiens
  siRNA target sequence for ERBB4 (NM_005235.1,3323-3341).
ctactgctgagatttttga

SEQ ID NO: 82111 - DNA, 19 bp, Homo sapiens
  siRNA target sequence for ERBB4 (NM_005235.1,3486-3504).
gactcctatgcgagacaaa

SEQ ID NO: 82112 - DNA, 19 bp, Homo sapiens
  siRNA target sequence for ERBB4 (NM_005235.1,3583-3601).
gataatcccgaatatcaca

SEQ ID NO: 82113 - DNA, 19 bp, Homo sapiens
  siRNA target sequence for ERBB4 (NM_005235.1,3589-3607).
cccgaatatcacaatgcat

SEQ ID NO: 82114 - DNA, 19 bp, Homo sapiens
  siRNA target sequence for ERBB4 (NM_005235.1,3620-3638).
ccaaggccgaggatgagta

SEQ ID NO: 82115 - DNA, 19 bp, Homo sapiens
  siRNA target sequence for ERBB4 (NM_005235.1,3621-3639).
caaggccgaggatgagtat

SEQ ID NO: 82116 - DNA, 19 bp, Homo sapiens
  siRNA target sequence for ERBB4 (NM_005235.1,3689-3707).
ctgagtacctgaagaacaa

SEQ ID NO: 82117 - DNA, 19 bp, Homo sapiens
  siRNA target sequence for ERBB4 (NM_005235.1,3693-3711).
gtacctgaagaacaacata

SEQ ID NO: 82118 - DNA, 19 bp, Homo sapiens
  siRNA target sequence for ERBB4 (NM_005235.1,3813-3831).
ggagtacagcacaaaatat

SEQ ID NO: 82119 - DNA, 19 bp, Homo sapiens
  siRNA target sequence for ERBB4 (NM_005235.1,3848-3866).
ggcggatccggcctattgt

SEQ ID NO: 82120 - DNA, 19 bp, Homo sapiens
  siRNA target sequence for ERBB4 (NM_005235.1,3858-3876).
gcctattgtggcagagaat

SEQ ID NO: 82121 - DNA, 19 bp, Homo sapiens
  siRNA target sequence for ERK8 (NM_139021.1,62-80).
cattgtccggagataccta

SEQ ID NO: 82122 - DNA, 19 bp, Homo sapiens
  siRNA target sequence for ERK8 (NM_139021.1,240-258).
ggggaccatcccaacatca

SEQ ID NO: 82123 - DNA, 19 bp, Homo sapiens
  siRNA target sequence for ERK8 (NM_139021.1,285-303).
gagaacgacagggacattt

SEQ ID NO: 82124 - DNA, 19 bp, Homo sapiens
  siRNA target sequence for ERK8 (NM_139021.1,426-444).
cacgtgcgctccatcttct

SEQ ID NO: 82125 - DNA, 19 bp, Homo sapiens
  siRNA target sequence for FER (NM_005246.1,415-433).
catgaagcagtgttaaaat

SEQ ID NO: 82126 - DNA, 19 bp, Homo sapiens
  siRNA target sequence for FER (NM_005246.1,451-469).
cggttactggaaacagtaa

SEQ ID NO: 82127 - DNA, 19 bp, Homo sapiens
  siRNA target sequence for FER (NM_005246.1,587-605).
ccaagtcttggctacttat

SEQ ID NO: 82128 - DNA, 19 bp, Homo sapiens
  siRNA target sequence for FER (NM_005246.1,591-609).
gtcttggctacttatgatt

SEQ ID NO: 82129 - DNA, 19 bp, Homo sapiens
  siRNA target sequence for FER (NM_005246.1,593-611).
cttggctacttatgattca

SEQ ID NO: 82130 - DNA, 19 bp, Homo sapiens
  siRNA target sequence for FER (NM_005246.1,606-624).
gattcagcagacagaacaa

SEQ ID NO: 82131 - DNA, 19 bp, Homo sapiens
  siRNA target sequence for FER (NM_005246.1,619-637).
gaacaacttagtaggataa

SEQ ID NO: 82132 - DNA, 19 bp, Homo sapiens
  siRNA target sequence for FER (NM_005246.1,625-643).
cttagtaggataatgaaga

SEQ ID NO: 82133 - DNA, 19 bp, Homo sapiens
  siRNA target sequence for FER (NM_005246.1,680-698).
ggctcaccatgatgattaa

SEQ ID NO: 82134 - DNA, 19 bp, Homo sapiens
  siRNA target sequence for FER (NM_005246.1,711-729).
ggtgaagaaaagttacata

SEQ ID NO: 82135 - DNA, 19 bp, Homo sapiens
  siRNA target sequence for FER (NM_005246.1,722-740).
gttacataggtgttcatca

SEQ ID NO: 82136 - DNA, 19 bp, Homo sapiens
  siRNA target sequence for FER (NM_005246.1,731-749).
gtgttcatcagcagataga

SEQ ID NO: 82137 - DNA, 19 bp, Homo sapiens
  siRNA target sequence for FER (NM_005246.1,751-769).
gcagagatgatcaaggtta

SEQ ID NO: 82138 - DNA, 19 bp, Homo sapiens
  siRNA target sequence for FER (NM_005246.1,800-818).
gctatagacaattaataaa

SEQ ID NO: 82139 - DNA, 19 bp, Homo sapiens
  siRNA target sequence for FER (NM_005246.1,897-915).
cgacaaagccacaatgaaa

SEQ ID NO: 82140 - DNA, 19 bp, Homo sapiens
  siRNA target sequence for FER (NM_005246.1,900-918).
caaagccacaatgaaactt

SEQ ID NO: 82141 - DNA, 19 bp, Homo sapiens
  siRNA target sequence for FER (NM_005246.1,936-954).
gtatgtattggcgttgaaa

SEQ ID NO: 82142 - DNA, 19 bp, Homo sapiens
  siRNA target sequence for FER (NM_005246.1,1003-1021).
cttctggactccttacaaa

SEQ ID NO: 82143 - DNA, 19 bp, Homo sapiens
  siRNA target sequence for FER (NM_005246.1,1046-1064).
cactcaaaggtatatttga

SEQ ID NO: 82144 - DNA, 19 bp, Homo sapiens
  siRNA target sequence for FER (NM_005246.1,1092-1110).
cacagaggaaatagtgaat

SEQ ID NO: 82145 - DNA, 19 bp, Homo sapiens
  siRNA target sequence for FER (NM_005246.1,1131-1149).
gtcggttgaacagatagat

SEQ ID NO: 82146 - DNA, 19 bp, Homo sapiens
  siRNA target sequence for FER (NM_005246.1,1143-1161).
gatagatcctagtacagaa

SEQ ID NO: 82147 - DNA, 19 bp, Homo sapiens
  siRNA target sequence for FER (NM_005246.1,1147-1165).
gatcctagtacagaataca

SEQ ID NO: 82148 - DNA, 19 bp, Homo sapiens
  siRNA target sequence for FER (NM_005246.1,1185-1203).
cagaacaacggctgctaaa

SEQ ID NO: 82149 - DNA, 19 bp, Homo sapiens
  siRNA target sequence for FER (NM_005246.1,1264-1282).
gagatcatgtggaataact

SEQ ID NO: 82150 - DNA, 19 bp, Homo sapiens
  siRNA target sequence for FER (NM_005246.1,1295-1313).
gtttgcaagtaatgttgaa

SEQ ID NO: 82151 - DNA, 19 bp, Homo sapiens
  siRNA target sequence for FER (NM_005246.1,1300-1318).
caagtaatgttgaaaacgt

SEQ ID NO: 82152 - DNA, 19 bp, Homo sapiens
  siRNA target sequence for FER (NM_005246.1,1316-1334).
cgttagcggaagaacttat

SEQ ID NO: 82153 - DNA, 19 bp, Homo sapiens
  siRNA target sequence for FER (NM_005246.1,1321-1339).
gcggaagaacttatgcaaa

SEQ ID NO: 82154 - DNA, 19 bp, Homo sapiens
  siRNA target sequence for FER (NM_005246.1,1567-1585).
gagccacctccagtagtaa

SEQ ID NO: 82155 - DNA, 19 bp, Homo sapiens
  siRNA target sequence for FER (NM_005246.1,1569-1587).
gccacctccagtagtaaat

SEQ ID NO: 82156 - DNA, 19 bp, Homo sapiens
  siRNA target sequence for FER (NM_005246.1,1571-1589).
cacctccagtagtaaatta

SEQ ID NO: 82157 - DNA, 19 bp, Homo sapiens
  siRNA target sequence for FER (NM_005246.1,1597-1615).
gatgcacgatcagttacat

SEQ ID NO: 82158 - DNA, 19 bp, Homo sapiens
  siRNA target sequence for FER (NM_005246.1,1600-1618).
gcacgatcagttacatcta

SEQ ID NO: 82159 - DNA, 19 bp, Homo sapiens
  siRNA target sequence for FER (NM_005246.1,1601-1619).
cacgatcagttacatctat

SEQ ID NO: 82160 - DNA, 19 bp, Homo sapiens
  siRNA target sequence for FER (NM_005246.1,1648-1666).
gaatctattcgtcattcaa

SEQ ID NO: 82161 - DNA, 19 bp, Homo sapiens
  siRNA target sequence for FER (NM_005246.1,1660-1678).
cattcaattgctggaataa

SEQ ID NO: 82162 - DNA, 19 bp, Homo sapiens
  siRNA target sequence for FER (NM_005246.1,1703-1721).
gctcttcagcactttctga

SEQ ID NO: 82163 - DNA, 19 bp, Homo sapiens
  siRNA target sequence for FER (NM_005246.1,1704-1722).
ctcttcagcactttctgat

SEQ ID NO: 82164 - DNA, 19 bp, Homo sapiens
  siRNA target sequence for FER (NM_005246.1,1706-1724).
cttcagcactttctgatat

SEQ ID NO: 82165 - DNA, 19 bp, Homo sapiens
  siRNA target sequence for FER (NM_005246.1,1772-1790).
gtgcaattcccagaataga

SEQ ID NO: 82166 - DNA, 19 bp, Homo sapiens
  siRNA target sequence for FER (NM_005246.1,1885-1903).
cagaggagacattttatca

SEQ ID NO: 82167 - DNA, 19 bp, Homo sapiens
  siRNA target sequence for FER (NM_005246.1,1887-1905).
gaggagacattttatcata

SEQ ID NO: 82168 - DNA, 19 bp, Homo sapiens
  siRNA target sequence for FER (NM_005246.1,1892-1910).
gacattttatcatacaata

SEQ ID NO: 82169 - DNA, 19 bp, Homo sapiens
  siRNA target sequence for FER (NM_005246.1,1912-1930).
gttgataacatgtatcgat

SEQ ID NO: 82170 - DNA, 19 bp, Homo sapiens
  siRNA target sequence for FER (NM_005246.1,1932-1950).
cgagggcactgggttttca

SEQ ID NO: 82171 - DNA, 19 bp, Homo sapiens
  siRNA target sequence for FER (NM_005246.1,1949-1967).
caaacattcctcaacttat

SEQ ID NO: 82172 - DNA, 19 bp, Homo sapiens
  siRNA target sequence for FER (NM_005246.1,1958-1976).
ctcaacttatagatcatca

SEQ ID NO: 82173 - DNA, 19 bp, Homo sapiens
  siRNA target sequence for FER (NM_005246.1,1963-1981).
cttatagatcatcactata

SEQ ID NO: 82174 - DNA, 19 bp, Homo sapiens
  siRNA target sequence for FER (NM_005246.1,2014-2032).
gtagttctgctgaatccta

SEQ ID NO: 82175 - DNA, 19 bp, Homo sapiens
  siRNA target sequence for FER (NM_005246.1,2036-2054).
ctaaggacaagaaatggat

SEQ ID NO: 82176 - DNA, 19 bp, Homo sapiens
  siRNA target sequence for FER (NM_005246.1,2098-2116).
ggaaattttggtgaagtat

SEQ ID NO: 82177 - DNA, 19 bp, Homo sapiens
  siRNA target sequence for FER (NM_005246.1,2099-2117).
gaaattttggtgaagtata

SEQ ID NO: 82178 - DNA, 19 bp, Homo sapiens
  siRNA target sequence for FER (NM_005246.1,2113-2131).
gtatataagggcacattaa

SEQ ID NO: 82179 - DNA, 19 bp, Homo sapiens
  siRNA target sequence for FER (NM_005246.1,2230-2248).
gatcatcccaatattgtca

SEQ ID NO: 82180 - DNA, 19 bp, Homo sapiens
  siRNA target sequence for FER (NM_005246.1,2273-2291).
gacagcctgtctacatcat

SEQ ID NO: 82181 - DNA, 19 bp, Homo sapiens
  siRNA target sequence for FER (NM_005246.1,2362-2380).
cagttagtgaaattttcat

SEQ ID NO: 82182 - DNA, 19 bp, Homo sapiens
  siRNA target sequence for FER (NM_005246.1,2387-2405).
ctgctgctggtatgttgta

SEQ ID NO: 82183 - DNA, 19 bp, Homo sapiens
  siRNA target sequence for FER (NM_005246.1,2400-2418).
gttgtatctcgagagtaaa

SEQ ID NO: 82184 - DNA, 19 bp, Homo sapiens
  siRNA target sequence for FER (NM_005246.1,2409-2427).
cgagagtaaaaactgtata

SEQ ID NO: 82185 - DNA, 19 bp, Homo sapiens
  siRNA target sequence for FER (NM_005246.1,2453-2471).
gcctggtaggtgaaaataa

SEQ ID NO: 82186 - DNA, 19 bp, Homo sapiens
  siRNA target sequence for FER (NM_005246.1,2564-2582).
cagcaccggaagctcttaa

SEQ ID NO: 82187 - DNA, 19 bp, Homo sapiens
  siRNA target sequence for FER (NM_005246.1,2566-2584).
gcaccggaagctcttaatt

SEQ ID NO: 82188 - DNA, 19 bp, Homo sapiens
  siRNA target sequence for FER (NM_005246.1,2567-2585).
caccggaagctcttaatta

SEQ ID NO: 82189 - DNA, 19 bp, Homo sapiens
  siRNA target sequence for FER (NM_005246.1,2578-2596).
cttaattatgggagataca

SEQ ID NO: 82190 - DNA, 19 bp, Homo sapiens
  siRNA target sequence for FER (NM_005246.1,2662-2680).
ccgtaccctggaatgacaa

SEQ ID NO: 82191 - DNA, 19 bp, Homo sapiens
  siRNA target sequence for FER (NM_005246.1,2663-2681).
cgtaccctggaatgacaaa

SEQ ID NO: 82192 - DNA, 19 bp, Homo sapiens
  siRNA target sequence for FER (NM_005246.1,2738-2756).
gtccagaggatatttccaa

SEQ ID NO: 82193 - DNA, 19 bp, Homo sapiens
  siRNA target sequence for FER (NM_005246.1,2743-2761).
gaggatatttccaaaatca

SEQ ID NO: 82194 - DNA, 19 bp, Homo sapiens
  siRNA target sequence for FER (NM_005246.1,2786-2804).
ctgaaaatcgccctaagtt

SEQ ID NO: 82195 - DNA, 19 bp, Homo sapiens
  siRNA target sequence for FER (NM_005246.1,2788-2806).
gaaaatcgccctaagttca

SEQ ID NO: 82196 - DNA, 19 bp, Homo sapiens
  siRNA target sequence for FER (NM_005246.1,2796-2814).
ccctaagttcagtgaactt

SEQ ID NO: 82197 - DNA, 19 bp, Homo sapiens
  siRNA target sequence for FER (NM_005246.1,2798-2816).
ctaagttcagtgaacttca

SEQ ID NO: 82198 - DNA, 19 bp, Homo sapiens
  siRNA target sequence for FER (NM_005246.1,2815-2833).
cagaaagagctcactatca

SEQ ID NO: 82199 - DNA, 19 bp, Homo sapiens
  siRNA target sequence for FES (NM_002005.2,151-169).
ctactggagggcatgagaa

SEQ ID NO: 82200 - DNA, 19 bp, Homo sapiens
  siRNA target sequence for FES (NM_002005.2,1773-1791).
gattggacgggggaacttt

SEQ ID NO: 82201 - DNA, 19 bp, Homo sapiens
  siRNA target sequence for FES (NM_002005.2,1784-1802).
ggaactttggcgaagtgtt

SEQ ID NO: 82202 - DNA, 19 bp, Homo sapiens
  siRNA target sequence for FES (NM_002005.2,1872-1890).
cctcaaggccaagtttcta

SEQ ID NO: 82203 - DNA, 19 bp, Homo sapiens
  siRNA target sequence for FES (NM_002005.2,2257-2275).
gcacctgaggcccttaact

SEQ ID NO: 82204 - DNA, 19 bp, Homo sapiens
  siRNA target sequence for FGFR1 (NM_000604.2,798-816).
cccgaccttgcctgaacaa

SEQ ID NO: 82205 - DNA, 19 bp, Homo sapiens
  siRNA target sequence for FGFR1 (NM_000604.2,1061-1079).
cctacttctccgtcaatgt

SEQ ID NO: 82206 - DNA, 19 bp, Homo sapiens
  siRNA target sequence for FGFR1 (NM_000604.2,1062-1080).
ctacttctccgtcaatgtt

SEQ ID NO: 82207 - DNA, 19 bp, Homo sapiens
  siRNA target sequence for FGFR1 (NM_000604.2,1284-1302).
cacactgcgctggttgaaa

SEQ ID NO: 82208 - DNA, 19 bp, Homo sapiens
  siRNA target sequence for FGFR1 (NM_000604.2,1286-1304).
cactgcgctggttgaaaaa

SEQ ID NO: 82209 - DNA, 19 bp, Homo sapiens
  siRNA target sequence for FGFR1 (NM_000604.2,1631-1649).
cagacaacctgccttatgt

SEQ ID NO: 82210 - DNA, 19 bp, Homo sapiens
  siRNA target sequence for FGFR1 (NM_000604.2,1642-1660).
ccttatgtccagatcttga

SEQ ID NO: 82211 - DNA, 19 bp, Homo sapiens
  siRNA target sequence for FGFR1 (NM_000604.2,1659-1677).
gaagactgctggagttaat

SEQ ID NO: 82212 - DNA, 19 bp, Homo sapiens
  siRNA target sequence for FGFR1 (NM_000604.2,1696-1714).
gaggtgcttcacttaagaa

SEQ ID NO: 82213 - DNA, 19 bp, Homo sapiens
  siRNA target sequence for FGFR1 (NM_000604.2,1702-1720).
cttcacttaagaaatgtct

SEQ ID NO: 82214 - DNA, 19 bp, Homo sapiens
  siRNA target sequence for FGFR1 (NM_000604.2,1901-1919).
ggtcggtcatcgtctacaa

SEQ ID NO: 82215 - DNA, 19 bp, Homo sapiens
  siRNA target sequence for FGFR1 (NM_000604.2,1904-1922).
cggtcatcgtctacaagat

SEQ ID NO: 82216 - DNA, 19 bp, Homo sapiens
  siRNA target sequence for FGFR1 (NM_000604.2,2277-2295).
gtcggacgcaacagagaaa

SEQ ID NO: 82217 - DNA, 19 bp, Homo sapiens
  siRNA target sequence for FGFR1 (NM_000604.2,2279-2297).
cggacgcaacagagaaaga

SEQ ID NO: 82218 - DNA, 19 bp, Homo sapiens
  siRNA target sequence for FGFR1 (NM_000604.2,2337-2355).
gatcgggaagcataagaat

SEQ ID NO: 82219 - DNA, 19 bp, Homo sapiens
  siRNA target sequence for FGFR1 (NM_000604.2,2382-2400).
gcaggatggtcccttgtat

SEQ ID NO: 82220 - DNA, 19 bp, Homo sapiens
  siRNA target sequence for FGFR1 (NM_000604.2,2654-2672).
gcctcgcacgggacattca

SEQ ID NO: 82221 - DNA, 19 bp, Homo sapiens
  siRNA target sequence for FGFR1 (NM_000604.2,2679-2697).
cgactactataaaaagaca

SEQ ID NO: 82222 - DNA, 19 bp, Homo sapiens
  siRNA target sequence for FGFR1 (NM_000604.2,2727-2745).
ggcacccgaggcattattt

SEQ ID NO: 82223 - DNA, 19 bp, Homo sapiens
  siRNA target sequence for FGFR1 (NM_000604.2,2729-2747).
cacccgaggcattatttga

SEQ ID NO: 82224 - DNA, 19 bp, Homo sapiens
  siRNA target sequence for FGFR1 (NM_023107.1,1550-1568).
catcccccaggactagtaa

SEQ ID NO: 82225 - DNA, 19 bp, Homo sapiens
  siRNA target sequence for FGFR1 (NM_023107.1,1565-1583).
gtaacagaggtcacaaagt

SEQ ID NO: 82226 - DNA, 19 bp, Homo sapiens
  siRNA target sequence for FGFR1 (NM_023110.1,1137-1155).
cactcccttgccatttgga

SEQ ID NO: 82227 - DNA, 19 bp, Homo sapiens
  siRNA target sequence for FGFR1 (NM_023110.1,1159-1177).
ggtactcggcttagtgatt

SEQ ID NO: 82228 - DNA, 19 bp, Homo sapiens
  siRNA target sequence for FGFR2 (NM_000141.2,660-678).
cctccttcagtttagttga

SEQ ID NO: 82229 - DNA, 19 bp, Homo sapiens
  siRNA target sequence for FGFR2 (NM_000141.2,769-787).
ggtgcgctgcctgttgaaa

SEQ ID NO: 82230 - DNA, 19 bp, Homo sapiens
  siRNA target sequence for FGFR2 (NM_000141.2,857-875).
ggggagtacttgcagataa

SEQ ID NO: 82231 - DNA, 19 bp, Homo sapiens
  siRNA target sequence for FGFR2 (NM_000141.2,973-991).
catctcatccggagatgat

SEQ ID NO: 82232 - DNA, 19 bp, Homo sapiens
  siRNA target sequence for FGFR2 (NM_000141.2,1002-1020).
ccgatggtgcggaagattt

SEQ ID NO: 82233 - DNA, 19 bp, Homo sapiens
  siRNA target sequence for FGFR2 (NM_000141.2,1003-1021).
cgatggtgcggaagatttt

SEQ ID NO: 82234 - DNA, 19 bp, Homo sapiens
  siRNA target sequence for FGFR2 (NM_000141.2,1007-1025).
ggtgcggaagattttgtca

SEQ ID NO: 82235 - DNA, 19 bp, Homo sapiens
  siRNA target sequence for FGFR2 (NM_000141.2,1155-1173).
ccatgcggtggctgaaaaa

SEQ ID NO: 82236 - DNA, 19 bp, Homo sapiens
  siRNA target sequence for FGFR2 (NM_000141.2,1226-1244).
cagcactggagcctcatta

SEQ ID NO: 82237 - DNA, 19 bp, Homo sapiens
  siRNA target sequence for FGFR2 (NM_000141.2,1320-1338).
cgtaccacctggatgttgt

SEQ ID NO: 82238 - DNA, 19 bp, Homo sapiens
  siRNA target sequence for FGFR2 (NM_000141.2,1402-1420).
cggaggagacgtagagttt

SEQ ID NO: 82239 - DNA, 19 bp, Homo sapiens
  siRNA target sequence for FGFR2 (NM_000141.2,1474-1492).
ggaaaagaacggcagtaaa

SEQ ID NO: 82240 - DNA, 19 bp, Homo sapiens
  siRNA target sequence for FGFR2 (NM_000141.2,1475-1493).
gaaaagaacggcagtaaat

SEQ ID NO: 82241 - DNA, 19 bp, Homo sapiens
  siRNA target sequence for FGFR2 (NM_000141.2,1573-1591).
ctatattcggaatgtaact

SEQ ID NO: 82242 - DNA, 19 bp, Homo sapiens
  siRNA target sequence for FGFR2 (NM_000141.2,1735-1753).
ctgcataggggtcttctta

SEQ ID NO: 82243 - DNA, 19 bp, Homo sapiens
  siRNA target sequence for FGFR2 (NM_000141.2,1758-1776).
cctgtatggtggtaacagt

SEQ ID NO: 82244 - DNA, 19 bp, Homo sapiens
  siRNA target sequence for FGFR2 (NM_000141.2,1781-1799).
ctgtgccgaatgaagaaca

SEQ ID NO: 82245 - DNA, 19 bp, Homo sapiens
  siRNA target sequence for FGFR2 (NM_000141.2,1838-1856).
cacaagctgaccaaacgta

SEQ ID NO: 82246 - DNA, 19 bp, Homo sapiens
  siRNA target sequence for FGFR2 (NM_000141.2,1919-1937).
ccgctggtgaggataacaa

SEQ ID NO: 82247 - DNA, 19 bp, Homo sapiens
  siRNA target sequence for FGFR2 (NM_000141.2,2085-2103).
cggaagcagtgggaattga

SEQ ID NO: 82248 - DNA, 19 bp, Homo sapiens
  siRNA target sequence for FGFR2 (NM_000141.2,2091-2109).
cagtgggaattgacaaaga

SEQ ID NO: 82249 - DNA, 19 bp, Homo sapiens
  siRNA target sequence for FGFR2 (NM_000141.2,2218-2236).
gaaacacaagaatatcata

SEQ ID NO: 82250 - DNA, 19 bp, Homo sapiens
  siRNA target sequence for FGFR2 (NM_000141.2,2266-2284).
gcctctctatgtcatagtt

SEQ ID NO: 82251 - DNA, 19 bp, Homo sapiens
  siRNA target sequence for FGFR2 (NM_000141.2,2344-2362).
ggagtactcctatgacatt

SEQ ID NO: 82252 - DNA, 19 bp, Homo sapiens
  siRNA target sequence for FGFR2 (NM_000141.2,2345-2363).
gagtactcctatgacatta

SEQ ID NO: 82253 - DNA, 19 bp, Homo sapiens
  siRNA target sequence for FGFR2 (NM_000141.2,2533-2551).
cgccagagatatcaacaat

SEQ ID NO: 82254 - DNA, 19 bp, Homo sapiens
  siRNA target sequence for FGFR2 (NM_000141.2,2534-2552).
gccagagatatcaacaata

SEQ ID NO: 82255 - DNA, 19 bp, Homo sapiens
  siRNA target sequence for FGFR2 (NM_000141.2,2606-2624).
ccagaagccctgtttgata

SEQ ID NO: 82256 - DNA, 19 bp, Homo sapiens
  siRNA target sequence for FGFR2 (NM_000141.2,2612-2630).
gccctgtttgatagagtat

SEQ ID NO: 82257 - DNA, 19 bp, Homo sapiens
  siRNA target sequence for FGFR2 (NM_000141.2,2613-2631).
ccctgtttgatagagtata

SEQ ID NO: 82258 - DNA, 19 bp, Homo sapiens
  siRNA target sequence for FGFR2 (NM_000141.2,2615-2633).
ctgtttgatagagtataca

SEQ ID NO: 82259 - DNA, 19 bp, Homo sapiens
  siRNA target sequence for FGFR2 (NM_000141.2,2617-2635).
gtttgatagagtatacact

SEQ ID NO: 82260 - DNA, 19 bp, Homo sapiens
  siRNA target sequence for FGFR2 (NM_000141.2,2858-2876).
gacttggatcgaattctca

SEQ ID NO: 82261 - DNA, 19 bp, Homo sapiens
  siRNA target sequence for FGFR2 (NM_000141.2,2910-2928).
gccaacctctcgaacagta

SEQ ID NO: 82262 - DNA, 19 bp, Homo sapiens
  siRNA target sequence for FGFR2 (NM_000141.2,2911-2929).
ccaacctctcgaacagtat

SEQ ID NO: 82263 - DNA, 19 bp, Homo sapiens
  siRNA target sequence for FGFR2 (NM_000141.2,2941-2959).
ccctgacacaagaagttct

SEQ ID NO: 82264 - DNA, 19 bp, Homo sapiens
  siRNA target sequence for FGFR2 (NM_000141.2,2945-2963).
gacacaagaagttcttgtt

SEQ ID NO: 82265 - DNA, 19 bp, Homo sapiens
  siRNA target sequence for FGFR2 (NM_000141.2,3020-3038).
cctcagtatccacacataa

SEQ ID NO: 82266 - DNA, 19 bp, Homo sapiens
  siRNA target sequence for FGFR2 (NM_000141.2,3032-3050).
cacataaacggcagtgtta

SEQ ID NO: 82267 - DNA, 19 bp, Homo sapiens
  siRNA target sequence for FGFR2 (NM_000141.2,3034-3052).
cataaacggcagtgttaaa

SEQ ID NO: 82268 - DNA, 19 bp, Homo sapiens
  siRNA target sequence for FGFR2 (NM_022969.1,1528-1546).
caagcactcggggataaat

SEQ ID NO: 82269 - DNA, 19 bp, Homo sapiens
  siRNA target sequence for FGFR2 (NM_022969.1,1531-1549).
gcactcggggataaatagt

SEQ ID NO: 82270 - DNA, 19 bp, Homo sapiens
  siRNA target sequence for FGFR2 (NM_022969.1,1532-1550).
cactcggggataaatagtt

SEQ ID NO: 82271 - DNA, 19 bp, Homo sapiens
  siRNA target sequence for FGFR2 (NM_022969.1,1537-1555).
ggggataaatagttccaat

SEQ ID NO: 82272 - DNA, 19 bp, Homo sapiens
  siRNA target sequence for FGFR2 (NM_022969.1,1565-1583).
ctggctctgttcaatgtga

SEQ ID NO: 82273 - DNA, 19 bp, Homo sapiens
  siRNA target sequence for FGFR2 (NM_022969.1,1590-1608).
cggatgctggggaatatat

SEQ ID NO: 82274 - DNA, 19 bp, Homo sapiens
  siRNA target sequence for FGFR2 (NM_022969.1,1595-1613).
gctggggaatatatatgta

SEQ ID NO: 82275 - DNA, 19 bp, Homo sapiens
  siRNA target sequence for FGFR2 (NM_022969.1,1611-1629).
gtaaggtctccaattatat

SEQ ID NO: 82276 - DNA, 19 bp, Homo sapiens
  siRNA target sequence for FGFR3 (NM_000142.2,506-524).
ccgagcggatggacaagaa

SEQ ID NO: 82277 - DNA, 19 bp, Homo sapiens
  siRNA target sequence for FGFR3 (NM_000142.2,940-958).
gacggcacaccctacgtta

SEQ ID NO: 82278 - DNA, 19 bp, Homo sapiens
  siRNA target sequence for FGFR3 (NM_000142.2,1264-1282).
cccaccgtgcacaagatct

SEQ ID NO: 82279 - DNA, 19 bp, Homo sapiens
  siRNA target sequence for FGFR3 (NM_000142.2,1966-1984).
cacaacctcgactactaca

SEQ ID NO: 82280 - DNA, 19 bp, Homo sapiens
  siRNA target sequence for FGFR3 (NM_000142.2,2195-2213).
gcacacacgacctgtacat

SEQ ID NO: 82281 - DNA, 19 bp, Homo sapiens
  siRNA target sequence for FGFR3 (NM_000142.2,2200-2218).
cacgacctgtacatgatca

SEQ ID NO: 82282 - DNA, 19 bp, Homo sapiens
  siRNA target sequence for FGFR4 (NM_002011.2,489-507).
gaatctcaccttgattaca

SEQ ID NO: 82283 - DNA, 19 bp, Homo sapiens
  siRNA target sequence for FGFR4 (NM_002011.2,647-665).
cggggaacaccgtcaagtt

SEQ ID NO: 82284 - DNA, 19 bp, Homo sapiens
  siRNA target sequence for FGFR4 (NM_002011.2,1055-1073).
cctatgtgcaagtcctaaa

SEQ ID NO: 82285 - DNA, 19 bp, Homo sapiens
  siRNA target sequence for FGFR4 (NM_002011.2,1250-1268).
ccaggtatacggacatcat

SEQ ID NO: 82286 - DNA, 19 bp, Homo sapiens
  siRNA target sequence for FGFR4 (NM_002011.2,1499-1517).
gcctcgtgagtctagatct

SEQ ID NO: 82287 - DNA, 19 bp, Homo sapiens
  siRNA target sequence for FGFR4 (NM_002011.2,1500-1518).
cctcgtgagtctagatcta

SEQ ID NO: 82288 - DNA, 19 bp, Homo sapiens
  siRNA target sequence for FGFR4 (NM_002011.2,1963-1981).
ctggagtcccggaagtgta

SEQ ID NO: 82289 - DNA, 19 bp, Homo sapiens
  siRNA target sequence for FGFR4 (NM_002011.2,2063-2081).
gcgtccaccacattgacta

SEQ ID NO: 82290 - DNA, 19 bp, Homo sapiens
  siRNA target sequence for FGFR4 (NM_002011.2,2480-2498).
gctcctccagcgattctgt

SEQ ID NO: 82291 - DNA, 19 bp, Homo sapiens
  siRNA target sequence for FGR (NM_005248.1,549-567).
ccctgttgactcaatccaa

SEQ ID NO: 82292 - DNA, 19 bp, Homo sapiens
  siRNA target sequence for FGR (NM_005248.1,721-739).
ggcgatcatgtgaagcatt

SEQ ID NO: 82293 - DNA, 19 bp, Homo sapiens
  siRNA target sequence for FGR (NM_005248.1,722-740).
gcgatcatgtgaagcatta

SEQ ID NO: 82294 - DNA, 19 bp, Homo sapiens
  siRNA target sequence for FGR (NM_005248.1,724-742).
gatcatgtgaagcattaca

SEQ ID NO: 82295 - DNA, 19 bp, Homo sapiens
  siRNA target sequence for FGR (NM_005248.1,779-797).
ccacacgggttcagttcaa

SEQ ID NO: 82296 - DNA, 19 bp, Homo sapiens
  siRNA target sequence for FGR (NM_005248.1,1164-1182).
cggcagcttgctggatttt

SEQ ID NO: 82297 - DNA, 19 bp, Homo sapiens
  siRNA target sequence for FGR (NM_005248.1,1266-1284).
ggaacgcatgaactacatt

SEQ ID NO: 82298 - DNA, 19 bp, Homo sapiens
  siRNA target sequence for FGR (NM_005248.1,1521-1539).
ctacccaggcatgaataaa

SEQ ID NO: 82299 - DNA, 19 bp, Homo sapiens
  siRNA target sequence for FIGN (NM_018086.1,232-250).
gtctctgcgagtataggaa

SEQ ID NO: 82300 - DNA, 19 bp, Homo sapiens
  siRNA target sequence for FIGN (NM_018086.1,273-291).
cctgacagaacctagttat

SEQ ID NO: 82301 - DNA, 19 bp, Homo sapiens
  siRNA target sequence for FIGN (NM_018086.1,274-292).
ctgacagaacctagttatt

SEQ ID NO: 82302 - DNA, 19 bp, Homo sapiens
  siRNA target sequence for FIGN (NM_018086.1,276-294).
gacagaacctagttattca

SEQ ID NO: 82303 - DNA, 19 bp, Homo sapiens
  siRNA target sequence for FIGN (NM_018086.1,280-298).
gaacctagttattcaagta

SEQ ID NO: 82304 - DNA, 19 bp, Homo sapiens
  siRNA target sequence for FIGN (NM_018086.1,338-356).
ggctcccatctcaggaata

SEQ ID NO: 82305 - DNA, 19 bp, Homo sapiens
  siRNA target sequence for FIGN (NM_018086.1,339-357).
gctcccatctcaggaatat

SEQ ID NO: 82306 - DNA, 19 bp, Homo sapiens
  siRNA target sequence for FIGN (NM_018086.1,362-380).
caggatacaacggatcata

SEQ ID NO: 82307 - DNA, 19 bp, Homo sapiens
  siRNA target sequence for FIGN (NM_018086.1,364-382).
ggatacaacggatcatatt

SEQ ID NO: 82308 - DNA, 19 bp, Homo sapiens
  siRNA target sequence for FIGN (NM_018086.1,365-383).
gatacaacggatcatattt

SEQ ID NO: 82309 - DNA, 19 bp, Homo sapiens
  siRNA target sequence for FIGN (NM_018086.1,369-387).
caacggatcatatttgcat

SEQ ID NO: 82310 - DNA, 19 bp, Homo sapiens
  siRNA target sequence for FIGN (NM_018086.1,540-558).
ctatccgtctgctagctat

SEQ ID NO: 82311 - DNA, 19 bp, Homo sapiens
  siRNA target sequence for FIGN (NM_018086.1,683-701).
cctaccagggccatggttt

SEQ ID NO: 82312 - DNA, 19 bp, Homo sapiens
  siRNA target sequence for FIGN (NM_018086.1,693-711).
ccatggtttgacacctatt

SEQ ID NO: 82313 - DNA, 19 bp, Homo sapiens
  siRNA target sequence for FIGN (NM_018086.1,713-731).
caccgtcggctctgacaaa

SEQ ID NO: 82314 - DNA, 19 bp, Homo sapiens
  siRNA target sequence for FIGN (NM_018086.1,715-733).
ccgtcggctctgacaaaca

SEQ ID NO: 82315 - DNA, 19 bp, Homo sapiens
  siRNA target sequence for FIGN (NM_018086.1,790-808).
gactccagttatggaaatt

SEQ ID NO: 82316 - DNA, 19 bp, Homo sapiens
  siRNA target sequence for FIGN (NM_018086.1,855-873).
gcccgacaacagcatttca

SEQ ID NO: 82317 - DNA, 19 bp, Homo sapiens
  siRNA target sequence for FIGN (NM_018086.1,883-901).
cgggggaatggctttgaca

SEQ ID NO: 82318 - DNA, 19 bp, Homo sapiens
  siRNA target sequence for FIGN (NM_018086.1,934-952).
ccaacgaagcagctaatgt

SEQ ID NO: 82319 - DNA, 19 bp, Homo sapiens
  siRNA target sequence for FIGN (NM_018086.1,1011-1029).
ctacagtactgctaaaaat

SEQ ID NO: 82320 - DNA, 19 bp, Homo sapiens
  siRNA target sequence for FIGN (NM_018086.1,1036-1054).
ggatcaagatccagtgaat

SEQ ID NO: 82321 - DNA, 19 bp, Homo sapiens
  siRNA target sequence for FIGN (NM_018086.1,1051-1069).
gaatcctttgggaagtaca

SEQ ID NO: 82322 - DNA, 19 bp, Homo sapiens
  siRNA target sequence for FIGN (NM_018086.1,1068-1086).
cacatcgccagtaatgagt

SEQ ID NO: 82323 - DNA, 19 bp, Homo sapiens
  siRNA target sequence for FIGN (NM_018086.1,1173-1191).
ggacgagcaactgaagaat

SEQ ID NO: 82324 - DNA, 19 bp, Homo sapiens
  siRNA target sequence for FIGN (NM_018086.1,1213-1231).
ctggtaaccaatgagatta

SEQ ID NO: 82325 - DNA, 19 bp, Homo sapiens
  siRNA target sequence for FIGN (NM_018086.1,1216-1234).
gtaaccaatgagattatca

SEQ ID NO: 82326 - DNA, 19 bp, Homo sapiens
  siRNA target sequence for FIGN (NM_018086.1,1279-1297).
ctggtgaaggctgtcatta

SEQ ID NO: 82327 - DNA, 19 bp, Homo sapiens
  siRNA target sequence for FIGN (NM_018086.1,1281-1299).
ggtgaaggctgtcattaaa

SEQ ID NO: 82328 - DNA, 19 bp, Homo sapiens
  siRNA target sequence for FIGN (NM_018086.1,1357-1375).
cctcggagcatccttttat

SEQ ID NO: 82329 - DNA, 19 bp, Homo sapiens
  siRNA target sequence for FIGN (NM_018086.1,1384-1402).
cgggggacaggcaaaacat

SEQ ID NO: 82330 - DNA, 19 bp, Homo sapiens
  siRNA target sequence for FIGN (NM_018086.1,1387-1405).
gggacaggcaaaacattat

SEQ ID NO: 82331 - DNA, 19 bp, Homo sapiens
  siRNA target sequence for FIGN (NM_018086.1,1531-1549).
cgccagccctcggtgattt

SEQ ID NO: 82332 - DNA, 19 bp, Homo sapiens
  siRNA target sequence for FIGN (NM_018086.1,1536-1554).
gccctcggtgatttttgtt

SEQ ID NO: 82333 - DNA, 19 bp, Homo sapiens
  siRNA target sequence for FIGN (NM_018086.1,1537-1555).
ccctcggtgatttttgtta

SEQ ID NO: 82334 - DNA, 19 bp, Homo sapiens
  siRNA target sequence for FIGN (NM_018086.1,1603-1621).
ccagtcagtcggatgagaa

SEQ ID NO: 82335 - DNA, 19 bp, Homo sapiens
  siRNA target sequence for FIGN (NM_018086.1,1613-1631).
ggatgagaaccgaatttct

SEQ ID NO: 82336 - DNA, 19 bp, Homo sapiens
  siRNA target sequence for FIGN (NM_018086.1,1635-1653).
gcaactggacactgtacta

SEQ ID NO: 82337 - DNA, 19 bp, Homo sapiens
  siRNA target sequence for FIGN (NM_018086.1,1636-1654).
caactggacactgtactaa

SEQ ID NO: 82338 - DNA, 19 bp, Homo sapiens
  siRNA target sequence for FIGN (NM_018086.1,1655-1673).
cttcggctgaggaccaaat

SEQ ID NO: 82339 - DNA, 19 bp, Homo sapiens
  siRNA target sequence for FIGN (NM_018086.1,1658-1676).
cggctgaggaccaaatcgt

SEQ ID NO: 82340 - DNA, 19 bp, Homo sapiens
  siRNA target sequence for FIGN (NM_018086.1,1659-1677).
ggctgaggaccaaatcgta

SEQ ID NO: 82341 - DNA, 19 bp, Homo sapiens
  siRNA target sequence for FIGN (NM_018086.1,1663-1681).
gaggaccaaatcgtagtaa

SEQ ID NO: 82342 - DNA, 19 bp, Homo sapiens
  siRNA target sequence for FIGN (NM_018086.1,1665-1683).
ggaccaaatcgtagtaatt

SEQ ID NO: 82343 - DNA, 19 bp, Homo sapiens
  siRNA target sequence for FIGN (NM_018086.1,1666-1684).
gaccaaatcgtagtaattt

SEQ ID NO: 82344 - DNA, 19 bp, Homo sapiens
  siRNA target sequence for FIGN (NM_018086.1,1668-1686).
ccaaatcgtagtaatttgt

SEQ ID NO: 82345 - DNA, 19 bp, Homo sapiens
  siRNA target sequence for FIGN (NM_018086.1,1689-1707).
caccagtaaaccagaagaa

SEQ ID NO: 82346 - DNA, 19 bp, Homo sapiens
  siRNA target sequence for FIGN (NM_018086.1,1718-1736).
cccttcggaggtacttcat

SEQ ID NO: 82347 - DNA, 19 bp, Homo sapiens
  siRNA target sequence for FIGN (NM_018086.1,1731-1749).
cttcatgaaacgactttta

SEQ ID NO: 82348 - DNA, 19 bp, Homo sapiens
  siRNA target sequence for FIGN (NM_018086.1,1769-1787).
cagcgaggcaccagataat

SEQ ID NO: 82349 - DNA, 19 bp, Homo sapiens
  siRNA target sequence for FIGN (NM_018086.1,1772-1790).
cgaggcaccagataatagt

SEQ ID NO: 82350 - DNA, 19 bp, Homo sapiens
  siRNA target sequence for FIGN (NM_018086.1,1773-1791).
gaggcaccagataatagta

SEQ ID NO: 82351 - DNA, 19 bp, Homo sapiens
  siRNA target sequence for FIGN (NM_018086.1,1775-1793).
ggcaccagataatagtaca

SEQ ID NO: 82352 - DNA, 19 bp, Homo sapiens
  siRNA target sequence for FIGN (NM_018086.1,1776-1794).
gcaccagataatagtacaa

SEQ ID NO: 82353 - DNA, 19 bp, Homo sapiens
  siRNA target sequence for FIGN (NM_018086.1,1795-1813).
ctgctctcacagcacaatt

SEQ ID NO: 82354 - DNA, 19 bp, Homo sapiens
  siRNA target sequence for FIGN (NM_018086.1,1871-1889).
gactagatgtggctcattt

SEQ ID NO: 82355 - DNA, 19 bp, Homo sapiens
  siRNA target sequence for FIGN (NM_018086.1,1873-1891).
ctagatgtggctcatttgt

SEQ ID NO: 82356 - DNA, 19 bp, Homo sapiens
  siRNA target sequence for FIGN (NM_018086.1,1934-1952).
cagacctttcagccattat

SEQ ID NO: 82357 - DNA, 19 bp, Homo sapiens
  siRNA target sequence for FIGN (NM_018086.1,1960-1978).
cagttgaggcccgttacat

SEQ ID NO: 82358 - DNA, 19 bp, Homo sapiens
  siRNA target sequence for FIGN (NM_018086.1,1965-1983).
gaggcccgttacatatcaa

SEQ ID NO: 82359 - DNA, 19 bp, Homo sapiens
  siRNA target sequence for FIGN (NM_018086.1,1967-1985).
ggcccgttacatatcaaga

SEQ ID NO: 82360 - DNA, 19 bp, Homo sapiens
  siRNA target sequence for FIGN (NM_018086.1,1970-1988).
ccgttacatatcaagactt

SEQ ID NO: 82361 - DNA, 19 bp, Homo sapiens
  siRNA target sequence for FIGN (NM_018086.1,1971-1989).
cgttacatatcaagacttt

SEQ ID NO: 82362 - DNA, 19 bp, Homo sapiens
  siRNA target sequence for FIGN (NM_018086.1,2004-2022).
caagattcagcctagcata

SEQ ID NO: 82363 - DNA, 19 bp, Homo sapiens
  siRNA target sequence for FIGN (NM_018086.1,2011-2029).
cagcctagcatatctcaaa

SEQ ID NO: 82364 - DNA, 19 bp, Homo sapiens
  siRNA target sequence for FIGN (NM_018086.1,2024-2042).
ctcaaaaggagcttgatat

SEQ ID NO: 82365 - DNA, 19 bp, Homo sapiens
  siRNA target sequence for FIGNL1 (NM_022116.2,336-354).
gacctccagctctagatct

SEQ ID NO: 82366 - DNA, 19 bp, Homo sapiens
  siRNA target sequence for FIGNL1 (NM_022116.2,378-396).
gaattacttcgcaattaca

SEQ ID NO: 82367 - DNA, 19 bp, Homo sapiens
  siRNA target sequence for FIGNL1 (NM_022116.2,413-431).
gaccgaaggcagatgcata

SEQ ID NO: 82368 - DNA, 19 bp, Homo sapiens
  siRNA target sequence for FIGNL1 (NM_022116.2,427-445).
gcataccgtgcacagatat

SEQ ID NO: 82369 - DNA, 19 bp, Homo sapiens
  siRNA target sequence for FIGNL1 (NM_022116.2,439-457).
cagatattacgcattcagt

SEQ ID NO: 82370 - DNA, 19 bp, Homo sapiens
  siRNA target sequence for FIGNL1 (NM_022116.2,627-645).
gtggcagtctggattgtca

SEQ ID NO: 82371 - DNA, 19 bp, Homo sapiens
  siRNA target sequence for FIGNL1 (NM_022116.2,629-647).
ggcagtctggattgtcaat

SEQ ID NO: 82372 - DNA, 19 bp, Homo sapiens
  siRNA target sequence for FIGNL1 (NM_022116.2,734-752).
catcagtggtaatccataa

SEQ ID NO: 82373 - DNA, 19 bp, Homo sapiens
  siRNA target sequence for FIGNL1 (NM_022116.2,756-774).
ggccactgtctttgatctt

SEQ ID NO: 82374 - DNA, 19 bp, Homo sapiens
  siRNA target sequence for FIGNL1 (NM_022116.2,763-781).
gtctttgatcttcctaaat

SEQ ID NO: 82375 - DNA, 19 bp, Homo sapiens
  siRNA target sequence for FIGNL1 (NM_022116.2,800-818).
ctcaagagagtgactcatt

SEQ ID NO: 82376 - DNA, 19 bp, Homo sapiens
  siRNA target sequence for FIGNL1 (NM_022116.2,805-823).
gagagtgactcattaccta

SEQ ID NO: 82377 - DNA, 19 bp, Homo sapiens
  siRNA target sequence for FIGNL1 (NM_022116.2,860-878).
cggagagcaatcgtttgaa

SEQ ID NO: 82378 - DNA, 19 bp, Homo sapiens
  siRNA target sequence for FIGNL1 (NM_022116.2,861-879).
ggagagcaatcgtttgaaa

SEQ ID NO: 82379 - DNA, 19 bp, Homo sapiens
  siRNA target sequence for FIGNL1 (NM_022116.2,898-916).
ccacctatggtgactaaca

SEQ ID NO: 82380 - DNA, 19 bp, Homo sapiens
  siRNA target sequence for FIGNL1 (NM_022116.2,924-942).
gacttgtcctacattctca

SEQ ID NO: 82381 - DNA, 19 bp, Homo sapiens
  siRNA target sequence for FIGNL1 (NM_022116.2,955-973).
gagtcagctactgcaaaat

SEQ ID NO: 82382 - DNA, 19 bp, Homo sapiens
  siRNA target sequence for FIGNL1 (NM_022116.2,979-997).
gtcacaccattgtttggaa

SEQ ID NO: 82383 - DNA, 19 bp, Homo sapiens
  siRNA target sequence for FIGNL1 (NM_022116.2,981-999).
cacaccattgtttggaaat

SEQ ID NO: 82384 - DNA, 19 bp, Homo sapiens
  siRNA target sequence for FIGNL1 (NM_022116.2,983-1001).
caccattgtttggaaatgt

SEQ ID NO: 82385 - DNA, 19 bp, Homo sapiens
  siRNA target sequence for FIGNL1 (NM_022116.2,1125-1143).
cattgatgcactttccaat

SEQ ID NO: 82386 - DNA, 19 bp, Homo sapiens
  siRNA target sequence for FIGNL1 (NM_022116.2,1129-1147).
gatgcactttccaatccaa

SEQ ID NO: 82387 - DNA, 19 bp, Homo sapiens
  siRNA target sequence for FIGNL1 (NM_022116.2,1139-1157).
ccaatccaatactgaataa

SEQ ID NO: 82388 - DNA, 19 bp, Homo sapiens
  siRNA target sequence for FIGNL1 (NM_022116.2,1150-1168).
ctgaataaggcttgtagta

SEQ ID NO: 82389 - DNA, 19 bp, Homo sapiens
  siRNA target sequence for FIGNL1 (NM_022116.2,1199-1217).
gcagcctgcctacatttaa

SEQ ID NO: 82390 - DNA, 19 bp, Homo sapiens
  siRNA target sequence for FIGNL1 (NM_022116.2,1274-1292).
gtgcatcagggtcttcata

SEQ ID NO: 82391 - DNA, 19 bp, Homo sapiens
  siRNA target sequence for FIGNL1 (NM_022116.2,1286-1304).
cttcatatggtggtgtaaa

SEQ ID NO: 82392 - DNA, 19 bp, Homo sapiens
  siRNA target sequence for FIGNL1 (NM_022116.2,1308-1326).
gtctctaggagctagtaga

SEQ ID NO: 82393 - DNA, 19 bp, Homo sapiens
  siRNA target sequence for FIGNL1 (NM_022116.2,1383-1401).
gcagaatggaggaatgcaa

SEQ ID NO: 82394 - DNA, 19 bp, Homo sapiens
  siRNA target sequence for FIGNL1 (NM_022116.2,1433-1451).
cagcacatccagttgatga

SEQ ID NO: 82395 - DNA, 19 bp, Homo sapiens
  siRNA target sequence for FIGNL1 (NM_022116.2,1447-1465).
gatgagcgtctgaagaact

SEQ ID NO: 82396 - DNA, 19 bp, Homo sapiens
  siRNA target sequence for FIGNL1 (NM_022116.2,1471-1489).
ccaaagatgattgaactta

SEQ ID NO: 82397 - DNA, 19 bp, Homo sapiens
  siRNA target sequence for FIGNL1 (NM_022116.2,1472-1490).
caaagatgattgaacttat

SEQ ID NO: 82398 - DNA, 19 bp, Homo sapiens
  siRNA target sequence for FIGNL1 (NM_022116.2,1510-1528).
catggacctccagtaaatt

SEQ ID NO: 82399 - DNA, 19 bp, Homo sapiens
  siRNA target sequence for FIGNL1 (NM_022116.2,1562-1580).
ccaccataaaggaaatagt

SEQ ID NO: 82400 - DNA, 19 bp, Homo sapiens
  siRNA target sequence for FIGNL1 (NM_022116.2,1596-1614).
gaggccagacatctttact

SEQ ID NO: 82401 - DNA, 19 bp, Homo sapiens
  siRNA target sequence for FIGNL1 (NM_022116.2,1623-1641).
gggaccccctaaaggaatt

SEQ ID NO: 82402 - DNA, 19 bp, Homo sapiens
  siRNA target sequence for FIGNL1 (NM_022116.2,1624-1642).
ggaccccctaaaggaattt

SEQ ID NO: 82403 - DNA, 19 bp, Homo sapiens
  siRNA target sequence for FIGNL1 (NM_022116.2,1625-1643).
gaccccctaaaggaatttt

SEQ ID NO: 82404 - DNA, 19 bp, Homo sapiens
  siRNA target sequence for FIGNL1 (NM_022116.2,1661-1679).
ggactggtaaaactctaat

SEQ ID NO: 82405 - DNA, 19 bp, Homo sapiens
  siRNA target sequence for FIGNL1 (NM_022116.2,1662-1680).
gactggtaaaactctaatt

SEQ ID NO: 82406 - DNA, 19 bp, Homo sapiens
  siRNA target sequence for FIGNL1 (NM_022116.2,1697-1715).
gtcagtctggggcaacatt

SEQ ID NO: 82407 - DNA, 19 bp, Homo sapiens
  siRNA target sequence for FIGNL1 (NM_022116.2,1699-1717).
cagtctggggcaacattct

SEQ ID NO: 82408 - DNA, 19 bp, Homo sapiens
  siRNA target sequence for FIGNL1 (NM_022116.2,1705-1723).
ggggcaacattctttagca

SEQ ID NO: 82409 - DNA, 19 bp, Homo sapiens
  siRNA target sequence for FIGNL1 (NM_022116.2,1706-1724).
gggcaacattctttagcat

SEQ ID NO: 82410 - DNA, 19 bp, Homo sapiens
  siRNA target sequence for FIGNL1 (NM_022116.2,1757-1775).
gtgagggggagaaaatggt

SEQ ID NO: 82411 - DNA, 19 bp, Homo sapiens
  siRNA target sequence for FIGNL1 (NM_022116.2,1806-1824).
gcaaccagctgtgatattt

SEQ ID NO: 82412 - DNA, 19 bp, Homo sapiens
  siRNA target sequence for FIGNL1 (NM_022116.2,1818-1836).
gatatttattgacgaaatt

SEQ ID NO: 82413 - DNA, 19 bp, Homo sapiens
  siRNA target sequence for FIGNL1 (NM_022116.2,1864-1882).
ggtgagcatgaatcttcta

SEQ ID NO: 82414 - DNA, 19 bp, Homo sapiens
  siRNA target sequence for FIGNL1 (NM_022116.2,1928-1946).
catcttctgaagatcgtat

SEQ ID NO: 82415 - DNA, 19 bp, Homo sapiens
  siRNA target sequence for FIGNL1 (NM_022116.2,2039-2057).
cttcagccaggaaacagat

SEQ ID NO: 82416 - DNA, 19 bp, Homo sapiens
  siRNA target sequence for FIGNL1 (NM_022116.2,2042-2060).
cagccaggaaacagatagt

SEQ ID NO: 82417 - DNA, 19 bp, Homo sapiens
  siRNA target sequence for FIGNL1 (NM_022116.2,2085-2103).
gtgttgcctcagtgaagaa

SEQ ID NO: 82418 - DNA, 19 bp, Homo sapiens
  siRNA target sequence for FIGNL1 (NM_022116.2,2090-2108).
gcctcagtgaagaagaaat

SEQ ID NO: 82419 - DNA, 19 bp, Homo sapiens
  siRNA target sequence for FIGNL1 (NM_022116.2,2124-2142).
gcagtctgatgcgttttca

SEQ ID NO: 82420 - DNA, 19 bp, Homo sapiens
  siRNA target sequence for FIGNL1 (NM_022116.2,2183-2201).
gtcctattcgcagtttaca

SEQ ID NO: 82421 - DNA, 19 bp, Homo sapiens
  siRNA target sequence for FIGNL1 (NM_022116.2,2206-2224).
gctgacattgctaccataa

SEQ ID NO: 82422 - DNA, 19 bp, Homo sapiens
  siRNA target sequence for FIGNL1 (NM_022116.2,2219-2237).
ccataacaccggatcaagt

SEQ ID NO: 82423 - DNA, 19 bp, Homo sapiens
  siRNA target sequence for FIGNL1 (NM_022116.2,2220-2238).
cataacaccggatcaagtt

SEQ ID NO: 82424 - DNA, 19 bp, Homo sapiens
  siRNA target sequence for FIGNL1 (NM_022116.2,2233-2251).
caagttcgacccatagctt

SEQ ID NO: 82425 - DNA, 19 bp, Homo sapiens
  siRNA target sequence for FIGNL1 (NM_022116.2,2240-2258).
gacccatagcttacattga

SEQ ID NO: 82426 - DNA, 19 bp, Homo sapiens
  siRNA target sequence for FIGNL1 (NM_022116.2,2244-2262).
catagcttacattgatttt

SEQ ID NO: 82427 - DNA, 19 bp, Homo sapiens
  siRNA target sequence for FLJ10074 (NM_017988.2,55-73).
cgctttgataccaagaatt

SEQ ID NO: 82428 - DNA, 19 bp, Homo sapiens
  siRNA target sequence for FLJ10074 (NM_017988.2,61-79).
gataccaagaattaaaaat

SEQ ID NO: 82429 - DNA, 19 bp, Homo sapiens
  siRNA target sequence for FLJ10074 (NM_017988.2,99-117).
cccttgcggttcgtgtaaa

SEQ ID NO: 82430 - DNA, 19 bp, Homo sapiens
  siRNA target sequence for FLJ10074 (NM_017988.2,100-118).
ccttgcggttcgtgtaaat

SEQ ID NO: 82431 - DNA, 19 bp, Homo sapiens
  siRNA target sequence for FLJ10074 (NM_017988.2,101-119).
cttgcggttcgtgtaaatt

SEQ ID NO: 82432 - DNA, 19 bp, Homo sapiens
  siRNA target sequence for FLJ10074 (NM_017988.2,104-122).
gcggttcgtgtaaattcat

SEQ ID NO: 82433 - DNA, 19 bp, Homo sapiens
  siRNA target sequence for FLJ10074 (NM_017988.2,105-123).
cggttcgtgtaaattcatt

SEQ ID NO: 82434 - DNA, 19 bp, Homo sapiens
  siRNA target sequence for FLJ10074 (NM_017988.2,106-124).
ggttcgtgtaaattcatta

SEQ ID NO: 82435 - DNA, 19 bp, Homo sapiens
  siRNA target sequence for FLJ10074 (NM_017988.2,129-147).
gcttaggaaagattttgga

SEQ ID NO: 82436 - DNA, 19 bp, Homo sapiens
  siRNA target sequence for FLJ10074 (NM_017988.2,135-153).
gaaagattttggaatactt

SEQ ID NO: 82437 - DNA, 19 bp, Homo sapiens
  siRNA target sequence for FLJ10074 (NM_017988.2,181-199).
cctacccttcttacaacaa

SEQ ID NO: 82438 - DNA, 19 bp, Homo sapiens
  siRNA target sequence for FLJ10074 (NM_017988.2,182-200).
ctacccttcttacaacaaa

SEQ ID NO: 82439 - DNA, 19 bp, Homo sapiens
  siRNA target sequence for FLJ10074 (NM_017988.2,219-237).
cggtcctcatgggaatttt

SEQ ID NO: 82440 - DNA, 19 bp, Homo sapiens
  siRNA target sequence for FLJ10074 (NM_017988.2,220-238).
ggtcctcatgggaatttta

SEQ ID NO: 82441 - DNA, 19 bp, Homo sapiens
  siRNA target sequence for FLJ10074 (NM_017988.2,224-242).
ctcatgggaattttaggta

SEQ ID NO: 82442 - DNA, 19 bp, Homo sapiens
  siRNA target sequence for FLJ10074 (NM_017988.2,239-257).
ggtatttacaaatgtactt

SEQ ID NO: 82443 - DNA, 19 bp, Homo sapiens
  siRNA target sequence for FLJ10074 (NM_017988.2,325-343).
cctgagtattgaaaacaat

SEQ ID NO: 82444 - DNA, 19 bp, Homo sapiens
  siRNA target sequence for FLJ10074 (NM_017988.2,335-353).
gaaaacaatcttaatctta

SEQ ID NO: 82445 - DNA, 19 bp, Homo sapiens
  siRNA target sequence for FLJ10074 (NM_017988.2,375-393).
ccgtcataaaagaaatgct

SEQ ID NO: 82446 - DNA, 19 bp, Homo sapiens
  siRNA target sequence for FLJ10074 (NM_017988.2,399-417).
gattggagtctgaacataa

SEQ ID NO: 82447 - DNA, 19 bp, Homo sapiens
  siRNA target sequence for FLJ10074 (NM_017988.2,404-422).
gagtctgaacataagacta

SEQ ID NO: 82448 - DNA, 19 bp, Homo sapiens
  siRNA target sequence for FLJ10074 (NM_017988.2,408-426).
ctgaacataagactaaact

SEQ ID NO: 82449 - DNA, 19 bp, Homo sapiens
  siRNA target sequence for FLJ10074 (NM_017988.2,425-443).
ctggagcaacttcatataa

SEQ ID NO: 82450 - DNA, 19 bp, Homo sapiens
  siRNA target sequence for FLJ10074 (NM_017988.2,467-485).
gatataggaaatcaaatga

SEQ ID NO: 82451 - DNA, 19 bp, Homo sapiens
  siRNA target sequence for FLJ10074 (NM_017988.2,519-537).
ggaatcagcaaattgacaa

SEQ ID NO: 82452 - DNA, 19 bp, Homo sapiens
  siRNA target sequence for FLJ10074 (NM_017988.2,572-590).
ggcagtgagtccgaaaata

SEQ ID NO: 82453 - DNA, 19 bp, Homo sapiens
  siRNA target sequence for FLJ10074 (NM_017988.2,595-613).
ggacgggttacagaataaa

SEQ ID NO: 82454 - DNA, 19 bp, Homo sapiens
  siRNA target sequence for FLJ10074 (NM_017988.2,598-616).
cgggttacagaataaacat

SEQ ID NO: 82455 - DNA, 19 bp, Homo sapiens
  siRNA target sequence for FLJ10074 (NM_017988.2,853-871).
gggcattggtatgatgttt

SEQ ID NO: 82456 - DNA, 19 bp, Homo sapiens
  siRNA target sequence for FLJ10074 (NM_017988.2,876-894).
caccaactgataatacaaa

SEQ ID NO: 82457 - DNA, 19 bp, Homo sapiens
  siRNA target sequence for FLJ10074 (NM_017988.2,949-967).
caacatgcccgttaataca

SEQ ID NO: 82458 - DNA, 19 bp, Homo sapiens
  siRNA target sequence for FLJ10074 (NM_017988.2,1029-1047).
ctcccactttgccaaactt

SEQ ID NO: 82459 - DNA, 19 bp, Homo sapiens
  siRNA target sequence for FLJ10074 (NM_017988.2,1076-1094).
gcaaagcagacccaacaaa

SEQ ID NO: 82460 - DNA, 19 bp, Homo sapiens
  siRNA target sequence for FLJ10074 (NM_017988.2,1132-1150).
ccctcagaaacccaaagtt

SEQ ID NO: 82461 - DNA, 19 bp, Homo sapiens
  siRNA target sequence for FLJ10074 (NM_017988.2,1148-1166).
gttagcatgaaccagttat

SEQ ID NO: 82462 - DNA, 19 bp, Homo sapiens
  siRNA target sequence for FLJ10074 (NM_017988.2,1179-1197).
caaatcagtggcttaatca

SEQ ID NO: 82463 - DNA, 19 bp, Homo sapiens
  siRNA target sequence for FLJ10074 (NM_017988.2,1209-1227).
ctcaaggttctccaactat

SEQ ID NO: 82464 - DNA, 19 bp, Homo sapiens
  siRNA target sequence for FLJ10074 (NM_017988.2,1224-1242).
ctatgggcagttcagtaat

SEQ ID NO: 82465 - DNA, 19 bp, Homo sapiens
  siRNA target sequence for FLJ10074 (NM_017988.2,1255-1273).
gaacgtgataggacaatct

SEQ ID NO: 82466 - DNA, 19 bp, Homo sapiens
  siRNA target sequence for FLJ10074 (NM_017988.2,1261-1279).
gataggacaatctgctttt

SEQ ID NO: 82467 - DNA, 19 bp, Homo sapiens
  siRNA target sequence for FLJ10074 (NM_017988.2,1280-1298).
ggtatgcagggtaatcctt

SEQ ID NO: 82468 - DNA, 19 bp, Homo sapiens
  siRNA target sequence for FLJ10074 (NM_017988.2,1281-1299).
gtatgcagggtaatccttt

SEQ ID NO: 82469 - DNA, 19 bp, Homo sapiens
  siRNA target sequence for FLJ10074 (NM_017988.2,1286-1304).
cagggtaatcctttcttta

SEQ ID NO: 82470 - DNA, 19 bp, Homo sapiens
  siRNA target sequence for FLJ10074 (NM_017988.2,1320-1338).
cacagccaccaactactat

SEQ ID NO: 82471 - DNA, 19 bp, Homo sapiens
  siRNA target sequence for FLJ10074 (NM_017988.2,1328-1346).
ccaactactatgaccaata

SEQ ID NO: 82472 - DNA, 19 bp, Homo sapiens
  siRNA target sequence for FLJ10074 (NM_017988.2,1348-1366).
cagttcagctagcaatgat

SEQ ID NO: 82473 - DNA, 19 bp, Homo sapiens
  siRNA target sequence for FLJ10074 (NM_017988.2,1350-1368).
gttcagctagcaatgattt

SEQ ID NO: 82474 - DNA, 19 bp, Homo sapiens
  siRNA target sequence for FLJ10326 (NM_018060.2,157-175).
cagaattttgccttcatga

SEQ ID NO: 82475 - DNA, 19 bp, Homo sapiens
  siRNA target sequence for FLJ10326 (NM_018060.2,202-220).
ctcatgttggacatgcttt

SEQ ID NO: 82476 - DNA, 19 bp, Homo sapiens
  siRNA target sequence for FLJ10326 (NM_018060.2,210-228).
ggacatgctttaaataaga

SEQ ID NO: 82477 - DNA, 19 bp, Homo sapiens
  siRNA target sequence for FLJ10326 (NM_018060.2,239-257).
catagccaatcgattccat

SEQ ID NO: 82478 - DNA, 19 bp, Homo sapiens
  siRNA target sequence for FLJ10326 (NM_018060.2,243-261).
gccaatcgattccatatga

SEQ ID NO: 82479 - DNA, 19 bp, Homo sapiens
  siRNA target sequence for FLJ10326 (NM_018060.2,244-262).
ccaatcgattccatatgat

SEQ ID NO: 82480 - DNA, 19 bp, Homo sapiens
  siRNA target sequence for FLJ10326 (NM_018060.2,268-286).
gctccaaaatacattttgt

SEQ ID NO: 82481 - DNA, 19 bp, Homo sapiens
  siRNA target sequence for FLJ10326 (NM_018060.2,383-401).
gaaagctagatcatttgct

SEQ ID NO: 82482 - DNA, 19 bp, Homo sapiens
  siRNA target sequence for FLJ10326 (NM_018060.2,405-423).
gcagccattgagaaacaga

SEQ ID NO: 82483 - DNA, 19 bp, Homo sapiens
  siRNA target sequence for FLJ10326 (NM_018060.2,445-463).
gaataatggcagattggaa

SEQ ID NO: 82484 - DNA, 19 bp, Homo sapiens
  siRNA target sequence for FLJ10326 (NM_018060.2,498-516).
gccaaacagttgagaactt

SEQ ID NO: 82485 - DNA, 19 bp, Homo sapiens
  siRNA target sequence for FLJ10326 (NM_018060.2,499-517).
ccaaacagttgagaacttt

SEQ ID NO: 82486 - DNA, 19 bp, Homo sapiens
  siRNA target sequence for FLJ10326 (NM_018060.2,538-556).
gcttggtttatcgatctta

SEQ ID NO: 82487 - DNA, 19 bp, Homo sapiens
  siRNA target sequence for FLJ10326 (NM_018060.2,542-560).
ggtttatcgatcttacaaa

SEQ ID NO: 82488 - DNA, 19 bp, Homo sapiens
  siRNA target sequence for FLJ10326 (NM_018060.2,626-644).
gcatgtcagtcgttcaata

SEQ ID NO: 82489 - DNA, 19 bp, Homo sapiens
  siRNA target sequence for FLJ10326 (NM_018060.2,632-650).
cagtcgttcaatatatgta

SEQ ID NO: 82490 - DNA, 19 bp, Homo sapiens
  siRNA target sequence for FLJ10326 (NM_018060.2,634-652).
gtcgttcaatatatgtaaa

SEQ ID NO: 82491 - DNA, 19 bp, Homo sapiens
  siRNA target sequence for FLJ10326 (NM_018060.2,675-693).
ccaaaattggcatctctta

SEQ ID NO: 82492 - DNA, 19 bp, Homo sapiens
  siRNA target sequence for FLJ10326 (NM_018060.2,676-694).
caaaattggcatctcttat

SEQ ID NO: 82493 - DNA, 19 bp, Homo sapiens
  siRNA target sequence for FLJ10326 (NM_018060.2,699-717).
ggttcatctcctgttagta

SEQ ID NO: 82494 - DNA, 19 bp, Homo sapiens
  siRNA target sequence for FLJ10326 (NM_018060.2,703-721).
catctcctgttagtatttt

SEQ ID NO: 82495 - DNA, 19 bp, Homo sapiens
  siRNA target sequence for FLJ10326 (NM_018060.2,743-761).
gacgattccagccaatgaa

SEQ ID NO: 82496 - DNA, 19 bp, Homo sapiens
  siRNA target sequence for FLJ10326 (NM_018060.2,784-802).
caaagtatgctgttgtgaa

SEQ ID NO: 82497 - DNA, 19 bp, Homo sapiens
  siRNA target sequence for FLJ10326 (NM_018060.2,827-845).
cgtactggcggcagataaa

SEQ ID NO: 82498 - DNA, 19 bp, Homo sapiens
  siRNA target sequence for FLJ10326 (NM_018060.2,849-867).
gcatctgttgcttctactt

SEQ ID NO: 82499 - DNA, 19 bp, Homo sapiens
  siRNA target sequence for FLJ10326 (NM_018060.2,850-868).
catctgttgcttctacttt

SEQ ID NO: 82500 - DNA, 19 bp, Homo sapiens
  siRNA target sequence for FLJ10326 (NM_018060.2,858-876).
gcttctactttggaaacaa

SEQ ID NO: 82501 - DNA, 19 bp, Homo sapiens
  siRNA target sequence for FLJ10326 (NM_018060.2,882-900).
gagactatttcaacacttt

SEQ ID NO: 82502 - DNA, 19 bp, Homo sapiens
  siRNA target sequence for FLJ10326 (NM_018060.2,922-940).
gtacttgcagtcatccatt

SEQ ID NO: 82503 - DNA, 19 bp, Homo sapiens
  siRNA target sequence for FLJ10326 (NM_018060.2,929-947).
cagtcatccattaattcct

SEQ ID NO: 82504 - DNA, 19 bp, Homo sapiens
  siRNA target sequence for FLJ10326 (NM_018060.2,1024-1042).
ctcatggtatggaagacta

SEQ ID NO: 82505 - DNA, 19 bp, Homo sapiens
  siRNA target sequence for FLJ10326 (NM_018060.2,1064-1082).
cctgcccatggattgtcta

SEQ ID NO: 82506 - DNA, 19 bp, Homo sapiens
  siRNA target sequence for FLJ10326 (NM_018060.2,1088-1106).
cgaagatggagttttcaca

SEQ ID NO: 82507 - DNA, 19 bp, Homo sapiens
  siRNA target sequence for FLJ10326 (NM_018060.2,1113-1131).
gcaggtcctgaacttcaaa

SEQ ID NO: 82508 - DNA, 19 bp, Homo sapiens
  siRNA target sequence for FLJ10326 (NM_018060.2,1114-1132).
caggtcctgaacttcaaaa

SEQ ID NO: 82509 - DNA, 19 bp, Homo sapiens
  siRNA target sequence for FLJ10326 (NM_018060.2,1116-1134).
ggtcctgaacttcaaaaca

SEQ ID NO: 82510 - DNA, 19 bp, Homo sapiens
  siRNA target sequence for FLJ10326 (NM_018060.2,1175-1193).
gcttcagactgcaaagaat

SEQ ID NO: 82511 - DNA, 19 bp, Homo sapiens
  siRNA target sequence for FLJ10326 (NM_018060.2,1266-1284).
gccagcaagcagtggttta

SEQ ID NO: 82512 - DNA, 19 bp, Homo sapiens
  siRNA target sequence for FLJ10326 (NM_018060.2,1267-1285).
ccagcaagcagtggtttat

SEQ ID NO: 82513 - DNA, 19 bp, Homo sapiens
  siRNA target sequence for FLJ10326 (NM_018060.2,1275-1293).
cagtggtttataaacatca

SEQ ID NO: 82514 - DNA, 19 bp, Homo sapiens
  siRNA target sequence for FLJ10326 (NM_018060.2,1289-1307).
catcacggatattaagact

SEQ ID NO: 82515 - DNA, 19 bp, Homo sapiens
  siRNA target sequence for FLJ10326 (NM_018060.2,1356-1374).
ctgaatggcatggttgaaa

SEQ ID NO: 82516 - DNA, 19 bp, Homo sapiens
  siRNA target sequence for FLJ10326 (NM_018060.2,1399-1417).
gtatatcaaggcaaagagt

SEQ ID NO: 82517 - DNA, 19 bp, Homo sapiens
  siRNA target sequence for FLJ10326 (NM_018060.2,1414-1432).
gagtttggggtgttccaat

SEQ ID NO: 82518 - DNA, 19 bp, Homo sapiens
  siRNA target sequence for FLJ10326 (NM_018060.2,1478-1496).
ccaaaccactgagcatatt

SEQ ID NO: 82519 - DNA, 19 bp, Homo sapiens
  siRNA target sequence for FLJ10326 (NM_018060.2,1512-1530).
caacacggcagtgatatct

SEQ ID NO: 82520 - DNA, 19 bp, Homo sapiens
  siRNA target sequence for FLJ10326 (NM_018060.2,1557-1575).
cttccaaaagaagtcttat

SEQ ID NO: 82521 - DNA, 19 bp, Homo sapiens
  siRNA target sequence for FLJ10326 (NM_018060.2,1561-1579).
caaaagaagtcttatctga

SEQ ID NO: 82522 - DNA, 19 bp, Homo sapiens
  siRNA target sequence for FLJ10326 (NM_018060.2,1591-1609).
ctgatgccttggaatatgt

SEQ ID NO: 82523 - DNA, 19 bp, Homo sapiens
  siRNA target sequence for FLJ10326 (NM_018060.2,1608-1626).
gtgccaggtcaggatattt

SEQ ID NO: 82524 - DNA, 19 bp, Homo sapiens
  siRNA target sequence for FLJ10326 (NM_018060.2,1612-1630).
caggtcaggatattttgga

SEQ ID NO: 82525 - DNA, 19 bp, Homo sapiens
  siRNA target sequence for FLJ10326 (NM_018060.2,1646-1664).
cggaacttcatggtcttat

SEQ ID NO: 82526 - DNA, 19 bp, Homo sapiens
  siRNA target sequence for FLJ10326 (NM_018060.2,1651-1669).
cttcatggtcttatgttct

SEQ ID NO: 82527 - DNA, 19 bp, Homo sapiens
  siRNA target sequence for FLJ10326 (NM_018060.2,1680-1698).
gaccaaagagcagatttgt

SEQ ID NO: 82528 - DNA, 19 bp, Homo sapiens
  siRNA target sequence for FLJ10326 (NM_018060.2,1715-1733).
ccagctcgggggttggttt

SEQ ID NO: 82529 - DNA, 19 bp, Homo sapiens
  siRNA target sequence for FLJ10326 (NM_018060.2,1719-1737).
ctcgggggttggtttcagt

SEQ ID NO: 82530 - DNA, 19 bp, Homo sapiens
  siRNA target sequence for FLJ10326 (NM_018060.2,1729-1747).
ggtttcagtcatccttatt

SEQ ID NO: 82531 - DNA, 19 bp, Homo sapiens
  siRNA target sequence for FLJ10326 (NM_018060.2,1730-1748).
gtttcagtcatccttatta

SEQ ID NO: 82532 - DNA, 19 bp, Homo sapiens
  siRNA target sequence for FLJ10326 (NM_018060.2,1734-1752).
cagtcatccttattaacaa

SEQ ID NO: 82533 - DNA, 19 bp, Homo sapiens
  siRNA target sequence for FLJ10326 (NM_018060.2,1777-1795).
cttataagacagtgattgt

SEQ ID NO: 82534 - DNA, 19 bp, Homo sapiens
  siRNA target sequence for FLJ10326 (NM_018060.2,1838-1856).
gtctcttgggaatgtcatt

SEQ ID NO: 82535 - DNA, 19 bp, Homo sapiens
  siRNA target sequence for FLJ10326 (NM_018060.2,1871-1889).
cgttaatggaggacaagat

SEQ ID NO: 82536 - DNA, 19 bp, Homo sapiens
  siRNA target sequence for FLJ10326 (NM_018060.2,1879-1897).
gaggacaagatcaaagcaa

SEQ ID NO: 82537 - DNA, 19 bp, Homo sapiens
  siRNA target sequence for FLJ10326 (NM_018060.2,1930-1948).
ggtgggtagctgattccaa

SEQ ID NO: 82538 - DNA, 19 bp, Homo sapiens
  siRNA target sequence for FLJ10326 (NM_018060.2,1931-1949).
gtgggtagctgattccaat

SEQ ID NO: 82539 - DNA, 19 bp, Homo sapiens
  siRNA target sequence for FLJ10326 (NM_018060.2,1952-1970).
cttcaccgaagttgcaatt

SEQ ID NO: 82540 - DNA, 19 bp, Homo sapiens
  siRNA target sequence for FLJ10326 (NM_018060.2,1998-2016).
gatgatattagcaagctta

SEQ ID NO: 82541 - DNA, 19 bp, Homo sapiens
  siRNA target sequence for FLJ10326 (NM_018060.2,2008-2026).
gcaagcttaggaatacact

SEQ ID NO: 82542 - DNA, 19 bp, Homo sapiens
  siRNA target sequence for FLJ10326 (NM_018060.2,2009-2027).
caagcttaggaatacactt

SEQ ID NO: 82543 - DNA, 19 bp, Homo sapiens
  siRNA target sequence for FLJ10326 (NM_018060.2,2041-2059).
gaaatgtggctgatttcaa

SEQ ID NO: 82544 - DNA, 19 bp, Homo sapiens
  siRNA target sequence for FLJ10326 (NM_018060.2,2074-2092).
ccatccctgtaaacgatat

SEQ ID NO: 82545 - DNA, 19 bp, Homo sapiens
  siRNA target sequence for FLJ10326 (NM_018060.2,2078-2096).
ccctgtaaacgatatgtat

SEQ ID NO: 82546 - DNA, 19 bp, Homo sapiens
  siRNA target sequence for FLJ10326 (NM_018060.2,2080-2098).
ctgtaaacgatatgtatgt

SEQ ID NO: 82547 - DNA, 19 bp, Homo sapiens
  siRNA target sequence for FLJ10326 (NM_018060.2,2082-2100).
gtaaacgatatgtatgtca

SEQ ID NO: 82548 - DNA, 19 bp, Homo sapiens
  siRNA target sequence for FLJ10326 (NM_018060.2,2129-2147).
ggatttggcaaacaagatt

SEQ ID NO: 82549 - DNA, 19 bp, Homo sapiens
  siRNA target sequence for FLJ10326 (NM_018060.2,2187-2205).
cggctgttacggacgtttt

SEQ ID NO: 82550 - DNA, 19 bp, Homo sapiens
  siRNA target sequence for FLJ10326 (NM_018060.2,2188-2206).
ggctgttacggacgtttta

SEQ ID NO: 82551 - DNA, 19 bp, Homo sapiens
  siRNA target sequence for FLJ10326 (NM_018060.2,2189-2207).
gctgttacggacgttttat

SEQ ID NO: 82552 - DNA, 19 bp, Homo sapiens
  siRNA target sequence for FLJ10326 (NM_018060.2,2190-2208).
ctgttacggacgttttata

SEQ ID NO: 82553 - DNA, 19 bp, Homo sapiens
  siRNA target sequence for FLJ10326 (NM_018060.2,2372-2390).
gttccagcacataccttat

SEQ ID NO: 82554 - DNA, 19 bp, Homo sapiens
  siRNA target sequence for FLJ10326 (NM_018060.2,2414-2432).
ccgtactgggtggattagt

SEQ ID NO: 82555 - DNA, 19 bp, Homo sapiens
  siRNA target sequence for FLJ10326 (NM_018060.2,2415-2433).
cgtactgggtggattagta

SEQ ID NO: 82556 - DNA, 19 bp, Homo sapiens
  siRNA target sequence for FLJ10326 (NM_018060.2,2421-2439).
gggtggattagtactagtt

SEQ ID NO: 82557 - DNA, 19 bp, Homo sapiens
  siRNA target sequence for FLJ10326 (NM_018060.2,2423-2441).
gtggattagtactagttct

SEQ ID NO: 82558 - DNA, 19 bp, Homo sapiens
  siRNA target sequence for FLJ10326 (NM_018060.2,2485-2503).
gtgcaatgcgagactcatt

SEQ ID NO: 82559 - DNA, 19 bp, Homo sapiens
  siRNA target sequence for FLJ10326 (NM_018060.2,2488-2506).
caatgcgagactcatttct

SEQ ID NO: 82560 - DNA, 19 bp, Homo sapiens
  siRNA target sequence for FLJ10326 (NM_018060.2,2532-2550).
gctgagtacaaggttatca

SEQ ID NO: 82561 - DNA, 19 bp, Homo sapiens
  siRNA target sequence for FLJ10326 (NM_018060.2,2566-2584).
gactgctttttgagataat

SEQ ID NO: 82562 - DNA, 19 bp, Homo sapiens
  siRNA target sequence for FLJ10326 (NM_018060.2,2612-2630).
cagcacctctcagttgaat

SEQ ID NO: 82563 - DNA, 19 bp, Homo sapiens
  siRNA target sequence for FLJ10326 (NM_018060.2,2689-2707).
cagatgtaatcgagcttaa

SEQ ID NO: 82564 - DNA, 19 bp, Homo sapiens
  siRNA target sequence for FLJ10326 (NM_018060.2,2710-2728).
ggaaattcctcatcaactt

SEQ ID NO: 82565 - DNA, 19 bp, Homo sapiens
  siRNA target sequence for FLJ10326 (NM_018060.2,2711-2729).
gaaattcctcatcaactta

SEQ ID NO: 82566 - DNA, 19 bp, Homo sapiens
  siRNA target sequence for FLJ10326 (NM_018060.2,2751-2769).
gagtcttcctataaagtaa

SEQ ID NO: 82567 - DNA, 19 bp, Homo sapiens
  siRNA target sequence for FLJ10326 (NM_018060.2,2753-2771).
gtcttcctataaagtaatt

SEQ ID NO: 82568 - DNA, 19 bp, Homo sapiens
  siRNA target sequence for FLJ10326 (NM_018060.2,2758-2776).
cctataaagtaattgtcat

SEQ ID NO: 82569 - DNA, 19 bp, Homo sapiens
  siRNA target sequence for FLJ10326 (NM_018060.2,2774-2792).
catgccgactacgaaagaa

SEQ ID NO: 82570 - DNA, 19 bp, Homo sapiens
  siRNA target sequence for FLJ10326 (NM_018060.2,2801-2819).
ccgttgttggaagtataca

SEQ ID NO: 82571 - DNA, 19 bp, Homo sapiens
  siRNA target sequence for FLJ10326 (NM_018060.2,2821-2839).
cggagtcttcagatacact

SEQ ID NO: 82572 - DNA, 19 bp, Homo sapiens
  siRNA target sequence for FLJ10326 (NM_018060.2,2845-2863).
ctcgatgtgcagaagttgt

SEQ ID NO: 82573 - DNA, 19 bp, Homo sapiens
  siRNA target sequence for FLJ10496 (NM_018114.3,603-621).
ccacgcccttgaagaactt

SEQ ID NO: 82574 - DNA, 19 bp, Homo sapiens
  siRNA target sequence for FLJ10496 (NM_018114.3,604-622).
cacgcccttgaagaactta

SEQ ID NO: 82575 - DNA, 19 bp, Homo sapiens
  siRNA target sequence for FLJ10496 (NM_018114.3,848-866).
gcggctgcctggttgtaca

SEQ ID NO: 82576 - DNA, 19 bp, Homo sapiens
  siRNA target sequence for FLJ10496 (NM_018114.3,849-867).
cggctgcctggttgtacat

SEQ ID NO: 82577 - DNA, 19 bp, Homo sapiens
  siRNA target sequence for FLJ10496 (NM_018114.3,851-869).
gctgcctggttgtacatgt

SEQ ID NO: 82578 - DNA, 19 bp, Homo sapiens
  siRNA target sequence for FLJ10496 (NM_018114.3,1183-1201).
ctggctgacagcagtatct

SEQ ID NO: 82579 - DNA, 19 bp, Homo sapiens
  siRNA target sequence for FLJ10496 (NM_018114.3,1203-1221).
cacgaagggcacaaagagt

SEQ ID NO: 82580 - DNA, 19 bp, Homo sapiens
  siRNA target sequence for FLJ10496 (NM_018114.3,1220-1238).
gtggcacctttgtcatgta

SEQ ID NO: 82581 - DNA, 19 bp, Homo sapiens
  siRNA target sequence for FLJ10496 (NM_018114.3,1256-1274).
ccacactctttgagagtta

SEQ ID NO: 82582 - DNA, 19 bp, Homo sapiens
  siRNA target sequence for FLJ10496 (NM_018114.3,1453-1471).
gtacgcacagagatgatat

SEQ ID NO: 82583 - DNA, 19 bp, Homo sapiens
  siRNA target sequence for FLJ10496 (NM_018114.3,1456-1474).
cgcacagagatgatatgca

SEQ ID NO: 82584 - DNA, 19 bp, Homo sapiens
  siRNA target sequence for FLJ10514 (NM_018122.3,416-434).
cttcccttcttggttaagt

SEQ ID NO: 82585 - DNA, 19 bp, Homo sapiens
  siRNA target sequence for FLJ10514 (NM_018122.3,438-456).
ctgtacaggggtttatcca

SEQ ID NO: 82586 - DNA, 19 bp, Homo sapiens
  siRNA target sequence for FLJ10514 (NM_018122.3,552-570).
gttgtccggaccaacacat

SEQ ID NO: 82587 - DNA, 19 bp, Homo sapiens
  siRNA target sequence for FLJ10514 (NM_018122.3,629-647).
gtaccgaaggcaaaacaca

SEQ ID NO: 82588 - DNA, 19 bp, Homo sapiens
  siRNA target sequence for FLJ10514 (NM_018122.3,633-651).
cgaaggcaaaacacattct

SEQ ID NO: 82589 - DNA, 19 bp, Homo sapiens
  siRNA target sequence for FLJ10514 (NM_018122.3,646-664).
cattcttggtcctaagaga

SEQ ID NO: 82590 - DNA, 19 bp, Homo sapiens
  siRNA target sequence for FLJ10514 (NM_018122.3,672-690).
gggcttgttcaagttatca

SEQ ID NO: 82591 - DNA, 19 bp, Homo sapiens
  siRNA target sequence for FLJ10514 (NM_018122.3,762-780).
gtgtctggtacagtcattt

SEQ ID NO: 82592 - DNA, 19 bp, Homo sapiens
  siRNA target sequence for FLJ10514 (NM_018122.3,920-938).
gttgcagtatcgctactta

SEQ ID NO: 82593 - DNA, 19 bp, Homo sapiens
  siRNA target sequence for FLJ10514 (NM_018122.3,939-957).
gacttgcgtagtttccaaa

SEQ ID NO: 82594 - DNA, 19 bp, Homo sapiens
  siRNA target sequence for FLJ10514 (NM_018122.3,949-967).
gtttccaaatgcagtataa

SEQ ID NO: 82595 - DNA, 19 bp, Homo sapiens
  siRNA target sequence for FLJ10514 (NM_018122.3,980-998).
gtcccagatggtcatgaaa

SEQ ID NO: 82596 - DNA, 19 bp, Homo sapiens
  siRNA target sequence for FLJ10514 (NM_018122.3,1001-1019).
gcgggaatatctctgtaat

SEQ ID NO: 82597 - DNA, 19 bp, Homo sapiens
  siRNA target sequence for FLJ10514 (NM_018122.3,1026-1044).
gggtttgtggatatagaaa

SEQ ID NO: 82598 - DNA, 19 bp, Homo sapiens
  siRNA target sequence for FLJ10514 (NM_018122.3,1072-1090).
ggggtgccaaagagttttt

SEQ ID NO: 82599 - DNA, 19 bp, Homo sapiens
  siRNA target sequence for FLJ10514 (NM_018122.3,1075-1093).
gtgccaaagagtttttagt

SEQ ID NO: 82600 - DNA, 19 bp, Homo sapiens
  siRNA target sequence for FLJ10514 (NM_018122.3,1100-1118).
cagggaacctggaaagttt

SEQ ID NO: 82601 - DNA, 19 bp, Homo sapiens
  siRNA target sequence for FLJ10514 (NM_018122.3,1102-1120).
gggaacctggaaagtttta

SEQ ID NO: 82602 - DNA, 19 bp, Homo sapiens
  siRNA target sequence for FLJ10514 (NM_018122.3,1103-1121).
ggaacctggaaagttttat

SEQ ID NO: 82603 - DNA, 19 bp, Homo sapiens
  siRNA target sequence for FLJ10514 (NM_018122.3,1129-1147).
ctcagagtcctcaacagtt

SEQ ID NO: 82604 - DNA, 19 bp, Homo sapiens
  siRNA target sequence for FLJ10514 (NM_018122.3,1131-1149).
cagagtcctcaacagttta

SEQ ID NO: 82605 - DNA, 19 bp, Homo sapiens
  siRNA target sequence for FLJ10514 (NM_018122.3,1167-1185).
ggcggtttagacagatatt

SEQ ID NO: 82606 - DNA, 19 bp, Homo sapiens
  siRNA target sequence for FLJ10514 (NM_018122.3,1168-1186).
gcggtttagacagatattt

SEQ ID NO: 82607 - DNA, 19 bp, Homo sapiens
  siRNA target sequence for FLJ10514 (NM_018122.3,1190-1208).
ggttgcccgatgttatcga

SEQ ID NO: 82608 - DNA, 19 bp, Homo sapiens
  siRNA target sequence for FLJ10514 (NM_018122.3,1196-1214).
ccgatgttatcgagatgaa

SEQ ID NO: 82609 - DNA, 19 bp, Homo sapiens
  siRNA target sequence for FLJ10514 (NM_018122.3,1227-1245).
gacagacagcctgagttta

SEQ ID NO: 82610 - DNA, 19 bp, Homo sapiens
  siRNA target sequence for FLJ10514 (NM_018122.3,1229-1247).
cagacagcctgagtttact

SEQ ID NO: 82611 - DNA, 19 bp, Homo sapiens
  siRNA target sequence for FLJ10514 (NM_018122.3,1231-1249).
gacagcctgagtttactca

SEQ ID NO: 82612 - DNA, 19 bp, Homo sapiens
  siRNA target sequence for FLJ10514 (NM_018122.3,1246-1264).
ctcagattgacatagagat

SEQ ID NO: 82613 - DNA, 19 bp, Homo sapiens
  siRNA target sequence for FLJ10514 (NM_018122.3,1285-1303).
ggatccagagtttaattga

SEQ ID NO: 82614 - DNA, 19 bp, Homo sapiens
  siRNA target sequence for FLJ10514 (NM_018122.3,1302-1320).
gagggtttgctccagtatt

SEQ ID NO: 82615 - DNA, 19 bp, Homo sapiens
  siRNA target sequence for FLJ10514 (NM_018122.3,1386-1404).
gccacctatggaactgata

SEQ ID NO: 82616 - DNA, 19 bp, Homo sapiens
  siRNA target sequence for FLJ10514 (NM_018122.3,1387-1405).
ccacctatggaactgataa

SEQ ID NO: 82617 - DNA, 19 bp, Homo sapiens
  siRNA target sequence for FLJ10514 (NM_018122.3,1407-1425).
cctgacactcgctttggaa

SEQ ID NO: 82618 - DNA, 19 bp, Homo sapiens
  siRNA target sequence for FLJ10514 (NM_018122.3,1496-1514).
gccccatggaactgtgaaa

SEQ ID NO: 82619 - DNA, 19 bp, Homo sapiens
  siRNA target sequence for FLJ10514 (NM_018122.3,1530-1548).
gaaggagcaaaatacttaa

SEQ ID NO: 82620 - DNA, 19 bp, Homo sapiens
  siRNA target sequence for FLJ10514 (NM_018122.3,1582-1600).
cagctgaccattttaatca

SEQ ID NO: 82621 - DNA, 19 bp, Homo sapiens
  siRNA target sequence for FLJ10514 (NM_018122.3,1620-1638).
cttaacgccaatagaaact

SEQ ID NO: 82622 - DNA, 19 bp, Homo sapiens
  siRNA target sequence for FLJ10514 (NM_018122.3,1640-1658).
gaattctccagttgctaat

SEQ ID NO: 82623 - DNA, 19 bp, Homo sapiens
  siRNA target sequence for FLJ10514 (NM_018122.3,1973-1991).
ggcccgtagccaacactat

SEQ ID NO: 82624 - DNA, 19 bp, Homo sapiens
  siRNA target sequence for FLJ10514 (NM_018122.3,1975-1993).
cccgtagccaacactatga

SEQ ID NO: 82625 - DNA, 19 bp, Homo sapiens
  siRNA target sequence for FLJ10514 (NM_018122.3,1977-1995).
cgtagccaacactatgact

SEQ ID NO: 82626 - DNA, 19 bp, Homo sapiens
  siRNA target sequence for FLJ10514 (NM_018122.3,1986-2004).
cactatgacttggttttaa

SEQ ID NO: 82627 - DNA, 19 bp, Homo sapiens
  siRNA target sequence for FLJ10514 (NM_018122.3,1988-2006).
ctatgacttggttttaaat

SEQ ID NO: 82628 - DNA, 19 bp, Homo sapiens
  siRNA target sequence for FLJ10514 (NM_018122.3,2019-2037).
ggaggtggttcaattcgaa

SEQ ID NO: 82629 - DNA, 19 bp, Homo sapiens
  siRNA target sequence for FLJ10514 (NM_018122.3,2020-2038).
gaggtggttcaattcgaat

SEQ ID NO: 82630 - DNA, 19 bp, Homo sapiens
  siRNA target sequence for FLJ10514 (NM_018122.3,2025-2043).
ggttcaattcgaattcaca

SEQ ID NO: 82631 - DNA, 19 bp, Homo sapiens
  siRNA target sequence for FLJ10514 (NM_018122.3,2026-2044).
gttcaattcgaattcacaa

SEQ ID NO: 82632 - DNA, 19 bp, Homo sapiens
  siRNA target sequence for FLJ10514 (NM_018122.3,2046-2064).
gcagagctgcagcgttata

SEQ ID NO: 82633 - DNA, 19 bp, Homo sapiens
  siRNA target sequence for FLJ10514 (NM_018122.3,2047-2065).
cagagctgcagcgttatat

SEQ ID NO: 82634 - DNA, 19 bp, Homo sapiens
  siRNA target sequence for FLJ10514 (NM_018122.3,2109-2127).
ctgctccaggctttagatt

SEQ ID NO: 82635 - DNA, 19 bp, Homo sapiens
  siRNA target sequence for FLJ10514 (NM_018122.3,2111-2129).
gctccaggctttagattat

SEQ ID NO: 82636 - DNA, 19 bp, Homo sapiens
  siRNA target sequence for FLJ10514 (NM_018122.3,2160-2178).
gggttagacagactgatat

SEQ ID NO: 82637 - DNA, 19 bp, Homo sapiens
  siRNA target sequence for FLJ10514 (NM_018122.3,2241-2259).
catgacctcatgagcaata

SEQ ID NO: 82638 - DNA, 19 bp, Homo sapiens
  siRNA target sequence for FLJ10514 (NM_018122.3,2254-2272).
gcaataccccagattctgt

SEQ ID NO: 82639 - DNA, 19 bp, Homo sapiens
  siRNA target sequence for FLJ10514 (NM_018122.3,2282-2300).
ggaactgaagccctatcat

SEQ ID NO: 82640 - DNA, 19 bp, Homo sapiens
  siRNA target sequence for FLJ10514 (NM_018122.3,2283-2301).
gaactgaagccctatcata

SEQ ID NO: 82641 - DNA, 19 bp, Homo sapiens
  siRNA target sequence for FLJ10709 (NM_018188.1,377-395).
cagtccaagctcaaagagt

SEQ ID NO: 82642 - DNA, 19 bp, Homo sapiens
  siRNA target sequence for FLJ10709 (NM_018188.1,379-397).
gtccaagctcaaagagtat

SEQ ID NO: 82643 - DNA, 19 bp, Homo sapiens
  siRNA target sequence for FLJ10774 (NM_024662.1,230-248).
ccgaatccggattctcatt

SEQ ID NO: 82644 - DNA, 19 bp, Homo sapiens
  siRNA target sequence for FLJ10774 (NM_024662.1,236-254).
ccggattctcattgagaat

SEQ ID NO: 82645 - DNA, 19 bp, Homo sapiens
  siRNA target sequence for FLJ10774 (NM_024662.1,258-276).
gtagctgagcggcaaagat

SEQ ID NO: 82646 - DNA, 19 bp, Homo sapiens
  siRNA target sequence for FLJ10774 (NM_024662.1,266-284).
gcggcaaagatctctcttt

SEQ ID NO: 82647 - DNA, 19 bp, Homo sapiens
  siRNA target sequence for FLJ10774 (NM_024662.1,268-286).
ggcaaagatctctctttgt

SEQ ID NO: 82648 - DNA, 19 bp, Homo sapiens
  siRNA target sequence for FLJ10774 (NM_024662.1,274-292).
gatctctctttgttgtagt

SEQ ID NO: 82649 - DNA, 19 bp, Homo sapiens
  siRNA target sequence for FLJ10774 (NM_024662.1,295-313).
gggatcgaggaaaagatca

SEQ ID NO: 82650 - DNA, 19 bp, Homo sapiens
  siRNA target sequence for FLJ10774 (NM_024662.1,324-342).
cttcatcacatgttatcca

SEQ ID NO: 82651 - DNA, 19 bp, Homo sapiens
  siRNA target sequence for FLJ10774 (NM_024662.1,454-472).
gaacactgaacataaagca

SEQ ID NO: 82652 - DNA, 19 bp, Homo sapiens
  siRNA target sequence for FLJ10774 (NM_024662.1,470-488).
gcaggacgacccctttgaa

SEQ ID NO: 82653 - DNA, 19 bp, Homo sapiens
  siRNA target sequence for FLJ10774 (NM_024662.1,610-628).
ccaggactgtagaaacagt

SEQ ID NO: 82654 - DNA, 19 bp, Homo sapiens
  siRNA target sequence for FLJ10774 (NM_024662.1,884-902).
gagtcttggtccttctgat

SEQ ID NO: 82655 - DNA, 19 bp, Homo sapiens
  siRNA target sequence for FLJ10774 (NM_024662.1,959-977).
ggtggactgctgtaagact

SEQ ID NO: 82656 - DNA, 19 bp, Homo sapiens
  siRNA target sequence for FLJ10774 (NM_024662.1,1113-1131).
gcatttgggtactccaata

SEQ ID NO: 82657 - DNA, 19 bp, Homo sapiens
  siRNA target sequence for FLJ10774 (NM_024662.1,1114-1132).
catttgggtactccaatat

SEQ ID NO: 82658 - DNA, 19 bp, Homo sapiens
  siRNA target sequence for FLJ10774 (NM_024662.1,1120-1138).
ggtactccaatatctttgt

SEQ ID NO: 82659 - DNA, 19 bp, Homo sapiens
  siRNA target sequence for FLJ10774 (NM_024662.1,1121-1139).
gtactccaatatctttgtt

SEQ ID NO: 82660 - DNA, 19 bp, Homo sapiens
  siRNA target sequence for FLJ10774 (NM_024662.1,1153-1171).
ctgataacctccatactct

SEQ ID NO: 82661 - DNA, 19 bp, Homo sapiens
  siRNA target sequence for FLJ10774 (NM_024662.1,1192-1210).
gatttgatgctctgcaata

SEQ ID NO: 82662 - DNA, 19 bp, Homo sapiens
  siRNA target sequence for FLJ10774 (NM_024662.1,1232-1250).
gattatccagtctctaaat

SEQ ID NO: 82663 - DNA, 19 bp, Homo sapiens
  siRNA target sequence for FLJ10774 (NM_024662.1,1271-1289).
gatcagagtgaatgtattt

SEQ ID NO: 82664 - DNA, 19 bp, Homo sapiens
  siRNA target sequence for FLJ10774 (NM_024662.1,1274-1292).
cagagtgaatgtatttcga

SEQ ID NO: 82665 - DNA, 19 bp, Homo sapiens
  siRNA target sequence for FLJ10774 (NM_024662.1,1296-1314).
cacaggcagactattcagt

SEQ ID NO: 82666 - DNA, 19 bp, Homo sapiens
  siRNA target sequence for FLJ10774 (NM_024662.1,1298-1316).
caggcagactattcagtat

SEQ ID NO: 82667 - DNA, 19 bp, Homo sapiens
  siRNA target sequence for FLJ10774 (NM_024662.1,1343-1361).
gggccaggctgaactagtt

SEQ ID NO: 82668 - DNA, 19 bp, Homo sapiens
  siRNA target sequence for FLJ10774 (NM_024662.1,1414-1432).
gcccctaccttgttttcat

SEQ ID NO: 82669 - DNA, 19 bp, Homo sapiens
  siRNA target sequence for FLJ10774 (NM_024662.1,1722-1740).
gaactgtactatgttaata

SEQ ID NO: 82670 - DNA, 19 bp, Homo sapiens
  siRNA target sequence for FLJ10774 (NM_024662.1,1727-1745).
gtactatgttaatagagat

SEQ ID NO: 82671 - DNA, 19 bp, Homo sapiens
  siRNA target sequence for FLJ10774 (NM_024662.1,1741-1759).
gagataccctcttttgcta

SEQ ID NO: 82672 - DNA, 19 bp, Homo sapiens
  siRNA target sequence for FLJ10774 (NM_024662.1,1809-1827).
gcttctcactacaagaact

SEQ ID NO: 82673 - DNA, 19 bp, Homo sapiens
  siRNA target sequence for FLJ10774 (NM_024662.1,2026-2044).
ggacagtgtcagaacagtt

SEQ ID NO: 82674 - DNA, 19 bp, Homo sapiens
  siRNA target sequence for FLJ10774 (NM_024662.1,2283-2301).
cctttactcctcaaattga

SEQ ID NO: 82675 - DNA, 19 bp, Homo sapiens
  siRNA target sequence for FLJ10774 (NM_024662.1,2311-2329).
ctgccgaacgcctggatta

SEQ ID NO: 82676 - DNA, 19 bp, Homo sapiens
  siRNA target sequence for FLJ10774 (NM_024662.1,2353-2371).
cccccaggctcctcaagtt

SEQ ID NO: 82677 - DNA, 19 bp, Homo sapiens
  siRNA target sequence for FLJ10774 (NM_024662.1,2374-2392).
ggaaacgagctggatttgt

SEQ ID NO: 82678 - DNA, 19 bp, Homo sapiens
  siRNA target sequence for FLJ10774 (NM_024662.1,2375-2393).
gaaacgagctggatttgtt

SEQ ID NO: 82679 - DNA, 19 bp, Homo sapiens
  siRNA target sequence for FLJ10774 (NM_024662.1,2736-2754).
gccatctctcgcatctatt

SEQ ID NO: 82680 - DNA, 19 bp, Homo sapiens
  siRNA target sequence for FLJ10774 (NM_024662.1,2737-2755).
ccatctctcgcatctattt

SEQ ID NO: 82681 - DNA, 19 bp, Homo sapiens
  siRNA target sequence for FLJ10774 (NM_024662.1,2812-2830).
ggattggcctgcagcataa

SEQ ID NO: 82682 - DNA, 19 bp, Homo sapiens
  siRNA target sequence for FLJ10774 (NM_024662.1,2874-2892).
cagttgatgggacttttca

SEQ ID NO: 82683 - DNA, 19 bp, Homo sapiens
  siRNA target sequence for FLJ10774 (NM_024662.1,2894-2912).
ccggatcatccgcaaagtt

SEQ ID NO: 82684 - DNA, 19 bp, Homo sapiens
  siRNA target sequence for FLJ10774 (NM_024662.1,2896-2914).
ggatcatccgcaaagttgt

SEQ ID NO: 82685 - DNA, 19 bp, Homo sapiens
  siRNA target sequence for FLJ10774 (NM_024662.1,3076-3094).
gcatggacctctctgaata

SEQ ID NO: 82686 - DNA, 19 bp, Homo sapiens
  siRNA target sequence for FLJ10774 (NM_024662.1,3080-3098).
ggacctctctgaatacata

SEQ ID NO: 82687 - DNA, 19 bp, Homo sapiens
  siRNA target sequence for FLJ10774 (NM_024662.1,3081-3099).
gacctctctgaatacataa

SEQ ID NO: 82688 - DNA, 19 bp, Homo sapiens
  siRNA target sequence for FLJ10774 (NM_024662.1,3147-3165).
ccgaacgcctcgatcatca

SEQ ID NO: 82689 - DNA, 19 bp, Homo sapiens
  siRNA target sequence for FLJ12118 (NM_024537.1,234-252).
gaagccgcctcctggtata

SEQ ID NO: 82690 - DNA, 19 bp, Homo sapiens
  siRNA target sequence for FLJ12118 (NM_024537.1,254-272).
ctgtggaccaactgtatat

SEQ ID NO: 82691 - DNA, 19 bp, Homo sapiens
  siRNA target sequence for FLJ12118 (NM_024537.1,290-308).
ccatgcttgctcatatgtt

SEQ ID NO: 82692 - DNA, 19 bp, Homo sapiens
  siRNA target sequence for FLJ12118 (NM_024537.1,332-350).
cctaaccaaggtttttgga

SEQ ID NO: 82693 - DNA, 19 bp, Homo sapiens
  siRNA target sequence for FLJ12118 (NM_024537.1,360-378).
gtcatggtgatgggtatta

SEQ ID NO: 82694 - DNA, 19 bp, Homo sapiens
  siRNA target sequence for FLJ12118 (NM_024537.1,362-380).
catggtgatgggtattaca

SEQ ID NO: 82695 - DNA, 19 bp, Homo sapiens
  siRNA target sequence for FLJ12118 (NM_024537.1,365-383).
ggtgatgggtattacagat

SEQ ID NO: 82696 - DNA, 19 bp, Homo sapiens
  siRNA target sequence for FLJ12118 (NM_024537.1,371-389).
gggtattacagatgtagat

SEQ ID NO: 82697 - DNA, 19 bp, Homo sapiens
  siRNA target sequence for FLJ12118 (NM_024537.1,408-426).
gccaatgagatgaatattt

SEQ ID NO: 82698 - DNA, 19 bp, Homo sapiens
  siRNA target sequence for FLJ12118 (NM_024537.1,433-451).
cttccctcgccagtcttta

SEQ ID NO: 82699 - DNA, 19 bp, Homo sapiens
  siRNA target sequence for FLJ12118 (NM_024537.1,436-454).
ccctcgccagtctttatga

SEQ ID NO: 82700 - DNA, 19 bp, Homo sapiens
  siRNA target sequence for FLJ12118 (NM_024537.1,445-463).
gtctttatgaggaagactt

SEQ ID NO: 82701 - DNA, 19 bp, Homo sapiens
  siRNA target sequence for FLJ12118 (NM_024537.1,512-530).
gagggtaaccgaaaatatt

SEQ ID NO: 82702 - DNA, 19 bp, Homo sapiens
  siRNA target sequence for FLJ12118 (NM_024537.1,521-539).
cgaaaatattcctcagata

SEQ ID NO: 82703 - DNA, 19 bp, Homo sapiens
  siRNA target sequence for FLJ12118 (NM_024537.1,564-582).
gctcgtgggaacgcttatt

SEQ ID NO: 82704 - DNA, 19 bp, Homo sapiens
  siRNA target sequence for FLJ12118 (NM_024537.1,567-585).
cgtgggaacgcttattcaa

SEQ ID NO: 82705 - DNA, 19 bp, Homo sapiens
  siRNA target sequence for FLJ12118 (NM_024537.1,586-604).
cggcaaaaggcaatgtcta

SEQ ID NO: 82706 - DNA, 19 bp, Homo sapiens
  siRNA target sequence for FLJ12118 (NM_024537.1,798-816).
gccatcgctagtatggtat

SEQ ID NO: 82707 - DNA, 19 bp, Homo sapiens
  siRNA target sequence for FLJ12118 (NM_024537.1,800-818).
catcgctagtatggtattt

SEQ ID NO: 82708 - DNA, 19 bp, Homo sapiens
  siRNA target sequence for FLJ12118 (NM_024537.1,803-821).
cgctagtatggtatttgga

SEQ ID NO: 82709 - DNA, 19 bp, Homo sapiens
  siRNA target sequence for FLJ12118 (NM_024537.1,848-866).
gatagatttagcttttcca

SEQ ID NO: 82710 - DNA, 19 bp, Homo sapiens
  siRNA target sequence for FLJ12118 (NM_024537.1,886-904).
cacagtgcgaagtctttca

SEQ ID NO: 82711 - DNA, 19 bp, Homo sapiens
  siRNA target sequence for FLJ12118 (NM_024537.1,1024-1042).
ccttttcccccgatgtctt

SEQ ID NO: 82712 - DNA, 19 bp, Homo sapiens
  siRNA target sequence for FLJ12118 (NM_024537.1,1149-1167).
gacgcacgtgcctacatga

SEQ ID NO: 82713 - DNA, 19 bp, Homo sapiens
  siRNA target sequence for FLJ12118 (NM_024537.1,1379-1397).
catcatctcttactttgaa

SEQ ID NO: 82714 - DNA, 19 bp, Homo sapiens
  siRNA target sequence for FLJ12118 (NM_024537.1,1417-1435).
gaatttctctggcaaatca

SEQ ID NO: 82715 - DNA, 19 bp, Homo sapiens
  siRNA target sequence for FLJ12118 (NM_024537.1,1560-1578).
cggcagcagctcctagaaa

SEQ ID NO: 82716 - DNA, 19 bp, Homo sapiens
  siRNA target sequence for FLJ12118 (NM_024537.1,1626-1644).
gcccacggcatcaacatca

SEQ ID NO: 82717 - DNA, 19 bp, Homo sapiens
  siRNA target sequence for FLJ12118 (NM_024537.1,1627-1645).
cccacggcatcaacatcaa

SEQ ID NO: 82718 - DNA, 19 bp, Homo sapiens
  siRNA target sequence for FLJ12118 (NM_024537.1,1647-1665).
gacagaagcagtacaacat

SEQ ID NO: 82719 - DNA, 19 bp, Homo sapiens
  siRNA target sequence for FLJ12528 (NM_025150.3,136-154).
ggctgctcaggtaaagaga

SEQ ID NO: 82720 - DNA, 19 bp, Homo sapiens
  siRNA target sequence for FLJ12528 (NM_025150.3,137-155).
gctgctcaggtaaagagat

SEQ ID NO: 82721 - DNA, 19 bp, Homo sapiens
  siRNA target sequence for FLJ12528 (NM_025150.3,172-190).
gaaggaaccccggactatt

SEQ ID NO: 82722 - DNA, 19 bp, Homo sapiens
  siRNA target sequence for FLJ12528 (NM_025150.3,179-197).
ccccggactattaagatat

SEQ ID NO: 82723 - DNA, 19 bp, Homo sapiens
  siRNA target sequence for FLJ12528 (NM_025150.3,181-199).
ccggactattaagatatca

SEQ ID NO: 82724 - DNA, 19 bp, Homo sapiens
  siRNA target sequence for FLJ12528 (NM_025150.3,183-201).
ggactattaagatatcact

SEQ ID NO: 82725 - DNA, 19 bp, Homo sapiens
  siRNA target sequence for FLJ12528 (NM_025150.3,184-202).
gactattaagatatcactt

SEQ ID NO: 82726 - DNA, 19 bp, Homo sapiens
  siRNA target sequence for FLJ12528 (NM_025150.3,358-376).
cagatttctgacattcgat

SEQ ID NO: 82727 - DNA, 19 bp, Homo sapiens
  siRNA target sequence for FLJ12528 (NM_025150.3,463-481).
cagaggtccaagtacagaa

SEQ ID NO: 82728 - DNA, 19 bp, Homo sapiens
  siRNA target sequence for FLJ12528 (NM_025150.3,554-572).
cggatttgccaggaactta

SEQ ID NO: 82729 - DNA, 19 bp, Homo sapiens
  siRNA target sequence for FLJ12528 (NM_025150.3,617-635).
cagcttcgccagttgttca

SEQ ID NO: 82730 - DNA, 19 bp, Homo sapiens
  siRNA target sequence for FLJ12528 (NM_025150.3,623-641).
cgccagttgttcaaggata

SEQ ID NO: 82731 - DNA, 19 bp, Homo sapiens
  siRNA target sequence for FLJ12528 (NM_025150.3,646-664).
ctttaagcttcacttgatt

SEQ ID NO: 82732 - DNA, 19 bp, Homo sapiens
  siRNA target sequence for FLJ12528 (NM_025150.3,680-698).
ggtccaacagcaacagtat

SEQ ID NO: 82733 - DNA, 19 bp, Homo sapiens
  siRNA target sequence for FLJ12528 (NM_025150.3,831-849).
gagtgtcagggatttcctt

SEQ ID NO: 82734 - DNA, 19 bp, Homo sapiens
  siRNA target sequence for FLJ12528 (NM_025150.3,987-1005).
gagggacaagggtgtataa

SEQ ID NO: 82735 - DNA, 19 bp, Homo sapiens
  siRNA target sequence for FLJ12528 (NM_025150.3,1007-1025).
gcactagtggcgtttatca

SEQ ID NO: 82736 - DNA, 19 bp, Homo sapiens
  siRNA target sequence for FLJ12528 (NM_025150.3,1018-1036).
gtttatcagggctgagtat

SEQ ID NO: 82737 - DNA, 19 bp, Homo sapiens
  siRNA target sequence for FLJ12528 (NM_025150.3,1104-1122).
ggcactgggagcattatca

SEQ ID NO: 82738 - DNA, 19 bp, Homo sapiens
  siRNA target sequence for FLJ12528 (NM_025150.3,1184-1202).
gattctaccaggcatatca

SEQ ID NO: 82739 - DNA, 19 bp, Homo sapiens
  siRNA target sequence for FLJ12528 (NM_025150.3,1214-1232).
gccctcaagcctatgaact

SEQ ID NO: 82740 - DNA, 19 bp, Homo sapiens
  siRNA target sequence for FLJ12528 (NM_025150.3,1288-1306).
cctgcgactagctgacttt

SEQ ID NO: 82741 - DNA, 19 bp, Homo sapiens
  siRNA target sequence for FLJ12528 (NM_025150.3,1387-1405).
catcttctgtacaacagat

SEQ ID NO: 82742 - DNA, 19 bp, Homo sapiens
  siRNA target sequence for FLJ12528 (NM_025150.3,1420-1438).
gatccaaagctgtcttgat

SEQ ID NO: 82743 - DNA, 19 bp, Homo sapiens
  siRNA target sequence for FLJ12528 (NM_025150.3,1537-1555).
ggccgaacaggtccttaaa

SEQ ID NO: 82744 - DNA, 19 bp, Homo sapiens
  siRNA target sequence for FLJ12528 (NM_025150.3,1539-1557).
ccgaacaggtccttaaaca

SEQ ID NO: 82745 - DNA, 19 bp, Homo sapiens
  siRNA target sequence for FLJ12528 (NM_025150.3,1671-1689).
ggacaattcagcttgactt

SEQ ID NO: 82746 - DNA, 19 bp, Homo sapiens
  siRNA target sequence for FLJ12528 (NM_025150.3,1704-1722).
gatttgacctccagtataa

SEQ ID NO: 82747 - DNA, 19 bp, Homo sapiens
  siRNA target sequence for FLJ12528 (NM_025150.3,1987-2005).
ccagcttgcccactacaat

SEQ ID NO: 82748 - DNA, 19 bp, Homo sapiens
  siRNA target sequence for FLJ12528 (NM_025150.3,2053-2071).
cattcggactcgagataat

SEQ ID NO: 82749 - DNA, 19 bp, Homo sapiens
  siRNA target sequence for FLJ12735 (NM_024857.3,403-421).
cgagattgagccatgcaaa

SEQ ID NO: 82750 - DNA, 19 bp, Homo sapiens
  siRNA target sequence for FLJ12735 (NM_024857.3,404-422).
gagattgagccatgcaaaa

SEQ ID NO: 82751 - DNA, 19 bp, Homo sapiens
  siRNA target sequence for FLJ12735 (NM_024857.3,440-458).
gacacatctacctgcaaaa

SEQ ID NO: 82752 - DNA, 19 bp, Homo sapiens
  siRNA target sequence for FLJ12735 (NM_024857.3,510-528).
ctccaccaaaacctagtaa

SEQ ID NO: 82753 - DNA, 19 bp, Homo sapiens
  siRNA target sequence for FLJ12735 (NM_024857.3,512-530).
ccaccaaaacctagtaata

SEQ ID NO: 82754 - DNA, 19 bp, Homo sapiens
  siRNA target sequence for FLJ12735 (NM_024857.3,513-531).
caccaaaacctagtaatat

SEQ ID NO: 82755 - DNA, 19 bp, Homo sapiens
  siRNA target sequence for FLJ12735 (NM_024857.3,595-613).
gataaagtcacctgaatca

SEQ ID NO: 82756 - DNA, 19 bp, Homo sapiens
  siRNA target sequence for FLJ12735 (NM_024857.3,637-655).
ctgtacgacacctttggaa

SEQ ID NO: 82757 - DNA, 19 bp, Homo sapiens
  siRNA target sequence for FLJ12735 (NM_024857.3,639-657).
gtacgacacctttggaaat

SEQ ID NO: 82758 - DNA, 19 bp, Homo sapiens
  siRNA target sequence for FLJ12735 (NM_024857.3,658-676).
gttctcaaatgtagagttt

SEQ ID NO: 82759 - DNA, 19 bp, Homo sapiens
  siRNA target sequence for FLJ12735 (NM_024857.3,691-709).
gagggttaatttatctcat

SEQ ID NO: 82760 - DNA, 19 bp, Homo sapiens
  siRNA target sequence for FLJ12735 (NM_024857.3,707-725).
catcaactaaataatatta

SEQ ID NO: 82761 - DNA, 19 bp, Homo sapiens
  siRNA target sequence for FLJ12735 (NM_024857.3,759-777).
gcgacgatagcaaagaaga

SEQ ID NO: 82762 - DNA, 19 bp, Homo sapiens
  siRNA target sequence for FLJ12735 (NM_024857.3,763-781).
cgatagcaaagaagactat

SEQ ID NO: 82763 - DNA, 19 bp, Homo sapiens
  siRNA target sequence for FLJ12735 (NM_024857.3,764-782).
gatagcaaagaagactata

SEQ ID NO: 82764 - DNA, 19 bp, Homo sapiens
  siRNA target sequence for FLJ12735 (NM_024857.3,778-796).
ctatagtttaaataatgat

SEQ ID NO: 82765 - DNA, 19 bp, Homo sapiens
  siRNA target sequence for FLJ12735 (NM_024857.3,844-862).
ggtacttgcagaaaacatt

SEQ ID NO: 82766 - DNA, 19 bp, Homo sapiens
  siRNA target sequence for FLJ12735 (NM_024857.3,975-993).
gcagagatgtagtagatct

SEQ ID NO: 82767 - DNA, 19 bp, Homo sapiens
  siRNA target sequence for FLJ12735 (NM_024857.3,983-1001).
gtagtagatctatctgaaa

SEQ ID NO: 82768 - DNA, 19 bp, Homo sapiens
  siRNA target sequence for FLJ12735 (NM_024857.3,1014-1032).
cagaggaactaaatttgct

SEQ ID NO: 82769 - DNA, 19 bp, Homo sapiens
  siRNA target sequence for FLJ12735 (NM_024857.3,1016-1034).
gaggaactaaatttgctta

SEQ ID NO: 82770 - DNA, 19 bp, Homo sapiens
  siRNA target sequence for FLJ12735 (NM_024857.3,1079-1097).
catgcaaactctagagata

SEQ ID NO: 82771 - DNA, 19 bp, Homo sapiens
  siRNA target sequence for FLJ12735 (NM_024857.3,1083-1101).
caaactctagagataacgt

SEQ ID NO: 82772 - DNA, 19 bp, Homo sapiens
  siRNA target sequence for FLJ12735 (NM_024857.3,1109-1127).
gcagcccagttaaatgata

SEQ ID NO: 82773 - DNA, 19 bp, Homo sapiens
  siRNA target sequence for FLJ12735 (NM_024857.3,1112-1130).
gcccagttaaatgatagta

SEQ ID NO: 82774 - DNA, 19 bp, Homo sapiens
  siRNA target sequence for FLJ12735 (NM_024857.3,1187-1205).
gagataccagactctacaa

SEQ ID NO: 82775 - DNA, 19 bp, Homo sapiens
  siRNA target sequence for FLJ12735 (NM_024857.3,1193-1211).
ccagactctacaatgtcaa

SEQ ID NO: 82776 - DNA, 19 bp, Homo sapiens
  siRNA target sequence for FLJ12735 (NM_024857.3,1194-1212).
cagactctacaatgtcaat

SEQ ID NO: 82777 - DNA, 19 bp, Homo sapiens
  siRNA target sequence for FLJ12735 (NM_024857.3,1200-1218).
ctacaatgtcaatttgtgt

SEQ ID NO: 82778 - DNA, 19 bp, Homo sapiens
  siRNA target sequence for FLJ12735 (NM_024857.3,1224-1242).
ctgaaactgtcgacgaaat

SEQ ID NO: 82779 - DNA, 19 bp, Homo sapiens
  siRNA target sequence for FLJ12735 (NM_024857.3,1230-1248).
ctgtcgacgaaatagtcaa

SEQ ID NO: 82780 - DNA, 19 bp, Homo sapiens
  siRNA target sequence for FLJ12735 (NM_024857.3,1234-1252).
cgacgaaatagtcaaaagt

SEQ ID NO: 82781 - DNA, 19 bp, Homo sapiens
  siRNA target sequence for FLJ12735 (NM_024857.3,1254-1272).
gttatataagtgaatcaga

SEQ ID NO: 82782 - DNA, 19 bp, Homo sapiens
  siRNA target sequence for FLJ12735 (NM_024857.3,1289-1307).
cagcaggtacgctttaaga

SEQ ID NO: 82783 - DNA, 19 bp, Homo sapiens
  siRNA target sequence for FLJ12735 (NM_024857.3,1291-1309).
gcaggtacgctttaagaca

SEQ ID NO: 82784 - DNA, 19 bp, Homo sapiens
  siRNA target sequence for FLJ12735 (NM_024857.3,1295-1313).
gtacgctttaagacagtta

SEQ ID NO: 82785 - DNA, 19 bp, Homo sapiens
  siRNA target sequence for FLJ12735 (NM_024857.3,1299-1317).
gctttaagacagttactgt

SEQ ID NO: 82786 - DNA, 19 bp, Homo sapiens
  siRNA target sequence for FLJ12735 (NM_024857.3,1334-1352).
cctattccgcccaaaaaga

SEQ ID NO: 82787 - DNA, 19 bp, Homo sapiens
  siRNA target sequence for FLJ12735 (NM_024857.3,1356-1374).
ggaaaataccccgaatttt

SEQ ID NO: 82788 - DNA, 19 bp, Homo sapiens
  siRNA target sequence for FLJ12735 (NM_024857.3,1366-1384).
ccgaattttcttgaaacaa

SEQ ID NO: 82789 - DNA, 19 bp, Homo sapiens
  siRNA target sequence for FLJ12735 (NM_024857.3,1658-1676).
ggaagagatgataattcta

SEQ ID NO: 82790 - DNA, 19 bp, Homo sapiens
  siRNA target sequence for FLJ12735 (NM_024857.3,1687-1705).
ggaaaattctggtatccaa

SEQ ID NO: 82791 - DNA, 19 bp, Homo sapiens
  siRNA target sequence for FLJ12735 (NM_024857.3,1732-1750).
gttacacactgataaagga

SEQ ID NO: 82792 - DNA, 19 bp, Homo sapiens
  siRNA target sequence for FLJ12735 (NM_024857.3,1959-1977).
gtcttgtttatgaagatat

SEQ ID NO: 82793 - DNA, 19 bp, Homo sapiens
  siRNA target sequence for FLJ12735 (NM_024857.3,1964-1982).
gtttatgaagatatagcaa

SEQ ID NO: 82794 - DNA, 19 bp, Homo sapiens
  siRNA target sequence for FLJ12735 (NM_024857.3,1979-1997).
gcaaatgatgaccttctaa

SEQ ID NO: 82795 - DNA, 19 bp, Homo sapiens
  siRNA target sequence for FLJ12735 (NM_024857.3,2004-2022).
cctctctgtgtaacaataa

SEQ ID NO: 82796 - DNA, 19 bp, Homo sapiens
  siRNA target sequence for FLJ12735 (NM_024857.3,2040-2058).
ccagcataccagttaaaga

SEQ ID NO: 82797 - DNA, 19 bp, Homo sapiens
  siRNA target sequence for FLJ12735 (NM_024857.3,2041-2059).
cagcataccagttaaagat

SEQ ID NO: 82798 - DNA, 19 bp, Homo sapiens
  siRNA target sequence for FLJ12735 (NM_024857.3,2043-2061).
gcataccagttaaagatat

SEQ ID NO: 82799 - DNA, 19 bp, Homo sapiens
  siRNA target sequence for FLJ12735 (NM_024857.3,2074-2092).
gtctaaagctgaatctgaa

SEQ ID NO: 82800 - DNA, 19 bp, Homo sapiens
  siRNA target sequence for FLJ12735 (NM_024857.3,2113-2131).
cacgcccaagtcaactaga

SEQ ID NO: 82801 - DNA, 19 bp, Homo sapiens
  siRNA target sequence for FLJ12735 (NM_024857.3,2116-2134).
gcccaagtcaactagaaga

SEQ ID NO: 82802 - DNA, 19 bp, Homo sapiens
  siRNA target sequence for FLJ12735 (NM_024857.3,2117-2135).
cccaagtcaactagaagat

SEQ ID NO: 82803 - DNA, 19 bp, Homo sapiens
  siRNA target sequence for FLJ12735 (NM_024857.3,2189-2207).
gacgatgtacaagataata

SEQ ID NO: 82804 - DNA, 19 bp, Homo sapiens
  siRNA target sequence for FLJ12735 (NM_024857.3,2238-2256).
ccaacttatcggaaaagca

SEQ ID NO: 82805 - DNA, 19 bp, Homo sapiens
  siRNA target sequence for FLJ12735 (NM_024857.3,2283-2301).
cagtaccctttgattcaga

SEQ ID NO: 82806 - DNA, 19 bp, Homo sapiens
  siRNA target sequence for FLJ12735 (NM_024857.3,2294-2312).
gattcagagagccctatta

SEQ ID NO: 82807 - DNA, 19 bp, Homo sapiens
  siRNA target sequence for FLJ12735 (NM_024857.3,2298-2316).
cagagagccctattagaat

SEQ ID NO: 82808 - DNA, 19 bp, Homo sapiens
  siRNA target sequence for FLJ12735 (NM_024857.3,2334-2352).
gtactcccaaaaaatctaa

SEQ ID NO: 82809 - DNA, 19 bp, Homo sapiens
  siRNA target sequence for FLJ12735 (NM_024857.3,2583-2601).
cagaagattctgttataat

SEQ ID NO: 82810 - DNA, 19 bp, Homo sapiens
  siRNA target sequence for FLJ12735 (NM_024857.3,2665-2683).
gaatgatgtgctaggaaaa

SEQ ID NO: 82811 - DNA, 19 bp, Homo sapiens
  siRNA target sequence for FLJ12735 (NM_024857.3,2687-2705).
cttaacacatccactaaaa

SEQ ID NO: 82812 - DNA, 19 bp, Homo sapiens
  siRNA target sequence for FLJ12735 (NM_024857.3,2692-2710).
cacatccactaaaaatgta

SEQ ID NO: 82813 - DNA, 19 bp, Homo sapiens
  siRNA target sequence for FLJ12735 (NM_024857.3,2722-2740).
gaaagtcgctcctttattt

SEQ ID NO: 82814 - DNA, 19 bp, Homo sapiens
  siRNA target sequence for FLJ12735 (NM_024857.3,2789-2807).
gaaagcagtcaagatacat

SEQ ID NO: 82815 - DNA, 19 bp, Homo sapiens
  siRNA target sequence for FLJ12735 (NM_024857.3,2819-2837).
caggattgtgatgttcaat

SEQ ID NO: 82816 - DNA, 19 bp, Homo sapiens
  siRNA target sequence for FLJ12735 (NM_024857.3,2821-2839).
ggattgtgatgttcaatgt

SEQ ID NO: 82817 - DNA, 19 bp, Homo sapiens
  siRNA target sequence for FLJ12735 (NM_024857.3,2822-2840).
gattgtgatgttcaatgta

SEQ ID NO: 82818 - DNA, 19 bp, Homo sapiens
  siRNA target sequence for FLJ12735 (NM_024857.3,2843-2861).
gcaaagcgtgacttcctaa

SEQ ID NO: 82819 - DNA, 19 bp, Homo sapiens
  siRNA target sequence for FLJ12735 (NM_024857.3,2844-2862).
caaagcgtgacttcctaat

SEQ ID NO: 82820 - DNA, 19 bp, Homo sapiens
  siRNA target sequence for FLJ12735 (NM_024857.3,2848-2866).
gcgtgacttcctaatgagt

SEQ ID NO: 82821 - DNA, 19 bp, Homo sapiens
  siRNA target sequence for FLJ12735 (NM_024857.3,2910-2928).
ctgcgctggatgtgtacaa

SEQ ID NO: 82822 - DNA, 19 bp, Homo sapiens
  siRNA target sequence for FLJ12735 (NM_024857.3,2954-2972).
gtcgtacatgtgcaacaaa

SEQ ID NO: 82823 - DNA, 19 bp, Homo sapiens
  siRNA target sequence for FLJ12735 (NM_024857.3,3015-3033).
gtcctctcttaactaaatt

SEQ ID NO: 82824 - DNA, 19 bp, Homo sapiens
  siRNA target sequence for FLJ12735 (NM_024857.3,3043-3061).
gaacactaaagtaatagat

SEQ ID NO: 82825 - DNA, 19 bp, Homo sapiens
  siRNA target sequence for FLJ12735 (NM_024857.3,3053-3071).
gtaatagatctctcaaaat

SEQ ID NO: 82826 - DNA, 19 bp, Homo sapiens
  siRNA target sequence for FLJ12735 (NM_024857.3,3112-3130).
gttgaaaagcggtaactct

SEQ ID NO: 82827 - DNA, 19 bp, Homo sapiens
  siRNA target sequence for FLJ12735 (NM_024857.3,3193-3211).
ggaaattaggtggtcaaat

SEQ ID NO: 82828 - DNA, 19 bp, Homo sapiens
  siRNA target sequence for FLJ12735 (NM_024857.3,3275-3293).
ctttcttccgagtgtcata

SEQ ID NO: 82829 - DNA, 19 bp, Homo sapiens
  siRNA target sequence for FLJ12735 (NM_024857.3,3279-3297).
cttccgagtgtcatagtaa

SEQ ID NO: 82830 - DNA, 19 bp, Homo sapiens
  siRNA target sequence for FLJ12735 (NM_024857.3,3288-3306).
gtcatagtaaacaagaact

SEQ ID NO: 82831 - DNA, 19 bp, Homo sapiens
  siRNA target sequence for FLJ12735 (NM_024857.3,3344-3362).
ctcgtagaagcagaaaatt

SEQ ID NO: 82832 - DNA, 19 bp, Homo sapiens
  siRNA target sequence for FLJ12735 (NM_024857.3,3533-3551).
gccagtgaacttataggaa

SEQ ID NO: 82833 - DNA, 19 bp, Homo sapiens
  siRNA target sequence for FLJ12735 (NM_024857.3,3535-3553).
cagtgaacttataggaaat

SEQ ID NO: 82834 - DNA, 19 bp, Homo sapiens
  siRNA target sequence for FLJ12735 (NM_024857.3,3554-3572).
gagttagctataaaaaagt

SEQ ID NO: 82835 - DNA, 19 bp, Homo sapiens
  siRNA target sequence for FLJ12735 (NM_024857.3,3560-3578).
gctataaaaaagttacata

SEQ ID NO: 82836 - DNA, 19 bp, Homo sapiens
  siRNA target sequence for FLJ12735 (NM_024857.3,3664-3682).
ctcgggtggcatagacttt

SEQ ID NO: 82837 - DNA, 19 bp, Homo sapiens
  siRNA target sequence for FLJ12735 (NM_024857.3,3666-3684).
cgggtggcatagactttaa

SEQ ID NO: 82838 - DNA, 19 bp, Homo sapiens
  siRNA target sequence for FLJ12735 (NM_024857.3,3667-3685).
gggtggcatagactttaaa

SEQ ID NO: 82839 - DNA, 19 bp, Homo sapiens
  siRNA target sequence for FLJ12735 (NM_024857.3,3711-3729).
gtcgtctttgcaatactgt

SEQ ID NO: 82840 - DNA, 19 bp, Homo sapiens
  siRNA target sequence for FLJ12735 (NM_024857.3,3787-3805).
ggagcttggatttaagata

SEQ ID NO: 82841 - DNA, 19 bp, Homo sapiens
  siRNA target sequence for FLJ12735 (NM_024857.3,3829-3847).
gcgcagtggtagacaaatt

SEQ ID NO: 82842 - DNA, 19 bp, Homo sapiens
  siRNA target sequence for FLJ12735 (NM_024857.3,3837-3855).
gtagacaaattctatctca

SEQ ID NO: 82843 - DNA, 19 bp, Homo sapiens
  siRNA target sequence for FLJ12735 (NM_024857.3,3870-3888).
ctcagtcccatcaagtaga

SEQ ID NO: 82844 - DNA, 19 bp, Homo sapiens
  siRNA target sequence for FLJ12735 (NM_024857.3,3874-3892).
gtcccatcaagtagacaaa

SEQ ID NO: 82845 - DNA, 19 bp, Homo sapiens
  siRNA target sequence for FLJ12735 (NM_024857.3,3889-3907).
caaacaaggtgtaaactca

SEQ ID NO: 82846 - DNA, 19 bp, Homo sapiens
  siRNA target sequence for FLJ12735 (NM_024857.3,3893-3911).
caaggtgtaaactcacaaa

SEQ ID NO: 82847 - DNA, 19 bp, Homo sapiens
  siRNA target sequence for FLJ12735 (NM_024857.3,3937-3955).
cataggcaagtcaccaaaa

SEQ ID NO: 82848 - DNA, 19 bp, Homo sapiens
  siRNA target sequence for FLJ12735 (NM_024857.3,3942-3960).
gcaagtcaccaaaaaaaat

SEQ ID NO: 82849 - DNA, 19 bp, Homo sapiens
  siRNA target sequence for FLJ12735 (NM_024857.3,3968-3986).
cctaagaaagttgttacat

SEQ ID NO: 82850 - DNA, 19 bp, Homo sapiens
  siRNA target sequence for FLJ12735 (NM_024857.3,4047-4065).
ccaaaaccttggcaaatta

SEQ ID NO: 82851 - DNA, 19 bp, Homo sapiens
  siRNA target sequence for FLJ12735 (NM_024857.3,4157-4175).
caaattactcagactaaat

SEQ ID NO: 82852 - DNA, 19 bp, Homo sapiens
  siRNA target sequence for FLJ12735 (NM_024857.3,4242-4260).
catctcttattctttttga

SEQ ID NO: 82853 - DNA, 19 bp, Homo sapiens
  siRNA target sequence for FLJ12735 (NM_024857.3,4283-4301).
gaagatgctgggtttttga

SEQ ID NO: 82854 - DNA, 19 bp, Homo sapiens
  siRNA target sequence for FLJ12735 (NM_024857.3,4314-4332).
cattcatggcaacaactaa

SEQ ID NO: 82855 - DNA, 19 bp, Homo sapiens
  siRNA target sequence for FLJ12735 (NM_024857.3,4329-4347).
ctaaacgacctgtaatcct

SEQ ID NO: 82856 - DNA, 19 bp, Homo sapiens
  siRNA target sequence for FLJ12735 (NM_024857.3,4334-4352).
cgacctgtaatccttacta

SEQ ID NO: 82857 - DNA, 19 bp, Homo sapiens
  siRNA target sequence for FLJ12735 (NM_024857.3,4350-4368).
ctacaagtgacccaacatt

SEQ ID NO: 82858 - DNA, 19 bp, Homo sapiens
  siRNA target sequence for FLJ12735 (NM_024857.3,4358-4376).
gacccaacatttagtttaa

SEQ ID NO: 82859 - DNA, 19 bp, Homo sapiens
  siRNA target sequence for FLJ12735 (NM_024857.3,4361-4379).
ccaacatttagtttaatgt

SEQ ID NO: 82860 - DNA, 19 bp, Homo sapiens
  siRNA target sequence for FLJ12735 (NM_024857.3,4362-4380).
caacatttagtttaatgtt

SEQ ID NO: 82861 - DNA, 19 bp, Homo sapiens
  siRNA target sequence for FLJ12735 (NM_024857.3,4501-4519).
gttaactgcaaatacttgt

SEQ ID NO: 82862 - DNA, 19 bp, Homo sapiens
  siRNA target sequence for FLJ12735 (NM_024857.3,4533-4551).
gtatcctttacttacaatt

SEQ ID NO: 82863 - DNA, 19 bp, Homo sapiens
  siRNA target sequence for FLJ12735 (NM_024857.3,4598-4616).
ctttatcgtggaaatagca

SEQ ID NO: 82864 - DNA, 19 bp, Homo sapiens
  siRNA target sequence for FLJ12735 (NM_024857.3,4614-4632).
gcagaaatgtacaactagt

SEQ ID NO: 82865 - DNA, 19 bp, Homo sapiens
  siRNA target sequence for FLJ12735 (NM_024857.3,4638-4656).
ctgaacatggccttgataa

SEQ ID NO: 82866 - DNA, 19 bp, Homo sapiens
  siRNA target sequence for FLJ12735 (NM_024857.3,4640-4658).
gaacatggccttgataaca

SEQ ID NO: 82867 - DNA, 19 bp, Homo sapiens
  siRNA target sequence for FLJ12735 (NM_024857.3,4688-4706).
cgtgtagaccttccaaaat

SEQ ID NO: 82868 - DNA, 19 bp, Homo sapiens
  siRNA target sequence for FLJ12735 (NM_024857.3,4717-4735).
ctgtgctgagaccttgttt

SEQ ID NO: 82869 - DNA, 19 bp, Homo sapiens
  siRNA target sequence for FLJ12735 (NM_024857.3,4889-4907).
ctaccattaccagttgata

SEQ ID NO: 82870 - DNA, 19 bp, Homo sapiens
  siRNA target sequence for FLJ12735 (NM_024857.3,4893-4911).
cattaccagttgataccat

SEQ ID NO: 82871 - DNA, 19 bp, Homo sapiens
  siRNA target sequence for FLJ12735 (NM_024857.3,4904-4922).
gataccattccagaaacta

SEQ ID NO: 82872 - DNA, 19 bp, Homo sapiens
  siRNA target sequence for FLJ12735 (NM_024857.3,4957-4975).
cagtgcagcaacaaaaagt

SEQ ID NO: 82873 - DNA, 19 bp, Homo sapiens
  siRNA target sequence for FLJ12735 (NM_024857.3,4978-4996).
gaattgtcttgctaggaaa

SEQ ID NO: 82874 - DNA, 19 bp, Homo sapiens
  siRNA target sequence for FLJ12735 (NM_024857.3,5007-5025).
gagaacagccattgaaaaa

SEQ ID NO: 82875 - DNA, 19 bp, Homo sapiens
  siRNA target sequence for FLJ12735 (NM_024857.3,5009-5027).
gaacagccattgaaaaagt

SEQ ID NO: 82876 - DNA, 19 bp, Homo sapiens
  siRNA target sequence for FLJ12735 (NM_024857.3,5092-5110).
cttggactttcctgatcaa

SEQ ID NO: 82877 - DNA, 19 bp, Homo sapiens
  siRNA target sequence for FLJ12735 (NM_024857.3,5096-5114).
gactttcctgatcaatcta

SEQ ID NO: 82878 - DNA, 19 bp, Homo sapiens
  siRNA target sequence for FLJ12735 (NM_024857.3,5098-5116).
ctttcctgatcaatctatt

SEQ ID NO: 82879 - DNA, 19 bp, Homo sapiens
  siRNA target sequence for FLJ12735 (NM_024857.3,5163-5181).
ccggagacgaagaaagcaa

SEQ ID NO: 82880 - DNA, 19 bp, Homo sapiens
  siRNA target sequence for FLJ12735 (NM_024857.3,5209-5227).
gacaaagaaatctattcct

SEQ ID NO: 82881 - DNA, 19 bp, Homo sapiens
  siRNA target sequence for FLJ12735 (NM_024857.3,5266-5284).
ccttgtttctcattgttta

SEQ ID NO: 82882 - DNA, 19 bp, Homo sapiens
  siRNA target sequence for FLJ12735 (NM_024857.3,5327-5345).
gcacttttaactgatgtaa

SEQ ID NO: 82883 - DNA, 19 bp, Homo sapiens
  siRNA target sequence for FLJ12735 (NM_024857.3,5337-5355).
ctgatgtaagggaacaaaa

SEQ ID NO: 82884 - DNA, 19 bp, Homo sapiens
  siRNA target sequence for FLJ12735 (NM_024857.3,5374-5392).
ctttagttggacaaatgga

SEQ ID NO: 82885 - DNA, 19 bp, Homo sapiens
  siRNA target sequence for FLJ12735 (NM_024857.3,5483-5501).
gaagctctcagctttacta

SEQ ID NO: 82886 - DNA, 19 bp, Homo sapiens
  siRNA target sequence for FLJ12735 (NM_024857.3,5491-5509).
cagctttactaaatgttct

SEQ ID NO: 82887 - DNA, 19 bp, Homo sapiens
  siRNA target sequence for FLJ12735 (NM_024857.3,5505-5523).
gttcttctgctatttcaaa

SEQ ID NO: 82888 - DNA, 19 bp, Homo sapiens
  siRNA target sequence for FLJ12735 (NM_024857.3,5525-5543).
gcattggaaaccttgaatt

SEQ ID NO: 82889 - DNA, 19 bp, Homo sapiens
  siRNA target sequence for FLJ12735 (NM_024857.3,5564-5582).
gatccaaccaacgatctta

SEQ ID NO: 82890 - DNA, 19 bp, Homo sapiens
  siRNA target sequence for FLJ12735 (NM_024857.3,5567-5585).
ccaaccaacgatcttactt

SEQ ID NO: 82891 - DNA, 19 bp, Homo sapiens
  siRNA target sequence for FLJ12735 (NM_024857.3,5568-5586).
caaccaacgatcttacttt

SEQ ID NO: 82892 - DNA, 19 bp, Homo sapiens
  siRNA target sequence for FLJ12735 (NM_024857.3,5571-5589).
ccaacgatcttacttttta

SEQ ID NO: 82893 - DNA, 19 bp, Homo sapiens
  siRNA target sequence for FLJ12735 (NM_024857.3,5572-5590).
caacgatcttactttttat

SEQ ID NO: 82894 - DNA, 19 bp, Homo sapiens
  siRNA target sequence for FLJ12735 (NM_024857.3,5595-5613).
cacaaaagcgcaataatgt

SEQ ID NO: 82895 - DNA, 19 bp, Homo sapiens
  siRNA target sequence for FLJ12735 (NM_024857.3,5597-5615).
caaaagcgcaataatgtat

SEQ ID NO: 82896 - DNA, 19 bp, Homo sapiens
  siRNA target sequence for FLJ12735 (NM_024857.3,5628-5646).
cagcagctaatttagacaa

SEQ ID NO: 82897 - DNA, 19 bp, Homo sapiens
  siRNA target sequence for FLJ12735 (NM_024857.3,5633-5651).
gctaatttagacaatgctt

SEQ ID NO: 82898 - DNA, 19 bp, Homo sapiens
  siRNA target sequence for FLJ12735 (NM_024857.3,5656-5674).
gaggatatcagtcattaaa

SEQ ID NO: 82899 - DNA, 19 bp, Homo sapiens
  siRNA target sequence for FLJ12735 (NM_024857.3,5659-5677).
gatatcagtcattaaaagt

SEQ ID NO: 82900 - DNA, 19 bp, Homo sapiens
  siRNA target sequence for FLJ12735 (NM_024857.3,5696-5714).
cttctctatgtgggtaata

SEQ ID NO: 82901 - DNA, 19 bp, Homo sapiens
  siRNA target sequence for FLJ12735 (NM_024857.3,5701-5719).
ctatgtgggtaatagacaa

SEQ ID NO: 82902 - DNA, 19 bp, Homo sapiens
  siRNA target sequence for FLJ12735 (NM_024857.3,5715-5733).
gacaagctagtataattga

SEQ ID NO: 82903 - DNA, 19 bp, Homo sapiens
  siRNA target sequence for FLJ12735 (NM_024857.3,5721-5739).
ctagtataattgaatacct

SEQ ID NO: 82904 - DNA, 19 bp, Homo sapiens
  siRNA target sequence for FLJ12735 (NM_024857.3,5741-5759).
ccaacccttcgaaacatct

SEQ ID NO: 82905 - DNA, 19 bp, Homo sapiens
  siRNA target sequence for FLJ12735 (NM_024857.3,5760-5778).
gtaagactgagaagctaaa

SEQ ID NO: 82906 - DNA, 19 bp, Homo sapiens
  siRNA target sequence for FLJ12969 (NM_022838.1,682-700).
ctggcctgcaagatggaat

SEQ ID NO: 82907 - DNA, 19 bp, Homo sapiens
  siRNA target sequence for FLJ12969 (NM_022838.1,715-733).
ctgctagagtgaatggtaa

SEQ ID NO: 82908 - DNA, 19 bp, Homo sapiens
  siRNA target sequence for FLJ12969 (NM_022838.1,717-735).
gctagagtgaatggtaaaa

SEQ ID NO: 82909 - DNA, 19 bp, Homo sapiens
  siRNA target sequence for FLJ12969 (NM_022838.1,866-884).
gatcaaggtggaagataca

SEQ ID NO: 82910 - DNA, 19 bp, Homo sapiens
  siRNA target sequence for FLJ12969 (NM_022838.1,869-887).
caaggtggaagatacaact

SEQ ID NO: 82911 - DNA, 19 bp, Homo sapiens
  siRNA target sequence for FLJ12969 (NM_022838.1,875-893).
ggaagatacaactaagact

SEQ ID NO: 82912 - DNA, 19 bp, Homo sapiens
  siRNA target sequence for FLJ12969 (NM_022838.1,876-894).
gaagatacaactaagacta

SEQ ID NO: 82913 - DNA, 19 bp, Homo sapiens
  siRNA target sequence for FLJ12969 (NM_022838.1,895-913).
gagtcatggttgagactaa

SEQ ID NO: 82914 - DNA, 19 bp, Homo sapiens
  siRNA target sequence for FLJ12969 (NM_022838.1,897-915).
gtcatggttgagactaaga

SEQ ID NO: 82915 - DNA, 19 bp, Homo sapiens
  siRNA target sequence for FLJ12969 (NM_022838.1,923-941).
cctggcagaacgcagtata

SEQ ID NO: 82916 - DNA, 19 bp, Homo sapiens
  siRNA target sequence for FLJ12969 (NM_022838.1,974-992).
gtctagggtcagtactgta

SEQ ID NO: 82917 - DNA, 19 bp, Homo sapiens
  siRNA target sequence for FLJ12969 (NM_022838.1,979-997).
gggtcagtactgtaaccaa

SEQ ID NO: 82918 - DNA, 19 bp, Homo sapiens
  siRNA target sequence for FLJ12969 (NM_022838.1,1206-1224).
gagacctctcttcaagttt

SEQ ID NO: 82919 - DNA, 19 bp, Homo sapiens
  siRNA target sequence for FLJ12969 (NM_022838.1,1268-1286).
caaacccacacttactata

SEQ ID NO: 82920 - DNA, 19 bp, Homo sapiens
  siRNA target sequence for FLJ12969 (NM_022838.1,1273-1291).
ccacacttactataaaaca

SEQ ID NO: 82921 - DNA, 19 bp, Homo sapiens
  siRNA target sequence for FLJ12969 (NM_022838.1,1386-1404).
gttgagaccttgattgaaa

SEQ ID NO: 82922 - DNA, 19 bp, Homo sapiens
  siRNA target sequence for FLJ12969 (NM_022838.1,1429-1447).
ccaagatcccaccttatca

SEQ ID NO: 82923 - DNA, 19 bp, Homo sapiens
  siRNA target sequence for FLJ12969 (NM_022838.1,1430-1448).
caagatcccaccttatcat

SEQ ID NO: 82924 - DNA, 19 bp, Homo sapiens
  siRNA target sequence for FLJ12969 (NM_022838.1,1535-1553).
caaatcacgtggctttagt

SEQ ID NO: 82925 - DNA, 19 bp, Homo sapiens
  siRNA target sequence for FLJ12969 (NM_022838.1,1540-1558).
cacgtggctttagtttaga

SEQ ID NO: 82926 - DNA, 19 bp, Homo sapiens
  siRNA target sequence for FLJ12969 (NM_022838.1,1561-1579).
ctaaagagtttgataaact

SEQ ID NO: 82927 - DNA, 19 bp, Homo sapiens
  siRNA target sequence for FLJ12969 (NM_022838.1,1578-1596).
cttgttgccctccttaagt

SEQ ID NO: 82928 - DNA, 19 bp, Homo sapiens
  siRNA target sequence for FLJ12969 (NM_022838.1,1584-1602).
gccctccttaagttaacta

SEQ ID NO: 82929 - DNA, 19 bp, Homo sapiens
  siRNA target sequence for FLJ12969 (NM_022838.1,1585-1603).
ccctccttaagttaactaa

SEQ ID NO: 82930 - DNA, 19 bp, Homo sapiens
  siRNA target sequence for FLJ12969 (NM_022838.1,1589-1607).
ccttaagttaactaaggat

SEQ ID NO: 82931 - DNA, 19 bp, Homo sapiens
  siRNA target sequence for FLJ12969 (NM_022838.1,1690-1708).
gtattactgttatgattga

SEQ ID NO: 82932 - DNA, 19 bp, Homo sapiens
  siRNA target sequence for FLJ12969 (NM_022838.1,1696-1714).
ctgttatgattgaaaactt

SEQ ID NO: 82933 - DNA, 19 bp, Homo sapiens
  siRNA target sequence for FLJ12969 (NM_022838.1,1718-1736).
caataatcccaatgttaaa

SEQ ID NO: 82934 - DNA, 19 bp, Homo sapiens
  siRNA target sequence for FLJ12969 (NM_022838.1,1792-1810).
caaaatcaggggagtcata

SEQ ID NO: 82935 - DNA, 19 bp, Homo sapiens
  siRNA target sequence for FLJ12969 (NM_022838.1,1801-1819).
gggagtcatatatacatca

SEQ ID NO: 82936 - DNA, 19 bp, Homo sapiens
  siRNA target sequence for FLJ12969 (NM_022838.1,1802-1820).
ggagtcatatatacatcaa

SEQ ID NO: 82937 - DNA, 19 bp, Homo sapiens
  siRNA target sequence for FLJ12969 (NM_022838.1,1821-1839).
gtttgtaaaggcataatct

SEQ ID NO: 82938 - DNA, 19 bp, Homo sapiens
  siRNA target sequence for FLJ12969 (NM_022838.1,1868-1886).
ggctggactgaaattacta

SEQ ID NO: 82939 - DNA, 19 bp, Homo sapiens
  siRNA target sequence for FLJ12969 (NM_022838.1,1884-1902).
ctagggcacttgagtataa

SEQ ID NO: 82940 - DNA, 19 bp, Homo sapiens
  siRNA target sequence for FLJ12969 (NM_022838.1,1887-1905).
gggcacttgagtataaaat

SEQ ID NO: 82941 - DNA, 19 bp, Homo sapiens
  siRNA target sequence for FLJ12969 (NM_022838.1,1916-1934).
ctatgtgattaccagttat

SEQ ID NO: 82942 - DNA, 19 bp, Homo sapiens
  siRNA target sequence for FLJ12969 (NM_022838.1,1922-1940).
gattaccagttatattcca

SEQ ID NO: 82943 - DNA, 19 bp, Homo sapiens
  siRNA target sequence for FLJ12969 (NM_022838.1,1998-2016).
gtgttttcgtgtttgtcta

SEQ ID NO: 82944 - DNA, 19 bp, Homo sapiens
  siRNA target sequence for FLJ12969 (NM_022838.1,2005-2023).
cgtgtttgtctaaaaatca

SEQ ID NO: 82945 - DNA, 19 bp, Homo sapiens
  siRNA target sequence for FLJ12969 (NM_022838.1,2050-2068).
ccaaagtactgtcatcatt

SEQ ID NO: 82946 - DNA, 19 bp, Homo sapiens
  siRNA target sequence for FLJ12969 (NM_022838.1,2070-2088).
gttgcaccctttaacaaga

SEQ ID NO: 82947 - DNA, 19 bp, Homo sapiens
  siRNA target sequence for FLJ12969 (NM_022838.1,2093-2111).
gtcaaaggccaatattctt

SEQ ID NO: 82948 - DNA, 19 bp, Homo sapiens
  siRNA target sequence for FLJ12969 (NM_022838.1,2095-2113).
caaaggccaatattcttaa

SEQ ID NO: 82949 - DNA, 19 bp, Homo sapiens
  siRNA target sequence for FLJ12969 (NM_022838.1,2100-2118).
gccaatattcttaatatta

SEQ ID NO: 82950 - DNA, 19 bp, Homo sapiens
  siRNA target sequence for FLJ12969 (NM_022838.1,2101-2119).
ccaatattcttaatattat

SEQ ID NO: 82951 - DNA, 19 bp, Homo sapiens
  siRNA target sequence for FLJ12969 (NM_022838.1,2177-2195).
ggaaaagttcactaaatct

SEQ ID NO: 82952 - DNA, 19 bp, Homo sapiens
  siRNA target sequence for FLJ12969 (NM_022838.1,2288-2306).
catacgattaatactaaaa

SEQ ID NO: 82953 - DNA, 19 bp, Homo sapiens
  siRNA target sequence for FLJ13490 (NM_024942.1,245-263).
gtcaggatctggtgatttt

SEQ ID NO: 82954 - DNA, 19 bp, Homo sapiens
  siRNA target sequence for FLJ13490 (NM_024942.1,342-360).
cgcttctattggcatttta

SEQ ID NO: 82955 - DNA, 19 bp, Homo sapiens
  siRNA target sequence for FLJ13490 (NM_024942.1,343-361).
gcttctattggcattttaa

SEQ ID NO: 82956 - DNA, 19 bp, Homo sapiens
  siRNA target sequence for FLJ13490 (NM_024942.1,576-594).
catgagatcagtttttgca

SEQ ID NO: 82957 - DNA, 19 bp, Homo sapiens
  siRNA target sequence for FLJ13490 (NM_024942.1,812-830).
ctaccttaggaaccttaaa

SEQ ID NO: 82958 - DNA, 19 bp, Homo sapiens
  siRNA target sequence for FLJ13490 (NM_024942.1,967-985).
gttatgcctcaaaaccatt

SEQ ID NO: 82959 - DNA, 19 bp, Homo sapiens
  siRNA target sequence for FLJ13490 (NM_024942.1,1133-1151).
ccgagtgtcaggaaaacat

SEQ ID NO: 82960 - DNA, 19 bp, Homo sapiens
  siRNA target sequence for FLJ13490 (NM_024942.1,1189-1207).
gaagagcaatctatttgct

SEQ ID NO: 82961 - DNA, 19 bp, Homo sapiens
  siRNA target sequence for FLJ13490 (NM_024942.1,1329-1347).
ggatttgctgcaaaatcct

SEQ ID NO: 82962 - DNA, 19 bp, Homo sapiens
  siRNA target sequence for FLJ13490 (NM_024942.1,1359-1377).
cactgggatacctctaaga

SEQ ID NO: 82963 - DNA, 19 bp, Homo sapiens
  siRNA target sequence for FLJ13490 (NM_024942.1,1361-1379).
ctgggatacctctaagaca

SEQ ID NO: 82964 - DNA, 19 bp, Homo sapiens
  siRNA target sequence for FLJ13490 (NM_024942.1,1363-1381).
gggatacctctaagacatt

SEQ ID NO: 82965 - DNA, 19 bp, Homo sapiens
  siRNA target sequence for FLJ13490 (NM_024942.1,1365-1383).
gatacctctaagacattat

SEQ ID NO: 82966 - DNA, 19 bp, Homo sapiens
  siRNA target sequence for FLJ14600 (NM_032810.2,462-480).
cagtgacatactttactat

SEQ ID NO: 82967 - DNA, 19 bp, Homo sapiens
  siRNA target sequence for FLJ14600 (NM_032810.2,464-482).
gtgacatactttactatca

SEQ ID NO: 82968 - DNA, 19 bp, Homo sapiens
  siRNA target sequence for FLJ14600 (NM_032810.2,466-484).
gacatactttactatcaaa

SEQ ID NO: 82969 - DNA, 19 bp, Homo sapiens
  siRNA target sequence for FLJ14600 (NM_032810.2,486-504).
ggatggtagatgcaattga

SEQ ID NO: 82970 - DNA, 19 bp, Homo sapiens
  siRNA target sequence for FLJ14600 (NM_032810.2,487-505).
gatggtagatgcaattgat

SEQ ID NO: 82971 - DNA, 19 bp, Homo sapiens
  siRNA target sequence for FLJ14600 (NM_032810.2,617-635).
cttgtagaccctcttaata

SEQ ID NO: 82972 - DNA, 19 bp, Homo sapiens
  siRNA target sequence for FLJ14600 (NM_032810.2,638-656).
catgttacttggagtgata

SEQ ID NO: 82973 - DNA, 19 bp, Homo sapiens
  siRNA target sequence for FLJ14600 (NM_032810.2,651-669).
gtgatatagcaggtttaga

SEQ ID NO: 82974 - DNA, 19 bp, Homo sapiens
  siRNA target sequence for FLJ14600 (NM_032810.2,696-714).
cagtcatcttacctatcaa

SEQ ID NO: 82975 - DNA, 19 bp, Homo sapiens
  siRNA target sequence for FLJ14600 (NM_032810.2,722-740).
catttgtttgagaattcca

SEQ ID NO: 82976 - DNA, 19 bp, Homo sapiens
  siRNA target sequence for FLJ14600 (NM_032810.2,783-801).
caggctgtggtaaaacgtt

SEQ ID NO: 82977 - DNA, 19 bp, Homo sapiens
  siRNA target sequence for FLJ14600 (NM_032810.2,831-849).
gctgtcgatttattaacct

SEQ ID NO: 82978 - DNA, 19 bp, Homo sapiens
  siRNA target sequence for FLJ14600 (NM_032810.2,832-850).
ctgtcgatttattaacctt

SEQ ID NO: 82979 - DNA, 19 bp, Homo sapiens
  siRNA target sequence for FLJ14600 (NM_032810.2,913-931).
ctcccttgccataaagcta

SEQ ID NO: 82980 - DNA, 19 bp, Homo sapiens
  siRNA target sequence for FLJ14600 (NM_032810.2,929-947).
ctacaaccatccatcatct

SEQ ID NO: 82981 - DNA, 19 bp, Homo sapiens
  siRNA target sequence for FLJ14600 (NM_032810.2,936-954).
catccatcatctttataga

SEQ ID NO: 82982 - DNA, 19 bp, Homo sapiens
  siRNA target sequence for FLJ14600 (NM_032810.2,971-989).
ctacgaaaccgttcaagtt

SEQ ID NO: 82983 - DNA, 19 bp, Homo sapiens
  siRNA target sequence for FLJ14600 (NM_032810.2,1062-1080).
gctgccaggtcatagtaat

SEQ ID NO: 82984 - DNA, 19 bp, Homo sapiens
  siRNA target sequence for FLJ14600 (NM_032810.2,1103-1121).
gaccttgactcggctataa

SEQ ID NO: 82985 - DNA, 19 bp, Homo sapiens
  siRNA target sequence for FLJ14600 (NM_032810.2,1106-1124).
cttgactcggctataatga

SEQ ID NO: 82986 - DNA, 19 bp, Homo sapiens
  siRNA target sequence for FLJ14600 (NM_032810.2,1109-1127).
gactcggctataatgagaa

SEQ ID NO: 82987 - DNA, 19 bp, Homo sapiens
  siRNA target sequence for FLJ14600 (NM_032810.2,1113-1131).
cggctataatgagaagaat

SEQ ID NO: 82988 - DNA, 19 bp, Homo sapiens
  siRNA target sequence for FLJ14600 (NM_032810.2,1266-1284).
gaagtgacctaaaagagat

SEQ ID NO: 82989 - DNA, 19 bp, Homo sapiens
  siRNA target sequence for FLJ14600 (NM_032810.2,1295-1313).
gctgccctcctctgtgtta

SEQ ID NO: 82990 - DNA, 19 bp, Homo sapiens
  siRNA target sequence for FLJ14600 (NM_032810.2,1384-1402).
cctgcatcgggcaattgaa

SEQ ID NO: 82991 - DNA, 19 bp, Homo sapiens
  siRNA target sequence for FLJ14600 (NM_032810.2,1391-1409).
cgggcaattgaaaagatga

SEQ ID NO: 82992 - DNA, 19 bp, Homo sapiens
  siRNA target sequence for FLJ14600 (NM_032810.2,1420-1438).
ggatgcagcatttcagaat

SEQ ID NO: 82993 - DNA, 19 bp, Homo sapiens
  siRNA target sequence for FLJ14813 (NM_032844.1,116-134).
gaggagggcgtgaatagga

SEQ ID NO: 82994 - DNA, 19 bp, Homo sapiens
  siRNA target sequence for FLJ14813 (NM_032844.1,161-179).
gaggaattcagcatagtga

SEQ ID NO: 82995 - DNA, 19 bp, Homo sapiens
  siRNA target sequence for FLJ14813 (NM_032844.1,219-237).
ggcagaaaggcggcaaatt

SEQ ID NO: 82996 - DNA, 19 bp, Homo sapiens
  siRNA target sequence for FLJ14813 (NM_032844.1,223-241).
gaaaggcggcaaattgtat

SEQ ID NO: 82997 - DNA, 19 bp, Homo sapiens
  siRNA target sequence for FLJ14813 (NM_032844.1,231-249).
gcaaattgtatgcagtaaa

SEQ ID NO: 82998 - DNA, 19 bp, Homo sapiens
  siRNA target sequence for FLJ14813 (NM_032844.1,365-383).
cagtctgcaaacaatgtct

SEQ ID NO: 82999 - DNA, 19 bp, Homo sapiens
  siRNA target sequence for FLJ14813 (NM_032844.1,380-398).
gtctacttggtaatggaat

SEQ ID NO: 83000 - DNA, 19 bp, Homo sapiens
  siRNA target sequence for FLJ14813 (NM_032844.1,539-557).
ccggacaatatgcttattt

SEQ ID NO: 83001 - DNA, 19 bp, Homo sapiens
  siRNA target sequence for FLJ14813 (NM_032844.1,541-559).
ggacaatatgcttatttct

SEQ ID NO: 83002 - DNA, 19 bp, Homo sapiens
  siRNA target sequence for FLJ14813 (NM_032844.1,558-576).
ctaatgagggtcatattaa

SEQ ID NO: 83003 - DNA, 19 bp, Homo sapiens
  siRNA target sequence for FLJ14813 (NM_032844.1,590-608).
ggcctttcaaaagttactt

SEQ ID NO: 83004 - DNA, 19 bp, Homo sapiens
  siRNA target sequence for FLJ14813 (NM_032844.1,617-635).
gatattaatatgatggata

SEQ ID NO: 83005 - DNA, 19 bp, Homo sapiens
  siRNA target sequence for FLJ14813 (NM_032844.1,628-646).
gatggatatccttacaaca

SEQ ID NO: 83006 - DNA, 19 bp, Homo sapiens
  siRNA target sequence for FLJ14813 (NM_032844.1,657-675).
caaaacctagacaagatta

SEQ ID NO: 83007 - DNA, 19 bp, Homo sapiens
  siRNA target sequence for FLJ14813 (NM_032844.1,692-710).
caagtgttatcgcttatca

SEQ ID NO: 83008 - DNA, 19 bp, Homo sapiens
  siRNA target sequence for FLJ14813 (NM_032844.1,712-730).
ctcgttgggatttaacaca

SEQ ID NO: 83009 - DNA, 19 bp, Homo sapiens
  siRNA target sequence for FLJ14813 (NM_032844.1,773-791).
gcctgtctgtctgaaacat

SEQ ID NO: 83010 - DNA, 19 bp, Homo sapiens
  siRNA target sequence for FLJ14813 (NM_032844.1,816-834).
gccctatgtctgtagatca

SEQ ID NO: 83011 - DNA, 19 bp, Homo sapiens
  siRNA target sequence for FLJ14813 (NM_032844.1,817-835).
ccctatgtctgtagatcaa

SEQ ID NO: 83012 - DNA, 19 bp, Homo sapiens
  siRNA target sequence for FLJ14813 (NM_032844.1,818-836).
cctatgtctgtagatcaaa

SEQ ID NO: 83013 - DNA, 19 bp, Homo sapiens
  siRNA target sequence for FLJ14813 (NM_032844.1,838-856).
ggacactacgccttattct

SEQ ID NO: 83014 - DNA, 19 bp, Homo sapiens
  siRNA target sequence for FLJ14813 (NM_032844.1,839-857).
gacactacgccttattcta

SEQ ID NO: 83015 - DNA, 19 bp, Homo sapiens
  siRNA target sequence for FLJ14813 (NM_032844.1,846-864).
cgccttattctagcaaatt

SEQ ID NO: 83016 - DNA, 19 bp, Homo sapiens
  siRNA target sequence for FLJ14813 (NM_032844.1,847-865).
gccttattctagcaaatta

SEQ ID NO: 83017 - DNA, 19 bp, Homo sapiens
  siRNA target sequence for FLJ14813 (NM_032844.1,907-925).
gcctgtgaagtgtctaact

SEQ ID NO: 83018 - DNA, 19 bp, Homo sapiens
  siRNA target sequence for FLJ14813 (NM_032844.1,1061-1079).
gcattgggcccaacaatga

SEQ ID NO: 83019 - DNA, 19 bp, Homo sapiens
  siRNA target sequence for FLJ14813 (NM_032844.1,1062-1080).
cattgggcccaacaatgat

SEQ ID NO: 83020 - DNA, 19 bp, Homo sapiens
  siRNA target sequence for FLJ14813 (NM_032844.1,1081-1099).
gagttggaatgcagttgaa

SEQ ID NO: 83021 - DNA, 19 bp, Homo sapiens
  siRNA target sequence for FLJ14813 (NM_032844.1,1083-1101).
gttggaatgcagttgaaaa

SEQ ID NO: 83022 - DNA, 19 bp, Homo sapiens
  siRNA target sequence for FLJ14813 (NM_032844.1,1097-1115).
gaaaagttatgcgcaaaat

SEQ ID NO: 83023 - DNA, 19 bp, Homo sapiens
  siRNA target sequence for FLJ14813 (NM_032844.1,1125-1143).
ccattgagacgaaaggttt

SEQ ID NO: 83024 - DNA, 19 bp, Homo sapiens
  siRNA target sequence for FLJ14813 (NM_032844.1,1134-1152).
cgaaaggtttcaataaaaa

SEQ ID NO: 83025 - DNA, 19 bp, Homo sapiens
  siRNA target sequence for FLJ14813 (NM_032844.1,1300-1318).
cactgacacaagtcagtta

SEQ ID NO: 83026 - DNA, 19 bp, Homo sapiens
  siRNA target sequence for FLJ14813 (NM_032844.1,1304-1322).
gacacaagtcagttaggtt

SEQ ID NO: 83027 - DNA, 19 bp, Homo sapiens
  siRNA target sequence for FLJ14813 (NM_032844.1,1419-1437).
ccagtccttgtaaaaaaat

SEQ ID NO: 83028 - DNA, 19 bp, Homo sapiens
  siRNA target sequence for FLJ14813 (NM_032844.1,1420-1438).
cagtccttgtaaaaaaatt

SEQ ID NO: 83029 - DNA, 19 bp, Homo sapiens
  siRNA target sequence for FLJ14813 (NM_032844.1,1455-1473).
cttgtgtagagtataagca

SEQ ID NO: 83030 - DNA, 19 bp, Homo sapiens
  siRNA target sequence for FLJ14813 (NM_032844.1,1458-1476).
gtgtagagtataagcataa

SEQ ID NO: 83031 - DNA, 19 bp, Homo sapiens
  siRNA target sequence for FLJ14813 (NM_032844.1,1472-1490).
cataacgaaatgacaaatt

SEQ ID NO: 83032 - DNA, 19 bp, Homo sapiens
  siRNA target sequence for FLJ14813 (NM_032844.1,1540-1558).
gctatcagtgcacaaaagt

SEQ ID NO: 83033 - DNA, 19 bp, Homo sapiens
  siRNA target sequence for FLJ14813 (NM_032844.1,1549-1567).
gcacaaaagtcaacaaaat

SEQ ID NO: 83034 - DNA, 19 bp, Homo sapiens
  siRNA target sequence for FLJ14813 (NM_032844.1,1634-1652).
cctataccaatgatagcaa

SEQ ID NO: 83035 - DNA, 19 bp, Homo sapiens
  siRNA target sequence for FLJ14813 (NM_032844.1,1641-1659).
caatgatagcaaaaaacct

SEQ ID NO: 83036 - DNA, 19 bp, Homo sapiens
  siRNA target sequence for FLJ14813 (NM_032844.1,1699-1717).
gagggactacttaagttct

SEQ ID NO: 83037 - DNA, 19 bp, Homo sapiens
  siRNA target sequence for FLJ14813 (NM_032844.1,1702-1720).
ggactacttaagttctagt

SEQ ID NO: 83038 - DNA, 19 bp, Homo sapiens
  siRNA target sequence for FLJ14813 (NM_032844.1,1703-1721).
gactacttaagttctagtt

SEQ ID NO: 83039 - DNA, 19 bp, Homo sapiens
  siRNA target sequence for FLJ14813 (NM_032844.1,1724-1742).
ctatgttctgatgatgata

SEQ ID NO: 83040 - DNA, 19 bp, Homo sapiens
  siRNA target sequence for FLJ14813 (NM_032844.1,1739-1757).
gatagagcttctaaaaata

SEQ ID NO: 83041 - DNA, 19 bp, Homo sapiens
  siRNA target sequence for FLJ14813 (NM_032844.1,1814-1832).
gaaagtcagcccttagatt

SEQ ID NO: 83042 - DNA, 19 bp, Homo sapiens
  siRNA target sequence for FLJ14813 (NM_032844.1,1818-1836).
gtcagcccttagattcaga

SEQ ID NO: 83043 - DNA, 19 bp, Homo sapiens
  siRNA target sequence for FLJ14813 (NM_032844.1,1822-1840).
gcccttagattcagataga

SEQ ID NO: 83044 - DNA, 19 bp, Homo sapiens
  siRNA target sequence for FLJ14813 (NM_032844.1,1823-1841).
cccttagattcagatagaa

SEQ ID NO: 83045 - DNA, 19 bp, Homo sapiens
  siRNA target sequence for FLJ14813 (NM_032844.1,1933-1951).
cgagaaccctgctgtacaa

SEQ ID NO: 83046 - DNA, 19 bp, Homo sapiens
  siRNA target sequence for FLJ14813 (NM_032844.1,1941-1959).
ctgctgtacaagagagtaa

SEQ ID NO: 83047 - DNA, 19 bp, Homo sapiens
  siRNA target sequence for FLJ14813 (NM_032844.1,1954-1972).
gagtaaccaaaaaatgtta

SEQ ID NO: 83048 - DNA, 19 bp, Homo sapiens
  siRNA target sequence for FLJ14813 (NM_032844.1,1984-2002).
ggaggtgctgaaaacgtta

SEQ ID NO: 83049 - DNA, 19 bp, Homo sapiens
  siRNA target sequence for FLJ14813 (NM_032844.1,1998-2016).
cgttagcctctaaaagaaa

SEQ ID NO: 83050 - DNA, 19 bp, Homo sapiens
  siRNA target sequence for FLJ14813 (NM_032844.1,2019-2037).
ctgttgcttttcgaagttt

SEQ ID NO: 83051 - DNA, 19 bp, Homo sapiens
  siRNA target sequence for FLJ14813 (NM_032844.1,2021-2039).
gttgcttttcgaagtttta

SEQ ID NO: 83052 - DNA, 19 bp, Homo sapiens
  siRNA target sequence for FLJ14813 (NM_032844.1,2024-2042).
gcttttcgaagttttaaca

SEQ ID NO: 83053 - DNA, 19 bp, Homo sapiens
  siRNA target sequence for FLJ14813 (NM_032844.1,2030-2048).
cgaagttttaacagtcata

SEQ ID NO: 83054 - DNA, 19 bp, Homo sapiens
  siRNA target sequence for FLJ14813 (NM_032844.1,2045-2063).
catattaatgcatccaata

SEQ ID NO: 83055 - DNA, 19 bp, Homo sapiens
  siRNA target sequence for FLJ14813 (NM_032844.1,2083-2101).
gaacatgacttctttagat

SEQ ID NO: 83056 - DNA, 19 bp, Homo sapiens
  siRNA target sequence for FLJ14813 (NM_032844.1,2118-2136).
gtgcctacagtggttcata

SEQ ID NO: 83057 - DNA, 19 bp, Homo sapiens
  siRNA target sequence for FLJ14813 (NM_032844.1,2143-2161).
ggctataacccctactcaa

SEQ ID NO: 83058 - DNA, 19 bp, Homo sapiens
  siRNA target sequence for FLJ14813 (NM_032844.1,2145-2163).
ctataacccctactcaaaa

SEQ ID NO: 83059 - DNA, 19 bp, Homo sapiens
  siRNA target sequence for FLJ14813 (NM_032844.1,2387-2405).
ccccctttcaatgatgaaa

SEQ ID NO: 83060 - DNA, 19 bp, Homo sapiens
  siRNA target sequence for FLJ14813 (NM_032844.1,2406-2424).
caccacaacaagtattcca

SEQ ID NO: 83061 - DNA, 19 bp, Homo sapiens
  siRNA target sequence for FLJ14813 (NM_032844.1,2483-2501).
gctcaaagtgcagtagaaa

SEQ ID NO: 83062 - DNA, 19 bp, Homo sapiens
  siRNA target sequence for FLJ14813 (NM_032844.1,2617-2635).
ccagccagatgatgaaaca

SEQ ID NO: 83063 - DNA, 19 bp, Homo sapiens
  siRNA target sequence for FLJ20245 (NM_017723.1,430-448).
ggagacctcgcgcaagtat

SEQ ID NO: 83064 - DNA, 19 bp, Homo sapiens
  siRNA target sequence for FLJ20245 (NM_017723.1,774-792).
gcgcgctcgtgctgcaata

SEQ ID NO: 83065 - DNA, 19 bp, Homo sapiens
  siRNA target sequence for FLJ20245 (NM_017723.1,777-795).
cgctcgtgctgcaatacca

SEQ ID NO: 83066 - DNA, 19 bp, Homo sapiens
  siRNA target sequence for FLJ20245 (NM_017723.1,778-796).
gctcgtgctgcaataccat

SEQ ID NO: 83067 - DNA, 19 bp, Homo sapiens
  siRNA target sequence for FLJ20559 (NM_017881.1,230-248).
gaatcagtggtgtgacaaa

SEQ ID NO: 83068 - DNA, 19 bp, Homo sapiens
  siRNA target sequence for FLJ20559 (NM_017881.1,234-252).
cagtggtgtgacaaacagt

SEQ ID NO: 83069 - DNA, 19 bp, Homo sapiens
  siRNA target sequence for FLJ20559 (NM_017881.1,263-281).
cactggctaagaatttgca

SEQ ID NO: 83070 - DNA, 19 bp, Homo sapiens
  siRNA target sequence for FLJ20559 (NM_017881.1,291-309).
cccaaattgcagtgtcata

SEQ ID NO: 83071 - DNA, 19 bp, Homo sapiens
  siRNA target sequence for FLJ20559 (NM_017881.1,292-310).
ccaaattgcagtgtcatat

SEQ ID NO: 83072 - DNA, 19 bp, Homo sapiens
  siRNA target sequence for FLJ20559 (NM_017881.1,304-322).
gtcatatctcaggatgatt

SEQ ID NO: 83073 - DNA, 19 bp, Homo sapiens
  siRNA target sequence for FLJ20559 (NM_017881.1,530-548).
cccttgacactatatggaa

SEQ ID NO: 83074 - DNA, 19 bp, Homo sapiens
  siRNA target sequence for FLJ20559 (NM_017881.1,531-549).
ccttgacactatatggaat

SEQ ID NO: 83075 - DNA, 19 bp, Homo sapiens
  siRNA target sequence for FLJ20559 (NM_017881.1,535-553).
gacactatatggaatagaa

SEQ ID NO: 83076 - DNA, 19 bp, Homo sapiens
  siRNA target sequence for FLJ20559 (NM_017881.1,545-563).
ggaatagaagctatttcct

SEQ ID NO: 83077 - DNA, 19 bp, Homo sapiens
  siRNA target sequence for FLJ20559 (NM_017881.1,564-582).
gactattccatatgaagaa

SEQ ID NO: 83078 - DNA, 19 bp, Homo sapiens
  siRNA target sequence for FLJ20559 (NM_017881.1,596-614).
ggagtacaagggtctatca

SEQ ID NO: 83079 - DNA, 19 bp, Homo sapiens
  siRNA target sequence for FLJ20559 (NM_017881.1,620-638).
cagactctccgggatactt

SEQ ID NO: 83080 - DNA, 19 bp, Homo sapiens
  siRNA target sequence for FLJ20559 (NM_017881.1,624-642).
ctctccgggatactttgat

SEQ ID NO: 83081 - DNA, 19 bp, Homo sapiens
  siRNA target sequence for FLJ20559 (NM_017881.1,649-667).
gtgtggcccatgtatctaa

SEQ ID NO: 83082 - DNA, 19 bp, Homo sapiens
  siRNA target sequence for FLJ20559 (NM_017881.1,653-671).
ggcccatgtatctaaagta

SEQ ID NO: 83083 - DNA, 19 bp, Homo sapiens
  siRNA target sequence for FLJ20559 (NM_017881.1,664-682).
ctaaagtacagacaagaaa

SEQ ID NO: 83084 - DNA, 19 bp, Homo sapiens
  siRNA target sequence for FLJ20559 (NM_017881.1,679-697).
gaaatgcaggacatcacat

SEQ ID NO: 83085 - DNA, 19 bp, Homo sapiens
  siRNA target sequence for FLJ20559 (NM_017881.1,736-754).
gacctctttttgcaagtat

SEQ ID NO: 83086 - DNA, 19 bp, Homo sapiens
  siRNA target sequence for FLJ20574 (NM_017886.1,150-168).
gaagcaagactgttgtcta

SEQ ID NO: 83087 - DNA, 19 bp, Homo sapiens
  siRNA target sequence for FLJ20574 (NM_017886.1,174-192).
ggcgacggaagggaacaat

SEQ ID NO: 83088 - DNA, 19 bp, Homo sapiens
  siRNA target sequence for FLJ20574 (NM_017886.1,176-194).
cgacggaagggaacaatca

SEQ ID NO: 83089 - DNA, 19 bp, Homo sapiens
  siRNA target sequence for FLJ20574 (NM_017886.1,177-195).
gacggaagggaacaatcaa

SEQ ID NO: 83090 - DNA, 19 bp, Homo sapiens
  siRNA target sequence for FLJ20574 (NM_017886.1,179-197).
cggaagggaacaatcaatt

SEQ ID NO: 83091 - DNA, 19 bp, Homo sapiens
  siRNA target sequence for FLJ20574 (NM_017886.1,203-221).
gccattctttgtactgata

SEQ ID NO: 83092 - DNA, 19 bp, Homo sapiens
  siRNA target sequence for FLJ20574 (NM_017886.1,204-222).
ccattctttgtactgataa

SEQ ID NO: 83093 - DNA, 19 bp, Homo sapiens
  siRNA target sequence for FLJ20574 (NM_017886.1,253-271).
ccgtctcacccgtgaaata

SEQ ID NO: 83094 - DNA, 19 bp, Homo sapiens
  siRNA target sequence for FLJ20574 (NM_017886.1,254-272).
cgtctcacccgtgaaataa

SEQ ID NO: 83095 - DNA, 19 bp, Homo sapiens
  siRNA target sequence for FLJ20574 (NM_017886.1,255-273).
gtctcacccgtgaaataaa

SEQ ID NO: 83096 - DNA, 19 bp, Homo sapiens
  siRNA target sequence for FLJ20574 (NM_017886.1,351-369).
gtggttccttaaaaacagt

SEQ ID NO: 83097 - DNA, 19 bp, Homo sapiens
  siRNA target sequence for FLJ20574 (NM_017886.1,353-371).
ggttccttaaaaacagtta

SEQ ID NO: 83098 - DNA, 19 bp, Homo sapiens
  siRNA target sequence for FLJ20574 (NM_017886.1,358-376).
cttaaaaacagttattgct

SEQ ID NO: 83099 - DNA, 19 bp, Homo sapiens
  siRNA target sequence for FLJ20574 (NM_017886.1,449-467).
cataaacttggcattctct

SEQ ID NO: 83100 - DNA, 19 bp, Homo sapiens
  siRNA target sequence for FLJ20574 (NM_017886.1,509-527).
ggcacactgaagtttagca

SEQ ID NO: 83101 - DNA, 19 bp, Homo sapiens
  siRNA target sequence for FLJ20574 (NM_017886.1,649-667).
caaaggatctcctgtatat

SEQ ID NO: 83102 - DNA, 19 bp, Homo sapiens
  siRNA target sequence for FLJ20574 (NM_017886.1,683-701).
gtgaggggtgctgactttt

SEQ ID NO: 83103 - DNA, 19 bp, Homo sapiens
  siRNA target sequence for FLJ20574 (NM_017886.1,764-782).
ccattcttctcagaaagta

SEQ ID NO: 83104 - DNA, 19 bp, Homo sapiens
  siRNA target sequence for FLJ20574 (NM_017886.1,827-845).
cctattccgaaagattctt

SEQ ID NO: 83105 - DNA, 19 bp, Homo sapiens
  siRNA target sequence for FLJ20574 (NM_017886.1,902-920).
gatcctcagaaaagattga

SEQ ID NO: 83106 - DNA, 19 bp, Homo sapiens
  siRNA target sequence for FLJ20574 (NM_017886.1,1002-1020).
gtctcagcagaaacactat

SEQ ID NO: 83107 - DNA, 19 bp, Homo sapiens
  siRNA target sequence for FLJ20574 (NM_017886.1,1024-1042).
gtgttctgggccacaagat

SEQ ID NO: 83108 - DNA, 19 bp, Homo sapiens
  siRNA target sequence for FLJ20574 (NM_017886.1,1029-1047).
ctgggccacaagattccaa

SEQ ID NO: 83109 - DNA, 19 bp, Homo sapiens
  siRNA target sequence for FLJ20574 (NM_017886.1,1060-1078).
gaactctcagagtagacaa

SEQ ID NO: 83110 - DNA, 19 bp, Homo sapiens
  siRNA target sequence for FLJ20574 (NM_017886.1,1112-1130).
cactctttcagactagaaa

SEQ ID NO: 83111 - DNA, 19 bp, Homo sapiens
  siRNA target sequence for FLJ20574 (NM_017886.1,1155-1173).
gtactcttgagggtcaatt

SEQ ID NO: 83112 - DNA, 19 bp, Homo sapiens
  siRNA target sequence for FLJ20574 (NM_017886.1,1167-1185).
gtcaattgaatgaatccat

SEQ ID NO: 83113 - DNA, 19 bp, Homo sapiens
  siRNA target sequence for FLJ20574 (NM_017886.1,1202-1220).
cgtcctactcccagaacta

SEQ ID NO: 83114 - DNA, 19 bp, Homo sapiens
  siRNA target sequence for FLJ20574 (NM_017886.1,1283-1301).
cctctgaccaagattacaa

SEQ ID NO: 83115 - DNA, 19 bp, Homo sapiens
  siRNA target sequence for FLJ20574 (NM_017886.1,1405-1423).
gaaacagccaccagttaaa

SEQ ID NO: 83116 - DNA, 19 bp, Homo sapiens
  siRNA target sequence for FLJ20574 (NM_017886.1,1411-1429).
gccaccagttaaatttgat

SEQ ID NO: 83117 - DNA, 19 bp, Homo sapiens
  siRNA target sequence for FLJ20574 (NM_017886.1,1452-1470).
catattcagtggataagtt

SEQ ID NO: 83118 - DNA, 19 bp, Homo sapiens
  siRNA target sequence for FLJ20574 (NM_017886.1,1458-1476).
cagtggataagttattatt

SEQ ID NO: 83119 - DNA, 19 bp, Homo sapiens
  siRNA target sequence for FLJ20574 (NM_017886.1,1632-1650).
cattcccccctgttccaat

SEQ ID NO: 83120 - DNA, 19 bp, Homo sapiens
  siRNA target sequence for FLJ20574 (NM_017886.1,1638-1656).
cccctgttccaattgctaa

SEQ ID NO: 83121 - DNA, 19 bp, Homo sapiens
  siRNA target sequence for FLJ20574 (NM_017886.1,1639-1657).
ccctgttccaattgctaat

SEQ ID NO: 83122 - DNA, 19 bp, Homo sapiens
  siRNA target sequence for FLJ20604 (NM_017897.1,104-122).
ccaactgcctgcaaaattt

SEQ ID NO: 83123 - DNA, 19 bp, Homo sapiens
  siRNA target sequence for FLJ20604 (NM_017897.1,138-156).
cactcgtcttctatgttca

SEQ ID NO: 83124 - DNA, 19 bp, Homo sapiens
  siRNA target sequence for FLJ20604 (NM_017897.1,145-163).
cttctatgttcaagattat

SEQ ID NO: 83125 - DNA, 19 bp, Homo sapiens
  siRNA target sequence for FLJ20604 (NM_017897.1,176-194).
gaagtaaaaggaagttttt

SEQ ID NO: 83126 - DNA, 19 bp, Homo sapiens
  siRNA target sequence for FLJ20604 (NM_017897.1,196-214).
ggaactgtgccaatatcca

SEQ ID NO: 83127 - DNA, 19 bp, Homo sapiens
  siRNA target sequence for FLJ20604 (NM_017897.1,220-238).
cataggcgagttgtcatta

SEQ ID NO: 83128 - DNA, 19 bp, Homo sapiens
  siRNA target sequence for FLJ20604 (NM_017897.1,300-318).
cggaggagagagtggaatt

SEQ ID NO: 83129 - DNA, 19 bp, Homo sapiens
  siRNA target sequence for FLJ20604 (NM_017897.1,323-341).
cactggttggtgaagagta

SEQ ID NO: 83130 - DNA, 19 bp, Homo sapiens
  siRNA target sequence for FLJ20604 (NM_017897.1,325-343).
ctggttggtgaagagtata

SEQ ID NO: 83131 - DNA, 19 bp, Homo sapiens
  siRNA target sequence for FLJ20604 (NM_017897.1,375-393).
gccaagaggtagtgatgaa

SEQ ID NO: 83132 - DNA, 19 bp, Homo sapiens
  siRNA target sequence for FLJ20604 (NM_017897.1,414-432).
ctttgtgtccaaatcagat

SEQ ID NO: 83133 - DNA, 19 bp, Homo sapiens
  siRNA target sequence for FLJ20604 (NM_017897.1,418-436).
gtgtccaaatcagatatca

SEQ ID NO: 83134 - DNA, 19 bp, Homo sapiens
  siRNA target sequence for FLJ20604 (NM_017897.1,478-496).
gaattagccatgaaggatt

SEQ ID NO: 83135 - DNA, 19 bp, Homo sapiens
  siRNA target sequence for FLJ20604 (NM_017897.1,605-623).
caaaaggttacaataaagt

SEQ ID NO: 83136 - DNA, 19 bp, Homo sapiens
  siRNA target sequence for FLJ20604 (NM_017897.1,668-686).
gccaggtcagcattcgata

SEQ ID NO: 83137 - DNA, 19 bp, Homo sapiens
  siRNA target sequence for FLJ20604 (NM_017897.1,670-688).
caggtcagcattcgatata

SEQ ID NO: 83138 - DNA, 19 bp, Homo sapiens
  siRNA target sequence for FLJ20604 (NM_017897.1,672-690).
ggtcagcattcgatataaa

SEQ ID NO: 83139 - DNA, 19 bp, Homo sapiens
  siRNA target sequence for FLJ20604 (NM_017897.1,677-695).
gcattcgatataaactcaa

SEQ ID NO: 83140 - DNA, 19 bp, Homo sapiens
  siRNA target sequence for FLJ20604 (NM_017897.1,745-763).
gtgggagactcatttagat

SEQ ID NO: 83141 - DNA, 19 bp, Homo sapiens
  siRNA target sequence for FLJ20604 (NM_017897.1,747-765).
gggagactcatttagattt

SEQ ID NO: 83142 - DNA, 19 bp, Homo sapiens
  siRNA target sequence for FLJ20604 (NM_017897.1,748-766).
ggagactcatttagattta

SEQ ID NO: 83143 - DNA, 19 bp, Homo sapiens
  siRNA target sequence for FLJ20604 (NM_017897.1,749-767).
gagactcatttagatttat

SEQ ID NO: 83144 - DNA, 19 bp, Homo sapiens
  siRNA target sequence for FLJ20604 (NM_017897.1,792-810).
ggtggctggaggtacagat

SEQ ID NO: 83145 - DNA, 19 bp, Homo sapiens
  siRNA target sequence for FLJ20604 (NM_017897.1,796-814).
gctggaggtacagattctt

SEQ ID NO: 83146 - DNA, 19 bp, Homo sapiens
  siRNA target sequence for FLJ20604 (NM_017897.1,799-817).
ggaggtacagattcttgta

SEQ ID NO: 83147 - DNA, 19 bp, Homo sapiens
  siRNA target sequence for FLJ20604 (NM_017897.1,802-820).
ggtacagattcttgtatta

SEQ ID NO: 83148 - DNA, 19 bp, Homo sapiens
  siRNA target sequence for FLJ20604 (NM_017897.1,882-900).
gttggcatgtcgaccattt

SEQ ID NO: 83149 - DNA, 19 bp, Homo sapiens
  siRNA target sequence for FLJ20604 (NM_017897.1,905-923).
caaagagagatggttttgt

SEQ ID NO: 83150 - DNA, 19 bp, Homo sapiens
  siRNA target sequence for FLJ20604 (NM_017897.1,987-1005).
ccggatctatgcagaagtt

SEQ ID NO: 83151 - DNA, 19 bp, Homo sapiens
  siRNA target sequence for FLJ20604 (NM_017897.1,1113-1131).
gcctgaggagatatcctat

SEQ ID NO: 83152 - DNA, 19 bp, Homo sapiens
  siRNA target sequence for FLJ20604 (NM_017897.1,1114-1132).
cctgaggagatatcctata

SEQ ID NO: 83153 - DNA, 19 bp, Homo sapiens
  siRNA target sequence for FLJ20604 (NM_017897.1,1115-1133).
ctgaggagatatcctatat

SEQ ID NO: 83154 - DNA, 19 bp, Homo sapiens
  siRNA target sequence for FLJ20604 (NM_017897.1,1117-1135).
gaggagatatcctatatca

SEQ ID NO: 83155 - DNA, 19 bp, Homo sapiens
  siRNA target sequence for FLJ20604 (NM_017897.1,1273-1291).
gcagtcgaggcagctttta

SEQ ID NO: 83156 - DNA, 19 bp, Homo sapiens
  siRNA target sequence for FLJ20604 (NM_017897.1,1276-1294).
gtcgaggcagcttttacca

SEQ ID NO: 83157 - DNA, 19 bp, Homo sapiens
  siRNA target sequence for FLJ20604 (NM_017897.1,1281-1299).
ggcagcttttaccacatta

SEQ ID NO: 83158 - DNA, 19 bp, Homo sapiens
  siRNA target sequence for FLJ20604 (NM_017897.1,1285-1303).
gcttttaccacattagctt

SEQ ID NO: 83159 - DNA, 19 bp, Homo sapiens
  siRNA target sequence for FLJ20604 (NM_017897.1,1343-1361).
gttcggaaccagaatttga

SEQ ID NO: 83160 - DNA, 19 bp, Homo sapiens
  siRNA target sequence for FLJ20604 (NM_017897.1,1448-1466).
ctaatgcaacactttgtat

SEQ ID NO: 83161 - DNA, 19 bp, Homo sapiens
  siRNA target sequence for FLJ21019 (NM_024927.3,671-689).
gacatcgttgtgaaaggtt

SEQ ID NO: 83162 - DNA, 19 bp, Homo sapiens
  siRNA target sequence for FLJ21019 (NM_024927.3,896-914).
gtgtctggtcggaaacaca

SEQ ID NO: 83163 - DNA, 19 bp, Homo sapiens
  siRNA target sequence for FLJ21019 (NM_024927.3,1055-1073).
gaggccgttgccctcattt

SEQ ID NO: 83164 - DNA, 19 bp, Homo sapiens
  siRNA target sequence for FLJ21019 (NM_024927.3,1486-1504).
ctcggaactggcggaatat

SEQ ID NO: 83165 - DNA, 19 bp, Homo sapiens
  siRNA target sequence for FLJ21019 (NM_024927.3,1556-1574).
ccctcgctggcggagattt

SEQ ID NO: 83166 - DNA, 19 bp, Homo sapiens
  siRNA target sequence for FLJ21019 (NM_024927.3,1847-1865).
gactccgggtggagactat

SEQ ID NO: 83167 - DNA, 19 bp, Homo sapiens
  siRNA target sequence for FLJ21019 (NM_024927.3,1849-1867).
ctccgggtggagactatgt

SEQ ID NO: 83168 - DNA, 19 bp, Homo sapiens
  siRNA target sequence for FLJ21019 (NM_024927.3,1851-1869).
ccgggtggagactatgtct

SEQ ID NO: 83169 - DNA, 19 bp, Homo sapiens
  siRNA target sequence for FLJ21019 (NM_024927.3,2218-2236).
ccgcactgcgggaagcatt

SEQ ID NO: 83170 - DNA, 19 bp, Homo sapiens
  siRNA target sequence for FLJ22002 (NM_024838.3,256-274).
ccactttaaccgatgtcat

SEQ ID NO: 83171 - DNA, 19 bp, Homo sapiens
  siRNA target sequence for FLJ22002 (NM_024838.3,265-283).
ccgatgtcatcatctgaaa

SEQ ID NO: 83172 - DNA, 19 bp, Homo sapiens
  siRNA target sequence for FLJ22002 (NM_024838.3,266-284).
cgatgtcatcatctgaaaa

SEQ ID NO: 83173 - DNA, 19 bp, Homo sapiens
  siRNA target sequence for FLJ22002 (NM_024838.3,368-386).
gcggaattgaggaagtcat

SEQ ID NO: 83174 - DNA, 19 bp, Homo sapiens
  siRNA target sequence for FLJ22002 (NM_024838.3,466-484).
cagaataataggtcagaaa

SEQ ID NO: 83175 - DNA, 19 bp, Homo sapiens
  siRNA target sequence for FLJ22002 (NM_024838.3,489-507).
gttgttgtgtcatagatgt

SEQ ID NO: 83176 - DNA, 19 bp, Homo sapiens
  siRNA target sequence for FLJ22002 (NM_024838.3,570-588).
gtaatgagcaatttttaga

SEQ ID NO: 83177 - DNA, 19 bp, Homo sapiens
  siRNA target sequence for FLJ22002 (NM_024838.3,597-615).
gaaaagctgtgttaaactt

SEQ ID NO: 83178 - DNA, 19 bp, Homo sapiens
  siRNA target sequence for FLJ22002 (NM_024838.3,712-730).
ggatgtacctctactagat

SEQ ID NO: 83179 - DNA, 19 bp, Homo sapiens
  siRNA target sequence for FLJ22002 (NM_024838.3,719-737).
cctctactagatctaattt

SEQ ID NO: 83180 - DNA, 19 bp, Homo sapiens
  siRNA target sequence for FLJ22002 (NM_024838.3,731-749).
ctaatttgtcgtctaaaat

SEQ ID NO: 83181 - DNA, 19 bp, Homo sapiens
  siRNA target sequence for FLJ22002 (NM_024838.3,754-772).
gaagacagataggattgta

SEQ ID NO: 83182 - DNA, 19 bp, Homo sapiens
  siRNA target sequence for FLJ22002 (NM_024838.3,766-784).
gattgtaggtcagaattct

SEQ ID NO: 83183 - DNA, 19 bp, Homo sapiens
  siRNA target sequence for FLJ22002 (NM_024838.3,837-855).
ggtatgatgctcgtgtttt

SEQ ID NO: 83184 - DNA, 19 bp, Homo sapiens
  siRNA target sequence for FLJ22002 (NM_024838.3,845-863).
gctcgtgttttctgtgaaa

SEQ ID NO: 83185 - DNA, 19 bp, Homo sapiens
  siRNA target sequence for FLJ22002 (NM_024838.3,926-944).
gtggactcggaaacattca

SEQ ID NO: 83186 - DNA, 19 bp, Homo sapiens
  siRNA target sequence for FLJ22002 (NM_024838.3,928-946).
ggactcggaaacattcatt

SEQ ID NO: 83187 - DNA, 19 bp, Homo sapiens
  siRNA target sequence for FLJ22002 (NM_024838.3,1103-1121).
ggagcaacctacgtagaaa

SEQ ID NO: 83188 - DNA, 19 bp, Homo sapiens
  siRNA target sequence for FLJ22002 (NM_024838.3,1114-1132).
cgtagaaagagcacagata

SEQ ID NO: 83189 - DNA, 19 bp, Homo sapiens
  siRNA target sequence for FLJ22002 (NM_024838.3,1118-1136).
gaaagagcacagatactgt

SEQ ID NO: 83190 - DNA, 19 bp, Homo sapiens
  siRNA target sequence for FLJ22002 (NM_024838.3,1129-1147).
gatactgttggaaagatgt

SEQ ID NO: 83191 - DNA, 19 bp, Homo sapiens
  siRNA target sequence for FLJ22002 (NM_024838.3,1135-1153).
gttggaaagatgtatccat

SEQ ID NO: 83192 - DNA, 19 bp, Homo sapiens
  siRNA target sequence for FLJ22002 (NM_024838.3,1172-1190).
gccaggttgggagaaatga

SEQ ID NO: 83193 - DNA, 19 bp, Homo sapiens
  siRNA target sequence for FLJ22002 (NM_024838.3,1173-1191).
ccaggttgggagaaatgat

SEQ ID NO: 83194 - DNA, 19 bp, Homo sapiens
  siRNA target sequence for FLJ22002 (NM_024838.3,1174-1192).
caggttgggagaaatgatt

SEQ ID NO: 83195 - DNA, 19 bp, Homo sapiens
  siRNA target sequence for FLJ22002 (NM_024838.3,1283-1301).
ggaccaacaggatcattta

SEQ ID NO: 83196 - DNA, 19 bp, Homo sapiens
  siRNA target sequence for FLJ22002 (NM_024838.3,1284-1302).
gaccaacaggatcatttaa

SEQ ID NO: 83197 - DNA, 19 bp, Homo sapiens
  siRNA target sequence for FLJ22002 (NM_024838.3,1316-1334).
cagcttatgcctcatattt

SEQ ID NO: 83198 - DNA, 19 bp, Homo sapiens
  siRNA target sequence for FLJ22002 (NM_024838.3,1318-1336).
gcttatgcctcatattttt

SEQ ID NO: 83199 - DNA, 19 bp, Homo sapiens
  siRNA target sequence for FLJ22002 (NM_024838.3,1348-1366).
cccaccaagttgcaattat

SEQ ID NO: 83200 - DNA, 19 bp, Homo sapiens
  siRNA target sequence for FLJ22002 (NM_024838.3,1349-1367).
ccaccaagttgcaattata

SEQ ID NO: 83201 - DNA, 19 bp, Homo sapiens
  siRNA target sequence for FLJ22002 (NM_024838.3,1350-1368).
caccaagttgcaattatat

SEQ ID NO: 83202 - DNA, 19 bp, Homo sapiens
  siRNA target sequence for FLJ22002 (NM_024838.3,1356-1374).
gttgcaattatatgatact

SEQ ID NO: 83203 - DNA, 19 bp, Homo sapiens
  siRNA target sequence for FLJ22002 (NM_024838.3,1359-1377).
gcaattatatgatacttgt

SEQ ID NO: 83204 - DNA, 19 bp, Homo sapiens
  siRNA target sequence for FLJ22002 (NM_024838.3,1360-1378).
caattatatgatacttgta

SEQ ID NO: 83205 - DNA, 19 bp, Homo sapiens
  siRNA target sequence for FLJ22002 (NM_024838.3,1393-1411).
cacagggagtgcagtctta

SEQ ID NO: 83206 - DNA, 19 bp, Homo sapiens
  siRNA target sequence for FLJ22002 (NM_024838.3,1395-1413).
cagggagtgcagtcttaaa

SEQ ID NO: 83207 - DNA, 19 bp, Homo sapiens
  siRNA target sequence for FLJ22002 (NM_024838.3,1399-1417).
gagtgcagtcttaaatggt

SEQ ID NO: 83208 - DNA, 19 bp, Homo sapiens
  siRNA target sequence for FLJ22002 (NM_024838.3,1401-1419).
gtgcagtcttaaatggttt

SEQ ID NO: 83209 - DNA, 19 bp, Homo sapiens
  siRNA target sequence for FLJ22002 (NM_024838.3,1422-1440).
gtcgtctaaataagaatga

SEQ ID NO: 83210 - DNA, 19 bp, Homo sapiens
  siRNA target sequence for FLJ22002 (NM_024838.3,1424-1442).
cgtctaaataagaatgata

SEQ ID NO: 83211 - DNA, 19 bp, Homo sapiens
  siRNA target sequence for FLJ22002 (NM_024838.3,1425-1443).
gtctaaataagaatgataa

SEQ ID NO: 83212 - DNA, 19 bp, Homo sapiens
  siRNA target sequence for FLJ22002 (NM_024838.3,1475-1493).
gagaatggagtaagtgatt

SEQ ID NO: 83213 - DNA, 19 bp, Homo sapiens
  siRNA target sequence for FLJ22002 (NM_024838.3,1541-1559).
gtgggtgttgagtcagatt

SEQ ID NO: 83214 - DNA, 19 bp, Homo sapiens
  siRNA target sequence for FLJ22002 (NM_024838.3,1614-1632).
gctttcttactgtggaata

SEQ ID NO: 83215 - DNA, 19 bp, Homo sapiens
  siRNA target sequence for FLJ22002 (NM_024838.3,1647-1665).
gttcggctaactccataaa

SEQ ID NO: 83216 - DNA, 19 bp, Homo sapiens
  siRNA target sequence for FLJ22002 (NM_024838.3,1701-1719).
cttccgcatatcttgatct

SEQ ID NO: 83217 - DNA, 19 bp, Homo sapiens
  siRNA target sequence for FLJ22002 (NM_024838.3,1704-1722).
ccgcatatcttgatcttgt

SEQ ID NO: 83218 - DNA, 19 bp, Homo sapiens
  siRNA target sequence for FLJ22002 (NM_024838.3,1705-1723).
cgcatatcttgatcttgtt

SEQ ID NO: 83219 - DNA, 19 bp, Homo sapiens
  siRNA target sequence for FLJ22002 (NM_024838.3,1706-1724).
gcatatcttgatcttgtta

SEQ ID NO: 83220 - DNA, 19 bp, Homo sapiens
  siRNA target sequence for FLJ22002 (NM_024838.3,1718-1736).
cttgttagtcaaggattta

SEQ ID NO: 83221 - DNA, 19 bp, Homo sapiens
  siRNA target sequence for FLJ22002 (NM_024838.3,1721-1739).
gttagtcaaggatttattt

SEQ ID NO: 83222 - DNA, 19 bp, Homo sapiens
  siRNA target sequence for FLJ22002 (NM_024838.3,1749-1767).
gcccagtcgatgtctgtat

SEQ ID NO: 83223 - DNA, 19 bp, Homo sapiens
  siRNA target sequence for FLJ22002 (NM_024838.3,1750-1768).
cccagtcgatgtctgtatt

SEQ ID NO: 83224 - DNA, 19 bp, Homo sapiens
  siRNA target sequence for FLJ22002 (NM_024838.3,1764-1782).
gtattcccacaggaaactt

SEQ ID NO: 83225 - DNA, 19 bp, Homo sapiens
  siRNA target sequence for FLJ22002 (NM_024838.3,1819-1837).
gggaatcccgattcgaaaa

SEQ ID NO: 83226 - DNA, 19 bp, Homo sapiens
  siRNA target sequence for FLJ22002 (NM_024838.3,1820-1838).
ggaatcccgattcgaaaat

SEQ ID NO: 83227 - DNA, 19 bp, Homo sapiens
  siRNA target sequence for FLJ22002 (NM_024838.3,1851-1869).
ctaatcagaaccatgtttt

SEQ ID NO: 83228 - DNA, 19 bp, Homo sapiens
  siRNA target sequence for FLJ22002 (NM_024838.3,1926-1944).
ccttttcaccgtcaataga

SEQ ID NO: 83229 - DNA, 19 bp, Homo sapiens
  siRNA target sequence for FLJ22002 (NM_024838.3,1927-1945).
cttttcaccgtcaatagat

SEQ ID NO: 83230 - DNA, 19 bp, Homo sapiens
  siRNA target sequence for FLJ22002 (NM_024838.3,1932-1950).
caccgtcaatagatattct

SEQ ID NO: 83231 - DNA, 19 bp, Homo sapiens
  siRNA target sequence for FLJ22002 (NM_024838.3,1959-1977).
caaacctagaacgacattt

SEQ ID NO: 83232 - DNA, 19 bp, Homo sapiens
  siRNA target sequence for FLJ22002 (NM_024838.3,1964-1982).
ctagaacgacatttacact

SEQ ID NO: 83233 - DNA, 19 bp, Homo sapiens
  siRNA target sequence for FLJ22002 (NM_024838.3,1981-1999).
cttgatggctaataaagat

SEQ ID NO: 83234 - DNA, 19 bp, Homo sapiens
  siRNA target sequence for FLJ22002 (NM_024838.3,2000-2018).
ggacagctaatgacagaat

SEQ ID NO: 83235 - DNA, 19 bp, Homo sapiens
  siRNA target sequence for FLJ22002 (NM_024838.3,2003-2021).
cagctaatgacagaattat

SEQ ID NO: 83236 - DNA, 19 bp, Homo sapiens
  siRNA target sequence for FLJ22002 (NM_024838.3,2011-2029).
gacagaattatttaatcga

SEQ ID NO: 83237 - DNA, 19 bp, Homo sapiens
  siRNA target sequence for FLJ22002 (NM_024838.3,2062-2080).
ggctctagttgagaaactt

SEQ ID NO: 83238 - DNA, 19 bp, Homo sapiens
  siRNA target sequence for FLJ22002 (NM_024838.3,2117-2135).
gagtgcctagcagctatta

SEQ ID NO: 83239 - DNA, 19 bp, Homo sapiens
  siRNA target sequence for FLJ22002 (NM_024838.3,2129-2147).
gctattaactccacctata

SEQ ID NO: 83240 - DNA, 19 bp, Homo sapiens
  siRNA target sequence for FLJ22002 (NM_024838.3,2130-2148).
ctattaactccacctataa

SEQ ID NO: 83241 - DNA, 19 bp, Homo sapiens
  siRNA target sequence for FLJ22002 (NM_024838.3,2199-2217).
cagatagggtgcaagacaa

SEQ ID NO: 83242 - DNA, 19 bp, Homo sapiens
  siRNA target sequence for FLJ22002 (NM_024838.3,2201-2219).
gatagggtgcaagacaaaa

SEQ ID NO: 83243 - DNA, 19 bp, Homo sapiens
  siRNA target sequence for FLJ22002 (NM_024838.3,2215-2233).
caaaacttgccctgtgatt

SEQ ID NO: 83244 - DNA, 19 bp, Homo sapiens
  siRNA target sequence for FLJ22002 (NM_024838.3,2335-2353).
gggttcatacaatgcatta

SEQ ID NO: 83245 - DNA, 19 bp, Homo sapiens
  siRNA target sequence for FLJ22002 (NM_024838.3,2414-2432).
gtctgtgcagctgatatga

SEQ ID NO: 83246 - DNA, 19 bp, Homo sapiens
  siRNA target sequence for FLJ22002 (NM_024838.3,2424-2442).
ctgatatgaatgtcttgaa

SEQ ID NO: 83247 - DNA, 19 bp, Homo sapiens
  siRNA target sequence for FLJ22002 (NM_024838.3,2462-2480).
gtccaaaatcaattcatat

SEQ ID NO: 83248 - DNA, 19 bp, Homo sapiens
  siRNA target sequence for FLJ22761 (NM_025130.2,143-161).
gtccacttgatggcatttt

SEQ ID NO: 83249 - DNA, 19 bp, Homo sapiens
  siRNA target sequence for FLJ22761 (NM_025130.2,228-246).
ccgatgacacccttttgga

SEQ ID NO: 83250 - DNA, 19 bp, Homo sapiens
  siRNA target sequence for FLJ22761 (NM_025130.2,466-484).
ctacccaacgcccaatgaa

SEQ ID NO: 83251 - DNA, 19 bp, Homo sapiens
  siRNA target sequence for FLJ22761 (NM_025130.2,470-488).
ccaacgcccaatgaaatca

SEQ ID NO: 83252 - DNA, 19 bp, Homo sapiens
  siRNA target sequence for FLJ22761 (NM_025130.2,544-562).
catgaagaccaaagattta

SEQ ID NO: 83253 - DNA, 19 bp, Homo sapiens
  siRNA target sequence for FLJ22761 (NM_025130.2,577-595).
gccccttggcctaactttt

SEQ ID NO: 83254 - DNA, 19 bp, Homo sapiens
  siRNA target sequence for FLJ22761 (NM_025130.2,581-599).
cttggcctaactttttctt

SEQ ID NO: 83255 - DNA, 19 bp, Homo sapiens
  siRNA target sequence for FLJ22761 (NM_025130.2,623-641).
gaagagggtgtcctacttt

SEQ ID NO: 83256 - DNA, 19 bp, Homo sapiens
  siRNA target sequence for FLJ22761 (NM_025130.2,634-652).
cctactttcgtggacaaaa

SEQ ID NO: 83257 - DNA, 19 bp, Homo sapiens
  siRNA target sequence for FLJ22761 (NM_025130.2,804-822).
gcgaagttggtgtcatcat

SEQ ID NO: 83258 - DNA, 19 bp, Homo sapiens
  siRNA target sequence for FLJ22761 (NM_025130.2,1043-1061).
gagcttgtcaggcttatct

SEQ ID NO: 83259 - DNA, 19 bp, Homo sapiens
  siRNA target sequence for FLJ22761 (NM_025130.2,1107-1125).
cttctgctctccacactaa

SEQ ID NO: 83260 - DNA, 19 bp, Homo sapiens
  siRNA target sequence for FLJ22761 (NM_025130.2,1317-1335).
cacgcctccgggagaacaa

SEQ ID NO: 83261 - DNA, 19 bp, Homo sapiens
  siRNA target sequence for FLJ22761 (NM_025130.2,1319-1337).
cgcctccgggagaacaaga

SEQ ID NO: 83262 - DNA, 19 bp, Homo sapiens
  siRNA target sequence for FLJ22761 (NM_025130.2,1372-1390).
cggcaccctctacaagata

SEQ ID NO: 83263 - DNA, 19 bp, Homo sapiens
  siRNA target sequence for FLJ22761 (NM_025130.2,1779-1797).
ggaggtcagtgcgaatgta

SEQ ID NO: 83264 - DNA, 19 bp, Homo sapiens
  siRNA target sequence for FLJ22761 (NM_025130.2,1782-1800).
ggtcagtgcgaatgtacaa

SEQ ID NO: 83265 - DNA, 19 bp, Homo sapiens
  siRNA target sequence for FLJ22761 (NM_025130.2,1787-1805).
gtgcgaatgtacaacaaga

SEQ ID NO: 83266 - DNA, 19 bp, Homo sapiens
  siRNA target sequence for FLJ22761 (NM_025130.2,1983-2001).
ggtggaccaaaggtttcaa

SEQ ID NO: 83267 - DNA, 19 bp, Homo sapiens
  siRNA target sequence for FLJ22761 (NM_025130.2,2088-2106).
cagtcgtgaatgatacagt

SEQ ID NO: 83268 - DNA, 19 bp, Homo sapiens
  siRNA target sequence for FLJ22761 (NM_025130.2,2731-2749).
gcaccctcacttttctaga

SEQ ID NO: 83269 - DNA, 19 bp, Homo sapiens
  siRNA target sequence for FLJ22761 (NM_025130.2,2732-2750).
caccctcacttttctagaa

SEQ ID NO: 83270 - DNA, 19 bp, Homo sapiens
  siRNA target sequence for FLJ22761 (NM_025130.2,2734-2752).
ccctcacttttctagaata

SEQ ID NO: 83271 - DNA, 19 bp, Homo sapiens
  siRNA target sequence for FLJ22761 (NM_025130.2,2736-2754).
ctcacttttctagaatatt

SEQ ID NO: 83272 - DNA, 19 bp, Homo sapiens
  siRNA target sequence for FLJ22761 (NM_025130.2,2783-2801).
cgatgtgatgtgacattca

SEQ ID NO: 83273 - DNA, 19 bp, Homo sapiens
  siRNA target sequence for FLJ22865 (NM_025109.3,473-491).
ggaggtcctgctgtacaaa

SEQ ID NO: 83274 - DNA, 19 bp, Homo sapiens
  siRNA target sequence for FLJ22865 (NM_025109.3,638-656).
ctcgcccgagctaatgaga

SEQ ID NO: 83275 - DNA, 19 bp, Homo sapiens
  siRNA target sequence for FLJ22865 (NM_025109.3,805-823).
cgtctcgctgcctaatgaa

SEQ ID NO: 83276 - DNA, 19 bp, Homo sapiens
  siRNA target sequence for FLJ22865 (NM_025109.3,808-826).
ctcgctgcctaatgaagtt

SEQ ID NO: 83277 - DNA, 19 bp, Homo sapiens
  siRNA target sequence for FLJ22865 (NM_025109.3,810-828).
cgctgcctaatgaagttct

SEQ ID NO: 83278 - DNA, 19 bp, Homo sapiens
  siRNA target sequence for FLJ22865 (NM_025109.3,812-830).
ctgcctaatgaagttctat

SEQ ID NO: 83279 - DNA, 19 bp, Homo sapiens
  siRNA target sequence for FLJ22865 (NM_025109.3,936-954).
gcgtgtacactgaggaata

SEQ ID NO: 83280 - DNA, 19 bp, Homo sapiens
  siRNA target sequence for FLJ22865 (NM_025109.3,937-955).
cgtgtacactgaggaataa

SEQ ID NO: 83281 - DNA, 19 bp, Homo sapiens
  siRNA target sequence for FLJ22865 (NM_025109.3,1034-1052).
ctacctcctagagaaaact

SEQ ID NO: 83282 - DNA, 19 bp, Homo sapiens
  siRNA target sequence for FLJ22865 (NM_025109.3,1233-1251).
ctccatttgggcattgaca

SEQ ID NO: 83283 - DNA, 19 bp, Homo sapiens
  siRNA target sequence for FLJ22865 (NM_025109.3,1421-1439).
ggagatggtgcagattaga

SEQ ID NO: 83284 - DNA, 19 bp, Homo sapiens
  siRNA target sequence for FLJ22865 (NM_025109.3,1529-1547).
gatctatgcgcggttgttt

SEQ ID NO: 83285 - DNA, 19 bp, Homo sapiens
  siRNA target sequence for FLJ22865 (NM_025109.3,1554-1572).
ctggtatcagtgatcaaca

SEQ ID NO: 83286 - DNA, 19 bp, Homo sapiens
  siRNA target sequence for FLJ22865 (NM_025109.3,1622-1640).
ggatgtgtatggatttgaa

SEQ ID NO: 83287 - DNA, 19 bp, Homo sapiens
  siRNA target sequence for FLJ22865 (NM_025109.3,1716-1734).
ctcgtggagaccatccata

SEQ ID NO: 83288 - DNA, 19 bp, Homo sapiens
  siRNA target sequence for FLJ22865 (NM_025109.3,1719-1737).
gtggagaccatccatatca

SEQ ID NO: 83289 - DNA, 19 bp, Homo sapiens
  siRNA target sequence for FLJ22865 (NM_025109.3,1721-1739).
ggagaccatccatatcagt

SEQ ID NO: 83290 - DNA, 19 bp, Homo sapiens
  siRNA target sequence for FLJ22865 (NM_025109.3,1759-1777).
gggtctctcaccgaaactt

SEQ ID NO: 83291 - DNA, 19 bp, Homo sapiens
  siRNA target sequence for FLJ22865 (NM_025109.3,1760-1778).
ggtctctcaccgaaacttt

SEQ ID NO: 83292 - DNA, 19 bp, Homo sapiens
  siRNA target sequence for FLJ22865 (NM_025109.3,1765-1783).
ctcaccgaaactttgtaga

SEQ ID NO: 83293 - DNA, 19 bp, Homo sapiens
  siRNA target sequence for FLJ22865 (NM_025109.3,1771-1789).
gaaactttgtagaacgata

SEQ ID NO: 83294 - DNA, 19 bp, Homo sapiens
  siRNA target sequence for FLJ22865 (NM_025109.3,1782-1800).
gaacgatacaagttactaa

SEQ ID NO: 83295 - DNA, 19 bp, Homo sapiens
  siRNA target sequence for FLJ22865 (NM_025109.3,1785-1803).
cgatacaagttactaagaa

SEQ ID NO: 83296 - DNA, 19 bp, Homo sapiens
  siRNA target sequence for FLJ22865 (NM_025109.3,1924-1942).
ctctgccggtcctaactca

SEQ ID NO: 83297 - DNA, 19 bp, Homo sapiens
  siRNA target sequence for FLJ22865 (NM_025109.3,2160-2178).
gccattcgttcctggttaa

SEQ ID NO: 83298 - DNA, 19 bp, Homo sapiens
  siRNA target sequence for FLJ22865 (NM_025109.3,2162-2180).
cattcgttcctggttaact

SEQ ID NO: 83299 - DNA, 19 bp, Homo sapiens
  siRNA target sequence for FLJ22865 (NM_025109.3,2173-2191).
ggttaactcggaaacacat

SEQ ID NO: 83300 - DNA, 19 bp, Homo sapiens
  siRNA target sequence for FLJ22865 (NM_025109.3,2257-2275).
cctgccttgctgctaaaga

SEQ ID NO: 83301 - DNA, 19 bp, Homo sapiens
  siRNA target sequence for FLJ22865 (NM_025109.3,2535-2553).
cctcagggatcgataaagt

SEQ ID NO: 83302 - DNA, 19 bp, Homo sapiens
  siRNA target sequence for FLJ22865 (NM_025109.3,2614-2632).
gcattacaggctttaatca

SEQ ID NO: 83303 - DNA, 19 bp, Homo sapiens
  siRNA target sequence for FLJ22955 (NM_024819.3,454-472).
gggacctgatctttaacca

SEQ ID NO: 83304 - DNA, 19 bp, Homo sapiens
  siRNA target sequence for FLJ22955 (NM_024819.3,562-580).
gataccgctacgtgattct

SEQ ID NO: 83305 - DNA, 19 bp, Homo sapiens
  siRNA target sequence for FLJ22955 (NM_024819.3,630-648).
cacaccgtggtagtatact

SEQ ID NO: 83306 - DNA, 19 bp, Homo sapiens
  siRNA target sequence for FLJ23074 (NM_025052.1,346-364).
gtggctcaatctctagtat

SEQ ID NO: 83307 - DNA, 19 bp, Homo sapiens
  siRNA target sequence for FLJ23074 (NM_025052.1,348-366).
ggctcaatctctagtatta

SEQ ID NO: 83308 - DNA, 19 bp, Homo sapiens
  siRNA target sequence for FLJ23074 (NM_025052.1,349-367).
gctcaatctctagtattat

SEQ ID NO: 83309 - DNA, 19 bp, Homo sapiens
  siRNA target sequence for FLJ23074 (NM_025052.1,350-368).
ctcaatctctagtattata

SEQ ID NO: 83310 - DNA, 19 bp, Homo sapiens
  siRNA target sequence for FLJ23074 (NM_025052.1,396-414).
gtgttctgtaaatatacga

SEQ ID NO: 83311 - DNA, 19 bp, Homo sapiens
  siRNA target sequence for FLJ23074 (NM_025052.1,456-474).
gtggtacatcgcgatatca

SEQ ID NO: 83312 - DNA, 19 bp, Homo sapiens
  siRNA target sequence for FLJ23074 (NM_025052.1,458-476).
ggtacatcgcgatatcaaa

SEQ ID NO: 83313 - DNA, 19 bp, Homo sapiens
  siRNA target sequence for FLJ23074 (NM_025052.1,462-480).
catcgcgatatcaaaggaa

SEQ ID NO: 83314 - DNA, 19 bp, Homo sapiens
  siRNA target sequence for FLJ23074 (NM_025052.1,465-483).
cgcgatatcaaaggaaata

SEQ ID NO: 83315 - DNA, 19 bp, Homo sapiens
  siRNA target sequence for FLJ23074 (NM_025052.1,492-510).
ctcatgccaactggaataa

SEQ ID NO: 83316 - DNA, 19 bp, Homo sapiens
  siRNA target sequence for FLJ23074 (NM_025052.1,568-586).
cccacagtgacatgcttaa

SEQ ID NO: 83317 - DNA, 19 bp, Homo sapiens
  siRNA target sequence for FLJ23074 (NM_025052.1,590-608).
catgcatgggactccatat

SEQ ID NO: 83318 - DNA, 19 bp, Homo sapiens
  siRNA target sequence for FLJ23074 (NM_025052.1,641-659).
ctatggacggaaatcagat

SEQ ID NO: 83319 - DNA, 19 bp, Homo sapiens
  siRNA target sequence for FLJ23074 (NM_025052.1,645-663).
ggacggaaatcagatatct

SEQ ID NO: 83320 - DNA, 19 bp, Homo sapiens
  siRNA target sequence for FLJ23074 (NM_025052.1,662-680).
ctggagcattggttgtact

SEQ ID NO: 83321 - DNA, 19 bp, Homo sapiens
  siRNA target sequence for FLJ23356 (NM_032237.2,660-678).
cacgctgcttggctattgt

SEQ ID NO: 83322 - DNA, 19 bp, Homo sapiens
  siRNA target sequence for FLJ23356 (NM_032237.2,662-680).
cgctgcttggctattgtga

SEQ ID NO: 83323 - DNA, 19 bp, Homo sapiens
  siRNA target sequence for FLJ23356 (NM_032237.2,671-689).
gctattgtgaggatgacaa

SEQ ID NO: 83324 - DNA, 19 bp, Homo sapiens
  siRNA target sequence for FLJ23356 (NM_032237.2,677-695).
gtgaggatgacaacactat

SEQ ID NO: 83325 - DNA, 19 bp, Homo sapiens
  siRNA target sequence for FLJ23356 (NM_032237.2,681-699).
ggatgacaacactatgctt

SEQ ID NO: 83326 - DNA, 19 bp, Homo sapiens
  siRNA target sequence for FLJ23356 (NM_032237.2,692-710).
ctatgcttactgaatatca

SEQ ID NO: 83327 - DNA, 19 bp, Homo sapiens
  siRNA target sequence for FLJ23356 (NM_032237.2,712-730).
cctctaggttccttgagta

SEQ ID NO: 83328 - DNA, 19 bp, Homo sapiens
  siRNA target sequence for FLJ23356 (NM_032237.2,713-731).
ctctaggttccttgagtaa

SEQ ID NO: 83329 - DNA, 19 bp, Homo sapiens
  siRNA target sequence for FLJ23356 (NM_032237.2,743-761).
cactaaacctttcaaagta

SEQ ID NO: 83330 - DNA, 19 bp, Homo sapiens
  siRNA target sequence for FLJ23356 (NM_032237.2,1055-1073).
ctttccacgatgatctcat

SEQ ID NO: 83331 - DNA, 19 bp, Homo sapiens
  siRNA target sequence for FLJ23356 (NM_032237.2,1076-1094).
cctcatatgatgagaagat

SEQ ID NO: 83332 - DNA, 19 bp, Homo sapiens
  siRNA target sequence for FLJ23356 (NM_032237.2,1077-1095).
ctcatatgatgagaagatt

SEQ ID NO: 83333 - DNA, 19 bp, Homo sapiens
  siRNA target sequence for FLJ23356 (NM_032237.2,1128-1146).
ccttctggggcacattgaa

SEQ ID NO: 83334 - DNA, 19 bp, Homo sapiens
  siRNA target sequence for FLJ23356 (NM_032237.2,1138-1156).
cacattgaagggagtgata

SEQ ID NO: 83335 - DNA, 19 bp, Homo sapiens
  siRNA target sequence for FLJ23356 (NM_032237.2,1153-1171).
gatatggtccgattccatt

SEQ ID NO: 83336 - DNA, 19 bp, Homo sapiens
  siRNA target sequence for FLJ23356 (NM_032237.2,1168-1186).
catttgtttgatattcaca

SEQ ID NO: 83337 - DNA, 19 bp, Homo sapiens
  siRNA target sequence for FLJ23356 (NM_032237.2,1251-1269).
gaaggtcttggatacactt

SEQ ID NO: 83338 - DNA, 19 bp, Homo sapiens
  siRNA target sequence for FLJ23356 (NM_032237.2,1257-1275).
cttggatacacttagagat

SEQ ID NO: 83339 - DNA, 19 bp, Homo sapiens
  siRNA target sequence for FLJ23356 (NM_032237.2,1267-1285).
cttagagatgccatgatgt

SEQ ID NO: 83340 - DNA, 19 bp, Homo sapiens
  siRNA target sequence for FLJ23441 (NM_024678.3,302-320).
cgagtggggagcgcattaa

SEQ ID NO: 83341 - DNA, 19 bp, Homo sapiens
  siRNA target sequence for FLJ23441 (NM_024678.3,376-394).
gtaaatgatgggtcatctt

SEQ ID NO: 83342 - DNA, 19 bp, Homo sapiens
  siRNA target sequence for FLJ23441 (NM_024678.3,424-442).
ggccttgacagtagagaat

SEQ ID NO: 83343 - DNA, 19 bp, Homo sapiens
  siRNA target sequence for FLJ23441 (NM_024678.3,425-443).
gccttgacagtagagaatt

SEQ ID NO: 83344 - DNA, 19 bp, Homo sapiens
  siRNA target sequence for FLJ23441 (NM_024678.3,426-444).
ccttgacagtagagaatta

SEQ ID NO: 83345 - DNA, 19 bp, Homo sapiens
  siRNA target sequence for FLJ23441 (NM_024678.3,427-445).
cttgacagtagagaattaa

SEQ ID NO: 83346 - DNA, 19 bp, Homo sapiens
  siRNA target sequence for FLJ23441 (NM_024678.3,452-470).
ggagttctgtggaagtaca

SEQ ID NO: 83347 - DNA, 19 bp, Homo sapiens
  siRNA target sequence for FLJ23441 (NM_024678.3,466-484).
gtacaagggcagctgataa

SEQ ID NO: 83348 - DNA, 19 bp, Homo sapiens
  siRNA target sequence for FLJ23441 (NM_024678.3,603-621).
gcgacaatatcctcacttt

SEQ ID NO: 83349 - DNA, 19 bp, Homo sapiens
  siRNA target sequence for FLJ23441 (NM_024678.3,604-622).
cgacaatatcctcacttta

SEQ ID NO: 83350 - DNA, 19 bp, Homo sapiens
  siRNA target sequence for FLJ23441 (NM_024678.3,632-650).
ctaacgttctgggttctat

SEQ ID NO: 83351 - DNA, 19 bp, Homo sapiens
  siRNA target sequence for FLJ23441 (NM_024678.3,670-688).
gcgacagctgctattcatt

SEQ ID NO: 83352 - DNA, 19 bp, Homo sapiens
  siRNA target sequence for FLJ23441 (NM_024678.3,672-690).
gacagctgctattcattct

SEQ ID NO: 83353 - DNA, 19 bp, Homo sapiens
  siRNA target sequence for FLJ23441 (NM_024678.3,706-724).
ggctttgtacatattcata

SEQ ID NO: 83354 - DNA, 19 bp, Homo sapiens
  siRNA target sequence for FLJ23441 (NM_024678.3,721-739).
catactccaataatcacat

SEQ ID NO: 83355 - DNA, 19 bp, Homo sapiens
  siRNA target sequence for FLJ23441 (NM_024678.3,799-817).
gtacctgaggagaatttct

SEQ ID NO: 83356 - DNA, 19 bp, Homo sapiens
  siRNA target sequence for FLJ23441 (NM_024678.3,843-861).
ctcaggacaacttcatcta

SEQ ID NO: 83357 - DNA, 19 bp, Homo sapiens
  siRNA target sequence for FLJ23441 (NM_024678.3,905-923).
cgaccttccgagctgaaaa

SEQ ID NO: 83358 - DNA, 19 bp, Homo sapiens
  siRNA target sequence for FLJ23441 (NM_024678.3,906-924).
gaccttccgagctgaaaat

SEQ ID NO: 83359 - DNA, 19 bp, Homo sapiens
  siRNA target sequence for FLJ23441 (NM_024678.3,936-954).
gaggcacctggcagagttt

SEQ ID NO: 83360 - DNA, 19 bp, Homo sapiens
  siRNA target sequence for FLJ23441 (NM_024678.3,985-1003).
gacagccttcaagatctta

SEQ ID NO: 83361 - DNA, 19 bp, Homo sapiens
  siRNA target sequence for FLJ23441 (NM_024678.3,1100-1118).
gccaaaaggacagattaga

SEQ ID NO: 83362 - DNA, 19 bp, Homo sapiens
  siRNA target sequence for FLJ23441 (NM_024678.3,1157-1175).
ctgaagcagtggagatctt

SEQ ID NO: 83363 - DNA, 19 bp, Homo sapiens
  siRNA target sequence for FLJ23441 (NM_024678.3,1180-1198).
caagcatcccagaacttca

SEQ ID NO: 83364 - DNA, 19 bp, Homo sapiens
  siRNA target sequence for FLJ23441 (NM_024678.3,1224-1242).
cctacggactgaacatgaa

SEQ ID NO: 83365 - DNA, 19 bp, Homo sapiens
  siRNA target sequence for FLJ23441 (NM_024678.3,1269-1287).
catacctgtcttcgttatt

SEQ ID NO: 83366 - DNA, 19 bp, Homo sapiens
  siRNA target sequence for FLJ23441 (NM_024678.3,1273-1291).
cctgtcttcgttattaatt

SEQ ID NO: 83367 - DNA, 19 bp, Homo sapiens
  siRNA target sequence for FLJ23441 (NM_024678.3,1274-1292).
ctgtcttcgttattaatta

SEQ ID NO: 83368 - DNA, 19 bp, Homo sapiens
  siRNA target sequence for FLJ23441 (NM_024678.3,1282-1300).
gttattaattatccattaa

SEQ ID NO: 83369 - DNA, 19 bp, Homo sapiens
  siRNA target sequence for FLJ23441 (NM_024678.3,1347-1365).
cacggttgctgctgttgat

SEQ ID NO: 83370 - DNA, 19 bp, Homo sapiens
  siRNA target sequence for FLJ23441 (NM_024678.3,1403-1421).
gcctcagagaagaacgata

SEQ ID NO: 83371 - DNA, 19 bp, Homo sapiens
  siRNA target sequence for FLJ23441 (NM_024678.3,1445-1463).
ccagatcgggacttacaga

SEQ ID NO: 83372 - DNA, 19 bp, Homo sapiens
  siRNA target sequence for FLJ23441 (NM_024678.3,1446-1464).
cagatcgggacttacagaa

SEQ ID NO: 83373 - DNA, 19 bp, Homo sapiens
  siRNA target sequence for FLJ23441 (NM_024678.3,1451-1469).
cgggacttacagaagtcta

SEQ ID NO: 83374 - DNA, 19 bp, Homo sapiens
  siRNA target sequence for FLJ23441 (NM_024678.3,1483-1501).
gaccttcgtcgatttggat

SEQ ID NO: 83375 - DNA, 19 bp, Homo sapiens
  siRNA target sequence for FLJ23441 (NM_024678.3,1550-1568).
gcatcttgggtgttgacaa

SEQ ID NO: 83376 - DNA, 19 bp, Homo sapiens
  siRNA target sequence for FLJ23441 (NM_024678.3,1551-1569).
catcttgggtgttgacaat

SEQ ID NO: 83377 - DNA, 19 bp, Homo sapiens
  siRNA target sequence for FLJ23441 (NM_024678.3,1557-1575).
gggtgttgacaatatcaaa

SEQ ID NO: 83378 - DNA, 19 bp, Homo sapiens
  siRNA target sequence for FLJ25005 (NM_152334.2,493-511).
gctcttacttgccatttat

SEQ ID NO: 83379 - DNA, 19 bp, Homo sapiens
  siRNA target sequence for FLJ25005 (NM_152334.2,496-514).
cttacttgccatttatgga

SEQ ID NO: 83380 - DNA, 19 bp, Homo sapiens
  siRNA target sequence for FLJ25005 (NM_152334.2,586-604).
gaaaacaacgccttaccaa

SEQ ID NO: 83381 - DNA, 19 bp, Homo sapiens
  siRNA target sequence for FLJ25005 (NM_152334.2,631-649).
ggctgaaagcacggtaata

SEQ ID NO: 83382 - DNA, 19 bp, Homo sapiens
  siRNA target sequence for FLJ25005 (NM_152334.2,642-660).
cggtaatagccaaagtcaa

SEQ ID NO: 83383 - DNA, 19 bp, Homo sapiens
  siRNA target sequence for FLJ25005 (NM_152334.2,643-661).
ggtaatagccaaagtcaat

SEQ ID NO: 83384 - DNA, 19 bp, Homo sapiens
  siRNA target sequence for FLJ25005 (NM_152334.2,705-723).
ctctagagctgcttacatt

SEQ ID NO: 83385 - DNA, 19 bp, Homo sapiens
  siRNA target sequence for FLJ25005 (NM_152334.2,710-728).
gagctgcttacatttgata

SEQ ID NO: 83386 - DNA, 19 bp, Homo sapiens
  siRNA target sequence for FLJ25005 (NM_152334.2,712-730).
gctgcttacatttgataat

SEQ ID NO: 83387 - DNA, 19 bp, Homo sapiens
  siRNA target sequence for FLJ25005 (NM_152334.2,781-799).
ggccatggagctttactat

SEQ ID NO: 83388 - DNA, 19 bp, Homo sapiens
  siRNA target sequence for FLJ25005 (NM_152334.2,893-911).
gccctggagaatatatgta

SEQ ID NO: 83389 - DNA, 19 bp, Homo sapiens
  siRNA target sequence for FLJ25005 (NM_152334.2,894-912).
ccctggagaatatatgtaa

SEQ ID NO: 83390 - DNA, 19 bp, Homo sapiens
  siRNA target sequence for FLJ25005 (NM_152334.2,1045-1063).
gtacaggtgcggtccatta

SEQ ID NO: 83391 - DNA, 19 bp, Homo sapiens
  siRNA target sequence for FLJ25005 (NM_152334.2,1050-1068).
ggtgcggtccattaattga

SEQ ID NO: 83392 - DNA, 19 bp, Homo sapiens
  siRNA target sequence for FLJ25005 (NM_152334.2,1059-1077).
cattaattgacctttgcaa

SEQ ID NO: 83393 - DNA, 19 bp, Homo sapiens
  siRNA target sequence for FLJ25005 (NM_152334.2,1075-1093).
caaaggtccacatgtaaga

SEQ ID NO: 83394 - DNA, 19 bp, Homo sapiens
  siRNA target sequence for FLJ25005 (NM_152334.2,1174-1192).
gcagaggatctatggaata

SEQ ID NO: 83395 - DNA, 19 bp, Homo sapiens
  siRNA target sequence for FLJ25005 (NM_152334.2,1175-1193).
cagaggatctatggaatat

SEQ ID NO: 83396 - DNA, 19 bp, Homo sapiens
  siRNA target sequence for FLJ25005 (NM_152334.2,1270-1288).
cgggaaggaacaagaactt

SEQ ID NO: 83397 - DNA, 19 bp, Homo sapiens
  siRNA target sequence for FLJ25005 (NM_152334.2,1291-1309).
ctttttccacgatttgagt

SEQ ID NO: 83398 - DNA, 19 bp, Homo sapiens
  siRNA target sequence for FLJ25005 (NM_152334.2,1532-1550).
ccagggcactgtctaatgt

SEQ ID NO: 83399 - DNA, 19 bp, Homo sapiens
  siRNA target sequence for FLJ25005 (NM_152334.2,1533-1551).
cagggcactgtctaatgtt

SEQ ID NO: 83400 - DNA, 19 bp, Homo sapiens
  siRNA target sequence for FLJ25005 (NM_152334.2,1573-1591).
gagggaaatgcctattaga

SEQ ID NO: 83401 - DNA, 19 bp, Homo sapiens
  siRNA target sequence for FLJ25005 (NM_152334.2,1576-1594).
ggaaatgcctattagattt

SEQ ID NO: 83402 - DNA, 19 bp, Homo sapiens
  siRNA target sequence for FLJ25005 (NM_152334.2,1584-1602).
ctattagatttgctgattt

SEQ ID NO: 83403 - DNA, 19 bp, Homo sapiens
  siRNA target sequence for FLJ25005 (NM_152334.2,1725-1743).
ggtgtttgcagtttttgca

SEQ ID NO: 83404 - DNA, 19 bp, Homo sapiens
  siRNA target sequence for FLJ25005 (NM_152334.2,1726-1744).
gtgtttgcagtttttgcaa

SEQ ID NO: 83405 - DNA, 19 bp, Homo sapiens
  siRNA target sequence for FLJ25005 (NM_152334.2,1763-1781).
ggcttctcctttcaattaa

SEQ ID NO: 83406 - DNA, 19 bp, Homo sapiens
  siRNA target sequence for FLJ25005 (NM_152334.2,1764-1782).
gcttctcctttcaattaaa

SEQ ID NO: 83407 - DNA, 19 bp, Homo sapiens
  siRNA target sequence for FLJ25005 (NM_152334.2,1775-1793).
caattaaacctgtcaacaa

SEQ ID NO: 83408 - DNA, 19 bp, Homo sapiens
  siRNA target sequence for FLJ25005 (NM_152334.2,1788-1806).
caacaaggccggaaaactt

SEQ ID NO: 83409 - DNA, 19 bp, Homo sapiens
  siRNA target sequence for FLJ25005 (NM_152334.2,1905-1923).
cattttatggccctaaaat

SEQ ID NO: 83410 - DNA, 19 bp, Homo sapiens
  siRNA target sequence for FLJ25005 (NM_152334.2,1914-1932).
gccctaaaattgacataaa

SEQ ID NO: 83411 - DNA, 19 bp, Homo sapiens
  siRNA target sequence for FLJ25005 (NM_152334.2,1957-1975).
ccatcaatgtgctacaatt

SEQ ID NO: 83412 - DNA, 19 bp, Homo sapiens
  siRNA target sequence for FLJ25005 (NM_152334.2,1994-2012).
cctattagatttaatctca

SEQ ID NO: 83413 - DNA, 19 bp, Homo sapiens
  siRNA target sequence for FLJ25005 (NM_152334.2,2041-2059).
gaagagacctgtgatcatt

SEQ ID NO: 83414 - DNA, 19 bp, Homo sapiens
  siRNA target sequence for FLJ25005 (NM_152334.2,2164-2182).
ccctgtggggccaacttgt

SEQ ID NO: 83415 - DNA, 19 bp, Homo sapiens
  siRNA target sequence for FLJ25005 (NM_152334.2,2168-2186).
gtggggccaacttgtgaaa

SEQ ID NO: 83416 - DNA, 19 bp, Homo sapiens
  siRNA target sequence for FLJ25005 (NM_152334.2,2171-2189).
gggccaacttgtgaaaaat

SEQ ID NO: 83417 - DNA, 19 bp, Homo sapiens
  siRNA target sequence for FLJ25005 (NM_152334.2,2173-2191).
gccaacttgtgaaaaatat

SEQ ID NO: 83418 - DNA, 19 bp, Homo sapiens
  siRNA target sequence for FLJ25005 (NM_152334.2,2243-2261).
gacttggatcacagttgta

SEQ ID NO: 83419 - DNA, 19 bp, Homo sapiens
  siRNA target sequence for FLJ25005 (NM_152334.2,2245-2263).
cttggatcacagttgtaca

SEQ ID NO: 83420 - DNA, 19 bp, Homo sapiens
  siRNA target sequence for FLJ25005 (NM_152334.2,2248-2266).
ggatcacagttgtacacta

SEQ ID NO: 83421 - DNA, 19 bp, Homo sapiens
  siRNA target sequence for FLJ25005 (NM_152334.2,2256-2274).
gttgtacactaaataagaa

SEQ ID NO: 83422 - DNA, 19 bp, Homo sapiens
  siRNA target sequence for FLJ25005 (NM_152334.2,2264-2282).
ctaaataagaaaatacgaa

SEQ ID NO: 83423 - DNA, 19 bp, Homo sapiens
  siRNA target sequence for FLJ25005 (NM_152334.2,2288-2306).
cagctggctcagtataatt

SEQ ID NO: 83424 - DNA, 19 bp, Homo sapiens
  siRNA target sequence for FLJ25005 (NM_152334.2,2290-2308).
gctggctcagtataatttt

SEQ ID NO: 83425 - DNA, 19 bp, Homo sapiens
  siRNA target sequence for FLJ25005 (NM_152334.2,2393-2411).
gtaacttctgccattgata

SEQ ID NO: 83426 - DNA, 19 bp, Homo sapiens
  siRNA target sequence for FLJ25005 (NM_152334.2,2397-2415).
cttctgccattgataaact

SEQ ID NO: 83427 - DNA, 19 bp, Homo sapiens
  siRNA target sequence for FLJ25006 (NM_144610.1,247-265).
ccccagtactggtagagaa

SEQ ID NO: 83428 - DNA, 19 bp, Homo sapiens
  siRNA target sequence for FLJ25006 (NM_144610.1,280-298).
ggccagtgcctcagttcat

SEQ ID NO: 83429 - DNA, 19 bp, Homo sapiens
  siRNA target sequence for FLJ25006 (NM_144610.1,416-434).
ccagaaagctgtatttgca

SEQ ID NO: 83430 - DNA, 19 bp, Homo sapiens
  siRNA target sequence for FLJ25006 (NM_144610.1,487-505).
gcaaagaggaggttagcat

SEQ ID NO: 83431 - DNA, 19 bp, Homo sapiens
  siRNA target sequence for FLJ25006 (NM_144610.1,502-520).
gcatccagcgacagatcaa

SEQ ID NO: 83432 - DNA, 19 bp, Homo sapiens
  siRNA target sequence for FLJ25006 (NM_144610.1,515-533).
gatcaaccatccctttgta

SEQ ID NO: 83433 - DNA, 19 bp, Homo sapiens
  siRNA target sequence for FLJ25006 (NM_144610.1,564-582).
cggcaccttttcattatgt

SEQ ID NO: 83434 - DNA, 19 bp, Homo sapiens
  siRNA target sequence for FLJ25006 (NM_144610.1,566-584).
gcaccttttcattatgtgt

SEQ ID NO: 83435 - DNA, 19 bp, Homo sapiens
  siRNA target sequence for FLJ25006 (NM_144610.1,671-689).
ggtgctggtactgtgttat

SEQ ID NO: 83436 - DNA, 19 bp, Homo sapiens
  siRNA target sequence for FLJ25006 (NM_144610.1,804-822).
gctcaagcctacactatct

SEQ ID NO: 83437 - DNA, 19 bp, Homo sapiens
  siRNA target sequence for FLJ25006 (NM_144610.1,823-841).
gtggcactcttcagtacat

SEQ ID NO: 83438 - DNA, 19 bp, Homo sapiens
  siRNA target sequence for FLJ31364 (NM_152463.1,134-152).
ccaacatttgcctttctga

SEQ ID NO: 83439 - DNA, 19 bp, Homo sapiens
  siRNA target sequence for FLJ31364 (NM_152463.1,158-176).
gaaccatcttcaacaaaga

SEQ ID NO: 83440 - DNA, 19 bp, Homo sapiens
  siRNA target sequence for FLJ31364 (NM_152463.1,211-229).
ggttgacatctcagattgt

SEQ ID NO: 83441 - DNA, 19 bp, Homo sapiens
  siRNA target sequence for FLJ31364 (NM_152463.1,305-323).
cagccagtcaggttgctaa

SEQ ID NO: 83442 - DNA, 19 bp, Homo sapiens
  siRNA target sequence for FLJ31364 (NM_152463.1,361-379).
ggctcaaaggcttacatgt

SEQ ID NO: 83443 - DNA, 19 bp, Homo sapiens
  siRNA target sequence for FLJ31364 (NM_152463.1,362-380).
gctcaaaggcttacatgta

SEQ ID NO: 83444 - DNA, 19 bp, Homo sapiens
  siRNA target sequence for FLJ31364 (NM_152463.1,365-383).
caaaggcttacatgtaagt

SEQ ID NO: 83445 - DNA, 19 bp, Homo sapiens
  siRNA target sequence for FLJ31364 (NM_152463.1,420-438).
gctccccagttaaaagtgt

SEQ ID NO: 83446 - DNA, 19 bp, Homo sapiens
  siRNA target sequence for FLJ31364 (NM_152463.1,421-439).
ctccccagttaaaagtgtt

SEQ ID NO: 83447 - DNA, 19 bp, Homo sapiens
  siRNA target sequence for FLJ31364 (NM_152463.1,423-441).
ccccagttaaaagtgtttt

SEQ ID NO: 83448 - DNA, 19 bp, Homo sapiens
  siRNA target sequence for FLJ31364 (NM_152463.1,437-455).
gttttggatcatcaaaata

SEQ ID NO: 83449 - DNA, 19 bp, Homo sapiens
  siRNA target sequence for FLJ31364 (NM_152463.1,503-521).
gaagttcccctccatgata

SEQ ID NO: 83450 - DNA, 19 bp, Homo sapiens
  siRNA target sequence for FLJ31364 (NM_152463.1,531-549).
ggagtgcagcagataacaa

SEQ ID NO: 83451 - DNA, 19 bp, Homo sapiens
  siRNA target sequence for FLJ31364 (NM_152463.1,817-835).
cttaaaacacatcattgta

SEQ ID NO: 83452 - DNA, 19 bp, Homo sapiens
  siRNA target sequence for FLJ31364 (NM_152463.1,842-860).
gatccagtgctcttacaga

SEQ ID NO: 83453 - DNA, 19 bp, Homo sapiens
  siRNA target sequence for FLJ31364 (NM_152463.1,991-1009).
ggtggaggagccaacagta

SEQ ID NO: 83454 - DNA, 19 bp, Homo sapiens
  siRNA target sequence for FLJ31364 (NM_152463.1,1041-1059).
ccatgatcgacaatggaaa

SEQ ID NO: 83455 - DNA, 19 bp, Homo sapiens
  siRNA target sequence for FLJ31364 (NM_152463.1,1420-1438).
gaagctccgagatgaaact

SEQ ID NO: 83456 - DNA, 19 bp, Homo sapiens
  siRNA target sequence for FLJ31364 (NM_152463.1,1609-1627).
ggcttatcagcagtgtttt

SEQ ID NO: 83457 - DNA, 19 bp, Homo sapiens
  siRNA target sequence for FLJ31364 (NM_152463.1,1618-1636).
gcagtgtttttcggataaa

SEQ ID NO: 83458 - DNA, 19 bp, Homo sapiens
  siRNA target sequence for FLJ31364 (NM_152463.1,1645-1663).
gaatttgctcgcagacata

SEQ ID NO: 83459 - DNA, 19 bp, Homo sapiens
  siRNA target sequence for FLJ31364 (NM_152463.1,1702-1720).
ccgcattggaccagaacta

SEQ ID NO: 83460 - DNA, 19 bp, Homo sapiens
  siRNA target sequence for FLJ31364 (NM_152463.1,1703-1721).
cgcattggaccagaactat

SEQ ID NO: 83461 - DNA, 19 bp, Homo sapiens
  siRNA target sequence for FLJ31364 (NM_152463.1,1735-1753).
ccttcagatgaccacttta

SEQ ID NO: 83462 - DNA, 19 bp, Homo sapiens
  siRNA target sequence for FLJ31364 (NM_152463.1,1756-1774).
gccacatctctctttagat

SEQ ID NO: 83463 - DNA, 19 bp, Homo sapiens
  siRNA target sequence for FLJ31364 (NM_152463.1,1757-1775).
ccacatctctctttagata

SEQ ID NO: 83464 - DNA, 19 bp, Homo sapiens
  siRNA target sequence for FLJ32685 (NM_152534.1,305-323).
gcagtaggctgcatccttt

SEQ ID NO: 83465 - DNA, 19 bp, Homo sapiens
  siRNA target sequence for FLJ32685 (NM_152534.1,311-329).
ggctgcatcctttatcaga

SEQ ID NO: 83466 - DNA, 19 bp, Homo sapiens
  siRNA target sequence for FLJ32685 (NM_152534.1,348-366).
ccttctacagcactaacat

SEQ ID NO: 83467 - DNA, 19 bp, Homo sapiens
  siRNA target sequence for FLJ32685 (NM_152534.1,367-385).
gctgtccttggctacaaaa

SEQ ID NO: 83468 - DNA, 19 bp, Homo sapiens
  siRNA target sequence for FLJ32685 (NM_152534.1,368-386).
ctgtccttggctacaaaaa

SEQ ID NO: 83469 - DNA, 19 bp, Homo sapiens
  siRNA target sequence for FLJ32685 (NM_152534.1,370-388).
gtccttggctacaaaaata

SEQ ID NO: 83470 - DNA, 19 bp, Homo sapiens
  siRNA target sequence for FLJ32685 (NM_152534.1,372-390).
ccttggctacaaaaatagt

SEQ ID NO: 83471 - DNA, 19 bp, Homo sapiens
  siRNA target sequence for FLJ32685 (NM_152534.1,420-438).
gtatctactctgaaaaagt

SEQ ID NO: 83472 - DNA, 19 bp, Homo sapiens
  siRNA target sequence for FLJ32685 (NM_152534.1,480-498).
ctcgtccagatattgtaga

SEQ ID NO: 83473 - DNA, 19 bp, Homo sapiens
  siRNA target sequence for FLJ32685 (NM_152534.1,497-515).
gaagtcagttcgatgatat

SEQ ID NO: 83474 - DNA, 19 bp, Homo sapiens
  siRNA target sequence for FLJ32685 (NM_152534.1,507-525).
cgatgatatcagatgtcat

SEQ ID NO: 83475 - DNA, 19 bp, Homo sapiens
  siRNA target sequence for FLJ32685 (NM_152534.1,591-609).
gaagacgcacacaaaggta

SEQ ID NO: 83476 - DNA, 19 bp, Homo sapiens
  siRNA target sequence for FLJ32685 (NM_152534.1,594-612).
gacgcacacaaaggtattt

SEQ ID NO: 83477 - DNA, 19 bp, Homo sapiens
  siRNA target sequence for FLJ32685 (NM_152534.1,596-614).
cgcacacaaaggtatttta

SEQ ID NO: 83478 - DNA, 19 bp, Homo sapiens
  siRNA target sequence for FLJ32685 (NM_152534.1,675-693).
cctttgagaaggcaagttt

SEQ ID NO: 83479 - DNA, 19 bp, Homo sapiens
  siRNA target sequence for FLJ32685 (NM_152534.1,815-833).
ctgtcagatgataacttca

SEQ ID NO: 83480 - DNA, 19 bp, Homo sapiens
  siRNA target sequence for FLJ32685 (NM_152534.1,845-863).
gctgagaaagatacatatt

SEQ ID NO: 83481 - DNA, 19 bp, Homo sapiens
  siRNA target sequence for FLJ32685 (NM_152534.1,1148-1166).
gtgattcttcgaaatctca

SEQ ID NO: 83482 - DNA, 19 bp, Homo sapiens
  siRNA target sequence for FLJ32704 (NM_152572.2,730-748).
caggattgtaatattaggt

SEQ ID NO: 83483 - DNA, 19 bp, Homo sapiens
  siRNA target sequence for FLJ32704 (NM_152572.2,826-844).
cctgatcttaaatgagttt

SEQ ID NO: 83484 - DNA, 19 bp, Homo sapiens
  siRNA target sequence for FLJ32704 (NM_152572.2,827-845).
ctgatcttaaatgagtttt

SEQ ID NO: 83485 - DNA, 19 bp, Homo sapiens
  siRNA target sequence for FLJ32704 (NM_152572.2,1026-1044).
cacccagacacgtcattgt

SEQ ID NO: 83486 - DNA, 19 bp, Homo sapiens
  siRNA target sequence for FLJ32704 (NM_152572.2,1064-1082).
gtcctgatcgagagaaact

SEQ ID NO: 83487 - DNA, 19 bp, Homo sapiens
  siRNA target sequence for FLJ32704 (NM_152572.2,1090-1108).
gagaatcgaccctcaaact

SEQ ID NO: 83488 - DNA, 19 bp, Homo sapiens
  siRNA target sequence for FLJ32704 (NM_152572.2,1135-1153).
ctggccacccgaatctgaa

SEQ ID NO: 83489 - DNA, 19 bp, Homo sapiens
  siRNA target sequence for FLJ32704 (NM_152572.2,1137-1155).
ggccacccgaatctgaaat

SEQ ID NO: 83490 - DNA, 19 bp, Homo sapiens
  siRNA target sequence for FLJ32704 (NM_152572.2,1290-1308).
catgtgtggacgtcttcta

SEQ ID NO: 83491 - DNA, 19 bp, Homo sapiens
  siRNA target sequence for FLJ32704 (NM_152572.2,1426-1444).
gaaatacaggcttgtcaat

SEQ ID NO: 83492 - DNA, 19 bp, Homo sapiens
  siRNA target sequence for FLJ32704 (NM_152572.2,1651-1669).
gaaccgcctgggctacaat

SEQ ID NO: 83493 - DNA, 19 bp, Homo sapiens
  siRNA target sequence for FLJ32704 (NM_152572.2,1718-1736).
cggctgactctgagaagaa

SEQ ID NO: 83494 - DNA, 19 bp, Homo sapiens
  siRNA target sequence for FLJ32704 (NM_152572.2,1723-1741).
gactctgagaagaattgat

SEQ ID NO: 83495 - DNA, 19 bp, Homo sapiens
  siRNA target sequence for FLJ32704 (NM_152572.2,1758-1776).
ggtaccacctcatgtacaa

SEQ ID NO: 83496 - DNA, 19 bp, Homo sapiens
  siRNA target sequence for FLJ32704 (NM_152572.2,1921-1939).
ggaccaggacccatacaca

SEQ ID NO: 83497 - DNA, 19 bp, Homo sapiens
  siRNA target sequence for FLJ32704 (NM_152572.2,1931-1949).
ccatacacagtcttcgaat

SEQ ID NO: 83498 - DNA, 19 bp, Homo sapiens
  siRNA target sequence for FLJ32704 (NM_152572.2,1932-1950).
catacacagtcttcgaata

SEQ ID NO: 83499 - DNA, 19 bp, Homo sapiens
  siRNA target sequence for FLJ32704 (NM_152572.2,1954-1972).
cgagagtgggatcattaat

SEQ ID NO: 83500 - DNA, 19 bp, Homo sapiens
  siRNA target sequence for FLJ32818 (NM_144685.3,523-541).
catgacgccctcaagttct

SEQ ID NO: 83501 - DNA, 19 bp, Homo sapiens
  siRNA target sequence for FLJ32818 (NM_144685.3,1152-1170).
ccagattgagacagtgaat

SEQ ID NO: 83502 - DNA, 19 bp, Homo sapiens
  siRNA target sequence for FLJ32818 (NM_144685.3,1431-1449).
cgtcgtggccgcagaagat

SEQ ID NO: 83503 - DNA, 19 bp, Homo sapiens
  siRNA target sequence for FLJ34389 (NM_152649.1,490-508).
cggtgtgaagagatgaaat

SEQ ID NO: 83504 - DNA, 19 bp, Homo sapiens
  siRNA target sequence for FLJ34389 (NM_152649.1,542-560).
gcgtcctcggcctgatcaa

SEQ ID NO: 83505 - DNA, 19 bp, Homo sapiens
  siRNA target sequence for FLJ34389 (NM_152649.1,596-614).
gcgtgccctctgagaagtt

SEQ ID NO: 83506 - DNA, 19 bp, Homo sapiens
  siRNA target sequence for FLJ34389 (NM_152649.1,654-672).
ggctaatggggagatagaa

SEQ ID NO: 83507 - DNA, 19 bp, Homo sapiens
  siRNA target sequence for FLJ34389 (NM_152649.1,655-673).
gctaatggggagatagaaa

SEQ ID NO: 83508 - DNA, 19 bp, Homo sapiens
  siRNA target sequence for FLJ34389 (NM_152649.1,675-693).
gttcagcaatagatccaat

SEQ ID NO: 83509 - DNA, 19 bp, Homo sapiens
  siRNA target sequence for FLJ34389 (NM_152649.1,690-708).
caatatctgcaggtttcta

SEQ ID NO: 83510 - DNA, 19 bp, Homo sapiens
  siRNA target sequence for FLJ34389 (NM_152649.1,713-731).
caagccaggacaaaatact

SEQ ID NO: 83511 - DNA, 19 bp, Homo sapiens
  siRNA target sequence for FLJ34389 (NM_152649.1,716-734).
gccaggacaaaatactctt

SEQ ID NO: 83512 - DNA, 19 bp, Homo sapiens
  siRNA target sequence for FLJ34389 (NM_152649.1,771-789).
ggagctctcgctgttactt

SEQ ID NO: 83513 - DNA, 19 bp, Homo sapiens
  siRNA target sequence for FLJ34389 (NM_152649.1,888-906).
gatgctaagaagagataat

SEQ ID NO: 83514 - DNA, 19 bp, Homo sapiens
  siRNA target sequence for FLJ34389 (NM_152649.1,920-938).
cttcactgagacgattaga

SEQ ID NO: 83515 - DNA, 19 bp, Homo sapiens
  siRNA target sequence for FLJ34389 (NM_152649.1,923-941).
cactgagacgattagaaat

SEQ ID NO: 83516 - DNA, 19 bp, Homo sapiens
  siRNA target sequence for FLJ34389 (NM_152649.1,929-947).
gacgattagaaatcaacat

SEQ ID NO: 83517 - DNA, 19 bp, Homo sapiens
  siRNA target sequence for FLJ34389 (NM_152649.1,931-949).
cgattagaaatcaacatga

SEQ ID NO: 83518 - DNA, 19 bp, Homo sapiens
  siRNA target sequence for FLJ34389 (NM_152649.1,932-950).
gattagaaatcaacatgaa

SEQ ID NO: 83519 - DNA, 19 bp, Homo sapiens
  siRNA target sequence for FLJ34389 (NM_152649.1,972-990).
gcagtatttaccaccaaaa

SEQ ID NO: 83520 - DNA, 19 bp, Homo sapiens
  siRNA target sequence for FLJ34389 (NM_152649.1,973-991).
cagtatttaccaccaaaat

SEQ ID NO: 83521 - DNA, 19 bp, Homo sapiens
  siRNA target sequence for FLJ34389 (NM_152649.1,1059-1077).
gattctgctaagggaaaat

SEQ ID NO: 83522 - DNA, 19 bp, Homo sapiens
  siRNA target sequence for FLJ34389 (NM_152649.1,1078-1096).
gaagtcagcacactttata

SEQ ID NO: 83523 - DNA, 19 bp, Homo sapiens
  siRNA target sequence for FLJ34389 (NM_152649.1,1083-1101).
cagcacactttataaagga

SEQ ID NO: 83524 - DNA, 19 bp, Homo sapiens
  siRNA target sequence for FLJ34389 (NM_152649.1,1122-1140).
ggccataaaagtattcaaa

SEQ ID NO: 83525 - DNA, 19 bp, Homo sapiens
  siRNA target sequence for FLJ34389 (NM_152649.1,1149-1167).
ggctggcagcattgcaata

SEQ ID NO: 83526 - DNA, 19 bp, Homo sapiens
  siRNA target sequence for FLJ34389 (NM_152649.1,1151-1169).
ctggcagcattgcaatagt

SEQ ID NO: 83527 - DNA, 19 bp, Homo sapiens
  siRNA target sequence for FLJ34389 (NM_152649.1,1153-1171).
ggcagcattgcaatagtga

SEQ ID NO: 83528 - DNA, 19 bp, Homo sapiens
  siRNA target sequence for FLJ34389 (NM_152649.1,1168-1186).
gtgaggcagactttcaata

SEQ ID NO: 83529 - DNA, 19 bp, Homo sapiens
  siRNA target sequence for FLJ34389 (NM_152649.1,1172-1190).
ggcagactttcaataagga

SEQ ID NO: 83530 - DNA, 19 bp, Homo sapiens
  siRNA target sequence for FLJ34389 (NM_152649.1,1220-1238).
ccaacatcctgcgtatatt

SEQ ID NO: 83531 - DNA, 19 bp, Homo sapiens
  siRNA target sequence for FLJ34389 (NM_152649.1,1259-1277).
cagtgactccgcctcaatt

SEQ ID NO: 83532 - DNA, 19 bp, Homo sapiens
  siRNA target sequence for FLJ34389 (NM_152649.1,1261-1279).
gtgactccgcctcaattct

SEQ ID NO: 83533 - DNA, 19 bp, Homo sapiens
  siRNA target sequence for FLJ34389 (NM_152649.1,1418-1436).
ctgaactccacggaaaaat

SEQ ID NO: 83534 - DNA, 19 bp, Homo sapiens
  siRNA target sequence for FLJ34389 (NM_152649.1,1445-1463).
caaacttcctggtaactca

SEQ ID NO: 83535 - DNA, 19 bp, Homo sapiens
  siRNA target sequence for FLJ34389 (NM_152649.1,1460-1478).
ctcaaggctaccaagtgaa

SEQ ID NO: 83536 - DNA, 19 bp, Homo sapiens
  siRNA target sequence for FLJ34389 (NM_152649.1,1577-1595).
ctcaggaactggaagatgt

SEQ ID NO: 83537 - DNA, 19 bp, Homo sapiens
  siRNA target sequence for FLJ34389 (NM_152649.1,1587-1605).
ggaagatgtattttatcaa

SEQ ID NO: 83538 - DNA, 19 bp, Homo sapiens
  siRNA target sequence for FLJ34389 (NM_152649.1,1671-1689).
cccgtttcaaggctgtaat

SEQ ID NO: 83539 - DNA, 19 bp, Homo sapiens
  siRNA target sequence for FLJ34389 (NM_152649.1,1672-1690).
ccgtttcaaggctgtaatt

SEQ ID NO: 83540 - DNA, 19 bp, Homo sapiens
  siRNA target sequence for FLJ34389 (NM_152649.1,1837-1855).
ctctccaccttttctaagt

SEQ ID NO: 83541 - DNA, 19 bp, Homo sapiens
  siRNA target sequence for FLJ37300 (NM_153209.1,410-428).
caggctgtgggaaaaccta

SEQ ID NO: 83542 - DNA, 19 bp, Homo sapiens
  siRNA target sequence for FLJ37300 (NM_153209.1,450-468).
ggagcctggcatctatgtt

SEQ ID NO: 83543 - DNA, 19 bp, Homo sapiens
  siRNA target sequence for FLJ37300 (NM_153209.1,648-666).
cgaagtctccaccatcaat

SEQ ID NO: 83544 - DNA, 19 bp, Homo sapiens
  siRNA target sequence for FLJ37300 (NM_153209.1,784-802).
cgcagccgggtcaagaaca

SEQ ID NO: 83545 - DNA, 19 bp, Homo sapiens
  siRNA target sequence for FLJ37300 (NM_153209.1,788-806).
gccgggtcaagaacatctt

SEQ ID NO: 83546 - DNA, 19 bp, Homo sapiens
  siRNA target sequence for FLJ37300 (NM_153209.1,861-879).
cgcctcgcagacacagaat

SEQ ID NO: 83547 - DNA, 19 bp, Homo sapiens
  siRNA target sequence for FLJ37300 (NM_153209.1,964-982).
ggtagcaacaagtacatca

SEQ ID NO: 83548 - DNA, 19 bp, Homo sapiens
  siRNA target sequence for FLJ37300 (NM_153209.1,1119-1137).
ggccaagaacattaagact

SEQ ID NO: 83549 - DNA, 19 bp, Homo sapiens
  siRNA target sequence for FLJ37300 (NM_153209.1,1120-1138).
gccaagaacattaagacta

SEQ ID NO: 83550 - DNA, 19 bp, Homo sapiens
  siRNA target sequence for FLJ37300 (NM_153209.1,1221-1239).
gcgactcaagcgcaagatt

SEQ ID NO: 83551 - DNA, 19 bp, Homo sapiens
  siRNA target sequence for FLT1 (NM_002019.2,303-321).
gcttctcacaggatctagt

SEQ ID NO: 83552 - DNA, 19 bp, Homo sapiens
  siRNA target sequence for FLT1 (NM_002019.2,314-332).
gatctagttcaggttcaaa

SEQ ID NO: 83553 - DNA, 19 bp, Homo sapiens
  siRNA target sequence for FLT1 (NM_002019.2,317-335).
ctagttcaggttcaaaatt

SEQ ID NO: 83554 - DNA, 19 bp, Homo sapiens
  siRNA target sequence for FLT1 (NM_002019.2,415-433).
gaagcagcccataaatggt

SEQ ID NO: 83555 - DNA, 19 bp, Homo sapiens
  siRNA target sequence for FLT1 (NM_002019.2,462-480).
cgaaaggctgagcataact

SEQ ID NO: 83556 - DNA, 19 bp, Homo sapiens
  siRNA target sequence for FLT1 (NM_002019.2,468-486).
gctgagcataactaaatct

SEQ ID NO: 83557 - DNA, 19 bp, Homo sapiens
  siRNA target sequence for FLT1 (NM_002019.2,557-575).
gcttctacagctgcaaata

SEQ ID NO: 83558 - DNA, 19 bp, Homo sapiens
  siRNA target sequence for FLT1 (NM_002019.2,580-598).
gctgtacctacttcaaaga

SEQ ID NO: 83559 - DNA, 19 bp, Homo sapiens
  siRNA target sequence for FLT1 (NM_002019.2,583-601).
gtacctacttcaaagaaga

SEQ ID NO: 83560 - DNA, 19 bp, Homo sapiens
  siRNA target sequence for FLT1 (NM_002019.2,608-626).
cagaatctgcaatctatat

SEQ ID NO: 83561 - DNA, 19 bp, Homo sapiens
  siRNA target sequence for FLT1 (NM_002019.2,647-665).
gacctttcgtagagatgta

SEQ ID NO: 83562 - DNA, 19 bp, Homo sapiens
  siRNA target sequence for FLT1 (NM_002019.2,649-667).
cctttcgtagagatgtaca

SEQ ID NO: 83563 - DNA, 19 bp, Homo sapiens
  siRNA target sequence for FLT1 (NM_002019.2,725-743).
gggttacgtcacctaacat

SEQ ID NO: 83564 - DNA, 19 bp, Homo sapiens
  siRNA target sequence for FLT1 (NM_002019.2,737-755).
ctaacatcactgttacttt

SEQ ID NO: 83565 - DNA, 19 bp, Homo sapiens
  siRNA target sequence for FLT1 (NM_002019.2,785-803).
ctgatggaaaacgcataat

SEQ ID NO: 83566 - DNA, 19 bp, Homo sapiens
  siRNA target sequence for FLT1 (NM_002019.2,878-896).
cagtcaatgggcatttgta

SEQ ID NO: 83567 - DNA, 19 bp, Homo sapiens
  siRNA target sequence for FLT1 (NM_002019.2,880-898).
gtcaatgggcatttgtata

SEQ ID NO: 83568 - DNA, 19 bp, Homo sapiens
  siRNA target sequence for FLT1 (NM_002019.2,916-934).
catcgacaaaccaatacaa

SEQ ID NO: 83569 - DNA, 19 bp, Homo sapiens
  siRNA target sequence for FLT1 (NM_002019.2,919-937).
cgacaaaccaatacaatca

SEQ ID NO: 83570 - DNA, 19 bp, Homo sapiens
  siRNA target sequence for FLT1 (NM_002019.2,959-977).
cacgcccagtcaaattact

SEQ ID NO: 83571 - DNA, 19 bp, Homo sapiens
  siRNA target sequence for FLT1 (NM_002019.2,1046-1064).
ggagttaccctgatgaaaa

SEQ ID NO: 83572 - DNA, 19 bp, Homo sapiens
  siRNA target sequence for FLT1 (NM_002019.2,1079-1097).
ccgtaaggcgacgaattga

SEQ ID NO: 83573 - DNA, 19 bp, Homo sapiens
  siRNA target sequence for FLT1 (NM_002019.2,1109-1127).
cccatgccaacatattcta

SEQ ID NO: 83574 - DNA, 19 bp, Homo sapiens
  siRNA target sequence for FLT1 (NM_002019.2,1111-1129).
catgccaacatattctaca

SEQ ID NO: 83575 - DNA, 19 bp, Homo sapiens
  siRNA target sequence for FLT1 (NM_002019.2,1130-1148).
gtgttcttactattgacaa

SEQ ID NO: 83576 - DNA, 19 bp, Homo sapiens
  siRNA target sequence for FLT1 (NM_002019.2,1190-1208).
ggagtggaccatcattcaa

SEQ ID NO: 83577 - DNA, 19 bp, Homo sapiens
  siRNA target sequence for FLT1 (NM_002019.2,1196-1214).
gaccatcattcaaatctgt

SEQ ID NO: 83578 - DNA, 19 bp, Homo sapiens
  siRNA target sequence for FLT1 (NM_002019.2,1198-1216).
ccatcattcaaatctgtta

SEQ ID NO: 83579 - DNA, 19 bp, Homo sapiens
  siRNA target sequence for FLT1 (NM_002019.2,1218-1236).
cacctcagtgcatatatat

SEQ ID NO: 83580 - DNA, 19 bp, Homo sapiens
  siRNA target sequence for FLT1 (NM_002019.2,1220-1238).
cctcagtgcatatatatga

SEQ ID NO: 83581 - DNA, 19 bp, Homo sapiens
  siRNA target sequence for FLT1 (NM_002019.2,1223-1241).
cagtgcatatatatgataa

SEQ ID NO: 83582 - DNA, 19 bp, Homo sapiens
  siRNA target sequence for FLT1 (NM_002019.2,1301-1319).
ggtcttaccggctctctat

SEQ ID NO: 83583 - DNA, 19 bp, Homo sapiens
  siRNA target sequence for FLT1 (NM_002019.2,1304-1322).
cttaccggctctctatgaa

SEQ ID NO: 83584 - DNA, 19 bp, Homo sapiens
  siRNA target sequence for FLT1 (NM_002019.2,1336-1354).
ccctcgccggaagttgtat

SEQ ID NO: 83585 - DNA, 19 bp, Homo sapiens
  siRNA target sequence for FLT1 (NM_002019.2,1340-1358).
cgccggaagttgtatggtt

SEQ ID NO: 83586 - DNA, 19 bp, Homo sapiens
  siRNA target sequence for FLT1 (NM_002019.2,1341-1359).
gccggaagttgtatggtta

SEQ ID NO: 83587 - DNA, 19 bp, Homo sapiens
  siRNA target sequence for FLT1 (NM_002019.2,1342-1360).
ccggaagttgtatggttaa

SEQ ID NO: 83588 - DNA, 19 bp, Homo sapiens
  siRNA target sequence for FLT1 (NM_002019.2,1343-1361).
cggaagttgtatggttaaa

SEQ ID NO: 83589 - DNA, 19 bp, Homo sapiens
  siRNA target sequence for FLT1 (NM_002019.2,1368-1386).
gttacctgcgactgagaaa

SEQ ID NO: 83590 - DNA, 19 bp, Homo sapiens
  siRNA target sequence for FLT1 (NM_002019.2,1403-1421).
ctcgtggctactcgttaat

SEQ ID NO: 83591 - DNA, 19 bp, Homo sapiens
  siRNA target sequence for FLT1 (NM_002019.2,1405-1423).
cgtggctactcgttaatta

SEQ ID NO: 83592 - DNA, 19 bp, Homo sapiens
  siRNA target sequence for FLT1 (NM_002019.2,1406-1424).
gtggctactcgttaattat

SEQ ID NO: 83593 - DNA, 19 bp, Homo sapiens
  siRNA target sequence for FLT1 (NM_002019.2,1408-1426).
ggctactcgttaattatca

SEQ ID NO: 83594 - DNA, 19 bp, Homo sapiens
  siRNA target sequence for FLT1 (NM_002019.2,1409-1427).
gctactcgttaattatcaa

SEQ ID NO: 83595 - DNA, 19 bp, Homo sapiens
  siRNA target sequence for FLT1 (NM_002019.2,1443-1461).
ggatgcagggaattataca

SEQ ID NO: 83596 - DNA, 19 bp, Homo sapiens
  siRNA target sequence for FLT1 (NM_002019.2,1447-1465).
gcagggaattatacaatct

SEQ ID NO: 83597 - DNA, 19 bp, Homo sapiens
  siRNA target sequence for FLT1 (NM_002019.2,1470-1488).
gagcataaaacagtcaaat

SEQ ID NO: 83598 - DNA, 19 bp, Homo sapiens
  siRNA target sequence for FLT1 (NM_002019.2,1500-1518).
cctcactgccactctaatt

SEQ ID NO: 83599 - DNA, 19 bp, Homo sapiens
  siRNA target sequence for FLT1 (NM_002019.2,1505-1523).
ctgccactctaattgtcaa

SEQ ID NO: 83600 - DNA, 19 bp, Homo sapiens
  siRNA target sequence for FLT1 (NM_002019.2,1508-1526).
ccactctaattgtcaatgt

SEQ ID NO: 83601 - DNA, 19 bp, Homo sapiens
  siRNA target sequence for FLT1 (NM_002019.2,1511-1529).
ctctaattgtcaatgtgaa

SEQ ID NO: 83602 - DNA, 19 bp, Homo sapiens
  siRNA target sequence for FLT1 (NM_002019.2,1605-1623).
gacttgtaccgcatatggt

SEQ ID NO: 83603 - DNA, 19 bp, Homo sapiens
  siRNA target sequence for FLT1 (NM_002019.2,1607-1625).
cttgtaccgcatatggtat

SEQ ID NO: 83604 - DNA, 19 bp, Homo sapiens
  siRNA target sequence for FLT1 (NM_002019.2,1653-1671).
gcacccctgtaaccataat

SEQ ID NO: 83605 - DNA, 19 bp, Homo sapiens
  siRNA target sequence for FLT1 (NM_002019.2,1656-1674).
cccctgtaaccataatcat

SEQ ID NO: 83606 - DNA, 19 bp, Homo sapiens
  siRNA target sequence for FLT1 (NM_002019.2,1677-1695).
cgaagcaaggtgtgacttt

SEQ ID NO: 83607 - DNA, 19 bp, Homo sapiens
  siRNA target sequence for FLT1 (NM_002019.2,1686-1704).
gtgtgacttttgttccaat

SEQ ID NO: 83608 - DNA, 19 bp, Homo sapiens
  siRNA target sequence for FLT1 (NM_002019.2,1692-1710).
cttttgttccaataatgaa

SEQ ID NO: 83609 - DNA, 19 bp, Homo sapiens
  siRNA target sequence for FLT1 (NM_002019.2,1766-1784).
ctcagcgcatggcaataat

SEQ ID NO: 83610 - DNA, 19 bp, Homo sapiens
  siRNA target sequence for FLT1 (NM_002019.2,1770-1788).
gcgcatggcaataatagaa

SEQ ID NO: 83611 - DNA, 19 bp, Homo sapiens
  siRNA target sequence for FLT1 (NM_002019.2,1829-1847).
ctagaatttctggaatcta

SEQ ID NO: 83612 - DNA, 19 bp, Homo sapiens
  siRNA target sequence for FLT1 (NM_002019.2,1875-1893).
gactgtgggaagaaacata

SEQ ID NO: 83613 - DNA, 19 bp, Homo sapiens
  siRNA target sequence for FLT1 (NM_002019.2,1972-1990).
ctgtcttgcacagttaaca

SEQ ID NO: 83614 - DNA, 19 bp, Homo sapiens
  siRNA target sequence for FLT1 (NM_002019.2,2025-2043).
gcggacagttaataacaga

SEQ ID NO: 83615 - DNA, 19 bp, Homo sapiens
  siRNA target sequence for FLT1 (NM_002019.2,2026-2044).
cggacagttaataacagaa

SEQ ID NO: 83616 - DNA, 19 bp, Homo sapiens
  siRNA target sequence for FLT1 (NM_002019.2,2030-2048).
cagttaataacagaacaat

SEQ ID NO: 83617 - DNA, 19 bp, Homo sapiens
  siRNA target sequence for FLT1 (NM_002019.2,2057-2075).
gtattagcaagcaaaaaat

SEQ ID NO: 83618 - DNA, 19 bp, Homo sapiens
  siRNA target sequence for FLT1 (NM_002019.2,2089-2107).
gagcactccatcactctta

SEQ ID NO: 83619 - DNA, 19 bp, Homo sapiens
  siRNA target sequence for FLT1 (NM_002019.2,2091-2109).
gcactccatcactcttaat

SEQ ID NO: 83620 - DNA, 19 bp, Homo sapiens
  siRNA target sequence for FLT1 (NM_002019.2,2110-2128).
cttaccatcatgaatgttt

SEQ ID NO: 83621 - DNA, 19 bp, Homo sapiens
  siRNA target sequence for FLT1 (NM_002019.2,2156-2174).
gcagagccaggaatgtata

SEQ ID NO: 83622 - DNA, 19 bp, Homo sapiens
  siRNA target sequence for FLT1 (NM_002019.2,2273-2291).
gcagttccaccactttaga

SEQ ID NO: 83623 - DNA, 19 bp, Homo sapiens
  siRNA target sequence for FLT1 (NM_002019.2,2285-2303).
ctttagactgtcatgctaa

SEQ ID NO: 83624 - DNA, 19 bp, Homo sapiens
  siRNA target sequence for FLT1 (NM_002019.2,2383-2401).
ggaagcagcacgctgttta

SEQ ID NO: 83625 - DNA, 19 bp, Homo sapiens
  siRNA target sequence for FLT1 (NM_002019.2,2387-2405).
gcagcacgctgtttattga

SEQ ID NO: 83626 - DNA, 19 bp, Homo sapiens
  siRNA target sequence for FLT1 (NM_002019.2,2388-2406).
cagcacgctgtttattgaa

SEQ ID NO: 83627 - DNA, 19 bp, Homo sapiens
  siRNA target sequence for FLT1 (NM_002019.2,2422-2440).
gatgaaggtgtctatcact

SEQ ID NO: 83628 - DNA, 19 bp, Homo sapiens
  siRNA target sequence for FLT1 (NM_002019.2,2497-2515).
ggaacctcggacaagtcta

SEQ ID NO: 83629 - DNA, 19 bp, Homo sapiens
  siRNA target sequence for FLT1 (NM_002019.2,2498-2516).
gaacctcggacaagtctaa

SEQ ID NO: 83630 - DNA, 19 bp, Homo sapiens
  siRNA target sequence for FLT1 (NM_002019.2,2518-2536).
ctggagctgatcactctaa

SEQ ID NO: 83631 - DNA, 19 bp, Homo sapiens
  siRNA target sequence for FLT1 (NM_002019.2,2520-2538).
ggagctgatcactctaaca

SEQ ID NO: 83632 - DNA, 19 bp, Homo sapiens
  siRNA target sequence for FLT1 (NM_002019.2,2521-2539).
gagctgatcactctaacat

SEQ ID NO: 83633 - DNA, 19 bp, Homo sapiens
  siRNA target sequence for FLT1 (NM_002019.2,2624-2642).
ctgactacctatcaattat

SEQ ID NO: 83634 - DNA, 19 bp, Homo sapiens
  siRNA target sequence for FLT1 (NM_002019.2,2626-2644).
gactacctatcaattataa

SEQ ID NO: 83635 - DNA, 19 bp, Homo sapiens
  siRNA target sequence for FLT1 (NM_002019.2,2678-2696).
gtgagcggctcccttatga

SEQ ID NO: 83636 - DNA, 19 bp, Homo sapiens
  siRNA target sequence for FLT1 (NM_002019.2,2780-2798).
catcagcatttggcattaa

SEQ ID NO: 83637 - DNA, 19 bp, Homo sapiens
  siRNA target sequence for FLT1 (NM_002019.2,2783-2801).
cagcatttggcattaagaa

SEQ ID NO: 83638 - DNA, 19 bp, Homo sapiens
  siRNA target sequence for FLT1 (NM_002019.2,2849-2867).
ccacggccagcgagtacaa

SEQ ID NO: 83639 - DNA, 19 bp, Homo sapiens
  siRNA target sequence for FLT1 (NM_002019.2,2872-2890).
ctgatgactgagctaaaaa

SEQ ID NO: 83640 - DNA, 19 bp, Homo sapiens
  siRNA target sequence for FLT1 (NM_002019.2,3015-3033).
gagcaaacgtgacttattt

SEQ ID NO: 83641 - DNA, 19 bp, Homo sapiens
  siRNA target sequence for FLT1 (NM_002019.2,3155-3173).
ccggctttcaggaagataa

SEQ ID NO: 83642 - DNA, 19 bp, Homo sapiens
  siRNA target sequence for FLT1 (NM_002019.2,3202-3220).
gattctgacggtttctaca

SEQ ID NO: 83643 - DNA, 19 bp, Homo sapiens
  siRNA target sequence for FLT1 (NM_002019.2,3315-3333).
cctggcagcgagaaacatt

SEQ ID NO: 83644 - DNA, 19 bp, Homo sapiens
  siRNA target sequence for FLT1 (NM_002019.2,3320-3338).
cagcgagaaacattctttt

SEQ ID NO: 83645 - DNA, 19 bp, Homo sapiens
  siRNA target sequence for FLT1 (NM_002019.2,3326-3344).
gaaacattcttttatctga

SEQ ID NO: 83646 - DNA, 19 bp, Homo sapiens
  siRNA target sequence for FLT1 (NM_002019.2,3497-3515).
ggtcttacggagtattgct

SEQ ID NO: 83647 - DNA, 19 bp, Homo sapiens
  siRNA target sequence for FLT1 (NM_002019.2,3544-3562).
ccatacccaggagtacaaa

SEQ ID NO: 83648 - DNA, 19 bp, Homo sapiens
  siRNA target sequence for FLT1 (NM_002019.2,3549-3567).
cccaggagtacaaatggat

SEQ ID NO: 83649 - DNA, 19 bp, Homo sapiens
  siRNA target sequence for FLT1 (NM_002019.2,3623-3641).
ctactcctgaaatctatca

SEQ ID NO: 83650 - DNA, 19 bp, Homo sapiens
  siRNA target sequence for FLT1 (NM_002019.2,3626-3644).
ctcctgaaatctatcagat

SEQ ID NO: 83651 - DNA, 19 bp, Homo sapiens
  siRNA target sequence for FLT1 (NM_002019.2,3629-3647).
ctgaaatctatcagatcat

SEQ ID NO: 83652 - DNA, 19 bp, Homo sapiens
  siRNA target sequence for FLT1 (NM_002019.2,3681-3699).
gccaagatttgcagaactt

SEQ ID NO: 83653 - DNA, 19 bp, Homo sapiens
  siRNA target sequence for FLT1 (NM_002019.2,3713-3731).
gtgatttgcttcaagcaaa

SEQ ID NO: 83654 - DNA, 19 bp, Homo sapiens
  siRNA target sequence for FLT1 (NM_002019.2,3769-3787).
gccatactgacaggaaata

SEQ ID NO: 83655 - DNA, 19 bp, Homo sapiens
  siRNA target sequence for FLT1 (NM_002019.2,3771-3789).
catactgacaggaaatagt

SEQ ID NO: 83656 - DNA, 19 bp, Homo sapiens
  siRNA target sequence for FLT1 (NM_002019.2,3781-3799).
ggaaatagtgggtttacat

SEQ ID NO: 83657 - DNA, 19 bp, Homo sapiens
  siRNA target sequence for FLT1 (NM_002019.2,3889-3907).
gtaaatgctttcaagttca

SEQ ID NO: 83658 - DNA, 19 bp, Homo sapiens
  siRNA target sequence for FLT3 (NM_004119.1,117-135).
gatatttgggactattaca

SEQ ID NO: 83659 - DNA, 19 bp, Homo sapiens
  siRNA target sequence for FLT3 (NM_004119.1,125-143).
ggactattacaaatcaaga

SEQ ID NO: 83660 - DNA, 19 bp, Homo sapiens
  siRNA target sequence for FLT3 (NM_004119.1,163-181).
gttttaatcaatcataaga

SEQ ID NO: 83661 - DNA, 19 bp, Homo sapiens
  siRNA target sequence for FLT3 (NM_004119.1,365-383).
gtctctgggtctttaagca

SEQ ID NO: 83662 - DNA, 19 bp, Homo sapiens
  siRNA target sequence for FLT3 (NM_004119.1,465-483).
ccaagctggagaataccta

SEQ ID NO: 83663 - DNA, 19 bp, Homo sapiens
  siRNA target sequence for FLT3 (NM_004119.1,546-564).
cctgctttacacattaaga

SEQ ID NO: 83664 - DNA, 19 bp, Homo sapiens
  siRNA target sequence for FLT3 (NM_004119.1,557-575).
cattaagaagaccttactt

SEQ ID NO: 83665 - DNA, 19 bp, Homo sapiens
  siRNA target sequence for FLT3 (NM_004119.1,595-613).
gacgccctggtctgcatat

SEQ ID NO: 83666 - DNA, 19 bp, Homo sapiens
  siRNA target sequence for FLT3 (NM_004119.1,597-615).
cgccctggtctgcatatct

SEQ ID NO: 83667 - DNA, 19 bp, Homo sapiens
  siRNA target sequence for FLT3 (NM_004119.1,599-617).
ccctggtctgcatatctga

SEQ ID NO: 83668 - DNA, 19 bp, Homo sapiens
  siRNA target sequence for FLT3 (NM_004119.1,644-662).
gggtgctttgcgattcaca

SEQ ID NO: 83669 - DNA, 19 bp, Homo sapiens
  siRNA target sequence for FLT3 (NM_004119.1,779-797).
gcaccaggctgttcacaat

SEQ ID NO: 83670 - DNA, 19 bp, Homo sapiens
  siRNA target sequence for FLT3 (NM_004119.1,789-807).
gttcacaatagatctaaat

SEQ ID NO: 83671 - DNA, 19 bp, Homo sapiens
  siRNA target sequence for FLT3 (NM_004119.1,819-837).
gaccacattgccacaatta

SEQ ID NO: 83672 - DNA, 19 bp, Homo sapiens
  siRNA target sequence for FLT3 (NM_004119.1,847-865).
gtaggggaacccttatgga

SEQ ID NO: 83673 - DNA, 19 bp, Homo sapiens
  siRNA target sequence for FLT3 (NM_004119.1,933-951).
cgaggagggcaactacttt

SEQ ID NO: 83674 - DNA, 19 bp, Homo sapiens
  siRNA target sequence for FLT3 (NM_004119.1,937-955).
gagggcaactactttgaga

SEQ ID NO: 83675 - DNA, 19 bp, Homo sapiens
  siRNA target sequence for FLT3 (NM_004119.1,948-966).
ctttgagatgagtacctat

SEQ ID NO: 83676 - DNA, 19 bp, Homo sapiens
  siRNA target sequence for FLT3 (NM_004119.1,954-972).
gatgagtacctattcaaca

SEQ ID NO: 83677 - DNA, 19 bp, Homo sapiens
  siRNA target sequence for FLT3 (NM_004119.1,1022-1040).
gaaacgacaccggatacta

SEQ ID NO: 83678 - DNA, 19 bp, Homo sapiens
  siRNA target sequence for FLT3 (NM_004119.1,1027-1045).
gacaccggatactacactt

SEQ ID NO: 83679 - DNA, 19 bp, Homo sapiens
  siRNA target sequence for FLT3 (NM_004119.1,1141-1159).
gaccaatatgaagagtttt

SEQ ID NO: 83680 - DNA, 19 bp, Homo sapiens
  siRNA target sequence for FLT3 (NM_004119.1,1143-1161).
ccaatatgaagagttttgt

SEQ ID NO: 83681 - DNA, 19 bp, Homo sapiens
  siRNA target sequence for FLT3 (NM_004119.1,1180-1198).
gcctacccacaaatcagat

SEQ ID NO: 83682 - DNA, 19 bp, Homo sapiens
  siRNA target sequence for FLT3 (NM_004119.1,1234-1252).
gagcaaaagggtcttgata

SEQ ID NO: 83683 - DNA, 19 bp, Homo sapiens
  siRNA target sequence for FLT3 (NM_004119.1,1249-1267).
gataacggatacagcatat

SEQ ID NO: 83684 - DNA, 19 bp, Homo sapiens
  siRNA target sequence for FLT3 (NM_004119.1,1262-1280).
gcatatccaagttttgcaa

SEQ ID NO: 83685 - DNA, 19 bp, Homo sapiens
  siRNA target sequence for FLT3 (NM_004119.1,1263-1281).
catatccaagttttgcaat

SEQ ID NO: 83686 - DNA, 19 bp, Homo sapiens
  siRNA target sequence for FLT3 (NM_004119.1,1268-1286).
ccaagttttgcaatcataa

SEQ ID NO: 83687 - DNA, 19 bp, Homo sapiens
  siRNA target sequence for FLT3 (NM_004119.1,1327-1345).
gatgcccaatttaccaaaa

SEQ ID NO: 83688 - DNA, 19 bp, Homo sapiens
  siRNA target sequence for FLT3 (NM_004119.1,1347-1365).
gttcacgctgaatataaga

SEQ ID NO: 83689 - DNA, 19 bp, Homo sapiens
  siRNA target sequence for FLT3 (NM_004119.1,1409-1427).
cctgtttctcggatggata

SEQ ID NO: 83690 - DNA, 19 bp, Homo sapiens
  siRNA target sequence for FLT3 (NM_004119.1,1420-1438).
gatggatacccattaccat

SEQ ID NO: 83691 - DNA, 19 bp, Homo sapiens
  siRNA target sequence for FLT3 (NM_004119.1,1495-1513).
gaaggagtctggaatagaa

SEQ ID NO: 83692 - DNA, 19 bp, Homo sapiens
  siRNA target sequence for FLT3 (NM_004119.1,1542-1560).
ggtgtcgagcagtactcta

SEQ ID NO: 83693 - DNA, 19 bp, Homo sapiens
  siRNA target sequence for FLT3 (NM_004119.1,1543-1561).
gtgtcgagcagtactctaa

SEQ ID NO: 83694 - DNA, 19 bp, Homo sapiens
  siRNA target sequence for FLT3 (NM_004119.1,1547-1565).
cgagcagtactctaaacat

SEQ ID NO: 83695 - DNA, 19 bp, Homo sapiens
  siRNA target sequence for FLT3 (NM_004119.1,1625-1643).
cttgtgagacgatcctttt

SEQ ID NO: 83696 - DNA, 19 bp, Homo sapiens
  siRNA target sequence for FLT3 (NM_004119.1,1632-1650).
gacgatccttttaaactct

SEQ ID NO: 83697 - DNA, 19 bp, Homo sapiens
  siRNA target sequence for FLT3 (NM_004119.1,1664-1682).
ctttcatccaagacaacat

SEQ ID NO: 83698 - DNA, 19 bp, Homo sapiens
  siRNA target sequence for FLT3 (NM_004119.1,1683-1701).
ctcattctatgcaacaatt

SEQ ID NO: 83699 - DNA, 19 bp, Homo sapiens
  siRNA target sequence for FLT3 (NM_004119.1,1714-1732).
ctcttcattgtcgttttaa

SEQ ID NO: 83700 - DNA, 19 bp, Homo sapiens
  siRNA target sequence for FLT3 (NM_004119.1,1725-1743).
cgttttaaccctgctaatt

SEQ ID NO: 83701 - DNA, 19 bp, Homo sapiens
  siRNA target sequence for FLT3 (NM_004119.1,1798-1816).
gtgaccggctcctcagata

SEQ ID NO: 83702 - DNA, 19 bp, Homo sapiens
  siRNA target sequence for FLT3 (NM_004119.1,1800-1818).
gaccggctcctcagataat

SEQ ID NO: 83703 - DNA, 19 bp, Homo sapiens
  siRNA target sequence for FLT3 (NM_004119.1,1802-1820).
ccggctcctcagataatga

SEQ ID NO: 83704 - DNA, 19 bp, Homo sapiens
  siRNA target sequence for FLT3 (NM_004119.1,1805-1823).
gctcctcagataatgagta

SEQ ID NO: 83705 - DNA, 19 bp, Homo sapiens
  siRNA target sequence for FLT3 (NM_004119.1,1808-1826).
cctcagataatgagtactt

SEQ ID NO: 83706 - DNA, 19 bp, Homo sapiens
  siRNA target sequence for FLT3 (NM_004119.1,1819-1837).
gagtacttctacgttgatt

SEQ ID NO: 83707 - DNA, 19 bp, Homo sapiens
  siRNA target sequence for FLT3 (NM_004119.1,1929-1947).
gatgaacgcaacagcttat

SEQ ID NO: 83708 - DNA, 19 bp, Homo sapiens
  siRNA target sequence for FLT3 (NM_004119.1,1935-1953).
cgcaacagcttatggaatt

SEQ ID NO: 83709 - DNA, 19 bp, Homo sapiens
  siRNA target sequence for FLT3 (NM_004119.1,1936-1954).
gcaacagcttatggaatta

SEQ ID NO: 83710 - DNA, 19 bp, Homo sapiens
  siRNA target sequence for FLT3 (NM_004119.1,1940-1958).
cagcttatggaattagcaa

SEQ ID NO: 83711 - DNA, 19 bp, Homo sapiens
  siRNA target sequence for FLT3 (NM_004119.1,1955-1973).
gcaaaacaggagtctcaat

SEQ ID NO: 83712 - DNA, 19 bp, Homo sapiens
  siRNA target sequence for FLT3 (NM_004119.1,2059-2077).
ctgggaagccacgagaata

SEQ ID NO: 83713 - DNA, 19 bp, Homo sapiens
  siRNA target sequence for FLT3 (NM_004119.1,2061-2079).
gggaagccacgagaatatt

SEQ ID NO: 83714 - DNA, 19 bp, Homo sapiens
  siRNA target sequence for FLT3 (NM_004119.1,2063-2081).
gaagccacgagaatattgt

SEQ ID NO: 83715 - DNA, 19 bp, Homo sapiens
  siRNA target sequence for FLT3 (NM_004119.1,2066-2084).
gccacgagaatattgtgaa

SEQ ID NO: 83716 - DNA, 19 bp, Homo sapiens
  siRNA target sequence for FLT3 (NM_004119.1,2100-2118).
cacactgtcaggaccaatt

SEQ ID NO: 83717 - DNA, 19 bp, Homo sapiens
  siRNA target sequence for FLT3 (NM_004119.1,2102-2120).
cactgtcaggaccaattta

SEQ ID NO: 83718 - DNA, 19 bp, Homo sapiens
  siRNA target sequence for FLT3 (NM_004119.1,2104-2122).
ctgtcaggaccaatttact

SEQ ID NO: 83719 - DNA, 19 bp, Homo sapiens
  siRNA target sequence for FLT3 (NM_004119.1,2110-2128).
ggaccaatttacttgattt

SEQ ID NO: 83720 - DNA, 19 bp, Homo sapiens
  siRNA target sequence for FLT3 (NM_004119.1,2111-2129).
gaccaatttacttgatttt

SEQ ID NO: 83721 - DNA, 19 bp, Homo sapiens
  siRNA target sequence for FLT3 (NM_004119.1,2114-2132).
caatttacttgatttttga

SEQ ID NO: 83722 - DNA, 19 bp, Homo sapiens
  siRNA target sequence for FLT3 (NM_004119.1,2152-2170).
cttctcaactatctaagaa

SEQ ID NO: 83723 - DNA, 19 bp, Homo sapiens
  siRNA target sequence for FLT3 (NM_004119.1,2155-2173).
ctcaactatctaagaagta

SEQ ID NO: 83724 - DNA, 19 bp, Homo sapiens
  siRNA target sequence for FLT3 (NM_004119.1,2268-2286).
gcctggttcaagagaagtt

SEQ ID NO: 83725 - DNA, 19 bp, Homo sapiens
  siRNA target sequence for FLT3 (NM_004119.1,2293-2311).
cacccggactcggatcaaa

SEQ ID NO: 83726 - DNA, 19 bp, Homo sapiens
  siRNA target sequence for FLT3 (NM_004119.1,2296-2314).
ccggactcggatcaaatct

SEQ ID NO: 83727 - DNA, 19 bp, Homo sapiens
  siRNA target sequence for FLT3 (NM_004119.1,2298-2316).
ggactcggatcaaatctca

SEQ ID NO: 83728 - DNA, 19 bp, Homo sapiens
  siRNA target sequence for FLT3 (NM_004119.1,2317-2335).
gggcttcatgggaattcat

SEQ ID NO: 83729 - DNA, 19 bp, Homo sapiens
  siRNA target sequence for FLT3 (NM_004119.1,2403-2421).
gcttacatttgaagatctt

SEQ ID NO: 83730 - DNA, 19 bp, Homo sapiens
  siRNA target sequence for FLT3 (NM_004119.1,2548-2566).
ggattggctcgagatatca

SEQ ID NO: 83731 - DNA, 19 bp, Homo sapiens
  siRNA target sequence for FLT3 (NM_004119.1,2549-2567).
gattggctcgagatatcat

SEQ ID NO: 83732 - DNA, 19 bp, Homo sapiens
  siRNA target sequence for FLT3 (NM_004119.1,2557-2575).
cgagatatcatgagtgatt

SEQ ID NO: 83733 - DNA, 19 bp, Homo sapiens
  siRNA target sequence for FLT3 (NM_004119.1,2568-2586).
gagtgattccaactatgtt

SEQ ID NO: 83734 - DNA, 19 bp, Homo sapiens
  siRNA target sequence for FLT3 (NM_004119.1,2599-2617).
gcccgtctgcctgtaaaat

SEQ ID NO: 83735 - DNA, 19 bp, Homo sapiens
  siRNA target sequence for FLT3 (NM_004119.1,2668-2686).
gtctggtcatatggaatat

SEQ ID NO: 83736 - DNA, 19 bp, Homo sapiens
  siRNA target sequence for FLT3 (NM_004119.1,2670-2688).
ctggtcatatggaatatta

SEQ ID NO: 83737 - DNA, 19 bp, Homo sapiens
  siRNA target sequence for FLT3 (NM_004119.1,2705-2723).
cacttggtgtgaatcctta

SEQ ID NO: 83738 - DNA, 19 bp, Homo sapiens
  siRNA target sequence for FLT3 (NM_004119.1,2734-2752).
ccggttgatgctaacttct

SEQ ID NO: 83739 - DNA, 19 bp, Homo sapiens
  siRNA target sequence for FLT3 (NM_004119.1,2737-2755).
gttgatgctaacttctaca

SEQ ID NO: 83740 - DNA, 19 bp, Homo sapiens
  siRNA target sequence for FLT3 (NM_004119.1,2743-2761).
gctaacttctacaaactga

SEQ ID NO: 83741 - DNA, 19 bp, Homo sapiens
  siRNA target sequence for FLT3 (NM_004119.1,2744-2762).
ctaacttctacaaactgat

SEQ ID NO: 83742 - DNA, 19 bp, Homo sapiens
  siRNA target sequence for FLT3 (NM_004119.1,2781-2799).
ggatcagccattttatgct

SEQ ID NO: 83743 - DNA, 19 bp, Homo sapiens
  siRNA target sequence for FLT3 (NM_004119.1,2782-2800).
gatcagccattttatgcta

SEQ ID NO: 83744 - DNA, 19 bp, Homo sapiens
  siRNA target sequence for FLT3 (NM_004119.1,2798-2816).
ctacagaagaaatatacat

SEQ ID NO: 83745 - DNA, 19 bp, Homo sapiens
  siRNA target sequence for FLT3 (NM_004119.1,2854-2872).
cggccatccttccctaatt

SEQ ID NO: 83746 - DNA, 19 bp, Homo sapiens
  siRNA target sequence for FLT3 (NM_004119.1,2908-2926).
gaagaagcgatgtatcaga

SEQ ID NO: 83747 - DNA, 19 bp, Homo sapiens
  siRNA target sequence for FLT3 (NM_004119.1,3016-3034).
caggctcaggtcgaagatt

SEQ ID NO: 83748 - DNA, 19 bp, Homo sapiens
  siRNA target sequence for FLT4 (NM_002020.1,344-362).
gctacgtctgctactacaa

SEQ ID NO: 83749 - DNA, 19 bp, Homo sapiens
  siRNA target sequence for FLT4 (NM_002020.1,695-713).
caggcaacgagctctatga

SEQ ID NO: 83750 - DNA, 19 bp, Homo sapiens
  siRNA target sequence for FLT4 (NM_002020.1,697-715).
ggcaacgagctctatgaca

SEQ ID NO: 83751 - DNA, 19 bp, Homo sapiens
  siRNA target sequence for FLT4 (NM_002020.1,781-799).
gtgtgggctgagtttaact

SEQ ID NO: 83752 - DNA, 19 bp, Homo sapiens
  siRNA target sequence for FLT4 (NM_002020.1,783-801).
gtgggctgagtttaactca

SEQ ID NO: 83753 - DNA, 19 bp, Homo sapiens
  siRNA target sequence for FLT4 (NM_002020.1,1409-1427).
ggacaccctgcaagatgtt

SEQ ID NO: 83754 - DNA, 19 bp, Homo sapiens
  siRNA target sequence for FLT4 (NM_002020.1,1410-1428).
gacaccctgcaagatgttt

SEQ ID NO: 83755 - DNA, 19 bp, Homo sapiens
  siRNA target sequence for FLT4 (NM_002020.1,1655-1673).
ggctcatctacttctatgt

SEQ ID NO: 83756 - DNA, 19 bp, Homo sapiens
  siRNA target sequence for FLT4 (NM_002020.1,1657-1675).
ctcatctacttctatgtga

SEQ ID NO: 83757 - DNA, 19 bp, Homo sapiens
  siRNA target sequence for FLT4 (NM_002020.1,1687-1705).
gacggcttcaccatcgaat

SEQ ID NO: 83758 - DNA, 19 bp, Homo sapiens
  siRNA target sequence for FLT4 (NM_002020.1,1756-1774).
caagccgacagctacaagt

SEQ ID NO: 83759 - DNA, 19 bp, Homo sapiens
  siRNA target sequence for FLT4 (NM_002020.1,1850-1868).
gcaagaacgtgcatctgtt

SEQ ID NO: 83760 - DNA, 19 bp, Homo sapiens
  siRNA target sequence for FLT4 (NM_002020.1,2054-2072).
ctcggctcacgcagaactt

SEQ ID NO: 83761 - DNA, 19 bp, Homo sapiens
  siRNA target sequence for FLT4 (NM_002020.1,2369-2387).
gcgtcatcgctgtcttctt

SEQ ID NO: 83762 - DNA, 19 bp, Homo sapiens
  siRNA target sequence for FLT4 (NM_002020.1,2371-2389).
gtcatcgctgtcttcttct

SEQ ID NO: 83763 - DNA, 19 bp, Homo sapiens
  siRNA target sequence for FLT4 (NM_002020.1,2404-2422).
ctcatcttctgtaacatga

SEQ ID NO: 83764 - DNA, 19 bp, Homo sapiens
  siRNA target sequence for FLT4 (NM_002020.1,3629-3647).
ccaccatggccctacacat

SEQ ID NO: 83765 - DNA, 19 bp, Homo sapiens
  siRNA target sequence for FLT4 (NM_182925.1,3905-3923).
cggcttcagctgtaaagga

SEQ ID NO: 83766 - DNA, 19 bp, Homo sapiens
  siRNA target sequence for FLT4 (NM_182925.1,3999-4017).
cgaggaggccaggtgtttt

SEQ ID NO: 83767 - DNA, 19 bp, Homo sapiens
  siRNA target sequence for FPGS (NM_004957.2,355-373).
gtgccttcacggaatgtat

SEQ ID NO: 83768 - DNA, 19 bp, Homo sapiens
  siRNA target sequence for FPGS (NM_004957.2,388-406).
gcctgaagacgggattctt

SEQ ID NO: 83769 - DNA, 19 bp, Homo sapiens
  siRNA target sequence for FPGS (NM_004957.2,389-407).
cctgaagacgggattcttt

SEQ ID NO: 83770 - DNA, 19 bp, Homo sapiens
  siRNA target sequence for FPGS (NM_004957.2,415-433).
ggagcggatccgcatcaat

SEQ ID NO: 83771 - DNA, 19 bp, Homo sapiens
  siRNA target sequence for FRK (NM_002031.2,519-537).
caagtcaaccgtgattgaa

SEQ ID NO: 83772 - DNA, 19 bp, Homo sapiens
  siRNA target sequence for FRK (NM_002031.2,522-540).
gtcaaccgtgattgaaaat

SEQ ID NO: 83773 - DNA, 19 bp, Homo sapiens
  siRNA target sequence for FRK (NM_002031.2,636-654).
ccgagcaggtgacaaactt

SEQ ID NO: 83774 - DNA, 19 bp, Homo sapiens
  siRNA target sequence for FRK (NM_002031.2,638-656).
gagcaggtgacaaacttca

SEQ ID NO: 83775 - DNA, 19 bp, Homo sapiens
  siRNA target sequence for FRK (NM_002031.2,641-659).
caggtgacaaacttcaagt

SEQ ID NO: 83776 - DNA, 19 bp, Homo sapiens
  siRNA target sequence for FRK (NM_002031.2,729-747).
gcaactacaaggctatatt

SEQ ID NO: 83777 - DNA, 19 bp, Homo sapiens
  siRNA target sequence for FRK (NM_002031.2,733-751).
ctacaaggctatattcctt

SEQ ID NO: 83778 - DNA, 19 bp, Homo sapiens
  siRNA target sequence for FRK (NM_002031.2,739-757).
ggctatattccttctaact

SEQ ID NO: 83779 - DNA, 19 bp, Homo sapiens
  siRNA target sequence for FRK (NM_002031.2,896-914).
gagaattctctctttcagt

SEQ ID NO: 83780 - DNA, 19 bp, Homo sapiens
  siRNA target sequence for FRK (NM_002031.2,922-940).
ggagcagttgtaaaacact

SEQ ID NO: 83781 - DNA, 19 bp, Homo sapiens
  siRNA target sequence for FRK (NM_002031.2,923-941).
gagcagttgtaaaacacta

SEQ ID NO: 83782 - DNA, 19 bp, Homo sapiens
  siRNA target sequence for FRK (NM_002031.2,955-973).
ctggatgaagggggatttt

SEQ ID NO: 83783 - DNA, 19 bp, Homo sapiens
  siRNA target sequence for FRK (NM_002031.2,976-994).
ctcacgcgaagaagaatct

SEQ ID NO: 83784 - DNA, 19 bp, Homo sapiens
  siRNA target sequence for FRK (NM_002031.2,978-996).
cacgcgaagaagaatcttt

SEQ ID NO: 83785 - DNA, 19 bp, Homo sapiens
  siRNA target sequence for FRK (NM_002031.2,1057-1075).
ctggggaaaccatgcttaa

SEQ ID NO: 83786 - DNA, 19 bp, Homo sapiens
  siRNA target sequence for FRK (NM_002031.2,1083-1101).
ggtcccagctccatttgat

SEQ ID NO: 83787 - DNA, 19 bp, Homo sapiens
  siRNA target sequence for FRK (NM_002031.2,1093-1111).
ccatttgatttgtcgtata

SEQ ID NO: 83788 - DNA, 19 bp, Homo sapiens
  siRNA target sequence for FRK (NM_002031.2,1094-1112).
catttgatttgtcgtataa

SEQ ID NO: 83789 - DNA, 19 bp, Homo sapiens
  siRNA target sequence for FRK (NM_002031.2,1194-1212).
ggaaggtctgtggaacaat

SEQ ID NO: 83790 - DNA, 19 bp, Homo sapiens
  siRNA target sequence for FRK (NM_002031.2,1195-1213).
gaaggtctgtggaacaata

SEQ ID NO: 83791 - DNA, 19 bp, Homo sapiens
  siRNA target sequence for FRK (NM_002031.2,1198-1216).
ggtctgtggaacaatacca

SEQ ID NO: 83792 - DNA, 19 bp, Homo sapiens
  siRNA target sequence for FRK (NM_002031.2,1274-1292).
gggaggcacagataatgaa

SEQ ID NO: 83793 - DNA, 19 bp, Homo sapiens
  siRNA target sequence for FRK (NM_002031.2,1296-1314).
cctaagacatccaaagctt

SEQ ID NO: 83794 - DNA, 19 bp, Homo sapiens
  siRNA target sequence for FRK (NM_002031.2,1297-1315).
ctaagacatccaaagctta

SEQ ID NO: 83795 - DNA, 19 bp, Homo sapiens
  siRNA target sequence for FRK (NM_002031.2,1301-1319).
gacatccaaagcttatcca

SEQ ID NO: 83796 - DNA, 19 bp, Homo sapiens
  siRNA target sequence for FRK (NM_002031.2,1334-1352).
gcactttagaagatccaat

SEQ ID NO: 83797 - DNA, 19 bp, Homo sapiens
  siRNA target sequence for FRK (NM_002031.2,1335-1353).
cactttagaagatccaatt

SEQ ID NO: 83798 - DNA, 19 bp, Homo sapiens
  siRNA target sequence for FRK (NM_002031.2,1337-1355).
ctttagaagatccaattta

SEQ ID NO: 83799 - DNA, 19 bp, Homo sapiens
  siRNA target sequence for FRK (NM_002031.2,1342-1360).
gaagatccaatttatatta

SEQ ID NO: 83800 - DNA, 19 bp, Homo sapiens
  siRNA target sequence for FRK (NM_002031.2,1349-1367).
caatttatattattacaga

SEQ ID NO: 83801 - DNA, 19 bp, Homo sapiens
  siRNA target sequence for FRK (NM_002031.2,1480-1498).
ctggagtctcggaactaca

SEQ ID NO: 83802 - DNA, 19 bp, Homo sapiens
  siRNA target sequence for FRK (NM_002031.2,1482-1500).
ggagtctcggaactacatt

SEQ ID NO: 83803 - DNA, 19 bp, Homo sapiens
  siRNA target sequence for FRK (NM_002031.2,1525-1543).
gtcctcgttggtgaacata

SEQ ID NO: 83804 - DNA, 19 bp, Homo sapiens
  siRNA target sequence for FRK (NM_002031.2,1527-1545).
cctcgttggtgaacataat

SEQ ID NO: 83805 - DNA, 19 bp, Homo sapiens
  siRNA target sequence for FRK (NM_002031.2,1528-1546).
ctcgttggtgaacataata

SEQ ID NO: 83806 - DNA, 19 bp, Homo sapiens
  siRNA target sequence for FRK (NM_002031.2,1534-1552).
ggtgaacataatatctaca

SEQ ID NO: 83807 - DNA, 19 bp, Homo sapiens
  siRNA target sequence for FRK (NM_002031.2,1597-1615).
gaagacatctatgaatcta

SEQ ID NO: 83808 - DNA, 19 bp, Homo sapiens
  siRNA target sequence for FRK (NM_002031.2,1609-1627).
gaatctagacacgaaataa

SEQ ID NO: 83809 - DNA, 19 bp, Homo sapiens
  siRNA target sequence for FRK (NM_002031.2,1613-1631).
ctagacacgaaataaagct

SEQ ID NO: 83810 - DNA, 19 bp, Homo sapiens
  siRNA target sequence for FRK (NM_002031.2,1652-1670).
ccgaagccattcgtagtaa

SEQ ID NO: 83811 - DNA, 19 bp, Homo sapiens
  siRNA target sequence for FRK (NM_002031.2,1653-1671).
cgaagccattcgtagtaat

SEQ ID NO: 83812 - DNA, 19 bp, Homo sapiens
  siRNA target sequence for FRK (NM_002031.2,1658-1676).
ccattcgtagtaataaatt

SEQ ID NO: 83813 - DNA, 19 bp, Homo sapiens
  siRNA target sequence for FRK (NM_002031.2,1766-1784).
cccaggtaatccagatgtt

SEQ ID NO: 83814 - DNA, 19 bp, Homo sapiens
  siRNA target sequence for FRK (NM_002031.2,1785-1803).
ggctcaaaactatagactt

SEQ ID NO: 83815 - DNA, 19 bp, Homo sapiens
  siRNA target sequence for FRK (NM_002031.2,1815-1833).
caactgtccacagcaattt

SEQ ID NO: 83816 - DNA, 19 bp, Homo sapiens
  siRNA target sequence for FRK (NM_002031.2,1820-1838).
gtccacagcaattttacaa

SEQ ID NO: 83817 - DNA, 19 bp, Homo sapiens
  siRNA target sequence for FRK (NM_002031.2,1822-1840).
ccacagcaattttacaaca

SEQ ID NO: 83818 - DNA, 19 bp, Homo sapiens
  siRNA target sequence for FRK (NM_002031.2,1823-1841).
cacagcaattttacaacat

SEQ ID NO: 83819 - DNA, 19 bp, Homo sapiens
  siRNA target sequence for FRK (NM_002031.2,1828-1846).
caattttacaacatcatgt

SEQ ID NO: 83820 - DNA, 19 bp, Homo sapiens
  siRNA target sequence for FRK (NM_002031.2,1857-1875).
gaatgcagagcctaaggaa

SEQ ID NO: 83821 - DNA, 19 bp, Homo sapiens
  siRNA target sequence for FRK (NM_002031.2,1868-1886).
ctaaggaacgacctacatt

SEQ ID NO: 83822 - DNA, 19 bp, Homo sapiens
  siRNA target sequence for FRK (NM_002031.2,1873-1891).
gaacgacctacatttgaga

SEQ ID NO: 83823 - DNA, 19 bp, Homo sapiens
  siRNA target sequence for FRK (NM_002031.2,1892-1910).
cactgcgttggaaacttga

SEQ ID NO: 83824 - DNA, 19 bp, Homo sapiens
  siRNA target sequence for FTHFSDC1 (NM_015440.3,561-579).
cggttcttgcaattatcca

SEQ ID NO: 83825 - DNA, 19 bp, Homo sapiens
  siRNA target sequence for FTHFSDC1 (NM_015440.3,581-599).
gcaggtgacgacaacttga

SEQ ID NO: 83826 - DNA, 19 bp, Homo sapiens
  siRNA target sequence for FTHFSDC1 (NM_015440.3,582-600).
caggtgacgacaacttgat

SEQ ID NO: 83827 - DNA, 19 bp, Homo sapiens
  siRNA target sequence for FTHFSDC1 (NM_015440.3,673-691).
cagtgaagccgagattata

SEQ ID NO: 83828 - DNA, 19 bp, Homo sapiens
  siRNA target sequence for FTHFSDC1 (NM_015440.3,783-801).
ccttgaaaccagaaaaaga

SEQ ID NO: 83829 - DNA, 19 bp, Homo sapiens
  siRNA target sequence for FTHFSDC1 (NM_015440.3,853-871).
ccatgaatgttttgtttca

SEQ ID NO: 83830 - DNA, 19 bp, Homo sapiens
  siRNA target sequence for FTHFSDC1 (NM_015440.3,1029-1047).
cacgccagcttcaaagcaa

SEQ ID NO: 83831 - DNA, 19 bp, Homo sapiens
  siRNA target sequence for FTHFSDC1 (NM_015440.3,1048-1066).
gcttcacgaggctgacatt

SEQ ID NO: 83832 - DNA, 19 bp, Homo sapiens
  siRNA target sequence for FTHFSDC1 (NM_015440.3,1091-1109).
gaagagattccccttactt

SEQ ID NO: 83833 - DNA, 19 bp, Homo sapiens
  siRNA target sequence for FTHFSDC1 (NM_015440.3,1096-1114).
gattccccttacttggata

SEQ ID NO: 83834 - DNA, 19 bp, Homo sapiens
  siRNA target sequence for FTHFSDC1 (NM_015440.3,1111-1129).
gatacaaccaggaactact

SEQ ID NO: 83835 - DNA, 19 bp, Homo sapiens
  siRNA target sequence for FTHFSDC1 (NM_015440.3,1171-1189).
gtgtggctctccaagaata

SEQ ID NO: 83836 - DNA, 19 bp, Homo sapiens
  siRNA target sequence for FTHFSDC1 (NM_015440.3,1233-1251).
ctgcagctctgcgaattca

SEQ ID NO: 83837 - DNA, 19 bp, Homo sapiens
  siRNA target sequence for FTHFSDC1 (NM_015440.3,1239-1257).
ctctgcgaattcagaacat

SEQ ID NO: 83838 - DNA, 19 bp, Homo sapiens
  siRNA target sequence for FTHFSDC1 (NM_015440.3,1308-1326).
gacttcactgcttgaaact

SEQ ID NO: 83839 - DNA, 19 bp, Homo sapiens
  siRNA target sequence for FTHFSDC1 (NM_015440.3,1397-1415).
cttgccaaggagattggat

SEQ ID NO: 83840 - DNA, 19 bp, Homo sapiens
  siRNA target sequence for FTHFSDC1 (NM_015440.3,1412-1430).
ggattgcttgcagatgaaa

SEQ ID NO: 83841 - DNA, 19 bp, Homo sapiens
  siRNA target sequence for FTHFSDC1 (NM_015440.3,1463-1481).
cgtttgtccgtgctagaaa

SEQ ID NO: 83842 - DNA, 19 bp, Homo sapiens
  siRNA target sequence for FTHFSDC1 (NM_015440.3,1468-1486).
gtccgtgctagaaaggtta

SEQ ID NO: 83843 - DNA, 19 bp, Homo sapiens
  siRNA target sequence for FTHFSDC1 (NM_015440.3,1470-1488).
ccgtgctagaaaggttaaa

SEQ ID NO: 83844 - DNA, 19 bp, Homo sapiens
  siRNA target sequence for FTHFSDC1 (NM_015440.3,1590-1608).
ccgcacacctgaatgtcaa

SEQ ID NO: 83845 - DNA, 19 bp, Homo sapiens
  siRNA target sequence for FTHFSDC1 (NM_015440.3,1774-1792).
catcgacacgaggattctt

SEQ ID NO: 83846 - DNA, 19 bp, Homo sapiens
  siRNA target sequence for FTHFSDC1 (NM_015440.3,1809-1827).
cagataaggctctgtataa

SEQ ID NO: 83847 - DNA, 19 bp, Homo sapiens
  siRNA target sequence for FTHFSDC1 (NM_015440.3,1829-1847).
cggctggttcctttagtga

SEQ ID NO: 83848 - DNA, 19 bp, Homo sapiens
  siRNA target sequence for FTHFSDC1 (NM_015440.3,1874-1892).
cagcttgctcggctaaaaa

SEQ ID NO: 83849 - DNA, 19 bp, Homo sapiens
  siRNA target sequence for FTHFSDC1 (NM_015440.3,1876-1894).
gcttgctcggctaaaaaaa

SEQ ID NO: 83850 - DNA, 19 bp, Homo sapiens
  siRNA target sequence for FTHFSDC1 (NM_015440.3,2191-2209).
gcctgtgacagcagatgat

SEQ ID NO: 83851 - DNA, 19 bp, Homo sapiens
  siRNA target sequence for FTHFSDC1 (NM_015440.3,2337-2355).
cttcagtgttggctgataa

SEQ ID NO: 83852 - DNA, 19 bp, Homo sapiens
  siRNA target sequence for FTHFSDC1 (NM_015440.3,2365-2383).
gaaactggttggtgaagaa

SEQ ID NO: 83853 - DNA, 19 bp, Homo sapiens
  siRNA target sequence for FTHFSDC1 (NM_015440.3,2371-2389).
ggttggtgaagaaggattt

SEQ ID NO: 83854 - DNA, 19 bp, Homo sapiens
  siRNA target sequence for FTHFSDC1 (NM_015440.3,2417-2435).
gacatcggaatggagaaat

SEQ ID NO: 83855 - DNA, 19 bp, Homo sapiens
  siRNA target sequence for FTHFSDC1 (NM_015440.3,2470-2488).
gcccaacgtggttgtgtta

SEQ ID NO: 83856 - DNA, 19 bp, Homo sapiens
  siRNA target sequence for FTHFSDC1 (NM_015440.3,2496-2514).
cggtgcgagctctgaagat

SEQ ID NO: 83857 - DNA, 19 bp, Homo sapiens
  siRNA target sequence for FTHFSDC1 (NM_015440.3,2544-2562).
gtgttcctcttaagaaaga

SEQ ID NO: 83858 - DNA, 19 bp, Homo sapiens
  siRNA target sequence for FTHFSDC1 (NM_015440.3,2650-2668).
cgttgtggtggctctgaat

SEQ ID NO: 83859 - DNA, 19 bp, Homo sapiens
  siRNA target sequence for FTHFSDC1 (NM_015440.3,2758-2776).
ctggtccgttggtggaaaa

SEQ ID NO: 83860 - DNA, 19 bp, Homo sapiens
  siRNA target sequence for FTHFSDC1 (NM_015440.3,2803-2821).
gagagaggctgcgagtaaa

SEQ ID NO: 83861 - DNA, 19 bp, Homo sapiens
  siRNA target sequence for FTHFSDC1 (NM_015440.3,3151-3169).
cttttatgacatagatctt

SEQ ID NO: 83862 - DNA, 19 bp, Homo sapiens
  siRNA target sequence for FTHFSDC1 (NM_015440.3,3174-3192).
ccgaaacagaacaagttaa

SEQ ID NO: 83863 - DNA, 19 bp, Homo sapiens
  siRNA target sequence for FTHFSDC1 (NM_015440.3,3185-3203).
caagttaaaggcttgttct

SEQ ID NO: 83864 - DNA, 19 bp, Homo sapiens
  siRNA target sequence for FUK (NM_145059.1,597-615).
ggcctacgctcagaatcat

SEQ ID NO: 83865 - DNA, 19 bp, Homo sapiens
  siRNA target sequence for FUK (NM_145059.1,938-956).
cagatgtagcgggttatct

SEQ ID NO: 83866 - DNA, 19 bp, Homo sapiens
  siRNA target sequence for FUK (NM_145059.1,1405-1423).
ggggcaggcacatatctca

SEQ ID NO: 83867 - DNA, 19 bp, Homo sapiens
  siRNA target sequence for FUK (NM_145059.1,1406-1424).
gggcaggcacatatctcaa

SEQ ID NO: 83868 - DNA, 19 bp, Homo sapiens
  siRNA target sequence for FUK (NM_145059.1,2351-2369).
ggcctcggcaggatgagat

SEQ ID NO: 83869 - DNA, 19 bp, Homo sapiens
  siRNA target sequence for FUK (NM_145059.1,2942-2960).
gcctggtacggcaaactga

SEQ ID NO: 83870 - DNA, 19 bp, Homo sapiens
  siRNA target sequence for FUK (NM_145059.1,3130-3148).
ggcggtggaggctttctct

SEQ ID NO: 83871 - DNA, 19 bp, Homo sapiens
  siRNA target sequence for FUK (NM_145059.1,3134-3152).
gtggaggctttctctatct

SEQ ID NO: 83872 - DNA, 19 bp, Homo sapiens
  siRNA target sequence for FUK (NM_145059.1,3208-3226).
gagggccttgggaattaca

SEQ ID NO: 83873 - DNA, 19 bp, Homo sapiens
  siRNA target sequence for FYN (NM_002037.3,591-609).
gcaatgtaaggataaagaa

SEQ ID NO: 83874 - DNA, 19 bp, Homo sapiens
  siRNA target sequence for FYN (NM_002037.3,778-796).
gtgaactcttcgtctcata

SEQ ID NO: 83875 - DNA, 19 bp, Homo sapiens
  siRNA target sequence for FYN (NM_002037.3,869-887).
cagaagatgacctgagttt

SEQ ID NO: 83876 - DNA, 19 bp, Homo sapiens
  siRNA target sequence for FYN (NM_002037.3,940-958).
gaagcccgctccttgacaa

SEQ ID NO: 83877 - DNA, 19 bp, Homo sapiens
  siRNA target sequence for FYN (NM_002037.3,959-977).
ctggagagacaggttacat

SEQ ID NO: 83878 - DNA, 19 bp, Homo sapiens
  siRNA target sequence for FYN (NM_002037.3,970-988).
ggttacattcccagcaatt

SEQ ID NO: 83879 - DNA, 19 bp, Homo sapiens
  siRNA target sequence for FYN (NM_002037.3,971-989).
gttacattcccagcaatta

SEQ ID NO: 83880 - DNA, 19 bp, Homo sapiens
  siRNA target sequence for FYN (NM_002037.3,1054-1072).
gctgagcgacagctattgt

SEQ ID NO: 83881 - DNA, 19 bp, Homo sapiens
  siRNA target sequence for FYN (NM_002037.3,1063-1081).
cagctattgtcctttggaa

SEQ ID NO: 83882 - DNA, 19 bp, Homo sapiens
  siRNA target sequence for FYN (NM_002037.3,1122-1140).
caaaggtgcctattcactt

SEQ ID NO: 83883 - DNA, 19 bp, Homo sapiens
  siRNA target sequence for FYN (NM_002037.3,1168-1186).
ggagaccatgtcaaacatt

SEQ ID NO: 83884 - DNA, 19 bp, Homo sapiens
  siRNA target sequence for FYN (NM_002037.3,1171-1189).
gaccatgtcaaacattata

SEQ ID NO: 83885 - DNA, 19 bp, Homo sapiens
  siRNA target sequence for FYN (NM_002037.3,1210-1228).
ggtggatactacattacca

SEQ ID NO: 83886 - DNA, 19 bp, Homo sapiens
  siRNA target sequence for FYN (NM_002037.3,1257-1275).
gcttgtacaacattactca

SEQ ID NO: 83887 - DNA, 19 bp, Homo sapiens
  siRNA target sequence for FYN (NM_002037.3,1384-1402).
gaatccctgcagttgatca

SEQ ID NO: 83888 - DNA, 19 bp, Homo sapiens
  siRNA target sequence for FYN (NM_002037.3,1465-1483).
gtagccataaagactctta

SEQ ID NO: 83889 - DNA, 19 bp, Homo sapiens
  siRNA target sequence for FYN (NM_002037.3,1470-1488).
cataaagactcttaaacca

SEQ ID NO: 83890 - DNA, 19 bp, Homo sapiens
  siRNA target sequence for FYN (NM_002037.3,1480-1498).
cttaaaccaggcacaatgt

SEQ ID NO: 83891 - DNA, 19 bp, Homo sapiens
  siRNA target sequence for FYN (NM_002037.3,1493-1511).
caatgtcccccgaatcatt

SEQ ID NO: 83892 - DNA, 19 bp, Homo sapiens
  siRNA target sequence for FYN (NM_002037.3,1497-1515).
gtcccccgaatcattcctt

SEQ ID NO: 83893 - DNA, 19 bp, Homo sapiens
  siRNA target sequence for FYN (NM_002037.3,1703-1721).
ctgcaggaatggcttacat

SEQ ID NO: 83894 - DNA, 19 bp, Homo sapiens
  siRNA target sequence for FYN (NM_002037.3,1719-1737).
catcgagcgcatgaattat

SEQ ID NO: 83895 - DNA, 19 bp, Homo sapiens
  siRNA target sequence for FYN (NM_002037.3,1725-1743).
gcgcatgaattatatccat

SEQ ID NO: 83896 - DNA, 19 bp, Homo sapiens
  siRNA target sequence for FYN (NM_002037.3,1752-1770).
gcgatcagcaaacattcta

SEQ ID NO: 83897 - DNA, 19 bp, Homo sapiens
  siRNA target sequence for FYN (NM_002037.3,1774-1792).
gggaatggactcatatgca

SEQ ID NO: 83898 - DNA, 19 bp, Homo sapiens
  siRNA target sequence for FYN (NM_002037.3,1806-1824).
cggattggcccgattgata

SEQ ID NO: 83899 - DNA, 19 bp, Homo sapiens
  siRNA target sequence for FYN (NM_002037.3,1808-1826).
gattggcccgattgataga

SEQ ID NO: 83900 - DNA, 19 bp, Homo sapiens
  siRNA target sequence for FYN (NM_002037.3,1815-1833).
ccgattgatagaagacaat

SEQ ID NO: 83901 - DNA, 19 bp, Homo sapiens
  siRNA target sequence for FYN (NM_002037.3,1894-1912).
ctgtacgggaggttcacaa

SEQ ID NO: 83902 - DNA, 19 bp, Homo sapiens
  siRNA target sequence for FYN (NM_002037.3,2104-2122).
gaacgccccacttttgagt

SEQ ID NO: 83903 - DNA, 19 bp, Homo sapiens
  siRNA target sequence for FYN (NM_153047.1,720-738).
ggtttgtgttttaacttaa

SEQ ID NO: 83904 - DNA, 19 bp, Homo sapiens
  siRNA target sequence for FYN (NM_153047.1,741-759).
gtgattgcatcgagttgta

SEQ ID NO: 83905 - DNA, 19 bp, Homo sapiens
  siRNA target sequence for FYN (NM_153047.1,752-770).
gagttgtaccccacaaact

SEQ ID NO: 83906 - DNA, 19 bp, Homo sapiens
  siRNA target sequence for FYN (NM_153047.1,769-787).
cttctggattggctaaaga

SEQ ID NO: 83907 - DNA, 19 bp, Homo sapiens
  siRNA target sequence for FYN (NM_153047.1,811-829).
cgttgtgtctggagaagaa

SEQ ID NO: 83908 - DNA, 19 bp, Homo sapiens
  siRNA target sequence for GABARAPL2 (NM_007285.6,181-199).
cgtggagtccgcgaagatt

SEQ ID NO: 83909 - DNA, 19 bp, Homo sapiens
  siRNA target sequence for GABARAPL2 (NM_007285.6,192-210).
cgaagattcgagcgaaata

SEQ ID NO: 83910 - DNA, 19 bp, Homo sapiens
  siRNA target sequence for GABARAPL2 (NM_007285.6,193-211).
gaagattcgagcgaaatat

SEQ ID NO: 83911 - DNA, 19 bp, Homo sapiens
  siRNA target sequence for GABARAPL2 (NM_007285.6,241-259).
ggtctcaggctctcagatt

SEQ ID NO: 83912 - DNA, 19 bp, Homo sapiens
  siRNA target sequence for GABARAPL2 (NM_007285.6,286-304).
ggttccatctgatatcact

SEQ ID NO: 83913 - DNA, 19 bp, Homo sapiens
  siRNA target sequence for GABARAPL2 (NM_007285.6,367-385).
cctgtttgtggataagaca

SEQ ID NO: 83914 - DNA, 19 bp, Homo sapiens
  siRNA target sequence for GABARAPL2 (NM_007285.6,405-423).
ctatgggacagctttacga

SEQ ID NO: 83915 - DNA, 19 bp, Homo sapiens
  siRNA target sequence for GABARAPL2 (NM_007285.6,413-431).
cagctttacgagaaggaaa

SEQ ID NO: 83916 - DNA, 19 bp, Homo sapiens
  siRNA target sequence for GAK (NM_005255.1,139-157).
gccgaaggagggtttgcat

SEQ ID NO: 83917 - DNA, 19 bp, Homo sapiens
  siRNA target sequence for GAK (NM_005255.1,140-158).
ccgaaggagggtttgcatt

SEQ ID NO: 83918 - DNA, 19 bp, Homo sapiens
  siRNA target sequence for GAK (NM_005255.1,141-159).
cgaaggagggtttgcattt

SEQ ID NO: 83919 - DNA, 19 bp, Homo sapiens
  siRNA target sequence for GAK (NM_005255.1,180-198).
ggggagtggcagagagtat

SEQ ID NO: 83920 - DNA, 19 bp, Homo sapiens
  siRNA target sequence for GAK (NM_005255.1,188-206).
gcagagagtatgcattaaa

SEQ ID NO: 83921 - DNA, 19 bp, Homo sapiens
  siRNA target sequence for GAK (NM_005255.1,207-225).
gaggctattatccaatgaa

SEQ ID NO: 83922 - DNA, 19 bp, Homo sapiens
  siRNA target sequence for GAK (NM_005255.1,237-255).
cagagccatcattcaagaa

SEQ ID NO: 83923 - DNA, 19 bp, Homo sapiens
  siRNA target sequence for GAK (NM_005255.1,278-296).
ccggccacccgaacattgt

SEQ ID NO: 83924 - DNA, 19 bp, Homo sapiens
  siRNA target sequence for GAK (NM_005255.1,308-326).
ctgcagcgtctataggaaa

SEQ ID NO: 83925 - DNA, 19 bp, Homo sapiens
  siRNA target sequence for GAK (NM_005255.1,311-329).
cagcgtctataggaaaaga

SEQ ID NO: 83926 - DNA, 19 bp, Homo sapiens
  siRNA target sequence for GAK (NM_005255.1,431-449).
cgtgcgacacggttctgaa

SEQ ID NO: 83927 - DNA, 19 bp, Homo sapiens
  siRNA target sequence for GAK (NM_005255.1,434-452).
gcgacacggttctgaagat

SEQ ID NO: 83928 - DNA, 19 bp, Homo sapiens
  siRNA target sequence for GAK (NM_005255.1,436-454).
gacacggttctgaagatct

SEQ ID NO: 83929 - DNA, 19 bp, Homo sapiens
  siRNA target sequence for GAK (NM_005255.1,440-458).
cggttctgaagatcttcta

SEQ ID NO: 83930 - DNA, 19 bp, Homo sapiens
  siRNA target sequence for GAK (NM_005255.1,520-538).
ctcaaggttgagaacttgt

SEQ ID NO: 83931 - DNA, 19 bp, Homo sapiens
  siRNA target sequence for GAK (NM_005255.1,526-544).
gttgagaacttgttgctta

SEQ ID NO: 83932 - DNA, 19 bp, Homo sapiens
  siRNA target sequence for GAK (NM_005255.1,545-563).
gtaaccaagggaccattaa

SEQ ID NO: 83933 - DNA, 19 bp, Homo sapiens
  siRNA target sequence for GAK (NM_005255.1,646-664).
gaagagatcacgaggaata

SEQ ID NO: 83934 - DNA, 19 bp, Homo sapiens
  siRNA target sequence for GAK (NM_005255.1,649-667).
gagatcacgaggaatacaa

SEQ ID NO: 83935 - DNA, 19 bp, Homo sapiens
  siRNA target sequence for GAK (NM_005255.1,651-669).
gatcacgaggaatacaaca

SEQ ID NO: 83936 - DNA, 19 bp, Homo sapiens
  siRNA target sequence for GAK (NM_005255.1,659-677).
ggaatacaacaccaatgta

SEQ ID NO: 83937 - DNA, 19 bp, Homo sapiens
  siRNA target sequence for GAK (NM_005255.1,683-701).
caccagaaatcatagactt

SEQ ID NO: 83938 - DNA, 19 bp, Homo sapiens
  siRNA target sequence for GAK (NM_005255.1,797-815).
gagcgaaacttcgaatagt

SEQ ID NO: 83939 - DNA, 19 bp, Homo sapiens
  siRNA target sequence for GAK (NM_005255.1,799-817).
gcgaaacttcgaatagtca

SEQ ID NO: 83940 - DNA, 19 bp, Homo sapiens
  siRNA target sequence for GAK (NM_005255.1,800-818).
cgaaacttcgaatagtcaa

SEQ ID NO: 83941 - DNA, 19 bp, Homo sapiens
  siRNA target sequence for GAK (NM_005255.1,801-819).
gaaacttcgaatagtcaat

SEQ ID NO: 83942 - DNA, 19 bp, Homo sapiens
  siRNA target sequence for GAK (NM_005255.1,1115-1133).
gcggcttcctggacattct

SEQ ID NO: 83943 - DNA, 19 bp, Homo sapiens
  siRNA target sequence for GAK (NM_005255.1,1191-1209).
ccagtccgtcgctaattat

SEQ ID NO: 83944 - DNA, 19 bp, Homo sapiens
  siRNA target sequence for GAK (NM_005255.1,1194-1212).
gtccgtcgctaattatgca

SEQ ID NO: 83945 - DNA, 19 bp, Homo sapiens
  siRNA target sequence for GAK (NM_005255.1,1196-1214).
ccgtcgctaattatgcaaa

SEQ ID NO: 83946 - DNA, 19 bp, Homo sapiens
  siRNA target sequence for GAK (NM_005255.1,1215-1233).
gggtgacctggacatatct

SEQ ID NO: 83947 - DNA, 19 bp, Homo sapiens
  siRNA target sequence for GAK (NM_005255.1,1219-1237).
gacctggacatatcttaca

SEQ ID NO: 83948 - DNA, 19 bp, Homo sapiens
  siRNA target sequence for GAK (NM_005255.1,1222-1240).
ctggacatatcttacatca

SEQ ID NO: 83949 - DNA, 19 bp, Homo sapiens
  siRNA target sequence for GAK (NM_005255.1,1286-1304).
cagcgctcaaaaacaacat

SEQ ID NO: 83950 - DNA, 19 bp, Homo sapiens
  siRNA target sequence for GAK (NM_005255.1,1343-1361).
ggcactatgccgtctacaa

SEQ ID NO: 83951 - DNA, 19 bp, Homo sapiens
  siRNA target sequence for GAK (NM_005255.1,1447-1465).
cacaccctgtacaacatct

SEQ ID NO: 83952 - DNA, 19 bp, Homo sapiens
  siRNA target sequence for GAK (NM_005255.1,1646-1664).
ggccatcccacaaaaggta

SEQ ID NO: 83953 - DNA, 19 bp, Homo sapiens
  siRNA target sequence for GAK (NM_005255.1,1854-1872).
gcgggactttaagattgaa

SEQ ID NO: 83954 - DNA, 19 bp, Homo sapiens
  siRNA target sequence for GAK (NM_005255.1,1917-1935).
cgtgctcatcgtcatctat

SEQ ID NO: 83955 - DNA, 19 bp, Homo sapiens
  siRNA target sequence for GAK (NM_005255.1,2031-2049).
cgccaccactgtgaaattt

SEQ ID NO: 83956 - DNA, 19 bp, Homo sapiens
  siRNA target sequence for GAK (NM_005255.1,2061-2079).
cctggacgcgtgtgacatt

SEQ ID NO: 83957 - DNA, 19 bp, Homo sapiens
  siRNA target sequence for GAK (NM_005255.1,2064-2082).
ggacgcgtgtgacattcaa

SEQ ID NO: 83958 - DNA, 19 bp, Homo sapiens
  siRNA target sequence for GAK (NM_005255.1,2067-2085).
cgcgtgtgacattcaagaa

SEQ ID NO: 83959 - DNA, 19 bp, Homo sapiens
  siRNA target sequence for GAK (NM_005255.1,2068-2086).
gcgtgtgacattcaagaaa

SEQ ID NO: 83960 - DNA, 19 bp, Homo sapiens
  siRNA target sequence for GAK (NM_005255.1,2083-2101).
gaaaaatacccggatttat

SEQ ID NO: 83961 - DNA, 19 bp, Homo sapiens
  siRNA target sequence for GAK (NM_005255.1,2093-2111).
cggatttatttcaagtgaa

SEQ ID NO: 83962 - DNA, 19 bp, Homo sapiens
  siRNA target sequence for GAK (NM_005255.1,2221-2239).
gagcagcaagacattctgt

SEQ ID NO: 83963 - DNA, 19 bp, Homo sapiens
  siRNA target sequence for GAK (NM_005255.1,2276-2294).
gctccacggctcagtatga

SEQ ID NO: 83964 - DNA, 19 bp, Homo sapiens
  siRNA target sequence for GAK (NM_005255.1,2277-2295).
ctccacggctcagtatgat

SEQ ID NO: 83965 - DNA, 19 bp, Homo sapiens
  siRNA target sequence for GAK (NM_005255.1,3428-3446).
cacagccaaggcctaacta

SEQ ID NO: 83966 - DNA, 19 bp, Homo sapiens
  siRNA target sequence for GAK (NM_005255.1,3569-3587).
cctccaggtctgacaagaa

SEQ ID NO: 83967 - DNA, 19 bp, Homo sapiens
  siRNA target sequence for GAK (NM_005255.1,3776-3794).
ctccggagcaagtgaagaa

SEQ ID NO: 83968 - DNA, 19 bp, Homo sapiens
  siRNA target sequence for GAK (NM_005255.1,3853-3871).
gagcagcacgccaagatga

SEQ ID NO: 83969 - DNA, 19 bp, Homo sapiens
  siRNA target sequence for GAK (NM_005255.1,3859-3877).
cacgccaagatgatcttca

SEQ ID NO: 83970 - DNA, 19 bp, Homo sapiens
  siRNA target sequence for GALK1 (NM_000154.1,188-206).
gggaacacacggactacaa

SEQ ID NO: 83971 - DNA, 19 bp, Homo sapiens
  siRNA target sequence for GALK1 (NM_000154.1,374-392).
ctcggtgggccaactatgt

SEQ ID NO: 83972 - DNA, 19 bp, Homo sapiens
  siRNA target sequence for GALK1 (NM_000154.1,376-394).
cggtgggccaactatgtca

SEQ ID NO: 83973 - DNA, 19 bp, Homo sapiens
  siRNA target sequence for GALK1 (NM_000154.1,377-395).
ggtgggccaactatgtcaa

SEQ ID NO: 83974 - DNA, 19 bp, Homo sapiens
  siRNA target sequence for GALK1 (NM_000154.1,619-637).
gaccagttcatctcactta

SEQ ID NO: 83975 - DNA, 19 bp, Homo sapiens
  siRNA target sequence for GALK1 (NM_000154.1,652-670).
cacgcgctgctcattgact

SEQ ID NO: 83976 - DNA, 19 bp, Homo sapiens
  siRNA target sequence for GALK1 (NM_000154.1,1001-1019).
cactcagagacgactatga

SEQ ID NO: 83977 - DNA, 19 bp, Homo sapiens
  siRNA target sequence for GALK2 (NM_002044.1,50-68).
ggtccaggtggcagaacat

SEQ ID NO: 83978 - DNA, 19 bp, Homo sapiens
  siRNA target sequence for GALK2 (NM_002044.1,73-91).
ggttactgaagctaaagga

SEQ ID NO: 83979 - DNA, 19 bp, Homo sapiens
  siRNA target sequence for GALK2 (NM_002044.1,115-133).
ctattcccaagttttatgt

SEQ ID NO: 83980 - DNA, 19 bp, Homo sapiens
  siRNA target sequence for GALK2 (NM_002044.1,141-159).
ccaggaagagtcaacataa

SEQ ID NO: 83981 - DNA, 19 bp, Homo sapiens
  siRNA target sequence for GALK2 (NM_002044.1,142-160).
caggaagagtcaacataat

SEQ ID NO: 83982 - DNA, 19 bp, Homo sapiens
  siRNA target sequence for GALK2 (NM_002044.1,231-249).
gtagaacctgtgaaaacgt

SEQ ID NO: 83983 - DNA, 19 bp, Homo sapiens
  siRNA target sequence for GALK2 (NM_002044.1,266-284).
caatacaaatcccttgtat

SEQ ID NO: 83984 - DNA, 19 bp, Homo sapiens
  siRNA target sequence for GALK2 (NM_002044.1,290-308).
cttcagtactagtgctaat

SEQ ID NO: 83985 - DNA, 19 bp, Homo sapiens
  siRNA target sequence for GALK2 (NM_002044.1,304-322).
ctaataacatccagattga

SEQ ID NO: 83986 - DNA, 19 bp, Homo sapiens
  siRNA target sequence for GALK2 (NM_002044.1,332-350).
gcctttgtggcacaactat

SEQ ID NO: 83987 - DNA, 19 bp, Homo sapiens
  siRNA target sequence for GALK2 (NM_002044.1,338-356).
gtggcacaactatttctta

SEQ ID NO: 83988 - DNA, 19 bp, Homo sapiens
  siRNA target sequence for GALK2 (NM_002044.1,341-359).
gcacaactatttcttatgt

SEQ ID NO: 83989 - DNA, 19 bp, Homo sapiens
  siRNA target sequence for GALK2 (NM_002044.1,377-395).
ggaacactttggtcttagt

SEQ ID NO: 83990 - DNA, 19 bp, Homo sapiens
  siRNA target sequence for GALK2 (NM_002044.1,378-396).
gaacactttggtcttagta

SEQ ID NO: 83991 - DNA, 19 bp, Homo sapiens
  siRNA target sequence for GALK2 (NM_002044.1,394-412).
gtaacctgactggaatgaa

SEQ ID NO: 83992 - DNA, 19 bp, Homo sapiens
  siRNA target sequence for GALK2 (NM_002044.1,501-519).
gtgctgggaaggaatctat

SEQ ID NO: 83993 - DNA, 19 bp, Homo sapiens
  siRNA target sequence for GALK2 (NM_002044.1,525-543).
gtggaacttgcagaaatct

SEQ ID NO: 83994 - DNA, 19 bp, Homo sapiens
  siRNA target sequence for GALK2 (NM_002044.1,547-565).
ccaagagtgagcgttacat

SEQ ID NO: 83995 - DNA, 19 bp, Homo sapiens
  siRNA target sequence for GALK2 (NM_002044.1,548-566).
caagagtgagcgttacatt

SEQ ID NO: 83996 - DNA, 19 bp, Homo sapiens
  siRNA target sequence for GALK2 (NM_002044.1,580-598).
gaggcatggaccagtctat

SEQ ID NO: 83997 - DNA, 19 bp, Homo sapiens
  siRNA target sequence for GALK2 (NM_002044.1,584-602).
catggaccagtctatatca

SEQ ID NO: 83998 - DNA, 19 bp, Homo sapiens
  siRNA target sequence for GALK2 (NM_002044.1,587-605).
ggaccagtctatatcattt

SEQ ID NO: 83999 - DNA, 19 bp, Homo sapiens
  siRNA target sequence for GALK2 (NM_002044.1,590-608).
ccagtctatatcatttctt

SEQ ID NO: 84000 - DNA, 19 bp, Homo sapiens
  siRNA target sequence for GALK2 (NM_002044.1,619-637).
gaactgccaagttgataga

SEQ ID NO: 84001 - DNA, 19 bp, Homo sapiens
  siRNA target sequence for GALK2 (NM_002044.1,624-642).
gccaagttgatagaattta

SEQ ID NO: 84002 - DNA, 19 bp, Homo sapiens
  siRNA target sequence for GALK2 (NM_002044.1,648-666).
ctgagggcaaccgatgtaa

SEQ ID NO: 84003 - DNA, 19 bp, Homo sapiens
  siRNA target sequence for GALK2 (NM_002044.1,650-668).
gagggcaaccgatgtaaaa

SEQ ID NO: 84004 - DNA, 19 bp, Homo sapiens
  siRNA target sequence for GALK2 (NM_002044.1,652-670).
gggcaaccgatgtaaaact

SEQ ID NO: 84005 - DNA, 19 bp, Homo sapiens
  siRNA target sequence for GALK2 (NM_002044.1,726-744).
gcaacttcccatttcaata

SEQ ID NO: 84006 - DNA, 19 bp, Homo sapiens
  siRNA target sequence for GALK2 (NM_002044.1,727-745).
caacttcccatttcaatat

SEQ ID NO: 84007 - DNA, 19 bp, Homo sapiens
  siRNA target sequence for GALK2 (NM_002044.1,771-789).
gcgaagctcctggctaaat

SEQ ID NO: 84008 - DNA, 19 bp, Homo sapiens
  siRNA target sequence for GALK2 (NM_002044.1,776-794).
gctcctggctaaatacaaa

SEQ ID NO: 84009 - DNA, 19 bp, Homo sapiens
  siRNA target sequence for GALK2 (NM_002044.1,836-854).
ggctaaactagggattagt

SEQ ID NO: 84010 - DNA, 19 bp, Homo sapiens
  siRNA target sequence for GALK2 (NM_002044.1,838-856).
ctaaactagggattagtct

SEQ ID NO: 84011 - DNA, 19 bp, Homo sapiens
  siRNA target sequence for GALK2 (NM_002044.1,847-865).
ggattagtctagaagaaat

SEQ ID NO: 84012 - DNA, 19 bp, Homo sapiens
  siRNA target sequence for GALK2 (NM_002044.1,1004-1022).
ctatcagcgggcaaagcat

SEQ ID NO: 84013 - DNA, 19 bp, Homo sapiens
  siRNA target sequence for GALK2 (NM_002044.1,1038-1056).
gcgcgagtgctccagttta

SEQ ID NO: 84014 - DNA, 19 bp, Homo sapiens
  siRNA target sequence for GALK2 (NM_002044.1,1039-1057).
cgcgagtgctccagtttaa

SEQ ID NO: 84015 - DNA, 19 bp, Homo sapiens
  siRNA target sequence for GALK2 (NM_002044.1,1041-1059).
cgagtgctccagtttaaga

SEQ ID NO: 84016 - DNA, 19 bp, Homo sapiens
  siRNA target sequence for GALK2 (NM_002044.1,1042-1060).
gagtgctccagtttaagaa

SEQ ID NO: 84017 - DNA, 19 bp, Homo sapiens
  siRNA target sequence for GALK2 (NM_002044.1,1178-1196).
ggacatctgtcggaagttt

SEQ ID NO: 84018 - DNA, 19 bp, Homo sapiens
  siRNA target sequence for GALK2 (NM_002044.1,1310-1328).
gaggagtgatggaagctta

SEQ ID NO: 84019 - DNA, 19 bp, Homo sapiens
  siRNA target sequence for GALK2 (NM_002044.1,1366-1384).
gaggtggggctttggtttt

SEQ ID NO: 84020 - DNA, 19 bp, Homo sapiens
  siRNA target sequence for GARS (NM_002047.1,569-587).
gcgccagcagggagatctt

SEQ ID NO: 84021 - DNA, 19 bp, Homo sapiens
  siRNA target sequence for GARS (NM_002047.1,617-635).
ccaagtagacgtagacaaa

SEQ ID NO: 84022 - DNA, 19 bp, Homo sapiens
  siRNA target sequence for GARS (NM_002047.1,686-704).
ggcgttacagcccaaagat

SEQ ID NO: 84023 - DNA, 19 bp, Homo sapiens
  siRNA target sequence for GARS (NM_002047.1,688-706).
cgttacagcccaaagatga

SEQ ID NO: 84024 - DNA, 19 bp, Homo sapiens
  siRNA target sequence for GARS (NM_002047.1,786-804).
gttagtggtctgtatgact

SEQ ID NO: 84025 - DNA, 19 bp, Homo sapiens
  siRNA target sequence for GARS (NM_002047.1,850-868).
ggaggcagcactttatcca

SEQ ID NO: 84026 - DNA, 19 bp, Homo sapiens
  siRNA target sequence for GARS (NM_002047.1,851-869).
gaggcagcactttatccaa

SEQ ID NO: 84027 - DNA, 19 bp, Homo sapiens
  siRNA target sequence for GARS (NM_002047.1,928-946).
cctctggccatgtagacaa

SEQ ID NO: 84028 - DNA, 19 bp, Homo sapiens
  siRNA target sequence for GARS (NM_002047.1,929-947).
ctctggccatgtagacaaa

SEQ ID NO: 84029 - DNA, 19 bp, Homo sapiens
  siRNA target sequence for GARS (NM_002047.1,931-949).
ctggccatgtagacaaatt

SEQ ID NO: 84030 - DNA, 19 bp, Homo sapiens
  siRNA target sequence for GARS (NM_002047.1,935-953).
ccatgtagacaaatttgct

SEQ ID NO: 84031 - DNA, 19 bp, Homo sapiens
  siRNA target sequence for GARS (NM_002047.1,962-980).
ggtgaaagacgtaaaaaat

SEQ ID NO: 84032 - DNA, 19 bp, Homo sapiens
  siRNA target sequence for GARS (NM_002047.1,993-1011).
cgtgctgaccatctattaa

SEQ ID NO: 84033 - DNA, 19 bp, Homo sapiens
  siRNA target sequence for GARS (NM_002047.1,1051-1069).
ctgtcgaaaagaaatcaga

SEQ ID NO: 84034 - DNA, 19 bp, Homo sapiens
  siRNA target sequence for GARS (NM_002047.1,1053-1071).
gtcgaaaagaaatcagaaa

SEQ ID NO: 84035 - DNA, 19 bp, Homo sapiens
  siRNA target sequence for GARS (NM_002047.1,1080-1098).
gttttggcccagcttgata

SEQ ID NO: 84036 - DNA, 19 bp, Homo sapiens
  siRNA target sequence for GARS (NM_002047.1,1085-1103).
ggcccagcttgataactat

SEQ ID NO: 84037 - DNA, 19 bp, Homo sapiens
  siRNA target sequence for GARS (NM_002047.1,1120-1138).
cggatctttttgtgaacta

SEQ ID NO: 84038 - DNA, 19 bp, Homo sapiens
  siRNA target sequence for GARS (NM_002047.1,1122-1140).
gatctttttgtgaactata

SEQ ID NO: 84039 - DNA, 19 bp, Homo sapiens
  siRNA target sequence for GARS (NM_002047.1,1133-1151).
gaactataatgtaaaatct

SEQ ID NO: 84040 - DNA, 19 bp, Homo sapiens
  siRNA target sequence for GARS (NM_002047.1,1177-1195).
ctccagtgtcttttaactt

SEQ ID NO: 84041 - DNA, 19 bp, Homo sapiens
  siRNA target sequence for GARS (NM_002047.1,1238-1256).
gtacttgagaccagaaact

SEQ ID NO: 84042 - DNA, 19 bp, Homo sapiens
  siRNA target sequence for GARS (NM_002047.1,1507-1525).
gacagtccgctcggaaaat

SEQ ID NO: 84043 - DNA, 19 bp, Homo sapiens
  siRNA target sequence for GARS (NM_002047.1,1550-1568).
gggtgtgattaataacaca

SEQ ID NO: 84044 - DNA, 19 bp, Homo sapiens
  siRNA target sequence for GARS (NM_002047.1,1554-1572).
gtgattaataacacagtat

SEQ ID NO: 84045 - DNA, 19 bp, Homo sapiens
  siRNA target sequence for GARS (NM_002047.1,1711-1729).
cctacggttggattgagat

SEQ ID NO: 84046 - DNA, 19 bp, Homo sapiens
  siRNA target sequence for GARS (NM_002047.1,1712-1730).
ctacggttggattgagatt

SEQ ID NO: 84047 - DNA, 19 bp, Homo sapiens
  siRNA target sequence for GARS (NM_002047.1,1781-1799).
caccaaagtcccacttgta

SEQ ID NO: 84048 - DNA, 19 bp, Homo sapiens
  siRNA target sequence for GARS (NM_002047.1,1907-1925).
gtatcttgccatttgtgat

SEQ ID NO: 84049 - DNA, 19 bp, Homo sapiens
  siRNA target sequence for GARS (NM_002047.1,1930-1948).
gctacattacagaaatgga

SEQ ID NO: 84050 - DNA, 19 bp, Homo sapiens
  siRNA target sequence for GARS (NM_002047.1,1968-1986).
ggggaattcacaattgaaa

SEQ ID NO: 84051 - DNA, 19 bp, Homo sapiens
  siRNA target sequence for GARS (NM_002047.1,1970-1988).
ggaattcacaattgaaact

SEQ ID NO: 84052 - DNA, 19 bp, Homo sapiens
  siRNA target sequence for GARS (NM_002047.1,2061-2079).
gaagttgttccgaatgtaa

SEQ ID NO: 84053 - DNA, 19 bp, Homo sapiens
  siRNA target sequence for GARS (NM_002047.1,2095-2113).
gcctgggtaggatcatgta

SEQ ID NO: 84054 - DNA, 19 bp, Homo sapiens
  siRNA target sequence for GARS (NM_002047.1,2096-2114).
cctgggtaggatcatgtat

SEQ ID NO: 84055 - DNA, 19 bp, Homo sapiens
  siRNA target sequence for GARS (NM_002047.1,2097-2115).
ctgggtaggatcatgtata

SEQ ID NO: 84056 - DNA, 19 bp, Homo sapiens
  siRNA target sequence for GARS (NM_002047.1,2111-2129).
gtatacggtatttgaacat

SEQ ID NO: 84057 - DNA, 19 bp, Homo sapiens
  siRNA target sequence for GARS (NM_002047.1,2184-2202).
gtagttgctccattcaaat

SEQ ID NO: 84058 - DNA, 19 bp, Homo sapiens
  siRNA target sequence for GARS (NM_002047.1,2232-2250).
gagttcatgccatttgtca

SEQ ID NO: 84059 - DNA, 19 bp, Homo sapiens
  siRNA target sequence for GARS (NM_002047.1,2240-2258).
gccatttgtcaaggaatta

SEQ ID NO: 84060 - DNA, 19 bp, Homo sapiens
  siRNA target sequence for GARS (NM_002047.1,2276-2294).
gcatggagtatctcacaaa

SEQ ID NO: 84061 - DNA, 19 bp, Homo sapiens
  siRNA target sequence for GARS (NM_002047.1,2345-2363).
gattggcgtggcttttggt

SEQ ID NO: 84062 - DNA, 19 bp, Homo sapiens
  siRNA target sequence for GARS (NM_002047.1,2519-2537).
caggtatcctctgtttgaa

SEQ ID NO: 84063 - DNA, 19 bp, Homo sapiens
  siRNA target sequence for GCK (NM_000162.2,718-736).
gacctgggtggcactaact

SEQ ID NO: 84064 - DNA, 19 bp, Homo sapiens
  siRNA target sequence for GCK (NM_000162.2,721-739).
ctgggtggcactaacttca

SEQ ID NO: 84065 - DNA, 19 bp, Homo sapiens
  siRNA target sequence for GCK (NM_000162.2,950-968).
ggcacgaagacatcgataa

SEQ ID NO: 84066 - DNA, 19 bp, Homo sapiens
  siRNA target sequence for GCK (NM_000162.2,1337-1355).
ccggtcagcagctgtatga

SEQ ID NO: 84067 - DNA, 19 bp, Homo sapiens
  siRNA target sequence for GCK (NM_000162.2,1339-1357).
ggtcagcagctgtatgaga

SEQ ID NO: 84068 - DNA, 19 bp, Homo sapiens
  siRNA target sequence for GCK (NM_000162.2,1409-1427).
ggctcgtggacgaaaacct

SEQ ID NO: 84069 - DNA, 19 bp, Homo sapiens
  siRNA target sequence for GCK (NM_000162.2,1514-1532).
gcgaccgcaagcagatcta

SEQ ID NO: 84070 - DNA, 19 bp, Homo sapiens
  siRNA target sequence for GCK (NM_000162.2,1519-1537).
cgcaagcagatctacaaca

SEQ ID NO: 84071 - DNA, 19 bp, Homo sapiens
  siRNA target sequence for GCK (NM_000162.2,1673-1691).
gccgcagcgaggacgtaat

SEQ ID NO: 84072 - DNA, 19 bp, Homo sapiens
  siRNA target sequence for GK (NM_000167.1,1488-1506).
cgaacccgaggatttgtct

SEQ ID NO: 84073 - DNA, 19 bp, Homo sapiens
  siRNA target sequence for GK2 (NM_033214.1,227-245).
gaacgtgtgagaaacttga

SEQ ID NO: 84074 - DNA, 19 bp, Homo sapiens
  siRNA target sequence for GK2 (NM_033214.1,244-262).
gacgaactgaatattgata

SEQ ID NO: 84075 - DNA, 19 bp, Homo sapiens
  siRNA target sequence for GK2 (NM_033214.1,247-265).
gaactgaatattgatatat

SEQ ID NO: 84076 - DNA, 19 bp, Homo sapiens
  siRNA target sequence for GK2 (NM_033214.1,383-401).
ctgttgaggatcttagtaa

SEQ ID NO: 84077 - DNA, 19 bp, Homo sapiens
  siRNA target sequence for GK2 (NM_033214.1,419-437).
gtaacttcgtcaagtctaa

SEQ ID NO: 84078 - DNA, 19 bp, Homo sapiens
  siRNA target sequence for GK2 (NM_033214.1,507-525).
cgtccaaaaggctgttgaa

SEQ ID NO: 84079 - DNA, 19 bp, Homo sapiens
  siRNA target sequence for GK2 (NM_033214.1,529-547).
ggtagagctctttttggta

SEQ ID NO: 84080 - DNA, 19 bp, Homo sapiens
  siRNA target sequence for GK2 (NM_033214.1,597-615).
cgtgcattgtacagatgta

SEQ ID NO: 84081 - DNA, 19 bp, Homo sapiens
  siRNA target sequence for GK2 (NM_033214.1,629-647).
ggacaatgctttttaatat

SEQ ID NO: 84082 - DNA, 19 bp, Homo sapiens
  siRNA target sequence for GK2 (NM_033214.1,863-881).
gttgcttcttactgtgtaa

SEQ ID NO: 84083 - DNA, 19 bp, Homo sapiens
  siRNA target sequence for GK2 (NM_033214.1,876-894).
gtgtaatacgggtcgtaaa

SEQ ID NO: 84084 - DNA, 19 bp, Homo sapiens
  siRNA target sequence for GK2 (NM_033214.1,885-903).
gggtcgtaaatgtgtgttt

SEQ ID NO: 84085 - DNA, 19 bp, Homo sapiens
  siRNA target sequence for GK2 (NM_033214.1,886-904).
ggtcgtaaatgtgtgtttt

SEQ ID NO: 84086 - DNA, 19 bp, Homo sapiens
  siRNA target sequence for GK2 (NM_033214.1,1464-1482).
caggatggaacgatttgaa

SEQ ID NO: 84087 - DNA, 19 bp, Homo sapiens
  siRNA target sequence for GK2 (NM_033214.1,1579-1597).
ggtggtgatccttctatct

SEQ ID NO: 84088 - DNA, 19 bp, Homo sapiens
  siRNA target sequence for GK2 (NM_033214.1,1580-1598).
gtggtgatccttctatctt

SEQ ID NO: 84089 - DNA, 19 bp, Homo sapiens
  siRNA target sequence for GK2 (NM_033214.1,1582-1600).
ggtgatccttctatcttct

SEQ ID NO: 84090 - DNA, 19 bp, Homo sapiens
  siRNA target sequence for GK2 (NM_033214.1,1644-1662).
gctaattggagcaagatat

SEQ ID NO: 84091 - DNA, 19 bp, Homo sapiens
  siRNA target sequence for GK2 (NM_033214.1,1645-1663).
ctaattggagcaagatata

SEQ ID NO: 84092 - DNA, 19 bp, Homo sapiens
  siRNA target sequence for GMPS (NM_003875.1,266-284).
gttcgtgcagtctgaaatt

SEQ ID NO: 84093 - DNA, 19 bp, Homo sapiens
  siRNA target sequence for GMPS (NM_003875.1,298-316).
caccagcatttgctataaa

SEQ ID NO: 84094 - DNA, 19 bp, Homo sapiens
  siRNA target sequence for GMPS (NM_003875.1,301-319).
cagcatttgctataaagga

SEQ ID NO: 84095 - DNA, 19 bp, Homo sapiens
  siRNA target sequence for GMPS (NM_003875.1,321-339).
caaggattccgtgctatta

SEQ ID NO: 84096 - DNA, 19 bp, Homo sapiens
  siRNA target sequence for GMPS (NM_003875.1,325-343).
gattccgtgctattatcat

SEQ ID NO: 84097 - DNA, 19 bp, Homo sapiens
  siRNA target sequence for GMPS (NM_003875.1,344-362).
ctctggaggacctaattct

SEQ ID NO: 84098 - DNA, 19 bp, Homo sapiens
  siRNA target sequence for GMPS (NM_003875.1,383-401).
ctggtttgatccagcaata

SEQ ID NO: 84099 - DNA, 19 bp, Homo sapiens
  siRNA target sequence for GMPS (NM_003875.1,385-403).
ggtttgatccagcaatatt

SEQ ID NO: 84100 - DNA, 19 bp, Homo sapiens
  siRNA target sequence for GMPS (NM_003875.1,390-408).
gatccagcaatattcacta

SEQ ID NO: 84101 - DNA, 19 bp, Homo sapiens
  siRNA target sequence for GMPS (NM_003875.1,433-451).
gctatggtatgcagatgat

SEQ ID NO: 84102 - DNA, 19 bp, Homo sapiens
  siRNA target sequence for GMPS (NM_003875.1,438-456).
ggtatgcagatgatgaata

SEQ ID NO: 84103 - DNA, 19 bp, Homo sapiens
  siRNA target sequence for GMPS (NM_003875.1,446-464).
gatgatgaataaggtattt

SEQ ID NO: 84104 - DNA, 19 bp, Homo sapiens
  siRNA target sequence for GMPS (NM_003875.1,465-483).
ggaggtactgtgcacaaaa

SEQ ID NO: 84105 - DNA, 19 bp, Homo sapiens
  siRNA target sequence for GMPS (NM_003875.1,472-490).
ctgtgcacaaaaaaagtgt

SEQ ID NO: 84106 - DNA, 19 bp, Homo sapiens
  siRNA target sequence for GMPS (NM_003875.1,502-520).
gagttttcaacattagtgt

SEQ ID NO: 84107 - DNA, 19 bp, Homo sapiens
  siRNA target sequence for GMPS (NM_003875.1,572-590).
gcttacacatggagatagt

SEQ ID NO: 84108 - DNA, 19 bp, Homo sapiens
  siRNA target sequence for GMPS (NM_003875.1,625-643).
cacgttctggaaacatagt

SEQ ID NO: 84109 - DNA, 19 bp, Homo sapiens
  siRNA target sequence for GMPS (NM_003875.1,648-666).
ggcatagcaaatgaatcta

SEQ ID NO: 84110 - DNA, 19 bp, Homo sapiens
  siRNA target sequence for GMPS (NM_003875.1,694-712).
ctgaagttggccttacaga

SEQ ID NO: 84111 - DNA, 19 bp, Homo sapiens
  siRNA target sequence for GMPS (NM_003875.1,776-794).
cgtgcagaacagagaactt

SEQ ID NO: 84112 - DNA, 19 bp, Homo sapiens
  siRNA target sequence for GMPS (NM_003875.1,785-803).
cagagaacttgagtgtatt

SEQ ID NO: 84113 - DNA, 19 bp, Homo sapiens
  siRNA target sequence for GMPS (NM_003875.1,797-815).
gtgtattcgagagatcaaa

SEQ ID NO: 84114 - DNA, 19 bp, Homo sapiens
  siRNA target sequence for GMPS (NM_003875.1,799-817).
gtattcgagagatcaaaga

SEQ ID NO: 84115 - DNA, 19 bp, Homo sapiens
  siRNA target sequence for GMPS (NM_003875.1,818-836).
gagagtaggcacgtcaaaa

SEQ ID NO: 84116 - DNA, 19 bp, Homo sapiens
  siRNA target sequence for GMPS (NM_003875.1,820-838).
gagtaggcacgtcaaaagt

SEQ ID NO: 84117 - DNA, 19 bp, Homo sapiens
  siRNA target sequence for GMPS (NM_003875.1,826-844).
gcacgtcaaaagttttggt

SEQ ID NO: 84118 - DNA, 19 bp, Homo sapiens
  siRNA target sequence for GMPS (NM_003875.1,827-845).
cacgtcaaaagttttggtt

SEQ ID NO: 84119 - DNA, 19 bp, Homo sapiens
  siRNA target sequence for GMPS (NM_003875.1,858-876).
ggagtagactcaacagttt

SEQ ID NO: 84120 - DNA, 19 bp, Homo sapiens
  siRNA target sequence for GMPS (NM_003875.1,902-920).
gaaccaagaacaagtcatt

SEQ ID NO: 84121 - DNA, 19 bp, Homo sapiens
  siRNA target sequence for GMPS (NM_003875.1,917-935).
cattgctgtgcacattgat

SEQ ID NO: 84122 - DNA, 19 bp, Homo sapiens
  siRNA target sequence for GMPS (NM_003875.1,1001-1019).
ggtcaaagtgataaatgct

SEQ ID NO: 84123 - DNA, 19 bp, Homo sapiens
  siRNA target sequence for GMPS (NM_003875.1,1010-1028).
gataaatgctgctcattct

SEQ ID NO: 84124 - DNA, 19 bp, Homo sapiens
  siRNA target sequence for GMPS (NM_003875.1,1045-1063).
caaccctaccaatatcaga

SEQ ID NO: 84125 - DNA, 19 bp, Homo sapiens
  siRNA target sequence for GMPS (NM_003875.1,1077-1095).
ccacggaaaagaattagca

SEQ ID NO: 84126 - DNA, 19 bp, Homo sapiens
  siRNA target sequence for GMPS (NM_003875.1,1078-1096).
cacggaaaagaattagcaa

SEQ ID NO: 84127 - DNA, 19 bp, Homo sapiens
  siRNA target sequence for GMPS (NM_003875.1,1143-1161).
ggggatacttttgttaaga

SEQ ID NO: 84128 - DNA, 19 bp, Homo sapiens
  siRNA target sequence for GMPS (NM_003875.1,1144-1162).
gggatacttttgttaagat

SEQ ID NO: 84129 - DNA, 19 bp, Homo sapiens
  siRNA target sequence for GMPS (NM_003875.1,1225-1243).
ctttacggcctgatctaat

SEQ ID NO: 84130 - DNA, 19 bp, Homo sapiens
  siRNA target sequence for GMPS (NM_003875.1,1267-1285).
gtggcaaagctgaactcat

SEQ ID NO: 84131 - DNA, 19 bp, Homo sapiens
  siRNA target sequence for GMPS (NM_003875.1,1449-1467).
ctggcaatcagagtaatat

SEQ ID NO: 84132 - DNA, 19 bp, Homo sapiens
  siRNA target sequence for GMPS (NM_003875.1,1451-1469).
ggcaatcagagtaatatgt

SEQ ID NO: 84133 - DNA, 19 bp, Homo sapiens
  siRNA target sequence for GMPS (NM_003875.1,1468-1486).
gtgctgaagaaccttatat

SEQ ID NO: 84134 - DNA, 19 bp, Homo sapiens
  siRNA target sequence for GMPS (NM_003875.1,1608-1626).
gagaagctgatgcaaatta

SEQ ID NO: 84135 - DNA, 19 bp, Homo sapiens
  siRNA target sequence for GMPS (NM_003875.1,2139-2157).
cctggtatttctcgaatta

SEQ ID NO: 84136 - DNA, 19 bp, Homo sapiens
  siRNA target sequence for GNE (NM_005476.3,159-177).
ggtttgtgttgctacttgt

SEQ ID NO: 84137 - DNA, 19 bp, Homo sapiens
  siRNA target sequence for GNE (NM_005476.3,160-178).
gtttgtgttgctacttgta

SEQ ID NO: 84138 - DNA, 19 bp, Homo sapiens
  siRNA target sequence for GNE (NM_005476.3,173-191).
cttgtaaccgtgcagatta

SEQ ID NO: 84139 - DNA, 19 bp, Homo sapiens
  siRNA target sequence for GNE (NM_005476.3,206-224).
cgatcatgtttggcattaa

SEQ ID NO: 84140 - DNA, 19 bp, Homo sapiens
  siRNA target sequence for GNE (NM_005476.3,207-225).
gatcatgtttggcattaaa

SEQ ID NO: 84141 - DNA, 19 bp, Homo sapiens
  siRNA target sequence for GNE (NM_005476.3,269-287).
ctcacctgatagatgacta

SEQ ID NO: 84142 - DNA, 19 bp, Homo sapiens
  siRNA target sequence for GNE (NM_005476.3,280-298).
gatgactatggaaatacat

SEQ ID NO: 84143 - DNA, 19 bp, Homo sapiens
  siRNA target sequence for GNE (NM_005476.3,296-314).
catatcgaatgattgaaca

SEQ ID NO: 84144 - DNA, 19 bp, Homo sapiens
  siRNA target sequence for GNE (NM_005476.3,333-351).
caccaggctacacacaatt

SEQ ID NO: 84145 - DNA, 19 bp, Homo sapiens
  siRNA target sequence for GNE (NM_005476.3,335-353).
ccaggctacacacaattgt

SEQ ID NO: 84146 - DNA, 19 bp, Homo sapiens
  siRNA target sequence for GNE (NM_005476.3,408-426).
gctgccagatgtccttaat

SEQ ID NO: 84147 - DNA, 19 bp, Homo sapiens
  siRNA target sequence for GNE (NM_005476.3,428-446).
gcctgaagcctgatatcat

SEQ ID NO: 84148 - DNA, 19 bp, Homo sapiens
  siRNA target sequence for GNE (NM_005476.3,430-448).
ctgaagcctgatatcatga

SEQ ID NO: 84149 - DNA, 19 bp, Homo sapiens
  siRNA target sequence for GNE (NM_005476.3,437-455).
ctgatatcatgattgttca

SEQ ID NO: 84150 - DNA, 19 bp, Homo sapiens
  siRNA target sequence for GNE (NM_005476.3,491-509).
ctgctgccttgatgaacat

SEQ ID NO: 84151 - DNA, 19 bp, Homo sapiens
  siRNA target sequence for GNE (NM_005476.3,501-519).
gatgaacatccgaatcctt

SEQ ID NO: 84152 - DNA, 19 bp, Homo sapiens
  siRNA target sequence for GNE (NM_005476.3,510-528).
ccgaatccttcacattgaa

SEQ ID NO: 84153 - DNA, 19 bp, Homo sapiens
  siRNA target sequence for GNE (NM_005476.3,578-596).
caaaactggctcattatca

SEQ ID NO: 84154 - DNA, 19 bp, Homo sapiens
  siRNA target sequence for GNE (NM_005476.3,646-664).
gaccatgatcgcatccttt

SEQ ID NO: 84155 - DNA, 19 bp, Homo sapiens
  siRNA target sequence for GNE (NM_005476.3,670-688).
ggctgcccttcctatgaca

SEQ ID NO: 84156 - DNA, 19 bp, Homo sapiens
  siRNA target sequence for GNE (NM_005476.3,671-689).
gctgcccttcctatgacaa

SEQ ID NO: 84157 - DNA, 19 bp, Homo sapiens
  siRNA target sequence for GNE (NM_005476.3,672-690).
ctgcccttcctatgacaaa

SEQ ID NO: 84158 - DNA, 19 bp, Homo sapiens
  siRNA target sequence for GNE (NM_005476.3,732-750).
catgtggctaggtgatgat

SEQ ID NO: 84159 - DNA, 19 bp, Homo sapiens
  siRNA target sequence for GNE (NM_005476.3,735-753).
gtggctaggtgatgatgta

SEQ ID NO: 84160 - DNA, 19 bp, Homo sapiens
  siRNA target sequence for GNE (NM_005476.3,737-755).
ggctaggtgatgatgtaaa

SEQ ID NO: 84161 - DNA, 19 bp, Homo sapiens
  siRNA target sequence for GNE (NM_005476.3,738-756).
gctaggtgatgatgtaaaa

SEQ ID NO: 84162 - DNA, 19 bp, Homo sapiens
  siRNA target sequence for GNE (NM_005476.3,743-761).
gtgatgatgtaaaatctaa

SEQ ID NO: 84163 - DNA, 19 bp, Homo sapiens
  siRNA target sequence for GNE (NM_005476.3,748-766).
gatgtaaaatctaaagatt

SEQ ID NO: 84164 - DNA, 19 bp, Homo sapiens
  siRNA target sequence for GNE (NM_005476.3,751-769).
gtaaaatctaaagattaca

SEQ ID NO: 84165 - DNA, 19 bp, Homo sapiens
  siRNA target sequence for GNE (NM_005476.3,787-805).
cctgtgaccactgacatta

SEQ ID NO: 84166 - DNA, 19 bp, Homo sapiens
  siRNA target sequence for GNE (NM_005476.3,792-810).
gaccactgacattaagcat

SEQ ID NO: 84167 - DNA, 19 bp, Homo sapiens
  siRNA target sequence for GNE (NM_005476.3,837-855).
ggatgcacttatctcattt

SEQ ID NO: 84168 - DNA, 19 bp, Homo sapiens
  siRNA target sequence for GNE (NM_005476.3,838-856).
gatgcacttatctcattta

SEQ ID NO: 84169 - DNA, 19 bp, Homo sapiens
  siRNA target sequence for GNE (NM_005476.3,841-859).
gcacttatctcatttaaca

SEQ ID NO: 84170 - DNA, 19 bp, Homo sapiens
  siRNA target sequence for GNE (NM_005476.3,948-966).
caactttcgtgcagttaaa

SEQ ID NO: 84171 - DNA, 19 bp, Homo sapiens
  siRNA target sequence for GNE (NM_005476.3,970-988).
gtcccatttgaccagttta

SEQ ID NO: 84172 - DNA, 19 bp, Homo sapiens
  siRNA target sequence for GNE (NM_005476.3,972-990).
cccatttgaccagtttata

SEQ ID NO: 84173 - DNA, 19 bp, Homo sapiens
  siRNA target sequence for GNE (NM_005476.3,1002-1020).
ccatgctggctgtatgatt

SEQ ID NO: 84174 - DNA, 19 bp, Homo sapiens
  siRNA target sequence for GNE (NM_005476.3,1077-1095).
cctgggaacacgtcagatt

SEQ ID NO: 84175 - DNA, 19 bp, Homo sapiens
  siRNA target sequence for GNE (NM_005476.3,1081-1099).
ggaacacgtcagattggaa

SEQ ID NO: 84176 - DNA, 19 bp, Homo sapiens
  siRNA target sequence for GNE (NM_005476.3,1087-1105).
cgtcagattggaagagaaa

SEQ ID NO: 84177 - DNA, 19 bp, Homo sapiens
  siRNA target sequence for GNE (NM_005476.3,1106-1124).
caggggagaatgttcttca

SEQ ID NO: 84178 - DNA, 19 bp, Homo sapiens
  siRNA target sequence for GNE (NM_005476.3,1167-1185).
gcaccttcagtttggtaaa

SEQ ID NO: 84179 - DNA, 19 bp, Homo sapiens
  siRNA target sequence for GNE (NM_005476.3,1186-1204).
cagtacccttgttcaaaga

SEQ ID NO: 84180 - DNA, 19 bp, Homo sapiens
  siRNA target sequence for GNE (NM_005476.3,1188-1206).
gtacccttgttcaaagata

SEQ ID NO: 84181 - DNA, 19 bp, Homo sapiens
  siRNA target sequence for GNE (NM_005476.3,1242-1260).
gtttctcaaatctatcgat

SEQ ID NO: 84182 - DNA, 19 bp, Homo sapiens
  siRNA target sequence for GNE (NM_005476.3,1297-1315).
cctgtgaaggagaatatct

SEQ ID NO: 84183 - DNA, 19 bp, Homo sapiens
  siRNA target sequence for GNE (NM_005476.3,1306-1324).
gagaatatctctcaagata

SEQ ID NO: 84184 - DNA, 19 bp, Homo sapiens
  siRNA target sequence for GNE (NM_005476.3,1376-1394).
cgaacctccgagttgcaat

SEQ ID NO: 84185 - DNA, 19 bp, Homo sapiens
  siRNA target sequence for GNE (NM_005476.3,1377-1395).
gaacctccgagttgcaata

SEQ ID NO: 84186 - DNA, 19 bp, Homo sapiens
  siRNA target sequence for GNE (NM_005476.3,1381-1399).
ctccgagttgcaatagtca

SEQ ID NO: 84187 - DNA, 19 bp, Homo sapiens
  siRNA target sequence for GNE (NM_005476.3,1398-1416).
cagcatgaagggtgaaata

SEQ ID NO: 84188 - DNA, 19 bp, Homo sapiens
  siRNA target sequence for GNE (NM_005476.3,1432-1450).
cagttcaatcctaaaacct

SEQ ID NO: 84189 - DNA, 19 bp, Homo sapiens
  siRNA target sequence for GNE (NM_005476.3,1434-1452).
gttcaatcctaaaacctat

SEQ ID NO: 84190 - DNA, 19 bp, Homo sapiens
  siRNA target sequence for GNE (NM_005476.3,1449-1467).
ctatgaagagaggattaat

SEQ ID NO: 84191 - DNA, 19 bp, Homo sapiens
  siRNA target sequence for GNE (NM_005476.3,1545-1563).
cacaggtggccgtgtaaat

SEQ ID NO: 84192 - DNA, 19 bp, Homo sapiens
  siRNA target sequence for GNE (NM_005476.3,1582-1600).
ctgcattcaaccaaactga

SEQ ID NO: 84193 - DNA, 19 bp, Homo sapiens
  siRNA target sequence for GNE (NM_005476.3,1688-1706).
ctgccctggcggaaaggaa

SEQ ID NO: 84194 - DNA, 19 bp, Homo sapiens
  siRNA target sequence for GNE (NM_005476.3,1690-1708).
gccctggcggaaaggaaat

SEQ ID NO: 84195 - DNA, 19 bp, Homo sapiens
  siRNA target sequence for GNE (NM_005476.3,1691-1709).
ccctggcggaaaggaaatt

SEQ ID NO: 84196 - DNA, 19 bp, Homo sapiens
  siRNA target sequence for GNE (NM_005476.3,1692-1710).
cctggcggaaaggaaattt

SEQ ID NO: 84197 - DNA, 19 bp, Homo sapiens
  siRNA target sequence for GNE (NM_005476.3,1703-1721).
ggaaatttggccaaggaaa

SEQ ID NO: 84198 - DNA, 19 bp, Homo sapiens
  siRNA target sequence for GNE (NM_005476.3,1722-1740).
gggactggaaaactttgtt

SEQ ID NO: 84199 - DNA, 19 bp, Homo sapiens
  siRNA target sequence for GNE (NM_005476.3,1723-1741).
ggactggaaaactttgtta

SEQ ID NO: 84200 - DNA, 19 bp, Homo sapiens
  siRNA target sequence for GNE (NM_005476.3,1734-1752).
ctttgttacacttatcaca

SEQ ID NO: 84201 - DNA, 19 bp, Homo sapiens
  siRNA target sequence for GNE (NM_005476.3,1759-1777).
ggaatcggtggtggaatta

SEQ ID NO: 84202 - DNA, 19 bp, Homo sapiens
  siRNA target sequence for GNE (NM_005476.3,1764-1782).
cggtggtggaattatccat

SEQ ID NO: 84203 - DNA, 19 bp, Homo sapiens
  siRNA target sequence for GNE (NM_005476.3,2007-2025).
catccaagctgcgaaactt

SEQ ID NO: 84204 - DNA, 19 bp, Homo sapiens
  siRNA target sequence for GNE (NM_005476.3,2134-2152).
gtcctggccagtcactata

SEQ ID NO: 84205 - DNA, 19 bp, Homo sapiens
  siRNA target sequence for GNE (NM_005476.3,2144-2162).
gtcactatatccacattgt

SEQ ID NO: 84206 - DNA, 19 bp, Homo sapiens
  siRNA target sequence for GNE (NM_005476.3,2146-2164).
cactatatccacattgtca

SEQ ID NO: 84207 - DNA, 19 bp, Homo sapiens
  siRNA target sequence for GNE (NM_005476.3,2214-2232).
ggtggtttcggatttggtt

SEQ ID NO: 84208 - DNA, 19 bp, Homo sapiens
  siRNA target sequence for GPRK2L (NM_005307.1,141-159).
gcgcgtcaagaaaaggatt

SEQ ID NO: 84209 - DNA, 19 bp, Homo sapiens
  siRNA target sequence for GPRK2L (NM_005307.1,142-160).
cgcgtcaagaaaaggatta

SEQ ID NO: 84210 - DNA, 19 bp, Homo sapiens
  siRNA target sequence for GPRK2L (NM_005307.1,147-165).
caagaaaaggattatagca

SEQ ID NO: 84211 - DNA, 19 bp, Homo sapiens
  siRNA target sequence for GPRK2L (NM_005307.1,155-173).
ggattatagcagtctttgt

SEQ ID NO: 84212 - DNA, 19 bp, Homo sapiens
  siRNA target sequence for GPRK2L (NM_005307.1,205-223).
ggcagttctgtgataccaa

SEQ ID NO: 84213 - DNA, 19 bp, Homo sapiens
  siRNA target sequence for GPRK2L (NM_005307.1,216-234).
gataccaaacccactctaa

SEQ ID NO: 84214 - DNA, 19 bp, Homo sapiens
  siRNA target sequence for GPRK2L (NM_005307.1,231-249).
ctaaagaggcacattgaat

SEQ ID NO: 84215 - DNA, 19 bp, Homo sapiens
  siRNA target sequence for GPRK2L (NM_005307.1,285-303).
gatgaggaccgaagtgatt

SEQ ID NO: 84216 - DNA, 19 bp, Homo sapiens
  siRNA target sequence for GPRK2L (NM_005307.1,298-316).
gtgattgtggactgtcaat

SEQ ID NO: 84217 - DNA, 19 bp, Homo sapiens
  siRNA target sequence for GPRK2L (NM_005307.1,325-343).
gattcttcaatgataagtt

SEQ ID NO: 84218 - DNA, 19 bp, Homo sapiens
  siRNA target sequence for GPRK2L (NM_005307.1,447-465).
gttgcccataactacctaa

SEQ ID NO: 84219 - DNA, 19 bp, Homo sapiens
  siRNA target sequence for GPRK2L (NM_005307.1,468-486).
ggggaaccatttgaagaat

SEQ ID NO: 84220 - DNA, 19 bp, Homo sapiens
  siRNA target sequence for GPRK2L (NM_005307.1,534-552).
gaaaggcaacccgtaacaa

SEQ ID NO: 84221 - DNA, 19 bp, Homo sapiens
  siRNA target sequence for GPRK2L (NM_005307.1,538-556).
ggcaacccgtaacaaagaa

SEQ ID NO: 84222 - DNA, 19 bp, Homo sapiens
  siRNA target sequence for GPRK2L (NM_005307.1,540-558).
caacccgtaacaaagaaca

SEQ ID NO: 84223 - DNA, 19 bp, Homo sapiens
  siRNA target sequence for GPRK2L (NM_005307.1,544-562).
ccgtaacaaagaacacatt

SEQ ID NO: 84224 - DNA, 19 bp, Homo sapiens
  siRNA target sequence for GPRK2L (NM_005307.1,545-563).
cgtaacaaagaacacattt

SEQ ID NO: 84225 - DNA, 19 bp, Homo sapiens
  siRNA target sequence for GPRK2L (NM_005307.1,642-660).
gcctgcaaaaagctacaaa

SEQ ID NO: 84226 - DNA, 19 bp, Homo sapiens
  siRNA target sequence for GPRK2L (NM_005307.1,643-661).
cctgcaaaaagctacaaaa

SEQ ID NO: 84227 - DNA, 19 bp, Homo sapiens
  siRNA target sequence for GPRK2L (NM_005307.1,685-703).
gtgaagctatggctctaaa

SEQ ID NO: 84228 - DNA, 19 bp, Homo sapiens
  siRNA target sequence for GPRK2L (NM_005307.1,720-738).
gagaaagtgcaaagtagat

SEQ ID NO: 84229 - DNA, 19 bp, Homo sapiens
  siRNA target sequence for GPRK2L (NM_005307.1,729-747).
caaagtagattcgtagtta

SEQ ID NO: 84230 - DNA, 19 bp, Homo sapiens
  siRNA target sequence for GPRK2L (NM_005307.1,748-766).
gtttagcctacgcttatga

SEQ ID NO: 84231 - DNA, 19 bp, Homo sapiens
  siRNA target sequence for GPRK2L (NM_005307.1,755-773).
ctacgcttatgaaaccaaa

SEQ ID NO: 84232 - DNA, 19 bp, Homo sapiens
  siRNA target sequence for GPRK2L (NM_005307.1,758-776).
cgcttatgaaaccaaagat

SEQ ID NO: 84233 - DNA, 19 bp, Homo sapiens
  siRNA target sequence for GPRK2L (NM_005307.1,839-857).
gggcaatcccggctttgat

SEQ ID NO: 84234 - DNA, 19 bp, Homo sapiens
  siRNA target sequence for GPRK2L (NM_005307.1,841-859).
gcaatcccggctttgatga

SEQ ID NO: 84235 - DNA, 19 bp, Homo sapiens
  siRNA target sequence for GPRK2L (NM_005307.1,858-876).
gagcagagagccgttttct

SEQ ID NO: 84236 - DNA, 19 bp, Homo sapiens
  siRNA target sequence for GPRK2L (NM_005307.1,1025-1043).
gagggttcgaggaagagtt

SEQ ID NO: 84237 - DNA, 19 bp, Homo sapiens
  siRNA target sequence for GPRK2L (NM_005307.1,1061-1079).
ggcacctgaagttgtcaat

SEQ ID NO: 84238 - DNA, 19 bp, Homo sapiens
  siRNA target sequence for GPRK2L (NM_005307.1,1062-1080).
gcacctgaagttgtcaata

SEQ ID NO: 84239 - DNA, 19 bp, Homo sapiens
  siRNA target sequence for GPRK2L (NM_005307.1,1114-1132).
gacttggctgtctgatcta

SEQ ID NO: 84240 - DNA, 19 bp, Homo sapiens
  siRNA target sequence for GPRK2L (NM_005307.1,1145-1163).
gggacattctccattcaaa

SEQ ID NO: 84241 - DNA, 19 bp, Homo sapiens
  siRNA target sequence for GPRK2L (NM_005307.1,1187-1205).
ggaggaggtcgatcaaaga

SEQ ID NO: 84242 - DNA, 19 bp, Homo sapiens
  siRNA target sequence for GPRK2L (NM_005307.1,1191-1209).
gaggtcgatcaaagaatca

SEQ ID NO: 84243 - DNA, 19 bp, Homo sapiens
  siRNA target sequence for GPRK2L (NM_005307.1,1194-1212).
gtcgatcaaagaatcaaga

SEQ ID NO: 84244 - DNA, 19 bp, Homo sapiens
  siRNA target sequence for GPRK2L (NM_005307.1,1196-1214).
cgatcaaagaatcaagaat

SEQ ID NO: 84245 - DNA, 19 bp, Homo sapiens
  siRNA target sequence for GPRK2L (NM_005307.1,1200-1218).
caaagaatcaagaatgata

SEQ ID NO: 84246 - DNA, 19 bp, Homo sapiens
  siRNA target sequence for GPRK2L (NM_005307.1,1224-1242).
gagtattctgagaagtttt

SEQ ID NO: 84247 - DNA, 19 bp, Homo sapiens
  siRNA target sequence for GPRK2L (NM_005307.1,1243-1261).
cagaggatgccaaatctat

SEQ ID NO: 84248 - DNA, 19 bp, Homo sapiens
  siRNA target sequence for GPRK2L (NM_005307.1,1245-1263).
gaggatgccaaatctatct

SEQ ID NO: 84249 - DNA, 19 bp, Homo sapiens
  siRNA target sequence for GPRK2L (NM_005307.1,1258-1276).
ctatctgcaggatgttact

SEQ ID NO: 84250 - DNA, 19 bp, Homo sapiens
  siRNA target sequence for GPRK2L (NM_005307.1,1344-1362).
gtgttcaaggacatcaact

SEQ ID NO: 84251 - DNA, 19 bp, Homo sapiens
  siRNA target sequence for GPRK2L (NM_005307.1,1407-1425).
gatcctcatgccgtttact

SEQ ID NO: 84252 - DNA, 19 bp, Homo sapiens
  siRNA target sequence for GPRK2L (NM_005307.1,1410-1428).
cctcatgccgtttactgta

SEQ ID NO: 84253 - DNA, 19 bp, Homo sapiens
  siRNA target sequence for GPRK2L (NM_005307.1,1411-1429).
ctcatgccgtttactgtaa

SEQ ID NO: 84254 - DNA, 19 bp, Homo sapiens
  siRNA target sequence for GPRK2L (NM_005307.1,1475-1493).
cctggacaccgcagatgaa

SEQ ID NO: 84255 - DNA, 19 bp, Homo sapiens
  siRNA target sequence for GPRK2L (NM_005307.1,1483-1501).
ccgcagatgaagacttcta

SEQ ID NO: 84256 - DNA, 19 bp, Homo sapiens
  siRNA target sequence for GPRK2L (NM_182982.1,327-345).
ggtcgtagtaaaaaatgga

SEQ ID NO: 84257 - DNA, 19 bp, Homo sapiens
  siRNA target sequence for GPRK2L (NM_182982.1,377-395).
gtgcagtgagcttagacat

SEQ ID NO: 84258 - DNA, 19 bp, Homo sapiens
  siRNA target sequence for GPRK2L (NM_182982.1,382-400).
gtgagcttagacattccat

SEQ ID NO: 84259 - DNA, 19 bp, Homo sapiens
  siRNA target sequence for GPRK2L (NM_182982.1,1852-1870).
ctttgccattagatctaga

SEQ ID NO: 84260 - DNA, 19 bp, Homo sapiens
  siRNA target sequence for GPRK2L (NM_182982.1,1858-1876).
cattagatctagacaagaa

SEQ ID NO: 84261 - DNA, 19 bp, Homo sapiens
  siRNA target sequence for GPRK5 (NM_005308.1,319-337).
cctgaagttccctcacatt

SEQ ID NO: 84262 - DNA, 19 bp, Homo sapiens
  siRNA target sequence for GPRK5 (NM_005308.1,360-378).
ggaccatagacagagatta

SEQ ID NO: 84263 - DNA, 19 bp, Homo sapiens
  siRNA target sequence for GPRK5 (NM_005308.1,444-462).
ctgggctggagtgttacat

SEQ ID NO: 84264 - DNA, 19 bp, Homo sapiens
  siRNA target sequence for GPRK5 (NM_005308.1,447-465).
ggctggagtgttacattca

SEQ ID NO: 84265 - DNA, 19 bp, Homo sapiens
  siRNA target sequence for GPRK5 (NM_005308.1,472-490).
ggactccgtggcagaatat

SEQ ID NO: 84266 - DNA, 19 bp, Homo sapiens
  siRNA target sequence for GPRK5 (NM_005308.1,833-851).
gttcgggccacgggtaaaa

SEQ ID NO: 84267 - DNA, 19 bp, Homo sapiens
  siRNA target sequence for GPRK5 (NM_005308.1,937-955).
gaaggtcaacagtcagttt

SEQ ID NO: 84268 - DNA, 19 bp, Homo sapiens
  siRNA target sequence for GPRK5 (NM_005308.1,1102-1120).
gatcctctgcggcttagaa

SEQ ID NO: 84269 - DNA, 19 bp, Homo sapiens
  siRNA target sequence for GPRK5 (NM_005308.1,1140-1158).
ccgtctaccgagatctgaa

SEQ ID NO: 84270 - DNA, 19 bp, Homo sapiens
  siRNA target sequence for GPRK5 (NM_005308.1,1168-1186).
catcctgttagatgattat

SEQ ID NO: 84271 - DNA, 19 bp, Homo sapiens
  siRNA target sequence for GPRK5 (NM_005308.1,1178-1196).
gatgattatggccacatta

SEQ ID NO: 84272 - DNA, 19 bp, Homo sapiens
  siRNA target sequence for GPRK5 (NM_005308.1,1439-1457).
gtgtactcccacaagttct

SEQ ID NO: 84273 - DNA, 19 bp, Homo sapiens
  siRNA target sequence for GPRK5 (NM_005308.1,1573-1591).
gaacttcaagcgcttagaa

SEQ ID NO: 84274 - DNA, 19 bp, Homo sapiens
  siRNA target sequence for GPRK5 (NM_005308.1,1674-1692).
ctgtgaagggcgtcaatct

SEQ ID NO: 84275 - DNA, 19 bp, Homo sapiens
  siRNA target sequence for GPRK5 (NM_005308.1,1749-1767).
catggcaaaacgagatgat

SEQ ID NO: 84276 - DNA, 19 bp, Homo sapiens
  siRNA target sequence for GPRK5 (NM_005308.1,1792-1810).
gaacgtgtttggacctaat

SEQ ID NO: 84277 - DNA, 19 bp, Homo sapiens
  siRNA target sequence for GPRK5 (NM_005308.1,1795-1813).
cgtgtttggacctaatggt

SEQ ID NO: 84278 - DNA, 19 bp, Homo sapiens
  siRNA target sequence for GPRK5 (NM_005308.1,1796-1814).
gtgtttggacctaatggta

SEQ ID NO: 84279 - DNA, 19 bp, Homo sapiens
  siRNA target sequence for GPRK5 (NM_005308.1,1820-1838).
ccgccagatctgaacagaa

SEQ ID NO: 84280 - DNA, 19 bp, Homo sapiens
  siRNA target sequence for GPRK5 (NM_005308.1,1889-1907).
cggcagcatcagaacaatt

SEQ ID NO: 84281 - DNA, 19 bp, Homo sapiens
  siRNA target sequence for GPRK5 (NM_005308.1,1921-1939).
cagctccaagaccagtttt

SEQ ID NO: 84282 - DNA, 19 bp, Homo sapiens
  siRNA target sequence for GPRK5 (NM_005308.1,1926-1944).
ccaagaccagttttaacca

SEQ ID NO: 84283 - DNA, 19 bp, Homo sapiens
  siRNA target sequence for GPRK6 (NM_002082.1,85-103).
cgaacacggtgctactcaa

SEQ ID NO: 84284 - DNA, 19 bp, Homo sapiens
  siRNA target sequence for GPRK6 (NM_002082.1,203-221).
cagcctcgagcgtgactat

SEQ ID NO: 84285 - DNA, 19 bp, Homo sapiens
  siRNA target sequence for GPRK6 (NM_002082.1,205-223).
gcctcgagcgtgactatca

SEQ ID NO: 84286 - DNA, 19 bp, Homo sapiens
  siRNA target sequence for GPRK6 (NM_002082.1,207-225).
ctcgagcgtgactatcaca

SEQ ID NO: 84287 - DNA, 19 bp, Homo sapiens
  siRNA target sequence for GPRK6 (NM_002082.1,469-487).
gtccctgcaaagacctttt

SEQ ID NO: 84288 - DNA, 19 bp, Homo sapiens
  siRNA target sequence for GPRK6 (NM_002082.1,1392-1410).
gagcaccccctctttaaga

SEQ ID NO: 84289 - DNA, 19 bp, Homo sapiens
  siRNA target sequence for GPRK6 (NM_002082.1,1462-1480).
ctgacccccaggccattta

SEQ ID NO: 84290 - DNA, 19 bp, Homo sapiens
  siRNA target sequence for GPRK6 (NM_002082.1,1550-1568).
ggacttctaccagaagttt

SEQ ID NO: 84291 - DNA, 19 bp, Homo sapiens
  siRNA target sequence for GPRK7 (NM_139209.1,562-580).
gagcagccctttaaggatt

SEQ ID NO: 84292 - DNA, 19 bp, Homo sapiens
  siRNA target sequence for GPRK7 (NM_139209.1,590-608).
gcgccttctacgacaagtt

SEQ ID NO: 84293 - DNA, 19 bp, Homo sapiens
  siRNA target sequence for GPRK7 (NM_139209.1,593-611).
ccttctacgacaagtttct

SEQ ID NO: 84294 - DNA, 19 bp, Homo sapiens
  siRNA target sequence for GPRK7 (NM_139209.1,640-658).
gtgtcagacaagtacttca

SEQ ID NO: 84295 - DNA, 19 bp, Homo sapiens
  siRNA target sequence for GPRK7 (NM_139209.1,705-723).
cgtccaggtgaaaaacact

SEQ ID NO: 84296 - DNA, 19 bp, Homo sapiens
  siRNA target sequence for GPRK7 (NM_139209.1,951-969).
catgagccgggtgatcttt

SEQ ID NO: 84297 - DNA, 19 bp, Homo sapiens
  siRNA target sequence for GPRK7 (NM_139209.1,1063-1081).
ctcggcaactgcaggttat

SEQ ID NO: 84298 - DNA, 19 bp, Homo sapiens
  siRNA target sequence for GPRK7 (NM_139209.1,1065-1083).
cggcaactgcaggttatct

SEQ ID NO: 84299 - DNA, 19 bp, Homo sapiens
  siRNA target sequence for GPRK7 (NM_139209.1,1174-1192).
gaaaaggtaagttattcct

SEQ ID NO: 84300 - DNA, 19 bp, Homo sapiens
  siRNA target sequence for GPRK7 (NM_139209.1,1211-1229).
ccatgggatgcagcattta

SEQ ID NO: 84301 - DNA, 19 bp, Homo sapiens
  siRNA target sequence for GPRK7 (NM_139209.1,1215-1233).
gggatgcagcatttatgaa

SEQ ID NO: 84302 - DNA, 19 bp, Homo sapiens
  siRNA target sequence for GPRK7 (NM_139209.1,1244-1262).
gacgaacaccattcaaaga

SEQ ID NO: 84303 - DNA, 19 bp, Homo sapiens
  siRNA target sequence for GPRK7 (NM_139209.1,1306-1324).
ctgcaagacgaggtcaaat

SEQ ID NO: 84304 - DNA, 19 bp, Homo sapiens
  siRNA target sequence for GPRK7 (NM_139209.1,1318-1336).
gtcaaattccagcatgata

SEQ ID NO: 84305 - DNA, 19 bp, Homo sapiens
  siRNA target sequence for GPRK7 (NM_139209.1,1396-1414).
cgcttaggaagcagagaaa

SEQ ID NO: 84306 - DNA, 19 bp, Homo sapiens
  siRNA target sequence for GPRK7 (NM_139209.1,1435-1453).
catcatttctttaaaacga

SEQ ID NO: 84307 - DNA, 19 bp, Homo sapiens
  siRNA target sequence for GPRK7 (NM_139209.1,1585-1603).
gataagcagttcttcaaaa

SEQ ID NO: 84308 - DNA, 19 bp, Homo sapiens
  siRNA target sequence for GPRK7 (NM_139209.1,1631-1649).
catggcaggaagaaattat

SEQ ID NO: 84309 - DNA, 19 bp, Homo sapiens
  siRNA target sequence for GPRK7 (NM_139209.1,1634-1652).
ggcaggaagaaattataga

SEQ ID NO: 84310 - DNA, 19 bp, Homo sapiens
  siRNA target sequence for GPRK7 (NM_139209.1,1718-1736).
ccaagtctggcgtgtgttt

SEQ ID NO: 84311 - DNA, 19 bp, Homo sapiens
  siRNA target sequence for GPRK7 (NM_139209.1,1722-1740).
gtctggcgtgtgtttgtta

SEQ ID NO: 84312 - DNA, 19 bp, Homo sapiens
  siRNA target sequence for GPRK7 (NM_139209.1,1724-1742).
ctggcgtgtgtttgttatt

SEQ ID NO: 84313 - DNA, 19 bp, Homo sapiens
  siRNA target sequence for GSG2 (NM_031965.1,59-77).
ccggcttttccgcacatat

SEQ ID NO: 84314 - DNA, 19 bp, Homo sapiens
  siRNA target sequence for GSG2 (NM_031965.1,147-165).
cggaggcgtttcttcaaca

SEQ ID NO: 84315 - DNA, 19 bp, Homo sapiens
  siRNA target sequence for GSG2 (NM_031965.1,807-825).
cgggcagatgggaagaata

SEQ ID NO: 84316 - DNA, 19 bp, Homo sapiens
  siRNA target sequence for GSG2 (NM_031965.1,1016-1034).
caggctggagagaactaga

SEQ ID NO: 84317 - DNA, 19 bp, Homo sapiens
  siRNA target sequence for GSG2 (NM_031965.1,1082-1100).
ccattcccaccgctttaaa

SEQ ID NO: 84318 - DNA, 19 bp, Homo sapiens
  siRNA target sequence for GSG2 (NM_031965.1,1083-1101).
cattcccaccgctttaaaa

SEQ ID NO: 84319 - DNA, 19 bp, Homo sapiens
  siRNA target sequence for GSG2 (NM_031965.1,1140-1158).
gacctgactcctttacaga

SEQ ID NO: 84320 - DNA, 19 bp, Homo sapiens
  siRNA target sequence for GSG2 (NM_031965.1,1233-1251).
gtctgcagcatctatacca

SEQ ID NO: 84321 - DNA, 19 bp, Homo sapiens
  siRNA target sequence for GSG2 (NM_031965.1,1269-1287).
ggatccctcctatcagaat

SEQ ID NO: 84322 - DNA, 19 bp, Homo sapiens
  siRNA target sequence for GSG2 (NM_031965.1,1275-1293).
ctcctatcagaatgttcaa

SEQ ID NO: 84323 - DNA, 19 bp, Homo sapiens
  siRNA target sequence for GSG2 (NM_031965.1,1291-1309).
caaaccggcctgtcatgaa

SEQ ID NO: 84324 - DNA, 19 bp, Homo sapiens
  siRNA target sequence for GSG2 (NM_031965.1,1299-1317).
cctgtcatgaacagaacaa

SEQ ID NO: 84325 - DNA, 19 bp, Homo sapiens
  siRNA target sequence for GSG2 (NM_031965.1,1343-1361).
ctcctctatgtatttgcta

SEQ ID NO: 84326 - DNA, 19 bp, Homo sapiens
  siRNA target sequence for GSG2 (NM_031965.1,1358-1376).
gctaagccccttaaacact

SEQ ID NO: 84327 - DNA, 19 bp, Homo sapiens
  siRNA target sequence for GSG2 (NM_031965.1,1364-1382).
ccccttaaacactctaagt

SEQ ID NO: 84328 - DNA, 19 bp, Homo sapiens
  siRNA target sequence for GSG2 (NM_031965.1,1365-1383).
cccttaaacactctaagta

SEQ ID NO: 84329 - DNA, 19 bp, Homo sapiens
  siRNA target sequence for GSG2 (NM_031965.1,1366-1384).
ccttaaacactctaagtat

SEQ ID NO: 84330 - DNA, 19 bp, Homo sapiens
  siRNA target sequence for GSG2 (NM_031965.1,1507-1525).
gggtgtttggcgaagtgtt

SEQ ID NO: 84331 - DNA, 19 bp, Homo sapiens
  siRNA target sequence for GSG2 (NM_031965.1,1515-1533).
ggcgaagtgtttcaaacaa

SEQ ID NO: 84332 - DNA, 19 bp, Homo sapiens
  siRNA target sequence for GSG2 (NM_031965.1,1516-1534).
gcgaagtgtttcaaacaat

SEQ ID NO: 84333 - DNA, 19 bp, Homo sapiens
  siRNA target sequence for GSG2 (NM_031965.1,1544-1562).
cacacccgtagccataaaa

SEQ ID NO: 84334 - DNA, 19 bp, Homo sapiens
  siRNA target sequence for GSG2 (NM_031965.1,1548-1566).
cccgtagccataaaaatca

SEQ ID NO: 84335 - DNA, 19 bp, Homo sapiens
  siRNA target sequence for GSG2 (NM_031965.1,1549-1567).
ccgtagccataaaaatcat

SEQ ID NO: 84336 - DNA, 19 bp, Homo sapiens
  siRNA target sequence for GSG2 (NM_031965.1,1570-1588).
ctattgaaggaccagattt

SEQ ID NO: 84337 - DNA, 19 bp, Homo sapiens
  siRNA target sequence for GSG2 (NM_031965.1,1581-1599).
ccagatttagtcaatggat

SEQ ID NO: 84338 - DNA, 19 bp, Homo sapiens
  siRNA target sequence for GSG2 (NM_031965.1,1592-1610).
caatggatcccatcagaaa

SEQ ID NO: 84339 - DNA, 19 bp, Homo sapiens
  siRNA target sequence for GSG2 (NM_031965.1,1751-1769).
caaagcctgggatcactat

SEQ ID NO: 84340 - DNA, 19 bp, Homo sapiens
  siRNA target sequence for GSG2 (NM_031965.1,1757-1775).
ctgggatcactataattca

SEQ ID NO: 84341 - DNA, 19 bp, Homo sapiens
  siRNA target sequence for GSG2 (NM_031965.1,1789-1807).
caaatgaccggcctgattt

SEQ ID NO: 84342 - DNA, 19 bp, Homo sapiens
  siRNA target sequence for GSG2 (NM_031965.1,1845-1863).
gagtttggagggattgact

SEQ ID NO: 84343 - DNA, 19 bp, Homo sapiens
  siRNA target sequence for GSG2 (NM_031965.1,1847-1865).
gtttggagggattgactta

SEQ ID NO: 84344 - DNA, 19 bp, Homo sapiens
  siRNA target sequence for GSG2 (NM_031965.1,1855-1873).
ggattgacttagagcaaat

SEQ ID NO: 84345 - DNA, 19 bp, Homo sapiens
  siRNA target sequence for GSG2 (NM_031965.1,1900-1918).
ctgcaaagagcattctaca

SEQ ID NO: 84346 - DNA, 19 bp, Homo sapiens
  siRNA target sequence for GSG2 (NM_031965.1,1961-1979).
ctttgagcaccgagactta

SEQ ID NO: 84347 - DNA, 19 bp, Homo sapiens
  siRNA target sequence for GSG2 (NM_031965.1,1984-2002).
gggggaacgtgctcttaaa

SEQ ID NO: 84348 - DNA, 19 bp, Homo sapiens
  siRNA target sequence for GSG2 (NM_031965.1,1986-2004).
gggaacgtgctcttaaaga

SEQ ID NO: 84349 - DNA, 19 bp, Homo sapiens
  siRNA target sequence for GSG2 (NM_031965.1,1987-2005).
ggaacgtgctcttaaagaa

SEQ ID NO: 84350 - DNA, 19 bp, Homo sapiens
  siRNA target sequence for GSG2 (NM_031965.1,1992-2010).
gtgctcttaaagaaaacca

SEQ ID NO: 84351 - DNA, 19 bp, Homo sapiens
  siRNA target sequence for GSG2 (NM_031965.1,2069-2087).
gttgcaagtgagcatcatt

SEQ ID NO: 84352 - DNA, 19 bp, Homo sapiens
  siRNA target sequence for GSG2 (NM_031965.1,2173-2191).
gtgactaccagtttgacat

SEQ ID NO: 84353 - DNA, 19 bp, Homo sapiens
  siRNA target sequence for GSG2 (NM_031965.1,2219-2237).
caaccgctggggtgaatat

SEQ ID NO: 84354 - DNA, 19 bp, Homo sapiens
  siRNA target sequence for GSG2 (NM_031965.1,2229-2247).
ggtgaatatcacccttata

SEQ ID NO: 84355 - DNA, 19 bp, Homo sapiens
  siRNA target sequence for GSG2 (NM_031965.1,2232-2250).
gaatatcacccttatagta

SEQ ID NO: 84356 - DNA, 19 bp, Homo sapiens
  siRNA target sequence for GSG2 (NM_031965.1,2303-2321).
caagactaaatgtaacact

SEQ ID NO: 84357 - DNA, 19 bp, Homo sapiens
  siRNA target sequence for GSG2 (NM_031965.1,2327-2345).
catgaagcaaattaagaga

SEQ ID NO: 84358 - DNA, 19 bp, Homo sapiens
  siRNA target sequence for GSK3A (NM_019884.1,446-464).
cagagcgctcccaagaagt

SEQ ID NO: 84359 - DNA, 19 bp, Homo sapiens
  siRNA target sequence for GSK3A (NM_019884.1,465-483).
ggcttacacggacatcaaa

SEQ ID NO: 84360 - DNA, 19 bp, Homo sapiens
  siRNA target sequence for GSK3A (NM_019884.1,758-776).
ccatccctatcctctatgt

SEQ ID NO: 84361 - DNA, 19 bp, Homo sapiens
  siRNA target sequence for GSK3A (NM_019884.1,888-906).
cctcaagctctgcgatttt

SEQ ID NO: 84362 - DNA, 19 bp, Homo sapiens
  siRNA target sequence for GSK3A (NM_019884.1,1160-1178).
ccaactacacggagttcaa

SEQ ID NO: 84363 - DNA, 19 bp, Homo sapiens
  siRNA target sequence for GSK3A (NM_019884.1,1173-1191).
gttcaagttccctcagatt

SEQ ID NO: 84364 - DNA, 19 bp, Homo sapiens
  siRNA target sequence for GSK3A (NM_019884.1,1206-1224).
gacaaaggtgttcaaatct

SEQ ID NO: 84365 - DNA, 19 bp, Homo sapiens
  siRNA target sequence for GSK3A (NM_019884.1,1307-1325).
gtgcgcacagcttctttga

SEQ ID NO: 84366 - DNA, 19 bp, Homo sapiens
  siRNA target sequence for GSK3A (NM_019884.1,1343-1361).
gaacccagctgcctaacaa

SEQ ID NO: 84367 - DNA, 19 bp, Homo sapiens
  siRNA target sequence for GSK3A (NM_019884.1,1369-1387).
cttccccctctcttcaact

SEQ ID NO: 84368 - DNA, 19 bp, Homo sapiens
  siRNA target sequence for GSK3A (NM_019884.1,1478-1496).
ccccgtcctcacaagcttt

SEQ ID NO: 84369 - DNA, 19 bp, Homo sapiens
  siRNA target sequence for GSK3A (NM_019884.1,1479-1497).
cccgtcctcacaagcttta

SEQ ID NO: 84370 - DNA, 19 bp, Homo sapiens
  siRNA target sequence for GSK3A (NM_019884.1,1480-1498).
ccgtcctcacaagctttaa

SEQ ID NO: 84371 - DNA, 19 bp, Homo sapiens
  siRNA target sequence for GSK3A (NM_019884.1,1482-1500).
gtcctcacaagctttaact

SEQ ID NO: 84372 - DNA, 19 bp, Homo sapiens
  siRNA target sequence for GSK3A (NM_019884.1,1484-1502).
cctcacaagctttaactga

SEQ ID NO: 84373 - DNA, 19 bp, Homo sapiens
  siRNA target sequence for GSK3B (NM_002093.2,375-393).
cagacaggccacaagaagt

SEQ ID NO: 84374 - DNA, 19 bp, Homo sapiens
  siRNA target sequence for GSK3B (NM_002093.2,394-412).
cagctatacagacactaaa

SEQ ID NO: 84375 - DNA, 19 bp, Homo sapiens
  siRNA target sequence for GSK3B (NM_002093.2,396-414).
gctatacagacactaaagt

SEQ ID NO: 84376 - DNA, 19 bp, Homo sapiens
  siRNA target sequence for GSK3B (NM_002093.2,426-444).
gatcatttggtgtggtata

SEQ ID NO: 84377 - DNA, 19 bp, Homo sapiens
  siRNA target sequence for GSK3B (NM_002093.2,537-555).
gaaagctagatcactgtaa

SEQ ID NO: 84378 - DNA, 19 bp, Homo sapiens
  siRNA target sequence for GSK3B (NM_002093.2,541-559).
gctagatcactgtaacata

SEQ ID NO: 84379 - DNA, 19 bp, Homo sapiens
  siRNA target sequence for GSK3B (NM_002093.2,560-578).
gtccgattgcgttatttct

SEQ ID NO: 84380 - DNA, 19 bp, Homo sapiens
  siRNA target sequence for GSK3B (NM_002093.2,685-703).
gacgctccctgtgatttat

SEQ ID NO: 84381 - DNA, 19 bp, Homo sapiens
  siRNA target sequence for GSK3B (NM_002093.2,732-750).
gaagtttagcctatatcca

SEQ ID NO: 84382 - DNA, 19 bp, Homo sapiens
  siRNA target sequence for GSK3B (NM_002093.2,763-781).
ctgccatcgggatattaaa

SEQ ID NO: 84383 - DNA, 19 bp, Homo sapiens
  siRNA target sequence for GSK3B (NM_002093.2,793-811).
cttgttggatcctgatact

SEQ ID NO: 84384 - DNA, 19 bp, Homo sapiens
  siRNA target sequence for GSK3B (NM_002093.2,856-874).
ccgaggagaacccaatgtt

SEQ ID NO: 84385 - DNA, 19 bp, Homo sapiens
  siRNA target sequence for GSK3B (NM_002093.2,857-875).
cgaggagaacccaatgttt

SEQ ID NO: 84386 - DNA, 19 bp, Homo sapiens
  siRNA target sequence for GSK3B (NM_002093.2,866-884).
cccaatgtttcgtatatct

SEQ ID NO: 84387 - DNA, 19 bp, Homo sapiens
  siRNA target sequence for GSK3B (NM_002093.2,900-918).
gggcaccagagttgatctt

SEQ ID NO: 84388 - DNA, 19 bp, Homo sapiens
  siRNA target sequence for GSK3B (NM_002093.2,901-919).
ggcaccagagttgatcttt

SEQ ID NO: 84389 - DNA, 19 bp, Homo sapiens
  siRNA target sequence for GSK3B (NM_002093.2,927-945).
ctgattatacctctagtat

SEQ ID NO: 84390 - DNA, 19 bp, Homo sapiens
  siRNA target sequence for GSK3B (NM_002093.2,982-1000).
gttactaggacaaccaata

SEQ ID NO: 84391 - DNA, 19 bp, Homo sapiens
  siRNA target sequence for GSK3B (NM_002093.2,1225-1243).
ccgtctgctggagtataca

SEQ ID NO: 84392 - DNA, 19 bp, Homo sapiens
  siRNA target sequence for GSK3B (NM_002093.2,1268-1286).
gaagcttgtgcacattcat

SEQ ID NO: 84393 - DNA, 19 bp, Homo sapiens
  siRNA target sequence for GSK3B (NM_002093.2,1271-1289).
gcttgtgcacattcatttt

SEQ ID NO: 84394 - DNA, 19 bp, Homo sapiens
  siRNA target sequence for GSK3B (NM_002093.2,1308-1326).
caaatgtcaaactaccaaa

SEQ ID NO: 84395 - DNA, 19 bp, Homo sapiens
  siRNA target sequence for GSK3B (NM_002093.2,1340-1358).
cctgcactcttcaacttca

SEQ ID NO: 84396 - DNA, 19 bp, Homo sapiens
  siRNA target sequence for GSK3B (NM_002093.2,1362-1380).
ctcaagaactgtcaagtaa

SEQ ID NO: 84397 - DNA, 19 bp, Homo sapiens
  siRNA target sequence for GSK3B (NM_002093.2,1386-1404).
ctctggctaccatccttat

SEQ ID NO: 84398 - DNA, 19 bp, Homo sapiens
  siRNA target sequence for GSK3B (NM_002093.2,1390-1408).
ggctaccatccttattcct

SEQ ID NO: 84399 - DNA, 19 bp, Homo sapiens
  siRNA target sequence for GSK3B (NM_002093.2,1481-1499).
gaccgtggacagaccaata

SEQ ID NO: 84400 - DNA, 19 bp, Homo sapiens
  siRNA target sequence for GSS (NM_000178.2,98-116).
gagcctcttgcaggataaa

SEQ ID NO: 84401 - DNA, 19 bp, Homo sapiens
  siRNA target sequence for GSS (NM_000178.2,100-118).
gcctcttgcaggataaaca

SEQ ID NO: 84402 - DNA, 19 bp, Homo sapiens
  siRNA target sequence for GSS (NM_000178.2,374-392).
ctttaccgctcgtctcttt

SEQ ID NO: 84403 - DNA, 19 bp, Homo sapiens
  siRNA target sequence for GSS (NM_000178.2,379-397).
ccgctcgtctctttgacat

SEQ ID NO: 84404 - DNA, 19 bp, Homo sapiens
  siRNA target sequence for GSS (NM_000178.2,737-755).
ccagcgtgccatagagaat

SEQ ID NO: 84405 - DNA, 19 bp, Homo sapiens
  siRNA target sequence for GSS (NM_000178.2,782-800).
gatccgacgaacatttgaa

SEQ ID NO: 84406 - DNA, 19 bp, Homo sapiens
  siRNA target sequence for GSS (NM_000178.2,785-803).
ccgacgaacatttgaagat

SEQ ID NO: 84407 - DNA, 19 bp, Homo sapiens
  siRNA target sequence for GSS (NM_000178.2,786-804).
cgacgaacatttgaagata

SEQ ID NO: 84408 - DNA, 19 bp, Homo sapiens
  siRNA target sequence for GSS (NM_000178.2,789-807).
cgaacatttgaagatatct

SEQ ID NO: 84409 - DNA, 19 bp, Homo sapiens
  siRNA target sequence for GSS (NM_000178.2,848-866).
ggatggccaggaaattgct

SEQ ID NO: 84410 - DNA, 19 bp, Homo sapiens
  siRNA target sequence for GSS (NM_000178.2,1153-1171).
ctagccggtttgtgctaaa

SEQ ID NO: 84411 - DNA, 19 bp, Homo sapiens
  siRNA target sequence for GSS (NM_000178.2,1332-1350).
cgagtggtccagtgcattt

SEQ ID NO: 84412 - DNA, 19 bp, Homo sapiens
  siRNA target sequence for GSS (NM_000178.2,1360-1378).
gcatctttggggtctatgt

SEQ ID NO: 84413 - DNA, 19 bp, Homo sapiens
  siRNA target sequence for GSS (NM_000178.2,1409-1427).
gcacgtggggcatctactt

SEQ ID NO: 84414 - DNA, 19 bp, Homo sapiens
  siRNA target sequence for GSS (NM_000178.2,1418-1436).
gcatctacttcgaaccaaa

SEQ ID NO: 84415 - DNA, 19 bp, Homo sapiens
  siRNA target sequence for GUCY2C (NM_004963.1,99-117).
cgggtggctgtcctttagt

SEQ ID NO: 84416 - DNA, 19 bp, Homo sapiens
  siRNA target sequence for GUCY2C (NM_004963.1,278-296).
ctgtgaacgctactttcat

SEQ ID NO: 84417 - DNA, 19 bp, Homo sapiens
  siRNA target sequence for GUCY2C (NM_004963.1,280-298).
gtgaacgctactttcatgt

SEQ ID NO: 84418 - DNA, 19 bp, Homo sapiens
  siRNA target sequence for GUCY2C (NM_004963.1,282-300).
gaacgctactttcatgtat

SEQ ID NO: 84419 - DNA, 19 bp, Homo sapiens
  siRNA target sequence for GUCY2C (NM_004963.1,297-315).
gtattcggatggtctgatt

SEQ ID NO: 84420 - DNA, 19 bp, Homo sapiens
  siRNA target sequence for GUCY2C (NM_004963.1,302-320).
cggatggtctgattcataa

SEQ ID NO: 84421 - DNA, 19 bp, Homo sapiens
  siRNA target sequence for GUCY2C (NM_004963.1,304-322).
gatggtctgattcataact

SEQ ID NO: 84422 - DNA, 19 bp, Homo sapiens
  siRNA target sequence for GUCY2C (NM_004963.1,355-373).
ctcgacctactcaggaaaa

SEQ ID NO: 84423 - DNA, 19 bp, Homo sapiens
  siRNA target sequence for GUCY2C (NM_004963.1,403-421).
ctcatagggccctcatgta

SEQ ID NO: 84424 - DNA, 19 bp, Homo sapiens
  siRNA target sequence for GUCY2C (NM_004963.1,405-423).
catagggccctcatgtaca

SEQ ID NO: 84425 - DNA, 19 bp, Homo sapiens
  siRNA target sequence for GUCY2C (NM_004963.1,409-427).
gggccctcatgtacatact

SEQ ID NO: 84426 - DNA, 19 bp, Homo sapiens
  siRNA target sequence for GUCY2C (NM_004963.1,490-508).
ggattgtcatgtgactata

SEQ ID NO: 84427 - DNA, 19 bp, Homo sapiens
  siRNA target sequence for GUCY2C (NM_004963.1,579-597).
caacgatctgcccttcaaa

SEQ ID NO: 84428 - DNA, 19 bp, Homo sapiens
  siRNA target sequence for GUCY2C (NM_004963.1,582-600).
cgatctgcccttcaaaact

SEQ ID NO: 84429 - DNA, 19 bp, Homo sapiens
  siRNA target sequence for GUCY2C (NM_004963.1,583-601).
gatctgcccttcaaaactt

SEQ ID NO: 84430 - DNA, 19 bp, Homo sapiens
  siRNA target sequence for GUCY2C (NM_004963.1,586-604).
ctgcccttcaaaacttatt

SEQ ID NO: 84431 - DNA, 19 bp, Homo sapiens
  siRNA target sequence for GUCY2C (NM_004963.1,606-624).
ctggagcacttcgtatgtt

SEQ ID NO: 84432 - DNA, 19 bp, Homo sapiens
  siRNA target sequence for GUCY2C (NM_004963.1,611-629).
gcacttcgtatgtttacaa

SEQ ID NO: 84433 - DNA, 19 bp, Homo sapiens
  siRNA target sequence for GUCY2C (NM_004963.1,627-645).
caagaatggtacagaaact

SEQ ID NO: 84434 - DNA, 19 bp, Homo sapiens
  siRNA target sequence for GUCY2C (NM_004963.1,649-667).
gactgtttctggtacctta

SEQ ID NO: 84435 - DNA, 19 bp, Homo sapiens
  siRNA target sequence for GUCY2C (NM_004963.1,651-669).
ctgtttctggtaccttaat

SEQ ID NO: 84436 - DNA, 19 bp, Homo sapiens
  siRNA target sequence for GUCY2C (NM_004963.1,675-693).
ggaggctagcgtttcctat

SEQ ID NO: 84437 - DNA, 19 bp, Homo sapiens
  siRNA target sequence for GUCY2C (NM_004963.1,676-694).
gaggctagcgtttcctatt

SEQ ID NO: 84438 - DNA, 19 bp, Homo sapiens
  siRNA target sequence for GUCY2C (NM_004963.1,698-716).
cccacgaactcggctttaa

SEQ ID NO: 84439 - DNA, 19 bp, Homo sapiens
  siRNA target sequence for GUCY2C (NM_004963.1,840-858).
ggctgaagacattgtcatt

SEQ ID NO: 84440 - DNA, 19 bp, Homo sapiens
  siRNA target sequence for GUCY2C (NM_004963.1,907-925).
gcccctgactatatgaaaa

SEQ ID NO: 84441 - DNA, 19 bp, Homo sapiens
  siRNA target sequence for GUCY2C (NM_004963.1,1224-1242).
ggttcttttgacctatgat

SEQ ID NO: 84442 - DNA, 19 bp, Homo sapiens
  siRNA target sequence for GUCY2C (NM_004963.1,1235-1253).
cctatgatacccacgtaaa

SEQ ID NO: 84443 - DNA, 19 bp, Homo sapiens
  siRNA target sequence for GUCY2C (NM_004963.1,1236-1254).
ctatgatacccacgtaaat

SEQ ID NO: 84444 - DNA, 19 bp, Homo sapiens
  siRNA target sequence for GUCY2C (NM_004963.1,1240-1258).
gatacccacgtaaataaga

SEQ ID NO: 84445 - DNA, 19 bp, Homo sapiens
  siRNA target sequence for GUCY2C (NM_004963.1,1287-1305).
cacttggaagaactctaaa

SEQ ID NO: 84446 - DNA, 19 bp, Homo sapiens
  siRNA target sequence for GUCY2C (NM_004963.1,1289-1307).
cttggaagaactctaaact

SEQ ID NO: 84447 - DNA, 19 bp, Homo sapiens
  siRNA target sequence for GUCY2C (NM_004963.1,1296-1314).
gaactctaaacttcctaat

SEQ ID NO: 84448 - DNA, 19 bp, Homo sapiens
  siRNA target sequence for GUCY2C (NM_004963.1,1432-1450).
gaacttcgtcagaaaaaat

SEQ ID NO: 84449 - DNA, 19 bp, Homo sapiens
  siRNA target sequence for GUCY2C (NM_004963.1,1454-1472).
cccacattcctcctgaaaa

SEQ ID NO: 84450 - DNA, 19 bp, Homo sapiens
  siRNA target sequence for GUCY2C (NM_004963.1,1455-1473).
ccacattcctcctgaaaat

SEQ ID NO: 84451 - DNA, 19 bp, Homo sapiens
  siRNA target sequence for GUCY2C (NM_004963.1,1490-1508).
ccaatgagaccaatcatgt

SEQ ID NO: 84452 - DNA, 19 bp, Homo sapiens
  siRNA target sequence for GUCY2C (NM_004963.1,1515-1533).
caagatcgatgatgacaaa

SEQ ID NO: 84453 - DNA, 19 bp, Homo sapiens
  siRNA target sequence for GUCY2C (NM_004963.1,1518-1536).
gatcgatgatgacaaaaga

SEQ ID NO: 84454 - DNA, 19 bp, Homo sapiens
  siRNA target sequence for GUCY2C (NM_004963.1,1528-1546).
gacaaaagacgagatacaa

SEQ ID NO: 84455 - DNA, 19 bp, Homo sapiens
  siRNA target sequence for GUCY2C (NM_004963.1,1553-1571).
gactacgacagtgcaaata

SEQ ID NO: 84456 - DNA, 19 bp, Homo sapiens
  siRNA target sequence for GUCY2C (NM_004963.1,1561-1579).
cagtgcaaatacgacaaaa

SEQ ID NO: 84457 - DNA, 19 bp, Homo sapiens
  siRNA target sequence for GUCY2C (NM_004963.1,1572-1590).
cgacaaaaagcgagtgatt

SEQ ID NO: 84458 - DNA, 19 bp, Homo sapiens
  siRNA target sequence for GUCY2C (NM_004963.1,1581-1599).
gcgagtgattctcaaagat

SEQ ID NO: 84459 - DNA, 19 bp, Homo sapiens
  siRNA target sequence for GUCY2C (NM_004963.1,1608-1626).
caatgatggtaatttcact

SEQ ID NO: 84460 - DNA, 19 bp, Homo sapiens
  siRNA target sequence for GUCY2C (NM_004963.1,1686-1704).
gttctacggcacagtgaaa

SEQ ID NO: 84461 - DNA, 19 bp, Homo sapiens
  siRNA target sequence for GUCY2C (NM_004963.1,1697-1715).
cagtgaaacttgataccat

SEQ ID NO: 84462 - DNA, 19 bp, Homo sapiens
  siRNA target sequence for GUCY2C (NM_004963.1,1716-1734).
gatcttcggggtgatagaa

SEQ ID NO: 84463 - DNA, 19 bp, Homo sapiens
  siRNA target sequence for GUCY2C (NM_004963.1,1722-1740).
cggggtgatagaatactgt

SEQ ID NO: 84464 - DNA, 19 bp, Homo sapiens
  siRNA target sequence for GUCY2C (NM_004963.1,1747-1765).
ggatccctccgggaagttt

SEQ ID NO: 84465 - DNA, 19 bp, Homo sapiens
  siRNA target sequence for GUCY2C (NM_004963.1,1748-1766).
gatccctccgggaagtttt

SEQ ID NO: 84466 - DNA, 19 bp, Homo sapiens
  siRNA target sequence for GUCY2C (NM_004963.1,1756-1774).
cgggaagttttaaatgaca

SEQ ID NO: 84467 - DNA, 19 bp, Homo sapiens
  siRNA target sequence for GUCY2C (NM_004963.1,1841-1859).
ctaagggaatgtcatatct

SEQ ID NO: 84468 - DNA, 19 bp, Homo sapiens
  siRNA target sequence for GUCY2C (NM_004963.1,1879-1897).
gtccatggtcgtctgaaat

SEQ ID NO: 84469 - DNA, 19 bp, Homo sapiens
  siRNA target sequence for GUCY2C (NM_004963.1,1881-1899).
ccatggtcgtctgaaatct

SEQ ID NO: 84470 - DNA, 19 bp, Homo sapiens
  siRNA target sequence for GUCY2C (NM_004963.1,2102-2120).
gtcgggaccggaatgagaa

SEQ ID NO: 84471 - DNA, 19 bp, Homo sapiens
  siRNA target sequence for GUCY2C (NM_004963.1,2155-2173).
cccttccgcccagatttat

SEQ ID NO: 84472 - DNA, 19 bp, Homo sapiens
  siRNA target sequence for GUCY2C (NM_004963.1,2156-2174).
ccttccgcccagatttatt

SEQ ID NO: 84473 - DNA, 19 bp, Homo sapiens
  siRNA target sequence for GUCY2C (NM_004963.1,2203-2221).
gaagtgtacctacttgtaa

SEQ ID NO: 84474 - DNA, 19 bp, Homo sapiens
  siRNA target sequence for GUCY2C (NM_004963.1,2285-2303).
ccaagatatttggactttt

SEQ ID NO: 84475 - DNA, 19 bp, Homo sapiens
  siRNA target sequence for GUCY2C (NM_004963.1,2343-2361).
ccgacgtctacagctatat

SEQ ID NO: 84476 - DNA, 19 bp, Homo sapiens
  siRNA target sequence for GUCY2C (NM_004963.1,2344-2362).
cgacgtctacagctatatt

SEQ ID NO: 84477 - DNA, 19 bp, Homo sapiens
  siRNA target sequence for GUCY2C (NM_004963.1,2424-2442).
ggctgacagacttaacttt

SEQ ID NO: 84478 - DNA, 19 bp, Homo sapiens
  siRNA target sequence for GUCY2C (NM_004963.1,2426-2444).
ctgacagacttaactttat

SEQ ID NO: 84479 - DNA, 19 bp, Homo sapiens
  siRNA target sequence for GUCY2C (NM_004963.1,2452-2470).
ccaaggctagtggtaaagt

SEQ ID NO: 84480 - DNA, 19 bp, Homo sapiens
  siRNA target sequence for GUCY2C (NM_004963.1,2503-2521).
ctatatgaggaagttacaa

SEQ ID NO: 84481 - DNA, 19 bp, Homo sapiens
  siRNA target sequence for GUCY2C (NM_004963.1,2533-2551).
gacattgtaggtttcacta

SEQ ID NO: 84482 - DNA, 19 bp, Homo sapiens
  siRNA target sequence for GUCY2C (NM_004963.1,2539-2557).
gtaggtttcactactatct

SEQ ID NO: 84483 - DNA, 19 bp, Homo sapiens
  siRNA target sequence for GUCY2C (NM_004963.1,2589-2607).
catgcttaatgacatctat

SEQ ID NO: 84484 - DNA, 19 bp, Homo sapiens
  siRNA target sequence for GUCY2C (NM_004963.1,2619-2637).
ccacattgttgatcatcat

SEQ ID NO: 84485 - DNA, 19 bp, Homo sapiens
  siRNA target sequence for GUCY2C (NM_004963.1,2705-2723).
gcaatcggcatgcaataga

SEQ ID NO: 84486 - DNA, 19 bp, Homo sapiens
  siRNA target sequence for GUCY2C (NM_004963.1,2782-2800).
cttcctggcctcccaatat

SEQ ID NO: 84487 - DNA, 19 bp, Homo sapiens
  siRNA target sequence for GUCY2C (NM_004963.1,2840-2858).
gagttgtgggaatcaagat

SEQ ID NO: 84488 - DNA, 19 bp, Homo sapiens
  siRNA target sequence for GUCY2C (NM_004963.1,2976-2994).
gtgccagttcctttatgaa

SEQ ID NO: 84489 - DNA, 19 bp, Homo sapiens
  siRNA target sequence for GUCY2C (NM_004963.1,2978-2996).
gccagttcctttatgaagt

SEQ ID NO: 84490 - DNA, 19 bp, Homo sapiens
  siRNA target sequence for GUCY2C (NM_004963.1,3086-3104).
ctcctactgtggagaatca

SEQ ID NO: 84491 - DNA, 19 bp, Homo sapiens
  siRNA target sequence for GUCY2C (NM_004963.1,3099-3117).
gaatcaacagcgtttgcaa

SEQ ID NO: 84492 - DNA, 19 bp, Homo sapiens
  siRNA target sequence for GUCY2C (NM_004963.1,3130-3148).
gacatgattgccaactctt

SEQ ID NO: 84493 - DNA, 19 bp, Homo sapiens
  siRNA target sequence for GUCY2C (NM_004963.1,3132-3150).
catgattgccaactcttta

SEQ ID NO: 84494 - DNA, 19 bp, Homo sapiens
  siRNA target sequence for GUCY2C (NM_004963.1,3191-3209).
gacgggtagccagctataa

SEQ ID NO: 84495 - DNA, 19 bp, Homo sapiens
  siRNA target sequence for GUCY2C (NM_004963.1,3193-3211).
cgggtagccagctataaaa

SEQ ID NO: 84496 - DNA, 19 bp, Homo sapiens
  siRNA target sequence for GUCY2C (NM_004963.1,3194-3212).
gggtagccagctataaaaa

SEQ ID NO: 84497 - DNA, 19 bp, Homo sapiens
  siRNA target sequence for GUCY2C (NM_004963.1,3195-3213).
ggtagccagctataaaaaa

SEQ ID NO: 84498 - DNA, 19 bp, Homo sapiens
  siRNA target sequence for GUCY2C (NM_004963.1,3223-3241).
gaatacttgcagctgaata

SEQ ID NO: 84499 - DNA, 19 bp, Homo sapiens
  siRNA target sequence for GUCY2C (NM_004963.1,3247-3265).
gacaaggagagcacctatt

SEQ ID NO: 84500 - DNA, 19 bp, Homo sapiens
  siRNA target sequence for GUCY2C (NM_004963.1,3249-3267).
caaggagagcacctatttt

SEQ ID NO: 84501 - DNA, 19 bp, Homo sapiens
  siRNA target sequence for GUCY2D (NM_000180.1,260-278).
gcttgcgaccccatcttct

SEQ ID NO: 84502 - DNA, 19 bp, Homo sapiens
  siRNA target sequence for GUCY2D (NM_000180.1,1310-1328).
cggctttttgccacataca

SEQ ID NO: 84503 - DNA, 19 bp, Homo sapiens
  siRNA target sequence for GUCY2D (NM_000180.1,1416-1434).
cgtgctggttcgatccaaa

SEQ ID NO: 84504 - DNA, 19 bp, Homo sapiens
  siRNA target sequence for GUCY2D (NM_000180.1,1419-1437).
gctggttcgatccaaacaa

SEQ ID NO: 84505 - DNA, 19 bp, Homo sapiens
  siRNA target sequence for GUCY2D (NM_000180.1,1422-1440).
ggttcgatccaaacaacat

SEQ ID NO: 84506 - DNA, 19 bp, Homo sapiens
  siRNA target sequence for GUCY2D (NM_000180.1,1515-1533).
ccttcctggcccattatgt

SEQ ID NO: 84507 - DNA, 19 bp, Homo sapiens
  siRNA target sequence for GUCY2D (NM_000180.1,1541-1559).
cggctacttcacatgcaaa

SEQ ID NO: 84508 - DNA, 19 bp, Homo sapiens
  siRNA target sequence for GUCY2D (NM_000180.1,1749-1767).
gggtttggctgaagaaatt

SEQ ID NO: 84509 - DNA, 19 bp, Homo sapiens
  siRNA target sequence for GUCY2D (NM_000180.1,1772-1790).
ggggatcagcacatagcta

SEQ ID NO: 84510 - DNA, 19 bp, Homo sapiens
  siRNA target sequence for GUCY2D (NM_000180.1,1961-1979).
ctcctcgctcagagagaaa

SEQ ID NO: 84511 - DNA, 19 bp, Homo sapiens
  siRNA target sequence for GUCY2D (NM_000180.1,1964-1982).
ctcgctcagagagaaataa

SEQ ID NO: 84512 - DNA, 19 bp, Homo sapiens
  siRNA target sequence for GUCY2D (NM_000180.1,2018-2036).
gaccttatcaagggaataa

SEQ ID NO: 84513 - DNA, 19 bp, Homo sapiens
  siRNA target sequence for GUCY2D (NM_000180.1,2021-2039).
cttatcaagggaataaggt

SEQ ID NO: 84514 - DNA, 19 bp, Homo sapiens
  siRNA target sequence for GUCY2D (NM_000180.1,2682-2700).
cagtggagcccgagtactt

SEQ ID NO: 84515 - DNA, 19 bp, Homo sapiens
  siRNA target sequence for GUCY2D (NM_000180.1,2791-2809).
cgatctctacacactcttt

SEQ ID NO: 84516 - DNA, 19 bp, Homo sapiens
  siRNA target sequence for GUCY2D (NM_000180.1,2823-2841).
gttcccacgatgtctacaa

SEQ ID NO: 84517 - DNA, 19 bp, Homo sapiens
  siRNA target sequence for GUCY2D (NM_000180.1,2850-2868).
caataggggacgcctatat

SEQ ID NO: 84518 - DNA, 19 bp, Homo sapiens
  siRNA target sequence for GUCY2D (NM_000180.1,3122-3140).
cgcatccacgtgaacttga

SEQ ID NO: 84519 - DNA, 19 bp, Homo sapiens
  siRNA target sequence for GUCY2D (NM_000180.1,3245-3263).
ggcagacgcggcttcaaca

SEQ ID NO: 84520 - DNA, 19 bp, Homo sapiens
  siRNA target sequence for GUCY2D (NM_000180.1,3246-3264).
gcagacgcggcttcaacaa

SEQ ID NO: 84521 - DNA, 19 bp, Homo sapiens
  siRNA target sequence for GUCY2F (NM_001522.1,445-463).
ggacactcccctacaagat

SEQ ID NO: 84522 - DNA, 19 bp, Homo sapiens
  siRNA target sequence for GUCY2F (NM_001522.1,446-464).
gacactcccctacaagata

SEQ ID NO: 84523 - DNA, 19 bp, Homo sapiens
  siRNA target sequence for GUCY2F (NM_001522.1,473-491).
gggcccttgggcttgtgat

SEQ ID NO: 84524 - DNA, 19 bp, Homo sapiens
  siRNA target sequence for GUCY2F (NM_001522.1,574-592).
gttattcttttgaatacgt

SEQ ID NO: 84525 - DNA, 19 bp, Homo sapiens
  siRNA target sequence for GUCY2F (NM_001522.1,580-598).
cttttgaatacgtgattct

SEQ ID NO: 84526 - DNA, 19 bp, Homo sapiens
  siRNA target sequence for GUCY2F (NM_001522.1,656-674).
ggcctcaggatttattgga

SEQ ID NO: 84527 - DNA, 19 bp, Homo sapiens
  siRNA target sequence for GUCY2F (NM_001522.1,742-760).
cttgggcttgtgtgaatta

SEQ ID NO: 84528 - DNA, 19 bp, Homo sapiens
  siRNA target sequence for GUCY2F (NM_001522.1,813-831).
cccatccgggtgcttgtaa

SEQ ID NO: 84529 - DNA, 19 bp, Homo sapiens
  siRNA target sequence for GUCY2F (NM_001522.1,815-833).
catccgggtgcttgtaact

SEQ ID NO: 84530 - DNA, 19 bp, Homo sapiens
  siRNA target sequence for GUCY2F (NM_001522.1,854-872).
ggctcatgctggagtcatt

SEQ ID NO: 84531 - DNA, 19 bp, Homo sapiens
  siRNA target sequence for GUCY2F (NM_001522.1,967-985).
gacaagacagccaaagcat

SEQ ID NO: 84532 - DNA, 19 bp, Homo sapiens
  siRNA target sequence for GUCY2F (NM_001522.1,1017-1035).
gacagaattcgcataatca

SEQ ID NO: 84533 - DNA, 19 bp, Homo sapiens
  siRNA target sequence for GUCY2F (NM_001522.1,1027-1045).
gcataatcatcatgtgtat

SEQ ID NO: 84534 - DNA, 19 bp, Homo sapiens
  siRNA target sequence for GUCY2F (NM_001522.1,1085-1103).
cttggaatgtgctcatgat

SEQ ID NO: 84535 - DNA, 19 bp, Homo sapiens
  siRNA target sequence for GUCY2F (NM_001522.1,1148-1166).
cctgctctacagtttacct

SEQ ID NO: 84536 - DNA, 19 bp, Homo sapiens
  siRNA target sequence for GUCY2F (NM_001522.1,1151-1169).
gctctacagtttaccttat

SEQ ID NO: 84537 - DNA, 19 bp, Homo sapiens
  siRNA target sequence for GUCY2F (NM_001522.1,1152-1170).
ctctacagtttaccttata

SEQ ID NO: 84538 - DNA, 19 bp, Homo sapiens
  siRNA target sequence for GUCY2F (NM_001522.1,1208-1226).
gctccgggaagcctatgat

SEQ ID NO: 84539 - DNA, 19 bp, Homo sapiens
  siRNA target sequence for GUCY2F (NM_001522.1,1224-1242).
gatgcagtgttgaccatta

SEQ ID NO: 84540 - DNA, 19 bp, Homo sapiens
  siRNA target sequence for GUCY2F (NM_001522.1,1243-1261).
cagtggagtcccaagaaaa

SEQ ID NO: 84541 - DNA, 19 bp, Homo sapiens
  siRNA target sequence for GUCY2F (NM_001522.1,1253-1271).
ccaagaaaagaccttctat

SEQ ID NO: 84542 - DNA, 19 bp, Homo sapiens
  siRNA target sequence for GUCY2F (NM_001522.1,1316-1334).
gctggagttcgatcaagtt

SEQ ID NO: 84543 - DNA, 19 bp, Homo sapiens
  siRNA target sequence for GUCY2F (NM_001522.1,1317-1335).
ctggagttcgatcaagttt

SEQ ID NO: 84544 - DNA, 19 bp, Homo sapiens
  siRNA target sequence for GUCY2F (NM_001522.1,1319-1337).
ggagttcgatcaagtttca

SEQ ID NO: 84545 - DNA, 19 bp, Homo sapiens
  siRNA target sequence for GUCY2F (NM_001522.1,1347-1365).
ggaaccatctacaattcaa

SEQ ID NO: 84546 - DNA, 19 bp, Homo sapiens
  siRNA target sequence for GUCY2F (NM_001522.1,1348-1366).
gaaccatctacaattcaat

SEQ ID NO: 84547 - DNA, 19 bp, Homo sapiens
  siRNA target sequence for GUCY2F (NM_001522.1,1376-1394).
cgcacaagccatgaataat

SEQ ID NO: 84548 - DNA, 19 bp, Homo sapiens
  siRNA target sequence for GUCY2F (NM_001522.1,1473-1491).
cagttgatgaggacagatt

SEQ ID NO: 84549 - DNA, 19 bp, Homo sapiens
  siRNA target sequence for GUCY2F (NM_001522.1,1599-1617).
ggagggacccctattcact

SEQ ID NO: 84550 - DNA, 19 bp, Homo sapiens
  siRNA target sequence for GUCY2F (NM_001522.1,1712-1730).
ggtctgccttactttgctt

SEQ ID NO: 84551 - DNA, 19 bp, Homo sapiens
  siRNA target sequence for GUCY2F (NM_001522.1,1736-1754).
cctgctgtctattaatgga

SEQ ID NO: 84552 - DNA, 19 bp, Homo sapiens
  siRNA target sequence for GUCY2F (NM_001522.1,1752-1770).
ggatttgcttactttataa

SEQ ID NO: 84553 - DNA, 19 bp, Homo sapiens
  siRNA target sequence for GUCY2F (NM_001522.1,1763-1781).
ctttataaggcgtcgtata

SEQ ID NO: 84554 - DNA, 19 bp, Homo sapiens
  siRNA target sequence for GUCY2F (NM_001522.1,1771-1789).
ggcgtcgtataaataaaat

SEQ ID NO: 84555 - DNA, 19 bp, Homo sapiens
  siRNA target sequence for GUCY2F (NM_001522.1,1796-1814).
gatcaaaggacccaataga

SEQ ID NO: 84556 - DNA, 19 bp, Homo sapiens
  siRNA target sequence for GUCY2F (NM_001522.1,1799-1817).
caaaggacccaatagaatt

SEQ ID NO: 84557 - DNA, 19 bp, Homo sapiens
  siRNA target sequence for GUCY2F (NM_001522.1,1804-1822).
gacccaatagaattctact

SEQ ID NO: 84558 - DNA, 19 bp, Homo sapiens
  siRNA target sequence for GUCY2F (NM_001522.1,1832-1850).
ggatgtaacgtttatcaat

SEQ ID NO: 84559 - DNA, 19 bp, Homo sapiens
  siRNA target sequence for GUCY2F (NM_001522.1,1872-1890).
ggaagtcgtgccagtgtaa

SEQ ID NO: 84560 - DNA, 19 bp, Homo sapiens
  siRNA target sequence for GUCY2F (NM_001522.1,1876-1894).
gtcgtgccagtgtaagctt

SEQ ID NO: 84561 - DNA, 19 bp, Homo sapiens
  siRNA target sequence for GUCY2F (NM_001522.1,1979-1997).
ctccaacatagcgatttat

SEQ ID NO: 84562 - DNA, 19 bp, Homo sapiens
  siRNA target sequence for GUCY2F (NM_001522.1,2004-2022).
gattgggtgtggctgaaaa

SEQ ID NO: 84563 - DNA, 19 bp, Homo sapiens
  siRNA target sequence for GUCY2F (NM_001522.1,2037-2055).
gattttggagaccttaagt

SEQ ID NO: 84564 - DNA, 19 bp, Homo sapiens
  siRNA target sequence for GUCY2F (NM_001522.1,2046-2064).
gaccttaagtccatcaaat

SEQ ID NO: 84565 - DNA, 19 bp, Homo sapiens
  siRNA target sequence for GUCY2F (NM_001522.1,2074-2092).
gtgatgtgttcgaaatgat

SEQ ID NO: 84566 - DNA, 19 bp, Homo sapiens
  siRNA target sequence for GUCY2F (NM_001522.1,2076-2094).
gatgtgttcgaaatgatga

SEQ ID NO: 84567 - DNA, 19 bp, Homo sapiens
  siRNA target sequence for GUCY2F (NM_001522.1,2097-2115).
gacttgcgtcatgagaata

SEQ ID NO: 84568 - DNA, 19 bp, Homo sapiens
  siRNA target sequence for GUCY2F (NM_001522.1,2099-2117).
cttgcgtcatgagaatatt

SEQ ID NO: 84569 - DNA, 19 bp, Homo sapiens
  siRNA target sequence for GUCY2F (NM_001522.1,2109-2127).
gagaatattaaccctttat

SEQ ID NO: 84570 - DNA, 19 bp, Homo sapiens
  siRNA target sequence for GUCY2F (NM_001522.1,2138-2156).
ctatgattcggggatgttt

SEQ ID NO: 84571 - DNA, 19 bp, Homo sapiens
  siRNA target sequence for GUCY2F (NM_001522.1,2179-2197).
cccgagggagcctagaaga

SEQ ID NO: 84572 - DNA, 19 bp, Homo sapiens
  siRNA target sequence for GUCY2F (NM_001522.1,2185-2203).
ggagcctagaagacatact

SEQ ID NO: 84573 - DNA, 19 bp, Homo sapiens
  siRNA target sequence for GUCY2F (NM_001522.1,2223-2241).
cttgactggatgtttaaat

SEQ ID NO: 84574 - DNA, 19 bp, Homo sapiens
  siRNA target sequence for GUCY2F (NM_001522.1,2259-2277).
ctcataaagggcatgaagt

SEQ ID NO: 84575 - DNA, 19 bp, Homo sapiens
  siRNA target sequence for GUCY2F (NM_001522.1,2279-2297).
cttacaccacagagagttt

SEQ ID NO: 84576 - DNA, 19 bp, Homo sapiens
  siRNA target sequence for GUCY2F (NM_001522.1,2309-2327).
gctaaagtctcgaaactgt

SEQ ID NO: 84577 - DNA, 19 bp, Homo sapiens
  siRNA target sequence for GUCY2F (NM_001522.1,2338-2356).
ggcgttttgtactaaaagt

SEQ ID NO: 84578 - DNA, 19 bp, Homo sapiens
  siRNA target sequence for GUCY2F (NM_001522.1,2359-2377).
cagattatggctttaacga

SEQ ID NO: 84579 - DNA, 19 bp, Homo sapiens
  siRNA target sequence for GUCY2F (NM_001522.1,2397-2415).
ctctctgaagaggaatctt

SEQ ID NO: 84580 - DNA, 19 bp, Homo sapiens
  siRNA target sequence for GUCY2F (NM_001522.1,2467-2485).
gcagcaggttaggttcttt

SEQ ID NO: 84581 - DNA, 19 bp, Homo sapiens
  siRNA target sequence for GUCY2F (NM_001522.1,2468-2486).
cagcaggttaggttctttt

SEQ ID NO: 84582 - DNA, 19 bp, Homo sapiens
  siRNA target sequence for GUCY2F (NM_001522.1,2488-2506).
caggagatgtctatagctt

SEQ ID NO: 84583 - DNA, 19 bp, Homo sapiens
  siRNA target sequence for GUCY2F (NM_001522.1,2633-2651).
gcatgcccctccagaatgt

SEQ ID NO: 84584 - DNA, 19 bp, Homo sapiens
  siRNA target sequence for GUCY2F (NM_001522.1,2694-2712).
cgaccaacttttgatgaaa

SEQ ID NO: 84585 - DNA, 19 bp, Homo sapiens
  siRNA target sequence for GUCY2F (NM_001522.1,2750-2768).
gaccaatattattgattct

SEQ ID NO: 84586 - DNA, 19 bp, Homo sapiens
  siRNA target sequence for GUCY2F (NM_001522.1,2775-2793).
cggatgttggagcaatatt

SEQ ID NO: 84587 - DNA, 19 bp, Homo sapiens
  siRNA target sequence for GUCY2F (NM_001522.1,2777-2795).
gatgttggagcaatattct

SEQ ID NO: 84588 - DNA, 19 bp, Homo sapiens
  siRNA target sequence for GUCY2F (NM_001522.1,2876-2894).
gatgctaccaccatcagtt

SEQ ID NO: 84589 - DNA, 19 bp, Homo sapiens
  siRNA target sequence for GUCY2F (NM_001522.1,2887-2905).
catcagttgctgaatctct

SEQ ID NO: 84590 - DNA, 19 bp, Homo sapiens
  siRNA target sequence for GUCY2F (NM_001522.1,2892-2910).
gttgctgaatctctcaaaa

SEQ ID NO: 84591 - DNA, 19 bp, Homo sapiens
  siRNA target sequence for GUCY2F (NM_001522.1,2940-2958).
gacttggtcaccttgtact

SEQ ID NO: 84592 - DNA, 19 bp, Homo sapiens
  siRNA target sequence for GUCY2F (NM_001522.1,3159-3177).
gcaaacatgtccttagata

SEQ ID NO: 84593 - DNA, 19 bp, Homo sapiens
  siRNA target sequence for GUCY2F (NM_001522.1,3222-3240).
gtgccggtccgaattcgaa

SEQ ID NO: 84594 - DNA, 19 bp, Homo sapiens
  siRNA target sequence for GUCY2F (NM_001522.1,3224-3242).
gccggtccgaattcgaatt

SEQ ID NO: 84595 - DNA, 19 bp, Homo sapiens
  siRNA target sequence for GUCY2F (NM_001522.1,3339-3357).
gaatctacaggcttacctt

SEQ ID NO: 84596 - DNA, 19 bp, Homo sapiens
  siRNA target sequence for GUCY2F (NM_001522.1,3350-3368).
cttaccttatcgcattcat

SEQ ID NO: 84597 - DNA, 19 bp, Homo sapiens
  siRNA target sequence for GUCY2F (NM_001522.1,3373-3391).
gtctcagcactgttacaat

SEQ ID NO: 84598 - DNA, 19 bp, Homo sapiens
  siRNA target sequence for GUCY2F (NM_001522.1,3377-3395).
cagcactgttacaattctt

SEQ ID NO: 84599 - DNA, 19 bp, Homo sapiens
  siRNA target sequence for GUCY2F (NM_001522.1,3422-3440).
ggagcttcgaggaagaaca

SEQ ID NO: 84600 - DNA, 19 bp, Homo sapiens
  siRNA target sequence for GUCY2F (NM_001522.1,3567-3585).
gagattgcagccttccaaa

SEQ ID NO: 84601 - DNA, 19 bp, Homo sapiens
  siRNA target sequence for GUK1 (NM_000858.3,362-380).
cggcaaagattactacttt

SEQ ID NO: 84602 - DNA, 19 bp, Homo sapiens
  siRNA target sequence for GUK1 (NM_000858.3,392-410).
ggtgatgcagcgtgacata

SEQ ID NO: 84603 - DNA, 19 bp, Homo sapiens
  siRNA target sequence for GUK1 (NM_000858.3,528-546).
cagggtgtgcggaacatca

SEQ ID NO: 84604 - DNA, 19 bp, Homo sapiens
  siRNA target sequence for GUK1 (NM_000858.3,765-783).
gcgctctctgaggaaatca

SEQ ID NO: 84605 - DNA, 19 bp, Homo sapiens
  siRNA target sequence for GUK1 (NM_000858.3,766-784).
cgctctctgaggaaatcaa

SEQ ID NO: 84606 - DNA, 19 bp, Homo sapiens
  siRNA target sequence for GUK1 (NM_000858.3,768-786).
ctctctgaggaaatcaaga

SEQ ID NO: 84607 - DNA, 19 bp, Homo sapiens
  siRNA target sequence for HAK (NM_052947.1,201-219).
gcaagttaatactctattt

SEQ ID NO: 84608 - DNA, 19 bp, Homo sapiens
  siRNA target sequence for HAK (NM_052947.1,251-269).
ctcctcaggtacaagttca

SEQ ID NO: 84609 - DNA, 19 bp, Homo sapiens
  siRNA target sequence for HAK (NM_052947.1,330-348).
ggaggagtccccattcact

SEQ ID NO: 84610 - DNA, 19 bp, Homo sapiens
  siRNA target sequence for HAK (NM_052947.1,359-377).
caatttccttctcaaactt

SEQ ID NO: 84611 - DNA, 19 bp, Homo sapiens
  siRNA target sequence for HAK (NM_052947.1,497-515).
gggaagacctaaaatatga

SEQ ID NO: 84612 - DNA, 19 bp, Homo sapiens
  siRNA target sequence for HAK (NM_052947.1,532-550).
gccaatgatgagactatgt

SEQ ID NO: 84613 - DNA, 19 bp, Homo sapiens
  siRNA target sequence for HAK (NM_052947.1,630-648).
ccctgaacccacagatact

SEQ ID NO: 84614 - DNA, 19 bp, Homo sapiens
  siRNA target sequence for HAK (NM_052947.1,796-814).
gaaatttgctctgtagata

SEQ ID NO: 84615 - DNA, 19 bp, Homo sapiens
  siRNA target sequence for HAK (NM_052947.1,820-838).
ctggcagaaggtcaaaaca

SEQ ID NO: 84616 - DNA, 19 bp, Homo sapiens
  siRNA target sequence for HAK (NM_052947.1,830-848).
gtcaaaacaaagtatctga

SEQ ID NO: 84617 - DNA, 19 bp, Homo sapiens
  siRNA target sequence for HAK (NM_052947.1,841-859).
gtatctgatttatgttctt

SEQ ID NO: 84618 - DNA, 19 bp, Homo sapiens
  siRNA target sequence for HAK (NM_052947.1,872-890).
cactggaagtcttttttca

SEQ ID NO: 84619 - DNA, 19 bp, Homo sapiens
  siRNA target sequence for HAK (NM_052947.1,947-965).
cagtcatgtcccctctttt

SEQ ID NO: 84620 - DNA, 19 bp, Homo sapiens
  siRNA target sequence for HAK (NM_052947.1,1146-1164).
caatcctttagtgcaattt

SEQ ID NO: 84621 - DNA, 19 bp, Homo sapiens
  siRNA target sequence for HAK (NM_052947.1,1215-1233).
cacaccagccagttatagt

SEQ ID NO: 84622 - DNA, 19 bp, Homo sapiens
  siRNA target sequence for HAK (NM_052947.1,1219-1237).
ccagccagttatagttcaa

SEQ ID NO: 84623 - DNA, 19 bp, Homo sapiens
  siRNA target sequence for HAK (NM_052947.1,1220-1238).
cagccagttatagttcaat

SEQ ID NO: 84624 - DNA, 19 bp, Homo sapiens
  siRNA target sequence for HAK (NM_052947.1,1223-1241).
ccagttatagttcaattgt

SEQ ID NO: 84625 - DNA, 19 bp, Homo sapiens
  siRNA target sequence for HAK (NM_052947.1,1265-1283).
caacattaactgctaataa

SEQ ID NO: 84626 - DNA, 19 bp, Homo sapiens
  siRNA target sequence for HAK (NM_052947.1,1406-1424).
gtgcatcccatgaaaaggt

SEQ ID NO: 84627 - DNA, 19 bp, Homo sapiens
  siRNA target sequence for HAK (NM_052947.1,1643-1661).
gctatgaagagaatttcca

SEQ ID NO: 84628 - DNA, 19 bp, Homo sapiens
  siRNA target sequence for HAK (NM_052947.1,1732-1750).
cctgatttccaacaaagtt

SEQ ID NO: 84629 - DNA, 19 bp, Homo sapiens
  siRNA target sequence for HAK (NM_052947.1,1976-1994).
caggcaacaagctgaagat

SEQ ID NO: 84630 - DNA, 19 bp, Homo sapiens
  siRNA target sequence for HAK (NM_052947.1,1986-2004).
gctgaagattataactcta

SEQ ID NO: 84631 - DNA, 19 bp, Homo sapiens
  siRNA target sequence for HAK (NM_052947.1,2030-2048).
caccacgacaactgacaaa

SEQ ID NO: 84632 - DNA, 19 bp, Homo sapiens
  siRNA target sequence for HAK (NM_052947.1,2032-2050).
ccacgacaactgacaaatt

SEQ ID NO: 84633 - DNA, 19 bp, Homo sapiens
  siRNA target sequence for HAK (NM_052947.1,2097-2115).
ctgggctgtacctgatagt

SEQ ID NO: 84634 - DNA, 19 bp, Homo sapiens
  siRNA target sequence for HAK (NM_052947.1,2101-2119).
gctgtacctgatagtctaa

SEQ ID NO: 84635 - DNA, 19 bp, Homo sapiens
  siRNA target sequence for HAK (NM_052947.1,2307-2325).
cgtggaccctgtagatgaa

SEQ ID NO: 84636 - DNA, 19 bp, Homo sapiens
  siRNA target sequence for HAK (NM_052947.1,2317-2335).
gtagatgaaaaggagttat

SEQ ID NO: 84637 - DNA, 19 bp, Homo sapiens
  siRNA target sequence for HAK (NM_052947.1,2329-2347).
gagttatctgtcacagatt

SEQ ID NO: 84638 - DNA, 19 bp, Homo sapiens
  siRNA target sequence for HAK (NM_052947.1,2460-2478).
gacctgccctaaaatccta

SEQ ID NO: 84639 - DNA, 19 bp, Homo sapiens
  siRNA target sequence for HAK (NM_052947.1,2475-2493).
cctagagtcctctgtagat

SEQ ID NO: 84640 - DNA, 19 bp, Homo sapiens
  siRNA target sequence for HAK (NM_052947.1,2495-2513).
ccattgatgagataagtgt

SEQ ID NO: 84641 - DNA, 19 bp, Homo sapiens
  siRNA target sequence for HAK (NM_052947.1,2656-2674).
ggaaccattctgagtgaaa

SEQ ID NO: 84642 - DNA, 19 bp, Homo sapiens
  siRNA target sequence for HAK (NM_052947.1,2661-2679).
cattctgagtgaaaataga

SEQ ID NO: 84643 - DNA, 19 bp, Homo sapiens
  siRNA target sequence for HAK (NM_052947.1,2728-2746).
caacctgaggaggcaaaaa

SEQ ID NO: 84644 - DNA, 19 bp, Homo sapiens
  siRNA target sequence for HAK (NM_052947.1,2772-2790).
cagcgaaggcggtgaaaga

SEQ ID NO: 84645 - DNA, 19 bp, Homo sapiens
  siRNA target sequence for HAK (NM_052947.1,2774-2792).
gcgaaggcggtgaaagaat

SEQ ID NO: 84646 - DNA, 19 bp, Homo sapiens
  siRNA target sequence for HAK (NM_052947.1,2779-2797).
ggcggtgaaagaattccaa

SEQ ID NO: 84647 - DNA, 19 bp, Homo sapiens
  siRNA target sequence for HAK (NM_052947.1,2807-2825).
gcataggccaaatacaaga

SEQ ID NO: 84648 - DNA, 19 bp, Homo sapiens
  siRNA target sequence for HAK (NM_052947.1,2808-2826).
cataggccaaatacaagaa

SEQ ID NO: 84649 - DNA, 19 bp, Homo sapiens
  siRNA target sequence for HAK (NM_052947.1,2955-2973).
caactccacaggccaaatt

SEQ ID NO: 84650 - DNA, 19 bp, Homo sapiens
  siRNA target sequence for HAK (NM_052947.1,2979-2997).
cgtccctgaaaatgacata

SEQ ID NO: 84651 - DNA, 19 bp, Homo sapiens
  siRNA target sequence for HAK (NM_052947.1,3003-3021).
gcccagaaagcgtcagtat

SEQ ID NO: 84652 - DNA, 19 bp, Homo sapiens
  siRNA target sequence for HAK (NM_052947.1,3005-3023).
ccagaaagcgtcagtatgt

SEQ ID NO: 84653 - DNA, 19 bp, Homo sapiens
  siRNA target sequence for HAK (NM_052947.1,3008-3026).
gaaagcgtcagtatgtgtt

SEQ ID NO: 84654 - DNA, 19 bp, Homo sapiens
  siRNA target sequence for HAK (NM_052947.1,3078-3096).
gccctcttctcctgatctt

SEQ ID NO: 84655 - DNA, 19 bp, Homo sapiens
  siRNA target sequence for HAK (NM_052947.1,3079-3097).
ccctcttctcctgatctta

SEQ ID NO: 84656 - DNA, 19 bp, Homo sapiens
  siRNA target sequence for HAK (NM_052947.1,3099-3117).
caggttcccttgtacttca

SEQ ID NO: 84657 - DNA, 19 bp, Homo sapiens
  siRNA target sequence for HAK (NM_052947.1,3128-3146).
gaaatgtcacagacttttt

SEQ ID NO: 84658 - DNA, 19 bp, Homo sapiens
  siRNA target sequence for HAK (NM_052947.1,3133-3151).
gtcacagactttttgataa

SEQ ID NO: 84659 - DNA, 19 bp, Homo sapiens
  siRNA target sequence for HAK (NM_052947.1,3229-3247).
gcgaagaccttggcattta

SEQ ID NO: 84660 - DNA, 19 bp, Homo sapiens
  siRNA target sequence for HAK (NM_052947.1,3234-3252).
gaccttggcatttatttca

SEQ ID NO: 84661 - DNA, 19 bp, Homo sapiens
  siRNA target sequence for HAK (NM_052947.1,3251-3269).
caggagaacgtgagttaga

SEQ ID NO: 84662 - DNA, 19 bp, Homo sapiens
  siRNA target sequence for HAK (NM_052947.1,3313-3331).
ctgggctgtgcgaaaaagt

SEQ ID NO: 84663 - DNA, 19 bp, Homo sapiens
  siRNA target sequence for HAK (NM_052947.1,3629-3647).
gaagagctccagtattact

SEQ ID NO: 84664 - DNA, 19 bp, Homo sapiens
  siRNA target sequence for HAK (NM_052947.1,3721-3739).
catgaagattctactatct

SEQ ID NO: 84665 - DNA, 19 bp, Homo sapiens
  siRNA target sequence for HAK (NM_052947.1,3740-3758).
gctggacaaaagattcaaa

SEQ ID NO: 84666 - DNA, 19 bp, Homo sapiens
  siRNA target sequence for HAK (NM_052947.1,3831-3849).
gaaggaccagggactctat

SEQ ID NO: 84667 - DNA, 19 bp, Homo sapiens
  siRNA target sequence for HAK (NM_052947.1,3926-3944).
caagtcgccaggatactaa

SEQ ID NO: 84668 - DNA, 19 bp, Homo sapiens
  siRNA target sequence for HAK (NM_052947.1,3931-3949).
cgccaggatactaaaggat

SEQ ID NO: 84669 - DNA, 19 bp, Homo sapiens
  siRNA target sequence for HAK (NM_052947.1,3947-3965).
gatgtgaagagattgaatt

SEQ ID NO: 84670 - DNA, 19 bp, Homo sapiens
  siRNA target sequence for HAK (NM_052947.1,4218-4236).
ccaggaatgctatgttcaa

SEQ ID NO: 84671 - DNA, 19 bp, Homo sapiens
  siRNA target sequence for HAK (NM_052947.1,4219-4237).
caggaatgctatgttcaaa

SEQ ID NO: 84672 - DNA, 19 bp, Homo sapiens
  siRNA target sequence for HAK (NM_052947.1,4332-4350).
ccatcggcctgagaacaat

SEQ ID NO: 84673 - DNA, 19 bp, Homo sapiens
  siRNA target sequence for HAK (NM_052947.1,4333-4351).
catcggcctgagaacaata

SEQ ID NO: 84674 - DNA, 19 bp, Homo sapiens
  siRNA target sequence for HAK (NM_052947.1,4477-4495).
cactgggtgtaccagaaaa

SEQ ID NO: 84675 - DNA, 19 bp, Homo sapiens
  siRNA target sequence for HAK (NM_052947.1,4479-4497).
ctgggtgtaccagaaaaca

SEQ ID NO: 84676 - DNA, 19 bp, Homo sapiens
  siRNA target sequence for HAK (NM_052947.1,4601-4619).
gttccatgaccttcattga

SEQ ID NO: 84677 - DNA, 19 bp, Homo sapiens
  siRNA target sequence for HAK (NM_052947.1,4610-4628).
ccttcattgatcagtttaa

SEQ ID NO: 84678 - DNA, 19 bp, Homo sapiens
  siRNA target sequence for HAK (NM_052947.1,4611-4629).
cttcattgatcagtttaaa

SEQ ID NO: 84679 - DNA, 19 bp, Homo sapiens
  siRNA target sequence for HAK (NM_052947.1,4630-4648).
gcactacaccagtgtaaca

SEQ ID NO: 84680 - DNA, 19 bp, Homo sapiens
  siRNA target sequence for HAK (NM_052947.1,4631-4649).
cactacaccagtgtaacaa

SEQ ID NO: 84681 - DNA, 19 bp, Homo sapiens
  siRNA target sequence for HAK (NM_052947.1,4636-4654).
caccagtgtaacaagtatt

SEQ ID NO: 84682 - DNA, 19 bp, Homo sapiens
  siRNA target sequence for HAK (NM_052947.1,4639-4657).
cagtgtaacaagtattgca

SEQ ID NO: 84683 - DNA, 19 bp, Homo sapiens
  siRNA target sequence for HAK (NM_052947.1,4643-4661).
gtaacaagtattgcaaaat

SEQ ID NO: 84684 - DNA, 19 bp, Homo sapiens
  siRNA target sequence for HAK (NM_052947.1,4667-4685).
gactgaaatcccttcaaaa

SEQ ID NO: 84685 - DNA, 19 bp, Homo sapiens
  siRNA target sequence for HARS (NM_002109.3,188-206).
gcgaaactcctgaaactga

SEQ ID NO: 84686 - DNA, 19 bp, Homo sapiens
  siRNA target sequence for HARS (NM_002109.3,262-280).
gggcacaagagactatagt

SEQ ID NO: 84687 - DNA, 19 bp, Homo sapiens
  siRNA target sequence for HARS (NM_002109.3,340-358).
ccacggtgcagaagtcatt

SEQ ID NO: 84688 - DNA, 19 bp, Homo sapiens
  siRNA target sequence for HARS (NM_002109.3,343-361).
cggtgcagaagtcattgat

SEQ ID NO: 84689 - DNA, 19 bp, Homo sapiens
  siRNA target sequence for HARS (NM_002109.3,344-362).
ggtgcagaagtcattgata

SEQ ID NO: 84690 - DNA, 19 bp, Homo sapiens
  siRNA target sequence for HARS (NM_002109.3,489-507).
ctcggtatttggcaatgaa

SEQ ID NO: 84691 - DNA, 19 bp, Homo sapiens
  siRNA target sequence for HARS (NM_002109.3,529-547).
ctaccacatagcaaaggta

SEQ ID NO: 84692 - DNA, 19 bp, Homo sapiens
  siRNA target sequence for HARS (NM_002109.3,578-596).
ggccgataccgggaattct

SEQ ID NO: 84693 - DNA, 19 bp, Homo sapiens
  siRNA target sequence for HARS (NM_002109.3,579-597).
gccgataccgggaattcta

SEQ ID NO: 84694 - DNA, 19 bp, Homo sapiens
  siRNA target sequence for HARS (NM_002109.3,676-694).
cctgagttcacttcagata

SEQ ID NO: 84695 - DNA, 19 bp, Homo sapiens
  siRNA target sequence for HARS (NM_002109.3,698-716).
gacttcctggtcaaggtaa

SEQ ID NO: 84696 - DNA, 19 bp, Homo sapiens
  siRNA target sequence for HARS (NM_002109.3,718-736).
cgatcgacgcattctagat

SEQ ID NO: 84697 - DNA, 19 bp, Homo sapiens
  siRNA target sequence for HARS (NM_002109.3,727-745).
cattctagatgggatgttt

SEQ ID NO: 84698 - DNA, 19 bp, Homo sapiens
  siRNA target sequence for HARS (NM_002109.3,731-749).
ctagatgggatgtttgcta

SEQ ID NO: 84699 - DNA, 19 bp, Homo sapiens
  siRNA target sequence for HARS (NM_002109.3,1009-1027).
gaccctatttggcattgat

SEQ ID NO: 84700 - DNA, 19 bp, Homo sapiens
  siRNA target sequence for HARS (NM_002109.3,1011-1029).
ccctatttggcattgatga

SEQ ID NO: 84701 - DNA, 19 bp, Homo sapiens
  siRNA target sequence for HARS (NM_002109.3,1055-1073).
gctcgagggctggattact

SEQ ID NO: 84702 - DNA, 19 bp, Homo sapiens
  siRNA target sequence for HARS (NM_002109.3,1056-1074).
ctcgagggctggattacta

SEQ ID NO: 84703 - DNA, 19 bp, Homo sapiens
  siRNA target sequence for HARS (NM_002109.3,1235-1253).
ggggtggagcggattttct

SEQ ID NO: 84704 - DNA, 19 bp, Homo sapiens
  siRNA target sequence for HARS (NM_002109.3,1339-1357).
gctgctagaggaaagacta

SEQ ID NO: 84705 - DNA, 19 bp, Homo sapiens
  siRNA target sequence for HARSL (NM_012208.2,324-342).
ggttgcagaggcagtgtta

SEQ ID NO: 84706 - DNA, 19 bp, Homo sapiens
  siRNA target sequence for HARSL (NM_012208.2,339-357).
gttaacatcccaactgaaa

SEQ ID NO: 84707 - DNA, 19 bp, Homo sapiens
  siRNA target sequence for HARSL (NM_012208.2,492-510).
gatggacaccccagcattt

SEQ ID NO: 84708 - DNA, 19 bp, Homo sapiens
  siRNA target sequence for HARSL (NM_012208.2,554-572).
ggctcatgtatgatctgaa

SEQ ID NO: 84709 - DNA, 19 bp, Homo sapiens
  siRNA target sequence for HARSL (NM_012208.2,629-647).
gttatctggccatgaataa

SEQ ID NO: 84710 - DNA, 19 bp, Homo sapiens
  siRNA target sequence for HARSL (NM_012208.2,654-672).
gaagatgaaacgttatcat

SEQ ID NO: 84711 - DNA, 19 bp, Homo sapiens
  siRNA target sequence for HARSL (NM_012208.2,657-675).
gatgaaacgttatcatgtt

SEQ ID NO: 84712 - DNA, 19 bp, Homo sapiens
  siRNA target sequence for HARSL (NM_012208.2,690-708).
gcgagagagcccaaccata

SEQ ID NO: 84713 - DNA, 19 bp, Homo sapiens
  siRNA target sequence for HARSL (NM_012208.2,758-776).
gtcagtttgaccctatgat

SEQ ID NO: 84714 - DNA, 19 bp, Homo sapiens
  siRNA target sequence for HARSL (NM_012208.2,778-796).
cccgatgcagagtgtttga

SEQ ID NO: 84715 - DNA, 19 bp, Homo sapiens
  siRNA target sequence for HARSL (NM_012208.2,779-797).
ccgatgcagagtgtttgaa

SEQ ID NO: 84716 - DNA, 19 bp, Homo sapiens
  siRNA target sequence for HARSL (NM_012208.2,921-939).
ctgctcctccatagataaa

SEQ ID NO: 84717 - DNA, 19 bp, Homo sapiens
  siRNA target sequence for HARSL (NM_012208.2,923-941).
gctcctccatagataaact

SEQ ID NO: 84718 - DNA, 19 bp, Homo sapiens
  siRNA target sequence for HARSL (NM_012208.2,924-942).
ctcctccatagataaacta

SEQ ID NO: 84719 - DNA, 19 bp, Homo sapiens
  siRNA target sequence for HARSL (NM_012208.2,926-944).
cctccatagataaactaga

SEQ ID NO: 84720 - DNA, 19 bp, Homo sapiens
  siRNA target sequence for HARSL (NM_012208.2,1118-1136).
gagacctaaagctgctatt

SEQ ID NO: 84721 - DNA, 19 bp, Homo sapiens
  siRNA target sequence for HARSL (NM_012208.2,1372-1390).
ggggttgagcgaatcttct

SEQ ID NO: 84722 - DNA, 19 bp, Homo sapiens
  siRNA target sequence for HARSL (NM_012208.2,1373-1391).
gggttgagcgaatcttcta

SEQ ID NO: 84723 - DNA, 19 bp, Homo sapiens
  siRNA target sequence for HARSL (NM_012208.2,1375-1393).
gttgagcgaatcttctaca

SEQ ID NO: 84724 - DNA, 19 bp, Homo sapiens
  siRNA target sequence for HARSL (NM_012208.2,1436-1454).
ctacagagactcaagtgtt

SEQ ID NO: 84725 - DNA, 19 bp, Homo sapiens
  siRNA target sequence for HARSL (NM_012208.2,1531-1549).
gcagagatgctatacaaga

SEQ ID NO: 84726 - DNA, 19 bp, Homo sapiens
  siRNA target sequence for HARSL (NM_012208.2,1532-1550).
cagagatgctatacaagaa

SEQ ID NO: 84727 - DNA, 19 bp, Homo sapiens
  siRNA target sequence for HARSL (NM_012208.2,1534-1552).
gagatgctatacaagaaca

SEQ ID NO: 84728 - DNA, 19 bp, Homo sapiens
  siRNA target sequence for HARSL (NM_012208.2,1545-1563).
caagaacaaccccaaacta

SEQ ID NO: 84729 - DNA, 19 bp, Homo sapiens
  siRNA target sequence for HARSL (NM_012208.2,1548-1566).
gaacaaccccaaactatta

SEQ ID NO: 84730 - DNA, 19 bp, Homo sapiens
  siRNA target sequence for HARSL (NM_012208.2,1680-1698).
ggccattaaacgggaaaat

SEQ ID NO: 84731 - DNA, 19 bp, Homo sapiens
  siRNA target sequence for HARSL (NM_012208.2,1682-1700).
ccattaaacgggaaaattt

SEQ ID NO: 84732 - DNA, 19 bp, Homo sapiens
  siRNA target sequence for HCK (NM_002110.2,261-279).
ccaggtcggaggcaataca

SEQ ID NO: 84733 - DNA, 19 bp, Homo sapiens
  siRNA target sequence for HCK (NM_002110.2,265-283).
gtcggaggcaatacattct

SEQ ID NO: 84734 - DNA, 19 bp, Homo sapiens
  siRNA target sequence for HCK (NM_002110.2,267-285).
cggaggcaatacattctca

SEQ ID NO: 84735 - DNA, 19 bp, Homo sapiens
  siRNA target sequence for HCK (NM_002110.2,418-436).
gtggttgccctgtatgatt

SEQ ID NO: 84736 - DNA, 19 bp, Homo sapiens
  siRNA target sequence for HCK (NM_002110.2,744-762).
gggagataccgtgaaacat

SEQ ID NO: 84737 - DNA, 19 bp, Homo sapiens
  siRNA target sequence for HCK (NM_002110.2,745-763).
ggagataccgtgaaacatt

SEQ ID NO: 84738 - DNA, 19 bp, Homo sapiens
  siRNA target sequence for HCK (NM_002110.2,746-764).
gagataccgtgaaacatta

SEQ ID NO: 84739 - DNA, 19 bp, Homo sapiens
  siRNA target sequence for HCK (NM_002110.2,1001-1019).
ggatggccacctacaacaa

SEQ ID NO: 84740 - DNA, 19 bp, Homo sapiens
  siRNA target sequence for HCK (NM_002110.2,1342-1360).
gcatccctggtgtgtaaga

SEQ ID NO: 84741 - DNA, 19 bp, Homo sapiens
  siRNA target sequence for HCK (NM_002110.2,1343-1361).
catccctggtgtgtaagat

SEQ ID NO: 84742 - DNA, 19 bp, Homo sapiens
  siRNA target sequence for HEAB (NM_006831.1,750-768).
gaagccaaccactaaattt

SEQ ID NO: 84743 - DNA, 19 bp, Homo sapiens
  siRNA target sequence for HEAB (NM_006831.1,755-773).
caaccactaaatttgaact

SEQ ID NO: 84744 - DNA, 19 bp, Homo sapiens
  siRNA target sequence for HEAB (NM_006831.1,818-836).
cagttcagttggagttgtt

SEQ ID NO: 84745 - DNA, 19 bp, Homo sapiens
  siRNA target sequence for HEAB (NM_006831.1,820-838).
gttcagttggagttgttga

SEQ ID NO: 84746 - DNA, 19 bp, Homo sapiens
  siRNA target sequence for HEAB (NM_006831.1,865-883).
gagctgacccgaaacaaga

SEQ ID NO: 84747 - DNA, 19 bp, Homo sapiens
  siRNA target sequence for HEAB (NM_006831.1,977-995).
ccaaggacactcctatgtt

SEQ ID NO: 84748 - DNA, 19 bp, Homo sapiens
  siRNA target sequence for HEAB (NM_006831.1,982-1000).
gacactcctatgttgcttt

SEQ ID NO: 84749 - DNA, 19 bp, Homo sapiens
  siRNA target sequence for HEAB (NM_006831.1,1035-1053).
gaggcaagcggaaaaggaa

SEQ ID NO: 84750 - DNA, 19 bp, Homo sapiens
  siRNA target sequence for HEAB (NM_006831.1,1115-1133).
gtcgccttctgctcaacta

SEQ ID NO: 84751 - DNA, 19 bp, Homo sapiens
  siRNA target sequence for HEAB (NM_006831.1,1243-1261).
gtcgaagagggtttctcta

SEQ ID NO: 84752 - DNA, 19 bp, Homo sapiens
  siRNA target sequence for HEAB (NM_006831.1,1266-1284).
ggcccctctggtgtatcat

SEQ ID NO: 84753 - DNA, 19 bp, Homo sapiens
  siRNA target sequence for HEAB (NM_006831.1,1267-1285).
gcccctctggtgtatcatt

SEQ ID NO: 84754 - DNA, 19 bp, Homo sapiens
  siRNA target sequence for HEAB (NM_006831.1,1269-1287).
ccctctggtgtatcatttt

SEQ ID NO: 84755 - DNA, 19 bp, Homo sapiens
  siRNA target sequence for HEAB (NM_006831.1,1303-1321).
ggcactaacatcaagcttt

SEQ ID NO: 84756 - DNA, 19 bp, Homo sapiens
  siRNA target sequence for HEAB (NM_006831.1,1304-1322).
gcactaacatcaagcttta

SEQ ID NO: 84757 - DNA, 19 bp, Homo sapiens
  siRNA target sequence for HEAB (NM_006831.1,1307-1325).
ctaacatcaagctttataa

SEQ ID NO: 84758 - DNA, 19 bp, Homo sapiens
  siRNA target sequence for HEAB (NM_006831.1,1340-1358).
gtttagcagatgtgttcaa

SEQ ID NO: 84759 - DNA, 19 bp, Homo sapiens
  siRNA target sequence for HEAB (NM_006831.1,1618-1636).
gagcgtatccgtgagtatt

SEQ ID NO: 84760 - DNA, 19 bp, Homo sapiens
  siRNA target sequence for HEAB (NM_006831.1,1620-1638).
gcgtatccgtgagtatttt

SEQ ID NO: 84761 - DNA, 19 bp, Homo sapiens
  siRNA target sequence for HEAB (NM_006831.1,1621-1639).
cgtatccgtgagtattttt

SEQ ID NO: 84762 - DNA, 19 bp, Homo sapiens
  siRNA target sequence for HEAB (NM_006831.1,1622-1640).
gtatccgtgagtattttta

SEQ ID NO: 84763 - DNA, 19 bp, Homo sapiens
  siRNA target sequence for HEAB (NM_006831.1,1748-1766).
gcatgtctcaagaggataa

SEQ ID NO: 84764 - DNA, 19 bp, Homo sapiens
  siRNA target sequence for HEAB (NM_006831.1,1952-1970).
ctaagaacttccttctcat

SEQ ID NO: 84765 - DNA, 19 bp, Homo sapiens
  siRNA target sequence for HIPK2 (NM_022740.1,133-151).
gcctcacatgtgcaagttt

SEQ ID NO: 84766 - DNA, 19 bp, Homo sapiens
  siRNA target sequence for HIPK2 (NM_022740.1,241-259).
ggctcccacagcaaagtgt

SEQ ID NO: 84767 - DNA, 19 bp, Homo sapiens
  siRNA target sequence for HIPK2 (NM_022740.1,242-260).
gctcccacagcaaagtgta

SEQ ID NO: 84768 - DNA, 19 bp, Homo sapiens
  siRNA target sequence for HIPK2 (NM_022740.1,433-451).
ggcggaccacacaacctaa

SEQ ID NO: 84769 - DNA, 19 bp, Homo sapiens
  siRNA target sequence for HIPK2 (NM_022740.1,434-452).
gcggaccacacaacctaat

SEQ ID NO: 84770 - DNA, 19 bp, Homo sapiens
  siRNA target sequence for HIPK2 (NM_022740.1,514-532).
gaggagatcgagaacacaa

SEQ ID NO: 84771 - DNA, 19 bp, Homo sapiens
  siRNA target sequence for HIPK2 (NM_022740.1,530-548).
caagcagcgtgcagatcat

SEQ ID NO: 84772 - DNA, 19 bp, Homo sapiens
  siRNA target sequence for HIPK2 (NM_022740.1,701-719).
cctacgaggtcttagagtt

SEQ ID NO: 84773 - DNA, 19 bp, Homo sapiens
  siRNA target sequence for HIPK2 (NM_022740.1,863-881).
cggagagtgccgatgacta

SEQ ID NO: 84774 - DNA, 19 bp, Homo sapiens
  siRNA target sequence for HIPK2 (NM_022740.1,864-882).
ggagagtgccgatgactat

SEQ ID NO: 84775 - DNA, 19 bp, Homo sapiens
  siRNA target sequence for HIPK2 (NM_022740.1,865-883).
gagagtgccgatgactata

SEQ ID NO: 84776 - DNA, 19 bp, Homo sapiens
  siRNA target sequence for HIPK2 (NM_022740.1,869-887).
gtgccgatgactataactt

SEQ ID NO: 84777 - DNA, 19 bp, Homo sapiens
  siRNA target sequence for HIPK2 (NM_022740.1,929-947).
gcttggtcttcgagatgtt

SEQ ID NO: 84778 - DNA, 19 bp, Homo sapiens
  siRNA target sequence for HIPK2 (NM_022740.1,949-967).
gagcagaacctctatgact

SEQ ID NO: 84779 - DNA, 19 bp, Homo sapiens
  siRNA target sequence for HIPK2 (NM_022740.1,989-1007).
gccccttgcccctcaaata

SEQ ID NO: 84780 - DNA, 19 bp, Homo sapiens
  siRNA target sequence for HIPK2 (NM_022740.1,1104-1122).
ggtggatccatctagacaa

SEQ ID NO: 84781 - DNA, 19 bp, Homo sapiens
  siRNA target sequence for HIPK2 (NM_022740.1,1188-1206).
ctacttgcagtccagatat

SEQ ID NO: 84782 - DNA, 19 bp, Homo sapiens
  siRNA target sequence for HIPK2 (NM_022740.1,1266-1284).
cctgggctgtgttattgca

SEQ ID NO: 84783 - DNA, 19 bp, Homo sapiens
  siRNA target sequence for HIPK2 (NM_022740.1,1293-1311).
cctgggttggccgttatat

SEQ ID NO: 84784 - DNA, 19 bp, Homo sapiens
  siRNA target sequence for HIPK2 (NM_022740.1,1296-1314).
gggttggccgttatatcca

SEQ ID NO: 84785 - DNA, 19 bp, Homo sapiens
  siRNA target sequence for HIPK2 (NM_022740.1,1392-1410).
gacaaagacaactaggttt

SEQ ID NO: 84786 - DNA, 19 bp, Homo sapiens
  siRNA target sequence for HIPK2 (NM_022740.1,1422-1440).
cacggactcaccatatcct

SEQ ID NO: 84787 - DNA, 19 bp, Homo sapiens
  siRNA target sequence for HIPK2 (NM_022740.1,1424-1442).
cggactcaccatatccttt

SEQ ID NO: 84788 - DNA, 19 bp, Homo sapiens
  siRNA target sequence for HIPK2 (NM_022740.1,1477-1495).
gagacagggattaagtcaa

SEQ ID NO: 84789 - DNA, 19 bp, Homo sapiens
  siRNA target sequence for HIPK2 (NM_022740.1,1543-1561).
gtgaacatgacgacagatt

SEQ ID NO: 84790 - DNA, 19 bp, Homo sapiens
  siRNA target sequence for HIPK2 (NM_022740.1,1571-1589).
gcgacatgttggtagaaaa

SEQ ID NO: 84791 - DNA, 19 bp, Homo sapiens
  siRNA target sequence for HIPK2 (NM_022740.1,1650-1668).
gagaatcactccaatcgaa

SEQ ID NO: 84792 - DNA, 19 bp, Homo sapiens
  siRNA target sequence for HIPK2 (NM_022740.1,1717-1735).
cacagcacacacgtcaaat

SEQ ID NO: 84793 - DNA, 19 bp, Homo sapiens
  siRNA target sequence for HIPK2 (NM_022740.1,1768-1786).
cgggtgaatatgtatgaca

SEQ ID NO: 84794 - DNA, 19 bp, Homo sapiens
  siRNA target sequence for HIPK2 (NM_022740.1,1899-1917).
ctctaccagtgccactatt

SEQ ID NO: 84795 - DNA, 19 bp, Homo sapiens
  siRNA target sequence for HIPK2 (NM_022740.1,1930-1948).
cccgaagtctccatactaa

SEQ ID NO: 84796 - DNA, 19 bp, Homo sapiens
  siRNA target sequence for HIPK2 (NM_022740.1,1931-1949).
ccgaagtctccatactaaa

SEQ ID NO: 84797 - DNA, 19 bp, Homo sapiens
  siRNA target sequence for HIPK2 (NM_022740.1,2130-2148).
ctactcggtgcgaatggaa

SEQ ID NO: 84798 - DNA, 19 bp, Homo sapiens
  siRNA target sequence for HIPK2 (NM_022740.1,2133-2151).
ctcggtgcgaatggaaaat

SEQ ID NO: 84799 - DNA, 19 bp, Homo sapiens
  siRNA target sequence for HIPK2 (NM_022740.1,2349-2367).
gctggcggactggagaaat

SEQ ID NO: 84800 - DNA, 19 bp, Homo sapiens
  siRNA target sequence for HIPK2 (NM_022740.1,2350-2368).
ctggcggactggagaaata

SEQ ID NO: 84801 - DNA, 19 bp, Homo sapiens
  siRNA target sequence for HIPK2 (NM_022740.1,2374-2392).
gctcacggaagccattata

SEQ ID NO: 84802 - DNA, 19 bp, Homo sapiens
  siRNA target sequence for HIPK2 (NM_022740.1,2375-2393).
ctcacggaagccattataa

SEQ ID NO: 84803 - DNA, 19 bp, Homo sapiens
  siRNA target sequence for HIPK2 (NM_022740.1,2719-2737).
cagcggcagacaattgtca

SEQ ID NO: 84804 - DNA, 19 bp, Homo sapiens
  siRNA target sequence for HIPK2 (NM_022740.1,2928-2946).
gcgtgctgggcacaacaat

SEQ ID NO: 84805 - DNA, 19 bp, Homo sapiens
  siRNA target sequence for HIPK2 (NM_022740.1,3043-3061).
gtattggtggagtgtgata

SEQ ID NO: 84806 - DNA, 19 bp, Homo sapiens
  siRNA target sequence for HIPK2 (NM_022740.1,3088-3106).
cactcgtcctcctacaagt

SEQ ID NO: 84807 - DNA, 19 bp, Homo sapiens
  siRNA target sequence for HIPK2 (NM_022740.1,3579-3597).
catccacccgagtcagtat

SEQ ID NO: 84808 - DNA, 19 bp, Homo sapiens
  siRNA target sequence for HIPK2 (NM_022740.1,3684-3702).
caaccagtacccttacata

SEQ ID NO: 84809 - DNA, 19 bp, Homo sapiens
  siRNA target sequence for HIPK3 (NM_005734.2,24-42).
cttggtctacccaccatat

SEQ ID NO: 84810 - DNA, 19 bp, Homo sapiens
  siRNA target sequence for HIPK3 (NM_005734.2,27-45).
ggtctacccaccatatgtt

SEQ ID NO: 84811 - DNA, 19 bp, Homo sapiens
  siRNA target sequence for HIPK3 (NM_005734.2,28-46).
gtctacccaccatatgttt

SEQ ID NO: 84812 - DNA, 19 bp, Homo sapiens
  siRNA target sequence for HIPK3 (NM_005734.2,30-48).
ctacccaccatatgtttat

SEQ ID NO: 84813 - DNA, 19 bp, Homo sapiens
  siRNA target sequence for HIPK3 (NM_005734.2,34-52).
ccaccatatgtttatcaaa

SEQ ID NO: 84814 - DNA, 19 bp, Homo sapiens
  siRNA target sequence for HIPK3 (NM_005734.2,38-56).
catatgtttatcaaactca

SEQ ID NO: 84815 - DNA, 19 bp, Homo sapiens
  siRNA target sequence for HIPK3 (NM_005734.2,94-112).
gagccaagcagttgtgtat

SEQ ID NO: 84816 - DNA, 19 bp, Homo sapiens
  siRNA target sequence for HIPK3 (NM_005734.2,133-151).
cggacctatgtgaatggta

SEQ ID NO: 84817 - DNA, 19 bp, Homo sapiens
  siRNA target sequence for HIPK3 (NM_005734.2,179-197).
ctaagggtagtgcttttca

SEQ ID NO: 84818 - DNA, 19 bp, Homo sapiens
  siRNA target sequence for HIPK3 (NM_005734.2,185-203).
gtagtgcttttcagacaaa

SEQ ID NO: 84819 - DNA, 19 bp, Homo sapiens
  siRNA target sequence for HIPK3 (NM_005734.2,223-241).
cgaggacacaacttttcat

SEQ ID NO: 84820 - DNA, 19 bp, Homo sapiens
  siRNA target sequence for HIPK3 (NM_005734.2,342-360).
gtggcgaaacagattgcat

SEQ ID NO: 84821 - DNA, 19 bp, Homo sapiens
  siRNA target sequence for HIPK3 (NM_005734.2,344-362).
ggcgaaacagattgcattt

SEQ ID NO: 84822 - DNA, 19 bp, Homo sapiens
  siRNA target sequence for HIPK3 (NM_005734.2,399-417).
gagtgaggagttggataat

SEQ ID NO: 84823 - DNA, 19 bp, Homo sapiens
  siRNA target sequence for HIPK3 (NM_005734.2,422-440).
gcagcgcaatgcagattgt

SEQ ID NO: 84824 - DNA, 19 bp, Homo sapiens
  siRNA target sequence for HIPK3 (NM_005734.2,433-451).
cagattgtcgatgaattgt

SEQ ID NO: 84825 - DNA, 19 bp, Homo sapiens
  siRNA target sequence for HIPK3 (NM_005734.2,441-459).
cgatgaattgtccatactt

SEQ ID NO: 84826 - DNA, 19 bp, Homo sapiens
  siRNA target sequence for HIPK3 (NM_005734.2,461-479).
ctgcaatgttgcaaaccaa

SEQ ID NO: 84827 - DNA, 19 bp, Homo sapiens
  siRNA target sequence for HIPK3 (NM_005734.2,506-524).
cagctaccacaggatcaaa

SEQ ID NO: 84828 - DNA, 19 bp, Homo sapiens
  siRNA target sequence for HIPK3 (NM_005734.2,509-527).
ctaccacaggatcaaaaca

SEQ ID NO: 84829 - DNA, 19 bp, Homo sapiens
  siRNA target sequence for HIPK3 (NM_005734.2,537-555).
cactggagaaggtgactat

SEQ ID NO: 84830 - DNA, 19 bp, Homo sapiens
  siRNA target sequence for HIPK3 (NM_005734.2,562-580).
gtacagcatgaagtcttat

SEQ ID NO: 84831 - DNA, 19 bp, Homo sapiens
  siRNA target sequence for HIPK3 (NM_005734.2,629-647).
cgtttggccaggtagttaa

SEQ ID NO: 84832 - DNA, 19 bp, Homo sapiens
  siRNA target sequence for HIPK3 (NM_005734.2,713-731).
cccgtcaaggtcaaataga

SEQ ID NO: 84833 - DNA, 19 bp, Homo sapiens
  siRNA target sequence for HIPK3 (NM_005734.2,714-732).
ccgtcaaggtcaaatagaa

SEQ ID NO: 84834 - DNA, 19 bp, Homo sapiens
  siRNA target sequence for HIPK3 (NM_005734.2,750-768).
gctcagtactgaaaatgct

SEQ ID NO: 84835 - DNA, 19 bp, Homo sapiens
  siRNA target sequence for HIPK3 (NM_005734.2,780-798).
ctttgtacgagcttatgaa

SEQ ID NO: 84836 - DNA, 19 bp, Homo sapiens
  siRNA target sequence for HIPK3 (NM_005734.2,801-819).
ctttcagcaccgtaaccat

SEQ ID NO: 84837 - DNA, 19 bp, Homo sapiens
  siRNA target sequence for HIPK3 (NM_005734.2,805-823).
cagcaccgtaaccatactt

SEQ ID NO: 84838 - DNA, 19 bp, Homo sapiens
  siRNA target sequence for HIPK3 (NM_005734.2,807-825).
gcaccgtaaccatacttgt

SEQ ID NO: 84839 - DNA, 19 bp, Homo sapiens
  siRNA target sequence for HIPK3 (NM_005734.2,808-826).
caccgtaaccatacttgtt

SEQ ID NO: 84840 - DNA, 19 bp, Homo sapiens
  siRNA target sequence for HIPK3 (NM_005734.2,810-828).
ccgtaaccatacttgttta

SEQ ID NO: 84841 - DNA, 19 bp, Homo sapiens
  siRNA target sequence for HIPK3 (NM_005734.2,812-830).
gtaaccatacttgtttagt

SEQ ID NO: 84842 - DNA, 19 bp, Homo sapiens
  siRNA target sequence for HIPK3 (NM_005734.2,821-839).
cttgtttagtctttgagat

SEQ ID NO: 84843 - DNA, 19 bp, Homo sapiens
  siRNA target sequence for HIPK3 (NM_005734.2,852-870).
cttgtatgactttctgaaa

SEQ ID NO: 84844 - DNA, 19 bp, Homo sapiens
  siRNA target sequence for HIPK3 (NM_005734.2,884-902).
gtcccctgccactaaaagt

SEQ ID NO: 84845 - DNA, 19 bp, Homo sapiens
  siRNA target sequence for HIPK3 (NM_005734.2,886-904).
cccctgccactaaaagtga

SEQ ID NO: 84846 - DNA, 19 bp, Homo sapiens
  siRNA target sequence for HIPK3 (NM_005734.2,888-906).
cctgccactaaaagtgatt

SEQ ID NO: 84847 - DNA, 19 bp, Homo sapiens
  siRNA target sequence for HIPK3 (NM_005734.2,903-921).
gattcggcccattcttcaa

SEQ ID NO: 84848 - DNA, 19 bp, Homo sapiens
  siRNA target sequence for HIPK3 (NM_005734.2,908-926).
ggcccattcttcaacaagt

SEQ ID NO: 84849 - DNA, 19 bp, Homo sapiens
  siRNA target sequence for HIPK3 (NM_005734.2,1014-1032).
gcagccttacagggttaaa

SEQ ID NO: 84850 - DNA, 19 bp, Homo sapiens
  siRNA target sequence for HIPK3 (NM_005734.2,1017-1035).
gccttacagggttaaagta

SEQ ID NO: 84851 - DNA, 19 bp, Homo sapiens
  siRNA target sequence for HIPK3 (NM_005734.2,1019-1037).
cttacagggttaaagtaat

SEQ ID NO: 84852 - DNA, 19 bp, Homo sapiens
  siRNA target sequence for HIPK3 (NM_005734.2,1045-1063).
gggtcggccagtcatgtat

SEQ ID NO: 84853 - DNA, 19 bp, Homo sapiens
  siRNA target sequence for HIPK3 (NM_005734.2,1047-1065).
gtcggccagtcatgtatca

SEQ ID NO: 84854 - DNA, 19 bp, Homo sapiens
  siRNA target sequence for HIPK3 (NM_005734.2,1049-1067).
cggccagtcatgtatcaaa

SEQ ID NO: 84855 - DNA, 19 bp, Homo sapiens
  siRNA target sequence for HIPK3 (NM_005734.2,1068-1086).
gactgtttgttcaacatat

SEQ ID NO: 84856 - DNA, 19 bp, Homo sapiens
  siRNA target sequence for HIPK3 (NM_005734.2,1256-1274).
gtttgccaggagaacagtt

SEQ ID NO: 84857 - DNA, 19 bp, Homo sapiens
  siRNA target sequence for HIPK3 (NM_005734.2,1260-1278).
gccaggagaacagttgtta

SEQ ID NO: 84858 - DNA, 19 bp, Homo sapiens
  siRNA target sequence for HIPK3 (NM_005734.2,1286-1304).
gtactaaatccacaagatt

SEQ ID NO: 84859 - DNA, 19 bp, Homo sapiens
  siRNA target sequence for HIPK3 (NM_005734.2,1330-1348).
cattctggttggagattaa

SEQ ID NO: 84860 - DNA, 19 bp, Homo sapiens
  siRNA target sequence for HIPK3 (NM_005734.2,1374-1392).
gacaggaatgaagtctaaa

SEQ ID NO: 84861 - DNA, 19 bp, Homo sapiens
  siRNA target sequence for HIPK3 (NM_005734.2,1376-1394).
caggaatgaagtctaaaga

SEQ ID NO: 84862 - DNA, 19 bp, Homo sapiens
  siRNA target sequence for HIPK3 (NM_005734.2,1489-1507).
gatagaagagaatttgtta

SEQ ID NO: 84863 - DNA, 19 bp, Homo sapiens
  siRNA target sequence for HIPK3 (NM_005734.2,1609-1627).
cctcatagcaaccatgtaa

SEQ ID NO: 84864 - DNA, 19 bp, Homo sapiens
  siRNA target sequence for HIPK3 (NM_005734.2,1610-1628).
ctcatagcaaccatgtaaa

SEQ ID NO: 84865 - DNA, 19 bp, Homo sapiens
  siRNA target sequence for HIPK3 (NM_005734.2,1735-1753).
gctacactgactgcaaatt

SEQ ID NO: 84866 - DNA, 19 bp, Homo sapiens
  siRNA target sequence for HIPK3 (NM_005734.2,1864-1882).
gcttttcagcagacattga

SEQ ID NO: 84867 - DNA, 19 bp, Homo sapiens
  siRNA target sequence for HIPK3 (NM_005734.2,1887-1905).
ctgtcccccagctattcaa

SEQ ID NO: 84868 - DNA, 19 bp, Homo sapiens
  siRNA target sequence for HIPK3 (NM_005734.2,2004-2022).
gatccgaccaggagttctt

SEQ ID NO: 84869 - DNA, 19 bp, Homo sapiens
  siRNA target sequence for HIPK3 (NM_005734.2,2009-2027).
gaccaggagttctttctca

SEQ ID NO: 84870 - DNA, 19 bp, Homo sapiens
  siRNA target sequence for HIPK3 (NM_005734.2,2028-2046).
gacgtggtctggtagaaca

SEQ ID NO: 84871 - DNA, 19 bp, Homo sapiens
  siRNA target sequence for HIPK3 (NM_005734.2,2088-2106).
ggctcctgctactactaca

SEQ ID NO: 84872 - DNA, 19 bp, Homo sapiens
  siRNA target sequence for HIPK3 (NM_005734.2,2160-2178).
gatttcatgcagcaatcat

SEQ ID NO: 84873 - DNA, 19 bp, Homo sapiens
  siRNA target sequence for HIPK3 (NM_005734.2,2208-2226).
gaccaatcagataacttta

SEQ ID NO: 84874 - DNA, 19 bp, Homo sapiens
  siRNA target sequence for HIPK3 (NM_005734.2,2277-2295).
gcctgccactaccaagaaa

SEQ ID NO: 84875 - DNA, 19 bp, Homo sapiens
  siRNA target sequence for HIPK3 (NM_005734.2,2304-2322).
gtgccagaacagaggtatt

SEQ ID NO: 84876 - DNA, 19 bp, Homo sapiens
  siRNA target sequence for HIPK3 (NM_005734.2,2368-2386).
gctttcagttggagtaatt

SEQ ID NO: 84877 - DNA, 19 bp, Homo sapiens
  siRNA target sequence for HIPK3 (NM_005734.2,2387-2405).
cattacagaataccaatat

SEQ ID NO: 84878 - DNA, 19 bp, Homo sapiens
  siRNA target sequence for HIPK3 (NM_005734.2,2449-2467).
gatgtcgaggaagtaagtt

SEQ ID NO: 84879 - DNA, 19 bp, Homo sapiens
  siRNA target sequence for HIPK3 (NM_005734.2,2452-2470).
gtcgaggaagtaagttgta

SEQ ID NO: 84880 - DNA, 19 bp, Homo sapiens
  siRNA target sequence for HIPK3 (NM_005734.2,2454-2472).
cgaggaagtaagttgtata

SEQ ID NO: 84881 - DNA, 19 bp, Homo sapiens
  siRNA target sequence for HIPK3 (NM_005734.2,2457-2475).
ggaagtaagttgtatagaa

SEQ ID NO: 84882 - DNA, 19 bp, Homo sapiens
  siRNA target sequence for HIPK3 (NM_005734.2,2539-2557).
gactctgattcatcagttt

SEQ ID NO: 84883 - DNA, 19 bp, Homo sapiens
  siRNA target sequence for HIPK3 (NM_005734.2,2566-2584).
cagcggcaaaccatcatta

SEQ ID NO: 84884 - DNA, 19 bp, Homo sapiens
  siRNA target sequence for HIPK3 (NM_005734.2,2568-2586).
gcggcaaaccatcattatt

SEQ ID NO: 84885 - DNA, 19 bp, Homo sapiens
  siRNA target sequence for HIPK3 (NM_005734.2,2668-2686).
ctcagagaatgtaaaggta

SEQ ID NO: 84886 - DNA, 19 bp, Homo sapiens
  siRNA target sequence for HIPK3 (NM_005734.2,2701-2719).
gcttgccagagcactttga

SEQ ID NO: 84887 - DNA, 19 bp, Homo sapiens
  siRNA target sequence for HIPK3 (NM_005734.2,2705-2723).
gccagagcactttgaatat

SEQ ID NO: 84888 - DNA, 19 bp, Homo sapiens
  siRNA target sequence for HIPK3 (NM_005734.2,2709-2727).
gagcactttgaatattgat

SEQ ID NO: 84889 - DNA, 19 bp, Homo sapiens
  siRNA target sequence for HIPK3 (NM_005734.2,2725-2743).
gatcggatgtgttcattaa

SEQ ID NO: 84890 - DNA, 19 bp, Homo sapiens
  siRNA target sequence for HIPK3 (NM_005734.2,2728-2746).
cggatgtgttcattaagta

SEQ ID NO: 84891 - DNA, 19 bp, Homo sapiens
  siRNA target sequence for HIPK3 (NM_005734.2,2799-2817).
ctgcaagagaccgaatagt

SEQ ID NO: 84892 - DNA, 19 bp, Homo sapiens
  siRNA target sequence for HIPK3 (NM_005734.2,2805-2823).
gagaccgaatagtatgtca

SEQ ID NO: 84893 - DNA, 19 bp, Homo sapiens
  siRNA target sequence for HIPK3 (NM_005734.2,2811-2829).
gaatagtatgtcagatgaa

SEQ ID NO: 84894 - DNA, 19 bp, Homo sapiens
  siRNA target sequence for HIPK3 (NM_005734.2,2883-2901).
cgggcatgacagtccattt

SEQ ID NO: 84895 - DNA, 19 bp, Homo sapiens
  siRNA target sequence for HIPK3 (NM_005734.2,2886-2904).
gcatgacagtccatttgca

SEQ ID NO: 84896 - DNA, 19 bp, Homo sapiens
  siRNA target sequence for HIPK3 (NM_005734.2,2917-2935).
gtggaggacactcatgaaa

SEQ ID NO: 84897 - DNA, 19 bp, Homo sapiens
  siRNA target sequence for HIPK3 (NM_005734.2,3042-3060).
ggcaaacacagattctata

SEQ ID NO: 84898 - DNA, 19 bp, Homo sapiens
  siRNA target sequence for HIPK3 (NM_005734.2,3056-3074).
ctatatgccagccattaat

SEQ ID NO: 84899 - DNA, 19 bp, Homo sapiens
  siRNA target sequence for HIPK3 (NM_005734.2,3086-3104).
ctgcccctggaagattaaa

SEQ ID NO: 84900 - DNA, 19 bp, Homo sapiens
  siRNA target sequence for HIPK3 (NM_005734.2,3089-3107).
cccctggaagattaaacca

SEQ ID NO: 84901 - DNA, 19 bp, Homo sapiens
  siRNA target sequence for HIPK3 (NM_005734.2,3120-3138).
gggtactcgtcagcaaaaa

SEQ ID NO: 84902 - DNA, 19 bp, Homo sapiens
  siRNA target sequence for HIPK3 (NM_005734.2,3121-3139).
ggtactcgtcagcaaaaat

SEQ ID NO: 84903 - DNA, 19 bp, Homo sapiens
  siRNA target sequence for HIPK3 (NM_005734.2,3122-3140).
gtactcgtcagcaaaaatt

SEQ ID NO: 84904 - DNA, 19 bp, Homo sapiens
  siRNA target sequence for HIPK3 (NM_005734.2,3178-3196).
caggttcagcactttggat

SEQ ID NO: 84905 - DNA, 19 bp, Homo sapiens
  siRNA target sequence for HIPK3 (NM_005734.2,3260-3278).
gtgttaccagtaatccatt

SEQ ID NO: 84906 - DNA, 19 bp, Homo sapiens
  siRNA target sequence for HIPK3 (NM_005734.2,3289-3307).
catggaagtcccaatcaca

SEQ ID NO: 84907 - DNA, 19 bp, Homo sapiens
  siRNA target sequence for HIPK3 (NM_005734.2,3345-3363).
cggaggacagcctactcta

SEQ ID NO: 84908 - DNA, 19 bp, Homo sapiens
  siRNA target sequence for HIPK3 (NM_005734.2,3451-3469).
cagcatccaacttataata

SEQ ID NO: 84909 - DNA, 19 bp, Homo sapiens
  siRNA target sequence for HIPK3 (NM_005734.2,3474-3492).
ccatcccagtggcatagtt

SEQ ID NO: 84910 - DNA, 19 bp, Homo sapiens
  siRNA target sequence for HIPK3 (NM_005734.2,3510-3528).
cttaaatccccgtctgtta

SEQ ID NO: 84911 - DNA, 19 bp, Homo sapiens
  siRNA target sequence for HIPK3 (NM_005734.2,3530-3548).
catccccaaccattcatca

SEQ ID NO: 84912 - DNA, 19 bp, Homo sapiens
  siRNA target sequence for HIPK3 (NM_005734.2,3547-3565).
cagactcagtacaaaccaa

SEQ ID NO: 84913 - DNA, 19 bp, Homo sapiens
  siRNA target sequence for HIPK3 (NM_005734.2,3570-3588).
cccaccacattcttacatt

SEQ ID NO: 84914 - DNA, 19 bp, Homo sapiens
  siRNA target sequence for HK1 (NM_000188.1,174-192).
ctccgatgaaactctcata

SEQ ID NO: 84915 - DNA, 19 bp, Homo sapiens
  siRNA target sequence for HK1 (NM_000188.1,176-194).
ccgatgaaactctcataga

SEQ ID NO: 84916 - DNA, 19 bp, Homo sapiens
  siRNA target sequence for HK1 (NM_000188.1,177-195).
cgatgaaactctcatagat

SEQ ID NO: 84917 - DNA, 19 bp, Homo sapiens
  siRNA target sequence for HK1 (NM_000188.1,181-199).
gaaactctcatagatatca

SEQ ID NO: 84918 - DNA, 19 bp, Homo sapiens
  siRNA target sequence for HK1 (NM_000188.1,229-247).
ggcctctcccgggatttta

SEQ ID NO: 84919 - DNA, 19 bp, Homo sapiens
  siRNA target sequence for HK1 (NM_000188.1,234-252).
ctcccgggattttaatcca

SEQ ID NO: 84920 - DNA, 19 bp, Homo sapiens
  siRNA target sequence for HK1 (NM_000188.1,267-285).
gatgttgccaacattcgta

SEQ ID NO: 84921 - DNA, 19 bp, Homo sapiens
  siRNA target sequence for HK1 (NM_000188.1,337-355).
ggtgggtcttcctttcgaa

SEQ ID NO: 84922 - DNA, 19 bp, Homo sapiens
  siRNA target sequence for HK1 (NM_000188.1,341-359).
ggtcttcctttcgaattct

SEQ ID NO: 84923 - DNA, 19 bp, Homo sapiens
  siRNA target sequence for HK1 (NM_000188.1,362-380).
gggtgcaagtgaatcatga

SEQ ID NO: 84924 - DNA, 19 bp, Homo sapiens
  siRNA target sequence for HK1 (NM_000188.1,554-572).
gccaacaatccaaaataga

SEQ ID NO: 84925 - DNA, 19 bp, Homo sapiens
  siRNA target sequence for HK1 (NM_000188.1,555-573).
ccaacaatccaaaatagat

SEQ ID NO: 84926 - DNA, 19 bp, Homo sapiens
  siRNA target sequence for HK1 (NM_000188.1,591-609).
ctggacaaagcgatttaaa

SEQ ID NO: 84927 - DNA, 19 bp, Homo sapiens
  siRNA target sequence for HK1 (NM_000188.1,875-893).
gagacgatggatcattaga

SEQ ID NO: 84928 - DNA, 19 bp, Homo sapiens
  siRNA target sequence for HK1 (NM_000188.1,1021-1039).
gccaaggagggcctcttat

SEQ ID NO: 84929 - DNA, 19 bp, Homo sapiens
  siRNA target sequence for HK1 (NM_000188.1,1023-1041).
caaggagggcctcttattt

SEQ ID NO: 84930 - DNA, 19 bp, Homo sapiens
  siRNA target sequence for HK1 (NM_000188.1,1026-1044).
ggagggcctcttatttgaa

SEQ ID NO: 84931 - DNA, 19 bp, Homo sapiens
  siRNA target sequence for HK1 (NM_000188.1,1066-1084).
ctcacccgagggaagttta

SEQ ID NO: 84932 - DNA, 19 bp, Homo sapiens
  siRNA target sequence for HK1 (NM_000188.1,1093-1111).
gatgtgtcagccatcgaaa

SEQ ID NO: 84933 - DNA, 19 bp, Homo sapiens
  siRNA target sequence for HK1 (NM_000188.1,1096-1114).
gtgtcagccatcgaaaaga

SEQ ID NO: 84934 - DNA, 19 bp, Homo sapiens
  siRNA target sequence for HK1 (NM_000188.1,1126-1144).
ctccacaatgccaaagaaa

SEQ ID NO: 84935 - DNA, 19 bp, Homo sapiens
  siRNA target sequence for HK1 (NM_000188.1,1312-1330).
ggtgtcgacggatctcttt

SEQ ID NO: 84936 - DNA, 19 bp, Homo sapiens
  siRNA target sequence for HK1 (NM_000188.1,1313-1331).
gtgtcgacggatctcttta

SEQ ID NO: 84937 - DNA, 19 bp, Homo sapiens
  siRNA target sequence for HK1 (NM_000188.1,1315-1333).
gtcgacggatctctttaca

SEQ ID NO: 84938 - DNA, 19 bp, Homo sapiens
  siRNA target sequence for HK1 (NM_000188.1,1318-1336).
gacggatctctttacaaga

SEQ ID NO: 84939 - DNA, 19 bp, Homo sapiens
  siRNA target sequence for HK1 (NM_000188.1,1332-1350).
caagacgcacccacagtat

SEQ ID NO: 84940 - DNA, 19 bp, Homo sapiens
  siRNA target sequence for HK1 (NM_000188.1,1581-1599).
gaagcagacgcacaacaat

SEQ ID NO: 84941 - DNA, 19 bp, Homo sapiens
  siRNA target sequence for HK1 (NM_000188.1,1649-1667).
ccgagaatggtgacttctt

SEQ ID NO: 84942 - DNA, 19 bp, Homo sapiens
  siRNA target sequence for HK1 (NM_000188.1,1716-1734).
ccgtagtgggaaaaagaga

SEQ ID NO: 84943 - DNA, 19 bp, Homo sapiens
  siRNA target sequence for HK1 (NM_000188.1,1717-1735).
cgtagtgggaaaaagagaa

SEQ ID NO: 84944 - DNA, 19 bp, Homo sapiens
  siRNA target sequence for HK1 (NM_000188.1,1736-1754).
cggtggaaatgcacaacaa

SEQ ID NO: 84945 - DNA, 19 bp, Homo sapiens
  siRNA target sequence for HK1 (NM_000188.1,1755-1773).
gatctacgccattcctatt

SEQ ID NO: 84946 - DNA, 19 bp, Homo sapiens
  siRNA target sequence for HK1 (NM_000188.1,1762-1780).
gccattcctattgaaatca

SEQ ID NO: 84947 - DNA, 19 bp, Homo sapiens
  siRNA target sequence for HK1 (NM_000188.1,1801-1819).
ctgtttgatcacattgtct

SEQ ID NO: 84948 - DNA, 19 bp, Homo sapiens
  siRNA target sequence for HK1 (NM_000188.1,1839-1857).
ggactacatggggatcaaa

SEQ ID NO: 84949 - DNA, 19 bp, Homo sapiens
  siRNA target sequence for HK1 (NM_000188.1,1912-1930).
ctggacgcgggaatcttga

SEQ ID NO: 84950 - DNA, 19 bp, Homo sapiens
  siRNA target sequence for HK1 (NM_000188.1,1915-1933).
gacgcgggaatcttgatca

SEQ ID NO: 84951 - DNA, 19 bp, Homo sapiens
  siRNA target sequence for HK1 (NM_000188.1,1934-1952).
cgtggacaaagggttttaa

SEQ ID NO: 84952 - DNA, 19 bp, Homo sapiens
  siRNA target sequence for HK1 (NM_000188.1,1964-1982).
gcgtgggccacgatgtagt

SEQ ID NO: 84953 - DNA, 19 bp, Homo sapiens
  siRNA target sequence for HK1 (NM_000188.1,1990-2008).
ctaagggatgcgataaaaa

SEQ ID NO: 84954 - DNA, 19 bp, Homo sapiens
  siRNA target sequence for HK1 (NM_000188.1,2227-2245).
gggtgtctggatgatatca

SEQ ID NO: 84955 - DNA, 19 bp, Homo sapiens
  siRNA target sequence for HK1 (NM_000188.1,2271-2289).
cgaatattccctaaatgct

SEQ ID NO: 84956 - DNA, 19 bp, Homo sapiens
  siRNA target sequence for HK1 (NM_000188.1,2335-2353).
gaaatcgtccgcaacatct

SEQ ID NO: 84957 - DNA, 19 bp, Homo sapiens
  siRNA target sequence for HK1 (NM_000188.1,2451-2469).
cgagagtgaccgattagca

SEQ ID NO: 84958 - DNA, 19 bp, Homo sapiens
  siRNA target sequence for HK1 (NM_000188.1,2494-2512).
cagcagctaggtctgaata

SEQ ID NO: 84959 - DNA, 19 bp, Homo sapiens
  siRNA target sequence for HK1 (NM_000188.1,2497-2515).
cagctaggtctgaatagca

SEQ ID NO: 84960 - DNA, 19 bp, Homo sapiens
  siRNA target sequence for HK1 (NM_000188.1,2597-2615).
ctgcggttgtggataagat

SEQ ID NO: 84961 - DNA, 19 bp, Homo sapiens
  siRNA target sequence for HK1 (NM_000188.1,2722-2740).
gaactgtcaccaaaatgta

SEQ ID NO: 84962 - DNA, 19 bp, Homo sapiens
  siRNA target sequence for HK1 (NM_033496.1,190-208).
gggagattgggattgacaa

SEQ ID NO: 84963 - DNA, 19 bp, Homo sapiens
  siRNA target sequence for HK1 (NM_033496.1,2315-2333).
cagactggtggacgaatat

SEQ ID NO: 84964 - DNA, 19 bp, Homo sapiens
  siRNA target sequence for HK1 (NM_033496.1,2324-2342).
ggacgaatattccctaaat

SEQ ID NO: 84965 - DNA, 19 bp, Homo sapiens
  siRNA target sequence for HK2 (NM_000189.4,2326-2344).
ctggctaacttcatggata

SEQ ID NO: 84966 - DNA, 19 bp, Homo sapiens
  siRNA target sequence for HK2 (NM_000189.4,2394-2412).
cccctgccaccagactaaa

SEQ ID NO: 84967 - DNA, 19 bp, Homo sapiens
  siRNA target sequence for HK2 (NM_000189.4,2397-2415).
ctgccaccagactaaacta

SEQ ID NO: 84968 - DNA, 19 bp, Homo sapiens
  siRNA target sequence for HK2 (NM_000189.4,2399-2417).
gccaccagactaaactaga

SEQ ID NO: 84969 - DNA, 19 bp, Homo sapiens
  siRNA target sequence for HK2 (NM_000189.4,2408-2426).
ctaaactagacgagagttt

SEQ ID NO: 84970 - DNA, 19 bp, Homo sapiens
  siRNA target sequence for HK2 (NM_000189.4,2435-2453).
catggaccaagggattcaa

SEQ ID NO: 84971 - DNA, 19 bp, Homo sapiens
  siRNA target sequence for HK2 (NM_000189.4,3136-3154).
gagcggctgcgctctacta

SEQ ID NO: 84972 - DNA, 19 bp, Homo sapiens
  siRNA target sequence for HK2 (NM_000189.4,3138-3156).
gcggctgcgctctactatt

SEQ ID NO: 84973 - DNA, 19 bp, Homo sapiens
  siRNA target sequence for HK2 (NM_000189.4,3196-3214).
gccaagcgtctacataaga

SEQ ID NO: 84974 - DNA, 19 bp, Homo sapiens
  siRNA target sequence for HK2 (NM_000189.4,3581-3599).
gagtggagatgcacaacaa

SEQ ID NO: 84975 - DNA, 19 bp, Homo sapiens
  siRNA target sequence for HK2 (NM_000189.4,3635-3653).
ccggggacgagctctttga

SEQ ID NO: 84976 - DNA, 19 bp, Homo sapiens
  siRNA target sequence for HK2 (NM_000189.4,3771-3789).
cctcctcaagtggacaaaa

SEQ ID NO: 84977 - DNA, 19 bp, Homo sapiens
  siRNA target sequence for HK2 (NM_000189.4,3895-3913).
gacacagtcggaactatga

SEQ ID NO: 84978 - DNA, 19 bp, Homo sapiens
  siRNA target sequence for HK2 (NM_000189.4,4081-4099).
gatgacttccgcacagaat

SEQ ID NO: 84979 - DNA, 19 bp, Homo sapiens
  siRNA target sequence for HK2 (NM_000189.4,4189-4207).
cgtaacattctcatcgatt

SEQ ID NO: 84980 - DNA, 19 bp, Homo sapiens
  siRNA target sequence for HK2 (NM_000189.4,4190-4208).
gtaacattctcatcgattt

SEQ ID NO: 84981 - DNA, 19 bp, Homo sapiens
  siRNA target sequence for HK2 (NM_000189.4,4328-4346).
gagccatcctgcaacactt

SEQ ID NO: 84982 - DNA, 19 bp, Homo sapiens
  siRNA target sequence for HK2 (NM_000189.4,4366-4384).
gacgacagcatcattgtta

SEQ ID NO: 84983 - DNA, 19 bp, Homo sapiens
  siRNA target sequence for HK2 (NM_000189.4,4475-4493).
ggctggacgctctcaaagt

SEQ ID NO: 84984 - DNA, 19 bp, Homo sapiens
  siRNA target sequence for HK2 (NM_000189.4,4531-4549).
cctcactttgccaaagtca

SEQ ID NO: 84985 - DNA, 19 bp, Homo sapiens
  siRNA target sequence for HK2 (NM_000189.4,4566-4584).
ggacctggctccgaaatgt

SEQ ID NO: 84986 - DNA, 19 bp, Homo sapiens
  siRNA target sequence for HK2 (NM_000189.4,4577-4595).
cgaaatgtgatgtgtcttt

SEQ ID NO: 84987 - DNA, 19 bp, Homo sapiens
  siRNA target sequence for HK3 (NM_002115.1,375-393).
gcctcactgcgtgttttgt

SEQ ID NO: 84988 - DNA, 19 bp, Homo sapiens
  siRNA target sequence for HK3 (NM_002115.1,387-405).
gttttgtgggtgactctaa

SEQ ID NO: 84989 - DNA, 19 bp, Homo sapiens
  siRNA target sequence for HK3 (NM_002115.1,784-802).
gtgaggttgggctagttgt

SEQ ID NO: 84990 - DNA, 19 bp, Homo sapiens
  siRNA target sequence for HK3 (NM_002115.1,978-996).
ggtgctcagaggtttgaga

SEQ ID NO: 84991 - DNA, 19 bp, Homo sapiens
  siRNA target sequence for HK3 (NM_002115.1,1159-1177).
cagcccgtgtccatgctat

SEQ ID NO: 84992 - DNA, 19 bp, Homo sapiens
  siRNA target sequence for HK3 (NM_002115.1,1201-1219).
ctggggcttcggatgttga

SEQ ID NO: 84993 - DNA, 19 bp, Homo sapiens
  siRNA target sequence for HK3 (NM_002115.1,1308-1326).
cacagccgggagcaacaaa

SEQ ID NO: 84994 - DNA, 19 bp, Homo sapiens
  siRNA target sequence for HK3 (NM_002115.1,1312-1330).
gccgggagcaacaaacact

SEQ ID NO: 84995 - DNA, 19 bp, Homo sapiens
  siRNA target sequence for HK3 (NM_002115.1,1422-1440).
gaatgcgatgtctccttaa

SEQ ID NO: 84996 - DNA, 19 bp, Homo sapiens
  siRNA target sequence for HK3 (NM_002115.1,1544-1562).
ccggttgaaccatgatcaa

SEQ ID NO: 84997 - DNA, 19 bp, Homo sapiens
  siRNA target sequence for HK3 (NM_002115.1,2194-2212).
gccgcatgtgcatcaacat

SEQ ID NO: 84998 - DNA, 19 bp, Homo sapiens
  siRNA target sequence for HK3 (NM_002115.1,2252-2270).
gctcagcacccgctttgat

SEQ ID NO: 84999 - DNA, 19 bp, Homo sapiens
  siRNA target sequence for HK3 (NM_002115.1,2351-2369).
cgtccgccacatcctttta

SEQ ID NO: 85000 - DNA, 19 bp, Homo sapiens
  siRNA target sequence for HK3 (NM_002115.1,2354-2372).
ccgccacatccttttacat

SEQ ID NO: 85001 - DNA, 19 bp, Homo sapiens
  siRNA target sequence for HK3 (NM_002115.1,2355-2373).
cgccacatccttttacatt

SEQ ID NO: 85002 - DNA, 19 bp, Homo sapiens
  siRNA target sequence for HK3 (NM_002115.1,2357-2375).
ccacatccttttacattta

SEQ ID NO: 85003 - DNA, 19 bp, Homo sapiens
  siRNA target sequence for HK3 (NM_002115.1,2377-2395).
ccagccttggcgttctctt

SEQ ID NO: 85004 - DNA, 19 bp, Homo sapiens
  siRNA target sequence for HRI (NM_014413.2,169-187).
ccgaatatgacgaatctga

SEQ ID NO: 85005 - DNA, 19 bp, Homo sapiens
  siRNA target sequence for HRI (NM_014413.2,170-188).
cgaatatgacgaatctgat

SEQ ID NO: 85006 - DNA, 19 bp, Homo sapiens
  siRNA target sequence for HRI (NM_014413.2,258-276).
caactcttgctggtttctt

SEQ ID NO: 85007 - DNA, 19 bp, Homo sapiens
  siRNA target sequence for HRI (NM_014413.2,318-336).
cgttcaagacaggtgttta

SEQ ID NO: 85008 - DNA, 19 bp, Homo sapiens
  siRNA target sequence for HRI (NM_014413.2,339-357).
ctactttgccagacgttta

SEQ ID NO: 85009 - DNA, 19 bp, Homo sapiens
  siRNA target sequence for HRI (NM_014413.2,342-360).
ctttgccagacgtttatca

SEQ ID NO: 85010 - DNA, 19 bp, Homo sapiens
  siRNA target sequence for HRI (NM_014413.2,346-364).
gccagacgtttatcaaaat

SEQ ID NO: 85011 - DNA, 19 bp, Homo sapiens
  siRNA target sequence for HRI (NM_014413.2,374-392).
gtcttctttcacttgtagt

SEQ ID NO: 85012 - DNA, 19 bp, Homo sapiens
  siRNA target sequence for HRI (NM_014413.2,393-411).
gacgagtttagctcattga

SEQ ID NO: 85013 - DNA, 19 bp, Homo sapiens
  siRNA target sequence for HRI (NM_014413.2,395-413).
cgagtttagctcattgaga

SEQ ID NO: 85014 - DNA, 19 bp, Homo sapiens
  siRNA target sequence for HRI (NM_014413.2,403-421).
gctcattgagactacatca

SEQ ID NO: 85015 - DNA, 19 bp, Homo sapiens
  siRNA target sequence for HRI (NM_014413.2,417-435).
catcacaacagagctatta

SEQ ID NO: 85016 - DNA, 19 bp, Homo sapiens
  siRNA target sequence for HRI (NM_014413.2,425-443).
cagagctattactcactta

SEQ ID NO: 85017 - DNA, 19 bp, Homo sapiens
  siRNA target sequence for HRI (NM_014413.2,427-445).
gagctattactcacttaat

SEQ ID NO: 85018 - DNA, 19 bp, Homo sapiens
  siRNA target sequence for HRI (NM_014413.2,429-447).
gctattactcacttaatga

SEQ ID NO: 85019 - DNA, 19 bp, Homo sapiens
  siRNA target sequence for HRI (NM_014413.2,440-458).
cttaatgaggtctgctaaa

SEQ ID NO: 85020 - DNA, 19 bp, Homo sapiens
  siRNA target sequence for HRI (NM_014413.2,473-491).
ggatccttgtgaggatatt

SEQ ID NO: 85021 - DNA, 19 bp, Homo sapiens
  siRNA target sequence for HRI (NM_014413.2,474-492).
gatccttgtgaggatattt

SEQ ID NO: 85022 - DNA, 19 bp, Homo sapiens
  siRNA target sequence for HRI (NM_014413.2,495-513).
cgtatccagaaaatcagat

SEQ ID NO: 85023 - DNA, 19 bp, Homo sapiens
  siRNA target sequence for HRI (NM_014413.2,535-553).
cacaaacttcacgttactt

SEQ ID NO: 85024 - DNA, 19 bp, Homo sapiens
  siRNA target sequence for HRI (NM_014413.2,541-559).
cttcacgttacttaaatga

SEQ ID NO: 85025 - DNA, 19 bp, Homo sapiens
  siRNA target sequence for HRI (NM_014413.2,611-629).
ggtcaggaataaattagat

SEQ ID NO: 85026 - DNA, 19 bp, Homo sapiens
  siRNA target sequence for HRI (NM_014413.2,659-677).
gattaagggtgcaactaaa

SEQ ID NO: 85027 - DNA, 19 bp, Homo sapiens
  siRNA target sequence for HRI (NM_014413.2,666-684).
ggtgcaactaaaacagttt

SEQ ID NO: 85028 - DNA, 19 bp, Homo sapiens
  siRNA target sequence for HRI (NM_014413.2,752-770).
caccgcgtggatagaacat

SEQ ID NO: 85029 - DNA, 19 bp, Homo sapiens
  siRNA target sequence for HRI (NM_014413.2,887-905).
cagctcatccattatcttt

SEQ ID NO: 85030 - DNA, 19 bp, Homo sapiens
  siRNA target sequence for HRI (NM_014413.2,975-993).
gtgaagtacaccaccaatt

SEQ ID NO: 85031 - DNA, 19 bp, Homo sapiens
  siRNA target sequence for HRI (NM_014413.2,977-995).
gaagtacaccaccaattta

SEQ ID NO: 85032 - DNA, 19 bp, Homo sapiens
  siRNA target sequence for HRI (NM_014413.2,1056-1074).
ggtttgtctgccagttcaa

SEQ ID NO: 85033 - DNA, 19 bp, Homo sapiens
  siRNA target sequence for HRI (NM_014413.2,1057-1075).
gtttgtctgccagttcaat

SEQ ID NO: 85034 - DNA, 19 bp, Homo sapiens
  siRNA target sequence for HRI (NM_014413.2,1089-1107).
ctgccactcaggcgtaatt

SEQ ID NO: 85035 - DNA, 19 bp, Homo sapiens
  siRNA target sequence for HRI (NM_014413.2,1108-1126).
cccacctagaggagagttt

SEQ ID NO: 85036 - DNA, 19 bp, Homo sapiens
  siRNA target sequence for HRI (NM_014413.2,1112-1130).
cctagaggagagtttcaca

SEQ ID NO: 85037 - DNA, 19 bp, Homo sapiens
  siRNA target sequence for HRI (NM_014413.2,1127-1145).
cacatccaccgaagaatct

SEQ ID NO: 85038 - DNA, 19 bp, Homo sapiens
  siRNA target sequence for HRI (NM_014413.2,1144-1162).
cttccgaagaaaatgtcaa

SEQ ID NO: 85039 - DNA, 19 bp, Homo sapiens
  siRNA target sequence for HRI (NM_014413.2,1148-1166).
cgaagaaaatgtcaacttt

SEQ ID NO: 85040 - DNA, 19 bp, Homo sapiens
  siRNA target sequence for HRI (NM_014413.2,1229-1247).
ctcgctgtgggattggata

SEQ ID NO: 85041 - DNA, 19 bp, Homo sapiens
  siRNA target sequence for HRI (NM_014413.2,1243-1261).
ggatagtcgagagaaacaa

SEQ ID NO: 85042 - DNA, 19 bp, Homo sapiens
  siRNA target sequence for HRI (NM_014413.2,1283-1301).
cgagtctgcctgtccttat

SEQ ID NO: 85043 - DNA, 19 bp, Homo sapiens
  siRNA target sequence for HRI (NM_014413.2,1307-1325).
ggccaatgttgcaacaaaa

SEQ ID NO: 85044 - DNA, 19 bp, Homo sapiens
  siRNA target sequence for HRI (NM_014413.2,1341-1359).
gtagaaggtgtgttttaca

SEQ ID NO: 85045 - DNA, 19 bp, Homo sapiens
  siRNA target sequence for HRI (NM_014413.2,1417-1435).
gccctgatcagcaagtaaa

SEQ ID NO: 85046 - DNA, 19 bp, Homo sapiens
  siRNA target sequence for HRI (NM_014413.2,1418-1436).
ccctgatcagcaagtaaaa

SEQ ID NO: 85047 - DNA, 19 bp, Homo sapiens
  siRNA target sequence for HRI (NM_014413.2,1420-1438).
ctgatcagcaagtaaaaat

SEQ ID NO: 85048 - DNA, 19 bp, Homo sapiens
  siRNA target sequence for HRI (NM_014413.2,1526-1544).
gtccagagtgggtacttgt

SEQ ID NO: 85049 - DNA, 19 bp, Homo sapiens
  siRNA target sequence for HRI (NM_014413.2,1584-1602).
gatgccaagtcagatatgt

SEQ ID NO: 85050 - DNA, 19 bp, Homo sapiens
  siRNA target sequence for HRI (NM_014413.2,1587-1605).
gccaagtcagatatgtaca

SEQ ID NO: 85051 - DNA, 19 bp, Homo sapiens
  siRNA target sequence for HRI (NM_014413.2,1665-1683).
gaagttctaacaggtttaa

SEQ ID NO: 85052 - DNA, 19 bp, Homo sapiens
  siRNA target sequence for HRI (NM_014413.2,1698-1716).
ccggaatccctccgtaaaa

SEQ ID NO: 85053 - DNA, 19 bp, Homo sapiens
  siRNA target sequence for HRI (NM_014413.2,1701-1719).
gaatccctccgtaaaaggt

SEQ ID NO: 85054 - DNA, 19 bp, Homo sapiens
  siRNA target sequence for HRI (NM_014413.2,1722-1740).
ccagtgcaagccaagtata

SEQ ID NO: 85055 - DNA, 19 bp, Homo sapiens
  siRNA target sequence for HRI (NM_014413.2,1723-1741).
cagtgcaagccaagtatat

SEQ ID NO: 85056 - DNA, 19 bp, Homo sapiens
  siRNA target sequence for HRI (NM_014413.2,1892-1910).
gctaaacctcctttctcaa

SEQ ID NO: 85057 - DNA, 19 bp, Homo sapiens
  siRNA target sequence for HSA250839 (NM_018401.1,106-124).
gaatgaggaagtcaacttt

SEQ ID NO: 85058 - DNA, 19 bp, Homo sapiens
  siRNA target sequence for HSA250839 (NM_018401.1,185-203).
cagaagcgagacactaaga

SEQ ID NO: 85059 - DNA, 19 bp, Homo sapiens
  siRNA target sequence for HSA250839 (NM_018401.1,191-209).
cgagacactaagaaaatgt

SEQ ID NO: 85060 - DNA, 19 bp, Homo sapiens
  siRNA target sequence for HSA250839 (NM_018401.1,535-553).
cggacatgttcacattaca

SEQ ID NO: 85061 - DNA, 19 bp, Homo sapiens
  siRNA target sequence for HSA250839 (NM_018401.1,537-555).
gacatgttcacattacaga

SEQ ID NO: 85062 - DNA, 19 bp, Homo sapiens
  siRNA target sequence for HSA250839 (NM_018401.1,547-565).
cattacagacttcaacata

SEQ ID NO: 85063 - DNA, 19 bp, Homo sapiens
  siRNA target sequence for HSA250839 (NM_018401.1,562-580).
catagcgacggtagtgaaa

SEQ ID NO: 85064 - DNA, 19 bp, Homo sapiens
  siRNA target sequence for HSA250839 (NM_018401.1,725-743).
ggctggaggccgtacgaaa

SEQ ID NO: 85065 - DNA, 19 bp, Homo sapiens
  siRNA target sequence for HSA250839 (NM_018401.1,726-744).
gctggaggccgtacgaaat

SEQ ID NO: 85066 - DNA, 19 bp, Homo sapiens
  siRNA target sequence for HSA250839 (NM_018401.1,729-747).
ggaggccgtacgaaatcca

SEQ ID NO: 85067 - DNA, 19 bp, Homo sapiens
  siRNA target sequence for HSA250839 (NM_018401.1,752-770).
gtcacgcccatcgatgaaa

SEQ ID NO: 85068 - DNA, 19 bp, Homo sapiens
  siRNA target sequence for HSA250839 (NM_018401.1,756-774).
cgcccatcgatgaaatcct

SEQ ID NO: 85069 - DNA, 19 bp, Homo sapiens
  siRNA target sequence for HSA250839 (NM_018401.1,873-891).
gcgtgtccagccttcatga

SEQ ID NO: 85070 - DNA, 19 bp, Homo sapiens
  siRNA target sequence for HSA250839 (NM_018401.1,877-895).
gtccagccttcatgacata

SEQ ID NO: 85071 - DNA, 19 bp, Homo sapiens
  siRNA target sequence for HSA250839 (NM_018401.1,958-976).
cggctttgtgcccaataaa

SEQ ID NO: 85072 - DNA, 19 bp, Homo sapiens
  siRNA target sequence for HSA250839 (NM_018401.1,1055-1073).
cgattggcaaagaacagat

SEQ ID NO: 85073 - DNA, 19 bp, Homo sapiens
  siRNA target sequence for HSA250839 (NM_018401.1,1139-1157).
cgggaggaattcatcatat

SEQ ID NO: 85074 - DNA, 19 bp, Homo sapiens
  siRNA target sequence for HSA250839 (NM_018401.1,1145-1163).
gaattcatcatattcaaca

SEQ ID NO: 85075 - DNA, 19 bp, Homo sapiens
  siRNA target sequence for HSA250839 (NM_018401.1,1250-1268).
caggacgggtgcaacaaca

SEQ ID NO: 85076 - DNA, 19 bp, Homo sapiens
  siRNA target sequence for HSP70-4 (NM_016299.1,100-118).
cctgtgtggccgtctataa

SEQ ID NO: 85077 - DNA, 19 bp, Homo sapiens
  siRNA target sequence for HSP70-4 (NM_016299.1,103-121).
gtgtggccgtctataagga

SEQ ID NO: 85078 - DNA, 19 bp, Homo sapiens
  siRNA target sequence for HSP70-4 (NM_016299.1,128-146).
ggctggtgtggttgcaaat

SEQ ID NO: 85079 - DNA, 19 bp, Homo sapiens
  siRNA target sequence for HSP70-4 (NM_016299.1,130-148).
ctggtgtggttgcaaatga

SEQ ID NO: 85080 - DNA, 19 bp, Homo sapiens
  siRNA target sequence for HSP70-4 (NM_016299.1,295-313).
cacaagctcagaaatacat

SEQ ID NO: 85081 - DNA, 19 bp, Homo sapiens
  siRNA target sequence for HSP70-4 (NM_016299.1,311-329).
catcgcggaaagtaaatgt

SEQ ID NO: 85082 - DNA, 19 bp, Homo sapiens
  siRNA target sequence for HSP70-4 (NM_016299.1,314-332).
cgcggaaagtaaatgttta

SEQ ID NO: 85083 - DNA, 19 bp, Homo sapiens
  siRNA target sequence for HSP70-4 (NM_016299.1,405-423).
gatgttgccagactgatat

SEQ ID NO: 85084 - DNA, 19 bp, Homo sapiens
  siRNA target sequence for HSP70-4 (NM_016299.1,411-429).
gccagactgatatttagta

SEQ ID NO: 85085 - DNA, 19 bp, Homo sapiens
  siRNA target sequence for HSP70-4 (NM_016299.1,434-452).
gaaagaaacggcacattct

SEQ ID NO: 85086 - DNA, 19 bp, Homo sapiens
  siRNA target sequence for HSP70-4 (NM_016299.1,438-456).
gaaacggcacattctgtat

SEQ ID NO: 85087 - DNA, 19 bp, Homo sapiens
  siRNA target sequence for HSP70-4 (NM_016299.1,458-476).
gggctcagatgcaaatgat

SEQ ID NO: 85088 - DNA, 19 bp, Homo sapiens
  siRNA target sequence for HSP70-4 (NM_016299.1,620-638).
ccctactggaaaaagcaat

SEQ ID NO: 85089 - DNA, 19 bp, Homo sapiens
  siRNA target sequence for HSP70-4 (NM_016299.1,634-652).
gcaatattttggtgtttaa

SEQ ID NO: 85090 - DNA, 19 bp, Homo sapiens
  siRNA target sequence for HSP70-4 (NM_016299.1,675-693).
ctcagcgtcatggaagtta

SEQ ID NO: 85091 - DNA, 19 bp, Homo sapiens
  siRNA target sequence for HSP70-4 (NM_016299.1,680-698).
cgtcatggaagttaacagt

SEQ ID NO: 85092 - DNA, 19 bp, Homo sapiens
  siRNA target sequence for HSP70-4 (NM_016299.1,699-717).
ggaatatatcgggttcttt

SEQ ID NO: 85093 - DNA, 19 bp, Homo sapiens
  siRNA target sequence for HSP70-4 (NM_016299.1,740-758).
cggtggtgcacatttcaca

SEQ ID NO: 85094 - DNA, 19 bp, Homo sapiens
  siRNA target sequence for HSP70-4 (NM_016299.1,744-762).
ggtgcacatttcacagaaa

SEQ ID NO: 85095 - DNA, 19 bp, Homo sapiens
  siRNA target sequence for HSP70-4 (NM_016299.1,825-843).
gcgcgagccatgatgaaat

SEQ ID NO: 85096 - DNA, 19 bp, Homo sapiens
  siRNA target sequence for HSP70-4 (NM_016299.1,826-844).
cgcgagccatgatgaaatt

SEQ ID NO: 85097 - DNA, 19 bp, Homo sapiens
  siRNA target sequence for HSP70-4 (NM_016299.1,828-846).
cgagccatgatgaaattaa

SEQ ID NO: 85098 - DNA, 19 bp, Homo sapiens
  siRNA target sequence for HSP70-4 (NM_016299.1,831-849).
gccatgatgaaattaacga

SEQ ID NO: 85099 - DNA, 19 bp, Homo sapiens
  siRNA target sequence for HSP70-4 (NM_016299.1,832-850).
ccatgatgaaattaacgaa

SEQ ID NO: 85100 - DNA, 19 bp, Homo sapiens
  siRNA target sequence for HSP70-4 (NM_016299.1,855-873).
gctgaagtagcgaaacatt

SEQ ID NO: 85101 - DNA, 19 bp, Homo sapiens
  siRNA target sequence for HSP70-4 (NM_016299.1,858-876).
gaagtagcgaaacattctt

SEQ ID NO: 85102 - DNA, 19 bp, Homo sapiens
  siRNA target sequence for HSP70-4 (NM_016299.1,861-879).
gtagcgaaacattctttgt

SEQ ID NO: 85103 - DNA, 19 bp, Homo sapiens
  siRNA target sequence for HSP70-4 (NM_016299.1,952-970).
gagcaagatttgaacttct

SEQ ID NO: 85104 - DNA, 19 bp, Homo sapiens
  siRNA target sequence for HSP70-4 (NM_016299.1,1003-1021).
caatcagaggactcttaga

SEQ ID NO: 85105 - DNA, 19 bp, Homo sapiens
  siRNA target sequence for HSP70-4 (NM_016299.1,1007-1025).
cagaggactcttagatcaa

SEQ ID NO: 85106 - DNA, 19 bp, Homo sapiens
  siRNA target sequence for HSP70-4 (NM_016299.1,1009-1027).
gaggactcttagatcaaaa

SEQ ID NO: 85107 - DNA, 19 bp, Homo sapiens
  siRNA target sequence for HSP70-4 (NM_016299.1,1036-1054).
cagcagatgatatcaacaa

SEQ ID NO: 85108 - DNA, 19 bp, Homo sapiens
  siRNA target sequence for HSP70-4 (NM_016299.1,1125-1143).
gttgagcttctcaattcta

SEQ ID NO: 85109 - DNA, 19 bp, Homo sapiens
  siRNA target sequence for HSP70-4 (NM_016299.1,1165-1183).
ctattggtgcagctataga

SEQ ID NO: 85110 - DNA, 19 bp, Homo sapiens
  siRNA target sequence for HSP70-4 (NM_016299.1,1220-1238).
ggaagactctcttatgata

SEQ ID NO: 85111 - DNA, 19 bp, Homo sapiens
  siRNA target sequence for HSP70-4 (NM_016299.1,1278-1296).
gaatcaggagccagtagat

SEQ ID NO: 85112 - DNA, 19 bp, Homo sapiens
  siRNA target sequence for HSP70-4 (NM_016299.1,1395-1413).
gagtctgatgggaagaact

SEQ ID NO: 85113 - DNA, 19 bp, Homo sapiens
  siRNA target sequence for HSP70-4 (NM_016299.1,1442-1460).
ggttgtactccaggattta

SEQ ID NO: 85114 - DNA, 19 bp, Homo sapiens
  siRNA target sequence for HSP70-4 (NM_016299.1,1446-1464).
gtactccaggatttagata

SEQ ID NO: 85115 - DNA, 19 bp, Homo sapiens
  siRNA target sequence for HSPA12B (NM_052970.3,312-330).
cgtctagtggctatgcttt

SEQ ID NO: 85116 - DNA, 19 bp, Homo sapiens
  siRNA target sequence for HSPA12B (NM_052970.3,513-531).
ggctctacttcgagaagtt

SEQ ID NO: 85117 - DNA, 19 bp, Homo sapiens
  siRNA target sequence for HSPA12B (NM_052970.3,573-591).
cccagctagaggcagtaaa

SEQ ID NO: 85118 - DNA, 19 bp, Homo sapiens
  siRNA target sequence for HSPA12B (NM_052970.3,574-592).
ccagctagaggcagtaaat

SEQ ID NO: 85119 - DNA, 19 bp, Homo sapiens
  siRNA target sequence for HSPA12B (NM_052970.3,1438-1456).
gctccgaatgtcttgtgaa

SEQ ID NO: 85120 - DNA, 19 bp, Homo sapiens
  siRNA target sequence for HSPA12B (NM_052970.3,1491-1509).
ggatcatccagcacataga

SEQ ID NO: 85121 - DNA, 19 bp, Homo sapiens
  siRNA target sequence for HSPA12B (NM_052970.3,1943-1961).
gaggatgcgcgcttcatca

SEQ ID NO: 85122 - DNA, 19 bp, Homo sapiens
  siRNA target sequence for HSPA12B (NM_052970.3,2077-2095).
gtttggcgacaccgaaatt

SEQ ID NO: 85123 - DNA, 19 bp, Homo sapiens
  siRNA target sequence for HSPA12B (NM_052970.3,2082-2100).
gcgacaccgaaattaaggt

SEQ ID NO: 85124 - DNA, 19 bp, Homo sapiens
  siRNA target sequence for HSPA12B (NM_052970.3,2137-2155).
cgcgtccatcgactttctt

SEQ ID NO: 85125 - DNA, 19 bp, Homo sapiens
  siRNA target sequence for HSPA12B (NM_052970.3,2138-2156).
gcgtccatcgactttcttt

SEQ ID NO: 85126 - DNA, 19 bp, Homo sapiens
  siRNA target sequence for HSPA1L (NM_005527.2,329-347).
gaaccaggtagcaatgaat

SEQ ID NO: 85127 - DNA, 19 bp, Homo sapiens
  siRNA target sequence for HSPA1L (NM_005527.2,349-367).
cccagaacactgtttttga

SEQ ID NO: 85128 - DNA, 19 bp, Homo sapiens
  siRNA target sequence for HSPA1L (NM_005527.2,375-393).
cgtctgatcggcaggaaat

SEQ ID NO: 85129 - DNA, 19 bp, Homo sapiens
  siRNA target sequence for HSPA1L (NM_005527.2,376-394).
gtctgatcggcaggaaatt

SEQ ID NO: 85130 - DNA, 19 bp, Homo sapiens
  siRNA target sequence for HSPA1L (NM_005527.2,383-401).
cggcaggaaatttaatgat

SEQ ID NO: 85131 - DNA, 19 bp, Homo sapiens
  siRNA target sequence for HSPA1L (NM_005527.2,403-421).
ctgttgtacaagcagatat

SEQ ID NO: 85132 - DNA, 19 bp, Homo sapiens
  siRNA target sequence for HSPA1L (NM_005527.2,411-429).
caagcagatatgaaacttt

SEQ ID NO: 85133 - DNA, 19 bp, Homo sapiens
  siRNA target sequence for HSPA1L (NM_005527.2,422-440).
gaaactttggccttttcaa

SEQ ID NO: 85134 - DNA, 19 bp, Homo sapiens
  siRNA target sequence for HSPA1L (NM_005527.2,430-448).
ggccttttcaagtgattaa

SEQ ID NO: 85135 - DNA, 19 bp, Homo sapiens
  siRNA target sequence for HSPA1L (NM_005527.2,513-531).
gaaatctcttcgatggtat

SEQ ID NO: 85136 - DNA, 19 bp, Homo sapiens
  siRNA target sequence for HSPA1L (NM_005527.2,520-538).
cttcgatggtattgactaa

SEQ ID NO: 85137 - DNA, 19 bp, Homo sapiens
  siRNA target sequence for HSPA1L (NM_005527.2,523-541).
cgatggtattgactaagtt

SEQ ID NO: 85138 - DNA, 19 bp, Homo sapiens
  siRNA target sequence for HSPA1L (NM_005527.2,784-802).
caattctgaccatagatga

SEQ ID NO: 85139 - DNA, 19 bp, Homo sapiens
  siRNA target sequence for HSPA1L (NM_005527.2,793-811).
ccatagatgatgggatttt

SEQ ID NO: 85140 - DNA, 19 bp, Homo sapiens
  siRNA target sequence for HSPA1L (NM_005527.2,999-1017).
gccaacctagaaattgatt

SEQ ID NO: 85141 - DNA, 19 bp, Homo sapiens
  siRNA target sequence for HSPA1L (NM_005527.2,1029-1047).
ggcattgacttctatacat

SEQ ID NO: 85142 - DNA, 19 bp, Homo sapiens
  siRNA target sequence for HSPA1L (NM_005527.2,1049-1067).
catcaccagagctcgattt

SEQ ID NO: 85143 - DNA, 19 bp, Homo sapiens
  siRNA target sequence for HSPA1L (NM_005527.2,1054-1072).
ccagagctcgatttgaaga

SEQ ID NO: 85144 - DNA, 19 bp, Homo sapiens
  siRNA target sequence for HSPA1L (NM_005527.2,1057-1075).
gagctcgatttgaagagtt

SEQ ID NO: 85145 - DNA, 19 bp, Homo sapiens
  siRNA target sequence for HSPA1L (NM_005527.2,1147-1165).
ctaaaatccatgacattgt

SEQ ID NO: 85146 - DNA, 19 bp, Homo sapiens
  siRNA target sequence for HSPA1L (NM_005527.2,1227-1245).
ggacgtgatctcaacaaga

SEQ ID NO: 85147 - DNA, 19 bp, Homo sapiens
  siRNA target sequence for HSPA1L (NM_005527.2,1255-1273).
ctgatgaggccgtagcata

SEQ ID NO: 85148 - DNA, 19 bp, Homo sapiens
  siRNA target sequence for HSPA1L (NM_005527.2,1754-1772).
ccagagggagaaaattgct

SEQ ID NO: 85149 - DNA, 19 bp, Homo sapiens
  siRNA target sequence for HSPA1L (NM_005527.2,1782-1800).
gccttagaatcctatgctt

SEQ ID NO: 85150 - DNA, 19 bp, Homo sapiens
  siRNA target sequence for HSPA1L (NM_005527.2,1783-1801).
ccttagaatcctatgcttt

SEQ ID NO: 85151 - DNA, 19 bp, Homo sapiens
  siRNA target sequence for HSPA1L (NM_005527.2,1788-1806).
gaatcctatgcttttaaca

SEQ ID NO: 85152 - DNA, 19 bp, Homo sapiens
  siRNA target sequence for HSPA1L (NM_005527.2,1844-1862).
gattagtgagtctgataaa

SEQ ID NO: 85153 - DNA, 19 bp, Homo sapiens
  siRNA target sequence for HSPA1L (NM_005527.2,1849-1867).
gtgagtctgataaaaataa

SEQ ID NO: 85154 - DNA, 19 bp, Homo sapiens
  siRNA target sequence for HSPA1L (NM_005527.2,1898-1916).
gtggctggaggtcaatcaa

SEQ ID NO: 85155 - DNA, 19 bp, Homo sapiens
  siRNA target sequence for HSPA1L (NM_005527.2,1938-1956).
gatcataagagaaaggaat

SEQ ID NO: 85156 - DNA, 19 bp, Homo sapiens
  siRNA target sequence for HSPA1L (NM_005527.2,1953-1971).
gaattggagcagatgtgta

SEQ ID NO: 85157 - DNA, 19 bp, Homo sapiens
  siRNA target sequence for HSPA1L (NM_005527.2,1969-1987).
gtaaccctatcatcacaaa

SEQ ID NO: 85158 - DNA, 19 bp, Homo sapiens
  siRNA target sequence for HSPA1L (NM_005527.2,2050-2068).
ccacaggccccacaattga

SEQ ID NO: 85159 - DNA, 19 bp, Homo sapiens
  siRNA target sequence for HSPA1L (NM_005527.2,2057-2075).
ccccacaattgaagaagta

SEQ ID NO: 85160 - DNA, 19 bp, Homo sapiens
  siRNA target sequence for HSPA2 (NM_021979.2,494-512).
gtgcacagcgcggtcataa

SEQ ID NO: 85161 - DNA, 19 bp, Homo sapiens
  siRNA target sequence for HSPA2 (NM_021979.2,1222-1240).
cctcatcggcgacaaatca

SEQ ID NO: 85162 - DNA, 19 bp, Homo sapiens
  siRNA target sequence for HSPA2 (NM_021979.2,1395-1413).
gcgtactggtgcaggtata

SEQ ID NO: 85163 - DNA, 19 bp, Homo sapiens
  siRNA target sequence for HSPA2 (NM_021979.2,1526-1544).
gacgccaatggcatcctta

SEQ ID NO: 85164 - DNA, 19 bp, Homo sapiens
  siRNA target sequence for HSPA2 (NM_021979.2,1561-1579).
caagagcaccggtaaggaa

SEQ ID NO: 85165 - DNA, 19 bp, Homo sapiens
  siRNA target sequence for HSPA2 (NM_021979.2,1566-1584).
gcaccggtaaggaaaacaa

SEQ ID NO: 85166 - DNA, 19 bp, Homo sapiens
  siRNA target sequence for HSPA2 (NM_021979.2,1707-1725).
ccctggagtcctataccta

SEQ ID NO: 85167 - DNA, 19 bp, Homo sapiens
  siRNA target sequence for HSPA2 (NM_021979.2,1716-1734).
cctatacctacaacatcaa

SEQ ID NO: 85168 - DNA, 19 bp, Homo sapiens
  siRNA target sequence for HSPA2 (NM_021979.2,1873-1891).
gaaagagctcgaaagagtt

SEQ ID NO: 85169 - DNA, 19 bp, Homo sapiens
  siRNA target sequence for HSPA4 (NM_002154.3,580-598).
gtataaaggtgacatatat

SEQ ID NO: 85170 - DNA, 19 bp, Homo sapiens
  siRNA target sequence for HSPA4 (NM_002154.3,666-684).
gccgaaagtgttcttaaga

SEQ ID NO: 85171 - DNA, 19 bp, Homo sapiens
  siRNA target sequence for HSPA4 (NM_002154.3,749-767).
gatggatgcaacacagatt

SEQ ID NO: 85172 - DNA, 19 bp, Homo sapiens
  siRNA target sequence for HSPA4 (NM_002154.3,774-792).
cttaattgcttgcgattaa

SEQ ID NO: 85173 - DNA, 19 bp, Homo sapiens
  siRNA target sequence for HSPA4 (NM_002154.3,781-799).
gcttgcgattaatgaatga

SEQ ID NO: 85174 - DNA, 19 bp, Homo sapiens
  siRNA target sequence for HSPA4 (NM_002154.3,782-800).
cttgcgattaatgaatgaa

SEQ ID NO: 85175 - DNA, 19 bp, Homo sapiens
  siRNA target sequence for HSPA4 (NM_002154.3,805-823).
ctgcagttgctcttgcata

SEQ ID NO: 85176 - DNA, 19 bp, Homo sapiens
  siRNA target sequence for HSPA4 (NM_002154.3,814-832).
ctcttgcatatggaatcta

SEQ ID NO: 85177 - DNA, 19 bp, Homo sapiens
  siRNA target sequence for HSPA4 (NM_002154.3,816-834).
cttgcatatggaatctata

SEQ ID NO: 85178 - DNA, 19 bp, Homo sapiens
  siRNA target sequence for HSPA4 (NM_002154.3,820-838).
catatggaatctataagca

SEQ ID NO: 85179 - DNA, 19 bp, Homo sapiens
  siRNA target sequence for HSPA4 (NM_002154.3,839-857).
ggatcttcctgccttagaa

SEQ ID NO: 85180 - DNA, 19 bp, Homo sapiens
  siRNA target sequence for HSPA4 (NM_002154.3,887-905).
catgggccactctgcttat

SEQ ID NO: 85181 - DNA, 19 bp, Homo sapiens
  siRNA target sequence for HSPA4 (NM_002154.3,894-912).
cactctgcttatcaagttt

SEQ ID NO: 85182 - DNA, 19 bp, Homo sapiens
  siRNA target sequence for HSPA4 (NM_002154.3,900-918).
gcttatcaagtttctgtat

SEQ ID NO: 85183 - DNA, 19 bp, Homo sapiens
  siRNA target sequence for HSPA4 (NM_002154.3,1052-1070).
gtccaaaatccgtgcatta

SEQ ID NO: 85184 - DNA, 19 bp, Homo sapiens
  siRNA target sequence for HSPA4 (NM_002154.3,1054-1072).
ccaaaatccgtgcattatt

SEQ ID NO: 85185 - DNA, 19 bp, Homo sapiens
  siRNA target sequence for HSPA4 (NM_002154.3,1131-1149).
ctccctttgagcattgaat

SEQ ID NO: 85186 - DNA, 19 bp, Homo sapiens
  siRNA target sequence for HSPA4 (NM_002154.3,1157-1175).
gaatgatgttgatgtatct

SEQ ID NO: 85187 - DNA, 19 bp, Homo sapiens
  siRNA target sequence for HSPA4 (NM_002154.3,1170-1188).
gtatctggaactatgaata

SEQ ID NO: 85188 - DNA, 19 bp, Homo sapiens
  siRNA target sequence for HSPA4 (NM_002154.3,1180-1198).
ctatgaatagaggcaaatt

SEQ ID NO: 85189 - DNA, 19 bp, Homo sapiens
  siRNA target sequence for HSPA4 (NM_002154.3,1235-1253).
gccaccacttcgtagtgtt

SEQ ID NO: 85190 - DNA, 19 bp, Homo sapiens
  siRNA target sequence for HSPA4 (NM_002154.3,1240-1258).
cacttcgtagtgttttgga

SEQ ID NO: 85191 - DNA, 19 bp, Homo sapiens
  siRNA target sequence for HSPA4 (NM_002154.3,1245-1263).
cgtagtgttttggaacaaa

SEQ ID NO: 85192 - DNA, 19 bp, Homo sapiens
  siRNA target sequence for HSPA4 (NM_002154.3,1318-1336).
gaatccctgcggtaaaaga

SEQ ID NO: 85193 - DNA, 19 bp, Homo sapiens
  siRNA target sequence for HSPA4 (NM_002154.3,1324-1342).
ctgcggtaaaagagaagat

SEQ ID NO: 85194 - DNA, 19 bp, Homo sapiens
  siRNA target sequence for HSPA4 (NM_002154.3,1326-1344).
gcggtaaaagagaagatca

SEQ ID NO: 85195 - DNA, 19 bp, Homo sapiens
  siRNA target sequence for HSPA4 (NM_002154.3,1346-1364).
caaatttttcggtaaagaa

SEQ ID NO: 85196 - DNA, 19 bp, Homo sapiens
  siRNA target sequence for HSPA4 (NM_002154.3,1362-1380).
gaacttagtacaacattaa

SEQ ID NO: 85197 - DNA, 19 bp, Homo sapiens
  siRNA target sequence for HSPA4 (NM_002154.3,1427-1445).
cttatcgcctgctttcaaa

SEQ ID NO: 85198 - DNA, 19 bp, Homo sapiens
  siRNA target sequence for HSPA4 (NM_002154.3,1463-1481).
cactgatgtagtaccatat

SEQ ID NO: 85199 - DNA, 19 bp, Homo sapiens
  siRNA target sequence for HSPA4 (NM_002154.3,1470-1488).
gtagtaccatatccaatat

SEQ ID NO: 85200 - DNA, 19 bp, Homo sapiens
  siRNA target sequence for HSPA4 (NM_002154.3,1527-1545).
gactgtgaagtcttttcca

SEQ ID NO: 85201 - DNA, 19 bp, Homo sapiens
  siRNA target sequence for HSPA4 (NM_002154.3,1650-1668).
cctgctatagctcagtttt

SEQ ID NO: 85202 - DNA, 19 bp, Homo sapiens
  siRNA target sequence for HSPA4 (NM_002154.3,1753-1771).
gtgtgtccagtgcatcttt

SEQ ID NO: 85203 - DNA, 19 bp, Homo sapiens
  siRNA target sequence for HSPA4 (NM_002154.3,1938-1956).
caagctggatccaaggata

SEQ ID NO: 85204 - DNA, 19 bp, Homo sapiens
  siRNA target sequence for HSPA4 (NM_002154.3,2034-2052).
ctattatggcagatagaca

SEQ ID NO: 85205 - DNA, 19 bp, Homo sapiens
  siRNA target sequence for HSPA4 (NM_002154.3,2060-2078).
gctcaacttgtacattgaa

SEQ ID NO: 85206 - DNA, 19 bp, Homo sapiens
  siRNA target sequence for HSPA4 (NM_002154.3,2171-2189).
caagcttagtggtgaatat

SEQ ID NO: 85207 - DNA, 19 bp, Homo sapiens
  siRNA target sequence for HSPA4 (NM_002154.3,2279-2297).
gccaaagcaagtttatgtt

SEQ ID NO: 85208 - DNA, 19 bp, Homo sapiens
  siRNA target sequence for HSPA4 (NM_002154.3,2322-2340).
ctaggtcaacctattaaga

SEQ ID NO: 85209 - DNA, 19 bp, Homo sapiens
  siRNA target sequence for HSPA4 (NM_002154.3,2394-2412).
cagatccaacagtatatga

SEQ ID NO: 85210 - DNA, 19 bp, Homo sapiens
  siRNA target sequence for HSPA4 (NM_002154.3,2444-2462).
ccagtatgatcatttggat

SEQ ID NO: 85211 - DNA, 19 bp, Homo sapiens
  siRNA target sequence for HSPA4 (NM_002154.3,2502-2520).
gcaatggagtggatgaata

SEQ ID NO: 85212 - DNA, 19 bp, Homo sapiens
  siRNA target sequence for HSPA4 (NM_002154.3,2512-2530).
ggatgaataacaagctaaa

SEQ ID NO: 85213 - DNA, 19 bp, Homo sapiens
  siRNA target sequence for HSPA4 (NM_002154.3,2513-2531).
gatgaataacaagctaaat

SEQ ID NO: 85214 - DNA, 19 bp, Homo sapiens
  siRNA target sequence for HSPA4 (NM_002154.3,2554-2572).
ccatggatccagttgtcaa

SEQ ID NO: 85215 - DNA, 19 bp, Homo sapiens
  siRNA target sequence for HSPA4 (NM_002154.3,2611-2629).
gtacttgtagccctataat

SEQ ID NO: 85216 - DNA, 19 bp, Homo sapiens
  siRNA target sequence for HSPA4 (NM_002154.3,2761-2779).
cttcggattcagacaagaa

SEQ ID NO: 85217 - DNA, 19 bp, Homo sapiens
  siRNA target sequence for HSPA5 (NM_005347.2,550-568).
ccgttcaaggtggttgaaa

SEQ ID NO: 85218 - DNA, 19 bp, Homo sapiens
  siRNA target sequence for HSPA5 (NM_005347.2,575-593).
ctaaaccatacattcaagt

SEQ ID NO: 85219 - DNA, 19 bp, Homo sapiens
  siRNA target sequence for HSPA5 (NM_005347.2,580-598).
ccatacattcaagttgata

SEQ ID NO: 85220 - DNA, 19 bp, Homo sapiens
  siRNA target sequence for HSPA5 (NM_005347.2,581-599).
catacattcaagttgatat

SEQ ID NO: 85221 - DNA, 19 bp, Homo sapiens
  siRNA target sequence for HSPA5 (NM_005347.2,585-603).
cattcaagttgatattgga

SEQ ID NO: 85222 - DNA, 19 bp, Homo sapiens
  siRNA target sequence for HSPA5 (NM_005347.2,601-619).
ggaggtgggcaaacaaaga

SEQ ID NO: 85223 - DNA, 19 bp, Homo sapiens
  siRNA target sequence for HSPA5 (NM_005347.2,667-685).
gaaaccgctgaggcttatt

SEQ ID NO: 85224 - DNA, 19 bp, Homo sapiens
  siRNA target sequence for HSPA5 (NM_005347.2,716-734).
ctgtaccagcctattttaa

SEQ ID NO: 85225 - DNA, 19 bp, Homo sapiens
  siRNA target sequence for HSPA5 (NM_005347.2,807-825).
gcctacggcagctgctatt

SEQ ID NO: 85226 - DNA, 19 bp, Homo sapiens
  siRNA target sequence for HSPA5 (NM_005347.2,930-948).
cgaagttgtggccactaat

SEQ ID NO: 85227 - DNA, 19 bp, Homo sapiens
  siRNA target sequence for HSPA5 (NM_005347.2,939-957).
ggccactaatggagatact

SEQ ID NO: 85228 - DNA, 19 bp, Homo sapiens
  siRNA target sequence for HSPA5 (NM_005347.2,941-959).
ccactaatggagatactca

SEQ ID NO: 85229 - DNA, 19 bp, Homo sapiens
  siRNA target sequence for HSPA5 (NM_005347.2,1166-1184).
ccctgactcgggccaaatt

SEQ ID NO: 85230 - DNA, 19 bp, Homo sapiens
  siRNA target sequence for HSPA5 (NM_005347.2,1167-1185).
cctgactcgggccaaattt

SEQ ID NO: 85231 - DNA, 19 bp, Homo sapiens
  siRNA target sequence for HSPA5 (NM_005347.2,1170-1188).
gactcgggccaaatttgaa

SEQ ID NO: 85232 - DNA, 19 bp, Homo sapiens
  siRNA target sequence for HSPA5 (NM_005347.2,1201-1219).
gatctgttccggtctacta

SEQ ID NO: 85233 - DNA, 19 bp, Homo sapiens
  siRNA target sequence for HSPA5 (NM_005347.2,1204-1222).
ctgttccggtctactatga

SEQ ID NO: 85234 - DNA, 19 bp, Homo sapiens
  siRNA target sequence for HSPA5 (NM_005347.2,1294-1312).
ggctcgactcgaattccaa

SEQ ID NO: 85235 - DNA, 19 bp, Homo sapiens
  siRNA target sequence for HSPA5 (NM_005347.2,1295-1313).
gctcgactcgaattccaaa

SEQ ID NO: 85236 - DNA, 19 bp, Homo sapiens
  siRNA target sequence for HSPA5 (NM_005347.2,1298-1316).
cgactcgaattccaaagat

SEQ ID NO: 85237 - DNA, 19 bp, Homo sapiens
  siRNA target sequence for HSPA5 (NM_005347.2,1301-1319).
ctcgaattccaaagattca

SEQ ID NO: 85238 - DNA, 19 bp, Homo sapiens
  siRNA target sequence for HSPA5 (NM_005347.2,1416-1434).
gctctctggtgatcaagat

SEQ ID NO: 85239 - DNA, 19 bp, Homo sapiens
  siRNA target sequence for HSPA5 (NM_005347.2,1417-1435).
ctctctggtgatcaagata

SEQ ID NO: 85240 - DNA, 19 bp, Homo sapiens
  siRNA target sequence for HSPA5 (NM_005347.2,1419-1437).
ctctggtgatcaagataca

SEQ ID NO: 85241 - DNA, 19 bp, Homo sapiens
  siRNA target sequence for HSPA5 (NM_005347.2,1528-1546).
gtggtgcctaccaagaagt

SEQ ID NO: 85242 - DNA, 19 bp, Homo sapiens
  siRNA target sequence for HSPA5 (NM_005347.2,1559-1577).
ctacagcttctgataatca

SEQ ID NO: 85243 - DNA, 19 bp, Homo sapiens
  siRNA target sequence for HSPA5 (NM_005347.2,1904-1922).
gctatgcctattctctaaa

SEQ ID NO: 85244 - DNA, 19 bp, Homo sapiens
  siRNA target sequence for HSPA5 (NM_005347.2,2090-2108).
caattatcagcaaactcta

SEQ ID NO: 85245 - DNA, 19 bp, Homo sapiens
  siRNA target sequence for HSPA6 (NM_002155.2,417-435).
ccaaggtgcgcgtatgcta

SEQ ID NO: 85246 - DNA, 19 bp, Homo sapiens
  siRNA target sequence for HSPA6 (NM_002155.2,748-766).
cattgacgctggtgtcttt

SEQ ID NO: 85247 - DNA, 19 bp, Homo sapiens
  siRNA target sequence for HSPA6 (NM_002155.2,1596-1614).
gcacaggtaaggctaacaa

SEQ ID NO: 85248 - DNA, 19 bp, Homo sapiens
  siRNA target sequence for HSPA6 (NM_002155.2,1599-1617).
caggtaaggctaacaagat

SEQ ID NO: 85249 - DNA, 19 bp, Homo sapiens
  siRNA target sequence for HSPA6 (NM_002155.2,1737-1755).
cgctggaggcccatgtctt

SEQ ID NO: 85250 - DNA, 19 bp, Homo sapiens
  siRNA target sequence for HSPA6 (NM_002155.2,1747-1765).
ccatgtcttccatgtgaaa

SEQ ID NO: 85251 - DNA, 19 bp, Homo sapiens
  siRNA target sequence for HSPA6 (NM_002155.2,1810-1828).
ggacaggcgcaaaatgcaa

SEQ ID NO: 85252 - DNA, 19 bp, Homo sapiens
  siRNA target sequence for HSPA6 (NM_002155.2,1906-1924).
ggagctggagcaaatctgt

SEQ ID NO: 85253 - DNA, 19 bp, Homo sapiens
  siRNA target sequence for HSPA8 (NM_006597.3,429-447).
ggaggtgtcttctatggtt

SEQ ID NO: 85254 - DNA, 19 bp, Homo sapiens
  siRNA target sequence for HSPA8 (NM_006597.3,622-640).
gcttacggcttagacaaaa

SEQ ID NO: 85255 - DNA, 19 bp, Homo sapiens
  siRNA target sequence for HSPA8 (NM_006597.3,623-641).
cttacggcttagacaaaaa

SEQ ID NO: 85256 - DNA, 19 bp, Homo sapiens
  siRNA target sequence for HSPA8 (NM_006597.3,627-645).
cggcttagacaaaaaggtt

SEQ ID NO: 85257 - DNA, 19 bp, Homo sapiens
  siRNA target sequence for HSPA8 (NM_006597.3,864-882).
cctccgtactgcttgtgaa

SEQ ID NO: 85258 - DNA, 19 bp, Homo sapiens
  siRNA target sequence for HSPA8 (NM_006597.3,911-929).
cccaggccagtattgagat

SEQ ID NO: 85259 - DNA, 19 bp, Homo sapiens
  siRNA target sequence for HSPA8 (NM_006597.3,916-934).
gccagtattgagatcgatt

SEQ ID NO: 85260 - DNA, 19 bp, Homo sapiens
  siRNA target sequence for HSPA8 (NM_006597.3,920-938).
gtattgagatcgattctct

SEQ ID NO: 85261 - DNA, 19 bp, Homo sapiens
  siRNA target sequence for HSPA8 (NM_006597.3,927-945).
gatcgattctctctatgaa

SEQ ID NO: 85262 - DNA, 19 bp, Homo sapiens
  siRNA target sequence for HSPA8 (NM_006597.3,971-989).
cccgtgcccgatttgaaga

SEQ ID NO: 85263 - DNA, 19 bp, Homo sapiens
  siRNA target sequence for HSPA8 (NM_006597.3,972-990).
ccgtgcccgatttgaagaa

SEQ ID NO: 85264 - DNA, 19 bp, Homo sapiens
  siRNA target sequence for HSPA8 (NM_006597.3,978-996).
ccgatttgaagaactgaat

SEQ ID NO: 85265 - DNA, 19 bp, Homo sapiens
  siRNA target sequence for HSPA8 (NM_006597.3,1038-1056).
ccttcgagatgccaaacta

SEQ ID NO: 85266 - DNA, 19 bp, Homo sapiens
  siRNA target sequence for HSPA8 (NM_006597.3,1083-1101).
cctggttggtggttctact

SEQ ID NO: 85267 - DNA, 19 bp, Homo sapiens
  siRNA target sequence for HSPA8 (NM_006597.3,1312-1330).
gtcctcatcaagcgtaata

SEQ ID NO: 85268 - DNA, 19 bp, Homo sapiens
  siRNA target sequence for HSPA8 (NM_006597.3,1482-1500).
ccgaggtgttcctcagatt

SEQ ID NO: 85269 - DNA, 19 bp, Homo sapiens
  siRNA target sequence for HSPA8 (NM_006597.3,1680-1698).
caaggtgtcatccaagaat

SEQ ID NO: 85270 - DNA, 19 bp, Homo sapiens
  siRNA target sequence for HSPA8 (NM_006597.3,1683-1701).
ggtgtcatccaagaattca

SEQ ID NO: 85271 - DNA, 19 bp, Homo sapiens
  siRNA target sequence for HSPA8 (NM_006597.3,1719-1737).
caacatgaaagcaactgtt

SEQ ID NO: 85272 - DNA, 19 bp, Homo sapiens
  siRNA target sequence for HSPA9B (NM_004134.4,194-212).
gctggaatggccttagtca

SEQ ID NO: 85273 - DNA, 19 bp, Homo sapiens
  siRNA target sequence for HSPA9B (NM_004134.4,195-213).
ctggaatggccttagtcat

SEQ ID NO: 85274 - DNA, 19 bp, Homo sapiens
  siRNA target sequence for HSPA9B (NM_004134.4,237-255).
gcgggattatgcatcagaa

SEQ ID NO: 85275 - DNA, 19 bp, Homo sapiens
  siRNA target sequence for HSPA9B (NM_004134.4,264-282).
gggagcagttgttggtatt

SEQ ID NO: 85276 - DNA, 19 bp, Homo sapiens
  siRNA target sequence for HSPA9B (NM_004134.4,268-286).
gcagttgttggtattgatt

SEQ ID NO: 85277 - DNA, 19 bp, Homo sapiens
  siRNA target sequence for HSPA9B (NM_004134.4,269-287).
cagttgttggtattgattt

SEQ ID NO: 85278 - DNA, 19 bp, Homo sapiens
  siRNA target sequence for HSPA9B (NM_004134.4,302-320).
cctgcgtggcagttatgga

SEQ ID NO: 85279 - DNA, 19 bp, Homo sapiens
  siRNA target sequence for HSPA9B (NM_004134.4,303-321).
ctgcgtggcagttatggaa

SEQ ID NO: 85280 - DNA, 19 bp, Homo sapiens
  siRNA target sequence for HSPA9B (NM_004134.4,574-592).
gctcatgggaaattgtatt

SEQ ID NO: 85281 - DNA, 19 bp, Homo sapiens
  siRNA target sequence for HSPA9B (NM_004134.4,588-606).
gtattctccgagtcagatt

SEQ ID NO: 85282 - DNA, 19 bp, Homo sapiens
  siRNA target sequence for HSPA9B (NM_004134.4,601-619).
cagattggagcatttgtgt

SEQ ID NO: 85283 - DNA, 19 bp, Homo sapiens
  siRNA target sequence for HSPA9B (NM_004134.4,678-696).
gatcacagtcccagcttat

SEQ ID NO: 85284 - DNA, 19 bp, Homo sapiens
  siRNA target sequence for HSPA9B (NM_004134.4,793-811).
gcctatggtctagacaaat

SEQ ID NO: 85285 - DNA, 19 bp, Homo sapiens
  siRNA target sequence for HSPA9B (NM_004134.4,795-813).
ctatggtctagacaaatca

SEQ ID NO: 85286 - DNA, 19 bp, Homo sapiens
  siRNA target sequence for HSPA9B (NM_004134.4,845-863).
gtggtggaacttttgatat

SEQ ID NO: 85287 - DNA, 19 bp, Homo sapiens
  siRNA target sequence for HSPA9B (NM_004134.4,905-923).
ccacaaatggggatacctt

SEQ ID NO: 85288 - DNA, 19 bp, Homo sapiens
  siRNA target sequence for HSPA9B (NM_004134.4,950-968).
ccttgctacggcacattgt

SEQ ID NO: 85289 - DNA, 19 bp, Homo sapiens
  siRNA target sequence for HSPA9B (NM_004134.4,985-1003).
gagacaggggttgatttga

SEQ ID NO: 85290 - DNA, 19 bp, Homo sapiens
  siRNA target sequence for HSPA9B (NM_004134.4,989-1007).
caggggttgatttgactaa

SEQ ID NO: 85291 - DNA, 19 bp, Homo sapiens
  siRNA target sequence for HSPA9B (NM_004134.4,1969-1987).
ctcctggctagaaaagaca

SEQ ID NO: 85292 - DNA, 19 bp, Homo sapiens
  siRNA target sequence for HSPCB (NM_007355.2,156-174).
catgtccctcatcatcaat

SEQ ID NO: 85293 - DNA, 19 bp, Homo sapiens
  siRNA target sequence for HSPCB (NM_007355.2,202-220).
cttcgggagttgatctcta

SEQ ID NO: 85294 - DNA, 19 bp, Homo sapiens
  siRNA target sequence for HSPCB (NM_007355.2,208-226).
gagttgatctctaatgctt

SEQ ID NO: 85295 - DNA, 19 bp, Homo sapiens
  siRNA target sequence for HSPCB (NM_007355.2,287-305).
gtaaagagctgaaaattga

SEQ ID NO: 85296 - DNA, 19 bp, Homo sapiens
  siRNA target sequence for HSPCB (NM_007355.2,366-384).
caaagctgatctcataaat

SEQ ID NO: 85297 - DNA, 19 bp, Homo sapiens
  siRNA target sequence for HSPCB (NM_007355.2,402-420).
caagtctggtactaaagca

SEQ ID NO: 85298 - DNA, 19 bp, Homo sapiens
  siRNA target sequence for HSPCB (NM_007355.2,407-425).
ctggtactaaagcattcat

SEQ ID NO: 85299 - DNA, 19 bp, Homo sapiens
  siRNA target sequence for HSPCB (NM_007355.2,531-549).
caacgatgatgaacagtat

SEQ ID NO: 85300 - DNA, 19 bp, Homo sapiens
  siRNA target sequence for HSPCB (NM_007355.2,669-687).
gaggcgggtcaaagaagta

SEQ ID NO: 85301 - DNA, 19 bp, Homo sapiens
  siRNA target sequence for HSPCB (NM_007355.2,671-689).
ggcgggtcaaagaagtagt

SEQ ID NO: 85302 - DNA, 19 bp, Homo sapiens
  siRNA target sequence for HSPCB (NM_007355.2,674-692).
gggtcaaagaagtagtgaa

SEQ ID NO: 85303 - DNA, 19 bp, Homo sapiens
  siRNA target sequence for HSPCB (NM_007355.2,862-880).
gacagcggtaaggataaga

SEQ ID NO: 85304 - DNA, 19 bp, Homo sapiens
  siRNA target sequence for HSPCB (NM_007355.2,996-1014).
ctacaagagcctcactaat

SEQ ID NO: 85305 - DNA, 19 bp, Homo sapiens
  siRNA target sequence for HSPCB (NM_007355.2,1034-1052).
cagtcaagcacttttctgt

SEQ ID NO: 85306 - DNA, 19 bp, Homo sapiens
  siRNA target sequence for HSPCB (NM_007355.2,1097-1115).
gggctccctttgacctttt

SEQ ID NO: 85307 - DNA, 19 bp, Homo sapiens
  siRNA target sequence for HSPCB (NM_007355.2,1191-1209).
gataccagagtatctcaat

SEQ ID NO: 85308 - DNA, 19 bp, Homo sapiens
  siRNA target sequence for HSPCB (NM_007355.2,1267-1285).
ctccagcagagcaaaatct

SEQ ID NO: 85309 - DNA, 19 bp, Homo sapiens
  siRNA target sequence for HSPCB (NM_007355.2,1293-1311).
cattcgcaaaaacattgtt

SEQ ID NO: 85310 - DNA, 19 bp, Homo sapiens
  siRNA target sequence for HSPCB (NM_007355.2,1297-1315).
cgcaaaaacattgttaaga

SEQ ID NO: 85311 - DNA, 19 bp, Homo sapiens
  siRNA target sequence for HSPCB (NM_007355.2,1441-1459).
gagctgctgcgctatcata

SEQ ID NO: 85312 - DNA, 19 bp, Homo sapiens
  siRNA target sequence for HSPCB (NM_007355.2,1601-1619).
ggggcttcgaggtggtata

SEQ ID NO: 85313 - DNA, 19 bp, Homo sapiens
  siRNA target sequence for HSPCB (NM_007355.2,1602-1620).
gggcttcgaggtggtatat

SEQ ID NO: 85314 - DNA, 19 bp, Homo sapiens
  siRNA target sequence for HSPCB (NM_007355.2,1603-1621).
ggcttcgaggtggtatata

SEQ ID NO: 85315 - DNA, 19 bp, Homo sapiens
  siRNA target sequence for HSPCB (NM_007355.2,1604-1622).
gcttcgaggtggtatatat

SEQ ID NO: 85316 - DNA, 19 bp, Homo sapiens
  siRNA target sequence for HSPCB (NM_007355.2,1818-1836).
gacaatctccaatagactt

SEQ ID NO: 85317 - DNA, 19 bp, Homo sapiens
  siRNA target sequence for HSPCB (NM_007355.2,1937-1955).
gctatatgatggccaaaaa

SEQ ID NO: 85318 - DNA, 19 bp, Homo sapiens
  siRNA target sequence for HSPCB (NM_007355.2,2062-2080).
gaaaccgccctgctatctt

SEQ ID NO: 85319 - DNA, 19 bp, Homo sapiens
  siRNA target sequence for HSPCB (NM_007355.2,2109-2127).
ccactccaaccgcatctat

SEQ ID NO: 85320 - DNA, 19 bp, Homo sapiens
  siRNA target sequence for HSPCB (NM_007355.2,2119-2137).
cgcatctatcgcatgatca

SEQ ID NO: 85321 - DNA, 19 bp, Homo sapiens
  siRNA target sequence for HSPCB (NM_007355.2,2120-2138).
gcatctatcgcatgatcaa

SEQ ID NO: 85322 - DNA, 19 bp, Homo sapiens
  siRNA target sequence for HSPCB (NM_007355.2,2139-2157).
gctaggtctaggtattgat

SEQ ID NO: 85323 - DNA, 19 bp, Homo sapiens
  siRNA target sequence for HSPD1 (NM_002156.3,192-210).
gatgctgtggccgttacaa

SEQ ID NO: 85324 - DNA, 19 bp, Homo sapiens
  siRNA target sequence for HSPD1 (NM_002156.3,281-299).
gactgttgcaaagtcaatt

SEQ ID NO: 85325 - DNA, 19 bp, Homo sapiens
  siRNA target sequence for HSPD1 (NM_002156.3,285-303).
gttgcaaagtcaattgact

SEQ ID NO: 85326 - DNA, 19 bp, Homo sapiens
  siRNA target sequence for HSPD1 (NM_002156.3,288-306).
gcaaagtcaattgacttaa

SEQ ID NO: 85327 - DNA, 19 bp, Homo sapiens
  siRNA target sequence for HSPH1 (NM_006644.1,412-430).
gtgcaccccgtcagtcata

SEQ ID NO: 85328 - DNA, 19 bp, Homo sapiens
  siRNA target sequence for HSPH1 (NM_006644.1,415-433).
caccccgtcagtcatatca

SEQ ID NO: 85329 - DNA, 19 bp, Homo sapiens
  siRNA target sequence for HSPH1 (NM_006644.1,417-435).
ccccgtcagtcatatcatt

SEQ ID NO: 85330 - DNA, 19 bp, Homo sapiens
  siRNA target sequence for HSPH1 (NM_006644.1,421-439).
gtcagtcatatcatttgga

SEQ ID NO: 85331 - DNA, 19 bp, Homo sapiens
  siRNA target sequence for HSPH1 (NM_006644.1,457-475).
cggagttgcagccaaaaat

SEQ ID NO: 85332 - DNA, 19 bp, Homo sapiens
  siRNA target sequence for HSPH1 (NM_006644.1,492-510).
caaacaatacggtgtctaa

SEQ ID NO: 85333 - DNA, 19 bp, Homo sapiens
  siRNA target sequence for HSPH1 (NM_006644.1,571-589).
cttgagttacgatttggtt

SEQ ID NO: 85334 - DNA, 19 bp, Homo sapiens
  siRNA target sequence for HSPH1 (NM_006644.1,576-594).
gttacgatttggttccatt

SEQ ID NO: 85335 - DNA, 19 bp, Homo sapiens
  siRNA target sequence for HSPH1 (NM_006644.1,586-604).
ggttccattgaaaaatggt

SEQ ID NO: 85336 - DNA, 19 bp, Homo sapiens
  siRNA target sequence for HSPH1 (NM_006644.1,605-623).
ggagttggaataaaggtaa

SEQ ID NO: 85337 - DNA, 19 bp, Homo sapiens
  siRNA target sequence for HSPH1 (NM_006644.1,606-624).
gagttggaataaaggtaat

SEQ ID NO: 85338 - DNA, 19 bp, Homo sapiens
  siRNA target sequence for HSPH1 (NM_006644.1,608-626).
gttggaataaaggtaatgt

SEQ ID NO: 85339 - DNA, 19 bp, Homo sapiens
  siRNA target sequence for HSPH1 (NM_006644.1,625-643).
gtacatgggtgaagaacat

SEQ ID NO: 85340 - DNA, 19 bp, Homo sapiens
  siRNA target sequence for HSPH1 (NM_006644.1,628-646).
catgggtgaagaacatcta

SEQ ID NO: 85341 - DNA, 19 bp, Homo sapiens
  siRNA target sequence for HSPH1 (NM_006644.1,632-650).
ggtgaagaacatctattta

SEQ ID NO: 85342 - DNA, 19 bp, Homo sapiens
  siRNA target sequence for HSPH1 (NM_006644.1,719-737).
ccagtaacagattgtgtta

SEQ ID NO: 85343 - DNA, 19 bp, Homo sapiens
  siRNA target sequence for HSPH1 (NM_006644.1,794-812).
cagattgttggcctaaact

SEQ ID NO: 85344 - DNA, 19 bp, Homo sapiens
  siRNA target sequence for HSPH1 (NM_006644.1,796-814).
gattgttggcctaaactgt

SEQ ID NO: 85345 - DNA, 19 bp, Homo sapiens
  siRNA target sequence for HSPH1 (NM_006644.1,804-822).
gcctaaactgtttaagact

SEQ ID NO: 85346 - DNA, 19 bp, Homo sapiens
  siRNA target sequence for HSPH1 (NM_006644.1,805-823).
cctaaactgtttaagactt

SEQ ID NO: 85347 - DNA, 19 bp, Homo sapiens
  siRNA target sequence for HSPH1 (NM_006644.1,806-824).
ctaaactgtttaagactta

SEQ ID NO: 85348 - DNA, 19 bp, Homo sapiens
  siRNA target sequence for HSPH1 (NM_006644.1,897-915).
ctcggatagtggtttttgt

SEQ ID NO: 85349 - DNA, 19 bp, Homo sapiens
  siRNA target sequence for HSPH1 (NM_006644.1,901-919).
gatagtggtttttgttgat

SEQ ID NO: 85350 - DNA, 19 bp, Homo sapiens
  siRNA target sequence for HSPH1 (NM_006644.1,984-1002).
gaacagcttttgatccttt

SEQ ID NO: 85351 - DNA, 19 bp, Homo sapiens
  siRNA target sequence for HSPH1 (NM_006644.1,1072-1090).
gttggatgcaaaatccaaa

SEQ ID NO: 85352 - DNA, 19 bp, Homo sapiens
  siRNA target sequence for HSPH1 (NM_006644.1,1162-1180).
ccttccactgaatatcgaa

SEQ ID NO: 85353 - DNA, 19 bp, Homo sapiens
  siRNA target sequence for HSPH1 (NM_006644.1,1163-1181).
cttccactgaatatcgaat

SEQ ID NO: 85354 - DNA, 19 bp, Homo sapiens
  siRNA target sequence for HSPH1 (NM_006644.1,1169-1187).
ctgaatatcgaatgcttta

SEQ ID NO: 85355 - DNA, 19 bp, Homo sapiens
  siRNA target sequence for HSPH1 (NM_006644.1,1213-1231).
gatgaacaggtcacaattt

SEQ ID NO: 85356 - DNA, 19 bp, Homo sapiens
  siRNA target sequence for HSPH1 (NM_006644.1,1261-1279).
gatagaagtacccctttat

SEQ ID NO: 85357 - DNA, 19 bp, Homo sapiens
  siRNA target sequence for HSPH1 (NM_006644.1,1288-1306).
ggaacaaactcatctcaaa

SEQ ID NO: 85358 - DNA, 19 bp, Homo sapiens
  siRNA target sequence for HSPH1 (NM_006644.1,1443-1461).
cattacagtgtgcaatact

SEQ ID NO: 85359 - DNA, 19 bp, Homo sapiens
  siRNA target sequence for HSPH1 (NM_006644.1,1468-1486).
ggcatttaaagttagagaa

SEQ ID NO: 85360 - DNA, 19 bp, Homo sapiens
  siRNA target sequence for HSPH1 (NM_006644.1,1470-1488).
catttaaagttagagaatt

SEQ ID NO: 85361 - DNA, 19 bp, Homo sapiens
  siRNA target sequence for HSPH1 (NM_006644.1,1502-1520).
gcagttccttttccaatat

SEQ ID NO: 85362 - DNA, 19 bp, Homo sapiens
  siRNA target sequence for HSPH1 (NM_006644.1,1523-1541).
ctgatctggaaccatgatt

SEQ ID NO: 85363 - DNA, 19 bp, Homo sapiens
  siRNA target sequence for HSPH1 (NM_006644.1,1525-1543).
gatctggaaccatgattca

SEQ ID NO: 85364 - DNA, 19 bp, Homo sapiens
  siRNA target sequence for HSPH1 (NM_006644.1,1531-1549).
gaaccatgattcagaagat

SEQ ID NO: 85365 - DNA, 19 bp, Homo sapiens
  siRNA target sequence for HSPH1 (NM_006644.1,1660-1678).
ccaaggagttccatatcca

SEQ ID NO: 85366 - DNA, 19 bp, Homo sapiens
  siRNA target sequence for HSPH1 (NM_006644.1,1692-1710).
gccgctttgtagttcagaa

SEQ ID NO: 85367 - DNA, 19 bp, Homo sapiens
  siRNA target sequence for HSPH1 (NM_006644.1,1785-1803).
ccatctctacggcatctat

SEQ ID NO: 85368 - DNA, 19 bp, Homo sapiens
  siRNA target sequence for HSPH1 (NM_006644.1,1816-1834).
cccaactgaggagaatgaa

SEQ ID NO: 85369 - DNA, 19 bp, Homo sapiens
  siRNA target sequence for HSPH1 (NM_006644.1,2029-2047).
gacagagggtaagatgata

SEQ ID NO: 85370 - DNA, 19 bp, Homo sapiens
  siRNA target sequence for HSPH1 (NM_006644.1,2128-2146).
gtgtggaccatatgaaaaa

SEQ ID NO: 85371 - DNA, 19 bp, Homo sapiens
  siRNA target sequence for HSPH1 (NM_006644.1,2156-2174).
gagcaggatcatcaaaatt

SEQ ID NO: 85372 - DNA, 19 bp, Homo sapiens
  siRNA target sequence for HSPH1 (NM_006644.1,2158-2176).
gcaggatcatcaaaatttt

SEQ ID NO: 85373 - DNA, 19 bp, Homo sapiens
  siRNA target sequence for HSPH1 (NM_006644.1,2159-2177).
caggatcatcaaaattttt

SEQ ID NO: 85374 - DNA, 19 bp, Homo sapiens
  siRNA target sequence for HSPH1 (NM_006644.1,2181-2199).
gactcctcacagaaactga

SEQ ID NO: 85375 - DNA, 19 bp, Homo sapiens
  siRNA target sequence for HSPH1 (NM_006644.1,2232-2250).
ctaaacaagcatatgttga

SEQ ID NO: 85376 - DNA, 19 bp, Homo sapiens
  siRNA target sequence for HSPH1 (NM_006644.1,2246-2264).
gttgacaagttggaagaat

SEQ ID NO: 85377 - DNA, 19 bp, Homo sapiens
  siRNA target sequence for HSPH1 (NM_006644.1,2350-2368).
gcagcattatgccaagata

SEQ ID NO: 85378 - DNA, 19 bp, Homo sapiens
  siRNA target sequence for HSPH1 (NM_006644.1,2490-2508).
ctaaaaagagtcttgatca

SEQ ID NO: 85379 - DNA, 19 bp, Homo sapiens
  siRNA target sequence for HSPH1 (NM_006644.1,2519-2537).
gtacgtgctcaggaaatta

SEQ ID NO: 85380 - DNA, 19 bp, Homo sapiens
  siRNA target sequence for HSPH1 (NM_006644.1,2568-2586).
gtgaacccgttgtaacaca

SEQ ID NO: 85381 - DNA, 19 bp, Homo sapiens
  siRNA target sequence for HSPH1 (NM_006644.1,2628-2646).
caaatggcccaaatattga

SEQ ID NO: 85382 - DNA, 19 bp, Homo sapiens
  siRNA target sequence for HSPH1 (NM_006644.1,2709-2727).
gtgaatgttaccctaatga

SEQ ID NO: 85383 - DNA, 19 bp, Homo sapiens
  siRNA target sequence for HUNK (NM_014586.1,714-732).
ccgccaccccaatatcact

SEQ ID NO: 85384 - DNA, 19 bp, Homo sapiens
  siRNA target sequence for HUNK (NM_014586.1,842-860).
ccgaagcccgcagatacat

SEQ ID NO: 85385 - DNA, 19 bp, Homo sapiens
  siRNA target sequence for HUNK (NM_014586.1,916-934).
gacttgaagatagagaatt

SEQ ID NO: 85386 - DNA, 19 bp, Homo sapiens
  siRNA target sequence for HUNK (NM_014586.1,921-939).
gaagatagagaatttgcta

SEQ ID NO: 85387 - DNA, 19 bp, Homo sapiens
  siRNA target sequence for HUNK (NM_014586.1,1103-1121).
ccataggtgtgaacatgta

SEQ ID NO: 85388 - DNA, 19 bp, Homo sapiens
  siRNA target sequence for HUNK (NM_014586.1,1305-1323).
ggcgaatcgctggcttaat

SEQ ID NO: 85389 - DNA, 19 bp, Homo sapiens
  siRNA target sequence for HUNK (NM_014586.1,1307-1325).
cgaatcgctggcttaatga

SEQ ID NO: 85390 - DNA, 19 bp, Homo sapiens
  siRNA target sequence for HUNK (NM_014586.1,1312-1330).
cgctggcttaatgagaatt

SEQ ID NO: 85391 - DNA, 19 bp, Homo sapiens
  siRNA target sequence for HUNK (NM_014586.1,1337-1355).
gcaaagtgccctgtaatgt

SEQ ID NO: 85392 - DNA, 19 bp, Homo sapiens
  siRNA target sequence for HUNK (NM_014586.1,1415-1433).
ccgagaagctgggttacaa

SEQ ID NO: 85393 - DNA, 19 bp, Homo sapiens
  siRNA target sequence for HUNK (NM_014586.1,1487-1505).
ccatctacttcctcttaaa

SEQ ID NO: 85394 - DNA, 19 bp, Homo sapiens
  siRNA target sequence for HUNK (NM_014586.1,1568-1586).
cccggctctaccagataga

SEQ ID NO: 85395 - DNA, 19 bp, Homo sapiens
  siRNA target sequence for HUNK (NM_014586.1,1569-1587).
ccggctctaccagatagaa

SEQ ID NO: 85396 - DNA, 19 bp, Homo sapiens
  siRNA target sequence for HUNK (NM_014586.1,1570-1588).
cggctctaccagatagaaa

SEQ ID NO: 85397 - DNA, 19 bp, Homo sapiens
  siRNA target sequence for HUNK (NM_014586.1,1573-1591).
ctctaccagatagaaaagt

SEQ ID NO: 85398 - DNA, 19 bp, Homo sapiens
  siRNA target sequence for HUNK (NM_014586.1,1629-1647).
cacctggacacgagatctt

SEQ ID NO: 85399 - DNA, 19 bp, Homo sapiens
  siRNA target sequence for HUNK (NM_014586.1,1631-1649).
cctggacacgagatcttga

SEQ ID NO: 85400 - DNA, 19 bp, Homo sapiens
  siRNA target sequence for HUNK (NM_014586.1,1632-1650).
ctggacacgagatcttgaa

SEQ ID NO: 85401 - DNA, 19 bp, Homo sapiens
  siRNA target sequence for HUNK (NM_014586.1,1634-1652).
ggacacgagatcttgaatt

SEQ ID NO: 85402 - DNA, 19 bp, Homo sapiens
  siRNA target sequence for HUNK (NM_014586.1,1654-1672).
catgccgtgcaggataaaa

SEQ ID NO: 85403 - DNA, 19 bp, Homo sapiens
  siRNA target sequence for HUNK (NM_014586.1,1761-1779).
ctcaggctcgcttatgaca

SEQ ID NO: 85404 - DNA, 19 bp, Homo sapiens
  siRNA target sequence for HUNK (NM_014586.1,1771-1789).
cttatgacacagattcaga

SEQ ID NO: 85405 - DNA, 19 bp, Homo sapiens
  siRNA target sequence for HUNK (NM_014586.1,1836-1854).
ccccgacaaagattccttt

SEQ ID NO: 85406 - DNA, 19 bp, Homo sapiens
  siRNA target sequence for HUNK (NM_014586.1,1850-1868).
cctttggctgccgcaatat

SEQ ID NO: 85407 - DNA, 19 bp, Homo sapiens
  siRNA target sequence for HUNK (NM_014586.1,1890-1908).
caattgtgtggcttcttct

SEQ ID NO: 85408 - DNA, 19 bp, Homo sapiens
  siRNA target sequence for HUNK (NM_014586.1,2060-2078).
gcgacgaccacgtagaagt

SEQ ID NO: 85409 - DNA, 19 bp, Homo sapiens
  siRNA target sequence for HUNK (NM_014586.1,2121-2139).
cagcttggctcgcagaaat

SEQ ID NO: 85410 - DNA, 19 bp, Homo sapiens
  siRNA target sequence for HUNK (NM_014586.1,2222-2240).
cttttgctcacgaagataa

SEQ ID NO: 85411 - DNA, 19 bp, Homo sapiens
  siRNA target sequence for HUNK (NM_014586.1,2227-2245).
gctcacgaagataagaaca

SEQ ID NO: 85412 - DNA, 19 bp, Homo sapiens
  siRNA target sequence for HUNK (NM_014586.1,2339-2357).
gaggccggttccctatgat

SEQ ID NO: 85413 - DNA, 19 bp, Homo sapiens
  siRNA target sequence for HUNK (NM_014586.1,2358-2376).
gggcatcggacagatgtta

SEQ ID NO: 85414 - DNA, 19 bp, Homo sapiens
  siRNA target sequence for HUNK (NM_014586.1,2359-2377).
ggcatcggacagatgttaa

SEQ ID NO: 85415 - DNA, 19 bp, Homo sapiens
  siRNA target sequence for HYOU1 (NM_006389.2,227-245).
ctgttggcactgagtgata

SEQ ID NO: 85416 - DNA, 19 bp, Homo sapiens
  siRNA target sequence for HYOU1 (NM_006389.2,229-247).
gttggcactgagtgataca

SEQ ID NO: 85417 - DNA, 19 bp, Homo sapiens
  siRNA target sequence for HYOU1 (NM_006389.2,311-329).
gtgcccatggaaattgtct

SEQ ID NO: 85418 - DNA, 19 bp, Homo sapiens
  siRNA target sequence for HYOU1 (NM_006389.2,361-379).
gatcgtgaccctgaaagaa

SEQ ID NO: 85419 - DNA, 19 bp, Homo sapiens
  siRNA target sequence for HYOU1 (NM_006389.2,364-382).
cgtgaccctgaaagaaaat

SEQ ID NO: 85420 - DNA, 19 bp, Homo sapiens
  siRNA target sequence for HYOU1 (NM_006389.2,408-426).
caagcatggcgattaagaa

SEQ ID NO: 85421 - DNA, 19 bp, Homo sapiens
  siRNA target sequence for HYOU1 (NM_006389.2,429-447).
caaaggctacgctacgtta

SEQ ID NO: 85422 - DNA, 19 bp, Homo sapiens
  siRNA target sequence for HYOU1 (NM_006389.2,483-501).
cccatgtagctctttacca

SEQ ID NO: 85423 - DNA, 19 bp, Homo sapiens
  siRNA target sequence for HYOU1 (NM_006389.2,513-531).
cggagcacgagctgacttt

SEQ ID NO: 85424 - DNA, 19 bp, Homo sapiens
  siRNA target sequence for HYOU1 (NM_006389.2,543-561).
ggcagactgtgcactttca

SEQ ID NO: 85425 - DNA, 19 bp, Homo sapiens
  siRNA target sequence for HYOU1 (NM_006389.2,545-563).
cagactgtgcactttcaga

SEQ ID NO: 85426 - DNA, 19 bp, Homo sapiens
  siRNA target sequence for HYOU1 (NM_006389.2,598-616).
gttgggcatggttctcaat

SEQ ID NO: 85427 - DNA, 19 bp, Homo sapiens
  siRNA target sequence for HYOU1 (NM_006389.2,601-619).
gggcatggttctcaattat

SEQ ID NO: 85428 - DNA, 19 bp, Homo sapiens
  siRNA target sequence for HYOU1 (NM_006389.2,602-620).
ggcatggttctcaattatt

SEQ ID NO: 85429 - DNA, 19 bp, Homo sapiens
  siRNA target sequence for HYOU1 (NM_006389.2,623-641).
cgttctctagctgaagatt

SEQ ID NO: 85430 - DNA, 19 bp, Homo sapiens
  siRNA target sequence for HYOU1 (NM_006389.2,675-693).
ccgtgccagtcttcttcaa

SEQ ID NO: 85431 - DNA, 19 bp, Homo sapiens
  siRNA target sequence for HYOU1 (NM_006389.2,824-842).
gcccagaatatcatgttct

SEQ ID NO: 85432 - DNA, 19 bp, Homo sapiens
  siRNA target sequence for HYOU1 (NM_006389.2,931-949).
gatccggggagtaggattt

SEQ ID NO: 85433 - DNA, 19 bp, Homo sapiens
  siRNA target sequence for HYOU1 (NM_006389.2,995-1013).
cgcctggctgggcttttca

SEQ ID NO: 85434 - DNA, 19 bp, Homo sapiens
  siRNA target sequence for HYOU1 (NM_006389.2,1085-1103).
gaggctaatcggctcaaaa

SEQ ID NO: 85435 - DNA, 19 bp, Homo sapiens
  siRNA target sequence for HYOU1 (NM_006389.2,1250-1268).
ctccagagtgccgaaatga

SEQ ID NO: 85436 - DNA, 19 bp, Homo sapiens
  siRNA target sequence for HYOU1 (NM_006389.2,1252-1270).
ccagagtgccgaaatgagt

SEQ ID NO: 85437 - DNA, 19 bp, Homo sapiens
  siRNA target sequence for HYOU1 (NM_006389.2,1425-1443).
cgctcagcaaagcctttaa

SEQ ID NO: 85438 - DNA, 19 bp, Homo sapiens
  siRNA target sequence for HYOU1 (NM_006389.2,1607-1625).
cgctacagccatgatttca

SEQ ID NO: 85439 - DNA, 19 bp, Homo sapiens
  siRNA target sequence for HYOU1 (NM_006389.2,1697-1715).
ctgaccacagtgaagctaa

SEQ ID NO: 85440 - DNA, 19 bp, Homo sapiens
  siRNA target sequence for HYOU1 (NM_006389.2,1815-1833).
gggtggagtctgtatttga

SEQ ID NO: 85441 - DNA, 19 bp, Homo sapiens
  siRNA target sequence for HYOU1 (NM_006389.2,1933-1951).
ggagaatggtactgatact

SEQ ID NO: 85442 - DNA, 19 bp, Homo sapiens
  siRNA target sequence for HYOU1 (NM_006389.2,2085-2103).
caacccctgagggagaaaa

SEQ ID NO: 85443 - DNA, 19 bp, Homo sapiens
  siRNA target sequence for HYOU1 (NM_006389.2,2221-2239).
caggaagcggcgaatggta

SEQ ID NO: 85444 - DNA, 19 bp, Homo sapiens
  siRNA target sequence for HYOU1 (NM_006389.2,2563-2581).
gtgccaagggctgtttttt

SEQ ID NO: 85445 - DNA, 19 bp, Homo sapiens
  siRNA target sequence for HYOU1 (NM_006389.2,2585-2603).
gtagaggagcgcaagaagt

SEQ ID NO: 85446 - DNA, 19 bp, Homo sapiens
  siRNA target sequence for HYOU1 (NM_006389.2,2613-2631).
ggctgtctgccctcgataa

SEQ ID NO: 85447 - DNA, 19 bp, Homo sapiens
  siRNA target sequence for HYOU1 (NM_006389.2,2614-2632).
gctgtctgccctcgataat

SEQ ID NO: 85448 - DNA, 19 bp, Homo sapiens
  siRNA target sequence for HYOU1 (NM_006389.2,2704-2722).
ggtggagatgacaacgtta

SEQ ID NO: 85449 - DNA, 19 bp, Homo sapiens
  siRNA target sequence for HYOU1 (NM_006389.2,2800-2818).
gcctgtgttgctctcaaaa

SEQ ID NO: 85450 - DNA, 19 bp, Homo sapiens
  siRNA target sequence for HYOU1 (NM_006389.2,2802-2820).
ctgtgttgctctcaaaaga

SEQ ID NO: 85451 - DNA, 19 bp, Homo sapiens
  siRNA target sequence for HYOU1 (NM_006389.2,2809-2827).
gctctcaaaagacattgaa

SEQ ID NO: 85452 - DNA, 19 bp, Homo sapiens
  siRNA target sequence for IARS (NM_002161.2,211-229).
ctatgatggtcctcctttt

SEQ ID NO: 85453 - DNA, 19 bp, Homo sapiens
  siRNA target sequence for IARS (NM_002161.2,241-259).
gcctcactatggacatata

SEQ ID NO: 85454 - DNA, 19 bp, Homo sapiens
  siRNA target sequence for IARS (NM_002161.2,243-261).
ctcactatggacatatact

SEQ ID NO: 85455 - DNA, 19 bp, Homo sapiens
  siRNA target sequence for IARS (NM_002161.2,263-281).
gcgggtacaattaaagata

SEQ ID NO: 85456 - DNA, 19 bp, Homo sapiens
  siRNA target sequence for IARS (NM_002161.2,267-285).
gtacaattaaagatatagt

SEQ ID NO: 85457 - DNA, 19 bp, Homo sapiens
  siRNA target sequence for IARS (NM_002161.2,301-319).
ccagagtgggtttcatgtt

SEQ ID NO: 85458 - DNA, 19 bp, Homo sapiens
  siRNA target sequence for IARS (NM_002161.2,348-366).
gcttacctgtggaatatga

SEQ ID NO: 85459 - DNA, 19 bp, Homo sapiens
  siRNA target sequence for IARS (NM_002161.2,349-367).
cttacctgtggaatatgaa

SEQ ID NO: 85460 - DNA, 19 bp, Homo sapiens
  siRNA target sequence for IARS (NM_002161.2,408-426).
ccaaaatggggattacaga

SEQ ID NO: 85461 - DNA, 19 bp, Homo sapiens
  siRNA target sequence for IARS (NM_002161.2,416-434).
gggattacagagtataaca

SEQ ID NO: 85462 - DNA, 19 bp, Homo sapiens
  siRNA target sequence for IARS (NM_002161.2,433-451).
caatcagtgccgagcaatt

SEQ ID NO: 85463 - DNA, 19 bp, Homo sapiens
  siRNA target sequence for IARS (NM_002161.2,443-461).
cgagcaattgtgatgagat

SEQ ID NO: 85464 - DNA, 19 bp, Homo sapiens
  siRNA target sequence for IARS (NM_002161.2,446-464).
gcaattgtgatgagatatt

SEQ ID NO: 85465 - DNA, 19 bp, Homo sapiens
  siRNA target sequence for IARS (NM_002161.2,470-488).
gagtggaagtctactgtta

SEQ ID NO: 85466 - DNA, 19 bp, Homo sapiens
  siRNA target sequence for IARS (NM_002161.2,490-508).
cagacttggccgatggatt

SEQ ID NO: 85467 - DNA, 19 bp, Homo sapiens
  siRNA target sequence for IARS (NM_002161.2,494-512).
cttggccgatggattgact

SEQ ID NO: 85468 - DNA, 19 bp, Homo sapiens
  siRNA target sequence for IARS (NM_002161.2,498-516).
gccgatggattgactttga

SEQ ID NO: 85469 - DNA, 19 bp, Homo sapiens
  siRNA target sequence for IARS (NM_002161.2,500-518).
cgatggattgactttgaca

SEQ ID NO: 85470 - DNA, 19 bp, Homo sapiens
  siRNA target sequence for IARS (NM_002161.2,559-577).
ctggtgggtcttcaaacaa

SEQ ID NO: 85471 - DNA, 19 bp, Homo sapiens
  siRNA target sequence for IARS (NM_002161.2,561-579).
ggtgggtcttcaaacaact

SEQ ID NO: 85472 - DNA, 19 bp, Homo sapiens
  siRNA target sequence for IARS (NM_002161.2,565-583).
ggtcttcaaacaactctat

SEQ ID NO: 85473 - DNA, 19 bp, Homo sapiens
  siRNA target sequence for IARS (NM_002161.2,571-589).
caaacaactctatgataaa

SEQ ID NO: 85474 - DNA, 19 bp, Homo sapiens
  siRNA target sequence for IARS (NM_002161.2,584-602).
gataaaggccttgtttata

SEQ ID NO: 85475 - DNA, 19 bp, Homo sapiens
  siRNA target sequence for IARS (NM_002161.2,625-643).
ctctacggcatgtaacact

SEQ ID NO: 85476 - DNA, 19 bp, Homo sapiens
  siRNA target sequence for IARS (NM_002161.2,636-654).
gtaacactccactttccaa

SEQ ID NO: 85477 - DNA, 19 bp, Homo sapiens
  siRNA target sequence for IARS (NM_002161.2,658-676).
cgagtcacaccagaattat

SEQ ID NO: 85478 - DNA, 19 bp, Homo sapiens
  siRNA target sequence for IARS (NM_002161.2,659-677).
gagtcacaccagaattata

SEQ ID NO: 85479 - DNA, 19 bp, Homo sapiens
  siRNA target sequence for IARS (NM_002161.2,766-784).
gactctacctagtaacctt

SEQ ID NO: 85480 - DNA, 19 bp, Homo sapiens
  siRNA target sequence for IARS (NM_002161.2,833-851).
gccagaggacgattactca

SEQ ID NO: 85481 - DNA, 19 bp, Homo sapiens
  siRNA target sequence for IARS (NM_002161.2,834-852).
ccagaggacgattactcat

SEQ ID NO: 85482 - DNA, 19 bp, Homo sapiens
  siRNA target sequence for IARS (NM_002161.2,835-853).
cagaggacgattactcatt

SEQ ID NO: 85483 - DNA, 19 bp, Homo sapiens
  siRNA target sequence for IARS (NM_002161.2,839-857).
ggacgattactcattttaa

SEQ ID NO: 85484 - DNA, 19 bp, Homo sapiens
  siRNA target sequence for IARS (NM_002161.2,840-858).
gacgattactcattttaat

SEQ ID NO: 85485 - DNA, 19 bp, Homo sapiens
  siRNA target sequence for IARS (NM_002161.2,867-885).
gattgtcagccctctataa

SEQ ID NO: 85486 - DNA, 19 bp, Homo sapiens
  siRNA target sequence for IARS (NM_002161.2,932-950).
cttaaaggcaagaagtaca

SEQ ID NO: 85487 - DNA, 19 bp, Homo sapiens
  siRNA target sequence for IARS (NM_002161.2,951-969).
ggcccctgtttgactattt

SEQ ID NO: 85488 - DNA, 19 bp, Homo sapiens
  siRNA target sequence for IARS (NM_002161.2,970-988).
cctgaagtgtaaagagaat

SEQ ID NO: 85489 - DNA, 19 bp, Homo sapiens
  siRNA target sequence for IARS (NM_002161.2,999-1017).
ctgtgcttgttgacaacta

SEQ ID NO: 85490 - DNA, 19 bp, Homo sapiens
  siRNA target sequence for IARS (NM_002161.2,1082-1100).
cgggtctgtatggacttta

SEQ ID NO: 85491 - DNA, 19 bp, Homo sapiens
  siRNA target sequence for IARS (NM_002161.2,1083-1101).
gggtctgtatggactttaa

SEQ ID NO: 85492 - DNA, 19 bp, Homo sapiens
  siRNA target sequence for IARS (NM_002161.2,1085-1103).
gtctgtatggactttaaca

SEQ ID NO: 85493 - DNA, 19 bp, Homo sapiens
  siRNA target sequence for IARS (NM_002161.2,1158-1176).
caacggaggtgacagattt

SEQ ID NO: 85494 - DNA, 19 bp, Homo sapiens
  siRNA target sequence for IARS (NM_002161.2,1209-1227).
gtatcatcaggactttgaa

SEQ ID NO: 85495 - DNA, 19 bp, Homo sapiens
  siRNA target sequence for IARS (NM_002161.2,1396-1414).
gttggtacgagaaaaacga

SEQ ID NO: 85496 - DNA, 19 bp, Homo sapiens
  siRNA target sequence for IARS (NM_002161.2,1403-1421).
cgagaaaaacgatttggaa

SEQ ID NO: 85497 - DNA, 19 bp, Homo sapiens
  siRNA target sequence for IARS (NM_002161.2,1436-1454).
gcacgtgactggacaattt

SEQ ID NO: 85498 - DNA, 19 bp, Homo sapiens
  siRNA target sequence for IARS (NM_002161.2,1491-1509).
gggtcagcgatgactttga

SEQ ID NO: 85499 - DNA, 19 bp, Homo sapiens
  siRNA target sequence for IARS (NM_002161.2,1530-1548).
cagtggcggaacttgaaga

SEQ ID NO: 85500 - DNA, 19 bp, Homo sapiens
  siRNA target sequence for IARS (NM_002161.2,1638-1656).
gcatctctgaagtgtttga

SEQ ID NO: 85501 - DNA, 19 bp, Homo sapiens
  siRNA target sequence for IARS (NM_002161.2,1683-1701).
cctatgctcaggttcatta

SEQ ID NO: 85502 - DNA, 19 bp, Homo sapiens
  siRNA target sequence for IARS (NM_002161.2,1693-1711).
ggttcattacccgtttgaa

SEQ ID NO: 85503 - DNA, 19 bp, Homo sapiens
  siRNA target sequence for IARS (NM_002161.2,1694-1712).
gttcattacccgtttgaaa

SEQ ID NO: 85504 - DNA, 19 bp, Homo sapiens
  siRNA target sequence for IARS (NM_002161.2,1697-1715).
cattacccgtttgaaaaca

SEQ ID NO: 85505 - DNA, 19 bp, Homo sapiens
  siRNA target sequence for IARS (NM_002161.2,1733-1751).
gcttttcctgcagatttca

SEQ ID NO: 85506 - DNA, 19 bp, Homo sapiens
  siRNA target sequence for IARS (NM_002161.2,1734-1752).
cttttcctgcagatttcat

SEQ ID NO: 85507 - DNA, 19 bp, Homo sapiens
  siRNA target sequence for IARS (NM_002161.2,1820-1838).
ggacaaccgcctttcaaga

SEQ ID NO: 85508 - DNA, 19 bp, Homo sapiens
  siRNA target sequence for IARS (NM_002161.2,1821-1839).
gacaaccgcctttcaagaa

SEQ ID NO: 85509 - DNA, 19 bp, Homo sapiens
  siRNA target sequence for IARS (NM_002161.2,1826-1844).
ccgcctttcaagaacgtaa

SEQ ID NO: 85510 - DNA, 19 bp, Homo sapiens
  siRNA target sequence for IARS (NM_002161.2,1827-1845).
cgcctttcaagaacgtaat

SEQ ID NO: 85511 - DNA, 19 bp, Homo sapiens
  siRNA target sequence for IARS (NM_002161.2,1828-1846).
gcctttcaagaacgtaatt

SEQ ID NO: 85512 - DNA, 19 bp, Homo sapiens
  siRNA target sequence for IARS (NM_002161.2,1866-1884).
caagtgatggccaaaaaat

SEQ ID NO: 85513 - DNA, 19 bp, Homo sapiens
  siRNA target sequence for IARS (NM_002161.2,1938-1956).
gtgctgatgccctcagatt

SEQ ID NO: 85514 - DNA, 19 bp, Homo sapiens
  siRNA target sequence for IARS (NM_002161.2,1940-1958).
gctgatgccctcagattat

SEQ ID NO: 85515 - DNA, 19 bp, Homo sapiens
  siRNA target sequence for IARS (NM_002161.2,1941-1959).
ctgatgccctcagattata

SEQ ID NO: 85516 - DNA, 19 bp, Homo sapiens
  siRNA target sequence for IARS (NM_002161.2,1949-1967).
ctcagattatatctgatta

SEQ ID NO: 85517 - DNA, 19 bp, Homo sapiens
  siRNA target sequence for IARS (NM_002161.2,2017-2035).
gcgggacgtccttaaggat

SEQ ID NO: 85518 - DNA, 19 bp, Homo sapiens
  siRNA target sequence for IARS (NM_002161.2,2053-2071).
caatgcctatcgcttctta

SEQ ID NO: 85519 - DNA, 19 bp, Homo sapiens
  siRNA target sequence for IARS (NM_002161.2,2058-2076).
cctatcgcttcttaatcca

SEQ ID NO: 85520 - DNA, 19 bp, Homo sapiens
  siRNA target sequence for IARS (NM_002161.2,2126-2144).
gagaacacggttagagaaa

SEQ ID NO: 85521 - DNA, 19 bp, Homo sapiens
  siRNA target sequence for IARS (NM_002161.2,2187-2205).
ctctcattggcttctttga

SEQ ID NO: 85522 - DNA, 19 bp, Homo sapiens
  siRNA target sequence for IARS (NM_002161.2,2215-2233).
ggcagcttataggctttat

SEQ ID NO: 85523 - DNA, 19 bp, Homo sapiens
  siRNA target sequence for IARS (NM_002161.2,2216-2234).
gcagcttataggctttata

SEQ ID NO: 85524 - DNA, 19 bp, Homo sapiens
  siRNA target sequence for IARS (NM_002161.2,2220-2238).
cttataggctttatactgt

SEQ ID NO: 85525 - DNA, 19 bp, Homo sapiens
  siRNA target sequence for IARS (NM_002161.2,2242-2260).
gcctcgcctggtcaagttt

SEQ ID NO: 85526 - DNA, 19 bp, Homo sapiens
  siRNA target sequence for IARS (NM_002161.2,2247-2265).
gcctggtcaagtttgtaga

SEQ ID NO: 85527 - DNA, 19 bp, Homo sapiens
  siRNA target sequence for IARS (NM_002161.2,2261-2279).
gtagatattctgaccaatt

SEQ ID NO: 85528 - DNA, 19 bp, Homo sapiens
  siRNA target sequence for IARS (NM_002161.2,2264-2282).
gatattctgaccaattggt

SEQ ID NO: 85529 - DNA, 19 bp, Homo sapiens
  siRNA target sequence for IARS (NM_002161.2,2270-2288).
ctgaccaattggtatgtta

SEQ ID NO: 85530 - DNA, 19 bp, Homo sapiens
  siRNA target sequence for IARS (NM_002161.2,2272-2290).
gaccaattggtatgttaga

SEQ ID NO: 85531 - DNA, 19 bp, Homo sapiens
  siRNA target sequence for IARS (NM_002161.2,2341-2359).
ggccctagaaaccttgttt

SEQ ID NO: 85532 - DNA, 19 bp, Homo sapiens
  siRNA target sequence for IARS (NM_002161.2,2342-2360).
gccctagaaaccttgttta

SEQ ID NO: 85533 - DNA, 19 bp, Homo sapiens
  siRNA target sequence for IARS (NM_002161.2,2443-2461).
gattgaccctgtttctgtt

SEQ ID NO: 85534 - DNA, 19 bp, Homo sapiens
  siRNA target sequence for IARS (NM_002161.2,2501-2519).
ccccgtgttcgagaagaat

SEQ ID NO: 85535 - DNA, 19 bp, Homo sapiens
  siRNA target sequence for IARS (NM_002161.2,2502-2520).
cccgtgttcgagaagaatt

SEQ ID NO: 85536 - DNA, 19 bp, Homo sapiens
  siRNA target sequence for IARS (NM_002161.2,2504-2522).
cgtgttcgagaagaattga

SEQ ID NO: 85537 - DNA, 19 bp, Homo sapiens
  siRNA target sequence for IARS (NM_002161.2,2505-2523).
gtgttcgagaagaattgat

SEQ ID NO: 85538 - DNA, 19 bp, Homo sapiens
  siRNA target sequence for IARS (NM_002161.2,2510-2528).
cgagaagaattgattgaca

SEQ ID NO: 85539 - DNA, 19 bp, Homo sapiens
  siRNA target sequence for IARS (NM_002161.2,2582-2600).
gtgatcagagaccgaaaaa

SEQ ID NO: 85540 - DNA, 19 bp, Homo sapiens
  siRNA target sequence for IARS (NM_002161.2,2607-2625).
ccataaagtatcctttgaa

SEQ ID NO: 85541 - DNA, 19 bp, Homo sapiens
  siRNA target sequence for IARS (NM_002161.2,2614-2632).
gtatcctttgaaagaaatt

SEQ ID NO: 85542 - DNA, 19 bp, Homo sapiens
  siRNA target sequence for IARS (NM_002161.2,2676-2694).
ctttggagaagtatatcat

SEQ ID NO: 85543 - DNA, 19 bp, Homo sapiens
  siRNA target sequence for IARS (NM_002161.2,2692-2710).
cattgaggaactcaatgtt

SEQ ID NO: 85544 - DNA, 19 bp, Homo sapiens
  siRNA target sequence for IARS (NM_002161.2,2698-2716).
ggaactcaatgttcgaaaa

SEQ ID NO: 85545 - DNA, 19 bp, Homo sapiens
  siRNA target sequence for IARS (NM_002161.2,2702-2720).
ctcaatgttcgaaaagtta

SEQ ID NO: 85546 - DNA, 19 bp, Homo sapiens
  siRNA target sequence for IARS (NM_002161.2,2704-2722).
caatgttcgaaaagttaca

SEQ ID NO: 85547 - DNA, 19 bp, Homo sapiens
  siRNA target sequence for IARS (NM_002161.2,2717-2735).
gttacactgtctacagata

SEQ ID NO: 85548 - DNA, 19 bp, Homo sapiens
  siRNA target sequence for IARS (NM_002161.2,2793-2811).
gtctgaagggagcctttaa

SEQ ID NO: 85549 - DNA, 19 bp, Homo sapiens
  siRNA target sequence for IARS (NM_002161.2,2920-2938).
cctcatgtacacctttgat

SEQ ID NO: 85550 - DNA, 19 bp, Homo sapiens
  siRNA target sequence for IARS (NM_002161.2,2949-2967).
gtgggactgcgcaatttga

SEQ ID NO: 85551 - DNA, 19 bp, Homo sapiens
  siRNA target sequence for IARS (NM_002161.2,2986-3004).
ggctttggtcctcttagat

SEQ ID NO: 85552 - DNA, 19 bp, Homo sapiens
  siRNA target sequence for IARS (NM_002161.2,3016-3034).
ccagtcaatggtagatgaa

SEQ ID NO: 85553 - DNA, 19 bp, Homo sapiens
  siRNA target sequence for IARS (NM_002161.2,3036-3054).
gaatggctcgggaagtcat

SEQ ID NO: 85554 - DNA, 19 bp, Homo sapiens
  siRNA target sequence for IARS (NM_002161.2,3040-3058).
ggctcgggaagtcatcaat

SEQ ID NO: 85555 - DNA, 19 bp, Homo sapiens
  siRNA target sequence for IARS (NM_002161.2,3050-3068).
gtcatcaatcgcatacaga

SEQ ID NO: 85556 - DNA, 19 bp, Homo sapiens
  siRNA target sequence for IARS (NM_002161.2,3052-3070).
catcaatcgcatacagaaa

SEQ ID NO: 85557 - DNA, 19 bp, Homo sapiens
  siRNA target sequence for IARS (NM_002161.2,3055-3073).
caatcgcatacagaaactt

SEQ ID NO: 85558 - DNA, 19 bp, Homo sapiens
  siRNA target sequence for IARS (NM_002161.2,3065-3083).
cagaaacttcgcaaaaagt

SEQ ID NO: 85559 - DNA, 19 bp, Homo sapiens
  siRNA target sequence for IARS (NM_002161.2,3109-3127).
cacagtgtactataaagca

SEQ ID NO: 85560 - DNA, 19 bp, Homo sapiens
  siRNA target sequence for IARS (NM_002161.2,3196-3214).
ggctcccttgaaaccatat

SEQ ID NO: 85561 - DNA, 19 bp, Homo sapiens
  siRNA target sequence for IARS (NM_002161.2,3205-3223).
gaaaccatatccagtttct

SEQ ID NO: 85562 - DNA, 19 bp, Homo sapiens
  siRNA target sequence for IARS (NM_002161.2,3312-3330).
gtcctgcttgtgcatatgt

SEQ ID NO: 85563 - DNA, 19 bp, Homo sapiens
  siRNA target sequence for IARS (NM_002161.2,3324-3342).
catatgtcaatcttaacat

SEQ ID NO: 85564 - DNA, 19 bp, Homo sapiens
  siRNA target sequence for IARS (NM_002161.2,3390-3408).
caaaaggtgacaataggtt

SEQ ID NO: 85565 - DNA, 19 bp, Homo sapiens
  siRNA target sequence for IARS (NM_002161.2,3400-3418).
caataggttggacctttta

SEQ ID NO: 85566 - DNA, 19 bp, Homo sapiens
  siRNA target sequence for IARS (NM_002161.2,3405-3423).
ggttggaccttttaaagct

SEQ ID NO: 85567 - DNA, 19 bp, Homo sapiens
  siRNA target sequence for IARS (NM_002161.2,3427-3445).
gagtgttgtcactagcatt

SEQ ID NO: 85568 - DNA, 19 bp, Homo sapiens
  siRNA target sequence for IARS (NM_002161.2,3429-3447).
gtgttgtcactagcatttt

SEQ ID NO: 85569 - DNA, 19 bp, Homo sapiens
  siRNA target sequence for IARS (NM_002161.2,3517-3535).
gagtcttagtggaaaaaca

SEQ ID NO: 85570 - DNA, 19 bp, Homo sapiens
  siRNA target sequence for IARS (NM_002161.2,3519-3537).
gtcttagtggaaaaacact

SEQ ID NO: 85571 - DNA, 19 bp, Homo sapiens
  siRNA target sequence for IARS (NM_002161.2,3555-3573).
cggctccctctctgatcaa

SEQ ID NO: 85572 - DNA, 19 bp, Homo sapiens
  siRNA target sequence for IARS (NM_002161.2,3557-3575).
gctccctctctgatcaaca

SEQ ID NO: 85573 - DNA, 19 bp, Homo sapiens
  siRNA target sequence for IARS (NM_002161.2,3566-3584).
ctgatcaacagttctagta

SEQ ID NO: 85574 - DNA, 19 bp, Homo sapiens
  siRNA target sequence for IARS (NM_002161.2,3568-3586).
gatcaacagttctagtact

SEQ ID NO: 85575 - DNA, 19 bp, Homo sapiens
  siRNA target sequence for IARS (NM_002161.2,3571-3589).
caacagttctagtactctt

SEQ ID NO: 85576 - DNA, 19 bp, Homo sapiens
  siRNA target sequence for IARS (NM_002161.2,3587-3605).
cttctttgtcagtatatca

SEQ ID NO: 85577 - DNA, 19 bp, Homo sapiens
  siRNA target sequence for IARS (NM_002161.2,3700-3718).
ccaccaaggtcttctgtat

SEQ ID NO: 85578 - DNA, 19 bp, Homo sapiens
  siRNA target sequence for IARS (NM_002161.2,3775-3793).
gacccaaacgcaggaaatt

SEQ ID NO: 85579 - DNA, 19 bp, Homo sapiens
  siRNA target sequence for IARS (NM_002161.2,3778-3796).
ccaaacgcaggaaattaca

SEQ ID NO: 85580 - DNA, 19 bp, Homo sapiens
  siRNA target sequence for IARS (NM_002161.2,3800-3818).
gacatccccgtgaagactt

SEQ ID NO: 85581 - DNA, 19 bp, Homo sapiens
  siRNA target sequence for IARS (NM_002161.2,3806-3824).
cccgtgaagactttgaata

SEQ ID NO: 85582 - DNA, 19 bp, Homo sapiens
  siRNA target sequence for ICK (NM_014920.2,432-450).
ctgatcgctattaaaaaaa

SEQ ID NO: 85583 - DNA, 19 bp, Homo sapiens
  siRNA target sequence for ICK (NM_014920.2,492-510).
cgggaggttaagtctttaa

SEQ ID NO: 85584 - DNA, 19 bp, Homo sapiens
  siRNA target sequence for ICK (NM_014920.2,521-539).
ccatgccaatgtagtcaaa

SEQ ID NO: 85585 - DNA, 19 bp, Homo sapiens
  siRNA target sequence for ICK (NM_014920.2,522-540).
catgccaatgtagtcaaat

SEQ ID NO: 85586 - DNA, 19 bp, Homo sapiens
  siRNA target sequence for ICK (NM_014920.2,639-657).
cctgagtctgctataagga

SEQ ID NO: 85587 - DNA, 19 bp, Homo sapiens
  siRNA target sequence for ICK (NM_014920.2,642-660).
gagtctgctataaggaata

SEQ ID NO: 85588 - DNA, 19 bp, Homo sapiens
  siRNA target sequence for ICK (NM_014920.2,648-666).
gctataaggaatatcatgt

SEQ ID NO: 85589 - DNA, 19 bp, Homo sapiens
  siRNA target sequence for ICK (NM_014920.2,649-667).
ctataaggaatatcatgta

SEQ ID NO: 85590 - DNA, 19 bp, Homo sapiens
  siRNA target sequence for ICK (NM_014920.2,655-673).
ggaatatcatgtatcagat

SEQ ID NO: 85591 - DNA, 19 bp, Homo sapiens
  siRNA target sequence for ICK (NM_014920.2,682-700).
gactcgcatttattcacaa

SEQ ID NO: 85592 - DNA, 19 bp, Homo sapiens
  siRNA target sequence for ICK (NM_014920.2,707-725).
cttctttcatcgagactta

SEQ ID NO: 85593 - DNA, 19 bp, Homo sapiens
  siRNA target sequence for ICK (NM_014920.2,745-763).
gcatgggaccagaacttgt

SEQ ID NO: 85594 - DNA, 19 bp, Homo sapiens
  siRNA target sequence for ICK (NM_014920.2,787-805).
cccgagaaatacgatcaaa

SEQ ID NO: 85595 - DNA, 19 bp, Homo sapiens
  siRNA target sequence for ICK (NM_014920.2,788-806).
ccgagaaatacgatcaaaa

SEQ ID NO: 85596 - DNA, 19 bp, Homo sapiens
  siRNA target sequence for ICK (NM_014920.2,798-816).
cgatcaaaacctccatata

SEQ ID NO: 85597 - DNA, 19 bp, Homo sapiens
  siRNA target sequence for ICK (NM_014920.2,910-928).
gcatcatggcagaagttta

SEQ ID NO: 85598 - DNA, 19 bp, Homo sapiens
  siRNA target sequence for ICK (NM_014920.2,951-969).
ggagccagtgaaattgaca

SEQ ID NO: 85599 - DNA, 19 bp, Homo sapiens
  siRNA target sequence for ICK (NM_014920.2,1020-1038).
cctgaaggctatcaacttt

SEQ ID NO: 85600 - DNA, 19 bp, Homo sapiens
  siRNA target sequence for ICK (NM_014920.2,1023-1041).
gaaggctatcaactttcaa

SEQ ID NO: 85601 - DNA, 19 bp, Homo sapiens
  siRNA target sequence for ICK (NM_014920.2,1171-1189).
ctagtcaggcacttcgata

SEQ ID NO: 85602 - DNA, 19 bp, Homo sapiens
  siRNA target sequence for ICK (NM_014920.2,1180-1198).
cacttcgatatccttactt

SEQ ID NO: 85603 - DNA, 19 bp, Homo sapiens
  siRNA target sequence for ICK (NM_014920.2,1278-1296).
gcaggcccacctccttata

SEQ ID NO: 85604 - DNA, 19 bp, Homo sapiens
  siRNA target sequence for ICK (NM_014920.2,1279-1297).
caggcccacctccttatat

SEQ ID NO: 85605 - DNA, 19 bp, Homo sapiens
  siRNA target sequence for ICK (NM_014920.2,1281-1299).
ggcccacctccttatatta

SEQ ID NO: 85606 - DNA, 19 bp, Homo sapiens
  siRNA target sequence for ICK (NM_014920.2,1488-1506).
catccacagtcgaaaatca

SEQ ID NO: 85607 - DNA, 19 bp, Homo sapiens
  siRNA target sequence for ICK (NM_014920.2,1533-1551).
gagataaagccaaagagta

SEQ ID NO: 85608 - DNA, 19 bp, Homo sapiens
  siRNA target sequence for ICK (NM_014920.2,1552-1570).
ggagaaggtggggtcttat

SEQ ID NO: 85609 - DNA, 19 bp, Homo sapiens
  siRNA target sequence for ICK (NM_014920.2,1553-1571).
gagaaggtggggtcttatt

SEQ ID NO: 85610 - DNA, 19 bp, Homo sapiens
  siRNA target sequence for ICK (NM_014920.2,1566-1584).
cttatttccaggtcaacaa

SEQ ID NO: 85611 - DNA, 19 bp, Homo sapiens
  siRNA target sequence for ICK (NM_014920.2,1576-1594).
ggtcaacaaaggattcaga

SEQ ID NO: 85612 - DNA, 19 bp, Homo sapiens
  siRNA target sequence for ICK (NM_014920.2,1577-1595).
gtcaacaaaggattcagat

SEQ ID NO: 85613 - DNA, 19 bp, Homo sapiens
  siRNA target sequence for ICK (NM_014920.2,1748-1766).
ccccacccagacgtcatat

SEQ ID NO: 85614 - DNA, 19 bp, Homo sapiens
  siRNA target sequence for ICK (NM_014920.2,1750-1768).
ccacccagacgtcatatca

SEQ ID NO: 85615 - DNA, 19 bp, Homo sapiens
  siRNA target sequence for ICK (NM_014920.2,1797-1815).
gcagccaagcagcactatt

SEQ ID NO: 85616 - DNA, 19 bp, Homo sapiens
  siRNA target sequence for ICK (NM_014920.2,1798-1816).
cagccaagcagcactattt

SEQ ID NO: 85617 - DNA, 19 bp, Homo sapiens
  siRNA target sequence for ICK (NM_014920.2,1800-1818).
gccaagcagcactatttga

SEQ ID NO: 85618 - DNA, 19 bp, Homo sapiens
  siRNA target sequence for ICK (NM_014920.2,1835-1853).
gcctgggatcagtataaga

SEQ ID NO: 85619 - DNA, 19 bp, Homo sapiens
  siRNA target sequence for ICK (NM_014920.2,1867-1885).
cgaatccaggcaaggaatt

SEQ ID NO: 85620 - DNA, 19 bp, Homo sapiens
  siRNA target sequence for ICK (NM_014920.2,1880-1898).
ggaatttattccacctaat

SEQ ID NO: 85621 - DNA, 19 bp, Homo sapiens
  siRNA target sequence for ICK (NM_014920.2,1893-1911).
cctaatccatggtctagtt

SEQ ID NO: 85622 - DNA, 19 bp, Homo sapiens
  siRNA target sequence for ICK (NM_014920.2,1916-1934).
cttgtctggaaaatcttca

SEQ ID NO: 85623 - DNA, 19 bp, Homo sapiens
  siRNA target sequence for ICK (NM_014920.2,1935-1953).
gggacaatgtcagtaatca

SEQ ID NO: 85624 - DNA, 19 bp, Homo sapiens
  siRNA target sequence for ICK (NM_014920.2,1943-1961).
gtcagtaatcagcaaagta

SEQ ID NO: 85625 - DNA, 19 bp, Homo sapiens
  siRNA target sequence for ICK (NM_014920.2,2057-2075).
ggtacacctagcacctatt

SEQ ID NO: 85626 - DNA, 19 bp, Homo sapiens
  siRNA target sequence for IDH3G (NM_004135.2,288-306).
cccctcgaggaacatcttt

SEQ ID NO: 85627 - DNA, 19 bp, Homo sapiens
  siRNA target sequence for IDH3G (NM_004135.2,289-307).
ccctcgaggaacatctttt

SEQ ID NO: 85628 - DNA, 19 bp, Homo sapiens
  siRNA target sequence for IDH3G (NM_004135.2,291-309).
ctcgaggaacatcttttca

SEQ ID NO: 85629 - DNA, 19 bp, Homo sapiens
  siRNA target sequence for IDH3G (NM_004135.2,414-432).
cttcaggcacgcatgtgta

SEQ ID NO: 85630 - DNA, 19 bp, Homo sapiens
  siRNA target sequence for IDH3G (NM_004135.2,450-468).
ggtgcacgtgagttccaat

SEQ ID NO: 85631 - DNA, 19 bp, Homo sapiens
  siRNA target sequence for IDH3G (NM_004135.2,526-544).
ctgaagggcaacatcgaaa

SEQ ID NO: 85632 - DNA, 19 bp, Homo sapiens
  siRNA target sequence for IDH3G (NM_004135.2,556-574).
ctgccaccgtcgcacaaat

SEQ ID NO: 85633 - DNA, 19 bp, Homo sapiens
  siRNA target sequence for IDH3G (NM_004135.2,558-576).
gccaccgtcgcacaaatct

SEQ ID NO: 85634 - DNA, 19 bp, Homo sapiens
  siRNA target sequence for IDH3G (NM_004135.2,566-584).
cgcacaaatctcgaaacaa

SEQ ID NO: 85635 - DNA, 19 bp, Homo sapiens
  siRNA target sequence for IDH3G (NM_004135.2,614-632).
ccaacgtcatccactgtaa

SEQ ID NO: 85636 - DNA, 19 bp, Homo sapiens
  siRNA target sequence for IDH3G (NM_004135.2,653-671).
cccggcacaaggacataga

SEQ ID NO: 85637 - DNA, 19 bp, Homo sapiens
  siRNA target sequence for IDH3G (NM_004135.2,926-944).
ccttcgagaacatgattgt

SEQ ID NO: 85638 - DNA, 19 bp, Homo sapiens
  siRNA target sequence for IDH3G (NM_004135.2,1090-1108).
gtgtacgcggtgtttgaaa

SEQ ID NO: 85639 - DNA, 19 bp, Homo sapiens
  siRNA target sequence for IDH3G (NM_004135.2,1092-1110).
gtacgcggtgtttgaaaca

SEQ ID NO: 85640 - DNA, 19 bp, Homo sapiens
  siRNA target sequence for IDH3G (NM_004135.2,1118-1136).
ggaacaccggcaagagtat

SEQ ID NO: 85641 - DNA, 19 bp, Homo sapiens
  siRNA target sequence for IDH3G (NM_004135.2,1127-1145).
gcaagagtatcgccaataa

SEQ ID NO: 85642 - DNA, 19 bp, Homo sapiens
  siRNA target sequence for IDH3G (NM_004135.2,1133-1151).
gtatcgccaataagaacat

SEQ ID NO: 85643 - DNA, 19 bp, Homo sapiens
  siRNA target sequence for IGF1R (NM_000875.2,122-140).
ggccgacgagtggagaaat

SEQ ID NO: 85644 - DNA, 19 bp, Homo sapiens
  siRNA target sequence for IGF1R (NM_000875.2,124-142).
ccgacgagtggagaaatct

SEQ ID NO: 85645 - DNA, 19 bp, Homo sapiens
  siRNA target sequence for IGF1R (NM_000875.2,281-299).
cggtcattaccgagtactt

SEQ ID NO: 85646 - DNA, 19 bp, Homo sapiens
  siRNA target sequence for IGF1R (NM_000875.2,462-480).
ggccatcaggattgagaaa

SEQ ID NO: 85647 - DNA, 19 bp, Homo sapiens
  siRNA target sequence for IGF1R (NM_000875.2,529-547).
gatgcggtgtccaataact

SEQ ID NO: 85648 - DNA, 19 bp, Homo sapiens
  siRNA target sequence for IGF1R (NM_000875.2,532-550).
gcggtgtccaataactaca

SEQ ID NO: 85649 - DNA, 19 bp, Homo sapiens
  siRNA target sequence for IGF1R (NM_000875.2,558-576).
gaataagcccccaaaggaa

SEQ ID NO: 85650 - DNA, 19 bp, Homo sapiens
  siRNA target sequence for IGF1R (NM_000875.2,668-686).
caaaccgctgccagaaaat

SEQ ID NO: 85651 - DNA, 19 bp, Homo sapiens
  siRNA target sequence for IGF1R (NM_000875.2,711-729).
ggcgtgcaccgagaacaat

SEQ ID NO: 85652 - DNA, 19 bp, Homo sapiens
  siRNA target sequence for IGF1R (NM_000875.2,713-731).
cgtgcaccgagaacaatga

SEQ ID NO: 85653 - DNA, 19 bp, Homo sapiens
  siRNA target sequence for IGF1R (NM_000875.2,919-937).
gactccgaggggtttgtga

SEQ ID NO: 85654 - DNA, 19 bp, Homo sapiens
  siRNA target sequence for IGF1R (NM_000875.2,1002-1020).
gtactgcatcccttgtgaa

SEQ ID NO: 85655 - DNA, 19 bp, Homo sapiens
  siRNA target sequence for IGF1R (NM_000875.2,1106-1124).
ccatcttcaagggcaattt

SEQ ID NO: 85656 - DNA, 19 bp, Homo sapiens
  siRNA target sequence for IGF1R (NM_000875.2,1141-1159).
cgggggaataacattgctt

SEQ ID NO: 85657 - DNA, 19 bp, Homo sapiens
  siRNA target sequence for IGF1R (NM_000875.2,1209-1227).
gaagatccgccattctcat

SEQ ID NO: 85658 - DNA, 19 bp, Homo sapiens
  siRNA target sequence for IGF1R (NM_000875.2,1234-1252).
gtctccttgtccttcctaa

SEQ ID NO: 85659 - DNA, 19 bp, Homo sapiens
  siRNA target sequence for IGF1R (NM_000875.2,1242-1260).
gtccttcctaaaaaacctt

SEQ ID NO: 85660 - DNA, 19 bp, Homo sapiens
  siRNA target sequence for IGF1R (NM_000875.2,1282-1300).
cagctagaagggaattact

SEQ ID NO: 85661 - DNA, 19 bp, Homo sapiens
  siRNA target sequence for IGF1R (NM_000875.2,1390-1408).
gctttcaatcccaaattat

SEQ ID NO: 85662 - DNA, 19 bp, Homo sapiens
  siRNA target sequence for IGF1R (NM_000875.2,1536-1554).
caccaccacgtcgaagaat

SEQ ID NO: 85663 - DNA, 19 bp, Homo sapiens
  siRNA target sequence for IGF1R (NM_000875.2,1547-1565).
cgaagaatcgcatcatcat

SEQ ID NO: 85664 - DNA, 19 bp, Homo sapiens
  siRNA target sequence for IGF1R (NM_000875.2,1548-1566).
gaagaatcgcatcatcata

SEQ ID NO: 85665 - DNA, 19 bp, Homo sapiens
  siRNA target sequence for IGF1R (NM_000875.2,1589-1607).
ctgactacagggatctcat

SEQ ID NO: 85666 - DNA, 19 bp, Homo sapiens
  siRNA target sequence for IGF1R (NM_000875.2,1769-1787).
ctcagtacgccgtttacgt

SEQ ID NO: 85667 - DNA, 19 bp, Homo sapiens
  siRNA target sequence for IGF1R (NM_000875.2,1839-1857).
gagtgagatcttgtacatt

SEQ ID NO: 85668 - DNA, 19 bp, Homo sapiens
  siRNA target sequence for IGF1R (NM_000875.2,1908-1926).
gaactcctcttctcagtta

SEQ ID NO: 85669 - DNA, 19 bp, Homo sapiens
  siRNA target sequence for IGF1R (NM_000875.2,1913-1931).
cctcttctcagttaatcgt

SEQ ID NO: 85670 - DNA, 19 bp, Homo sapiens
  siRNA target sequence for IGF1R (NM_000875.2,1955-1973).
ccaacggcaacctgagtta

SEQ ID NO: 85671 - DNA, 19 bp, Homo sapiens
  siRNA target sequence for IGF1R (NM_000875.2,1961-1979).
gcaacctgagttactacat

SEQ ID NO: 85672 - DNA, 19 bp, Homo sapiens
  siRNA target sequence for IGF1R (NM_000875.2,1962-1980).
caacctgagttactacatt

SEQ ID NO: 85673 - DNA, 19 bp, Homo sapiens
  siRNA target sequence for IGF1R (NM_000875.2,1999-2017).
cctcaggacggctaccttt

SEQ ID NO: 85674 - DNA, 19 bp, Homo sapiens
  siRNA target sequence for IGF1R (NM_000875.2,2000-2018).
ctcaggacggctaccttta

SEQ ID NO: 85675 - DNA, 19 bp, Homo sapiens
  siRNA target sequence for IGF1R (NM_000875.2,2144-2162).
gcgcctgccccaaaactga

SEQ ID NO: 85676 - DNA, 19 bp, Homo sapiens
  siRNA target sequence for IGF1R (NM_000875.2,2145-2163).
cgcctgccccaaaactgaa

SEQ ID NO: 85677 - DNA, 19 bp, Homo sapiens
  siRNA target sequence for IGF1R (NM_000875.2,2191-2209).
gctgaataccgcaaagtct

SEQ ID NO: 85678 - DNA, 19 bp, Homo sapiens
  siRNA target sequence for IGF1R (NM_000875.2,2192-2210).
ctgaataccgcaaagtctt

SEQ ID NO: 85679 - DNA, 19 bp, Homo sapiens
  siRNA target sequence for IGF1R (NM_000875.2,2200-2218).
cgcaaagtctttgagaatt

SEQ ID NO: 85680 - DNA, 19 bp, Homo sapiens
  siRNA target sequence for IGF1R (NM_000875.2,2255-2273).
ggaagcggagagatgtcat

SEQ ID NO: 85681 - DNA, 19 bp, Homo sapiens
  siRNA target sequence for IGF1R (NM_000875.2,2321-2339).
ccgcagacacctacaacat

SEQ ID NO: 85682 - DNA, 19 bp, Homo sapiens
  siRNA target sequence for IGF1R (NM_000875.2,2422-2440).
cttcggcctttcacattgt

SEQ ID NO: 85683 - DNA, 19 bp, Homo sapiens
  siRNA target sequence for IGF1R (NM_000875.2,2564-2582).
gggagccaaggcctgaaaa

SEQ ID NO: 85684 - DNA, 19 bp, Homo sapiens
  siRNA target sequence for IGF1R (NM_000875.2,2566-2584).
gagccaaggcctgaaaact

SEQ ID NO: 85685 - DNA, 19 bp, Homo sapiens
  siRNA target sequence for IGF1R (NM_000875.2,2598-2616).
gtggccggaacctgagaat

SEQ ID NO: 85686 - DNA, 19 bp, Homo sapiens
  siRNA target sequence for IGF1R (NM_000875.2,2613-2631).
gaatcccaatggattgatt

SEQ ID NO: 85687 - DNA, 19 bp, Homo sapiens
  siRNA target sequence for IGF1R (NM_000875.2,2617-2635).
cccaatggattgattctaa

SEQ ID NO: 85688 - DNA, 19 bp, Homo sapiens
  siRNA target sequence for IGF1R (NM_000875.2,2624-2642).
gattgattctaatgtatga

SEQ ID NO: 85689 - DNA, 19 bp, Homo sapiens
  siRNA target sequence for IGF1R (NM_000875.2,2820-2838).
ggccaaaacaggatatgaa

SEQ ID NO: 85690 - DNA, 19 bp, Homo sapiens
  siRNA target sequence for IGF1R (NM_000875.2,2867-2885).
ccgtcgctgtcctgttgat

SEQ ID NO: 85691 - DNA, 19 bp, Homo sapiens
  siRNA target sequence for IGF1R (NM_000875.2,2908-2926).
ctgtacgtcttccatagaa

SEQ ID NO: 85692 - DNA, 19 bp, Homo sapiens
  siRNA target sequence for IGF1R (NM_000875.2,3072-3090).
gtttgggatggtctatgaa

SEQ ID NO: 85693 - DNA, 19 bp, Homo sapiens
  siRNA target sequence for IGF1R (NM_000875.2,3129-3147).
cagagtggccattaaaaca

SEQ ID NO: 85694 - DNA, 19 bp, Homo sapiens
  siRNA target sequence for IGF1R (NM_000875.2,3131-3149).
gagtggccattaaaacagt

SEQ ID NO: 85695 - DNA, 19 bp, Homo sapiens
  siRNA target sequence for IGF1R (NM_000875.2,3170-3188).
gtgagaggattgagtttct

SEQ ID NO: 85696 - DNA, 19 bp, Homo sapiens
  siRNA target sequence for IGF1R (NM_000875.2,3320-3338).
ggtctctgaggccagaaat

SEQ ID NO: 85697 - DNA, 19 bp, Homo sapiens
  siRNA target sequence for IGF1R (NM_000875.2,3368-3386).
gcctgagcaagatgattca

SEQ ID NO: 85698 - DNA, 19 bp, Homo sapiens
  siRNA target sequence for IGF1R (NM_000875.2,3416-3434).
catacctcaacgccaataa

SEQ ID NO: 85699 - DNA, 19 bp, Homo sapiens
  siRNA target sequence for IGF1R (NM_000875.2,3467-3485).
gcatggtagccgaagattt

SEQ ID NO: 85700 - DNA, 19 bp, Homo sapiens
  siRNA target sequence for IGF1R (NM_000875.2,3508-3526).
ggtatgacgcgagatatct

SEQ ID NO: 85701 - DNA, 19 bp, Homo sapiens
  siRNA target sequence for IGF1R (NM_000875.2,3509-3527).
gtatgacgcgagatatcta

SEQ ID NO: 85702 - DNA, 19 bp, Homo sapiens
  siRNA target sequence for IGF1R (NM_000875.2,3793-3811).
cagtataaccccaagatga

SEQ ID NO: 85703 - DNA, 19 bp, Homo sapiens
  siRNA target sequence for IKBKE (NM_014002.1,382-400).
ccactgccagtgtgtacaa

SEQ ID NO: 85704 - DNA, 19 bp, Homo sapiens
  siRNA target sequence for IKBKE (NM_014002.1,1009-1027).
ggcggaacaaggagatcat

SEQ ID NO: 85705 - DNA, 19 bp, Homo sapiens
  siRNA target sequence for IKBKE (NM_014002.1,1249-1267).
gagttgtcgtccatgtctt

SEQ ID NO: 85706 - DNA, 19 bp, Homo sapiens
  siRNA target sequence for IKBKE (NM_014002.1,1548-1566).
ctgcaggcggattacaaca

SEQ ID NO: 85707 - DNA, 19 bp, Homo sapiens
  siRNA target sequence for IKBKE (NM_014002.1,1626-1644).
gatgggcaggagctaatgt

SEQ ID NO: 85708 - DNA, 19 bp, Homo sapiens
  siRNA target sequence for IKBKE (NM_014002.1,1915-1933).
gccgggatcaggtacatga

SEQ ID NO: 85709 - DNA, 19 bp, Homo sapiens
  siRNA target sequence for IKBKE (NM_014002.1,2435-2453).
catcgaacggctaaataga

SEQ ID NO: 85710 - DNA, 19 bp, Homo sapiens
  siRNA target sequence for ILK (NM_004517.1,326-344).
gggcacggatcaatgtaat

SEQ ID NO: 85711 - DNA, 19 bp, Homo sapiens
  siRNA target sequence for ILK (NM_004517.1,328-346).
gcacggatcaatgtaatga

SEQ ID NO: 85712 - DNA, 19 bp, Homo sapiens
  siRNA target sequence for ILK (NM_004517.1,329-347).
cacggatcaatgtaatgaa

SEQ ID NO: 85713 - DNA, 19 bp, Homo sapiens
  siRNA target sequence for ILK (NM_004517.1,389-407).
gacaccgtgatattgtaca

SEQ ID NO: 85714 - DNA, 19 bp, Homo sapiens
  siRNA target sequence for ILK (NM_004517.1,466-484).
ctgcactatgcctgttttt

SEQ ID NO: 85715 - DNA, 19 bp, Homo sapiens
  siRNA target sequence for ILK (NM_004517.1,529-547).
cttgtcagcatctgtaaca

SEQ ID NO: 85716 - DNA, 19 bp, Homo sapiens
  siRNA target sequence for ILK (NM_004517.1,532-550).
gtcagcatctgtaacaagt

SEQ ID NO: 85717 - DNA, 19 bp, Homo sapiens
  siRNA target sequence for ILK (NM_004517.1,534-552).
cagcatctgtaacaagtat

SEQ ID NO: 85718 - DNA, 19 bp, Homo sapiens
  siRNA target sequence for ILK (NM_004517.1,627-645).
gaatctcaaccgtattcca

SEQ ID NO: 85719 - DNA, 19 bp, Homo sapiens
  siRNA target sequence for ILK (NM_004517.1,694-712).
ggaaccctgaacaaacact

SEQ ID NO: 85720 - DNA, 19 bp, Homo sapiens
  siRNA target sequence for ILK (NM_004517.1,746-764).
cgaagctcaacgagaatca

SEQ ID NO: 85721 - DNA, 19 bp, Homo sapiens
  siRNA target sequence for ILK (NM_004517.1,884-902).
ggattttctcgcatccaaa

SEQ ID NO: 85722 - DNA, 19 bp, Homo sapiens
  siRNA target sequence for ILK (NM_004517.1,885-903).
gattttctcgcatccaaat

SEQ ID NO: 85723 - DNA, 19 bp, Homo sapiens
  siRNA target sequence for ILK (NM_004517.1,964-982).
cactggatgccgtatggat

SEQ ID NO: 85724 - DNA, 19 bp, Homo sapiens
  siRNA target sequence for ILK (NM_004517.1,974-992).
cgtatggatccctctacaa

SEQ ID NO: 85725 - DNA, 19 bp, Homo sapiens
  siRNA target sequence for ILK (NM_004517.1,975-993).
gtatggatccctctacaat

SEQ ID NO: 85726 - DNA, 19 bp, Homo sapiens
  siRNA target sequence for ILK (NM_004517.1,980-998).
gatccctctacaatgtact

SEQ ID NO: 85727 - DNA, 19 bp, Homo sapiens
  siRNA target sequence for ILK (NM_004517.1,984-1002).
cctctacaatgtactacat

SEQ ID NO: 85728 - DNA, 19 bp, Homo sapiens
  siRNA target sequence for ILK (NM_004517.1,1101-1119).
cccacgacatgcactcaat

SEQ ID NO: 85729 - DNA, 19 bp, Homo sapiens
  siRNA target sequence for ILK (NM_004517.1,1114-1132).
ctcaatagccgtagtgtaa

SEQ ID NO: 85730 - DNA, 19 bp, Homo sapiens
  siRNA target sequence for ILK (NM_004517.1,1121-1139).
gccgtagtgtaatgattga

SEQ ID NO: 85731 - DNA, 19 bp, Homo sapiens
  siRNA target sequence for ILK (NM_004517.1,1122-1140).
ccgtagtgtaatgattgat

SEQ ID NO: 85732 - DNA, 19 bp, Homo sapiens
  siRNA target sequence for ILK (NM_004517.1,1334-1352).
ctgacctctccaatatgga

SEQ ID NO: 85733 - DNA, 19 bp, Homo sapiens
  siRNA target sequence for ILK (NM_004517.1,1417-1435).
gtgtgtaagctcatgaaga

SEQ ID NO: 85734 - DNA, 19 bp, Homo sapiens
  siRNA target sequence for IMMP2L (NM_032549.1,459-477).
gggtgggtgaaaagataca

SEQ ID NO: 85735 - DNA, 19 bp, Homo sapiens
  siRNA target sequence for IMMP2L (NM_032549.1,463-481).
gggtgaaaagatacatcaa

SEQ ID NO: 85736 - DNA, 19 bp, Homo sapiens
  siRNA target sequence for IMMP2L (NM_032549.1,542-560).
cgcctgtgtggcaagagta

SEQ ID NO: 85737 - DNA, 19 bp, Homo sapiens
  siRNA target sequence for IMMP2L (NM_032549.1,545-563).
ctgtgtggcaagagtagaa

SEQ ID NO: 85738 - DNA, 19 bp, Homo sapiens
  siRNA target sequence for IMMP2L (NM_032549.1,657-675).
caccgtggtgacattgtat

SEQ ID NO: 85739 - DNA, 19 bp, Homo sapiens
  siRNA target sequence for IMMP2L (NM_032549.1,661-679).
gtggtgacattgtatcatt

SEQ ID NO: 85740 - DNA, 19 bp, Homo sapiens
  siRNA target sequence for INSL3 (NM_005543.2,358-376).
gtggctgtacccaacaaga

SEQ ID NO: 85741 - DNA, 19 bp, Homo sapiens
  siRNA target sequence for INSR (NM_000208.1,248-266).
catgagctggagaattgct

SEQ ID NO: 85742 - DNA, 19 bp, Homo sapiens
  siRNA target sequence for INSR (NM_000208.1,278-296).
ggacacttgcagatactct

SEQ ID NO: 85743 - DNA, 19 bp, Homo sapiens
  siRNA target sequence for INSR (NM_000208.1,279-297).
gacacttgcagatactctt

SEQ ID NO: 85744 - DNA, 19 bp, Homo sapiens
  siRNA target sequence for INSR (NM_000208.1,293-311).
ctcttgatgttcaaaacga

SEQ ID NO: 85745 - DNA, 19 bp, Homo sapiens
  siRNA target sequence for INSR (NM_000208.1,332-350).
ctcagtttccccaaactca

SEQ ID NO: 85746 - DNA, 19 bp, Homo sapiens
  siRNA target sequence for INSR (NM_000208.1,347-365).
ctcatcatgatcactgatt

SEQ ID NO: 85747 - DNA, 19 bp, Homo sapiens
  siRNA target sequence for INSR (NM_000208.1,438-456).
gatcacgactgttctttaa

SEQ ID NO: 85748 - DNA, 19 bp, Homo sapiens
  siRNA target sequence for INSR (NM_000208.1,441-459).
cacgactgttctttaacta

SEQ ID NO: 85749 - DNA, 19 bp, Homo sapiens
  siRNA target sequence for INSR (NM_000208.1,534-552).
ctgtccgcatcgagaagaa

SEQ ID NO: 85750 - DNA, 19 bp, Homo sapiens
  siRNA target sequence for INSR (NM_000208.1,538-556).
ccgcatcgagaagaacaat

SEQ ID NO: 85751 - DNA, 19 bp, Homo sapiens
  siRNA target sequence for INSR (NM_000208.1,540-558).
gcatcgagaagaacaatga

SEQ ID NO: 85752 - DNA, 19 bp, Homo sapiens
  siRNA target sequence for INSR (NM_000208.1,598-616).
ggattccgtggaggataat

SEQ ID NO: 85753 - DNA, 19 bp, Homo sapiens
  siRNA target sequence for INSR (NM_000208.1,725-743).
gaacgatgttggactcata

SEQ ID NO: 85754 - DNA, 19 bp, Homo sapiens
  siRNA target sequence for INSR (NM_000208.1,729-747).
gatgttggactcatagtca

SEQ ID NO: 85755 - DNA, 19 bp, Homo sapiens
  siRNA target sequence for INSR (NM_000208.1,758-776).
gtttgcccgaccatctgta

SEQ ID NO: 85756 - DNA, 19 bp, Homo sapiens
  siRNA target sequence for INSR (NM_000208.1,974-992).
caccacaaatgcaagaact

SEQ ID NO: 85757 - DNA, 19 bp, Homo sapiens
  siRNA target sequence for INSR (NM_000208.1,1019-1037).
gtcattcacaacaacaagt

SEQ ID NO: 85758 - DNA, 19 bp, Homo sapiens
  siRNA target sequence for INSR (NM_000208.1,1054-1072).
ctccgggtacacgatgaat

SEQ ID NO: 85759 - DNA, 19 bp, Homo sapiens
  siRNA target sequence for INSR (NM_000208.1,1058-1076).
gggtacacgatgaattcca

SEQ ID NO: 85760 - DNA, 19 bp, Homo sapiens
  siRNA target sequence for INSR (NM_000208.1,1179-1197).
gaggatgcaccgtcatcaa

SEQ ID NO: 85761 - DNA, 19 bp, Homo sapiens
  siRNA target sequence for INSR (NM_000208.1,1199-1217).
gggagtctgatcatcaaca

SEQ ID NO: 85762 - DNA, 19 bp, Homo sapiens
  siRNA target sequence for INSR (NM_000208.1,1216-1234).
cattcgaggaggcaacaat

SEQ ID NO: 85763 - DNA, 19 bp, Homo sapiens
  siRNA target sequence for INSR (NM_000208.1,1255-1273).
caacctcggcctcattgaa

SEQ ID NO: 85764 - DNA, 19 bp, Homo sapiens
  siRNA target sequence for INSR (NM_000208.1,1259-1277).
ctcggcctcattgaagaaa

SEQ ID NO: 85765 - DNA, 19 bp, Homo sapiens
  siRNA target sequence for INSR (NM_000208.1,1261-1279).
cggcctcattgaagaaatt

SEQ ID NO: 85766 - DNA, 19 bp, Homo sapiens
  siRNA target sequence for INSR (NM_000208.1,1333-1351).
ccggaagttacgtctgatt

SEQ ID NO: 85767 - DNA, 19 bp, Homo sapiens
  siRNA target sequence for INSR (NM_000208.1,1452-1470).
ctcaggggaaactcttctt

SEQ ID NO: 85768 - DNA, 19 bp, Homo sapiens
  siRNA target sequence for INSR (NM_000208.1,1692-1710).
ggttcatgctgttctacaa

SEQ ID NO: 85769 - DNA, 19 bp, Homo sapiens
  siRNA target sequence for INSR (NM_000208.1,1806-1824).
ccaacgaccccaaatcaca

SEQ ID NO: 85770 - DNA, 19 bp, Homo sapiens
  siRNA target sequence for INSR (NM_000208.1,1864-1882).
gacccagtatgccatcttt

SEQ ID NO: 85771 - DNA, 19 bp, Homo sapiens
  siRNA target sequence for INSR (NM_000208.1,2107-2125).
gctgttcgagctggattat

SEQ ID NO: 85772 - DNA, 19 bp, Homo sapiens
  siRNA target sequence for INSR (NM_000208.1,2108-2126).
ctgttcgagctggattatt

SEQ ID NO: 85773 - DNA, 19 bp, Homo sapiens
  siRNA target sequence for INSR (NM_000208.1,2168-2186).
ccattcgagtctgaagatt

SEQ ID NO: 85774 - DNA, 19 bp, Homo sapiens
  siRNA target sequence for INSR (NM_000208.1,2194-2212).
gcacaaccagagtgagtat

SEQ ID NO: 85775 - DNA, 19 bp, Homo sapiens
  siRNA target sequence for INSR (NM_000208.1,2273-2291).
ctggaggagtcctcgttta

SEQ ID NO: 85776 - DNA, 19 bp, Homo sapiens
  siRNA target sequence for INSR (NM_000208.1,2323-2341).
ggttttcgtccccagaaaa

SEQ ID NO: 85777 - DNA, 19 bp, Homo sapiens
  siRNA target sequence for INSR (NM_000208.1,2399-2417).
ggcgatgttgggaatgtga

SEQ ID NO: 85778 - DNA, 19 bp, Homo sapiens
  siRNA target sequence for INSR (NM_000208.1,2669-2687).
ggccctgtgacgcatgaaa

SEQ ID NO: 85779 - DNA, 19 bp, Homo sapiens
  siRNA target sequence for INSR (NM_000208.1,2670-2688).
gccctgtgacgcatgaaat

SEQ ID NO: 85780 - DNA, 19 bp, Homo sapiens
  siRNA target sequence for INSR (NM_000208.1,2672-2690).
cctgtgacgcatgaaatct

SEQ ID NO: 85781 - DNA, 19 bp, Homo sapiens
  siRNA target sequence for INSR (NM_000208.1,2673-2691).
ctgtgacgcatgaaatctt

SEQ ID NO: 85782 - DNA, 19 bp, Homo sapiens
  siRNA target sequence for INSR (NM_000208.1,2752-2770).
gctgtatgaagtgagttat

SEQ ID NO: 85783 - DNA, 19 bp, Homo sapiens
  siRNA target sequence for INSR (NM_000208.1,2764-2782).
gagttatcggcgatatggt

SEQ ID NO: 85784 - DNA, 19 bp, Homo sapiens
  siRNA target sequence for INSR (NM_000208.1,2913-2931).
ggacggaacccacctattt

SEQ ID NO: 85785 - DNA, 19 bp, Homo sapiens
  siRNA target sequence for INSR (NM_000208.1,2916-2934).
cggaacccacctatttcta

SEQ ID NO: 85786 - DNA, 19 bp, Homo sapiens
  siRNA target sequence for INSR (NM_000208.1,2932-2950).
ctacgtgacagactattta

SEQ ID NO: 85787 - DNA, 19 bp, Homo sapiens
  siRNA target sequence for INSR (NM_000208.1,2953-2971).
cgtcccgtcaaatattgca

SEQ ID NO: 85788 - DNA, 19 bp, Homo sapiens
  siRNA target sequence for INSR (NM_000208.1,2954-2972).
gtcccgtcaaatattgcaa

SEQ ID NO: 85789 - DNA, 19 bp, Homo sapiens
  siRNA target sequence for INSR (NM_000208.1,2956-2974).
cccgtcaaatattgcaaaa

SEQ ID NO: 85790 - DNA, 19 bp, Homo sapiens
  siRNA target sequence for INSR (NM_000208.1,3299-3317).
ctccgagagcggattgagt

SEQ ID NO: 85791 - DNA, 19 bp, Homo sapiens
  siRNA target sequence for INSR (NM_000208.1,3460-3478).
gcggccagaggctgagaat

SEQ ID NO: 85792 - DNA, 19 bp, Homo sapiens
  siRNA target sequence for INSR (NM_000208.1,3495-3513).
cccctacccttcaagagat

SEQ ID NO: 85793 - DNA, 19 bp, Homo sapiens
  siRNA target sequence for INSR (NM_000208.1,3498-3516).
ctacccttcaagagatgat

SEQ ID NO: 85794 - DNA, 19 bp, Homo sapiens
  siRNA target sequence for INSR (NM_000208.1,3600-3618).
gcatggtcgcccatgattt

SEQ ID NO: 85795 - DNA, 19 bp, Homo sapiens
  siRNA target sequence for INSR (NM_000208.1,3601-3619).
catggtcgcccatgatttt

SEQ ID NO: 85796 - DNA, 19 bp, Homo sapiens
  siRNA target sequence for INSR (NM_000208.1,3604-3622).
ggtcgcccatgattttact

SEQ ID NO: 85797 - DNA, 19 bp, Homo sapiens
  siRNA target sequence for INSR (NM_000208.1,3776-3794).
gtggtcctttgggaaatca

SEQ ID NO: 85798 - DNA, 19 bp, Homo sapiens
  siRNA target sequence for INSR (NM_000208.1,3802-3820).
ggcagaacagccttaccaa

SEQ ID NO: 85799 - DNA, 19 bp, Homo sapiens
  siRNA target sequence for INSR (NM_000208.1,3813-3831).
cttaccaaggcctgtctaa

SEQ ID NO: 85800 - DNA, 19 bp, Homo sapiens
  siRNA target sequence for INSR (NM_000208.1,3817-3835).
ccaaggcctgtctaatgaa

SEQ ID NO: 85801 - DNA, 19 bp, Homo sapiens
  siRNA target sequence for INSR (NM_000208.1,4143-4161).
ggtcctcgctgggtttcaa

SEQ ID NO: 85802 - DNA, 19 bp, Homo sapiens
  siRNA target sequence for INSR (NM_000208.1,4195-4213).
catgaacggaggcaagaaa

SEQ ID NO: 85803 - DNA, 19 bp, Homo sapiens
  siRNA target sequence for INSRR (NM_014215.1,316-334).
gatttggcctggatacagt

SEQ ID NO: 85804 - DNA, 19 bp, Homo sapiens
  siRNA target sequence for INSRR (NM_014215.1,997-1015).
cttgccgccacctctactt

SEQ ID NO: 85805 - DNA, 19 bp, Homo sapiens
  siRNA target sequence for INSRR (NM_014215.1,1182-1200).
cgtaatagcagcagcatat

SEQ ID NO: 85806 - DNA, 19 bp, Homo sapiens
  siRNA target sequence for INSRR (NM_014215.1,1370-1388).
ggggctggtagaaaccatt

SEQ ID NO: 85807 - DNA, 19 bp, Homo sapiens
  siRNA target sequence for INSRR (NM_014215.1,1371-1389).
gggctggtagaaaccatta

SEQ ID NO: 85808 - DNA, 19 bp, Homo sapiens
  siRNA target sequence for INSRR (NM_014215.1,1639-1657).
cgcgaggtcggcagaacaa

SEQ ID NO: 85809 - DNA, 19 bp, Homo sapiens
  siRNA target sequence for INSRR (NM_014215.1,1958-1976).
gacacagtacgcagtgttt

SEQ ID NO: 85810 - DNA, 19 bp, Homo sapiens
  siRNA target sequence for INSRR (NM_014215.1,1960-1978).
cacagtacgcagtgtttgt

SEQ ID NO: 85811 - DNA, 19 bp, Homo sapiens
  siRNA target sequence for INSRR (NM_014215.1,2202-2220).
gacctctacctcaatgact

SEQ ID NO: 85812 - DNA, 19 bp, Homo sapiens
  siRNA target sequence for INSRR (NM_014215.1,2518-2536).
gcaacagctcggatttcga

SEQ ID NO: 85813 - DNA, 19 bp, Homo sapiens
  siRNA target sequence for INSRR (NM_014215.1,2690-2708).
cagagaggctgatggtatt

SEQ ID NO: 85814 - DNA, 19 bp, Homo sapiens
  siRNA target sequence for INSRR (NM_014215.1,2787-2805).
ctcatcctcaagtacgaaa

SEQ ID NO: 85815 - DNA, 19 bp, Homo sapiens
  siRNA target sequence for INSRR (NM_014215.1,2845-2863).
gtgtgtcccgtcttcgata

SEQ ID NO: 85816 - DNA, 19 bp, Homo sapiens
  siRNA target sequence for INSRR (NM_014215.1,3067-3085).
ctgcccttggtttcttcta

SEQ ID NO: 85817 - DNA, 19 bp, Homo sapiens
  siRNA target sequence for INSRR (NM_014215.1,3139-3157).
gcgcctctgatatgtatgt

SEQ ID NO: 85818 - DNA, 19 bp, Homo sapiens
  siRNA target sequence for INSRR (NM_014215.1,3180-3198).
cgggagcagatctcgataa

SEQ ID NO: 85819 - DNA, 19 bp, Homo sapiens
  siRNA target sequence for INSRR (NM_014215.1,3181-3199).
gggagcagatctcgataat

SEQ ID NO: 85820 - DNA, 19 bp, Homo sapiens
  siRNA target sequence for INSRR (NM_014215.1,3310-3328).
ccagcccacgggaatgcat

SEQ ID NO: 85821 - DNA, 19 bp, Homo sapiens
  siRNA target sequence for INSRR (NM_014215.1,3311-3329).
cagcccacgggaatgcatt

SEQ ID NO: 85822 - DNA, 19 bp, Homo sapiens
  siRNA target sequence for INSRR (NM_014215.1,3315-3333).
ccacgggaatgcattgagt

SEQ ID NO: 85823 - DNA, 19 bp, Homo sapiens
  siRNA target sequence for INSRR (NM_014215.1,3316-3334).
cacgggaatgcattgagtt

SEQ ID NO: 85824 - DNA, 19 bp, Homo sapiens
  siRNA target sequence for INSRR (NM_014215.1,3341-3359).
ggaagcttctgtcatgaaa

SEQ ID NO: 85825 - DNA, 19 bp, Homo sapiens
  siRNA target sequence for INSRR (NM_014215.1,3351-3369).
gtcatgaaagccttcaagt

SEQ ID NO: 85826 - DNA, 19 bp, Homo sapiens
  siRNA target sequence for INSRR (NM_014215.1,3671-3689).
cgtgtatgagacagactat

SEQ ID NO: 85827 - DNA, 19 bp, Homo sapiens
  siRNA target sequence for INSRR (NM_014215.1,3956-3974).
cctgcgcccatctttcaca

SEQ ID NO: 85828 - DNA, 19 bp, Homo sapiens
  siRNA target sequence for INSRR (NM_014215.1,3962-3980).
cccatctttcacacacatt

SEQ ID NO: 85829 - DNA, 19 bp, Homo sapiens
  siRNA target sequence for IPT (NM_017646.3,76-94).
ggaccctacctcttgtagt

SEQ ID NO: 85830 - DNA, 19 bp, Homo sapiens
  siRNA target sequence for IPT (NM_017646.3,79-97).
ccctacctcttgtagtgat

SEQ ID NO: 85831 - DNA, 19 bp, Homo sapiens
  siRNA target sequence for IPT (NM_017646.3,80-98).
cctacctcttgtagtgatt

SEQ ID NO: 85832 - DNA, 19 bp, Homo sapiens
  siRNA target sequence for IPT (NM_017646.3,195-213).
gaaggcctagacatcatca

SEQ ID NO: 85833 - DNA, 19 bp, Homo sapiens
  siRNA target sequence for IPT (NM_017646.3,276-294).
cctcttgtgaccaattaca

SEQ ID NO: 85834 - DNA, 19 bp, Homo sapiens
  siRNA target sequence for IPT (NM_017646.3,319-337).
caactgctctgattgaaga

SEQ ID NO: 85835 - DNA, 19 bp, Homo sapiens
  siRNA target sequence for IPT (NM_017646.3,322-340).
ctgctctgattgaagatat

SEQ ID NO: 85836 - DNA, 19 bp, Homo sapiens
  siRNA target sequence for IPT (NM_017646.3,345-363).
gcccgagacaaaattccta

SEQ ID NO: 85837 - DNA, 19 bp, Homo sapiens
  siRNA target sequence for IPT (NM_017646.3,346-364).
cccgagacaaaattcctat

SEQ ID NO: 85838 - DNA, 19 bp, Homo sapiens
  siRNA target sequence for IPT (NM_017646.3,347-365).
ccgagacaaaattcctatt

SEQ ID NO: 85839 - DNA, 19 bp, Homo sapiens
  siRNA target sequence for IPT (NM_017646.3,349-367).
gagacaaaattcctattgt

SEQ ID NO: 85840 - DNA, 19 bp, Homo sapiens
  siRNA target sequence for IPT (NM_017646.3,373-391).
gaggaaccaattattacat

SEQ ID NO: 85841 - DNA, 19 bp, Homo sapiens
  siRNA target sequence for IPT (NM_017646.3,376-394).
gaaccaattattacattga

SEQ ID NO: 85842 - DNA, 19 bp, Homo sapiens
  siRNA target sequence for IPT (NM_017646.3,482-500).
ggaggatggtcttgtactt

SEQ ID NO: 85843 - DNA, 19 bp, Homo sapiens
  siRNA target sequence for IPT (NM_017646.3,570-588).
gccaggagcttgcaagttt

SEQ ID NO: 85844 - DNA, 19 bp, Homo sapiens
  siRNA target sequence for IPT (NM_017646.3,663-681).
ggtcctctgaagttctcta

SEQ ID NO: 85845 - DNA, 19 bp, Homo sapiens
  siRNA target sequence for IPT (NM_017646.3,720-738).
ctagatgagcgcttggata

SEQ ID NO: 85846 - DNA, 19 bp, Homo sapiens
  siRNA target sequence for IPT (NM_017646.3,765-783).
gggctcttggaggaactaa

SEQ ID NO: 85847 - DNA, 19 bp, Homo sapiens
  siRNA target sequence for IPT (NM_017646.3,777-795).
gaactaagagattttcaca

SEQ ID NO: 85848 - DNA, 19 bp, Homo sapiens
  siRNA target sequence for IPT (NM_017646.3,800-818).
ctataatcagaagaatgtt

SEQ ID NO: 85849 - DNA, 19 bp, Homo sapiens
  siRNA target sequence for IPT (NM_017646.3,840-858).
caacatggtatcttccaat

SEQ ID NO: 85850 - DNA, 19 bp, Homo sapiens
  siRNA target sequence for IPT (NM_017646.3,843-861).
catggtatcttccaatcaa

SEQ ID NO: 85851 - DNA, 19 bp, Homo sapiens
  siRNA target sequence for IPT (NM_017646.3,907-925).
gcacactggagactagtaa

SEQ ID NO: 85852 - DNA, 19 bp, Homo sapiens
  siRNA target sequence for IPT (NM_017646.3,971-989).
gagatatgcccggaaacaa

SEQ ID NO: 85853 - DNA, 19 bp, Homo sapiens
  siRNA target sequence for IPT (NM_017646.3,997-1015).
gggttaaaaaccgtttttt

SEQ ID NO: 85854 - DNA, 19 bp, Homo sapiens
  siRNA target sequence for IPT (NM_017646.3,1104-1122).
cttgaaatcgtgcaaagtt

SEQ ID NO: 85855 - DNA, 19 bp, Homo sapiens
  siRNA target sequence for IPT (NM_017646.3,1107-1125).
gaaatcgtgcaaagtttca

SEQ ID NO: 85856 - DNA, 19 bp, Homo sapiens
  siRNA target sequence for IPT (NM_017646.3,1140-1158).
cctacagccactccaataa

SEQ ID NO: 85857 - DNA, 19 bp, Homo sapiens
  siRNA target sequence for IPT (NM_017646.3,1141-1159).
ctacagccactccaataaa

SEQ ID NO: 85858 - DNA, 19 bp, Homo sapiens
  siRNA target sequence for IPT (NM_017646.3,1204-1222).
gtgacctctgtgatcgaat

SEQ ID NO: 85859 - DNA, 19 bp, Homo sapiens
  siRNA target sequence for IPT (NM_017646.3,1239-1257).
gaatgggcagcgcacataa

SEQ ID NO: 85860 - DNA, 19 bp, Homo sapiens
  siRNA target sequence for IPT (NM_017646.3,1245-1263).
gcagcgcacataaaatcca

SEQ ID NO: 85861 - DNA, 19 bp, Homo sapiens
  siRNA target sequence for IPT (NM_017646.3,1378-1396).
ccccagggcagaatgatca

SEQ ID NO: 85862 - DNA, 19 bp, Homo sapiens
  siRNA target sequence for IPT (NM_017646.3,1381-1399).
cagggcagaatgatcaaga

SEQ ID NO: 85863 - DNA, 19 bp, Homo sapiens
  siRNA target sequence for IRAK1 (NM_001569.2,155-173).
gtcatgtgccgcttctaca

SEQ ID NO: 85864 - DNA, 19 bp, Homo sapiens
  siRNA target sequence for IRAK1 (NM_001569.2,157-175).
catgtgccgcttctacaaa

SEQ ID NO: 85865 - DNA, 19 bp, Homo sapiens
  siRNA target sequence for IRAK1 (NM_001569.2,1091-1109).
catggagacatcaagagtt

SEQ ID NO: 85866 - DNA, 19 bp, Homo sapiens
  siRNA target sequence for IRAK1 (NM_001569.2,1360-1378).
cggtgccaggaccaagtat

SEQ ID NO: 85867 - DNA, 19 bp, Homo sapiens
  siRNA target sequence for IRAK1 (NM_001569.2,1362-1380).
gtgccaggaccaagtatct

SEQ ID NO: 85868 - DNA, 19 bp, Homo sapiens
  siRNA target sequence for IRAK1 (NM_001569.2,2043-2061).
cagagccaccgcagattat

SEQ ID NO: 85869 - DNA, 19 bp, Homo sapiens
  siRNA target sequence for IRAK1 (NM_001569.2,2048-2066).
ccaccgcagattatcatca

SEQ ID NO: 85870 - DNA, 19 bp, Homo sapiens
  siRNA target sequence for IRAK1 (NM_001569.2,2189-2207).
cccgaagaaagtgatgaat

SEQ ID NO: 85871 - DNA, 19 bp, Homo sapiens
  siRNA target sequence for IRAK2 (NM_001570.2,130-148).
cagctgcggaagatcaagt

SEQ ID NO: 85872 - DNA, 19 bp, Homo sapiens
  siRNA target sequence for IRAK2 (NM_001570.2,215-233).
ccaccgtccagcaacttgt

SEQ ID NO: 85873 - DNA, 19 bp, Homo sapiens
  siRNA target sequence for IRAK2 (NM_001570.2,287-305).
ggaaaccggctcctgaaat

SEQ ID NO: 85874 - DNA, 19 bp, Homo sapiens
  siRNA target sequence for IRAK2 (NM_001570.2,352-370).
cctttggcagcttctgtaa

SEQ ID NO: 85875 - DNA, 19 bp, Homo sapiens
  siRNA target sequence for IRAK2 (NM_001570.2,514-532).
ctccccacttcgtctgatt

SEQ ID NO: 85876 - DNA, 19 bp, Homo sapiens
  siRNA target sequence for IRAK2 (NM_001570.2,516-534).
ccccacttcgtctgattca

SEQ ID NO: 85877 - DNA, 19 bp, Homo sapiens
  siRNA target sequence for IRAK2 (NM_001570.2,517-535).
cccacttcgtctgattcaa

SEQ ID NO: 85878 - DNA, 19 bp, Homo sapiens
  siRNA target sequence for IRAK2 (NM_001570.2,518-536).
ccacttcgtctgattcaaa

SEQ ID NO: 85879 - DNA, 19 bp, Homo sapiens
  siRNA target sequence for IRAK2 (NM_001570.2,629-647).
ccgatgacttcaatcaaaa

SEQ ID NO: 85880 - DNA, 19 bp, Homo sapiens
  siRNA target sequence for IRAK2 (NM_001570.2,701-719).
ggaagccattcgtcttcaa

SEQ ID NO: 85881 - DNA, 19 bp, Homo sapiens
  siRNA target sequence for IRAK2 (NM_001570.2,740-758).
gttcaagtccaggatcaat

SEQ ID NO: 85882 - DNA, 19 bp, Homo sapiens
  siRNA target sequence for IRAK2 (NM_001570.2,748-766).
ccaggatcaatcgaaagat

SEQ ID NO: 85883 - DNA, 19 bp, Homo sapiens
  siRNA target sequence for IRAK2 (NM_001570.2,749-767).
caggatcaatcgaaagatt

SEQ ID NO: 85884 - DNA, 19 bp, Homo sapiens
  siRNA target sequence for IRAK2 (NM_001570.2,752-770).
gatcaatcgaaagattctt

SEQ ID NO: 85885 - DNA, 19 bp, Homo sapiens
  siRNA target sequence for IRAK2 (NM_001570.2,776-794).
cagagttgcagatttgtct

SEQ ID NO: 85886 - DNA, 19 bp, Homo sapiens
  siRNA target sequence for IRAK2 (NM_001570.2,800-818).
gctgccaccccaatgtctt

SEQ ID NO: 85887 - DNA, 19 bp, Homo sapiens
  siRNA target sequence for IRAK2 (NM_001570.2,867-885).
cccctacatggcaaatggt

SEQ ID NO: 85888 - DNA, 19 bp, Homo sapiens
  siRNA target sequence for IRAK2 (NM_001570.2,1011-1029).
caacgtcaagagctctaat

SEQ ID NO: 85889 - DNA, 19 bp, Homo sapiens
  siRNA target sequence for IRAK2 (NM_001570.2,1187-1205).
caaagcgagtggacatctt

SEQ ID NO: 85890 - DNA, 19 bp, Homo sapiens
  siRNA target sequence for IRAK2 (NM_001570.2,1200-1218).
catcttcagctgtggaata

SEQ ID NO: 85891 - DNA, 19 bp, Homo sapiens
  siRNA target sequence for IRAK2 (NM_001570.2,1241-1259).
gcatccctgcaatggataa

SEQ ID NO: 85892 - DNA, 19 bp, Homo sapiens
  siRNA target sequence for IRAK2 (NM_001570.2,1285-1303).
gacttactcctcagtgata

SEQ ID NO: 85893 - DNA, 19 bp, Homo sapiens
  siRNA target sequence for IRAK2 (NM_001570.2,1291-1309).
ctcctcagtgatattccaa

SEQ ID NO: 85894 - DNA, 19 bp, Homo sapiens
  siRNA target sequence for IRAK2 (NM_001570.2,1558-1576).
gagggtacaggctcttctt

SEQ ID NO: 85895 - DNA, 19 bp, Homo sapiens
  siRNA target sequence for IRAK2 (NM_001570.2,1597-1615).
gacgacgttgacaattcca

SEQ ID NO: 85896 - DNA, 19 bp, Homo sapiens
  siRNA target sequence for IRAK3 (NM_007199.1,219-237).
gctggatgttcgtcatatt

SEQ ID NO: 85897 - DNA, 19 bp, Homo sapiens
  siRNA target sequence for IRAK3 (NM_007199.1,222-240).
ggatgttcgtcatattgaa

SEQ ID NO: 85898 - DNA, 19 bp, Homo sapiens
  siRNA target sequence for IRAK3 (NM_007199.1,226-244).
gttcgtcatattgaaaagt

SEQ ID NO: 85899 - DNA, 19 bp, Homo sapiens
  siRNA target sequence for IRAK3 (NM_007199.1,287-305).
cctgggcacagaaaaacaa

SEQ ID NO: 85900 - DNA, 19 bp, Homo sapiens
  siRNA target sequence for IRAK3 (NM_007199.1,306-324).
gaccatcggtgacctttta

SEQ ID NO: 85901 - DNA, 19 bp, Homo sapiens
  siRNA target sequence for IRAK3 (NM_007199.1,308-326).
ccatcggtgaccttttaca

SEQ ID NO: 85902 - DNA, 19 bp, Homo sapiens
  siRNA target sequence for IRAK3 (NM_007199.1,342-360).
gggacatcgtcgagctatt

SEQ ID NO: 85903 - DNA, 19 bp, Homo sapiens
  siRNA target sequence for IRAK3 (NM_007199.1,344-362).
gacatcgtcgagctattca

SEQ ID NO: 85904 - DNA, 19 bp, Homo sapiens
  siRNA target sequence for IRAK3 (NM_007199.1,346-364).
catcgtcgagctattcatt

SEQ ID NO: 85905 - DNA, 19 bp, Homo sapiens
  siRNA target sequence for IRAK3 (NM_007199.1,349-367).
cgtcgagctattcatttaa

SEQ ID NO: 85906 - DNA, 19 bp, Homo sapiens
  siRNA target sequence for IRAK3 (NM_007199.1,350-368).
gtcgagctattcatttaat

SEQ ID NO: 85907 - DNA, 19 bp, Homo sapiens
  siRNA target sequence for IRAK3 (NM_007199.1,414-432).
ggaaggtggatttccaaat

SEQ ID NO: 85908 - DNA, 19 bp, Homo sapiens
  siRNA target sequence for IRAK3 (NM_007199.1,452-470).
ccaatgtcaccgtggataa

SEQ ID NO: 85909 - DNA, 19 bp, Homo sapiens
  siRNA target sequence for IRAK3 (NM_007199.1,461-479).
ccgtggataatgttcttat

SEQ ID NO: 85910 - DNA, 19 bp, Homo sapiens
  siRNA target sequence for IRAK3 (NM_007199.1,462-480).
cgtggataatgttcttatt

SEQ ID NO: 85911 - DNA, 19 bp, Homo sapiens
  siRNA target sequence for IRAK3 (NM_007199.1,515-533).
cttccatcagctttcaaaa

SEQ ID NO: 85912 - DNA, 19 bp, Homo sapiens
  siRNA target sequence for IRAK3 (NM_007199.1,610-628).
gagattcaaaacctaacat

SEQ ID NO: 85913 - DNA, 19 bp, Homo sapiens
  siRNA target sequence for IRAK3 (NM_007199.1,621-639).
cctaacatatgctgtcaaa

SEQ ID NO: 85914 - DNA, 19 bp, Homo sapiens
  siRNA target sequence for IRAK3 (NM_007199.1,622-640).
ctaacatatgctgtcaaat

SEQ ID NO: 85915 - DNA, 19 bp, Homo sapiens
  siRNA target sequence for IRAK3 (NM_007199.1,632-650).
ctgtcaaattatttaaaca

SEQ ID NO: 85916 - DNA, 19 bp, Homo sapiens
  siRNA target sequence for IRAK3 (NM_007199.1,675-693).
gcattggaagaggttttta

SEQ ID NO: 85917 - DNA, 19 bp, Homo sapiens
  siRNA target sequence for IRAK3 (NM_007199.1,736-754).
ctagagttggctgcatatt

SEQ ID NO: 85918 - DNA, 19 bp, Homo sapiens
  siRNA target sequence for IRAK3 (NM_007199.1,739-757).
gagttggctgcatatttta

SEQ ID NO: 85919 - DNA, 19 bp, Homo sapiens
  siRNA target sequence for IRAK3 (NM_007199.1,803-821).
gaacactttttgacagatt

SEQ ID NO: 85920 - DNA, 19 bp, Homo sapiens
  siRNA target sequence for IRAK3 (NM_007199.1,847-865).
ctcccttggcacattcgaa

SEQ ID NO: 85921 - DNA, 19 bp, Homo sapiens
  siRNA target sequence for IRAK3 (NM_007199.1,856-874).
cacattcgaatcggtatat

SEQ ID NO: 85922 - DNA, 19 bp, Homo sapiens
  siRNA target sequence for IRAK3 (NM_007199.1,858-876).
cattcgaatcggtatatta

SEQ ID NO: 85923 - DNA, 19 bp, Homo sapiens
  siRNA target sequence for IRAK3 (NM_007199.1,867-885).
cggtatattaataggaata

SEQ ID NO: 85924 - DNA, 19 bp, Homo sapiens
  siRNA target sequence for IRAK3 (NM_007199.1,868-886).
ggtatattaataggaatat

SEQ ID NO: 85925 - DNA, 19 bp, Homo sapiens
  siRNA target sequence for IRAK3 (NM_007199.1,927-945).
ggtcatctgtggcagtata

SEQ ID NO: 85926 - DNA, 19 bp, Homo sapiens
  siRNA target sequence for IRAK3 (NM_007199.1,930-948).
catctgtggcagtatatca

SEQ ID NO: 85927 - DNA, 19 bp, Homo sapiens
  siRNA target sequence for IRAK3 (NM_007199.1,933-951).
ctgtggcagtatatcaagt

SEQ ID NO: 85928 - DNA, 19 bp, Homo sapiens
  siRNA target sequence for IRAK3 (NM_007199.1,941-959).
gtatatcaagtgcaaacat

SEQ ID NO: 85929 - DNA, 19 bp, Homo sapiens
  siRNA target sequence for IRAK3 (NM_007199.1,947-965).
caagtgcaaacatcctttt

SEQ ID NO: 85930 - DNA, 19 bp, Homo sapiens
  siRNA target sequence for IRAK3 (NM_007199.1,973-991).
cagtttcaacccaaactaa

SEQ ID NO: 85931 - DNA, 19 bp, Homo sapiens
  siRNA target sequence for IRAK3 (NM_007199.1,1014-1032).
ccggtcccacctagaacat

SEQ ID NO: 85932 - DNA, 19 bp, Homo sapiens
  siRNA target sequence for IRAK3 (NM_007199.1,1030-1048).
catcagagttgtaccataa

SEQ ID NO: 85933 - DNA, 19 bp, Homo sapiens
  siRNA target sequence for IRAK3 (NM_007199.1,1103-1121).
gacaggggaaactttccat

SEQ ID NO: 85934 - DNA, 19 bp, Homo sapiens
  siRNA target sequence for IRAK3 (NM_007199.1,1150-1168).
gtaataatggaagttctaa

SEQ ID NO: 85935 - DNA, 19 bp, Homo sapiens
  siRNA target sequence for IRAK3 (NM_007199.1,1172-1190).
gatgtagagtagtgttaga

SEQ ID NO: 85936 - DNA, 19 bp, Homo sapiens
  siRNA target sequence for IRAK3 (NM_007199.1,1175-1193).
gtagagtagtgttagatga

SEQ ID NO: 85937 - DNA, 19 bp, Homo sapiens
  siRNA target sequence for IRAK3 (NM_007199.1,1213-1231).
cgggatctccttagagaat

SEQ ID NO: 85938 - DNA, 19 bp, Homo sapiens
  siRNA target sequence for IRAK3 (NM_007199.1,1214-1232).
gggatctccttagagaatt

SEQ ID NO: 85939 - DNA, 19 bp, Homo sapiens
  siRNA target sequence for IRAK3 (NM_007199.1,1216-1234).
gatctccttagagaattga

SEQ ID NO: 85940 - DNA, 19 bp, Homo sapiens
  siRNA target sequence for IRAK3 (NM_007199.1,1352-1370).
caaagttaagaccatcaat

SEQ ID NO: 85941 - DNA, 19 bp, Homo sapiens
  siRNA target sequence for IRAK3 (NM_007199.1,1361-1379).
gaccatcaatggatgaagt

SEQ ID NO: 85942 - DNA, 19 bp, Homo sapiens
  siRNA target sequence for IRAK3 (NM_007199.1,1400-1418).
ctcaagccagcttgtattt

SEQ ID NO: 85943 - DNA, 19 bp, Homo sapiens
  siRNA target sequence for IRAK3 (NM_007199.1,1426-1444).
gatcctcccacatcactaa

SEQ ID NO: 85944 - DNA, 19 bp, Homo sapiens
  siRNA target sequence for IRAK3 (NM_007199.1,1429-1447).
cctcccacatcactaaagt

SEQ ID NO: 85945 - DNA, 19 bp, Homo sapiens
  siRNA target sequence for IRAK3 (NM_007199.1,1524-1542).
caatttactaccttctgat

SEQ ID NO: 85946 - DNA, 19 bp, Homo sapiens
  siRNA target sequence for IRAK3 (NM_007199.1,1589-1607).
gcagccagtctgaggttat

SEQ ID NO: 85947 - DNA, 19 bp, Homo sapiens
  siRNA target sequence for IRAK3 (NM_007199.1,1592-1610).
gccagtctgaggttatgtt

SEQ ID NO: 85948 - DNA, 19 bp, Homo sapiens
  siRNA target sequence for IRAK3 (NM_007199.1,1593-1611).
ccagtctgaggttatgttt

SEQ ID NO: 85949 - DNA, 19 bp, Homo sapiens
  siRNA target sequence for IRAK3 (NM_007199.1,1665-1683).
gcccagttcttcttgtgaa

SEQ ID NO: 85950 - DNA, 19 bp, Homo sapiens
  siRNA target sequence for IRAK3 (NM_007199.1,1722-1740).
cttaaggccctataaggta

SEQ ID NO: 85951 - DNA, 19 bp, Homo sapiens
  siRNA target sequence for IRAK3 (NM_007199.1,1727-1745).
ggccctataaggtaaatat

SEQ ID NO: 85952 - DNA, 19 bp, Homo sapiens
  siRNA target sequence for IRAK3 (NM_007199.1,1728-1746).
gccctataaggtaaatata

SEQ ID NO: 85953 - DNA, 19 bp, Homo sapiens
  siRNA target sequence for IRAK3 (NM_007199.1,1730-1748).
cctataaggtaaatataga

SEQ ID NO: 85954 - DNA, 19 bp, Homo sapiens
  siRNA target sequence for IRAK3 (NM_007199.1,1759-1777).
gaagctccagggcattctt

SEQ ID NO: 85955 - DNA, 19 bp, Homo sapiens
  siRNA target sequence for IRAK4 (NM_016123.1,182-200).
gatgatagatacaatcagt

SEQ ID NO: 85956 - DNA, 19 bp, Homo sapiens
  siRNA target sequence for IRAK4 (NM_016123.1,211-229).
gagatttgaagcattactt

SEQ ID NO: 85957 - DNA, 19 bp, Homo sapiens
  siRNA target sequence for IRAK4 (NM_016123.1,266-284).
gactggggcaccacaaatt

SEQ ID NO: 85958 - DNA, 19 bp, Homo sapiens
  siRNA target sequence for IRAK4 (NM_016123.1,293-311).
ggtgatcttgtggatcttt

SEQ ID NO: 85959 - DNA, 19 bp, Homo sapiens
  siRNA target sequence for IRAK4 (NM_016123.1,294-312).
gtgatcttgtggatctttt

SEQ ID NO: 85960 - DNA, 19 bp, Homo sapiens
  siRNA target sequence for IRAK4 (NM_016123.1,366-384).
ccaaaactgctaatacact

SEQ ID NO: 85961 - DNA, 19 bp, Homo sapiens
  siRNA target sequence for IRAK4 (NM_016123.1,606-624).
ctgttggtggtaataaaat

SEQ ID NO: 85962 - DNA, 19 bp, Homo sapiens
  siRNA target sequence for IRAK4 (NM_016123.1,647-665).
gtatataaaggctacgtaa

SEQ ID NO: 85963 - DNA, 19 bp, Homo sapiens
  siRNA target sequence for IRAK4 (NM_016123.1,656-674).
ggctacgtaaataacacaa

SEQ ID NO: 85964 - DNA, 19 bp, Homo sapiens
  siRNA target sequence for IRAK4 (NM_016123.1,695-713).
gcagcaatggttgacatta

SEQ ID NO: 85965 - DNA, 19 bp, Homo sapiens
  siRNA target sequence for IRAK4 (NM_016123.1,698-716).
gcaatggttgacattacta

SEQ ID NO: 85966 - DNA, 19 bp, Homo sapiens
  siRNA target sequence for IRAK4 (NM_016123.1,766-784).
gtgtcaacatgaaaactta

SEQ ID NO: 85967 - DNA, 19 bp, Homo sapiens
  siRNA target sequence for IRAK4 (NM_016123.1,788-806).
gaactacttggtttctcaa

SEQ ID NO: 85968 - DNA, 19 bp, Homo sapiens
  siRNA target sequence for IRAK4 (NM_016123.1,820-838).
cctctgcttagtatatgtt

SEQ ID NO: 85969 - DNA, 19 bp, Homo sapiens
  siRNA target sequence for IRAK4 (NM_016123.1,821-839).
ctctgcttagtatatgttt

SEQ ID NO: 85970 - DNA, 19 bp, Homo sapiens
  siRNA target sequence for IRAK4 (NM_016123.1,844-862).
gcctaatggttcattgcta

SEQ ID NO: 85971 - DNA, 19 bp, Homo sapiens
  siRNA target sequence for IRAK4 (NM_016123.1,884-902).
ggtactccaccactttctt

SEQ ID NO: 85972 - DNA, 19 bp, Homo sapiens
  siRNA target sequence for IRAK4 (NM_016123.1,896-914).
ctttcttggcacatgagat

SEQ ID NO: 85973 - DNA, 19 bp, Homo sapiens
  siRNA target sequence for IRAK4 (NM_016123.1,904-922).
gcacatgagatgcaagatt

SEQ ID NO: 85974 - DNA, 19 bp, Homo sapiens
  siRNA target sequence for IRAK4 (NM_016123.1,965-983).
catcatattcatagagata

SEQ ID NO: 85975 - DNA, 19 bp, Homo sapiens
  siRNA target sequence for IRAK4 (NM_016123.1,1067-1085).
gcccagacagtcatgacta

SEQ ID NO: 85976 - DNA, 19 bp, Homo sapiens
  siRNA target sequence for IRAK4 (NM_016123.1,1124-1142).
gctttgcgtggagaaataa

SEQ ID NO: 85977 - DNA, 19 bp, Homo sapiens
  siRNA target sequence for IRAK4 (NM_016123.1,1164-1182).
gctttggtgtggttttact

SEQ ID NO: 85978 - DNA, 19 bp, Homo sapiens
  siRNA target sequence for IRAK4 (NM_016123.1,1165-1183).
ctttggtgtggttttacta

SEQ ID NO: 85979 - DNA, 19 bp, Homo sapiens
  siRNA target sequence for IRAK4 (NM_016123.1,1169-1187).
ggtgtggttttactagaaa

SEQ ID NO: 85980 - DNA, 19 bp, Homo sapiens
  siRNA target sequence for IRAK4 (NM_016123.1,1170-1188).
gtgtggttttactagaaat

SEQ ID NO: 85981 - DNA, 19 bp, Homo sapiens
  siRNA target sequence for IRAK4 (NM_016123.1,1174-1192).
ggttttactagaaataata

SEQ ID NO: 85982 - DNA, 19 bp, Homo sapiens
  siRNA target sequence for IRAK4 (NM_016123.1,1217-1235).
caccgtgaacctcagttat

SEQ ID NO: 85983 - DNA, 19 bp, Homo sapiens
  siRNA target sequence for IRAK4 (NM_016123.1,1221-1239).
gtgaacctcagttattgct

SEQ ID NO: 85984 - DNA, 19 bp, Homo sapiens
  siRNA target sequence for IRAK4 (NM_016123.1,1226-1244).
cctcagttattgctagata

SEQ ID NO: 85985 - DNA, 19 bp, Homo sapiens
  siRNA target sequence for IRAK4 (NM_016123.1,1227-1245).
ctcagttattgctagatat

SEQ ID NO: 85986 - DNA, 19 bp, Homo sapiens
  siRNA target sequence for IRAK4 (NM_016123.1,1229-1247).
cagttattgctagatatta

SEQ ID NO: 85987 - DNA, 19 bp, Homo sapiens
  siRNA target sequence for IRAK4 (NM_016123.1,1275-1293).
caattgaagattatattga

SEQ ID NO: 85988 - DNA, 19 bp, Homo sapiens
  siRNA target sequence for IRAK4 (NM_016123.1,1320-1338).
cttcagttgaagctatgta

SEQ ID NO: 85989 - DNA, 19 bp, Homo sapiens
  siRNA target sequence for ITGB1BP3 (NM_014446.1,170-188).
catcaggatgacttcttca

SEQ ID NO: 85990 - DNA, 19 bp, Homo sapiens
  siRNA target sequence for ITGB1BP3 (NM_014446.1,187-205).
caagccccaagaccaaata

SEQ ID NO: 85991 - DNA, 19 bp, Homo sapiens
  siRNA target sequence for ITGB1BP3 (NM_014446.1,190-208).
gccccaagaccaaatagca

SEQ ID NO: 85992 - DNA, 19 bp, Homo sapiens
  siRNA target sequence for ITGB1BP3 (NM_014446.1,213-231).
gggaagacggcttcaaaca

SEQ ID NO: 85993 - DNA, 19 bp, Homo sapiens
  siRNA target sequence for ITGB1BP3 (NM_014446.1,292-310).
gagcagcccgcagaagttt

SEQ ID NO: 85994 - DNA, 19 bp, Homo sapiens
  siRNA target sequence for ITGB1BP3 (NM_170678.1,625-643).
cccctggtggacttgtaca

SEQ ID NO: 85995 - DNA, 19 bp, Homo sapiens
  siRNA target sequence for ITGB1BP3 (NM_170678.1,750-768).
gcccatgtaccagaagtat

SEQ ID NO: 85996 - DNA, 19 bp, Homo sapiens
  siRNA target sequence for ITK (NM_005546.3,144-162).
cttctccctcgaactttaa

SEQ ID NO: 85997 - DNA, 19 bp, Homo sapiens
  siRNA target sequence for ITK (NM_005546.3,147-165).
ctccctcgaactttaaagt

SEQ ID NO: 85998 - DNA, 19 bp, Homo sapiens
  siRNA target sequence for ITK (NM_005546.3,164-182).
gtccgcttctttgtgttaa

SEQ ID NO: 85999 - DNA, 19 bp, Homo sapiens
  siRNA target sequence for ITK (NM_005546.3,167-185).
cgcttctttgtgttaacca

SEQ ID NO: 86000 - DNA, 19 bp, Homo sapiens
  siRNA target sequence for ITK (NM_005546.3,168-186).
gcttctttgtgttaaccaa

SEQ ID NO: 86001 - DNA, 19 bp, Homo sapiens
  siRNA target sequence for ITK (NM_005546.3,169-187).
cttctttgtgttaaccaaa

SEQ ID NO: 86002 - DNA, 19 bp, Homo sapiens
  siRNA target sequence for ITK (NM_005546.3,190-208).
cagcctggcatactttgaa

SEQ ID NO: 86003 - DNA, 19 bp, Homo sapiens
  siRNA target sequence for ITK (NM_005546.3,248-266).
gagctctcccgaatcaaat

SEQ ID NO: 86004 - DNA, 19 bp, Homo sapiens
  siRNA target sequence for ITK (NM_005546.3,250-268).
gctctcccgaatcaaatgt

SEQ ID NO: 86005 - DNA, 19 bp, Homo sapiens
  siRNA target sequence for ITK (NM_005546.3,253-271).
ctcccgaatcaaatgtgtt

SEQ ID NO: 86006 - DNA, 19 bp, Homo sapiens
  siRNA target sequence for ITK (NM_005546.3,294-312).
gcatcccatgccactataa

SEQ ID NO: 86007 - DNA, 19 bp, Homo sapiens
  siRNA target sequence for ITK (NM_005546.3,340-358).
ctacctcctatatgtgttt

SEQ ID NO: 86008 - DNA, 19 bp, Homo sapiens
  siRNA target sequence for ITK (NM_005546.3,385-403).
ctgggtgctggcccttaaa

SEQ ID NO: 86009 - DNA, 19 bp, Homo sapiens
  siRNA target sequence for ITK (NM_005546.3,391-409).
gctggcccttaaagaagaa

SEQ ID NO: 86010 - DNA, 19 bp, Homo sapiens
  siRNA target sequence for ITK (NM_005546.3,411-429).
cgaggaataataacagttt

SEQ ID NO: 86011 - DNA, 19 bp, Homo sapiens
  siRNA target sequence for ITK (NM_005546.3,723-741).
ggaatgggcatgaaggata

SEQ ID NO: 86012 - DNA, 19 bp, Homo sapiens
  siRNA target sequence for ITK (NM_005546.3,750-768).
gcagttatctggtggaaaa

SEQ ID NO: 86013 - DNA, 19 bp, Homo sapiens
  siRNA target sequence for ITK (NM_005546.3,751-769).
cagttatctggtggaaaaa

SEQ ID NO: 86014 - DNA, 19 bp, Homo sapiens
  siRNA target sequence for ITK (NM_005546.3,789-807).
cctatgagtggtacaataa

SEQ ID NO: 86015 - DNA, 19 bp, Homo sapiens
  siRNA target sequence for ITK (NM_005546.3,794-812).
gagtggtacaataagagta

SEQ ID NO: 86016 - DNA, 19 bp, Homo sapiens
  siRNA target sequence for ITK (NM_005546.3,808-826).
gagtatcagccgagacaaa

SEQ ID NO: 86017 - DNA, 19 bp, Homo sapiens
  siRNA target sequence for ITK (NM_005546.3,882-900).
ccaggactgcaggaacata

SEQ ID NO: 86018 - DNA, 19 bp, Homo sapiens
  siRNA target sequence for ITK (NM_005546.3,897-915).
catacaccgtgtctgtttt

SEQ ID NO: 86019 - DNA, 19 bp, Homo sapiens
  siRNA target sequence for ITK (NM_005546.3,916-934).
caccaaggctgttgtaagt

SEQ ID NO: 86020 - DNA, 19 bp, Homo sapiens
  siRNA target sequence for ITK (NM_005546.3,918-936).
ccaaggctgttgtaagtga

SEQ ID NO: 86021 - DNA, 19 bp, Homo sapiens
  siRNA target sequence for ITK (NM_005546.3,935-953).
gagaacaatccctgtataa

SEQ ID NO: 86022 - DNA, 19 bp, Homo sapiens
  siRNA target sequence for ITK (NM_005546.3,982-1000).
caatcctaagcgatactat

SEQ ID NO: 86023 - DNA, 19 bp, Homo sapiens
  siRNA target sequence for ITK (NM_005546.3,1001-1019).
gtggctgaaaagtatgtgt

SEQ ID NO: 86024 - DNA, 19 bp, Homo sapiens
  siRNA target sequence for ITK (NM_005546.3,1032-1050).
ctcttctcatcaactatca

SEQ ID NO: 86025 - DNA, 19 bp, Homo sapiens
  siRNA target sequence for ITK (NM_005546.3,1186-1204).
gattggcagtgggcaattt

SEQ ID NO: 86026 - DNA, 19 bp, Homo sapiens
  siRNA target sequence for ITK (NM_005546.3,1237-1255).
ggacaaggtggctatcaaa

SEQ ID NO: 86027 - DNA, 19 bp, Homo sapiens
  siRNA target sequence for ITK (NM_005546.3,1238-1256).
gacaaggtggctatcaaaa

SEQ ID NO: 86028 - DNA, 19 bp, Homo sapiens
  siRNA target sequence for ITK (NM_005546.3,1304-1322).
gaagtaatgatgaaactct

SEQ ID NO: 86029 - DNA, 19 bp, Homo sapiens
  siRNA target sequence for ITK (NM_005546.3,1400-1418).
cacggctgcctgtcagatt

SEQ ID NO: 86030 - DNA, 19 bp, Homo sapiens
  siRNA target sequence for ITK (NM_005546.3,1402-1420).
cggctgcctgtcagattat

SEQ ID NO: 86031 - DNA, 19 bp, Homo sapiens
  siRNA target sequence for ITK (NM_005546.3,1429-1447).
ccagcggggactttttgct

SEQ ID NO: 86032 - DNA, 19 bp, Homo sapiens
  siRNA target sequence for ITK (NM_005546.3,1653-1671).
gggcatccccagaggtttt

SEQ ID NO: 86033 - DNA, 19 bp, Homo sapiens
  siRNA target sequence for ITK (NM_005546.3,1746-1764).
gcaaaatcccgtatgaaaa

SEQ ID NO: 86034 - DNA, 19 bp, Homo sapiens
  siRNA target sequence for ITK (NM_005546.3,1800-1818).
ccggatttcggttgtacaa

SEQ ID NO: 86035 - DNA, 19 bp, Homo sapiens
  siRNA target sequence for ITK (NM_005546.3,1838-1856).
cacgtctaccagattatga

SEQ ID NO: 86036 - DNA, 19 bp, Homo sapiens
  siRNA target sequence for ITK (NM_005546.3,1840-1858).
cgtctaccagattatgaat

SEQ ID NO: 86037 - DNA, 19 bp, Homo sapiens
  siRNA target sequence for ITK (NM_005546.3,1909-1927).
gcgtcaactggctgaaatt

SEQ ID NO: 86038 - DNA, 19 bp, Homo sapiens
  siRNA target sequence for JAK1 (NM_002227.1,148-166).
gaagtgatcttctatctgt

SEQ ID NO: 86039 - DNA, 19 bp, Homo sapiens
  siRNA target sequence for JAK1 (NM_002227.1,245-263).
gtatctctcctctttgtca

SEQ ID NO: 86040 - DNA, 19 bp, Homo sapiens
  siRNA target sequence for JAK1 (NM_002227.1,297-315).
gctctggtatgctccaaat

SEQ ID NO: 86041 - DNA, 19 bp, Homo sapiens
  siRNA target sequence for JAK1 (NM_002227.1,317-335).
gcaccatcaccgttgatga

SEQ ID NO: 86042 - DNA, 19 bp, Homo sapiens
  siRNA target sequence for JAK1 (NM_002227.1,357-375).
ctaccggatgaggttctat

SEQ ID NO: 86043 - DNA, 19 bp, Homo sapiens
  siRNA target sequence for JAK1 (NM_002227.1,361-379).
cggatgaggttctatttca

SEQ ID NO: 86044 - DNA, 19 bp, Homo sapiens
  siRNA target sequence for JAK1 (NM_002227.1,411-429).
gtcagtgtggcgtcattct

SEQ ID NO: 86045 - DNA, 19 bp, Homo sapiens
  siRNA target sequence for JAK1 (NM_002227.1,419-437).
ggcgtcattctccaaagaa

SEQ ID NO: 86046 - DNA, 19 bp, Homo sapiens
  siRNA target sequence for JAK1 (NM_002227.1,494-512).
ccagctcactggagtatct

SEQ ID NO: 86047 - DNA, 19 bp, Homo sapiens
  siRNA target sequence for JAK1 (NM_002227.1,497-515).
gctcactggagtatctgtt

SEQ ID NO: 86048 - DNA, 19 bp, Homo sapiens
  siRNA target sequence for JAK1 (NM_002227.1,517-535).
gctcagggacagtatgatt

SEQ ID NO: 86049 - DNA, 19 bp, Homo sapiens
  siRNA target sequence for JAK1 (NM_002227.1,526-544).
cagtatgatttggtgaaat

SEQ ID NO: 86050 - DNA, 19 bp, Homo sapiens
  siRNA target sequence for JAK1 (NM_002227.1,540-558).
gaaatgcctggctcctatt

SEQ ID NO: 86051 - DNA, 19 bp, Homo sapiens
  siRNA target sequence for JAK1 (NM_002227.1,573-591).
cgagcaggatggacatgat

SEQ ID NO: 86052 - DNA, 19 bp, Homo sapiens
  siRNA target sequence for JAK1 (NM_002227.1,684-702).
cagctacaagcgatatatt

SEQ ID NO: 86053 - DNA, 19 bp, Homo sapiens
  siRNA target sequence for JAK1 (NM_002227.1,693-711).
gcgatatattccagaaaca

SEQ ID NO: 86054 - DNA, 19 bp, Homo sapiens
  siRNA target sequence for JAK1 (NM_002227.1,694-712).
cgatatattccagaaacat

SEQ ID NO: 86055 - DNA, 19 bp, Homo sapiens
  siRNA target sequence for JAK1 (NM_002227.1,744-762).
caccaggatgcggataaat

SEQ ID NO: 86056 - DNA, 19 bp, Homo sapiens
  siRNA target sequence for JAK1 (NM_002227.1,749-767).
ggatgcggataaataatgt

SEQ ID NO: 86057 - DNA, 19 bp, Homo sapiens
  siRNA target sequence for JAK1 (NM_002227.1,750-768).
gatgcggataaataatgtt

SEQ ID NO: 86058 - DNA, 19 bp, Homo sapiens
  siRNA target sequence for JAK1 (NM_002227.1,754-772).
cggataaataatgttttca

SEQ ID NO: 86059 - DNA, 19 bp, Homo sapiens
  siRNA target sequence for JAK1 (NM_002227.1,832-850).
gacctgaaggtgaaatact

SEQ ID NO: 86060 - DNA, 19 bp, Homo sapiens
  siRNA target sequence for JAK1 (NM_002227.1,877-895).
cattacggtgctgaaatat

SEQ ID NO: 86061 - DNA, 19 bp, Homo sapiens
  siRNA target sequence for JAK1 (NM_002227.1,900-918).
gacttccatgttactgatt

SEQ ID NO: 86062 - DNA, 19 bp, Homo sapiens
  siRNA target sequence for JAK1 (NM_002227.1,936-954).
gaattggtttcattcgaat

SEQ ID NO: 86063 - DNA, 19 bp, Homo sapiens
  siRNA target sequence for JAK1 (NM_002227.1,951-969).
gaatgacggtggaaacgtt

SEQ ID NO: 86064 - DNA, 19 bp, Homo sapiens
  siRNA target sequence for JAK1 (NM_002227.1,1008-1026).
ccagtggaggcataaacca

SEQ ID NO: 86065 - DNA, 19 bp, Homo sapiens
  siRNA target sequence for JAK1 (NM_002227.1,1009-1027).
cagtggaggcataaaccaa

SEQ ID NO: 86066 - DNA, 19 bp, Homo sapiens
  siRNA target sequence for JAK1 (NM_002227.1,1013-1031).
ggaggcataaaccaaatgt

SEQ ID NO: 86067 - DNA, 19 bp, Homo sapiens
  siRNA target sequence for JAK1 (NM_002227.1,1014-1032).
gaggcataaaccaaatgtt

SEQ ID NO: 86068 - DNA, 19 bp, Homo sapiens
  siRNA target sequence for JAK1 (NM_002227.1,1116-1134).
ccgggaagagtggaacaat

SEQ ID NO: 86069 - DNA, 19 bp, Homo sapiens
  siRNA target sequence for JAK1 (NM_002227.1,1117-1135).
cgggaagagtggaacaatt

SEQ ID NO: 86070 - DNA, 19 bp, Homo sapiens
  siRNA target sequence for JAK1 (NM_002227.1,1240-1258).
gaggccttgtcctttgtgt

SEQ ID NO: 86071 - DNA, 19 bp, Homo sapiens
  siRNA target sequence for JAK1 (NM_002227.1,1328-1346).
cgttgatcgtccacaacat

SEQ ID NO: 86072 - DNA, 19 bp, Homo sapiens
  siRNA target sequence for JAK1 (NM_002227.1,1329-1347).
gttgatcgtccacaacata

SEQ ID NO: 86073 - DNA, 19 bp, Homo sapiens
  siRNA target sequence for JAK1 (NM_002227.1,1363-1381).
ggtccaatctgtacagaat

SEQ ID NO: 86074 - DNA, 19 bp, Homo sapiens
  siRNA target sequence for JAK1 (NM_002227.1,1364-1382).
gtccaatctgtacagaata

SEQ ID NO: 86075 - DNA, 19 bp, Homo sapiens
  siRNA target sequence for JAK1 (NM_002227.1,1376-1394).
cagaatacgccatcaataa

SEQ ID NO: 86076 - DNA, 19 bp, Homo sapiens
  siRNA target sequence for JAK1 (NM_002227.1,1445-1463).
gcaccgactttgacaacat

SEQ ID NO: 86077 - DNA, 19 bp, Homo sapiens
  siRNA target sequence for JAK1 (NM_002227.1,1472-1490).
ccgtcacctgctttgagaa

SEQ ID NO: 86078 - DNA, 19 bp, Homo sapiens
  siRNA target sequence for JAK1 (NM_002227.1,1508-1526).
gtgcccagaagcagttcaa

SEQ ID NO: 86079 - DNA, 19 bp, Homo sapiens
  siRNA target sequence for JAK1 (NM_002227.1,1675-1693).
cccaagccccgagaaatct

SEQ ID NO: 86080 - DNA, 19 bp, Homo sapiens
  siRNA target sequence for JAK1 (NM_002227.1,1701-1719).
gctggtggctactaagaaa

SEQ ID NO: 86081 - DNA, 19 bp, Homo sapiens
  siRNA target sequence for JAK1 (NM_002227.1,1749-1767).
gagccagctgagtttcgat

SEQ ID NO: 86082 - DNA, 19 bp, Homo sapiens
  siRNA target sequence for JAK1 (NM_002227.1,1814-1832).
gcacgagaacacacatcta

SEQ ID NO: 86083 - DNA, 19 bp, Homo sapiens
  siRNA target sequence for JAK1 (NM_002227.1,1815-1833).
cacgagaacacacatctat

SEQ ID NO: 86084 - DNA, 19 bp, Homo sapiens
  siRNA target sequence for JAK1 (NM_002227.1,1838-1856).
ggaccctgatggattacaa

SEQ ID NO: 86085 - DNA, 19 bp, Homo sapiens
  siRNA target sequence for JAK1 (NM_002227.1,2011-2029).
gtccgcgacgtggagaata

SEQ ID NO: 86086 - DNA, 19 bp, Homo sapiens
  siRNA target sequence for JAK1 (NM_002227.1,2015-2033).
gcgacgtggagaatatcat

SEQ ID NO: 86087 - DNA, 19 bp, Homo sapiens
  siRNA target sequence for JAK1 (NM_002227.1,2102-2120).
caccatggaaattcaaagt

SEQ ID NO: 86088 - DNA, 19 bp, Homo sapiens
  siRNA target sequence for JAK1 (NM_002227.1,2275-2293).
gtgctgtctaggcaagaat

SEQ ID NO: 86089 - DNA, 19 bp, Homo sapiens
  siRNA target sequence for JAK1 (NM_002227.1,2425-2443).
gacaagacgctgattgaga

SEQ ID NO: 86090 - DNA, 19 bp, Homo sapiens
  siRNA target sequence for JAK1 (NM_002227.1,2442-2460).
gaaagagagattctatgaa

SEQ ID NO: 86091 - DNA, 19 bp, Homo sapiens
  siRNA target sequence for JAK1 (NM_002227.1,2511-2529).
gacccgctgcatgaactat

SEQ ID NO: 86092 - DNA, 19 bp, Homo sapiens
  siRNA target sequence for JAK1 (NM_002227.1,2513-2531).
cccgctgcatgaactatga

SEQ ID NO: 86093 - DNA, 19 bp, Homo sapiens
  siRNA target sequence for JAK1 (NM_002227.1,2534-2552).
ccaatcagaggcctttctt

SEQ ID NO: 86094 - DNA, 19 bp, Homo sapiens
  siRNA target sequence for JAK1 (NM_002227.1,2557-2575).
gccatcatgagagacatta

SEQ ID NO: 86095 - DNA, 19 bp, Homo sapiens
  siRNA target sequence for JAK1 (NM_002227.1,2790-2808).
ccacatagctgatctgaaa

SEQ ID NO: 86096 - DNA, 19 bp, Homo sapiens
  siRNA target sequence for JAK1 (NM_002227.1,2875-2893).
gaagacggaggaaatggta

SEQ ID NO: 86097 - DNA, 19 bp, Homo sapiens
  siRNA target sequence for JAK1 (NM_002227.1,2882-2900).
gaggaaatggtattaagct

SEQ ID NO: 86098 - DNA, 19 bp, Homo sapiens
  siRNA target sequence for JAK1 (NM_002227.1,2922-2940).
gggaagccttaaggaatat

SEQ ID NO: 86099 - DNA, 19 bp, Homo sapiens
  siRNA target sequence for JAK1 (NM_002227.1,3002-3020).
gtaaggggatggactattt

SEQ ID NO: 86100 - DNA, 19 bp, Homo sapiens
  siRNA target sequence for JAK1 (NM_002227.1,3021-3039).
gggttctcggcaatacgtt

SEQ ID NO: 86101 - DNA, 19 bp, Homo sapiens
  siRNA target sequence for JAK1 (NM_002227.1,3097-3115).
ggagacttcggtttaacca

SEQ ID NO: 86102 - DNA, 19 bp, Homo sapiens
  siRNA target sequence for JAK1 (NM_002227.1,3098-3116).
gagacttcggtttaaccaa

SEQ ID NO: 86103 - DNA, 19 bp, Homo sapiens
  siRNA target sequence for JAK1 (NM_002227.1,3119-3137).
caattgaaaccgataagga

SEQ ID NO: 86104 - DNA, 19 bp, Homo sapiens
  siRNA target sequence for JAK1 (NM_002227.1,3124-3142).
gaaaccgataaggagtatt

SEQ ID NO: 86105 - DNA, 19 bp, Homo sapiens
  siRNA target sequence for JAK1 (NM_002227.1,3160-3178).
cgggacagccctgtgtttt

SEQ ID NO: 86106 - DNA, 19 bp, Homo sapiens
  siRNA target sequence for JAK1 (NM_002227.1,3187-3205).
ccagaatgtttaatgcaat

SEQ ID NO: 86107 - DNA, 19 bp, Homo sapiens
  siRNA target sequence for JAK1 (NM_002227.1,3194-3212).
gtttaatgcaatctaaatt

SEQ ID NO: 86108 - DNA, 19 bp, Homo sapiens
  siRNA target sequence for JAK1 (NM_002227.1,3261-3279).
gctgacttactgtgattca

SEQ ID NO: 86109 - DNA, 19 bp, Homo sapiens
  siRNA target sequence for JAK1 (NM_002227.1,3270-3288).
ctgtgattcagattctagt

SEQ ID NO: 86110 - DNA, 19 bp, Homo sapiens
  siRNA target sequence for JAK1 (NM_002227.1,3284-3302).
ctagtcccatggctttgtt

SEQ ID NO: 86111 - DNA, 19 bp, Homo sapiens
  siRNA target sequence for JAK1 (NM_002227.1,3338-3356).
cagtcacaagacttgtgaa

SEQ ID NO: 86112 - DNA, 19 bp, Homo sapiens
  siRNA target sequence for JAK1 (NM_002227.1,3381-3399).
gccgtgcccacctaactgt

SEQ ID NO: 86113 - DNA, 19 bp, Homo sapiens
  siRNA target sequence for JAK2 (NM_004972.2,499-517).
gaatggcctgccttacgat

SEQ ID NO: 86114 - DNA, 19 bp, Homo sapiens
  siRNA target sequence for JAK2 (NM_004972.2,508-526).
gccttacgatgacagaaat

SEQ ID NO: 86115 - DNA, 19 bp, Homo sapiens
  siRNA target sequence for JAK2 (NM_004972.2,535-553).
catccacctcttctatata

SEQ ID NO: 86116 - DNA, 19 bp, Homo sapiens
  siRNA target sequence for JAK2 (NM_004972.2,542-560).
ctcttctatatatcagaat

SEQ ID NO: 86117 - DNA, 19 bp, Homo sapiens
  siRNA target sequence for JAK2 (NM_004972.2,571-589).
ctggaaatgccaattctat

SEQ ID NO: 86118 - DNA, 19 bp, Homo sapiens
  siRNA target sequence for JAK2 (NM_004972.2,573-591).
ggaaatgccaattctatga

SEQ ID NO: 86119 - DNA, 19 bp, Homo sapiens
  siRNA target sequence for JAK2 (NM_004972.2,579-597).
gccaattctatgaagcaaa

SEQ ID NO: 86120 - DNA, 19 bp, Homo sapiens
  siRNA target sequence for JAK2 (NM_004972.2,580-598).
ccaattctatgaagcaaat

SEQ ID NO: 86121 - DNA, 19 bp, Homo sapiens
  siRNA target sequence for JAK2 (NM_004972.2,721-739).
gtatcacacctgtgtatca

SEQ ID NO: 86122 - DNA, 19 bp, Homo sapiens
  siRNA target sequence for JAK2 (NM_004972.2,725-743).
cacacctgtgtatcataat

SEQ ID NO: 86123 - DNA, 19 bp, Homo sapiens
  siRNA target sequence for JAK2 (NM_004972.2,786-804).
cccaaccatgtcttccata

SEQ ID NO: 86124 - DNA, 19 bp, Homo sapiens
  siRNA target sequence for JAK2 (NM_004972.2,817-835).
ccaggcataatgtactcta

SEQ ID NO: 86125 - DNA, 19 bp, Homo sapiens
  siRNA target sequence for JAK2 (NM_004972.2,822-840).
cataatgtactctacagaa

SEQ ID NO: 86126 - DNA, 19 bp, Homo sapiens
  siRNA target sequence for JAK2 (NM_004972.2,883-901).
gagcctatcggcatggaat

SEQ ID NO: 86127 - DNA, 19 bp, Homo sapiens
  siRNA target sequence for JAK2 (NM_004972.2,885-903).
gcctatcggcatggaatat

SEQ ID NO: 86128 - DNA, 19 bp, Homo sapiens
  siRNA target sequence for JAK2 (NM_004972.2,887-905).
ctatcggcatggaatatct

SEQ ID NO: 86129 - DNA, 19 bp, Homo sapiens
  siRNA target sequence for JAK2 (NM_004972.2,957-975).
gctcagtggcggcatgatt

SEQ ID NO: 86130 - DNA, 19 bp, Homo sapiens
  siRNA target sequence for JAK2 (NM_004972.2,980-998).
gcacggatggataaaagta

SEQ ID NO: 86131 - DNA, 19 bp, Homo sapiens
  siRNA target sequence for JAK2 (NM_004972.2,1032-1050).
gggatggcagtgttagata

SEQ ID NO: 86132 - DNA, 19 bp, Homo sapiens
  siRNA target sequence for JAK2 (NM_004972.2,1038-1056).
gcagtgttagatatgatga

SEQ ID NO: 86133 - DNA, 19 bp, Homo sapiens
  siRNA target sequence for JAK2 (NM_004972.2,1086-1104).
ctggccatctataactcta

SEQ ID NO: 86134 - DNA, 19 bp, Homo sapiens
  siRNA target sequence for JAK2 (NM_004972.2,1102-1120).
ctatcagctacaagacatt

SEQ ID NO: 86135 - DNA, 19 bp, Homo sapiens
  siRNA target sequence for JAK2 (NM_004972.2,1106-1124).
cagctacaagacattctta

SEQ ID NO: 86136 - DNA, 19 bp, Homo sapiens
  siRNA target sequence for JAK2 (NM_004972.2,1138-1156).
gagcaaagatccaagacta

SEQ ID NO: 86137 - DNA, 19 bp, Homo sapiens
  siRNA target sequence for JAK2 (NM_004972.2,1149-1167).
caagactatcatattttga

SEQ ID NO: 86138 - DNA, 19 bp, Homo sapiens
  siRNA target sequence for JAK2 (NM_004972.2,1175-1193).
gcgaataaggtacagattt

SEQ ID NO: 86139 - DNA, 19 bp, Homo sapiens
  siRNA target sequence for JAK2 (NM_004972.2,1187-1205).
cagatttcgcagatttatt

SEQ ID NO: 86140 - DNA, 19 bp, Homo sapiens
  siRNA target sequence for JAK2 (NM_004972.2,1189-1207).
gatttcgcagatttattca

SEQ ID NO: 86141 - DNA, 19 bp, Homo sapiens
  siRNA target sequence for JAK2 (NM_004972.2,1208-1226).
gcaattcagccaatgcaaa

SEQ ID NO: 86142 - DNA, 19 bp, Homo sapiens
  siRNA target sequence for JAK2 (NM_004972.2,1227-1245).
gccactgccagaaacttga

SEQ ID NO: 86143 - DNA, 19 bp, Homo sapiens
  siRNA target sequence for JAK2 (NM_004972.2,1368-1386).
ggaaacggtggaattcagt

SEQ ID NO: 86144 - DNA, 19 bp, Homo sapiens
  siRNA target sequence for JAK2 (NM_004972.2,1425-1443).
gaacaggatttacagttat

SEQ ID NO: 86145 - DNA, 19 bp, Homo sapiens
  siRNA target sequence for JAK2 (NM_004972.2,1439-1457).
gttatattgcgattttcct

SEQ ID NO: 86146 - DNA, 19 bp, Homo sapiens
  siRNA target sequence for JAK2 (NM_004972.2,1447-1465).
gcgattttcctaatattat

SEQ ID NO: 86147 - DNA, 19 bp, Homo sapiens
  siRNA target sequence for JAK2 (NM_004972.2,1448-1466).
cgattttcctaatattatt

SEQ ID NO: 86148 - DNA, 19 bp, Homo sapiens
  siRNA target sequence for JAK2 (NM_004972.2,1486-1504).
caaaccaagagggttcaaa

SEQ ID NO: 86149 - DNA, 19 bp, Homo sapiens
  siRNA target sequence for JAK2 (NM_004972.2,1511-1529).
ccgagttgtaactatccat

SEQ ID NO: 86150 - DNA, 19 bp, Homo sapiens
  siRNA target sequence for JAK2 (NM_004972.2,1512-1530).
cgagttgtaactatccata

SEQ ID NO: 86151 - DNA, 19 bp, Homo sapiens
  siRNA target sequence for JAK2 (NM_004972.2,1513-1531).
gagttgtaactatccataa

SEQ ID NO: 86152 - DNA, 19 bp, Homo sapiens
  siRNA target sequence for JAK2 (NM_004972.2,1583-1601).
gtctttcgtgtcattaatt

SEQ ID NO: 86153 - DNA, 19 bp, Homo sapiens
  siRNA target sequence for JAK2 (NM_004972.2,1585-1603).
ctttcgtgtcattaattga

SEQ ID NO: 86154 - DNA, 19 bp, Homo sapiens
  siRNA target sequence for JAK2 (NM_004972.2,1662-1680).
ccagccgtgcttgaaaata

SEQ ID NO: 86155 - DNA, 19 bp, Homo sapiens
  siRNA target sequence for JAK2 (NM_004972.2,1663-1681).
cagccgtgcttgaaaatat

SEQ ID NO: 86156 - DNA, 19 bp, Homo sapiens
  siRNA target sequence for JAK2 (NM_004972.2,1668-1686).
gtgcttgaaaatatacaaa

SEQ ID NO: 86157 - DNA, 19 bp, Homo sapiens
  siRNA target sequence for JAK2 (NM_004972.2,1693-1711).
gtcatggcccaatttcgat

SEQ ID NO: 86158 - DNA, 19 bp, Homo sapiens
  siRNA target sequence for JAK2 (NM_004972.2,1698-1716).
ggcccaatttcgatggatt

SEQ ID NO: 86159 - DNA, 19 bp, Homo sapiens
  siRNA target sequence for JAK2 (NM_004972.2,1699-1717).
gcccaatttcgatggattt

SEQ ID NO: 86160 - DNA, 19 bp, Homo sapiens
  siRNA target sequence for JAK2 (NM_004972.2,1751-1769).
gactggactgtatgtactt

SEQ ID NO: 86161 - DNA, 19 bp, Homo sapiens
  siRNA target sequence for JAK2 (NM_004972.2,1815-1833).
gtcgagcgagaaaatgtca

SEQ ID NO: 86162 - DNA, 19 bp, Homo sapiens
  siRNA target sequence for JAK2 (NM_004972.2,1817-1835).
cgagcgagaaaatgtcatt

SEQ ID NO: 86163 - DNA, 19 bp, Homo sapiens
  siRNA target sequence for JAK2 (NM_004972.2,1912-1930).
gtcttaaagatcttttgaa

SEQ ID NO: 86164 - DNA, 19 bp, Homo sapiens
  siRNA target sequence for JAK2 (NM_004972.2,1950-1968).
gttcgctcagacaatataa

SEQ ID NO: 86165 - DNA, 19 bp, Homo sapiens
  siRNA target sequence for JAK2 (NM_004972.2,2073-2091).
cagaggcctactcatatga

SEQ ID NO: 86166 - DNA, 19 bp, Homo sapiens
  siRNA target sequence for JAK2 (NM_004972.2,2083-2101).
ctcatatgaaccaaatggt

SEQ ID NO: 86167 - DNA, 19 bp, Homo sapiens
  siRNA target sequence for JAK2 (NM_004972.2,2148-2166).
ggccaaggcacttttacaa

SEQ ID NO: 86168 - DNA, 19 bp, Homo sapiens
  siRNA target sequence for JAK2 (NM_004972.2,2213-2231).
gcatgaaacagaagttctt

SEQ ID NO: 86169 - DNA, 19 bp, Homo sapiens
  siRNA target sequence for JAK2 (NM_004972.2,2345-2363).
ctgtggagacgagaatatt

SEQ ID NO: 86170 - DNA, 19 bp, Homo sapiens
  siRNA target sequence for JAK2 (NM_004972.2,2364-2382).
ctggttcaggagtttgtaa

SEQ ID NO: 86171 - DNA, 19 bp, Homo sapiens
  siRNA target sequence for JAK2 (NM_004972.2,2366-2384).
ggttcaggagtttgtaaaa

SEQ ID NO: 86172 - DNA, 19 bp, Homo sapiens
  siRNA target sequence for JAK2 (NM_004972.2,2389-2407).
gatcactagatacatatct

SEQ ID NO: 86173 - DNA, 19 bp, Homo sapiens
  siRNA target sequence for JAK2 (NM_004972.2,2392-2410).
cactagatacatatctgaa

SEQ ID NO: 86174 - DNA, 19 bp, Homo sapiens
  siRNA target sequence for JAK2 (NM_004972.2,2445-2463).
cttgaagttgctaaacagt

SEQ ID NO: 86175 - DNA, 19 bp, Homo sapiens
  siRNA target sequence for JAK2 (NM_004972.2,2509-2527).
ggaatgtatgtgccaaaaa

SEQ ID NO: 86176 - DNA, 19 bp, Homo sapiens
  siRNA target sequence for JAK2 (NM_004972.2,2562-2580).
ggaaatcctcctttcatca

SEQ ID NO: 86177 - DNA, 19 bp, Homo sapiens
  siRNA target sequence for JAK2 (NM_004972.2,2568-2586).
cctcctttcatcaaactta

SEQ ID NO: 86178 - DNA, 19 bp, Homo sapiens
  siRNA target sequence for JAK2 (NM_004972.2,2572-2590).
ctttcatcaaacttagtga

SEQ ID NO: 86179 - DNA, 19 bp, Homo sapiens
  siRNA target sequence for JAK2 (NM_004972.2,2587-2605).
gtgatcctggcattagtat

SEQ ID NO: 86180 - DNA, 19 bp, Homo sapiens
  siRNA target sequence for JAK2 (NM_004972.2,2589-2607).
gatcctggcattagtatta

SEQ ID NO: 86181 - DNA, 19 bp, Homo sapiens
  siRNA target sequence for JAK2 (NM_004972.2,2593-2611).
ctggcattagtattacagt

SEQ ID NO: 86182 - DNA, 19 bp, Homo sapiens
  siRNA target sequence for JAK2 (NM_004972.2,2780-2798).
gctacaattttatgaagat

SEQ ID NO: 86183 - DNA, 19 bp, Homo sapiens
  siRNA target sequence for JAK2 (NM_004972.2,2859-2877).
gattatgaaccagatttca

SEQ ID NO: 86184 - DNA, 19 bp, Homo sapiens
  siRNA target sequence for JAK2 (NM_004972.2,2892-2910).
gccatcatacgagatctta

SEQ ID NO: 86185 - DNA, 19 bp, Homo sapiens
  siRNA target sequence for JAK2 (NM_004972.2,2918-2936).
gtttactccagattatgaa

SEQ ID NO: 86186 - DNA, 19 bp, Homo sapiens
  siRNA target sequence for JAK2 (NM_004972.2,2952-2970).
gacatgttaccaaatatga

SEQ ID NO: 86187 - DNA, 19 bp, Homo sapiens
  siRNA target sequence for JAK2 (NM_004972.2,3008-3026).
ccgggatcctacacagttt

SEQ ID NO: 86188 - DNA, 19 bp, Homo sapiens
  siRNA target sequence for JAK2 (NM_004972.2,3010-3028).
gggatcctacacagtttga

SEQ ID NO: 86189 - DNA, 19 bp, Homo sapiens
  siRNA target sequence for JAK2 (NM_004972.2,3011-3029).
ggatcctacacagtttgaa

SEQ ID NO: 86190 - DNA, 19 bp, Homo sapiens
  siRNA target sequence for JAK2 (NM_004972.2,3054-3072).
caacttggcaagggtaatt

SEQ ID NO: 86191 - DNA, 19 bp, Homo sapiens
  siRNA target sequence for JAK2 (NM_004972.2,3121-3139).
gggaggtggtcgctgtaaa

SEQ ID NO: 86192 - DNA, 19 bp, Homo sapiens
  siRNA target sequence for JAK2 (NM_004972.2,3122-3140).
ggaggtggtcgctgtaaaa

SEQ ID NO: 86193 - DNA, 19 bp, Homo sapiens
  siRNA target sequence for JAK2 (NM_004972.2,3128-3146).
ggtcgctgtaaaaaagctt

SEQ ID NO: 86194 - DNA, 19 bp, Homo sapiens
  siRNA target sequence for JAK2 (NM_004972.2,3143-3161).
gcttcagcatagtactgaa

SEQ ID NO: 86195 - DNA, 19 bp, Homo sapiens
  siRNA target sequence for JAK2 (NM_004972.2,3252-3270).
gctggtcggcgtaatctaa

SEQ ID NO: 86196 - DNA, 19 bp, Homo sapiens
  siRNA target sequence for JAK2 (NM_004972.2,3253-3271).
ctggtcggcgtaatctaaa

SEQ ID NO: 86197 - DNA, 19 bp, Homo sapiens
  siRNA target sequence for JAK2 (NM_004972.2,3255-3273).
ggtcggcgtaatctaaaat

SEQ ID NO: 86198 - DNA, 19 bp, Homo sapiens
  siRNA target sequence for JAK2 (NM_004972.2,3256-3274).
gtcggcgtaatctaaaatt

SEQ ID NO: 86199 - DNA, 19 bp, Homo sapiens
  siRNA target sequence for JAK2 (NM_004972.2,3258-3276).
cggcgtaatctaaaattaa

SEQ ID NO: 86200 - DNA, 19 bp, Homo sapiens
  siRNA target sequence for JAK2 (NM_004972.2,3259-3277).
ggcgtaatctaaaattaat

SEQ ID NO: 86201 - DNA, 19 bp, Homo sapiens
  siRNA target sequence for JAK2 (NM_004972.2,3261-3279).
cgtaatctaaaattaatta

SEQ ID NO: 86202 - DNA, 19 bp, Homo sapiens
  siRNA target sequence for JAK2 (NM_004972.2,3281-3299).
ggaatatttaccatatgga

SEQ ID NO: 86203 - DNA, 19 bp, Homo sapiens
  siRNA target sequence for JAK2 (NM_004972.2,3298-3316).
gaagtttacgagactatct

SEQ ID NO: 86204 - DNA, 19 bp, Homo sapiens
  siRNA target sequence for JAK2 (NM_004972.2,3301-3319).
gtttacgagactatcttca

SEQ ID NO: 86205 - DNA, 19 bp, Homo sapiens
  siRNA target sequence for JAK2 (NM_004972.2,3309-3327).
gactatcttcaaaaacata

SEQ ID NO: 86206 - DNA, 19 bp, Homo sapiens
  siRNA target sequence for JAK2 (NM_004972.2,3330-3348).
gaacggatagatcacataa

SEQ ID NO: 86207 - DNA, 19 bp, Homo sapiens
  siRNA target sequence for JAK2 (NM_004972.2,3334-3352).
ggatagatcacataaaact

SEQ ID NO: 86208 - DNA, 19 bp, Homo sapiens
  siRNA target sequence for JAK2 (NM_004972.2,3335-3353).
gatagatcacataaaactt

SEQ ID NO: 86209 - DNA, 19 bp, Homo sapiens
  siRNA target sequence for JAK2 (NM_004972.2,3377-3395).
caagggtatggagtatctt

SEQ ID NO: 86210 - DNA, 19 bp, Homo sapiens
  siRNA target sequence for JAK2 (NM_004972.2,3386-3404).
ggagtatcttggtacaaaa

SEQ ID NO: 86211 - DNA, 19 bp, Homo sapiens
  siRNA target sequence for JAK2 (NM_004972.2,3420-3438).
gatctggcaacgagaaata

SEQ ID NO: 86212 - DNA, 19 bp, Homo sapiens
  siRNA target sequence for JAK2 (NM_004972.2,3423-3441).
ctggcaacgagaaatatat

SEQ ID NO: 86213 - DNA, 19 bp, Homo sapiens
  siRNA target sequence for JAK2 (NM_004972.2,3494-3512).
cttgccacaagacaaagaa

SEQ ID NO: 86214 - DNA, 19 bp, Homo sapiens
  siRNA target sequence for JAK2 (NM_004972.2,3501-3519).
caagacaaagaatactata

SEQ ID NO: 86215 - DNA, 19 bp, Homo sapiens
  siRNA target sequence for JAK2 (NM_004972.2,3532-3550).
ctggtgaaagtcccatatt

SEQ ID NO: 86216 - DNA, 19 bp, Homo sapiens
  siRNA target sequence for JAK2 (NM_004972.2,3551-3569).
ctggtatgctccagaatca

SEQ ID NO: 86217 - DNA, 19 bp, Homo sapiens
  siRNA target sequence for JAK2 (NM_004972.2,3553-3571).
ggtatgctccagaatcact

SEQ ID NO: 86218 - DNA, 19 bp, Homo sapiens
  siRNA target sequence for JAK2 (NM_004972.2,3611-3629).
ctttggagtggttctgtat

SEQ ID NO: 86219 - DNA, 19 bp, Homo sapiens
  siRNA target sequence for JAK2 (NM_004972.2,3661-3679).
gtccaccagcggaatttat

SEQ ID NO: 86220 - DNA, 19 bp, Homo sapiens
  siRNA target sequence for JAK2 (NM_004972.2,3670-3688).
cggaatttatgcgtatgat

SEQ ID NO: 86221 - DNA, 19 bp, Homo sapiens
  siRNA target sequence for JAK2 (NM_004972.2,3671-3689).
ggaatttatgcgtatgatt

SEQ ID NO: 86222 - DNA, 19 bp, Homo sapiens
  siRNA target sequence for JAK2 (NM_004972.2,3681-3699).
cgtatgattggcaatgaca

SEQ ID NO: 86223 - DNA, 19 bp, Homo sapiens
  siRNA target sequence for JAK2 (NM_004972.2,3713-3731).
gatcgtgttccatttgata

SEQ ID NO: 86224 - DNA, 19 bp, Homo sapiens
  siRNA target sequence for JAK2 (NM_004972.2,3719-3737).
gttccatttgatagaactt

SEQ ID NO: 86225 - DNA, 19 bp, Homo sapiens
  siRNA target sequence for JAK2 (NM_004972.2,3775-3793).
gcccagatgagatctatat

SEQ ID NO: 86226 - DNA, 19 bp, Homo sapiens
  siRNA target sequence for JAK2 (NM_004972.2,3778-3796).
cagatgagatctatatgat

SEQ ID NO: 86227 - DNA, 19 bp, Homo sapiens
  siRNA target sequence for JAK2 (NM_004972.2,3780-3798).
gatgagatctatatgatca

SEQ ID NO: 86228 - DNA, 19 bp, Homo sapiens
  siRNA target sequence for JAK2 (NM_004972.2,3811-3829).
ggaacaataatgtaaatca

SEQ ID NO: 86229 - DNA, 19 bp, Homo sapiens
  siRNA target sequence for JAK2 (NM_004972.2,3852-3870).
gctcttcgagtggatcaaa

SEQ ID NO: 86230 - DNA, 19 bp, Homo sapiens
  siRNA target sequence for JAK2 (NM_004972.2,3853-3871).
ctcttcgagtggatcaaat

SEQ ID NO: 86231 - DNA, 19 bp, Homo sapiens
  siRNA target sequence for JAK2 (NM_004972.2,3855-3873).
cttcgagtggatcaaataa

SEQ ID NO: 86232 - DNA, 19 bp, Homo sapiens
  siRNA target sequence for JAK3 (NM_000215.1,793-811).
cgctcatggccaagtacat

SEQ ID NO: 86233 - DNA, 19 bp, Homo sapiens
  siRNA target sequence for JAK3 (NM_000215.1,973-991).
gcgactttccagaaatcgt

SEQ ID NO: 86234 - DNA, 19 bp, Homo sapiens
  siRNA target sequence for JAK3 (NM_000215.1,974-992).
cgactttccagaaatcgta

SEQ ID NO: 86235 - DNA, 19 bp, Homo sapiens
  siRNA target sequence for JAK3 (NM_000215.1,981-999).
ccagaaatcgtagacatta

SEQ ID NO: 86236 - DNA, 19 bp, Homo sapiens
  siRNA target sequence for JAK3 (NM_000215.1,1038-1056).
caccgcctggtcactgtta

SEQ ID NO: 86237 - DNA, 19 bp, Homo sapiens
  siRNA target sequence for JAK3 (NM_000215.1,1683-1701).
gggtccttcaccaagattt

SEQ ID NO: 86238 - DNA, 19 bp, Homo sapiens
  siRNA target sequence for JAK3 (NM_000215.1,1922-1940).
catgtatctgcgaaaacgt

SEQ ID NO: 86239 - DNA, 19 bp, Homo sapiens
  siRNA target sequence for JAK3 (NM_000215.1,1988-2006).
ggcctacgccctcaactat

SEQ ID NO: 86240 - DNA, 19 bp, Homo sapiens
  siRNA target sequence for JAK3 (NM_000215.1,1990-2008).
cctacgccctcaactatct

SEQ ID NO: 86241 - DNA, 19 bp, Homo sapiens
  siRNA target sequence for JAK3 (NM_000215.1,2184-2202).
cgggaggcgcagacactta

SEQ ID NO: 86242 - DNA, 19 bp, Homo sapiens
  siRNA target sequence for JAK3 (NM_000215.1,2412-2430).
gtcattcgtgacctcaata

SEQ ID NO: 86243 - DNA, 19 bp, Homo sapiens
  siRNA target sequence for JAK3 (NM_000215.1,2724-2742).
gcactgcacagtgatttca

SEQ ID NO: 86244 - DNA, 19 bp, Homo sapiens
  siRNA target sequence for JAK3 (NM_000215.1,2730-2748).
cacagtgatttcattgtca

SEQ ID NO: 86245 - DNA, 19 bp, Homo sapiens
  siRNA target sequence for JAK3 (NM_000215.1,2868-2886).
cgcctccttctctattcct

SEQ ID NO: 86246 - DNA, 19 bp, Homo sapiens
  siRNA target sequence for JAK3 (NM_000215.1,2971-2989).
gcgaggcacacgtcaagat

SEQ ID NO: 86247 - DNA, 19 bp, Homo sapiens
  siRNA target sequence for JAK3 (NM_000215.1,3019-3037).
cgcttgacaaagactacta

SEQ ID NO: 86248 - DNA, 19 bp, Homo sapiens
  siRNA target sequence for JAK3 (NM_000215.1,3052-3070).
caggccagagccccatttt

SEQ ID NO: 86249 - DNA, 19 bp, Homo sapiens
  siRNA target sequence for JAK3 (NM_000215.1,3340-3358).
cacaggaccggccatcatt

SEQ ID NO: 86250 - DNA, 19 bp, Homo sapiens
  siRNA target sequence for JAK3 (NM_000215.1,3447-3465).
caccactccctgtcctttt

SEQ ID NO: 86251 - DNA, 19 bp, Homo sapiens
  siRNA target sequence for JFC1 (NM_032872.1,577-595).
ccaggctcaccattgatga

SEQ ID NO: 86252 - DNA, 19 bp, Homo sapiens
  siRNA target sequence for JFC1 (NM_032872.1,1217-1235).
ctttctgggcgaagttgaa

SEQ ID NO: 86253 - DNA, 19 bp, Homo sapiens
  siRNA target sequence for JFC1 (NM_032872.1,1455-1473).
ctggacacttacgtacaat

SEQ ID NO: 86254 - DNA, 19 bp, Homo sapiens
  siRNA target sequence for JFC1 (NM_032872.1,1535-1553).
cctcagccctgtgttcaat

SEQ ID NO: 86255 - DNA, 19 bp, Homo sapiens
  siRNA target sequence for JIK (NM_016281.2,317-335).
ccagagattgccgatctat

SEQ ID NO: 86256 - DNA, 19 bp, Homo sapiens
  siRNA target sequence for JIK (NM_016281.2,318-336).
cagagattgccgatctatt

SEQ ID NO: 86257 - DNA, 19 bp, Homo sapiens
  siRNA target sequence for JIK (NM_016281.2,320-338).
gagattgccgatctattct

SEQ ID NO: 86258 - DNA, 19 bp, Homo sapiens
  siRNA target sequence for JIK (NM_016281.2,328-346).
cgatctattctacaaagat

SEQ ID NO: 86259 - DNA, 19 bp, Homo sapiens
  siRNA target sequence for JIK (NM_016281.2,505-523).
ggaagttaaatttttacga

SEQ ID NO: 86260 - DNA, 19 bp, Homo sapiens
  siRNA target sequence for JIK (NM_016281.2,529-547).
gaagcatcctaatactatt

SEQ ID NO: 86261 - DNA, 19 bp, Homo sapiens
  siRNA target sequence for JIK (NM_016281.2,581-599).
gcttggttggtgatggaat

SEQ ID NO: 86262 - DNA, 19 bp, Homo sapiens
  siRNA target sequence for JIK (NM_016281.2,582-600).
cttggttggtgatggaata

SEQ ID NO: 86263 - DNA, 19 bp, Homo sapiens
  siRNA target sequence for JIK (NM_016281.2,589-607).
ggtgatggaatattgctta

SEQ ID NO: 86264 - DNA, 19 bp, Homo sapiens
  siRNA target sequence for JIK (NM_016281.2,612-630).
cagcctctgatttattaga

SEQ ID NO: 86265 - DNA, 19 bp, Homo sapiens
  siRNA target sequence for JIK (NM_016281.2,615-633).
cctctgatttattagaagt

SEQ ID NO: 86266 - DNA, 19 bp, Homo sapiens
  siRNA target sequence for JIK (NM_016281.2,616-634).
ctctgatttattagaagtt

SEQ ID NO: 86267 - DNA, 19 bp, Homo sapiens
  siRNA target sequence for JIK (NM_016281.2,661-679).
gatcgctgccattactcat

SEQ ID NO: 86268 - DNA, 19 bp, Homo sapiens
  siRNA target sequence for JIK (NM_016281.2,763-781).
gccaggtcaggtaaaacta

SEQ ID NO: 86269 - DNA, 19 bp, Homo sapiens
  siRNA target sequence for JIK (NM_016281.2,851-869).
ccagaggtgatcttagcta

SEQ ID NO: 86270 - DNA, 19 bp, Homo sapiens
  siRNA target sequence for JIK (NM_016281.2,852-870).
cagaggtgatcttagctat

SEQ ID NO: 86271 - DNA, 19 bp, Homo sapiens
  siRNA target sequence for JIK (NM_016281.2,856-874).
ggtgatcttagctatggat

SEQ ID NO: 86272 - DNA, 19 bp, Homo sapiens
  siRNA target sequence for JIK (NM_016281.2,997-1015).
gaatgactccccaacgtta

SEQ ID NO: 86273 - DNA, 19 bp, Homo sapiens
  siRNA target sequence for JIK (NM_016281.2,1001-1019).
gactccccaacgttacagt

SEQ ID NO: 86274 - DNA, 19 bp, Homo sapiens
  siRNA target sequence for JIK (NM_016281.2,1005-1023).
ccccaacgttacagtctaa

SEQ ID NO: 86275 - DNA, 19 bp, Homo sapiens
  siRNA target sequence for JIK (NM_016281.2,1006-1024).
cccaacgttacagtctaat

SEQ ID NO: 86276 - DNA, 19 bp, Homo sapiens
  siRNA target sequence for JIK (NM_016281.2,1008-1026).
caacgttacagtctaatga

SEQ ID NO: 86277 - DNA, 19 bp, Homo sapiens
  siRNA target sequence for JIK (NM_016281.2,1025-1043).
gaatggacagactccttta

SEQ ID NO: 86278 - DNA, 19 bp, Homo sapiens
  siRNA target sequence for JIK (NM_016281.2,1036-1054).
ctcctttaggagatttgtt

SEQ ID NO: 86279 - DNA, 19 bp, Homo sapiens
  siRNA target sequence for JIK (NM_016281.2,1178-1196).
gcagttcgtgagctagata

SEQ ID NO: 86280 - DNA, 19 bp, Homo sapiens
  siRNA target sequence for JIK (NM_016281.2,1179-1197).
cagttcgtgagctagataa

SEQ ID NO: 86281 - DNA, 19 bp, Homo sapiens
  siRNA target sequence for JIK (NM_016281.2,1324-1342).
gggcagcaaccattccatt

SEQ ID NO: 86282 - DNA, 19 bp, Homo sapiens
  siRNA target sequence for JIK (NM_016281.2,1413-1431).
gcagttccgaacttgtcat

SEQ ID NO: 86283 - DNA, 19 bp, Homo sapiens
  siRNA target sequence for JIK (NM_016281.2,1439-1457).
gatgacgaaagcacaatca

SEQ ID NO: 86284 - DNA, 19 bp, Homo sapiens
  siRNA target sequence for JIK (NM_016281.2,1467-1485).
cctccgtcgtgcataagaa

SEQ ID NO: 86285 - DNA, 19 bp, Homo sapiens
  siRNA target sequence for JIK (NM_016281.2,1468-1486).
ctccgtcgtgcataagaaa

SEQ ID NO: 86286 - DNA, 19 bp, Homo sapiens
  siRNA target sequence for JIK (NM_016281.2,1470-1488).
ccgtcgtgcataagaaaga

SEQ ID NO: 86287 - DNA, 19 bp, Homo sapiens
  siRNA target sequence for JIK (NM_016281.2,1471-1489).
cgtcgtgcataagaaagat

SEQ ID NO: 86288 - DNA, 19 bp, Homo sapiens
  siRNA target sequence for JIK (NM_016281.2,1474-1492).
cgtgcataagaaagatcat

SEQ ID NO: 86289 - DNA, 19 bp, Homo sapiens
  siRNA target sequence for JIK (NM_016281.2,1477-1495).
gcataagaaagatcatgta

SEQ ID NO: 86290 - DNA, 19 bp, Homo sapiens
  siRNA target sequence for JIK (NM_016281.2,1591-1609).
gcgctttgccacgatcaaa

SEQ ID NO: 86291 - DNA, 19 bp, Homo sapiens
  siRNA target sequence for JIK (NM_016281.2,1592-1610).
cgctttgccacgatcaaat

SEQ ID NO: 86292 - DNA, 19 bp, Homo sapiens
  siRNA target sequence for JIK (NM_016281.2,1594-1612).
ctttgccacgatcaaatca

SEQ ID NO: 86293 - DNA, 19 bp, Homo sapiens
  siRNA target sequence for JIK (NM_016281.2,1784-1802).
gagacgcatgccaacaact

SEQ ID NO: 86294 - DNA, 19 bp, Homo sapiens
  siRNA target sequence for JIK (NM_016281.2,1831-1849).
gaagcaagtggctatcata

SEQ ID NO: 86295 - DNA, 19 bp, Homo sapiens
  siRNA target sequence for JIK (NM_016281.2,1834-1852).
gcaagtggctatcatagaa

SEQ ID NO: 86296 - DNA, 19 bp, Homo sapiens
  siRNA target sequence for JIK (NM_016281.2,1835-1853).
caagtggctatcatagaaa

SEQ ID NO: 86297 - DNA, 19 bp, Homo sapiens
  siRNA target sequence for JIK (NM_016281.2,1929-1947).
caactttcttagaaagtca

SEQ ID NO: 86298 - DNA, 19 bp, Homo sapiens
  siRNA target sequence for JIK (NM_016281.2,2030-2048).
gagcggatctccaaacata

SEQ ID NO: 86299 - DNA, 19 bp, Homo sapiens
  siRNA target sequence for JIK (NM_016281.2,2032-2050).
gcggatctccaaacataaa

SEQ ID NO: 86300 - DNA, 19 bp, Homo sapiens
  siRNA target sequence for JIK (NM_016281.2,2034-2052).
ggatctccaaacataaaga

SEQ ID NO: 86301 - DNA, 19 bp, Homo sapiens
  siRNA target sequence for JIK (NM_016281.2,2108-2126).
ctgtactacgacaaaaatt

SEQ ID NO: 86302 - DNA, 19 bp, Homo sapiens
  siRNA target sequence for JIK (NM_016281.2,2408-2426).
cggcaacagccaaaaaact

SEQ ID NO: 86303 - DNA, 19 bp, Homo sapiens
  siRNA target sequence for JIK (NM_016281.2,2411-2429).
caacagccaaaaaacttaa

SEQ ID NO: 86304 - DNA, 19 bp, Homo sapiens
  siRNA target sequence for JIK (NM_016281.2,2477-2495).
gtacagaccaaacagtata

SEQ ID NO: 86305 - DNA, 19 bp, Homo sapiens
  siRNA target sequence for JIK (NM_016281.2,2482-2500).
gaccaaacagtataaagca

SEQ ID NO: 86306 - DNA, 19 bp, Homo sapiens
  siRNA target sequence for JIK (NM_016281.2,2857-2875).
ggaacgcagcgagagaata

SEQ ID NO: 86307 - DNA, 19 bp, Homo sapiens
  siRNA target sequence for JIK (NM_016281.2,2858-2876).
gaacgcagcgagagaataa

SEQ ID NO: 86308 - DNA, 19 bp, Homo sapiens
  siRNA target sequence for JIK (NM_016281.2,2861-2879).
cgcagcgagagaataaaga

SEQ ID NO: 86309 - DNA, 19 bp, Homo sapiens
  siRNA target sequence for JIK (NM_016281.2,2892-2910).
ggcaagagcgagagattga

SEQ ID NO: 86310 - DNA, 19 bp, Homo sapiens
  siRNA target sequence for JIK (NM_016281.2,2893-2911).
gcaagagcgagagattgaa

SEQ ID NO: 86311 - DNA, 19 bp, Homo sapiens
  siRNA target sequence for JIK (NM_016281.2,2894-2912).
caagagcgagagattgaaa

SEQ ID NO: 86312 - DNA, 19 bp, Homo sapiens
  siRNA target sequence for JIK (NM_016281.2,2899-2917).
gcgagagattgaaactttt

SEQ ID NO: 86313 - DNA, 19 bp, Homo sapiens
  siRNA target sequence for JIK (NM_016281.2,2934-2952).
gaatgggatttgggaattt

SEQ ID NO: 86314 - DNA, 19 bp, Homo sapiens
  siRNA target sequence for KATNA1 (NM_007044.2,48-66).
gagtcttcttatgattagt

SEQ ID NO: 86315 - DNA, 19 bp, Homo sapiens
  siRNA target sequence for KATNA1 (NM_007044.2,50-68).
gtcttcttatgattagtga

SEQ ID NO: 86316 - DNA, 19 bp, Homo sapiens
  siRNA target sequence for KATNA1 (NM_007044.2,95-113).
cattgctgggaaactatga

SEQ ID NO: 86317 - DNA, 19 bp, Homo sapiens
  siRNA target sequence for KATNA1 (NM_007044.2,116-134).
ctgcgatggtctattatca

SEQ ID NO: 86318 - DNA, 19 bp, Homo sapiens
  siRNA target sequence for KATNA1 (NM_007044.2,126-144).
ctattatcagggagttctt

SEQ ID NO: 86319 - DNA, 19 bp, Homo sapiens
  siRNA target sequence for KATNA1 (NM_007044.2,159-177).
gtatctgtactcagtcaaa

SEQ ID NO: 86320 - DNA, 19 bp, Homo sapiens
  siRNA target sequence for KATNA1 (NM_007044.2,163-181).
ctgtactcagtcaaagata

SEQ ID NO: 86321 - DNA, 19 bp, Homo sapiens
  siRNA target sequence for KATNA1 (NM_007044.2,226-244).
gtggaagctaaacatgtta

SEQ ID NO: 86322 - DNA, 19 bp, Homo sapiens
  siRNA target sequence for KATNA1 (NM_007044.2,228-246).
ggaagctaaacatgttaaa

SEQ ID NO: 86323 - DNA, 19 bp, Homo sapiens
  siRNA target sequence for KATNA1 (NM_007044.2,238-256).
catgttaaagatatcatga

SEQ ID NO: 86324 - DNA, 19 bp, Homo sapiens
  siRNA target sequence for KATNA1 (NM_007044.2,260-278).
cactagagagctttaaact

SEQ ID NO: 86325 - DNA, 19 bp, Homo sapiens
  siRNA target sequence for KATNA1 (NM_007044.2,342-360).
catgcctgtacctgttgaa

SEQ ID NO: 86326 - DNA, 19 bp, Homo sapiens
  siRNA target sequence for KATNA1 (NM_007044.2,368-386).
cctcaccaggacctagaaa

SEQ ID NO: 86327 - DNA, 19 bp, Homo sapiens
  siRNA target sequence for KATNA1 (NM_007044.2,379-397).
cctagaaaacgccaatctt

SEQ ID NO: 86328 - DNA, 19 bp, Homo sapiens
  siRNA target sequence for KATNA1 (NM_007044.2,405-423).
cagtgaccctaaatcacat

SEQ ID NO: 86329 - DNA, 19 bp, Homo sapiens
  siRNA target sequence for KATNA1 (NM_007044.2,411-429).
ccctaaatcacatggtaat

SEQ ID NO: 86330 - DNA, 19 bp, Homo sapiens
  siRNA target sequence for KATNA1 (NM_007044.2,424-442).
ggtaatcgtccaagtacaa

SEQ ID NO: 86331 - DNA, 19 bp, Homo sapiens
  siRNA target sequence for KATNA1 (NM_007044.2,592-610).
gatagtaccggatatgata

SEQ ID NO: 86332 - DNA, 19 bp, Homo sapiens
  siRNA target sequence for KATNA1 (NM_007044.2,596-614).
gtaccggatatgataaaga

SEQ ID NO: 86333 - DNA, 19 bp, Homo sapiens
  siRNA target sequence for KATNA1 (NM_007044.2,599-617).
ccggatatgataaagactt

SEQ ID NO: 86334 - DNA, 19 bp, Homo sapiens
  siRNA target sequence for KATNA1 (NM_007044.2,600-618).
cggatatgataaagactta

SEQ ID NO: 86335 - DNA, 19 bp, Homo sapiens
  siRNA target sequence for KATNA1 (NM_007044.2,668-686).
gggatgatatcgctgattt

SEQ ID NO: 86336 - DNA, 19 bp, Homo sapiens
  siRNA target sequence for KATNA1 (NM_007044.2,669-687).
ggatgatatcgctgattta

SEQ ID NO: 86337 - DNA, 19 bp, Homo sapiens
  siRNA target sequence for KATNA1 (NM_007044.2,712-730).
gaagccgtagtgttaccaa

SEQ ID NO: 86338 - DNA, 19 bp, Homo sapiens
  siRNA target sequence for KATNA1 (NM_007044.2,732-750).
gtggatgcccgaattcttt

SEQ ID NO: 86339 - DNA, 19 bp, Homo sapiens
  siRNA target sequence for KATNA1 (NM_007044.2,807-825).
gaagacgctccttgctaaa

SEQ ID NO: 86340 - DNA, 19 bp, Homo sapiens
  siRNA target sequence for KATNA1 (NM_007044.2,810-828).
gacgctccttgctaaagca

SEQ ID NO: 86341 - DNA, 19 bp, Homo sapiens
  siRNA target sequence for KATNA1 (NM_007044.2,843-861).
caagacaacattcttcaat

SEQ ID NO: 86342 - DNA, 19 bp, Homo sapiens
  siRNA target sequence for KATNA1 (NM_007044.2,864-882).
ctcttcatcaactttgact

SEQ ID NO: 86343 - DNA, 19 bp, Homo sapiens
  siRNA target sequence for KATNA1 (NM_007044.2,909-927).
gcttgttcgtcttctgttt

SEQ ID NO: 86344 - DNA, 19 bp, Homo sapiens
  siRNA target sequence for KATNA1 (NM_007044.2,1156-1174).
cgacgccttgagaaacgaa

SEQ ID NO: 86345 - DNA, 19 bp, Homo sapiens
  siRNA target sequence for KATNA1 (NM_007044.2,1157-1175).
gacgccttgagaaacgaat

SEQ ID NO: 86346 - DNA, 19 bp, Homo sapiens
  siRNA target sequence for KATNA1 (NM_007044.2,1160-1178).
gccttgagaaacgaatcta

SEQ ID NO: 86347 - DNA, 19 bp, Homo sapiens
  siRNA target sequence for KATNA1 (NM_007044.2,1161-1179).
ccttgagaaacgaatctat

SEQ ID NO: 86348 - DNA, 19 bp, Homo sapiens
  siRNA target sequence for KATNA1 (NM_007044.2,1203-1221).
cagggaggagctattacga

SEQ ID NO: 86349 - DNA, 19 bp, Homo sapiens
  siRNA target sequence for KATNA1 (NM_007044.2,1206-1224).
ggaggagctattacgaata

SEQ ID NO: 86350 - DNA, 19 bp, Homo sapiens
  siRNA target sequence for KATNA1 (NM_007044.2,1209-1227).
ggagctattacgaataagt

SEQ ID NO: 86351 - DNA, 19 bp, Homo sapiens
  siRNA target sequence for KATNA1 (NM_007044.2,1226-1244).
gtctacgtgagttggaatt

SEQ ID NO: 86352 - DNA, 19 bp, Homo sapiens
  siRNA target sequence for KATNA1 (NM_007044.2,1239-1257).
ggaattggctgatgatgtt

SEQ ID NO: 86353 - DNA, 19 bp, Homo sapiens
  siRNA target sequence for KATNA1 (NM_007044.2,1295-1313).
caggtgcggacattaccaa

SEQ ID NO: 86354 - DNA, 19 bp, Homo sapiens
  siRNA target sequence for KCNJ1 (NM_000220.2,58-76).
gcttccagtcggaatgtgt

SEQ ID NO: 86355 - DNA, 19 bp, Homo sapiens
  siRNA target sequence for KCNJ1 (NM_000220.2,59-77).
cttccagtcggaatgtgtt

SEQ ID NO: 86356 - DNA, 19 bp, Homo sapiens
  siRNA target sequence for KCNJ1 (NM_000220.2,62-80).
ccagtcggaatgtgtttga

SEQ ID NO: 86357 - DNA, 19 bp, Homo sapiens
  siRNA target sequence for KCNJ1 (NM_000220.2,73-91).
gtgtttgacacgttgatca

SEQ ID NO: 86358 - DNA, 19 bp, Homo sapiens
  siRNA target sequence for KCNJ1 (NM_000220.2,92-110).
gggtgttgacagaaagtat

SEQ ID NO: 86359 - DNA, 19 bp, Homo sapiens
  siRNA target sequence for KCNJ1 (NM_000220.2,94-112).
gtgttgacagaaagtatgt

SEQ ID NO: 86360 - DNA, 19 bp, Homo sapiens
  siRNA target sequence for KCNJ1 (NM_000220.2,222-240).
ggcacagtcaaggtttata

SEQ ID NO: 86361 - DNA, 19 bp, Homo sapiens
  siRNA target sequence for KCNJ1 (NM_000220.2,348-366).
gtatgcagtagcgtacatt

SEQ ID NO: 86362 - DNA, 19 bp, Homo sapiens
  siRNA target sequence for KCNJ1 (NM_000220.2,352-370).
gcagtagcgtacattcaca

SEQ ID NO: 86363 - DNA, 19 bp, Homo sapiens
  siRNA target sequence for KCNJ1 (NM_000220.2,353-371).
cagtagcgtacattcacaa

SEQ ID NO: 86364 - DNA, 19 bp, Homo sapiens
  siRNA target sequence for KCNJ1 (NM_000220.2,409-427).
ccctgtgtggagaatatta

SEQ ID NO: 86365 - DNA, 19 bp, Homo sapiens
  siRNA target sequence for KCNJ1 (NM_000220.2,464-482).
ctcaagtgaccattggata

SEQ ID NO: 86366 - DNA, 19 bp, Homo sapiens
  siRNA target sequence for KCNJ1 (NM_000220.2,517-535).
gccatttttctgcttatct

SEQ ID NO: 86367 - DNA, 19 bp, Homo sapiens
  siRNA target sequence for KCNJ1 (NM_000220.2,540-558).
gtctatacttggagttata

SEQ ID NO: 86368 - DNA, 19 bp, Homo sapiens
  siRNA target sequence for KCNJ1 (NM_000220.2,542-560).
ctatacttggagttataat

SEQ ID NO: 86369 - DNA, 19 bp, Homo sapiens
  siRNA target sequence for KCNJ1 (NM_000220.2,550-568).
ggagttataatcaattctt

SEQ ID NO: 86370 - DNA, 19 bp, Homo sapiens
  siRNA target sequence for KCNJ1 (NM_000220.2,553-571).
gttataatcaattctttca

SEQ ID NO: 86371 - DNA, 19 bp, Homo sapiens
  siRNA target sequence for KCNJ1 (NM_000220.2,613-631).
cgtgccaagaccattacgt

SEQ ID NO: 86372 - DNA, 19 bp, Homo sapiens
  siRNA target sequence for KCNJ1 (NM_000220.2,614-632).
gtgccaagaccattacgtt

SEQ ID NO: 86373 - DNA, 19 bp, Homo sapiens
  siRNA target sequence for KCNJ1 (NM_000220.2,665-683).
ggaagctttgcctcctaat

SEQ ID NO: 86374 - DNA, 19 bp, Homo sapiens
  siRNA target sequence for KCNJ1 (NM_000220.2,712-730).
cttattggcagtcacattt

SEQ ID NO: 86375 - DNA, 19 bp, Homo sapiens
  siRNA target sequence for KCNJ1 (NM_000220.2,786-804).
ccagatcaatatcaacttt

SEQ ID NO: 86376 - DNA, 19 bp, Homo sapiens
  siRNA target sequence for KCNJ1 (NM_000220.2,851-869).
caatttaccatgtcattga

SEQ ID NO: 86377 - DNA, 19 bp, Homo sapiens
  siRNA target sequence for KCNJ1 (NM_000220.2,975-993).
ccaagtccggacatcctat

SEQ ID NO: 86378 - DNA, 19 bp, Homo sapiens
  siRNA target sequence for KCNJ1 (NM_000220.2,1021-1039).
cgttttgctcccatagtat

SEQ ID NO: 86379 - DNA, 19 bp, Homo sapiens
  siRNA target sequence for KCNJ1 (NM_000220.2,1030-1048).
cccatagtatccaagacaa

SEQ ID NO: 86380 - DNA, 19 bp, Homo sapiens
  siRNA target sequence for KCNJ1 (NM_000220.2,1063-1081).
cgagtggatttccataact

SEQ ID NO: 86381 - DNA, 19 bp, Homo sapiens
  siRNA target sequence for KCNJ1 (NM_000220.2,1113-1131).
ctgtgccatgtgcctttat

SEQ ID NO: 86382 - DNA, 19 bp, Homo sapiens
  siRNA target sequence for KCNJ1 (NM_000220.2,1144-1162).
gttagagccaggatgaaga

SEQ ID NO: 86383 - DNA, 19 bp, Homo sapiens
  siRNA target sequence for KCNJ10 (NM_002241.2,235-253).
cagttgccaaggtgtatta

SEQ ID NO: 86384 - DNA, 19 bp, Homo sapiens
  siRNA target sequence for KCNJ10 (NM_002241.2,237-255).
gttgccaaggtgtattaca

SEQ ID NO: 86385 - DNA, 19 bp, Homo sapiens
  siRNA target sequence for KCNJ10 (NM_002241.2,258-276).
cagaccactcagacagaaa

SEQ ID NO: 86386 - DNA, 19 bp, Homo sapiens
  siRNA target sequence for KCNJ10 (NM_002241.2,307-325).
ggcggagagtcctgacaaa

SEQ ID NO: 86387 - DNA, 19 bp, Homo sapiens
  siRNA target sequence for KCNJ10 (NM_002241.2,653-671).
ggccattgtgcttcttatt

SEQ ID NO: 86388 - DNA, 19 bp, Homo sapiens
  siRNA target sequence for KCNJ10 (NM_002241.2,750-768).
cgggctgagaccattcgtt

SEQ ID NO: 86389 - DNA, 19 bp, Homo sapiens
  siRNA target sequence for KCNJ10 (NM_002241.2,751-769).
gggctgagaccattcgttt

SEQ ID NO: 86390 - DNA, 19 bp, Homo sapiens
  siRNA target sequence for KDR (NM_002253.1,377-395).
ctagtgtttctcttgatct

SEQ ID NO: 86391 - DNA, 19 bp, Homo sapiens
  siRNA target sequence for KDR (NM_002253.1,396-414).
gcccaggctcagcatacaa

SEQ ID NO: 86392 - DNA, 19 bp, Homo sapiens
  siRNA target sequence for KDR (NM_002253.1,399-417).
caggctcagcatacaaaaa

SEQ ID NO: 86393 - DNA, 19 bp, Homo sapiens
  siRNA target sequence for KDR (NM_002253.1,485-503).
ggctttggcccaataatca

SEQ ID NO: 86394 - DNA, 19 bp, Homo sapiens
  siRNA target sequence for KDR (NM_002253.1,487-505).
ctttggcccaataatcaga

SEQ ID NO: 86395 - DNA, 19 bp, Homo sapiens
  siRNA target sequence for KDR (NM_002253.1,542-560).
gcgatggcctcttctgtaa

SEQ ID NO: 86396 - DNA, 19 bp, Homo sapiens
  siRNA target sequence for KDR (NM_002253.1,565-583).
ctcacaattccaaaagtga

SEQ ID NO: 86397 - DNA, 19 bp, Homo sapiens
  siRNA target sequence for KDR (NM_002253.1,634-652).
gcctcggtcatttatgtct

SEQ ID NO: 86398 - DNA, 19 bp, Homo sapiens
  siRNA target sequence for KDR (NM_002253.1,635-653).
cctcggtcatttatgtcta

SEQ ID NO: 86399 - DNA, 19 bp, Homo sapiens
  siRNA target sequence for KDR (NM_002253.1,636-654).
ctcggtcatttatgtctat

SEQ ID NO: 86400 - DNA, 19 bp, Homo sapiens
  siRNA target sequence for KDR (NM_002253.1,748-766).
ccatgtctcgggtccattt

SEQ ID NO: 86401 - DNA, 19 bp, Homo sapiens
  siRNA target sequence for KDR (NM_002253.1,757-775).
gggtccatttcaaatctca

SEQ ID NO: 86402 - DNA, 19 bp, Homo sapiens
  siRNA target sequence for KDR (NM_002253.1,809-827).
gatttgttcctgatggtaa

SEQ ID NO: 86403 - DNA, 19 bp, Homo sapiens
  siRNA target sequence for KDR (NM_002253.1,843-861).
cagcaagaagggctttact

SEQ ID NO: 86404 - DNA, 19 bp, Homo sapiens
  siRNA target sequence for KDR (NM_002253.1,846-864).
caagaagggctttactatt

SEQ ID NO: 86405 - DNA, 19 bp, Homo sapiens
  siRNA target sequence for KDR (NM_002253.1,930-948).
ccagtctattatgtacata

SEQ ID NO: 86406 - DNA, 19 bp, Homo sapiens
  siRNA target sequence for KDR (NM_002253.1,952-970).
gtcgttgtagggtatagga

SEQ ID NO: 86407 - DNA, 19 bp, Homo sapiens
  siRNA target sequence for KDR (NM_002253.1,954-972).
cgttgtagggtataggatt

SEQ ID NO: 86408 - DNA, 19 bp, Homo sapiens
  siRNA target sequence for KDR (NM_002253.1,955-973).
gttgtagggtataggattt

SEQ ID NO: 86409 - DNA, 19 bp, Homo sapiens
  siRNA target sequence for KDR (NM_002253.1,987-1005).
gagtccgtctcatggaatt

SEQ ID NO: 86410 - DNA, 19 bp, Homo sapiens
  siRNA target sequence for KDR (NM_002253.1,989-1007).
gtccgtctcatggaattga

SEQ ID NO: 86411 - DNA, 19 bp, Homo sapiens
  siRNA target sequence for KDR (NM_002253.1,992-1010).
cgtctcatggaattgaact

SEQ ID NO: 86412 - DNA, 19 bp, Homo sapiens
  siRNA target sequence for KDR (NM_002253.1,993-1011).
gtctcatggaattgaacta

SEQ ID NO: 86413 - DNA, 19 bp, Homo sapiens
  siRNA target sequence for KDR (NM_002253.1,1046-1064).
caagaactgaactaaatgt

SEQ ID NO: 86414 - DNA, 19 bp, Homo sapiens
  siRNA target sequence for KDR (NM_002253.1,1063-1081).
gtggggattgacttcaact

SEQ ID NO: 86415 - DNA, 19 bp, Homo sapiens
  siRNA target sequence for KDR (NM_002253.1,1094-1112).
cttcgaagcatcagcataa

SEQ ID NO: 86416 - DNA, 19 bp, Homo sapiens
  siRNA target sequence for KDR (NM_002253.1,1105-1123).
cagcataagaaacttgtaa

SEQ ID NO: 86417 - DNA, 19 bp, Homo sapiens
  siRNA target sequence for KDR (NM_002253.1,1120-1138).
gtaaaccgagacctaaaaa

SEQ ID NO: 86418 - DNA, 19 bp, Homo sapiens
  siRNA target sequence for KDR (NM_002253.1,1170-1188).
gagcaccttaactatagat

SEQ ID NO: 86419 - DNA, 19 bp, Homo sapiens
  siRNA target sequence for KDR (NM_002253.1,1196-1214).
cccggagtgaccaaggatt

SEQ ID NO: 86420 - DNA, 19 bp, Homo sapiens
  siRNA target sequence for KDR (NM_002253.1,1269-1287).
cagggtccatgaaaaacct

SEQ ID NO: 86421 - DNA, 19 bp, Homo sapiens
  siRNA target sequence for KDR (NM_002253.1,1271-1289).
gggtccatgaaaaaccttt

SEQ ID NO: 86422 - DNA, 19 bp, Homo sapiens
  siRNA target sequence for KDR (NM_002253.1,1272-1290).
ggtccatgaaaaacctttt

SEQ ID NO: 86423 - DNA, 19 bp, Homo sapiens
  siRNA target sequence for KDR (NM_002253.1,1378-1396).
cccccagaaataaaatggt

SEQ ID NO: 86424 - DNA, 19 bp, Homo sapiens
  siRNA target sequence for KDR (NM_002253.1,1411-1429).
ccccttgagtccaatcaca

SEQ ID NO: 86425 - DNA, 19 bp, Homo sapiens
  siRNA target sequence for KDR (NM_002253.1,1441-1459).
gggcatgtactgacgatta

SEQ ID NO: 86426 - DNA, 19 bp, Homo sapiens
  siRNA target sequence for KDR (NM_002253.1,1539-1557).
ggtctctctggttgtgtat

SEQ ID NO: 86427 - DNA, 19 bp, Homo sapiens
  siRNA target sequence for KDR (NM_002253.1,1609-1627).
cagtacggcaccactcaaa

SEQ ID NO: 86428 - DNA, 19 bp, Homo sapiens
  siRNA target sequence for KDR (NM_002253.1,1663-1681).
catcacatccactggtatt

SEQ ID NO: 86429 - DNA, 19 bp, Homo sapiens
  siRNA target sequence for KDR (NM_002253.1,1841-1859).
ctgtaagtacccttgttat

SEQ ID NO: 86430 - DNA, 19 bp, Homo sapiens
  siRNA target sequence for KDR (NM_002253.1,1892-1910).
gtgaagcggtcaacaaagt

SEQ ID NO: 86431 - DNA, 19 bp, Homo sapiens
  siRNA target sequence for KDR (NM_002253.1,1949-1967).
ggggtcctgaaattacttt

SEQ ID NO: 86432 - DNA, 19 bp, Homo sapiens
  siRNA target sequence for KDR (NM_002253.1,2023-2041).
gacagatctacgtttgaga

SEQ ID NO: 86433 - DNA, 19 bp, Homo sapiens
  siRNA target sequence for KDR (NM_002253.1,2111-2129).
gcaagaacttggatactct

SEQ ID NO: 86434 - DNA, 19 bp, Homo sapiens
  siRNA target sequence for KDR (NM_002253.1,2209-2227).
gaccaaggagactatgtct

SEQ ID NO: 86435 - DNA, 19 bp, Homo sapiens
  siRNA target sequence for KDR (NM_002253.1,2323-2341).
gagaatcagacgacaagta

SEQ ID NO: 86436 - DNA, 19 bp, Homo sapiens
  siRNA target sequence for KDR (NM_002253.1,2389-2407).
ccacagatcatgtggttta

SEQ ID NO: 86437 - DNA, 19 bp, Homo sapiens
  siRNA target sequence for KDR (NM_002253.1,2390-2408).
cacagatcatgtggtttaa

SEQ ID NO: 86438 - DNA, 19 bp, Homo sapiens
  siRNA target sequence for KDR (NM_002253.1,2428-2446).
gaagactcaggcattgtat

SEQ ID NO: 86439 - DNA, 19 bp, Homo sapiens
  siRNA target sequence for KDR (NM_002253.1,2578-2596).
gaaaagacgaacttggaaa

SEQ ID NO: 86440 - DNA, 19 bp, Homo sapiens
  siRNA target sequence for KDR (NM_002253.1,2583-2601).
gacgaacttggaaatcatt

SEQ ID NO: 86441 - DNA, 19 bp, Homo sapiens
  siRNA target sequence for KDR (NM_002253.1,2592-2610).
ggaaatcattattctagta

SEQ ID NO: 86442 - DNA, 19 bp, Homo sapiens
  siRNA target sequence for KDR (NM_002253.1,2617-2635).
gcggtgattgccatgttct

SEQ ID NO: 86443 - DNA, 19 bp, Homo sapiens
  siRNA target sequence for KDR (NM_002253.1,2618-2636).
cggtgattgccatgttctt

SEQ ID NO: 86444 - DNA, 19 bp, Homo sapiens
  siRNA target sequence for KDR (NM_002253.1,2620-2638).
gtgattgccatgttcttct

SEQ ID NO: 86445 - DNA, 19 bp, Homo sapiens
  siRNA target sequence for KDR (NM_002253.1,2678-2696).
ccaatggaggggaactgaa

SEQ ID NO: 86446 - DNA, 19 bp, Homo sapiens
  siRNA target sequence for KDR (NM_002253.1,2738-2756).
cattggatgaacattgtga

SEQ ID NO: 86447 - DNA, 19 bp, Homo sapiens
  siRNA target sequence for KDR (NM_002253.1,2964-2982).
gatcctcattcatattggt

SEQ ID NO: 86448 - DNA, 19 bp, Homo sapiens
  siRNA target sequence for KDR (NM_002253.1,3164-3182).
caatccctgtggatctgaa

SEQ ID NO: 86449 - DNA, 19 bp, Homo sapiens
  siRNA target sequence for KDR (NM_002253.1,3243-3261).
gaagtccctcagtgatgta

SEQ ID NO: 86450 - DNA, 19 bp, Homo sapiens
  siRNA target sequence for KDR (NM_002253.1,3278-3296).
ctgaagatctgtataagga

SEQ ID NO: 86451 - DNA, 19 bp, Homo sapiens
  siRNA target sequence for KDR (NM_002253.1,3357-3375).
cttggcatcgcgaaagtgt

SEQ ID NO: 86452 - DNA, 19 bp, Homo sapiens
  siRNA target sequence for KDR (NM_002253.1,3394-3412).
gcacgaaatatcctcttat

SEQ ID NO: 86453 - DNA, 19 bp, Homo sapiens
  siRNA target sequence for KDR (NM_002253.1,3420-3438).
gaacgtggttaaaatctgt

SEQ ID NO: 86454 - DNA, 19 bp, Homo sapiens
  siRNA target sequence for KDR (NM_002253.1,3519-3537).
ggccccagaaacaattttt

SEQ ID NO: 86455 - DNA, 19 bp, Homo sapiens
  siRNA target sequence for KDR (NM_002253.1,3603-3621).
cttaggtgcttctccatat

SEQ ID NO: 86456 - DNA, 19 bp, Homo sapiens
  siRNA target sequence for KDR (NM_002253.1,3616-3634).
ccatatcctggggtaaaga

SEQ ID NO: 86457 - DNA, 19 bp, Homo sapiens
  siRNA target sequence for KDR (NM_002253.1,3617-3635).
catatcctggggtaaagat

SEQ ID NO: 86458 - DNA, 19 bp, Homo sapiens
  siRNA target sequence for KDR (NM_002253.1,3623-3641).
ctggggtaaagattgatga

SEQ ID NO: 86459 - DNA, 19 bp, Homo sapiens
  siRNA target sequence for KDR (NM_002253.1,3818-3836).
gcaaagactacattgttct

SEQ ID NO: 86460 - DNA, 19 bp, Homo sapiens
  siRNA target sequence for KDR (NM_002253.1,3828-3846).
cattgttcttccgatatca

SEQ ID NO: 86461 - DNA, 19 bp, Homo sapiens
  siRNA target sequence for KDR (NM_002253.1,3932-3950).
ccaaattccattatgacaa

SEQ ID NO: 86462 - DNA, 19 bp, Homo sapiens
  siRNA target sequence for KDR (NM_002253.1,4074-4092).
gacggacagtggtatggtt

SEQ ID NO: 86463 - DNA, 19 bp, Homo sapiens
  siRNA target sequence for KDR (NM_002253.1,4214-4232).
gctaccagtccggatatca

SEQ ID NO: 86464 - DNA, 19 bp, Homo sapiens
  siRNA target sequence for KIAA0195 (NM_014738.1,583-601).
ggctgcgagggatcattga

SEQ ID NO: 86465 - DNA, 19 bp, Homo sapiens
  siRNA target sequence for KIAA0195 (NM_014738.1,589-607).
gagggatcattgaccaaat

SEQ ID NO: 86466 - DNA, 19 bp, Homo sapiens
  siRNA target sequence for KIAA0195 (NM_014738.1,641-659).
gtggcccagtgccatgtat

SEQ ID NO: 86467 - DNA, 19 bp, Homo sapiens
  siRNA target sequence for KIAA0195 (NM_014738.1,775-793).
ggcctggccaggaatcgtt

SEQ ID NO: 86468 - DNA, 19 bp, Homo sapiens
  siRNA target sequence for KIAA0195 (NM_014738.1,780-798).
ggccaggaatcgtttgctt

SEQ ID NO: 86469 - DNA, 19 bp, Homo sapiens
  siRNA target sequence for KIAA0195 (NM_014738.1,1034-1052).
gtcggtgatgctacactat

SEQ ID NO: 86470 - DNA, 19 bp, Homo sapiens
  siRNA target sequence for KIAA0195 (NM_014738.1,1267-1285).
gctccctgctggctaagtt

SEQ ID NO: 86471 - DNA, 19 bp, Homo sapiens
  siRNA target sequence for KIAA0195 (NM_014738.1,1293-1311).
gatactctcagcagctata

SEQ ID NO: 86472 - DNA, 19 bp, Homo sapiens
  siRNA target sequence for KIAA0195 (NM_014738.1,1332-1350).
gaaatgctgcgctgcattt

SEQ ID NO: 86473 - DNA, 19 bp, Homo sapiens
  siRNA target sequence for KIAA0195 (NM_014738.1,1614-1632).
gctggctccctgaacaaca

SEQ ID NO: 86474 - DNA, 19 bp, Homo sapiens
  siRNA target sequence for KIAA0195 (NM_014738.1,1769-1787).
caccgagggtggtgaagaa

SEQ ID NO: 86475 - DNA, 19 bp, Homo sapiens
  siRNA target sequence for KIAA0195 (NM_014738.1,1897-1915).
cctcctgcatccagtttga

SEQ ID NO: 86476 - DNA, 19 bp, Homo sapiens
  siRNA target sequence for KIAA0195 (NM_014738.1,1900-1918).
cctgcatccagtttgatga

SEQ ID NO: 86477 - DNA, 19 bp, Homo sapiens
  siRNA target sequence for KIAA0195 (NM_014738.1,2178-2196).
cccagtgccgagacaatga

SEQ ID NO: 86478 - DNA, 19 bp, Homo sapiens
  siRNA target sequence for KIAA0195 (NM_014738.1,2179-2197).
ccagtgccgagacaatgaa

SEQ ID NO: 86479 - DNA, 19 bp, Homo sapiens
  siRNA target sequence for KIAA0195 (NM_014738.1,3154-3172).
gtgagatgataaagatcat

SEQ ID NO: 86480 - DNA, 19 bp, Homo sapiens
  siRNA target sequence for KIAA0195 (NM_014738.1,3425-3443).
catcatccggcttatcgaa

SEQ ID NO: 86481 - DNA, 19 bp, Homo sapiens
  siRNA target sequence for KIAA0195 (NM_014738.1,4181-4199).
cgtgaagctacatgagatt

SEQ ID NO: 86482 - DNA, 19 bp, Homo sapiens
  siRNA target sequence for KIAA0195 (NM_014738.1,4225-4243).
gacagaagctgcagtttga

SEQ ID NO: 86483 - DNA, 19 bp, Homo sapiens
  siRNA target sequence for KIAA0703 (NM_014861.1,1154-1172).
ggaagccgagccatgtagt

SEQ ID NO: 86484 - DNA, 19 bp, Homo sapiens
  siRNA target sequence for KIAA0703 (NM_014861.1,1155-1173).
gaagccgagccatgtagta

SEQ ID NO: 86485 - DNA, 19 bp, Homo sapiens
  siRNA target sequence for KIAA0703 (NM_014861.1,1160-1178).
cgagccatgtagtaaaaca

SEQ ID NO: 86486 - DNA, 19 bp, Homo sapiens
  siRNA target sequence for KIAA0703 (NM_014861.1,1294-1312).
ctcagttcggagaagtgtt

SEQ ID NO: 86487 - DNA, 19 bp, Homo sapiens
  siRNA target sequence for KIAA0703 (NM_014861.1,1296-1314).
cagttcggagaagtgttta

SEQ ID NO: 86488 - DNA, 19 bp, Homo sapiens
  siRNA target sequence for KIAA0703 (NM_014861.1,1364-1382).
ggacaggctaggaaagcaa

SEQ ID NO: 86489 - DNA, 19 bp, Homo sapiens
  siRNA target sequence for KIAA0703 (NM_014861.1,1432-1450).
ggtcgcaagggaaacaact

SEQ ID NO: 86490 - DNA, 19 bp, Homo sapiens
  siRNA target sequence for KIAA0703 (NM_014861.1,1441-1459).
ggaaacaactcctgagtat

SEQ ID NO: 86491 - DNA, 19 bp, Homo sapiens
  siRNA target sequence for KIAA0703 (NM_014861.1,1446-1464).
caactcctgagtatgttca

SEQ ID NO: 86492 - DNA, 19 bp, Homo sapiens
  siRNA target sequence for KIAA0703 (NM_014861.1,1637-1655).
gactctgactgccaatgaa

SEQ ID NO: 86493 - DNA, 19 bp, Homo sapiens
  siRNA target sequence for KIAA0703 (NM_014861.1,1641-1659).
ctgactgccaatgaaatga

SEQ ID NO: 86494 - DNA, 19 bp, Homo sapiens
  siRNA target sequence for KIAA0703 (NM_014861.1,1760-1778).
cattaaggaattttccaat

SEQ ID NO: 86495 - DNA, 19 bp, Homo sapiens
  siRNA target sequence for KIAA0703 (NM_014861.1,1884-1902).
gcgatgaagatggacttaa

SEQ ID NO: 86496 - DNA, 19 bp, Homo sapiens
  siRNA target sequence for KIAA0703 (NM_014861.1,1886-1904).
gatgaagatggacttaagt

SEQ ID NO: 86497 - DNA, 19 bp, Homo sapiens
  siRNA target sequence for KIAA0703 (NM_014861.1,2091-2109).
ccccagcagaggtcattct

SEQ ID NO: 86498 - DNA, 19 bp, Homo sapiens
  siRNA target sequence for KIAA0703 (NM_014861.1,2649-2667).
gaggaaggcaagggtattt

SEQ ID NO: 86499 - DNA, 19 bp, Homo sapiens
  siRNA target sequence for KIAA0703 (NM_014861.1,2773-2791).
ccatgcagatcctatggat

SEQ ID NO: 86500 - DNA, 19 bp, Homo sapiens
  siRNA target sequence for KIAA0703 (NM_014861.1,2784-2802).
ctatggatcaacatcatca

SEQ ID NO: 86501 - DNA, 19 bp, Homo sapiens
  siRNA target sequence for KIAA0703 (NM_014861.1,2831-2849).
ggtagagcccgttgacaaa

SEQ ID NO: 86502 - DNA, 19 bp, Homo sapiens
  siRNA target sequence for KIAA0703 (NM_014861.1,2944-2962).
gcgggaccctctttatctt

SEQ ID NO: 86503 - DNA, 19 bp, Homo sapiens
  siRNA target sequence for KIAA0703 (NM_014861.1,3010-3028).
cgatgacgttcacttgttt

SEQ ID NO: 86504 - DNA, 19 bp, Homo sapiens
  siRNA target sequence for KIAA0703 (NM_014861.1,3011-3029).
gatgacgttcacttgtttt

SEQ ID NO: 86505 - DNA, 19 bp, Homo sapiens
  siRNA target sequence for KIAA0703 (NM_014861.1,3144-3162).
gggcagctggcggtcattt

SEQ ID NO: 86506 - DNA, 19 bp, Homo sapiens
  siRNA target sequence for KIAA0703 (NM_014861.1,3145-3163).
ggcagctggcggtcattta

SEQ ID NO: 86507 - DNA, 19 bp, Homo sapiens
  siRNA target sequence for KIAA0703 (NM_014861.1,3236-3254).
ggcctcatccgtcttcatt

SEQ ID NO: 86508 - DNA, 19 bp, Homo sapiens
  siRNA target sequence for KIAA0703 (NM_014861.1,3237-3255).
gcctcatccgtcttcattt

SEQ ID NO: 86509 - DNA, 19 bp, Homo sapiens
  siRNA target sequence for KIAA0999 (NM_025164.3,130-148).
gccaaggttgctatcaaga

SEQ ID NO: 86510 - DNA, 19 bp, Homo sapiens
  siRNA target sequence for KIAA0999 (NM_025164.3,196-214).
cgggaagttcaaattatga

SEQ ID NO: 86511 - DNA, 19 bp, Homo sapiens
  siRNA target sequence for KIAA0999 (NM_025164.3,220-238).
ctttgccacccccatatca

SEQ ID NO: 86512 - DNA, 19 bp, Homo sapiens
  siRNA target sequence for KIAA0999 (NM_025164.3,261-279).
gacagaacggatgatttat

SEQ ID NO: 86513 - DNA, 19 bp, Homo sapiens
  siRNA target sequence for KIAA0999 (NM_025164.3,263-281).
cagaacggatgatttatct

SEQ ID NO: 86514 - DNA, 19 bp, Homo sapiens
  siRNA target sequence for KIAA0999 (NM_025164.3,295-313).
gctagtggaggggaaatat

SEQ ID NO: 86515 - DNA, 19 bp, Homo sapiens
  siRNA target sequence for KIAA0999 (NM_025164.3,352-370).
gaggcacgtcggaagttca

SEQ ID NO: 86516 - DNA, 19 bp, Homo sapiens
  siRNA target sequence for KIAA0999 (NM_025164.3,354-372).
ggcacgtcggaagttcaaa

SEQ ID NO: 86517 - DNA, 19 bp, Homo sapiens
  siRNA target sequence for KIAA0999 (NM_025164.3,356-374).
cacgtcggaagttcaaaca

SEQ ID NO: 86518 - DNA, 19 bp, Homo sapiens
  siRNA target sequence for KIAA0999 (NM_025164.3,358-376).
cgtcggaagttcaaacaga

SEQ ID NO: 86519 - DNA, 19 bp, Homo sapiens
  siRNA target sequence for KIAA0999 (NM_025164.3,375-393).
gatcgtcacagctgtctat

SEQ ID NO: 86520 - DNA, 19 bp, Homo sapiens
  siRNA target sequence for KIAA0999 (NM_025164.3,398-416).
gtcactgtcggaacattgt

SEQ ID NO: 86521 - DNA, 19 bp, Homo sapiens
  siRNA target sequence for KIAA0999 (NM_025164.3,402-420).
ctgtcggaacattgttcat

SEQ ID NO: 86522 - DNA, 19 bp, Homo sapiens
  siRNA target sequence for KIAA0999 (NM_025164.3,411-429).
cattgttcatcgtgattta

SEQ ID NO: 86523 - DNA, 19 bp, Homo sapiens
  siRNA target sequence for KIAA0999 (NM_025164.3,635-653).
gcggtgccctgccatttga

SEQ ID NO: 86524 - DNA, 19 bp, Homo sapiens
  siRNA target sequence for KIAA0999 (NM_025164.3,746-764).
gccatatgttggtgttaga

SEQ ID NO: 86525 - DNA, 19 bp, Homo sapiens
  siRNA target sequence for KIAA0999 (NM_025164.3,822-840).
ggacgccgatcccaacttt

SEQ ID NO: 86526 - DNA, 19 bp, Homo sapiens
  siRNA target sequence for KIAA0999 (NM_025164.3,832-850).
cccaactttgacaggttaa

SEQ ID NO: 86527 - DNA, 19 bp, Homo sapiens
  siRNA target sequence for KIAA0999 (NM_025164.3,833-851).
ccaactttgacaggttaat

SEQ ID NO: 86528 - DNA, 19 bp, Homo sapiens
  siRNA target sequence for KIAA0999 (NM_025164.3,954-972).
gcagtcattaagatcagat

SEQ ID NO: 86529 - DNA, 19 bp, Homo sapiens
  siRNA target sequence for KIAA0999 (NM_025164.3,968-986).
cagatgcctatgatcacta

SEQ ID NO: 86530 - DNA, 19 bp, Homo sapiens
  siRNA target sequence for KIAA0999 (NM_025164.3,970-988).
gatgcctatgatcactata

SEQ ID NO: 86531 - DNA, 19 bp, Homo sapiens
  siRNA target sequence for KIAA0999 (NM_025164.3,982-1000).
cactatagtgcaatctaca

SEQ ID NO: 86532 - DNA, 19 bp, Homo sapiens
  siRNA target sequence for KIAA0999 (NM_025164.3,1008-1026).
gtgtgatcgacataagaga

SEQ ID NO: 86533 - DNA, 19 bp, Homo sapiens
  siRNA target sequence for KIAA0999 (NM_025164.3,1012-1030).
gatcgacataagagacata

SEQ ID NO: 86534 - DNA, 19 bp, Homo sapiens
  siRNA target sequence for KIAA0999 (NM_025164.3,1077-1095).
ctttcaagcaccagtcaat

SEQ ID NO: 86535 - DNA, 19 bp, Homo sapiens
  siRNA target sequence for KIAA0999 (NM_025164.3,1114-1132).
ggtactgctatgaacatca

SEQ ID NO: 86536 - DNA, 19 bp, Homo sapiens
  siRNA target sequence for KIAA0999 (NM_025164.3,1180-1198).
ccggatgggacactgaatt

SEQ ID NO: 86537 - DNA, 19 bp, Homo sapiens
  siRNA target sequence for KIAA0999 (NM_025164.3,1181-1199).
cggatgggacactgaattt

SEQ ID NO: 86538 - DNA, 19 bp, Homo sapiens
  siRNA target sequence for KIAA0999 (NM_025164.3,1234-1252).
gcattggtgcgctatttgt

SEQ ID NO: 86539 - DNA, 19 bp, Homo sapiens
  siRNA target sequence for KIAA0999 (NM_025164.3,1240-1258).
gtgcgctatttgtcaatga

SEQ ID NO: 86540 - DNA, 19 bp, Homo sapiens
  siRNA target sequence for KIAA0999 (NM_025164.3,1282-1300).
gacccacgcacggaagtta

SEQ ID NO: 86541 - DNA, 19 bp, Homo sapiens
  siRNA target sequence for KIAA0999 (NM_025164.3,1286-1304).
cacgcacggaagttatgga

SEQ ID NO: 86542 - DNA, 19 bp, Homo sapiens
  siRNA target sequence for KIAA0999 (NM_025164.3,1292-1310).
cggaagttatggaagatct

SEQ ID NO: 86543 - DNA, 19 bp, Homo sapiens
  siRNA target sequence for KIAA0999 (NM_025164.3,1369-1387).
gcccctaatgtgaacttca

SEQ ID NO: 86544 - DNA, 19 bp, Homo sapiens
  siRNA target sequence for KIAA0999 (NM_025164.3,1421-1439).
caaccgggcaacttgagta

SEQ ID NO: 86545 - DNA, 19 bp, Homo sapiens
  siRNA target sequence for KIAA0999 (NM_025164.3,1424-1442).
ccgggcaacttgagtacaa

SEQ ID NO: 86546 - DNA, 19 bp, Homo sapiens
  siRNA target sequence for KIAA0999 (NM_025164.3,1467-1485).
cacgctacagctgttgaat

SEQ ID NO: 86547 - DNA, 19 bp, Homo sapiens
  siRNA target sequence for KIAA0999 (NM_025164.3,1752-1770).
gagcatccaggccttcaaa

SEQ ID NO: 86548 - DNA, 19 bp, Homo sapiens
  siRNA target sequence for KIAA0999 (NM_025164.3,1924-1942).
caaattctccagcaacaaa

SEQ ID NO: 86549 - DNA, 19 bp, Homo sapiens
  siRNA target sequence for KIAA0999 (NM_025164.3,2020-2038).
catcagctccagaggttaa

SEQ ID NO: 86550 - DNA, 19 bp, Homo sapiens
  siRNA target sequence for KIAA0999 (NM_025164.3,2088-2106).
caggcagcccagtaatagt

SEQ ID NO: 86551 - DNA, 19 bp, Homo sapiens
  siRNA target sequence for KIAA0999 (NM_025164.3,2161-2179).
cagtttcaaggcttacctt

SEQ ID NO: 86552 - DNA, 19 bp, Homo sapiens
  siRNA target sequence for KIAA0999 (NM_025164.3,2200-2218).
cagcaacctgagaactgtt

SEQ ID NO: 86553 - DNA, 19 bp, Homo sapiens
  siRNA target sequence for KIAA0999 (NM_025164.3,2514-2532).
ctacgaccaggcgcattta

SEQ ID NO: 86554 - DNA, 19 bp, Homo sapiens
  siRNA target sequence for KIAA0999 (NM_025164.3,2609-2627).
caacccaagccctgaaagt

SEQ ID NO: 86555 - DNA, 19 bp, Homo sapiens
  siRNA target sequence for KIAA0999 (NM_025164.3,2835-2853).
gtttgcacagctcattaaa

SEQ ID NO: 86556 - DNA, 19 bp, Homo sapiens
  siRNA target sequence for KIAA0999 (NM_025164.3,3118-3136).
cagccggcactgatgcatt

SEQ ID NO: 86557 - DNA, 19 bp, Homo sapiens
  siRNA target sequence for KIAA0999 (NM_025164.3,3181-3199).
ggcttccaagacagtaaga

SEQ ID NO: 86558 - DNA, 19 bp, Homo sapiens
  siRNA target sequence for KIAA0999 (NM_025164.3,3190-3208).
gacagtaagagttcaagta

SEQ ID NO: 86559 - DNA, 19 bp, Homo sapiens
  siRNA target sequence for KIAA0999 (NM_025164.3,3300-3318).
ccaagaattggggatacat

SEQ ID NO: 86560 - DNA, 19 bp, Homo sapiens
  siRNA target sequence for KIAA0999 (NM_025164.3,3387-3405).
gaactgcatggatagaagt

SEQ ID NO: 86561 - DNA, 19 bp, Homo sapiens
  siRNA target sequence for KIAA0999 (NM_025164.3,3390-3408).
ctgcatggatagaagttct

SEQ ID NO: 86562 - DNA, 19 bp, Homo sapiens
  siRNA target sequence for KIAA0999 (NM_025164.3,3423-3441).
ggagctgccggatcacaat

SEQ ID NO: 86563 - DNA, 19 bp, Homo sapiens
  siRNA target sequence for KIAA0999 (NM_025164.3,3519-3537).
gaacagcgacgatgcttat

SEQ ID NO: 86564 - DNA, 19 bp, Homo sapiens
  siRNA target sequence for KIAA0999 (NM_025164.3,3524-3542).
gcgacgatgcttatgtaca

SEQ ID NO: 86565 - DNA, 19 bp, Homo sapiens
  siRNA target sequence for KIAA0999 (NM_025164.3,3533-3551).
cttatgtacagctggataa

SEQ ID NO: 86566 - DNA, 19 bp, Homo sapiens
  siRNA target sequence for KIAA0999 (NM_025164.3,3744-3762).
ctatccatctacgtgtatt

SEQ ID NO: 86567 - DNA, 19 bp, Homo sapiens
  siRNA target sequence for KIAA0999 (NM_025164.3,3749-3767).
catctacgtgtattacaga

SEQ ID NO: 86568 - DNA, 19 bp, Homo sapiens
  siRNA target sequence for KIAA1164 (NM_019092.1,416-434).
ctctgagagggcagtacaa

SEQ ID NO: 86569 - DNA, 19 bp, Homo sapiens
  siRNA target sequence for KIAA1164 (NM_019092.1,464-482).
ccggagtgggtcatgagtt

SEQ ID NO: 86570 - DNA, 19 bp, Homo sapiens
  siRNA target sequence for KIAA1164 (NM_019092.1,677-695).
gctgcgagttcaatagtga

SEQ ID NO: 86571 - DNA, 19 bp, Homo sapiens
  siRNA target sequence for KIAA1164 (NM_019092.1,821-839).
gcttcccgggacaatctgt

SEQ ID NO: 86572 - DNA, 19 bp, Homo sapiens
  siRNA target sequence for KIAA1164 (NM_019092.1,825-843).
cccgggacaatctgtgtat

SEQ ID NO: 86573 - DNA, 19 bp, Homo sapiens
  siRNA target sequence for KIAA1164 (NM_019092.1,827-845).
cgggacaatctgtgtatca

SEQ ID NO: 86574 - DNA, 19 bp, Homo sapiens
  siRNA target sequence for KIAA1164 (NM_019092.1,829-847).
ggacaatctgtgtatcaca

SEQ ID NO: 86575 - DNA, 19 bp, Homo sapiens
  siRNA target sequence for KIAA1164 (NM_019092.1,964-982).
ccaccgatgatggaaatca

SEQ ID NO: 86576 - DNA, 19 bp, Homo sapiens
  siRNA target sequence for KIAA1164 (NM_019092.1,967-985).
ccgatgatggaaatcataa

SEQ ID NO: 86577 - DNA, 19 bp, Homo sapiens
  siRNA target sequence for KIAA1164 (NM_019092.1,1049-1067).
cagaaattcaacgtttaaa

SEQ ID NO: 86578 - DNA, 19 bp, Homo sapiens
  siRNA target sequence for KIAA1164 (NM_019092.1,1061-1079).
gtttaaattatgaacagaa

SEQ ID NO: 86579 - DNA, 19 bp, Homo sapiens
  siRNA target sequence for KIAA1164 (NM_019092.1,1114-1132).
cagacaggcctggatgtaa

SEQ ID NO: 86580 - DNA, 19 bp, Homo sapiens
  siRNA target sequence for KIAA1164 (NM_019092.1,1116-1134).
gacaggcctggatgtaaat

SEQ ID NO: 86581 - DNA, 19 bp, Homo sapiens
  siRNA target sequence for KIAA1164 (NM_019092.1,1166-1184).
gcagctacaaccaactagt

SEQ ID NO: 86582 - DNA, 19 bp, Homo sapiens
  siRNA target sequence for KIAA1804 (NM_032435.1,1090-1108).
catgatgacatctgcaata

SEQ ID NO: 86583 - DNA, 19 bp, Homo sapiens
  siRNA target sequence for KIAA1804 (NM_032435.1,1198-1216).
cccgaagtgatcaagtctt

SEQ ID NO: 86584 - DNA, 19 bp, Homo sapiens
  siRNA target sequence for KIAA1804 (NM_032435.1,1287-1305).
cccctatcggggcattgat

SEQ ID NO: 86585 - DNA, 19 bp, Homo sapiens
  siRNA target sequence for KIAA1804 (NM_032435.1,1342-1360).
ctcactttgcccattccat

SEQ ID NO: 86586 - DNA, 19 bp, Homo sapiens
  siRNA target sequence for KIAA1804 (NM_032435.1,1376-1394).
cgtttgccaagctcatgaa

SEQ ID NO: 86587 - DNA, 19 bp, Homo sapiens
  siRNA target sequence for KIAA1804 (NM_032435.1,1404-1422).
gcaacaagaccctcatatt

SEQ ID NO: 86588 - DNA, 19 bp, Homo sapiens
  siRNA target sequence for KIAA1804 (NM_032435.1,1436-1454).
ccttaattctcgaacagtt

SEQ ID NO: 86589 - DNA, 19 bp, Homo sapiens
  siRNA target sequence for KIAA1804 (NM_032435.1,1446-1464).
cgaacagttgactgctatt

SEQ ID NO: 86590 - DNA, 19 bp, Homo sapiens
  siRNA target sequence for KIAA1804 (NM_032435.1,1483-1501).
gagatgcctcaagaatctt

SEQ ID NO: 86591 - DNA, 19 bp, Homo sapiens
  siRNA target sequence for KIAA1804 (NM_032435.1,1512-1530).
gcaagatgactggaaacta

SEQ ID NO: 86592 - DNA, 19 bp, Homo sapiens
  siRNA target sequence for KIAA1804 (NM_032435.1,1684-1702).
ctggagcgggaacttaaca

SEQ ID NO: 86593 - DNA, 19 bp, Homo sapiens
  siRNA target sequence for KIAA1804 (NM_032435.1,1690-1708).
cgggaacttaacattctga

SEQ ID NO: 86594 - DNA, 19 bp, Homo sapiens
  siRNA target sequence for KIAA1804 (NM_032435.1,1691-1709).
gggaacttaacattctgat

SEQ ID NO: 86595 - DNA, 19 bp, Homo sapiens
  siRNA target sequence for KIAA1804 (NM_032435.1,1786-1804).
gatggacatcgaatcagtt

SEQ ID NO: 86596 - DNA, 19 bp, Homo sapiens
  siRNA target sequence for KIAA1804 (NM_032435.1,1792-1810).
catcgaatcagtttacctt

SEQ ID NO: 86597 - DNA, 19 bp, Homo sapiens
  siRNA target sequence for KIAA1804 (NM_032435.1,1894-1912).
ccgagcagccccacaatga

SEQ ID NO: 86598 - DNA, 19 bp, Homo sapiens
  siRNA target sequence for KIAA1804 (NM_032435.1,1895-1913).
cgagcagccccacaatgat

SEQ ID NO: 86599 - DNA, 19 bp, Homo sapiens
  siRNA target sequence for KIAA1804 (NM_032435.1,1918-1936).
cgactccgagccatacagt

SEQ ID NO: 86600 - DNA, 19 bp, Homo sapiens
  siRNA target sequence for KIAA1804 (NM_032435.1,1919-1937).
gactccgagccatacagtt

SEQ ID NO: 86601 - DNA, 19 bp, Homo sapiens
  siRNA target sequence for KIAA1804 (NM_032435.1,1924-1942).
cgagccatacagttgactt

SEQ ID NO: 86602 - DNA, 19 bp, Homo sapiens
  siRNA target sequence for KIAA1804 (NM_032435.1,1976-1994).
cagtctttcgacaagaaga

SEQ ID NO: 86603 - DNA, 19 bp, Homo sapiens
  siRNA target sequence for KIAA1804 (NM_032435.1,1978-1996).
gtctttcgacaagaagaat

SEQ ID NO: 86604 - DNA, 19 bp, Homo sapiens
  siRNA target sequence for KIAA1804 (NM_032435.1,1980-1998).
ctttcgacaagaagaattt

SEQ ID NO: 86605 - DNA, 19 bp, Homo sapiens
  siRNA target sequence for KIAA1804 (NM_032435.1,2042-2060).
gaccaaattccattcaaat

SEQ ID NO: 86606 - DNA, 19 bp, Homo sapiens
  siRNA target sequence for KIAA1804 (NM_032435.1,2045-2063).
caaattccattcaaatgaa

SEQ ID NO: 86607 - DNA, 19 bp, Homo sapiens
  siRNA target sequence for KIAA1804 (NM_032435.1,2253-2271).
gcctagtcaggcctacatt

SEQ ID NO: 86608 - DNA, 19 bp, Homo sapiens
  siRNA target sequence for KIAA1804 (NM_032435.1,2255-2273).
ctagtcaggcctacattga

SEQ ID NO: 86609 - DNA, 19 bp, Homo sapiens
  siRNA target sequence for KIAA1804 (NM_032435.1,2258-2276).
gtcaggcctacattgatct

SEQ ID NO: 86610 - DNA, 19 bp, Homo sapiens
  siRNA target sequence for KIAA1804 (NM_032435.1,2396-2414).
gatccccccagagaaagaa

SEQ ID NO: 86611 - DNA, 19 bp, Homo sapiens
  siRNA target sequence for KIAA1804 (NM_032435.1,2473-2491).
gacctcagagagcttcata

SEQ ID NO: 86612 - DNA, 19 bp, Homo sapiens
  siRNA target sequence for KIAA1804 (NM_032435.1,2757-2775).
gatgctcactccggatttt

SEQ ID NO: 86613 - DNA, 19 bp, Homo sapiens
  siRNA target sequence for KIAA1804 (NM_032435.1,2760-2778).
gctcactccggatttttgt

SEQ ID NO: 86614 - DNA, 19 bp, Homo sapiens
  siRNA target sequence for KIAA1804 (NM_032435.1,2829-2847).
cactgattgtagtgtatca

SEQ ID NO: 86615 - DNA, 19 bp, Homo sapiens
  siRNA target sequence for KIAA1804 (NM_032435.1,2879-2897).
catgtgggaatgtacctta

SEQ ID NO: 86616 - DNA, 19 bp, Homo sapiens
  siRNA target sequence for KIAA1804 (NM_032435.1,2893-2911).
ccttactgtgcttcttcaa

SEQ ID NO: 86617 - DNA, 19 bp, Homo sapiens
  siRNA target sequence for KIAA1804 (NM_032435.1,2936-2954).
ggaccatgtctgatggaaa

SEQ ID NO: 86618 - DNA, 19 bp, Homo sapiens
  siRNA target sequence for KIAA1804 (NM_032435.1,2962-2980).
ccaactggtgcaactatta

SEQ ID NO: 86619 - DNA, 19 bp, Homo sapiens
  siRNA target sequence for KIAA1804 (NM_032435.1,3220-3238).
gctgccaaggagagaacta

SEQ ID NO: 86620 - DNA, 19 bp, Homo sapiens
  siRNA target sequence for KIAA1804 (NM_032435.1,3221-3239).
ctgccaaggagagaactaa

SEQ ID NO: 86621 - DNA, 19 bp, Homo sapiens
  siRNA target sequence for KIAA1804 (NM_032435.1,3242-3260).
cccatgtgccttcattact

SEQ ID NO: 86622 - DNA, 19 bp, Homo sapiens
  siRNA target sequence for KIAA1804 (NM_032435.1,3332-3350).
ggccatctatatatgaact

SEQ ID NO: 86623 - DNA, 19 bp, Homo sapiens
  siRNA target sequence for KIAA1811 (NM_032430.1,351-369).
cccagcacgcccaatatgt

SEQ ID NO: 86624 - DNA, 19 bp, Homo sapiens
  siRNA target sequence for KIAA1811 (NM_032430.1,574-592).
ctacgagaacaagaaatat

SEQ ID NO: 86625 - DNA, 19 bp, Homo sapiens
  siRNA target sequence for KIAA1811 (NM_032430.1,753-771).
ccgagaacctgcttttgga

SEQ ID NO: 86626 - DNA, 19 bp, Homo sapiens
  siRNA target sequence for KIAA1811 (NM_032430.1,754-772).
cgagaacctgcttttggat

SEQ ID NO: 86627 - DNA, 19 bp, Homo sapiens
  siRNA target sequence for KIAA1811 (NM_032430.1,847-865).
ctgcgggtccccccattat

SEQ ID NO: 86628 - DNA, 19 bp, Homo sapiens
  siRNA target sequence for KIAA1811 (NM_032430.1,878-896).
gtgattaagggggaaaaat

SEQ ID NO: 86629 - DNA, 19 bp, Homo sapiens
  siRNA target sequence for KIAA1811 (NM_032430.1,1056-1074).
gcctcctgaggggaatgat

SEQ ID NO: 86630 - DNA, 19 bp, Homo sapiens
  siRNA target sequence for KIAA1811 (NM_032430.1,1075-1093).
cgaagtggagcccgaaaaa

SEQ ID NO: 86631 - DNA, 19 bp, Homo sapiens
  siRNA target sequence for KIAA1811 (NM_032430.1,1096-1114).
gctcagtctggagcaaatt

SEQ ID NO: 86632 - DNA, 19 bp, Homo sapiens
  siRNA target sequence for KIAA1811 (NM_032430.1,1384-1402).
gcctccccggaatgatgtt

SEQ ID NO: 86633 - DNA, 19 bp, Homo sapiens
  siRNA target sequence for KIAA1811 (NM_032430.1,1619-1637).
ccaaggagtccggtctttt

SEQ ID NO: 86634 - DNA, 19 bp, Homo sapiens
  siRNA target sequence for KIAA1811 (NM_032430.1,1681-1699).
gggctccccgacttccaaa

SEQ ID NO: 86635 - DNA, 19 bp, Homo sapiens
  siRNA target sequence for KIF11 (NM_004523.2,144-162).
gcgtcgcagccaaattcgt

SEQ ID NO: 86636 - DNA, 19 bp, Homo sapiens
  siRNA target sequence for KIF11 (NM_004523.2,207-225).
gtgagatgcagaccattta

SEQ ID NO: 86637 - DNA, 19 bp, Homo sapiens
  siRNA target sequence for KIF11 (NM_004523.2,209-227).
gagatgcagaccatttaat

SEQ ID NO: 86638 - DNA, 19 bp, Homo sapiens
  siRNA target sequence for KIF11 (NM_004523.2,211-229).
gatgcagaccatttaattt

SEQ ID NO: 86639 - DNA, 19 bp, Homo sapiens
  siRNA target sequence for KIF11 (NM_004523.2,244-262).
ctagcgcccattcaatagt

SEQ ID NO: 86640 - DNA, 19 bp, Homo sapiens
  siRNA target sequence for KIF11 (NM_004523.2,247-265).
gcgcccattcaatagtaga

SEQ ID NO: 86641 - DNA, 19 bp, Homo sapiens
  siRNA target sequence for KIF11 (NM_004523.2,248-266).
cgcccattcaatagtagaa

SEQ ID NO: 86642 - DNA, 19 bp, Homo sapiens
  siRNA target sequence for KIF11 (NM_004523.2,249-267).
gcccattcaatagtagaat

SEQ ID NO: 86643 - DNA, 19 bp, Homo sapiens
  siRNA target sequence for KIF11 (NM_004523.2,251-269).
ccattcaatagtagaatgt

SEQ ID NO: 86644 - DNA, 19 bp, Homo sapiens
  siRNA target sequence for KIF11 (NM_004523.2,268-286).
gtgatcctgtacgaaaaga

SEQ ID NO: 86645 - DNA, 19 bp, Homo sapiens
  siRNA target sequence for KIF11 (NM_004523.2,273-291).
cctgtacgaaaagaagtta

SEQ ID NO: 86646 - DNA, 19 bp, Homo sapiens
  siRNA target sequence for KIF11 (NM_004523.2,353-371).
gtttggagcatctactaaa

SEQ ID NO: 86647 - DNA, 19 bp, Homo sapiens
  siRNA target sequence for KIF11 (NM_004523.2,358-376).
gagcatctactaaacagat

SEQ ID NO: 86648 - DNA, 19 bp, Homo sapiens
  siRNA target sequence for KIF11 (NM_004523.2,364-382).
ctactaaacagattgatgt

SEQ ID NO: 86649 - DNA, 19 bp, Homo sapiens
  siRNA target sequence for KIF11 (NM_004523.2,400-418).
gtccaattctggatgaagt

SEQ ID NO: 86650 - DNA, 19 bp, Homo sapiens
  siRNA target sequence for KIF11 (NM_004523.2,417-435).
gttattatgggctataatt

SEQ ID NO: 86651 - DNA, 19 bp, Homo sapiens
  siRNA target sequence for KIF11 (NM_004523.2,426-444).
ggctataattgcactatct

SEQ ID NO: 86652 - DNA, 19 bp, Homo sapiens
  siRNA target sequence for KIF11 (NM_004523.2,427-445).
gctataattgcactatctt

SEQ ID NO: 86653 - DNA, 19 bp, Homo sapiens
  siRNA target sequence for KIF11 (NM_004523.2,496-514).
ggtcacctaatgaagagta

SEQ ID NO: 86654 - DNA, 19 bp, Homo sapiens
  siRNA target sequence for KIF11 (NM_004523.2,501-519).
cctaatgaagagtatacct

SEQ ID NO: 86655 - DNA, 19 bp, Homo sapiens
  siRNA target sequence for KIF11 (NM_004523.2,549-567).
ccacgtacccttcatcaaa

SEQ ID NO: 86656 - DNA, 19 bp, Homo sapiens
  siRNA target sequence for KIF11 (NM_004523.2,550-568).
cacgtacccttcatcaaat

SEQ ID NO: 86657 - DNA, 19 bp, Homo sapiens
  siRNA target sequence for KIF11 (NM_004523.2,552-570).
cgtacccttcatcaaattt

SEQ ID NO: 86658 - DNA, 19 bp, Homo sapiens
  siRNA target sequence for KIF11 (NM_004523.2,558-576).
cttcatcaaatttttgaga

SEQ ID NO: 86659 - DNA, 19 bp, Homo sapiens
  siRNA target sequence for KIF11 (NM_004523.2,639-657).
gagctttttgatcttctta

SEQ ID NO: 86660 - DNA, 19 bp, Homo sapiens
  siRNA target sequence for KIF11 (NM_004523.2,661-679).
catcatctgatgtttctga

SEQ ID NO: 86661 - DNA, 19 bp, Homo sapiens
  siRNA target sequence for KIF11 (NM_004523.2,696-714).
gatgatccccgtaacaaga

SEQ ID NO: 86662 - DNA, 19 bp, Homo sapiens
  siRNA target sequence for KIF11 (NM_004523.2,718-736).
gagtgataattaaaggttt

SEQ ID NO: 86663 - DNA, 19 bp, Homo sapiens
  siRNA target sequence for KIF11 (NM_004523.2,814-832).
ctactctgatgaatgcata

SEQ ID NO: 86664 - DNA, 19 bp, Homo sapiens
  siRNA target sequence for KIF11 (NM_004523.2,819-837).
ctgatgaatgcatactcta

SEQ ID NO: 86665 - DNA, 19 bp, Homo sapiens
  siRNA target sequence for KIF11 (NM_004523.2,960-978).
cgttctggagctgttgata

SEQ ID NO: 86666 - DNA, 19 bp, Homo sapiens
  siRNA target sequence for KIF11 (NM_004523.2,985-1003).
ctcgggaagctggaaatat

SEQ ID NO: 86667 - DNA, 19 bp, Homo sapiens
  siRNA target sequence for KIF11 (NM_004523.2,1065-1083).
gttccttatcgagaatcta

SEQ ID NO: 86668 - DNA, 19 bp, Homo sapiens
  siRNA target sequence for KIF11 (NM_004523.2,1069-1087).
cttatcgagaatctaaact

SEQ ID NO: 86669 - DNA, 19 bp, Homo sapiens
  siRNA target sequence for KIF11 (NM_004523.2,1077-1095).
gaatctaaactaactagaa

SEQ ID NO: 86670 - DNA, 19 bp, Homo sapiens
  siRNA target sequence for KIF11 (NM_004523.2,1110-1128).
cttggagggcgtacaagaa

SEQ ID NO: 86671 - DNA, 19 bp, Homo sapiens
  siRNA target sequence for KIF11 (NM_004523.2,1113-1131).
ggagggcgtacaagaacat

SEQ ID NO: 86672 - DNA, 19 bp, Homo sapiens
  siRNA target sequence for KIF11 (NM_004523.2,1117-1135).
ggcgtacaagaacatctat

SEQ ID NO: 86673 - DNA, 19 bp, Homo sapiens
  siRNA target sequence for KIF11 (NM_004523.2,1118-1136).
gcgtacaagaacatctata

SEQ ID NO: 86674 - DNA, 19 bp, Homo sapiens
  siRNA target sequence for KIF11 (NM_004523.2,1119-1137).
cgtacaagaacatctataa

SEQ ID NO: 86675 - DNA, 19 bp, Homo sapiens
  siRNA target sequence for KIF11 (NM_004523.2,1177-1195).
ctctgagtacattggaata

SEQ ID NO: 86676 - DNA, 19 bp, Homo sapiens
  siRNA target sequence for KIF11 (NM_004523.2,1181-1199).
gagtacattggaatatgct

SEQ ID NO: 86677 - DNA, 19 bp, Homo sapiens
  siRNA target sequence for KIF11 (NM_004523.2,1271-1289).
gtatacggaggagatagaa

SEQ ID NO: 86678 - DNA, 19 bp, Homo sapiens
  siRNA target sequence for KIF11 (NM_004523.2,1276-1294).
cggaggagatagaacgttt

SEQ ID NO: 86679 - DNA, 19 bp, Homo sapiens
  siRNA target sequence for KIF11 (NM_004523.2,1283-1301).
gatagaacgtttaaaacga

SEQ ID NO: 86680 - DNA, 19 bp, Homo sapiens
  siRNA target sequence for KIF11 (NM_004523.2,1398-1416).
gtagaattgattgaaaaaa

SEQ ID NO: 86681 - DNA, 19 bp, Homo sapiens
  siRNA target sequence for KIF11 (NM_004523.2,1476-1494).
gaacttgaccagtgtaaat

SEQ ID NO: 86682 - DNA, 19 bp, Homo sapiens
  siRNA target sequence for KIF11 (NM_004523.2,1528-1546).
ccactcaaaaacatttgca

SEQ ID NO: 86683 - DNA, 19 bp, Homo sapiens
  siRNA target sequence for KIF11 (NM_004523.2,1552-1570).
ctaaattacaacttgttaa

SEQ ID NO: 86684 - DNA, 19 bp, Homo sapiens
  siRNA target sequence for KIF11 (NM_004523.2,1634-1652).
gctgcttaacacagttgaa

SEQ ID NO: 86685 - DNA, 19 bp, Homo sapiens
  siRNA target sequence for KIF11 (NM_004523.2,1703-1721).
ggcagttgaccaacacaat

SEQ ID NO: 86686 - DNA, 19 bp, Homo sapiens
  siRNA target sequence for KIF11 (NM_004523.2,1722-1740).
gcagaagctcaggatattt

SEQ ID NO: 86687 - DNA, 19 bp, Homo sapiens
  siRNA target sequence for KIF11 (NM_004523.2,1744-1762).
gcaaaaacctgaatagtct

SEQ ID NO: 86688 - DNA, 19 bp, Homo sapiens
  siRNA target sequence for KIF11 (NM_004523.2,1751-1769).
cctgaatagtctgtttaat

SEQ ID NO: 86689 - DNA, 19 bp, Homo sapiens
  siRNA target sequence for KIF11 (NM_004523.2,1752-1770).
ctgaatagtctgtttaata

SEQ ID NO: 86690 - DNA, 19 bp, Homo sapiens
  siRNA target sequence for KIF11 (NM_004523.2,1754-1772).
gaatagtctgtttaataat

SEQ ID NO: 86691 - DNA, 19 bp, Homo sapiens
  siRNA target sequence for KIF11 (NM_004523.2,1759-1777).
gtctgtttaataatatgga

SEQ ID NO: 86692 - DNA, 19 bp, Homo sapiens
  siRNA target sequence for KIF11 (NM_004523.2,1790-1808).
ggatggcagctcaaagcaa

SEQ ID NO: 86693 - DNA, 19 bp, Homo sapiens
  siRNA target sequence for KIF11 (NM_004523.2,1821-1839).
gaagtacataagaccttat

SEQ ID NO: 86694 - DNA, 19 bp, Homo sapiens
  siRNA target sequence for KIF11 (NM_004523.2,1827-1845).
cataagaccttatttggta

SEQ ID NO: 86695 - DNA, 19 bp, Homo sapiens
  siRNA target sequence for KIF11 (NM_004523.2,1865-1883).
ctctgcattagataccatt

SEQ ID NO: 86696 - DNA, 19 bp, Homo sapiens
  siRNA target sequence for KIF11 (NM_004523.2,1946-1964).
gatttttaatatgatacta

SEQ ID NO: 86697 - DNA, 19 bp, Homo sapiens
  siRNA target sequence for KIF11 (NM_004523.2,1975-1993).
cattagcagcagaaagtaa

SEQ ID NO: 86698 - DNA, 19 bp, Homo sapiens
  siRNA target sequence for KIF11 (NM_004523.2,1996-2014).
ctgtactacaggaattgat

SEQ ID NO: 86699 - DNA, 19 bp, Homo sapiens
  siRNA target sequence for KIF11 (NM_004523.2,1998-2016).
gtactacaggaattgatta

SEQ ID NO: 86700 - DNA, 19 bp, Homo sapiens
  siRNA target sequence for KIF11 (NM_004523.2,2024-2042).
caagactgatcttctaagt

SEQ ID NO: 86701 - DNA, 19 bp, Homo sapiens
  siRNA target sequence for KIF11 (NM_004523.2,2027-2045).
gactgatcttctaagttca

SEQ ID NO: 86702 - DNA, 19 bp, Homo sapiens
  siRNA target sequence for KIF11 (NM_004523.2,2068-2086).
ctgtggtgtctatactgaa

SEQ ID NO: 86703 - DNA, 19 bp, Homo sapiens
  siRNA target sequence for KIF11 (NM_004523.2,2073-2091).
gtgtctatactgaaaatca

SEQ ID NO: 86704 - DNA, 19 bp, Homo sapiens
  siRNA target sequence for KIF11 (NM_004523.2,2075-2093).
gtctatactgaaaatcaat

SEQ ID NO: 86705 - DNA, 19 bp, Homo sapiens
  siRNA target sequence for KIF11 (NM_004523.2,2090-2108).
caatagtcaactaaagcat

SEQ ID NO: 86706 - DNA, 19 bp, Homo sapiens
  siRNA target sequence for KIF11 (NM_004523.2,2095-2113).
gtcaactaaagcatatttt

SEQ ID NO: 86707 - DNA, 19 bp, Homo sapiens
  siRNA target sequence for KIF11 (NM_004523.2,2126-2144).
gacagtggccgataagata

SEQ ID NO: 86708 - DNA, 19 bp, Homo sapiens
  siRNA target sequence for KIF11 (NM_004523.2,2128-2146).
cagtggccgataagataga

SEQ ID NO: 86709 - DNA, 19 bp, Homo sapiens
  siRNA target sequence for KIF11 (NM_004523.2,2134-2152).
ccgataagatagaagatca

SEQ ID NO: 86710 - DNA, 19 bp, Homo sapiens
  siRNA target sequence for KIF11 (NM_004523.2,2135-2153).
cgataagatagaagatcaa

SEQ ID NO: 86711 - DNA, 19 bp, Homo sapiens
  siRNA target sequence for KIF11 (NM_004523.2,2160-2178).
gaactagatggctttctca

SEQ ID NO: 86712 - DNA, 19 bp, Homo sapiens
  siRNA target sequence for KIF11 (NM_004523.2,2179-2197).
gtatactgtgtaacaatct

SEQ ID NO: 86713 - DNA, 19 bp, Homo sapiens
  siRNA target sequence for KIF11 (NM_004523.2,2192-2210).
caatctacatgaactacaa

SEQ ID NO: 86714 - DNA, 19 bp, Homo sapiens
  siRNA target sequence for KIF11 (NM_004523.2,2227-2245).
ccttggttgagtcacaaaa

SEQ ID NO: 86715 - DNA, 19 bp, Homo sapiens
  siRNA target sequence for KIF11 (NM_004523.2,2297-2315).
ccaggaactttgcaagtta

SEQ ID NO: 86716 - DNA, 19 bp, Homo sapiens
  siRNA target sequence for KIF11 (NM_004523.2,2301-2319).
gaactttgcaagttaatga

SEQ ID NO: 86717 - DNA, 19 bp, Homo sapiens
  siRNA target sequence for KIF11 (NM_004523.2,2383-2401).
gtagtgtccaggaaaatat

SEQ ID NO: 86718 - DNA, 19 bp, Homo sapiens
  siRNA target sequence for KIF11 (NM_004523.2,2413-2431).
ctaaggatatagtcaacaa

SEQ ID NO: 86719 - DNA, 19 bp, Homo sapiens
  siRNA target sequence for KIF11 (NM_004523.2,2556-2574).
ggcaacctggaaaaaatat

SEQ ID NO: 86720 - DNA, 19 bp, Homo sapiens
  siRNA target sequence for KIF11 (NM_004523.2,2638-2656).
gggtatcttccttaaatga

SEQ ID NO: 86721 - DNA, 19 bp, Homo sapiens
  siRNA target sequence for KIF11 (NM_004523.2,2659-2677).
gggaacaggaacttcacaa

SEQ ID NO: 86722 - DNA, 19 bp, Homo sapiens
  siRNA target sequence for KIF11 (NM_004523.2,2685-2703).
gaggttgtaagccaatgtt

SEQ ID NO: 86723 - DNA, 19 bp, Homo sapiens
  siRNA target sequence for KIF11 (NM_004523.2,2817-2835).
gcacaaaatctagaactta

SEQ ID NO: 86724 - DNA, 19 bp, Homo sapiens
  siRNA target sequence for KIF11 (NM_004523.2,2818-2836).
cacaaaatctagaacttaa

SEQ ID NO: 86725 - DNA, 19 bp, Homo sapiens
  siRNA target sequence for KIF11 (NM_004523.2,2853-2871).
ggtttgactaagcttaatt

SEQ ID NO: 86726 - DNA, 19 bp, Homo sapiens
  siRNA target sequence for KIF11 (NM_004523.2,2971-2989).
gtgaacatctccttgatca

SEQ ID NO: 86727 - DNA, 19 bp, Homo sapiens
  siRNA target sequence for KIF11 (NM_004523.2,3003-3021).
cagcctgagctgttaatga

SEQ ID NO: 86728 - DNA, 19 bp, Homo sapiens
  siRNA target sequence for KIF11 (NM_004523.2,3009-3027).
gagctgttaatgatgctaa

SEQ ID NO: 86729 - DNA, 19 bp, Homo sapiens
  siRNA target sequence for KIF11 (NM_004523.2,3100-3118).
ctgaagaacctctaagtca

SEQ ID NO: 86730 - DNA, 19 bp, Homo sapiens
  siRNA target sequence for KIF11 (NM_004523.2,3286-3304).
ctctgcgagcccagatcaa

SEQ ID NO: 86731 - DNA, 19 bp, Homo sapiens
  siRNA target sequence for KIF11 (NM_004523.2,3291-3309).
cgagcccagatcaaccttt

SEQ ID NO: 86732 - DNA, 19 bp, Homo sapiens
  siRNA target sequence for KIF12 (NM_138424.1,295-313).
cacccttcgcgcctcttat

SEQ ID NO: 86733 - DNA, 19 bp, Homo sapiens
  siRNA target sequence for KIF12 (NM_138424.1,297-315).
cccttcgcgcctcttatct

SEQ ID NO: 86734 - DNA, 19 bp, Homo sapiens
  siRNA target sequence for KIF12 (NM_138424.1,374-392).
cctgttcgctggaacaaga

SEQ ID NO: 86735 - DNA, 19 bp, Homo sapiens
  siRNA target sequence for KIF12 (NM_138424.1,388-406).
caagactcggggcttctat

SEQ ID NO: 86736 - DNA, 19 bp, Homo sapiens
  siRNA target sequence for KIF12 (NM_138424.1,883-901).
cagcaccctgcgatatgca

SEQ ID NO: 86737 - DNA, 19 bp, Homo sapiens
  siRNA target sequence for KIF12 (NM_138424.1,1548-1566).
gagtcctggcagagatgtt

SEQ ID NO: 86738 - DNA, 19 bp, Homo sapiens
  siRNA target sequence for KIF12 (NM_138424.1,1550-1568).
gtcctggcagagatgttga

SEQ ID NO: 86739 - DNA, 19 bp, Homo sapiens
  siRNA target sequence for KIF13A (NM_022113.3,22-40).
gtcggataccaaggtaaaa

SEQ ID NO: 86740 - DNA, 19 bp, Homo sapiens
  siRNA target sequence for KIF13A (NM_022113.3,24-42).
cggataccaaggtaaaagt

SEQ ID NO: 86741 - DNA, 19 bp, Homo sapiens
  siRNA target sequence for KIF13A (NM_022113.3,212-230).
gatgaatctaacactacaa

SEQ ID NO: 86742 - DNA, 19 bp, Homo sapiens
  siRNA target sequence for KIF13A (NM_022113.3,295-313).
ggggtataatgcgtgtatt

SEQ ID NO: 86743 - DNA, 19 bp, Homo sapiens
  siRNA target sequence for KIF13A (NM_022113.3,296-314).
gggtataatgcgtgtattt

SEQ ID NO: 86744 - DNA, 19 bp, Homo sapiens
  siRNA target sequence for KIF13A (NM_022113.3,297-315).
ggtataatgcgtgtatttt

SEQ ID NO: 86745 - DNA, 19 bp, Homo sapiens
  siRNA target sequence for KIF13A (NM_022113.3,298-316).
gtataatgcgtgtattttt

SEQ ID NO: 86746 - DNA, 19 bp, Homo sapiens
  siRNA target sequence for KIF13A (NM_022113.3,326-344).
cagacaggttcgggaaaat

SEQ ID NO: 86747 - DNA, 19 bp, Homo sapiens
  siRNA target sequence for KIF13A (NM_022113.3,370-388).
gcagctgggccttattcca

SEQ ID NO: 86748 - DNA, 19 bp, Homo sapiens
  siRNA target sequence for KIF13A (NM_022113.3,482-500).
gagaaagttcgggatcttt

SEQ ID NO: 86749 - DNA, 19 bp, Homo sapiens
  siRNA target sequence for KIF13A (NM_022113.3,484-502).
gaaagttcgggatctttta

SEQ ID NO: 86750 - DNA, 19 bp, Homo sapiens
  siRNA target sequence for KIF13A (NM_022113.3,513-531).
ggagtagacagtctcttaa

SEQ ID NO: 86751 - DNA, 19 bp, Homo sapiens
  siRNA target sequence for KIF13A (NM_022113.3,514-532).
gagtagacagtctcttaaa

SEQ ID NO: 86752 - DNA, 19 bp, Homo sapiens
  siRNA target sequence for KIF13A (NM_022113.3,516-534).
gtagacagtctcttaaagt

SEQ ID NO: 86753 - DNA, 19 bp, Homo sapiens
  siRNA target sequence for KIF13A (NM_022113.3,527-545).
cttaaagttcgagaacata

SEQ ID NO: 86754 - DNA, 19 bp, Homo sapiens
  siRNA target sequence for KIF13A (NM_022113.3,533-551).
gttcgagaacataaagttt

SEQ ID NO: 86755 - DNA, 19 bp, Homo sapiens
  siRNA target sequence for KIF13A (NM_022113.3,578-596).
caactagctgtcactagtt

SEQ ID NO: 86756 - DNA, 19 bp, Homo sapiens
  siRNA target sequence for KIF13A (NM_022113.3,589-607).
cactagttttgaggatatt

SEQ ID NO: 86757 - DNA, 19 bp, Homo sapiens
  siRNA target sequence for KIF13A (NM_022113.3,778-796).
ggcgggtagcgaaagagta

SEQ ID NO: 86758 - DNA, 19 bp, Homo sapiens
  siRNA target sequence for KIF13A (NM_022113.3,781-799).
gggtagcgaaagagtatct

SEQ ID NO: 86759 - DNA, 19 bp, Homo sapiens
  siRNA target sequence for KIF13A (NM_022113.3,782-800).
ggtagcgaaagagtatcta

SEQ ID NO: 86760 - DNA, 19 bp, Homo sapiens
  siRNA target sequence for KIF13A (NM_022113.3,783-801).
gtagcgaaagagtatctaa

SEQ ID NO: 86761 - DNA, 19 bp, Homo sapiens
  siRNA target sequence for KIF13A (NM_022113.3,787-805).
cgaaagagtatctaaaaca

SEQ ID NO: 86762 - DNA, 19 bp, Homo sapiens
  siRNA target sequence for KIF13A (NM_022113.3,813-831).
caggagagcgactgaaaga

SEQ ID NO: 86763 - DNA, 19 bp, Homo sapiens
  siRNA target sequence for KIF13A (NM_022113.3,858-876).
caaccttggggttggttat

SEQ ID NO: 86764 - DNA, 19 bp, Homo sapiens
  siRNA target sequence for KIF13A (NM_022113.3,900-918).
ctggcaagggtaaaagcaa

SEQ ID NO: 86765 - DNA, 19 bp, Homo sapiens
  siRNA target sequence for KIF13A (NM_022113.3,979-997).
cagccaaacctctatgata

SEQ ID NO: 86766 - DNA, 19 bp, Homo sapiens
  siRNA target sequence for KIF13A (NM_022113.3,1008-1026).
gcccagccgcagacaacta

SEQ ID NO: 86767 - DNA, 19 bp, Homo sapiens
  siRNA target sequence for KIF13A (NM_022113.3,1009-1027).
cccagccgcagacaactat

SEQ ID NO: 86768 - DNA, 19 bp, Homo sapiens
  siRNA target sequence for KIF13A (NM_022113.3,1031-1049).
gagaccctctccacattaa

SEQ ID NO: 86769 - DNA, 19 bp, Homo sapiens
  siRNA target sequence for KIF13A (NM_022113.3,1033-1051).
gaccctctccacattaaga

SEQ ID NO: 86770 - DNA, 19 bp, Homo sapiens
  siRNA target sequence for KIF13A (NM_022113.3,1039-1057).
ctccacattaagatatgca

SEQ ID NO: 86771 - DNA, 19 bp, Homo sapiens
  siRNA target sequence for KIF13A (NM_022113.3,1055-1073).
gcagaccgagccaaaagga

SEQ ID NO: 86772 - DNA, 19 bp, Homo sapiens
  siRNA target sequence for KIF13A (NM_022113.3,1056-1074).
cagaccgagccaaaaggat

SEQ ID NO: 86773 - DNA, 19 bp, Homo sapiens
  siRNA target sequence for KIF13A (NM_022113.3,1078-1096).
gaaccatgctgttgtgaat

SEQ ID NO: 86774 - DNA, 19 bp, Homo sapiens
  siRNA target sequence for KIF13A (NM_022113.3,1211-1229).
gagtctgaaaagctgataa

SEQ ID NO: 86775 - DNA, 19 bp, Homo sapiens
  siRNA target sequence for KIF13A (NM_022113.3,1339-1357).
caaggtgggggatgacaaa

SEQ ID NO: 86776 - DNA, 19 bp, Homo sapiens
  siRNA target sequence for KIF13A (NM_022113.3,1360-1378).
ctacttagtcaatctgaat

SEQ ID NO: 86777 - DNA, 19 bp, Homo sapiens
  siRNA target sequence for KIF13A (NM_022113.3,1386-1404).
ctgctcttaacgaacttct

SEQ ID NO: 86778 - DNA, 19 bp, Homo sapiens
  siRNA target sequence for KIF13A (NM_022113.3,1396-1414).
cgaacttctggtttattat

SEQ ID NO: 86779 - DNA, 19 bp, Homo sapiens
  siRNA target sequence for KIF13A (NM_022113.3,1397-1415).
gaacttctggtttattatt

SEQ ID NO: 86780 - DNA, 19 bp, Homo sapiens
  siRNA target sequence for KIF13A (NM_022113.3,1597-1615).
gcatggtgaccgaatccta

SEQ ID NO: 86781 - DNA, 19 bp, Homo sapiens
  siRNA target sequence for KIF13A (NM_022113.3,1613-1631).
ctatggggaaataatcact

SEQ ID NO: 86782 - DNA, 19 bp, Homo sapiens
  siRNA target sequence for KIF13A (NM_022113.3,1656-1674).
ggaaacgtcgagattggtt

SEQ ID NO: 86783 - DNA, 19 bp, Homo sapiens
  siRNA target sequence for KIF13A (NM_022113.3,1662-1680).
gtcgagattggttgaaaga

SEQ ID NO: 86784 - DNA, 19 bp, Homo sapiens
  siRNA target sequence for KIF13A (NM_022113.3,1664-1682).
cgagattggttgaaagact

SEQ ID NO: 86785 - DNA, 19 bp, Homo sapiens
  siRNA target sequence for KIF13A (NM_022113.3,1745-1763).
ccagactataactatgaat

SEQ ID NO: 86786 - DNA, 19 bp, Homo sapiens
  siRNA target sequence for KIF13A (NM_022113.3,1746-1764).
cagactataactatgaatt

SEQ ID NO: 86787 - DNA, 19 bp, Homo sapiens
  siRNA target sequence for KIF13A (NM_022113.3,1786-1804).
gaaaaccctgaatagtaat

SEQ ID NO: 86788 - DNA, 19 bp, Homo sapiens
  siRNA target sequence for KIF13A (NM_022113.3,1800-1818).
gtaatgacccagttcaaaa

SEQ ID NO: 86789 - DNA, 19 bp, Homo sapiens
  siRNA target sequence for KIF13A (NM_022113.3,2060-2078).
cagctggttaaagctaata

SEQ ID NO: 86790 - DNA, 19 bp, Homo sapiens
  siRNA target sequence for KIF13A (NM_022113.3,2063-2081).
ctggttaaagctaatacct

SEQ ID NO: 86791 - DNA, 19 bp, Homo sapiens
  siRNA target sequence for KIF13A (NM_022113.3,2079-2097).
ccttggtgagggaagcaaa

SEQ ID NO: 86792 - DNA, 19 bp, Homo sapiens
  siRNA target sequence for KIF13A (NM_022113.3,2118-2136).
gcaaactcaccgattacca

SEQ ID NO: 86793 - DNA, 19 bp, Homo sapiens
  siRNA target sequence for KIF13A (NM_022113.3,2197-2215).
gagtgaaccagctatccaa

SEQ ID NO: 86794 - DNA, 19 bp, Homo sapiens
  siRNA target sequence for KIF13A (NM_022113.3,2240-2258).
caagtgtggaccattgaga

SEQ ID NO: 86795 - DNA, 19 bp, Homo sapiens
  siRNA target sequence for KIF13A (NM_022113.3,2329-2347).
gagactctacggaaaacga

SEQ ID NO: 86796 - DNA, 19 bp, Homo sapiens
  siRNA target sequence for KIF13A (NM_022113.3,2386-2404).
catcggggtggcgaatgta

SEQ ID NO: 86797 - DNA, 19 bp, Homo sapiens
  siRNA target sequence for KIF13A (NM_022113.3,2390-2408).
ggggtggcgaatgtattct

SEQ ID NO: 86798 - DNA, 19 bp, Homo sapiens
  siRNA target sequence for KIF13A (NM_022113.3,2391-2409).
gggtggcgaatgtattctt

SEQ ID NO: 86799 - DNA, 19 bp, Homo sapiens
  siRNA target sequence for KIF13A (NM_022113.3,2396-2414).
gcgaatgtattcttggaat

SEQ ID NO: 86800 - DNA, 19 bp, Homo sapiens
  siRNA target sequence for KIF13A (NM_022113.3,2424-2442).
gtgatgtgaaacttcagta

SEQ ID NO: 86801 - DNA, 19 bp, Homo sapiens
  siRNA target sequence for KIF13A (NM_022113.3,2494-2512).
ggaagtgatgcgtgttaca

SEQ ID NO: 86802 - DNA, 19 bp, Homo sapiens
  siRNA target sequence for KIF13A (NM_022113.3,2540-2558).
gatgactcttcggagaatt

SEQ ID NO: 86803 - DNA, 19 bp, Homo sapiens
  siRNA target sequence for KIF13A (NM_022113.3,2543-2561).
gactcttcggagaattcca

SEQ ID NO: 86804 - DNA, 19 bp, Homo sapiens
  siRNA target sequence for KIF13A (NM_022113.3,2551-2569).
ggagaattccagtgaaagt

SEQ ID NO: 86805 - DNA, 19 bp, Homo sapiens
  siRNA target sequence for KIF13A (NM_022113.3,2588-2606).
gacagcagcggggaaatca

SEQ ID NO: 86806 - DNA, 19 bp, Homo sapiens
  siRNA target sequence for KIF13A (NM_022113.3,2624-2642).
ctgacatgtcgggtaaaaa

SEQ ID NO: 86807 - DNA, 19 bp, Homo sapiens
  siRNA target sequence for KIF13A (NM_022113.3,2626-2644).
gacatgtcgggtaaaaatt

SEQ ID NO: 86808 - DNA, 19 bp, Homo sapiens
  siRNA target sequence for KIF13A (NM_022113.3,2631-2649).
gtcgggtaaaaattaaaga

SEQ ID NO: 86809 - DNA, 19 bp, Homo sapiens
  siRNA target sequence for KIF13A (NM_022113.3,2652-2670).
caacggggctgcccttaaa

SEQ ID NO: 86810 - DNA, 19 bp, Homo sapiens
  siRNA target sequence for KIF13A (NM_022113.3,2655-2673).
cggggctgcccttaaacct

SEQ ID NO: 86811 - DNA, 19 bp, Homo sapiens
  siRNA target sequence for KIF13A (NM_022113.3,2799-2817).
cccactgtaaggactatgt

SEQ ID NO: 86812 - DNA, 19 bp, Homo sapiens
  siRNA target sequence for KIF13A (NM_022113.3,2819-2837).
gtgaatgtaacagaagaat

SEQ ID NO: 86813 - DNA, 19 bp, Homo sapiens
  siRNA target sequence for KIF13A (NM_022113.3,2884-2902).
ccaccggtgtgctggaaat

SEQ ID NO: 86814 - DNA, 19 bp, Homo sapiens
  siRNA target sequence for KIF13A (NM_022113.3,2917-2935).
ggaggtcgattctcttcat

SEQ ID NO: 86815 - DNA, 19 bp, Homo sapiens
  siRNA target sequence for KIF13A (NM_022113.3,2972-2990).
gtaacgcgaagaatagaaa

SEQ ID NO: 86816 - DNA, 19 bp, Homo sapiens
  siRNA target sequence for KIF13A (NM_022113.3,2998-3016).
ctccatattagaattgaat

SEQ ID NO: 86817 - DNA, 19 bp, Homo sapiens
  siRNA target sequence for KIF13A (NM_022113.3,3067-3085).
cacaggaggcatctttcaa

SEQ ID NO: 86818 - DNA, 19 bp, Homo sapiens
  siRNA target sequence for KIF13A (NM_022113.3,3094-3112).
gggtcattcccgtagagta

SEQ ID NO: 86819 - DNA, 19 bp, Homo sapiens
  siRNA target sequence for KIF13A (NM_022113.3,3145-3163).
gacactgccacttatggtt

SEQ ID NO: 86820 - DNA, 19 bp, Homo sapiens
  siRNA target sequence for KIF13A (NM_022113.3,3164-3182).
gaagccatcctgtcagtat

SEQ ID NO: 86821 - DNA, 19 bp, Homo sapiens
  siRNA target sequence for KIF13A (NM_022113.3,3179-3197).
gtatccatcggctgtgtaa

SEQ ID NO: 86822 - DNA, 19 bp, Homo sapiens
  siRNA target sequence for KIF13A (NM_022113.3,3312-3330).
ggtcagatgcactcattaa

SEQ ID NO: 86823 - DNA, 19 bp, Homo sapiens
  siRNA target sequence for KIF13A (NM_022113.3,3667-3685).
cataaagcacagtgatgat

SEQ ID NO: 86824 - DNA, 19 bp, Homo sapiens
  siRNA target sequence for KIF13A (NM_022113.3,3710-3728).
gattcctcggtgcatgatt

SEQ ID NO: 86825 - DNA, 19 bp, Homo sapiens
  siRNA target sequence for KIF13A (NM_022113.3,3714-3732).
cctcggtgcatgattctgt

SEQ ID NO: 86826 - DNA, 19 bp, Homo sapiens
  siRNA target sequence for KIF13A (NM_022113.3,3715-3733).
ctcggtgcatgattctgtt

SEQ ID NO: 86827 - DNA, 19 bp, Homo sapiens
  siRNA target sequence for KIF13A (NM_022113.3,3744-3762).
gggtcacaccacagaatga

SEQ ID NO: 86828 - DNA, 19 bp, Homo sapiens
  siRNA target sequence for KIF13A (NM_022113.3,3807-3825).
ctgctgctatggagttagt

SEQ ID NO: 86829 - DNA, 19 bp, Homo sapiens
  siRNA target sequence for KIF13A (NM_022113.3,3810-3828).
ctgctatggagttagtatt

SEQ ID NO: 86830 - DNA, 19 bp, Homo sapiens
  siRNA target sequence for KIF13A (NM_022113.3,3820-3838).
gttagtattacgaaaacga

SEQ ID NO: 86831 - DNA, 19 bp, Homo sapiens
  siRNA target sequence for KIF13A (NM_022113.3,3843-3861).
cagccaatatttacaacaa

SEQ ID NO: 86832 - DNA, 19 bp, Homo sapiens
  siRNA target sequence for KIF13A (NM_022113.3,3867-3885).
gtttcacgcagagtttgaa

SEQ ID NO: 86833 - DNA, 19 bp, Homo sapiens
  siRNA target sequence for KIF13A (NM_022113.3,3919-3937).
ctgtggtgtaacctatgaa

SEQ ID NO: 86834 - DNA, 19 bp, Homo sapiens
  siRNA target sequence for KIF13A (NM_022113.3,3921-3939).
gtggtgtaacctatgaaat

SEQ ID NO: 86835 - DNA, 19 bp, Homo sapiens
  siRNA target sequence for KIF13A (NM_022113.3,3924-3942).
gtgtaacctatgaaatagt

SEQ ID NO: 86836 - DNA, 19 bp, Homo sapiens
  siRNA target sequence for KIF13A (NM_022113.3,4034-4052).
ggggagacgtacattgaga

SEQ ID NO: 86837 - DNA, 19 bp, Homo sapiens
  siRNA target sequence for KIF13A (NM_022113.3,4108-4126).
gcaggccgtcacagtcaaa

SEQ ID NO: 86838 - DNA, 19 bp, Homo sapiens
  siRNA target sequence for KIF13A (NM_022113.3,4111-4129).
ggccgtcacagtcaaagaa

SEQ ID NO: 86839 - DNA, 19 bp, Homo sapiens
  siRNA target sequence for KIF13A (NM_022113.3,4164-4182).
gcctcagtacaccaaatgt

SEQ ID NO: 86840 - DNA, 19 bp, Homo sapiens
  siRNA target sequence for KIF13A (NM_022113.3,4165-4183).
cctcagtacaccaaatgtt

SEQ ID NO: 86841 - DNA, 19 bp, Homo sapiens
  siRNA target sequence for KIF13A (NM_022113.3,4173-4191).
caccaaatgttcataatgt

SEQ ID NO: 86842 - DNA, 19 bp, Homo sapiens
  siRNA target sequence for KIF13A (NM_022113.3,4259-4277).
gacatgtctgactatagct

SEQ ID NO: 86843 - DNA, 19 bp, Homo sapiens
  siRNA target sequence for KIF13A (NM_022113.3,4285-4303).
ccaagatgtagcatgttat

SEQ ID NO: 86844 - DNA, 19 bp, Homo sapiens
  siRNA target sequence for KIF13A (NM_022113.3,4318-4336).
ggattctcctcgaaggaat

SEQ ID NO: 86845 - DNA, 19 bp, Homo sapiens
  siRNA target sequence for KIF13A (NM_022113.3,4319-4337).
gattctcctcgaaggaata

SEQ ID NO: 86846 - DNA, 19 bp, Homo sapiens
  siRNA target sequence for KIF13A (NM_022113.3,4376-4394).
gtcagcccttttaaagcat

SEQ ID NO: 86847 - DNA, 19 bp, Homo sapiens
  siRNA target sequence for KIF13A (NM_022113.3,4423-4441).
gcccctaatgcctgtaaaa

SEQ ID NO: 86848 - DNA, 19 bp, Homo sapiens
  siRNA target sequence for KIF13A (NM_022113.3,4444-4462).
ggagcataagaaaaggata

SEQ ID NO: 86849 - DNA, 19 bp, Homo sapiens
  siRNA target sequence for KIF13A (NM_022113.3,4469-4487).
gaagcaaggcctcttctaa

SEQ ID NO: 86850 - DNA, 19 bp, Homo sapiens
  siRNA target sequence for KIF13A (NM_022113.3,4503-4521).
ctccacctcaggcacataa

SEQ ID NO: 86851 - DNA, 19 bp, Homo sapiens
  siRNA target sequence for KIF13A (NM_022113.3,4555-4573).
cagcagcatgccagtagaa

SEQ ID NO: 86852 - DNA, 19 bp, Homo sapiens
  siRNA target sequence for KIF13A (NM_022113.3,4557-4575).
gcagcatgccagtagaaca

SEQ ID NO: 86853 - DNA, 19 bp, Homo sapiens
  siRNA target sequence for KIF13A (NM_022113.3,4560-4578).
gcatgccagtagaacacaa

SEQ ID NO: 86854 - DNA, 19 bp, Homo sapiens
  siRNA target sequence for KIF13A (NM_022113.3,4561-4579).
catgccagtagaacacaat

SEQ ID NO: 86855 - DNA, 19 bp, Homo sapiens
  siRNA target sequence for KIF13A (NM_022113.3,4720-4738).
ggaatggttttcctctaaa

SEQ ID NO: 86856 - DNA, 19 bp, Homo sapiens
  siRNA target sequence for KIF13A (NM_022113.3,4725-4743).
ggttttcctctaaagtaga

SEQ ID NO: 86857 - DNA, 19 bp, Homo sapiens
  siRNA target sequence for KIF13A (NM_022113.3,4734-4752).
ctaaagtagatctgtcaaa

SEQ ID NO: 86858 - DNA, 19 bp, Homo sapiens
  siRNA target sequence for KIF13A (NM_022113.3,4755-4773).
cacgggtcttggagaaaga

SEQ ID NO: 86859 - DNA, 19 bp, Homo sapiens
  siRNA target sequence for KIF13A (NM_022113.3,4852-4870).
catggtggtcccttctagt

SEQ ID NO: 86860 - DNA, 19 bp, Homo sapiens
  siRNA target sequence for KIF13A (NM_022113.3,4931-4949).
ccatcgcttgtgcatgatt

SEQ ID NO: 86861 - DNA, 19 bp, Homo sapiens
  siRNA target sequence for KIF13A (NM_022113.3,4932-4950).
catcgcttgtgcatgattt

SEQ ID NO: 86862 - DNA, 19 bp, Homo sapiens
  siRNA target sequence for KIF13A (NM_022113.3,4951-4969).
caggccgtcctcaaacaaa

SEQ ID NO: 86863 - DNA, 19 bp, Homo sapiens
  siRNA target sequence for KIF13A (NM_022113.3,4953-4971).
ggccgtcctcaaacaaaga

SEQ ID NO: 86864 - DNA, 19 bp, Homo sapiens
  siRNA target sequence for KIF13A (NM_022113.3,4955-4973).
ccgtcctcaaacaaagagt

SEQ ID NO: 86865 - DNA, 19 bp, Homo sapiens
  siRNA target sequence for KIF13A (NM_022113.3,4956-4974).
cgtcctcaaacaaagagtt

SEQ ID NO: 86866 - DNA, 19 bp, Homo sapiens
  siRNA target sequence for KIF13A (NM_022113.3,4972-4990).
gttgacagaagtcgaaaaa

SEQ ID NO: 86867 - DNA, 19 bp, Homo sapiens
  siRNA target sequence for KIF13A (NM_022113.3,4982-5000).
gtcgaaaaaggcttggtaa

SEQ ID NO: 86868 - DNA, 19 bp, Homo sapiens
  siRNA target sequence for KIF13A (NM_022113.3,5109-5127).
gctcatgttcagaactaga

SEQ ID NO: 86869 - DNA, 19 bp, Homo sapiens
  siRNA target sequence for KIF13A (NM_022113.3,5110-5128).
ctcatgttcagaactagat

SEQ ID NO: 86870 - DNA, 19 bp, Homo sapiens
  siRNA target sequence for KIF13A (NM_022113.3,5129-5147).
gcctgccccagcaaaatta

SEQ ID NO: 86871 - DNA, 19 bp, Homo sapiens
  siRNA target sequence for KIF13A (NM_022113.3,5213-5231).
gaccattctttcacagaat

SEQ ID NO: 86872 - DNA, 19 bp, Homo sapiens
  siRNA target sequence for KIF13A (NM_022113.3,5240-5258).
gtgtcagagggaaaagatt

SEQ ID NO: 86873 - DNA, 19 bp, Homo sapiens
  siRNA target sequence for KIF13A (NM_022113.3,5298-5316).
gtaggaggagtctaccaaa

SEQ ID NO: 86874 - DNA, 19 bp, Homo sapiens
  siRNA target sequence for KIF13B (NM_015254.1,42-60).
gggactccaaagtgaaagt

SEQ ID NO: 86875 - DNA, 19 bp, Homo sapiens
  siRNA target sequence for KIF13B (NM_015254.1,89-107).
cgagagactgacttgcata

SEQ ID NO: 86876 - DNA, 19 bp, Homo sapiens
  siRNA target sequence for KIF13B (NM_015254.1,94-112).
gactgacttgcataccaaa

SEQ ID NO: 86877 - DNA, 19 bp, Homo sapiens
  siRNA target sequence for KIF13B (NM_015254.1,132-150).
caaacaaggttattcttaa

SEQ ID NO: 86878 - DNA, 19 bp, Homo sapiens
  siRNA target sequence for KIF13B (NM_015254.1,146-164).
cttaatcctgtaaatacga

SEQ ID NO: 86879 - DNA, 19 bp, Homo sapiens
  siRNA target sequence for KIF13B (NM_015254.1,152-170).
cctgtaaatacgaatcttt

SEQ ID NO: 86880 - DNA, 19 bp, Homo sapiens
  siRNA target sequence for KIF13B (NM_015254.1,225-243).
ggtctatggatgaatctgt

SEQ ID NO: 86881 - DNA, 19 bp, Homo sapiens
  siRNA target sequence for KIF13B (NM_015254.1,253-271).
gtatgcaggtcaagatatt

SEQ ID NO: 86882 - DNA, 19 bp, Homo sapiens
  siRNA target sequence for KIF13B (NM_015254.1,282-300).
gccttggagagaatatcct

SEQ ID NO: 86883 - DNA, 19 bp, Homo sapiens
  siRNA target sequence for KIF13B (NM_015254.1,317-335).
ggctacaatgcatgtatct

SEQ ID NO: 86884 - DNA, 19 bp, Homo sapiens
  siRNA target sequence for KIF13B (NM_015254.1,398-416).
ggattaatcccaagacttt

SEQ ID NO: 86885 - DNA, 19 bp, Homo sapiens
  siRNA target sequence for KIF13B (NM_015254.1,539-557).
cgtcagacgttgaaagtca

SEQ ID NO: 86886 - DNA, 19 bp, Homo sapiens
  siRNA target sequence for KIF13B (NM_015254.1,567-585).
gtgtgttgggaccttatgt

SEQ ID NO: 86887 - DNA, 19 bp, Homo sapiens
  siRNA target sequence for KIF13B (NM_015254.1,610-628).
cacaagctacaaggatatt

SEQ ID NO: 86888 - DNA, 19 bp, Homo sapiens
  siRNA target sequence for KIF13B (NM_015254.1,612-630).
caagctacaaggatattga

SEQ ID NO: 86889 - DNA, 19 bp, Homo sapiens
  siRNA target sequence for KIF13B (NM_015254.1,637-655).
gatgtctgagggtaacaaa

SEQ ID NO: 86890 - DNA, 19 bp, Homo sapiens
  siRNA target sequence for KIF13B (NM_015254.1,640-658).
gtctgagggtaacaaatct

SEQ ID NO: 86891 - DNA, 19 bp, Homo sapiens
  siRNA target sequence for KIF13B (NM_015254.1,756-774).
ggacatctggagagaaagt

SEQ ID NO: 86892 - DNA, 19 bp, Homo sapiens
  siRNA target sequence for KIF13B (NM_015254.1,879-897).
caaccctcggtctggttat

SEQ ID NO: 86893 - DNA, 19 bp, Homo sapiens
  siRNA target sequence for KIF13B (NM_015254.1,883-901).
cctcggtctggttatctca

SEQ ID NO: 86894 - DNA, 19 bp, Homo sapiens
  siRNA target sequence for KIF13B (NM_015254.1,1032-1050).
ctgcagctgataactatga

SEQ ID NO: 86895 - DNA, 19 bp, Homo sapiens
  siRNA target sequence for KIF13B (NM_015254.1,1035-1053).
cagctgataactatgatga

SEQ ID NO: 86896 - DNA, 19 bp, Homo sapiens
  siRNA target sequence for KIF13B (NM_015254.1,1121-1139).
gaccctaatgcccgaatta

SEQ ID NO: 86897 - DNA, 19 bp, Homo sapiens
  siRNA target sequence for KIF13B (NM_015254.1,1219-1237).
ggaccggctggaagaatct

SEQ ID NO: 86898 - DNA, 19 bp, Homo sapiens
  siRNA target sequence for KIF13B (NM_015254.1,1321-1339).
gcttgagagtcttggaata

SEQ ID NO: 86899 - DNA, 19 bp, Homo sapiens
  siRNA target sequence for KIF13B (NM_015254.1,1348-1366).
gtcttcgggaatcaaagtt

SEQ ID NO: 86900 - DNA, 19 bp, Homo sapiens
  siRNA target sequence for KIF13B (NM_015254.1,1506-1524).
ctgaacactgtattataga

SEQ ID NO: 86901 - DNA, 19 bp, Homo sapiens
  siRNA target sequence for KIF13B (NM_015254.1,1530-1548).
cgtcagaaggccaggttat

SEQ ID NO: 86902 - DNA, 19 bp, Homo sapiens
  siRNA target sequence for KIF13B (NM_015254.1,1533-1551).
cagaaggccaggttatgct

SEQ ID NO: 86903 - DNA, 19 bp, Homo sapiens
  siRNA target sequence for KIF13B (NM_015254.1,1593-1611).
ctgtctccagtccaataca

SEQ ID NO: 86904 - DNA, 19 bp, Homo sapiens
  siRNA target sequence for KIF13B (NM_015254.1,1616-1634).
caccatggggacaggatat

SEQ ID NO: 86905 - DNA, 19 bp, Homo sapiens
  siRNA target sequence for KIF13B (NM_015254.1,1618-1636).
ccatggggacaggatatta

SEQ ID NO: 86906 - DNA, 19 bp, Homo sapiens
  siRNA target sequence for KIF13B (NM_015254.1,1619-1637).
catggggacaggatattat

SEQ ID NO: 86907 - DNA, 19 bp, Homo sapiens
  siRNA target sequence for KIF13B (NM_015254.1,1661-1679).
ctcaatttgcctaaaaaga

SEQ ID NO: 86908 - DNA, 19 bp, Homo sapiens
  siRNA target sequence for KIF13B (NM_015254.1,1723-1741).
gaagaacgagaatagttct

SEQ ID NO: 86909 - DNA, 19 bp, Homo sapiens
  siRNA target sequence for KIF13B (NM_015254.1,1774-1792).
cgaggtgtccagtgaagtt

SEQ ID NO: 86910 - DNA, 19 bp, Homo sapiens
  siRNA target sequence for KIF13B (NM_015254.1,1775-1793).
gaggtgtccagtgaagtta

SEQ ID NO: 86911 - DNA, 19 bp, Homo sapiens
  siRNA target sequence for KIF13B (NM_015254.1,1778-1796).
gtgtccagtgaagttaact

SEQ ID NO: 86912 - DNA, 19 bp, Homo sapiens
  siRNA target sequence for KIF13B (NM_015254.1,1780-1798).
gtccagtgaagttaacttt

SEQ ID NO: 86913 - DNA, 19 bp, Homo sapiens
  siRNA target sequence for KIF13B (NM_015254.1,1790-1808).
gttaactttaattacgaat

SEQ ID NO: 86914 - DNA, 19 bp, Homo sapiens
  siRNA target sequence for KIF13B (NM_015254.1,1850-1868).
gatccgatgcagtccatat

SEQ ID NO: 86915 - DNA, 19 bp, Homo sapiens
  siRNA target sequence for KIF13B (NM_015254.1,1854-1872).
cgatgcagtccatattaaa

SEQ ID NO: 86916 - DNA, 19 bp, Homo sapiens
  siRNA target sequence for KIF13B (NM_015254.1,1916-1934).
gagcgccagaggcttatgt

SEQ ID NO: 86917 - DNA, 19 bp, Homo sapiens
  siRNA target sequence for KIF13B (NM_015254.1,2026-2044).
cgctcagcaacgcttaaga

SEQ ID NO: 86918 - DNA, 19 bp, Homo sapiens
  siRNA target sequence for KIF13B (NM_015254.1,2028-2046).
ctcagcaacgcttaagaca

SEQ ID NO: 86919 - DNA, 19 bp, Homo sapiens
  siRNA target sequence for KIF13B (NM_015254.1,2061-2079).
gagaagcaacgttgaataa

SEQ ID NO: 86920 - DNA, 19 bp, Homo sapiens
  siRNA target sequence for KIF13B (NM_015254.1,2089-2107).
gaggctgagggaacaaatt

SEQ ID NO: 86921 - DNA, 19 bp, Homo sapiens
  siRNA target sequence for KIF13B (NM_015254.1,2176-2194).
caaagttaccctacagatt

SEQ ID NO: 86922 - DNA, 19 bp, Homo sapiens
  siRNA target sequence for KIF13B (NM_015254.1,2221-2239).
gaagcgaggctctcttctt

SEQ ID NO: 86923 - DNA, 19 bp, Homo sapiens
  siRNA target sequence for KIF13B (NM_015254.1,2224-2242).
gcgaggctctcttcttagt

SEQ ID NO: 86924 - DNA, 19 bp, Homo sapiens
  siRNA target sequence for KIF13B (NM_015254.1,2226-2244).
gaggctctcttcttagtga

SEQ ID NO: 86925 - DNA, 19 bp, Homo sapiens
  siRNA target sequence for KIF13B (NM_015254.1,2311-2329).
caggctgttggatatgaga

SEQ ID NO: 86926 - DNA, 19 bp, Homo sapiens
  siRNA target sequence for KIF13B (NM_015254.1,2320-2338).
ggatatgagagacctttat

SEQ ID NO: 86927 - DNA, 19 bp, Homo sapiens
  siRNA target sequence for KIF13B (NM_015254.1,2363-2381).
gataacccagtaatacgat

SEQ ID NO: 86928 - DNA, 19 bp, Homo sapiens
  siRNA target sequence for KIF13B (NM_015254.1,2369-2387).
ccagtaatacgatcatact

SEQ ID NO: 86929 - DNA, 19 bp, Homo sapiens
  siRNA target sequence for KIF13B (NM_015254.1,2372-2390).
gtaatacgatcatacttca

SEQ ID NO: 86930 - DNA, 19 bp, Homo sapiens
  siRNA target sequence for KIF13B (NM_015254.1,2394-2412).
gtgctgatccattctatga

SEQ ID NO: 86931 - DNA, 19 bp, Homo sapiens
  siRNA target sequence for KIF13B (NM_015254.1,2458-2476).
cgagtcacttttctatgat

SEQ ID NO: 86932 - DNA, 19 bp, Homo sapiens
  siRNA target sequence for KIF13B (NM_015254.1,2639-2657).
ctggtgtgcatggttaaaa

SEQ ID NO: 86933 - DNA, 19 bp, Homo sapiens
  siRNA target sequence for KIF13B (NM_015254.1,2790-2808).
cgcactgcatggttgtctt

SEQ ID NO: 86934 - DNA, 19 bp, Homo sapiens
  siRNA target sequence for KIF13B (NM_015254.1,2810-2828).
gatcattgcaatgagtttt

SEQ ID NO: 86935 - DNA, 19 bp, Homo sapiens
  siRNA target sequence for KIF13B (NM_015254.1,2846-2864).
gactttatcgagcatcttt

SEQ ID NO: 86936 - DNA, 19 bp, Homo sapiens
  siRNA target sequence for KIF13B (NM_015254.1,2874-2892).
cattggcaattgaagtata

SEQ ID NO: 86937 - DNA, 19 bp, Homo sapiens
  siRNA target sequence for KIF13B (NM_015254.1,3049-3067).
ctgccctgtagaagtgatt

SEQ ID NO: 86938 - DNA, 19 bp, Homo sapiens
  siRNA target sequence for KIF13B (NM_015254.1,3126-3144).
gagttcaagtcgaagtgaa

SEQ ID NO: 86939 - DNA, 19 bp, Homo sapiens
  siRNA target sequence for KIF13B (NM_015254.1,3171-3189).
cactgatggaagaatgtat

SEQ ID NO: 86940 - DNA, 19 bp, Homo sapiens
  siRNA target sequence for KIF13B (NM_015254.1,3282-3300).
gctaccaggatcgagattt

SEQ ID NO: 86941 - DNA, 19 bp, Homo sapiens
  siRNA target sequence for KIF13B (NM_015254.1,3283-3301).
ctaccaggatcgagattta

SEQ ID NO: 86942 - DNA, 19 bp, Homo sapiens
  siRNA target sequence for KIF13B (NM_015254.1,3287-3305).
caggatcgagatttagaga

SEQ ID NO: 86943 - DNA, 19 bp, Homo sapiens
  siRNA target sequence for KIF13B (NM_015254.1,3321-3339).
ggctaaatgcattaacaaa

SEQ ID NO: 86944 - DNA, 19 bp, Homo sapiens
  siRNA target sequence for KIF13B (NM_015254.1,3322-3340).
gctaaatgcattaacaaaa

SEQ ID NO: 86945 - DNA, 19 bp, Homo sapiens
  siRNA target sequence for KIF13B (NM_015254.1,3346-3364).
ggagtacttggatcaacaa

SEQ ID NO: 86946 - DNA, 19 bp, Homo sapiens
  siRNA target sequence for KIF13B (NM_015254.1,3347-3365).
gagtacttggatcaacaat

SEQ ID NO: 86947 - DNA, 19 bp, Homo sapiens
  siRNA target sequence for KIF13B (NM_015254.1,3377-3395).
gtcagtaaacgtgataaaa

SEQ ID NO: 86948 - DNA, 19 bp, Homo sapiens
  siRNA target sequence for KIF13B (NM_015254.1,3381-3399).
gtaaacgtgataaaacaga

SEQ ID NO: 86949 - DNA, 19 bp, Homo sapiens
  siRNA target sequence for KIF13B (NM_015254.1,3585-3603).
gctctcaggataatcttga

SEQ ID NO: 86950 - DNA, 19 bp, Homo sapiens
  siRNA target sequence for KIF13B (NM_015254.1,3833-3851).
gtgttacgcaagagaatct

SEQ ID NO: 86951 - DNA, 19 bp, Homo sapiens
  siRNA target sequence for KIF13B (NM_015254.1,3841-3859).
caagagaatctgtgtcaat

SEQ ID NO: 86952 - DNA, 19 bp, Homo sapiens
  siRNA target sequence for KIF13B (NM_015254.1,3846-3864).
gaatctgtgtcaatgttca

SEQ ID NO: 86953 - DNA, 19 bp, Homo sapiens
  siRNA target sequence for KIF13B (NM_015254.1,3901-3919).
gatgtctcatcgaagttct

SEQ ID NO: 86954 - DNA, 19 bp, Homo sapiens
  siRNA target sequence for KIF13B (NM_015254.1,4037-4055).
gctgactcggaggcttata

SEQ ID NO: 86955 - DNA, 19 bp, Homo sapiens
  siRNA target sequence for KIF13B (NM_015254.1,4038-4056).
ctgactcggaggcttatat

SEQ ID NO: 86956 - DNA, 19 bp, Homo sapiens
  siRNA target sequence for KIF13B (NM_015254.1,4042-4060).
ctcggaggcttatattgaa

SEQ ID NO: 86957 - DNA, 19 bp, Homo sapiens
  siRNA target sequence for KIF13B (NM_015254.1,4044-4062).
cggaggcttatattgaaaa

SEQ ID NO: 86958 - DNA, 19 bp, Homo sapiens
  siRNA target sequence for KIF13B (NM_015254.1,4072-4090).
gagcgtgctggctgtagaa

SEQ ID NO: 86959 - DNA, 19 bp, Homo sapiens
  siRNA target sequence for KIF13B (NM_015254.1,4074-4092).
gcgtgctggctgtagaaaa

SEQ ID NO: 86960 - DNA, 19 bp, Homo sapiens
  siRNA target sequence for KIF13B (NM_015254.1,4127-4145).
gcagtgaaggaacagttaa

SEQ ID NO: 86961 - DNA, 19 bp, Homo sapiens
  siRNA target sequence for KIF13B (NM_015254.1,4171-4189).
gagtatcagttctccaaat

SEQ ID NO: 86962 - DNA, 19 bp, Homo sapiens
  siRNA target sequence for KIF13B (NM_015254.1,4203-4221).
ctggaagccgacaagatct

SEQ ID NO: 86963 - DNA, 19 bp, Homo sapiens
  siRNA target sequence for KIF13B (NM_015254.1,4206-4224).
gaagccgacaagatctcat

SEQ ID NO: 86964 - DNA, 19 bp, Homo sapiens
  siRNA target sequence for KIF13B (NM_015254.1,4211-4229).
cgacaagatctcattccat

SEQ ID NO: 86965 - DNA, 19 bp, Homo sapiens
  siRNA target sequence for KIF13B (NM_015254.1,4217-4235).
gatctcattccatcataca

SEQ ID NO: 86966 - DNA, 19 bp, Homo sapiens
  siRNA target sequence for KIF13B (NM_015254.1,4353-4371).
cagatccaggactcagtaa

SEQ ID NO: 86967 - DNA, 19 bp, Homo sapiens
  siRNA target sequence for KIF13B (NM_015254.1,4384-4402).
ctacttgaatcctgtcaaa

SEQ ID NO: 86968 - DNA, 19 bp, Homo sapiens
  siRNA target sequence for KIF13B (NM_015254.1,4727-4745).
gcctctagcgggtacttct

SEQ ID NO: 86969 - DNA, 19 bp, Homo sapiens
  siRNA target sequence for KIF13B (NM_015254.1,5245-5263).
cctgccctcaggtaagaat

SEQ ID NO: 86970 - DNA, 19 bp, Homo sapiens
  siRNA target sequence for KIF13B (NM_015254.1,5469-5487).
ccgacaggagccacaagaa

SEQ ID NO: 86971 - DNA, 19 bp, Homo sapiens
  siRNA target sequence for KIF14 (NM_014875.1,442-460).
gtcattacacagtactcat

SEQ ID NO: 86972 - DNA, 19 bp, Homo sapiens
  siRNA target sequence for KIF14 (NM_014875.1,465-483).
gaaataacagcggtgatat

SEQ ID NO: 86973 - DNA, 19 bp, Homo sapiens
  siRNA target sequence for KIF14 (NM_014875.1,474-492).
gcggtgatattcttgatat

SEQ ID NO: 86974 - DNA, 19 bp, Homo sapiens
  siRNA target sequence for KIF14 (NM_014875.1,531-549).
cccacagtagccgacttaa

SEQ ID NO: 86975 - DNA, 19 bp, Homo sapiens
  siRNA target sequence for KIF14 (NM_014875.1,540-558).
gccgacttaagctgcattt

SEQ ID NO: 86976 - DNA, 19 bp, Homo sapiens
  siRNA target sequence for KIF14 (NM_014875.1,542-560).
cgacttaagctgcatttga

SEQ ID NO: 86977 - DNA, 19 bp, Homo sapiens
  siRNA target sequence for KIF14 (NM_014875.1,554-572).
catttgaagtcggatatgt

SEQ ID NO: 86978 - DNA, 19 bp, Homo sapiens
  siRNA target sequence for KIF14 (NM_014875.1,562-580).
gtcggatatgtcagaatgt

SEQ ID NO: 86979 - DNA, 19 bp, Homo sapiens
  siRNA target sequence for KIF14 (NM_014875.1,564-582).
cggatatgtcagaatgtga

SEQ ID NO: 86980 - DNA, 19 bp, Homo sapiens
  siRNA target sequence for KIF14 (NM_014875.1,611-629).
ggtaaagtcagagacataa

SEQ ID NO: 86981 - DNA, 19 bp, Homo sapiens
  siRNA target sequence for KIF14 (NM_014875.1,612-630).
gtaaagtcagagacataaa

SEQ ID NO: 86982 - DNA, 19 bp, Homo sapiens
  siRNA target sequence for KIF14 (NM_014875.1,641-659).
gttatttctgccagtagaa

SEQ ID NO: 86983 - DNA, 19 bp, Homo sapiens
  siRNA target sequence for KIF14 (NM_014875.1,673-691).
gccccttacccctaatcct

SEQ ID NO: 86984 - DNA, 19 bp, Homo sapiens
  siRNA target sequence for KIF14 (NM_014875.1,684-702).
ctaatcctgtaggtagatt

SEQ ID NO: 86985 - DNA, 19 bp, Homo sapiens
  siRNA target sequence for KIF14 (NM_014875.1,704-722).
gcacttcagaggagaacta

SEQ ID NO: 86986 - DNA, 19 bp, Homo sapiens
  siRNA target sequence for KIF14 (NM_014875.1,734-752).
gaatcatctttgcttgtta

SEQ ID NO: 86987 - DNA, 19 bp, Homo sapiens
  siRNA target sequence for KIF14 (NM_014875.1,806-824).
cgtcgtgctaaaacagatt

SEQ ID NO: 86988 - DNA, 19 bp, Homo sapiens
  siRNA target sequence for KIF14 (NM_014875.1,902-920).
ggtgtttctaaggaaagta

SEQ ID NO: 86989 - DNA, 19 bp, Homo sapiens
  siRNA target sequence for KIF14 (NM_014875.1,918-936).
gtagaacaaatgtaaggat

SEQ ID NO: 86990 - DNA, 19 bp, Homo sapiens
  siRNA target sequence for KIF14 (NM_014875.1,1067-1085).
gttgcacttaagtactcaa

SEQ ID NO: 86991 - DNA, 19 bp, Homo sapiens
  siRNA target sequence for KIF14 (NM_014875.1,1070-1088).
gcacttaagtactcaagta

SEQ ID NO: 86992 - DNA, 19 bp, Homo sapiens
  siRNA target sequence for KIF14 (NM_014875.1,1071-1089).
cacttaagtactcaagtaa

SEQ ID NO: 86993 - DNA, 19 bp, Homo sapiens
  siRNA target sequence for KIF14 (NM_014875.1,1073-1091).
cttaagtactcaagtaata

SEQ ID NO: 86994 - DNA, 19 bp, Homo sapiens
  siRNA target sequence for KIF14 (NM_014875.1,1115-1133).
cagactgaagttgttagat

SEQ ID NO: 86995 - DNA, 19 bp, Homo sapiens
  siRNA target sequence for KIF14 (NM_014875.1,1117-1135).
gactgaagttgttagatca

SEQ ID NO: 86996 - DNA, 19 bp, Homo sapiens
  siRNA target sequence for KIF14 (NM_014875.1,1281-1299).
gtacaacagaacacaaact

SEQ ID NO: 86997 - DNA, 19 bp, Homo sapiens
  siRNA target sequence for KIF14 (NM_014875.1,1289-1307).
gaacacaaactgacaacaa

SEQ ID NO: 86998 - DNA, 19 bp, Homo sapiens
  siRNA target sequence for KIF14 (NM_014875.1,1292-1310).
cacaaactgacaacaaagt

SEQ ID NO: 86999 - DNA, 19 bp, Homo sapiens
  siRNA target sequence for KIF14 (NM_014875.1,1334-1352).
ccagctccatcaatactga

SEQ ID NO: 87000 - DNA, 19 bp, Homo sapiens
  siRNA target sequence for KIF14 (NM_014875.1,1349-1367).
ctgaagaatagaatgtcta

SEQ ID NO: 87001 - DNA, 19 bp, Homo sapiens
  siRNA target sequence for KIF14 (NM_014875.1,1354-1372).
gaatagaatgtctaacctt

SEQ ID NO: 87002 - DNA, 19 bp, Homo sapiens
  siRNA target sequence for KIF14 (NM_014875.1,1365-1383).
ctaaccttcaagttaaaca

SEQ ID NO: 87003 - DNA, 19 bp, Homo sapiens
  siRNA target sequence for KIF14 (NM_014875.1,1395-1413).
gttcctttcttgcaaataa

SEQ ID NO: 87004 - DNA, 19 bp, Homo sapiens
  siRNA target sequence for KIF14 (NM_014875.1,1417-1435).
ggaaagatccgcagaaaat

SEQ ID NO: 87005 - DNA, 19 bp, Homo sapiens
  siRNA target sequence for KIF14 (NM_014875.1,1418-1436).
gaaagatccgcagaaaata

SEQ ID NO: 87006 - DNA, 19 bp, Homo sapiens
  siRNA target sequence for KIF14 (NM_014875.1,1569-1587).
catcccaggtagtcttcat

SEQ ID NO: 87007 - DNA, 19 bp, Homo sapiens
  siRNA target sequence for KIF14 (NM_014875.1,1615-1633).
ccctgacacgaaacaagtt

SEQ ID NO: 87008 - DNA, 19 bp, Homo sapiens
  siRNA target sequence for KIF14 (NM_014875.1,1616-1634).
cctgacacgaaacaagttt

SEQ ID NO: 87009 - DNA, 19 bp, Homo sapiens
  siRNA target sequence for KIF14 (NM_014875.1,1617-1635).
ctgacacgaaacaagttta

SEQ ID NO: 87010 - DNA, 19 bp, Homo sapiens
  siRNA target sequence for KIF14 (NM_014875.1,1621-1639).
cacgaaacaagtttataat

SEQ ID NO: 87011 - DNA, 19 bp, Homo sapiens
  siRNA target sequence for KIF14 (NM_014875.1,1660-1678).
ctggtcttttgatgaatgt

SEQ ID NO: 87012 - DNA, 19 bp, Homo sapiens
  siRNA target sequence for KIF14 (NM_014875.1,1695-1713).
gccagacaactgtctatga

SEQ ID NO: 87013 - DNA, 19 bp, Homo sapiens
  siRNA target sequence for KIF14 (NM_014875.1,1751-1769).
ggcttcaatacctgtcttt

SEQ ID NO: 87014 - DNA, 19 bp, Homo sapiens
  siRNA target sequence for KIF14 (NM_014875.1,1752-1770).
gcttcaatacctgtctttt

SEQ ID NO: 87015 - DNA, 19 bp, Homo sapiens
  siRNA target sequence for KIF14 (NM_014875.1,1830-1848).
caggaataattccaagatt

SEQ ID NO: 87016 - DNA, 19 bp, Homo sapiens
  siRNA target sequence for KIF14 (NM_014875.1,1889-1907).
caagaggtcagctatcaca

SEQ ID NO: 87017 - DNA, 19 bp, Homo sapiens
  siRNA target sequence for KIF14 (NM_014875.1,1894-1912).
ggtcagctatcacattgaa

SEQ ID NO: 87018 - DNA, 19 bp, Homo sapiens
  siRNA target sequence for KIF14 (NM_014875.1,1895-1913).
gtcagctatcacattgaaa

SEQ ID NO: 87019 - DNA, 19 bp, Homo sapiens
  siRNA target sequence for KIF14 (NM_014875.1,1915-1933).
gagcttctttgaagtatat

SEQ ID NO: 87020 - DNA, 19 bp, Homo sapiens
  siRNA target sequence for KIF14 (NM_014875.1,1946-1964).
cacgaccttctggtttgta

SEQ ID NO: 87021 - DNA, 19 bp, Homo sapiens
  siRNA target sequence for KIF14 (NM_014875.1,2005-2023).
ggaacatcctgtttatgga

SEQ ID NO: 87022 - DNA, 19 bp, Homo sapiens
  siRNA target sequence for KIF14 (NM_014875.1,2013-2031).
ctgtttatggaccatatgt

SEQ ID NO: 87023 - DNA, 19 bp, Homo sapiens
  siRNA target sequence for KIF14 (NM_014875.1,2112-2130).
ctgctgctactggtatgaa

SEQ ID NO: 87024 - DNA, 19 bp, Homo sapiens
  siRNA target sequence for KIF14 (NM_014875.1,2115-2133).
ctgctactggtatgaatga

SEQ ID NO: 87025 - DNA, 19 bp, Homo sapiens
  siRNA target sequence for KIF14 (NM_014875.1,2123-2141).
ggtatgaatgataaaagtt

SEQ ID NO: 87026 - DNA, 19 bp, Homo sapiens
  siRNA target sequence for KIF14 (NM_014875.1,2139-2157).
gttcccgatctcattcagt

SEQ ID NO: 87027 - DNA, 19 bp, Homo sapiens
  siRNA target sequence for KIF14 (NM_014875.1,2210-2228).
cacgatcacagaataacaa

SEQ ID NO: 87028 - DNA, 19 bp, Homo sapiens
  siRNA target sequence for KIF14 (NM_014875.1,2218-2236).
cagaataacaagtcgaatt

SEQ ID NO: 87029 - DNA, 19 bp, Homo sapiens
  siRNA target sequence for KIF14 (NM_014875.1,2220-2238).
gaataacaagtcgaattaa

SEQ ID NO: 87030 - DNA, 19 bp, Homo sapiens
  siRNA target sequence for KIF14 (NM_014875.1,2229-2247).
gtcgaattaacctaataga

SEQ ID NO: 87031 - DNA, 19 bp, Homo sapiens
  siRNA target sequence for KIF14 (NM_014875.1,2232-2250).
gaattaacctaatagatct

SEQ ID NO: 87032 - DNA, 19 bp, Homo sapiens
  siRNA target sequence for KIF14 (NM_014875.1,2268-2286).
gctctacggctcacactaa

SEQ ID NO: 87033 - DNA, 19 bp, Homo sapiens
  siRNA target sequence for KIF14 (NM_014875.1,2283-2301).
ctaatggagatcgactaaa

SEQ ID NO: 87034 - DNA, 19 bp, Homo sapiens
  siRNA target sequence for KIF14 (NM_014875.1,2435-2453).
ctgggtggaaattcaaaaa

SEQ ID NO: 87035 - DNA, 19 bp, Homo sapiens
  siRNA target sequence for KIF14 (NM_014875.1,2437-2455).
gggtggaaattcaaaaact

SEQ ID NO: 87036 - DNA, 19 bp, Homo sapiens
  siRNA target sequence for KIF14 (NM_014875.1,2456-2474).
gcaatgattgctacgatta

SEQ ID NO: 87037 - DNA, 19 bp, Homo sapiens
  siRNA target sequence for KIF14 (NM_014875.1,2479-2497).
cgctgccagcaacatagaa

SEQ ID NO: 87038 - DNA, 19 bp, Homo sapiens
  siRNA target sequence for KIF14 (NM_014875.1,2481-2499).
ctgccagcaacatagaaga

SEQ ID NO: 87039 - DNA, 19 bp, Homo sapiens
  siRNA target sequence for KIF14 (NM_014875.1,2498-2516).
gaaacattaagcacactta

SEQ ID NO: 87040 - DNA, 19 bp, Homo sapiens
  siRNA target sequence for KIF14 (NM_014875.1,2502-2520).
cattaagcacacttagata

SEQ ID NO: 87041 - DNA, 19 bp, Homo sapiens
  siRNA target sequence for KIF14 (NM_014875.1,2508-2526).
gcacacttagatatgctaa

SEQ ID NO: 87042 - DNA, 19 bp, Homo sapiens
  siRNA target sequence for KIF14 (NM_014875.1,2522-2540).
gctaaccaagcccgtttaa

SEQ ID NO: 87043 - DNA, 19 bp, Homo sapiens
  siRNA target sequence for KIF14 (NM_014875.1,2523-2541).
ctaaccaagcccgtttaat

SEQ ID NO: 87044 - DNA, 19 bp, Homo sapiens
  siRNA target sequence for KIF14 (NM_014875.1,2528-2546).
caagcccgtttaatagtca

SEQ ID NO: 87045 - DNA, 19 bp, Homo sapiens
  siRNA target sequence for KIF14 (NM_014875.1,2532-2550).
cccgtttaatagtcaacat

SEQ ID NO: 87046 - DNA, 19 bp, Homo sapiens
  siRNA target sequence for KIF14 (NM_014875.1,2533-2551).
ccgtttaatagtcaacatt

SEQ ID NO: 87047 - DNA, 19 bp, Homo sapiens
  siRNA target sequence for KIF14 (NM_014875.1,2543-2561).
gtcaacattgctaaagtaa

SEQ ID NO: 87048 - DNA, 19 bp, Homo sapiens
  siRNA target sequence for KIF14 (NM_014875.1,2567-2585).
gatatgaacgctaagttaa

SEQ ID NO: 87049 - DNA, 19 bp, Homo sapiens
  siRNA target sequence for KIF14 (NM_014875.1,2572-2590).
gaacgctaagttaattaga

SEQ ID NO: 87050 - DNA, 19 bp, Homo sapiens
  siRNA target sequence for KIF14 (NM_014875.1,2575-2593).
cgctaagttaattagagaa

SEQ ID NO: 87051 - DNA, 19 bp, Homo sapiens
  siRNA target sequence for KIF14 (NM_014875.1,2668-2686).
ctgtcggcaagaaataaca

SEQ ID NO: 87052 - DNA, 19 bp, Homo sapiens
  siRNA target sequence for KIF14 (NM_014875.1,2674-2692).
gcaagaaataacatcctta

SEQ ID NO: 87053 - DNA, 19 bp, Homo sapiens
  siRNA target sequence for KIF14 (NM_014875.1,2694-2712).
gaatgaaactgcatcaaca

SEQ ID NO: 87054 - DNA, 19 bp, Homo sapiens
  siRNA target sequence for KIF14 (NM_014875.1,2830-2848).
caatcatttaccaaacctt

SEQ ID NO: 87055 - DNA, 19 bp, Homo sapiens
  siRNA target sequence for KIF14 (NM_014875.1,2834-2852).
catttaccaaaccttgtta

SEQ ID NO: 87056 - DNA, 19 bp, Homo sapiens
  siRNA target sequence for KIF14 (NM_014875.1,2840-2858).
ccaaaccttgttaatctga

SEQ ID NO: 87057 - DNA, 19 bp, Homo sapiens
  siRNA target sequence for KIF14 (NM_014875.1,2845-2863).
ccttgttaatctgaatgaa

SEQ ID NO: 87058 - DNA, 19 bp, Homo sapiens
  siRNA target sequence for KIF14 (NM_014875.1,2877-2895).
ctgagatgctgctatatat

SEQ ID NO: 87059 - DNA, 19 bp, Homo sapiens
  siRNA target sequence for KIF14 (NM_014875.1,2933-2951).
ccaaactcaagccatgata

SEQ ID NO: 87060 - DNA, 19 bp, Homo sapiens
  siRNA target sequence for KIF14 (NM_014875.1,2934-2952).
caaactcaagccatgatat

SEQ ID NO: 87061 - DNA, 19 bp, Homo sapiens
  siRNA target sequence for KIF14 (NM_014875.1,2968-2986).
gctgattgctgatgatcat

SEQ ID NO: 87062 - DNA, 19 bp, Homo sapiens
  siRNA target sequence for KIF14 (NM_014875.1,3005-3023).
ggtgggacagtgagtatta

SEQ ID NO: 87063 - DNA, 19 bp, Homo sapiens
  siRNA target sequence for KIF14 (NM_014875.1,3006-3024).
gtgggacagtgagtattat

SEQ ID NO: 87064 - DNA, 19 bp, Homo sapiens
  siRNA target sequence for KIF14 (NM_014875.1,3029-3047).
gttggggaagcaaagacat

SEQ ID NO: 87065 - DNA, 19 bp, Homo sapiens
  siRNA target sequence for KIF14 (NM_014875.1,3033-3051).
gggaagcaaagacatatgt

SEQ ID NO: 87066 - DNA, 19 bp, Homo sapiens
  siRNA target sequence for KIF14 (NM_014875.1,3034-3052).
ggaagcaaagacatatgta

SEQ ID NO: 87067 - DNA, 19 bp, Homo sapiens
  siRNA target sequence for KIF14 (NM_014875.1,3035-3053).
gaagcaaagacatatgtaa

SEQ ID NO: 87068 - DNA, 19 bp, Homo sapiens
  siRNA target sequence for KIF14 (NM_014875.1,3070-3088).
ggaaatcacagtattacgt

SEQ ID NO: 87069 - DNA, 19 bp, Homo sapiens
  siRNA target sequence for KIF14 (NM_014875.1,3103-3121).
gattcttggtggagatcat

SEQ ID NO: 87070 - DNA, 19 bp, Homo sapiens
  siRNA target sequence for KIF14 (NM_014875.1,3107-3125).
cttggtggagatcattatt

SEQ ID NO: 87071 - DNA, 19 bp, Homo sapiens
  siRNA target sequence for KIF14 (NM_014875.1,3177-3195).
gagatactcctataagtga

SEQ ID NO: 87072 - DNA, 19 bp, Homo sapiens
  siRNA target sequence for KIF14 (NM_014875.1,3192-3210).
gtgagggtccaaaagactt

SEQ ID NO: 87073 - DNA, 19 bp, Homo sapiens
  siRNA target sequence for KIF14 (NM_014875.1,3212-3230).
gaatttgcaaaaaatgagt

SEQ ID NO: 87074 - DNA, 19 bp, Homo sapiens
  siRNA target sequence for KIF14 (NM_014875.1,3332-3350).
gctcagcaagagctttctt

SEQ ID NO: 87075 - DNA, 19 bp, Homo sapiens
  siRNA target sequence for KIF14 (NM_014875.1,3488-3506).
catcttgaacaggaaatat

SEQ ID NO: 87076 - DNA, 19 bp, Homo sapiens
  siRNA target sequence for KIF14 (NM_014875.1,3570-3588).
gcatccgccatgcaagaat

SEQ ID NO: 87077 - DNA, 19 bp, Homo sapiens
  siRNA target sequence for KIF14 (NM_014875.1,3571-3589).
catccgccatgcaagaatt

SEQ ID NO: 87078 - DNA, 19 bp, Homo sapiens
  siRNA target sequence for KIF14 (NM_014875.1,3585-3603).
gaattctggaagctttaga

SEQ ID NO: 87079 - DNA, 19 bp, Homo sapiens
  siRNA target sequence for KIF14 (NM_014875.1,3653-3671).
cggaataatagggataaaa

SEQ ID NO: 87080 - DNA, 19 bp, Homo sapiens
  siRNA target sequence for KIF14 (NM_014875.1,3663-3681).
gggataaaacttttacagt

SEQ ID NO: 87081 - DNA, 19 bp, Homo sapiens
  siRNA target sequence for KIF14 (NM_014875.1,3690-3708).
cttggagctctatgaaact

SEQ ID NO: 87082 - DNA, 19 bp, Homo sapiens
  siRNA target sequence for KIF14 (NM_014875.1,3699-3717).
ctatgaaactctcaatgat

SEQ ID NO: 87083 - DNA, 19 bp, Homo sapiens
  siRNA target sequence for KIF14 (NM_014875.1,3734-3752).
gctatcagcagcaaattga

SEQ ID NO: 87084 - DNA, 19 bp, Homo sapiens
  siRNA target sequence for KIF14 (NM_014875.1,3735-3753).
ctatcagcagcaaattgaa

SEQ ID NO: 87085 - DNA, 19 bp, Homo sapiens
  siRNA target sequence for KIF14 (NM_014875.1,3744-3762).
gcaaattgaaaacatacta

SEQ ID NO: 87086 - DNA, 19 bp, Homo sapiens
  siRNA target sequence for KIF14 (NM_014875.1,3807-3825).
cttctattcgggttcgtaa

SEQ ID NO: 87087 - DNA, 19 bp, Homo sapiens
  siRNA target sequence for KIF14 (NM_014875.1,3816-3834).
gggttcgtaacctgaaact

SEQ ID NO: 87088 - DNA, 19 bp, Homo sapiens
  siRNA target sequence for KIF14 (NM_014875.1,3817-3835).
ggttcgtaacctgaaacta

SEQ ID NO: 87089 - DNA, 19 bp, Homo sapiens
  siRNA target sequence for KIF14 (NM_014875.1,3822-3840).
gtaacctgaaactaggaat

SEQ ID NO: 87090 - DNA, 19 bp, Homo sapiens
  siRNA target sequence for KIF14 (NM_014875.1,3857-3875).
ctggaaaagtttgaatcta

SEQ ID NO: 87091 - DNA, 19 bp, Homo sapiens
  siRNA target sequence for KIF14 (NM_014875.1,3902-3920).
gagagtaatggtagtaaca

SEQ ID NO: 87092 - DNA, 19 bp, Homo sapiens
  siRNA target sequence for KIF14 (NM_014875.1,3953-3971).
gaatgggaacccgacatta

SEQ ID NO: 87093 - DNA, 19 bp, Homo sapiens
  siRNA target sequence for KIF14 (NM_014875.1,4058-4076).
caagtccatccaattaaga

SEQ ID NO: 87094 - DNA, 19 bp, Homo sapiens
  siRNA target sequence for KIF14 (NM_014875.1,4100-4118).
ggtttaatggacaaatcaa

SEQ ID NO: 87095 - DNA, 19 bp, Homo sapiens
  siRNA target sequence for KIF14 (NM_014875.1,4109-4127).
gacaaatcaagcactattt

SEQ ID NO: 87096 - DNA, 19 bp, Homo sapiens
  siRNA target sequence for KIF14 (NM_014875.1,4120-4138).
cactatttactcaaattca

SEQ ID NO: 87097 - DNA, 19 bp, Homo sapiens
  siRNA target sequence for KIF14 (NM_014875.1,4174-4192).
gattggttcttcgttagat

SEQ ID NO: 87098 - DNA, 19 bp, Homo sapiens
  siRNA target sequence for KIF14 (NM_014875.1,4178-4196).
ggttcttcgttagattttt

SEQ ID NO: 87099 - DNA, 19 bp, Homo sapiens
  siRNA target sequence for KIF14 (NM_014875.1,4179-4197).
gttcttcgttagatttttt

SEQ ID NO: 87100 - DNA, 19 bp, Homo sapiens
  siRNA target sequence for KIF14 (NM_014875.1,4204-4222).
gagttatgatgaagaaaga

SEQ ID NO: 87101 - DNA, 19 bp, Homo sapiens
  siRNA target sequence for KIF14 (NM_014875.1,4229-4247).
gcagacagcctaattaata

SEQ ID NO: 87102 - DNA, 19 bp, Homo sapiens
  siRNA target sequence for KIF14 (NM_014875.1,4232-4250).
gacagcctaattaatagtt

SEQ ID NO: 87103 - DNA, 19 bp, Homo sapiens
  siRNA target sequence for KIF14 (NM_014875.1,4340-4358).
cgagcaatccagtcactta

SEQ ID NO: 87104 - DNA, 19 bp, Homo sapiens
  siRNA target sequence for KIF14 (NM_014875.1,4377-4395).
cttttgagcagctagtagt

SEQ ID NO: 87105 - DNA, 19 bp, Homo sapiens
  siRNA target sequence for KIF14 (NM_014875.1,4385-4403).
cagctagtagtgctaatga

SEQ ID NO: 87106 - DNA, 19 bp, Homo sapiens
  siRNA target sequence for KIF14 (NM_014875.1,4391-4409).
gtagtgctaatgaaacact

SEQ ID NO: 87107 - DNA, 19 bp, Homo sapiens
  siRNA target sequence for KIF14 (NM_014875.1,4427-4445).
ccttgtaccaacatagcaa

SEQ ID NO: 87108 - DNA, 19 bp, Homo sapiens
  siRNA target sequence for KIF14 (NM_014875.1,4443-4461).
caagacttgaggatgagtt

SEQ ID NO: 87109 - DNA, 19 bp, Homo sapiens
  siRNA target sequence for KIF14 (NM_014875.1,4481-4499).
ctgggaggctacttacagt

SEQ ID NO: 87110 - DNA, 19 bp, Homo sapiens
  siRNA target sequence for KIF14 (NM_014875.1,4483-4501).
gggaggctacttacagtta

SEQ ID NO: 87111 - DNA, 19 bp, Homo sapiens
  siRNA target sequence for KIF14 (NM_014875.1,4484-4502).
ggaggctacttacagttat

SEQ ID NO: 87112 - DNA, 19 bp, Homo sapiens
  siRNA target sequence for KIF14 (NM_014875.1,4485-4503).
gaggctacttacagttatt

SEQ ID NO: 87113 - DNA, 19 bp, Homo sapiens
  siRNA target sequence for KIF14 (NM_014875.1,4571-4589).
gtacaacaagctgtaaagt

SEQ ID NO: 87114 - DNA, 19 bp, Homo sapiens
  siRNA target sequence for KIF14 (NM_014875.1,4596-4614).
ggcagttagcagttctgaa

SEQ ID NO: 87115 - DNA, 19 bp, Homo sapiens
  siRNA target sequence for KIF14 (NM_014875.1,4766-4784).
ctctttaggcagtgtacaa

SEQ ID NO: 87116 - DNA, 19 bp, Homo sapiens
  siRNA target sequence for KIF14 (NM_014875.1,4768-4786).
ctttaggcagtgtacaaaa

SEQ ID NO: 87117 - DNA, 19 bp, Homo sapiens
  siRNA target sequence for KIF14 (NM_014875.1,4790-4808).
gaggttaccaaagaaatga

SEQ ID NO: 87118 - DNA, 19 bp, Homo sapiens
  siRNA target sequence for KIF14 (NM_014875.1,4812-4830).
ctaatgccatgggattgat

SEQ ID NO: 87119 - DNA, 19 bp, Homo sapiens
  siRNA target sequence for KIF14 (NM_014875.1,4817-4835).
gccatgggattgattagat

SEQ ID NO: 87120 - DNA, 19 bp, Homo sapiens
  siRNA target sequence for KIF14 (NM_014875.1,4822-4840).
gggattgattagatctctt

SEQ ID NO: 87121 - DNA, 19 bp, Homo sapiens
  siRNA target sequence for KIF14 (NM_014875.1,4856-4874).
gaatcgaaaattaaaagtt

SEQ ID NO: 87122 - DNA, 19 bp, Homo sapiens
  siRNA target sequence for KIF14 (NM_014875.1,4876-4894).
cagaaggcaagtacaagaa

SEQ ID NO: 87123 - DNA, 19 bp, Homo sapiens
  siRNA target sequence for KIF14 (NM_014875.1,4918-4936).
caagaggatggttaatcgt

SEQ ID NO: 87124 - DNA, 19 bp, Homo sapiens
  siRNA target sequence for KIF14 (NM_014875.1,4934-4952).
cgtgctccagaattcttaa

SEQ ID NO: 87125 - DNA, 19 bp, Homo sapiens
  siRNA target sequence for KIF14 (NM_014875.1,5030-5048).
ctccagacttgtgttgaaa

SEQ ID NO: 87126 - DNA, 19 bp, Homo sapiens
  siRNA target sequence for KIF14 (NM_014875.1,5056-5074).
caacttggccagtgatttt

SEQ ID NO: 87127 - DNA, 19 bp, Homo sapiens
  siRNA target sequence for KIF14 (NM_014875.1,5062-5080).
ggccagtgatttttacagt

SEQ ID NO: 87128 - DNA, 19 bp, Homo sapiens
  siRNA target sequence for KIF14 (NM_014875.1,5110-5128).
cagctatgagagtagagta

SEQ ID NO: 87129 - DNA, 19 bp, Homo sapiens
  siRNA target sequence for KIF14 (NM_014875.1,5119-5137).
gagtagagtaactcacatt

SEQ ID NO: 87130 - DNA, 19 bp, Homo sapiens
  siRNA target sequence for KIF14 (NM_014875.1,5121-5139).
gtagagtaactcacattgt

SEQ ID NO: 87131 - DNA, 19 bp, Homo sapiens
  siRNA target sequence for KIF14 (NM_014875.1,5217-5235).
cctgggaaacttataatca

SEQ ID NO: 87132 - DNA, 19 bp, Homo sapiens
  siRNA target sequence for KIF14 (NM_014875.1,5249-5267).
gaacaccaacaatctaaat

SEQ ID NO: 87133 - DNA, 19 bp, Homo sapiens
  siRNA target sequence for KIF14 (NM_014875.1,5273-5291).
gggattgacggcagtaaga

SEQ ID NO: 87134 - DNA, 19 bp, Homo sapiens
  siRNA target sequence for KIF14 (NM_014875.1,5281-5299).
cggcagtaagaataaaggt

SEQ ID NO: 87135 - DNA, 19 bp, Homo sapiens
  siRNA target sequence for KIF1B (NM_015074.1,183-201).
ccgggtaaggcccttcaat

SEQ ID NO: 87136 - DNA, 19 bp, Homo sapiens
  siRNA target sequence for KIF1B (NM_015074.1,184-202).
cgggtaaggcccttcaatt

SEQ ID NO: 87137 - DNA, 19 bp, Homo sapiens
  siRNA target sequence for KIF1B (NM_015074.1,205-223).
cgagagaccagcaaggaat

SEQ ID NO: 87138 - DNA, 19 bp, Homo sapiens
  siRNA target sequence for KIF1B (NM_015074.1,215-233).
gcaaggaatccaaatgcat

SEQ ID NO: 87139 - DNA, 19 bp, Homo sapiens
  siRNA target sequence for KIF1B (NM_015074.1,247-265).
ggcaactcgaccagtatta

SEQ ID NO: 87140 - DNA, 19 bp, Homo sapiens
  siRNA target sequence for KIF1B (NM_015074.1,248-266).
gcaactcgaccagtattat

SEQ ID NO: 87141 - DNA, 19 bp, Homo sapiens
  siRNA target sequence for KIF1B (NM_015074.1,249-267).
caactcgaccagtattatt

SEQ ID NO: 87142 - DNA, 19 bp, Homo sapiens
  siRNA target sequence for KIF1B (NM_015074.1,339-357).
cgaagatccctgttttgca

SEQ ID NO: 87143 - DNA, 19 bp, Homo sapiens
  siRNA target sequence for KIF1B (NM_015074.1,340-358).
gaagatccctgttttgcat

SEQ ID NO: 87144 - DNA, 19 bp, Homo sapiens
  siRNA target sequence for KIF1B (NM_015074.1,405-423).
cgcctttgagggatataat

SEQ ID NO: 87145 - DNA, 19 bp, Homo sapiens
  siRNA target sequence for KIF1B (NM_015074.1,414-432).
gggatataatgtctgtatt

SEQ ID NO: 87146 - DNA, 19 bp, Homo sapiens
  siRNA target sequence for KIF1B (NM_015074.1,502-520).
ggcatcattccacagttat

SEQ ID NO: 87147 - DNA, 19 bp, Homo sapiens
  siRNA target sequence for KIF1B (NM_015074.1,507-525).
cattccacagttatgtgaa

SEQ ID NO: 87148 - DNA, 19 bp, Homo sapiens
  siRNA target sequence for KIF1B (NM_015074.1,512-530).
cacagttatgtgaagaact

SEQ ID NO: 87149 - DNA, 19 bp, Homo sapiens
  siRNA target sequence for KIF1B (NM_015074.1,616-634).
cgagatttgctgaatccaa

SEQ ID NO: 87150 - DNA, 19 bp, Homo sapiens
  siRNA target sequence for KIF1B (NM_015074.1,764-782).
cagtggcagctacaaacat

SEQ ID NO: 87151 - DNA, 19 bp, Homo sapiens
  siRNA target sequence for KIF1B (NM_015074.1,1004-1022).
ccttggccgaggtgagtaa

SEQ ID NO: 87152 - DNA, 19 bp, Homo sapiens
  siRNA target sequence for KIF1B (NM_015074.1,1005-1023).
cttggccgaggtgagtaaa

SEQ ID NO: 87153 - DNA, 19 bp, Homo sapiens
  siRNA target sequence for KIF1B (NM_015074.1,1077-1095).
ccttcgagaaaatttaggt

SEQ ID NO: 87154 - DNA, 19 bp, Homo sapiens
  siRNA target sequence for KIF1B (NM_015074.1,1177-1195).
gcagatcgtgcaaaacaaa

SEQ ID NO: 87155 - DNA, 19 bp, Homo sapiens
  siRNA target sequence for KIF1B (NM_015074.1,1178-1196).
cagatcgtgcaaaacaaat

SEQ ID NO: 87156 - DNA, 19 bp, Homo sapiens
  siRNA target sequence for KIF1B (NM_015074.1,1180-1198).
gatcgtgcaaaacaaatta

SEQ ID NO: 87157 - DNA, 19 bp, Homo sapiens
  siRNA target sequence for KIF1B (NM_015074.1,1232-1250).
ccaaactggttcgtgaatt

SEQ ID NO: 87158 - DNA, 19 bp, Homo sapiens
  siRNA target sequence for KIF1B (NM_015074.1,1233-1251).
caaactggttcgtgaatta

SEQ ID NO: 87159 - DNA, 19 bp, Homo sapiens
  siRNA target sequence for KIF1B (NM_015074.1,1293-1311).
gggcctgggagatattatt

SEQ ID NO: 87160 - DNA, 19 bp, Homo sapiens
  siRNA target sequence for KIF1B (NM_015074.1,1377-1395).
gacgtctgtgaccagtatt

SEQ ID NO: 87161 - DNA, 19 bp, Homo sapiens
  siRNA target sequence for KIF1B (NM_015074.1,1379-1397).
cgtctgtgaccagtattca

SEQ ID NO: 87162 - DNA, 19 bp, Homo sapiens
  siRNA target sequence for KIF1B (NM_015074.1,1396-1414).
caagagaggatcatgtcta

SEQ ID NO: 87163 - DNA, 19 bp, Homo sapiens
  siRNA target sequence for KIF1B (NM_015074.1,1576-1594).
ggaaccctaggggttttct

SEQ ID NO: 87164 - DNA, 19 bp, Homo sapiens
  siRNA target sequence for KIF1B (NM_015074.1,1644-1662).
gtctgagtgcctactttat

SEQ ID NO: 87165 - DNA, 19 bp, Homo sapiens
  siRNA target sequence for KIF1B (NM_015074.1,1648-1666).
gagtgcctactttattaca

SEQ ID NO: 87166 - DNA, 19 bp, Homo sapiens
  siRNA target sequence for KIF1B (NM_015074.1,1652-1670).
gcctactttattacatcaa

SEQ ID NO: 87167 - DNA, 19 bp, Homo sapiens
  siRNA target sequence for KIF1B (NM_015074.1,1653-1671).
cctactttattacatcaaa

SEQ ID NO: 87168 - DNA, 19 bp, Homo sapiens
  siRNA target sequence for KIF1B (NM_015074.1,1810-1828).
ccctgtgagcgctcagaaa

SEQ ID NO: 87169 - DNA, 19 bp, Homo sapiens
  siRNA target sequence for KIF1B (NM_015074.1,1814-1832).
gtgagcgctcagaaaccta

SEQ ID NO: 87170 - DNA, 19 bp, Homo sapiens
  siRNA target sequence for KIF1B (NM_015074.1,1819-1837).
cgctcagaaacctacgtaa

SEQ ID NO: 87171 - DNA, 19 bp, Homo sapiens
  siRNA target sequence for KIF1B (NM_015074.1,1820-1838).
gctcagaaacctacgtaaa

SEQ ID NO: 87172 - DNA, 19 bp, Homo sapiens
  siRNA target sequence for KIF1B (NM_015074.1,1883-1901).
gtatcatcatgggtaaaaa

SEQ ID NO: 87173 - DNA, 19 bp, Homo sapiens
  siRNA target sequence for KIF1B (NM_015074.1,2234-2252).
cacagcatgaatttgagtt

SEQ ID NO: 87174 - DNA, 19 bp, Homo sapiens
  siRNA target sequence for KIF1B (NM_015074.1,2294-2312).
cttcattacgggacttact

SEQ ID NO: 87175 - DNA, 19 bp, Homo sapiens
  siRNA target sequence for KIF1B (NM_015074.1,2318-2336).
gcaatgccgtgtacctaaa

SEQ ID NO: 87176 - DNA, 19 bp, Homo sapiens
  siRNA target sequence for KIF1B (NM_015074.1,2417-2435).
ctttgcctcctgaattact

SEQ ID NO: 87177 - DNA, 19 bp, Homo sapiens
  siRNA target sequence for KIF1B (NM_015074.1,2492-2510).
cagtagaagtccaggattt

SEQ ID NO: 87178 - DNA, 19 bp, Homo sapiens
  siRNA target sequence for KIF1B (NM_015074.1,2514-2532).
gaatggagcaacacactat

SEQ ID NO: 87179 - DNA, 19 bp, Homo sapiens
  siRNA target sequence for KIF1B (NM_015074.1,2687-2705).
ggagctcccccattttcca

SEQ ID NO: 87180 - DNA, 19 bp, Homo sapiens
  siRNA target sequence for KIF1B (NM_015074.1,2891-2909).
ggcatgacccgttttacga

SEQ ID NO: 87181 - DNA, 19 bp, Homo sapiens
  siRNA target sequence for KIF1B (NM_015074.1,2910-2928).
ccgatccccttggttcatt

SEQ ID NO: 87182 - DNA, 19 bp, Homo sapiens
  siRNA target sequence for KIF1B (NM_015074.1,2911-2929).
cgatccccttggttcattt

SEQ ID NO: 87183 - DNA, 19 bp, Homo sapiens
  siRNA target sequence for KIF1B (NM_015074.1,2912-2930).
gatccccttggttcatttt

SEQ ID NO: 87184 - DNA, 19 bp, Homo sapiens
  siRNA target sequence for KIF1B (NM_015074.1,3014-3032).
gtgaagtgcggggatttct

SEQ ID NO: 87185 - DNA, 19 bp, Homo sapiens
  siRNA target sequence for KIF1B (NM_015074.1,3099-3117).
gtcaggaacagctaaaata

SEQ ID NO: 87186 - DNA, 19 bp, Homo sapiens
  siRNA target sequence for KIF1B (NM_015074.1,3234-3252).
catcactcctccagaagaa

SEQ ID NO: 87187 - DNA, 19 bp, Homo sapiens
  siRNA target sequence for KIF1B (NM_015074.1,3247-3265).
gaagaaatcagtcgaatta

SEQ ID NO: 87188 - DNA, 19 bp, Homo sapiens
  siRNA target sequence for KIF1B (NM_015074.1,3259-3277).
cgaattaatgacttggatt

SEQ ID NO: 87189 - DNA, 19 bp, Homo sapiens
  siRNA target sequence for KIF1B (NM_015074.1,3287-3305).
gcactttgctggatggtaa

SEQ ID NO: 87190 - DNA, 19 bp, Homo sapiens
  siRNA target sequence for KIF1B (NM_015074.1,3295-3313).
ctggatggtaagatggtaa

SEQ ID NO: 87191 - DNA, 19 bp, Homo sapiens
  siRNA target sequence for KIF1B (NM_015074.1,3363-3381).
cttcactttccgagtaaca

SEQ ID NO: 87192 - DNA, 19 bp, Homo sapiens
  siRNA target sequence for KIF1B (NM_015074.1,3407-3425).
cagagtatgcagatatctt

SEQ ID NO: 87193 - DNA, 19 bp, Homo sapiens
  siRNA target sequence for KIF1B (NM_015074.1,3500-3518).
gtcccctggccttttatca

SEQ ID NO: 87194 - DNA, 19 bp, Homo sapiens
  siRNA target sequence for KIF1B (NM_015074.1,3567-3585).
caaaaccaagcctattgta

SEQ ID NO: 87195 - DNA, 19 bp, Homo sapiens
  siRNA target sequence for KIF1B (NM_015074.1,3703-3721).
gttccagccaccaagttaa

SEQ ID NO: 87196 - DNA, 19 bp, Homo sapiens
  siRNA target sequence for KIF1B (NM_015074.1,3706-3724).
ccagccaccaagttaaaca

SEQ ID NO: 87197 - DNA, 19 bp, Homo sapiens
  siRNA target sequence for KIF1B (NM_015074.1,3747-3765).
ccagagcatgagcaagtat

SEQ ID NO: 87198 - DNA, 19 bp, Homo sapiens
  siRNA target sequence for KIF1B (NM_015074.1,3799-3817).
gagcctacaggagagtata

SEQ ID NO: 87199 - DNA, 19 bp, Homo sapiens
  siRNA target sequence for KIF1B (NM_015074.1,3893-3911).
ggatcacagtgaccattat

SEQ ID NO: 87200 - DNA, 19 bp, Homo sapiens
  siRNA target sequence for KIF1B (NM_015074.1,3897-3915).
cacagtgaccattatccat

SEQ ID NO: 87201 - DNA, 19 bp, Homo sapiens
  siRNA target sequence for KIF1B (NM_015074.1,3923-3941).
ggagcgagctccattggaa

SEQ ID NO: 87202 - DNA, 19 bp, Homo sapiens
  siRNA target sequence for KIF1B (NM_015074.1,4009-4027).
gccatcctctccctaaata

SEQ ID NO: 87203 - DNA, 19 bp, Homo sapiens
  siRNA target sequence for KIF1B (NM_015074.1,4011-4029).
catcctctccctaaatatt

SEQ ID NO: 87204 - DNA, 19 bp, Homo sapiens
  siRNA target sequence for KIF1B (NM_015074.1,4014-4032).
cctctccctaaatattatt

SEQ ID NO: 87205 - DNA, 19 bp, Homo sapiens
  siRNA target sequence for KIF1B (NM_015074.1,4036-4054).
gccaagtacctgaagtctt

SEQ ID NO: 87206 - DNA, 19 bp, Homo sapiens
  siRNA target sequence for KIF1B (NM_015074.1,4225-4243).
gtgtgcatggtcttctact

SEQ ID NO: 87207 - DNA, 19 bp, Homo sapiens
  siRNA target sequence for KIF1B (NM_015074.1,4291-4309).
ggcagcggctactcaaagt

SEQ ID NO: 87208 - DNA, 19 bp, Homo sapiens
  siRNA target sequence for KIF1B (NM_015074.1,4304-4322).
caaagtcaccagattcgaa

SEQ ID NO: 87209 - DNA, 19 bp, Homo sapiens
  siRNA target sequence for KIF1B (NM_015074.1,4325-4343).
gagtcactggcatttacga

SEQ ID NO: 87210 - DNA, 19 bp, Homo sapiens
  siRNA target sequence for KIF1B (NM_015074.1,4341-4359).
cgaactcagcttatgcaaa

SEQ ID NO: 87211 - DNA, 19 bp, Homo sapiens
  siRNA target sequence for KIF1B (NM_015074.1,4347-4365).
cagcttatgcaaaatgtca

SEQ ID NO: 87212 - DNA, 19 bp, Homo sapiens
  siRNA target sequence for KIF1B (NM_015074.1,4431-4449).
gcggggagaagagaactta

SEQ ID NO: 87213 - DNA, 19 bp, Homo sapiens
  siRNA target sequence for KIF1B (NM_015074.1,4519-4537).
ctacatgaggtggaaaaaa

SEQ ID NO: 87214 - DNA, 19 bp, Homo sapiens
  siRNA target sequence for KIF1B (NM_015074.1,4698-4716).
cgagagcagtggctatgat

SEQ ID NO: 87215 - DNA, 19 bp, Homo sapiens
  siRNA target sequence for KIF1B (NM_015074.1,4699-4717).
gagagcagtggctatgatt

SEQ ID NO: 87216 - DNA, 19 bp, Homo sapiens
  siRNA target sequence for KIF1B (NM_015074.1,4701-4719).
gagcagtggctatgattca

SEQ ID NO: 87217 - DNA, 19 bp, Homo sapiens
  siRNA target sequence for KIF1B (NM_015074.1,4714-4732).
gattcaggagacatcgaaa

SEQ ID NO: 87218 - DNA, 19 bp, Homo sapiens
  siRNA target sequence for KIF1B (NM_015074.1,4763-4781).
ccaagtgcctgcaacttct

SEQ ID NO: 87219 - DNA, 19 bp, Homo sapiens
  siRNA target sequence for KIF1B (NM_015074.1,4777-4795).
cttctcacccacactttca

SEQ ID NO: 87220 - DNA, 19 bp, Homo sapiens
  siRNA target sequence for KIF1B (NM_015074.1,4820-4838).
gcagcgtcagtgactgtaa

SEQ ID NO: 87221 - DNA, 19 bp, Homo sapiens
  siRNA target sequence for KIF1B (NM_015074.1,4823-4841).
gcgtcagtgactgtaagtt

SEQ ID NO: 87222 - DNA, 19 bp, Homo sapiens
  siRNA target sequence for KIF1B (NM_015074.1,4825-4843).
gtcagtgactgtaagttgt

SEQ ID NO: 87223 - DNA, 19 bp, Homo sapiens
  siRNA target sequence for KIF1B (NM_015074.1,4842-4860).
gtctgatatctctccaatt

SEQ ID NO: 87224 - DNA, 19 bp, Homo sapiens
  siRNA target sequence for KIF1B (NM_015074.1,4870-4888).
ccctctgagtccagtttca

SEQ ID NO: 87225 - DNA, 19 bp, Homo sapiens
  siRNA target sequence for KIF1B (NM_015074.1,4997-5015).
gcccagaatttgaacagtt

SEQ ID NO: 87226 - DNA, 19 bp, Homo sapiens
  siRNA target sequence for KIF1B (NM_015074.1,4998-5016).
cccagaatttgaacagttt

SEQ ID NO: 87227 - DNA, 19 bp, Homo sapiens
  siRNA target sequence for KIF1B (NM_015074.1,5051-5069).
cccgagcaggaaaaaacga

SEQ ID NO: 87228 - DNA, 19 bp, Homo sapiens
  siRNA target sequence for KIF1B (NM_015074.1,5060-5078).
gaaaaaacgaatttctcaa

SEQ ID NO: 87229 - DNA, 19 bp, Homo sapiens
  siRNA target sequence for KIF1B (NM_015074.1,5076-5094).
caatcttgttccagatatt

SEQ ID NO: 87230 - DNA, 19 bp, Homo sapiens
  siRNA target sequence for KIF1B (NM_015074.1,5116-5134).
gtggtctctaagaaaggat

SEQ ID NO: 87231 - DNA, 19 bp, Homo sapiens
  siRNA target sequence for KIF1B (NM_015074.1,5145-5163).
caaggagcctctttacagt

SEQ ID NO: 87232 - DNA, 19 bp, Homo sapiens
  siRNA target sequence for KIF1B (NM_015074.1,5188-5206).
gtccgtcggccttatgtct

SEQ ID NO: 87233 - DNA, 19 bp, Homo sapiens
  siRNA target sequence for KIF1B (NM_015074.1,5192-5210).
gtcggccttatgtcttcat

SEQ ID NO: 87234 - DNA, 19 bp, Homo sapiens
  siRNA target sequence for KIF1B (NM_015074.1,5194-5212).
cggccttatgtcttcatct

SEQ ID NO: 87235 - DNA, 19 bp, Homo sapiens
  siRNA target sequence for KIF1B (NM_015074.1,5196-5214).
gccttatgtcttcatctat

SEQ ID NO: 87236 - DNA, 19 bp, Homo sapiens
  siRNA target sequence for KIF1B (NM_015074.1,5197-5215).
ccttatgtcttcatctata

SEQ ID NO: 87237 - DNA, 19 bp, Homo sapiens
  siRNA target sequence for KIF1B (NM_015074.1,5373-5391).
catgaacgactggttgtat

SEQ ID NO: 87238 - DNA, 19 bp, Homo sapiens
  siRNA target sequence for KIF1B (NM_015074.1,5444-5462).
gcccgagccagtcgaaata

SEQ ID NO: 87239 - DNA, 19 bp, Homo sapiens
  siRNA target sequence for KIF1B (NM_015074.1,5446-5464).
ccgagccagtcgaaatact

SEQ ID NO: 87240 - DNA, 19 bp, Homo sapiens
  siRNA target sequence for KIF2 (NM_004520.1,100-118).
gacctggagagcatctttt

SEQ ID NO: 87241 - DNA, 19 bp, Homo sapiens
  siRNA target sequence for KIF2 (NM_004520.1,184-202).
gcatcctcagccaaagtaa

SEQ ID NO: 87242 - DNA, 19 bp, Homo sapiens
  siRNA target sequence for KIF2 (NM_004520.1,223-241).
cggactgtagcttctatta

SEQ ID NO: 87243 - DNA, 19 bp, Homo sapiens
  siRNA target sequence for KIF2 (NM_004520.1,224-242).
ggactgtagcttctattaa

SEQ ID NO: 87244 - DNA, 19 bp, Homo sapiens
  siRNA target sequence for KIF2 (NM_004520.1,243-261).
gaatgaccctccttcaaga

SEQ ID NO: 87245 - DNA, 19 bp, Homo sapiens
  siRNA target sequence for KIF2 (NM_004520.1,247-265).
gaccctccttcaagagata

SEQ ID NO: 87246 - DNA, 19 bp, Homo sapiens
  siRNA target sequence for KIF2 (NM_004520.1,286-304).
cgtgcacggcccagtcaat

SEQ ID NO: 87247 - DNA, 19 bp, Homo sapiens
  siRNA target sequence for KIF2 (NM_004520.1,287-305).
gtgcacggcccagtcaatt

SEQ ID NO: 87248 - DNA, 19 bp, Homo sapiens
  siRNA target sequence for KIF2 (NM_004520.1,328-346).
caacagaatggtagtgttt

SEQ ID NO: 87249 - DNA, 19 bp, Homo sapiens
  siRNA target sequence for KIF2 (NM_004520.1,333-351).
gaatggtagtgtttcagat

SEQ ID NO: 87250 - DNA, 19 bp, Homo sapiens
  siRNA target sequence for KIF2 (NM_004520.1,337-355).
ggtagtgtttcagatatat

SEQ ID NO: 87251 - DNA, 19 bp, Homo sapiens
  siRNA target sequence for KIF2 (NM_004520.1,386-404).
gacccccttcacgtagaaa

SEQ ID NO: 87252 - DNA, 19 bp, Homo sapiens
  siRNA target sequence for KIF2 (NM_004520.1,458-476).
gattgcaacagcaagaact

SEQ ID NO: 87253 - DNA, 19 bp, Homo sapiens
  siRNA target sequence for KIF2 (NM_004520.1,514-532).
ccaaattatgaaattatgt

SEQ ID NO: 87254 - DNA, 19 bp, Homo sapiens
  siRNA target sequence for KIF2 (NM_004520.1,531-549).
gtgtatgatcagagacttt

SEQ ID NO: 87255 - DNA, 19 bp, Homo sapiens
  siRNA target sequence for KIF2 (NM_004520.1,542-560).
gagactttagaggaagttt

SEQ ID NO: 87256 - DNA, 19 bp, Homo sapiens
  siRNA target sequence for KIF2 (NM_004520.1,546-564).
ctttagaggaagtttggat

SEQ ID NO: 87257 - DNA, 19 bp, Homo sapiens
  siRNA target sequence for KIF2 (NM_004520.1,561-579).
ggattatagaccattaaca

SEQ ID NO: 87258 - DNA, 19 bp, Homo sapiens
  siRNA target sequence for KIF2 (NM_004520.1,578-596).
caacagcagatcctattga

SEQ ID NO: 87259 - DNA, 19 bp, Homo sapiens
  siRNA target sequence for KIF2 (NM_004520.1,590-608).
ctattgatgaacataggat

SEQ ID NO: 87260 - DNA, 19 bp, Homo sapiens
  siRNA target sequence for KIF2 (NM_004520.1,677-695).
caattcctagtaaagatgt

SEQ ID NO: 87261 - DNA, 19 bp, Homo sapiens
  siRNA target sequence for KIF2 (NM_004520.1,702-720).
ggtacatgaaccaaaacaa

SEQ ID NO: 87262 - DNA, 19 bp, Homo sapiens
  siRNA target sequence for KIF2 (NM_004520.1,734-752).
caaggtacctagaaaacca

SEQ ID NO: 87263 - DNA, 19 bp, Homo sapiens
  siRNA target sequence for KIF2 (NM_004520.1,796-814).
gaaatggtttacaggttta

SEQ ID NO: 87264 - DNA, 19 bp, Homo sapiens
  siRNA target sequence for KIF2 (NM_004520.1,824-842).
cactagtggaaactatatt

SEQ ID NO: 87265 - DNA, 19 bp, Homo sapiens
  siRNA target sequence for KIF2 (NM_004520.1,849-867).
gggaatggctacatgcttt

SEQ ID NO: 87266 - DNA, 19 bp, Homo sapiens
  siRNA target sequence for KIF2 (NM_004520.1,965-983).
ctcgagatgtctttttaat

SEQ ID NO: 87267 - DNA, 19 bp, Homo sapiens
  siRNA target sequence for KIF2 (NM_004520.1,999-1017).
ctataagaagctagaactt

SEQ ID NO: 87268 - DNA, 19 bp, Homo sapiens
  siRNA target sequence for KIF2 (NM_004520.1,1005-1023).
gaagctagaacttcaagta

SEQ ID NO: 87269 - DNA, 19 bp, Homo sapiens
  siRNA target sequence for KIF2 (NM_004520.1,1012-1030).
gaacttcaagtatatgcaa

SEQ ID NO: 87270 - DNA, 19 bp, Homo sapiens
  siRNA target sequence for KIF2 (NM_004520.1,1049-1067).
gtggaaaggtgtttgactt

SEQ ID NO: 87271 - DNA, 19 bp, Homo sapiens
  siRNA target sequence for KIF2 (NM_004520.1,1135-1153).
caggaacgggaggtcaaat

SEQ ID NO: 87272 - DNA, 19 bp, Homo sapiens
  siRNA target sequence for KIF2 (NM_004520.1,1137-1155).
ggaacgggaggtcaaatgt

SEQ ID NO: 87273 - DNA, 19 bp, Homo sapiens
  siRNA target sequence for KIF2 (NM_004520.1,1197-1215).
cagaacatccggtcaaaca

SEQ ID NO: 87274 - DNA, 19 bp, Homo sapiens
  siRNA target sequence for KIF2 (NM_004520.1,1206-1224).
cggtcaaacatctgcaaat

SEQ ID NO: 87275 - DNA, 19 bp, Homo sapiens
  siRNA target sequence for KIF2 (NM_004520.1,1415-1433).
gagccttaggtagaaataa

SEQ ID NO: 87276 - DNA, 19 bp, Homo sapiens
  siRNA target sequence for KIF2 (NM_004520.1,1419-1437).
cttaggtagaaataaacct

SEQ ID NO: 87277 - DNA, 19 bp, Homo sapiens
  siRNA target sequence for KIF2 (NM_004520.1,1442-1460).
ctcctttccgtgcaagtaa

SEQ ID NO: 87278 - DNA, 19 bp, Homo sapiens
  siRNA target sequence for KIF2 (NM_004520.1,1500-1518).
ctctcgtacctgcatgatt

SEQ ID NO: 87279 - DNA, 19 bp, Homo sapiens
  siRNA target sequence for KIF2 (NM_004520.1,1701-1719).
gagagatgatctaaaactt

SEQ ID NO: 87280 - DNA, 19 bp, Homo sapiens
  siRNA target sequence for KIF2 (NM_004520.1,1703-1721).
gagatgatctaaaacttct

SEQ ID NO: 87281 - DNA, 19 bp, Homo sapiens
  siRNA target sequence for KIF2 (NM_004520.1,1825-1843).
gcagtgttccaggaatcta

SEQ ID NO: 87282 - DNA, 19 bp, Homo sapiens
  siRNA target sequence for KIF2 (NM_004520.1,1826-1844).
cagtgttccaggaatctat

SEQ ID NO: 87283 - DNA, 19 bp, Homo sapiens
  siRNA target sequence for KIF2 (NM_004520.1,1841-1859).
ctattcggtggttagaaga

SEQ ID NO: 87284 - DNA, 19 bp, Homo sapiens
  siRNA target sequence for KIF2 (NM_004520.1,1846-1864).
cggtggttagaagatgaaa

SEQ ID NO: 87285 - DNA, 19 bp, Homo sapiens
  siRNA target sequence for KIF2 (NM_004520.1,1894-1912).
gattatgatgtcgattcat

SEQ ID NO: 87286 - DNA, 19 bp, Homo sapiens
  siRNA target sequence for KIF2 (NM_004520.1,1900-1918).
gatgtcgattcatatgcta

SEQ ID NO: 87287 - DNA, 19 bp, Homo sapiens
  siRNA target sequence for KIF2 (NM_004520.1,1905-1923).
cgattcatatgctacacaa

SEQ ID NO: 87288 - DNA, 19 bp, Homo sapiens
  siRNA target sequence for KIF2 (NM_004520.1,1961-1979).
ctgaactgcgggataaagt

SEQ ID NO: 87289 - DNA, 19 bp, Homo sapiens
  siRNA target sequence for KIF2 (NM_004520.1,1963-1981).
gaactgcgggataaagtga

SEQ ID NO: 87290 - DNA, 19 bp, Homo sapiens
  siRNA target sequence for KIF2 (NM_004520.1,1968-1986).
gcgggataaagtgaaatct

SEQ ID NO: 87291 - DNA, 19 bp, Homo sapiens
  siRNA target sequence for KIF2 (NM_004520.1,1969-1987).
cgggataaagtgaaatctt

SEQ ID NO: 87292 - DNA, 19 bp, Homo sapiens
  siRNA target sequence for KIF20A (NM_005733.1,70-88).
gatgacgatgtcgtagttt

SEQ ID NO: 87293 - DNA, 19 bp, Homo sapiens
  siRNA target sequence for KIF20A (NM_005733.1,209-227).
gtatggagaaggtgaaagt

SEQ ID NO: 87294 - DNA, 19 bp, Homo sapiens
  siRNA target sequence for KIF20A (NM_005733.1,283-301).
ggttgtgtccgtattgaga

SEQ ID NO: 87295 - DNA, 19 bp, Homo sapiens
  siRNA target sequence for KIF20A (NM_005733.1,284-302).
gttgtgtccgtattgagaa

SEQ ID NO: 87296 - DNA, 19 bp, Homo sapiens
  siRNA target sequence for KIF20A (NM_005733.1,287-305).
gtgtccgtattgagaatgt

SEQ ID NO: 87297 - DNA, 19 bp, Homo sapiens
  siRNA target sequence for KIF20A (NM_005733.1,306-324).
ggagacccttgttctacaa

SEQ ID NO: 87298 - DNA, 19 bp, Homo sapiens
  siRNA target sequence for KIF20A (NM_005733.1,427-445).
gcatccttcttcaacctaa

SEQ ID NO: 87299 - DNA, 19 bp, Homo sapiens
  siRNA target sequence for KIF20A (NM_005733.1,486-504).
ctggctcatctatacatat

SEQ ID NO: 87300 - DNA, 19 bp, Homo sapiens
  siRNA target sequence for KIF20A (NM_005733.1,522-540).
gaaaacccacacgattcaa

SEQ ID NO: 87301 - DNA, 19 bp, Homo sapiens
  siRNA target sequence for KIF20A (NM_005733.1,640-658).
ctctccaatgaggtaatct

SEQ ID NO: 87302 - DNA, 19 bp, Homo sapiens
  siRNA target sequence for KIF20A (NM_005733.1,811-829).
gctgggctctcttctatca

SEQ ID NO: 87303 - DNA, 19 bp, Homo sapiens
  siRNA target sequence for KIF20A (NM_005733.1,852-870).
gctggatgaaacaagtcat

SEQ ID NO: 87304 - DNA, 19 bp, Homo sapiens
  siRNA target sequence for KIF20A (NM_005733.1,932-950).
ggatctcattctttgagat

SEQ ID NO: 87305 - DNA, 19 bp, Homo sapiens
  siRNA target sequence for KIF20A (NM_005733.1,951-969).
ctacaacgaactgctttat

SEQ ID NO: 87306 - DNA, 19 bp, Homo sapiens
  siRNA target sequence for KIF20A (NM_005733.1,1015-1033).
cggctatgcgaggatcaaa

SEQ ID NO: 87307 - DNA, 19 bp, Homo sapiens
  siRNA target sequence for KIF20A (NM_005733.1,1016-1034).
ggctatgcgaggatcaaaa

SEQ ID NO: 87308 - DNA, 19 bp, Homo sapiens
  siRNA target sequence for KIF20A (NM_005733.1,1017-1035).
gctatgcgaggatcaaaat

SEQ ID NO: 87309 - DNA, 19 bp, Homo sapiens
  siRNA target sequence for KIF20A (NM_005733.1,1037-1055).
gcaatccctatgtgaaaga

SEQ ID NO: 87310 - DNA, 19 bp, Homo sapiens
  siRNA target sequence for KIF20A (NM_005733.1,1166-1184).
gtcacagcatcttctcaat

SEQ ID NO: 87311 - DNA, 19 bp, Homo sapiens
  siRNA target sequence for KIF20A (NM_005733.1,1213-1231).
gatatagtccccaagatca

SEQ ID NO: 87312 - DNA, 19 bp, Homo sapiens
  siRNA target sequence for KIF20A (NM_005733.1,1421-1439).
ctcgagtgttccaaggttt

SEQ ID NO: 87313 - DNA, 19 bp, Homo sapiens
  siRNA target sequence for KIF20A (NM_005733.1,1426-1444).
gtgttccaaggtttcttca

SEQ ID NO: 87314 - DNA, 19 bp, Homo sapiens
  siRNA target sequence for KIF20A (NM_005733.1,1485-1503).
ctgtgcatctacctatgat

SEQ ID NO: 87315 - DNA, 19 bp, Homo sapiens
  siRNA target sequence for KIF20A (NM_005733.1,1487-1505).
gtgcatctacctatgatga

SEQ ID NO: 87316 - DNA, 19 bp, Homo sapiens
  siRNA target sequence for KIF20A (NM_005733.1,1493-1511).
ctacctatgatgaaactct

SEQ ID NO: 87317 - DNA, 19 bp, Homo sapiens
  siRNA target sequence for KIF20A (NM_005733.1,1497-1515).
ctatgatgaaactcttcat

SEQ ID NO: 87318 - DNA, 19 bp, Homo sapiens
  siRNA target sequence for KIF20A (NM_005733.1,1510-1528).
cttcatgtggccaagttct

SEQ ID NO: 87319 - DNA, 19 bp, Homo sapiens
  siRNA target sequence for KIF20A (NM_005733.1,1596-1614).
catcaaggaacatagtctt

SEQ ID NO: 87320 - DNA, 19 bp, Homo sapiens
  siRNA target sequence for KIF20A (NM_005733.1,1782-1800).
gatgcatctccgagatgaa

SEQ ID NO: 87321 - DNA, 19 bp, Homo sapiens
  siRNA target sequence for KIF20A (NM_005733.1,1789-1807).
ctccgagatgaaatttgca

SEQ ID NO: 87322 - DNA, 19 bp, Homo sapiens
  siRNA target sequence for KIF20A (NM_005733.1,1805-1823).
gcaatgagatggtagaaca

SEQ ID NO: 87323 - DNA, 19 bp, Homo sapiens
  siRNA target sequence for KIF20A (NM_005733.1,1873-1891).
gaactattggaggaaatgt

SEQ ID NO: 87324 - DNA, 19 bp, Homo sapiens
  siRNA target sequence for KIF20A (NM_005733.1,2044-2062).
gccctacggcggtcacaaa

SEQ ID NO: 87325 - DNA, 19 bp, Homo sapiens
  siRNA target sequence for KIF20A (NM_005733.1,2147-2165).
ctgaagagttgcataagta

SEQ ID NO: 87326 - DNA, 19 bp, Homo sapiens
  siRNA target sequence for KIF20A (NM_005733.1,2154-2172).
gttgcataagtatcagaaa

SEQ ID NO: 87327 - DNA, 19 bp, Homo sapiens
  siRNA target sequence for KIF20A (NM_005733.1,2322-2340).
cactggggcaggaaaactt

SEQ ID NO: 87328 - DNA, 19 bp, Homo sapiens
  siRNA target sequence for KIF20A (NM_005733.1,2357-2375).
cttgtgatgacatcttaat

SEQ ID NO: 87329 - DNA, 19 bp, Homo sapiens
  siRNA target sequence for KIF20A (NM_005733.1,2360-2378).
gtgatgacatcttaatcaa

SEQ ID NO: 87330 - DNA, 19 bp, Homo sapiens
  siRNA target sequence for KIF20A (NM_005733.1,2459-2477).
ctgagcagtatcatactgt

SEQ ID NO: 87331 - DNA, 19 bp, Homo sapiens
  siRNA target sequence for KIF20A (NM_005733.1,2466-2484).
gtatcatactgtgttgaaa

SEQ ID NO: 87332 - DNA, 19 bp, Homo sapiens
  siRNA target sequence for KIF20A (NM_005733.1,2519-2537).
gtaccaaccaggaaaatca

SEQ ID NO: 87333 - DNA, 19 bp, Homo sapiens
  siRNA target sequence for KIF20A (NM_005733.1,2651-2669).
cacggcgttcccctttact

SEQ ID NO: 87334 - DNA, 19 bp, Homo sapiens
  siRNA target sequence for KIF20A (NM_005733.1,2653-2671).
cggcgttcccctttactca

SEQ ID NO: 87335 - DNA, 19 bp, Homo sapiens
  siRNA target sequence for KIF20A (NM_005733.1,2654-2672).
ggcgttcccctttactcaa

SEQ ID NO: 87336 - DNA, 19 bp, Homo sapiens
  siRNA target sequence for KIF20A (NM_005733.1,2655-2673).
gcgttcccctttactcaaa

SEQ ID NO: 87337 - DNA, 19 bp, Homo sapiens
  siRNA target sequence for KIF21A (NM_017641.2,176-194).
gcgggtggctgtcagaata

SEQ ID NO: 87338 - DNA, 19 bp, Homo sapiens
  siRNA target sequence for KIF21A (NM_017641.2,177-195).
cgggtggctgtcagaataa

SEQ ID NO: 87339 - DNA, 19 bp, Homo sapiens
  siRNA target sequence for KIF21A (NM_017641.2,179-197).
ggtggctgtcagaataaga

SEQ ID NO: 87340 - DNA, 19 bp, Homo sapiens
  siRNA target sequence for KIF21A (NM_017641.2,198-216).
ccacagcttgccaaagaga

SEQ ID NO: 87341 - DNA, 19 bp, Homo sapiens
  siRNA target sequence for KIF21A (NM_017641.2,225-243).
ggatgccatatttgtacat

SEQ ID NO: 87342 - DNA, 19 bp, Homo sapiens
  siRNA target sequence for KIF21A (NM_017641.2,324-342).
cagcaagagcagatctaca

SEQ ID NO: 87343 - DNA, 19 bp, Homo sapiens
  siRNA target sequence for KIF21A (NM_017641.2,326-344).
gcaagagcagatctacatt

SEQ ID NO: 87344 - DNA, 19 bp, Homo sapiens
  siRNA target sequence for KIF21A (NM_017641.2,335-353).
gatctacattcaatgtata

SEQ ID NO: 87345 - DNA, 19 bp, Homo sapiens
  siRNA target sequence for KIF21A (NM_017641.2,370-388).
gttgctttgaaggatacaa

SEQ ID NO: 87346 - DNA, 19 bp, Homo sapiens
  siRNA target sequence for KIF21A (NM_017641.2,442-460).
gaacaggatttgatgttaa

SEQ ID NO: 87347 - DNA, 19 bp, Homo sapiens
  siRNA target sequence for KIF21A (NM_017641.2,468-486).
gaggaagaactgggtatta

SEQ ID NO: 87348 - DNA, 19 bp, Homo sapiens
  siRNA target sequence for KIF21A (NM_017641.2,470-488).
ggaagaactgggtattatt

SEQ ID NO: 87349 - DNA, 19 bp, Homo sapiens
  siRNA target sequence for KIF21A (NM_017641.2,561-579).
gctccagattttaaagtga

SEQ ID NO: 87350 - DNA, 19 bp, Homo sapiens
  siRNA target sequence for KIF21A (NM_017641.2,636-654).
cgtgatattgatgcaaaaa

SEQ ID NO: 87351 - DNA, 19 bp, Homo sapiens
  siRNA target sequence for KIF21A (NM_017641.2,742-760).
cagagatgatgcagtgttt

SEQ ID NO: 87352 - DNA, 19 bp, Homo sapiens
  siRNA target sequence for KIF21A (NM_017641.2,791-809).
cagtacccagatgaatgtt

SEQ ID NO: 87353 - DNA, 19 bp, Homo sapiens
  siRNA target sequence for KIF21A (NM_017641.2,793-811).
gtacccagatgaatgttca

SEQ ID NO: 87354 - DNA, 19 bp, Homo sapiens
  siRNA target sequence for KIF21A (NM_017641.2,817-835).
ctcgttcacatgccatttt

SEQ ID NO: 87355 - DNA, 19 bp, Homo sapiens
  siRNA target sequence for KIF21A (NM_017641.2,857-875).
cagagtgtgtccccaaata

SEQ ID NO: 87356 - DNA, 19 bp, Homo sapiens
  siRNA target sequence for KIF21A (NM_017641.2,859-877).
gagtgtgtccccaaataga

SEQ ID NO: 87357 - DNA, 19 bp, Homo sapiens
  siRNA target sequence for KIF21A (NM_017641.2,869-887).
ccaaatagatgctgacaat

SEQ ID NO: 87358 - DNA, 19 bp, Homo sapiens
  siRNA target sequence for KIF21A (NM_017641.2,942-960).
ctgactgcaaagttccatt

SEQ ID NO: 87359 - DNA, 19 bp, Homo sapiens
  siRNA target sequence for KIF21A (NM_017641.2,1023-1041).
gaaggcatttctatcaact

SEQ ID NO: 87360 - DNA, 19 bp, Homo sapiens
  siRNA target sequence for KIF21A (NM_017641.2,1052-1070).
ggcacttggcaatgtaata

SEQ ID NO: 87361 - DNA, 19 bp, Homo sapiens
  siRNA target sequence for KIF21A (NM_017641.2,1053-1071).
gcacttggcaatgtaataa

SEQ ID NO: 87362 - DNA, 19 bp, Homo sapiens
  siRNA target sequence for KIF21A (NM_017641.2,1100-1118).
cacacatgtcccctataga

SEQ ID NO: 87363 - DNA, 19 bp, Homo sapiens
  siRNA target sequence for KIF21A (NM_017641.2,1102-1120).
cacatgtcccctatagaga

SEQ ID NO: 87364 - DNA, 19 bp, Homo sapiens
  siRNA target sequence for KIF21A (NM_017641.2,1104-1122).
catgtcccctatagagatt

SEQ ID NO: 87365 - DNA, 19 bp, Homo sapiens
  siRNA target sequence for KIF21A (NM_017641.2,1124-1142).
caagctaacaagactacta

SEQ ID NO: 87366 - DNA, 19 bp, Homo sapiens
  siRNA target sequence for KIF21A (NM_017641.2,1146-1164).
gattccctcgggggtaata

SEQ ID NO: 87367 - DNA, 19 bp, Homo sapiens
  siRNA target sequence for KIF21A (NM_017641.2,1156-1174).
ggggtaatagccaaacaat

SEQ ID NO: 87368 - DNA, 19 bp, Homo sapiens
  siRNA target sequence for KIF21A (NM_017641.2,1158-1176).
ggtaatagccaaacaatca

SEQ ID NO: 87369 - DNA, 19 bp, Homo sapiens
  siRNA target sequence for KIF21A (NM_017641.2,1159-1177).
gtaatagccaaacaatcat

SEQ ID NO: 87370 - DNA, 19 bp, Homo sapiens
  siRNA target sequence for KIF21A (NM_017641.2,1206-1224).
gactttatggaaacgttaa

SEQ ID NO: 87371 - DNA, 19 bp, Homo sapiens
  siRNA target sequence for KIF21A (NM_017641.2,1238-1256).
cgccaatcgagctagaaat

SEQ ID NO: 87372 - DNA, 19 bp, Homo sapiens
  siRNA target sequence for KIF21A (NM_017641.2,1239-1257).
gccaatcgagctagaaata

SEQ ID NO: 87373 - DNA, 19 bp, Homo sapiens
  siRNA target sequence for KIF21A (NM_017641.2,1304-1322).
caatgcacttcgtagtgaa

SEQ ID NO: 87374 - DNA, 19 bp, Homo sapiens
  siRNA target sequence for KIF21A (NM_017641.2,1385-1403).
gggtgtggaaagcatcaat

SEQ ID NO: 87375 - DNA, 19 bp, Homo sapiens
  siRNA target sequence for KIF21A (NM_017641.2,1389-1407).
gtggaaagcatcaatgaca

SEQ ID NO: 87376 - DNA, 19 bp, Homo sapiens
  siRNA target sequence for KIF21A (NM_017641.2,1396-1414).
gcatcaatgacatgtttca

SEQ ID NO: 87377 - DNA, 19 bp, Homo sapiens
  siRNA target sequence for KIF21A (NM_017641.2,1397-1415).
catcaatgacatgtttcat

SEQ ID NO: 87378 - DNA, 19 bp, Homo sapiens
  siRNA target sequence for KIF21A (NM_017641.2,1488-1506).
gcattgaggtccagaatta

SEQ ID NO: 87379 - DNA, 19 bp, Homo sapiens
  siRNA target sequence for KIF21A (NM_017641.2,1565-1583).
ggagattagtaatatgatt

SEQ ID NO: 87380 - DNA, 19 bp, Homo sapiens
  siRNA target sequence for KIF21A (NM_017641.2,1588-1606).
gttatataaaagaaatcga

SEQ ID NO: 87381 - DNA, 19 bp, Homo sapiens
  siRNA target sequence for KIF21A (NM_017641.2,1647-1665).
gagaaccttcgaaaaaact

SEQ ID NO: 87382 - DNA, 19 bp, Homo sapiens
  siRNA target sequence for KIF21A (NM_017641.2,1678-1696).
cagcaagagcgccatattt

SEQ ID NO: 87383 - DNA, 19 bp, Homo sapiens
  siRNA target sequence for KIF21A (NM_017641.2,1680-1698).
gcaagagcgccatatttca

SEQ ID NO: 87384 - DNA, 19 bp, Homo sapiens
  siRNA target sequence for KIF21A (NM_017641.2,1697-1715).
cagcggatcatcaactttt

SEQ ID NO: 87385 - DNA, 19 bp, Homo sapiens
  siRNA target sequence for KIF21A (NM_017641.2,1700-1718).
cggatcatcaactttttct

SEQ ID NO: 87386 - DNA, 19 bp, Homo sapiens
  siRNA target sequence for KIF21A (NM_017641.2,1724-1742).
catactatcctcagacaaa

SEQ ID NO: 87387 - DNA, 19 bp, Homo sapiens
  siRNA target sequence for KIF21A (NM_017641.2,1761-1779).
gacctagcaaaaaaagatt

SEQ ID NO: 87388 - DNA, 19 bp, Homo sapiens
  siRNA target sequence for KIF21A (NM_017641.2,1823-1841).
ggctggtaaagaggataat

SEQ ID NO: 87389 - DNA, 19 bp, Homo sapiens
  siRNA target sequence for KIF21A (NM_017641.2,1824-1842).
gctggtaaagaggataata

SEQ ID NO: 87390 - DNA, 19 bp, Homo sapiens
  siRNA target sequence for KIF21A (NM_017641.2,1828-1846).
gtaaagaggataatacaga

SEQ ID NO: 87391 - DNA, 19 bp, Homo sapiens
  siRNA target sequence for KIF21A (NM_017641.2,1985-2003).
gggtgaaagttctgatgaa

SEQ ID NO: 87392 - DNA, 19 bp, Homo sapiens
  siRNA target sequence for KIF21A (NM_017641.2,2040-2058).
gcagacttggcaaacatta

SEQ ID NO: 87393 - DNA, 19 bp, Homo sapiens
  siRNA target sequence for KIF21A (NM_017641.2,2045-2063).
cttggcaaacattacttgt

SEQ ID NO: 87394 - DNA, 19 bp, Homo sapiens
  siRNA target sequence for KIF21A (NM_017641.2,2048-2066).
ggcaaacattacttgtgaa

SEQ ID NO: 87395 - DNA, 19 bp, Homo sapiens
  siRNA target sequence for KIF21A (NM_017641.2,2059-2077).
cttgtgaaattgcaattaa

SEQ ID NO: 87396 - DNA, 19 bp, Homo sapiens
  siRNA target sequence for KIF21A (NM_017641.2,2078-2096).
gcaaaagctgattgatgaa

SEQ ID NO: 87397 - DNA, 19 bp, Homo sapiens
  siRNA target sequence for KIF21A (NM_017641.2,2116-2134).
gactgcagactctgaaaaa

SEQ ID NO: 87398 - DNA, 19 bp, Homo sapiens
  siRNA target sequence for KIF21A (NM_017641.2,2151-2169).
ctaatgatgctgcaacata

SEQ ID NO: 87399 - DNA, 19 bp, Homo sapiens
  siRNA target sequence for KIF21A (NM_017641.2,2175-2193).
cgggatactcagcttgaaa

SEQ ID NO: 87400 - DNA, 19 bp, Homo sapiens
  siRNA target sequence for KIF21A (NM_017641.2,2177-2195).
ggatactcagcttgaaaga

SEQ ID NO: 87401 - DNA, 19 bp, Homo sapiens
  siRNA target sequence for KIF21A (NM_017641.2,2198-2216).
ccaggtgcttcaaaactta

SEQ ID NO: 87402 - DNA, 19 bp, Homo sapiens
  siRNA target sequence for KIF21A (NM_017641.2,2213-2231).
cttaggctcggtagaatct

SEQ ID NO: 87403 - DNA, 19 bp, Homo sapiens
  siRNA target sequence for KIF21A (NM_017641.2,2217-2235).
ggctcggtagaatcttact

SEQ ID NO: 87404 - DNA, 19 bp, Homo sapiens
  siRNA target sequence for KIF21A (NM_017641.2,2256-2274).
gttaggtctgaatatgaaa

SEQ ID NO: 87405 - DNA, 19 bp, Homo sapiens
  siRNA target sequence for KIF21A (NM_017641.2,2335-2353).
caaggttgcttaaaaatca

SEQ ID NO: 87406 - DNA, 19 bp, Homo sapiens
  siRNA target sequence for KIF21A (NM_017641.2,2413-2431).
caaaggttcgcctaatgaa

SEQ ID NO: 87407 - DNA, 19 bp, Homo sapiens
  siRNA target sequence for KIF21A (NM_017641.2,2417-2435).
ggttcgcctaatgaaacaa

SEQ ID NO: 87408 - DNA, 19 bp, Homo sapiens
  siRNA target sequence for KIF21A (NM_017641.2,2418-2436).
gttcgcctaatgaaacaaa

SEQ ID NO: 87409 - DNA, 19 bp, Homo sapiens
  siRNA target sequence for KIF21A (NM_017641.2,2421-2439).
cgcctaatgaaacaaatga

SEQ ID NO: 87410 - DNA, 19 bp, Homo sapiens
  siRNA target sequence for KIF21A (NM_017641.2,2463-2481).
ctgactgagtctagaagaa

SEQ ID NO: 87411 - DNA, 19 bp, Homo sapiens
  siRNA target sequence for KIF21A (NM_017641.2,2570-2588).
ggttctacgtcgcaaaact

SEQ ID NO: 87412 - DNA, 19 bp, Homo sapiens
  siRNA target sequence for KIF21A (NM_017641.2,2601-2619).
gctcttcgtcggcaagtaa

SEQ ID NO: 87413 - DNA, 19 bp, Homo sapiens
  siRNA target sequence for KIF21A (NM_017641.2,2616-2634).
gtaagacccatgtcagata

SEQ ID NO: 87414 - DNA, 19 bp, Homo sapiens
  siRNA target sequence for KIF21A (NM_017641.2,2657-2675).
gaagctgagttcatctgat

SEQ ID NO: 87415 - DNA, 19 bp, Homo sapiens
  siRNA target sequence for KIF21A (NM_017641.2,2834-2852).
gactggccgagtgtttatt

SEQ ID NO: 87416 - DNA, 19 bp, Homo sapiens
  siRNA target sequence for KIF21A (NM_017641.2,2838-2856).
ggccgagtgtttatttcca

SEQ ID NO: 87417 - DNA, 19 bp, Homo sapiens
  siRNA target sequence for KIF21A (NM_017641.2,2986-3004).
gacgagagaaactttcaaa

SEQ ID NO: 87418 - DNA, 19 bp, Homo sapiens
  siRNA target sequence for KIF21A (NM_017641.2,3055-3073).
ctaatatcaatgaagagat

SEQ ID NO: 87419 - DNA, 19 bp, Homo sapiens
  siRNA target sequence for KIF21A (NM_017641.2,3074-3092).
ggagtcactgactgctaat

SEQ ID NO: 87420 - DNA, 19 bp, Homo sapiens
  siRNA target sequence for KIF21A (NM_017641.2,3075-3093).
gagtcactgactgctaata

SEQ ID NO: 87421 - DNA, 19 bp, Homo sapiens
  siRNA target sequence for KIF21A (NM_017641.2,3081-3099).
ctgactgctaatatcgatt

SEQ ID NO: 87422 - DNA, 19 bp, Homo sapiens
  siRNA target sequence for KIF21A (NM_017641.2,3085-3103).
ctgctaatatcgattacat

SEQ ID NO: 87423 - DNA, 19 bp, Homo sapiens
  siRNA target sequence for KIF21A (NM_017641.2,3087-3105).
gctaatatcgattacatca

SEQ ID NO: 87424 - DNA, 19 bp, Homo sapiens
  siRNA target sequence for KIF21A (NM_017641.2,3088-3106).
ctaatatcgattacatcaa

SEQ ID NO: 87425 - DNA, 19 bp, Homo sapiens
  siRNA target sequence for KIF21A (NM_017641.2,3120-3138).
gattgtcaggccaacataa

SEQ ID NO: 87426 - DNA, 19 bp, Homo sapiens
  siRNA target sequence for KIF21A (NM_017641.2,3124-3142).
gtcaggccaacataatgca

SEQ ID NO: 87427 - DNA, 19 bp, Homo sapiens
  siRNA target sequence for KIF21A (NM_017641.2,3165-3183).
ggtgagacattggatgtta

SEQ ID NO: 87428 - DNA, 19 bp, Homo sapiens
  siRNA target sequence for KIF21A (NM_017641.2,3217-3235).
cccgatacctgctagatca

SEQ ID NO: 87429 - DNA, 19 bp, Homo sapiens
  siRNA target sequence for KIF21A (NM_017641.2,3220-3238).
gatacctgctagatcactt

SEQ ID NO: 87430 - DNA, 19 bp, Homo sapiens
  siRNA target sequence for KIF21A (NM_017641.2,3239-3257).
cctgtcaatgggcatcaat

SEQ ID NO: 87431 - DNA, 19 bp, Homo sapiens
  siRNA target sequence for KIF21A (NM_017641.2,3240-3258).
ctgtcaatgggcatcaata

SEQ ID NO: 87432 - DNA, 19 bp, Homo sapiens
  siRNA target sequence for KIF21A (NM_017641.2,3348-3366).
cagctcttattccatatgt

SEQ ID NO: 87433 - DNA, 19 bp, Homo sapiens
  siRNA target sequence for KIF21A (NM_017641.2,3351-3369).
ctcttattccatatgttga

SEQ ID NO: 87434 - DNA, 19 bp, Homo sapiens
  siRNA target sequence for KIF21A (NM_017641.2,3374-3392).
gaaggcagaattaaatcct

SEQ ID NO: 87435 - DNA, 19 bp, Homo sapiens
  siRNA target sequence for KIF21A (NM_017641.2,3403-3421).
ctttactaggccatgcttt

SEQ ID NO: 87436 - DNA, 19 bp, Homo sapiens
  siRNA target sequence for KIF21A (NM_017641.2,3412-3430).
gccatgctttacaagatct

SEQ ID NO: 87437 - DNA, 19 bp, Homo sapiens
  siRNA target sequence for KIF21A (NM_017641.2,3417-3435).
gctttacaagatctagata

SEQ ID NO: 87438 - DNA, 19 bp, Homo sapiens
  siRNA target sequence for KIF21A (NM_017641.2,3432-3450).
gatagcgtaccattagaaa

SEQ ID NO: 87439 - DNA, 19 bp, Homo sapiens
  siRNA target sequence for KIF21A (NM_017641.2,3436-3454).
gcgtaccattagaaaatgt

SEQ ID NO: 87440 - DNA, 19 bp, Homo sapiens
  siRNA target sequence for KIF21A (NM_017641.2,3437-3455).
cgtaccattagaaaatgta

SEQ ID NO: 87441 - DNA, 19 bp, Homo sapiens
  siRNA target sequence for KIF21A (NM_017641.2,3577-3595).
ccaccactcagatggaatt

SEQ ID NO: 87442 - DNA, 19 bp, Homo sapiens
  siRNA target sequence for KIF21A (NM_017641.2,3580-3598).
ccactcagatggaattgct

SEQ ID NO: 87443 - DNA, 19 bp, Homo sapiens
  siRNA target sequence for KIF21A (NM_017641.2,3618-3636).
ctagcttcagacactagta

SEQ ID NO: 87444 - DNA, 19 bp, Homo sapiens
  siRNA target sequence for KIF21A (NM_017641.2,3786-3804).
cagtcatctctatcagaaa

SEQ ID NO: 87445 - DNA, 19 bp, Homo sapiens
  siRNA target sequence for KIF21A (NM_017641.2,3788-3806).
gtcatctctatcagaaaaa

SEQ ID NO: 87446 - DNA, 19 bp, Homo sapiens
  siRNA target sequence for KIF21A (NM_017641.2,3946-3964).
cccgtaatgaactgaatgt

SEQ ID NO: 87447 - DNA, 19 bp, Homo sapiens
  siRNA target sequence for KIF21A (NM_017641.2,3947-3965).
ccgtaatgaactgaatgtt

SEQ ID NO: 87448 - DNA, 19 bp, Homo sapiens
  siRNA target sequence for KIF21A (NM_017641.2,4008-4026).
caggataagtctgatgaaa

SEQ ID NO: 87449 - DNA, 19 bp, Homo sapiens
  siRNA target sequence for KIF21A (NM_017641.2,4070-4088).
cataatcaacccatttcct

SEQ ID NO: 87450 - DNA, 19 bp, Homo sapiens
  siRNA target sequence for KIF21A (NM_017641.2,4108-4126).
cttttccacttcagtgtat

SEQ ID NO: 87451 - DNA, 19 bp, Homo sapiens
  siRNA target sequence for KIF21A (NM_017641.2,4113-4131).
ccacttcagtgtattcaca

SEQ ID NO: 87452 - DNA, 19 bp, Homo sapiens
  siRNA target sequence for KIF21A (NM_017641.2,4157-4175).
gctctgtgtggattctact

SEQ ID NO: 87453 - DNA, 19 bp, Homo sapiens
  siRNA target sequence for KIF21A (NM_017641.2,4184-4202).
cctcttcactggatcaaaa

SEQ ID NO: 87454 - DNA, 19 bp, Homo sapiens
  siRNA target sequence for KIF21A (NM_017641.2,4198-4216).
caaaagatcgtacttgtaa

SEQ ID NO: 87455 - DNA, 19 bp, Homo sapiens
  siRNA target sequence for KIF21A (NM_017641.2,4229-4247).
ggtgactgggcaggaaata

SEQ ID NO: 87456 - DNA, 19 bp, Homo sapiens
  siRNA target sequence for KIF21A (NM_017641.2,4230-4248).
gtgactgggcaggaaataa

SEQ ID NO: 87457 - DNA, 19 bp, Homo sapiens
  siRNA target sequence for KIF21A (NM_017641.2,4256-4274).
ggggggtcatcccaacaat

SEQ ID NO: 87458 - DNA, 19 bp, Homo sapiens
  siRNA target sequence for KIF21A (NM_017641.2,4258-4276).
ggggtcatcccaacaatgt

SEQ ID NO: 87459 - DNA, 19 bp, Homo sapiens
  siRNA target sequence for KIF21A (NM_017641.2,4271-4289).
caatgtcgtgtctgtaaaa

SEQ ID NO: 87460 - DNA, 19 bp, Homo sapiens
  siRNA target sequence for KIF21A (NM_017641.2,4275-4293).
gtcgtgtctgtaaaatact

SEQ ID NO: 87461 - DNA, 19 bp, Homo sapiens
  siRNA target sequence for KIF21A (NM_017641.2,4277-4295).
cgtgtctgtaaaatactgt

SEQ ID NO: 87462 - DNA, 19 bp, Homo sapiens
  siRNA target sequence for KIF21A (NM_017641.2,4278-4296).
gtgtctgtaaaatactgta

SEQ ID NO: 87463 - DNA, 19 bp, Homo sapiens
  siRNA target sequence for KIF21A (NM_017641.2,4316-4334).
cactgtatcaacatcttat

SEQ ID NO: 87464 - DNA, 19 bp, Homo sapiens
  siRNA target sequence for KIF21A (NM_017641.2,4318-4336).
ctgtatcaacatcttatat

SEQ ID NO: 87465 - DNA, 19 bp, Homo sapiens
  siRNA target sequence for KIF21A (NM_017641.2,4341-4359).
gtgtgggatatcagagatt

SEQ ID NO: 87466 - DNA, 19 bp, Homo sapiens
  siRNA target sequence for KIF21A (NM_017641.2,4343-4361).
gtgggatatcagagattca

SEQ ID NO: 87467 - DNA, 19 bp, Homo sapiens
  siRNA target sequence for KIF21A (NM_017641.2,4385-4403).
gtcttcaggtcaagttact

SEQ ID NO: 87468 - DNA, 19 bp, Homo sapiens
  siRNA target sequence for KIF21A (NM_017641.2,4429-4447).
ccagtcgaacagtagctat

SEQ ID NO: 87469 - DNA, 19 bp, Homo sapiens
  siRNA target sequence for KIF21A (NM_017641.2,4430-4448).
cagtcgaacagtagctatt

SEQ ID NO: 87470 - DNA, 19 bp, Homo sapiens
  siRNA target sequence for KIF21A (NM_017641.2,4434-4452).
cgaacagtagctattcctt

SEQ ID NO: 87471 - DNA, 19 bp, Homo sapiens
  siRNA target sequence for KIF21A (NM_017641.2,4456-4474).
gagagaaccagatcaatca

SEQ ID NO: 87472 - DNA, 19 bp, Homo sapiens
  siRNA target sequence for KIF21A (NM_017641.2,4529-4547).
caggatgtgggatcttaaa

SEQ ID NO: 87473 - DNA, 19 bp, Homo sapiens
  siRNA target sequence for KIF21A (NM_017641.2,4535-4553).
gtgggatcttaaaaggttt

SEQ ID NO: 87474 - DNA, 19 bp, Homo sapiens
  siRNA target sequence for KIF21A (NM_017641.2,4556-4574).
gtctacaggaaagttaaca

SEQ ID NO: 87475 - DNA, 19 bp, Homo sapiens
  siRNA target sequence for KIF21A (NM_017641.2,4576-4594).
gacacctaggccctgttat

SEQ ID NO: 87476 - DNA, 19 bp, Homo sapiens
  siRNA target sequence for KIF21A (NM_017641.2,4597-4615).
gccttactgtggatcagat

SEQ ID NO: 87477 - DNA, 19 bp, Homo sapiens
  siRNA target sequence for KIF21A (NM_017641.2,4598-4616).
ccttactgtggatcagatt

SEQ ID NO: 87478 - DNA, 19 bp, Homo sapiens
  siRNA target sequence for KIF21A (NM_017641.2,4618-4636).
ccagtggacaagatctaat

SEQ ID NO: 87479 - DNA, 19 bp, Homo sapiens
  siRNA target sequence for KIF21A (NM_017641.2,4623-4641).
ggacaagatctaatcatca

SEQ ID NO: 87480 - DNA, 19 bp, Homo sapiens
  siRNA target sequence for KIF21A (NM_017641.2,4648-4666).
ccaaggatcattacatcaa

SEQ ID NO: 87481 - DNA, 19 bp, Homo sapiens
  siRNA target sequence for KIF21A (NM_017641.2,4649-4667).
caaggatcattacatcaaa

SEQ ID NO: 87482 - DNA, 19 bp, Homo sapiens
  siRNA target sequence for KIF21A (NM_017641.2,4703-4721).
gagtcccacccacaatttt

SEQ ID NO: 87483 - DNA, 19 bp, Homo sapiens
  siRNA target sequence for KIF21A (NM_017641.2,4705-4723).
gtcccacccacaattttga

SEQ ID NO: 87484 - DNA, 19 bp, Homo sapiens
  siRNA target sequence for KIF21A (NM_017641.2,4741-4759).
gcatagaagcactaaccat

SEQ ID NO: 87485 - DNA, 19 bp, Homo sapiens
  siRNA target sequence for KIF21A (NM_017641.2,4761-4779).
caaggggataacctattta

SEQ ID NO: 87486 - DNA, 19 bp, Homo sapiens
  siRNA target sequence for KIF21A (NM_017641.2,4783-4801).
ggtctagagataatggaat

SEQ ID NO: 87487 - DNA, 19 bp, Homo sapiens
  siRNA target sequence for KIF21A (NM_017641.2,4935-4953).
gtctggaacatggatactt

SEQ ID NO: 87488 - DNA, 19 bp, Homo sapiens
  siRNA target sequence for KIF21A (NM_017641.2,4939-4957).
ggaacatggatacttttat

SEQ ID NO: 87489 - DNA, 19 bp, Homo sapiens
  siRNA target sequence for KIF21A (NM_017641.2,4970-4988).
gatgaagggtcatgatagt

SEQ ID NO: 87490 - DNA, 19 bp, Homo sapiens
  siRNA target sequence for KIF21A (NM_017641.2,4978-4996).
gtcatgatagtcctatcaa

SEQ ID NO: 87491 - DNA, 19 bp, Homo sapiens
  siRNA target sequence for KIF21A (NM_017641.2,4990-5008).
ctatcaatgccatatgtgt

SEQ ID NO: 87492 - DNA, 19 bp, Homo sapiens
  siRNA target sequence for KIF21A (NM_017641.2,4998-5016).
gccatatgtgttaattcca

SEQ ID NO: 87493 - DNA, 19 bp, Homo sapiens
  siRNA target sequence for KIF21A (NM_017641.2,5007-5025).
gttaattccacccacattt

SEQ ID NO: 87494 - DNA, 19 bp, Homo sapiens
  siRNA target sequence for KIF21A (NM_017641.2,5043-5061).
cgaactgtgagaatttgga

SEQ ID NO: 87495 - DNA, 19 bp, Homo sapiens
  siRNA target sequence for KIF21A (NM_017641.2,5059-5077).
ggaaggctcgcaatttgca

SEQ ID NO: 87496 - DNA, 19 bp, Homo sapiens
  siRNA target sequence for KIF21A (NM_017641.2,5111-5129).
ggaagatattgccagtaat

SEQ ID NO: 87497 - DNA, 19 bp, Homo sapiens
  siRNA target sequence for KIF25 (NM_005355.2,424-442).
ggatgggtacaatgtttgt

SEQ ID NO: 87498 - DNA, 19 bp, Homo sapiens
  siRNA target sequence for KIF25 (NM_005355.2,428-446).
gggtacaatgtttgtgtta

SEQ ID NO: 87499 - DNA, 19 bp, Homo sapiens
  siRNA target sequence for KIF25 (NM_005355.2,468-486).
gcggaaagagctataccat

SEQ ID NO: 87500 - DNA, 19 bp, Homo sapiens
  siRNA target sequence for KIF25 (NM_005355.2,603-621).
gaagcccaaaggttgaagt

SEQ ID NO: 87501 - DNA, 19 bp, Homo sapiens
  siRNA target sequence for KIF25 (NM_005355.2,764-782).
ggcagcgcctcgaaactga

SEQ ID NO: 87502 - DNA, 19 bp, Homo sapiens
  siRNA target sequence for KIF25 (NM_005355.2,765-783).
gcagcgcctcgaaactgat

SEQ ID NO: 87503 - DNA, 19 bp, Homo sapiens
  siRNA target sequence for KIF25 (NM_005355.2,849-867).
ccaggtctcacctgataat

SEQ ID NO: 87504 - DNA, 19 bp, Homo sapiens
  siRNA target sequence for KIF25 (NM_005355.2,970-988).
gagccgcagagcttctcaa

SEQ ID NO: 87505 - DNA, 19 bp, Homo sapiens
  siRNA target sequence for KIF25 (NM_005355.2,1092-1110).
gaggcgatgcgaagttact

SEQ ID NO: 87506 - DNA, 19 bp, Homo sapiens
  siRNA target sequence for KIF25 (NM_005355.2,1101-1119).
cgaagttactggtgattct

SEQ ID NO: 87507 - DNA, 19 bp, Homo sapiens
  siRNA target sequence for KIF27 (NM_017576.1,724-742).
catacaggtaccactcaaa

SEQ ID NO: 87508 - DNA, 19 bp, Homo sapiens
  siRNA target sequence for KIF27 (NM_017576.1,728-746).
caggtaccactcaaatgaa

SEQ ID NO: 87509 - DNA, 19 bp, Homo sapiens
  siRNA target sequence for KIF27 (NM_017576.1,750-768).
gcactccagcagatcacat

SEQ ID NO: 87510 - DNA, 19 bp, Homo sapiens
  siRNA target sequence for KIF27 (NM_017576.1,755-773).
ccagcagatcacatgcaat

SEQ ID NO: 87511 - DNA, 19 bp, Homo sapiens
  siRNA target sequence for KIF27 (NM_017576.1,756-774).
cagcagatcacatgcaatt

SEQ ID NO: 87512 - DNA, 19 bp, Homo sapiens
  siRNA target sequence for KIF27 (NM_017576.1,834-852).
gtattcccctcggcatatt

SEQ ID NO: 87513 - DNA, 19 bp, Homo sapiens
  siRNA target sequence for KIF27 (NM_017576.1,842-860).
ctcggcatattgtctcaaa

SEQ ID NO: 87514 - DNA, 19 bp, Homo sapiens
  siRNA target sequence for KIF27 (NM_017576.1,844-862).
cggcatattgtctcaaagt

SEQ ID NO: 87515 - DNA, 19 bp, Homo sapiens
  siRNA target sequence for KIF27 (NM_017576.1,845-863).
ggcatattgtctcaaagtt

SEQ ID NO: 87516 - DNA, 19 bp, Homo sapiens
  siRNA target sequence for KIF27 (NM_017576.1,879-897).
ggcaggatcagaaagagta

SEQ ID NO: 87517 - DNA, 19 bp, Homo sapiens
  siRNA target sequence for KIF27 (NM_017576.1,884-902).
gatcagaaagagtaaccaa

SEQ ID NO: 87518 - DNA, 19 bp, Homo sapiens
  siRNA target sequence for KIF27 (NM_017576.1,914-932).
ctggtgaacggttcaaaga

SEQ ID NO: 87519 - DNA, 19 bp, Homo sapiens
  siRNA target sequence for KIF27 (NM_017576.1,916-934).
ggtgaacggttcaaagaat

SEQ ID NO: 87520 - DNA, 19 bp, Homo sapiens
  siRNA target sequence for KIF27 (NM_017576.1,924-942).
gttcaaagaatccattcaa

SEQ ID NO: 87521 - DNA, 19 bp, Homo sapiens
  siRNA target sequence for KIF27 (NM_017576.1,931-949).
gaatccattcaaatcaata

SEQ ID NO: 87522 - DNA, 19 bp, Homo sapiens
  siRNA target sequence for KIF27 (NM_017576.1,960-978).
ggctttaggaaatgtaata

SEQ ID NO: 87523 - DNA, 19 bp, Homo sapiens
  siRNA target sequence for KIF27 (NM_017576.1,991-1009).
gacccacgcaggaagagtt

SEQ ID NO: 87524 - DNA, 19 bp, Homo sapiens
  siRNA target sequence for KIF27 (NM_017576.1,997-1015).
cgcaggaagagttcacata

SEQ ID NO: 87525 - DNA, 19 bp, Homo sapiens
  siRNA target sequence for KIF27 (NM_017576.1,998-1016).
gcaggaagagttcacatat

SEQ ID NO: 87526 - DNA, 19 bp, Homo sapiens
  siRNA target sequence for KIF27 (NM_017576.1,999-1017).
caggaagagttcacatatt

SEQ ID NO: 87527 - DNA, 19 bp, Homo sapiens
  siRNA target sequence for KIF27 (NM_017576.1,1002-1020).
gaagagttcacatattcca

SEQ ID NO: 87528 - DNA, 19 bp, Homo sapiens
  siRNA target sequence for KIF27 (NM_017576.1,1018-1036).
ccatatagggatgctaaaa

SEQ ID NO: 87529 - DNA, 19 bp, Homo sapiens
  siRNA target sequence for KIF27 (NM_017576.1,1019-1037).
catatagggatgctaaaat

SEQ ID NO: 87530 - DNA, 19 bp, Homo sapiens
  siRNA target sequence for KIF27 (NM_017576.1,1043-1061).
ggcttctgaaagattctct

SEQ ID NO: 87531 - DNA, 19 bp, Homo sapiens
  siRNA target sequence for KIF27 (NM_017576.1,1100-1118).
gcccctcctcctcgaattt

SEQ ID NO: 87532 - DNA, 19 bp, Homo sapiens
  siRNA target sequence for KIF27 (NM_017576.1,1101-1119).
cccctcctcctcgaatttt

SEQ ID NO: 87533 - DNA, 19 bp, Homo sapiens
  siRNA target sequence for KIF27 (NM_017576.1,1104-1122).
ctcctcctcgaattttgat

SEQ ID NO: 87534 - DNA, 19 bp, Homo sapiens
  siRNA target sequence for KIF27 (NM_017576.1,1106-1124).
cctcctcgaattttgatga

SEQ ID NO: 87535 - DNA, 19 bp, Homo sapiens
  siRNA target sequence for KIF27 (NM_017576.1,1127-1145).
ccttaaattctctcaaata

SEQ ID NO: 87536 - DNA, 19 bp, Homo sapiens
  siRNA target sequence for KIF27 (NM_017576.1,1128-1146).
cttaaattctctcaaatat

SEQ ID NO: 87537 - DNA, 19 bp, Homo sapiens
  siRNA target sequence for KIF27 (NM_017576.1,1152-1170).
cagagcacggaacattaga

SEQ ID NO: 87538 - DNA, 19 bp, Homo sapiens
  siRNA target sequence for KIF27 (NM_017576.1,1154-1172).
gagcacggaacattagaaa

SEQ ID NO: 87539 - DNA, 19 bp, Homo sapiens
  siRNA target sequence for KIF27 (NM_017576.1,1156-1174).
gcacggaacattagaaaca

SEQ ID NO: 87540 - DNA, 19 bp, Homo sapiens
  siRNA target sequence for KIF27 (NM_017576.1,1157-1175).
cacggaacattagaaacaa

SEQ ID NO: 87541 - DNA, 19 bp, Homo sapiens
  siRNA target sequence for KIF27 (NM_017576.1,1196-1214).
ccgagtcagaccgtataga

SEQ ID NO: 87542 - DNA, 19 bp, Homo sapiens
  siRNA target sequence for KIF27 (NM_017576.1,1197-1215).
cgagtcagaccgtatagat

SEQ ID NO: 87543 - DNA, 19 bp, Homo sapiens
  siRNA target sequence for KIF27 (NM_017576.1,1202-1220).
cagaccgtatagatgaaat

SEQ ID NO: 87544 - DNA, 19 bp, Homo sapiens
  siRNA target sequence for KIF27 (NM_017576.1,1206-1224).
ccgtatagatgaaatggaa

SEQ ID NO: 87545 - DNA, 19 bp, Homo sapiens
  siRNA target sequence for KIF27 (NM_017576.1,1277-1295).
gccaaactacccagatcaa

SEQ ID NO: 87546 - DNA, 19 bp, Homo sapiens
  siRNA target sequence for KIF27 (NM_017576.1,1278-1296).
ccaaactacccagatcaat

SEQ ID NO: 87547 - DNA, 19 bp, Homo sapiens
  siRNA target sequence for KIF27 (NM_017576.1,1312-1330).
gatacaaataggattcatt

SEQ ID NO: 87548 - DNA, 19 bp, Homo sapiens
  siRNA target sequence for KIF27 (NM_017576.1,1371-1389).
gggttaccagtgttgtgta

SEQ ID NO: 87549 - DNA, 19 bp, Homo sapiens
  siRNA target sequence for KIF27 (NM_017576.1,1377-1395).
ccagtgttgtgtagaagaa

SEQ ID NO: 87550 - DNA, 19 bp, Homo sapiens
  siRNA target sequence for KIF27 (NM_017576.1,1407-1425).
cctggttgacctaaaagat

SEQ ID NO: 87551 - DNA, 19 bp, Homo sapiens
  siRNA target sequence for KIF27 (NM_017576.1,1410-1428).
ggttgacctaaaagatact

SEQ ID NO: 87552 - DNA, 19 bp, Homo sapiens
  siRNA target sequence for KIF27 (NM_017576.1,1427-1445).
ctgtcagactaaacgaaaa

SEQ ID NO: 87553 - DNA, 19 bp, Homo sapiens
  siRNA target sequence for KIF27 (NM_017576.1,1462-1480).
caggagtggtttaacatga

SEQ ID NO: 87554 - DNA, 19 bp, Homo sapiens
  siRNA target sequence for KIF27 (NM_017576.1,1546-1564).
gaaggaccacagcatgtta

SEQ ID NO: 87555 - DNA, 19 bp, Homo sapiens
  siRNA target sequence for KIF27 (NM_017576.1,1550-1568).
gaccacagcatgttacagt

SEQ ID NO: 87556 - DNA, 19 bp, Homo sapiens
  siRNA target sequence for KIF27 (NM_017576.1,2132-2150).
gtcgttcatggattcagaa

SEQ ID NO: 87557 - DNA, 19 bp, Homo sapiens
  siRNA target sequence for KIF3A (NM_007054.3,177-195).
gccagaaagctgcgataat

SEQ ID NO: 87558 - DNA, 19 bp, Homo sapiens
  siRNA target sequence for KIF3A (NM_007054.3,181-199).
gaaagctgcgataatgtga

SEQ ID NO: 87559 - DNA, 19 bp, Homo sapiens
  siRNA target sequence for KIF3A (NM_007054.3,223-241).
ctcaatgagagagagaaat

SEQ ID NO: 87560 - DNA, 19 bp, Homo sapiens
  siRNA target sequence for KIF3A (NM_007054.3,274-292).
gagatgaggggaactatca

SEQ ID NO: 87561 - DNA, 19 bp, Homo sapiens
  siRNA target sequence for KIF3A (NM_007054.3,295-313).
gtacataagactgattctt

SEQ ID NO: 87562 - DNA, 19 bp, Homo sapiens
  siRNA target sequence for KIF3A (NM_007054.3,370-388).
caacttgatgtttataact

SEQ ID NO: 87563 - DNA, 19 bp, Homo sapiens
  siRNA target sequence for KIF3A (NM_007054.3,373-391).
cttgatgtttataacttaa

SEQ ID NO: 87564 - DNA, 19 bp, Homo sapiens
  siRNA target sequence for KIF3A (NM_007054.3,387-405).
cttaactgcaagacctatt

SEQ ID NO: 87565 - DNA, 19 bp, Homo sapiens
  siRNA target sequence for KIF3A (NM_007054.3,483-501).
ggaaggtgttcgagctatt

SEQ ID NO: 87566 - DNA, 19 bp, Homo sapiens
  siRNA target sequence for KIF3A (NM_007054.3,493-511).
cgagctattcctgaactta

SEQ ID NO: 87567 - DNA, 19 bp, Homo sapiens
  siRNA target sequence for KIF3A (NM_007054.3,502-520).
cctgaacttagaggaataa

SEQ ID NO: 87568 - DNA, 19 bp, Homo sapiens
  siRNA target sequence for KIF3A (NM_007054.3,503-521).
ctgaacttagaggaataat

SEQ ID NO: 87569 - DNA, 19 bp, Homo sapiens
  siRNA target sequence for KIF3A (NM_007054.3,536-554).
ctcacatatttggtcatat

SEQ ID NO: 87570 - DNA, 19 bp, Homo sapiens
  siRNA target sequence for KIF3A (NM_007054.3,562-580).
gcggagggtgatacaagat

SEQ ID NO: 87571 - DNA, 19 bp, Homo sapiens
  siRNA target sequence for KIF3A (NM_007054.3,563-581).
cggagggtgatacaagatt

SEQ ID NO: 87572 - DNA, 19 bp, Homo sapiens
  siRNA target sequence for KIF3A (NM_007054.3,564-582).
ggagggtgatacaagattt

SEQ ID NO: 87573 - DNA, 19 bp, Homo sapiens
  siRNA target sequence for KIF3A (NM_007054.3,565-583).
gagggtgatacaagatttt

SEQ ID NO: 87574 - DNA, 19 bp, Homo sapiens
  siRNA target sequence for KIF3A (NM_007054.3,677-695).
ctgatgtgggagtttatat

SEQ ID NO: 87575 - DNA, 19 bp, Homo sapiens
  siRNA target sequence for KIF3A (NM_007054.3,685-703).
ggagtttatatcaaagatt

SEQ ID NO: 87576 - DNA, 19 bp, Homo sapiens
  siRNA target sequence for KIF3A (NM_007054.3,718-736).
gtaaataatgctgatgata

SEQ ID NO: 87577 - DNA, 19 bp, Homo sapiens
  siRNA target sequence for KIF3A (NM_007054.3,750-768).
gacgctaggccacaaaaat

SEQ ID NO: 87578 - DNA, 19 bp, Homo sapiens
  siRNA target sequence for KIF3A (NM_007054.3,753-771).
gctaggccacaaaaatcgt

SEQ ID NO: 87579 - DNA, 19 bp, Homo sapiens
  siRNA target sequence for KIF3A (NM_007054.3,754-772).
ctaggccacaaaaatcgtt

SEQ ID NO: 87580 - DNA, 19 bp, Homo sapiens
  siRNA target sequence for KIF3A (NM_007054.3,770-788).
gttctgttggtgcaactaa

SEQ ID NO: 87581 - DNA, 19 bp, Homo sapiens
  siRNA target sequence for KIF3A (NM_007054.3,773-791).
ctgttggtgcaactaatat

SEQ ID NO: 87582 - DNA, 19 bp, Homo sapiens
  siRNA target sequence for KIF3A (NM_007054.3,775-793).
gttggtgcaactaatatga

SEQ ID NO: 87583 - DNA, 19 bp, Homo sapiens
  siRNA target sequence for KIF3A (NM_007054.3,941-959).
ctggacagcgcctaaagga

SEQ ID NO: 87584 - DNA, 19 bp, Homo sapiens
  siRNA target sequence for KIF3A (NM_007054.3,980-998).
cactttccacccttggtaa

SEQ ID NO: 87585 - DNA, 19 bp, Homo sapiens
  siRNA target sequence for KIF3A (NM_007054.3,986-1004).
ccacccttggtaatgtaat

SEQ ID NO: 87586 - DNA, 19 bp, Homo sapiens
  siRNA target sequence for KIF3A (NM_007054.3,1029-1047).
cactcatgtgccttatcgt

SEQ ID NO: 87587 - DNA, 19 bp, Homo sapiens
  siRNA target sequence for KIF3A (NM_007054.3,1031-1049).
ctcatgtgccttatcgtaa

SEQ ID NO: 87588 - DNA, 19 bp, Homo sapiens
  siRNA target sequence for KIF3A (NM_007054.3,1036-1054).
gtgccttatcgtaactcta

SEQ ID NO: 87589 - DNA, 19 bp, Homo sapiens
  siRNA target sequence for KIF3A (NM_007054.3,1038-1056).
gccttatcgtaactctaaa

SEQ ID NO: 87590 - DNA, 19 bp, Homo sapiens
  siRNA target sequence for KIF3A (NM_007054.3,1040-1058).
cttatcgtaactctaaact

SEQ ID NO: 87591 - DNA, 19 bp, Homo sapiens
  siRNA target sequence for KIF3A (NM_007054.3,1121-1139).
ggccagcagattacaatta

SEQ ID NO: 87592 - DNA, 19 bp, Homo sapiens
  siRNA target sequence for KIF3A (NM_007054.3,1124-1142).
cagcagattacaattatga

SEQ ID NO: 87593 - DNA, 19 bp, Homo sapiens
  siRNA target sequence for KIF3A (NM_007054.3,1141-1159).
gatgaaactatcagtacat

SEQ ID NO: 87594 - DNA, 19 bp, Homo sapiens
  siRNA target sequence for KIF3A (NM_007054.3,1168-1186).
gccaatcgtgctaagaata

SEQ ID NO: 87595 - DNA, 19 bp, Homo sapiens
  siRNA target sequence for KIF3A (NM_007054.3,1169-1187).
ccaatcgtgctaagaatat

SEQ ID NO: 87596 - DNA, 19 bp, Homo sapiens
  siRNA target sequence for KIF3A (NM_007054.3,1170-1188).
caatcgtgctaagaatatt

SEQ ID NO: 87597 - DNA, 19 bp, Homo sapiens
  siRNA target sequence for KIF3A (NM_007054.3,1234-1252).
cgtcagttccagaaagaaa

SEQ ID NO: 87598 - DNA, 19 bp, Homo sapiens
  siRNA target sequence for KIF3A (NM_007054.3,1402-1420).
gtctccccagacaagatga

SEQ ID NO: 87599 - DNA, 19 bp, Homo sapiens
  siRNA target sequence for KIF3A (NM_007054.3,1501-1519).
gctagagctgaattagaga

SEQ ID NO: 87600 - DNA, 19 bp, Homo sapiens
  siRNA target sequence for KIF3A (NM_007054.3,1728-1746).
gcaagaacgcttggatatt

SEQ ID NO: 87601 - DNA, 19 bp, Homo sapiens
  siRNA target sequence for KIF3A (NM_007054.3,1735-1753).
cgcttggatattgaagaaa

SEQ ID NO: 87602 - DNA, 19 bp, Homo sapiens
  siRNA target sequence for KIF3A (NM_007054.3,1844-1862).
ctgatctccaacaagaaca

SEQ ID NO: 87603 - DNA, 19 bp, Homo sapiens
  siRNA target sequence for KIF3A (NM_007054.3,1910-1928).
gggagcttcgacttcagat

SEQ ID NO: 87604 - DNA, 19 bp, Homo sapiens
  siRNA target sequence for KIF3A (NM_007054.3,1915-1933).
cttcgacttcagatgctta

SEQ ID NO: 87605 - DNA, 19 bp, Homo sapiens
  siRNA target sequence for KIF3A (NM_007054.3,1918-1936).
cgacttcagatgcttatta

SEQ ID NO: 87606 - DNA, 19 bp, Homo sapiens
  siRNA target sequence for KIF3A (NM_007054.3,1924-1942).
cagatgcttattattgata

SEQ ID NO: 87607 - DNA, 19 bp, Homo sapiens
  siRNA target sequence for KIF3A (NM_007054.3,1944-1962).
ctttatacctcgggattat

SEQ ID NO: 87608 - DNA, 19 bp, Homo sapiens
  siRNA target sequence for KIF3A (NM_007054.3,1952-1970).
ctcgggattatcaggaaat

SEQ ID NO: 87609 - DNA, 19 bp, Homo sapiens
  siRNA target sequence for KIF3A (NM_007054.3,1954-1972).
cgggattatcaggaaatga

SEQ ID NO: 87610 - DNA, 19 bp, Homo sapiens
  siRNA target sequence for KIF3A (NM_007054.3,1980-1998).
ctatgtccattggaatgaa

SEQ ID NO: 87611 - DNA, 19 bp, Homo sapiens
  siRNA target sequence for KIF3A (NM_007054.3,1986-2004).
ccattggaatgaagacata

SEQ ID NO: 87612 - DNA, 19 bp, Homo sapiens
  siRNA target sequence for KIF3A (NM_007054.3,2103-2121).
cctttctcacgtgtatctt

SEQ ID NO: 87613 - DNA, 19 bp, Homo sapiens
  siRNA target sequence for KIF3A (NM_007054.3,2112-2130).
cgtgtatcttgcctatact

SEQ ID NO: 87614 - DNA, 19 bp, Homo sapiens
  siRNA target sequence for KIF3A (NM_007054.3,2230-2248).
cctgaaactgtaattgact

SEQ ID NO: 87615 - DNA, 19 bp, Homo sapiens
  siRNA target sequence for KIF3B (NM_004798.2,233-251).
ggaaaaggctgcttcgtat

SEQ ID NO: 87616 - DNA, 19 bp, Homo sapiens
  siRNA target sequence for KIF3B (NM_004798.2,239-257).
ggctgcttcgtatgacaaa

SEQ ID NO: 87617 - DNA, 19 bp, Homo sapiens
  siRNA target sequence for KIF3B (NM_004798.2,241-259).
ctgcttcgtatgacaaagt

SEQ ID NO: 87618 - DNA, 19 bp, Homo sapiens
  siRNA target sequence for KIF3B (NM_004798.2,392-410).
gacgttccgaccacttgtt

SEQ ID NO: 87619 - DNA, 19 bp, Homo sapiens
  siRNA target sequence for KIF3B (NM_004798.2,394-412).
cgttccgaccacttgttga

SEQ ID NO: 87620 - DNA, 19 bp, Homo sapiens
  siRNA target sequence for KIF3B (NM_004798.2,420-438).
ctgcaaggtttcaatggaa

SEQ ID NO: 87621 - DNA, 19 bp, Homo sapiens
  siRNA target sequence for KIF3B (NM_004798.2,516-534).
ggagtcattcctaactcat

SEQ ID NO: 87622 - DNA, 19 bp, Homo sapiens
  siRNA target sequence for KIF3B (NM_004798.2,559-577).
ctcgatcccagaatcaaca

SEQ ID NO: 87623 - DNA, 19 bp, Homo sapiens
  siRNA target sequence for KIF3B (NM_004798.2,561-579).
cgatcccagaatcaacaat

SEQ ID NO: 87624 - DNA, 19 bp, Homo sapiens
  siRNA target sequence for KIF3B (NM_004798.2,562-580).
gatcccagaatcaacaata

SEQ ID NO: 87625 - DNA, 19 bp, Homo sapiens
  siRNA target sequence for KIF3B (NM_004798.2,584-602).
ggtcagggcttcttactta

SEQ ID NO: 87626 - DNA, 19 bp, Homo sapiens
  siRNA target sequence for KIF3B (NM_004798.2,589-607).
gggcttcttacttagagat

SEQ ID NO: 87627 - DNA, 19 bp, Homo sapiens
  siRNA target sequence for KIF3B (NM_004798.2,592-610).
cttcttacttagagatcta

SEQ ID NO: 87628 - DNA, 19 bp, Homo sapiens
  siRNA target sequence for KIF3B (NM_004798.2,682-700).
caggagtgtatgtgaaaga

SEQ ID NO: 87629 - DNA, 19 bp, Homo sapiens
  siRNA target sequence for KIF3B (NM_004798.2,797-815).
gcacagctcgcgttctcat

SEQ ID NO: 87630 - DNA, 19 bp, Homo sapiens
  siRNA target sequence for KIF3B (NM_004798.2,802-820).
gctcgcgttctcatgcaat

SEQ ID NO: 87631 - DNA, 19 bp, Homo sapiens
  siRNA target sequence for KIF3B (NM_004798.2,803-821).
ctcgcgttctcatgcaatt

SEQ ID NO: 87632 - DNA, 19 bp, Homo sapiens
  siRNA target sequence for KIF3B (NM_004798.2,805-823).
cgcgttctcatgcaatttt

SEQ ID NO: 87633 - DNA, 19 bp, Homo sapiens
  siRNA target sequence for KIF3B (NM_004798.2,813-831).
catgcaattttcgttatca

SEQ ID NO: 87634 - DNA, 19 bp, Homo sapiens
  siRNA target sequence for KIF3B (NM_004798.2,853-871).
gcctcgatggtgaaaacca

SEQ ID NO: 87635 - DNA, 19 bp, Homo sapiens
  siRNA target sequence for KIF3B (NM_004798.2,870-888).
cacatccgtgtaggaaaat

SEQ ID NO: 87636 - DNA, 19 bp, Homo sapiens
  siRNA target sequence for KIF3B (NM_004798.2,934-952).
gcgcacaaggggagagatt

SEQ ID NO: 87637 - DNA, 19 bp, Homo sapiens
  siRNA target sequence for KIF3B (NM_004798.2,935-953).
cgcacaaggggagagatta

SEQ ID NO: 87638 - DNA, 19 bp, Homo sapiens
  siRNA target sequence for KIF3B (NM_004798.2,936-954).
gcacaaggggagagattaa

SEQ ID NO: 87639 - DNA, 19 bp, Homo sapiens
  siRNA target sequence for KIF3B (NM_004798.2,985-1003).
ccgctttgggtaatgtcat

SEQ ID NO: 87640 - DNA, 19 bp, Homo sapiens
  siRNA target sequence for KIF3B (NM_004798.2,1011-1029).
ctagtggacggcaaaagca

SEQ ID NO: 87641 - DNA, 19 bp, Homo sapiens
  siRNA target sequence for KIF3B (NM_004798.2,1275-1293).
gaaaaacggtccattggta

SEQ ID NO: 87642 - DNA, 19 bp, Homo sapiens
  siRNA target sequence for KIF3B (NM_004798.2,1386-1404).
ggggatgataaggatgatt

SEQ ID NO: 87643 - DNA, 19 bp, Homo sapiens
  siRNA target sequence for KIF3B (NM_004798.2,1387-1405).
gggatgataaggatgatta

SEQ ID NO: 87644 - DNA, 19 bp, Homo sapiens
  siRNA target sequence for KIF3B (NM_004798.2,1649-1667).
gaaacgacaggaaattgca

SEQ ID NO: 87645 - DNA, 19 bp, Homo sapiens
  siRNA target sequence for KIF3B (NM_004798.2,1871-1889).
gctagagcagactcagaat

SEQ ID NO: 87646 - DNA, 19 bp, Homo sapiens
  siRNA target sequence for KIF3B (NM_004798.2,1991-2009).
ggaagatcattggaaacta

SEQ ID NO: 87647 - DNA, 19 bp, Homo sapiens
  siRNA target sequence for KIF3B (NM_004798.2,2094-2112).
gcaagaatgtccatgatga

SEQ ID NO: 87648 - DNA, 19 bp, Homo sapiens
  siRNA target sequence for KIF3B (NM_004798.2,2125-2143).
cccgatatagggcagaaaa

SEQ ID NO: 87649 - DNA, 19 bp, Homo sapiens
  siRNA target sequence for KIF3B (NM_004798.2,2128-2146).
gatatagggcagaaaacat

SEQ ID NO: 87650 - DNA, 19 bp, Homo sapiens
  siRNA target sequence for KIF3B (NM_004798.2,2174-2192).
ccggaccaccagagactat

SEQ ID NO: 87651 - DNA, 19 bp, Homo sapiens
  siRNA target sequence for KIF3B (NM_004798.2,2243-2261).
gcaggatgaagatgagata

SEQ ID NO: 87652 - DNA, 19 bp, Homo sapiens
  siRNA target sequence for KIF3B (NM_004798.2,2262-2280).
caggtggatgcatcatcat

SEQ ID NO: 87653 - DNA, 19 bp, Homo sapiens
  siRNA target sequence for KIF3B (NM_004798.2,2306-2324).
caaggccaggcctaaaagt

SEQ ID NO: 87654 - DNA, 19 bp, Homo sapiens
  siRNA target sequence for KIF3C (NM_002254.4,758-776).
ctttgacgccgtgtatgat

SEQ ID NO: 87655 - DNA, 19 bp, Homo sapiens
  siRNA target sequence for KIF3C (NM_002254.4,811-829).
ccgtgaggcccctgataga

SEQ ID NO: 87656 - DNA, 19 bp, Homo sapiens
  siRNA target sequence for KIF3C (NM_002254.4,813-831).
gtgaggcccctgatagact

SEQ ID NO: 87657 - DNA, 19 bp, Homo sapiens
  siRNA target sequence for KIF3C (NM_002254.4,1124-1142).
ctccttcgtcaccaagaat

SEQ ID NO: 87658 - DNA, 19 bp, Homo sapiens
  siRNA target sequence for KIF3C (NM_002254.4,1193-1211).
gggcagcacccacatgaat

SEQ ID NO: 87659 - DNA, 19 bp, Homo sapiens
  siRNA target sequence for KIF3C (NM_002254.4,1440-1458).
cctaaggaagcctccaaaa

SEQ ID NO: 87660 - DNA, 19 bp, Homo sapiens
  siRNA target sequence for KIF3C (NM_002254.4,1441-1459).
ctaaggaagcctccaaaat

SEQ ID NO: 87661 - DNA, 19 bp, Homo sapiens
  siRNA target sequence for KIF3C (NM_002254.4,1453-1471).
ccaaaatcaacctctcatt

SEQ ID NO: 87662 - DNA, 19 bp, Homo sapiens
  siRNA target sequence for KIF3C (NM_002254.4,1454-1472).
caaaatcaacctctcatta

SEQ ID NO: 87663 - DNA, 19 bp, Homo sapiens
  siRNA target sequence for KIF3C (NM_002254.4,2454-2472).
gcgaactcaagctcaagta

SEQ ID NO: 87664 - DNA, 19 bp, Homo sapiens
  siRNA target sequence for KIF3C (NM_002254.4,2474-2492).
ctaatcatcgagaacttca

SEQ ID NO: 87665 - DNA, 19 bp, Homo sapiens
  siRNA target sequence for KIF3C (NM_002254.4,2602-2620).
gaagaagcggccaacatct

SEQ ID NO: 87666 - DNA, 19 bp, Homo sapiens
  siRNA target sequence for KIF3C (NM_002254.4,2688-2706).
ggtacagggctgaaaacat

SEQ ID NO: 87667 - DNA, 19 bp, Homo sapiens
  siRNA target sequence for KIF3C (NM_002254.4,2689-2707).
gtacagggctgaaaacata

SEQ ID NO: 87668 - DNA, 19 bp, Homo sapiens
  siRNA target sequence for KIF3C (NM_002254.4,2694-2712).
gggctgaaaacataatgtt

SEQ ID NO: 87669 - DNA, 19 bp, Homo sapiens
  siRNA target sequence for KIF3C (NM_002254.4,2728-2746).
gtcccctccagctgtcttt

SEQ ID NO: 87670 - DNA, 19 bp, Homo sapiens
  siRNA target sequence for KIF3C (NM_002254.4,2730-2748).
cccctccagctgtctttga

SEQ ID NO: 87671 - DNA, 19 bp, Homo sapiens
  siRNA target sequence for KIF3C (NM_002254.4,2758-2776).
ctctcacgaccaagaacaa

SEQ ID NO: 87672 - DNA, 19 bp, Homo sapiens
  siRNA target sequence for KIF5A (NM_004984.1,155-173).
gagaccaacaacgaatgta

SEQ ID NO: 87673 - DNA, 19 bp, Homo sapiens
  siRNA target sequence for KIF5A (NM_004984.1,255-273).
gggacgacagcgtcgttat

SEQ ID NO: 87674 - DNA, 19 bp, Homo sapiens
  siRNA target sequence for KIF5A (NM_004984.1,256-274).
ggacgacagcgtcgttatt

SEQ ID NO: 87675 - DNA, 19 bp, Homo sapiens
  siRNA target sequence for KIF5A (NM_004984.1,277-295).
ggggaagccatatgttttt

SEQ ID NO: 87676 - DNA, 19 bp, Homo sapiens
  siRNA target sequence for KIF5A (NM_004984.1,319-337).
gactcaagagcaagtttat

SEQ ID NO: 87677 - DNA, 19 bp, Homo sapiens
  siRNA target sequence for KIF5A (NM_004984.1,342-360).
catgtgccatgcagattgt

SEQ ID NO: 87678 - DNA, 19 bp, Homo sapiens
  siRNA target sequence for KIF5A (NM_004984.1,541-559).
caaggtttcttactttgaa

SEQ ID NO: 87679 - DNA, 19 bp, Homo sapiens
  siRNA target sequence for KIF5A (NM_004984.1,589-607).
ggatgtgaccaagacaaat

SEQ ID NO: 87680 - DNA, 19 bp, Homo sapiens
  siRNA target sequence for KIF5A (NM_004984.1,593-611).
gtgaccaagacaaatctgt

SEQ ID NO: 87681 - DNA, 19 bp, Homo sapiens
  siRNA target sequence for KIF5A (NM_004984.1,612-630).
ccgtgcacgaggacaagaa

SEQ ID NO: 87682 - DNA, 19 bp, Homo sapiens
  siRNA target sequence for KIF5A (NM_004984.1,961-979).
gggcactaaaagctatgtt

SEQ ID NO: 87683 - DNA, 19 bp, Homo sapiens
  siRNA target sequence for KIF5A (NM_004984.1,980-998).
ccatatcgtgacagcaaaa

SEQ ID NO: 87684 - DNA, 19 bp, Homo sapiens
  siRNA target sequence for KIF5A (NM_004984.1,981-999).
catatcgtgacagcaaaat

SEQ ID NO: 87685 - DNA, 19 bp, Homo sapiens
  siRNA target sequence for KIF5A (NM_004984.1,1035-1053).
gccggacgactatgttcat

SEQ ID NO: 87686 - DNA, 19 bp, Homo sapiens
  siRNA target sequence for KIF5A (NM_004984.1,1037-1055).
cggacgactatgttcatct

SEQ ID NO: 87687 - DNA, 19 bp, Homo sapiens
  siRNA target sequence for KIF5A (NM_004984.1,1059-1077).
gctcaccatccagttataa

SEQ ID NO: 87688 - DNA, 19 bp, Homo sapiens
  siRNA target sequence for KIF5A (NM_004984.1,1060-1078).
ctcaccatccagttataat

SEQ ID NO: 87689 - DNA, 19 bp, Homo sapiens
  siRNA target sequence for KIF5A (NM_004984.1,1062-1080).
caccatccagttataatga

SEQ ID NO: 87690 - DNA, 19 bp, Homo sapiens
  siRNA target sequence for KIF5A (NM_004984.1,1137-1155).
ctgcctcagtaaatttgga

SEQ ID NO: 87691 - DNA, 19 bp, Homo sapiens
  siRNA target sequence for KIF5A (NM_004984.1,1255-1273).
gtggcgcaatggagagaat

SEQ ID NO: 87692 - DNA, 19 bp, Homo sapiens
  siRNA target sequence for KIF5A (NM_004984.1,1257-1275).
ggcgcaatggagagaatgt

SEQ ID NO: 87693 - DNA, 19 bp, Homo sapiens
  siRNA target sequence for KIF5A (NM_004984.1,1379-1397).
cccgaggagcggcagaaat

SEQ ID NO: 87694 - DNA, 19 bp, Homo sapiens
  siRNA target sequence for KIF5A (NM_004984.1,1380-1398).
ccgaggagcggcagaaata

SEQ ID NO: 87695 - DNA, 19 bp, Homo sapiens
  siRNA target sequence for KIF5A (NM_004984.1,1406-1424).
gagatccgccgtctctata

SEQ ID NO: 87696 - DNA, 19 bp, Homo sapiens
  siRNA target sequence for KIF5A (NM_004984.1,1460-1478).
caaagccaactcatagaga

SEQ ID NO: 87697 - DNA, 19 bp, Homo sapiens
  siRNA target sequence for KIF5A (NM_004984.1,1576-1594).
gaacgatgccgctaaggat

SEQ ID NO: 87698 - DNA, 19 bp, Homo sapiens
  siRNA target sequence for KIF5A (NM_004984.1,1769-1787).
ggacaccagcgaaaacgaa

SEQ ID NO: 87699 - DNA, 19 bp, Homo sapiens
  siRNA target sequence for KIF5A (NM_004984.1,1770-1788).
gacaccagcgaaaacgaat

SEQ ID NO: 87700 - DNA, 19 bp, Homo sapiens
  siRNA target sequence for KIF5A (NM_004984.1,1774-1792).
ccagcgaaaacgaattgct

SEQ ID NO: 87701 - DNA, 19 bp, Homo sapiens
  siRNA target sequence for KIF5A (NM_004984.1,1822-1840).
gagcgagttcagtgtcatt

SEQ ID NO: 87702 - DNA, 19 bp, Homo sapiens
  siRNA target sequence for KIF5A (NM_004984.1,1824-1842).
gcgagttcagtgtcattgt

SEQ ID NO: 87703 - DNA, 19 bp, Homo sapiens
  siRNA target sequence for KIF5A (NM_004984.1,1841-1859).
gtgggcaacggggagatta

SEQ ID NO: 87704 - DNA, 19 bp, Homo sapiens
  siRNA target sequence for KIF5A (NM_004984.1,1845-1863).
gcaacggggagattaagct

SEQ ID NO: 87705 - DNA, 19 bp, Homo sapiens
  siRNA target sequence for KIF5A (NM_004984.1,1902-1920).
ctgtggcccgactctacat

SEQ ID NO: 87706 - DNA, 19 bp, Homo sapiens
  siRNA target sequence for KIF5A (NM_004984.1,1904-1922).
gtggcccgactctacatca

SEQ ID NO: 87707 - DNA, 19 bp, Homo sapiens
  siRNA target sequence for KIF5A (NM_004984.1,2069-2087).
cgctcgcttacggaataca

SEQ ID NO: 87708 - DNA, 19 bp, Homo sapiens
  siRNA target sequence for KIF5A (NM_004984.1,2070-2088).
gctcgcttacggaatacat

SEQ ID NO: 87709 - DNA, 19 bp, Homo sapiens
  siRNA target sequence for KIF5A (NM_004984.1,2090-2108).
cagagcgtggagctaaaga

SEQ ID NO: 87710 - DNA, 19 bp, Homo sapiens
  siRNA target sequence for KIF5A (NM_004984.1,2117-2135).
ctggaagagtcctatgact

SEQ ID NO: 87711 - DNA, 19 bp, Homo sapiens
  siRNA target sequence for KIF5A (NM_004984.1,2541-2559).
gcaagctgttcgttcaaga

SEQ ID NO: 87712 - DNA, 19 bp, Homo sapiens
  siRNA target sequence for KIF5A (NM_004984.1,2563-2581).
cacgactcgagtcaagaaa

SEQ ID NO: 87713 - DNA, 19 bp, Homo sapiens
  siRNA target sequence for KIF5A (NM_004984.1,2659-2677).
ggaacagcttacaaaggtt

SEQ ID NO: 87714 - DNA, 19 bp, Homo sapiens
  siRNA target sequence for KIF5A (NM_004984.1,2710-2728).
gcgttgtgagcttcctaaa

SEQ ID NO: 87715 - DNA, 19 bp, Homo sapiens
  siRNA target sequence for KIF5A (NM_004984.1,2712-2730).
gttgtgagcttcctaaatt

SEQ ID NO: 87716 - DNA, 19 bp, Homo sapiens
  siRNA target sequence for KIF5A (NM_004984.1,2852-2870).
gaggccgttcgctacaaga

SEQ ID NO: 87717 - DNA, 19 bp, Homo sapiens
  siRNA target sequence for KIF5A (NM_004984.1,2967-2985).
gccctgagtgcatcagtta

SEQ ID NO: 87718 - DNA, 19 bp, Homo sapiens
  siRNA target sequence for KIF5A (NM_004984.1,3039-3057).
gctccacctcagatatgta

SEQ ID NO: 87719 - DNA, 19 bp, Homo sapiens
  siRNA target sequence for KIF5A (NM_004984.1,3042-3060).
ccacctcagatatgtactt

SEQ ID NO: 87720 - DNA, 19 bp, Homo sapiens
  siRNA target sequence for KIF5A (NM_004984.1,3043-3061).
cacctcagatatgtacttt

SEQ ID NO: 87721 - DNA, 19 bp, Homo sapiens
  siRNA target sequence for KIF5B (NM_004521.1,323-341).
ctggccgagtgcaacatca

SEQ ID NO: 87722 - DNA, 19 bp, Homo sapiens
  siRNA target sequence for KIF5B (NM_004521.1,325-343).
ggccgagtgcaacatcaaa

SEQ ID NO: 87723 - DNA, 19 bp, Homo sapiens
  siRNA target sequence for KIF5B (NM_004521.1,436-454).
cgcgtccaagccttatgca

SEQ ID NO: 87724 - DNA, 19 bp, Homo sapiens
  siRNA target sequence for KIF5B (NM_004521.1,437-455).
gcgtccaagccttatgcat

SEQ ID NO: 87725 - DNA, 19 bp, Homo sapiens
  siRNA target sequence for KIF5B (NM_004521.1,438-456).
cgtccaagccttatgcatt

SEQ ID NO: 87726 - DNA, 19 bp, Homo sapiens
  siRNA target sequence for KIF5B (NM_004521.1,441-459).
ccaagccttatgcatttga

SEQ ID NO: 87727 - DNA, 19 bp, Homo sapiens
  siRNA target sequence for KIF5B (NM_004521.1,442-460).
caagccttatgcatttgat

SEQ ID NO: 87728 - DNA, 19 bp, Homo sapiens
  siRNA target sequence for KIF5B (NM_004521.1,469-487).
ccagtcaagcacatctcaa

SEQ ID NO: 87729 - DNA, 19 bp, Homo sapiens
  siRNA target sequence for KIF5B (NM_004521.1,488-506).
gagcaagtgtataatgact

SEQ ID NO: 87730 - DNA, 19 bp, Homo sapiens
  siRNA target sequence for KIF5B (NM_004521.1,527-545).
gatgtacttgaaggatata

SEQ ID NO: 87731 - DNA, 19 bp, Homo sapiens
  siRNA target sequence for KIF5B (NM_004521.1,592-610).
cacaatggagggtaaactt

SEQ ID NO: 87732 - DNA, 19 bp, Homo sapiens
  siRNA target sequence for KIF5B (NM_004521.1,598-616).
ggagggtaaacttcatgat

SEQ ID NO: 87733 - DNA, 19 bp, Homo sapiens
  siRNA target sequence for KIF5B (NM_004521.1,617-635).
ccagaaggcatgggaatta

SEQ ID NO: 87734 - DNA, 19 bp, Homo sapiens
  siRNA target sequence for KIF5B (NM_004521.1,618-636).
cagaaggcatgggaattat

SEQ ID NO: 87735 - DNA, 19 bp, Homo sapiens
  siRNA target sequence for KIF5B (NM_004521.1,623-641).
ggcatgggaattattccaa

SEQ ID NO: 87736 - DNA, 19 bp, Homo sapiens
  siRNA target sequence for KIF5B (NM_004521.1,691-709).
ggaatttcatattaaggtt

SEQ ID NO: 87737 - DNA, 19 bp, Homo sapiens
  siRNA target sequence for KIF5B (NM_004521.1,743-761).
gacctgttagatgtttcaa

SEQ ID NO: 87738 - DNA, 19 bp, Homo sapiens
  siRNA target sequence for KIF5B (NM_004521.1,763-781).
gaccaacctttcagttcat

SEQ ID NO: 87739 - DNA, 19 bp, Homo sapiens
  siRNA target sequence for KIF5B (NM_004521.1,765-783).
ccaacctttcagttcatga

SEQ ID NO: 87740 - DNA, 19 bp, Homo sapiens
  siRNA target sequence for KIF5B (NM_004521.1,766-784).
caacctttcagttcatgaa

SEQ ID NO: 87741 - DNA, 19 bp, Homo sapiens
  siRNA target sequence for KIF5B (NM_004521.1,814-832).
gtgcacagagcgttttgta

SEQ ID NO: 87742 - DNA, 19 bp, Homo sapiens
  siRNA target sequence for KIF5B (NM_004521.1,817-835).
cacagagcgttttgtatgt

SEQ ID NO: 87743 - DNA, 19 bp, Homo sapiens
  siRNA target sequence for KIF5B (NM_004521.1,839-857).
ccagatgaagttatggata

SEQ ID NO: 87744 - DNA, 19 bp, Homo sapiens
  siRNA target sequence for KIF5B (NM_004521.1,882-900).
gacatgtagcagttacaaa

SEQ ID NO: 87745 - DNA, 19 bp, Homo sapiens
  siRNA target sequence for KIF5B (NM_004521.1,887-905).
gtagcagttacaaatatga

SEQ ID NO: 87746 - DNA, 19 bp, Homo sapiens
  siRNA target sequence for KIF5B (NM_004521.1,1010-1028).
gctggtagtgaaaaggtta

SEQ ID NO: 87747 - DNA, 19 bp, Homo sapiens
  siRNA target sequence for KIF5B (NM_004521.1,1013-1031).
ggtagtgaaaaggttagta

SEQ ID NO: 87748 - DNA, 19 bp, Homo sapiens
  siRNA target sequence for KIF5B (NM_004521.1,1014-1032).
gtagtgaaaaggttagtaa

SEQ ID NO: 87749 - DNA, 19 bp, Homo sapiens
  siRNA target sequence for KIF5B (NM_004521.1,1119-1137).
ctgagggtagtacatatgt

SEQ ID NO: 87750 - DNA, 19 bp, Homo sapiens
  siRNA target sequence for KIF5B (NM_004521.1,1125-1143).
gtagtacatatgttccata

SEQ ID NO: 87751 - DNA, 19 bp, Homo sapiens
  siRNA target sequence for KIF5B (NM_004521.1,1136-1154).
gttccatatcgagatagta

SEQ ID NO: 87752 - DNA, 19 bp, Homo sapiens
  siRNA target sequence for KIF5B (NM_004521.1,1139-1157).
ccatatcgagatagtaaaa

SEQ ID NO: 87753 - DNA, 19 bp, Homo sapiens
  siRNA target sequence for KIF5B (NM_004521.1,1140-1158).
catatcgagatagtaaaat

SEQ ID NO: 87754 - DNA, 19 bp, Homo sapiens
  siRNA target sequence for KIF5B (NM_004521.1,1218-1236).
gctctccatcatcatacaa

SEQ ID NO: 87755 - DNA, 19 bp, Homo sapiens
  siRNA target sequence for KIF5B (NM_004521.1,1219-1237).
ctctccatcatcatacaat

SEQ ID NO: 87756 - DNA, 19 bp, Homo sapiens
  siRNA target sequence for KIF5B (NM_004521.1,1268-1286).
ggccaaagggccaaaacaa

SEQ ID NO: 87757 - DNA, 19 bp, Homo sapiens
  siRNA target sequence for KIF5B (NM_004521.1,1269-1287).
gccaaagggccaaaacaat

SEQ ID NO: 87758 - DNA, 19 bp, Homo sapiens
  siRNA target sequence for KIF5B (NM_004521.1,1291-1309).
gaacacagtttgtgtcaat

SEQ ID NO: 87759 - DNA, 19 bp, Homo sapiens
  siRNA target sequence for KIF5B (NM_004521.1,1369-1387).
gatcctgcggaacactatt

SEQ ID NO: 87760 - DNA, 19 bp, Homo sapiens
  siRNA target sequence for KIF5B (NM_004521.1,1383-1401).
ctattcagtggcttgaaaa

SEQ ID NO: 87761 - DNA, 19 bp, Homo sapiens
  siRNA target sequence for KIF5B (NM_004521.1,1397-1415).
gaaaatgagctcaacagat

SEQ ID NO: 87762 - DNA, 19 bp, Homo sapiens
  siRNA target sequence for KIF5B (NM_004521.1,1426-1444).
ggagacggtgcctattgat

SEQ ID NO: 87763 - DNA, 19 bp, Homo sapiens
  siRNA target sequence for KIF5B (NM_004521.1,1429-1447).
gacggtgcctattgatgaa

SEQ ID NO: 87764 - DNA, 19 bp, Homo sapiens
  siRNA target sequence for KIF5B (NM_004521.1,1431-1449).
cggtgcctattgatgaaca

SEQ ID NO: 87765 - DNA, 19 bp, Homo sapiens
  siRNA target sequence for KIF5B (NM_004521.1,1524-1542).
caaccgcaattggagttat

SEQ ID NO: 87766 - DNA, 19 bp, Homo sapiens
  siRNA target sequence for KIF5B (NM_004521.1,1528-1546).
cgcaattggagttatagga

SEQ ID NO: 87767 - DNA, 19 bp, Homo sapiens
  siRNA target sequence for KIF5B (NM_004521.1,1530-1548).
caattggagttataggaaa

SEQ ID NO: 87768 - DNA, 19 bp, Homo sapiens
  siRNA target sequence for KIF5B (NM_004521.1,1698-1716).
ctaccagaagggatcaaga

SEQ ID NO: 87769 - DNA, 19 bp, Homo sapiens
  siRNA target sequence for KIF5B (NM_004521.1,1708-1726).
ggatcaagacaatatgcaa

SEQ ID NO: 87770 - DNA, 19 bp, Homo sapiens
  siRNA target sequence for KIF5B (NM_004521.1,1799-1817).
gaagaacttgctgtcaatt

SEQ ID NO: 87771 - DNA, 19 bp, Homo sapiens
  siRNA target sequence for KIF5B (NM_004521.1,1825-1843).
gaagtctcaggaagttgaa

SEQ ID NO: 87772 - DNA, 19 bp, Homo sapiens
  siRNA target sequence for KIF5B (NM_004521.1,1862-1880).
gaattgcttagtgatgaat

SEQ ID NO: 87773 - DNA, 19 bp, Homo sapiens
  siRNA target sequence for KIF5B (NM_004521.1,1894-1912).
ggcaactttagcgagtata

SEQ ID NO: 87774 - DNA, 19 bp, Homo sapiens
  siRNA target sequence for KIF5B (NM_004521.1,1972-1990).
gatgatggcatctttacta

SEQ ID NO: 87775 - DNA, 19 bp, Homo sapiens
  siRNA target sequence for KIF5B (NM_004521.1,1994-2012).
gaccttgcagaaataggaa

SEQ ID NO: 87776 - DNA, 19 bp, Homo sapiens
  siRNA target sequence for KIF5B (NM_004521.1,2055-2073).
gcatgatagatgaagagtt

SEQ ID NO: 87777 - DNA, 19 bp, Homo sapiens
  siRNA target sequence for KIF5B (NM_004521.1,2076-2094).
ctgttgcaagactctacat

SEQ ID NO: 87778 - DNA, 19 bp, Homo sapiens
  siRNA target sequence for KIF5B (NM_004521.1,2078-2096).
gttgcaagactctacatta

SEQ ID NO: 87779 - DNA, 19 bp, Homo sapiens
  siRNA target sequence for KIF5B (NM_004521.1,2081-2099).
gcaagactctacattagca

SEQ ID NO: 87780 - DNA, 19 bp, Homo sapiens
  siRNA target sequence for KIF5B (NM_004521.1,2082-2100).
caagactctacattagcaa

SEQ ID NO: 87781 - DNA, 19 bp, Homo sapiens
  siRNA target sequence for KIF5B (NM_004521.1,2212-2230).
gcttcgtatctctcaacat

SEQ ID NO: 87782 - DNA, 19 bp, Homo sapiens
  siRNA target sequence for KIF5B (NM_004521.1,2223-2241).
ctcaacatgaagccaaaat

SEQ ID NO: 87783 - DNA, 19 bp, Homo sapiens
  siRNA target sequence for KIF5B (NM_004521.1,2332-2350).
gcttcgagcacaagagaaa

SEQ ID NO: 87784 - DNA, 19 bp, Homo sapiens
  siRNA target sequence for KIF5B (NM_004521.1,2368-2386).
ggagcacttaaataaggtt

SEQ ID NO: 87785 - DNA, 19 bp, Homo sapiens
  siRNA target sequence for KIF5B (NM_004521.1,2428-2446).
ccagagccatagagaaact

SEQ ID NO: 87786 - DNA, 19 bp, Homo sapiens
  siRNA target sequence for KIF5B (NM_004521.1,2461-2479).
cagtagtttgagagatgaa

SEQ ID NO: 87787 - DNA, 19 bp, Homo sapiens
  siRNA target sequence for KIF5B (NM_004521.1,2463-2481).
gtagtttgagagatgaagt

SEQ ID NO: 87788 - DNA, 19 bp, Homo sapiens
  siRNA target sequence for KIF5B (NM_004521.1,2542-2560).
gcaggaacgtctaagagta

SEQ ID NO: 87789 - DNA, 19 bp, Homo sapiens
  siRNA target sequence for KIF5B (NM_004521.1,2545-2563).
ggaacgtctaagagtagaa

SEQ ID NO: 87790 - DNA, 19 bp, Homo sapiens
  siRNA target sequence for KIF5B (NM_004521.1,2550-2568).
gtctaagagtagaacatga

SEQ ID NO: 87791 - DNA, 19 bp, Homo sapiens
  siRNA target sequence for KIF5B (NM_004521.1,2615-2633).
cttacggttatgcaagata

SEQ ID NO: 87792 - DNA, 19 bp, Homo sapiens
  siRNA target sequence for KIF5B (NM_004521.1,2626-2644).
gcaagatagacgagaacaa

SEQ ID NO: 87793 - DNA, 19 bp, Homo sapiens
  siRNA target sequence for KIF5B (NM_004521.1,2676-2694).
cagtggcaaaagaacttca

SEQ ID NO: 87794 - DNA, 19 bp, Homo sapiens
  siRNA target sequence for KIF5B (NM_004521.1,2707-2725).
cctgcgcaaactctttgtt

SEQ ID NO: 87795 - DNA, 19 bp, Homo sapiens
  siRNA target sequence for KIF5B (NM_004521.1,2729-2747).
gacctggctacaagagtta

SEQ ID NO: 87796 - DNA, 19 bp, Homo sapiens
  siRNA target sequence for KIF5B (NM_004521.1,2752-2770).
gagtgctgagattgattct

SEQ ID NO: 87797 - DNA, 19 bp, Homo sapiens
  siRNA target sequence for KIF5B (NM_004521.1,2792-2810).
gctcagaagcaaaaaatct

SEQ ID NO: 87798 - DNA, 19 bp, Homo sapiens
  siRNA target sequence for KIF5B (NM_004521.1,2841-2859).
ctaaagtgcacaaacagtt

SEQ ID NO: 87799 - DNA, 19 bp, Homo sapiens
  siRNA target sequence for KIF5B (NM_004521.1,3023-3041).
gaagcagtcaggtcaaaga

SEQ ID NO: 87800 - DNA, 19 bp, Homo sapiens
  siRNA target sequence for KIF5B (NM_004521.1,3070-3088).
gattgctaaacctattcgt

SEQ ID NO: 87801 - DNA, 19 bp, Homo sapiens
  siRNA target sequence for KIF5C (NM_004522.1,686-704).
ggggatcatcccacgaatt

SEQ ID NO: 87802 - DNA, 19 bp, Homo sapiens
  siRNA target sequence for KIF5C (NM_004522.1,696-714).
ccacgaattgcccatgata

SEQ ID NO: 87803 - DNA, 19 bp, Homo sapiens
  siRNA target sequence for KIF5C (NM_004522.1,697-715).
cacgaattgcccatgatat

SEQ ID NO: 87804 - DNA, 19 bp, Homo sapiens
  siRNA target sequence for KIF5C (NM_004522.1,699-717).
cgaattgcccatgatatct

SEQ ID NO: 87805 - DNA, 19 bp, Homo sapiens
  siRNA target sequence for KIF5C (NM_004522.1,743-761).
gaacctggagtttcacata

SEQ ID NO: 87806 - DNA, 19 bp, Homo sapiens
  siRNA target sequence for KIF5C (NM_004522.1,756-774).
cacataaaggtttcctatt

SEQ ID NO: 87807 - DNA, 19 bp, Homo sapiens
  siRNA target sequence for KIF5C (NM_004522.1,821-839).
gaccaacttggctgttcat

SEQ ID NO: 87808 - DNA, 19 bp, Homo sapiens
  siRNA target sequence for KIF5C (NM_004522.1,984-1002).
cacagtatcttcctgataa

SEQ ID NO: 87809 - DNA, 19 bp, Homo sapiens
  siRNA target sequence for KIF5C (NM_004522.1,986-1004).
cagtatcttcctgataaat

SEQ ID NO: 87810 - DNA, 19 bp, Homo sapiens
  siRNA target sequence for KIF5C (NM_004522.1,1099-1117).
ccgagggagctgttcttga

SEQ ID NO: 87811 - DNA, 19 bp, Homo sapiens
  siRNA target sequence for KIF5C (NM_004522.1,1214-1232).
caagatgactcggattctt

SEQ ID NO: 87812 - DNA, 19 bp, Homo sapiens
  siRNA target sequence for KIF5C (NM_004522.1,1555-1573).
cccccatcatagacaatat

SEQ ID NO: 87813 - DNA, 19 bp, Homo sapiens
  siRNA target sequence for KIF5C (NM_004522.1,1568-1586).
caatattgctcctgttgtt

SEQ ID NO: 87814 - DNA, 19 bp, Homo sapiens
  siRNA target sequence for KIF5C (NM_004522.1,1731-1749).
cttttagcttccacaagaa

SEQ ID NO: 87815 - DNA, 19 bp, Homo sapiens
  siRNA target sequence for KIF5C (NM_004522.1,1741-1759).
ccacaagaagagactatga

SEQ ID NO: 87816 - DNA, 19 bp, Homo sapiens
  siRNA target sequence for KIF5C (NM_004522.1,1929-1947).
cagaaaacgactacattga

SEQ ID NO: 87817 - DNA, 19 bp, Homo sapiens
  siRNA target sequence for KIF5C (NM_004522.1,2008-2026).
caactgagatcctgaattt

SEQ ID NO: 87818 - DNA, 19 bp, Homo sapiens
  siRNA target sequence for KIF5C (NM_004522.1,2011-2029).
ctgagatcctgaatttgct

SEQ ID NO: 87819 - DNA, 19 bp, Homo sapiens
  siRNA target sequence for KIF5C (NM_004522.1,2043-2061).
ggggagataggtggaatta

SEQ ID NO: 87820 - DNA, 19 bp, Homo sapiens
  siRNA target sequence for KIF5C (NM_004522.1,2044-2062).
gggagataggtggaattat

SEQ ID NO: 87821 - DNA, 19 bp, Homo sapiens
  siRNA target sequence for KIF5C (NM_004522.1,2066-2084).
caccaatgatgtgaaaact

SEQ ID NO: 87822 - DNA, 19 bp, Homo sapiens
  siRNA target sequence for KIF5C (NM_004522.1,2210-2228).
ctccaacaggaagatgaat

SEQ ID NO: 87823 - DNA, 19 bp, Homo sapiens
  siRNA target sequence for KIF5C (NM_004522.1,2383-2401).
gagcccaggaaaaaatgca

SEQ ID NO: 87824 - DNA, 19 bp, Homo sapiens
  siRNA target sequence for KIF5C (NM_004522.1,2524-2542).
ccagactccgagacgaaat

SEQ ID NO: 87825 - DNA, 19 bp, Homo sapiens
  siRNA target sequence for KIF5C (NM_004522.1,2525-2543).
cagactccgagacgaaatt

SEQ ID NO: 87826 - DNA, 19 bp, Homo sapiens
  siRNA target sequence for KIF5C (NM_004522.1,2527-2545).
gactccgagacgaaattga

SEQ ID NO: 87827 - DNA, 19 bp, Homo sapiens
  siRNA target sequence for KIF5C (NM_004522.1,2678-2696).
cttattgctcaacgataaa

SEQ ID NO: 87828 - DNA, 19 bp, Homo sapiens
  siRNA target sequence for KIF5C (NM_004522.1,2737-2755).
cagtgtctagagaattgca

SEQ ID NO: 87829 - DNA, 19 bp, Homo sapiens
  siRNA target sequence for KIF5C (NM_004522.1,2793-2811).
ctgaccacccgagttaaaa

SEQ ID NO: 87830 - DNA, 19 bp, Homo sapiens
  siRNA target sequence for KIF5C (NM_004522.1,2795-2813).
gaccacccgagttaaaaaa

SEQ ID NO: 87831 - DNA, 19 bp, Homo sapiens
  siRNA target sequence for KIF5C (NM_004522.1,2798-2816).
cacccgagttaaaaaaagt

SEQ ID NO: 87832 - DNA, 19 bp, Homo sapiens
  siRNA target sequence for KIF5C (NM_004522.1,2800-2818).
cccgagttaaaaaaagtgt

SEQ ID NO: 87833 - DNA, 19 bp, Homo sapiens
  siRNA target sequence for KIF5C (NM_004522.1,2853-2871).
gcccagaagcagaaaattt

SEQ ID NO: 87834 - DNA, 19 bp, Homo sapiens
  siRNA target sequence for KIF5C (NM_004522.1,2872-2890).
ccttcttggagaataacct

SEQ ID NO: 87835 - DNA, 19 bp, Homo sapiens
  siRNA target sequence for KIF9 (NM_022342.2,153-171).
gaagcattgatattcactt

SEQ ID NO: 87836 - DNA, 19 bp, Homo sapiens
  siRNA target sequence for KIF9 (NM_022342.2,156-174).
gcattgatattcacttaaa

SEQ ID NO: 87837 - DNA, 19 bp, Homo sapiens
  siRNA target sequence for KIF9 (NM_022342.2,185-203).
cggagaggagttgtcaata

SEQ ID NO: 87838 - DNA, 19 bp, Homo sapiens
  siRNA target sequence for KIF9 (NM_022342.2,209-227).
cagacagactggtcgttta

SEQ ID NO: 87839 - DNA, 19 bp, Homo sapiens
  siRNA target sequence for KIF9 (NM_022342.2,253-271).
ctcccaggacttggtttat

SEQ ID NO: 87840 - DNA, 19 bp, Homo sapiens
  siRNA target sequence for KIF9 (NM_022342.2,255-273).
cccaggacttggtttatga

SEQ ID NO: 87841 - DNA, 19 bp, Homo sapiens
  siRNA target sequence for KIF9 (NM_022342.2,370-388).
gatgggggcaactgagaat

SEQ ID NO: 87842 - DNA, 19 bp, Homo sapiens
  siRNA target sequence for KIF9 (NM_022342.2,473-491).
cgtgtttcctacttggaaa

SEQ ID NO: 87843 - DNA, 19 bp, Homo sapiens
  siRNA target sequence for KIF9 (NM_022342.2,555-573).
caatgaccatcgtggaaaa

SEQ ID NO: 87844 - DNA, 19 bp, Homo sapiens
  siRNA target sequence for KIF9 (NM_022342.2,653-671).
ggtgagaccaacaggatta

SEQ ID NO: 87845 - DNA, 19 bp, Homo sapiens
  siRNA target sequence for KIF9 (NM_022342.2,674-692).
gcctcccacactatgaaca

SEQ ID NO: 87846 - DNA, 19 bp, Homo sapiens
  siRNA target sequence for KIF9 (NM_022342.2,675-693).
cctcccacactatgaacaa

SEQ ID NO: 87847 - DNA, 19 bp, Homo sapiens
  siRNA target sequence for KIF9 (NM_022342.2,676-694).
ctcccacactatgaacaaa

SEQ ID NO: 87848 - DNA, 19 bp, Homo sapiens
  siRNA target sequence for KIF9 (NM_022342.2,678-696).
cccacactatgaacaaaaa

SEQ ID NO: 87849 - DNA, 19 bp, Homo sapiens
  siRNA target sequence for KIF9 (NM_022342.2,680-698).
cacactatgaacaaaaact

SEQ ID NO: 87850 - DNA, 19 bp, Homo sapiens
  siRNA target sequence for KIF9 (NM_022342.2,737-755).
gcccattcccggaccttat

SEQ ID NO: 87851 - DNA, 19 bp, Homo sapiens
  siRNA target sequence for KIF9 (NM_022342.2,739-757).
ccattcccggaccttatca

SEQ ID NO: 87852 - DNA, 19 bp, Homo sapiens
  siRNA target sequence for KIF9 (NM_022342.2,747-765).
ggaccttatcagaggaaaa

SEQ ID NO: 87853 - DNA, 19 bp, Homo sapiens
  siRNA target sequence for KIF9 (NM_022342.2,995-1013).
gtcctcgtgacaaacatct

SEQ ID NO: 87854 - DNA, 19 bp, Homo sapiens
  siRNA target sequence for KIF9 (NM_022342.2,997-1015).
cctcgtgacaaacatctat

SEQ ID NO: 87855 - DNA, 19 bp, Homo sapiens
  siRNA target sequence for KIF9 (NM_022342.2,1041-1059).
cgctatcttcactgagatt

SEQ ID NO: 87856 - DNA, 19 bp, Homo sapiens
  siRNA target sequence for KIF9 (NM_022342.2,1088-1106).
gagcctgccatcaatgaaa

SEQ ID NO: 87857 - DNA, 19 bp, Homo sapiens
  siRNA target sequence for KIF9 (NM_022342.2,1162-1180).
gcaggagctggctatccat

SEQ ID NO: 87858 - DNA, 19 bp, Homo sapiens
  siRNA target sequence for KIF9 (NM_022342.2,1280-1298).
ctggacgagatcgacataa

SEQ ID NO: 87859 - DNA, 19 bp, Homo sapiens
  siRNA target sequence for KIF9 (NM_022342.2,1283-1301).
gacgagatcgacataatca

SEQ ID NO: 87860 - DNA, 19 bp, Homo sapiens
  siRNA target sequence for KIF9 (NM_022342.2,1386-1404).
ggaagtacaccctcattga

SEQ ID NO: 87861 - DNA, 19 bp, Homo sapiens
  siRNA target sequence for KIF9 (NM_022342.2,1478-1496).
gagcctgaaggacaaaact

SEQ ID NO: 87862 - DNA, 19 bp, Homo sapiens
  siRNA target sequence for KIF9 (NM_022342.2,1505-1523).
ggagtcgcccctttctcta

SEQ ID NO: 87863 - DNA, 19 bp, Homo sapiens
  siRNA target sequence for KIF9 (NM_022342.2,1510-1528).
cgcccctttctctaccaaa

SEQ ID NO: 87864 - DNA, 19 bp, Homo sapiens
  siRNA target sequence for KIF9 (NM_022342.2,1635-1653).
gtgagatcaaccgaatttt

SEQ ID NO: 87865 - DNA, 19 bp, Homo sapiens
  siRNA target sequence for KIF9 (NM_022342.2,1722-1740).
ccatcaagcgggagattga

SEQ ID NO: 87866 - DNA, 19 bp, Homo sapiens
  siRNA target sequence for KIF9 (NM_022342.2,1723-1741).
catcaagcgggagattgat

SEQ ID NO: 87867 - DNA, 19 bp, Homo sapiens
  siRNA target sequence for KIF9 (NM_022342.2,1973-1991).
gacatctggtacaatgagt

SEQ ID NO: 87868 - DNA, 19 bp, Homo sapiens
  siRNA target sequence for KIF9 (NM_022342.2,2144-2162).
gattccatctccttctaca

SEQ ID NO: 87869 - DNA, 19 bp, Homo sapiens
  siRNA target sequence for KIF9 (NM_022342.2,2161-2179).
caatgccaaagtcaagata

SEQ ID NO: 87870 - DNA, 19 bp, Homo sapiens
  siRNA target sequence for KIF9 (NM_022342.2,2180-2198).
gagcagaagcataattact

SEQ ID NO: 87871 - DNA, 19 bp, Homo sapiens
  siRNA target sequence for KIF9 (NM_022342.2,2189-2207).
cataattacttgaaaacca

SEQ ID NO: 87872 - DNA, 19 bp, Homo sapiens
  siRNA target sequence for KIF9 (NM_022342.2,2218-2236).
ccagcaggcacatagaaaa

SEQ ID NO: 87873 - DNA, 19 bp, Homo sapiens
  siRNA target sequence for KIF9 (NM_182902.2,1665-1683).
ggaaggacttggattacgt

SEQ ID NO: 87874 - DNA, 19 bp, Homo sapiens
  siRNA target sequence for KIF9 (NM_182902.2,1666-1684).
gaaggacttggattacgtt

SEQ ID NO: 87875 - DNA, 19 bp, Homo sapiens
  siRNA target sequence for KIF9 (NM_182902.2,1705-1723).
ggtcccatcctccaaagat

SEQ ID NO: 87876 - DNA, 19 bp, Homo sapiens
  siRNA target sequence for KIF9 (NM_182902.2,1727-1745).
gatgtcaaagacatgcttt

SEQ ID NO: 87877 - DNA, 19 bp, Homo sapiens
  siRNA target sequence for KIF9 (NM_182903.2,2008-2026).
gggctttccctcgctaaat

SEQ ID NO: 87878 - DNA, 19 bp, Homo sapiens
  siRNA target sequence for KIF9 (NM_182903.2,2010-2028).
gctttccctcgctaaatca

SEQ ID NO: 87879 - DNA, 19 bp, Homo sapiens
  siRNA target sequence for KIFC2 (NM_145754.2,82-100).
cgttgctcatctacatctt

SEQ ID NO: 87880 - DNA, 19 bp, Homo sapiens
  siRNA target sequence for KIFC2 (NM_145754.2,2026-2044).
gggaggcccagaccataaa

SEQ ID NO: 87881 - DNA, 19 bp, Homo sapiens
  siRNA target sequence for KIFC2 (NM_145754.2,2295-2313).
cagtctgctccctcaagtt

SEQ ID NO: 87882 - DNA, 19 bp, Homo sapiens
  siRNA target sequence for KIFC3 (NM_005550.2,916-934).
gtccccacctgtcaagtat

SEQ ID NO: 87883 - DNA, 19 bp, Homo sapiens
  siRNA target sequence for KIFC3 (NM_005550.2,921-939).
cacctgtcaagtatgtcat

SEQ ID NO: 87884 - DNA, 19 bp, Homo sapiens
  siRNA target sequence for KIFC3 (NM_005550.2,1564-1582).
caatgctgtgactttcgat

SEQ ID NO: 87885 - DNA, 19 bp, Homo sapiens
  siRNA target sequence for KIFC3 (NM_005550.2,1699-1717).
cctggtcacctcttgcatt

SEQ ID NO: 87886 - DNA, 19 bp, Homo sapiens
  siRNA target sequence for KIFC3 (NM_005550.2,1702-1720).
ggtcacctcttgcattgat

SEQ ID NO: 87887 - DNA, 19 bp, Homo sapiens
  siRNA target sequence for KIFC3 (NM_005550.2,1884-1902).
gcgctgcggagatctacaa

SEQ ID NO: 87888 - DNA, 19 bp, Homo sapiens
  siRNA target sequence for KIFC3 (NM_005550.2,1885-1903).
cgctgcggagatctacaat

SEQ ID NO: 87889 - DNA, 19 bp, Homo sapiens
  siRNA target sequence for KIFC3 (NM_005550.2,1887-1905).
ctgcggagatctacaatga

SEQ ID NO: 87890 - DNA, 19 bp, Homo sapiens
  siRNA target sequence for KIFC3 (NM_005550.2,1972-1990).
cagtgggcagctgtatgta

SEQ ID NO: 87891 - DNA, 19 bp, Homo sapiens
  siRNA target sequence for KIFC3 (NM_005550.2,2431-2449).
gctctattccctcaagttt

SEQ ID NO: 87892 - DNA, 19 bp, Homo sapiens
  siRNA target sequence for KIT (NM_000222.1,135-153).
catccatccaggaaaatca

SEQ ID NO: 87893 - DNA, 19 bp, Homo sapiens
  siRNA target sequence for KIT (NM_000222.1,146-164).
gaaaatcagacttaatagt

SEQ ID NO: 87894 - DNA, 19 bp, Homo sapiens
  siRNA target sequence for KIT (NM_000222.1,166-184).
cgcgtgggcgacgagatta

SEQ ID NO: 87895 - DNA, 19 bp, Homo sapiens
  siRNA target sequence for KIT (NM_000222.1,175-193).
gacgagattaggctgttat

SEQ ID NO: 87896 - DNA, 19 bp, Homo sapiens
  siRNA target sequence for KIT (NM_000222.1,202-220).
ccgggctttgtcaaatgga

SEQ ID NO: 87897 - DNA, 19 bp, Homo sapiens
  siRNA target sequence for KIT (NM_000222.1,211-229).
gtcaaatggacttttgaga

SEQ ID NO: 87898 - DNA, 19 bp, Homo sapiens
  siRNA target sequence for KIT (NM_000222.1,232-250).
ctggatgaaacgaatgaga

SEQ ID NO: 87899 - DNA, 19 bp, Homo sapiens
  siRNA target sequence for KIT (NM_000222.1,234-252).
ggatgaaacgaatgagaat

SEQ ID NO: 87900 - DNA, 19 bp, Homo sapiens
  siRNA target sequence for KIT (NM_000222.1,235-253).
gatgaaacgaatgagaata

SEQ ID NO: 87901 - DNA, 19 bp, Homo sapiens
  siRNA target sequence for KIT (NM_000222.1,318-336).
caaacacggcttaagcaat

SEQ ID NO: 87902 - DNA, 19 bp, Homo sapiens
  siRNA target sequence for KIT (NM_000222.1,322-340).
cacggcttaagcaattcca

SEQ ID NO: 87903 - DNA, 19 bp, Homo sapiens
  siRNA target sequence for KIT (NM_000222.1,324-342).
cggcttaagcaattccatt

SEQ ID NO: 87904 - DNA, 19 bp, Homo sapiens
  siRNA target sequence for KIT (NM_000222.1,325-343).
ggcttaagcaattccattt

SEQ ID NO: 87905 - DNA, 19 bp, Homo sapiens
  siRNA target sequence for KIT (NM_000222.1,326-344).
gcttaagcaattccattta

SEQ ID NO: 87906 - DNA, 19 bp, Homo sapiens
  siRNA target sequence for KIT (NM_000222.1,441-459).
cccagaagtgaccaattat

SEQ ID NO: 87907 - DNA, 19 bp, Homo sapiens
  siRNA target sequence for KIT (NM_000222.1,495-513).
ggacttgaggtttattcct

SEQ ID NO: 87908 - DNA, 19 bp, Homo sapiens
  siRNA target sequence for KIT (NM_000222.1,604-622).
gtgctgtcggaaaaattca

SEQ ID NO: 87909 - DNA, 19 bp, Homo sapiens
  siRNA target sequence for KIT (NM_000222.1,669-687).
gtccaaagcaagctatctt

SEQ ID NO: 87910 - DNA, 19 bp, Homo sapiens
  siRNA target sequence for KIT (NM_000222.1,710-728).
cagtgacgtgcacaataaa

SEQ ID NO: 87911 - DNA, 19 bp, Homo sapiens
  siRNA target sequence for KIT (NM_000222.1,806-824).
ggcatcacggtgacttcaa

SEQ ID NO: 87912 - DNA, 19 bp, Homo sapiens
  siRNA target sequence for KIT (NM_000222.1,807-825).
gcatcacggtgacttcaat

SEQ ID NO: 87913 - DNA, 19 bp, Homo sapiens
  siRNA target sequence for KIT (NM_000222.1,808-826).
catcacggtgacttcaatt

SEQ ID NO: 87914 - DNA, 19 bp, Homo sapiens
  siRNA target sequence for KIT (NM_000222.1,813-831).
cggtgacttcaattatgaa

SEQ ID NO: 87915 - DNA, 19 bp, Homo sapiens
  siRNA target sequence for KIT (NM_000222.1,832-850).
cgtcaggcaacgttgacta

SEQ ID NO: 87916 - DNA, 19 bp, Homo sapiens
  siRNA target sequence for KIT (NM_000222.1,835-853).
caggcaacgttgactatca

SEQ ID NO: 87917 - DNA, 19 bp, Homo sapiens
  siRNA target sequence for KIT (NM_000222.1,852-870).
cagttcagcgagagttaat

SEQ ID NO: 87918 - DNA, 19 bp, Homo sapiens
  siRNA target sequence for KIT (NM_000222.1,854-872).
gttcagcgagagttaatga

SEQ ID NO: 87919 - DNA, 19 bp, Homo sapiens
  siRNA target sequence for KIT (NM_000222.1,875-893).
ctggagtgttcatgtgtta

SEQ ID NO: 87920 - DNA, 19 bp, Homo sapiens
  siRNA target sequence for KIT (NM_000222.1,885-903).
catgtgttatgccaataat

SEQ ID NO: 87921 - DNA, 19 bp, Homo sapiens
  siRNA target sequence for KIT (NM_000222.1,888-906).
gtgttatgccaataatact

SEQ ID NO: 87922 - DNA, 19 bp, Homo sapiens
  siRNA target sequence for KIT (NM_000222.1,933-951).
cttggaagtagtagataaa

SEQ ID NO: 87923 - DNA, 19 bp, Homo sapiens
  siRNA target sequence for KIT (NM_000222.1,946-964).
gataaaggattcattaata

SEQ ID NO: 87924 - DNA, 19 bp, Homo sapiens
  siRNA target sequence for KIT (NM_000222.1,972-990).
catgataaacactacagta

SEQ ID NO: 87925 - DNA, 19 bp, Homo sapiens
  siRNA target sequence for KIT (NM_000222.1,975-993).
gataaacactacagtattt

SEQ ID NO: 87926 - DNA, 19 bp, Homo sapiens
  siRNA target sequence for KIT (NM_000222.1,1057-1075).
cagcagtggatctatatga

SEQ ID NO: 87927 - DNA, 19 bp, Homo sapiens
  siRNA target sequence for KIT (NM_000222.1,1060-1078).
cagtggatctatatgaaca

SEQ ID NO: 87928 - DNA, 19 bp, Homo sapiens
  siRNA target sequence for KIT (NM_000222.1,1108-1126).
cccaagtctgagaatgaaa

SEQ ID NO: 87929 - DNA, 19 bp, Homo sapiens
  siRNA target sequence for KIT (NM_000222.1,1136-1154).
gatacgtaagtgaacttca

SEQ ID NO: 87930 - DNA, 19 bp, Homo sapiens
  siRNA target sequence for KIT (NM_000222.1,1150-1168).
cttcatctaacgagattaa

SEQ ID NO: 87931 - DNA, 19 bp, Homo sapiens
  siRNA target sequence for KIT (NM_000222.1,1176-1194).
cgaaggaggcacttacaca

SEQ ID NO: 87932 - DNA, 19 bp, Homo sapiens
  siRNA target sequence for KIT (NM_000222.1,1177-1195).
gaaggaggcacttacacat

SEQ ID NO: 87933 - DNA, 19 bp, Homo sapiens
  siRNA target sequence for KIT (NM_000222.1,1223-1241).
ctgccatagcatttaatgt

SEQ ID NO: 87934 - DNA, 19 bp, Homo sapiens
  siRNA target sequence for KIT (NM_000222.1,1225-1243).
gccatagcatttaatgttt

SEQ ID NO: 87935 - DNA, 19 bp, Homo sapiens
  siRNA target sequence for KIT (NM_000222.1,1326-1344).
gcccacaatagattggtat

SEQ ID NO: 87936 - DNA, 19 bp, Homo sapiens
  siRNA target sequence for KIT (NM_000222.1,1327-1345).
cccacaatagattggtatt

SEQ ID NO: 87937 - DNA, 19 bp, Homo sapiens
  siRNA target sequence for KIT (NM_000222.1,1329-1347).
cacaatagattggtatttt

SEQ ID NO: 87938 - DNA, 19 bp, Homo sapiens
  siRNA target sequence for KIT (NM_000222.1,1390-1408).
gtggatgtgcagacactaa

SEQ ID NO: 87939 - DNA, 19 bp, Homo sapiens
  siRNA target sequence for KIT (NM_000222.1,1396-1414).
gtgcagacactaaactcat

SEQ ID NO: 87940 - DNA, 19 bp, Homo sapiens
  siRNA target sequence for KIT (NM_000222.1,1419-1437).
gccaccgtttggaaagcta

SEQ ID NO: 87941 - DNA, 19 bp, Homo sapiens
  siRNA target sequence for KIT (NM_000222.1,1476-1494).
caatggcacggttgaatgt

SEQ ID NO: 87942 - DNA, 19 bp, Homo sapiens
  siRNA target sequence for KIT (NM_000222.1,1514-1532).
gcaagacttctgcctattt

SEQ ID NO: 87943 - DNA, 19 bp, Homo sapiens
  siRNA target sequence for KIT (NM_000222.1,1525-1543).
gcctattttaactttgcat

SEQ ID NO: 87944 - DNA, 19 bp, Homo sapiens
  siRNA target sequence for KIT (NM_000222.1,1599-1617).
gattggtttcgtaatcgta

SEQ ID NO: 87945 - DNA, 19 bp, Homo sapiens
  siRNA target sequence for KIT (NM_000222.1,1641-1659).
gatgattctgacctacaaa

SEQ ID NO: 87946 - DNA, 19 bp, Homo sapiens
  siRNA target sequence for KIT (NM_000222.1,1644-1662).
gattctgacctacaaatat

SEQ ID NO: 87947 - DNA, 19 bp, Homo sapiens
  siRNA target sequence for KIT (NM_000222.1,1668-1686).
gaaacccatgtatgaagta

SEQ ID NO: 87948 - DNA, 19 bp, Homo sapiens
  siRNA target sequence for KIT (NM_000222.1,1742-1760).
cacaacttccttatgatca

SEQ ID NO: 87949 - DNA, 19 bp, Homo sapiens
  siRNA target sequence for KIT (NM_000222.1,1817-1835).
ctttcgggaaggttgttga

SEQ ID NO: 87950 - DNA, 19 bp, Homo sapiens
  siRNA target sequence for KIT (NM_000222.1,1843-1861).
gcttatggcttaattaagt

SEQ ID NO: 87951 - DNA, 19 bp, Homo sapiens
  siRNA target sequence for KIT (NM_000222.1,1944-1962).
caaagtcctgagttacctt

SEQ ID NO: 87952 - DNA, 19 bp, Homo sapiens
  siRNA target sequence for KIT (NM_000222.1,1955-1973).
gttaccttggtaatcacat

SEQ ID NO: 87953 - DNA, 19 bp, Homo sapiens
  siRNA target sequence for KIT (NM_000222.1,1971-1989).
catgaatattgtgaatcta

SEQ ID NO: 87954 - DNA, 19 bp, Homo sapiens
  siRNA target sequence for KIT (NM_000222.1,2011-2029).
gggcccaccctggtcatta

SEQ ID NO: 87955 - DNA, 19 bp, Homo sapiens
  siRNA target sequence for KIT (NM_000222.1,2013-2031).
gcccaccctggtcattaca

SEQ ID NO: 87956 - DNA, 19 bp, Homo sapiens
  siRNA target sequence for KIT (NM_000222.1,2016-2034).
caccctggtcattacagaa

SEQ ID NO: 87957 - DNA, 19 bp, Homo sapiens
  siRNA target sequence for KIT (NM_000222.1,2067-2085).
gagaagaaaacgtgattca

SEQ ID NO: 87958 - DNA, 19 bp, Homo sapiens
  siRNA target sequence for KIT (NM_000222.1,2069-2087).
gaagaaaacgtgattcatt

SEQ ID NO: 87959 - DNA, 19 bp, Homo sapiens
  siRNA target sequence for KIT (NM_000222.1,2077-2095).
cgtgattcatttatttgtt

SEQ ID NO: 87960 - DNA, 19 bp, Homo sapiens
  siRNA target sequence for KIT (NM_000222.1,2116-2134).
gaagctgcactttataaga

SEQ ID NO: 87961 - DNA, 19 bp, Homo sapiens
  siRNA target sequence for KIT (NM_000222.1,2159-2177).
cctgcagcgatagtactaa

SEQ ID NO: 87962 - DNA, 19 bp, Homo sapiens
  siRNA target sequence for KIT (NM_000222.1,2160-2178).
ctgcagcgatagtactaat

SEQ ID NO: 87963 - DNA, 19 bp, Homo sapiens
  siRNA target sequence for KIT (NM_000222.1,2162-2180).
gcagcgatagtactaatga

SEQ ID NO: 87964 - DNA, 19 bp, Homo sapiens
  siRNA target sequence for KIT (NM_000222.1,2165-2183).
gcgatagtactaatgagta

SEQ ID NO: 87965 - DNA, 19 bp, Homo sapiens
  siRNA target sequence for KIT (NM_000222.1,2218-2236).
ccaaccaaggccgacaaaa

SEQ ID NO: 87966 - DNA, 19 bp, Homo sapiens
  siRNA target sequence for KIT (NM_000222.1,2247-2265).
gagaataggctcatacata

SEQ ID NO: 87967 - DNA, 19 bp, Homo sapiens
  siRNA target sequence for KIT (NM_000222.1,2249-2267).
gaataggctcatacataga

SEQ ID NO: 87968 - DNA, 19 bp, Homo sapiens
  siRNA target sequence for KIT (NM_000222.1,2301-2319).
cgagttggccctagactta

SEQ ID NO: 87969 - DNA, 19 bp, Homo sapiens
  siRNA target sequence for KIT (NM_000222.1,2309-2327).
ccctagacttagaagactt

SEQ ID NO: 87970 - DNA, 19 bp, Homo sapiens
  siRNA target sequence for KIT (NM_000222.1,2423-2441).
ctcatggtcggatcacaaa

SEQ ID NO: 87971 - DNA, 19 bp, Homo sapiens
  siRNA target sequence for KIT (NM_000222.1,2425-2443).
catggtcggatcacaaaga

SEQ ID NO: 87972 - DNA, 19 bp, Homo sapiens
  siRNA target sequence for KIT (NM_000222.1,2428-2446).
ggtcggatcacaaagattt

SEQ ID NO: 87973 - DNA, 19 bp, Homo sapiens
  siRNA target sequence for KIT (NM_000222.1,2456-2474).
gtctagccagagacatcaa

SEQ ID NO: 87974 - DNA, 19 bp, Homo sapiens
  siRNA target sequence for KIT (NM_000222.1,2467-2485).
gacatcaagaatgattcta

SEQ ID NO: 87975 - DNA, 19 bp, Homo sapiens
  siRNA target sequence for KIT (NM_000222.1,2540-2558).
gcattttcaactgtgtata

SEQ ID NO: 87976 - DNA, 19 bp, Homo sapiens
  siRNA target sequence for KIT (NM_000222.1,2577-2595).
ctggtcctatgggattttt

SEQ ID NO: 87977 - DNA, 19 bp, Homo sapiens
  siRNA target sequence for KIT (NM_000222.1,2635-2653).
ggaatgccggtcgattcta

SEQ ID NO: 87978 - DNA, 19 bp, Homo sapiens
  siRNA target sequence for KIT (NM_000222.1,2636-2654).
gaatgccggtcgattctaa

SEQ ID NO: 87979 - DNA, 19 bp, Homo sapiens
  siRNA target sequence for KIT (NM_000222.1,2641-2659).
ccggtcgattctaagttct

SEQ ID NO: 87980 - DNA, 19 bp, Homo sapiens
  siRNA target sequence for KIT (NM_000222.1,2642-2660).
cggtcgattctaagttcta

SEQ ID NO: 87981 - DNA, 19 bp, Homo sapiens
  siRNA target sequence for KIT (NM_000222.1,2644-2662).
gtcgattctaagttctaca

SEQ ID NO: 87982 - DNA, 19 bp, Homo sapiens
  siRNA target sequence for KIT (NM_000222.1,2705-2723).
cacctgctgaaatgtatga

SEQ ID NO: 87983 - DNA, 19 bp, Homo sapiens
  siRNA target sequence for KIT (NM_000222.1,2742-2760).
ggatgcagatcccctaaaa

SEQ ID NO: 87984 - DNA, 19 bp, Homo sapiens
  siRNA target sequence for KIT (NM_000222.1,2743-2761).
gatgcagatcccctaaaaa

SEQ ID NO: 87985 - DNA, 19 bp, Homo sapiens
  siRNA target sequence for KIT (NM_000222.1,2765-2783).
caacattcaagcaaattgt

SEQ ID NO: 87986 - DNA, 19 bp, Homo sapiens
  siRNA target sequence for KIT (NM_000222.1,2768-2786).
cattcaagcaaattgttca

SEQ ID NO: 87987 - DNA, 19 bp, Homo sapiens
  siRNA target sequence for KIT (NM_000222.1,2867-2885).
ccgtggtagaccattctgt

SEQ ID NO: 87988 - DNA, 19 bp, Homo sapiens
  siRNA target sequence for KIT (NM_000222.1,2877-2895).
ccattctgtgcggatcaat

SEQ ID NO: 87989 - DNA, 19 bp, Homo sapiens
  siRNA target sequence for KIT (NM_000222.1,2878-2896).
cattctgtgcggatcaatt

SEQ ID NO: 87990 - DNA, 19 bp, Homo sapiens
  siRNA target sequence for KIT (NM_000222.1,2882-2900).
ctgtgcggatcaattctgt

SEQ ID NO: 87991 - DNA, 19 bp, Homo sapiens
  siRNA target sequence for KPI2 (NM_014916.2,600-618).
gcagaggtcttcacacttt

SEQ ID NO: 87992 - DNA, 19 bp, Homo sapiens
  siRNA target sequence for KPI2 (NM_014916.2,611-629).
cacactttcagtaccaaat

SEQ ID NO: 87993 - DNA, 19 bp, Homo sapiens
  siRNA target sequence for KPI2 (NM_014916.2,613-631).
cactttcagtaccaaatat

SEQ ID NO: 87994 - DNA, 19 bp, Homo sapiens
  siRNA target sequence for KPI2 (NM_014916.2,640-658).
cagctccctcgcaattcca

SEQ ID NO: 87995 - DNA, 19 bp, Homo sapiens
  siRNA target sequence for KPI2 (NM_014916.2,671-689).
gggattgaagtctcaagtt

SEQ ID NO: 87996 - DNA, 19 bp, Homo sapiens
  siRNA target sequence for KPI2 (NM_014916.2,693-711).
cgccacagtctaaactaca

SEQ ID NO: 87997 - DNA, 19 bp, Homo sapiens
  siRNA target sequence for KPI2 (NM_014916.2,694-712).
gccacagtctaaactacat

SEQ ID NO: 87998 - DNA, 19 bp, Homo sapiens
  siRNA target sequence for KPI2 (NM_014916.2,707-725).
ctacatacaggaaattgga

SEQ ID NO: 87999 - DNA, 19 bp, Homo sapiens
  siRNA target sequence for KPI2 (NM_014916.2,733-751).
ggtttggaaaggttctctt

SEQ ID NO: 88000 - DNA, 19 bp, Homo sapiens
  siRNA target sequence for KPI2 (NM_014916.2,850-868).
gagaaccttactacattct

SEQ ID NO: 88001 - DNA, 19 bp, Homo sapiens
  siRNA target sequence for KPI2 (NM_014916.2,1093-1111).
ccctgcggaattgttttct

SEQ ID NO: 88002 - DNA, 19 bp, Homo sapiens
  siRNA target sequence for KPI2 (NM_014916.2,1114-1132).
cctccgacttaaatgtgaa

SEQ ID NO: 88003 - DNA, 19 bp, Homo sapiens
  siRNA target sequence for KPI2 (NM_014916.2,1115-1133).
ctccgacttaaatgtgaaa

SEQ ID NO: 88004 - DNA, 19 bp, Homo sapiens
  siRNA target sequence for KPI2 (NM_014916.2,1137-1155).
ggagattacggaataggat

SEQ ID NO: 88005 - DNA, 19 bp, Homo sapiens
  siRNA target sequence for KPI2 (NM_014916.2,1138-1156).
gagattacggaataggatt

SEQ ID NO: 88006 - DNA, 19 bp, Homo sapiens
  siRNA target sequence for KPI2 (NM_014916.2,1159-1177).
gcaggtacaaggaggatta

SEQ ID NO: 88007 - DNA, 19 bp, Homo sapiens
  siRNA target sequence for KPI2 (NM_014916.2,1216-1234).
ggactgctccagaattagt

SEQ ID NO: 88008 - DNA, 19 bp, Homo sapiens
  siRNA target sequence for KPI2 (NM_014916.2,1261-1279).
ctgcagatcagactaagta

SEQ ID NO: 88009 - DNA, 19 bp, Homo sapiens
  siRNA target sequence for KPI2 (NM_014916.2,1263-1281).
gcagatcagactaagtata

SEQ ID NO: 88010 - DNA, 19 bp, Homo sapiens
  siRNA target sequence for KPI2 (NM_014916.2,1266-1284).
gatcagactaagtatagta

SEQ ID NO: 88011 - DNA, 19 bp, Homo sapiens
  siRNA target sequence for KPI2 (NM_014916.2,1335-1353).
cagccgtattcaaaccttt

SEQ ID NO: 88012 - DNA, 19 bp, Homo sapiens
  siRNA target sequence for KPI2 (NM_014916.2,1339-1357).
cgtattcaaacctttccaa

SEQ ID NO: 88013 - DNA, 19 bp, Homo sapiens
  siRNA target sequence for KPI2 (NM_014916.2,1345-1363).
caaacctttccaacttaga

SEQ ID NO: 88014 - DNA, 19 bp, Homo sapiens
  siRNA target sequence for KPI2 (NM_014916.2,1419-1437).
gagcagccctactctgata

SEQ ID NO: 88015 - DNA, 19 bp, Homo sapiens
  siRNA target sequence for KPI2 (NM_014916.2,1421-1439).
gcagccctactctgataga

SEQ ID NO: 88016 - DNA, 19 bp, Homo sapiens
  siRNA target sequence for KPI2 (NM_014916.2,1422-1440).
cagccctactctgatagat

SEQ ID NO: 88017 - DNA, 19 bp, Homo sapiens
  siRNA target sequence for KPI2 (NM_014916.2,1427-1445).
ctactctgatagatggtat

SEQ ID NO: 88018 - DNA, 19 bp, Homo sapiens
  siRNA target sequence for KPI2 (NM_014916.2,1438-1456).
gatggtatgaagtcttaca

SEQ ID NO: 88019 - DNA, 19 bp, Homo sapiens
  siRNA target sequence for KPI2 (NM_014916.2,1462-1480).
gttggctgtcaccagaaaa

SEQ ID NO: 88020 - DNA, 19 bp, Homo sapiens
  siRNA target sequence for KPI2 (NM_014916.2,1544-1562).
ctcagaggtcgactttgaa

SEQ ID NO: 88021 - DNA, 19 bp, Homo sapiens
  siRNA target sequence for KPI2 (NM_014916.2,1575-1593).
gctctgaagccgaacacaa

SEQ ID NO: 88022 - DNA, 19 bp, Homo sapiens
  siRNA target sequence for KPI2 (NM_014916.2,1576-1594).
ctctgaagccgaacacaaa

SEQ ID NO: 88023 - DNA, 19 bp, Homo sapiens
  siRNA target sequence for KPI2 (NM_014916.2,1578-1596).
ctgaagccgaacacaaaca

SEQ ID NO: 88024 - DNA, 19 bp, Homo sapiens
  siRNA target sequence for KPI2 (NM_014916.2,1654-1672).
ggctgggtcgtgaaatgga

SEQ ID NO: 88025 - DNA, 19 bp, Homo sapiens
  siRNA target sequence for KPI2 (NM_014916.2,1705-1723).
gcctgagcttcgagtatgt

SEQ ID NO: 88026 - DNA, 19 bp, Homo sapiens
  siRNA target sequence for KPI2 (NM_014916.2,1790-1808).
ctacacgagcatcttctat

SEQ ID NO: 88027 - DNA, 19 bp, Homo sapiens
  siRNA target sequence for KPI2 (NM_014916.2,1802-1820).
cttctatccggttgaagtt

SEQ ID NO: 88028 - DNA, 19 bp, Homo sapiens
  siRNA target sequence for KPI2 (NM_014916.2,1805-1823).
ctatccggttgaagttttt

SEQ ID NO: 88029 - DNA, 19 bp, Homo sapiens
  siRNA target sequence for KPI2 (NM_014916.2,1809-1827).
ccggttgaagtttttgaga

SEQ ID NO: 88030 - DNA, 19 bp, Homo sapiens
  siRNA target sequence for KPI2 (NM_014916.2,1894-1912).
ctggagtggttcctgtttt

SEQ ID NO: 88031 - DNA, 19 bp, Homo sapiens
  siRNA target sequence for KPI2 (NM_014916.2,1897-1915).
gagtggttcctgtttttga

SEQ ID NO: 88032 - DNA, 19 bp, Homo sapiens
  siRNA target sequence for KPI2 (NM_014916.2,1930-1948).
ctgttggaagcgactatta

SEQ ID NO: 88033 - DNA, 19 bp, Homo sapiens
  siRNA target sequence for KPI2 (NM_014916.2,1932-1950).
gttggaagcgactattata

SEQ ID NO: 88034 - DNA, 19 bp, Homo sapiens
  siRNA target sequence for KPI2 (NM_014916.2,1936-1954).
gaagcgactattatatcca

SEQ ID NO: 88035 - DNA, 19 bp, Homo sapiens
  siRNA target sequence for KPI2 (NM_014916.2,1943-1961).
ctattatatccagttagaa

SEQ ID NO: 88036 - DNA, 19 bp, Homo sapiens
  siRNA target sequence for KPI2 (NM_014916.2,2007-2025).
ctcacaaccgacatggata

SEQ ID NO: 88037 - DNA, 19 bp, Homo sapiens
  siRNA target sequence for KPI2 (NM_014916.2,2065-2083).
cgctcaggagcgttgaact

SEQ ID NO: 88038 - DNA, 19 bp, Homo sapiens
  siRNA target sequence for KPI2 (NM_014916.2,2066-2084).
gctcaggagcgttgaactt

SEQ ID NO: 88039 - DNA, 19 bp, Homo sapiens
  siRNA target sequence for KPI2 (NM_014916.2,2129-2147).
ccccaaagactctagctta

SEQ ID NO: 88040 - DNA, 19 bp, Homo sapiens
  siRNA target sequence for KPI2 (NM_014916.2,2175-2193).
cccgagagccctttcaaca

SEQ ID NO: 88041 - DNA, 19 bp, Homo sapiens
  siRNA target sequence for KPI2 (NM_014916.2,2176-2194).
ccgagagccctttcaacaa

SEQ ID NO: 88042 - DNA, 19 bp, Homo sapiens
  siRNA target sequence for KPI2 (NM_014916.2,2177-2195).
cgagagccctttcaacaat

SEQ ID NO: 88043 - DNA, 19 bp, Homo sapiens
  siRNA target sequence for KPI2 (NM_014916.2,2180-2198).
gagccctttcaacaatata

SEQ ID NO: 88044 - DNA, 19 bp, Homo sapiens
  siRNA target sequence for KPI2 (NM_014916.2,2208-2226).
gtggacaaatcggaagatt

SEQ ID NO: 88045 - DNA, 19 bp, Homo sapiens
  siRNA target sequence for KPI2 (NM_014916.2,2229-2247).
cccagtcaccaaaaaatat

SEQ ID NO: 88046 - DNA, 19 bp, Homo sapiens
  siRNA target sequence for KPI2 (NM_014916.2,2258-2276).
ggaattaaacggagttcaa

SEQ ID NO: 88047 - DNA, 19 bp, Homo sapiens
  siRNA target sequence for KPI2 (NM_014916.2,2268-2286).
ggagttcaagccgacttta

SEQ ID NO: 88048 - DNA, 19 bp, Homo sapiens
  siRNA target sequence for KPI2 (NM_014916.2,2269-2287).
gagttcaagccgactttaa

SEQ ID NO: 88049 - DNA, 19 bp, Homo sapiens
  siRNA target sequence for KPI2 (NM_014916.2,2318-2336).
ccccaaagagtcagtcata

SEQ ID NO: 88050 - DNA, 19 bp, Homo sapiens
  siRNA target sequence for KPI2 (NM_014916.2,2319-2337).
cccaaagagtcagtcataa

SEQ ID NO: 88051 - DNA, 19 bp, Homo sapiens
  siRNA target sequence for KPI2 (NM_014916.2,2355-2373).
gaaaagccccgtaagattt

SEQ ID NO: 88052 - DNA, 19 bp, Homo sapiens
  siRNA target sequence for KPI2 (NM_014916.2,2361-2379).
ccccgtaagatttttgaca

SEQ ID NO: 88053 - DNA, 19 bp, Homo sapiens
  siRNA target sequence for KPI2 (NM_014916.2,2392-2410).
gcctatcagataatcttat

SEQ ID NO: 88054 - DNA, 19 bp, Homo sapiens
  siRNA target sequence for KPI2 (NM_014916.2,2431-2449).
cattgaatgttcaagaatt

SEQ ID NO: 88055 - DNA, 19 bp, Homo sapiens
  siRNA target sequence for KPI2 (NM_014916.2,2575-2593).
cgtcatgtagaaactcttt

SEQ ID NO: 88056 - DNA, 19 bp, Homo sapiens
  siRNA target sequence for KPI2 (NM_014916.2,2635-2653).
ctttgttgcaggaaaacgt

SEQ ID NO: 88057 - DNA, 19 bp, Homo sapiens
  siRNA target sequence for KPI2 (NM_014916.2,2812-2830).
cccagcccacgtgtttaga

SEQ ID NO: 88058 - DNA, 19 bp, Homo sapiens
  siRNA target sequence for KPI2 (NM_014916.2,2813-2831).
ccagcccacgtgtttagat

SEQ ID NO: 88059 - DNA, 19 bp, Homo sapiens
  siRNA target sequence for KPI2 (NM_014916.2,2817-2835).
cccacgtgtttagatgtta

SEQ ID NO: 88060 - DNA, 19 bp, Homo sapiens
  siRNA target sequence for KPI2 (NM_014916.2,2818-2836).
ccacgtgtttagatgttat

SEQ ID NO: 88061 - DNA, 19 bp, Homo sapiens
  siRNA target sequence for KPI2 (NM_014916.2,2819-2837).
cacgtgtttagatgttatt

SEQ ID NO: 88062 - DNA, 19 bp, Homo sapiens
  siRNA target sequence for KPI2 (NM_014916.2,2821-2839).
cgtgtttagatgttattgt

SEQ ID NO: 88063 - DNA, 19 bp, Homo sapiens
  siRNA target sequence for KPI2 (NM_014916.2,2886-2904).
gtcccggttgaaattctct

SEQ ID NO: 88064 - DNA, 19 bp, Homo sapiens
  siRNA target sequence for KPI2 (NM_014916.2,3049-3067).
cggaactgggacaggaatt

SEQ ID NO: 88065 - DNA, 19 bp, Homo sapiens
  siRNA target sequence for KPI2 (NM_014916.2,3057-3075).
ggacaggaattgcacaata

SEQ ID NO: 88066 - DNA, 19 bp, Homo sapiens
  siRNA target sequence for KPI2 (NM_014916.2,3109-3127).
ggctagagaaaaacttaga

SEQ ID NO: 88067 - DNA, 19 bp, Homo sapiens
  siRNA target sequence for KPI2 (NM_014916.2,3317-3335).
gctactggactctttagga

SEQ ID NO: 88068 - DNA, 19 bp, Homo sapiens
  siRNA target sequence for KPI2 (NM_014916.2,3337-3355).
ctcacactccccagaaact

SEQ ID NO: 88069 - DNA, 19 bp, Homo sapiens
  siRNA target sequence for KPI2 (NM_014916.2,3375-3393).
gcagacagtggctacgaaa

SEQ ID NO: 88070 - DNA, 19 bp, Homo sapiens
  siRNA target sequence for KPI2 (NM_014916.2,3385-3403).
gctacgaaacagagaactt

SEQ ID NO: 88071 - DNA, 19 bp, Homo sapiens
  siRNA target sequence for KPI2 (NM_014916.2,3604-3622).
cgtacttctcagacaatga

SEQ ID NO: 88072 - DNA, 19 bp, Homo sapiens
  siRNA target sequence for KPI2 (NM_014916.2,3996-4014).
ctccttgcctacaccaatt

SEQ ID NO: 88073 - DNA, 19 bp, Homo sapiens
  siRNA target sequence for KPI2 (NM_014916.2,3998-4016).
ccttgcctacaccaattct

SEQ ID NO: 88074 - DNA, 19 bp, Homo sapiens
  siRNA target sequence for KPI2 (NM_014916.2,4355-4373).
ggcagtcacgtttttcgat

SEQ ID NO: 88075 - DNA, 19 bp, Homo sapiens
  siRNA target sequence for KPI2 (NM_014916.2,4566-4584).
ccagatccttttatgtcaa

SEQ ID NO: 88076 - DNA, 19 bp, Homo sapiens
  siRNA target sequence for KPI2 (NM_014916.2,4622-4640).
ccaaacatccaagtacttt

SEQ ID NO: 88077 - DNA, 19 bp, Homo sapiens
  siRNA target sequence for KPI2 (NM_014916.2,4709-4727).
catctctcccgccaacatt

SEQ ID NO: 88078 - DNA, 19 bp, Homo sapiens
  siRNA target sequence for KPI2 (NM_014916.2,4783-4801).
gcgaagacggagaaaagga

SEQ ID NO: 88079 - DNA, 19 bp, Homo sapiens
  siRNA target sequence for KSR2 (NM_173598.2,107-125).
caggaggcaacctttccaa

SEQ ID NO: 88080 - DNA, 19 bp, Homo sapiens
  siRNA target sequence for KSR2 (NM_173598.2,251-269).
gcgtccagcactattgtca

SEQ ID NO: 88081 - DNA, 19 bp, Homo sapiens
  siRNA target sequence for KSR2 (NM_173598.2,518-536).
cctcccgaaaactgataca

SEQ ID NO: 88082 - DNA, 19 bp, Homo sapiens
  siRNA target sequence for KSR2 (NM_173598.2,521-539).
cccgaaaactgatacactt

SEQ ID NO: 88083 - DNA, 19 bp, Homo sapiens
  siRNA target sequence for KSR2 (NM_173598.2,524-542).
gaaaactgatacacttgat

SEQ ID NO: 88084 - DNA, 19 bp, Homo sapiens
  siRNA target sequence for KSR2 (NM_173598.2,556-574).
gcgctgcatcggagcaaat

SEQ ID NO: 88085 - DNA, 19 bp, Homo sapiens
  siRNA target sequence for KSR2 (NM_173598.2,934-952).
ctttttggcctcaagtgta

SEQ ID NO: 88086 - DNA, 19 bp, Homo sapiens
  siRNA target sequence for KSR2 (NM_173598.2,940-958).
ggcctcaagtgtaaaaact

SEQ ID NO: 88087 - DNA, 19 bp, Homo sapiens
  siRNA target sequence for KSR2 (NM_173598.2,950-968).
gtaaaaactgcaagttaaa

SEQ ID NO: 88088 - DNA, 19 bp, Homo sapiens
  siRNA target sequence for KSR2 (NM_173598.2,998-1016).
caccctgtcatcttctgat

SEQ ID NO: 88089 - DNA, 19 bp, Homo sapiens
  siRNA target sequence for KSR2 (NM_173598.2,1001-1019).
cctgtcatcttctgatcat

SEQ ID NO: 88090 - DNA, 19 bp, Homo sapiens
  siRNA target sequence for KSR2 (NM_173598.2,1058-1076).
ccgttccgtgtgacatcaa

SEQ ID NO: 88091 - DNA, 19 bp, Homo sapiens
  siRNA target sequence for KSR2 (NM_173598.2,1060-1078).
gttccgtgtgacatcaaca

SEQ ID NO: 88092 - DNA, 19 bp, Homo sapiens
  siRNA target sequence for KSR2 (NM_173598.2,1089-1107).
gaagccacctcgctattca

SEQ ID NO: 88093 - DNA, 19 bp, Homo sapiens
  siRNA target sequence for KSR2 (NM_173598.2,1321-1339).
ccagcatcccactactaca

SEQ ID NO: 88094 - DNA, 19 bp, Homo sapiens
  siRNA target sequence for KSR2 (NM_173598.2,1322-1340).
cagcatcccactactacaa

SEQ ID NO: 88095 - DNA, 19 bp, Homo sapiens
  siRNA target sequence for KSR2 (NM_173598.2,1420-1438).
ccggtgacctcgaatccaa

SEQ ID NO: 88096 - DNA, 19 bp, Homo sapiens
  siRNA target sequence for KSR2 (NM_173598.2,1421-1439).
cggtgacctcgaatccaat

SEQ ID NO: 88097 - DNA, 19 bp, Homo sapiens
  siRNA target sequence for KSR2 (NM_173598.2,1454-1472).
cattacttcaaattgaagt

SEQ ID NO: 88098 - DNA, 19 bp, Homo sapiens
  siRNA target sequence for KSR2 (NM_173598.2,1476-1494).
gccaacgtcggagaatgaa

SEQ ID NO: 88099 - DNA, 19 bp, Homo sapiens
  siRNA target sequence for KSR2 (NM_173598.2,1892-1910).
gggatgccaaaatcgtttt

SEQ ID NO: 88100 - DNA, 19 bp, Homo sapiens
  siRNA target sequence for KSR2 (NM_173598.2,2084-2102).
gcaggcgggaggacaaact

SEQ ID NO: 88101 - DNA, 19 bp, Homo sapiens
  siRNA target sequence for KSR2 (NM_173598.2,2243-2261).
ccagggaatggcctttcaa

SEQ ID NO: 88102 - DNA, 19 bp, Homo sapiens
  siRNA target sequence for KSR2 (NM_173598.2,2361-2379).
cttctgctgggcctttgaa

SEQ ID NO: 88103 - DNA, 19 bp, Homo sapiens
  siRNA target sequence for KSR2 (NM_173598.2,2366-2384).
gctgggcctttgaacaaga

SEQ ID NO: 88104 - DNA, 19 bp, Homo sapiens
  siRNA target sequence for LAK (NM_025144.2,190-208).
ccagcgctgcagagcttta

SEQ ID NO: 88105 - DNA, 19 bp, Homo sapiens
  siRNA target sequence for LAK (NM_025144.2,209-227).
ctccccagcgagttaagga

SEQ ID NO: 88106 - DNA, 19 bp, Homo sapiens
  siRNA target sequence for LAK (NM_025144.2,258-276).
ggcccttcgtgcctgaaaa

SEQ ID NO: 88107 - DNA, 19 bp, Homo sapiens
  siRNA target sequence for LAK (NM_025144.2,260-278).
cccttcgtgcctgaaaagt

SEQ ID NO: 88108 - DNA, 19 bp, Homo sapiens
  siRNA target sequence for LAK (NM_025144.2,584-602).
ctgagcagtctaataagca

SEQ ID NO: 88109 - DNA, 19 bp, Homo sapiens
  siRNA target sequence for LAK (NM_025144.2,655-673).
ggtgcagtcggtctgtata

SEQ ID NO: 88110 - DNA, 19 bp, Homo sapiens
  siRNA target sequence for LAK (NM_025144.2,659-677).
cagtcggtctgtatacaga

SEQ ID NO: 88111 - DNA, 19 bp, Homo sapiens
  siRNA target sequence for LAK (NM_025144.2,735-753).
gggcctccattgtaggata

SEQ ID NO: 88112 - DNA, 19 bp, Homo sapiens
  siRNA target sequence for LAK (NM_025144.2,736-754).
ggcctccattgtaggatat

SEQ ID NO: 88113 - DNA, 19 bp, Homo sapiens
  siRNA target sequence for LAK (NM_025144.2,737-755).
gcctccattgtaggatatt

SEQ ID NO: 88114 - DNA, 19 bp, Homo sapiens
  siRNA target sequence for LAK (NM_025144.2,761-779).
cttcctcagccggataaaa

SEQ ID NO: 88115 - DNA, 19 bp, Homo sapiens
  siRNA target sequence for LAK (NM_025144.2,787-805).
ctccacgtcgctaggtata

SEQ ID NO: 88116 - DNA, 19 bp, Homo sapiens
  siRNA target sequence for LAK (NM_025144.2,789-807).
ccacgtcgctaggtatact

SEQ ID NO: 88117 - DNA, 19 bp, Homo sapiens
  siRNA target sequence for LAK (NM_025144.2,801-819).
gtatactggcagacatctt

SEQ ID NO: 88118 - DNA, 19 bp, Homo sapiens
  siRNA target sequence for LAK (NM_025144.2,806-824).
ctggcagacatctttgttt

SEQ ID NO: 88119 - DNA, 19 bp, Homo sapiens
  siRNA target sequence for LAK (NM_025144.2,825-843).
ccatgagcaagaacgatta

SEQ ID NO: 88120 - DNA, 19 bp, Homo sapiens
  siRNA target sequence for LAK (NM_025144.2,826-844).
catgagcaagaacgattat

SEQ ID NO: 88121 - DNA, 19 bp, Homo sapiens
  siRNA target sequence for LAK (NM_025144.2,829-847).
gagcaagaacgattatgaa

SEQ ID NO: 88122 - DNA, 19 bp, Homo sapiens
  siRNA target sequence for LAK (NM_025144.2,835-853).
gaacgattatgaaaagttt

SEQ ID NO: 88123 - DNA, 19 bp, Homo sapiens
  siRNA target sequence for LAK (NM_025144.2,989-1007).
cgtggcacgtgtttattgt

SEQ ID NO: 88124 - DNA, 19 bp, Homo sapiens
  siRNA target sequence for LAK (NM_025144.2,1025-1043).
gactgtcctccagaattga

SEQ ID NO: 88125 - DNA, 19 bp, Homo sapiens
  siRNA target sequence for LAK (NM_025144.2,1289-1307).
gctctgtctcaagaagtta

SEQ ID NO: 88126 - DNA, 19 bp, Homo sapiens
  siRNA target sequence for LAK (NM_025144.2,1319-1337).
gcccaggtgaaggaacatt

SEQ ID NO: 88127 - DNA, 19 bp, Homo sapiens
  siRNA target sequence for LAK (NM_025144.2,1320-1338).
cccaggtgaaggaacattt

SEQ ID NO: 88128 - DNA, 19 bp, Homo sapiens
  siRNA target sequence for LAK (NM_025144.2,1327-1345).
gaaggaacatttacaagtt

SEQ ID NO: 88129 - DNA, 19 bp, Homo sapiens
  siRNA target sequence for LAK (NM_025144.2,1330-1348).
ggaacatttacaagttcaa

SEQ ID NO: 88130 - DNA, 19 bp, Homo sapiens
  siRNA target sequence for LAK (NM_025144.2,1393-1411).
cgagtgcaggttggataaa

SEQ ID NO: 88131 - DNA, 19 bp, Homo sapiens
  siRNA target sequence for LAK (NM_025144.2,1424-1442).
gggcaaggggatttccaaa

SEQ ID NO: 88132 - DNA, 19 bp, Homo sapiens
  siRNA target sequence for LAK (NM_025144.2,1473-1491).
cttcggtgtgtgaagtatt

SEQ ID NO: 88133 - DNA, 19 bp, Homo sapiens
  siRNA target sequence for LAK (NM_025144.2,1546-1564).
ctgcatcactgctctaaaa

SEQ ID NO: 88134 - DNA, 19 bp, Homo sapiens
  siRNA target sequence for LAK (NM_025144.2,1549-1567).
catcactgctctaaaaaca

SEQ ID NO: 88135 - DNA, 19 bp, Homo sapiens
  siRNA target sequence for LAK (NM_025144.2,1589-1607).
gtgagtactactcaagaaa

SEQ ID NO: 88136 - DNA, 19 bp, Homo sapiens
  siRNA target sequence for LAK (NM_025144.2,1644-1662).
ccctaatgggtaagaatgt

SEQ ID NO: 88137 - DNA, 19 bp, Homo sapiens
  siRNA target sequence for LAK (NM_025144.2,1645-1663).
cctaatgggtaagaatgtt

SEQ ID NO: 88138 - DNA, 19 bp, Homo sapiens
  siRNA target sequence for LAK (NM_025144.2,1698-1716).
ggacccattctgatgcatt

SEQ ID NO: 88139 - DNA, 19 bp, Homo sapiens
  siRNA target sequence for LAK (NM_025144.2,1699-1717).
gacccattctgatgcattt

SEQ ID NO: 88140 - DNA, 19 bp, Homo sapiens
  siRNA target sequence for LAK (NM_025144.2,1702-1720).
ccattctgatgcatttcga

SEQ ID NO: 88141 - DNA, 19 bp, Homo sapiens
  siRNA target sequence for LAK (NM_025144.2,1822-1840).
cagtgcttggagcaactta

SEQ ID NO: 88142 - DNA, 19 bp, Homo sapiens
  siRNA target sequence for LAK (NM_025144.2,1891-1909).
cgacaggtcagccagaaaa

SEQ ID NO: 88143 - DNA, 19 bp, Homo sapiens
  siRNA target sequence for LAK (NM_025144.2,1981-1999).
ggaaggcagagctatgcat

SEQ ID NO: 88144 - DNA, 19 bp, Homo sapiens
  siRNA target sequence for LAK (NM_025144.2,1982-2000).
gaaggcagagctatgcatt

SEQ ID NO: 88145 - DNA, 19 bp, Homo sapiens
  siRNA target sequence for LAK (NM_025144.2,1985-2003).
ggcagagctatgcattcat

SEQ ID NO: 88146 - DNA, 19 bp, Homo sapiens
  siRNA target sequence for LAK (NM_025144.2,1986-2004).
gcagagctatgcattcatt

SEQ ID NO: 88147 - DNA, 19 bp, Homo sapiens
  siRNA target sequence for LAK (NM_025144.2,2050-2068).
caatttggagccttctcaa

SEQ ID NO: 88148 - DNA, 19 bp, Homo sapiens
  siRNA target sequence for LAK (NM_025144.2,2099-2117).
cccttctcgcctcataata

SEQ ID NO: 88149 - DNA, 19 bp, Homo sapiens
  siRNA target sequence for LAK (NM_025144.2,2218-2236).
ctccagaccctcatatcgt

SEQ ID NO: 88150 - DNA, 19 bp, Homo sapiens
  siRNA target sequence for LAK (NM_025144.2,2259-2277).
ctggtaggcccaagaatat

SEQ ID NO: 88151 - DNA, 19 bp, Homo sapiens
  siRNA target sequence for LAK (NM_025144.2,2397-2415).
gaggcgcaggccctacatt

SEQ ID NO: 88152 - DNA, 19 bp, Homo sapiens
  siRNA target sequence for LAK (NM_025144.2,2400-2418).
gcgcaggccctacatttaa

SEQ ID NO: 88153 - DNA, 19 bp, Homo sapiens
  siRNA target sequence for LAK (NM_025144.2,2401-2419).
cgcaggccctacatttaaa

SEQ ID NO: 88154 - DNA, 19 bp, Homo sapiens
  siRNA target sequence for LAK (NM_025144.2,2405-2423).
ggccctacatttaaagcta

SEQ ID NO: 88155 - DNA, 19 bp, Homo sapiens
  siRNA target sequence for LAK (NM_025144.2,2468-2486).
gaagatgcacccttagact

SEQ ID NO: 88156 - DNA, 19 bp, Homo sapiens
  siRNA target sequence for LAK (NM_025144.2,2474-2492).
gcacccttagactttcaca

SEQ ID NO: 88157 - DNA, 19 bp, Homo sapiens
  siRNA target sequence for LAK (NM_025144.2,2548-2566).
ccctaattggcctgttcaa

SEQ ID NO: 88158 - DNA, 19 bp, Homo sapiens
  siRNA target sequence for LAK (NM_025144.2,2685-2703).
ggcacggctctcatagact

SEQ ID NO: 88159 - DNA, 19 bp, Homo sapiens
  siRNA target sequence for LAK (NM_025144.2,2751-2769).
cctctgtaagcggtaacat

SEQ ID NO: 88160 - DNA, 19 bp, Homo sapiens
  siRNA target sequence for LAK (NM_025144.2,2822-2840).
cctggaaacatgctaaact

SEQ ID NO: 88161 - DNA, 19 bp, Homo sapiens
  siRNA target sequence for LAK (NM_025144.2,2919-2937).
gcccttggtcctatctgaa

SEQ ID NO: 88162 - DNA, 19 bp, Homo sapiens
  siRNA target sequence for LAK (NM_025144.2,2921-2939).
ccttggtcctatctgaatt

SEQ ID NO: 88163 - DNA, 19 bp, Homo sapiens
  siRNA target sequence for LAK (NM_025144.2,3004-3022).
cttgcaacctgatgacttt

SEQ ID NO: 88164 - DNA, 19 bp, Homo sapiens
  siRNA target sequence for LAK (NM_025144.2,3007-3025).
gcaacctgatgactttgaa

SEQ ID NO: 88165 - DNA, 19 bp, Homo sapiens
  siRNA target sequence for LAK (NM_025144.2,3045-3063).
ggcatgattggctgtttca

SEQ ID NO: 88166 - DNA, 19 bp, Homo sapiens
  siRNA target sequence for LAK (NM_025144.2,3071-3089).
gagaatacgggggttttta

SEQ ID NO: 88167 - DNA, 19 bp, Homo sapiens
  siRNA target sequence for LAK (NM_025144.2,3110-3128).
gcacatagtgctcttttgt

SEQ ID NO: 88168 - DNA, 19 bp, Homo sapiens
  siRNA target sequence for LAK (NM_025144.2,3117-3135).
gtgctcttttgttaaaata

SEQ ID NO: 88169 - DNA, 19 bp, Homo sapiens
  siRNA target sequence for LAK (NM_025144.2,3157-3175).
gacggcccaggaaactatt

SEQ ID NO: 88170 - DNA, 19 bp, Homo sapiens
  siRNA target sequence for LAK (NM_025144.2,3159-3177).
cggcccaggaaactattgt

SEQ ID NO: 88171 - DNA, 19 bp, Homo sapiens
  siRNA target sequence for LAK (NM_025144.2,3162-3180).
cccaggaaactattgtcta

SEQ ID NO: 88172 - DNA, 19 bp, Homo sapiens
  siRNA target sequence for LAK (NM_025144.2,3347-3365).
cagcactatgtgacagaat

SEQ ID NO: 88173 - DNA, 19 bp, Homo sapiens
  siRNA target sequence for LAK (NM_025144.2,3409-3427).
ctacatcccatccacaata

SEQ ID NO: 88174 - DNA, 19 bp, Homo sapiens
  siRNA target sequence for LAK (NM_025144.2,3412-3430).
catcccatccacaatacta

SEQ ID NO: 88175 - DNA, 19 bp, Homo sapiens
  siRNA target sequence for LAK (NM_025144.2,3417-3435).
catccacaatactactgat

SEQ ID NO: 88176 - DNA, 19 bp, Homo sapiens
  siRNA target sequence for LAK (NM_025144.2,3468-3486).
gtgtggagccttacatact

SEQ ID NO: 88177 - DNA, 19 bp, Homo sapiens
  siRNA target sequence for LAK (NM_025144.2,3477-3495).
cttacatactgggagaatt

SEQ ID NO: 88178 - DNA, 19 bp, Homo sapiens
  siRNA target sequence for LAK (NM_025144.2,3533-3551).
gaatacaaagccacagaat

SEQ ID NO: 88179 - DNA, 19 bp, Homo sapiens
  siRNA target sequence for LAK (NM_025144.2,3597-3615).
gagatgttgtggtcgattt

SEQ ID NO: 88180 - DNA, 19 bp, Homo sapiens
  siRNA target sequence for LAK (NM_025144.2,3676-3694).
ctccgttgatcagaaagtt

SEQ ID NO: 88181 - DNA, 19 bp, Homo sapiens
  siRNA target sequence for LAK (NM_025144.2,3688-3706).
gaaagttttcactaccaat

SEQ ID NO: 88182 - DNA, 19 bp, Homo sapiens
  siRNA target sequence for LAK (NM_025144.2,3745-3763).
gcatgtggaatgtaatgaa

SEQ ID NO: 88183 - DNA, 19 bp, Homo sapiens
  siRNA target sequence for LAK (NM_025144.2,3749-3767).
gtggaatgtaatgaaatct

SEQ ID NO: 88184 - DNA, 19 bp, Homo sapiens
  siRNA target sequence for LARS (NM_020117.8,144-162).
ggatactgagagagtgttt

SEQ ID NO: 88185 - DNA, 19 bp, Homo sapiens
  siRNA target sequence for LARS (NM_020117.8,157-175).
gtgtttgaggtcaatgcat

SEQ ID NO: 88186 - DNA, 19 bp, Homo sapiens
  siRNA target sequence for LARS (NM_020117.8,163-181).
gaggtcaatgcatctaatt

SEQ ID NO: 88187 - DNA, 19 bp, Homo sapiens
  siRNA target sequence for LARS (NM_020117.8,165-183).
ggtcaatgcatctaattta

SEQ ID NO: 88188 - DNA, 19 bp, Homo sapiens
  siRNA target sequence for LARS (NM_020117.8,194-212).
ccagcaagggcaagtattt

SEQ ID NO: 88189 - DNA, 19 bp, Homo sapiens
  siRNA target sequence for LARS (NM_020117.8,203-221).
gcaagtattttgtaacctt

SEQ ID NO: 88190 - DNA, 19 bp, Homo sapiens
  siRNA target sequence for LARS (NM_020117.8,214-232).
gtaaccttcccatatccat

SEQ ID NO: 88191 - DNA, 19 bp, Homo sapiens
  siRNA target sequence for LARS (NM_020117.8,222-240).
cccatatccatatatgaat

SEQ ID NO: 88192 - DNA, 19 bp, Homo sapiens
  siRNA target sequence for LARS (NM_020117.8,250-268).
catttgggacacacgtttt

SEQ ID NO: 88193 - DNA, 19 bp, Homo sapiens
  siRNA target sequence for LARS (NM_020117.8,300-318).
ccagcgattgaaaggaaaa

SEQ ID NO: 88194 - DNA, 19 bp, Homo sapiens
  siRNA target sequence for LARS (NM_020117.8,301-319).
cagcgattgaaaggaaaat

SEQ ID NO: 88195 - DNA, 19 bp, Homo sapiens
  siRNA target sequence for LARS (NM_020117.8,367-385).
gcatgtgctgataagttga

SEQ ID NO: 88196 - DNA, 19 bp, Homo sapiens
  siRNA target sequence for LARS (NM_020117.8,457-475).
gttaaaacagaagatataa

SEQ ID NO: 88197 - DNA, 19 bp, Homo sapiens
  siRNA target sequence for LARS (NM_020117.8,540-558).
ccagtggggcattatgaaa

SEQ ID NO: 88198 - DNA, 19 bp, Homo sapiens
  siRNA target sequence for LARS (NM_020117.8,541-559).
cagtggggcattatgaaat

SEQ ID NO: 88199 - DNA, 19 bp, Homo sapiens
  siRNA target sequence for LARS (NM_020117.8,570-588).
gtctgatgaagagatagta

SEQ ID NO: 88200 - DNA, 19 bp, Homo sapiens
  siRNA target sequence for LARS (NM_020117.8,582-600).
gatagtaaaattttctgaa

SEQ ID NO: 88201 - DNA, 19 bp, Homo sapiens
  siRNA target sequence for LARS (NM_020117.8,687-705).
catcaccactgatgttaat

SEQ ID NO: 88202 - DNA, 19 bp, Homo sapiens
  siRNA target sequence for LARS (NM_020117.8,695-713).
ctgatgttaatccttacta

SEQ ID NO: 88203 - DNA, 19 bp, Homo sapiens
  siRNA target sequence for LARS (NM_020117.8,773-791).
ggaagcggtatacaattta

SEQ ID NO: 88204 - DNA, 19 bp, Homo sapiens
  siRNA target sequence for LARS (NM_020117.8,777-795).
gcggtatacaatttactct

SEQ ID NO: 88205 - DNA, 19 bp, Homo sapiens
  siRNA target sequence for LARS (NM_020117.8,816-834).
catggatcatgatagacaa

SEQ ID NO: 88206 - DNA, 19 bp, Homo sapiens
  siRNA target sequence for LARS (NM_020117.8,819-837).
ggatcatgatagacaaact

SEQ ID NO: 88207 - DNA, 19 bp, Homo sapiens
  siRNA target sequence for LARS (NM_020117.8,850-868).
ggacctcaggaatatactt

SEQ ID NO: 88208 - DNA, 19 bp, Homo sapiens
  siRNA target sequence for LARS (NM_020117.8,851-869).
gacctcaggaatatacttt

SEQ ID NO: 88209 - DNA, 19 bp, Homo sapiens
  siRNA target sequence for LARS (NM_020117.8,954-972).
cagacctgagaccatgttt

SEQ ID NO: 88210 - DNA, 19 bp, Homo sapiens
  siRNA target sequence for LARS (NM_020117.8,986-1004).
gttgggttcgtcctgatat

SEQ ID NO: 88211 - DNA, 19 bp, Homo sapiens
  siRNA target sequence for LARS (NM_020117.8,989-1007).
gggttcgtcctgatatgaa

SEQ ID NO: 88212 - DNA, 19 bp, Homo sapiens
  siRNA target sequence for LARS (NM_020117.8,994-1012).
cgtcctgatatgaagtaca

SEQ ID NO: 88213 - DNA, 19 bp, Homo sapiens
  siRNA target sequence for LARS (NM_020117.8,1000-1018).
gatatgaagtacattggat

SEQ ID NO: 88214 - DNA, 19 bp, Homo sapiens
  siRNA target sequence for LARS (NM_020117.8,1061-1079).
cagccaggaatatgtcata

SEQ ID NO: 88215 - DNA, 19 bp, Homo sapiens
  siRNA target sequence for LARS (NM_020117.8,1083-1101).
gggctttaccaaagacaat

SEQ ID NO: 88216 - DNA, 19 bp, Homo sapiens
  siRNA target sequence for LARS (NM_020117.8,1102-1120).
ggcgtggtgcctgttgtta

SEQ ID NO: 88217 - DNA, 19 bp, Homo sapiens
  siRNA target sequence for LARS (NM_020117.8,1103-1121).
gcgtggtgcctgttgttaa

SEQ ID NO: 88218 - DNA, 19 bp, Homo sapiens
  siRNA target sequence for LARS (NM_020117.8,1188-1206).
ctatgttctcccaatgcta

SEQ ID NO: 88219 - DNA, 19 bp, Homo sapiens
  siRNA target sequence for LARS (NM_020117.8,1199-1217).
caatgctaactattaagga

SEQ ID NO: 88220 - DNA, 19 bp, Homo sapiens
  siRNA target sequence for LARS (NM_020117.8,1253-1271).
ccgactcccctgatgatat

SEQ ID NO: 88221 - DNA, 19 bp, Homo sapiens
  siRNA target sequence for LARS (NM_020117.8,1299-1317).
gcaagccttacgagcaaaa

SEQ ID NO: 88222 - DNA, 19 bp, Homo sapiens
  siRNA target sequence for LARS (NM_020117.8,1300-1318).
caagccttacgagcaaaat

SEQ ID NO: 88223 - DNA, 19 bp, Homo sapiens
  siRNA target sequence for LARS (NM_020117.8,1305-1323).
cttacgagcaaaatatgga

SEQ ID NO: 88224 - DNA, 19 bp, Homo sapiens
  siRNA target sequence for LARS (NM_020117.8,1309-1327).
cgagcaaaatatggaatta

SEQ ID NO: 88225 - DNA, 19 bp, Homo sapiens
  siRNA target sequence for LARS (NM_020117.8,1355-1373).
cggtgccagtcattgaaat

SEQ ID NO: 88226 - DNA, 19 bp, Homo sapiens
  siRNA target sequence for LARS (NM_020117.8,1403-1421).
ccatttgtgatgagttgaa

SEQ ID NO: 88227 - DNA, 19 bp, Homo sapiens
  siRNA target sequence for LARS (NM_020117.8,1434-1452).
gaatgaccgggaaaaactt

SEQ ID NO: 88228 - DNA, 19 bp, Homo sapiens
  siRNA target sequence for LARS (NM_020117.8,1470-1488).
gatatatctaaaaggattt

SEQ ID NO: 88229 - DNA, 19 bp, Homo sapiens
  siRNA target sequence for LARS (NM_020117.8,1484-1502).
gattttatgagggtatcat

SEQ ID NO: 88230 - DNA, 19 bp, Homo sapiens
  siRNA target sequence for LARS (NM_020117.8,1572-1590).
cgctggagatgcacttatt

SEQ ID NO: 88231 - DNA, 19 bp, Homo sapiens
  siRNA target sequence for LARS (NM_020117.8,1573-1591).
gctggagatgcacttattt

SEQ ID NO: 88232 - DNA, 19 bp, Homo sapiens
  siRNA target sequence for LARS (NM_020117.8,1620-1638).
caggtcgtcagatgaatgt

SEQ ID NO: 88233 - DNA, 19 bp, Homo sapiens
  siRNA target sequence for LARS (NM_020117.8,1622-1640).
ggtcgtcagatgaatgtgt

SEQ ID NO: 88234 - DNA, 19 bp, Homo sapiens
  siRNA target sequence for LARS (NM_020117.8,1623-1641).
gtcgtcagatgaatgtgtt

SEQ ID NO: 88235 - DNA, 19 bp, Homo sapiens
  siRNA target sequence for LARS (NM_020117.8,1763-1781).
ccttaggttggctacaaga

SEQ ID NO: 88236 - DNA, 19 bp, Homo sapiens
  siRNA target sequence for LARS (NM_020117.8,1764-1782).
cttaggttggctacaagaa

SEQ ID NO: 88237 - DNA, 19 bp, Homo sapiens
  siRNA target sequence for LARS (NM_020117.8,1833-1851).
gcagtggctgattgaatca

SEQ ID NO: 88238 - DNA, 19 bp, Homo sapiens
  siRNA target sequence for LARS (NM_020117.8,1836-1854).
gtggctgattgaatcactt

SEQ ID NO: 88239 - DNA, 19 bp, Homo sapiens
  siRNA target sequence for LARS (NM_020117.8,1839-1857).
gctgattgaatcactttct

SEQ ID NO: 88240 - DNA, 19 bp, Homo sapiens
  siRNA target sequence for LARS (NM_020117.8,1886-1904).
cagttgcacacctattgca

SEQ ID NO: 88241 - DNA, 19 bp, Homo sapiens
  siRNA target sequence for LARS (NM_020117.8,1932-1950).
gtctccgctgggcattaga

SEQ ID NO: 88242 - DNA, 19 bp, Homo sapiens
  siRNA target sequence for LARS (NM_020117.8,1998-2016).
ggctccatttcctaagact

SEQ ID NO: 88243 - DNA, 19 bp, Homo sapiens
  siRNA target sequence for LARS (NM_020117.8,2009-2027).
ctaagactcagattgcaaa

SEQ ID NO: 88244 - DNA, 19 bp, Homo sapiens
  siRNA target sequence for LARS (NM_020117.8,2097-2115).
ggatcttgttccaaatcat

SEQ ID NO: 88245 - DNA, 19 bp, Homo sapiens
  siRNA target sequence for LARS (NM_020117.8,2116-2134).
ctttcatattacctttata

SEQ ID NO: 88246 - DNA, 19 bp, Homo sapiens
  siRNA target sequence for LARS (NM_020117.8,2234-2252).
caggcaacttcctcacttt

SEQ ID NO: 88247 - DNA, 19 bp, Homo sapiens
  siRNA target sequence for LARS (NM_020117.8,2253-2271).
gacccaagctattgacaaa

SEQ ID NO: 88248 - DNA, 19 bp, Homo sapiens
  siRNA target sequence for LARS (NM_020117.8,2255-2273).
cccaagctattgacaaatt

SEQ ID NO: 88249 - DNA, 19 bp, Homo sapiens
  siRNA target sequence for LARS (NM_020117.8,2441-2459).
gcactttcaatgatagagt

SEQ ID NO: 88250 - DNA, 19 bp, Homo sapiens
  siRNA target sequence for LARS (NM_020117.8,2553-2571).
gtttcaggccgcaaaagat

SEQ ID NO: 88251 - DNA, 19 bp, Homo sapiens
  siRNA target sequence for LARS (NM_020117.8,2557-2575).
caggccgcaaaagataagt

SEQ ID NO: 88252 - DNA, 19 bp, Homo sapiens
  siRNA target sequence for LARS (NM_020117.8,2597-2615).
ggatgcacagagaacttgt

SEQ ID NO: 88253 - DNA, 19 bp, Homo sapiens
  siRNA target sequence for LARS (NM_020117.8,2616-2634).
gttccggtttattgaagtt

SEQ ID NO: 88254 - DNA, 19 bp, Homo sapiens
  siRNA target sequence for LARS (NM_020117.8,2694-2712).
gggaaagcctgactcaatt

SEQ ID NO: 88255 - DNA, 19 bp, Homo sapiens
  siRNA target sequence for LARS (NM_020117.8,2700-2718).
gcctgactcaattatgaat

SEQ ID NO: 88256 - DNA, 19 bp, Homo sapiens
  siRNA target sequence for LARS (NM_020117.8,2704-2722).
gactcaattatgaatgctt

SEQ ID NO: 88257 - DNA, 19 bp, Homo sapiens
  siRNA target sequence for LARS (NM_020117.8,2803-2821).
ctacgactcaagaactata

SEQ ID NO: 88258 - DNA, 19 bp, Homo sapiens
  siRNA target sequence for LARS (NM_020117.8,2806-2824).
cgactcaagaactatatga

SEQ ID NO: 88259 - DNA, 19 bp, Homo sapiens
  siRNA target sequence for LARS (NM_020117.8,2871-2889).
ctcacattgcaccatctat

SEQ ID NO: 88260 - DNA, 19 bp, Homo sapiens
  siRNA target sequence for LARS (NM_020117.8,2882-2900).
ccatctatgtggcaaagaa

SEQ ID NO: 88261 - DNA, 19 bp, Homo sapiens
  siRNA target sequence for LARS (NM_020117.8,2924-2942).
ccctgtctgttctacgtaa

SEQ ID NO: 88262 - DNA, 19 bp, Homo sapiens
  siRNA target sequence for LARS (NM_020117.8,2925-2943).
cctgtctgttctacgtaaa

SEQ ID NO: 88263 - DNA, 19 bp, Homo sapiens
  siRNA target sequence for LARS (NM_020117.8,2930-2948).
ctgttctacgtaaacactt

SEQ ID NO: 88264 - DNA, 19 bp, Homo sapiens
  siRNA target sequence for LARS (NM_020117.8,3043-3061).
ccatttgttgccatgatta

SEQ ID NO: 88265 - DNA, 19 bp, Homo sapiens
  siRNA target sequence for LARS (NM_020117.8,3044-3062).
catttgttgccatgattaa

SEQ ID NO: 88266 - DNA, 19 bp, Homo sapiens
  siRNA target sequence for LARS (NM_020117.8,3088-3106).
cgtattctggatttgcaat

SEQ ID NO: 88267 - DNA, 19 bp, Homo sapiens
  siRNA target sequence for LARS (NM_020117.8,3094-3112).
ctggatttgcaattagaat

SEQ ID NO: 88268 - DNA, 19 bp, Homo sapiens
  siRNA target sequence for LARS (NM_020117.8,3162-3180).
gcttgagctagaacacata

SEQ ID NO: 88269 - DNA, 19 bp, Homo sapiens
  siRNA target sequence for LARS (NM_020117.8,3193-3211).
gcctccgaagcagaagata

SEQ ID NO: 88270 - DNA, 19 bp, Homo sapiens
  siRNA target sequence for LARS (NM_020117.8,3230-3248).
gtcctgggaaaccacttaa

SEQ ID NO: 88271 - DNA, 19 bp, Homo sapiens
  siRNA target sequence for LARS (NM_020117.8,3343-3361).
gataactgtgattccataa

SEQ ID NO: 88272 - DNA, 19 bp, Homo sapiens
  siRNA target sequence for LARS (NM_020117.8,3356-3374).
ccataatcaggcgtttaat

SEQ ID NO: 88273 - DNA, 19 bp, Homo sapiens
  siRNA target sequence for LARS (NM_020117.8,3480-3498).
cgagaagacccccatttct

SEQ ID NO: 88274 - DNA, 19 bp, Homo sapiens
  siRNA target sequence for LARS (NM_020117.8,3565-3583).
gtggatattggcgatacaa

SEQ ID NO: 88275 - DNA, 19 bp, Homo sapiens
  siRNA target sequence for LARS (NM_020117.8,3567-3585).
ggatattggcgatacaata

SEQ ID NO: 88276 - DNA, 19 bp, Homo sapiens
  siRNA target sequence for LARS (NM_020117.8,3568-3586).
gatattggcgatacaataa

SEQ ID NO: 88277 - DNA, 19 bp, Homo sapiens
  siRNA target sequence for LARS (NM_020117.8,3575-3593).
gcgatacaataatctatct

SEQ ID NO: 88278 - DNA, 19 bp, Homo sapiens
  siRNA target sequence for LARS2 (NM_015340.2,256-274).
gggccagatgtcatcaagt

SEQ ID NO: 88279 - DNA, 19 bp, Homo sapiens
  siRNA target sequence for LARS2 (NM_015340.2,321-339).
cacgggaaagtggacaaaa

SEQ ID NO: 88280 - DNA, 19 bp, Homo sapiens
  siRNA target sequence for LARS2 (NM_015340.2,377-395).
ggtggcatcaacgaataaa

SEQ ID NO: 88281 - DNA, 19 bp, Homo sapiens
  siRNA target sequence for LARS2 (NM_015340.2,378-396).
gtggcatcaacgaataaaa

SEQ ID NO: 88282 - DNA, 19 bp, Homo sapiens
  siRNA target sequence for LARS2 (NM_015340.2,380-398).
ggcatcaacgaataaaaga

SEQ ID NO: 88283 - DNA, 19 bp, Homo sapiens
  siRNA target sequence for LARS2 (NM_015340.2,424-442).
gataaatcgaagccaaaat

SEQ ID NO: 88284 - DNA, 19 bp, Homo sapiens
  siRNA target sequence for LARS2 (NM_015340.2,431-449).
cgaagccaaaattttacgt

SEQ ID NO: 88285 - DNA, 19 bp, Homo sapiens
  siRNA target sequence for LARS2 (NM_015340.2,545-563).
gagggatgcaggtcatcaa

SEQ ID NO: 88286 - DNA, 19 bp, Homo sapiens
  siRNA target sequence for LARS2 (NM_015340.2,570-588).
gggatgggatgcttttgga

SEQ ID NO: 88287 - DNA, 19 bp, Homo sapiens
  siRNA target sequence for LARS2 (NM_015340.2,606-624).
cgcagtcgagaggaatcta

SEQ ID NO: 88288 - DNA, 19 bp, Homo sapiens
  siRNA target sequence for LARS2 (NM_015340.2,608-626).
cagtcgagaggaatctaca

SEQ ID NO: 88289 - DNA, 19 bp, Homo sapiens
  siRNA target sequence for LARS2 (NM_015340.2,716-734).
ctacgtgtttgccagatta

SEQ ID NO: 88290 - DNA, 19 bp, Homo sapiens
  siRNA target sequence for LARS2 (NM_015340.2,719-737).
cgtgtttgccagattacta

SEQ ID NO: 88291 - DNA, 19 bp, Homo sapiens
  siRNA target sequence for LARS2 (NM_015340.2,722-740).
gtttgccagattactacaa

SEQ ID NO: 88292 - DNA, 19 bp, Homo sapiens
  siRNA target sequence for LARS2 (NM_015340.2,735-753).
ctacaagtggactcagtat

SEQ ID NO: 88293 - DNA, 19 bp, Homo sapiens
  siRNA target sequence for LARS2 (NM_015340.2,741-759).
gtggactcagtatctcttt

SEQ ID NO: 88294 - DNA, 19 bp, Homo sapiens
  siRNA target sequence for LARS2 (NM_015340.2,774-792).
ggctgggctggcctatcaa

SEQ ID NO: 88295 - DNA, 19 bp, Homo sapiens
  siRNA target sequence for LARS2 (NM_015340.2,775-793).
gctgggctggcctatcaaa

SEQ ID NO: 88296 - DNA, 19 bp, Homo sapiens
  siRNA target sequence for LARS2 (NM_015340.2,813-831).
ggacccagtggatcaaaca

SEQ ID NO: 88297 - DNA, 19 bp, Homo sapiens
  siRNA target sequence for LARS2 (NM_015340.2,900-918).
gtacctcagacaatggttt

SEQ ID NO: 88298 - DNA, 19 bp, Homo sapiens
  siRNA target sequence for LARS2 (NM_015340.2,903-921).
cctcagacaatggtttatt

SEQ ID NO: 88299 - DNA, 19 bp, Homo sapiens
  siRNA target sequence for LARS2 (NM_015340.2,904-922).
ctcagacaatggtttatta

SEQ ID NO: 88300 - DNA, 19 bp, Homo sapiens
  siRNA target sequence for LARS2 (NM_015340.2,962-980).
cagaccttccagaatggta

SEQ ID NO: 88301 - DNA, 19 bp, Homo sapiens
  siRNA target sequence for LARS2 (NM_015340.2,1028-1046).
gccacctggacttcacatt

SEQ ID NO: 88302 - DNA, 19 bp, Homo sapiens
  siRNA target sequence for LARS2 (NM_015340.2,1029-1047).
ccacctggacttcacatta

SEQ ID NO: 88303 - DNA, 19 bp, Homo sapiens
  siRNA target sequence for LARS2 (NM_015340.2,1254-1272).
ggaggtccctgtcgttatt

SEQ ID NO: 88304 - DNA, 19 bp, Homo sapiens
  siRNA target sequence for LARS2 (NM_015340.2,1291-1309).
gaaggctctctggattcaa

SEQ ID NO: 88305 - DNA, 19 bp, Homo sapiens
  siRNA target sequence for LARS2 (NM_015340.2,1370-1388).
cctactctgaagtcattga

SEQ ID NO: 88306 - DNA, 19 bp, Homo sapiens
  siRNA target sequence for LARS2 (NM_015340.2,1445-1463).
cccggcaggatgcttttct

SEQ ID NO: 88307 - DNA, 19 bp, Homo sapiens
  siRNA target sequence for LARS2 (NM_015340.2,1446-1464).
ccggcaggatgcttttcta

SEQ ID NO: 88308 - DNA, 19 bp, Homo sapiens
  siRNA target sequence for LARS2 (NM_015340.2,1501-1519).
ggagacgtgacaagtgata

SEQ ID NO: 88309 - DNA, 19 bp, Homo sapiens
  siRNA target sequence for LARS2 (NM_015340.2,1509-1527).
gacaagtgataaactgaaa

SEQ ID NO: 88310 - DNA, 19 bp, Homo sapiens
  siRNA target sequence for LARS2 (NM_015340.2,1636-1654).
cccaacatcgcgtctttca

SEQ ID NO: 88311 - DNA, 19 bp, Homo sapiens
  siRNA target sequence for LARS2 (NM_015340.2,1638-1656).
caacatcgcgtctttcact

SEQ ID NO: 88312 - DNA, 19 bp, Homo sapiens
  siRNA target sequence for LARS2 (NM_015340.2,1742-1760).
cagacacgatggatacctt

SEQ ID NO: 88313 - DNA, 19 bp, Homo sapiens
  siRNA target sequence for LARS2 (NM_015340.2,1746-1764).
cacgatggatacctttgtt

SEQ ID NO: 88314 - DNA, 19 bp, Homo sapiens
  siRNA target sequence for LARS2 (NM_015340.2,1748-1766).
cgatggatacctttgttga

SEQ ID NO: 88315 - DNA, 19 bp, Homo sapiens
  siRNA target sequence for LARS2 (NM_015340.2,1765-1783).
gattctgcttggtactact

SEQ ID NO: 88316 - DNA, 19 bp, Homo sapiens
  siRNA target sequence for LARS2 (NM_015340.2,1772-1790).
cttggtactacttcagata

SEQ ID NO: 88317 - DNA, 19 bp, Homo sapiens
  siRNA target sequence for LARS2 (NM_015340.2,1776-1794).
gtactacttcagatacact

SEQ ID NO: 88318 - DNA, 19 bp, Homo sapiens
  siRNA target sequence for LARS2 (NM_015340.2,1787-1805).
gatacactgaccctcataa

SEQ ID NO: 88319 - DNA, 19 bp, Homo sapiens
  siRNA target sequence for LARS2 (NM_015340.2,1848-1866).
gcctgtggatttgtacatt

SEQ ID NO: 88320 - DNA, 19 bp, Homo sapiens
  siRNA target sequence for LARS2 (NM_015340.2,1882-1900).
gccgtcatgcacttgttct

SEQ ID NO: 88321 - DNA, 19 bp, Homo sapiens
  siRNA target sequence for LARS2 (NM_015340.2,1883-1901).
ccgtcatgcacttgttcta

SEQ ID NO: 88322 - DNA, 19 bp, Homo sapiens
  siRNA target sequence for LARS2 (NM_015340.2,1884-1902).
cgtcatgcacttgttctat

SEQ ID NO: 88323 - DNA, 19 bp, Homo sapiens
  siRNA target sequence for LARS2 (NM_015340.2,1899-1917).
ctatgcaagattctttagt

SEQ ID NO: 88324 - DNA, 19 bp, Homo sapiens
  siRNA target sequence for LARS2 (NM_015340.2,1903-1921).
gcaagattctttagtcatt

SEQ ID NO: 88325 - DNA, 19 bp, Homo sapiens
  siRNA target sequence for LARS2 (NM_015340.2,2007-2025).
cctaccatctggacagtat

SEQ ID NO: 88326 - DNA, 19 bp, Homo sapiens
  siRNA target sequence for LARS2 (NM_015340.2,2012-2030).
catctggacagtatctaca

SEQ ID NO: 88327 - DNA, 19 bp, Homo sapiens
  siRNA target sequence for LARS2 (NM_015340.2,2062-2080).
cctgttcatgcaaaaacga

SEQ ID NO: 88328 - DNA, 19 bp, Homo sapiens
  siRNA target sequence for LARS2 (NM_015340.2,2200-2218).
gcccctcctgagaaggata

SEQ ID NO: 88329 - DNA, 19 bp, Homo sapiens
  siRNA target sequence for LARS2 (NM_015340.2,2201-2219).
cccctcctgagaaggatat

SEQ ID NO: 88330 - DNA, 19 bp, Homo sapiens
  siRNA target sequence for LARS2 (NM_015340.2,2272-2290).
cgactgtggaccttgacaa

SEQ ID NO: 88331 - DNA, 19 bp, Homo sapiens
  siRNA target sequence for LARS2 (NM_015340.2,2282-2300).
ccttgacaactcggtttat

SEQ ID NO: 88332 - DNA, 19 bp, Homo sapiens
  siRNA target sequence for LARS2 (NM_015340.2,2283-2301).
cttgacaactcggtttatt

SEQ ID NO: 88333 - DNA, 19 bp, Homo sapiens
  siRNA target sequence for LARS2 (NM_015340.2,2369-2387).
ggaagctctgggagtacaa

SEQ ID NO: 88334 - DNA, 19 bp, Homo sapiens
  siRNA target sequence for LARS2 (NM_015340.2,2374-2392).
ctctgggagtacaagaact

SEQ ID NO: 88335 - DNA, 19 bp, Homo sapiens
  siRNA target sequence for LARS2 (NM_015340.2,2489-2507).
cctctcagagcgtcattct

SEQ ID NO: 88336 - DNA, 19 bp, Homo sapiens
  siRNA target sequence for LARS2 (NM_015340.2,2715-2733).
ggcagttctgatcaacaat

SEQ ID NO: 88337 - DNA, 19 bp, Homo sapiens
  siRNA target sequence for LARS2 (NM_015340.2,2716-2734).
gcagttctgatcaacaata

SEQ ID NO: 88338 - DNA, 19 bp, Homo sapiens
  siRNA target sequence for LARS2 (NM_015340.2,2722-2740).
ctgatcaacaataaagctt

SEQ ID NO: 88339 - DNA, 19 bp, Homo sapiens
  siRNA target sequence for LARS2 (NM_015340.2,2836-2854).
ggacgaagcatcaagaagt

SEQ ID NO: 88340 - DNA, 19 bp, Homo sapiens
  siRNA target sequence for LARS2 (NM_015340.2,2867-2885).
cgagaactgccctcatcaa

SEQ ID NO: 88341 - DNA, 19 bp, Homo sapiens
  siRNA target sequence for LATS1 (NM_004690.2,570-588).
gaaggatatagacaaatga

SEQ ID NO: 88342 - DNA, 19 bp, Homo sapiens
  siRNA target sequence for LATS1 (NM_004690.2,598-616).
cctttcctgccagtaacta

SEQ ID NO: 88343 - DNA, 19 bp, Homo sapiens
  siRNA target sequence for LATS1 (NM_004690.2,599-617).
ctttcctgccagtaactat

SEQ ID NO: 88344 - DNA, 19 bp, Homo sapiens
  siRNA target sequence for LATS1 (NM_004690.2,621-639).
gtcagtagccggcaaatgt

SEQ ID NO: 88345 - DNA, 19 bp, Homo sapiens
  siRNA target sequence for LATS1 (NM_004690.2,623-641).
cagtagccggcaaatgtta

SEQ ID NO: 88346 - DNA, 19 bp, Homo sapiens
  siRNA target sequence for LATS1 (NM_004690.2,625-643).
gtagccggcaaatgttaca

SEQ ID NO: 88347 - DNA, 19 bp, Homo sapiens
  siRNA target sequence for LATS1 (NM_004690.2,628-646).
gccggcaaatgttacaaga

SEQ ID NO: 88348 - DNA, 19 bp, Homo sapiens
  siRNA target sequence for LATS1 (NM_004690.2,651-669).
cgggaatcccttaggaatt

SEQ ID NO: 88349 - DNA, 19 bp, Homo sapiens
  siRNA target sequence for LATS1 (NM_004690.2,654-672).
gaatcccttaggaatttat

SEQ ID NO: 88350 - DNA, 19 bp, Homo sapiens
  siRNA target sequence for LATS1 (NM_004690.2,691-709).
ctaaggctgagcataacat

SEQ ID NO: 88351 - DNA, 19 bp, Homo sapiens
  siRNA target sequence for LATS1 (NM_004690.2,696-714).
gctgagcataacatgagta

SEQ ID NO: 88352 - DNA, 19 bp, Homo sapiens
  siRNA target sequence for LATS1 (NM_004690.2,697-715).
ctgagcataacatgagtaa

SEQ ID NO: 88353 - DNA, 19 bp, Homo sapiens
  siRNA target sequence for LATS1 (NM_004690.2,778-796).
ccttgcaggaaattcgaaa

SEQ ID NO: 88354 - DNA, 19 bp, Homo sapiens
  siRNA target sequence for LATS1 (NM_004690.2,834-852).
cggagtacttcagaagtta

SEQ ID NO: 88355 - DNA, 19 bp, Homo sapiens
  siRNA target sequence for LATS1 (NM_004690.2,856-874).
cacaaatgcttcaagactt

SEQ ID NO: 88356 - DNA, 19 bp, Homo sapiens
  siRNA target sequence for LATS1 (NM_004690.2,913-931).
ctcttcagaaaactaacaa

SEQ ID NO: 88357 - DNA, 19 bp, Homo sapiens
  siRNA target sequence for LATS1 (NM_004690.2,925-943).
ctaacaacagaagtataga

SEQ ID NO: 88358 - DNA, 19 bp, Homo sapiens
  siRNA target sequence for LATS1 (NM_004690.2,937-955).
gtatagaagcagcaattga

SEQ ID NO: 88359 - DNA, 19 bp, Homo sapiens
  siRNA target sequence for LATS1 (NM_004690.2,1008-1026).
gcagctgccagacctatta

SEQ ID NO: 88360 - DNA, 19 bp, Homo sapiens
  siRNA target sequence for LATS1 (NM_004690.2,1009-1027).
cagctgccagacctattaa

SEQ ID NO: 88361 - DNA, 19 bp, Homo sapiens
  siRNA target sequence for LATS1 (NM_004690.2,1045-1063).
ggaatgtgcagcaatcagt

SEQ ID NO: 88362 - DNA, 19 bp, Homo sapiens
  siRNA target sequence for LATS1 (NM_004690.2,1134-1152).
gaaagtgtggcctatcatt

SEQ ID NO: 88363 - DNA, 19 bp, Homo sapiens
  siRNA target sequence for LATS1 (NM_004690.2,1138-1156).
gtgtggcctatcattctga

SEQ ID NO: 88364 - DNA, 19 bp, Homo sapiens
  siRNA target sequence for LATS1 (NM_004690.2,1352-1370).
ggaaccaaactctcaaaca

SEQ ID NO: 88365 - DNA, 19 bp, Homo sapiens
  siRNA target sequence for LATS1 (NM_004690.2,1383-1401).
ggaaacatggaatacgtaa

SEQ ID NO: 88366 - DNA, 19 bp, Homo sapiens
  siRNA target sequence for LATS1 (NM_004690.2,1397-1415).
cgtaatctcccgaatctct

SEQ ID NO: 88367 - DNA, 19 bp, Homo sapiens
  siRNA target sequence for LATS1 (NM_004690.2,1472-1490).
ccccatgaatcctcctaat

SEQ ID NO: 88368 - DNA, 19 bp, Homo sapiens
  siRNA target sequence for LATS1 (NM_004690.2,1474-1492).
ccatgaatcctcctaatca

SEQ ID NO: 88369 - DNA, 19 bp, Homo sapiens
  siRNA target sequence for LATS1 (NM_004690.2,1475-1493).
catgaatcctcctaatcaa

SEQ ID NO: 88370 - DNA, 19 bp, Homo sapiens
  siRNA target sequence for LATS1 (NM_004690.2,1519-1537).
ctgttggcagacaaccaat

SEQ ID NO: 88371 - DNA, 19 bp, Homo sapiens
  siRNA target sequence for LATS1 (NM_004690.2,1524-1542).
ggcagacaaccaatcatca

SEQ ID NO: 88372 - DNA, 19 bp, Homo sapiens
  siRNA target sequence for LATS1 (NM_004690.2,1592-1610).
gaatggtactggacaaact

SEQ ID NO: 88373 - DNA, 19 bp, Homo sapiens
  siRNA target sequence for LATS1 (NM_004690.2,1600-1618).
ctggacaaactgatttcat

SEQ ID NO: 88374 - DNA, 19 bp, Homo sapiens
  siRNA target sequence for LATS1 (NM_004690.2,1602-1620).
ggacaaactgatttcatga

SEQ ID NO: 88375 - DNA, 19 bp, Homo sapiens
  siRNA target sequence for LATS1 (NM_004690.2,1616-1634).
catgatacaccaaaatgtt

SEQ ID NO: 88376 - DNA, 19 bp, Homo sapiens
  siRNA target sequence for LATS1 (NM_004690.2,1703-1721).
cccttctgctttacaaaca

SEQ ID NO: 88377 - DNA, 19 bp, Homo sapiens
  siRNA target sequence for LATS1 (NM_004690.2,1734-1752).
gctccttcgtcatatacaa

SEQ ID NO: 88378 - DNA, 19 bp, Homo sapiens
  siRNA target sequence for LATS1 (NM_004690.2,1735-1753).
ctccttcgtcatatacaaa

SEQ ID NO: 88379 - DNA, 19 bp, Homo sapiens
  siRNA target sequence for LATS1 (NM_004690.2,1759-1777).
gtattcctcagtctatgat

SEQ ID NO: 88380 - DNA, 19 bp, Homo sapiens
  siRNA target sequence for LATS1 (NM_004690.2,1795-1813).
gtcataacatggaactata

SEQ ID NO: 88381 - DNA, 19 bp, Homo sapiens
  siRNA target sequence for LATS1 (NM_004690.2,1797-1815).
cataacatggaactatata

SEQ ID NO: 88382 - DNA, 19 bp, Homo sapiens
  siRNA target sequence for LATS1 (NM_004690.2,1805-1823).
ggaactatataacattagt

SEQ ID NO: 88383 - DNA, 19 bp, Homo sapiens
  siRNA target sequence for LATS1 (NM_004690.2,1827-1845).
cctggactgcaaacaaatt

SEQ ID NO: 88384 - DNA, 19 bp, Homo sapiens
  siRNA target sequence for LATS1 (NM_004690.2,1881-1899).
ccgagcagtgggcatgaaa

SEQ ID NO: 88385 - DNA, 19 bp, Homo sapiens
  siRNA target sequence for LATS1 (NM_004690.2,1882-1900).
cgagcagtgggcatgaaat

SEQ ID NO: 88386 - DNA, 19 bp, Homo sapiens
  siRNA target sequence for LATS1 (NM_004690.2,1903-1921).
ctacatggcaacctaacat

SEQ ID NO: 88387 - DNA, 19 bp, Homo sapiens
  siRNA target sequence for LATS1 (NM_004690.2,1919-1937).
cataccagtgaggtcaaat

SEQ ID NO: 88388 - DNA, 19 bp, Homo sapiens
  siRNA target sequence for LATS1 (NM_004690.2,1924-1942).
cagtgaggtcaaattcttt

SEQ ID NO: 88389 - DNA, 19 bp, Homo sapiens
  siRNA target sequence for LATS1 (NM_004690.2,1965-1983).
gcaagtcactctgctaatt

SEQ ID NO: 88390 - DNA, 19 bp, Homo sapiens
  siRNA target sequence for LATS1 (NM_004690.2,2031-2049).
caacagcctgtgaaaagta

SEQ ID NO: 88391 - DNA, 19 bp, Homo sapiens
  siRNA target sequence for LATS1 (NM_004690.2,2069-2087).
gctacagactgctttagca

SEQ ID NO: 88392 - DNA, 19 bp, Homo sapiens
  siRNA target sequence for LATS1 (NM_004690.2,2104-2122).
ggataccacagccaattca

SEQ ID NO: 88393 - DNA, 19 bp, Homo sapiens
  siRNA target sequence for LATS1 (NM_004690.2,2218-2236).
caccctacccaaaacatct

SEQ ID NO: 88394 - DNA, 19 bp, Homo sapiens
  siRNA target sequence for LATS1 (NM_004690.2,2240-2258).
gcaccaaaacccatctgtt

SEQ ID NO: 88395 - DNA, 19 bp, Homo sapiens
  siRNA target sequence for LATS1 (NM_004690.2,2259-2277).
cctccatacgagtcaatca

SEQ ID NO: 88396 - DNA, 19 bp, Homo sapiens
  siRNA target sequence for LATS1 (NM_004690.2,2262-2280).
ccatacgagtcaatcagta

SEQ ID NO: 88397 - DNA, 19 bp, Homo sapiens
  siRNA target sequence for LATS1 (NM_004690.2,2263-2281).
catacgagtcaatcagtaa

SEQ ID NO: 88398 - DNA, 19 bp, Homo sapiens
  siRNA target sequence for LATS1 (NM_004690.2,2305-2323).
gcttgcccaaggaagatga

SEQ ID NO: 88399 - DNA, 19 bp, Homo sapiens
  siRNA target sequence for LATS1 (NM_004690.2,2319-2337).
gatgagagtgaaaagagtt

SEQ ID NO: 88400 - DNA, 19 bp, Homo sapiens
  siRNA target sequence for LATS1 (NM_004690.2,2369-2387).
gaaacagattacaacttca

SEQ ID NO: 88401 - DNA, 19 bp, Homo sapiens
  siRNA target sequence for LATS1 (NM_004690.2,2375-2393).
gattacaacttcacctatt

SEQ ID NO: 88402 - DNA, 19 bp, Homo sapiens
  siRNA target sequence for LATS1 (NM_004690.2,2380-2398).
caacttcacctattactgt

SEQ ID NO: 88403 - DNA, 19 bp, Homo sapiens
  siRNA target sequence for LATS1 (NM_004690.2,2423-2441).
gcgaagggaatctcgtatt

SEQ ID NO: 88404 - DNA, 19 bp, Homo sapiens
  siRNA target sequence for LATS1 (NM_004690.2,2429-2447).
ggaatctcgtattcaaagt

SEQ ID NO: 88405 - DNA, 19 bp, Homo sapiens
  siRNA target sequence for LATS1 (NM_004690.2,2430-2448).
gaatctcgtattcaaagtt

SEQ ID NO: 88406 - DNA, 19 bp, Homo sapiens
  siRNA target sequence for LATS1 (NM_004690.2,2452-2470).
ctcctcaagcatttaaatt

SEQ ID NO: 88407 - DNA, 19 bp, Homo sapiens
  siRNA target sequence for LATS1 (NM_004690.2,2454-2472).
cctcaagcatttaaattct

SEQ ID NO: 88408 - DNA, 19 bp, Homo sapiens
  siRNA target sequence for LATS1 (NM_004690.2,2455-2473).
ctcaagcatttaaattctt

SEQ ID NO: 88409 - DNA, 19 bp, Homo sapiens
  siRNA target sequence for LATS1 (NM_004690.2,2471-2489).
ctttatggagcaacatgta

SEQ ID NO: 88410 - DNA, 19 bp, Homo sapiens
  siRNA target sequence for LATS1 (NM_004690.2,2477-2495).
ggagcaacatgtagaaaat

SEQ ID NO: 88411 - DNA, 19 bp, Homo sapiens
  siRNA target sequence for LATS1 (NM_004690.2,2513-2531).
gcagcgtctacatcgtaaa

SEQ ID NO: 88412 - DNA, 19 bp, Homo sapiens
  siRNA target sequence for LATS1 (NM_004690.2,2514-2532).
cagcgtctacatcgtaaaa

SEQ ID NO: 88413 - DNA, 19 bp, Homo sapiens
  siRNA target sequence for LATS1 (NM_004690.2,2516-2534).
gcgtctacatcgtaaaaaa

SEQ ID NO: 88414 - DNA, 19 bp, Homo sapiens
  siRNA target sequence for LATS1 (NM_004690.2,2552-2570).
gatgcgggttggattatct

SEQ ID NO: 88415 - DNA, 19 bp, Homo sapiens
  siRNA target sequence for LATS1 (NM_004690.2,2574-2592).
gatgcccaggatcaaatga

SEQ ID NO: 88416 - DNA, 19 bp, Homo sapiens
  siRNA target sequence for LATS1 (NM_004690.2,2605-2623).
gccaaaaagaatctaatta

SEQ ID NO: 88417 - DNA, 19 bp, Homo sapiens
  siRNA target sequence for LATS1 (NM_004690.2,2617-2635).
ctaattacatccgtcttaa

SEQ ID NO: 88418 - DNA, 19 bp, Homo sapiens
  siRNA target sequence for LATS1 (NM_004690.2,2628-2646).
cgtcttaaaagggctaaaa

SEQ ID NO: 88419 - DNA, 19 bp, Homo sapiens
  siRNA target sequence for LATS1 (NM_004690.2,2705-2723).
ctgtctagcaagaaaagta

SEQ ID NO: 88420 - DNA, 19 bp, Homo sapiens
  siRNA target sequence for LATS1 (NM_004690.2,2820-2838).
gctgaagctgacaatgaat

SEQ ID NO: 88421 - DNA, 19 bp, Homo sapiens
  siRNA target sequence for LATS1 (NM_004690.2,2839-2857).
gggtagttcgtctatatta

SEQ ID NO: 88422 - DNA, 19 bp, Homo sapiens
  siRNA target sequence for LATS1 (NM_004690.2,2840-2858).
ggtagttcgtctatattat

SEQ ID NO: 88423 - DNA, 19 bp, Homo sapiens
  siRNA target sequence for LATS1 (NM_004690.2,2841-2859).
gtagttcgtctatattatt

SEQ ID NO: 88424 - DNA, 19 bp, Homo sapiens
  siRNA target sequence for LATS1 (NM_004690.2,2844-2862).
gttcgtctatattattcat

SEQ ID NO: 88425 - DNA, 19 bp, Homo sapiens
  siRNA target sequence for LATS1 (NM_004690.2,2868-2886).
gataaggacaatttatact

SEQ ID NO: 88426 - DNA, 19 bp, Homo sapiens
  siRNA target sequence for LATS1 (NM_004690.2,2873-2891).
ggacaatttatactttgta

SEQ ID NO: 88427 - DNA, 19 bp, Homo sapiens
  siRNA target sequence for LATS1 (NM_004690.2,2918-2936).
gatgagcctattaattaga

SEQ ID NO: 88428 - DNA, 19 bp, Homo sapiens
  siRNA target sequence for LATS1 (NM_004690.2,2956-2974).
gtctggcacgattctacat

SEQ ID NO: 88429 - DNA, 19 bp, Homo sapiens
  siRNA target sequence for LATS1 (NM_004690.2,2982-3000).
cttacctgtgcagttgaaa

SEQ ID NO: 88430 - DNA, 19 bp, Homo sapiens
  siRNA target sequence for LATS1 (NM_004690.2,2987-3005).
ctgtgcagttgaaagtgtt

SEQ ID NO: 88431 - DNA, 19 bp, Homo sapiens
  siRNA target sequence for LATS1 (NM_004690.2,2992-3010).
cagttgaaagtgttcataa

SEQ ID NO: 88432 - DNA, 19 bp, Homo sapiens
  siRNA target sequence for LATS1 (NM_004690.2,3057-3075).
gatcgtgatggtcatatta

SEQ ID NO: 88433 - DNA, 19 bp, Homo sapiens
  siRNA target sequence for LATS1 (NM_004690.2,3061-3079).
gtgatggtcatattaaatt

SEQ ID NO: 88434 - DNA, 19 bp, Homo sapiens
  siRNA target sequence for LATS1 (NM_004690.2,3109-3127).
gatggacacacgattctaa

SEQ ID NO: 88435 - DNA, 19 bp, Homo sapiens
  siRNA target sequence for LATS1 (NM_004690.2,3112-3130).
ggacacacgattctaagta

SEQ ID NO: 88436 - DNA, 19 bp, Homo sapiens
  siRNA target sequence for LATS1 (NM_004690.2,3120-3138).
gattctaagtactatcaga

SEQ ID NO: 88437 - DNA, 19 bp, Homo sapiens
  siRNA target sequence for LATS1 (NM_004690.2,3153-3171).
cggcaagatagcatggatt

SEQ ID NO: 88438 - DNA, 19 bp, Homo sapiens
  siRNA target sequence for LATS1 (NM_004690.2,3257-3275).
gcgatgtctagcacattct

SEQ ID NO: 88439 - DNA, 19 bp, Homo sapiens
  siRNA target sequence for LATS1 (NM_004690.2,3258-3276).
cgatgtctagcacattctt

SEQ ID NO: 88440 - DNA, 19 bp, Homo sapiens
  siRNA target sequence for LATS1 (NM_004690.2,3278-3296).
ggttgggactcccaattat

SEQ ID NO: 88441 - DNA, 19 bp, Homo sapiens
  siRNA target sequence for LATS1 (NM_004690.2,3279-3297).
gttgggactcccaattata

SEQ ID NO: 88442 - DNA, 19 bp, Homo sapiens
  siRNA target sequence for LATS1 (NM_004690.2,3284-3302).
gactcccaattatattgca

SEQ ID NO: 88443 - DNA, 19 bp, Homo sapiens
  siRNA target sequence for LATS1 (NM_004690.2,3314-3332).
gctacgaacaggatacaca

SEQ ID NO: 88444 - DNA, 19 bp, Homo sapiens
  siRNA target sequence for LATS1 (NM_004690.2,3432-3450).
gttatcaactggcaaacat

SEQ ID NO: 88445 - DNA, 19 bp, Homo sapiens
  siRNA target sequence for LATS1 (NM_004690.2,3542-3560).
gaatggtgctgatgaaata

SEQ ID NO: 88446 - DNA, 19 bp, Homo sapiens
  siRNA target sequence for LATS1 (NM_004690.2,3607-3625).
gacagcagtctgcttcata

SEQ ID NO: 88447 - DNA, 19 bp, Homo sapiens
  siRNA target sequence for LATS1 (NM_004690.2,3611-3629).
gcagtctgcttcatacatt

SEQ ID NO: 88448 - DNA, 19 bp, Homo sapiens
  siRNA target sequence for LATS1 (NM_004690.2,3619-3637).
cttcatacattcctaaaat

SEQ ID NO: 88449 - DNA, 19 bp, Homo sapiens
  siRNA target sequence for LATS1 (NM_004690.2,3672-3690).
gttgatcctgataaattat

SEQ ID NO: 88450 - DNA, 19 bp, Homo sapiens
  siRNA target sequence for LATS1 (NM_004690.2,3675-3693).
gatcctgataaattatgga

SEQ ID NO: 88451 - DNA, 19 bp, Homo sapiens
  siRNA target sequence for LATS1 (NM_004690.2,3727-3745).
ctctcaatggatggtataa

SEQ ID NO: 88452 - DNA, 19 bp, Homo sapiens
  siRNA target sequence for LATS1 (NM_004690.2,3729-3747).
ctcaatggatggtataaaa

SEQ ID NO: 88453 - DNA, 19 bp, Homo sapiens
  siRNA target sequence for LATS1 (NM_004690.2,3760-3778).
ctgaacatgcattctatga

SEQ ID NO: 88454 - DNA, 19 bp, Homo sapiens
  siRNA target sequence for LATS1 (NM_004690.2,3762-3780).
gaacatgcattctatgaat

SEQ ID NO: 88455 - DNA, 19 bp, Homo sapiens
  siRNA target sequence for LATS1 (NM_004690.2,3806-3824).
caatggctacccatataat

SEQ ID NO: 88456 - DNA, 19 bp, Homo sapiens
  siRNA target sequence for LATS1 (NM_004690.2,3829-3847).
cgaagcctattgaatatga

SEQ ID NO: 88457 - DNA, 19 bp, Homo sapiens
  siRNA target sequence for LATS1 (NM_004690.2,3835-3853).
ctattgaatatgaatacat

SEQ ID NO: 88458 - DNA, 19 bp, Homo sapiens
  siRNA target sequence for LATS1 (NM_004690.2,3921-3939).
cgcgatctagtatatgttt

SEQ ID NO: 88459 - DNA, 19 bp, Homo sapiens
  siRNA target sequence for LATS2 (NM_014572.1,398-416).
cacgacttattctggaaat

SEQ ID NO: 88460 - DNA, 19 bp, Homo sapiens
  siRNA target sequence for LATS2 (NM_014572.1,421-439).
ggcagcgactgcaagagat

SEQ ID NO: 88461 - DNA, 19 bp, Homo sapiens
  siRNA target sequence for LATS2 (NM_014572.1,437-455).
gattcgtgaggggttaaaa

SEQ ID NO: 88462 - DNA, 19 bp, Homo sapiens
  siRNA target sequence for LATS2 (NM_014572.1,575-593).
cccaaagttcggaccttat

SEQ ID NO: 88463 - DNA, 19 bp, Homo sapiens
  siRNA target sequence for LATS2 (NM_014572.1,577-595).
caaagttcggaccttatca

SEQ ID NO: 88464 - DNA, 19 bp, Homo sapiens
  siRNA target sequence for LATS2 (NM_014572.1,581-599).
gttcggaccttatcagaaa

SEQ ID NO: 88465 - DNA, 19 bp, Homo sapiens
  siRNA target sequence for LATS2 (NM_014572.1,816-834).
cagattgtgcgggtcatta

SEQ ID NO: 88466 - DNA, 19 bp, Homo sapiens
  siRNA target sequence for LATS2 (NM_014572.1,1002-1020).
ccgtacgtggactaccttt

SEQ ID NO: 88467 - DNA, 19 bp, Homo sapiens
  siRNA target sequence for LATS2 (NM_014572.1,1003-1021).
cgtacgtggactacctttt

SEQ ID NO: 88468 - DNA, 19 bp, Homo sapiens
  siRNA target sequence for LATS2 (NM_014572.1,2071-2089).
gcggaaaggataaaaagca

SEQ ID NO: 88469 - DNA, 19 bp, Homo sapiens
  siRNA target sequence for LATS2 (NM_014572.1,2104-2122).
ccgttcccgtccgcaaaaa

SEQ ID NO: 88470 - DNA, 19 bp, Homo sapiens
  siRNA target sequence for LATS2 (NM_014572.1,2106-2124).
gttcccgtccgcaaaaaca

SEQ ID NO: 88471 - DNA, 19 bp, Homo sapiens
  siRNA target sequence for LATS2 (NM_014572.1,2167-2185).
cgccatacgcctttaagtt

SEQ ID NO: 88472 - DNA, 19 bp, Homo sapiens
  siRNA target sequence for LATS2 (NM_014572.1,2169-2187).
ccatacgcctttaagttct

SEQ ID NO: 88473 - DNA, 19 bp, Homo sapiens
  siRNA target sequence for LATS2 (NM_014572.1,2170-2188).
catacgcctttaagttctt

SEQ ID NO: 88474 - DNA, 19 bp, Homo sapiens
  siRNA target sequence for LATS2 (NM_014572.1,2318-2336).
ctaccagaaagagtctaat

SEQ ID NO: 88475 - DNA, 19 bp, Homo sapiens
  siRNA target sequence for LATS2 (NM_014572.1,2332-2350).
ctaattacaacaggttaaa

SEQ ID NO: 88476 - DNA, 19 bp, Homo sapiens
  siRNA target sequence for LATS2 (NM_014572.1,2535-2553).
gccgaggcagacaatgagt

SEQ ID NO: 88477 - DNA, 19 bp, Homo sapiens
  siRNA target sequence for LATS2 (NM_014572.1,2554-2572).
gggtggtcaaactctacta

SEQ ID NO: 88478 - DNA, 19 bp, Homo sapiens
  siRNA target sequence for LATS2 (NM_014572.1,2556-2574).
gtggtcaaactctactact

SEQ ID NO: 88479 - DNA, 19 bp, Homo sapiens
  siRNA target sequence for LATS2 (NM_014572.1,2753-2771).
gcctgataacattttgata

SEQ ID NO: 88480 - DNA, 19 bp, Homo sapiens
  siRNA target sequence for LATS2 (NM_014572.1,2819-2837).
gttcaggtggactcacaat

SEQ ID NO: 88481 - DNA, 19 bp, Homo sapiens
  siRNA target sequence for LATS2 (NM_014572.1,2994-3012).
gtggggactccaaactaca

SEQ ID NO: 88482 - DNA, 19 bp, Homo sapiens
  siRNA target sequence for LATS2 (NM_014572.1,3136-3154).
cccagctgaaggtgatcaa

SEQ ID NO: 88483 - DNA, 19 bp, Homo sapiens
  siRNA target sequence for LATS2 (NM_014572.1,3380-3398).
cgaccccgtagatgaagaa

SEQ ID NO: 88484 - DNA, 19 bp, Homo sapiens
  siRNA target sequence for LATS2 (NM_014572.1,3381-3399).
gaccccgtagatgaagaaa

SEQ ID NO: 88485 - DNA, 19 bp, Homo sapiens
  siRNA target sequence for LATS2 (NM_014572.1,3447-3465).
ctcacctcgcccaataaca

SEQ ID NO: 88486 - DNA, 19 bp, Homo sapiens
  siRNA target sequence for LATS2 (NM_014572.1,3468-3486).
catcctgagcacgcatttt

SEQ ID NO: 88487 - DNA, 19 bp, Homo sapiens
  siRNA target sequence for LATS2 (NM_014572.1,3472-3490).
ctgagcacgcattttacga

SEQ ID NO: 88488 - DNA, 19 bp, Homo sapiens
  siRNA target sequence for LATS2 (NM_014572.1,3474-3492).
gagcacgcattttacgaat

SEQ ID NO: 88489 - DNA, 19 bp, Homo sapiens
  siRNA target sequence for LATS2 (NM_014572.1,3477-3495).
cacgcattttacgaattca

SEQ ID NO: 88490 - DNA, 19 bp, Homo sapiens
  siRNA target sequence for LCK (NM_005356.2,108-126).
gtgtgagaactgccattat

SEQ ID NO: 88491 - DNA, 19 bp, Homo sapiens
  siRNA target sequence for LCK (NM_005356.2,185-203).
gggacccactggttaccta

SEQ ID NO: 88492 - DNA, 19 bp, Homo sapiens
  siRNA target sequence for LCK (NM_005356.2,421-439).
cccgaaccctggttcttca

SEQ ID NO: 88493 - DNA, 19 bp, Homo sapiens
  siRNA target sequence for LCK (NM_005356.2,422-440).
ccgaaccctggttcttcaa

SEQ ID NO: 88494 - DNA, 19 bp, Homo sapiens
  siRNA target sequence for LCK (NM_005356.2,575-593).
gagaggtggtgaaacatta

SEQ ID NO: 88495 - DNA, 19 bp, Homo sapiens
  siRNA target sequence for LCK (NM_005356.2,577-595).
gaggtggtgaaacattaca

SEQ ID NO: 88496 - DNA, 19 bp, Homo sapiens
  siRNA target sequence for LCK (NM_005356.2,661-679).
gaactggtccgccattaca

SEQ ID NO: 88497 - DNA, 19 bp, Homo sapiens
  siRNA target sequence for LCK (NM_005356.2,670-688).
cgccattacaccaatgctt

SEQ ID NO: 88498 - DNA, 19 bp, Homo sapiens
  siRNA target sequence for LCK (NM_005356.2,1271-1289).
cagcgccagaagccattaa

SEQ ID NO: 88499 - DNA, 19 bp, Homo sapiens
  siRNA target sequence for LCK (NM_005356.2,1332-1350).
gatcctgctgacggaaatt

SEQ ID NO: 88500 - DNA, 19 bp, Homo sapiens
  siRNA target sequence for LCK (NM_005356.2,1336-1354).
ctgctgacggaaattgtca

SEQ ID NO: 88501 - DNA, 19 bp, Homo sapiens
  siRNA target sequence for LCK (NM_005356.2,1385-1403).
ccaacccggaggtgattca

SEQ ID NO: 88502 - DNA, 19 bp, Homo sapiens
  siRNA target sequence for LIMK1 (NM_002314.2,191-209).
cctggagggaagaacgtat

SEQ ID NO: 88503 - DNA, 19 bp, Homo sapiens
  siRNA target sequence for LIMK1 (NM_002314.2,246-264).
ctgcggccagaggatctat

SEQ ID NO: 88504 - DNA, 19 bp, Homo sapiens
  siRNA target sequence for LIMK1 (NM_002314.2,248-266).
gcggccagaggatctatga

SEQ ID NO: 88505 - DNA, 19 bp, Homo sapiens
  siRNA target sequence for LIMK1 (NM_002314.2,249-267).
cggccagaggatctatgat

SEQ ID NO: 88506 - DNA, 19 bp, Homo sapiens
  siRNA target sequence for LIMK1 (NM_002314.2,338-356).
ccctgtcgcaccagtacta

SEQ ID NO: 88507 - DNA, 19 bp, Homo sapiens
  siRNA target sequence for LIMK1 (NM_002314.2,339-357).
cctgtcgcaccagtactat

SEQ ID NO: 88508 - DNA, 19 bp, Homo sapiens
  siRNA target sequence for LIMK1 (NM_002314.2,421-439).
gggtgctctgagcaaatca

SEQ ID NO: 88509 - DNA, 19 bp, Homo sapiens
  siRNA target sequence for LIMK1 (NM_002314.2,499-517).
ctcacgtgtgggaccttta

SEQ ID NO: 88510 - DNA, 19 bp, Homo sapiens
  siRNA target sequence for LIMK1 (NM_002314.2,686-704).
gcaagcgtggactttcagt

SEQ ID NO: 88511 - DNA, 19 bp, Homo sapiens
  siRNA target sequence for LIMK1 (NM_002314.2,788-806).
gcatgagcccagatgtgaa

SEQ ID NO: 88512 - DNA, 19 bp, Homo sapiens
  siRNA target sequence for LIMK1 (NM_002314.2,792-810).
gagcccagatgtgaagaat

SEQ ID NO: 88513 - DNA, 19 bp, Homo sapiens
  siRNA target sequence for LIMK1 (NM_002314.2,826-844).
gaccggatcttggaaatca

SEQ ID NO: 88514 - DNA, 19 bp, Homo sapiens
  siRNA target sequence for LIMK1 (NM_002314.2,848-866).
gcacgcccatccgaaatgt

SEQ ID NO: 88515 - DNA, 19 bp, Homo sapiens
  siRNA target sequence for LIMK1 (NM_002314.2,982-1000).
ctgagctctccggcttata

SEQ ID NO: 88516 - DNA, 19 bp, Homo sapiens
  siRNA target sequence for LIMK1 (NM_002314.2,984-1002).
gagctctccggcttatact

SEQ ID NO: 88517 - DNA, 19 bp, Homo sapiens
  siRNA target sequence for LIMK1 (NM_002314.2,1211-1229).
gcttcggccaggctatcaa

SEQ ID NO: 88518 - DNA, 19 bp, Homo sapiens
  siRNA target sequence for LIMK1 (NM_002314.2,1562-1580).
gcctggtccgcgagaacaa

SEQ ID NO: 88519 - DNA, 19 bp, Homo sapiens
  siRNA target sequence for LIMK1 (NM_002314.2,1564-1582).
ctggtccgcgagaacaaga

SEQ ID NO: 88520 - DNA, 19 bp, Homo sapiens
  siRNA target sequence for LIMK1 (NM_002314.2,1566-1584).
ggtccgcgagaacaagaat

SEQ ID NO: 88521 - DNA, 19 bp, Homo sapiens
  siRNA target sequence for LIMK2 (NM_005569.2,151-169).
cgcgctggcgggtgaagat

SEQ ID NO: 88522 - DNA, 19 bp, Homo sapiens
  siRNA target sequence for LIMK2 (NM_005569.2,203-221).
gctccaagccagatatggt

SEQ ID NO: 88523 - DNA, 19 bp, Homo sapiens
  siRNA target sequence for LIMK2 (NM_005569.2,288-306).
ccaactggtactatgagaa

SEQ ID NO: 88524 - DNA, 19 bp, Homo sapiens
  siRNA target sequence for LIMK2 (NM_005569.2,331-349).
ggactactgggggaagttt

SEQ ID NO: 88525 - DNA, 19 bp, Homo sapiens
  siRNA target sequence for LIMK2 (NM_005569.2,377-395).
ctgatgacagggcctttta

SEQ ID NO: 88526 - DNA, 19 bp, Homo sapiens
  siRNA target sequence for LIMK2 (NM_005569.2,442-460).
gagctgcaaggtgatcatt

SEQ ID NO: 88527 - DNA, 19 bp, Homo sapiens
  siRNA target sequence for LIMK2 (NM_005569.2,444-462).
gctgcaaggtgatcattga

SEQ ID NO: 88528 - DNA, 19 bp, Homo sapiens
  siRNA target sequence for LIMK2 (NM_005569.2,834-852).
cacttcagctgttgattga

SEQ ID NO: 88529 - DNA, 19 bp, Homo sapiens
  siRNA target sequence for LIMK2 (NM_005569.2,994-1012).
cctaaggcgcagtaacagt

SEQ ID NO: 88530 - DNA, 19 bp, Homo sapiens
  siRNA target sequence for LIMK2 (NM_005569.2,995-1013).
ctaaggcgcagtaacagta

SEQ ID NO: 88531 - DNA, 19 bp, Homo sapiens
  siRNA target sequence for LIMK2 (NM_005569.2,1091-1109).
cgttgttccagcagctatt

SEQ ID NO: 88532 - DNA, 19 bp, Homo sapiens
  siRNA target sequence for LIMK2 (NM_005569.2,1126-1144).
gccctgtgacctaatccat

SEQ ID NO: 88533 - DNA, 19 bp, Homo sapiens
  siRNA target sequence for LIMK2 (NM_005569.2,1219-1237).
catgaaagagttaattcga

SEQ ID NO: 88534 - DNA, 19 bp, Homo sapiens
  siRNA target sequence for LIMK2 (NM_005569.2,1322-1340).
ggtgtgctgtacaaggata

SEQ ID NO: 88535 - DNA, 19 bp, Homo sapiens
  siRNA target sequence for LIMK2 (NM_005569.2,1323-1341).
gtgtgctgtacaaggataa

SEQ ID NO: 88536 - DNA, 19 bp, Homo sapiens
  siRNA target sequence for LIMK2 (NM_005569.2,1455-1473).
ccggaatggcctatttgca

SEQ ID NO: 88537 - DNA, 19 bp, Homo sapiens
  siRNA target sequence for LIMK2 (NM_005569.2,1463-1481).
gcctatttgcactctatgt

SEQ ID NO: 88538 - DNA, 19 bp, Homo sapiens
  siRNA target sequence for LIMK2 (NM_005569.2,1557-1575).
ggctgtcacggctcatagt

SEQ ID NO: 88539 - DNA, 19 bp, Homo sapiens
  siRNA target sequence for LIMK2 (NM_005569.2,1603-1621).
gaaggccaccaccaagaaa

SEQ ID NO: 88540 - DNA, 19 bp, Homo sapiens
  siRNA target sequence for LIMK2 (NM_005569.2,1718-1736).
gagacggtggatatcttct

SEQ ID NO: 88541 - DNA, 19 bp, Homo sapiens
  siRNA target sequence for LIMK2 (NM_005569.2,1815-1833).
gcctcaacgtgaagctttt

SEQ ID NO: 88542 - DNA, 19 bp, Homo sapiens
  siRNA target sequence for LIMK2 (NM_005569.2,1817-1835).
ctcaacgtgaagcttttct

SEQ ID NO: 88543 - DNA, 19 bp, Homo sapiens
  siRNA target sequence for LIMK2 (NM_005569.2,1843-1861).
gtttgttcccacagattgt

SEQ ID NO: 88544 - DNA, 19 bp, Homo sapiens
  siRNA target sequence for LIMK2 (NM_016733.1,360-378).
cctgtttcggtgttcagaa

SEQ ID NO: 88545 - DNA, 19 bp, Homo sapiens
  siRNA target sequence for LOC115704 (NM_145245.2,231-249).
gtccatgcgctccatgaat

SEQ ID NO: 88546 - DNA, 19 bp, Homo sapiens
  siRNA target sequence for LOC115704 (NM_145245.2,467-485).
cggacatgcccgtcaagaa

SEQ ID NO: 88547 - DNA, 19 bp, Homo sapiens
  siRNA target sequence for LOC115704 (NM_145245.2,786-804).
gctcgggctctgcatctat

SEQ ID NO: 88548 - DNA, 19 bp, Homo sapiens
  siRNA target sequence for LOC115704 (NM_145245.2,790-808).
gggctctgcatctatcagt

SEQ ID NO: 88549 - DNA, 19 bp, Homo sapiens
  siRNA target sequence for LOC115704 (NM_145245.2,791-809).
ggctctgcatctatcagtt

SEQ ID NO: 88550 - DNA, 19 bp, Homo sapiens
  siRNA target sequence for LOC115704 (NM_145245.2,938-956).
ccacccgggtctttgacat

SEQ ID NO: 88551 - DNA, 19 bp, Homo sapiens
  siRNA target sequence for LOC115704 (NM_145245.2,1120-1138).
gcctaccaggtcaagtaca

SEQ ID NO: 88552 - DNA, 19 bp, Homo sapiens
  siRNA target sequence for LOC115704 (NM_145245.2,1206-1224).
gatcgagatcaaaagactt

SEQ ID NO: 88553 - DNA, 19 bp, Homo sapiens
  siRNA target sequence for LOC115704 (NM_145245.2,1253-1271).
ggattgaaaccctagagaa

SEQ ID NO: 88554 - DNA, 19 bp, Homo sapiens
  siRNA target sequence for LOC115704 (NM_145245.2,1525-1543).
gttctcgacatggaaaaga

SEQ ID NO: 88555 - DNA, 19 bp, Homo sapiens
  siRNA target sequence for LOC115704 (NM_145245.2,1554-1572).
gctgcccgacgagaacaat

SEQ ID NO: 88556 - DNA, 19 bp, Homo sapiens
  siRNA target sequence for LOC115704 (NM_145245.2,1631-1649).
cctcgacgcgagagcttaa

SEQ ID NO: 88557 - DNA, 19 bp, Homo sapiens
  siRNA target sequence for LOC115704 (NM_145245.2,1632-1650).
ctcgacgcgagagcttaaa

SEQ ID NO: 88558 - DNA, 19 bp, Homo sapiens
  siRNA target sequence for LOC115704 (NM_145245.2,1634-1652).
cgacgcgagagcttaaact

SEQ ID NO: 88559 - DNA, 19 bp, Homo sapiens
  siRNA target sequence for LOC115704 (NM_145245.2,2120-2138).
cggactcatcgcagtacat

SEQ ID NO: 88560 - DNA, 19 bp, Homo sapiens
  siRNA target sequence for LOC115704 (NM_145245.2,2211-2229).
ggacccgctggctttcgat

SEQ ID NO: 88561 - DNA, 19 bp, Homo sapiens
  siRNA target sequence for LOC115704 (NM_145245.2,2312-2330).
ccctgcaggacgcattgta

SEQ ID NO: 88562 - DNA, 19 bp, Homo sapiens
  siRNA target sequence for LOC116143 (NM_138458.1,164-182).
cctgcagcgccaaatttgt

SEQ ID NO: 88563 - DNA, 19 bp, Homo sapiens
  siRNA target sequence for LOC116143 (NM_138458.1,203-221).
ggggcaccggcgtcattca

SEQ ID NO: 88564 - DNA, 19 bp, Homo sapiens
  siRNA target sequence for LOC116143 (NM_138458.1,253-271).
ctgcttcgggagattgaaa

SEQ ID NO: 88565 - DNA, 19 bp, Homo sapiens
  siRNA target sequence for LOC116143 (NM_138458.1,377-395).
ctccagagatgccagtata

SEQ ID NO: 88566 - DNA, 19 bp, Homo sapiens
  siRNA target sequence for LOC116143 (NM_138458.1,437-455).
gcataggtggactaggaat

SEQ ID NO: 88567 - DNA, 19 bp, Homo sapiens
  siRNA target sequence for LOC116143 (NM_138458.1,438-456).
cataggtggactaggaatt

SEQ ID NO: 88568 - DNA, 19 bp, Homo sapiens
  siRNA target sequence for LOC116143 (NM_138458.1,463-481).
ggagcacctgaaattgtga

SEQ ID NO: 88569 - DNA, 19 bp, Homo sapiens
  siRNA target sequence for LOC116143 (NM_138458.1,645-663).
caatggggatatcaaacta

SEQ ID NO: 88570 - DNA, 19 bp, Homo sapiens
  siRNA target sequence for LOC116143 (NM_138458.1,683-701).
cattacggtgggagacaaa

SEQ ID NO: 88571 - DNA, 19 bp, Homo sapiens
  siRNA target sequence for LOC116143 (NM_138458.1,722-740).
gcttggagtttgacagaaa

SEQ ID NO: 88572 - DNA, 19 bp, Homo sapiens
  siRNA target sequence for LOC116143 (NM_138458.1,744-762).
cataagtatgaataagtta

SEQ ID NO: 88573 - DNA, 19 bp, Homo sapiens
  siRNA target sequence for LOC116143 (NM_138458.1,844-862).
gaaaaggctcataaatcta

SEQ ID NO: 88574 - DNA, 19 bp, Homo sapiens
  siRNA target sequence for LOC116143 (NM_138458.1,955-973).
cctattcagcggtcaaaga

SEQ ID NO: 88575 - DNA, 19 bp, Homo sapiens
  siRNA target sequence for LOC116143 (NM_138458.1,956-974).
ctattcagcggtcaaagaa

SEQ ID NO: 88576 - DNA, 19 bp, Homo sapiens
  siRNA target sequence for LOC116143 (NM_138458.1,961-979).
cagcggtcaaagaaagatt

SEQ ID NO: 88577 - DNA, 19 bp, Homo sapiens
  siRNA target sequence for LOC116143 (NM_138458.1,963-981).
gcggtcaaagaaagattct

SEQ ID NO: 88578 - DNA, 19 bp, Homo sapiens
  siRNA target sequence for LOC116143 (NM_138458.1,996-1014).
gggagtcgcaggttctgta

SEQ ID NO: 88579 - DNA, 19 bp, Homo sapiens
  siRNA target sequence for LOC116143 (NM_138458.1,997-1015).
ggagtcgcaggttctgtaa

SEQ ID NO: 88580 - DNA, 19 bp, Homo sapiens
  siRNA target sequence for LOC116143 (NM_138458.1,1041-1059).
cacccagcccatttcaagt

SEQ ID NO: 88581 - DNA, 19 bp, Homo sapiens
  siRNA target sequence for LOC116143 (NM_138458.1,1062-1080).
ggattggagtccagataaa

SEQ ID NO: 88582 - DNA, 19 bp, Homo sapiens
  siRNA target sequence for LOC116143 (NM_138458.1,1117-1135).
gtgagagtactgatcgtta

SEQ ID NO: 88583 - DNA, 19 bp, Homo sapiens
  siRNA target sequence for LOC116143 (NM_138458.1,1121-1139).
gagtactgatcgttacaaa

SEQ ID NO: 88584 - DNA, 19 bp, Homo sapiens
  siRNA target sequence for LOC116143 (NM_138458.1,1131-1149).
cgttacaaagctcaataaa

SEQ ID NO: 88585 - DNA, 19 bp, Homo sapiens
  siRNA target sequence for LOC149420 (NM_152835.1,302-320).
cagccaaagtacgatctaa

SEQ ID NO: 88586 - DNA, 19 bp, Homo sapiens
  siRNA target sequence for LOC149420 (NM_152835.1,304-322).
gccaaagtacgatctaata

SEQ ID NO: 88587 - DNA, 19 bp, Homo sapiens
  siRNA target sequence for LOC149420 (NM_152835.1,339-357).
gtagttacggtgttgtgta

SEQ ID NO: 88588 - DNA, 19 bp, Homo sapiens
  siRNA target sequence for LOC149420 (NM_152835.1,342-360).
gttacggtgttgtgtatga

SEQ ID NO: 88589 - DNA, 19 bp, Homo sapiens
  siRNA target sequence for LOC149420 (NM_152835.1,408-426).
gatgtcacgcacctgaaaa

SEQ ID NO: 88590 - DNA, 19 bp, Homo sapiens
  siRNA target sequence for LOC149420 (NM_152835.1,411-429).
gtcacgcacctgaaaatgt

SEQ ID NO: 88591 - DNA, 19 bp, Homo sapiens
  siRNA target sequence for LOC149420 (NM_152835.1,453-471).
gggcactaagcagtatcaa

SEQ ID NO: 88592 - DNA, 19 bp, Homo sapiens
  siRNA target sequence for LOC149420 (NM_152835.1,474-492).
gccaacatccaaatgtgat

SEQ ID NO: 88593 - DNA, 19 bp, Homo sapiens
  siRNA target sequence for LOC149420 (NM_152835.1,475-493).
ccaacatccaaatgtgatt

SEQ ID NO: 88594 - DNA, 19 bp, Homo sapiens
  siRNA target sequence for LOC149420 (NM_152835.1,500-518).
gaggaatgcatcctacaaa

SEQ ID NO: 88595 - DNA, 19 bp, Homo sapiens
  siRNA target sequence for LOC149420 (NM_152835.1,538-556).
gatgtcccacggctctaat

SEQ ID NO: 88596 - DNA, 19 bp, Homo sapiens
  siRNA target sequence for LOC149420 (NM_152835.1,572-590).
cagcttgtagaaacttcat

SEQ ID NO: 88597 - DNA, 19 bp, Homo sapiens
  siRNA target sequence for LOC149420 (NM_152835.1,654-672).
gtgacggaggagatatgaa

SEQ ID NO: 88598 - DNA, 19 bp, Homo sapiens
  siRNA target sequence for LOC149420 (NM_152835.1,688-706).
caggaaacccaatcgtaaa

SEQ ID NO: 88599 - DNA, 19 bp, Homo sapiens
  siRNA target sequence for LOC149420 (NM_152835.1,740-758).
gccctggctttcttgcata

SEQ ID NO: 88600 - DNA, 19 bp, Homo sapiens
  siRNA target sequence for LOC149420 (NM_152835.1,908-926).
cctgtcagtgtaaacaagt

SEQ ID NO: 88601 - DNA, 19 bp, Homo sapiens
  siRNA target sequence for LOC149420 (NM_152835.1,1042-1060).
ggaaaggatcacattcata

SEQ ID NO: 88602 - DNA, 19 bp, Homo sapiens
  siRNA target sequence for LOC149420 (NM_152835.1,1078-1096).
ggaactcttggggagttat

SEQ ID NO: 88603 - DNA, 19 bp, Homo sapiens
  siRNA target sequence for LOC149420 (NM_152835.1,1084-1102).
cttggggagttatgtaaaa

SEQ ID NO: 88604 - DNA, 19 bp, Homo sapiens
  siRNA target sequence for LOC149420 (NM_152835.1,1087-1105).
ggggagttatgtaaaacaa

SEQ ID NO: 88605 - DNA, 19 bp, Homo sapiens
  siRNA target sequence for LOC149420 (NM_152835.1,1194-1212).
ggcgaatgaaacaactgat

SEQ ID NO: 88606 - DNA, 19 bp, Homo sapiens
  siRNA target sequence for LOC149420 (NM_152835.1,1196-1214).
cgaatgaaacaactgatta

SEQ ID NO: 88607 - DNA, 19 bp, Homo sapiens
  siRNA target sequence for LOC149420 (NM_152835.1,1240-1258).
ggatcgtccagatgctttt

SEQ ID NO: 88608 - DNA, 19 bp, Homo sapiens
  siRNA target sequence for LOC149420 (NM_152835.1,1265-1283).
gaactcagattagtacaaa

SEQ ID NO: 88609 - DNA, 19 bp, Homo sapiens
  siRNA target sequence for LOC200383 (NM_145299.1,172-190).
caaacaaaattgaacacta

SEQ ID NO: 88610 - DNA, 19 bp, Homo sapiens
  siRNA target sequence for LOC200383 (NM_145299.1,240-258).
cctaactgaaaactactat

SEQ ID NO: 88611 - DNA, 19 bp, Homo sapiens
  siRNA target sequence for LOC200383 (NM_145299.1,255-273).
ctatgattcttttgataca

SEQ ID NO: 88612 - DNA, 19 bp, Homo sapiens
  siRNA target sequence for LOC200383 (NM_145299.1,399-417).
caaatacaaccgagatgtt

SEQ ID NO: 88613 - DNA, 19 bp, Homo sapiens
  siRNA target sequence for LOC200383 (NM_145299.1,408-426).
ccgagatgttccatttttt

SEQ ID NO: 88614 - DNA, 19 bp, Homo sapiens
  siRNA target sequence for LOC200383 (NM_145299.1,412-430).
gatgttccattttttgaaa

SEQ ID NO: 88615 - DNA, 19 bp, Homo sapiens
  siRNA target sequence for LOC200383 (NM_145299.1,454-472).
gtgcgctatgggtatctaa

SEQ ID NO: 88616 - DNA, 19 bp, Homo sapiens
  siRNA target sequence for LOC200383 (NM_145299.1,458-476).
gctatgggtatctaatgga

SEQ ID NO: 88617 - DNA, 19 bp, Homo sapiens
  siRNA target sequence for LOC200383 (NM_145299.1,459-477).
ctatgggtatctaatggaa

SEQ ID NO: 88618 - DNA, 19 bp, Homo sapiens
  siRNA target sequence for LOC200383 (NM_145299.1,481-499).
ctactggcagtcaagcatt

SEQ ID NO: 88619 - DNA, 19 bp, Homo sapiens
  siRNA target sequence for LOC200383 (NM_145299.1,492-510).
caagcattccgtgttgttt

SEQ ID NO: 88620 - DNA, 19 bp, Homo sapiens
  siRNA target sequence for LOC200383 (NM_145299.1,495-513).
gcattccgtgttgtttact

SEQ ID NO: 88621 - DNA, 19 bp, Homo sapiens
  siRNA target sequence for LOC200383 (NM_145299.1,501-519).
cgtgttgtttactggaata

SEQ ID NO: 88622 - DNA, 19 bp, Homo sapiens
  siRNA target sequence for LOC200383 (NM_145299.1,540-558).
gattgcaaaaggattgcta

SEQ ID NO: 88623 - DNA, 19 bp, Homo sapiens
  siRNA target sequence for LOC200383 (NM_145299.1,544-562).
gcaaaaggattgctaaata

SEQ ID NO: 88624 - DNA, 19 bp, Homo sapiens
  siRNA target sequence for LOC200383 (NM_145299.1,581-599).
gctatgtccctgtttatct

SEQ ID NO: 88625 - DNA, 19 bp, Homo sapiens
  siRNA target sequence for LOC200383 (NM_145299.1,623-641).
ctgcaaggacacaagagat

SEQ ID NO: 88626 - DNA, 19 bp, Homo sapiens
  siRNA target sequence for LOC200383 (NM_145299.1,685-703).
gcaccgggaaacaaacgaa

SEQ ID NO: 88627 - DNA, 19 bp, Homo sapiens
  siRNA target sequence for LOC200383 (NM_145299.1,686-704).
caccgggaaacaaacgaat

SEQ ID NO: 88628 - DNA, 19 bp, Homo sapiens
  siRNA target sequence for LOC200383 (NM_145299.1,689-707).
cgggaaacaaacgaattgt

SEQ ID NO: 88629 - DNA, 19 bp, Homo sapiens
  siRNA target sequence for LOC200383 (NM_145299.1,692-710).
gaaacaaacgaattgtgat

SEQ ID NO: 88630 - DNA, 19 bp, Homo sapiens
  siRNA target sequence for LOC200383 (NM_145299.1,696-714).
caaacgaattgtgattttt

SEQ ID NO: 88631 - DNA, 19 bp, Homo sapiens
  siRNA target sequence for LOC200383 (NM_145299.1,753-771).
ctctcagcctccgattgaa

SEQ ID NO: 88632 - DNA, 19 bp, Homo sapiens
  siRNA target sequence for LOC200383 (NM_145299.1,755-773).
ctcagcctccgattgaatt

SEQ ID NO: 88633 - DNA, 19 bp, Homo sapiens
  siRNA target sequence for LOC200383 (NM_145299.1,759-777).
gcctccgattgaattactt

SEQ ID NO: 88634 - DNA, 19 bp, Homo sapiens
  siRNA target sequence for LOC200383 (NM_145299.1,775-793).
cttcggcagtatcaagatt

SEQ ID NO: 88635 - DNA, 19 bp, Homo sapiens
  siRNA target sequence for LOC200383 (NM_145299.1,799-817).
ggattttatgacagaaaca

SEQ ID NO: 88636 - DNA, 19 bp, Homo sapiens
  siRNA target sequence for LOC200383 (NM_145299.1,970-988).
caggccatcttaaatggtt

SEQ ID NO: 88637 - DNA, 19 bp, Homo sapiens
  siRNA target sequence for LOC200383 (NM_145299.1,1042-1060).
gcctcagttgagatttata

SEQ ID NO: 88638 - DNA, 19 bp, Homo sapiens
  siRNA target sequence for LOC200383 (NM_145299.1,1043-1061).
cctcagttgagatttataa

SEQ ID NO: 88639 - DNA, 19 bp, Homo sapiens
  siRNA target sequence for LOC200383 (NM_145299.1,1091-1109).
ccgccaagtcccattatgt

SEQ ID NO: 88640 - DNA, 19 bp, Homo sapiens
  siRNA target sequence for LOC200383 (NM_145299.1,1100-1118).
cccattatgtctttaactt

SEQ ID NO: 88641 - DNA, 19 bp, Homo sapiens
  siRNA target sequence for LOC200383 (NM_145299.1,1168-1186).
gacctggaatattttttga

SEQ ID NO: 88642 - DNA, 19 bp, Homo sapiens
  siRNA target sequence for LOC200383 (NM_145299.1,1185-1203).
gaataagcccatcatattt

SEQ ID NO: 88643 - DNA, 19 bp, Homo sapiens
  siRNA target sequence for LOC200383 (NM_145299.1,1254-1272).
catgcctgatatagagaaa

SEQ ID NO: 88644 - DNA, 19 bp, Homo sapiens
  siRNA target sequence for LOC200383 (NM_145299.1,1297-1315).
cttgatgattataatctca

SEQ ID NO: 88645 - DNA, 19 bp, Homo sapiens
  siRNA target sequence for LOC200383 (NM_145299.1,1314-1332).
cacaaatcccaaagaagta

SEQ ID NO: 88646 - DNA, 19 bp, Homo sapiens
  siRNA target sequence for LOC200383 (NM_145299.1,1341-1359).
gttcttccaggatgctata

SEQ ID NO: 88647 - DNA, 19 bp, Homo sapiens
  siRNA target sequence for LOC200383 (NM_145299.1,1347-1365).
ccaggatgctatagaacat

SEQ ID NO: 88648 - DNA, 19 bp, Homo sapiens
  siRNA target sequence for LOC200383 (NM_145299.1,1381-1399).
cggatgatacgtcaagaaa

SEQ ID NO: 88649 - DNA, 19 bp, Homo sapiens
  siRNA target sequence for LOC200383 (NM_145299.1,1451-1469).
cgagacttgcagctcatat

SEQ ID NO: 88650 - DNA, 19 bp, Homo sapiens
  siRNA target sequence for LOC200383 (NM_145299.1,1452-1470).
gagacttgcagctcatata

SEQ ID NO: 88651 - DNA, 19 bp, Homo sapiens
  siRNA target sequence for LOC200383 (NM_145299.1,1463-1481).
ctcatatatgcggttacaa

SEQ ID NO: 88652 - DNA, 19 bp, Homo sapiens
  siRNA target sequence for LOC200383 (NM_145299.1,1465-1483).
catatatgcggttacaaat

SEQ ID NO: 88653 - DNA, 19 bp, Homo sapiens
  siRNA target sequence for LOC200383 (NM_145299.1,1534-1552).
gacctgaggaagttgtaca

SEQ ID NO: 88654 - DNA, 19 bp, Homo sapiens
  siRNA target sequence for LOC200383 (NM_145299.1,1536-1554).
cctgaggaagttgtacaaa

SEQ ID NO: 88655 - DNA, 19 bp, Homo sapiens
  siRNA target sequence for LOC200383 (NM_145299.1,1614-1632).
ggaggagttcctagaagat

SEQ ID NO: 88656 - DNA, 19 bp, Homo sapiens
  siRNA target sequence for LOC200383 (NM_145299.1,1618-1636).
gagttcctagaagatataa

SEQ ID NO: 88657 - DNA, 19 bp, Homo sapiens
  siRNA target sequence for LOC200383 (NM_145299.1,1620-1638).
gttcctagaagatataaat

SEQ ID NO: 88658 - DNA, 19 bp, Homo sapiens
  siRNA target sequence for LOC200383 (NM_145299.1,1652-1670).
caggtgaagtgcctaattt

SEQ ID NO: 88659 - DNA, 19 bp, Homo sapiens
  siRNA target sequence for LOC200383 (NM_145299.1,1654-1672).
ggtgaagtgcctaatttat

SEQ ID NO: 88660 - DNA, 19 bp, Homo sapiens
  siRNA target sequence for LOC200383 (NM_145299.1,1655-1673).
gtgaagtgcctaatttatt

SEQ ID NO: 88661 - DNA, 19 bp, Homo sapiens
  siRNA target sequence for LOC200383 (NM_145299.1,1762-1780).
ggatgtgccagagtagtta

SEQ ID NO: 88662 - DNA, 19 bp, Homo sapiens
  siRNA target sequence for LOC200383 (NM_145299.1,1763-1781).
gatgtgccagagtagttat

SEQ ID NO: 88663 - DNA, 19 bp, Homo sapiens
  siRNA target sequence for LOC200383 (NM_145299.1,1785-1803).
gctttatcacaaaaacgtt

SEQ ID NO: 88664 - DNA, 19 bp, Homo sapiens
  siRNA target sequence for LOC340371 (NM_178564.2,1202-1220).
gaatctacccactgatgaa

SEQ ID NO: 88665 - DNA, 19 bp, Homo sapiens
  siRNA target sequence for LOC84643 (NM_032559.2,483-501).
gcgatgatcccccagaaaa

SEQ ID NO: 88666 - DNA, 19 bp, Homo sapiens
  siRNA target sequence for LOC84643 (NM_032559.2,484-502).
cgatgatcccccagaaaaa

SEQ ID NO: 88667 - DNA, 19 bp, Homo sapiens
  siRNA target sequence for LOC84643 (NM_032559.2,657-675).
gccctcgatgtcaatacca

SEQ ID NO: 88668 - DNA, 19 bp, Homo sapiens
  siRNA target sequence for LOC84643 (NM_032559.2,676-694).
gaaaccccaactacgaaat

SEQ ID NO: 88669 - DNA, 19 bp, Homo sapiens
  siRNA target sequence for LOC84643 (NM_032559.2,844-862).
ccgtcccctcggacaatgt

SEQ ID NO: 88670 - DNA, 19 bp, Homo sapiens
  siRNA target sequence for LOC84643 (NM_032559.2,853-871).
cggacaatgtggttatggt

SEQ ID NO: 88671 - DNA, 19 bp, Homo sapiens
  siRNA target sequence for LOC84643 (NM_032559.2,1089-1107).
ggaacggcccaagattgtt

SEQ ID NO: 88672 - DNA, 19 bp, Homo sapiens
  siRNA target sequence for LOC84643 (NM_032559.2,1093-1111).
cggcccaagattgttctaa

SEQ ID NO: 88673 - DNA, 19 bp, Homo sapiens
  siRNA target sequence for LOC84643 (NM_032559.2,1184-1202).
caaagtctatgggacattt

SEQ ID NO: 88674 - DNA, 19 bp, Homo sapiens
  siRNA target sequence for LOC84643 (NM_032559.2,1215-1233).
gggggcaaggtgtatgatt

SEQ ID NO: 88675 - DNA, 19 bp, Homo sapiens
  siRNA target sequence for LOC84643 (NM_032559.2,1216-1234).
ggggcaaggtgtatgattt

SEQ ID NO: 88676 - DNA, 19 bp, Homo sapiens
  siRNA target sequence for LOC84643 (NM_032559.2,1218-1236).
ggcaaggtgtatgatttgt

SEQ ID NO: 88677 - DNA, 19 bp, Homo sapiens
  siRNA target sequence for LOC84643 (NM_032559.2,1334-1352).
gctgaacctggtggaaata

SEQ ID NO: 88678 - DNA, 19 bp, Homo sapiens
  siRNA target sequence for LOC84643 (NM_032559.2,1536-1554).
ggggcagagattaacaaga

SEQ ID NO: 88679 - DNA, 19 bp, Homo sapiens
  siRNA target sequence for LOC84643 (NM_032559.2,1544-1562).
gattaacaagagtcttcta

SEQ ID NO: 88680 - DNA, 19 bp, Homo sapiens
  siRNA target sequence for LOC84643 (NM_032559.2,1560-1578).
ctagccctcaaagaatgta

SEQ ID NO: 88681 - DNA, 19 bp, Homo sapiens
  siRNA target sequence for LOC84643 (NM_032559.2,1667-1685).
ctcctccacttgcatgatt

SEQ ID NO: 88682 - DNA, 19 bp, Homo sapiens
  siRNA target sequence for LOC84643 (NM_032559.2,1706-1724).
gacctcttgtgaaaacact

SEQ ID NO: 88683 - DNA, 19 bp, Homo sapiens
  siRNA target sequence for LOC84643 (NM_032559.2,1812-1830).
gaggcaccaaggatgttaa

SEQ ID NO: 88684 - DNA, 19 bp, Homo sapiens
  siRNA target sequence for LOC84643 (NM_032559.2,1858-1876).
cccttcagagggatgaatt

SEQ ID NO: 88685 - DNA, 19 bp, Homo sapiens
  siRNA target sequence for LOC84643 (NM_032559.2,1863-1881).
cagagggatgaatttatta

SEQ ID NO: 88686 - DNA, 19 bp, Homo sapiens
  siRNA target sequence for LOC84643 (NM_032559.2,2016-2034).
ggtggagtacaccatgata

SEQ ID NO: 88687 - DNA, 19 bp, Homo sapiens
  siRNA target sequence for LOC84643 (NM_032559.2,2017-2035).
gtggagtacaccatgatat

SEQ ID NO: 88688 - DNA, 19 bp, Homo sapiens
  siRNA target sequence for LOC84643 (NM_032559.2,2020-2038).
gagtacaccatgatattga

SEQ ID NO: 88689 - DNA, 19 bp, Homo sapiens
  siRNA target sequence for LOC84643 (NM_032559.2,2085-2103).
gctctgaccgagatccaaa

SEQ ID NO: 88690 - DNA, 19 bp, Homo sapiens
  siRNA target sequence for LOC84643 (NM_032559.2,2086-2104).
ctctgaccgagatccaaaa

SEQ ID NO: 88691 - DNA, 19 bp, Homo sapiens
  siRNA target sequence for LOC91807 (NM_182493.1,505-523).
ccacgttccagaaatcaaa

SEQ ID NO: 88692 - DNA, 19 bp, Homo sapiens
  siRNA target sequence for LOC91807 (NM_182493.1,581-599).
cagccctgaggagaataaa

SEQ ID NO: 88693 - DNA, 19 bp, Homo sapiens
  siRNA target sequence for LOC91807 (NM_182493.1,916-934).
cacccggcagggtcaatgt

SEQ ID NO: 88694 - DNA, 19 bp, Homo sapiens
  siRNA target sequence for LOC91807 (NM_182493.1,1118-1136).
gatctccatccacatacaa

SEQ ID NO: 88695 - DNA, 19 bp, Homo sapiens
  siRNA target sequence for LOC91807 (NM_182493.1,1123-1141).
ccatccacatacaagagat

SEQ ID NO: 88696 - DNA, 19 bp, Homo sapiens
  siRNA target sequence for LOC91807 (NM_182493.1,2061-2079).
ggacatcaaattaagatca

SEQ ID NO: 88697 - DNA, 19 bp, Homo sapiens
  siRNA target sequence for LOC91807 (NM_182493.1,2156-2174).
cccagaagtcgtcaattat

SEQ ID NO: 88698 - DNA, 19 bp, Homo sapiens
  siRNA target sequence for LOC91807 (NM_182493.1,2158-2176).
cagaagtcgtcaattatga

SEQ ID NO: 88699 - DNA, 19 bp, Homo sapiens
  siRNA target sequence for LOC91807 (NM_182493.1,2166-2184).
gtcaattatgagtttgtct

SEQ ID NO: 88700 - DNA, 19 bp, Homo sapiens
  siRNA target sequence for LOC91807 (NM_182493.1,2273-2291).
gaccatgaatttcattgta

SEQ ID NO: 88701 - DNA, 19 bp, Homo sapiens
  siRNA target sequence for LOC91807 (NM_182493.1,2359-2377).
cccggttgctggtcaaaga

SEQ ID NO: 88702 - DNA, 19 bp, Homo sapiens
  siRNA target sequence for LOC91807 (NM_182493.1,2361-2379).
cggttgctggtcaaagaga

SEQ ID NO: 88703 - DNA, 19 bp, Homo sapiens
  siRNA target sequence for LOC91807 (NM_182493.1,2362-2380).
ggttgctggtcaaagagaa

SEQ ID NO: 88704 - DNA, 19 bp, Homo sapiens
  siRNA target sequence for LOC91807 (NM_182493.1,2415-2433).
cacgagtggctgaataatt

SEQ ID NO: 88705 - DNA, 19 bp, Homo sapiens
  siRNA target sequence for LOC91807 (NM_182493.1,2435-2453).
gcctgccaaagcttcaaga

SEQ ID NO: 88706 - DNA, 19 bp, Homo sapiens
  siRNA target sequence for LOC91807 (NM_182493.1,2541-2559).
gccaacaggttaaggaaat

SEQ ID NO: 88707 - DNA, 19 bp, Homo sapiens
  siRNA target sequence for LOC91807 (NM_182493.1,2546-2564).
caggttaaggaaatttcca

SEQ ID NO: 88708 - DNA, 19 bp, Homo sapiens
  siRNA target sequence for LOC91862 (NM_052858.1,526-544).
ccccttcggagagatatct

SEQ ID NO: 88709 - DNA, 19 bp, Homo sapiens
  siRNA target sequence for LOC91862 (NM_052858.1,565-583).
gacgagaggaggtggaata

SEQ ID NO: 88710 - DNA, 19 bp, Homo sapiens
  siRNA target sequence for LOC91862 (NM_052858.1,567-585).
cgagaggaggtggaatatt

SEQ ID NO: 88711 - DNA, 19 bp, Homo sapiens
  siRNA target sequence for LOC91862 (NM_052858.1,646-664).
gagcctgctgccaaatgct

SEQ ID NO: 88712 - DNA, 19 bp, Homo sapiens
  siRNA target sequence for LOC91862 (NM_052858.1,753-771).
ggcatttactactatcagt

SEQ ID NO: 88713 - DNA, 19 bp, Homo sapiens
  siRNA target sequence for LOC91862 (NM_052858.1,770-788).
gttcggaggggcttacagt

SEQ ID NO: 88714 - DNA, 19 bp, Homo sapiens
  siRNA target sequence for LOC91862 (NM_052858.1,779-797).
ggcttacagtggctttgat

SEQ ID NO: 88715 - DNA, 19 bp, Homo sapiens
  siRNA target sequence for LOC91862 (NM_052858.1,1076-1094).
ggcgctgtaccaaagcaaa

SEQ ID NO: 88716 - DNA, 19 bp, Homo sapiens
  siRNA target sequence for LOC91862 (NM_052858.1,1117-1135).
gtttccacggagcagatat

SEQ ID NO: 88717 - DNA, 19 bp, Homo sapiens
  siRNA target sequence for LOC91862 (NM_052858.1,1121-1139).
ccacggagcagatatagga

SEQ ID NO: 88718 - DNA, 19 bp, Homo sapiens
  siRNA target sequence for LOC91862 (NM_052858.1,1204-1222).
gctaccgaaaagttaggaa

SEQ ID NO: 88719 - DNA, 19 bp, Homo sapiens
  siRNA target sequence for LOC92935 (NM_138395.1,316-334).
cgagcacgggctgaagatt

SEQ ID NO: 88720 - DNA, 19 bp, Homo sapiens
  siRNA target sequence for LOC92935 (NM_138395.1,517-535).
ctacaagggcgtctatgaa

SEQ ID NO: 88721 - DNA, 19 bp, Homo sapiens
  siRNA target sequence for LOC92935 (NM_138395.1,526-544).
cgtctatgaaggttggtat

SEQ ID NO: 88722 - DNA, 19 bp, Homo sapiens
  siRNA target sequence for LOC92935 (NM_138395.1,597-615).
gcccatcgggggattcgtt

SEQ ID NO: 88723 - DNA, 19 bp, Homo sapiens
  siRNA target sequence for LOC92935 (NM_138395.1,598-616).
cccatcgggggattcgttt

SEQ ID NO: 88724 - DNA, 19 bp, Homo sapiens
  siRNA target sequence for LOC92935 (NM_138395.1,607-625).
ggattcgtttcctgtatct

SEQ ID NO: 88725 - DNA, 19 bp, Homo sapiens
  siRNA target sequence for LOC92935 (NM_138395.1,732-750).
cgatcacccccgaaccatt

SEQ ID NO: 88726 - DNA, 19 bp, Homo sapiens
  siRNA target sequence for LOC92935 (NM_138395.1,736-754).
cacccccgaaccatttcat

SEQ ID NO: 88727 - DNA, 19 bp, Homo sapiens
  siRNA target sequence for LOC92935 (NM_138395.1,747-765).
catttcatcacgtagttct

SEQ ID NO: 88728 - DNA, 19 bp, Homo sapiens
  siRNA target sequence for LOC92935 (NM_138395.1,889-907).
caactacctcactgtaatt

SEQ ID NO: 88729 - DNA, 19 bp, Homo sapiens
  siRNA target sequence for LOC92935 (NM_138395.1,943-961).
ggccacctctcatatcata

SEQ ID NO: 88730 - DNA, 19 bp, Homo sapiens
  siRNA target sequence for LOC92935 (NM_138395.1,948-966).
cctctcatatcataggtaa

SEQ ID NO: 88731 - DNA, 19 bp, Homo sapiens
  siRNA target sequence for LOC92935 (NM_138395.1,962-980).
ggtaaggacattctcaaat

SEQ ID NO: 88732 - DNA, 19 bp, Homo sapiens
  siRNA target sequence for LOC92935 (NM_138395.1,1064-1082).
gtctgtggccaaaagatgt

SEQ ID NO: 88733 - DNA, 19 bp, Homo sapiens
  siRNA target sequence for LOC92935 (NM_138395.1,1183-1201).
ggactgtgactactatgat

SEQ ID NO: 88734 - DNA, 19 bp, Homo sapiens
  siRNA target sequence for LOC92935 (NM_138395.1,1242-1260).
ccttgggaggtctcttgaa

SEQ ID NO: 88735 - DNA, 19 bp, Homo sapiens
  siRNA target sequence for LOC92935 (NM_138395.1,1359-1377).
gtgctcaggcagaggatta

SEQ ID NO: 88736 - DNA, 19 bp, Homo sapiens
  siRNA target sequence for LOC92935 (NM_138395.1,1414-1432).
ggtagcagaccactatgat

SEQ ID NO: 88737 - DNA, 19 bp, Homo sapiens
  siRNA target sequence for LOC92935 (NM_138395.1,1415-1433).
gtagcagaccactatgata

SEQ ID NO: 88738 - DNA, 19 bp, Homo sapiens
  siRNA target sequence for LOC92935 (NM_138395.1,1418-1436).
gcagaccactatgataact

SEQ ID NO: 88739 - DNA, 19 bp, Homo sapiens
  siRNA target sequence for LOC92935 (NM_138395.1,1419-1437).
cagaccactatgataactt

SEQ ID NO: 88740 - DNA, 19 bp, Homo sapiens
  siRNA target sequence for LOC92935 (NM_138395.1,1430-1448).
gataactttcggatatata

SEQ ID NO: 88741 - DNA, 19 bp, Homo sapiens
  siRNA target sequence for LOC92935 (NM_138395.1,1471-1489).
ctgtgtccggcaaactaat

SEQ ID NO: 88742 - DNA, 19 bp, Homo sapiens
  siRNA target sequence for LOC92935 (NM_138395.1,1475-1493).
gtccggcaaactaatggtt

SEQ ID NO: 88743 - DNA, 19 bp, Homo sapiens
  siRNA target sequence for LOC92935 (NM_138395.1,1477-1495).
ccggcaaactaatggtttt

SEQ ID NO: 88744 - DNA, 19 bp, Homo sapiens
  siRNA target sequence for LOC92935 (NM_138395.1,1479-1497).
ggcaaactaatggttttgt

SEQ ID NO: 88745 - DNA, 19 bp, Homo sapiens
  siRNA target sequence for LONP (NM_031490.2,376-394).
cccactacactctgttgat

SEQ ID NO: 88746 - DNA, 19 bp, Homo sapiens
  siRNA target sequence for LONP (NM_031490.2,406-424).
gccgtttccagattgtaca

SEQ ID NO: 88747 - DNA, 19 bp, Homo sapiens
  siRNA target sequence for LONP (NM_031490.2,414-432).
cagattgtacaggtcttaa

SEQ ID NO: 88748 - DNA, 19 bp, Homo sapiens
  siRNA target sequence for LONP (NM_031490.2,485-503).
gtttcccaacacctgtaaa

SEQ ID NO: 88749 - DNA, 19 bp, Homo sapiens
  siRNA target sequence for LONP (NM_031490.2,525-543).
ctatcagagcagttttaca

SEQ ID NO: 88750 - DNA, 19 bp, Homo sapiens
  siRNA target sequence for LONP (NM_031490.2,549-567).
gcagtacaattggttgaaa

SEQ ID NO: 88751 - DNA, 19 bp, Homo sapiens
  siRNA target sequence for LONP (NM_031490.2,550-568).
cagtacaattggttgaaat

SEQ ID NO: 88752 - DNA, 19 bp, Homo sapiens
  siRNA target sequence for LONP (NM_031490.2,552-570).
gtacaattggttgaaatgt

SEQ ID NO: 88753 - DNA, 19 bp, Homo sapiens
  siRNA target sequence for LONP (NM_031490.2,580-598).
ctgtccctgcagttgctaa

SEQ ID NO: 88754 - DNA, 19 bp, Homo sapiens
  siRNA target sequence for LONP (NM_031490.2,582-600).
gtccctgcagttgctaaat

SEQ ID NO: 88755 - DNA, 19 bp, Homo sapiens
  siRNA target sequence for LONP (NM_031490.2,602-620).
gagacgtcttttagatagt

SEQ ID NO: 88756 - DNA, 19 bp, Homo sapiens
  siRNA target sequence for LONP (NM_031490.2,604-622).
gacgtcttttagatagtct

SEQ ID NO: 88757 - DNA, 19 bp, Homo sapiens
  siRNA target sequence for LONP (NM_031490.2,642-660).
gacatcttgacatcaatta

SEQ ID NO: 88758 - DNA, 19 bp, Homo sapiens
  siRNA target sequence for LONP (NM_031490.2,708-726).
ctagaggagcggttcaaga

SEQ ID NO: 88759 - DNA, 19 bp, Homo sapiens
  siRNA target sequence for LONP (NM_031490.2,711-729).
gaggagcggttcaagatga

SEQ ID NO: 88760 - DNA, 19 bp, Homo sapiens
  siRNA target sequence for LONP (NM_031490.2,714-732).
gagcggttcaagatgacta

SEQ ID NO: 88761 - DNA, 19 bp, Homo sapiens
  siRNA target sequence for LONP (NM_031490.2,716-734).
gcggttcaagatgactata

SEQ ID NO: 88762 - DNA, 19 bp, Homo sapiens
  siRNA target sequence for LONP (NM_031490.2,719-737).
gttcaagatgactatacca

SEQ ID NO: 88763 - DNA, 19 bp, Homo sapiens
  siRNA target sequence for LONP (NM_031490.2,740-758).
gcttgtcagacaaattgaa

SEQ ID NO: 88764 - DNA, 19 bp, Homo sapiens
  siRNA target sequence for LONP (NM_031490.2,759-777).
ggcctgaaattgcttcaaa

SEQ ID NO: 88765 - DNA, 19 bp, Homo sapiens
  siRNA target sequence for LONP (NM_031490.2,804-822).
gataagagggttatagcaa

SEQ ID NO: 88766 - DNA, 19 bp, Homo sapiens
  siRNA target sequence for LONP (NM_031490.2,825-843).
cgccctattaggagaatta

SEQ ID NO: 88767 - DNA, 19 bp, Homo sapiens
  siRNA target sequence for LONP (NM_031490.2,937-955).
cagagcaggcccataaagt

SEQ ID NO: 88768 - DNA, 19 bp, Homo sapiens
  siRNA target sequence for LONP (NM_031490.2,939-957).
gagcaggcccataaagtct

SEQ ID NO: 88769 - DNA, 19 bp, Homo sapiens
  siRNA target sequence for LONP (NM_031490.2,947-965).
ccataaagtctgtgtcaaa

SEQ ID NO: 88770 - DNA, 19 bp, Homo sapiens
  siRNA target sequence for LONP (NM_031490.2,1011-1029).
gctctgactagaaattatt

SEQ ID NO: 88771 - DNA, 19 bp, Homo sapiens
  siRNA target sequence for LONP (NM_031490.2,1094-1112).
ccggattcttctggataat

SEQ ID NO: 88772 - DNA, 19 bp, Homo sapiens
  siRNA target sequence for LONP (NM_031490.2,1115-1133).
ccattacgccatggaaaaa

SEQ ID NO: 88773 - DNA, 19 bp, Homo sapiens
  siRNA target sequence for LONP (NM_031490.2,1116-1134).
cattacgccatggaaaaat

SEQ ID NO: 88774 - DNA, 19 bp, Homo sapiens
  siRNA target sequence for LONP (NM_031490.2,1184-1202).
cctgaagggcccaatccta

SEQ ID NO: 88775 - DNA, 19 bp, Homo sapiens
  siRNA target sequence for LONP (NM_031490.2,1185-1203).
ctgaagggcccaatcctat

SEQ ID NO: 88776 - DNA, 19 bp, Homo sapiens
  siRNA target sequence for LONP (NM_031490.2,1190-1208).
gggcccaatcctatgcttt

SEQ ID NO: 88777 - DNA, 19 bp, Homo sapiens
  siRNA target sequence for LONP (NM_031490.2,1193-1211).
cccaatcctatgctttgtt

SEQ ID NO: 88778 - DNA, 19 bp, Homo sapiens
  siRNA target sequence for LONP (NM_031490.2,1394-1412).
caacccagtgttcctatta

SEQ ID NO: 88779 - DNA, 19 bp, Homo sapiens
  siRNA target sequence for LONP (NM_031490.2,1424-1442).
caaactgggaaaaagtcta

SEQ ID NO: 88780 - DNA, 19 bp, Homo sapiens
  siRNA target sequence for LONP (NM_031490.2,1482-1500).
cctgaacaaaaccataact

SEQ ID NO: 88781 - DNA, 19 bp, Homo sapiens
  siRNA target sequence for LONP (NM_031490.2,1494-1512).
cataacttcacagatcatt

SEQ ID NO: 88782 - DNA, 19 bp, Homo sapiens
  siRNA target sequence for LONP (NM_031490.2,1595-1613).
ggacagaatggagatcatt

SEQ ID NO: 88783 - DNA, 19 bp, Homo sapiens
  siRNA target sequence for LONP (NM_031490.2,1737-1755).
gacatcatcaccaggtata

SEQ ID NO: 88784 - DNA, 19 bp, Homo sapiens
  siRNA target sequence for LONP (NM_031490.2,1770-1788).
gttcgttctctggatagaa

SEQ ID NO: 88785 - DNA, 19 bp, Homo sapiens
  siRNA target sequence for LONP (NM_031490.2,1828-1846).
cagaaggacagcataagga

SEQ ID NO: 88786 - DNA, 19 bp, Homo sapiens
  siRNA target sequence for LONP (NM_031490.2,1850-1868).
caagttggaccgttctgat

SEQ ID NO: 88787 - DNA, 19 bp, Homo sapiens
  siRNA target sequence for LONP (NM_031490.2,1888-1906).
gcagagaacacatcttaga

SEQ ID NO: 88788 - DNA, 19 bp, Homo sapiens
  siRNA target sequence for LONP (NM_031490.2,1956-1974).
cctgaaatgccgattttga

SEQ ID NO: 88789 - DNA, 19 bp, Homo sapiens
  siRNA target sequence for LONP (NM_031490.2,1966-1984).
cgattttgattgatttcca

SEQ ID NO: 88790 - DNA, 19 bp, Homo sapiens
  siRNA target sequence for LONP (NM_031490.2,2048-2066).
gccaggagtagcaataggt

SEQ ID NO: 88791 - DNA, 19 bp, Homo sapiens
  siRNA target sequence for LONP (NM_031490.2,2049-2067).
ccaggagtagcaataggtt

SEQ ID NO: 88792 - DNA, 19 bp, Homo sapiens
  siRNA target sequence for LONP (NM_031490.2,2079-2097).
cccttaggtggagaaatca

SEQ ID NO: 88793 - DNA, 19 bp, Homo sapiens
  siRNA target sequence for LONP (NM_031490.2,2080-2098).
ccttaggtggagaaatcat

SEQ ID NO: 88794 - DNA, 19 bp, Homo sapiens
  siRNA target sequence for LONP (NM_031490.2,2105-2123).
ggaggcgagtcgaatggat

SEQ ID NO: 88795 - DNA, 19 bp, Homo sapiens
  siRNA target sequence for LONP (NM_031490.2,2121-2139).
gatggcgagggccagttaa

SEQ ID NO: 88796 - DNA, 19 bp, Homo sapiens
  siRNA target sequence for LONP (NM_031490.2,2125-2143).
gcgagggccagttaactct

SEQ ID NO: 88797 - DNA, 19 bp, Homo sapiens
  siRNA target sequence for LONP (NM_031490.2,2202-2220).
cgcagcaacgcaaagaagt

SEQ ID NO: 88798 - DNA, 19 bp, Homo sapiens
  siRNA target sequence for LONP (NM_031490.2,2319-2337).
gctggagttaccatagtaa

SEQ ID NO: 88799 - DNA, 19 bp, Homo sapiens
  siRNA target sequence for LONP (NM_031490.2,2467-2485).
cgggactgaagcaagtcat

SEQ ID NO: 88800 - DNA, 19 bp, Homo sapiens
  siRNA target sequence for LONP (NM_031490.2,2468-2486).
gggactgaagcaagtcatt

SEQ ID NO: 88801 - DNA, 19 bp, Homo sapiens
  siRNA target sequence for LONP (NM_031490.2,2469-2487).
ggactgaagcaagtcatta

SEQ ID NO: 88802 - DNA, 19 bp, Homo sapiens
  siRNA target sequence for LONP (NM_031490.2,2470-2488).
gactgaagcaagtcattat

SEQ ID NO: 88803 - DNA, 19 bp, Homo sapiens
  siRNA target sequence for LONP (NM_031490.2,2474-2492).
gaagcaagtcattattcct

SEQ ID NO: 88804 - DNA, 19 bp, Homo sapiens
  siRNA target sequence for LONP (NM_031490.2,2491-2509).
ctcggagaaatgaaaaaga

SEQ ID NO: 88805 - DNA, 19 bp, Homo sapiens
  siRNA target sequence for LONP (NM_031490.2,2527-2545).
gcaacgtacgacaggattt

SEQ ID NO: 88806 - DNA, 19 bp, Homo sapiens
  siRNA target sequence for LONP (NM_031490.2,2528-2546).
caacgtacgacaggattta

SEQ ID NO: 88807 - DNA, 19 bp, Homo sapiens
  siRNA target sequence for LONP (NM_031490.2,2531-2549).
cgtacgacaggatttaagt

SEQ ID NO: 88808 - DNA, 19 bp, Homo sapiens
  siRNA target sequence for LONP (NM_031490.2,2536-2554).
gacaggatttaagttttgt

SEQ ID NO: 88809 - DNA, 19 bp, Homo sapiens
  siRNA target sequence for LONP (NM_031490.2,2570-2588).
ggatgaggttcttaatgca

SEQ ID NO: 88810 - DNA, 19 bp, Homo sapiens
  siRNA target sequence for LONP (NM_031490.2,2576-2594).
ggttcttaatgcagctttt

SEQ ID NO: 88811 - DNA, 19 bp, Homo sapiens
  siRNA target sequence for LONP (NM_031490.2,2618-2636).
cagacctggtctgttaaat

SEQ ID NO: 88812 - DNA, 19 bp, Homo sapiens
  siRNA target sequence for LONP (NM_031490.2,2623-2641).
ctggtctgttaaatagcaa

SEQ ID NO: 88813 - DNA, 19 bp, Homo sapiens
  siRNA target sequence for LTK (NM_002344.1,333-351).
ccagcctccccgctgaatt

SEQ ID NO: 88814 - DNA, 19 bp, Homo sapiens
  siRNA target sequence for LTK (NM_002344.1,365-383).
ggggtcttggctgttttct

SEQ ID NO: 88815 - DNA, 19 bp, Homo sapiens
  siRNA target sequence for LTK (NM_002344.1,366-384).
gggtcttggctgttttcta

SEQ ID NO: 88816 - DNA, 19 bp, Homo sapiens
  siRNA target sequence for LTK (NM_002344.1,1291-1309).
caacactgagcctccttat

SEQ ID NO: 88817 - DNA, 19 bp, Homo sapiens
  siRNA target sequence for LTK (NM_002344.1,1294-1312).
cactgagcctccttatggt

SEQ ID NO: 88818 - DNA, 19 bp, Homo sapiens
  siRNA target sequence for LTK (NM_002344.1,1500-1518).
gtttccccagccaatgtta

SEQ ID NO: 88819 - DNA, 19 bp, Homo sapiens
  siRNA target sequence for LTK (NM_002344.1,1559-1577).
gtatgagggactggtaatt

SEQ ID NO: 88820 - DNA, 19 bp, Homo sapiens
  siRNA target sequence for LTK (NM_002344.1,1600-1618).
ccctgcaggtagctatcaa

SEQ ID NO: 88821 - DNA, 19 bp, Homo sapiens
  siRNA target sequence for LTK (NM_002344.1,1602-1620).
ctgcaggtagctatcaaga

SEQ ID NO: 88822 - DNA, 19 bp, Homo sapiens
  siRNA target sequence for LTK (NM_002344.1,1684-1702).
gcaagtttcgccatcagaa

SEQ ID NO: 88823 - DNA, 19 bp, Homo sapiens
  siRNA target sequence for LTK (NM_002344.1,1880-1898).
ccactacctggaggaaaat

SEQ ID NO: 88824 - DNA, 19 bp, Homo sapiens
  siRNA target sequence for LTK (NM_002344.1,2238-2256).
cctgtgtaccgcatcatga

SEQ ID NO: 88825 - DNA, 19 bp, Homo sapiens
  siRNA target sequence for LTK (NM_002344.1,2334-2352).
gacccggatgtgctgaatt

SEQ ID NO: 88826 - DNA, 19 bp, Homo sapiens
  siRNA target sequence for LTK (NM_002344.1,2336-2354).
cccggatgtgctgaattca

SEQ ID NO: 88827 - DNA, 19 bp, Homo sapiens
  siRNA target sequence for LTK (NM_002344.1,2404-2422).
ggctggggaacagatcttt

SEQ ID NO: 88828 - DNA, 19 bp, Homo sapiens
  siRNA target sequence for LYK5 (NM_153335.3,277-295).
gtcatttcttaccaatgat

SEQ ID NO: 88829 - DNA, 19 bp, Homo sapiens
  siRNA target sequence for LYK5 (NM_153335.3,298-316).
gagctcagagtcaatagca

SEQ ID NO: 88830 - DNA, 19 bp, Homo sapiens
  siRNA target sequence for LYK5 (NM_153335.3,370-388).
cgagctgctcactgtgata

SEQ ID NO: 88831 - DNA, 19 bp, Homo sapiens
  siRNA target sequence for LYK5 (NM_153335.3,452-470).
gtgactgtacggaggatta

SEQ ID NO: 88832 - DNA, 19 bp, Homo sapiens
  siRNA target sequence for LYK5 (NM_153335.3,456-474).
ctgtacggaggattaacct

SEQ ID NO: 88833 - DNA, 19 bp, Homo sapiens
  siRNA target sequence for LYK5 (NM_153335.3,472-490).
cctagaagcttgttccaat

SEQ ID NO: 88834 - DNA, 19 bp, Homo sapiens
  siRNA target sequence for LYK5 (NM_153335.3,476-494).
gaagcttgttccaatgaga

SEQ ID NO: 88835 - DNA, 19 bp, Homo sapiens
  siRNA target sequence for LYK5 (NM_153335.3,547-565).
caatatcgtgccatatcga

SEQ ID NO: 88836 - DNA, 19 bp, Homo sapiens
  siRNA target sequence for LYK5 (NM_153335.3,556-574).
gccatatcgagccactttt

SEQ ID NO: 88837 - DNA, 19 bp, Homo sapiens
  siRNA target sequence for LYK5 (NM_153335.3,557-575).
ccatatcgagccactttta

SEQ ID NO: 88838 - DNA, 19 bp, Homo sapiens
  siRNA target sequence for LYK5 (NM_153335.3,558-576).
catatcgagccacttttat

SEQ ID NO: 88839 - DNA, 19 bp, Homo sapiens
  siRNA target sequence for LYK5 (NM_153335.3,590-608).
ctgtgggttgtcacatcat

SEQ ID NO: 88840 - DNA, 19 bp, Homo sapiens
  siRNA target sequence for LYK5 (NM_153335.3,594-612).
gggttgtcacatcattcat

SEQ ID NO: 88841 - DNA, 19 bp, Homo sapiens
  siRNA target sequence for LYK5 (NM_153335.3,613-631).
ggcatacggttctgcaaaa

SEQ ID NO: 88842 - DNA, 19 bp, Homo sapiens
  siRNA target sequence for LYK5 (NM_153335.3,615-633).
catacggttctgcaaaaga

SEQ ID NO: 88843 - DNA, 19 bp, Homo sapiens
  siRNA target sequence for LYK5 (NM_153335.3,649-667).
cttcatggatggcatgaat

SEQ ID NO: 88844 - DNA, 19 bp, Homo sapiens
  siRNA target sequence for LYK5 (NM_153335.3,721-739).
ccaccacatgggatatgta

SEQ ID NO: 88845 - DNA, 19 bp, Homo sapiens
  siRNA target sequence for LYK5 (NM_153335.3,854-872).
cacgattttcccaagtaca

SEQ ID NO: 88846 - DNA, 19 bp, Homo sapiens
  siRNA target sequence for LYK5 (NM_153335.3,989-1007).
catgtcccctttaaggata

SEQ ID NO: 88847 - DNA, 19 bp, Homo sapiens
  siRNA target sequence for LYN (NM_002350.1,333-351).
gagtgacgatggagtagat

SEQ ID NO: 88848 - DNA, 19 bp, Homo sapiens
  siRNA target sequence for LYN (NM_002350.1,337-355).
gacgatggagtagatttga

SEQ ID NO: 88849 - DNA, 19 bp, Homo sapiens
  siRNA target sequence for LYN (NM_002350.1,367-385).
gtacgtaatactgaaagaa

SEQ ID NO: 88850 - DNA, 19 bp, Homo sapiens
  siRNA target sequence for LYN (NM_002350.1,377-395).
ctgaaagaactatttatgt

SEQ ID NO: 88851 - DNA, 19 bp, Homo sapiens
  siRNA target sequence for LYN (NM_002350.1,379-397).
gaaagaactatttatgtga

SEQ ID NO: 88852 - DNA, 19 bp, Homo sapiens
  siRNA target sequence for LYN (NM_002350.1,398-416).
gagatccaacgtccaataa

SEQ ID NO: 88853 - DNA, 19 bp, Homo sapiens
  siRNA target sequence for LYN (NM_002350.1,425-443).
ggccagttccagaatctca

SEQ ID NO: 88854 - DNA, 19 bp, Homo sapiens
  siRNA target sequence for LYN (NM_002350.1,454-472).
ggacagaggtttcaaacta

SEQ ID NO: 88855 - DNA, 19 bp, Homo sapiens
  siRNA target sequence for LYN (NM_002350.1,529-547).
cacccggacgacttgtctt

SEQ ID NO: 88856 - DNA, 19 bp, Homo sapiens
  siRNA target sequence for LYN (NM_002350.1,532-550).
ccggacgacttgtctttca

SEQ ID NO: 88857 - DNA, 19 bp, Homo sapiens
  siRNA target sequence for LYN (NM_002350.1,533-551).
cggacgacttgtctttcaa

SEQ ID NO: 88858 - DNA, 19 bp, Homo sapiens
  siRNA target sequence for LYN (NM_002350.1,535-553).
gacgacttgtctttcaaga

SEQ ID NO: 88859 - DNA, 19 bp, Homo sapiens
  siRNA target sequence for LYN (NM_002350.1,537-555).
cgacttgtctttcaagaaa

SEQ ID NO: 88860 - DNA, 19 bp, Homo sapiens
  siRNA target sequence for LYN (NM_002350.1,654-672).
caaactcaacaccttagaa

SEQ ID NO: 88861 - DNA, 19 bp, Homo sapiens
  siRNA target sequence for LYN (NM_002350.1,681-699).
gtggtttttcaaggatata

SEQ ID NO: 88862 - DNA, 19 bp, Homo sapiens
  siRNA target sequence for LYN (NM_002350.1,743-761).
gcgctggagctttccttat

SEQ ID NO: 88863 - DNA, 19 bp, Homo sapiens
  siRNA target sequence for LYN (NM_002350.1,744-762).
cgctggagctttccttatt

SEQ ID NO: 88864 - DNA, 19 bp, Homo sapiens
  siRNA target sequence for LYN (NM_002350.1,745-763).
gctggagctttccttatta

SEQ ID NO: 88865 - DNA, 19 bp, Homo sapiens
  siRNA target sequence for LYN (NM_002350.1,749-767).
gagctttccttattagaga

SEQ ID NO: 88866 - DNA, 19 bp, Homo sapiens
  siRNA target sequence for LYN (NM_002350.1,817-835).
cctgtgcatggtgatgtta

SEQ ID NO: 88867 - DNA, 19 bp, Homo sapiens
  siRNA target sequence for LYN (NM_002350.1,818-836).
ctgtgcatggtgatgttat

SEQ ID NO: 88868 - DNA, 19 bp, Homo sapiens
  siRNA target sequence for LYN (NM_002350.1,820-838).
gtgcatggtgatgttatta

SEQ ID NO: 88869 - DNA, 19 bp, Homo sapiens
  siRNA target sequence for LYN (NM_002350.1,902-920).
cctgtatcagcgacatgat

SEQ ID NO: 88870 - DNA, 19 bp, Homo sapiens
  siRNA target sequence for LYN (NM_002350.1,905-923).
gtatcagcgacatgattaa

SEQ ID NO: 88871 - DNA, 19 bp, Homo sapiens
  siRNA target sequence for LYN (NM_002350.1,909-927).
cagcgacatgattaaacat

SEQ ID NO: 88872 - DNA, 19 bp, Homo sapiens
  siRNA target sequence for LYN (NM_002350.1,911-929).
gcgacatgattaaacatta

SEQ ID NO: 88873 - DNA, 19 bp, Homo sapiens
  siRNA target sequence for LYN (NM_002350.1,943-961).
gatggcttgtgcagaagat

SEQ ID NO: 88874 - DNA, 19 bp, Homo sapiens
  siRNA target sequence for LYN (NM_002350.1,963-981).
ggagaaggcttgtattagt

SEQ ID NO: 88875 - DNA, 19 bp, Homo sapiens
  siRNA target sequence for LYN (NM_002350.1,1128-1146).
gaagccaggaactatgtct

SEQ ID NO: 88876 - DNA, 19 bp, Homo sapiens
  siRNA target sequence for LYN (NM_002350.1,1352-1370).
cagagggaatggcatacat

SEQ ID NO: 88877 - DNA, 19 bp, Homo sapiens
  siRNA target sequence for LYN (NM_002350.1,1493-1511).
caagggaaggtgctaagtt

SEQ ID NO: 88878 - DNA, 19 bp, Homo sapiens
  siRNA target sequence for LYN (NM_002350.1,1501-1519).
ggtgctaagttccctatta

SEQ ID NO: 88879 - DNA, 19 bp, Homo sapiens
  siRNA target sequence for LYN (NM_002350.1,1504-1522).
gctaagttccctattaagt

SEQ ID NO: 88880 - DNA, 19 bp, Homo sapiens
  siRNA target sequence for LYN (NM_002350.1,1526-1544).
cggctccagaagcaatcaa

SEQ ID NO: 88881 - DNA, 19 bp, Homo sapiens
  siRNA target sequence for LYN (NM_002350.1,1580-1598).
cctttggaatcctcctata

SEQ ID NO: 88882 - DNA, 19 bp, Homo sapiens
  siRNA target sequence for LYN (NM_002350.1,1586-1604).
gaatcctcctatacgaaat

SEQ ID NO: 88883 - DNA, 19 bp, Homo sapiens
  siRNA target sequence for LYN (NM_002350.1,1591-1609).
ctcctatacgaaattgtca

SEQ ID NO: 88884 - DNA, 19 bp, Homo sapiens
  siRNA target sequence for LYN (NM_002350.1,1625-1643).
cctacccagggagaactaa

SEQ ID NO: 88885 - DNA, 19 bp, Homo sapiens
  siRNA target sequence for LYN (NM_002350.1,1626-1644).
ctacccagggagaactaat

SEQ ID NO: 88886 - DNA, 19 bp, Homo sapiens
  siRNA target sequence for LYN (NM_002350.1,1708-1726).
gagctctatgacattatga

SEQ ID NO: 88887 - DNA, 19 bp, Homo sapiens
  siRNA target sequence for LYN (NM_002350.1,1753-1771).
gagagaccaacgtttgact

SEQ ID NO: 88888 - DNA, 19 bp, Homo sapiens
  siRNA target sequence for LYN (NM_002350.1,1757-1775).
gaccaacgtttgactactt

SEQ ID NO: 88889 - DNA, 19 bp, Homo sapiens
  siRNA target sequence for LYN (NM_002350.1,1760-1778).
caacgtttgactacttaca

SEQ ID NO: 88890 - DNA, 19 bp, Homo sapiens
  siRNA target sequence for LYN (NM_002350.1,1777-1795).
cagagcgtcctggatgatt

SEQ ID NO: 88891 - DNA, 19 bp, Homo sapiens
  siRNA target sequence for LYN (NM_002350.1,1805-1823).
ccacggaagggcaatacca

SEQ ID NO: 88892 - DNA, 19 bp, Homo sapiens
  siRNA target sequence for MAK (NM_005906.3,270-288).
cgtatgggagtgtgcttat

SEQ ID NO: 88893 - DNA, 19 bp, Homo sapiens
  siRNA target sequence for MAK (NM_005906.3,281-299).
gtgcttatgggcaagagta

SEQ ID NO: 88894 - DNA, 19 bp, Homo sapiens
  siRNA target sequence for MAK (NM_005906.3,283-301).
gcttatgggcaagagtaat

SEQ ID NO: 88895 - DNA, 19 bp, Homo sapiens
  siRNA target sequence for MAK (NM_005906.3,364-382).
catgaacttgagagaagtt

SEQ ID NO: 88896 - DNA, 19 bp, Homo sapiens
  siRNA target sequence for MAK (NM_005906.3,370-388).
cttgagagaagttaagtct

SEQ ID NO: 88897 - DNA, 19 bp, Homo sapiens
  siRNA target sequence for MAK (NM_005906.3,385-403).
gtctctgaagaaacttaat

SEQ ID NO: 88898 - DNA, 19 bp, Homo sapiens
  siRNA target sequence for MAK (NM_005906.3,662-680).
ggacttgcaagagaattaa

SEQ ID NO: 88899 - DNA, 19 bp, Homo sapiens
  siRNA target sequence for MAK (NM_005906.3,665-683).
cttgcaagagaattaaggt

SEQ ID NO: 88900 - DNA, 19 bp, Homo sapiens
  siRNA target sequence for MAK (NM_005906.3,682-700).
gtcacagccaccatacact

SEQ ID NO: 88901 - DNA, 19 bp, Homo sapiens
  siRNA target sequence for MAK (NM_005906.3,686-704).
cagccaccatacactgatt

SEQ ID NO: 88902 - DNA, 19 bp, Homo sapiens
  siRNA target sequence for MAK (NM_005906.3,688-706).
gccaccatacactgattat

SEQ ID NO: 88903 - DNA, 19 bp, Homo sapiens
  siRNA target sequence for MAK (NM_005906.3,745-763).
gagatcttcagtttatagt

SEQ ID NO: 88904 - DNA, 19 bp, Homo sapiens
  siRNA target sequence for MAK (NM_005906.3,780-798).
gggctgttggaagtatcat

SEQ ID NO: 88905 - DNA, 19 bp, Homo sapiens
  siRNA target sequence for MAK (NM_005906.3,792-810).
gtatcatggctgaactcta

SEQ ID NO: 88906 - DNA, 19 bp, Homo sapiens
  siRNA target sequence for MAK (NM_005906.3,799-817).
ggctgaactctatatgtta

SEQ ID NO: 88907 - DNA, 19 bp, Homo sapiens
  siRNA target sequence for MAK (NM_005906.3,800-818).
gctgaactctatatgttaa

SEQ ID NO: 88908 - DNA, 19 bp, Homo sapiens
  siRNA target sequence for MAK (NM_005906.3,840-858).
gtgaggtcgatgaaatctt

SEQ ID NO: 88909 - DNA, 19 bp, Homo sapiens
  siRNA target sequence for MAK (NM_005906.3,879-897).
ggactcccaaaaaaagtga

SEQ ID NO: 88910 - DNA, 19 bp, Homo sapiens
  siRNA target sequence for MAK (NM_005906.3,1007-1025).
ctcatgaccgaaatgttga

SEQ ID NO: 88911 - DNA, 19 bp, Homo sapiens
  siRNA target sequence for MAK (NM_005906.3,1061-1079).
gcattgaaacacccatatt

SEQ ID NO: 88912 - DNA, 19 bp, Homo sapiens
  siRNA target sequence for MAK (NM_005906.3,1062-1080).
cattgaaacacccatattt

SEQ ID NO: 88913 - DNA, 19 bp, Homo sapiens
  siRNA target sequence for MAK (NM_005906.3,1101-1119).
gcccttcgtcaaatcatct

SEQ ID NO: 88914 - DNA, 19 bp, Homo sapiens
  siRNA target sequence for MAK (NM_005906.3,1144-1162).
gcagctgcaaccattagaa

SEQ ID NO: 88915 - DNA, 19 bp, Homo sapiens
  siRNA target sequence for MAK (NM_005906.3,1148-1166).
ctgcaaccattagaatcaa

SEQ ID NO: 88916 - DNA, 19 bp, Homo sapiens
  siRNA target sequence for MAK (NM_005906.3,1197-1215).
ctctgccggatataatcga

SEQ ID NO: 88917 - DNA, 19 bp, Homo sapiens
  siRNA target sequence for MAK (NM_005906.3,1346-1364).
ccgagcatcgtcaaaaaca

SEQ ID NO: 88918 - DNA, 19 bp, Homo sapiens
  siRNA target sequence for MAK (NM_005906.3,1412-1430).
cgttggggtcagactatct

SEQ ID NO: 88919 - DNA, 19 bp, Homo sapiens
  siRNA target sequence for MAK (NM_005906.3,1413-1431).
gttggggtcagactatctt

SEQ ID NO: 88920 - DNA, 19 bp, Homo sapiens
  siRNA target sequence for MAK (NM_005906.3,1418-1436).
ggtcagactatcttcaagt

SEQ ID NO: 88921 - DNA, 19 bp, Homo sapiens
  siRNA target sequence for MAK (NM_005906.3,1577-1595).
cactcgacaggggaaaaca

SEQ ID NO: 88922 - DNA, 19 bp, Homo sapiens
  siRNA target sequence for MAK (NM_005906.3,1597-1615).
gagcttacctgctgttact

SEQ ID NO: 88923 - DNA, 19 bp, Homo sapiens
  siRNA target sequence for MAK (NM_005906.3,1644-1662).
ctgctccaacctctaaaca

SEQ ID NO: 88924 - DNA, 19 bp, Homo sapiens
  siRNA target sequence for MAK (NM_005906.3,1647-1665).
ctccaacctctaaacagta

SEQ ID NO: 88925 - DNA, 19 bp, Homo sapiens
  siRNA target sequence for MAK (NM_005906.3,1656-1674).
ctaaacagtactacttgaa

SEQ ID NO: 88926 - DNA, 19 bp, Homo sapiens
  siRNA target sequence for MAK (NM_005906.3,1661-1679).
cagtactacttgaaacaat

SEQ ID NO: 88927 - DNA, 19 bp, Homo sapiens
  siRNA target sequence for MAK (NM_005906.3,1705-1723).
caagaaggtgtccttgata

SEQ ID NO: 88928 - DNA, 19 bp, Homo sapiens
  siRNA target sequence for MAK (NM_005906.3,1752-1770).
cttggagcaaccagttatt

SEQ ID NO: 88929 - DNA, 19 bp, Homo sapiens
  siRNA target sequence for MAK (NM_005906.3,1815-1833).
ggagcaatgcaggaaatct

SEQ ID NO: 88930 - DNA, 19 bp, Homo sapiens
  siRNA target sequence for MAK (NM_005906.3,1824-1842).
caggaaatcttggaagtta

SEQ ID NO: 88931 - DNA, 19 bp, Homo sapiens
  siRNA target sequence for MAK (NM_005906.3,1835-1853).
ggaagttatgctacttaca

SEQ ID NO: 88932 - DNA, 19 bp, Homo sapiens
  siRNA target sequence for MAK (NM_005906.3,1839-1857).
gttatgctacttacaatca

SEQ ID NO: 88933 - DNA, 19 bp, Homo sapiens
  siRNA target sequence for MAK (NM_005906.3,1852-1870).
caatcagtcaggatatatt

SEQ ID NO: 88934 - DNA, 19 bp, Homo sapiens
  siRNA target sequence for MAK (NM_005906.3,1915-1933).
ccacttagcacctctcaat

SEQ ID NO: 88935 - DNA, 19 bp, Homo sapiens
  siRNA target sequence for MAK (NM_005906.3,1934-1952).
gcaacggcttcagaatata

SEQ ID NO: 88936 - DNA, 19 bp, Homo sapiens
  siRNA target sequence for MAK (NM_005906.3,1981-1999).
gttttcaggacgtacttat

SEQ ID NO: 88937 - DNA, 19 bp, Homo sapiens
  siRNA target sequence for MAK (NM_005906.3,1988-2006).
ggacgtacttataatccta

SEQ ID NO: 88938 - DNA, 19 bp, Homo sapiens
  siRNA target sequence for MAP2K1 (NM_002755.2,116-134).
ccgacggctctgcagttaa

SEQ ID NO: 88939 - DNA, 19 bp, Homo sapiens
  siRNA target sequence for MAP2K1 (NM_002755.2,216-234).
gcgccttgaggcctttctt

SEQ ID NO: 88940 - DNA, 19 bp, Homo sapiens
  siRNA target sequence for MAP2K1 (NM_002755.2,217-235).
cgccttgaggcctttctta

SEQ ID NO: 88941 - DNA, 19 bp, Homo sapiens
  siRNA target sequence for MAP2K1 (NM_002755.2,348-366).
ggtcatggccagaaagcta

SEQ ID NO: 88942 - DNA, 19 bp, Homo sapiens
  siRNA target sequence for MAP2K1 (NM_002755.2,351-369).
catggccagaaagctaatt

SEQ ID NO: 88943 - DNA, 19 bp, Homo sapiens
  siRNA target sequence for MAP2K1 (NM_002755.2,478-496).
gatggcgagatcagtatct

SEQ ID NO: 88944 - DNA, 19 bp, Homo sapiens
  siRNA target sequence for MAP2K1 (NM_002755.2,515-533).
gaggttctctggatcaagt

SEQ ID NO: 88945 - DNA, 19 bp, Homo sapiens
  siRNA target sequence for MAP2K1 (NM_002755.2,745-763).
ggcacaaggtcctacatgt

SEQ ID NO: 88946 - DNA, 19 bp, Homo sapiens
  siRNA target sequence for MAP2K1 (NM_002755.2,773-791).
gactccaggggactcatta

SEQ ID NO: 88947 - DNA, 19 bp, Homo sapiens
  siRNA target sequence for MAP2K1 (NM_002755.2,775-793).
ctccaggggactcattact

SEQ ID NO: 88948 - DNA, 19 bp, Homo sapiens
  siRNA target sequence for MAP2K1 (NM_002755.2,777-795).
ccaggggactcattactct

SEQ ID NO: 88949 - DNA, 19 bp, Homo sapiens
  siRNA target sequence for MAP2K1 (NM_002755.2,985-1003).
cgacctcccatggcaattt

SEQ ID NO: 88950 - DNA, 19 bp, Homo sapiens
  siRNA target sequence for MAP2K1 (NM_002755.2,986-1004).
gacctcccatggcaatttt

SEQ ID NO: 88951 - DNA, 19 bp, Homo sapiens
  siRNA target sequence for MAP2K1 (NM_002755.2,1026-1044).
caacgagcctcctccaaaa

SEQ ID NO: 88952 - DNA, 19 bp, Homo sapiens
  siRNA target sequence for MAP2K1 (NM_002755.2,1059-1077).
gttcagtctggaatttcaa

SEQ ID NO: 88953 - DNA, 19 bp, Homo sapiens
  siRNA target sequence for MAP2K1 (NM_002755.2,1062-1080).
cagtctggaatttcaagat

SEQ ID NO: 88954 - DNA, 19 bp, Homo sapiens
  siRNA target sequence for MAP2K1 (NM_002755.2,1109-1127).
ccgcagagagagcagattt

SEQ ID NO: 88955 - DNA, 19 bp, Homo sapiens
  siRNA target sequence for MAP2K1 (NM_002755.2,1121-1139).
cagatttgaagcaactcat

SEQ ID NO: 88956 - DNA, 19 bp, Homo sapiens
  siRNA target sequence for MAP2K1 (NM_002755.2,1135-1153).
ctcatggttcatgctttta

SEQ ID NO: 88957 - DNA, 19 bp, Homo sapiens
  siRNA target sequence for MAP2K1 (NM_002755.2,1144-1162).
catgcttttatcaagagat

SEQ ID NO: 88958 - DNA, 19 bp, Homo sapiens
  siRNA target sequence for MAP2K2 (NM_030662.2,411-429).
cggctggaagcctttctca

SEQ ID NO: 88959 - DNA, 19 bp, Homo sapiens
  siRNA target sequence for MAP2K2 (NM_030662.2,672-690).
gacggggagatcagcattt

SEQ ID NO: 88960 - DNA, 19 bp, Homo sapiens
  siRNA target sequence for MAP2K2 (NM_030662.2,675-693).
ggggagatcagcatttgca

SEQ ID NO: 88961 - DNA, 19 bp, Homo sapiens
  siRNA target sequence for MAP2K2 (NM_030662.2,676-694).
gggagatcagcatttgcat

SEQ ID NO: 88962 - DNA, 19 bp, Homo sapiens
  siRNA target sequence for MAP2K2 (NM_030662.2,966-984).
cggttgcagggcacacatt

SEQ ID NO: 88963 - DNA, 19 bp, Homo sapiens
  siRNA target sequence for MAP2K2 (NM_030662.2,967-985).
ggttgcagggcacacatta

SEQ ID NO: 88964 - DNA, 19 bp, Homo sapiens
  siRNA target sequence for MAP2K2 (NM_030662.2,1392-1410).
gccggctggttgtgtaaaa

SEQ ID NO: 88965 - DNA, 19 bp, Homo sapiens
  siRNA target sequence for MAP2K3 (NM_002756.2,383-401).
gactcccggaccttcatca

SEQ ID NO: 88966 - DNA, 19 bp, Homo sapiens
  siRNA target sequence for MAP2K3 (NM_002756.2,471-489).
cctatggggtggtagagaa

SEQ ID NO: 88967 - DNA, 19 bp, Homo sapiens
  siRNA target sequence for MAP2K3 (NM_002756.2,596-614).
cgcacggtcgactgtttct

SEQ ID NO: 88968 - DNA, 19 bp, Homo sapiens
  siRNA target sequence for MAP2K3 (NM_002756.2,597-615).
gcacggtcgactgtttcta

SEQ ID NO: 88969 - DNA, 19 bp, Homo sapiens
  siRNA target sequence for MAP2K3 (NM_002756.2,624-642).
ccttctacggggcactatt

SEQ ID NO: 88970 - DNA, 19 bp, Homo sapiens
  siRNA target sequence for MAP2K3 (NM_002756.2,628-646).
ctacggggcactattcaga

SEQ ID NO: 88971 - DNA, 19 bp, Homo sapiens
  siRNA target sequence for MAP2K3 (NM_002756.2,684-702).
catccttggacaagttcta

SEQ ID NO: 88972 - DNA, 19 bp, Homo sapiens
  siRNA target sequence for MAP2K3 (NM_002756.2,828-846).
cctccaatgtccttatcaa

SEQ ID NO: 88973 - DNA, 19 bp, Homo sapiens
  siRNA target sequence for MAP2K3 (NM_145109.1,282-300).
ccccagtccaaaggaaaat

SEQ ID NO: 88974 - DNA, 19 bp, Homo sapiens
  siRNA target sequence for MAP2K4 (NM_003010.2,902-920).
gcgcatcacgacaaggata

SEQ ID NO: 88975 - DNA, 19 bp, Homo sapiens
  siRNA target sequence for MAP2K4 (NM_003010.2,903-921).
cgcatcacgacaaggatat

SEQ ID NO: 88976 - DNA, 19 bp, Homo sapiens
  siRNA target sequence for MAP2K4 (NM_003010.2,1197-1215).
ggtcgcatgctatgtttgt

SEQ ID NO: 88977 - DNA, 19 bp, Homo sapiens
  siRNA target sequence for MAP2K4 (NM_003010.2,1198-1216).
gtcgcatgctatgtttgta

SEQ ID NO: 88978 - DNA, 19 bp, Homo sapiens
  siRNA target sequence for MAP2K4 (NM_003010.2,1200-1218).
cgcatgctatgtttgtaaa

SEQ ID NO: 88979 - DNA, 19 bp, Homo sapiens
  siRNA target sequence for MAP2K5 (NM_002757.2,692-710).
gaaccaggtgctggtaatt

SEQ ID NO: 88980 - DNA, 19 bp, Homo sapiens
  siRNA target sequence for MAP2K5 (NM_002757.2,702-720).
ctggtaattcgcatcaaga

SEQ ID NO: 88981 - DNA, 19 bp, Homo sapiens
  siRNA target sequence for MAP2K5 (NM_002757.2,711-729).
cgcatcaagatcccaaata

SEQ ID NO: 88982 - DNA, 19 bp, Homo sapiens
  siRNA target sequence for MAP2K5 (NM_002757.2,713-731).
catcaagatcccaaatagt

SEQ ID NO: 88983 - DNA, 19 bp, Homo sapiens
  siRNA target sequence for MAP2K5 (NM_002757.2,846-864).
gaagatggtgatcgaatta

SEQ ID NO: 88984 - DNA, 19 bp, Homo sapiens
  siRNA target sequence for MAP2K5 (NM_002757.2,890-908).
ggcaatgctgtcatattat

SEQ ID NO: 88985 - DNA, 19 bp, Homo sapiens
  siRNA target sequence for MAP2K5 (NM_002757.2,897-915).
ctgtcatattattattcca

SEQ ID NO: 88986 - DNA, 19 bp, Homo sapiens
  siRNA target sequence for MAP2K5 (NM_002757.2,988-1006).
ctggggaacggaacataca

SEQ ID NO: 88987 - DNA, 19 bp, Homo sapiens
  siRNA target sequence for MAP2K5 (NM_002757.2,1065-1083).
gattcacttccaagcaata

SEQ ID NO: 88988 - DNA, 19 bp, Homo sapiens
  siRNA target sequence for MAP2K5 (NM_002757.2,1123-1141).
ccaatggccagatgaatga

SEQ ID NO: 88989 - DNA, 19 bp, Homo sapiens
  siRNA target sequence for MAP2K5 (NM_002757.2,1133-1151).
gatgaatgaacaagacata

SEQ ID NO: 88990 - DNA, 19 bp, Homo sapiens
  siRNA target sequence for MAP2K5 (NM_002757.2,1189-1207).
cagtctacaaagcatatca

SEQ ID NO: 88991 - DNA, 19 bp, Homo sapiens
  siRNA target sequence for MAP2K5 (NM_002757.2,1214-1232).
gagtgggaaaatattagct

SEQ ID NO: 88992 - DNA, 19 bp, Homo sapiens
  siRNA target sequence for MAP2K5 (NM_002757.2,1239-1257).
gtcatactactagatatta

SEQ ID NO: 88993 - DNA, 19 bp, Homo sapiens
  siRNA target sequence for MAP2K5 (NM_002757.2,1266-1284).
cttcagaagcaaattatgt

SEQ ID NO: 88994 - DNA, 19 bp, Homo sapiens
  siRNA target sequence for MAP2K5 (NM_002757.2,1299-1317).
ctttataagtgcgattcat

SEQ ID NO: 88995 - DNA, 19 bp, Homo sapiens
  siRNA target sequence for MAP2K5 (NM_002757.2,1309-1327).
gcgattcatcatatatcat

SEQ ID NO: 88996 - DNA, 19 bp, Homo sapiens
  siRNA target sequence for MAP2K5 (NM_002757.2,1310-1328).
cgattcatcatatatcatt

SEQ ID NO: 88997 - DNA, 19 bp, Homo sapiens
  siRNA target sequence for MAP2K5 (NM_002757.2,1315-1333).
catcatatatcattggatt

SEQ ID NO: 88998 - DNA, 19 bp, Homo sapiens
  siRNA target sequence for MAP2K5 (NM_002757.2,1358-1376).
caggatttcaatatgtaca

SEQ ID NO: 88999 - DNA, 19 bp, Homo sapiens
  siRNA target sequence for MAP2K5 (NM_002757.2,1455-1473).
gttaaaggccttacttatt

SEQ ID NO: 89000 - DNA, 19 bp, Homo sapiens
  siRNA target sequence for MAP2K5 (NM_002757.2,1505-1523).
gaagccctccaatatgcta

SEQ ID NO: 89001 - DNA, 19 bp, Homo sapiens
  siRNA target sequence for MAP2K5 (NM_002757.2,1510-1528).
cctccaatatgctagtaaa

SEQ ID NO: 89002 - DNA, 19 bp, Homo sapiens
  siRNA target sequence for MAP2K5 (NM_002757.2,1514-1532).
caatatgctagtaaacaca

SEQ ID NO: 89003 - DNA, 19 bp, Homo sapiens
  siRNA target sequence for MAP2K5 (NM_002757.2,1568-1586).
cactcagctggtgaattct

SEQ ID NO: 89004 - DNA, 19 bp, Homo sapiens
  siRNA target sequence for MAP2K5 (NM_002757.2,1595-1613).
gacgtatgttggaacaaat

SEQ ID NO: 89005 - DNA, 19 bp, Homo sapiens
  siRNA target sequence for MAP2K5 (NM_002757.2,1598-1616).
gtatgttggaacaaatgct

SEQ ID NO: 89006 - DNA, 19 bp, Homo sapiens
  siRNA target sequence for MAP2K5 (NM_002757.2,1602-1620).
gttggaacaaatgcttata

SEQ ID NO: 89007 - DNA, 19 bp, Homo sapiens
  siRNA target sequence for MAP2K5 (NM_002757.2,1644-1662).
gagcagtatggaattcatt

SEQ ID NO: 89008 - DNA, 19 bp, Homo sapiens
  siRNA target sequence for MAP2K5 (NM_002757.2,1646-1664).
gcagtatggaattcattct

SEQ ID NO: 89009 - DNA, 19 bp, Homo sapiens
  siRNA target sequence for MAP2K5 (NM_002757.2,1787-1805).
ctcggagccatttgtacat

SEQ ID NO: 89010 - DNA, 19 bp, Homo sapiens
  siRNA target sequence for MAP2K5 (NM_002757.2,1789-1807).
cggagccatttgtacattt

SEQ ID NO: 89011 - DNA, 19 bp, Homo sapiens
  siRNA target sequence for MAP2K5 (NM_002757.2,1791-1809).
gagccatttgtacatttca

SEQ ID NO: 89012 - DNA, 19 bp, Homo sapiens
  siRNA target sequence for MAP2K5 (NM_002757.2,1813-1831).
ctcagtgtatgcgaaaaca

SEQ ID NO: 89013 - DNA, 19 bp, Homo sapiens
  siRNA target sequence for MAP2K5 (NM_002757.2,1846-1864).
cagcacctgaagaattgat

SEQ ID NO: 89014 - DNA, 19 bp, Homo sapiens
  siRNA target sequence for MAP2K5 (NM_002757.2,1874-1892).
gttcatcgtgcagttcaat

SEQ ID NO: 89015 - DNA, 19 bp, Homo sapiens
  siRNA target sequence for MAP2K5 (NM_145160.1,1712-1730).
gtttccatatcctcagatt

SEQ ID NO: 89016 - DNA, 19 bp, Homo sapiens
  siRNA target sequence for MAP2K5 (NM_145161.1,2030-2048).
caggccatccccatacctt

SEQ ID NO: 89017 - DNA, 19 bp, Homo sapiens
  siRNA target sequence for MAP2K5 (NM_145162.1,357-375).
ggactttgaggtcatacta

SEQ ID NO: 89018 - DNA, 19 bp, Homo sapiens
  siRNA target sequence for MAP2K6 (NM_002758.2,365-383).
cgaaaccctggccttaaaa

SEQ ID NO: 89019 - DNA, 19 bp, Homo sapiens
  siRNA target sequence for MAP2K6 (NM_002758.2,371-389).
cctggccttaaaattccaa

SEQ ID NO: 89020 - DNA, 19 bp, Homo sapiens
  siRNA target sequence for MAP2K6 (NM_002758.2,372-390).
ctggccttaaaattccaaa

SEQ ID NO: 89021 - DNA, 19 bp, Homo sapiens
  siRNA target sequence for MAP2K6 (NM_002758.2,423-441).
caccacctcgagatttaga

SEQ ID NO: 89022 - DNA, 19 bp, Homo sapiens
  siRNA target sequence for MAP2K6 (NM_002758.2,425-443).
ccacctcgagatttagact

SEQ ID NO: 89023 - DNA, 19 bp, Homo sapiens
  siRNA target sequence for MAP2K6 (NM_002758.2,444-462).
ccaaggcttgcatttctat

SEQ ID NO: 89024 - DNA, 19 bp, Homo sapiens
  siRNA target sequence for MAP2K6 (NM_002758.2,588-606).
ggatccgagccacagtaaa

SEQ ID NO: 89025 - DNA, 19 bp, Homo sapiens
  siRNA target sequence for MAP2K6 (NM_002758.2,589-607).
gatccgagccacagtaaat

SEQ ID NO: 89026 - DNA, 19 bp, Homo sapiens
  siRNA target sequence for MAP2K6 (NM_002758.2,624-642).
ggctactgatggatttgga

SEQ ID NO: 89027 - DNA, 19 bp, Homo sapiens
  siRNA target sequence for MAP2K6 (NM_002758.2,626-644).
ctactgatggatttggata

SEQ ID NO: 89028 - DNA, 19 bp, Homo sapiens
  siRNA target sequence for MAP2K6 (NM_002758.2,658-676).
ggtggactgtccattcact

SEQ ID NO: 89029 - DNA, 19 bp, Homo sapiens
  siRNA target sequence for MAP2K6 (NM_002758.2,730-748).
gctcatggatacatcacta

SEQ ID NO: 89030 - DNA, 19 bp, Homo sapiens
  siRNA target sequence for MAP2K6 (NM_002758.2,733-751).
catggatacatcactagat

SEQ ID NO: 89031 - DNA, 19 bp, Homo sapiens
  siRNA target sequence for MAP2K6 (NM_002758.2,736-754).
ggatacatcactagataaa

SEQ ID NO: 89032 - DNA, 19 bp, Homo sapiens
  siRNA target sequence for MAP2K6 (NM_002758.2,741-759).
catcactagataaattcta

SEQ ID NO: 89033 - DNA, 19 bp, Homo sapiens
  siRNA target sequence for MAP2K6 (NM_002758.2,799-817).
catcttagggaaaatagca

SEQ ID NO: 89034 - DNA, 19 bp, Homo sapiens
  siRNA target sequence for MAP2K6 (NM_002758.2,822-840).
ctattgtaaaagcattaga

SEQ ID NO: 89035 - DNA, 19 bp, Homo sapiens
  siRNA target sequence for MAP2K6 (NM_002758.2,852-870).
gtaagctgtctgtcattca

SEQ ID NO: 89036 - DNA, 19 bp, Homo sapiens
  siRNA target sequence for MAP2K6 (NM_002758.2,873-891).
gagacgtcaagccttctaa

SEQ ID NO: 89037 - DNA, 19 bp, Homo sapiens
  siRNA target sequence for MAP2K6 (NM_002758.2,877-895).
cgtcaagccttctaatgta

SEQ ID NO: 89038 - DNA, 19 bp, Homo sapiens
  siRNA target sequence for MAP2K6 (NM_002758.2,906-924).
ctctcggtcaagtgaagat

SEQ ID NO: 89039 - DNA, 19 bp, Homo sapiens
  siRNA target sequence for MAP2K6 (NM_002758.2,952-970).
ggtggactctgttgctaaa

SEQ ID NO: 89040 - DNA, 19 bp, Homo sapiens
  siRNA target sequence for MAP2K6 (NM_002758.2,955-973).
ggactctgttgctaaaaca

SEQ ID NO: 89041 - DNA, 19 bp, Homo sapiens
  siRNA target sequence for MAP2K6 (NM_002758.2,960-978).
ctgttgctaaaacaattga

SEQ ID NO: 89042 - DNA, 19 bp, Homo sapiens
  siRNA target sequence for MAP2K6 (NM_002758.2,1042-1060).
cagtgtgaagtctgacatt

SEQ ID NO: 89043 - DNA, 19 bp, Homo sapiens
  siRNA target sequence for MAP2K6 (NM_002758.2,1087-1105).
gttggccatccttcgattt

SEQ ID NO: 89044 - DNA, 19 bp, Homo sapiens
  siRNA target sequence for MAP2K6 (NM_002758.2,1097-1115).
cttcgatttccctatgatt

SEQ ID NO: 89045 - DNA, 19 bp, Homo sapiens
  siRNA target sequence for MAP2K6 (NM_002758.2,1100-1118).
cgatttccctatgattcat

SEQ ID NO: 89046 - DNA, 19 bp, Homo sapiens
  siRNA target sequence for MAP2K6 (NM_002758.2,1116-1134).
catggggaactccatttca

SEQ ID NO: 89047 - DNA, 19 bp, Homo sapiens
  siRNA target sequence for MAP2K6 (NM_002758.2,1191-1209).
ctgcagagtttgttgactt

SEQ ID NO: 89048 - DNA, 19 bp, Homo sapiens
  siRNA target sequence for MAP2K6 (NM_002758.2,1196-1214).
gagtttgttgactttacct

SEQ ID NO: 89049 - DNA, 19 bp, Homo sapiens
  siRNA target sequence for MAP2K6 (NM_002758.2,1236-1254).
ccaaagaacggcctacata

SEQ ID NO: 89050 - DNA, 19 bp, Homo sapiens
  siRNA target sequence for MAP2K6 (NM_002758.2,1251-1269).
catacccagagctaatgca

SEQ ID NO: 89051 - DNA, 19 bp, Homo sapiens
  siRNA target sequence for MAP2K6 (NM_002758.2,1261-1279).
gctaatgcaacatccattt

SEQ ID NO: 89052 - DNA, 19 bp, Homo sapiens
  siRNA target sequence for MAP2K7 (NM_145185.2,497-515).
cgtcattgccgttaagcaa

SEQ ID NO: 89053 - DNA, 19 bp, Homo sapiens
  siRNA target sequence for MAP2K7 (NM_145185.2,498-516).
gtcattgccgttaagcaaa

SEQ ID NO: 89054 - DNA, 19 bp, Homo sapiens
  siRNA target sequence for MAP2K7 (NM_145185.2,628-646).
ccaacacggacgtcttcat

SEQ ID NO: 89055 - DNA, 19 bp, Homo sapiens
  siRNA target sequence for MAP2K7 (NM_145185.2,1007-1025).
gctggcaacaggacagttt

SEQ ID NO: 89056 - DNA, 19 bp, Homo sapiens
  siRNA target sequence for MAP2K7 (NM_145185.2,1018-1036).
gacagtttccctacaagaa

SEQ ID NO: 89057 - DNA, 19 bp, Homo sapiens
  siRNA target sequence for MAP2K7 (NM_145185.2,1160-1178).
caggaagagaccaaagtat

SEQ ID NO: 89058 - DNA, 19 bp, Homo sapiens
  siRNA target sequence for MAP3K10 (NM_002446.2,791-809).
cacacctctgcctagtgat

SEQ ID NO: 89059 - DNA, 19 bp, Homo sapiens
  siRNA target sequence for MAP3K10 (NM_002446.2,905-923).
gcatgaactacctacacaa

SEQ ID NO: 89060 - DNA, 19 bp, Homo sapiens
  siRNA target sequence for MAP3K10 (NM_002446.2,906-924).
catgaactacctacacaat

SEQ ID NO: 89061 - DNA, 19 bp, Homo sapiens
  siRNA target sequence for MAP3K10 (NM_002446.2,1224-1242).
gtatggcgtggctatgaat

SEQ ID NO: 89062 - DNA, 19 bp, Homo sapiens
  siRNA target sequence for MAP3K10 (NM_002446.2,1229-1247).
gcgtggctatgaataagct

SEQ ID NO: 89063 - DNA, 19 bp, Homo sapiens
  siRNA target sequence for MAP3K10 (NM_002446.2,1434-1452).
ggagattcagcacatgttt

SEQ ID NO: 89064 - DNA, 19 bp, Homo sapiens
  siRNA target sequence for MAP3K10 (NM_002446.2,1762-1780).
ctggataagcggaaaggat

SEQ ID NO: 89065 - DNA, 19 bp, Homo sapiens
  siRNA target sequence for MAP3K10 (NM_002446.2,2402-2420).
ggctcgacggcctcttctt

SEQ ID NO: 89066 - DNA, 19 bp, Homo sapiens
  siRNA target sequence for MAP3K11 (NM_002419.2,526-544).
ccctctagggtcatggaat

SEQ ID NO: 89067 - DNA, 19 bp, Homo sapiens
  siRNA target sequence for MAP3K11 (NM_002419.2,1454-1472).
ccataccgtggcattgact

SEQ ID NO: 89068 - DNA, 19 bp, Homo sapiens
  siRNA target sequence for MAP3K11 (NM_002419.2,1718-1736).
gagctgcgagccaaggaaa

SEQ ID NO: 89069 - DNA, 19 bp, Homo sapiens
  siRNA target sequence for MAP3K11 (NM_002419.2,2279-2297).
gactcatcccccttaggat

SEQ ID NO: 89070 - DNA, 19 bp, Homo sapiens
  siRNA target sequence for MAP3K11 (NM_002419.2,2309-2327).
cccccagcactcaatggta

SEQ ID NO: 89071 - DNA, 19 bp, Homo sapiens
  siRNA target sequence for MAP3K11 (NM_002419.2,2310-2328).
ccccagcactcaatggtaa

SEQ ID NO: 89072 - DNA, 19 bp, Homo sapiens
  siRNA target sequence for MAP3K11 (NM_002419.2,2806-2824).
ccttcgcagccgcattgat

SEQ ID NO: 89073 - DNA, 19 bp, Homo sapiens
  siRNA target sequence for MAP3K12 (NM_006301.2,386-404).
ccctgtctggaccatgatt

SEQ ID NO: 89074 - DNA, 19 bp, Homo sapiens
  siRNA target sequence for MAP3K12 (NM_006301.2,837-855).
gacgatgtggtgaagatct

SEQ ID NO: 89075 - DNA, 19 bp, Homo sapiens
  siRNA target sequence for MAP3K12 (NM_006301.2,1099-1117).
gttgcccagatggtttcaa

SEQ ID NO: 89076 - DNA, 19 bp, Homo sapiens
  siRNA target sequence for MAP3K12 (NM_006301.2,1125-1143).
cttcgccagtgctggaata

SEQ ID NO: 89077 - DNA, 19 bp, Homo sapiens
  siRNA target sequence for MAP3K12 (NM_006301.2,1128-1146).
cgccagtgctggaatagca

SEQ ID NO: 89078 - DNA, 19 bp, Homo sapiens
  siRNA target sequence for MAP3K12 (NM_006301.2,1150-1168).
cacgaaatcgcccatcatt

SEQ ID NO: 89079 - DNA, 19 bp, Homo sapiens
  siRNA target sequence for MAP3K12 (NM_006301.2,1249-1267).
cagagtggcgggaagaagt

SEQ ID NO: 89080 - DNA, 19 bp, Homo sapiens
  siRNA target sequence for MAP3K12 (NM_006301.2,1255-1273).
ggcgggaagaagtaaaact

SEQ ID NO: 89081 - DNA, 19 bp, Homo sapiens
  siRNA target sequence for MAP3K12 (NM_006301.2,1275-1293).
cactttgaaaagattaagt

SEQ ID NO: 89082 - DNA, 19 bp, Homo sapiens
  siRNA target sequence for MAP3K12 (NM_006301.2,1306-1324).
gtctgcaccgcctagaaga

SEQ ID NO: 89083 - DNA, 19 bp, Homo sapiens
  siRNA target sequence for MAP3K12 (NM_006301.2,1405-1423).
ccaacaacctgtatatgga

SEQ ID NO: 89084 - DNA, 19 bp, Homo sapiens
  siRNA target sequence for MAP3K12 (NM_006301.2,1474-1492).
ggcgagagcaagctttaga

SEQ ID NO: 89085 - DNA, 19 bp, Homo sapiens
  siRNA target sequence for MAP3K12 (NM_006301.2,1634-1652).
gtctttgctccctaaacta

SEQ ID NO: 89086 - DNA, 19 bp, Homo sapiens
  siRNA target sequence for MAP3K12 (NM_006301.2,1899-1917).
ctcctgctccgcaaaatgt

SEQ ID NO: 89087 - DNA, 19 bp, Homo sapiens
  siRNA target sequence for MAP3K12 (NM_006301.2,1902-1920).
ctgctccgcaaaatgtctt

SEQ ID NO: 89088 - DNA, 19 bp, Homo sapiens
  siRNA target sequence for MAP3K12 (NM_006301.2,1905-1923).
ctccgcaaaatgtcttcat

SEQ ID NO: 89089 - DNA, 19 bp, Homo sapiens
  siRNA target sequence for MAP3K12 (NM_006301.2,2222-2240).
cgtcacccgaagtcagaaa

SEQ ID NO: 89090 - DNA, 19 bp, Homo sapiens
  siRNA target sequence for MAP3K12 (NM_006301.2,2235-2253).
cagaaacgtggcatctcat

SEQ ID NO: 89091 - DNA, 19 bp, Homo sapiens
  siRNA target sequence for MAP3K12 (NM_006301.2,2327-2345).
catgcgccagtcactatct

SEQ ID NO: 89092 - DNA, 19 bp, Homo sapiens
  siRNA target sequence for MAP3K12 (NM_006301.2,2405-2423).
cagtggcacacctgaagtt

SEQ ID NO: 89093 - DNA, 19 bp, Homo sapiens
  siRNA target sequence for MAP3K13 (NM_004721.3,315-333).
cacttacccttcagtgaaa

SEQ ID NO: 89094 - DNA, 19 bp, Homo sapiens
  siRNA target sequence for MAP3K13 (NM_004721.3,531-549).
ctaagggaacacgatgaat

SEQ ID NO: 89095 - DNA, 19 bp, Homo sapiens
  siRNA target sequence for MAP3K13 (NM_004721.3,596-614).
gagcacaagcggaactgaa

SEQ ID NO: 89096 - DNA, 19 bp, Homo sapiens
  siRNA target sequence for MAP3K13 (NM_004721.3,649-667).
gcagtggtgggtttcttga

SEQ ID NO: 89097 - DNA, 19 bp, Homo sapiens
  siRNA target sequence for MAP3K13 (NM_004721.3,650-668).
cagtggtgggtttcttgaa

SEQ ID NO: 89098 - DNA, 19 bp, Homo sapiens
  siRNA target sequence for MAP3K13 (NM_004721.3,658-676).
ggtttcttgaaggactatt

SEQ ID NO: 89099 - DNA, 19 bp, Homo sapiens
  siRNA target sequence for MAP3K13 (NM_004721.3,669-687).
ggactatttggatgcttaa

SEQ ID NO: 89100 - DNA, 19 bp, Homo sapiens
  siRNA target sequence for MAP3K13 (NM_004721.3,688-706).
ggcctgtatggaatatcat

SEQ ID NO: 89101 - DNA, 19 bp, Homo sapiens
  siRNA target sequence for MAP3K13 (NM_004721.3,689-707).
gcctgtatggaatatcatt

SEQ ID NO: 89102 - DNA, 19 bp, Homo sapiens
  siRNA target sequence for MAP3K13 (NM_004721.3,715-733).
catattccactgattacaa

SEQ ID NO: 89103 - DNA, 19 bp, Homo sapiens
  siRNA target sequence for MAP3K13 (NM_004721.3,805-823).
cccaaggagcggtcttctt

SEQ ID NO: 89104 - DNA, 19 bp, Homo sapiens
  siRNA target sequence for MAP3K13 (NM_004721.3,913-931).
ctaacatcatcgcattcaa

SEQ ID NO: 89105 - DNA, 19 bp, Homo sapiens
  siRNA target sequence for MAP3K13 (NM_004721.3,940-958).
gtactcaggccccatgtta

SEQ ID NO: 89106 - DNA, 19 bp, Homo sapiens
  siRNA target sequence for MAP3K13 (NM_004721.3,945-963).
caggccccatgttattgta

SEQ ID NO: 89107 - DNA, 19 bp, Homo sapiens
  siRNA target sequence for MAP3K13 (NM_004721.3,947-965).
ggccccatgttattgtatt

SEQ ID NO: 89108 - DNA, 19 bp, Homo sapiens
  siRNA target sequence for MAP3K13 (NM_004721.3,948-966).
gccccatgttattgtatta

SEQ ID NO: 89109 - DNA, 19 bp, Homo sapiens
  siRNA target sequence for MAP3K13 (NM_004721.3,1027-1045).
cacctcgattgctagtaga

SEQ ID NO: 89110 - DNA, 19 bp, Homo sapiens
  siRNA target sequence for MAP3K13 (NM_004721.3,1046-1064).
ctggtccacaggaattgca

SEQ ID NO: 89111 - DNA, 19 bp, Homo sapiens
  siRNA target sequence for MAP3K13 (NM_004721.3,1082-1100).
gcacctccataaaattatt

SEQ ID NO: 89112 - DNA, 19 bp, Homo sapiens
  siRNA target sequence for MAP3K13 (NM_004721.3,1136-1154).
ccacacagatgcggtaaaa

SEQ ID NO: 89113 - DNA, 19 bp, Homo sapiens
  siRNA target sequence for MAP3K13 (NM_004721.3,1137-1155).
cacacagatgcggtaaaaa

SEQ ID NO: 89114 - DNA, 19 bp, Homo sapiens
  siRNA target sequence for MAP3K13 (NM_004721.3,1139-1157).
cacagatgcggtaaaaatt

SEQ ID NO: 89115 - DNA, 19 bp, Homo sapiens
  siRNA target sequence for MAP3K13 (NM_004721.3,1159-1177).
cagattttggtacatctaa

SEQ ID NO: 89116 - DNA, 19 bp, Homo sapiens
  siRNA target sequence for MAP3K13 (NM_004721.3,1260-1278).
gtctctgaaaaagttgata

SEQ ID NO: 89117 - DNA, 19 bp, Homo sapiens
  siRNA target sequence for MAP3K13 (NM_004721.3,1399-1417).
ccacttgccctgatggatt

SEQ ID NO: 89118 - DNA, 19 bp, Homo sapiens
  siRNA target sequence for MAP3K13 (NM_004721.3,1402-1420).
cttgccctgatggattcaa

SEQ ID NO: 89119 - DNA, 19 bp, Homo sapiens
  siRNA target sequence for MAP3K13 (NM_004721.3,1436-1454).
gacgtggcagagtaaacct

SEQ ID NO: 89120 - DNA, 19 bp, Homo sapiens
  siRNA target sequence for MAP3K13 (NM_004721.3,1453-1471).
ctcgaaaccgaccttcttt

SEQ ID NO: 89121 - DNA, 19 bp, Homo sapiens
  siRNA target sequence for MAP3K13 (NM_004721.3,1473-1491).
cggcagacactcatgcatt

SEQ ID NO: 89122 - DNA, 19 bp, Homo sapiens
  siRNA target sequence for MAP3K13 (NM_004721.3,1515-1533).
cttgccaccccacaagaaa

SEQ ID NO: 89123 - DNA, 19 bp, Homo sapiens
  siRNA target sequence for MAP3K13 (NM_004721.3,1519-1537).
ccaccccacaagaaactta

SEQ ID NO: 89124 - DNA, 19 bp, Homo sapiens
  siRNA target sequence for MAP3K13 (NM_004721.3,1569-1587).
gtgaaaaaacattttgaga

SEQ ID NO: 89125 - DNA, 19 bp, Homo sapiens
  siRNA target sequence for MAP3K13 (NM_004721.3,1609-1627).
gtatacaccggttagatga

SEQ ID NO: 89126 - DNA, 19 bp, Homo sapiens
  siRNA target sequence for MAP3K13 (NM_004721.3,1623-1641).
gatgaagaactgattcgaa

SEQ ID NO: 89127 - DNA, 19 bp, Homo sapiens
  siRNA target sequence for MAP3K13 (NM_004721.3,1658-1676).
caggcatgcgctggatatt

SEQ ID NO: 89128 - DNA, 19 bp, Homo sapiens
  siRNA target sequence for MAP3K13 (NM_004721.3,1661-1679).
gcatgcgctggatattcgt

SEQ ID NO: 89129 - DNA, 19 bp, Homo sapiens
  siRNA target sequence for MAP3K13 (NM_004721.3,1670-1688).
ggatattcgtgaacactat

SEQ ID NO: 89130 - DNA, 19 bp, Homo sapiens
  siRNA target sequence for MAP3K13 (NM_004721.3,1759-1777).
gggagaaggagctcattaa

SEQ ID NO: 89131 - DNA, 19 bp, Homo sapiens
  siRNA target sequence for MAP3K13 (NM_004721.3,1909-1927).
ccaaacggccagacttgtt

SEQ ID NO: 89132 - DNA, 19 bp, Homo sapiens
  siRNA target sequence for MAP3K13 (NM_004721.3,1914-1932).
cggccagacttgttgagat

SEQ ID NO: 89133 - DNA, 19 bp, Homo sapiens
  siRNA target sequence for MAP3K13 (NM_004721.3,1989-2007).
cccaaaatgtccacttcta

SEQ ID NO: 89134 - DNA, 19 bp, Homo sapiens
  siRNA target sequence for MAP3K13 (NM_004721.3,2009-2027).
cagcaagagccgatatcga

SEQ ID NO: 89135 - DNA, 19 bp, Homo sapiens
  siRNA target sequence for MAP3K13 (NM_004721.3,2015-2033).
gagccgatatcgaagcaaa

SEQ ID NO: 89136 - DNA, 19 bp, Homo sapiens
  siRNA target sequence for MAP3K13 (NM_004721.3,2073-2091).
gactttgccgcaatcttga

SEQ ID NO: 89137 - DNA, 19 bp, Homo sapiens
  siRNA target sequence for MAP3K13 (NM_004721.3,2099-2117).
gccagcccaggaaaattca

SEQ ID NO: 89138 - DNA, 19 bp, Homo sapiens
  siRNA target sequence for MAP3K13 (NM_004721.3,2226-2244).
caccatcccagactcaata

SEQ ID NO: 89139 - DNA, 19 bp, Homo sapiens
  siRNA target sequence for MAP3K13 (NM_004721.3,2272-2290).
ccaacaacctgaggtattt

SEQ ID NO: 89140 - DNA, 19 bp, Homo sapiens
  siRNA target sequence for MAP3K13 (NM_004721.3,2443-2461).
gccaggctgacgcttatga

SEQ ID NO: 89141 - DNA, 19 bp, Homo sapiens
  siRNA target sequence for MAP3K13 (NM_004721.3,2474-2492).
gtgcaggccagaacagtat

SEQ ID NO: 89142 - DNA, 19 bp, Homo sapiens
  siRNA target sequence for MAP3K13 (NM_004721.3,2487-2505).
cagtatgggtccttagaca

SEQ ID NO: 89143 - DNA, 19 bp, Homo sapiens
  siRNA target sequence for MAP3K13 (NM_004721.3,2489-2507).
gtatgggtccttagacata

SEQ ID NO: 89144 - DNA, 19 bp, Homo sapiens
  siRNA target sequence for MAP3K13 (NM_004721.3,2530-2548).
ggagccctgacctttccaa

SEQ ID NO: 89145 - DNA, 19 bp, Homo sapiens
  siRNA target sequence for MAP3K13 (NM_004721.3,2545-2563).
ccaagtcaccagcacataa

SEQ ID NO: 89146 - DNA, 19 bp, Homo sapiens
  siRNA target sequence for MAP3K13 (NM_004721.3,2549-2567).
gtcaccagcacataatcct

SEQ ID NO: 89147 - DNA, 19 bp, Homo sapiens
  siRNA target sequence for MAP3K13 (NM_004721.3,2579-2597).
cgcccagagttctgagaaa

SEQ ID NO: 89148 - DNA, 19 bp, Homo sapiens
  siRNA target sequence for MAP3K13 (NM_004721.3,2888-2906).
gttagctgataaacttgaa

SEQ ID NO: 89149 - DNA, 19 bp, Homo sapiens
  siRNA target sequence for MAP3K13 (NM_004721.3,2939-2957).
gtcccagacgccagagatt

SEQ ID NO: 89150 - DNA, 19 bp, Homo sapiens
  siRNA target sequence for MAP3K13 (NM_004721.3,2952-2970).
gagattcccattgacatat

SEQ ID NO: 89151 - DNA, 19 bp, Homo sapiens
  siRNA target sequence for MAP3K13 (NM_004721.3,3074-3092).
ccccatgcagtttgaagaa

SEQ ID NO: 89152 - DNA, 19 bp, Homo sapiens
  siRNA target sequence for MAP3K13 (NM_004721.3,3075-3093).
cccatgcagtttgaagaat

SEQ ID NO: 89153 - DNA, 19 bp, Homo sapiens
  siRNA target sequence for MAP3K13 (NM_004721.3,3133-3151).
cagttaggaccaataaaca

SEQ ID NO: 89154 - DNA, 19 bp, Homo sapiens
  siRNA target sequence for MAP3K14 (NM_003954.1,404-422).
ctgaatgacgtgattacca

SEQ ID NO: 89155 - DNA, 19 bp, Homo sapiens
  siRNA target sequence for MAP3K14 (NM_003954.1,452-470).
gggccagctgccatctcta

SEQ ID NO: 89156 - DNA, 19 bp, Homo sapiens
  siRNA target sequence for MAP3K14 (NM_003954.1,453-471).
ggccagctgccatctctat

SEQ ID NO: 89157 - DNA, 19 bp, Homo sapiens
  siRNA target sequence for MAP3K14 (NM_003954.1,455-473).
ccagctgccatctctatca

SEQ ID NO: 89158 - DNA, 19 bp, Homo sapiens
  siRNA target sequence for MAP3K14 (NM_003954.1,456-474).
cagctgccatctctatcat

SEQ ID NO: 89159 - DNA, 19 bp, Homo sapiens
  siRNA target sequence for MAP3K14 (NM_003954.1,489-507).
gtgagaatagccaagagtt

SEQ ID NO: 89160 - DNA, 19 bp, Homo sapiens
  siRNA target sequence for MAP3K14 (NM_003954.1,503-521).
gagttcagccccacctttt

SEQ ID NO: 89161 - DNA, 19 bp, Homo sapiens
  siRNA target sequence for MAP3K14 (NM_003954.1,559-577).
ccagtccgagagtcttgat

SEQ ID NO: 89162 - DNA, 19 bp, Homo sapiens
  siRNA target sequence for MAP3K14 (NM_003954.1,564-582).
ccgagagtcttgatcagat

SEQ ID NO: 89163 - DNA, 19 bp, Homo sapiens
  siRNA target sequence for MAP3K14 (NM_003954.1,849-867).
ggcaactctgttttaagca

SEQ ID NO: 89164 - DNA, 19 bp, Homo sapiens
  siRNA target sequence for MAP3K14 (NM_003954.1,917-935).
ctgatcagccccttgcaat

SEQ ID NO: 89165 - DNA, 19 bp, Homo sapiens
  siRNA target sequence for MAP3K14 (NM_003954.1,998-1016).
caccccttcccctatagca

SEQ ID NO: 89166 - DNA, 19 bp, Homo sapiens
  siRNA target sequence for MAP3K14 (NM_003954.1,1203-1221).
ctcgtggtgcccatgagaa

SEQ ID NO: 89167 - DNA, 19 bp, Homo sapiens
  siRNA target sequence for MAP3K14 (NM_003954.1,1501-1519).
cttccagtgcgctgtcaaa

SEQ ID NO: 89168 - DNA, 19 bp, Homo sapiens
  siRNA target sequence for MAP3K14 (NM_003954.1,1522-1540).
ggtgcggctggaagtattt

SEQ ID NO: 89169 - DNA, 19 bp, Homo sapiens
  siRNA target sequence for MAP3K14 (NM_003954.1,1617-1635).
ggccttgggtcaacatctt

SEQ ID NO: 89170 - DNA, 19 bp, Homo sapiens
  siRNA target sequence for MAP3K14 (NM_003954.1,1619-1637).
ccttgggtcaacatcttca

SEQ ID NO: 89171 - DNA, 19 bp, Homo sapiens
  siRNA target sequence for MAP3K14 (NM_003954.1,1728-1746).
ccctggagggtctggaata

SEQ ID NO: 89172 - DNA, 19 bp, Homo sapiens
  siRNA target sequence for MAP3K14 (NM_003954.1,1747-1765).
cctccactcacgaaggatt

SEQ ID NO: 89173 - DNA, 19 bp, Homo sapiens
  siRNA target sequence for MAP3K14 (NM_003954.1,2221-2239).
cccttggaggggagaatat

SEQ ID NO: 89174 - DNA, 19 bp, Homo sapiens
  siRNA target sequence for MAP3K14 (NM_003954.1,2226-2244).
ggaggggagaatataaaga

SEQ ID NO: 89175 - DNA, 19 bp, Homo sapiens
  siRNA target sequence for MAP3K14 (NM_003954.1,2250-2268).
gacatccaccgccaaatca

SEQ ID NO: 89176 - DNA, 19 bp, Homo sapiens
  siRNA target sequence for MAP3K14 (NM_003954.1,2259-2277).
cgccaaatcaagccaatta

SEQ ID NO: 89177 - DNA, 19 bp, Homo sapiens
  siRNA target sequence for MAP3K14 (NM_003954.1,2262-2280).
caaatcaagccaattacca

SEQ ID NO: 89178 - DNA, 19 bp, Homo sapiens
  siRNA target sequence for MAP3K14 (NM_003954.1,2669-2687).
ccatcaaaggcctctcaaa

SEQ ID NO: 89179 - DNA, 19 bp, Homo sapiens
  siRNA target sequence for MAP3K14 (NM_003954.1,2791-2809).
caccccaagctatttcaat

SEQ ID NO: 89180 - DNA, 19 bp, Homo sapiens
  siRNA target sequence for MAP3K14 (NM_003954.1,2813-2831).
gtgaaagtccaaatacagt

SEQ ID NO: 89181 - DNA, 19 bp, Homo sapiens
  siRNA target sequence for MAP3K2 (NM_006609.2,158-176).
ggccagtcgaccagcatta

SEQ ID NO: 89182 - DNA, 19 bp, Homo sapiens
  siRNA target sequence for MAP3K2 (NM_006609.2,163-181).
gtcgaccagcattatcctt

SEQ ID NO: 89183 - DNA, 19 bp, Homo sapiens
  siRNA target sequence for MAP3K2 (NM_006609.2,224-242).
gaatgatgtccgagtcaaa

SEQ ID NO: 89184 - DNA, 19 bp, Homo sapiens
  siRNA target sequence for MAP3K2 (NM_006609.2,294-312).
ctggaagatctgagatcta

SEQ ID NO: 89185 - DNA, 19 bp, Homo sapiens
  siRNA target sequence for MAP3K2 (NM_006609.2,326-344).
ctttggacagtctatggat

SEQ ID NO: 89186 - DNA, 19 bp, Homo sapiens
  siRNA target sequence for MAP3K2 (NM_006609.2,331-349).
gacagtctatggatctaca

SEQ ID NO: 89187 - DNA, 19 bp, Homo sapiens
  siRNA target sequence for MAP3K2 (NM_006609.2,335-353).
gtctatggatctacattat

SEQ ID NO: 89188 - DNA, 19 bp, Homo sapiens
  siRNA target sequence for MAP3K2 (NM_006609.2,341-359).
ggatctacattataccaat

SEQ ID NO: 89189 - DNA, 19 bp, Homo sapiens
  siRNA target sequence for MAP3K2 (NM_006609.2,355-373).
ccaataacgagttggtaat

SEQ ID NO: 89190 - DNA, 19 bp, Homo sapiens
  siRNA target sequence for MAP3K2 (NM_006609.2,356-374).
caataacgagttggtaatt

SEQ ID NO: 89191 - DNA, 19 bp, Homo sapiens
  siRNA target sequence for MAP3K2 (NM_006609.2,362-380).
cgagttggtaattccatta

SEQ ID NO: 89192 - DNA, 19 bp, Homo sapiens
  siRNA target sequence for MAP3K2 (NM_006609.2,363-381).
gagttggtaattccattaa

SEQ ID NO: 89193 - DNA, 19 bp, Homo sapiens
  siRNA target sequence for MAP3K2 (NM_006609.2,416-434).
gctggatcgtagtattcat

SEQ ID NO: 89194 - DNA, 19 bp, Homo sapiens
  siRNA target sequence for MAP3K2 (NM_006609.2,417-435).
ctggatcgtagtattcata

SEQ ID NO: 89195 - DNA, 19 bp, Homo sapiens
  siRNA target sequence for MAP3K2 (NM_006609.2,423-441).
cgtagtattcatatgaaga

SEQ ID NO: 89196 - DNA, 19 bp, Homo sapiens
  siRNA target sequence for MAP3K2 (NM_006609.2,442-460).
gcctcaagatattacttgt

SEQ ID NO: 89197 - DNA, 19 bp, Homo sapiens
  siRNA target sequence for MAP3K2 (NM_006609.2,472-490).
gtacacaggctactaattt

SEQ ID NO: 89198 - DNA, 19 bp, Homo sapiens
  siRNA target sequence for MAP3K2 (NM_006609.2,496-514).
cattgccatcactagaaga

SEQ ID NO: 89199 - DNA, 19 bp, Homo sapiens
  siRNA target sequence for MAP3K2 (NM_006609.2,513-531).
gatttggataatacagtat

SEQ ID NO: 89200 - DNA, 19 bp, Homo sapiens
  siRNA target sequence for MAP3K2 (NM_006609.2,544-562).
ggaaaaaacggctatctat

SEQ ID NO: 89201 - DNA, 19 bp, Homo sapiens
  siRNA target sequence for MAP3K2 (NM_006609.2,545-563).
gaaaaaacggctatctata

SEQ ID NO: 89202 - DNA, 19 bp, Homo sapiens
  siRNA target sequence for MAP3K2 (NM_006609.2,570-588).
cctactagtagagatagaa

SEQ ID NO: 89203 - DNA, 19 bp, Homo sapiens
  siRNA target sequence for MAP3K2 (NM_006609.2,603-621).
ggttacattccagatgaat

SEQ ID NO: 89204 - DNA, 19 bp, Homo sapiens
  siRNA target sequence for MAP3K2 (NM_006609.2,633-651).
gcccggaatgggtcattca

SEQ ID NO: 89205 - DNA, 19 bp, Homo sapiens
  siRNA target sequence for MAP3K2 (NM_006609.2,635-653).
ccggaatgggtcattcact

SEQ ID NO: 89206 - DNA, 19 bp, Homo sapiens
  siRNA target sequence for MAP3K2 (NM_006609.2,636-654).
cggaatgggtcattcacta

SEQ ID NO: 89207 - DNA, 19 bp, Homo sapiens
  siRNA target sequence for MAP3K2 (NM_006609.2,642-660).
gggtcattcactagtatca

SEQ ID NO: 89208 - DNA, 19 bp, Homo sapiens
  siRNA target sequence for MAP3K2 (NM_006609.2,643-661).
ggtcattcactagtatcaa

SEQ ID NO: 89209 - DNA, 19 bp, Homo sapiens
  siRNA target sequence for MAP3K2 (NM_006609.2,701-719).
gctggatccattatcttta

SEQ ID NO: 89210 - DNA, 19 bp, Homo sapiens
  siRNA target sequence for MAP3K2 (NM_006609.2,702-720).
ctggatccattatctttaa

SEQ ID NO: 89211 - DNA, 19 bp, Homo sapiens
  siRNA target sequence for MAP3K2 (NM_006609.2,705-723).
gatccattatctttaagca

SEQ ID NO: 89212 - DNA, 19 bp, Homo sapiens
  siRNA target sequence for MAP3K2 (NM_006609.2,815-833).
gagctacccagataatcat

SEQ ID NO: 89213 - DNA, 19 bp, Homo sapiens
  siRNA target sequence for MAP3K2 (NM_006609.2,848-866).
ctatgataaccctatcttt

SEQ ID NO: 89214 - DNA, 19 bp, Homo sapiens
  siRNA target sequence for MAP3K2 (NM_006609.2,894-912).
ccaagaaggtatcatgttt

SEQ ID NO: 89215 - DNA, 19 bp, Homo sapiens
  siRNA target sequence for MAP3K2 (NM_006609.2,901-919).
ggtatcatgtttcatatca

SEQ ID NO: 89216 - DNA, 19 bp, Homo sapiens
  siRNA target sequence for MAP3K2 (NM_006609.2,990-1008).
cggtctcctgtgagtttca

SEQ ID NO: 89217 - DNA, 19 bp, Homo sapiens
  siRNA target sequence for MAP3K2 (NM_006609.2,1001-1019).
gagtttcagtcctactgat

SEQ ID NO: 89218 - DNA, 19 bp, Homo sapiens
  siRNA target sequence for MAP3K2 (NM_006609.2,1020-1038).
cattccttaagcactagta

SEQ ID NO: 89219 - DNA, 19 bp, Homo sapiens
  siRNA target sequence for MAP3K2 (NM_006609.2,1052-1070).
ctttaccccagagtatgat

SEQ ID NO: 89220 - DNA, 19 bp, Homo sapiens
  siRNA target sequence for MAP3K2 (NM_006609.2,1058-1076).
cccagagtatgatgatagt

SEQ ID NO: 89221 - DNA, 19 bp, Homo sapiens
  siRNA target sequence for MAP3K2 (NM_006609.2,1064-1082).
gtatgatgatagtcgaata

SEQ ID NO: 89222 - DNA, 19 bp, Homo sapiens
  siRNA target sequence for MAP3K2 (NM_006609.2,1071-1089).
gatagtcgaataagaagaa

SEQ ID NO: 89223 - DNA, 19 bp, Homo sapiens
  siRNA target sequence for MAP3K2 (NM_006609.2,1087-1105).
gaaggggaagtgacataga

SEQ ID NO: 89224 - DNA, 19 bp, Homo sapiens
  siRNA target sequence for MAP3K2 (NM_006609.2,1207-1225).
gaagggtctacctctgtta

SEQ ID NO: 89225 - DNA, 19 bp, Homo sapiens
  siRNA target sequence for MAP3K2 (NM_006609.2,1210-1228).
gggtctacctctgttatga

SEQ ID NO: 89226 - DNA, 19 bp, Homo sapiens
  siRNA target sequence for MAP3K2 (NM_006609.2,1211-1229).
ggtctacctctgttatgat

SEQ ID NO: 89227 - DNA, 19 bp, Homo sapiens
  siRNA target sequence for MAP3K2 (NM_006609.2,1214-1232).
ctacctctgttatgatgtt

SEQ ID NO: 89228 - DNA, 19 bp, Homo sapiens
  siRNA target sequence for MAP3K2 (NM_006609.2,1220-1238).
ctgttatgatgttgataca

SEQ ID NO: 89229 - DNA, 19 bp, Homo sapiens
  siRNA target sequence for MAP3K2 (NM_006609.2,1243-1261).
gagaattggctgttaagca

SEQ ID NO: 89230 - DNA, 19 bp, Homo sapiens
  siRNA target sequence for MAP3K2 (NM_006609.2,1287-1305).
gagaccagcaaggaagtaa

SEQ ID NO: 89231 - DNA, 19 bp, Homo sapiens
  siRNA target sequence for MAP3K2 (NM_006609.2,1289-1307).
gaccagcaaggaagtaaat

SEQ ID NO: 89232 - DNA, 19 bp, Homo sapiens
  siRNA target sequence for MAP3K2 (NM_006609.2,1343-1361).
gctacatgagcgaattgtt

SEQ ID NO: 89233 - DNA, 19 bp, Homo sapiens
  siRNA target sequence for MAP3K2 (NM_006609.2,1350-1368).
gagcgaattgttcagtatt

SEQ ID NO: 89234 - DNA, 19 bp, Homo sapiens
  siRNA target sequence for MAP3K2 (NM_006609.2,1352-1370).
gcgaattgttcagtattat

SEQ ID NO: 89235 - DNA, 19 bp, Homo sapiens
  siRNA target sequence for MAP3K2 (NM_006609.2,1362-1380).
cagtattatggctgtttga

SEQ ID NO: 89236 - DNA, 19 bp, Homo sapiens
  siRNA target sequence for MAP3K2 (NM_006609.2,1391-1409).
ggaaaaaacactttccata

SEQ ID NO: 89237 - DNA, 19 bp, Homo sapiens
  siRNA target sequence for MAP3K2 (NM_006609.2,1426-1444).
cagggggttcaattaagga

SEQ ID NO: 89238 - DNA, 19 bp, Homo sapiens
  siRNA target sequence for MAP3K2 (NM_006609.2,1435-1453).
caattaaggaccaattaaa

SEQ ID NO: 89239 - DNA, 19 bp, Homo sapiens
  siRNA target sequence for MAP3K2 (NM_006609.2,1473-1491).
gagaatgtgactaggaaat

SEQ ID NO: 89240 - DNA, 19 bp, Homo sapiens
  siRNA target sequence for MAP3K2 (NM_006609.2,1582-1600).
caacaggcaacgtcaaact

SEQ ID NO: 89241 - DNA, 19 bp, Homo sapiens
  siRNA target sequence for MAP3K2 (NM_006609.2,1592-1610).
cgtcaaactaggagatttt

SEQ ID NO: 89242 - DNA, 19 bp, Homo sapiens
  siRNA target sequence for MAP3K2 (NM_006609.2,1778-1796).
gccgccttgggctgaattt

SEQ ID NO: 89243 - DNA, 19 bp, Homo sapiens
  siRNA target sequence for MAP3K2 (NM_006609.2,1780-1798).
cgccttgggctgaatttga

SEQ ID NO: 89244 - DNA, 19 bp, Homo sapiens
  siRNA target sequence for MAP3K2 (NM_006609.2,1883-1901).
cctcaaacggatttttgta

SEQ ID NO: 89245 - DNA, 19 bp, Homo sapiens
  siRNA target sequence for MAP3K2 (NM_006609.2,1939-1957).
ggcacatgtttgtgcatta

SEQ ID NO: 89246 - DNA, 19 bp, Homo sapiens
  siRNA target sequence for MAP3K3 (NM_002401.2,90-108).
gaacaggaggcattgaact

SEQ ID NO: 89247 - DNA, 19 bp, Homo sapiens
  siRNA target sequence for MAP3K3 (NM_002401.2,153-171).
cggatgcctggatatgaga

SEQ ID NO: 89248 - DNA, 19 bp, Homo sapiens
  siRNA target sequence for MAP3K3 (NM_002401.2,205-223).
ggcagagtgacgtcagaat

SEQ ID NO: 89249 - DNA, 19 bp, Homo sapiens
  siRNA target sequence for MAP3K3 (NM_002401.2,239-257).
cggggagaggcgaattata

SEQ ID NO: 89250 - DNA, 19 bp, Homo sapiens
  siRNA target sequence for MAP3K3 (NM_002401.2,296-314).
caaggtgacaacagtattt

SEQ ID NO: 89251 - DNA, 19 bp, Homo sapiens
  siRNA target sequence for MAP3K3 (NM_002401.2,316-334).
gacaacctcttgatctaca

SEQ ID NO: 89252 - DNA, 19 bp, Homo sapiens
  siRNA target sequence for MAP3K3 (NM_002401.2,327-345).
gatctacattacatgaaca

SEQ ID NO: 89253 - DNA, 19 bp, Homo sapiens
  siRNA target sequence for MAP3K3 (NM_002401.2,355-373).
ccatcctgctgaaaaacca

SEQ ID NO: 89254 - DNA, 19 bp, Homo sapiens
  siRNA target sequence for MAP3K3 (NM_002401.2,446-464).
gtcccaggacagaaaccat

SEQ ID NO: 89255 - DNA, 19 bp, Homo sapiens
  siRNA target sequence for MAP3K3 (NM_002401.2,453-471).
gacagaaaccataacagtt

SEQ ID NO: 89256 - DNA, 19 bp, Homo sapiens
  siRNA target sequence for MAP3K3 (NM_002401.2,518-536).
ccagtccgcaggggatata

SEQ ID NO: 89257 - DNA, 19 bp, Homo sapiens
  siRNA target sequence for MAP3K3 (NM_002401.2,519-537).
cagtccgcaggggatataa

SEQ ID NO: 89258 - DNA, 19 bp, Homo sapiens
  siRNA target sequence for MAP3K3 (NM_002401.2,521-539).
gtccgcaggggatataaat

SEQ ID NO: 89259 - DNA, 19 bp, Homo sapiens
  siRNA target sequence for MAP3K3 (NM_002401.2,524-542).
cgcaggggatataaatact

SEQ ID NO: 89260 - DNA, 19 bp, Homo sapiens
  siRNA target sequence for MAP3K3 (NM_002401.2,731-749).
cctgagcagtgcagaaaat

SEQ ID NO: 89261 - DNA, 19 bp, Homo sapiens
  siRNA target sequence for MAP3K3 (NM_002401.2,736-754).
gcagtgcagaaaattcctt

SEQ ID NO: 89262 - DNA, 19 bp, Homo sapiens
  siRNA target sequence for MAP3K3 (NM_002401.2,794-812).
cccatccttccggaaatca

SEQ ID NO: 89263 - DNA, 19 bp, Homo sapiens
  siRNA target sequence for MAP3K3 (NM_002401.2,971-989).
ccgaatacggcgtcatcaa

SEQ ID NO: 89264 - DNA, 19 bp, Homo sapiens
  siRNA target sequence for MAP3K3 (NM_002401.2,981-999).
cgtcatcaaggcaacttgt

SEQ ID NO: 89265 - DNA, 19 bp, Homo sapiens
  siRNA target sequence for MAP3K3 (NM_002401.2,982-1000).
gtcatcaaggcaacttgtt

SEQ ID NO: 89266 - DNA, 19 bp, Homo sapiens
  siRNA target sequence for MAP3K3 (NM_002401.2,984-1002).
catcaaggcaacttgttca

SEQ ID NO: 89267 - DNA, 19 bp, Homo sapiens
  siRNA target sequence for MAP3K3 (NM_002401.2,1019-1037).
ccgctccctgagcacaaat

SEQ ID NO: 89268 - DNA, 19 bp, Homo sapiens
  siRNA target sequence for MAP3K3 (NM_002401.2,1198-1216).
ccttcggcagggtctattt

SEQ ID NO: 89269 - DNA, 19 bp, Homo sapiens
  siRNA target sequence for MAP3K3 (NM_002401.2,1249-1267).
cttccaagcaggtccaatt

SEQ ID NO: 89270 - DNA, 19 bp, Homo sapiens
  siRNA target sequence for MAP3K3 (NM_002401.2,1252-1270).
ccaagcaggtccaatttga

SEQ ID NO: 89271 - DNA, 19 bp, Homo sapiens
  siRNA target sequence for MAP3K3 (NM_002401.2,1253-1271).
caagcaggtccaatttgat

SEQ ID NO: 89272 - DNA, 19 bp, Homo sapiens
  siRNA target sequence for MAP3K3 (NM_002401.2,1315-1333).
gcgagatccagttgctaaa

SEQ ID NO: 89273 - DNA, 19 bp, Homo sapiens
  siRNA target sequence for MAP3K3 (NM_002401.2,1423-1441).
cagggggctcggtgaaaga

SEQ ID NO: 89274 - DNA, 19 bp, Homo sapiens
  siRNA target sequence for MAP3K3 (NM_002401.2,1523-1541).
gcacagcaacatgattgtt

SEQ ID NO: 89275 - DNA, 19 bp, Homo sapiens
  siRNA target sequence for MAP3K3 (NM_002401.2,1620-1638).
cgcctgcagacgatctgta

SEQ ID NO: 89276 - DNA, 19 bp, Homo sapiens
  siRNA target sequence for MAP3K3 (NM_002401.2,1621-1639).
gcctgcagacgatctgtat

SEQ ID NO: 89277 - DNA, 19 bp, Homo sapiens
  siRNA target sequence for MAP3K3 (NM_002401.2,1623-1641).
ctgcagacgatctgtatgt

SEQ ID NO: 89278 - DNA, 19 bp, Homo sapiens
  siRNA target sequence for MAP3K3 (NM_002401.2,1706-1724).
cgagggctatggaaggaaa

SEQ ID NO: 89279 - DNA, 19 bp, Homo sapiens
  siRNA target sequence for MAP3K3 (NM_002401.2,1850-1868).
ctcccacatctctgaacat

SEQ ID NO: 89280 - DNA, 19 bp, Homo sapiens
  siRNA target sequence for MAP3K4 (NM_005922.1,328-346).
gagtcctgaatctgatcta

SEQ ID NO: 89281 - DNA, 19 bp, Homo sapiens
  siRNA target sequence for MAP3K4 (NM_005922.1,330-348).
gtcctgaatctgatctaga

SEQ ID NO: 89282 - DNA, 19 bp, Homo sapiens
  siRNA target sequence for MAP3K4 (NM_005922.1,347-365).
gaagacttctccgatgaaa

SEQ ID NO: 89283 - DNA, 19 bp, Homo sapiens
  siRNA target sequence for MAP3K4 (NM_005922.1,350-368).
gacttctccgatgaaacaa

SEQ ID NO: 89284 - DNA, 19 bp, Homo sapiens
  siRNA target sequence for MAP3K4 (NM_005922.1,352-370).
cttctccgatgaaacaaat

SEQ ID NO: 89285 - DNA, 19 bp, Homo sapiens
  siRNA target sequence for MAP3K4 (NM_005922.1,355-373).
ctccgatgaaacaaataca

SEQ ID NO: 89286 - DNA, 19 bp, Homo sapiens
  siRNA target sequence for MAP3K4 (NM_005922.1,403-421).
cacacctcgacagatgaaa

SEQ ID NO: 89287 - DNA, 19 bp, Homo sapiens
  siRNA target sequence for MAP3K4 (NM_005922.1,423-441).
gcatgtcaaccaaacatca

SEQ ID NO: 89288 - DNA, 19 bp, Homo sapiens
  siRNA target sequence for MAP3K4 (NM_005922.1,460-478).
gccagccagtcggtctaat

SEQ ID NO: 89289 - DNA, 19 bp, Homo sapiens
  siRNA target sequence for MAP3K4 (NM_005922.1,461-479).
ccagccagtcggtctaatt

SEQ ID NO: 89290 - DNA, 19 bp, Homo sapiens
  siRNA target sequence for MAP3K4 (NM_005922.1,462-480).
cagccagtcggtctaattt

SEQ ID NO: 89291 - DNA, 19 bp, Homo sapiens
  siRNA target sequence for MAP3K4 (NM_005922.1,464-482).
gccagtcggtctaatttga

SEQ ID NO: 89292 - DNA, 19 bp, Homo sapiens
  siRNA target sequence for MAP3K4 (NM_005922.1,465-483).
ccagtcggtctaatttgaa

SEQ ID NO: 89293 - DNA, 19 bp, Homo sapiens
  siRNA target sequence for MAP3K4 (NM_005922.1,466-484).
cagtcggtctaatttgaaa

SEQ ID NO: 89294 - DNA, 19 bp, Homo sapiens
  siRNA target sequence for MAP3K4 (NM_005922.1,468-486).
gtcggtctaatttgaaaga

SEQ ID NO: 89295 - DNA, 19 bp, Homo sapiens
  siRNA target sequence for MAP3K4 (NM_005922.1,506-524).
cagcctccacataaagaca

SEQ ID NO: 89296 - DNA, 19 bp, Homo sapiens
  siRNA target sequence for MAP3K4 (NM_005922.1,577-595).
gatccgagcagctcttaga

SEQ ID NO: 89297 - DNA, 19 bp, Homo sapiens
  siRNA target sequence for MAP3K4 (NM_005922.1,580-598).
ccgagcagctcttagaaca

SEQ ID NO: 89298 - DNA, 19 bp, Homo sapiens
  siRNA target sequence for MAP3K4 (NM_005922.1,581-599).
cgagcagctcttagaacaa

SEQ ID NO: 89299 - DNA, 19 bp, Homo sapiens
  siRNA target sequence for MAP3K4 (NM_005922.1,680-698).
ccagatgtggatctcaata

SEQ ID NO: 89300 - DNA, 19 bp, Homo sapiens
  siRNA target sequence for MAP3K4 (NM_005922.1,681-699).
cagatgtggatctcaataa

SEQ ID NO: 89301 - DNA, 19 bp, Homo sapiens
  siRNA target sequence for MAP3K4 (NM_005922.1,767-785).
cctgcacgccagacttcta

SEQ ID NO: 89302 - DNA, 19 bp, Homo sapiens
  siRNA target sequence for MAP3K4 (NM_005922.1,798-816).
cagcagatcgtttaaagtt

SEQ ID NO: 89303 - DNA, 19 bp, Homo sapiens
  siRNA target sequence for MAP3K4 (NM_005922.1,800-818).
gcagatcgtttaaagtttt

SEQ ID NO: 89304 - DNA, 19 bp, Homo sapiens
  siRNA target sequence for MAP3K4 (NM_005922.1,814-832).
gttttttgaaactttacga

SEQ ID NO: 89305 - DNA, 19 bp, Homo sapiens
  siRNA target sequence for MAP3K4 (NM_005922.1,830-848).
cgacttttgctaaagctta

SEQ ID NO: 89306 - DNA, 19 bp, Homo sapiens
  siRNA target sequence for MAP3K4 (NM_005922.1,910-928).
gcttaaccgatctaacgaa

SEQ ID NO: 89307 - DNA, 19 bp, Homo sapiens
  siRNA target sequence for MAP3K4 (NM_005922.1,955-973).
gcatgcaggacggacaatt

SEQ ID NO: 89308 - DNA, 19 bp, Homo sapiens
  siRNA target sequence for MAP3K4 (NM_005922.1,956-974).
catgcaggacggacaatta

SEQ ID NO: 89309 - DNA, 19 bp, Homo sapiens
  siRNA target sequence for MAP3K4 (NM_005922.1,960-978).
caggacggacaattaacga

SEQ ID NO: 89310 - DNA, 19 bp, Homo sapiens
  siRNA target sequence for MAP3K4 (NM_005922.1,1007-1025).
caagccatcccagatatta

SEQ ID NO: 89311 - DNA, 19 bp, Homo sapiens
  siRNA target sequence for MAP3K4 (NM_005922.1,1060-1078).
gagcttcgcctttgttaga

SEQ ID NO: 89312 - DNA, 19 bp, Homo sapiens
  siRNA target sequence for MAP3K4 (NM_005922.1,1066-1084).
cgcctttgttagagataga

SEQ ID NO: 89313 - DNA, 19 bp, Homo sapiens
  siRNA target sequence for MAP3K4 (NM_005922.1,1125-1143).
ccactcctggaacaaagat

SEQ ID NO: 89314 - DNA, 19 bp, Homo sapiens
  siRNA target sequence for MAP3K4 (NM_005922.1,1134-1152).
gaacaaagattgtaggtta

SEQ ID NO: 89315 - DNA, 19 bp, Homo sapiens
  siRNA target sequence for MAP3K4 (NM_005922.1,1189-1207).
ctcatttgagcaggtaaaa

SEQ ID NO: 89316 - DNA, 19 bp, Homo sapiens
  siRNA target sequence for MAP3K4 (NM_005922.1,1219-1237).
gctgctagagtacatagaa

SEQ ID NO: 89317 - DNA, 19 bp, Homo sapiens
  siRNA target sequence for MAP3K4 (NM_005922.1,1260-1278).
ctcttcagaaggactatga

SEQ ID NO: 89318 - DNA, 19 bp, Homo sapiens
  siRNA target sequence for MAP3K4 (NM_005922.1,1270-1288).
ggactatgaaaaatatgct

SEQ ID NO: 89319 - DNA, 19 bp, Homo sapiens
  siRNA target sequence for MAP3K4 (NM_005922.1,1308-1326).
gggtgcaggcactctgttt

SEQ ID NO: 89320 - DNA, 19 bp, Homo sapiens
  siRNA target sequence for MAP3K4 (NM_005922.1,1310-1328).
gtgcaggcactctgtttgt

SEQ ID NO: 89321 - DNA, 19 bp, Homo sapiens
  siRNA target sequence for MAP3K4 (NM_005922.1,1316-1334).
gcactctgtttgtggttaa

SEQ ID NO: 89322 - DNA, 19 bp, Homo sapiens
  siRNA target sequence for MAP3K4 (NM_005922.1,1317-1335).
cactctgtttgtggttaaa

SEQ ID NO: 89323 - DNA, 19 bp, Homo sapiens
  siRNA target sequence for MAP3K4 (NM_005922.1,1346-1364).
gacttaaatcagaaattaa

SEQ ID NO: 89324 - DNA, 19 bp, Homo sapiens
  siRNA target sequence for MAP3K4 (NM_005922.1,1377-1395).
ctgttttgggcatcaagaa

SEQ ID NO: 89325 - DNA, 19 bp, Homo sapiens
  siRNA target sequence for MAP3K4 (NM_005922.1,1379-1397).
gttttgggcatcaagaatt

SEQ ID NO: 89326 - DNA, 19 bp, Homo sapiens
  siRNA target sequence for MAP3K4 (NM_005922.1,1384-1402).
gggcatcaagaatttatca

SEQ ID NO: 89327 - DNA, 19 bp, Homo sapiens
  siRNA target sequence for MAP3K4 (NM_005922.1,1386-1404).
gcatcaagaatttatcaga

SEQ ID NO: 89328 - DNA, 19 bp, Homo sapiens
  siRNA target sequence for MAP3K4 (NM_005922.1,1436-1454).
cctcgaccatccaaaggta

SEQ ID NO: 89329 - DNA, 19 bp, Homo sapiens
  siRNA target sequence for MAP3K4 (NM_005922.1,1452-1470).
gtaatgagccggagtatga

SEQ ID NO: 89330 - DNA, 19 bp, Homo sapiens
  siRNA target sequence for MAP3K4 (NM_005922.1,1547-1565).
cctagggtaccggaaatca

SEQ ID NO: 89331 - DNA, 19 bp, Homo sapiens
  siRNA target sequence for MAP3K4 (NM_005922.1,1595-1613).
cagtcgcgggactgcatat

SEQ ID NO: 89332 - DNA, 19 bp, Homo sapiens
  siRNA target sequence for MAP3K4 (NM_005922.1,1599-1617).
cgcgggactgcatatccaa

SEQ ID NO: 89333 - DNA, 19 bp, Homo sapiens
  siRNA target sequence for MAP3K4 (NM_005922.1,1685-1703).
gcaggctttagtagacatt

SEQ ID NO: 89334 - DNA, 19 bp, Homo sapiens
  siRNA target sequence for MAP3K4 (NM_005922.1,1776-1794).
gacttcacaagctaatgga

SEQ ID NO: 89335 - DNA, 19 bp, Homo sapiens
  siRNA target sequence for MAP3K4 (NM_005922.1,1804-1822).
gcaaagggcacgtatagca

SEQ ID NO: 89336 - DNA, 19 bp, Homo sapiens
  siRNA target sequence for MAP3K4 (NM_005922.1,1805-1823).
caaagggcacgtatagcat

SEQ ID NO: 89337 - DNA, 19 bp, Homo sapiens
  siRNA target sequence for MAP3K4 (NM_005922.1,1810-1828).
ggcacgtatagcattggta

SEQ ID NO: 89338 - DNA, 19 bp, Homo sapiens
  siRNA target sequence for MAP3K4 (NM_005922.1,1811-1829).
gcacgtatagcattggtaa

SEQ ID NO: 89339 - DNA, 19 bp, Homo sapiens
  siRNA target sequence for MAP3K4 (NM_005922.1,1812-1830).
cacgtatagcattggtaaa

SEQ ID NO: 89340 - DNA, 19 bp, Homo sapiens
  siRNA target sequence for MAP3K4 (NM_005922.1,1814-1832).
cgtatagcattggtaaaga

SEQ ID NO: 89341 - DNA, 19 bp, Homo sapiens
  siRNA target sequence for MAP3K4 (NM_005922.1,1839-1857).
gtccagtggagttttctga

SEQ ID NO: 89342 - DNA, 19 bp, Homo sapiens
  siRNA target sequence for MAP3K4 (NM_005922.1,1910-1928).
ccttcatctgaggagaaat

SEQ ID NO: 89343 - DNA, 19 bp, Homo sapiens
  siRNA target sequence for MAP3K4 (NM_005922.1,2003-2021).
cgagtccttctgaatgtca

SEQ ID NO: 89344 - DNA, 19 bp, Homo sapiens
  siRNA target sequence for MAP3K4 (NM_005922.1,2027-2045).
gagtgtctgaagttaagat

SEQ ID NO: 89345 - DNA, 19 bp, Homo sapiens
  siRNA target sequence for MAP3K4 (NM_005922.1,2185-2203).
gaagcccgactgcaacatt

SEQ ID NO: 89346 - DNA, 19 bp, Homo sapiens
  siRNA target sequence for MAP3K4 (NM_005922.1,2208-2226).
cttttgaagaggatctaca

SEQ ID NO: 89347 - DNA, 19 bp, Homo sapiens
  siRNA target sequence for MAP3K4 (NM_005922.1,2288-2306).
cctcaagcatcgcatagtt

SEQ ID NO: 89348 - DNA, 19 bp, Homo sapiens
  siRNA target sequence for MAP3K4 (NM_005922.1,2289-2307).
ctcaagcatcgcatagttt

SEQ ID NO: 89349 - DNA, 19 bp, Homo sapiens
  siRNA target sequence for MAP3K4 (NM_005922.1,2291-2309).
caagcatcgcatagtttaa

SEQ ID NO: 89350 - DNA, 19 bp, Homo sapiens
  siRNA target sequence for MAP3K4 (NM_005922.1,2294-2312).
gcatcgcatagtttaaaaa

SEQ ID NO: 89351 - DNA, 19 bp, Homo sapiens
  siRNA target sequence for MAP3K4 (NM_005922.1,2386-2404).
gaagcttttctgtgacatt

SEQ ID NO: 89352 - DNA, 19 bp, Homo sapiens
  siRNA target sequence for MAP3K4 (NM_005922.1,2408-2426).
ggaatgctgctgaaatcta

SEQ ID NO: 89353 - DNA, 19 bp, Homo sapiens
  siRNA target sequence for MAP3K4 (NM_005922.1,2493-2511).
gcagtgcttccgacgaaat

SEQ ID NO: 89354 - DNA, 19 bp, Homo sapiens
  siRNA target sequence for MAP3K4 (NM_005922.1,2581-2599).
caaagcacttggatttgct

SEQ ID NO: 89355 - DNA, 19 bp, Homo sapiens
  siRNA target sequence for MAP3K4 (NM_005922.1,2585-2603).
gcacttggatttgctaaaa

SEQ ID NO: 89356 - DNA, 19 bp, Homo sapiens
  siRNA target sequence for MAP3K4 (NM_005922.1,2586-2604).
cacttggatttgctaaaat

SEQ ID NO: 89357 - DNA, 19 bp, Homo sapiens
  siRNA target sequence for MAP3K4 (NM_005922.1,2665-2683).
cctggatgttctgaaatca

SEQ ID NO: 89358 - DNA, 19 bp, Homo sapiens
  siRNA target sequence for MAP3K4 (NM_005922.1,2689-2707).
gtatgtcaaggtgcaaatt

SEQ ID NO: 89359 - DNA, 19 bp, Homo sapiens
  siRNA target sequence for MAP3K4 (NM_005922.1,2702-2720).
caaattcctgggttagaaa

SEQ ID NO: 89360 - DNA, 19 bp, Homo sapiens
  siRNA target sequence for MAP3K4 (NM_005922.1,2711-2729).
gggttagaaaacttgcaaa

SEQ ID NO: 89361 - DNA, 19 bp, Homo sapiens
  siRNA target sequence for MAP3K4 (NM_005922.1,2803-2821).
ctgttcaaaagattcagat

SEQ ID NO: 89362 - DNA, 19 bp, Homo sapiens
  siRNA target sequence for MAP3K4 (NM_005922.1,2955-2973).
gaagcatgcaggtggataa

SEQ ID NO: 89363 - DNA, 19 bp, Homo sapiens
  siRNA target sequence for MAP3K4 (NM_005922.1,2958-2976).
gcatgcaggtggataatct

SEQ ID NO: 89364 - DNA, 19 bp, Homo sapiens
  siRNA target sequence for MAP3K4 (NM_005922.1,2959-2977).
catgcaggtggataatctt

SEQ ID NO: 89365 - DNA, 19 bp, Homo sapiens
  siRNA target sequence for MAP3K4 (NM_005922.1,2995-3013).
gtctgcgcatctcacaatt

SEQ ID NO: 89366 - DNA, 19 bp, Homo sapiens
  siRNA target sequence for MAP3K4 (NM_005922.1,2999-3017).
gcgcatctcacaattcaga

SEQ ID NO: 89367 - DNA, 19 bp, Homo sapiens
  siRNA target sequence for MAP3K4 (NM_005922.1,3037-3055).
cattgagggacttatgact

SEQ ID NO: 89368 - DNA, 19 bp, Homo sapiens
  siRNA target sequence for MAP3K4 (NM_005922.1,3083-3101).
ccggtcatcgccaaagctt

SEQ ID NO: 89369 - DNA, 19 bp, Homo sapiens
  siRNA target sequence for MAP3K4 (NM_005922.1,3084-3102).
cggtcatcgccaaagcttt

SEQ ID NO: 89370 - DNA, 19 bp, Homo sapiens
  siRNA target sequence for MAP3K4 (NM_005922.1,3131-3149).
ctatgcaacaggataagca

SEQ ID NO: 89371 - DNA, 19 bp, Homo sapiens
  siRNA target sequence for MAP3K4 (NM_005922.1,3161-3179).
cgcgtggaccacatgttca

SEQ ID NO: 89372 - DNA, 19 bp, Homo sapiens
  siRNA target sequence for MAP3K4 (NM_005922.1,3164-3182).
gtggaccacatgttcacat

SEQ ID NO: 89373 - DNA, 19 bp, Homo sapiens
  siRNA target sequence for MAP3K4 (NM_005922.1,3169-3187).
ccacatgttcacatcagaa

SEQ ID NO: 89374 - DNA, 19 bp, Homo sapiens
  siRNA target sequence for MAP3K4 (NM_005922.1,3250-3268).
gattcaggggtacaatttt

SEQ ID NO: 89375 - DNA, 19 bp, Homo sapiens
  siRNA target sequence for MAP3K4 (NM_005922.1,3254-3272).
caggggtacaattttggat

SEQ ID NO: 89376 - DNA, 19 bp, Homo sapiens
  siRNA target sequence for MAP3K4 (NM_005922.1,3258-3276).
ggtacaattttggatttga

SEQ ID NO: 89377 - DNA, 19 bp, Homo sapiens
  siRNA target sequence for MAP3K4 (NM_005922.1,3287-3305).
gaagttgttcgtttgatgt

SEQ ID NO: 89378 - DNA, 19 bp, Homo sapiens
  siRNA target sequence for MAP3K4 (NM_005922.1,3350-3368).
gcccggaagtggatgaatt

SEQ ID NO: 89379 - DNA, 19 bp, Homo sapiens
  siRNA target sequence for MAP3K4 (NM_005922.1,3364-3382).
gaattatgtcctgactaaa

SEQ ID NO: 89380 - DNA, 19 bp, Homo sapiens
  siRNA target sequence for MAP3K4 (NM_005922.1,3388-3406).
gagtggtagaggtacaaga

SEQ ID NO: 89381 - DNA, 19 bp, Homo sapiens
  siRNA target sequence for MAP3K4 (NM_005922.1,3411-3429).
ggtgggcgactcaaggatt

SEQ ID NO: 89382 - DNA, 19 bp, Homo sapiens
  siRNA target sequence for MAP3K4 (NM_005922.1,3414-3432).
gggcgactcaaggatttga

SEQ ID NO: 89383 - DNA, 19 bp, Homo sapiens
  siRNA target sequence for MAP3K4 (NM_005922.1,3415-3433).
ggcgactcaaggatttgat

SEQ ID NO: 89384 - DNA, 19 bp, Homo sapiens
  siRNA target sequence for MAP3K4 (NM_005922.1,3416-3434).
gcgactcaaggatttgatt

SEQ ID NO: 89385 - DNA, 19 bp, Homo sapiens
  siRNA target sequence for MAP3K4 (NM_005922.1,3417-3435).
cgactcaaggatttgattt

SEQ ID NO: 89386 - DNA, 19 bp, Homo sapiens
  siRNA target sequence for MAP3K4 (NM_005922.1,3444-3462).
caattgaacctgcctttat

SEQ ID NO: 89387 - DNA, 19 bp, Homo sapiens
  siRNA target sequence for MAP3K4 (NM_005922.1,3546-3564).
gtcctgttacaggtttgta

SEQ ID NO: 89388 - DNA, 19 bp, Homo sapiens
  siRNA target sequence for MAP3K4 (NM_005922.1,3963-3981).
gggaacttcggacactaat

SEQ ID NO: 89389 - DNA, 19 bp, Homo sapiens
  siRNA target sequence for MAP3K4 (NM_005922.1,3965-3983).
gaacttcggacactaatca

SEQ ID NO: 89390 - DNA, 19 bp, Homo sapiens
  siRNA target sequence for MAP3K4 (NM_005922.1,3975-3993).
cactaatcagccagagtaa

SEQ ID NO: 89391 - DNA, 19 bp, Homo sapiens
  siRNA target sequence for MAP3K4 (NM_005922.1,3990-4008).
gtaaagatactgcttctaa

SEQ ID NO: 89392 - DNA, 19 bp, Homo sapiens
  siRNA target sequence for MAP3K4 (NM_005922.1,4033-4051).
gaagtcagtccgattgttt

SEQ ID NO: 89393 - DNA, 19 bp, Homo sapiens
  siRNA target sequence for MAP3K4 (NM_005922.1,4036-4054).
gtcagtccgattgtttgaa

SEQ ID NO: 89394 - DNA, 19 bp, Homo sapiens
  siRNA target sequence for MAP3K4 (NM_005922.1,4038-4056).
cagtccgattgtttgaaga

SEQ ID NO: 89395 - DNA, 19 bp, Homo sapiens
  siRNA target sequence for MAP3K4 (NM_005922.1,4040-4058).
gtccgattgtttgaagaaa

SEQ ID NO: 89396 - DNA, 19 bp, Homo sapiens
  siRNA target sequence for MAP3K4 (NM_005922.1,4084-4102).
gaatatcattggtcaagtt

SEQ ID NO: 89397 - DNA, 19 bp, Homo sapiens
  siRNA target sequence for MAP3K4 (NM_005922.1,4110-4128).
cgcctaagtcctatgataa

SEQ ID NO: 89398 - DNA, 19 bp, Homo sapiens
  siRNA target sequence for MAP3K4 (NM_005922.1,4111-4129).
gcctaagtcctatgataat

SEQ ID NO: 89399 - DNA, 19 bp, Homo sapiens
  siRNA target sequence for MAP3K4 (NM_005922.1,4113-4131).
ctaagtcctatgataatgt

SEQ ID NO: 89400 - DNA, 19 bp, Homo sapiens
  siRNA target sequence for MAP3K4 (NM_005922.1,4248-4266).
ccatgaaagagattcgatt

SEQ ID NO: 89401 - DNA, 19 bp, Homo sapiens
  siRNA target sequence for MAP3K4 (NM_005922.1,4249-4267).
catgaaagagattcgattt

SEQ ID NO: 89402 - DNA, 19 bp, Homo sapiens
  siRNA target sequence for MAP3K4 (NM_005922.1,4258-4276).
gattcgatttcaacctaat

SEQ ID NO: 89403 - DNA, 19 bp, Homo sapiens
  siRNA target sequence for MAP3K4 (NM_005922.1,4272-4290).
ctaatgaccataagactat

SEQ ID NO: 89404 - DNA, 19 bp, Homo sapiens
  siRNA target sequence for MAP3K4 (NM_005922.1,4299-4317).
ctgcagacgaattgaaaat

SEQ ID NO: 89405 - DNA, 19 bp, Homo sapiens
  siRNA target sequence for MAP3K4 (NM_005922.1,4301-4319).
gcagacgaattgaaaatat

SEQ ID NO: 89406 - DNA, 19 bp, Homo sapiens
  siRNA target sequence for MAP3K4 (NM_005922.1,4306-4324).
cgaattgaaaatattcgaa

SEQ ID NO: 89407 - DNA, 19 bp, Homo sapiens
  siRNA target sequence for MAP3K4 (NM_005922.1,4338-4356).
ccaatctggttcggtattt

SEQ ID NO: 89408 - DNA, 19 bp, Homo sapiens
  siRNA target sequence for MAP3K4 (NM_005922.1,4339-4357).
caatctggttcggtatttt

SEQ ID NO: 89409 - DNA, 19 bp, Homo sapiens
  siRNA target sequence for MAP3K4 (NM_005922.1,4359-4377).
gtgtggagctccatagaga

SEQ ID NO: 89410 - DNA, 19 bp, Homo sapiens
  siRNA target sequence for MAP3K4 (NM_005922.1,4442-4460).
cttcaggaacatgtgatta

SEQ ID NO: 89411 - DNA, 19 bp, Homo sapiens
  siRNA target sequence for MAP3K4 (NM_005922.1,4451-4469).
catgtgattaggctgtatt

SEQ ID NO: 89412 - DNA, 19 bp, Homo sapiens
  siRNA target sequence for MAP3K4 (NM_005922.1,4454-4472).
gtgattaggctgtattcaa

SEQ ID NO: 89413 - DNA, 19 bp, Homo sapiens
  siRNA target sequence for MAP3K4 (NM_005922.1,4513-4531).
catagtccaccgtgacatt

SEQ ID NO: 89414 - DNA, 19 bp, Homo sapiens
  siRNA target sequence for MAP3K4 (NM_005922.1,4519-4537).
ccaccgtgacattaaaggt

SEQ ID NO: 89415 - DNA, 19 bp, Homo sapiens
  siRNA target sequence for MAP3K4 (NM_005922.1,4535-4553).
ggtgccaatatcttcctta

SEQ ID NO: 89416 - DNA, 19 bp, Homo sapiens
  siRNA target sequence for MAP3K4 (NM_005922.1,4549-4567).
ccttacctcatctggatta

SEQ ID NO: 89417 - DNA, 19 bp, Homo sapiens
  siRNA target sequence for MAP3K4 (NM_005922.1,4550-4568).
cttacctcatctggattaa

SEQ ID NO: 89418 - DNA, 19 bp, Homo sapiens
  siRNA target sequence for MAP3K4 (NM_005922.1,4557-4575).
catctggattaatcaaact

SEQ ID NO: 89419 - DNA, 19 bp, Homo sapiens
  siRNA target sequence for MAP3K4 (NM_005922.1,4576-4594).
gggagattttggatgttca

SEQ ID NO: 89420 - DNA, 19 bp, Homo sapiens
  siRNA target sequence for MAP3K4 (NM_005922.1,4733-4751).
gggtgtgttgtcatagaga

SEQ ID NO: 89421 - DNA, 19 bp, Homo sapiens
  siRNA target sequence for MAP3K4 (NM_005922.1,4734-4752).
ggtgtgttgtcatagagat

SEQ ID NO: 89422 - DNA, 19 bp, Homo sapiens
  siRNA target sequence for MAP3K4 (NM_005922.1,4767-4785).
ggccttggcatgagtatga

SEQ ID NO: 89423 - DNA, 19 bp, Homo sapiens
  siRNA target sequence for MAP3K4 (NM_005922.1,4784-4802).
gagcacaactttcaaatta

SEQ ID NO: 89424 - DNA, 19 bp, Homo sapiens
  siRNA target sequence for MAP3K4 (NM_005922.1,4828-4846).
gccaccaatccctgaaaga

SEQ ID NO: 89425 - DNA, 19 bp, Homo sapiens
  siRNA target sequence for MAP3K4 (NM_005922.1,4830-4848).
caccaatccctgaaagatt

SEQ ID NO: 89426 - DNA, 19 bp, Homo sapiens
  siRNA target sequence for MAP3K4 (NM_005922.1,4921-4939).
gctcctcgaccattcgttt

SEQ ID NO: 89427 - DNA, 19 bp, Homo sapiens
  siRNA target sequence for MAP3K4 (NM_005922.1,4925-4943).
ctcgaccattcgtttgtca

SEQ ID NO: 89428 - DNA, 19 bp, Homo sapiens
  siRNA target sequence for MAP3K4 (NM_005922.1,4931-4949).
cattcgtttgtcaaggttt

SEQ ID NO: 89429 - DNA, 19 bp, Homo sapiens
  siRNA target sequence for MAP3K5 (NM_005923.3,374-392).
gcggacgagggcatcactt

SEQ ID NO: 89430 - DNA, 19 bp, Homo sapiens
  siRNA target sequence for MAP3K5 (NM_005923.3,375-393).
cggacgagggcatcacttt

SEQ ID NO: 89431 - DNA, 19 bp, Homo sapiens
  siRNA target sequence for MAP3K5 (NM_005923.3,377-395).
gacgagggcatcactttct

SEQ ID NO: 89432 - DNA, 19 bp, Homo sapiens
  siRNA target sequence for MAP3K5 (NM_005923.3,630-648).
ggaccacggtggcatatgt

SEQ ID NO: 89433 - DNA, 19 bp, Homo sapiens
  siRNA target sequence for MAP3K5 (NM_005923.3,785-803).
gtgctggaccgcttttaca

SEQ ID NO: 89434 - DNA, 19 bp, Homo sapiens
  siRNA target sequence for MAP3K5 (NM_005923.3,787-805).
gctggaccgcttttacaat

SEQ ID NO: 89435 - DNA, 19 bp, Homo sapiens
  siRNA target sequence for MAP3K5 (NM_005923.3,795-813).
gcttttacaatgcagatat

SEQ ID NO: 89436 - DNA, 19 bp, Homo sapiens
  siRNA target sequence for MAP3K5 (NM_005923.3,841-859).
ccggcagccgtccttgttt

SEQ ID NO: 89437 - DNA, 19 bp, Homo sapiens
  siRNA target sequence for MAP3K5 (NM_005923.3,842-860).
cggcagccgtccttgtttt

SEQ ID NO: 89438 - DNA, 19 bp, Homo sapiens
  siRNA target sequence for MAP3K5 (NM_005923.3,843-861).
ggcagccgtccttgtttta

SEQ ID NO: 89439 - DNA, 19 bp, Homo sapiens
  siRNA target sequence for MAP3K5 (NM_005923.3,869-887).
ggggtgagagaaagtttca

SEQ ID NO: 89440 - DNA, 19 bp, Homo sapiens
  siRNA target sequence for MAP3K5 (NM_005923.3,904-922).
catcctctactgtgatact

SEQ ID NO: 89441 - DNA, 19 bp, Homo sapiens
  siRNA target sequence for MAP3K5 (NM_005923.3,1014-1032).
ctccacataacaaagtcta

SEQ ID NO: 89442 - DNA, 19 bp, Homo sapiens
  siRNA target sequence for MAP3K5 (NM_005923.3,1115-1133).
cctcttgtggatcgtttta

SEQ ID NO: 89443 - DNA, 19 bp, Homo sapiens
  siRNA target sequence for MAP3K5 (NM_005923.3,1116-1134).
ctcttgtggatcgttttat

SEQ ID NO: 89444 - DNA, 19 bp, Homo sapiens
  siRNA target sequence for MAP3K5 (NM_005923.3,1147-1165).
ggtggcacaagcaagttct

SEQ ID NO: 89445 - DNA, 19 bp, Homo sapiens
  siRNA target sequence for MAP3K5 (NM_005923.3,1148-1166).
gtggcacaagcaagttcta

SEQ ID NO: 89446 - DNA, 19 bp, Homo sapiens
  siRNA target sequence for MAP3K5 (NM_005923.3,1177-1195).
ccgggaatctatactcaat

SEQ ID NO: 89447 - DNA, 19 bp, Homo sapiens
  siRNA target sequence for MAP3K5 (NM_005923.3,1179-1197).
gggaatctatactcaatga

SEQ ID NO: 89448 - DNA, 19 bp, Homo sapiens
  siRNA target sequence for MAP3K5 (NM_005923.3,1181-1199).
gaatctatactcaatgaca

SEQ ID NO: 89449 - DNA, 19 bp, Homo sapiens
  siRNA target sequence for MAP3K5 (NM_005923.3,1201-1219).
caggaaagctcgtaattta

SEQ ID NO: 89450 - DNA, 19 bp, Homo sapiens
  siRNA target sequence for MAP3K5 (NM_005923.3,1259-1277).
cggcagcgagtagataata

SEQ ID NO: 89451 - DNA, 19 bp, Homo sapiens
  siRNA target sequence for MAP3K5 (NM_005923.3,1260-1278).
ggcagcgagtagataatat

SEQ ID NO: 89452 - DNA, 19 bp, Homo sapiens
  siRNA target sequence for MAP3K5 (NM_005923.3,1264-1282).
gcgagtagataatatcgaa

SEQ ID NO: 89453 - DNA, 19 bp, Homo sapiens
  siRNA target sequence for MAP3K5 (NM_005923.3,1295-1313).
gatattgtcataaatctgt

SEQ ID NO: 89454 - DNA, 19 bp, Homo sapiens
  siRNA target sequence for MAP3K5 (NM_005923.3,1357-1375).
gctggtagagactttagaa

SEQ ID NO: 89455 - DNA, 19 bp, Homo sapiens
  siRNA target sequence for MAP3K5 (NM_005923.3,1358-1376).
ctggtagagactttagaaa

SEQ ID NO: 89456 - DNA, 19 bp, Homo sapiens
  siRNA target sequence for MAP3K5 (NM_005923.3,1434-1452).
cactgaataggagaaatct

SEQ ID NO: 89457 - DNA, 19 bp, Homo sapiens
  siRNA target sequence for MAP3K5 (NM_005923.3,1533-1551).
gcctagttggtcgaatcta

SEQ ID NO: 89458 - DNA, 19 bp, Homo sapiens
  siRNA target sequence for MAP3K5 (NM_005923.3,1535-1553).
ctagttggtcgaatctaca

SEQ ID NO: 89459 - DNA, 19 bp, Homo sapiens
  siRNA target sequence for MAP3K5 (NM_005923.3,1544-1562).
cgaatctacaaagatatgt

SEQ ID NO: 89460 - DNA, 19 bp, Homo sapiens
  siRNA target sequence for MAP3K5 (NM_005923.3,1545-1563).
gaatctacaaagatatgtt

SEQ ID NO: 89461 - DNA, 19 bp, Homo sapiens
  siRNA target sequence for MAP3K5 (NM_005923.3,1693-1711).
ccagtttgaatcttccttt

SEQ ID NO: 89462 - DNA, 19 bp, Homo sapiens
  siRNA target sequence for MAP3K5 (NM_005923.3,1724-1742).
gttggggtgaagctaagta

SEQ ID NO: 89463 - DNA, 19 bp, Homo sapiens
  siRNA target sequence for MAP3K5 (NM_005923.3,1831-1849).
ccacatgagagtcattcaa

SEQ ID NO: 89464 - DNA, 19 bp, Homo sapiens
  siRNA target sequence for MAP3K5 (NM_005923.3,1888-1906).
gtacctcaagtctattgta

SEQ ID NO: 89465 - DNA, 19 bp, Homo sapiens
  siRNA target sequence for MAP3K5 (NM_005923.3,1897-1915).
gtctattgtagagacaatt

SEQ ID NO: 89466 - DNA, 19 bp, Homo sapiens
  siRNA target sequence for MAP3K5 (NM_005923.3,2029-2047).
ggttaggtttccagtatta

SEQ ID NO: 89467 - DNA, 19 bp, Homo sapiens
  siRNA target sequence for MAP3K5 (NM_005923.3,2030-2048).
gttaggtttccagtattaa

SEQ ID NO: 89468 - DNA, 19 bp, Homo sapiens
  siRNA target sequence for MAP3K5 (NM_005923.3,2035-2053).
gtttccagtattaatatta

SEQ ID NO: 89469 - DNA, 19 bp, Homo sapiens
  siRNA target sequence for MAP3K5 (NM_005923.3,2076-2094).
cttcttatttgtctatcaa

SEQ ID NO: 89470 - DNA, 19 bp, Homo sapiens
  siRNA target sequence for MAP3K5 (NM_005923.3,2079-2097).
cttatttgtctatcaacaa

SEQ ID NO: 89471 - DNA, 19 bp, Homo sapiens
  siRNA target sequence for MAP3K5 (NM_005923.3,2192-2210).
ggagtgagtatttctaaat

SEQ ID NO: 89472 - DNA, 19 bp, Homo sapiens
  siRNA target sequence for MAP3K5 (NM_005923.3,2272-2290).
ctgtacagaacttcattgt

SEQ ID NO: 89473 - DNA, 19 bp, Homo sapiens
  siRNA target sequence for MAP3K5 (NM_005923.3,2364-2382).
gtgacttgctggagtatga

SEQ ID NO: 89474 - DNA, 19 bp, Homo sapiens
  siRNA target sequence for MAP3K5 (NM_005923.3,2366-2384).
gacttgctggagtatgact

SEQ ID NO: 89475 - DNA, 19 bp, Homo sapiens
  siRNA target sequence for MAP3K5 (NM_005923.3,2371-2389).
gctggagtatgactatgaa

SEQ ID NO: 89476 - DNA, 19 bp, Homo sapiens
  siRNA target sequence for MAP3K5 (NM_005923.3,2377-2395).
gtatgactatgaatatgat

SEQ ID NO: 89477 - DNA, 19 bp, Homo sapiens
  siRNA target sequence for MAP3K5 (NM_005923.3,2426-2444).
ggcacttatgggatagtct

SEQ ID NO: 89478 - DNA, 19 bp, Homo sapiens
  siRNA target sequence for MAP3K5 (NM_005923.3,2427-2445).
gcacttatgggatagtcta

SEQ ID NO: 89479 - DNA, 19 bp, Homo sapiens
  siRNA target sequence for MAP3K5 (NM_005923.3,2467-2485).
ccaagtcagaattgctatt

SEQ ID NO: 89480 - DNA, 19 bp, Homo sapiens
  siRNA target sequence for MAP3K5 (NM_005923.3,2475-2493).
gaattgctattaaggaaat

SEQ ID NO: 89481 - DNA, 19 bp, Homo sapiens
  siRNA target sequence for MAP3K5 (NM_005923.3,2589-2607).
ctttcagtgagaatggttt

SEQ ID NO: 89482 - DNA, 19 bp, Homo sapiens
  siRNA target sequence for MAP3K5 (NM_005923.3,2651-2669).
gctctccttcgttccaaat

SEQ ID NO: 89483 - DNA, 19 bp, Homo sapiens
  siRNA target sequence for MAP3K5 (NM_005923.3,2673-2691).
gtccattaaaagacaatga

SEQ ID NO: 89484 - DNA, 19 bp, Homo sapiens
  siRNA target sequence for MAP3K5 (NM_005923.3,2704-2722).
cttttatacaaagcaaata

SEQ ID NO: 89485 - DNA, 19 bp, Homo sapiens
  siRNA target sequence for MAP3K5 (NM_005923.3,2717-2735).
caaatactggaaggattaa

SEQ ID NO: 89486 - DNA, 19 bp, Homo sapiens
  siRNA target sequence for MAP3K5 (NM_005923.3,2743-2761).
ccatgacaatcagatagtt

SEQ ID NO: 89487 - DNA, 19 bp, Homo sapiens
  siRNA target sequence for MAP3K5 (NM_005923.3,2777-2795).
ggtgacaatgtgttgatta

SEQ ID NO: 89488 - DNA, 19 bp, Homo sapiens
  siRNA target sequence for MAP3K5 (NM_005923.3,2778-2796).
gtgacaatgtgttgattaa

SEQ ID NO: 89489 - DNA, 19 bp, Homo sapiens
  siRNA target sequence for MAP3K5 (NM_005923.3,2821-2839).
ctctgacttcggaacatca

SEQ ID NO: 89490 - DNA, 19 bp, Homo sapiens
  siRNA target sequence for MAP3K5 (NM_005923.3,2825-2843).
gacttcggaacatcaaaga

SEQ ID NO: 89491 - DNA, 19 bp, Homo sapiens
  siRNA target sequence for MAP3K5 (NM_005923.3,2880-2898).
ctggtaccctccagtatat

SEQ ID NO: 89492 - DNA, 19 bp, Homo sapiens
  siRNA target sequence for MAP3K5 (NM_005923.3,2955-2973).
ggtctctgggctgtacaat

SEQ ID NO: 89493 - DNA, 19 bp, Homo sapiens
  siRNA target sequence for MAP3K5 (NM_005923.3,2962-2980).
gggctgtacaatcattgaa

SEQ ID NO: 89494 - DNA, 19 bp, Homo sapiens
  siRNA target sequence for MAP3K5 (NM_005923.3,2963-2981).
ggctgtacaatcattgaaa

SEQ ID NO: 89495 - DNA, 19 bp, Homo sapiens
  siRNA target sequence for MAP3K5 (NM_005923.3,2964-2982).
gctgtacaatcattgaaat

SEQ ID NO: 89496 - DNA, 19 bp, Homo sapiens
  siRNA target sequence for MAP3K5 (NM_005923.3,2991-3009).
gaaaacccccattttatga

SEQ ID NO: 89497 - DNA, 19 bp, Homo sapiens
  siRNA target sequence for MAP3K5 (NM_005923.3,3020-3038).
ccacaagcagctatgttca

SEQ ID NO: 89498 - DNA, 19 bp, Homo sapiens
  siRNA target sequence for MAP3K5 (NM_005923.3,3094-3112).
caaggcattcatactgaaa

SEQ ID NO: 89499 - DNA, 19 bp, Homo sapiens
  siRNA target sequence for MAP3K5 (NM_005923.3,3318-3336).
cacccgacacggagttgaa

SEQ ID NO: 89500 - DNA, 19 bp, Homo sapiens
  siRNA target sequence for MAP3K5 (NM_005923.3,3321-3339).
ccgacacggagttgaaagt

SEQ ID NO: 89501 - DNA, 19 bp, Homo sapiens
  siRNA target sequence for MAP3K5 (NM_005923.3,3340-3358).
ggaccccttctctttcaaa

SEQ ID NO: 89502 - DNA, 19 bp, Homo sapiens
  siRNA target sequence for MAP3K5 (NM_005923.3,3375-3393).
gcggagaaagagatgtcaa

SEQ ID NO: 89503 - DNA, 19 bp, Homo sapiens
  siRNA target sequence for MAP3K5 (NM_005923.3,3394-3412).
gggaattcggacactcttt

SEQ ID NO: 89504 - DNA, 19 bp, Homo sapiens
  siRNA target sequence for MAP3K5 (NM_005923.3,3395-3413).
ggaattcggacactctttt

SEQ ID NO: 89505 - DNA, 19 bp, Homo sapiens
  siRNA target sequence for MAP3K5 (NM_005923.3,3416-3434).
ggcattccagatgagaatt

SEQ ID NO: 89506 - DNA, 19 bp, Homo sapiens
  siRNA target sequence for MAP3K5 (NM_005923.3,3537-3555).
cggaagaccaagacaaaat

SEQ ID NO: 89507 - DNA, 19 bp, Homo sapiens
  siRNA target sequence for MAP3K5 (NM_005923.3,3542-3560).
gaccaagacaaaattgtga

SEQ ID NO: 89508 - DNA, 19 bp, Homo sapiens
  siRNA target sequence for MAP3K5 (NM_005923.3,3561-3579).
gaaacctaatggaatcttt

SEQ ID NO: 89509 - DNA, 19 bp, Homo sapiens
  siRNA target sequence for MAP3K5 (NM_005923.3,3589-3607).
ggctgaagaaccgaaacta

SEQ ID NO: 89510 - DNA, 19 bp, Homo sapiens
  siRNA target sequence for MAP3K5 (NM_005923.3,3590-3608).
gctgaagaaccgaaactaa

SEQ ID NO: 89511 - DNA, 19 bp, Homo sapiens
  siRNA target sequence for MAP3K5 (NM_005923.3,3636-3654).
caagcctcagagaatttgt

SEQ ID NO: 89512 - DNA, 19 bp, Homo sapiens
  siRNA target sequence for MAP3K5 (NM_005923.3,3661-3679).
cactgaccgaaaaatcata

SEQ ID NO: 89513 - DNA, 19 bp, Homo sapiens
  siRNA target sequence for MAP3K5 (NM_005923.3,3687-3705).
cactgtcaaagctgaaact

SEQ ID NO: 89514 - DNA, 19 bp, Homo sapiens
  siRNA target sequence for MAP3K5 (NM_005923.3,3785-3803).
cttcggaatcataacatca

SEQ ID NO: 89515 - DNA, 19 bp, Homo sapiens
  siRNA target sequence for MAP3K5 (NM_005923.3,3848-3866).
gtacagacagccattacca

SEQ ID NO: 89516 - DNA, 19 bp, Homo sapiens
  siRNA target sequence for MAP3K5 (NM_005923.3,3910-3928).
gagtgatactgctgatcaa

SEQ ID NO: 89517 - DNA, 19 bp, Homo sapiens
  siRNA target sequence for MAP3K5 (NM_005923.3,4028-4046).
gtgagcacgctcagttcta

SEQ ID NO: 89518 - DNA, 19 bp, Homo sapiens
  siRNA target sequence for MAP3K5 (NM_005923.3,4071-4089).
ctcaccggtcactgaatgt

SEQ ID NO: 89519 - DNA, 19 bp, Homo sapiens
  siRNA target sequence for MAP3K5 (NM_005923.3,4139-4157).
gttcggaaagagaaagaat

SEQ ID NO: 89520 - DNA, 19 bp, Homo sapiens
  siRNA target sequence for MAP3K5 (NM_005923.3,4168-4186).
ccttcatcgagctattgaa

SEQ ID NO: 89521 - DNA, 19 bp, Homo sapiens
  siRNA target sequence for MAP3K5 (NM_005923.3,4222-4240).
gtcccaacccatagaaatt

SEQ ID NO: 89522 - DNA, 19 bp, Homo sapiens
  siRNA target sequence for MAP3K5 (NM_005923.3,4249-4267).
gcctgtatttcatctaaat

SEQ ID NO: 89523 - DNA, 19 bp, Homo sapiens
  siRNA target sequence for MAP3K5 (NM_005923.3,4250-4268).
cctgtatttcatctaaatt

SEQ ID NO: 89524 - DNA, 19 bp, Homo sapiens
  siRNA target sequence for MAP3K5 (NM_005923.3,4274-4292).
ggcacaaatactgaagatt

SEQ ID NO: 89525 - DNA, 19 bp, Homo sapiens
  siRNA target sequence for MAP3K5 (NM_005923.3,4276-4294).
cacaaatactgaagattct

SEQ ID NO: 89526 - DNA, 19 bp, Homo sapiens
  siRNA target sequence for MAP3K5 (NM_005923.3,4303-4321).
cgactggctgagagtgaat

SEQ ID NO: 89527 - DNA, 19 bp, Homo sapiens
  siRNA target sequence for MAP3K5 (NM_005923.3,4345-4363).
ccggtttttggctgaagat

SEQ ID NO: 89528 - DNA, 19 bp, Homo sapiens
  siRNA target sequence for MAP3K5 (NM_005923.3,4347-4365).
ggtttttggctgaagatta

SEQ ID NO: 89529 - DNA, 19 bp, Homo sapiens
  siRNA target sequence for MAP3K5 (NM_005923.3,4354-4372).
ggctgaagattatacacta

SEQ ID NO: 89530 - DNA, 19 bp, Homo sapiens
  siRNA target sequence for MAP3K5 (NM_005923.3,4355-4373).
gctgaagattatacactat

SEQ ID NO: 89531 - DNA, 19 bp, Homo sapiens
  siRNA target sequence for MAP3K5 (NM_005923.3,4391-4409).
gttacacgtgatgacttaa

SEQ ID NO: 89532 - DNA, 19 bp, Homo sapiens
  siRNA target sequence for MAP3K5 (NM_005923.3,4397-4415).
cgtgatgacttaaaatgct

SEQ ID NO: 89533 - DNA, 19 bp, Homo sapiens
  siRNA target sequence for MAP3K5 (NM_005923.3,4455-4473).
ctatcattgactttcgaaa

SEQ ID NO: 89534 - DNA, 19 bp, Homo sapiens
  siRNA target sequence for MAP3K6 (NM_004672.2,671-689).
gccgagcagcataatgtct

SEQ ID NO: 89535 - DNA, 19 bp, Homo sapiens
  siRNA target sequence for MAP3K6 (NM_004672.2,807-825).
gcatgtgtggccgtatcta

SEQ ID NO: 89536 - DNA, 19 bp, Homo sapiens
  siRNA target sequence for MAP3K6 (NM_004672.2,869-887).
cgggagcaggcctatcact

SEQ ID NO: 89537 - DNA, 19 bp, Homo sapiens
  siRNA target sequence for MAP3K6 (NM_004672.2,888-906).
ggtatcgcaaggcttttga

SEQ ID NO: 89538 - DNA, 19 bp, Homo sapiens
  siRNA target sequence for MAP3K6 (NM_004672.2,982-1000).
caaagagctccggctaata

SEQ ID NO: 89539 - DNA, 19 bp, Homo sapiens
  siRNA target sequence for MAP3K6 (NM_004672.2,1145-1163).
ctcaatgcccccatatggt

SEQ ID NO: 89540 - DNA, 19 bp, Homo sapiens
  siRNA target sequence for MAP3K6 (NM_004672.2,1839-1857).
gacgcctgcgccacaagaa

SEQ ID NO: 89541 - DNA, 19 bp, Homo sapiens
  siRNA target sequence for MAP3K6 (NM_004672.2,1841-1859).
cgcctgcgccacaagaaca

SEQ ID NO: 89542 - DNA, 19 bp, Homo sapiens
  siRNA target sequence for MAP3K6 (NM_004672.2,1842-1860).
gcctgcgccacaagaacat

SEQ ID NO: 89543 - DNA, 19 bp, Homo sapiens
  siRNA target sequence for MAP3K6 (NM_004672.2,2067-2085).
gggacaatgtgctgatcaa

SEQ ID NO: 89544 - DNA, 19 bp, Homo sapiens
  siRNA target sequence for MAP3K6 (NM_004672.2,2069-2087).
gacaatgtgctgatcaaca

SEQ ID NO: 89545 - DNA, 19 bp, Homo sapiens
  siRNA target sequence for MAP3K6 (NM_004672.2,2097-2115).
ggctgctcaagatttctga

SEQ ID NO: 89546 - DNA, 19 bp, Homo sapiens
  siRNA target sequence for MAP3K6 (NM_004672.2,2310-2328).
cacaggctgccatgtttca

SEQ ID NO: 89547 - DNA, 19 bp, Homo sapiens
  siRNA target sequence for MAP3K6 (NM_004672.2,2622-2640).
cgaagcgctgcctcagtta

SEQ ID NO: 89548 - DNA, 19 bp, Homo sapiens
  siRNA target sequence for MAP3K6 (NM_004672.2,2623-2641).
gaagcgctgcctcagttat

SEQ ID NO: 89549 - DNA, 19 bp, Homo sapiens
  siRNA target sequence for MAP3K6 (NM_004672.2,2784-2802).
cagcgctggcggagaatct

SEQ ID NO: 89550 - DNA, 19 bp, Homo sapiens
  siRNA target sequence for MAP3K6 (NM_004672.2,3138-3156).
ggtcagaggagctgagtaa

SEQ ID NO: 89551 - DNA, 19 bp, Homo sapiens
  siRNA target sequence for MAP3K6 (NM_004672.2,3139-3157).
gtcagaggagctgagtaat

SEQ ID NO: 89552 - DNA, 19 bp, Homo sapiens
  siRNA target sequence for MAP3K6 (NM_004672.2,3417-3435).
ggctacaggaactgaatgt

SEQ ID NO: 89553 - DNA, 19 bp, Homo sapiens
  siRNA target sequence for MAP3K6 (NM_004672.2,3504-3522).
ctcgagatgacctcatcta

SEQ ID NO: 89554 - DNA, 19 bp, Homo sapiens
  siRNA target sequence for MAP3K7 (NM_003188.2,474-492).
gcaaaagatgttgctatta

SEQ ID NO: 89555 - DNA, 19 bp, Homo sapiens
  siRNA target sequence for MAP3K7 (NM_003188.2,511-529).
ctgagaggaaagcgtttat

SEQ ID NO: 89556 - DNA, 19 bp, Homo sapiens
  siRNA target sequence for MAP3K7 (NM_003188.2,515-533).
gaggaaagcgtttattgta

SEQ ID NO: 89557 - DNA, 19 bp, Homo sapiens
  siRNA target sequence for MAP3K7 (NM_003188.2,517-535).
ggaaagcgtttattgtaga

SEQ ID NO: 89558 - DNA, 19 bp, Homo sapiens
  siRNA target sequence for MAP3K7 (NM_003188.2,531-549).
gtagagcttcggcagttat

SEQ ID NO: 89559 - DNA, 19 bp, Homo sapiens
  siRNA target sequence for MAP3K7 (NM_003188.2,550-568).
cccgtgtgaaccatcctaa

SEQ ID NO: 89560 - DNA, 19 bp, Homo sapiens
  siRNA target sequence for MAP3K7 (NM_003188.2,551-569).
ccgtgtgaaccatcctaat

SEQ ID NO: 89561 - DNA, 19 bp, Homo sapiens
  siRNA target sequence for MAP3K7 (NM_003188.2,552-570).
cgtgtgaaccatcctaata

SEQ ID NO: 89562 - DNA, 19 bp, Homo sapiens
  siRNA target sequence for MAP3K7 (NM_003188.2,625-643).
ctgaagggggctctttata

SEQ ID NO: 89563 - DNA, 19 bp, Homo sapiens
  siRNA target sequence for MAP3K7 (NM_003188.2,660-678).
gctgaaccattgccatatt

SEQ ID NO: 89564 - DNA, 19 bp, Homo sapiens
  siRNA target sequence for MAP3K7 (NM_003188.2,661-679).
ctgaaccattgccatatta

SEQ ID NO: 89565 - DNA, 19 bp, Homo sapiens
  siRNA target sequence for MAP3K7 (NM_003188.2,694-712).
caatgagttggtgtttaca

SEQ ID NO: 89566 - DNA, 19 bp, Homo sapiens
  siRNA target sequence for MAP3K7 (NM_003188.2,718-736).
cccaaggagtggcttatct

SEQ ID NO: 89567 - DNA, 19 bp, Homo sapiens
  siRNA target sequence for MAP3K7 (NM_003188.2,719-737).
ccaaggagtggcttatctt

SEQ ID NO: 89568 - DNA, 19 bp, Homo sapiens
  siRNA target sequence for MAP3K7 (NM_003188.2,746-764).
gcaacccaaagcgctaatt

SEQ ID NO: 89569 - DNA, 19 bp, Homo sapiens
  siRNA target sequence for MAP3K7 (NM_003188.2,750-768).
cccaaagcgctaattcaca

SEQ ID NO: 89570 - DNA, 19 bp, Homo sapiens
  siRNA target sequence for MAP3K7 (NM_003188.2,801-819).
gcaggggggacagttctaa

SEQ ID NO: 89571 - DNA, 19 bp, Homo sapiens
  siRNA target sequence for MAP3K7 (NM_003188.2,806-824).
ggggacagttctaaaaatt

SEQ ID NO: 89572 - DNA, 19 bp, Homo sapiens
  siRNA target sequence for MAP3K7 (NM_003188.2,807-825).
gggacagttctaaaaattt

SEQ ID NO: 89573 - DNA, 19 bp, Homo sapiens
  siRNA target sequence for MAP3K7 (NM_003188.2,835-853).
gtacagcctgtgacattca

SEQ ID NO: 89574 - DNA, 19 bp, Homo sapiens
  siRNA target sequence for MAP3K7 (NM_003188.2,856-874).
cacacatgaccaataacaa

SEQ ID NO: 89575 - DNA, 19 bp, Homo sapiens
  siRNA target sequence for MAP3K7 (NM_003188.2,944-962).
cagctggggtattattctt

SEQ ID NO: 89576 - DNA, 19 bp, Homo sapiens
  siRNA target sequence for MAP3K7 (NM_003188.2,979-997).
gtcggaaaccctttgatga

SEQ ID NO: 89577 - DNA, 19 bp, Homo sapiens
  siRNA target sequence for MAP3K7 (NM_003188.2,983-1001).
gaaaccctttgatgagatt

SEQ ID NO: 89578 - DNA, 19 bp, Homo sapiens
  siRNA target sequence for MAP3K7 (NM_003188.2,1006-1024).
gcccagctttccgaatcat

SEQ ID NO: 89579 - DNA, 19 bp, Homo sapiens
  siRNA target sequence for MAP3K7 (NM_003188.2,1008-1026).
ccagctttccgaatcatgt

SEQ ID NO: 89580 - DNA, 19 bp, Homo sapiens
  siRNA target sequence for MAP3K7 (NM_003188.2,1022-1040).
catgtgggctgttcataat

SEQ ID NO: 89581 - DNA, 19 bp, Homo sapiens
  siRNA target sequence for MAP3K7 (NM_003188.2,1025-1043).
gtgggctgttcataatggt

SEQ ID NO: 89582 - DNA, 19 bp, Homo sapiens
  siRNA target sequence for MAP3K7 (NM_003188.2,1094-1112).
gactcgttgttggtctaaa

SEQ ID NO: 89583 - DNA, 19 bp, Homo sapiens
  siRNA target sequence for MAP3K7 (NM_003188.2,1117-1135).
cttcccagcgcccttcaat

SEQ ID NO: 89584 - DNA, 19 bp, Homo sapiens
  siRNA target sequence for MAP3K7 (NM_003188.2,1183-1201).
gagcagatgagccattaca

SEQ ID NO: 89585 - DNA, 19 bp, Homo sapiens
  siRNA target sequence for MAP3K7 (NM_003188.2,1202-1220).
gtatccttgtcagtattca

SEQ ID NO: 89586 - DNA, 19 bp, Homo sapiens
  siRNA target sequence for MAP3K7 (NM_003188.2,1323-1341).
gccacaaatgatactatta

SEQ ID NO: 89587 - DNA, 19 bp, Homo sapiens
  siRNA target sequence for MAP3K7 (NM_003188.2,1324-1342).
ccacaaatgatactattaa

SEQ ID NO: 89588 - DNA, 19 bp, Homo sapiens
  siRNA target sequence for MAP3K7 (NM_003188.2,1534-1552).
gtagatccatccaagactt

SEQ ID NO: 89589 - DNA, 19 bp, Homo sapiens
  siRNA target sequence for MAP3K7 (NM_003188.2,1544-1562).
ccaagacttgactgtaact

SEQ ID NO: 89590 - DNA, 19 bp, Homo sapiens
  siRNA target sequence for MAP3K7 (NM_003188.2,1662-1680).
ccatggacccctgatgatt

SEQ ID NO: 89591 - DNA, 19 bp, Homo sapiens
  siRNA target sequence for MAP3K7 (NM_003188.2,1686-1704).
gataccaatggatcagata

SEQ ID NO: 89592 - DNA, 19 bp, Homo sapiens
  siRNA target sequence for MAP3K7 (NM_003188.2,1708-1726).
ccatcccaatggcttatct

SEQ ID NO: 89593 - DNA, 19 bp, Homo sapiens
  siRNA target sequence for MAP3K7 (NM_003188.2,1712-1730).
cccaatggcttatcttaca

SEQ ID NO: 89594 - DNA, 19 bp, Homo sapiens
  siRNA target sequence for MAP3K7 (NM_003188.2,1780-1798).
ctatggcagtgtttgaaca

SEQ ID NO: 89595 - DNA, 19 bp, Homo sapiens
  siRNA target sequence for MAP3K7 (NM_003188.2,1788-1806).
gtgtttgaacagcattgta

SEQ ID NO: 89596 - DNA, 19 bp, Homo sapiens
  siRNA target sequence for MAP3K7 (NM_003188.2,1920-1938).
cgcctggtacaggaacata

SEQ ID NO: 89597 - DNA, 19 bp, Homo sapiens
  siRNA target sequence for MAP3K7 (NM_003188.2,1982-2000).
gcaatgcaaaaaacaacta

SEQ ID NO: 89598 - DNA, 19 bp, Homo sapiens
  siRNA target sequence for MAP3K7 (NM_145331.1,1432-1450).
gtccctgagatcgtcatat

SEQ ID NO: 89599 - DNA, 19 bp, Homo sapiens
  siRNA target sequence for MAP3K7 (NM_145331.1,1434-1452).
ccctgagatcgtcatatca

SEQ ID NO: 89600 - DNA, 19 bp, Homo sapiens
  siRNA target sequence for MAP3K7 (NM_145332.1,1824-1842).
ctacaggcaagaactagtt

SEQ ID NO: 89601 - DNA, 19 bp, Homo sapiens
  siRNA target sequence for MAP3K8 (NM_005204.2,765-783).
gtctgatgtaatagacatt

SEQ ID NO: 89602 - DNA, 19 bp, Homo sapiens
  siRNA target sequence for MAP3K8 (NM_005204.2,839-857).
ccatgtgtcaagacagtaa

SEQ ID NO: 89603 - DNA, 19 bp, Homo sapiens
  siRNA target sequence for MAP3K8 (NM_005204.2,840-858).
catgtgtcaagacagtaat

SEQ ID NO: 89604 - DNA, 19 bp, Homo sapiens
  siRNA target sequence for MAP3K8 (NM_005204.2,864-882).
cgatgagcgttctaagtct

SEQ ID NO: 89605 - DNA, 19 bp, Homo sapiens
  siRNA target sequence for MAP3K8 (NM_005204.2,901-919).
gaggtaccatggttgtcat

SEQ ID NO: 89606 - DNA, 19 bp, Homo sapiens
  siRNA target sequence for MAP3K8 (NM_005204.2,915-933).
gtcatcagtcagatatgga

SEQ ID NO: 89607 - DNA, 19 bp, Homo sapiens
  siRNA target sequence for MAP3K8 (NM_005204.2,932-950).
gaactgtggaggatttgct

SEQ ID NO: 89608 - DNA, 19 bp, Homo sapiens
  siRNA target sequence for MAP3K8 (NM_005204.2,1003-1021).
ccacaggaatctggaattt

SEQ ID NO: 89609 - DNA, 19 bp, Homo sapiens
  siRNA target sequence for MAP3K8 (NM_005204.2,1044-1062).
ccaaaatggacgttaccaa

SEQ ID NO: 89610 - DNA, 19 bp, Homo sapiens
  siRNA target sequence for MAP3K8 (NM_005204.2,1051-1069).
ggacgttaccaaatagatt

SEQ ID NO: 89611 - DNA, 19 bp, Homo sapiens
  siRNA target sequence for MAP3K8 (NM_005204.2,1098-1116).
gacttacaggaatattggt

SEQ ID NO: 89612 - DNA, 19 bp, Homo sapiens
  siRNA target sequence for MAP3K8 (NM_005204.2,1149-1167).
ggtatacttggcacaagat

SEQ ID NO: 89613 - DNA, 19 bp, Homo sapiens
  siRNA target sequence for MAP3K8 (NM_005204.2,1184-1202).
gaatggcgtgtaaactgat

SEQ ID NO: 89614 - DNA, 19 bp, Homo sapiens
  siRNA target sequence for MAP3K8 (NM_005204.2,1223-1241).
catctgatgtggaaatcca

SEQ ID NO: 89615 - DNA, 19 bp, Homo sapiens
  siRNA target sequence for MAP3K8 (NM_005204.2,1247-1265).
gcttccggcacgagaacat

SEQ ID NO: 89616 - DNA, 19 bp, Homo sapiens
  siRNA target sequence for MAP3K8 (NM_005204.2,1356-1374).
gagctgtggaccaatgaga

SEQ ID NO: 89617 - DNA, 19 bp, Homo sapiens
  siRNA target sequence for MAP3K8 (NM_005204.2,1463-1481).
ctagcaacattgttttcat

SEQ ID NO: 89618 - DNA, 19 bp, Homo sapiens
  siRNA target sequence for MAP3K8 (NM_005204.2,1510-1528).
ggcctaagtgttcaaatga

SEQ ID NO: 89619 - DNA, 19 bp, Homo sapiens
  siRNA target sequence for MAP3K8 (NM_005204.2,1527-1545).
gaccgaagatgtctatttt

SEQ ID NO: 89620 - DNA, 19 bp, Homo sapiens
  siRNA target sequence for MAP3K8 (NM_005204.2,1561-1579).
ggaacagagatttacatga

SEQ ID NO: 89621 - DNA, 19 bp, Homo sapiens
  siRNA target sequence for MAP3K8 (NM_005204.2,1594-1612).
ctgtgcaggggccattcaa

SEQ ID NO: 89622 - DNA, 19 bp, Homo sapiens
  siRNA target sequence for MAP3K8 (NM_005204.2,1705-1723).
ccctcctacctgtacataa

SEQ ID NO: 89623 - DNA, 19 bp, Homo sapiens
  siRNA target sequence for MAP3K8 (NM_005204.2,1709-1727).
cctacctgtacataatcca

SEQ ID NO: 89624 - DNA, 19 bp, Homo sapiens
  siRNA target sequence for MAP3K8 (NM_005204.2,1829-1847).
gagccgcagacctactaaa

SEQ ID NO: 89625 - DNA, 19 bp, Homo sapiens
  siRNA target sequence for MAP3K8 (NM_005204.2,1833-1851).
cgcagacctactaaaacat

SEQ ID NO: 89626 - DNA, 19 bp, Homo sapiens
  siRNA target sequence for MAP3K8 (NM_005204.2,2045-2063).
ctctggctggctacttcaa

SEQ ID NO: 89627 - DNA, 19 bp, Homo sapiens
  siRNA target sequence for MAP3K8 (NM_005204.2,2049-2067).
ggctggctacttcaatctt

SEQ ID NO: 89628 - DNA, 19 bp, Homo sapiens
  siRNA target sequence for MAP3K8 (NM_005204.2,2074-2092).
ggaccaccaacgcttgaat

SEQ ID NO: 89629 - DNA, 19 bp, Homo sapiens
  siRNA target sequence for MAP3K8 (NM_005204.2,2075-2093).
gaccaccaacgcttgaata

SEQ ID NO: 89630 - DNA, 19 bp, Homo sapiens
  siRNA target sequence for MAP4K1 (NM_007181.2,10-28).
gtggaccctgacattttca

SEQ ID NO: 89631 - DNA, 19 bp, Homo sapiens
  siRNA target sequence for MAP4K1 (NM_007181.2,77-95).
gcacgtatggggaagtctt

SEQ ID NO: 89632 - DNA, 19 bp, Homo sapiens
  siRNA target sequence for MAP4K1 (NM_007181.2,78-96).
cacgtatggggaagtcttt

SEQ ID NO: 89633 - DNA, 19 bp, Homo sapiens
  siRNA target sequence for MAP4K1 (NM_007181.2,80-98).
cgtatggggaagtctttaa

SEQ ID NO: 89634 - DNA, 19 bp, Homo sapiens
  siRNA target sequence for MAP4K1 (NM_007181.2,183-201).
ggaaatcctcatattgaaa

SEQ ID NO: 89635 - DNA, 19 bp, Homo sapiens
  siRNA target sequence for MAP4K1 (NM_007181.2,225-243).
ggcctaccatgggagttat

SEQ ID NO: 89636 - DNA, 19 bp, Homo sapiens
  siRNA target sequence for MAP4K1 (NM_007181.2,290-308).
gttctctccaggacatcta

SEQ ID NO: 89637 - DNA, 19 bp, Homo sapiens
  siRNA target sequence for MAP4K1 (NM_007181.2,329-347).
cagagctccagattagcta

SEQ ID NO: 89638 - DNA, 19 bp, Homo sapiens
  siRNA target sequence for MAP4K1 (NM_007181.2,334-352).
ctccagattagctatgtct

SEQ ID NO: 89639 - DNA, 19 bp, Homo sapiens
  siRNA target sequence for MAP4K1 (NM_007181.2,450-468).
ggtcagattggctgacttt

SEQ ID NO: 89640 - DNA, 19 bp, Homo sapiens
  siRNA target sequence for MAP4K1 (NM_007181.2,501-519).
cagacgcctctctttcatt

SEQ ID NO: 89641 - DNA, 19 bp, Homo sapiens
  siRNA target sequence for MAP4K1 (NM_007181.2,701-719).
ctccccgactgaaggaaaa

SEQ ID NO: 89642 - DNA, 19 bp, Homo sapiens
  siRNA target sequence for MAP4K1 (NM_007181.2,1125-1143).
gtcgtctgacgatgactat

SEQ ID NO: 89643 - DNA, 19 bp, Homo sapiens
  siRNA target sequence for MAP4K1 (NM_007181.2,1451-1469).
gtgcccttctcgtaaagtt

SEQ ID NO: 89644 - DNA, 19 bp, Homo sapiens
  siRNA target sequence for MAP4K1 (NM_007181.2,1453-1471).
gcccttctcgtaaagttgt

SEQ ID NO: 89645 - DNA, 19 bp, Homo sapiens
  siRNA target sequence for MAP4K1 (NM_007181.2,1454-1472).
cccttctcgtaaagttgtt

SEQ ID NO: 89646 - DNA, 19 bp, Homo sapiens
  siRNA target sequence for MAP4K1 (NM_007181.2,1456-1474).
cttctcgtaaagttgttca

SEQ ID NO: 89647 - DNA, 19 bp, Homo sapiens
  siRNA target sequence for MAP4K1 (NM_007181.2,1640-1658).
ccatcaacaacgttctcat

SEQ ID NO: 89648 - DNA, 19 bp, Homo sapiens
  siRNA target sequence for MAP4K1 (NM_007181.2,1674-1692).
gaccccccacctgtattct

SEQ ID NO: 89649 - DNA, 19 bp, Homo sapiens
  siRNA target sequence for MAP4K1 (NM_007181.2,1676-1694).
ccccccacctgtattctca

SEQ ID NO: 89650 - DNA, 19 bp, Homo sapiens
  siRNA target sequence for MAP4K1 (NM_007181.2,1708-1726).
ctgctggaacggaaagaga

SEQ ID NO: 89651 - DNA, 19 bp, Homo sapiens
  siRNA target sequence for MAP4K1 (NM_007181.2,1908-1926).
gtaccagcccatgaacaaa

SEQ ID NO: 89652 - DNA, 19 bp, Homo sapiens
  siRNA target sequence for MAP4K2 (NM_004579.2,305-323).
caatgtggtggcctacatt

SEQ ID NO: 89653 - DNA, 19 bp, Homo sapiens
  siRNA target sequence for MAP4K2 (NM_004579.2,379-397).
gctccctgcaggagattta

SEQ ID NO: 89654 - DNA, 19 bp, Homo sapiens
  siRNA target sequence for MAP4K2 (NM_004579.2,650-668).
gcgcaaaggtggctacaat

SEQ ID NO: 89655 - DNA, 19 bp, Homo sapiens
  siRNA target sequence for MAP4K2 (NM_004579.2,652-670).
gcaaaggtggctacaatga

SEQ ID NO: 89656 - DNA, 19 bp, Homo sapiens
  siRNA target sequence for MAP4K2 (NM_004579.2,792-810).
cccaaactgagagataaga

SEQ ID NO: 89657 - DNA, 19 bp, Homo sapiens
  siRNA target sequence for MAP4K2 (NM_004579.2,794-812).
caaactgagagataagact

SEQ ID NO: 89658 - DNA, 19 bp, Homo sapiens
  siRNA target sequence for MAP4K2 (NM_004579.2,811-829).
ctcgctggacccagaattt

SEQ ID NO: 89659 - DNA, 19 bp, Homo sapiens
  siRNA target sequence for MAP4K2 (NM_004579.2,849-867).
gccctgaccaagaatccta

SEQ ID NO: 89660 - DNA, 19 bp, Homo sapiens
  siRNA target sequence for MAP4K2 (NM_004579.2,850-868).
ccctgaccaagaatcctaa

SEQ ID NO: 89661 - DNA, 19 bp, Homo sapiens
  siRNA target sequence for MAP4K2 (NM_004579.2,1624-1642).
cactcaacctgcatgaact

SEQ ID NO: 89662 - DNA, 19 bp, Homo sapiens
  siRNA target sequence for MAP4K2 (NM_004579.2,1658-1676).
ggagaagctgatttcacat

SEQ ID NO: 89663 - DNA, 19 bp, Homo sapiens
  siRNA target sequence for MAP4K2 (NM_004579.2,1687-1705).
ggctctactgcgtgaacaa

SEQ ID NO: 89664 - DNA, 19 bp, Homo sapiens
  siRNA target sequence for MAP4K2 (NM_004579.2,2257-2275).
gtgtgaggattgtcaacat

SEQ ID NO: 89665 - DNA, 19 bp, Homo sapiens
  siRNA target sequence for MAP4K2 (NM_004579.2,2389-2407).
gccgaagcctggataccaa

SEQ ID NO: 89666 - DNA, 19 bp, Homo sapiens
  siRNA target sequence for MAP4K3 (NM_003618.2,187-205).
ggcacggaatgttaacact

SEQ ID NO: 89667 - DNA, 19 bp, Homo sapiens
  siRNA target sequence for MAP4K3 (NM_003618.2,238-256).
ggaaccaggagaagacttt

SEQ ID NO: 89668 - DNA, 19 bp, Homo sapiens
  siRNA target sequence for MAP4K3 (NM_003618.2,290-308).
gactgtaaacacccaaata

SEQ ID NO: 89669 - DNA, 19 bp, Homo sapiens
  siRNA target sequence for MAP4K3 (NM_003618.2,327-345).
gctatctcaggcgagataa

SEQ ID NO: 89670 - DNA, 19 bp, Homo sapiens
  siRNA target sequence for MAP4K3 (NM_003618.2,332-350).
ctcaggcgagataagcttt

SEQ ID NO: 89671 - DNA, 19 bp, Homo sapiens
  siRNA target sequence for MAP4K3 (NM_003618.2,336-354).
ggcgagataagctttggat

SEQ ID NO: 89672 - DNA, 19 bp, Homo sapiens
  siRNA target sequence for MAP4K3 (NM_003618.2,337-355).
gcgagataagctttggatt

SEQ ID NO: 89673 - DNA, 19 bp, Homo sapiens
  siRNA target sequence for MAP4K3 (NM_003618.2,352-370).
gatttgcatggagttttgt

SEQ ID NO: 89674 - DNA, 19 bp, Homo sapiens
  siRNA target sequence for MAP4K3 (NM_003618.2,375-393).
gtggttctttacaggatat

SEQ ID NO: 89675 - DNA, 19 bp, Homo sapiens
  siRNA target sequence for MAP4K3 (NM_003618.2,454-472).
gcagggattatattatctt

SEQ ID NO: 89676 - DNA, 19 bp, Homo sapiens
  siRNA target sequence for MAP4K3 (NM_003618.2,505-523).
gggagctaacattctatta

SEQ ID NO: 89677 - DNA, 19 bp, Homo sapiens
  siRNA target sequence for MAP4K3 (NM_003618.2,525-543).
cggataatggtcatgtgaa

SEQ ID NO: 89678 - DNA, 19 bp, Homo sapiens
  siRNA target sequence for MAP4K3 (NM_003618.2,567-585).
cacagataacagctacaat

SEQ ID NO: 89679 - DNA, 19 bp, Homo sapiens
  siRNA target sequence for MAP4K3 (NM_003618.2,587-605).
gccaaacggaagtctttca

SEQ ID NO: 89680 - DNA, 19 bp, Homo sapiens
  siRNA target sequence for MAP4K3 (NM_003618.2,652-670).
gaaggggggttacaatcaa

SEQ ID NO: 89681 - DNA, 19 bp, Homo sapiens
  siRNA target sequence for MAP4K3 (NM_003618.2,726-744).
ctcctatgtttgacttaca

SEQ ID NO: 89682 - DNA, 19 bp, Homo sapiens
  siRNA target sequence for MAP4K3 (NM_003618.2,816-834).
ggtcaaatagttttcatca

SEQ ID NO: 89683 - DNA, 19 bp, Homo sapiens
  siRNA target sequence for MAP4K3 (NM_003618.2,898-916).
gcatccttttgtaacacaa

SEQ ID NO: 89684 - DNA, 19 bp, Homo sapiens
  siRNA target sequence for MAP4K3 (NM_003618.2,902-920).
ccttttgtaacacaacatt

SEQ ID NO: 89685 - DNA, 19 bp, Homo sapiens
  siRNA target sequence for MAP4K3 (NM_003618.2,935-953).
gcaatcgagctgttggata

SEQ ID NO: 89686 - DNA, 19 bp, Homo sapiens
  siRNA target sequence for MAP4K3 (NM_003618.2,936-954).
caatcgagctgttggataa

SEQ ID NO: 89687 - DNA, 19 bp, Homo sapiens
  siRNA target sequence for MAP4K3 (NM_003618.2,940-958).
cgagctgttggataaagta

SEQ ID NO: 89688 - DNA, 19 bp, Homo sapiens
  siRNA target sequence for MAP4K3 (NM_003618.2,956-974).
gtaaataatccagatcatt

SEQ ID NO: 89689 - DNA, 19 bp, Homo sapiens
  siRNA target sequence for MAP4K3 (NM_003618.2,971-989).
cattccacttaccatgatt

SEQ ID NO: 89690 - DNA, 19 bp, Homo sapiens
  siRNA target sequence for MAP4K3 (NM_003618.2,975-993).
ccacttaccatgatttcga

SEQ ID NO: 89691 - DNA, 19 bp, Homo sapiens
  siRNA target sequence for MAP4K3 (NM_003618.2,976-994).
cacttaccatgatttcgat

SEQ ID NO: 89692 - DNA, 19 bp, Homo sapiens
  siRNA target sequence for MAP4K3 (NM_003618.2,1022-1040).
gtaccacatagaattcact

SEQ ID NO: 89693 - DNA, 19 bp, Homo sapiens
  siRNA target sequence for MAP4K3 (NM_003618.2,1028-1046).
catagaattcactcaacaa

SEQ ID NO: 89694 - DNA, 19 bp, Homo sapiens
  siRNA target sequence for MAP4K3 (NM_003618.2,1071-1089).
cacgctcagagataacctt

SEQ ID NO: 89695 - DNA, 19 bp, Homo sapiens
  siRNA target sequence for MAP4K3 (NM_003618.2,1086-1104).
cctttggccaagtgaaatt

SEQ ID NO: 89696 - DNA, 19 bp, Homo sapiens
  siRNA target sequence for MAP4K3 (NM_003618.2,1087-1105).
ctttggccaagtgaaattt

SEQ ID NO: 89697 - DNA, 19 bp, Homo sapiens
  siRNA target sequence for MAP4K3 (NM_003618.2,1149-1167).
ccgacagtgatggtttttt

SEQ ID NO: 89698 - DNA, 19 bp, Homo sapiens
  siRNA target sequence for MAP4K3 (NM_003618.2,1189-1207).
ctacactgcaagatctaat

SEQ ID NO: 89699 - DNA, 19 bp, Homo sapiens
  siRNA target sequence for MAP4K3 (NM_003618.2,1236-1254).
gacaccaaggtggttactt

SEQ ID NO: 89700 - DNA, 19 bp, Homo sapiens
  siRNA target sequence for MAP4K3 (NM_003618.2,1240-1258).
ccaaggtggttacttttta

SEQ ID NO: 89701 - DNA, 19 bp, Homo sapiens
  siRNA target sequence for MAP4K3 (NM_003618.2,1308-1326).
gaggacacgtcgcacattt

SEQ ID NO: 89702 - DNA, 19 bp, Homo sapiens
  siRNA target sequence for MAP4K3 (NM_003618.2,1311-1329).
gacacgtcgcacatttaga

SEQ ID NO: 89703 - DNA, 19 bp, Homo sapiens
  siRNA target sequence for MAP4K3 (NM_003618.2,1396-1414).
gccaccaaagcctaagtct

SEQ ID NO: 89704 - DNA, 19 bp, Homo sapiens
  siRNA target sequence for MAP4K3 (NM_003618.2,1397-1415).
ccaccaaagcctaagtcta

SEQ ID NO: 89705 - DNA, 19 bp, Homo sapiens
  siRNA target sequence for MAP4K3 (NM_003618.2,1400-1418).
ccaaagcctaagtctatct

SEQ ID NO: 89706 - DNA, 19 bp, Homo sapiens
  siRNA target sequence for MAP4K3 (NM_003618.2,1401-1419).
caaagcctaagtctatctt

SEQ ID NO: 89707 - DNA, 19 bp, Homo sapiens
  siRNA target sequence for MAP4K3 (NM_003618.2,1420-1438).
cataccacaggaaatgcat

SEQ ID NO: 89708 - DNA, 19 bp, Homo sapiens
  siRNA target sequence for MAP4K3 (NM_003618.2,1534-1552).
cagattacccccacacaaa

SEQ ID NO: 89709 - DNA, 19 bp, Homo sapiens
  siRNA target sequence for MAP4K3 (NM_003618.2,1576-1594).
gagctccttccagttaaat

SEQ ID NO: 89710 - DNA, 19 bp, Homo sapiens
  siRNA target sequence for MAP4K3 (NM_003618.2,1673-1691).
gtaccaaagcctattagta

SEQ ID NO: 89711 - DNA, 19 bp, Homo sapiens
  siRNA target sequence for MAP4K3 (NM_003618.2,1704-1722).
caacacctaaagtgcatat

SEQ ID NO: 89712 - DNA, 19 bp, Homo sapiens
  siRNA target sequence for MAP4K3 (NM_003618.2,1824-1842).
gtgccgaagaagggattta

SEQ ID NO: 89713 - DNA, 19 bp, Homo sapiens
  siRNA target sequence for MAP4K3 (NM_003618.2,1836-1854).
ggatttataccctcaatct

SEQ ID NO: 89714 - DNA, 19 bp, Homo sapiens
  siRNA target sequence for MAP4K3 (NM_003618.2,1845-1863).
ccctcaatcttaatgaact

SEQ ID NO: 89715 - DNA, 19 bp, Homo sapiens
  siRNA target sequence for MAP4K3 (NM_003618.2,1900-1918).
gtgtacatggttgtatgta

SEQ ID NO: 89716 - DNA, 19 bp, Homo sapiens
  siRNA target sequence for MAP4K3 (NM_003618.2,1933-1951).
gctatcaatatctggtaaa

SEQ ID NO: 89717 - DNA, 19 bp, Homo sapiens
  siRNA target sequence for MAP4K3 (NM_003618.2,1947-1965).
gtaaagcttctcagcttta

SEQ ID NO: 89718 - DNA, 19 bp, Homo sapiens
  siRNA target sequence for MAP4K3 (NM_003618.2,1958-1976).
cagctttattcccataatt

SEQ ID NO: 89719 - DNA, 19 bp, Homo sapiens
  siRNA target sequence for MAP4K3 (NM_003618.2,1960-1978).
gctttattcccataattta

SEQ ID NO: 89720 - DNA, 19 bp, Homo sapiens
  siRNA target sequence for MAP4K3 (NM_003618.2,1982-2000).
gggctttttgattatgcaa

SEQ ID NO: 89721 - DNA, 19 bp, Homo sapiens
  siRNA target sequence for MAP4K3 (NM_003618.2,2014-2032).
gttacctgttgctattcca

SEQ ID NO: 89722 - DNA, 19 bp, Homo sapiens
  siRNA target sequence for MAP4K3 (NM_003618.2,2038-2056).
caaactccctgacagaata

SEQ ID NO: 89723 - DNA, 19 bp, Homo sapiens
  siRNA target sequence for MAP4K3 (NM_003618.2,2168-2186).
cagactagcattgttctat

SEQ ID NO: 89724 - DNA, 19 bp, Homo sapiens
  siRNA target sequence for MAP4K3 (NM_003618.2,2170-2188).
gactagcattgttctatta

SEQ ID NO: 89725 - DNA, 19 bp, Homo sapiens
  siRNA target sequence for MAP4K3 (NM_003618.2,2195-2213).
gttgaaccaatgcagaaat

SEQ ID NO: 89726 - DNA, 19 bp, Homo sapiens
  siRNA target sequence for MAP4K3 (NM_003618.2,2218-2236).
gttaattaagcacatagat

SEQ ID NO: 89727 - DNA, 19 bp, Homo sapiens
  siRNA target sequence for MAP4K3 (NM_003618.2,2227-2245).
gcacatagattttcctata

SEQ ID NO: 89728 - DNA, 19 bp, Homo sapiens
  siRNA target sequence for MAP4K3 (NM_003618.2,2250-2268).
gtccacttagaatgtttga

SEQ ID NO: 89729 - DNA, 19 bp, Homo sapiens
  siRNA target sequence for MAP4K3 (NM_003618.2,2290-2308).
ggagtaccctttagtttgt

SEQ ID NO: 89730 - DNA, 19 bp, Homo sapiens
  siRNA target sequence for MAP4K3 (NM_003618.2,2335-2353).
caaccaagtggttcgattt

SEQ ID NO: 89731 - DNA, 19 bp, Homo sapiens
  siRNA target sequence for MAP4K3 (NM_003618.2,2339-2357).
caagtggttcgatttgaga

SEQ ID NO: 89732 - DNA, 19 bp, Homo sapiens
  siRNA target sequence for MAP4K3 (NM_003618.2,2354-2372).
gagacggtcaatccaaatt

SEQ ID NO: 89733 - DNA, 19 bp, Homo sapiens
  siRNA target sequence for MAP4K3 (NM_003618.2,2356-2374).
gacggtcaatccaaattct

SEQ ID NO: 89734 - DNA, 19 bp, Homo sapiens
  siRNA target sequence for MAP4K3 (NM_003618.2,2397-2415).
cagataccccacagacaaa

SEQ ID NO: 89735 - DNA, 19 bp, Homo sapiens
  siRNA target sequence for MAP4K3 (NM_003618.2,2456-2474).
gtatgcttggactgttgta

SEQ ID NO: 89736 - DNA, 19 bp, Homo sapiens
  siRNA target sequence for MAP4K3 (NM_003618.2,2526-2544).
cagaactcacctttgattt

SEQ ID NO: 89737 - DNA, 19 bp, Homo sapiens
  siRNA target sequence for MAP4K3 (NM_003618.2,2556-2574).
caatagtgtgcctacaaga

SEQ ID NO: 89738 - DNA, 19 bp, Homo sapiens
  siRNA target sequence for MAP4K3 (NM_003618.2,2609-2627).
ggtagaagttttagatcta

SEQ ID NO: 89739 - DNA, 19 bp, Homo sapiens
  siRNA target sequence for MAP4K3 (NM_003618.2,2682-2700).
ctgacagggtcgtggtttt

SEQ ID NO: 89740 - DNA, 19 bp, Homo sapiens
  siRNA target sequence for MAP4K3 (NM_003618.2,2717-2735).
gataaccccacagcaaata

SEQ ID NO: 89741 - DNA, 19 bp, Homo sapiens
  siRNA target sequence for MAP4K3 (NM_003618.2,2754-2772).
cgggtcatgaaaacagtta

SEQ ID NO: 89742 - DNA, 19 bp, Homo sapiens
  siRNA target sequence for MAP4K5 (NM_006575.3,419-437).
cgtctataaggccagaaat

SEQ ID NO: 89743 - DNA, 19 bp, Homo sapiens
  siRNA target sequence for MAP4K5 (NM_006575.3,557-575).
ctactttgggagttatctt

SEQ ID NO: 89744 - DNA, 19 bp, Homo sapiens
  siRNA target sequence for MAP4K5 (NM_006575.3,573-591).
cttagtcgggaaaaactat

SEQ ID NO: 89745 - DNA, 19 bp, Homo sapiens
  siRNA target sequence for MAP4K5 (NM_006575.3,577-595).
gtcgggaaaaactatggat

SEQ ID NO: 89746 - DNA, 19 bp, Homo sapiens
  siRNA target sequence for MAP4K5 (NM_006575.3,593-611).
gatttgtatggaatactgt

SEQ ID NO: 89747 - DNA, 19 bp, Homo sapiens
  siRNA target sequence for MAP4K5 (NM_006575.3,617-635).
cggatcacttcaagatatt

SEQ ID NO: 89748 - DNA, 19 bp, Homo sapiens
  siRNA target sequence for MAP4K5 (NM_006575.3,618-636).
ggatcacttcaagatattt

SEQ ID NO: 89749 - DNA, 19 bp, Homo sapiens
  siRNA target sequence for MAP4K5 (NM_006575.3,619-637).
gatcacttcaagatattta

SEQ ID NO: 89750 - DNA, 19 bp, Homo sapiens
  siRNA target sequence for MAP4K5 (NM_006575.3,646-664).
ctggaccattatcagaatt

SEQ ID NO: 89751 - DNA, 19 bp, Homo sapiens
  siRNA target sequence for MAP4K5 (NM_006575.3,649-667).
gaccattatcagaattgca

SEQ ID NO: 89752 - DNA, 19 bp, Homo sapiens
  siRNA target sequence for MAP4K5 (NM_006575.3,702-720).
cttgcctatttgcatacta

SEQ ID NO: 89753 - DNA, 19 bp, Homo sapiens
  siRNA target sequence for MAP4K5 (NM_006575.3,766-784).
cagaccatggcgatgtaaa

SEQ ID NO: 89754 - DNA, 19 bp, Homo sapiens
  siRNA target sequence for MAP4K5 (NM_006575.3,768-786).
gaccatggcgatgtaaaat

SEQ ID NO: 89755 - DNA, 19 bp, Homo sapiens
  siRNA target sequence for MAP4K5 (NM_006575.3,770-788).
ccatggcgatgtaaaatta

SEQ ID NO: 89756 - DNA, 19 bp, Homo sapiens
  siRNA target sequence for MAP4K5 (NM_006575.3,923-941).
ctgggcagtaggaataaca

SEQ ID NO: 89757 - DNA, 19 bp, Homo sapiens
  siRNA target sequence for MAP4K5 (NM_006575.3,1001-1019).
cttcttaatgtcaaaaagt

SEQ ID NO: 89758 - DNA, 19 bp, Homo sapiens
  siRNA target sequence for MAP4K5 (NM_006575.3,1057-1075).
ggtcatcaacattccataa

SEQ ID NO: 89759 - DNA, 19 bp, Homo sapiens
  siRNA target sequence for MAP4K5 (NM_006575.3,1129-1147).
gacttctgactcacacttt

SEQ ID NO: 89760 - DNA, 19 bp, Homo sapiens
  siRNA target sequence for MAP4K5 (NM_006575.3,1171-1189).
gagccctagcagttgaact

SEQ ID NO: 89761 - DNA, 19 bp, Homo sapiens
  siRNA target sequence for MAP4K5 (NM_006575.3,1174-1192).
ccctagcagttgaactgtt

SEQ ID NO: 89762 - DNA, 19 bp, Homo sapiens
  siRNA target sequence for MAP4K5 (NM_006575.3,1175-1193).
cctagcagttgaactgtta

SEQ ID NO: 89763 - DNA, 19 bp, Homo sapiens
  siRNA target sequence for MAP4K5 (NM_006575.3,1190-1208).
gttagacaaagtgaacaat

SEQ ID NO: 89764 - DNA, 19 bp, Homo sapiens
  siRNA target sequence for MAP4K5 (NM_006575.3,1210-1228).
cagataaccacgcacatta

SEQ ID NO: 89765 - DNA, 19 bp, Homo sapiens
  siRNA target sequence for MAP4K5 (NM_006575.3,1212-1230).
gataaccacgcacattaca

SEQ ID NO: 89766 - DNA, 19 bp, Homo sapiens
  siRNA target sequence for MAP4K5 (NM_006575.3,1264-1282).
caatcattcgtcataccat

SEQ ID NO: 89767 - DNA, 19 bp, Homo sapiens
  siRNA target sequence for MAP4K5 (NM_006575.3,1268-1286).
cattcgtcataccattaga

SEQ ID NO: 89768 - DNA, 19 bp, Homo sapiens
  siRNA target sequence for MAP4K5 (NM_006575.3,1272-1290).
cgtcataccattagatcta

SEQ ID NO: 89769 - DNA, 19 bp, Homo sapiens
  siRNA target sequence for MAP4K5 (NM_006575.3,1375-1393).
cagaagcacgagatgaaat

SEQ ID NO: 89770 - DNA, 19 bp, Homo sapiens
  siRNA target sequence for MAP4K5 (NM_006575.3,1421-1439).
gttacagtggaatcctttt

SEQ ID NO: 89771 - DNA, 19 bp, Homo sapiens
  siRNA target sequence for MAP4K5 (NM_006575.3,1460-1478).
caaatcaacctcaaaacgt

SEQ ID NO: 89772 - DNA, 19 bp, Homo sapiens
  siRNA target sequence for MAP4K5 (NM_006575.3,1469-1487).
ctcaaaacgtgcaatacca

SEQ ID NO: 89773 - DNA, 19 bp, Homo sapiens
  siRNA target sequence for MAP4K5 (NM_006575.3,1497-1515).
cctcctaagccaaggataa

SEQ ID NO: 89774 - DNA, 19 bp, Homo sapiens
  siRNA target sequence for MAP4K5 (NM_006575.3,1500-1518).
cctaagccaaggataagca

SEQ ID NO: 89775 - DNA, 19 bp, Homo sapiens
  siRNA target sequence for MAP4K5 (NM_006575.3,1532-1550).
caactttccggatgaagaa

SEQ ID NO: 89776 - DNA, 19 bp, Homo sapiens
  siRNA target sequence for MAP4K5 (NM_006575.3,1783-1801).
ccaccccaaaagttctgat

SEQ ID NO: 89777 - DNA, 19 bp, Homo sapiens
  siRNA target sequence for MAP4K5 (NM_006575.3,1862-1880).
ctggatacatcctgataca

SEQ ID NO: 89778 - DNA, 19 bp, Homo sapiens
  siRNA target sequence for MAP4K5 (NM_006575.3,1903-1921).
gaactgaagatggtattta

SEQ ID NO: 89779 - DNA, 19 bp, Homo sapiens
  siRNA target sequence for MAP4K5 (NM_006575.3,1915-1933).
gtatttacacactgaatct

SEQ ID NO: 89780 - DNA, 19 bp, Homo sapiens
  siRNA target sequence for MAP4K5 (NM_006575.3,1950-1968).
gcaacgatggaacagttat

SEQ ID NO: 89781 - DNA, 19 bp, Homo sapiens
  siRNA target sequence for MAP4K5 (NM_006575.3,1984-2002).
cttggctgtatgttatcaa

SEQ ID NO: 89782 - DNA, 19 bp, Homo sapiens
  siRNA target sequence for MAP4K5 (NM_006575.3,1987-2005).
ggctgtatgttatcaataa

SEQ ID NO: 89783 - DNA, 19 bp, Homo sapiens
  siRNA target sequence for MAP4K5 (NM_006575.3,2045-2063).
ctactctcacaatcttata

SEQ ID NO: 89784 - DNA, 19 bp, Homo sapiens
  siRNA target sequence for MAP4K5 (NM_006575.3,2048-2066).
ctctcacaatcttatagct

SEQ ID NO: 89785 - DNA, 19 bp, Homo sapiens
  siRNA target sequence for MAP4K5 (NM_006575.3,2050-2068).
ctcacaatcttatagcttt

SEQ ID NO: 89786 - DNA, 19 bp, Homo sapiens
  siRNA target sequence for MAP4K5 (NM_006575.3,2098-2116).
ctgcccatattcaaactca

SEQ ID NO: 89787 - DNA, 19 bp, Homo sapiens
  siRNA target sequence for MAP4K5 (NM_006575.3,2119-2137).
ggtttccagaccgaatact

SEQ ID NO: 89788 - DNA, 19 bp, Homo sapiens
  siRNA target sequence for MAP4K5 (NM_006575.3,2120-2138).
gtttccagaccgaatacta

SEQ ID NO: 89789 - DNA, 19 bp, Homo sapiens
  siRNA target sequence for MAP4K5 (NM_006575.3,2129-2147).
ccgaatactaccaagaaaa

SEQ ID NO: 89790 - DNA, 19 bp, Homo sapiens
  siRNA target sequence for MAP4K5 (NM_006575.3,2130-2148).
cgaatactaccaagaaaat

SEQ ID NO: 89791 - DNA, 19 bp, Homo sapiens
  siRNA target sequence for MAP4K5 (NM_006575.3,2183-2201).
ctgccacaaatgttgcata

SEQ ID NO: 89792 - DNA, 19 bp, Homo sapiens
  siRNA target sequence for MAP4K5 (NM_006575.3,2285-2303).
gcagaaattcatgttgata

SEQ ID NO: 89793 - DNA, 19 bp, Homo sapiens
  siRNA target sequence for MAP4K5 (NM_006575.3,2382-2400).
gtctgtgtagctattagca

SEQ ID NO: 89794 - DNA, 19 bp, Homo sapiens
  siRNA target sequence for MAP4K5 (NM_006575.3,2413-2431).
cgaatcaggtagttcagtt

SEQ ID NO: 89795 - DNA, 19 bp, Homo sapiens
  siRNA target sequence for MAP4K5 (NM_006575.3,2418-2436).
caggtagttcagtttgaga

SEQ ID NO: 89796 - DNA, 19 bp, Homo sapiens
  siRNA target sequence for MAP4K5 (NM_006575.3,2427-2445).
cagtttgagacaatcaatt

SEQ ID NO: 89797 - DNA, 19 bp, Homo sapiens
  siRNA target sequence for MAP4K5 (NM_006575.3,2533-2551).
ccgttttagtgtgtttaga

SEQ ID NO: 89798 - DNA, 19 bp, Homo sapiens
  siRNA target sequence for MAP4K5 (NM_006575.3,2535-2553).
gttttagtgtgtttagaca

SEQ ID NO: 89799 - DNA, 19 bp, Homo sapiens
  siRNA target sequence for MAP4K5 (NM_006575.3,2545-2563).
gtttagacaaatttgtgaa

SEQ ID NO: 89800 - DNA, 19 bp, Homo sapiens
  siRNA target sequence for MAP4K5 (NM_006575.3,2600-2618).
gaaactggcctctgagtta

SEQ ID NO: 89801 - DNA, 19 bp, Homo sapiens
  siRNA target sequence for MAP4K5 (NM_006575.3,2604-2622).
ctggcctctgagttaagtt

SEQ ID NO: 89802 - DNA, 19 bp, Homo sapiens
  siRNA target sequence for MAP4K5 (NM_006575.3,2606-2624).
ggcctctgagttaagtttt

SEQ ID NO: 89803 - DNA, 19 bp, Homo sapiens
  siRNA target sequence for MAP4K5 (NM_006575.3,2631-2649).
cgcattgaatctgtagtat

SEQ ID NO: 89804 - DNA, 19 bp, Homo sapiens
  siRNA target sequence for MAP4K5 (NM_006575.3,2685-2703).
gggatgcagggtaaaagct

SEQ ID NO: 89805 - DNA, 19 bp, Homo sapiens
  siRNA target sequence for MAP4K5 (NM_006575.3,2686-2704).
ggatgcagggtaaaagctt

SEQ ID NO: 89806 - DNA, 19 bp, Homo sapiens
  siRNA target sequence for MAP4K5 (NM_006575.3,2715-2733).
gaggttacccaggagattt

SEQ ID NO: 89807 - DNA, 19 bp, Homo sapiens
  siRNA target sequence for MAP4K5 (NM_006575.3,2743-2761).
caagagttttccgcttatt

SEQ ID NO: 89808 - DNA, 19 bp, Homo sapiens
  siRNA target sequence for MAP4K5 (NM_006575.3,2748-2766).
gttttccgcttattaggat

SEQ ID NO: 89809 - DNA, 19 bp, Homo sapiens
  siRNA target sequence for MAP4K5 (NM_006575.3,2767-2785).
cagacagggttgtcgtttt

SEQ ID NO: 89810 - DNA, 19 bp, Homo sapiens
  siRNA target sequence for MAP4K5 (NM_006575.3,2837-2855).
ggctggacatgaaaatagt

SEQ ID NO: 89811 - DNA, 19 bp, Homo sapiens
  siRNA target sequence for MAPK1 (NM_002745.2,351-369).
catggtgtgctctgcttat

SEQ ID NO: 89812 - DNA, 19 bp, Homo sapiens
  siRNA target sequence for MAPK1 (NM_002745.2,354-372).
ggtgtgctctgcttatgat

SEQ ID NO: 89813 - DNA, 19 bp, Homo sapiens
  siRNA target sequence for MAPK1 (NM_002745.2,355-373).
gtgtgctctgcttatgata

SEQ ID NO: 89814 - DNA, 19 bp, Homo sapiens
  siRNA target sequence for MAPK1 (NM_002745.2,359-377).
gctctgcttatgataatgt

SEQ ID NO: 89815 - DNA, 19 bp, Homo sapiens
  siRNA target sequence for MAPK1 (NM_002745.2,385-403).
gttcgagtagctatcaaga

SEQ ID NO: 89816 - DNA, 19 bp, Homo sapiens
  siRNA target sequence for MAPK1 (NM_002745.2,474-492).
cagacatgagaacatcatt

SEQ ID NO: 89817 - DNA, 19 bp, Homo sapiens
  siRNA target sequence for MAPK1 (NM_002745.2,515-533).
caccaaccatcgagcaaat

SEQ ID NO: 89818 - DNA, 19 bp, Homo sapiens
  siRNA target sequence for MAPK1 (NM_002745.2,517-535).
ccaaccatcgagcaaatga

SEQ ID NO: 89819 - DNA, 19 bp, Homo sapiens
  siRNA target sequence for MAPK1 (NM_002745.2,518-536).
caaccatcgagcaaatgaa

SEQ ID NO: 89820 - DNA, 19 bp, Homo sapiens
  siRNA target sequence for MAPK1 (NM_002745.2,521-539).
ccatcgagcaaatgaaaga

SEQ ID NO: 89821 - DNA, 19 bp, Homo sapiens
  siRNA target sequence for MAPK1 (NM_002745.2,636-654).
gatcctcagagggttaaaa

SEQ ID NO: 89822 - DNA, 19 bp, Homo sapiens
  siRNA target sequence for MAPK1 (NM_002745.2,639-657).
cctcagagggttaaaatat

SEQ ID NO: 89823 - DNA, 19 bp, Homo sapiens
  siRNA target sequence for MAPK1 (NM_002745.2,644-662).
gagggttaaaatatatcca

SEQ ID NO: 89824 - DNA, 19 bp, Homo sapiens
  siRNA target sequence for MAPK1 (NM_002745.2,785-803).
ggttcctgacagaatatgt

SEQ ID NO: 89825 - DNA, 19 bp, Homo sapiens
  siRNA target sequence for MAPK1 (NM_002745.2,821-839).
gggctccagaaattatgtt

SEQ ID NO: 89826 - DNA, 19 bp, Homo sapiens
  siRNA target sequence for MAPK1 (NM_002745.2,823-841).
gctccagaaattatgttga

SEQ ID NO: 89827 - DNA, 19 bp, Homo sapiens
  siRNA target sequence for MAPK1 (NM_002745.2,852-870).
ctacaccaagtccattgat

SEQ ID NO: 89828 - DNA, 19 bp, Homo sapiens
  siRNA target sequence for MAPK1 (NM_002745.2,926-944).
cagggaagcattatcttga

SEQ ID NO: 89829 - DNA, 19 bp, Homo sapiens
  siRNA target sequence for MAPK1 (NM_002745.2,1068-1086).
caggctgttcccaaatgct

SEQ ID NO: 89830 - DNA, 19 bp, Homo sapiens
  siRNA target sequence for MAPK1 (NM_002745.2,1133-1151).
cacacaagaggattgaagt

SEQ ID NO: 89831 - DNA, 19 bp, Homo sapiens
  siRNA target sequence for MAPK1 (NM_002745.2,1171-1189).
ccatatctggagcagtatt

SEQ ID NO: 89832 - DNA, 19 bp, Homo sapiens
  siRNA target sequence for MAPK1 (NM_002745.2,1172-1190).
catatctggagcagtatta

SEQ ID NO: 89833 - DNA, 19 bp, Homo sapiens
  siRNA target sequence for MAPK1 (NM_002745.2,1213-1231).
gccgaagcaccattcaagt

SEQ ID NO: 89834 - DNA, 19 bp, Homo sapiens
  siRNA target sequence for MAPK1 (NM_002745.2,1214-1232).
ccgaagcaccattcaagtt

SEQ ID NO: 89835 - DNA, 19 bp, Homo sapiens
  siRNA target sequence for MAPK1 (NM_002745.2,1230-1248).
gttcgacatggaattggat

SEQ ID NO: 89836 - DNA, 19 bp, Homo sapiens
  siRNA target sequence for MAPK1 (NM_002745.2,1245-1263).
ggatgacttgcctaaggaa

SEQ ID NO: 89837 - DNA, 19 bp, Homo sapiens
  siRNA target sequence for MAPK1 (NM_002745.2,1256-1274).
ctaaggaaaagctcaaaga

SEQ ID NO: 89838 - DNA, 19 bp, Homo sapiens
  siRNA target sequence for MAPK10 (NM_002753.2,250-268).
cagtgaaccaacattggat

SEQ ID NO: 89839 - DNA, 19 bp, Homo sapiens
  siRNA target sequence for MAPK10 (NM_002753.2,280-298).
cttttgtcagggattcgat

SEQ ID NO: 89840 - DNA, 19 bp, Homo sapiens
  siRNA target sequence for MAPK10 (NM_002753.2,302-320).
caagtggatgtgtcatata

SEQ ID NO: 89841 - DNA, 19 bp, Homo sapiens
  siRNA target sequence for MAPK10 (NM_002753.2,313-331).
gtcatatattgccaaacat

SEQ ID NO: 89842 - DNA, 19 bp, Homo sapiens
  siRNA target sequence for MAPK10 (NM_002753.2,323-341).
gccaaacattacaacatga

SEQ ID NO: 89843 - DNA, 19 bp, Homo sapiens
  siRNA target sequence for MAPK10 (NM_002753.2,342-360).
gcaaaagcaaagttgacaa

SEQ ID NO: 89844 - DNA, 19 bp, Homo sapiens
  siRNA target sequence for MAPK10 (NM_002753.2,406-424).
caagcgctaccagaatcta

SEQ ID NO: 89845 - DNA, 19 bp, Homo sapiens
  siRNA target sequence for MAPK10 (NM_002753.2,440-458).
ggggctcagggcatagttt

SEQ ID NO: 89846 - DNA, 19 bp, Homo sapiens
  siRNA target sequence for MAPK10 (NM_002753.2,442-460).
ggctcagggcatagtttgt

SEQ ID NO: 89847 - DNA, 19 bp, Homo sapiens
  siRNA target sequence for MAPK10 (NM_002753.2,552-570).
gggagctggtcctcatgaa

SEQ ID NO: 89848 - DNA, 19 bp, Homo sapiens
  siRNA target sequence for MAPK10 (NM_002753.2,568-586).
gaagtgtgtgaaccataaa

SEQ ID NO: 89849 - DNA, 19 bp, Homo sapiens
  siRNA target sequence for MAPK10 (NM_002753.2,635-653).
gagttccaagatgtttact

SEQ ID NO: 89850 - DNA, 19 bp, Homo sapiens
  siRNA target sequence for MAPK10 (NM_002753.2,637-655).
gttccaagatgtttactta

SEQ ID NO: 89851 - DNA, 19 bp, Homo sapiens
  siRNA target sequence for MAPK10 (NM_002753.2,707-725).
gaccatgagcgaatgtctt

SEQ ID NO: 89852 - DNA, 19 bp, Homo sapiens
  siRNA target sequence for MAPK10 (NM_002753.2,723-741).
cttacctgctgtaccaaat

SEQ ID NO: 89853 - DNA, 19 bp, Homo sapiens
  siRNA target sequence for MAPK10 (NM_002753.2,798-816).
caagtaacattgtagtcaa

SEQ ID NO: 89854 - DNA, 19 bp, Homo sapiens
  siRNA target sequence for MAPK10 (NM_002753.2,817-835).
gtctgattgcacattgaaa

SEQ ID NO: 89855 - DNA, 19 bp, Homo sapiens
  siRNA target sequence for MAPK10 (NM_002753.2,866-884).
ggcacaagcttcatgatga

SEQ ID NO: 89856 - DNA, 19 bp, Homo sapiens
  siRNA target sequence for MAPK10 (NM_002753.2,893-911).
gtggtgacacgttattaca

SEQ ID NO: 89857 - DNA, 19 bp, Homo sapiens
  siRNA target sequence for MAPK10 (NM_002753.2,895-913).
ggtgacacgttattacaga

SEQ ID NO: 89858 - DNA, 19 bp, Homo sapiens
  siRNA target sequence for MAPK10 (NM_002753.2,1181-1199).
gcggactccgagcacaata

SEQ ID NO: 89859 - DNA, 19 bp, Homo sapiens
  siRNA target sequence for MAPK10 (NM_002753.2,1182-1200).
cggactccgagcacaataa

SEQ ID NO: 89860 - DNA, 19 bp, Homo sapiens
  siRNA target sequence for MAPK10 (NM_002753.2,1183-1201).
ggactccgagcacaataaa

SEQ ID NO: 89861 - DNA, 19 bp, Homo sapiens
  siRNA target sequence for MAPK10 (NM_002753.2,1188-1206).
ccgagcacaataaactcaa

SEQ ID NO: 89862 - DNA, 19 bp, Homo sapiens
  siRNA target sequence for MAPK10 (NM_002753.2,1189-1207).
cgagcacaataaactcaaa

SEQ ID NO: 89863 - DNA, 19 bp, Homo sapiens
  siRNA target sequence for MAPK10 (NM_002753.2,1246-1264).
gattgacccagcaaaaaga

SEQ ID NO: 89864 - DNA, 19 bp, Homo sapiens
  siRNA target sequence for MAPK10 (NM_002753.2,1338-1356).
cacctcagatatatgacaa

SEQ ID NO: 89865 - DNA, 19 bp, Homo sapiens
  siRNA target sequence for MAPK10 (NM_002753.2,1400-1418).
cttatctacaaggaagtaa

SEQ ID NO: 89866 - DNA, 19 bp, Homo sapiens
  siRNA target sequence for MAPK10 (NM_138980.1,1843-1861).
cctcgtctgtcaatgacat

SEQ ID NO: 89867 - DNA, 19 bp, Homo sapiens
  siRNA target sequence for MAPK11 (NM_002751.4,453-471).
gcgacgagcacgttcaatt

SEQ ID NO: 89868 - DNA, 19 bp, Homo sapiens
  siRNA target sequence for MAPK11 (NM_002751.4,815-833).
cctgaggttctggcaaaaa

SEQ ID NO: 89869 - DNA, 19 bp, Homo sapiens
  siRNA target sequence for MAPK12 (NM_002969.2,573-591).
gctgctggacgtattcact

SEQ ID NO: 89870 - DNA, 19 bp, Homo sapiens
  siRNA target sequence for MAPK12 (NM_002969.2,607-625).
gatgacttcacggactttt

SEQ ID NO: 89871 - DNA, 19 bp, Homo sapiens
  siRNA target sequence for MAPK12 (NM_002969.2,971-989).
caggcaagacgctgttcaa

SEQ ID NO: 89872 - DNA, 19 bp, Homo sapiens
  siRNA target sequence for MAPK12 (NM_002969.2,1309-1327).
gaccgcacactggatgaat

SEQ ID NO: 89873 - DNA, 19 bp, Homo sapiens
  siRNA target sequence for MAPK12 (NM_002969.2,1328-1346).
ggaagcgtgttacttacaa

SEQ ID NO: 89874 - DNA, 19 bp, Homo sapiens
  siRNA target sequence for MAPK12 (NM_002969.2,1329-1347).
gaagcgtgttacttacaaa

SEQ ID NO: 89875 - DNA, 19 bp, Homo sapiens
  siRNA target sequence for MAPK13 (NM_002754.3,111-129).
cggaaaaagggcttctaca

SEQ ID NO: 89876 - DNA, 19 bp, Homo sapiens
  siRNA target sequence for MAPK13 (NM_002754.3,112-130).
ggaaaaagggcttctacaa

SEQ ID NO: 89877 - DNA, 19 bp, Homo sapiens
  siRNA target sequence for MAPK13 (NM_002754.3,274-292).
cctttcagtccgagatctt

SEQ ID NO: 89878 - DNA, 19 bp, Homo sapiens
  siRNA target sequence for MAPK13 (NM_002754.3,383-401).
ctccctgcgcaacttctat

SEQ ID NO: 89879 - DNA, 19 bp, Homo sapiens
  siRNA target sequence for MAPK13 (NM_002754.3,385-403).
ccctgcgcaacttctatga

SEQ ID NO: 89880 - DNA, 19 bp, Homo sapiens
  siRNA target sequence for MAPK13 (NM_002754.3,852-870).
gacaaagcggccaaatcct

SEQ ID NO: 89881 - DNA, 19 bp, Homo sapiens
  siRNA target sequence for MAPK13 (NM_002754.3,1064-1082).
gccgtttgatgattcctta

SEQ ID NO: 89882 - DNA, 19 bp, Homo sapiens
  siRNA target sequence for MAPK13 (NM_002754.3,1078-1096).
ccttagaacacgagaaact

SEQ ID NO: 89883 - DNA, 19 bp, Homo sapiens
  siRNA target sequence for MAPK14 (NM_001315.1,521-539).
gaagctctccagaccattt

SEQ ID NO: 89884 - DNA, 19 bp, Homo sapiens
  siRNA target sequence for MAPK14 (NM_001315.1,545-563).
catcattcatgcgaaaaga

SEQ ID NO: 89885 - DNA, 19 bp, Homo sapiens
  siRNA target sequence for MAPK14 (NM_001315.1,569-587).
cagagaactgcggttactt

SEQ ID NO: 89886 - DNA, 19 bp, Homo sapiens
  siRNA target sequence for MAPK14 (NM_001315.1,576-594).
ctgcggttacttaaacata

SEQ ID NO: 89887 - DNA, 19 bp, Homo sapiens
  siRNA target sequence for MAPK14 (NM_001315.1,579-597).
cggttacttaaacatatga

SEQ ID NO: 89888 - DNA, 19 bp, Homo sapiens
  siRNA target sequence for MAPK14 (NM_001315.1,580-598).
ggttacttaaacatatgaa

SEQ ID NO: 89889 - DNA, 19 bp, Homo sapiens
  siRNA target sequence for MAPK14 (NM_001315.1,581-599).
gttacttaaacatatgaaa

SEQ ID NO: 89890 - DNA, 19 bp, Homo sapiens
  siRNA target sequence for MAPK14 (NM_001315.1,615-633).
ggtctgttggacgttttta

SEQ ID NO: 89891 - DNA, 19 bp, Homo sapiens
  siRNA target sequence for MAPK14 (NM_001315.1,653-671).
ggaattcaatgatgtgtat

SEQ ID NO: 89892 - DNA, 19 bp, Homo sapiens
  siRNA target sequence for MAPK14 (NM_001315.1,690-708).
ggggcagatctgaacaaca

SEQ ID NO: 89893 - DNA, 19 bp, Homo sapiens
  siRNA target sequence for MAPK14 (NM_001315.1,691-709).
gggcagatctgaacaacat

SEQ ID NO: 89894 - DNA, 19 bp, Homo sapiens
  siRNA target sequence for MAPK14 (NM_001315.1,694-712).
cagatctgaacaacattgt

SEQ ID NO: 89895 - DNA, 19 bp, Homo sapiens
  siRNA target sequence for MAPK14 (NM_001315.1,711-729).
gtgaaatgtcagaagctta

SEQ ID NO: 89896 - DNA, 19 bp, Homo sapiens
  siRNA target sequence for MAPK14 (NM_001315.1,735-753).
gaccatgttcagttcctta

SEQ ID NO: 89897 - DNA, 19 bp, Homo sapiens
  siRNA target sequence for MAPK14 (NM_001315.1,744-762).
cagttccttatctaccaaa

SEQ ID NO: 89898 - DNA, 19 bp, Homo sapiens
  siRNA target sequence for MAPK14 (NM_001315.1,746-764).
gttccttatctaccaaatt

SEQ ID NO: 89899 - DNA, 19 bp, Homo sapiens
  siRNA target sequence for MAPK14 (NM_001315.1,765-783).
ctccgaggtctaaagtata

SEQ ID NO: 89900 - DNA, 19 bp, Homo sapiens
  siRNA target sequence for MAPK14 (NM_001315.1,767-785).
ccgaggtctaaagtatata

SEQ ID NO: 89901 - DNA, 19 bp, Homo sapiens
  siRNA target sequence for MAPK14 (NM_001315.1,769-787).
gaggtctaaagtatataca

SEQ ID NO: 89902 - DNA, 19 bp, Homo sapiens
  siRNA target sequence for MAPK14 (NM_001315.1,808-826).
gggacctaaaacctagtaa

SEQ ID NO: 89903 - DNA, 19 bp, Homo sapiens
  siRNA target sequence for MAPK14 (NM_001315.1,812-830).
cctaaaacctagtaatcta

SEQ ID NO: 89904 - DNA, 19 bp, Homo sapiens
  siRNA target sequence for MAPK14 (NM_001315.1,879-897).
cggcacacagatgatgaaa

SEQ ID NO: 89905 - DNA, 19 bp, Homo sapiens
  siRNA target sequence for MAPK14 (NM_001315.1,962-980).
caaccagacagttgatatt

SEQ ID NO: 89906 - DNA, 19 bp, Homo sapiens
  siRNA target sequence for MAPK14 (NM_001315.1,1008-1026).
ctgttgactggaagaacat

SEQ ID NO: 89907 - DNA, 19 bp, Homo sapiens
  siRNA target sequence for MAPK14 (NM_001315.1,1117-1135).
gccatgaggcaagaaacta

SEQ ID NO: 89908 - DNA, 19 bp, Homo sapiens
  siRNA target sequence for MAPK14 (NM_001315.1,1119-1137).
catgaggcaagaaactata

SEQ ID NO: 89909 - DNA, 19 bp, Homo sapiens
  siRNA target sequence for MAPK14 (NM_001315.1,1230-1248).
gtattggactcagataaga

SEQ ID NO: 89910 - DNA, 19 bp, Homo sapiens
  siRNA target sequence for MAPK14 (NM_001315.1,1235-1253).
ggactcagataagagaatt

SEQ ID NO: 89911 - DNA, 19 bp, Homo sapiens
  siRNA target sequence for MAPK14 (NM_001315.1,1238-1256).
ctcagataagagaattaca

SEQ ID NO: 89912 - DNA, 19 bp, Homo sapiens
  siRNA target sequence for MAPK14 (NM_001315.1,1348-1366).
gcagggacctccttataga

SEQ ID NO: 89913 - DNA, 19 bp, Homo sapiens
  siRNA target sequence for MAPK14 (NM_001315.1,1349-1367).
cagggacctccttatagat

SEQ ID NO: 89914 - DNA, 19 bp, Homo sapiens
  siRNA target sequence for MAPK14 (NM_001315.1,1378-1396).
gcctgacctatgatgaagt

SEQ ID NO: 89915 - DNA, 19 bp, Homo sapiens
  siRNA target sequence for MAPK14 (NM_139013.1,1192-1210).
ccaatcccctgggtaagtt

SEQ ID NO: 89916 - DNA, 19 bp, Homo sapiens
  siRNA target sequence for MAPK14 (NM_139013.1,1200-1218).
ctgggtaagttgaccatat

SEQ ID NO: 89917 - DNA, 19 bp, Homo sapiens
  siRNA target sequence for MAPK14 (NM_139013.1,1202-1220).
gggtaagttgaccatatat

SEQ ID NO: 89918 - DNA, 19 bp, Homo sapiens
  siRNA target sequence for MAPK14 (NM_139013.1,1222-1240).
ctcacctcatggatattga

SEQ ID NO: 89919 - DNA, 19 bp, Homo sapiens
  siRNA target sequence for MAPK3 (NM_002746.1,269-287).
ctcgcgtggccatcaagaa

SEQ ID NO: 89920 - DNA, 19 bp, Homo sapiens
  siRNA target sequence for MAPK3 (NM_002746.1,457-475).
ctgtacaagttgctgaaaa

SEQ ID NO: 89921 - DNA, 19 bp, Homo sapiens
  siRNA target sequence for MAPK3 (NM_002746.1,555-573).
cgtgctccaccgagatcta

SEQ ID NO: 89922 - DNA, 19 bp, Homo sapiens
  siRNA target sequence for MAPK3 (NM_002746.1,556-574).
gtgctccaccgagatctaa

SEQ ID NO: 89923 - DNA, 19 bp, Homo sapiens
  siRNA target sequence for MAPK3 (NM_002746.1,600-618).
cacctgcgaccttaagatt

SEQ ID NO: 89924 - DNA, 19 bp, Homo sapiens
  siRNA target sequence for MAPK3 (NM_002746.1,603-621).
ctgcgaccttaagatttgt

SEQ ID NO: 89925 - DNA, 19 bp, Homo sapiens
  siRNA target sequence for MAPK3 (NM_002746.1,668-686).
gcttcctgacggagtatgt

SEQ ID NO: 89926 - DNA, 19 bp, Homo sapiens
  siRNA target sequence for MAPK3 (NM_002746.1,988-1006).
ctgctggaccggatgttaa

SEQ ID NO: 89927 - DNA, 19 bp, Homo sapiens
  siRNA target sequence for MAPK3 (NM_002746.1,993-1011).
ggaccggatgttaaccttt

SEQ ID NO: 89928 - DNA, 19 bp, Homo sapiens
  siRNA target sequence for MAPK3 (NM_002746.1,994-1012).
gaccggatgttaaccttta

SEQ ID NO: 89929 - DNA, 19 bp, Homo sapiens
  siRNA target sequence for MAPK3 (NM_002746.1,1056-1074).
ctacctggagcagtactat

SEQ ID NO: 89930 - DNA, 19 bp, Homo sapiens
  siRNA target sequence for MAPK4 (NM_002747.2,509-527).
ctgcatcgccagtgtctat

SEQ ID NO: 89931 - DNA, 19 bp, Homo sapiens
  siRNA target sequence for MAPK4 (NM_002747.2,536-554).
cctcggtgggcgctttgtt

SEQ ID NO: 89932 - DNA, 19 bp, Homo sapiens
  siRNA target sequence for MAPK4 (NM_002747.2,541-559).
gtgggcgctttgttgactt

SEQ ID NO: 89933 - DNA, 19 bp, Homo sapiens
  siRNA target sequence for MAPK4 (NM_002747.2,675-693).
gcgctccgagagatcaaga

SEQ ID NO: 89934 - DNA, 19 bp, Homo sapiens
  siRNA target sequence for MAPK4 (NM_002747.2,971-989).
ggacctcgtgctcaagatt

SEQ ID NO: 89935 - DNA, 19 bp, Homo sapiens
  siRNA target sequence for MAPK4 (NM_002747.2,1009-1027).
ggatcgttgatcagcatta

SEQ ID NO: 89936 - DNA, 19 bp, Homo sapiens
  siRNA target sequence for MAPK4 (NM_002747.2,1044-1062).
ctgtcagaagggttggtaa

SEQ ID NO: 89937 - DNA, 19 bp, Homo sapiens
  siRNA target sequence for MAPK4 (NM_002747.2,1050-1068).
gaagggttggtaacaaagt

SEQ ID NO: 89938 - DNA, 19 bp, Homo sapiens
  siRNA target sequence for MAPK4 (NM_002747.2,1092-1110).
ctttcccccaataactaca

SEQ ID NO: 89939 - DNA, 19 bp, Homo sapiens
  siRNA target sequence for MAPK4 (NM_002747.2,1359-1377).
gagaagatcctgaccttta

SEQ ID NO: 89940 - DNA, 19 bp, Homo sapiens
  siRNA target sequence for MAPK4 (NM_002747.2,2098-2116).
gacctggacgtgttcatct

SEQ ID NO: 89941 - DNA, 19 bp, Homo sapiens
  siRNA target sequence for MAPK6 (NM_002748.2,813-831).
gtatatggacttaaaacca

SEQ ID NO: 89942 - DNA, 19 bp, Homo sapiens
  siRNA target sequence for MAPK6 (NM_002748.2,842-860).
gaggcaatggcttggtttt

SEQ ID NO: 89943 - DNA, 19 bp, Homo sapiens
  siRNA target sequence for MAPK6 (NM_002748.2,940-958).
gctctacgtgaaatcaaaa

SEQ ID NO: 89944 - DNA, 19 bp, Homo sapiens
  siRNA target sequence for MAPK6 (NM_002748.2,941-959).
ctctacgtgaaatcaaaat

SEQ ID NO: 89945 - DNA, 19 bp, Homo sapiens
  siRNA target sequence for MAPK6 (NM_002748.2,979-997).
gataacattgtgaaagtgt

SEQ ID NO: 89946 - DNA, 19 bp, Homo sapiens
  siRNA target sequence for MAPK6 (NM_002748.2,1014-1032).
cagtggaagccaattaaca

SEQ ID NO: 89947 - DNA, 19 bp, Homo sapiens
  siRNA target sequence for MAPK6 (NM_002748.2,1283-1301).
ggatcatggatcctcatta

SEQ ID NO: 89948 - DNA, 19 bp, Homo sapiens
  siRNA target sequence for MAPK6 (NM_002748.2,1318-1336).
ctttctgaaggattggtta

SEQ ID NO: 89949 - DNA, 19 bp, Homo sapiens
  siRNA target sequence for MAPK6 (NM_002748.2,1322-1340).
ctgaaggattggttactaa

SEQ ID NO: 89950 - DNA, 19 bp, Homo sapiens
  siRNA target sequence for MAPK6 (NM_002748.2,1324-1342).
gaaggattggttactaaat

SEQ ID NO: 89951 - DNA, 19 bp, Homo sapiens
  siRNA target sequence for MAPK6 (NM_002748.2,1327-1345).
ggattggttactaaatggt

SEQ ID NO: 89952 - DNA, 19 bp, Homo sapiens
  siRNA target sequence for MAPK6 (NM_002748.2,1328-1346).
gattggttactaaatggta

SEQ ID NO: 89953 - DNA, 19 bp, Homo sapiens
  siRNA target sequence for MAPK6 (NM_002748.2,1333-1351).
gttactaaatggtacagat

SEQ ID NO: 89954 - DNA, 19 bp, Homo sapiens
  siRNA target sequence for MAPK6 (NM_002748.2,1347-1365).
cagatctccacgtctttta

SEQ ID NO: 89955 - DNA, 19 bp, Homo sapiens
  siRNA target sequence for MAPK6 (NM_002748.2,1349-1367).
gatctccacgtcttttact

SEQ ID NO: 89956 - DNA, 19 bp, Homo sapiens
  siRNA target sequence for MAPK6 (NM_002748.2,1370-1388).
ctcctaataattatactaa

SEQ ID NO: 89957 - DNA, 19 bp, Homo sapiens
  siRNA target sequence for MAPK6 (NM_002748.2,1460-1478).
cacatgaacttgaacagat

SEQ ID NO: 89958 - DNA, 19 bp, Homo sapiens
  siRNA target sequence for MAPK6 (NM_002748.2,1480-1498).
cagctgattttagaatcta

SEQ ID NO: 89959 - DNA, 19 bp, Homo sapiens
  siRNA target sequence for MAPK6 (NM_002748.2,1530-1548).
gcttctcagcgtaattcca

SEQ ID NO: 89960 - DNA, 19 bp, Homo sapiens
  siRNA target sequence for MAPK6 (NM_002748.2,1539-1557).
cgtaattccagtttacatt

SEQ ID NO: 89961 - DNA, 19 bp, Homo sapiens
  siRNA target sequence for MAPK6 (NM_002748.2,1566-1584).
catgactgagccacacaaa

SEQ ID NO: 89962 - DNA, 19 bp, Homo sapiens
  siRNA target sequence for MAPK6 (NM_002748.2,1577-1595).
cacacaaacctttaactca

SEQ ID NO: 89963 - DNA, 19 bp, Homo sapiens
  siRNA target sequence for MAPK6 (NM_002748.2,1633-1651).
ctggaacaaattttgacat

SEQ ID NO: 89964 - DNA, 19 bp, Homo sapiens
  siRNA target sequence for MAPK6 (NM_002748.2,1687-1705).
ctctcccatccttacatga

SEQ ID NO: 89965 - DNA, 19 bp, Homo sapiens
  siRNA target sequence for MAPK6 (NM_002748.2,1693-1711).
catccttacatgagcatat

SEQ ID NO: 89966 - DNA, 19 bp, Homo sapiens
  siRNA target sequence for MAPK6 (NM_002748.2,1706-1724).
gcatatattcttttccaat

SEQ ID NO: 89967 - DNA, 19 bp, Homo sapiens
  siRNA target sequence for MAPK6 (NM_002748.2,1815-1833).
ctgggaaaggtatcatgat

SEQ ID NO: 89968 - DNA, 19 bp, Homo sapiens
  siRNA target sequence for MAPK6 (NM_002748.2,1818-1836).
ggaaaggtatcatgattgt

SEQ ID NO: 89969 - DNA, 19 bp, Homo sapiens
  siRNA target sequence for MAPK6 (NM_002748.2,1824-1842).
gtatcatgattgtcagttt

SEQ ID NO: 89970 - DNA, 19 bp, Homo sapiens
  siRNA target sequence for MAPK6 (NM_002748.2,1848-1866).
gcatgattggcctgtacat

SEQ ID NO: 89971 - DNA, 19 bp, Homo sapiens
  siRNA target sequence for MAPK6 (NM_002748.2,1856-1874).
ggcctgtacataacaactt

SEQ ID NO: 89972 - DNA, 19 bp, Homo sapiens
  siRNA target sequence for MAPK6 (NM_002748.2,1857-1875).
gcctgtacataacaacttt

SEQ ID NO: 89973 - DNA, 19 bp, Homo sapiens
  siRNA target sequence for MAPK6 (NM_002748.2,1861-1879).
gtacataacaactttgata

SEQ ID NO: 89974 - DNA, 19 bp, Homo sapiens
  siRNA target sequence for MAPK6 (NM_002748.2,1942-1960).
gttgatccccgaaaatatt

SEQ ID NO: 89975 - DNA, 19 bp, Homo sapiens
  siRNA target sequence for MAPK6 (NM_002748.2,1963-1981).
gatggagatcgggaaaagt

SEQ ID NO: 89976 - DNA, 19 bp, Homo sapiens
  siRNA target sequence for MAPK6 (NM_002748.2,2020-2038).
gagccttgttggcaatact

SEQ ID NO: 89977 - DNA, 19 bp, Homo sapiens
  siRNA target sequence for MAPK6 (NM_002748.2,2031-2049).
gcaatactcagatcatcat

SEQ ID NO: 89978 - DNA, 19 bp, Homo sapiens
  siRNA target sequence for MAPK6 (NM_002748.2,2070-2088).
ggagtgtagccatacttgt

SEQ ID NO: 89979 - DNA, 19 bp, Homo sapiens
  siRNA target sequence for MAPK6 (NM_002748.2,2071-2089).
gagtgtagccatacttgta

SEQ ID NO: 89980 - DNA, 19 bp, Homo sapiens
  siRNA target sequence for MAPK6 (NM_002748.2,2108-2126).
catcatatttagataactt

SEQ ID NO: 89981 - DNA, 19 bp, Homo sapiens
  siRNA target sequence for MAPK6 (NM_002748.2,2141-2159).
gtgaagttaaccattacta

SEQ ID NO: 89982 - DNA, 19 bp, Homo sapiens
  siRNA target sequence for MAPK6 (NM_002748.2,2165-2183).
ccaagcttattatagatct

SEQ ID NO: 89983 - DNA, 19 bp, Homo sapiens
  siRNA target sequence for MAPK6 (NM_002748.2,2166-2184).
caagcttattatagatctt

SEQ ID NO: 89984 - DNA, 19 bp, Homo sapiens
  siRNA target sequence for MAPK6 (NM_002748.2,2376-2394).
gcatgagcctactgatgtt

SEQ ID NO: 89985 - DNA, 19 bp, Homo sapiens
  siRNA target sequence for MAPK6 (NM_002748.2,2387-2405).
ctgatgttgttgataaatt

SEQ ID NO: 89986 - DNA, 19 bp, Homo sapiens
  siRNA target sequence for MAPK6 (NM_002748.2,2420-2438).
gctcagtgtcccaactaga

SEQ ID NO: 89987 - DNA, 19 bp, Homo sapiens
  siRNA target sequence for MAPK6 (NM_002748.2,2423-2441).
cagtgtcccaactagaatt

SEQ ID NO: 89988 - DNA, 19 bp, Homo sapiens
  siRNA target sequence for MAPK6 (NM_002748.2,2425-2443).
gtgtcccaactagaattga

SEQ ID NO: 89989 - DNA, 19 bp, Homo sapiens
  siRNA target sequence for MAPK6 (NM_002748.2,2427-2445).
gtcccaactagaattgaaa

SEQ ID NO: 89990 - DNA, 19 bp, Homo sapiens
  siRNA target sequence for MAPK6 (NM_002748.2,2430-2448).
ccaactagaattgaaaagt

SEQ ID NO: 89991 - DNA, 19 bp, Homo sapiens
  siRNA target sequence for MAPK6 (NM_002748.2,2493-2511).
ggcaaatctggctcaatta

SEQ ID NO: 89992 - DNA, 19 bp, Homo sapiens
  siRNA target sequence for MAPK6 (NM_002748.2,2515-2533).
gccttgtaccagtcttctt

SEQ ID NO: 89993 - DNA, 19 bp, Homo sapiens
  siRNA target sequence for MAPK6 (NM_002748.2,2531-2549).
cttgggacagccagtttgt

SEQ ID NO: 89994 - DNA, 19 bp, Homo sapiens
  siRNA target sequence for MAPK6 (NM_002748.2,2558-2576).
gggaggactgttttttcat

SEQ ID NO: 89995 - DNA, 19 bp, Homo sapiens
  siRNA target sequence for MAPK6 (NM_002748.2,2620-2638).
gaaaacacttacactagtt

SEQ ID NO: 89996 - DNA, 19 bp, Homo sapiens
  siRNA target sequence for MAPK6 (NM_002748.2,2815-2833).
gggtcaccacttaagtcaa

SEQ ID NO: 89997 - DNA, 19 bp, Homo sapiens
  siRNA target sequence for MAPK6 (NM_002748.2,2816-2834).
ggtcaccacttaagtcaat

SEQ ID NO: 89998 - DNA, 19 bp, Homo sapiens
  siRNA target sequence for MAPK6 (NM_002748.2,2817-2835).
gtcaccacttaagtcaata

SEQ ID NO: 89999 - DNA, 19 bp, Homo sapiens
  siRNA target sequence for MAPK6 (NM_002748.2,2829-2847).
gtcaatacaggccacatta

SEQ ID NO: 90000 - DNA, 19 bp, Homo sapiens
  siRNA target sequence for MAPK6 (NM_002748.2,2862-2880).
gaaatcttcccctcaaatt

SEQ ID NO: 90001 - DNA, 19 bp, Homo sapiens
  siRNA target sequence for MAPK7 (NM_002749.2,397-415).
gatccctaatgctttcgat

SEQ ID NO: 90002 - DNA, 19 bp, Homo sapiens
  siRNA target sequence for MAPK7 (NM_002749.2,515-533).
gtgccctatggcgaattca

SEQ ID NO: 90003 - DNA, 19 bp, Homo sapiens
  siRNA target sequence for MAPK7 (NM_002749.2,517-535).
gccctatggcgaattcaaa

SEQ ID NO: 90004 - DNA, 19 bp, Homo sapiens
  siRNA target sequence for MAPK7 (NM_002749.2,518-536).
ccctatggcgaattcaaat

SEQ ID NO: 90005 - DNA, 19 bp, Homo sapiens
  siRNA target sequence for MAPK7 (NM_002749.2,689-707).
ctgaagccctccaacctat

SEQ ID NO: 90006 - DNA, 19 bp, Homo sapiens
  siRNA target sequence for MAPK7 (NM_002749.2,699-717).
ccaacctattggtgaatga

SEQ ID NO: 90007 - DNA, 19 bp, Homo sapiens
  siRNA target sequence for MAPK7 (NM_002749.2,774-792).
ccgctgaacatcagtactt

SEQ ID NO: 90008 - DNA, 19 bp, Homo sapiens
  siRNA target sequence for MAPK7 (NM_002749.2,776-794).
gctgaacatcagtacttca

SEQ ID NO: 90009 - DNA, 19 bp, Homo sapiens
  siRNA target sequence for MAPK7 (NM_002749.2,777-795).
ctgaacatcagtacttcat

SEQ ID NO: 90010 - DNA, 19 bp, Homo sapiens
  siRNA target sequence for MAPK7 (NM_002749.2,779-797).
gaacatcagtacttcatga

SEQ ID NO: 90011 - DNA, 19 bp, Homo sapiens
  siRNA target sequence for MAPK7 (NM_002749.2,787-805).
gtacttcatgactgagtat

SEQ ID NO: 90012 - DNA, 19 bp, Homo sapiens
  siRNA target sequence for MAPK7 (NM_002749.2,842-860).
ctctctttgcatgagtata

SEQ ID NO: 90013 - DNA, 19 bp, Homo sapiens
  siRNA target sequence for MAPK7 (NM_002749.2,844-862).
ctctttgcatgagtataca

SEQ ID NO: 90014 - DNA, 19 bp, Homo sapiens
  siRNA target sequence for MAPK7 (NM_002749.2,846-864).
ctttgcatgagtatacaca

SEQ ID NO: 90015 - DNA, 19 bp, Homo sapiens
  siRNA target sequence for MAPK7 (NM_002749.2,923-941).
ctcttcccaggcaaaaact

SEQ ID NO: 90016 - DNA, 19 bp, Homo sapiens
  siRNA target sequence for MAPK7 (NM_002749.2,928-946).
cccaggcaaaaactatgta

SEQ ID NO: 90017 - DNA, 19 bp, Homo sapiens
  siRNA target sequence for MAPK7 (NM_002749.2,930-948).
caggcaaaaactatgtaca

SEQ ID NO: 90018 - DNA, 19 bp, Homo sapiens
  siRNA target sequence for MAPK7 (NM_002749.2,984-1002).
catcaccagccgtgattca

SEQ ID NO: 90019 - DNA, 19 bp, Homo sapiens
  siRNA target sequence for MAPK7 (NM_002749.2,1116-1134).
gtcgcatgctgcgttttga

SEQ ID NO: 90020 - DNA, 19 bp, Homo sapiens
  siRNA target sequence for MAPK7 (NM_002749.2,1375-1393).
gcctggctgtccagatgtt

SEQ ID NO: 90021 - DNA, 19 bp, Homo sapiens
  siRNA target sequence for MAPK7 (NM_002749.2,1476-1494).
cacctgacaccattgatct

SEQ ID NO: 90022 - DNA, 19 bp, Homo sapiens
  siRNA target sequence for MAPK7 (NM_002749.2,1547-1565).
ggtgccatctcagacaata

SEQ ID NO: 90023 - DNA, 19 bp, Homo sapiens
  siRNA target sequence for MAPK7 (NM_002749.2,1550-1568).
gccatctcagacaatacta

SEQ ID NO: 90024 - DNA, 19 bp, Homo sapiens
  siRNA target sequence for MAPK7 (NM_002749.2,1551-1569).
ccatctcagacaatactaa

SEQ ID NO: 90025 - DNA, 19 bp, Homo sapiens
  siRNA target sequence for MAPK7 (NM_002749.2,1583-1601).
gctgccctgctcaagtctt

SEQ ID NO: 90026 - DNA, 19 bp, Homo sapiens
  siRNA target sequence for MAPK7 (NM_002749.2,2279-2297).
gtgacccagcagctatcta

SEQ ID NO: 90027 - DNA, 19 bp, Homo sapiens
  siRNA target sequence for MAPK7 (NM_002749.2,2284-2302).
ccagcagctatctaagtca

SEQ ID NO: 90028 - DNA, 19 bp, Homo sapiens
  siRNA target sequence for MAPK8 (NM_002750.2,25-43).
gaagcaagcgtgacaacaa

SEQ ID NO: 90029 - DNA, 19 bp, Homo sapiens
  siRNA target sequence for MAPK8 (NM_002750.2,28-46).
gcaagcgtgacaacaattt

SEQ ID NO: 90030 - DNA, 19 bp, Homo sapiens
  siRNA target sequence for MAPK8 (NM_002750.2,29-47).
caagcgtgacaacaatttt

SEQ ID NO: 90031 - DNA, 19 bp, Homo sapiens
  siRNA target sequence for MAPK8 (NM_002750.2,33-51).
cgtgacaacaatttttata

SEQ ID NO: 90032 - DNA, 19 bp, Homo sapiens
  siRNA target sequence for MAPK8 (NM_002750.2,38-56).
caacaatttttatagtgta

SEQ ID NO: 90033 - DNA, 19 bp, Homo sapiens
  siRNA target sequence for MAPK8 (NM_002750.2,77-95).
cacagtcctgaaacgatat

SEQ ID NO: 90034 - DNA, 19 bp, Homo sapiens
  siRNA target sequence for MAPK8 (NM_002750.2,81-99).
gtcctgaaacgatatcaga

SEQ ID NO: 90035 - DNA, 19 bp, Homo sapiens
  siRNA target sequence for MAPK8 (NM_002750.2,86-104).
gaaacgatatcagaattta

SEQ ID NO: 90036 - DNA, 19 bp, Homo sapiens
  siRNA target sequence for MAPK8 (NM_002750.2,115-133).
gctcaggagctcaaggaat

SEQ ID NO: 90037 - DNA, 19 bp, Homo sapiens
  siRNA target sequence for MAPK8 (NM_002750.2,232-250).
gagagctagttcttatgaa

SEQ ID NO: 90038 - DNA, 19 bp, Homo sapiens
  siRNA target sequence for MAPK8 (NM_002750.2,345-363).
ctcatggatgcaaatcttt

SEQ ID NO: 90039 - DNA, 19 bp, Homo sapiens
  siRNA target sequence for MAPK8 (NM_002750.2,355-373).
caaatctttgccaagtgat

SEQ ID NO: 90040 - DNA, 19 bp, Homo sapiens
  siRNA target sequence for MAPK8 (NM_002750.2,429-447).
ggaatcaagcaccttcatt

SEQ ID NO: 90041 - DNA, 19 bp, Homo sapiens
  siRNA target sequence for MAPK8 (NM_002750.2,467-485).
ggacttaaagcccagtaat

SEQ ID NO: 90042 - DNA, 19 bp, Homo sapiens
  siRNA target sequence for MAPK8 (NM_002750.2,470-488).
cttaaagcccagtaatata

SEQ ID NO: 90043 - DNA, 19 bp, Homo sapiens
  siRNA target sequence for MAPK8 (NM_002750.2,476-494).
gcccagtaatatagtagta

SEQ ID NO: 90044 - DNA, 19 bp, Homo sapiens
  siRNA target sequence for MAPK8 (NM_002750.2,478-496).
ccagtaatatagtagtaaa

SEQ ID NO: 90045 - DNA, 19 bp, Homo sapiens
  siRNA target sequence for MAPK8 (NM_002750.2,479-497).
cagtaatatagtagtaaaa

SEQ ID NO: 90046 - DNA, 19 bp, Homo sapiens
  siRNA target sequence for MAPK8 (NM_002750.2,543-561).
gcaggaacgagttttatga

SEQ ID NO: 90047 - DNA, 19 bp, Homo sapiens
  siRNA target sequence for MAPK8 (NM_002750.2,546-564).
ggaacgagttttatgatga

SEQ ID NO: 90048 - DNA, 19 bp, Homo sapiens
  siRNA target sequence for MAPK8 (NM_002750.2,573-591).
gtagtgactcgctactaca

SEQ ID NO: 90049 - DNA, 19 bp, Homo sapiens
  siRNA target sequence for MAPK8 (NM_002750.2,783-801).
gtaaggacttacgttgaaa

SEQ ID NO: 90050 - DNA, 19 bp, Homo sapiens
  siRNA target sequence for MAPK8 (NM_002750.2,816-834).
gctggatatagctttgaga

SEQ ID NO: 90051 - DNA, 19 bp, Homo sapiens
  siRNA target sequence for MAPK8 (NM_002750.2,817-835).
ctggatatagctttgagaa

SEQ ID NO: 90052 - DNA, 19 bp, Homo sapiens
  siRNA target sequence for MAPK8 (NM_002750.2,820-838).
gatatagctttgagaaact

SEQ ID NO: 90053 - DNA, 19 bp, Homo sapiens
  siRNA target sequence for MAPK8 (NM_002750.2,866-884).
ctcagaacacaacaaactt

SEQ ID NO: 90054 - DNA, 19 bp, Homo sapiens
  siRNA target sequence for MAPK8 (NM_002750.2,894-912).
caggcaagggatttgttat

SEQ ID NO: 90055 - DNA, 19 bp, Homo sapiens
  siRNA target sequence for MAPK8 (NM_002750.2,914-932).
caaaatgctggtaatagat

SEQ ID NO: 90056 - DNA, 19 bp, Homo sapiens
  siRNA target sequence for MAPK8 (NM_002750.2,963-981).
ctccaacacccgtacatca

SEQ ID NO: 90057 - DNA, 19 bp, Homo sapiens
  siRNA target sequence for MAPK8 (NM_002750.2,965-983).
ccaacacccgtacatcaat

SEQ ID NO: 90058 - DNA, 19 bp, Homo sapiens
  siRNA target sequence for MAPK8 (NM_002750.2,969-987).
cacccgtacatcaatgtct

SEQ ID NO: 90059 - DNA, 19 bp, Homo sapiens
  siRNA target sequence for MAPK8 (NM_002750.2,1068-1086).
gagtggaaagaattgatat

SEQ ID NO: 90060 - DNA, 19 bp, Homo sapiens
  siRNA target sequence for MAPK8 (NM_139046.1,689-707).
gttcccaggtacagatcat

SEQ ID NO: 90061 - DNA, 19 bp, Homo sapiens
  siRNA target sequence for MAPK8 (NM_139047.1,1195-1213).
cgtcgtctgtcaatgatgt

SEQ ID NO: 90062 - DNA, 19 bp, Homo sapiens
  siRNA target sequence for MAPK8 (NM_139047.1,1209-1227).
gatgtgtcttcaatgtcaa

SEQ ID NO: 90063 - DNA, 19 bp, Homo sapiens
  siRNA target sequence for MAPK8 (NM_139047.1,1214-1232).
gtcttcaatgtcaacagat

SEQ ID NO: 90064 - DNA, 19 bp, Homo sapiens
  siRNA target sequence for MAPK9 (NM_002752.3,163-181).
gattgtttgtgctgcattt

SEQ ID NO: 90065 - DNA, 19 bp, Homo sapiens
  siRNA target sequence for MAPK9 (NM_002752.3,186-204).
cagttcttgggataaatgt

SEQ ID NO: 90066 - DNA, 19 bp, Homo sapiens
  siRNA target sequence for MAPK9 (NM_002752.3,214-232).
gaaactaagccgtcctttt

SEQ ID NO: 90067 - DNA, 19 bp, Homo sapiens
  siRNA target sequence for MAPK9 (NM_002752.3,224-242).
cgtccttttcagaaccaaa

SEQ ID NO: 90068 - DNA, 19 bp, Homo sapiens
  siRNA target sequence for MAPK9 (NM_002752.3,253-271).
gagagcttatcgtgaactt

SEQ ID NO: 90069 - DNA, 19 bp, Homo sapiens
  siRNA target sequence for MAPK9 (NM_002752.3,263-281).
cgtgaacttgtcctcttaa

SEQ ID NO: 90070 - DNA, 19 bp, Homo sapiens
  siRNA target sequence for MAPK9 (NM_002752.3,264-282).
gtgaacttgtcctcttaaa

SEQ ID NO: 90071 - DNA, 19 bp, Homo sapiens
  siRNA target sequence for MAPK9 (NM_002752.3,274-292).
cctcttaaaatgtgtcaat

SEQ ID NO: 90072 - DNA, 19 bp, Homo sapiens
  siRNA target sequence for MAPK9 (NM_002752.3,277-295).
cttaaaatgtgtcaatcat

SEQ ID NO: 90073 - DNA, 19 bp, Homo sapiens
  siRNA target sequence for MAPK9 (NM_002752.3,330-348).
cacaaaaaactctagaaga

SEQ ID NO: 90074 - DNA, 19 bp, Homo sapiens
  siRNA target sequence for MAPK9 (NM_002752.3,353-371).
caagatgtgtatttggtta

SEQ ID NO: 90075 - DNA, 19 bp, Homo sapiens
  siRNA target sequence for MAPK9 (NM_002752.3,367-385).
ggttatggaattaatggat

SEQ ID NO: 90076 - DNA, 19 bp, Homo sapiens
  siRNA target sequence for MAPK9 (NM_002752.3,387-405).
ctaacttatgtcaggttat

SEQ ID NO: 90077 - DNA, 19 bp, Homo sapiens
  siRNA target sequence for MAPK9 (NM_002752.3,475-493).
gcattcagctggtataatt

SEQ ID NO: 90078 - DNA, 19 bp, Homo sapiens
  siRNA target sequence for MAPK9 (NM_002752.3,483-501).
ctggtataattcatagaga

SEQ ID NO: 90079 - DNA, 19 bp, Homo sapiens
  siRNA target sequence for MAPK9 (NM_002752.3,510-528).
ctagcaacattgttgtgaa

SEQ ID NO: 90080 - DNA, 19 bp, Homo sapiens
  siRNA target sequence for MAPK9 (NM_002752.3,514-532).
caacattgttgtgaaatca

SEQ ID NO: 90081 - DNA, 19 bp, Homo sapiens
  siRNA target sequence for MAPK9 (NM_002752.3,569-587).
cggacagcgtgcactaact

SEQ ID NO: 90082 - DNA, 19 bp, Homo sapiens
  siRNA target sequence for MAPK9 (NM_002752.3,570-588).
ggacagcgtgcactaactt

SEQ ID NO: 90083 - DNA, 19 bp, Homo sapiens
  siRNA target sequence for MAPK9 (NM_002752.3,573-591).
cagcgtgcactaacttcat

SEQ ID NO: 90084 - DNA, 19 bp, Homo sapiens
  siRNA target sequence for MAPK9 (NM_002752.3,575-593).
gcgtgcactaacttcatga

SEQ ID NO: 90085 - DNA, 19 bp, Homo sapiens
  siRNA target sequence for MAPK9 (NM_002752.3,703-721).
ggtgaaaggttgtgtgata

SEQ ID NO: 90086 - DNA, 19 bp, Homo sapiens
  siRNA target sequence for MAPK9 (NM_002752.3,806-824).
cagccaactgtgaggaatt

SEQ ID NO: 90087 - DNA, 19 bp, Homo sapiens
  siRNA target sequence for MAPK9 (NM_002752.3,808-826).
gccaactgtgaggaattat

SEQ ID NO: 90088 - DNA, 19 bp, Homo sapiens
  siRNA target sequence for MAPK9 (NM_002752.3,820-838).
gaattatgtcgaaaacaga

SEQ ID NO: 90089 - DNA, 19 bp, Homo sapiens
  siRNA target sequence for MAPK9 (NM_002752.3,924-942).
gtcaagccagagatctgtt

SEQ ID NO: 90090 - DNA, 19 bp, Homo sapiens
  siRNA target sequence for MAPK9 (NM_002752.3,926-944).
caagccagagatctgttat

SEQ ID NO: 90091 - DNA, 19 bp, Homo sapiens
  siRNA target sequence for MAPK9 (NM_002752.3,929-947).
gccagagatctgttatcaa

SEQ ID NO: 90092 - DNA, 19 bp, Homo sapiens
  siRNA target sequence for MAPK9 (NM_002752.3,993-1011).
ctctgcgtcacccatacat

SEQ ID NO: 90093 - DNA, 19 bp, Homo sapiens
  siRNA target sequence for MAPK9 (NM_002752.3,995-1013).
ctgcgtcacccatacatca

SEQ ID NO: 90094 - DNA, 19 bp, Homo sapiens
  siRNA target sequence for MAPK9 (NM_002752.3,1001-1019).
cacccatacatcactgttt

SEQ ID NO: 90095 - DNA, 19 bp, Homo sapiens
  siRNA target sequence for MAPK9 (NM_002752.3,1047-1065).
caccacctcaaatttatga

SEQ ID NO: 90096 - DNA, 19 bp, Homo sapiens
  siRNA target sequence for MAPK9 (NM_002752.3,1149-1167).
gcaagaatggtgttgtaaa

SEQ ID NO: 90097 - DNA, 19 bp, Homo sapiens
  siRNA target sequence for MAPK9 (NM_002752.3,1150-1168).
caagaatggtgttgtaaaa

SEQ ID NO: 90098 - DNA, 19 bp, Homo sapiens
  siRNA target sequence for MAPK9 (NM_002752.3,1273-1291).
cacagacagcagtcttgat

SEQ ID NO: 90099 - DNA, 19 bp, Homo sapiens
  siRNA target sequence for MAPK9 (NM_139069.1,721-739).
gttcccgggaagagactat

SEQ ID NO: 90100 - DNA, 19 bp, Homo sapiens
  siRNA target sequence for MAPKAPK2 (NM_004759.3,435-453).
ccggcctgcagatcaagaa

SEQ ID NO: 90101 - DNA, 19 bp, Homo sapiens
  siRNA target sequence for MAPKAPK2 (NM_004759.3,503-521).
ggcatcaacggcaaagttt

SEQ ID NO: 90102 - DNA, 19 bp, Homo sapiens
  siRNA target sequence for MAPKAPK2 (NM_004759.3,710-728).
gacggtggagaactcttta

SEQ ID NO: 90103 - DNA, 19 bp, Homo sapiens
  siRNA target sequence for MAPKAPK2 (NM_004759.3,768-786).
gagaagcatccgaaatcat

SEQ ID NO: 90104 - DNA, 19 bp, Homo sapiens
  siRNA target sequence for MAPKAPK2 (NM_004759.3,773-791).
gcatccgaaatcatgaaga

SEQ ID NO: 90105 - DNA, 19 bp, Homo sapiens
  siRNA target sequence for MAPKAPK2 (NM_004759.3,847-865).
caagcctgagaatctctta

SEQ ID NO: 90106 - DNA, 19 bp, Homo sapiens
  siRNA target sequence for MAPKAPK2 (NM_004759.3,851-869).
cctgagaatctcttataca

SEQ ID NO: 90107 - DNA, 19 bp, Homo sapiens
  siRNA target sequence for MAPKAPK2 (NM_004759.3,942-960).
ctttgaccactccttgtta

SEQ ID NO: 90108 - DNA, 19 bp, Homo sapiens
  siRNA target sequence for MAPKAPK2 (NM_004759.3,946-964).
gaccactccttgttataca

SEQ ID NO: 90109 - DNA, 19 bp, Homo sapiens
  siRNA target sequence for MAPKAPK2 (NM_004759.3,957-975).
gttatacaccgtactatgt

SEQ ID NO: 90110 - DNA, 19 bp, Homo sapiens
  siRNA target sequence for MAPKAPK2 (NM_004759.3,1123-1141).
ccgaatgggccagtatgaa

SEQ ID NO: 90111 - DNA, 19 bp, Homo sapiens
  siRNA target sequence for MAPKAPK2 (NM_004759.3,1124-1142).
cgaatgggccagtatgaat

SEQ ID NO: 90112 - DNA, 19 bp, Homo sapiens
  siRNA target sequence for MAPKAPK2 (NM_004759.3,1125-1143).
gaatgggccagtatgaatt

SEQ ID NO: 90113 - DNA, 19 bp, Homo sapiens
  siRNA target sequence for MAPKAPK2 (NM_004759.3,1230-1248).
ccatcaccgagtttatgaa

SEQ ID NO: 90114 - DNA, 19 bp, Homo sapiens
  siRNA target sequence for MAPKAPK2 (NM_004759.3,1253-1271).
ccttggatcatgcaatcaa

SEQ ID NO: 90115 - DNA, 19 bp, Homo sapiens
  siRNA target sequence for MAPKAPK2 (NM_004759.3,1347-1365).
ggtgtcttcatgacaagaa

SEQ ID NO: 90116 - DNA, 19 bp, Homo sapiens
  siRNA target sequence for MAPKAPK2 (NM_032960.2,1368-1386).
ccacaatgcgcgttgacta

SEQ ID NO: 90117 - DNA, 19 bp, Homo sapiens
  siRNA target sequence for MAPKAPK2 (NM_032960.2,1384-1402).
ctacgagcagatcaagata

SEQ ID NO: 90118 - DNA, 19 bp, Homo sapiens
  siRNA target sequence for MAPKAPK2 (NM_032960.2,1387-1405).
cgagcagatcaagataaaa

SEQ ID NO: 90119 - DNA, 19 bp, Homo sapiens
  siRNA target sequence for MAPKAPK3 (NM_004635.3,321-339).
ccctgaagctcctgtatga

SEQ ID NO: 90120 - DNA, 19 bp, Homo sapiens
  siRNA target sequence for MAPKAPK3 (NM_004635.3,443-461).
cgctgtctcctcatcatca

SEQ ID NO: 90121 - DNA, 19 bp, Homo sapiens
  siRNA target sequence for MAPKAPK3 (NM_004635.3,473-491).
gaaggtggtgagttgttca

SEQ ID NO: 90122 - DNA, 19 bp, Homo sapiens
  siRNA target sequence for MAPKAPK3 (NM_004635.3,617-635).
gaaaacctactctacacat

SEQ ID NO: 90123 - DNA, 19 bp, Homo sapiens
  siRNA target sequence for MAPKAPK3 (NM_004635.3,655-673).
gcttaagctcaccgatttt

SEQ ID NO: 90124 - DNA, 19 bp, Homo sapiens
  siRNA target sequence for MAPKAPK3 (NM_004635.3,714-732).
cctgctatactccctatta

SEQ ID NO: 90125 - DNA, 19 bp, Homo sapiens
  siRNA target sequence for MAPKAPK3 (NM_004635.3,715-733).
ctgctatactccctattat

SEQ ID NO: 90126 - DNA, 19 bp, Homo sapiens
  siRNA target sequence for MAPKAPK3 (NM_004635.3,717-735).
gctatactccctattatgt

SEQ ID NO: 90127 - DNA, 19 bp, Homo sapiens
  siRNA target sequence for MAPKAPK3 (NM_004635.3,1014-1032).
cctggatcaaccaatcgat

SEQ ID NO: 90128 - DNA, 19 bp, Homo sapiens
  siRNA target sequence for MAPKAPK3 (NM_004635.3,1128-1146).
ccactatgcgggtagacta

SEQ ID NO: 90129 - DNA, 19 bp, Homo sapiens
  siRNA target sequence for MAPKAPK5 (NM_003668.2,314-332).
gaatacagtatcaattgga

SEQ ID NO: 90130 - DNA, 19 bp, Homo sapiens
  siRNA target sequence for MAPKAPK5 (NM_003668.2,362-380).
ccagttagagtctgtgtaa

SEQ ID NO: 90131 - DNA, 19 bp, Homo sapiens
  siRNA target sequence for MAPKAPK5 (NM_003668.2,363-381).
cagttagagtctgtgtaaa

SEQ ID NO: 90132 - DNA, 19 bp, Homo sapiens
  siRNA target sequence for MAPKAPK5 (NM_003668.2,365-383).
gttagagtctgtgtaaaga

SEQ ID NO: 90133 - DNA, 19 bp, Homo sapiens
  siRNA target sequence for MAPKAPK5 (NM_003668.2,395-413).
gaacggtttgcgctgaaaa

SEQ ID NO: 90134 - DNA, 19 bp, Homo sapiens
  siRNA target sequence for MAPKAPK5 (NM_003668.2,399-417).
ggtttgcgctgaaaattct

SEQ ID NO: 90135 - DNA, 19 bp, Homo sapiens
  siRNA target sequence for MAPKAPK5 (NM_003668.2,446-464).
gtacgtctgcacatgatgt

SEQ ID NO: 90136 - DNA, 19 bp, Homo sapiens
  siRNA target sequence for MAPKAPK5 (NM_003668.2,465-483).
gtgccacacacccaaacat

SEQ ID NO: 90137 - DNA, 19 bp, Homo sapiens
  siRNA target sequence for MAPKAPK5 (NM_003668.2,468-486).
ccacacacccaaacatagt

SEQ ID NO: 90138 - DNA, 19 bp, Homo sapiens
  siRNA target sequence for MAPKAPK5 (NM_003668.2,469-487).
cacacacccaaacatagtt

SEQ ID NO: 90139 - DNA, 19 bp, Homo sapiens
  siRNA target sequence for MAPKAPK5 (NM_003668.2,475-493).
cccaaacatagttcagatt

SEQ ID NO: 90140 - DNA, 19 bp, Homo sapiens
  siRNA target sequence for MAPKAPK5 (NM_003668.2,477-495).
caaacatagttcagattat

SEQ ID NO: 90141 - DNA, 19 bp, Homo sapiens
  siRNA target sequence for MAPKAPK5 (NM_003668.2,481-499).
catagttcagattattgaa

SEQ ID NO: 90142 - DNA, 19 bp, Homo sapiens
  siRNA target sequence for MAPKAPK5 (NM_003668.2,546-564).
cccgactcttaattgtaat

SEQ ID NO: 90143 - DNA, 19 bp, Homo sapiens
  siRNA target sequence for MAPKAPK5 (NM_003668.2,604-622).
ccagcaccggcactttaca

SEQ ID NO: 90144 - DNA, 19 bp, Homo sapiens
  siRNA target sequence for MAPKAPK5 (NM_003668.2,628-646).
gcaagccagccaagtaaca

SEQ ID NO: 90145 - DNA, 19 bp, Homo sapiens
  siRNA target sequence for MAPKAPK5 (NM_003668.2,629-647).
caagccagccaagtaacaa

SEQ ID NO: 90146 - DNA, 19 bp, Homo sapiens
  siRNA target sequence for MAPKAPK5 (NM_003668.2,669-687).
ggcactgtcacttgttaaa

SEQ ID NO: 90147 - DNA, 19 bp, Homo sapiens
  siRNA target sequence for MAPKAPK5 (NM_003668.2,785-803).
gaccaaggtgacttgatga

SEQ ID NO: 90148 - DNA, 19 bp, Homo sapiens
  siRNA target sequence for MAPKAPK5 (NM_003668.2,806-824).
ccccagttcaccccttatt

SEQ ID NO: 90149 - DNA, 19 bp, Homo sapiens
  siRNA target sequence for MAPKAPK5 (NM_003668.2,839-857).
gtactggaggcgcaaagaa

SEQ ID NO: 90150 - DNA, 19 bp, Homo sapiens
  siRNA target sequence for MAPKAPK5 (NM_003668.2,849-867).
cgcaaagaaggcatcagaa

SEQ ID NO: 90151 - DNA, 19 bp, Homo sapiens
  siRNA target sequence for MAPKAPK5 (NM_003668.2,868-886).
ggagaaatctggcatcata

SEQ ID NO: 90152 - DNA, 19 bp, Homo sapiens
  siRNA target sequence for MAPKAPK5 (NM_003668.2,894-912).
caccgacgccctacactta

SEQ ID NO: 90153 - DNA, 19 bp, Homo sapiens
  siRNA target sequence for MAPKAPK5 (NM_003668.2,900-918).
cgccctacacttacaacaa

SEQ ID NO: 90154 - DNA, 19 bp, Homo sapiens
  siRNA target sequence for MAPKAPK5 (NM_003668.2,902-920).
ccctacacttacaacaaga

SEQ ID NO: 90155 - DNA, 19 bp, Homo sapiens
  siRNA target sequence for MAPKAPK5 (NM_003668.2,933-951).
ggtccctaggggtgattat

SEQ ID NO: 90156 - DNA, 19 bp, Homo sapiens
  siRNA target sequence for MAPKAPK5 (NM_003668.2,942-960).
gggtgattatctatgtgat

SEQ ID NO: 90157 - DNA, 19 bp, Homo sapiens
  siRNA target sequence for MAPKAPK5 (NM_003668.2,968-986).
ggataccctcctttttact

SEQ ID NO: 90158 - DNA, 19 bp, Homo sapiens
  siRNA target sequence for MAPKAPK5 (NM_003668.2,1000-1018).
ccggactatcccaaaggat

SEQ ID NO: 90159 - DNA, 19 bp, Homo sapiens
  siRNA target sequence for MAPKAPK5 (NM_003668.2,1001-1019).
cggactatcccaaaggata

SEQ ID NO: 90160 - DNA, 19 bp, Homo sapiens
  siRNA target sequence for MAPKAPK5 (NM_003668.2,1016-1034).
gatatgcgaagaaagatca

SEQ ID NO: 90161 - DNA, 19 bp, Homo sapiens
  siRNA target sequence for MAPKAPK5 (NM_003668.2,1265-1283).
cagttggccaacatgagaa

SEQ ID NO: 90162 - DNA, 19 bp, Homo sapiens
  siRNA target sequence for MAPKAPK5 (NM_003668.2,1510-1528).
gcaggaggcttggaagtat

SEQ ID NO: 90163 - DNA, 19 bp, Homo sapiens
  siRNA target sequence for MAPKAPK5 (NM_003668.2,1525-1543).
gtataaccgggaatgcaaa

SEQ ID NO: 90164 - DNA, 19 bp, Homo sapiens
  siRNA target sequence for MAPKAPK5 (NM_003668.2,1576-1594).
gaatggtcgtggattcaca

SEQ ID NO: 90165 - DNA, 19 bp, Homo sapiens
  siRNA target sequence for MAPKAPK5 (NM_003668.2,1581-1599).
gtcgtggattcacagataa

SEQ ID NO: 90166 - DNA, 19 bp, Homo sapiens
  siRNA target sequence for MAPKAPK5 (NM_003668.2,1587-1605).
gattcacagataaagtaga

SEQ ID NO: 90167 - DNA, 19 bp, Homo sapiens
  siRNA target sequence for MARK1 (NM_018650.2,630-648).
cgagcgggacacggaaaat

SEQ ID NO: 90168 - DNA, 19 bp, Homo sapiens
  siRNA target sequence for MARK1 (NM_018650.2,633-651).
gcgggacacggaaaatcat

SEQ ID NO: 90169 - DNA, 19 bp, Homo sapiens
  siRNA target sequence for MARK1 (NM_018650.2,634-652).
cgggacacggaaaatcata

SEQ ID NO: 90170 - DNA, 19 bp, Homo sapiens
  siRNA target sequence for MARK1 (NM_018650.2,636-654).
ggacacggaaaatcataca

SEQ ID NO: 90171 - DNA, 19 bp, Homo sapiens
  siRNA target sequence for MARK1 (NM_018650.2,637-655).
gacacggaaaatcatacat

SEQ ID NO: 90172 - DNA, 19 bp, Homo sapiens
  siRNA target sequence for MARK1 (NM_018650.2,656-674).
ctgtggatggatatactga

SEQ ID NO: 90173 - DNA, 19 bp, Homo sapiens
  siRNA target sequence for MARK1 (NM_018650.2,698-716).
cgagtagcagacagaacat

SEQ ID NO: 90174 - DNA, 19 bp, Homo sapiens
  siRNA target sequence for MARK1 (NM_018650.2,721-739).
cggtgtagaaactccatta

SEQ ID NO: 90175 - DNA, 19 bp, Homo sapiens
  siRNA target sequence for MARK1 (NM_018650.2,740-758).
cgtcagcaacagatgaaca

SEQ ID NO: 90176 - DNA, 19 bp, Homo sapiens
  siRNA target sequence for MARK1 (NM_018650.2,825-843).
ggcaagacacgttctaact

SEQ ID NO: 90177 - DNA, 19 bp, Homo sapiens
  siRNA target sequence for MARK1 (NM_018650.2,873-891).
caaaactcagctaaatcct

SEQ ID NO: 90178 - DNA, 19 bp, Homo sapiens
  siRNA target sequence for MARK1 (NM_018650.2,889-907).
cctaccagtctacaaaagt

SEQ ID NO: 90179 - DNA, 19 bp, Homo sapiens
  siRNA target sequence for MARK1 (NM_018650.2,894-912).
cagtctacaaaagttattt

SEQ ID NO: 90180 - DNA, 19 bp, Homo sapiens
  siRNA target sequence for MARK1 (NM_018650.2,922-940).
cgaataatgaagatactga

SEQ ID NO: 90181 - DNA, 19 bp, Homo sapiens
  siRNA target sequence for MARK1 (NM_018650.2,933-951).
gatactgaatcatcctaat

SEQ ID NO: 90182 - DNA, 19 bp, Homo sapiens
  siRNA target sequence for MARK1 (NM_018650.2,946-964).
cctaatataggtgaagtat

SEQ ID NO: 90183 - DNA, 19 bp, Homo sapiens
  siRNA target sequence for MARK1 (NM_018650.2,976-994).
gttgcccatggaagaatga

SEQ ID NO: 90184 - DNA, 19 bp, Homo sapiens
  siRNA target sequence for MARK1 (NM_018650.2,999-1017).
gaaagaggcccgtgcaaaa

SEQ ID NO: 90185 - DNA, 19 bp, Homo sapiens
  siRNA target sequence for MARK1 (NM_018650.2,1098-1116).
ccttgatggtgatatgaat

SEQ ID NO: 90186 - DNA, 19 bp, Homo sapiens
  siRNA target sequence for MARK1 (NM_018650.2,1154-1172).
cagttgggaacaaattgga

SEQ ID NO: 90187 - DNA, 19 bp, Homo sapiens
  siRNA target sequence for MARK1 (NM_018650.2,1199-1217).
ctgctcccgagcttttcca

SEQ ID NO: 90188 - DNA, 19 bp, Homo sapiens
  siRNA target sequence for MARK1 (NM_018650.2,1260-1278).
gggcgtcattctctataca

SEQ ID NO: 90189 - DNA, 19 bp, Homo sapiens
  siRNA target sequence for MARK1 (NM_018650.2,1263-1281).
cgtcattctctatacatta

SEQ ID NO: 90190 - DNA, 19 bp, Homo sapiens
  siRNA target sequence for MARK1 (NM_018650.2,1326-1344).
gcgagagcgagttttacga

SEQ ID NO: 90191 - DNA, 19 bp, Homo sapiens
  siRNA target sequence for MARK1 (NM_018650.2,1427-1445).
gaggcagcttggaacaaat

SEQ ID NO: 90192 - DNA, 19 bp, Homo sapiens
  siRNA target sequence for MARK1 (NM_018650.2,1429-1447).
ggcagcttggaacaaataa

SEQ ID NO: 90193 - DNA, 19 bp, Homo sapiens
  siRNA target sequence for MARK1 (NM_018650.2,1483-1501).
gaagaactaaagccatata

SEQ ID NO: 90194 - DNA, 19 bp, Homo sapiens
  siRNA target sequence for MARK1 (NM_018650.2,1504-1522).
gagcctgatccggatttca

SEQ ID NO: 90195 - DNA, 19 bp, Homo sapiens
  siRNA target sequence for MARK1 (NM_018650.2,1506-1524).
gcctgatccggatttcaat

SEQ ID NO: 90196 - DNA, 19 bp, Homo sapiens
  siRNA target sequence for MARK1 (NM_018650.2,1510-1528).
gatccggatttcaatgaca

SEQ ID NO: 90197 - DNA, 19 bp, Homo sapiens
  siRNA target sequence for MARK1 (NM_018650.2,1514-1532).
cggatttcaatgacacaaa

SEQ ID NO: 90198 - DNA, 19 bp, Homo sapiens
  siRNA target sequence for MARK1 (NM_018650.2,1557-1575).
gggctttgcacgagatgaa

SEQ ID NO: 90199 - DNA, 19 bp, Homo sapiens
  siRNA target sequence for MARK1 (NM_018650.2,1558-1576).
ggctttgcacgagatgaaa

SEQ ID NO: 90200 - DNA, 19 bp, Homo sapiens
  siRNA target sequence for MARK1 (NM_018650.2,1559-1577).
gctttgcacgagatgaaat

SEQ ID NO: 90201 - DNA, 19 bp, Homo sapiens
  siRNA target sequence for MARK1 (NM_018650.2,1560-1578).
ctttgcacgagatgaaata

SEQ ID NO: 90202 - DNA, 19 bp, Homo sapiens
  siRNA target sequence for MARK1 (NM_018650.2,1586-1604).
ccttaataaatcagaagta

SEQ ID NO: 90203 - DNA, 19 bp, Homo sapiens
  siRNA target sequence for MARK1 (NM_018650.2,1617-1635).
ggctacttatattcttcta

SEQ ID NO: 90204 - DNA, 19 bp, Homo sapiens
  siRNA target sequence for MARK1 (NM_018650.2,1657-1675).
gaaggtggtgaatcgttat

SEQ ID NO: 90205 - DNA, 19 bp, Homo sapiens
  siRNA target sequence for MARK1 (NM_018650.2,1660-1678).
ggtggtgaatcgttatcca

SEQ ID NO: 90206 - DNA, 19 bp, Homo sapiens
  siRNA target sequence for MARK1 (NM_018650.2,1670-1688).
cgttatccagtggaaactt

SEQ ID NO: 90207 - DNA, 19 bp, Homo sapiens
  siRNA target sequence for MARK1 (NM_018650.2,1705-1723).
cccagtagtgacttaaaca

SEQ ID NO: 90208 - DNA, 19 bp, Homo sapiens
  siRNA target sequence for MARK1 (NM_018650.2,1706-1724).
ccagtagtgacttaaacaa

SEQ ID NO: 90209 - DNA, 19 bp, Homo sapiens
  siRNA target sequence for MARK1 (NM_018650.2,1761-1779).
gagaagtatctcagcaaat

SEQ ID NO: 90210 - DNA, 19 bp, Homo sapiens
  siRNA target sequence for MARK1 (NM_018650.2,1782-1800).
gaagcagcggcgtttcagt

SEQ ID NO: 90211 - DNA, 19 bp, Homo sapiens
  siRNA target sequence for MARK1 (NM_018650.2,1788-1806).
gcggcgtttcagtgatcat

SEQ ID NO: 90212 - DNA, 19 bp, Homo sapiens
  siRNA target sequence for MARK1 (NM_018650.2,1818-1836).
cattcctcctgctgtatca

SEQ ID NO: 90213 - DNA, 19 bp, Homo sapiens
  siRNA target sequence for MARK1 (NM_018650.2,1828-1846).
gctgtatcatataccaaaa

SEQ ID NO: 90214 - DNA, 19 bp, Homo sapiens
  siRNA target sequence for MARK1 (NM_018650.2,1919-1937).
gcacaacagttggatcaaa

SEQ ID NO: 90215 - DNA, 19 bp, Homo sapiens
  siRNA target sequence for MARK1 (NM_018650.2,1985-2003).
cttcaactattccaagtaa

SEQ ID NO: 90216 - DNA, 19 bp, Homo sapiens
  siRNA target sequence for MARK1 (NM_018650.2,1991-2009).
ctattccaagtaacaatgt

SEQ ID NO: 90217 - DNA, 19 bp, Homo sapiens
  siRNA target sequence for MARK1 (NM_018650.2,2058-2076).
gaccacagatcgatacgta

SEQ ID NO: 90218 - DNA, 19 bp, Homo sapiens
  siRNA target sequence for MARK1 (NM_018650.2,2063-2081).
cagatcgatacgtagcatt

SEQ ID NO: 90219 - DNA, 19 bp, Homo sapiens
  siRNA target sequence for MARK1 (NM_018650.2,2221-2239).
gtcacactgccaaccatta

SEQ ID NO: 90220 - DNA, 19 bp, Homo sapiens
  siRNA target sequence for MARK1 (NM_018650.2,2225-2243).
cactgccaaccattaaaga

SEQ ID NO: 90221 - DNA, 19 bp, Homo sapiens
  siRNA target sequence for MARK1 (NM_018650.2,2394-2412).
gcgacgcagcgttgcttat

SEQ ID NO: 90222 - DNA, 19 bp, Homo sapiens
  siRNA target sequence for MARK1 (NM_018650.2,2395-2413).
cgacgcagcgttgcttata

SEQ ID NO: 90223 - DNA, 19 bp, Homo sapiens
  siRNA target sequence for MARK1 (NM_018650.2,2396-2414).
gacgcagcgttgcttataa

SEQ ID NO: 90224 - DNA, 19 bp, Homo sapiens
  siRNA target sequence for MARK1 (NM_018650.2,2436-2454).
ccatgaaacgggtgcattt

SEQ ID NO: 90225 - DNA, 19 bp, Homo sapiens
  siRNA target sequence for MARK1 (NM_018650.2,2578-2596).
cgttctttgcggttcacat

SEQ ID NO: 90226 - DNA, 19 bp, Homo sapiens
  siRNA target sequence for MARK1 (NM_018650.2,2662-2680).
gatgcaaataactgtgatt

SEQ ID NO: 90227 - DNA, 19 bp, Homo sapiens
  siRNA target sequence for MARK1 (NM_018650.2,2666-2684).
caaataactgtgattatga

SEQ ID NO: 90228 - DNA, 19 bp, Homo sapiens
  siRNA target sequence for MARK1 (NM_018650.2,2677-2695).
gattatgagcaaaaagaga

SEQ ID NO: 90229 - DNA, 19 bp, Homo sapiens
  siRNA target sequence for MARK1 (NM_018650.2,2772-2790).
gccacgactgtcacttaat

SEQ ID NO: 90230 - DNA, 19 bp, Homo sapiens
  siRNA target sequence for MARK1 (NM_018650.2,2794-2812).
gttcgcttcaagcgaatat

SEQ ID NO: 90231 - DNA, 19 bp, Homo sapiens
  siRNA target sequence for MARK1 (NM_018650.2,2806-2824).
cgaatatctgggacatcta

SEQ ID NO: 90232 - DNA, 19 bp, Homo sapiens
  siRNA target sequence for MARK1 (NM_018650.2,2807-2825).
gaatatctgggacatctat

SEQ ID NO: 90233 - DNA, 19 bp, Homo sapiens
  siRNA target sequence for MARK1 (NM_018650.2,2822-2840).
ctattgcctttaagaacat

SEQ ID NO: 90234 - DNA, 19 bp, Homo sapiens
  siRNA target sequence for MARK1 (NM_018650.2,2838-2856).
cattgcatcaaaaatagca

SEQ ID NO: 90235 - DNA, 19 bp, Homo sapiens
  siRNA target sequence for MARK2 (NM_004954.2,481-499).
ccattggcaagggtaattt

SEQ ID NO: 90236 - DNA, 19 bp, Homo sapiens
  siRNA target sequence for MARK2 (NM_004954.2,597-615).
ctattccgcgaagtaagaa

SEQ ID NO: 90237 - DNA, 19 bp, Homo sapiens
  siRNA target sequence for MARK2 (NM_004954.2,629-647).
gaatcatcccaacatagtt

SEQ ID NO: 90238 - DNA, 19 bp, Homo sapiens
  siRNA target sequence for MARK2 (NM_004954.2,703-721).
ctagtggcggagaggtatt

SEQ ID NO: 90239 - DNA, 19 bp, Homo sapiens
  siRNA target sequence for MARK2 (NM_004954.2,769-787).
ccaaattccgccagatagt

SEQ ID NO: 90240 - DNA, 19 bp, Homo sapiens
  siRNA target sequence for MARK2 (NM_004954.2,1014-1032).
ctaggagttatcctctata

SEQ ID NO: 90241 - DNA, 19 bp, Homo sapiens
  siRNA target sequence for MARK2 (NM_004954.2,1018-1036).
gagttatcctctatacact

SEQ ID NO: 90242 - DNA, 19 bp, Homo sapiens
  siRNA target sequence for MARK2 (NM_004954.2,1175-1193).
cagcaagagaggcacttta

SEQ ID NO: 90243 - DNA, 19 bp, Homo sapiens
  siRNA target sequence for MARK2 (NM_004954.2,1177-1195).
gcaagagaggcactttaga

SEQ ID NO: 90244 - DNA, 19 bp, Homo sapiens
  siRNA target sequence for MARK2 (NM_004954.2,1304-1322).
ggtgtccatgggttataca

SEQ ID NO: 90245 - DNA, 19 bp, Homo sapiens
  siRNA target sequence for MARK2 (NM_004954.2,1315-1333).
gttatacacgggaagagat

SEQ ID NO: 90246 - DNA, 19 bp, Homo sapiens
  siRNA target sequence for MARK2 (NM_004954.2,1551-1569).
gccattcccacctctaatt

SEQ ID NO: 90247 - DNA, 19 bp, Homo sapiens
  siRNA target sequence for MARK2 (NM_004954.2,1553-1571).
cattcccacctctaattct

SEQ ID NO: 90248 - DNA, 19 bp, Homo sapiens
  siRNA target sequence for MARK2 (NM_004954.2,1733-1751).
ctccaccagcacaaatcga

SEQ ID NO: 90249 - DNA, 19 bp, Homo sapiens
  siRNA target sequence for MARK2 (NM_004954.2,1753-1771).
gcaggaattccccactttt

SEQ ID NO: 90250 - DNA, 19 bp, Homo sapiens
  siRNA target sequence for MARK2 (NM_004954.2,1756-1774).
ggaattccccacttttgga

SEQ ID NO: 90251 - DNA, 19 bp, Homo sapiens
  siRNA target sequence for MARK2 (NM_004954.2,1849-1867).
ccccatccgcccacaacat

SEQ ID NO: 90252 - DNA, 19 bp, Homo sapiens
  siRNA target sequence for MARK2 (NM_004954.2,1851-1869).
ccatccgcccacaacatca

SEQ ID NO: 90253 - DNA, 19 bp, Homo sapiens
  siRNA target sequence for MARK2 (NM_004954.2,1885-1903).
ccccagaccgaactaactt

SEQ ID NO: 90254 - DNA, 19 bp, Homo sapiens
  siRNA target sequence for MARK2 (NM_004954.2,2140-2158).
gtggcggcaacgacaaaga

SEQ ID NO: 90255 - DNA, 19 bp, Homo sapiens
  siRNA target sequence for MARK2 (NM_004954.2,2392-2410).
ctctcaacggggttcgatt

SEQ ID NO: 90256 - DNA, 19 bp, Homo sapiens
  siRNA target sequence for MARK2 (NM_004954.2,2394-2412).
ctcaacggggttcgattta

SEQ ID NO: 90257 - DNA, 19 bp, Homo sapiens
  siRNA target sequence for MARK2 (NM_004954.2,2463-2481).
gccaacgagctgaagcttt

SEQ ID NO: 90258 - DNA, 19 bp, Homo sapiens
  siRNA target sequence for MARK2 (NM_017490.1,1810-1828).
gcaaagacagcctaaccat

SEQ ID NO: 90259 - DNA, 19 bp, Homo sapiens
  siRNA target sequence for MARK2 (NM_017490.1,1887-1905).
cgccagcaccagaaatcca

SEQ ID NO: 90260 - DNA, 19 bp, Homo sapiens
  siRNA target sequence for MARK2 (NM_017490.1,1946-1964).
ccccacggagagtaactgt

SEQ ID NO: 90261 - DNA, 19 bp, Homo sapiens
  siRNA target sequence for MARK3 (NM_002376.3,554-572).
gagatgggcgtcaagaagt

SEQ ID NO: 90262 - DNA, 19 bp, Homo sapiens
  siRNA target sequence for MARK3 (NM_002376.3,556-574).
gatgggcgtcaagaagtta

SEQ ID NO: 90263 - DNA, 19 bp, Homo sapiens
  siRNA target sequence for MARK3 (NM_002376.3,595-613).
ggagctcggtgtagaaact

SEQ ID NO: 90264 - DNA, 19 bp, Homo sapiens
  siRNA target sequence for MARK3 (NM_002376.3,598-616).
gctcggtgtagaaactcta

SEQ ID NO: 90265 - DNA, 19 bp, Homo sapiens
  siRNA target sequence for MARK3 (NM_002376.3,640-658).
cctcacatcggaaactaca

SEQ ID NO: 90266 - DNA, 19 bp, Homo sapiens
  siRNA target sequence for MARK3 (NM_002376.3,650-668).
gaaactacagactgttgaa

SEQ ID NO: 90267 - DNA, 19 bp, Homo sapiens
  siRNA target sequence for MARK3 (NM_002376.3,671-689).
caatcggcaaggggaattt

SEQ ID NO: 90268 - DNA, 19 bp, Homo sapiens
  siRNA target sequence for MARK3 (NM_002376.3,681-699).
ggggaattttgcaaaagta

SEQ ID NO: 90269 - DNA, 19 bp, Homo sapiens
  siRNA target sequence for MARK3 (NM_002376.3,682-700).
gggaattttgcaaaagtaa

SEQ ID NO: 90270 - DNA, 19 bp, Homo sapiens
  siRNA target sequence for MARK3 (NM_002376.3,697-715).
gtaaaattggcaagacata

SEQ ID NO: 90271 - DNA, 19 bp, Homo sapiens
  siRNA target sequence for MARK3 (NM_002376.3,762-780).
gttgaatccaacaagtcta

SEQ ID NO: 90272 - DNA, 19 bp, Homo sapiens
  siRNA target sequence for MARK3 (NM_002376.3,786-804).
gctcttcagagaagtaaga

SEQ ID NO: 90273 - DNA, 19 bp, Homo sapiens
  siRNA target sequence for MARK3 (NM_002376.3,837-855).
gaagttattcgaagtcatt

SEQ ID NO: 90274 - DNA, 19 bp, Homo sapiens
  siRNA target sequence for MARK3 (NM_002376.3,840-858).
gttattcgaagtcattgaa

SEQ ID NO: 90275 - DNA, 19 bp, Homo sapiens
  siRNA target sequence for MARK3 (NM_002376.3,877-895).
ctaatcatggaatatgcaa

SEQ ID NO: 90276 - DNA, 19 bp, Homo sapiens
  siRNA target sequence for MARK3 (NM_002376.3,893-911).
caagtggaggtgaagtatt

SEQ ID NO: 90277 - DNA, 19 bp, Homo sapiens
  siRNA target sequence for MARK3 (NM_002376.3,1052-1070).
ccgatatgaacattaaaat

SEQ ID NO: 90278 - DNA, 19 bp, Homo sapiens
  siRNA target sequence for MARK3 (NM_002376.3,1108-1126).
ggtaaactcgacacgtttt

SEQ ID NO: 90279 - DNA, 19 bp, Homo sapiens
  siRNA target sequence for MARK3 (NM_002376.3,1280-1298).
gagtattaagagggaaata

SEQ ID NO: 90280 - DNA, 19 bp, Homo sapiens
  siRNA target sequence for MARK3 (NM_002376.3,1330-1348).
gaaaaccttctcaaacgtt

SEQ ID NO: 90281 - DNA, 19 bp, Homo sapiens
  siRNA target sequence for MARK3 (NM_002376.3,1350-1368).
cctggtgctaaatccaatt

SEQ ID NO: 90282 - DNA, 19 bp, Homo sapiens
  siRNA target sequence for MARK3 (NM_002376.3,1351-1369).
ctggtgctaaatccaatta

SEQ ID NO: 90283 - DNA, 19 bp, Homo sapiens
  siRNA target sequence for MARK3 (NM_002376.3,1462-1480).
gacatctcagaccaaaaaa

SEQ ID NO: 90284 - DNA, 19 bp, Homo sapiens
  siRNA target sequence for MARK3 (NM_002376.3,1467-1485).
ctcagaccaaaaaagaata

SEQ ID NO: 90285 - DNA, 19 bp, Homo sapiens
  siRNA target sequence for MARK3 (NM_002376.3,1528-1546).
gaatctcttagtaagatga

SEQ ID NO: 90286 - DNA, 19 bp, Homo sapiens
  siRNA target sequence for MARK3 (NM_002376.3,1597-1615).
gagctggatgctagtgatt

SEQ ID NO: 90287 - DNA, 19 bp, Homo sapiens
  siRNA target sequence for MARK3 (NM_002376.3,1606-1624).
gctagtgattccagttcta

SEQ ID NO: 90288 - DNA, 19 bp, Homo sapiens
  siRNA target sequence for MARK3 (NM_002376.3,1617-1635).
cagttctagcagcaatctt

SEQ ID NO: 90289 - DNA, 19 bp, Homo sapiens
  siRNA target sequence for MARK3 (NM_002376.3,1633-1651).
ctttcacttgctaaggtta

SEQ ID NO: 90290 - DNA, 19 bp, Homo sapiens
  siRNA target sequence for MARK3 (NM_002376.3,1652-1670).
ggccgagcagtgatctcaa

SEQ ID NO: 90291 - DNA, 19 bp, Homo sapiens
  siRNA target sequence for MARK3 (NM_002376.3,1655-1673).
cgagcagtgatctcaacaa

SEQ ID NO: 90292 - DNA, 19 bp, Homo sapiens
  siRNA target sequence for MARK3 (NM_002376.3,1777-1795).
gtggcgtatccgaaaagga

SEQ ID NO: 90293 - DNA, 19 bp, Homo sapiens
  siRNA target sequence for MARK3 (NM_002376.3,1906-1924).
gggaatgcaagtaatccta

SEQ ID NO: 90294 - DNA, 19 bp, Homo sapiens
  siRNA target sequence for MARK3 (NM_002376.3,1907-1925).
ggaatgcaagtaatcctaa

SEQ ID NO: 90295 - DNA, 19 bp, Homo sapiens
  siRNA target sequence for MARK3 (NM_002376.3,1908-1926).
gaatgcaagtaatcctaat

SEQ ID NO: 90296 - DNA, 19 bp, Homo sapiens
  siRNA target sequence for MARK3 (NM_002376.3,1958-1976).
ccactgtccctagtagtaa

SEQ ID NO: 90297 - DNA, 19 bp, Homo sapiens
  siRNA target sequence for MARK3 (NM_002376.3,1990-2008).
ggaatgacacgacgaaata

SEQ ID NO: 90298 - DNA, 19 bp, Homo sapiens
  siRNA target sequence for MARK3 (NM_002376.3,1995-2013).
gacacgacgaaatacttat

SEQ ID NO: 90299 - DNA, 19 bp, Homo sapiens
  siRNA target sequence for MARK3 (NM_002376.3,1997-2015).
cacgacgaaatacttatgt

SEQ ID NO: 90300 - DNA, 19 bp, Homo sapiens
  siRNA target sequence for MARK3 (NM_002376.3,1999-2017).
cgacgaaatacttatgttt

SEQ ID NO: 90301 - DNA, 19 bp, Homo sapiens
  siRNA target sequence for MARK3 (NM_002376.3,2027-2045).
gaactacagctgatagaca

SEQ ID NO: 90302 - DNA, 19 bp, Homo sapiens
  siRNA target sequence for MARK3 (NM_002376.3,2104-2122).
gcttcaacacacagtatca

SEQ ID NO: 90303 - DNA, 19 bp, Homo sapiens
  siRNA target sequence for MARK3 (NM_002376.3,2129-2147).
cagccaccccagatcgaat

SEQ ID NO: 90304 - DNA, 19 bp, Homo sapiens
  siRNA target sequence for MARK3 (NM_002376.3,2203-2221).
cggcgaaccgcaacatata

SEQ ID NO: 90305 - DNA, 19 bp, Homo sapiens
  siRNA target sequence for MARK3 (NM_002376.3,2205-2223).
gcgaaccgcaacatataat

SEQ ID NO: 90306 - DNA, 19 bp, Homo sapiens
  siRNA target sequence for MARK3 (NM_002376.3,2282-2300).
gccgaggctccactaatct

SEQ ID NO: 90307 - DNA, 19 bp, Homo sapiens
  siRNA target sequence for MARK3 (NM_002376.3,2284-2302).
cgaggctccactaatctct

SEQ ID NO: 90308 - DNA, 19 bp, Homo sapiens
  siRNA target sequence for MARK3 (NM_002376.3,2285-2303).
gaggctccactaatctctt

SEQ ID NO: 90309 - DNA, 19 bp, Homo sapiens
  siRNA target sequence for MARK3 (NM_002376.3,2287-2305).
ggctccactaatctcttta

SEQ ID NO: 90310 - DNA, 19 bp, Homo sapiens
  siRNA target sequence for MARK3 (NM_002376.3,2289-2307).
ctccactaatctctttagt

SEQ ID NO: 90311 - DNA, 19 bp, Homo sapiens
  siRNA target sequence for MARK3 (NM_002376.3,2291-2309).
ccactaatctctttagtaa

SEQ ID NO: 90312 - DNA, 19 bp, Homo sapiens
  siRNA target sequence for MARK3 (NM_002376.3,2325-2343).
cacaaggagtcgcaatgta

SEQ ID NO: 90313 - DNA, 19 bp, Homo sapiens
  siRNA target sequence for MARK3 (NM_002376.3,2446-2464).
cgggaaatccgcaaagtgt

SEQ ID NO: 90314 - DNA, 19 bp, Homo sapiens
  siRNA target sequence for MARK3 (NM_002376.3,2461-2479).
gtgttggacgccaataact

SEQ ID NO: 90315 - DNA, 19 bp, Homo sapiens
  siRNA target sequence for MARK3 (NM_002376.3,2471-2489).
ccaataactgcgactatga

SEQ ID NO: 90316 - DNA, 19 bp, Homo sapiens
  siRNA target sequence for MARK3 (NM_002376.3,2622-2640).
gacatccatagccttcaaa

SEQ ID NO: 90317 - DNA, 19 bp, Homo sapiens
  siRNA target sequence for MARK4 (NM_031417.2,252-270).
cgggaggttgccatcaaga

SEQ ID NO: 90318 - DNA, 19 bp, Homo sapiens
  siRNA target sequence for MARK4 (NM_031417.2,318-336).
cgagaagtccgcatcatga

SEQ ID NO: 90319 - DNA, 19 bp, Homo sapiens
  siRNA target sequence for MARK4 (NM_031417.2,319-337).
gagaagtccgcatcatgaa

SEQ ID NO: 90320 - DNA, 19 bp, Homo sapiens
  siRNA target sequence for MARK4 (NM_031417.2,484-502).
ccaagttccgacagattgt

SEQ ID NO: 90321 - DNA, 19 bp, Homo sapiens
  siRNA target sequence for MARK4 (NM_031417.2,485-503).
caagttccgacagattgtt

SEQ ID NO: 90322 - DNA, 19 bp, Homo sapiens
  siRNA target sequence for MARK4 (NM_031417.2,578-596).
cgaggccaacatcaagatt

SEQ ID NO: 90323 - DNA, 19 bp, Homo sapiens
  siRNA target sequence for MARK4 (NM_031417.2,825-843).
cgggtccctttctacatgt

SEQ ID NO: 90324 - DNA, 19 bp, Homo sapiens
  siRNA target sequence for MARK4 (NM_031417.2,828-846).
gtccctttctacatgtcaa

SEQ ID NO: 90325 - DNA, 19 bp, Homo sapiens
  siRNA target sequence for MARK4 (NM_031417.2,956-974).
ggagttgaagccatacaca

SEQ ID NO: 90326 - DNA, 19 bp, Homo sapiens
  siRNA target sequence for MARK4 (NM_031417.2,994-1012).
gggacaccaagagaattga

SEQ ID NO: 90327 - DNA, 19 bp, Homo sapiens
  siRNA target sequence for MARK4 (NM_031417.2,1029-1047).
ggctacacacgggaagaaa

SEQ ID NO: 90328 - DNA, 19 bp, Homo sapiens
  siRNA target sequence for MARK4 (NM_031417.2,1030-1048).
gctacacacgggaagaaat

SEQ ID NO: 90329 - DNA, 19 bp, Homo sapiens
  siRNA target sequence for MARK4 (NM_031417.2,1181-1199).
caccaccaacggaacaagt

SEQ ID NO: 90330 - DNA, 19 bp, Homo sapiens
  siRNA target sequence for MARK4 (NM_031417.2,1263-1281).
cgcaggcatagcgatttct

SEQ ID NO: 90331 - DNA, 19 bp, Homo sapiens
  siRNA target sequence for MARK4 (NM_031417.2,1506-1524).
ctccctcctagcatgatga

SEQ ID NO: 90332 - DNA, 19 bp, Homo sapiens
  siRNA target sequence for MARK4 (NM_031417.2,1944-1962).
ccccagggatccaagatca

SEQ ID NO: 90333 - DNA, 19 bp, Homo sapiens
  siRNA target sequence for MARK4 (NM_031417.2,2012-2030).
catctaccttgggatcaaa

SEQ ID NO: 90334 - DNA, 19 bp, Homo sapiens
  siRNA target sequence for MAST205 (NM_015112.1,360-378).
cggagctgtctcagtcttt

SEQ ID NO: 90335 - DNA, 19 bp, Homo sapiens
  siRNA target sequence for MAST205 (NM_015112.1,454-472).
ggagcaggatgtagtaact

SEQ ID NO: 90336 - DNA, 19 bp, Homo sapiens
  siRNA target sequence for MAST205 (NM_015112.1,493-511).
caggaaactcagtaatcct

SEQ ID NO: 90337 - DNA, 19 bp, Homo sapiens
  siRNA target sequence for MAST205 (NM_015112.1,558-576).
gtcaggatgattgtaagtt

SEQ ID NO: 90338 - DNA, 19 bp, Homo sapiens
  siRNA target sequence for MAST205 (NM_015112.1,560-578).
caggatgattgtaagttat

SEQ ID NO: 90339 - DNA, 19 bp, Homo sapiens
  siRNA target sequence for MAST205 (NM_015112.1,563-581).
gatgattgtaagttatgga

SEQ ID NO: 90340 - DNA, 19 bp, Homo sapiens
  siRNA target sequence for MAST205 (NM_015112.1,672-690).
cgtcaggagaagcatcaaa

SEQ ID NO: 90341 - DNA, 19 bp, Homo sapiens
  siRNA target sequence for MAST205 (NM_015112.1,684-702).
catcaaacctggttcgaat

SEQ ID NO: 90342 - DNA, 19 bp, Homo sapiens
  siRNA target sequence for MAST205 (NM_015112.1,724-742).
gtctgcaccttctcttact

SEQ ID NO: 90343 - DNA, 19 bp, Homo sapiens
  siRNA target sequence for MAST205 (NM_015112.1,901-919).
gaatttctctccaaatgca

SEQ ID NO: 90344 - DNA, 19 bp, Homo sapiens
  siRNA target sequence for MAST205 (NM_015112.1,1035-1053).
catgctcctcacaggaaaa

SEQ ID NO: 90345 - DNA, 19 bp, Homo sapiens
  siRNA target sequence for MAST205 (NM_015112.1,1038-1056).
gctcctcacaggaaaagct

SEQ ID NO: 90346 - DNA, 19 bp, Homo sapiens
  siRNA target sequence for MAST205 (NM_015112.1,1207-1225).
ctttgacagtgaaataata

SEQ ID NO: 90347 - DNA, 19 bp, Homo sapiens
  siRNA target sequence for MAST205 (NM_015112.1,1257-1275).
caaaggccaccgcacaaat

SEQ ID NO: 90348 - DNA, 19 bp, Homo sapiens
  siRNA target sequence for MAST205 (NM_015112.1,1280-1298).
gagcgactagcagagttta

SEQ ID NO: 90349 - DNA, 19 bp, Homo sapiens
  siRNA target sequence for MAST205 (NM_015112.1,1282-1300).
gcgactagcagagtttatt

SEQ ID NO: 90350 - DNA, 19 bp, Homo sapiens
  siRNA target sequence for MAST205 (NM_015112.1,1283-1301).
cgactagcagagtttattt

SEQ ID NO: 90351 - DNA, 19 bp, Homo sapiens
  siRNA target sequence for MAST205 (NM_015112.1,1344-1362).
ccctgagctttattcatca

SEQ ID NO: 90352 - DNA, 19 bp, Homo sapiens
  siRNA target sequence for MAST205 (NM_015112.1,1381-1399).
ccgagactgcctggataaa

SEQ ID NO: 90353 - DNA, 19 bp, Homo sapiens
  siRNA target sequence for MAST205 (NM_015112.1,1403-1421).
cggagtggcctcattacat

SEQ ID NO: 90354 - DNA, 19 bp, Homo sapiens
  siRNA target sequence for MAST205 (NM_015112.1,1409-1427).
ggcctcattacatcacaat

SEQ ID NO: 90355 - DNA, 19 bp, Homo sapiens
  siRNA target sequence for MAST205 (NM_015112.1,1410-1428).
gcctcattacatcacaata

SEQ ID NO: 90356 - DNA, 19 bp, Homo sapiens
  siRNA target sequence for MAST205 (NM_015112.1,1633-1651).
gggacaagggattaaatgt

SEQ ID NO: 90357 - DNA, 19 bp, Homo sapiens
  siRNA target sequence for MAST205 (NM_015112.1,1690-1708).
ccgggatcccctagaagaa

SEQ ID NO: 90358 - DNA, 19 bp, Homo sapiens
  siRNA target sequence for MAST205 (NM_015112.1,1691-1709).
cgggatcccctagaagaaa

SEQ ID NO: 90359 - DNA, 19 bp, Homo sapiens
  siRNA target sequence for MAST205 (NM_015112.1,1746-1764).
cagagacagatgattctat

SEQ ID NO: 90360 - DNA, 19 bp, Homo sapiens
  siRNA target sequence for MAST205 (NM_015112.1,1846-1864).
cgcctatggggctgtattt

SEQ ID NO: 90361 - DNA, 19 bp, Homo sapiens
  siRNA target sequence for MAST205 (NM_015112.1,1848-1866).
cctatggggctgtatttct

SEQ ID NO: 90362 - DNA, 19 bp, Homo sapiens
  siRNA target sequence for MAST205 (NM_015112.1,2111-2129).
gacatggtgcgtctatact

SEQ ID NO: 90363 - DNA, 19 bp, Homo sapiens
  siRNA target sequence for MAST205 (NM_015112.1,2113-2131).
catggtgcgtctatacttt

SEQ ID NO: 90364 - DNA, 19 bp, Homo sapiens
  siRNA target sequence for MAST205 (NM_015112.1,2271-2289).
gtctgacaacgaacttgta

SEQ ID NO: 90365 - DNA, 19 bp, Homo sapiens
  siRNA target sequence for MAST205 (NM_015112.1,2284-2302).
cttgtatgagggtcatatt

SEQ ID NO: 90366 - DNA, 19 bp, Homo sapiens
  siRNA target sequence for MAST205 (NM_015112.1,2287-2305).
gtatgagggtcatattgaa

SEQ ID NO: 90367 - DNA, 19 bp, Homo sapiens
  siRNA target sequence for MAST205 (NM_015112.1,2417-2435).
ggcattatcctgtatgagt

SEQ ID NO: 90368 - DNA, 19 bp, Homo sapiens
  siRNA target sequence for MAST205 (NM_015112.1,2418-2436).
gcattatcctgtatgagtt

SEQ ID NO: 90369 - DNA, 19 bp, Homo sapiens
  siRNA target sequence for MAST205 (NM_015112.1,2491-2509).
ggtgatcagtgatgagatt

SEQ ID NO: 90370 - DNA, 19 bp, Homo sapiens
  siRNA target sequence for MAST205 (NM_015112.1,2623-2641).
gcagcacccattctttact

SEQ ID NO: 90371 - DNA, 19 bp, Homo sapiens
  siRNA target sequence for MAST205 (NM_015112.1,2974-2992).
gattggctcccctgagata

SEQ ID NO: 90372 - DNA, 19 bp, Homo sapiens
  siRNA target sequence for MAST205 (NM_015112.1,3402-3420).
ctgctcgccctgtcaacaa

SEQ ID NO: 90373 - DNA, 19 bp, Homo sapiens
  siRNA target sequence for MAST205 (NM_015112.1,3605-3623).
caccgagctggcaagaagt

SEQ ID NO: 90374 - DNA, 19 bp, Homo sapiens
  siRNA target sequence for MAST205 (NM_015112.1,4134-4152).
ccgatgctgtgcattcagt

SEQ ID NO: 90375 - DNA, 19 bp, Homo sapiens
  siRNA target sequence for MAST205 (NM_015112.1,4399-4417).
ggcctttcccacaaagctt

SEQ ID NO: 90376 - DNA, 19 bp, Homo sapiens
  siRNA target sequence for MAST205 (NM_015112.1,4473-4491).
cccgttcaccactactcaa

SEQ ID NO: 90377 - DNA, 19 bp, Homo sapiens
  siRNA target sequence for MAST205 (NM_015112.1,4495-4513).
ggtgcagtcggctgagaaa

SEQ ID NO: 90378 - DNA, 19 bp, Homo sapiens
  siRNA target sequence for MAST205 (NM_015112.1,5251-5269).
gtcctggaaatcccttatt

SEQ ID NO: 90379 - DNA, 19 bp, Homo sapiens
  siRNA target sequence for MAST205 (NM_015112.1,5253-5271).
cctggaaatcccttattga

SEQ ID NO: 90380 - DNA, 19 bp, Homo sapiens
  siRNA target sequence for MAST205 (NM_015112.1,5417-5435).
gactggcccatccatctta

SEQ ID NO: 90381 - DNA, 19 bp, Homo sapiens
  siRNA target sequence for MAT1A (NM_000429.1,97-115).
gtgaccactctctaagtga

SEQ ID NO: 90382 - DNA, 19 bp, Homo sapiens
  siRNA target sequence for MAT1A (NM_000429.1,117-135).
ggagtcttcatgttcacat

SEQ ID NO: 90383 - DNA, 19 bp, Homo sapiens
  siRNA target sequence for MAT1A (NM_000429.1,150-168).
gagggacacccggataaga

SEQ ID NO: 90384 - DNA, 19 bp, Homo sapiens
  siRNA target sequence for MAT1A (NM_000429.1,153-171).
ggacacccggataagatct

SEQ ID NO: 90385 - DNA, 19 bp, Homo sapiens
  siRNA target sequence for MAT1A (NM_000429.1,404-422).
gcagcaatccccagatatt

SEQ ID NO: 90386 - DNA, 19 bp, Homo sapiens
  siRNA target sequence for MAT1A (NM_000429.1,430-448).
gcgtccatctggacagaaa

SEQ ID NO: 90387 - DNA, 19 bp, Homo sapiens
  siRNA target sequence for MAT1A (NM_000429.1,597-615).
ctgcggcctgactctaaga

SEQ ID NO: 90388 - DNA, 19 bp, Homo sapiens
  siRNA target sequence for MAT1A (NM_000429.1,599-617).
gcggcctgactctaagact

SEQ ID NO: 90389 - DNA, 19 bp, Homo sapiens
  siRNA target sequence for MAT1A (NM_000429.1,616-634).
ctcaggtgacagttcagta

SEQ ID NO: 90390 - DNA, 19 bp, Homo sapiens
  siRNA target sequence for MAT1A (NM_000429.1,808-826).
ccagtgggcggtttgtcat

SEQ ID NO: 90391 - DNA, 19 bp, Homo sapiens
  siRNA target sequence for MAT1A (NM_000429.1,852-870).
gtcactggccgtaagatta

SEQ ID NO: 90392 - DNA, 19 bp, Homo sapiens
  siRNA target sequence for MAT1A (NM_000429.1,854-872).
cactggccgtaagattatt

SEQ ID NO: 90393 - DNA, 19 bp, Homo sapiens
  siRNA target sequence for MAT1A (NM_000429.1,856-874).
ctggccgtaagattattgt

SEQ ID NO: 90394 - DNA, 19 bp, Homo sapiens
  siRNA target sequence for MAT1A (NM_000429.1,1013-1031).
gcttgtccaggtttcctat

SEQ ID NO: 90395 - DNA, 19 bp, Homo sapiens
  siRNA target sequence for MAT1A (NM_000429.1,1044-1062).
gccgagccgctgtccattt

SEQ ID NO: 90396 - DNA, 19 bp, Homo sapiens
  siRNA target sequence for MAT1A (NM_000429.1,1047-1065).
gagccgctgtccatttcca

SEQ ID NO: 90397 - DNA, 19 bp, Homo sapiens
  siRNA target sequence for MAT1A (NM_000429.1,1236-1254).
gttcccaggaagcttgtat

SEQ ID NO: 90398 - DNA, 19 bp, Homo sapiens
  siRNA target sequence for MAT2A (NM_005911.3,191-209).
ccacccagataagatttgt

SEQ ID NO: 90399 - DNA, 19 bp, Homo sapiens
  siRNA target sequence for MAT2A (NM_005911.3,261-279).
gccaaagtagcttgtgaaa

SEQ ID NO: 90400 - DNA, 19 bp, Homo sapiens
  siRNA target sequence for MAT2A (NM_005911.3,325-343).
ccagagctgctgttgacta

SEQ ID NO: 90401 - DNA, 19 bp, Homo sapiens
  siRNA target sequence for MAT2A (NM_005911.3,363-381).
gctgttaaacacattggat

SEQ ID NO: 90402 - DNA, 19 bp, Homo sapiens
  siRNA target sequence for MAT2A (NM_005911.3,364-382).
ctgttaaacacattggata

SEQ ID NO: 90403 - DNA, 19 bp, Homo sapiens
  siRNA target sequence for MAT2A (NM_005911.3,372-390).
cacattggatatgatgatt

SEQ ID NO: 90404 - DNA, 19 bp, Homo sapiens
  siRNA target sequence for MAT2A (NM_005911.3,466-484).
gtgttcatcttgacagaaa

SEQ ID NO: 90405 - DNA, 19 bp, Homo sapiens
  siRNA target sequence for MAT2A (NM_005911.3,549-567).
gagtgtatgcctttaacca

SEQ ID NO: 90406 - DNA, 19 bp, Homo sapiens
  siRNA target sequence for MAT2A (NM_005911.3,631-649).
ggttacgccctgattctaa

SEQ ID NO: 90407 - DNA, 19 bp, Homo sapiens
  siRNA target sequence for MAT2A (NM_005911.3,632-650).
gttacgccctgattctaaa

SEQ ID NO: 90408 - DNA, 19 bp, Homo sapiens
  siRNA target sequence for MAT2A (NM_005911.3,698-716).
catcagagtccacacaatt

SEQ ID NO: 90409 - DNA, 19 bp, Homo sapiens
  siRNA target sequence for MAT2A (NM_005911.3,707-725).
ccacacaattgttatatct

SEQ ID NO: 90410 - DNA, 19 bp, Homo sapiens
  siRNA target sequence for MAT2A (NM_005911.3,744-762).
gtttgtcttgatgaaatga

SEQ ID NO: 90411 - DNA, 19 bp, Homo sapiens
  siRNA target sequence for MAT2A (NM_005911.3,793-811).
cagttgtgcctgcgaaata

SEQ ID NO: 90412 - DNA, 19 bp, Homo sapiens
  siRNA target sequence for MAT2A (NM_005911.3,886-904).
gtttgactggacgcaaaat

SEQ ID NO: 90413 - DNA, 19 bp, Homo sapiens
  siRNA target sequence for MAT2A (NM_005911.3,890-908).
gactggacgcaaaatcatt

SEQ ID NO: 90414 - DNA, 19 bp, Homo sapiens
  siRNA target sequence for MAT2A (NM_005911.3,977-995).
cgaccgttcagctgcttat

SEQ ID NO: 90415 - DNA, 19 bp, Homo sapiens
  siRNA target sequence for MAT2A (NM_005911.3,1008-1026).
gtggcaaaatcccttgtta

SEQ ID NO: 90416 - DNA, 19 bp, Homo sapiens
  siRNA target sequence for MAT2A (NM_005911.3,1010-1028).
ggcaaaatcccttgttaaa

SEQ ID NO: 90417 - DNA, 19 bp, Homo sapiens
  siRNA target sequence for MAT2A (NM_005911.3,1037-1055).
gtgccggagggttcttgtt

SEQ ID NO: 90418 - DNA, 19 bp, Homo sapiens
  siRNA target sequence for MAT2A (NM_005911.3,1039-1057).
gccggagggttcttgttca

SEQ ID NO: 90419 - DNA, 19 bp, Homo sapiens
  siRNA target sequence for MAT2A (NM_005911.3,1074-1092).
ggagtttctcatccattat

SEQ ID NO: 90420 - DNA, 19 bp, Homo sapiens
  siRNA target sequence for MAT2A (NM_005911.3,1077-1095).
gtttctcatccattatcta

SEQ ID NO: 90421 - DNA, 19 bp, Homo sapiens
  siRNA target sequence for MAT2A (NM_005911.3,1097-1115).
ctccattttccattatggt

SEQ ID NO: 90422 - DNA, 19 bp, Homo sapiens
  siRNA target sequence for MAT2A (NM_005911.3,1129-1147).
gtgagagagagctattaga

SEQ ID NO: 90423 - DNA, 19 bp, Homo sapiens
  siRNA target sequence for MATK (NM_002378.2,862-880).
gcgacggccacctcacaat

SEQ ID NO: 90424 - DNA, 19 bp, Homo sapiens
  siRNA target sequence for MATK (NM_002378.2,866-884).
cggccacctcacaatcgat

SEQ ID NO: 90425 - DNA, 19 bp, Homo sapiens
  siRNA target sequence for MATK (NM_002378.2,1119-1137).
gccgtgaagaatatcaagt

SEQ ID NO: 90426 - DNA, 19 bp, Homo sapiens
  siRNA target sequence for MATK (NM_002378.2,1229-1247).
gcaccaggggctgtacatt

SEQ ID NO: 90427 - DNA, 19 bp, Homo sapiens
  siRNA target sequence for MATK (NM_002378.2,1320-1338).
gctcagctcctgcagtttt

SEQ ID NO: 90428 - DNA, 19 bp, Homo sapiens
  siRNA target sequence for MATK (NM_002378.2,1527-1545).
ctcaaacacgggaagttca

SEQ ID NO: 90429 - DNA, 19 bp, Homo sapiens
  siRNA target sequence for MATK (NM_002378.2,1553-1571).
gtcggatgtctggagtttt

SEQ ID NO: 90430 - DNA, 19 bp, Homo sapiens
  siRNA target sequence for MATK (NM_002378.2,1605-1623).
cgggctccgtaccctaaaa

SEQ ID NO: 90431 - DNA, 19 bp, Homo sapiens
  siRNA target sequence for MATK (NM_002378.2,1606-1624).
gggctccgtaccctaaaat

SEQ ID NO: 90432 - DNA, 19 bp, Homo sapiens
  siRNA target sequence for MATK (NM_002378.2,1608-1626).
gctccgtaccctaaaatgt

SEQ ID NO: 90433 - DNA, 19 bp, Homo sapiens
  siRNA target sequence for MCCC1 (NM_020166.2,236-254).
ggcaaagaaccatgaagta

SEQ ID NO: 90434 - DNA, 19 bp, Homo sapiens
  siRNA target sequence for MCCC1 (NM_020166.2,281-299).
ccaaggtcctcattgcaaa

SEQ ID NO: 90435 - DNA, 19 bp, Homo sapiens
  siRNA target sequence for MCCC1 (NM_020166.2,324-342).
gatgcgcacagccaaaaaa

SEQ ID NO: 90436 - DNA, 19 bp, Homo sapiens
  siRNA target sequence for MCCC1 (NM_020166.2,352-370).
cagactgtggcggtttata

SEQ ID NO: 90437 - DNA, 19 bp, Homo sapiens
  siRNA target sequence for MCCC1 (NM_020166.2,356-374).
ctgtggcggtttatagtga

SEQ ID NO: 90438 - DNA, 19 bp, Homo sapiens
  siRNA target sequence for MCCC1 (NM_020166.2,383-401).
gaaattccatgcatgtaga

SEQ ID NO: 90439 - DNA, 19 bp, Homo sapiens
  siRNA target sequence for MCCC1 (NM_020166.2,442-460).
cagcagagctacctatcta

SEQ ID NO: 90440 - DNA, 19 bp, Homo sapiens
  siRNA target sequence for MCCC1 (NM_020166.2,590-608).
ctccatctgcaattagaga

SEQ ID NO: 90441 - DNA, 19 bp, Homo sapiens
  siRNA target sequence for MCCC1 (NM_020166.2,621-639).
gagcacatccaaatccata

SEQ ID NO: 90442 - DNA, 19 bp, Homo sapiens
  siRNA target sequence for MCCC1 (NM_020166.2,659-677).
ctgttgtggagggttatca

SEQ ID NO: 90443 - DNA, 19 bp, Homo sapiens
  siRNA target sequence for MCCC1 (NM_020166.2,708-726).
ggaacacgccaggagaatt

SEQ ID NO: 90444 - DNA, 19 bp, Homo sapiens
  siRNA target sequence for MCCC1 (NM_020166.2,729-747).
ctatcctgtcatgattaaa

SEQ ID NO: 90445 - DNA, 19 bp, Homo sapiens
  siRNA target sequence for MCCC1 (NM_020166.2,784-802).
gttagatcagaacaagaat

SEQ ID NO: 90446 - DNA, 19 bp, Homo sapiens
  siRNA target sequence for MCCC1 (NM_020166.2,824-842).
cacggagagaagctaagaa

SEQ ID NO: 90447 - DNA, 19 bp, Homo sapiens
  siRNA target sequence for MCCC1 (NM_020166.2,832-850).
gaagctaagaagtctttca

SEQ ID NO: 90448 - DNA, 19 bp, Homo sapiens
  siRNA target sequence for MCCC1 (NM_020166.2,836-854).
ctaagaagtctttcaatga

SEQ ID NO: 90449 - DNA, 19 bp, Homo sapiens
  siRNA target sequence for MCCC1 (NM_020166.2,860-878).
ctatgctgatcgagaagtt

SEQ ID NO: 90450 - DNA, 19 bp, Homo sapiens
  siRNA target sequence for MCCC1 (NM_020166.2,864-882).
gctgatcgagaagtttgta

SEQ ID NO: 90451 - DNA, 19 bp, Homo sapiens
  siRNA target sequence for MCCC1 (NM_020166.2,928-946).
ggcaatgctgtgtacttgt

SEQ ID NO: 90452 - DNA, 19 bp, Homo sapiens
  siRNA target sequence for MCCC1 (NM_020166.2,997-1015).
gccccagcgcctggtatta

SEQ ID NO: 90453 - DNA, 19 bp, Homo sapiens
  siRNA target sequence for MCCC1 (NM_020166.2,998-1016).
ccccagcgcctggtattaa

SEQ ID NO: 90454 - DNA, 19 bp, Homo sapiens
  siRNA target sequence for MCCC1 (NM_020166.2,999-1017).
cccagcgcctggtattaaa

SEQ ID NO: 90455 - DNA, 19 bp, Homo sapiens
  siRNA target sequence for MCCC1 (NM_020166.2,1000-1018).
ccagcgcctggtattaaat

SEQ ID NO: 90456 - DNA, 19 bp, Homo sapiens
  siRNA target sequence for MCCC1 (NM_020166.2,1005-1023).
gcctggtattaaatctgaa

SEQ ID NO: 90457 - DNA, 19 bp, Homo sapiens
  siRNA target sequence for MCCC1 (NM_020166.2,1055-1073).
gagctgctaaagctgtaaa

SEQ ID NO: 90458 - DNA, 19 bp, Homo sapiens
  siRNA target sequence for MCCC1 (NM_020166.2,1058-1076).
ctgctaaagctgtaaatta

SEQ ID NO: 90459 - DNA, 19 bp, Homo sapiens
  siRNA target sequence for MCCC1 (NM_020166.2,1087-1105).
gggactgtggagtttatta

SEQ ID NO: 90460 - DNA, 19 bp, Homo sapiens
  siRNA target sequence for MCCC1 (NM_020166.2,1088-1106).
ggactgtggagtttattat

SEQ ID NO: 90461 - DNA, 19 bp, Homo sapiens
  siRNA target sequence for MCCC1 (NM_020166.2,1110-1128).
ctcaaaacataatttctgt

SEQ ID NO: 90462 - DNA, 19 bp, Homo sapiens
  siRNA target sequence for MCCC1 (NM_020166.2,1198-1216).
gtggagtggcagcttagaa

SEQ ID NO: 90463 - DNA, 19 bp, Homo sapiens
  siRNA target sequence for MCCC1 (NM_020166.2,1275-1293).
cttcgaagctagaatatat

SEQ ID NO: 90464 - DNA, 19 bp, Homo sapiens
  siRNA target sequence for MCCC1 (NM_020166.2,1278-1296).
cgaagctagaatatatgca

SEQ ID NO: 90465 - DNA, 19 bp, Homo sapiens
  siRNA target sequence for MCCC1 (NM_020166.2,1294-1312).
gcagaagatcctagcaata

SEQ ID NO: 90466 - DNA, 19 bp, Homo sapiens
  siRNA target sequence for MCCC1 (NM_020166.2,1322-1340).
ctgtggcaggcccattagt

SEQ ID NO: 90467 - DNA, 19 bp, Homo sapiens
  siRNA target sequence for MCCC1 (NM_020166.2,1393-1411).
cggcaaggagacgaagttt

SEQ ID NO: 90468 - DNA, 19 bp, Homo sapiens
  siRNA target sequence for MCCC1 (NM_020166.2,1404-1422).
cgaagtttccgtgcattat

SEQ ID NO: 90469 - DNA, 19 bp, Homo sapiens
  siRNA target sequence for MCCC1 (NM_020166.2,1416-1434).
gcattatgaccccatgatt

SEQ ID NO: 90470 - DNA, 19 bp, Homo sapiens
  siRNA target sequence for MCCC1 (NM_020166.2,1462-1480).
cgccaggcggcattgacaa

SEQ ID NO: 90471 - DNA, 19 bp, Homo sapiens
  siRNA target sequence for MCCC1 (NM_020166.2,1463-1481).
gccaggcggcattgacaaa

SEQ ID NO: 90472 - DNA, 19 bp, Homo sapiens
  siRNA target sequence for MCCC1 (NM_020166.2,1494-1512).
ccttcgtcagtacaatatt

SEQ ID NO: 90473 - DNA, 19 bp, Homo sapiens
  siRNA target sequence for MCCC1 (NM_020166.2,1553-1571).
ctggccacccagagtttga

SEQ ID NO: 90474 - DNA, 19 bp, Homo sapiens
  siRNA target sequence for MCCC1 (NM_020166.2,1693-1711).
gccatgaccgacactttca

SEQ ID NO: 90475 - DNA, 19 bp, Homo sapiens
  siRNA target sequence for MCCC1 (NM_020166.2,1695-1713).
catgaccgacactttcact

SEQ ID NO: 90476 - DNA, 19 bp, Homo sapiens
  siRNA target sequence for MCCC1 (NM_020166.2,1714-1732).
cttcaggcacatgatcaat

SEQ ID NO: 90477 - DNA, 19 bp, Homo sapiens
  siRNA target sequence for MCCC1 (NM_020166.2,1719-1737).
ggcacatgatcaattctct

SEQ ID NO: 90478 - DNA, 19 bp, Homo sapiens
  siRNA target sequence for MCCC1 (NM_020166.2,1765-1783).
ctgaatatctcgtatacca

SEQ ID NO: 90479 - DNA, 19 bp, Homo sapiens
  siRNA target sequence for MCCC1 (NM_020166.2,1819-1837).
gccatagctgtaacgtata

SEQ ID NO: 90480 - DNA, 19 bp, Homo sapiens
  siRNA target sequence for MCCC1 (NM_020166.2,1820-1838).
ccatagctgtaacgtataa

SEQ ID NO: 90481 - DNA, 19 bp, Homo sapiens
  siRNA target sequence for MCCC1 (NM_020166.2,1840-1858).
catgatgggtcttatagca

SEQ ID NO: 90482 - DNA, 19 bp, Homo sapiens
  siRNA target sequence for MCCC1 (NM_020166.2,1850-1868).
cttatagcatgcagattga

SEQ ID NO: 90483 - DNA, 19 bp, Homo sapiens
  siRNA target sequence for MCCC1 (NM_020166.2,1881-1899).
ccaagtccttggtaatctt

SEQ ID NO: 90484 - DNA, 19 bp, Homo sapiens
  siRNA target sequence for MCCC1 (NM_020166.2,1912-1930).
gactgcacttacctgaaat

SEQ ID NO: 90485 - DNA, 19 bp, Homo sapiens
  siRNA target sequence for MCCC1 (NM_020166.2,1914-1932).
ctgcacttacctgaaatgt

SEQ ID NO: 90486 - DNA, 19 bp, Homo sapiens
  siRNA target sequence for MCCC1 (NM_020166.2,1952-1970).
gtaaagcgaagctgattat

SEQ ID NO: 90487 - DNA, 19 bp, Homo sapiens
  siRNA target sequence for MCCC1 (NM_020166.2,2005-2023).
ggaagtattgagattgaca

SEQ ID NO: 90488 - DNA, 19 bp, Homo sapiens
  siRNA target sequence for MCCC1 (NM_020166.2,2006-2024).
gaagtattgagattgacat

SEQ ID NO: 90489 - DNA, 19 bp, Homo sapiens
  siRNA target sequence for MCCC1 (NM_020166.2,2146-2164).
gattccctcatggttatga

SEQ ID NO: 90490 - DNA, 19 bp, Homo sapiens
  siRNA target sequence for MCCC1 (NM_020166.2,2158-2176).
gttatgatcgccatgaaga

SEQ ID NO: 90491 - DNA, 19 bp, Homo sapiens
  siRNA target sequence for MCCC1 (NM_020166.2,2178-2196).
ggagcataccataaagtct

SEQ ID NO: 90492 - DNA, 19 bp, Homo sapiens
  siRNA target sequence for MCCC1 (NM_020166.2,2197-2215).
ccaaaggatggcacagtaa

SEQ ID NO: 90493 - DNA, 19 bp, Homo sapiens
  siRNA target sequence for MCCC1 (NM_020166.2,2258-2276).
ctcctttagtcgagtttga

SEQ ID NO: 90494 - DNA, 19 bp, Homo sapiens
  siRNA target sequence for MDN1 (NM_014611.1,218-236).
ggtgtggacacctcaagat

SEQ ID NO: 90495 - DNA, 19 bp, Homo sapiens
  siRNA target sequence for MDN1 (NM_014611.1,242-260).
gtgtgtcctgagtacctta

SEQ ID NO: 90496 - DNA, 19 bp, Homo sapiens
  siRNA target sequence for MDN1 (NM_014611.1,262-280).
cacagttgcttttggataa

SEQ ID NO: 90497 - DNA, 19 bp, Homo sapiens
  siRNA target sequence for MDN1 (NM_014611.1,340-358).
ggaatgccgaagccattaa

SEQ ID NO: 90498 - DNA, 19 bp, Homo sapiens
  siRNA target sequence for MDN1 (NM_014611.1,367-385).
gccaaatcaaccatgatct

SEQ ID NO: 90499 - DNA, 19 bp, Homo sapiens
  siRNA target sequence for MDN1 (NM_014611.1,404-422).
gtcgatgagcaaactcatt

SEQ ID NO: 90500 - DNA, 19 bp, Homo sapiens
  siRNA target sequence for MDN1 (NM_014611.1,467-485).
ggacacatccccagtcttt

SEQ ID NO: 90501 - DNA, 19 bp, Homo sapiens
  siRNA target sequence for MDN1 (NM_014611.1,548-566).
gctccgggacctaatggaa

SEQ ID NO: 90502 - DNA, 19 bp, Homo sapiens
  siRNA target sequence for MDN1 (NM_014611.1,659-677).
cttggttcgctggtataca

SEQ ID NO: 90503 - DNA, 19 bp, Homo sapiens
  siRNA target sequence for MDN1 (NM_014611.1,670-688).
ggtatacagccaattgtct

SEQ ID NO: 90504 - DNA, 19 bp, Homo sapiens
  siRNA target sequence for MDN1 (NM_014611.1,671-689).
gtatacagccaattgtctt

SEQ ID NO: 90505 - DNA, 19 bp, Homo sapiens
  siRNA target sequence for MDN1 (NM_014611.1,676-694).
cagccaattgtcttgcttt

SEQ ID NO: 90506 - DNA, 19 bp, Homo sapiens
  siRNA target sequence for MDN1 (NM_014611.1,691-709).
ctttggttacctgtatgaa

SEQ ID NO: 90507 - DNA, 19 bp, Homo sapiens
  siRNA target sequence for MDN1 (NM_014611.1,711-729).
gaagagcacaagttatcat

SEQ ID NO: 90508 - DNA, 19 bp, Homo sapiens
  siRNA target sequence for MDN1 (NM_014611.1,716-734).
gcacaagttatcatttctt

SEQ ID NO: 90509 - DNA, 19 bp, Homo sapiens
  siRNA target sequence for MDN1 (NM_014611.1,770-788).
caggttgaggttattagaa

SEQ ID NO: 90510 - DNA, 19 bp, Homo sapiens
  siRNA target sequence for MDN1 (NM_014611.1,860-878).
gaaggagctgcagtactta

SEQ ID NO: 90511 - DNA, 19 bp, Homo sapiens
  siRNA target sequence for MDN1 (NM_014611.1,875-893).
cttacagggacatcttgtt

SEQ ID NO: 90512 - DNA, 19 bp, Homo sapiens
  siRNA target sequence for MDN1 (NM_014611.1,972-990).
ggtggtaataggagttctt

SEQ ID NO: 90513 - DNA, 19 bp, Homo sapiens
  siRNA target sequence for MDN1 (NM_014611.1,1004-1022).
gctggcccttaggtcttat

SEQ ID NO: 90514 - DNA, 19 bp, Homo sapiens
  siRNA target sequence for MDN1 (NM_014611.1,1067-1085).
ggcggttgcttctcagaat

SEQ ID NO: 90515 - DNA, 19 bp, Homo sapiens
  siRNA target sequence for MDN1 (NM_014611.1,1123-1141).
cttccttagttgaatattt

SEQ ID NO: 90516 - DNA, 19 bp, Homo sapiens
  siRNA target sequence for MDN1 (NM_014611.1,1147-1165).
cagtgacaggtagaacaaa

SEQ ID NO: 90517 - DNA, 19 bp, Homo sapiens
  siRNA target sequence for MDN1 (NM_014611.1,1204-1222).
ctgacagtaagatgctttt

SEQ ID NO: 90518 - DNA, 19 bp, Homo sapiens
  siRNA target sequence for MDN1 (NM_014611.1,1214-1232).
gatgcttttggggatgtat

SEQ ID NO: 90519 - DNA, 19 bp, Homo sapiens
  siRNA target sequence for MDN1 (NM_014611.1,1336-1354).
ccttagacgtggtttctgt

SEQ ID NO: 90520 - DNA, 19 bp, Homo sapiens
  siRNA target sequence for MDN1 (NM_014611.1,1397-1415).
ccgaggtgactgtctgaaa

SEQ ID NO: 90521 - DNA, 19 bp, Homo sapiens
  siRNA target sequence for MDN1 (NM_014611.1,1416-1434).
gtggcacctggatttcagt

SEQ ID NO: 90522 - DNA, 19 bp, Homo sapiens
  siRNA target sequence for MDN1 (NM_014611.1,1454-1472).
cttgagctgtggaggaaat

SEQ ID NO: 90523 - DNA, 19 bp, Homo sapiens
  siRNA target sequence for MDN1 (NM_014611.1,1475-1493).
gtatcgaccgctaaacagt

SEQ ID NO: 90524 - DNA, 19 bp, Homo sapiens
  siRNA target sequence for MDN1 (NM_014611.1,1490-1508).
cagtcatgctactttgcta

SEQ ID NO: 90525 - DNA, 19 bp, Homo sapiens
  siRNA target sequence for MDN1 (NM_014611.1,1509-1527).
gacaaatattggaccaaaa

SEQ ID NO: 90526 - DNA, 19 bp, Homo sapiens
  siRNA target sequence for MDN1 (NM_014611.1,1511-1529).
caaatattggaccaaaatt

SEQ ID NO: 90527 - DNA, 19 bp, Homo sapiens
  siRNA target sequence for MDN1 (NM_014611.1,1535-1553).
ggataacctggataagaga

SEQ ID NO: 90528 - DNA, 19 bp, Homo sapiens
  siRNA target sequence for MDN1 (NM_014611.1,1613-1631).
gcttgacatttatatccaa

SEQ ID NO: 90529 - DNA, 19 bp, Homo sapiens
  siRNA target sequence for MDN1 (NM_014611.1,1617-1635).
gacatttatatccaactta

SEQ ID NO: 90530 - DNA, 19 bp, Homo sapiens
  siRNA target sequence for MDN1 (NM_014611.1,1650-1668).
cactcttggagtgatagtt

SEQ ID NO: 90531 - DNA, 19 bp, Homo sapiens
  siRNA target sequence for MDN1 (NM_014611.1,1652-1670).
ctcttggagtgatagttct

SEQ ID NO: 90532 - DNA, 19 bp, Homo sapiens
  siRNA target sequence for MDN1 (NM_014611.1,1732-1750).
cccttgagggaagagaatt

SEQ ID NO: 90533 - DNA, 19 bp, Homo sapiens
  siRNA target sequence for MDN1 (NM_014611.1,1755-1773).
ctaagggatctgctgaatt

SEQ ID NO: 90534 - DNA, 19 bp, Homo sapiens
  siRNA target sequence for MDN1 (NM_014611.1,1767-1785).
ctgaattggtgtaatagga

SEQ ID NO: 90535 - DNA, 19 bp, Homo sapiens
  siRNA target sequence for MDN1 (NM_014611.1,1791-1809).
catagctttgacagttcat

SEQ ID NO: 90536 - DNA, 19 bp, Homo sapiens
  siRNA target sequence for MDN1 (NM_014611.1,1839-1857).
gaggctctagactgtttca

SEQ ID NO: 90537 - DNA, 19 bp, Homo sapiens
  siRNA target sequence for MDN1 (NM_014611.1,1850-1868).
ctgtttcacagcaatgctt

SEQ ID NO: 90538 - DNA, 19 bp, Homo sapiens
  siRNA target sequence for MDN1 (NM_014611.1,1902-1920).
gttattggaagcaaattga

SEQ ID NO: 90539 - DNA, 19 bp, Homo sapiens
  siRNA target sequence for MDN1 (NM_014611.1,1979-1997).
caatgagctagatttgcaa

SEQ ID NO: 90540 - DNA, 19 bp, Homo sapiens
  siRNA target sequence for MDN1 (NM_014611.1,2077-2095).
ggccgtcctctgttctcat

SEQ ID NO: 90541 - DNA, 19 bp, Homo sapiens
  siRNA target sequence for MDN1 (NM_014611.1,2204-2222).
ccgtttgagggttgtcaat

SEQ ID NO: 90542 - DNA, 19 bp, Homo sapiens
  siRNA target sequence for MDN1 (NM_014611.1,2205-2223).
cgtttgagggttgtcaata

SEQ ID NO: 90543 - DNA, 19 bp, Homo sapiens
  siRNA target sequence for MDN1 (NM_014611.1,2206-2224).
gtttgagggttgtcaatat

SEQ ID NO: 90544 - DNA, 19 bp, Homo sapiens
  siRNA target sequence for MDN1 (NM_014611.1,2210-2228).
gagggttgtcaatatgaat

SEQ ID NO: 90545 - DNA, 19 bp, Homo sapiens
  siRNA target sequence for MDN1 (NM_014611.1,2212-2230).
gggttgtcaatatgaatca

SEQ ID NO: 90546 - DNA, 19 bp, Homo sapiens
  siRNA target sequence for MDN1 (NM_014611.1,2247-2265).
gacttgcttggaggttata

SEQ ID NO: 90547 - DNA, 19 bp, Homo sapiens
  siRNA target sequence for MDN1 (NM_014611.1,2268-2286).
ccggtggaccataagctta

SEQ ID NO: 90548 - DNA, 19 bp, Homo sapiens
  siRNA target sequence for MDN1 (NM_014611.1,2269-2287).
cggtggaccataagcttat

SEQ ID NO: 90549 - DNA, 19 bp, Homo sapiens
  siRNA target sequence for MDN1 (NM_014611.1,2271-2289).
gtggaccataagcttattt

SEQ ID NO: 90550 - DNA, 19 bp, Homo sapiens
  siRNA target sequence for MDN1 (NM_014611.1,2306-2324).
ggcatttgaggaactcttt

SEQ ID NO: 90551 - DNA, 19 bp, Homo sapiens
  siRNA target sequence for MDN1 (NM_014611.1,2369-2387).
cattcagacctgttacaga

SEQ ID NO: 90552 - DNA, 19 bp, Homo sapiens
  siRNA target sequence for MDN1 (NM_014611.1,2400-2418).
catgatctcctgagactaa

SEQ ID NO: 90553 - DNA, 19 bp, Homo sapiens
  siRNA target sequence for MDN1 (NM_014611.1,2413-2431).
gactaatgcagcatgtaca

SEQ ID NO: 90554 - DNA, 19 bp, Homo sapiens
  siRNA target sequence for MDN1 (NM_014611.1,2554-2572).
ccttattgttcgcatttgt

SEQ ID NO: 90555 - DNA, 19 bp, Homo sapiens
  siRNA target sequence for MDN1 (NM_014611.1,2638-2656).
ctgctccagaaatactaga

SEQ ID NO: 90556 - DNA, 19 bp, Homo sapiens
  siRNA target sequence for MDN1 (NM_014611.1,2736-2754).
catcctgacttccgtttat

SEQ ID NO: 90557 - DNA, 19 bp, Homo sapiens
  siRNA target sequence for MDN1 (NM_014611.1,2765-2783).
gaatccagcaactgatgta

SEQ ID NO: 90558 - DNA, 19 bp, Homo sapiens
  siRNA target sequence for MDN1 (NM_014611.1,2796-2814).
ctcccaccaggaataagaa

SEQ ID NO: 90559 - DNA, 19 bp, Homo sapiens
  siRNA target sequence for MDN1 (NM_014611.1,2922-2940).
ggaatcataaacttctaca

SEQ ID NO: 90560 - DNA, 19 bp, Homo sapiens
  siRNA target sequence for MDN1 (NM_014611.1,3059-3077).
cattcagcgctcactctat

SEQ ID NO: 90561 - DNA, 19 bp, Homo sapiens
  siRNA target sequence for MDN1 (NM_014611.1,3088-3106).
gtttgggtttcttaacaca

SEQ ID NO: 90562 - DNA, 19 bp, Homo sapiens
  siRNA target sequence for MDN1 (NM_014611.1,3116-3134).
ggcatcacacccaatagtt

SEQ ID NO: 90563 - DNA, 19 bp, Homo sapiens
  siRNA target sequence for MDN1 (NM_014611.1,3118-3136).
catcacacccaatagttca

SEQ ID NO: 90564 - DNA, 19 bp, Homo sapiens
  siRNA target sequence for MDN1 (NM_014611.1,3305-3323).
gctgaacctgagagatata

SEQ ID NO: 90565 - DNA, 19 bp, Homo sapiens
  siRNA target sequence for MDN1 (NM_014611.1,3425-3443).
ccactgtgtgcgtattaat

SEQ ID NO: 90566 - DNA, 19 bp, Homo sapiens
  siRNA target sequence for MDN1 (NM_014611.1,3426-3444).
cactgtgtgcgtattaata

SEQ ID NO: 90567 - DNA, 19 bp, Homo sapiens
  siRNA target sequence for MDN1 (NM_014611.1,3457-3475).
cggatattcaggagtacat

SEQ ID NO: 90568 - DNA, 19 bp, Homo sapiens
  siRNA target sequence for MDN1 (NM_014611.1,3468-3486).
gagtacattggttgttaca

SEQ ID NO: 90569 - DNA, 19 bp, Homo sapiens
  siRNA target sequence for MDN1 (NM_014611.1,3581-3599).
ggcccctactgatgtgtta

SEQ ID NO: 90570 - DNA, 19 bp, Homo sapiens
  siRNA target sequence for MDN1 (NM_014611.1,3583-3601).
cccctactgatgtgttaga

SEQ ID NO: 90571 - DNA, 19 bp, Homo sapiens
  siRNA target sequence for MDN1 (NM_014611.1,3629-3647).
ccgtgaattgctagtaaca

SEQ ID NO: 90572 - DNA, 19 bp, Homo sapiens
  siRNA target sequence for MDN1 (NM_014611.1,3631-3649).
gtgaattgctagtaacaga

SEQ ID NO: 90573 - DNA, 19 bp, Homo sapiens
  siRNA target sequence for MDN1 (NM_014611.1,3648-3666).
gaaacacaggaagttgtta

SEQ ID NO: 90574 - DNA, 19 bp, Homo sapiens
  siRNA target sequence for MDN1 (NM_014611.1,3672-3690).
caccctcggtttatgcttt

SEQ ID NO: 90575 - DNA, 19 bp, Homo sapiens
  siRNA target sequence for MDN1 (NM_014611.1,3725-3743).
cagaaaggtcctttctaga

SEQ ID NO: 90576 - DNA, 19 bp, Homo sapiens
  siRNA target sequence for MDN1 (NM_014611.1,3786-3804).
cctagctccgagttggaaa

SEQ ID NO: 90577 - DNA, 19 bp, Homo sapiens
  siRNA target sequence for MDN1 (NM_014611.1,3847-3865).
gcaagttggttaaagtcat

SEQ ID NO: 90578 - DNA, 19 bp, Homo sapiens
  siRNA target sequence for MDN1 (NM_014611.1,3876-3894).
cagtcctatcgcagaagtt

SEQ ID NO: 90579 - DNA, 19 bp, Homo sapiens
  siRNA target sequence for MDN1 (NM_014611.1,3878-3896).
gtcctatcgcagaagttct

SEQ ID NO: 90580 - DNA, 19 bp, Homo sapiens
  siRNA target sequence for MDN1 (NM_014611.1,3941-3959).
gttccgatgggctgaaaga

SEQ ID NO: 90581 - DNA, 19 bp, Homo sapiens
  siRNA target sequence for MDN1 (NM_014611.1,3945-3963).
cgatgggctgaaagataca

SEQ ID NO: 90582 - DNA, 19 bp, Homo sapiens
  siRNA target sequence for MDN1 (NM_014611.1,3976-3994).
cgaccgagaaggagtatga

SEQ ID NO: 90583 - DNA, 19 bp, Homo sapiens
  siRNA target sequence for MDN1 (NM_014611.1,4012-4030).
ccaatgatggttatatgct

SEQ ID NO: 90584 - DNA, 19 bp, Homo sapiens
  siRNA target sequence for MDN1 (NM_014611.1,4058-4076).
ggaaattgatgtgattcaa

SEQ ID NO: 90585 - DNA, 19 bp, Homo sapiens
  siRNA target sequence for MDN1 (NM_014611.1,4189-4207).
gtaactttggccatatcgt

SEQ ID NO: 90586 - DNA, 19 bp, Homo sapiens
  siRNA target sequence for MDN1 (NM_014611.1,4242-4260).
gtgggaagggcattggaat

SEQ ID NO: 90587 - DNA, 19 bp, Homo sapiens
  siRNA target sequence for MDN1 (NM_014611.1,4244-4262).
gggaagggcattggaattt

SEQ ID NO: 90588 - DNA, 19 bp, Homo sapiens
  siRNA target sequence for MDN1 (NM_014611.1,4293-4311).
gggtgtgggaaaactacta

SEQ ID NO: 90589 - DNA, 19 bp, Homo sapiens
  siRNA target sequence for MDN1 (NM_014611.1,4329-4347).
gccttggcaaatcagaaat

SEQ ID NO: 90590 - DNA, 19 bp, Homo sapiens
  siRNA target sequence for MDN1 (NM_014611.1,4330-4348).
ccttggcaaatcagaaatt

SEQ ID NO: 90591 - DNA, 19 bp, Homo sapiens
  siRNA target sequence for MDN1 (NM_014611.1,4331-4349).
cttggcaaatcagaaatta

SEQ ID NO: 90592 - DNA, 19 bp, Homo sapiens
  siRNA target sequence for MDN1 (NM_014611.1,4401-4419).
ctgcggccagtgagacaaa

SEQ ID NO: 90593 - DNA, 19 bp, Homo sapiens
  siRNA target sequence for MDN1 (NM_014611.1,4422-4440).
ccaaacgacaaggaagaaa

SEQ ID NO: 90594 - DNA, 19 bp, Homo sapiens
  siRNA target sequence for MDN1 (NM_014611.1,4512-4530).
ctcttggatgagatctcat

SEQ ID NO: 90595 - DNA, 19 bp, Homo sapiens
  siRNA target sequence for MDN1 (NM_014611.1,4566-4584).
gtccttgaagtagaaaagt

SEQ ID NO: 90596 - DNA, 19 bp, Homo sapiens
  siRNA target sequence for MDN1 (NM_014611.1,4679-4697).
gaaccctgggggtgacttt

SEQ ID NO: 90597 - DNA, 19 bp, Homo sapiens
  siRNA target sequence for MDN1 (NM_014611.1,4721-4739).
cttaagaaaccggtttaca

SEQ ID NO: 90598 - DNA, 19 bp, Homo sapiens
  siRNA target sequence for MDN1 (NM_014611.1,4759-4777).
gcacaagccgtgaagattt

SEQ ID NO: 90599 - DNA, 19 bp, Homo sapiens
  siRNA target sequence for MDN1 (NM_014611.1,4760-4778).
cacaagccgtgaagattta

SEQ ID NO: 90600 - DNA, 19 bp, Homo sapiens
  siRNA target sequence for MDN1 (NM_014611.1,4762-4780).
caagccgtgaagatttaat

SEQ ID NO: 90601 - DNA, 19 bp, Homo sapiens
  siRNA target sequence for MDN1 (NM_014611.1,4765-4783).
gccgtgaagatttaattca

SEQ ID NO: 90602 - DNA, 19 bp, Homo sapiens
  siRNA target sequence for MDN1 (NM_014611.1,4773-4791).
gatttaattcagatcatca

SEQ ID NO: 90603 - DNA, 19 bp, Homo sapiens
  siRNA target sequence for MDN1 (NM_014611.1,4814-4832).
gtgtctgggcagaatagat

SEQ ID NO: 90604 - DNA, 19 bp, Homo sapiens
  siRNA target sequence for MDN1 (NM_014611.1,4820-4838).
gggcagaatagatcctaaa

SEQ ID NO: 90605 - DNA, 19 bp, Homo sapiens
  siRNA target sequence for MDN1 (NM_014611.1,4843-4861).
ctgacatacctgaagtgat

SEQ ID NO: 90606 - DNA, 19 bp, Homo sapiens
  siRNA target sequence for MDN1 (NM_014611.1,4852-4870).
ctgaagtgatgctggattt

SEQ ID NO: 90607 - DNA, 19 bp, Homo sapiens
  siRNA target sequence for MDN1 (NM_014611.1,4879-4897).
ggctgacccaccaagagtt

SEQ ID NO: 90608 - DNA, 19 bp, Homo sapiens
  siRNA target sequence for MDN1 (NM_014611.1,4880-4898).
gctgacccaccaagagttt

SEQ ID NO: 90609 - DNA, 19 bp, Homo sapiens
  siRNA target sequence for MDN1 (NM_014611.1,4907-4925).
gtgtgtggtcagtatcaga

SEQ ID NO: 90610 - DNA, 19 bp, Homo sapiens
  siRNA target sequence for MDN1 (NM_014611.1,4932-4950).
ctgtcctgggttaacttca

SEQ ID NO: 90611 - DNA, 19 bp, Homo sapiens
  siRNA target sequence for MDN1 (NM_014611.1,4936-4954).
cctgggttaacttcatgaa

SEQ ID NO: 90612 - DNA, 19 bp, Homo sapiens
  siRNA target sequence for MDN1 (NM_014611.1,5023-5041).
ctgcatgcctggtgtacat

SEQ ID NO: 90613 - DNA, 19 bp, Homo sapiens
  siRNA target sequence for MDN1 (NM_014611.1,5107-5125).
gtctgaaatttctaatcaa

SEQ ID NO: 90614 - DNA, 19 bp, Homo sapiens
  siRNA target sequence for MDN1 (NM_014611.1,5126-5144).
gaggcttgccaagatagta

SEQ ID NO: 90615 - DNA, 19 bp, Homo sapiens
  siRNA target sequence for MDN1 (NM_014611.1,5135-5153).
caagatagtacgacttaca

SEQ ID NO: 90616 - DNA, 19 bp, Homo sapiens
  siRNA target sequence for MDN1 (NM_014611.1,5138-5156).
gatagtacgacttacagaa

SEQ ID NO: 90617 - DNA, 19 bp, Homo sapiens
  siRNA target sequence for MDN1 (NM_014611.1,5145-5163).
cgacttacagaatatcaga

SEQ ID NO: 90618 - DNA, 19 bp, Homo sapiens
  siRNA target sequence for MDN1 (NM_014611.1,5202-5220).
gaattcactggaatagata

SEQ ID NO: 90619 - DNA, 19 bp, Homo sapiens
  siRNA target sequence for MDN1 (NM_014611.1,5227-5245).
ggggaattcatccattttt

SEQ ID NO: 90620 - DNA, 19 bp, Homo sapiens
  siRNA target sequence for MDN1 (NM_014611.1,5262-5280).
gtcctacacaggaataata

SEQ ID NO: 90621 - DNA, 19 bp, Homo sapiens
  siRNA target sequence for MDN1 (NM_014611.1,5338-5356).
gagctaccaaactgaagaa

SEQ ID NO: 90622 - DNA, 19 bp, Homo sapiens
  siRNA target sequence for MDN1 (NM_014611.1,5382-5400).
ggtgttggcaagacaagtt

SEQ ID NO: 90623 - DNA, 19 bp, Homo sapiens
  siRNA target sequence for MDN1 (NM_014611.1,5383-5401).
gtgttggcaagacaagttt

SEQ ID NO: 90624 - DNA, 19 bp, Homo sapiens
  siRNA target sequence for MDN1 (NM_014611.1,5434-5452).
cccttgttagaatcaactt

SEQ ID NO: 90625 - DNA, 19 bp, Homo sapiens
  siRNA target sequence for MDN1 (NM_014611.1,5435-5453).
ccttgttagaatcaactta

SEQ ID NO: 90626 - DNA, 19 bp, Homo sapiens
  siRNA target sequence for MDN1 (NM_014611.1,5436-5454).
cttgttagaatcaacttat

SEQ ID NO: 90627 - DNA, 19 bp, Homo sapiens
  siRNA target sequence for MDN1 (NM_014611.1,5477-5495).
cctgtttggagcagatcta

SEQ ID NO: 90628 - DNA, 19 bp, Homo sapiens
  siRNA target sequence for MDN1 (NM_014611.1,5542-5560).
ccttactggcagctttgaa

SEQ ID NO: 90629 - DNA, 19 bp, Homo sapiens
  siRNA target sequence for MDN1 (NM_014611.1,5639-5657).
ccaccgaggagaaatctat

SEQ ID NO: 90630 - DNA, 19 bp, Homo sapiens
  siRNA target sequence for MDN1 (NM_014611.1,5690-5708).
gcatgaaaagacgaagatt

SEQ ID NO: 90631 - DNA, 19 bp, Homo sapiens
  siRNA target sequence for MDN1 (NM_014611.1,5691-5709).
catgaaaagacgaagattt

SEQ ID NO: 90632 - DNA, 19 bp, Homo sapiens
  siRNA target sequence for MDN1 (NM_014611.1,5705-5723).
gatttttgggtgtcagaat

SEQ ID NO: 90633 - DNA, 19 bp, Homo sapiens
  siRNA target sequence for MDN1 (NM_014611.1,5714-5732).
gtgtcagaatccctttaga

SEQ ID NO: 90634 - DNA, 19 bp, Homo sapiens
  siRNA target sequence for MDN1 (NM_014611.1,5716-5734).
gtcagaatccctttagaca

SEQ ID NO: 90635 - DNA, 19 bp, Homo sapiens
  siRNA target sequence for MDN1 (NM_014611.1,5761-5779).
ggtctttccttaacagatt

SEQ ID NO: 90636 - DNA, 19 bp, Homo sapiens
  siRNA target sequence for MDN1 (NM_014611.1,5792-5810).
cgttgatccccttacagta

SEQ ID NO: 90637 - DNA, 19 bp, Homo sapiens
  siRNA target sequence for MDN1 (NM_014611.1,5799-5817).
ccccttacagtaattgaca

SEQ ID NO: 90638 - DNA, 19 bp, Homo sapiens
  siRNA target sequence for MDN1 (NM_014611.1,5938-5956).
gaggaccctgggaattcaa

SEQ ID NO: 90639 - DNA, 19 bp, Homo sapiens
  siRNA target sequence for MDN1 (NM_014611.1,6002-6020).
gtcccctgggtgttatgat

SEQ ID NO: 90640 - DNA, 19 bp, Homo sapiens
  siRNA target sequence for MDN1 (NM_014611.1,6061-6079).
gaaccgaagaggacaaaaa

SEQ ID NO: 90641 - DNA, 19 bp, Homo sapiens
  siRNA target sequence for MDN1 (NM_014611.1,6131-6149).
catgggaaccagactattt

SEQ ID NO: 90642 - DNA, 19 bp, Homo sapiens
  siRNA target sequence for MDN1 (NM_014611.1,6134-6152).
gggaaccagactatttcgt

SEQ ID NO: 90643 - DNA, 19 bp, Homo sapiens
  siRNA target sequence for MDN1 (NM_014611.1,6136-6154).
gaaccagactatttcgtat

SEQ ID NO: 90644 - DNA, 19 bp, Homo sapiens
  siRNA target sequence for MDN1 (NM_014611.1,6140-6158).
cagactatttcgtatcact

SEQ ID NO: 90645 - DNA, 19 bp, Homo sapiens
  siRNA target sequence for MDN1 (NM_014611.1,6151-6169).
gtatcactccctatgatgt

SEQ ID NO: 90646 - DNA, 19 bp, Homo sapiens
  siRNA target sequence for MDN1 (NM_014611.1,6157-6175).
ctccctatgatgttcagtt

SEQ ID NO: 90647 - DNA, 19 bp, Homo sapiens
  siRNA target sequence for MDN1 (NM_014611.1,6255-6273).
caacccctggagtcaatca

SEQ ID NO: 90648 - DNA, 19 bp, Homo sapiens
  siRNA target sequence for MDN1 (NM_014611.1,6395-6413).
cagtgcaatggatactact

SEQ ID NO: 90649 - DNA, 19 bp, Homo sapiens
  siRNA target sequence for MDN1 (NM_014611.1,6427-6445).
gatttgagcaggttgatct

SEQ ID NO: 90650 - DNA, 19 bp, Homo sapiens
  siRNA target sequence for MDN1 (NM_014611.1,6434-6452).
gcaggttgatcttatacga

SEQ ID NO: 90651 - DNA, 19 bp, Homo sapiens
  siRNA target sequence for MDN1 (NM_014611.1,6473-6491).
gaaggtggagggaactgta

SEQ ID NO: 90652 - DNA, 19 bp, Homo sapiens
  siRNA target sequence for MDN1 (NM_014611.1,6506-6524).
ggatagcctccttatcagt

SEQ ID NO: 90653 - DNA, 19 bp, Homo sapiens
  siRNA target sequence for MDN1 (NM_014611.1,6548-6566).
gcgagcctggagtcatttt

SEQ ID NO: 90654 - DNA, 19 bp, Homo sapiens
  siRNA target sequence for MDN1 (NM_014611.1,6559-6577).
gtcattttcttctgacata

SEQ ID NO: 90655 - DNA, 19 bp, Homo sapiens
  siRNA target sequence for MDN1 (NM_014611.1,6572-6590).
gacatataagcctaagtgt

SEQ ID NO: 90656 - DNA, 19 bp, Homo sapiens
  siRNA target sequence for MDN1 (NM_014611.1,6594-6612).
ggagaaggtggtaaagcta

SEQ ID NO: 90657 - DNA, 19 bp, Homo sapiens
  siRNA target sequence for MDN1 (NM_014611.1,6616-6634).
cgatggagattgtcaacaa

SEQ ID NO: 90658 - DNA, 19 bp, Homo sapiens
  siRNA target sequence for MDN1 (NM_014611.1,6632-6650).
caaactagaagcagtgtta

SEQ ID NO: 90659 - DNA, 19 bp, Homo sapiens
  siRNA target sequence for MDN1 (NM_014611.1,6643-6661).
cagtgttattgcttatgca

SEQ ID NO: 90660 - DNA, 19 bp, Homo sapiens
  siRNA target sequence for MDN1 (NM_014611.1,6862-6880).
catcagtgttggatcgttt

SEQ ID NO: 90661 - DNA, 19 bp, Homo sapiens
  siRNA target sequence for MDN1 (NM_014611.1,6899-6917).
cggaggtgtcctcactatt

SEQ ID NO: 90662 - DNA, 19 bp, Homo sapiens
  siRNA target sequence for MDN1 (NM_014611.1,6900-6918).
ggaggtgtcctcactatta

SEQ ID NO: 90663 - DNA, 19 bp, Homo sapiens
  siRNA target sequence for MDN1 (NM_014611.1,6986-7004).
ctcgatggatcctgttcat

SEQ ID NO: 90664 - DNA, 19 bp, Homo sapiens
  siRNA target sequence for MDN1 (NM_014611.1,7027-7045).
ggaatcgtggacttgaaat

SEQ ID NO: 90665 - DNA, 19 bp, Homo sapiens
  siRNA target sequence for MDN1 (NM_014611.1,7032-7050).
cgtggacttgaaatctaca

SEQ ID NO: 90666 - DNA, 19 bp, Homo sapiens
  siRNA target sequence for MDN1 (NM_014611.1,7082-7100).
caacctggatttgaaagtt

SEQ ID NO: 90667 - DNA, 19 bp, Homo sapiens
  siRNA target sequence for MDN1 (NM_014611.1,7201-7219).
ctgtatcaactctaatcca

SEQ ID NO: 90668 - DNA, 19 bp, Homo sapiens
  siRNA target sequence for MDN1 (NM_014611.1,7285-7303).
catgctgggaagtatatgt

SEQ ID NO: 90669 - DNA, 19 bp, Homo sapiens
  siRNA target sequence for MDN1 (NM_014611.1,7324-7342).
caaaccggaagcttgtaca

SEQ ID NO: 90670 - DNA, 19 bp, Homo sapiens
  siRNA target sequence for MDN1 (NM_014611.1,7345-7363).
ctttactggagaaacatgt

SEQ ID NO: 90671 - DNA, 19 bp, Homo sapiens
  siRNA target sequence for MDN1 (NM_014611.1,7388-7406).
ctggggagactccattctt

SEQ ID NO: 90672 - DNA, 19 bp, Homo sapiens
  siRNA target sequence for MDN1 (NM_014611.1,7546-7564).
ggagtcagccttttacctt

SEQ ID NO: 90673 - DNA, 19 bp, Homo sapiens
  siRNA target sequence for MDN1 (NM_014611.1,7555-7573).
cttttaccttgcaagactt

SEQ ID NO: 90674 - DNA, 19 bp, Homo sapiens
  siRNA target sequence for MDN1 (NM_014611.1,7597-7615).
gccctgagaacctgaaatt

SEQ ID NO: 90675 - DNA, 19 bp, Homo sapiens
  siRNA target sequence for MDN1 (NM_014611.1,7616-7634).
caatgcagtcgaagtgaat

SEQ ID NO: 90676 - DNA, 19 bp, Homo sapiens
  siRNA target sequence for MDN1 (NM_014611.1,7620-7638).
gcagtcgaagtgaatactt

SEQ ID NO: 90677 - DNA, 19 bp, Homo sapiens
  siRNA target sequence for MDN1 (NM_014611.1,7621-7639).
cagtcgaagtgaatactta

SEQ ID NO: 90678 - DNA, 19 bp, Homo sapiens
  siRNA target sequence for MDN1 (NM_014611.1,7623-7641).
gtcgaagtgaatacttact

SEQ ID NO: 90679 - DNA, 19 bp, Homo sapiens
  siRNA target sequence for MDN1 (NM_014611.1,7643-7661).
gatcgatgaaccagatgtt

SEQ ID NO: 90680 - DNA, 19 bp, Homo sapiens
  siRNA target sequence for MDN1 (NM_014611.1,7707-7725).
gattggatgctcagagtta

SEQ ID NO: 90681 - DNA, 19 bp, Homo sapiens
  siRNA target sequence for MDN1 (NM_014611.1,7760-7778).
ggggcttgagtccatacaa

SEQ ID NO: 90682 - DNA, 19 bp, Homo sapiens
  siRNA target sequence for MDN1 (NM_014611.1,7761-7779).
gggcttgagtccatacaaa

SEQ ID NO: 90683 - DNA, 19 bp, Homo sapiens
  siRNA target sequence for MDN1 (NM_014611.1,7762-7780).
ggcttgagtccatacaaat

SEQ ID NO: 90684 - DNA, 19 bp, Homo sapiens
  siRNA target sequence for MDN1 (NM_014611.1,7767-7785).
gagtccatacaaattcatt

SEQ ID NO: 90685 - DNA, 19 bp, Homo sapiens
  siRNA target sequence for MDN1 (NM_014611.1,7836-7854).
ggtgcagtcagtaatgttt

SEQ ID NO: 90686 - DNA, 19 bp, Homo sapiens
  siRNA target sequence for MDN1 (NM_014611.1,7839-7857).
gcagtcagtaatgttttca

SEQ ID NO: 90687 - DNA, 19 bp, Homo sapiens
  siRNA target sequence for MDN1 (NM_014611.1,7998-8016).
gaatcagctgcaaacaaga

SEQ ID NO: 90688 - DNA, 19 bp, Homo sapiens
  siRNA target sequence for MDN1 (NM_014611.1,8005-8023).
ctgcaaacaagacaatcat

SEQ ID NO: 90689 - DNA, 19 bp, Homo sapiens
  siRNA target sequence for MDN1 (NM_014611.1,8036-8054).
ggaaaaacgggtttttact

SEQ ID NO: 90690 - DNA, 19 bp, Homo sapiens
  siRNA target sequence for MDN1 (NM_014611.1,8169-8187).
gtcaatcttgctgcttttt

SEQ ID NO: 90691 - DNA, 19 bp, Homo sapiens
  siRNA target sequence for MDN1 (NM_014611.1,8309-8327).
cgacacagtaaaagtagat

SEQ ID NO: 90692 - DNA, 19 bp, Homo sapiens
  siRNA target sequence for MDN1 (NM_014611.1,8355-8373).
cattggcactgggttttaa

SEQ ID NO: 90693 - DNA, 19 bp, Homo sapiens
  siRNA target sequence for MDN1 (NM_014611.1,8393-8411).
cccccgacttctgatgaat

SEQ ID NO: 90694 - DNA, 19 bp, Homo sapiens
  siRNA target sequence for MDN1 (NM_014611.1,8394-8412).
ccccgacttctgatgaatt

SEQ ID NO: 90695 - DNA, 19 bp, Homo sapiens
  siRNA target sequence for MDN1 (NM_014611.1,8395-8413).
cccgacttctgatgaatta

SEQ ID NO: 90696 - DNA, 19 bp, Homo sapiens
  siRNA target sequence for MDN1 (NM_014611.1,8484-8502).
ggtggcttcgctggtataa

SEQ ID NO: 90697 - DNA, 19 bp, Homo sapiens
  siRNA target sequence for MDN1 (NM_014611.1,8485-8503).
gtggcttcgctggtataaa

SEQ ID NO: 90698 - DNA, 19 bp, Homo sapiens
  siRNA target sequence for MDN1 (NM_014611.1,8487-8505).
ggcttcgctggtataaaga

SEQ ID NO: 90699 - DNA, 19 bp, Homo sapiens
  siRNA target sequence for MDN1 (NM_014611.1,8488-8506).
gcttcgctggtataaagaa

SEQ ID NO: 90700 - DNA, 19 bp, Homo sapiens
  siRNA target sequence for MDN1 (NM_014611.1,8527-8545).
gaccgtttccttttaagga

SEQ ID NO: 90701 - DNA, 19 bp, Homo sapiens
  siRNA target sequence for MDN1 (NM_014611.1,8549-8567).
gctggtggtggagtgtttt

SEQ ID NO: 90702 - DNA, 19 bp, Homo sapiens
  siRNA target sequence for MDN1 (NM_014611.1,8552-8570).
ggtggtggagtgtttttca

SEQ ID NO: 90703 - DNA, 19 bp, Homo sapiens
  siRNA target sequence for MDN1 (NM_014611.1,8742-8760).
gatgtcagcctagatgaat

SEQ ID NO: 90704 - DNA, 19 bp, Homo sapiens
  siRNA target sequence for MDN1 (NM_014611.1,8745-8763).
gtcagcctagatgaattga

SEQ ID NO: 90705 - DNA, 19 bp, Homo sapiens
  siRNA target sequence for MDN1 (NM_014611.1,8749-8767).
gcctagatgaattgaagaa

SEQ ID NO: 90706 - DNA, 19 bp, Homo sapiens
  siRNA target sequence for MDN1 (NM_014611.1,8750-8768).
cctagatgaattgaagaat

SEQ ID NO: 90707 - DNA, 19 bp, Homo sapiens
  siRNA target sequence for MDN1 (NM_014611.1,8918-8936).
ggagtacctggctatgctt

SEQ ID NO: 90708 - DNA, 19 bp, Homo sapiens
  siRNA target sequence for MDN1 (NM_014611.1,8919-8937).
gagtacctggctatgcttt

SEQ ID NO: 90709 - DNA, 19 bp, Homo sapiens
  siRNA target sequence for MDN1 (NM_014611.1,8934-8952).
ctttggcggtacaaagtga

SEQ ID NO: 90710 - DNA, 19 bp, Homo sapiens
  siRNA target sequence for MDN1 (NM_014611.1,9091-9109).
ggtccttgctgcatcatca

SEQ ID NO: 90711 - DNA, 19 bp, Homo sapiens
  siRNA target sequence for MDN1 (NM_014611.1,9094-9112).
ccttgctgcatcatcagaa

SEQ ID NO: 90712 - DNA, 19 bp, Homo sapiens
  siRNA target sequence for MDN1 (NM_014611.1,9123-9141).
gaagaaattacatctttgt

SEQ ID NO: 90713 - DNA, 19 bp, Homo sapiens
  siRNA target sequence for MDN1 (NM_014611.1,9136-9154).
ctttgtggtccgagttatt

SEQ ID NO: 90714 - DNA, 19 bp, Homo sapiens
  siRNA target sequence for MDN1 (NM_014611.1,9140-9158).
gtggtccgagttatttaat

SEQ ID NO: 90715 - DNA, 19 bp, Homo sapiens
  siRNA target sequence for MDN1 (NM_014611.1,9145-9163).
ccgagttatttaattccat

SEQ ID NO: 90716 - DNA, 19 bp, Homo sapiens
  siRNA target sequence for MDN1 (NM_014611.1,9201-9219).
ccagagtactggctaatgt

SEQ ID NO: 90717 - DNA, 19 bp, Homo sapiens
  siRNA target sequence for MDN1 (NM_014611.1,9297-9315).
ctcaatagacccatattct

SEQ ID NO: 90718 - DNA, 19 bp, Homo sapiens
  siRNA target sequence for MDN1 (NM_014611.1,9444-9462).
gacatcagttcgatgcttt

SEQ ID NO: 90719 - DNA, 19 bp, Homo sapiens
  siRNA target sequence for MDN1 (NM_014611.1,9454-9472).
cgatgctttggactaacat

SEQ ID NO: 90720 - DNA, 19 bp, Homo sapiens
  siRNA target sequence for MDN1 (NM_014611.1,9470-9488).
catggctatctcttcagta

SEQ ID NO: 90721 - DNA, 19 bp, Homo sapiens
  siRNA target sequence for MDN1 (NM_014611.1,9856-9874).
gggagtacaagctcaatta

SEQ ID NO: 90722 - DNA, 19 bp, Homo sapiens
  siRNA target sequence for MDN1 (NM_014611.1,10016-10034).
ggatcggctggataattta

SEQ ID NO: 90723 - DNA, 19 bp, Homo sapiens
  siRNA target sequence for MDN1 (NM_014611.1,10017-10035).
gatcggctggataatttaa

SEQ ID NO: 90724 - DNA, 19 bp, Homo sapiens
  siRNA target sequence for MDN1 (NM_014611.1,10020-10038).
cggctggataatttaacct

SEQ ID NO: 90725 - DNA, 19 bp, Homo sapiens
  siRNA target sequence for MDN1 (NM_014611.1,10169-10187).
gcaggccctccacatagat

SEQ ID NO: 90726 - DNA, 19 bp, Homo sapiens
  siRNA target sequence for MDN1 (NM_014611.1,10321-10339).
catccatattgcagttaca

SEQ ID NO: 90727 - DNA, 19 bp, Homo sapiens
  siRNA target sequence for MDN1 (NM_014611.1,10324-10342).
ccatattgcagttacaaca

SEQ ID NO: 90728 - DNA, 19 bp, Homo sapiens
  siRNA target sequence for MDN1 (NM_014611.1,10455-10473).
cccaccttcccgacttact

SEQ ID NO: 90729 - DNA, 19 bp, Homo sapiens
  siRNA target sequence for MDN1 (NM_014611.1,10456-10474).
ccaccttcccgacttacta

SEQ ID NO: 90730 - DNA, 19 bp, Homo sapiens
  siRNA target sequence for MDN1 (NM_014611.1,10457-10475).
caccttcccgacttactat

SEQ ID NO: 90731 - DNA, 19 bp, Homo sapiens
  siRNA target sequence for MDN1 (NM_014611.1,10476-10494).
gctcatgcagacactttgt

SEQ ID NO: 90732 - DNA, 19 bp, Homo sapiens
  siRNA target sequence for MDN1 (NM_014611.1,10522-10540).
gaggccttgggaagctaat

SEQ ID NO: 90733 - DNA, 19 bp, Homo sapiens
  siRNA target sequence for MDN1 (NM_014611.1,10525-10543).
gccttgggaagctaatcct

SEQ ID NO: 90734 - DNA, 19 bp, Homo sapiens
  siRNA target sequence for MDN1 (NM_014611.1,10632-10650).
ctgcgctcccacgtgttat

SEQ ID NO: 90735 - DNA, 19 bp, Homo sapiens
  siRNA target sequence for MDN1 (NM_014611.1,10635-10653).
cgctcccacgtgttatgca

SEQ ID NO: 90736 - DNA, 19 bp, Homo sapiens
  siRNA target sequence for MDN1 (NM_014611.1,10636-10654).
gctcccacgtgttatgcaa

SEQ ID NO: 90737 - DNA, 19 bp, Homo sapiens
  siRNA target sequence for MDN1 (NM_014611.1,10758-10776).
caggaaagcggcctgtata

SEQ ID NO: 90738 - DNA, 19 bp, Homo sapiens
  siRNA target sequence for MDN1 (NM_014611.1,10760-10778).
ggaaagcggcctgtataga

SEQ ID NO: 90739 - DNA, 19 bp, Homo sapiens
  siRNA target sequence for MDN1 (NM_014611.1,10761-10779).
gaaagcggcctgtatagat

SEQ ID NO: 90740 - DNA, 19 bp, Homo sapiens
  siRNA target sequence for MDN1 (NM_014611.1,10824-10842).
gaagaacgggagttcagaa

SEQ ID NO: 90741 - DNA, 19 bp, Homo sapiens
  siRNA target sequence for MDN1 (NM_014611.1,10845-10863).
cagttccccctgcatgaaa

SEQ ID NO: 90742 - DNA, 19 bp, Homo sapiens
  siRNA target sequence for MDN1 (NM_014611.1,10891-10909).
caacgttggaggagaacaa

SEQ ID NO: 90743 - DNA, 19 bp, Homo sapiens
  siRNA target sequence for MDN1 (NM_014611.1,10989-11007).
ctgatacaccagcaattgt

SEQ ID NO: 90744 - DNA, 19 bp, Homo sapiens
  siRNA target sequence for MDN1 (NM_014611.1,11000-11018).
gcaattgtgtctcaacttt

SEQ ID NO: 90745 - DNA, 19 bp, Homo sapiens
  siRNA target sequence for MDN1 (NM_014611.1,11023-11041).
gatccctctggtatcaaca

SEQ ID NO: 90746 - DNA, 19 bp, Homo sapiens
  siRNA target sequence for MDN1 (NM_014611.1,11053-11071).
cacatgaagcaaagcatta

SEQ ID NO: 90747 - DNA, 19 bp, Homo sapiens
  siRNA target sequence for MDN1 (NM_014611.1,11078-11096).
cctgtttctgtcttgctat

SEQ ID NO: 90748 - DNA, 19 bp, Homo sapiens
  siRNA target sequence for MDN1 (NM_014611.1,11110-11128).
cgcttgtgacacacttcta

SEQ ID NO: 90749 - DNA, 19 bp, Homo sapiens
  siRNA target sequence for MDN1 (NM_014611.1,11160-11178).
ctcttgggcagccaacttt

SEQ ID NO: 90750 - DNA, 19 bp, Homo sapiens
  siRNA target sequence for MDN1 (NM_014611.1,11190-11208).
ctctcccataacactcttt

SEQ ID NO: 90751 - DNA, 19 bp, Homo sapiens
  siRNA target sequence for MDN1 (NM_014611.1,11192-11210).
ctcccataacactcttttt

SEQ ID NO: 90752 - DNA, 19 bp, Homo sapiens
  siRNA target sequence for MDN1 (NM_014611.1,11261-11279).
ctaccagcatcccaatgtt

SEQ ID NO: 90753 - DNA, 19 bp, Homo sapiens
  siRNA target sequence for MDN1 (NM_014611.1,11370-11388).
gaacagctcctggttgtaa

SEQ ID NO: 90754 - DNA, 19 bp, Homo sapiens
  siRNA target sequence for MDN1 (NM_014611.1,11416-11434).
ccagtcccatctcaaagtt

SEQ ID NO: 90755 - DNA, 19 bp, Homo sapiens
  siRNA target sequence for MDN1 (NM_014611.1,11487-11505).
gcaagtcgagctttgtctt

SEQ ID NO: 90756 - DNA, 19 bp, Homo sapiens
  siRNA target sequence for MDN1 (NM_014611.1,11488-11506).
caagtcgagctttgtcttt

SEQ ID NO: 90757 - DNA, 19 bp, Homo sapiens
  siRNA target sequence for MDN1 (NM_014611.1,11503-11521).
ctttgcggaaacatcttga

SEQ ID NO: 90758 - DNA, 19 bp, Homo sapiens
  siRNA target sequence for MDN1 (NM_014611.1,11525-11543).
gatcagtcagatgatcatt

SEQ ID NO: 90759 - DNA, 19 bp, Homo sapiens
  siRNA target sequence for MDN1 (NM_014611.1,11570-11588).
ctggtccatgagtttggat

SEQ ID NO: 90760 - DNA, 19 bp, Homo sapiens
  siRNA target sequence for MDN1 (NM_014611.1,11573-11591).
gtccatgagtttggataat

SEQ ID NO: 90761 - DNA, 19 bp, Homo sapiens
  siRNA target sequence for MDN1 (NM_014611.1,11576-11594).
catgagtttggataatact

SEQ ID NO: 90762 - DNA, 19 bp, Homo sapiens
  siRNA target sequence for MDN1 (NM_014611.1,11581-11599).
gtttggataatactatgaa

SEQ ID NO: 90763 - DNA, 19 bp, Homo sapiens
  siRNA target sequence for MDN1 (NM_014611.1,11601-11619).
cgccacaccgagaaatcca

SEQ ID NO: 90764 - DNA, 19 bp, Homo sapiens
  siRNA target sequence for MDN1 (NM_014611.1,11629-11647).
ggttctccatctatcagat

SEQ ID NO: 90765 - DNA, 19 bp, Homo sapiens
  siRNA target sequence for MDN1 (NM_014611.1,11723-11741).
cacattacaagcatttatt

SEQ ID NO: 90766 - DNA, 19 bp, Homo sapiens
  siRNA target sequence for MDN1 (NM_014611.1,11820-11838).
caggttgaaggaaaggatt

SEQ ID NO: 90767 - DNA, 19 bp, Homo sapiens
  siRNA target sequence for MDN1 (NM_014611.1,11891-11909).
ccgggtccaggccaaaatt

SEQ ID NO: 90768 - DNA, 19 bp, Homo sapiens
  siRNA target sequence for MDN1 (NM_014611.1,11893-11911).
gggtccaggccaaaattgt

SEQ ID NO: 90769 - DNA, 19 bp, Homo sapiens
  siRNA target sequence for MDN1 (NM_014611.1,11916-11934).
cttcgttcccccctagaaa

SEQ ID NO: 90770 - DNA, 19 bp, Homo sapiens
  siRNA target sequence for MDN1 (NM_014611.1,11920-11938).
gttcccccctagaaaaaga

SEQ ID NO: 90771 - DNA, 19 bp, Homo sapiens
  siRNA target sequence for MDN1 (NM_014611.1,11924-11942).
ccccctagaaaaagaactt

SEQ ID NO: 90772 - DNA, 19 bp, Homo sapiens
  siRNA target sequence for MDN1 (NM_014611.1,11926-11944).
ccctagaaaaagaacttaa

SEQ ID NO: 90773 - DNA, 19 bp, Homo sapiens
  siRNA target sequence for MDN1 (NM_014611.1,11976-11994).
gtcagcttctggtccatta

SEQ ID NO: 90774 - DNA, 19 bp, Homo sapiens
  siRNA target sequence for MDN1 (NM_014611.1,11980-11998).
gcttctggtccattaagca

SEQ ID NO: 90775 - DNA, 19 bp, Homo sapiens
  siRNA target sequence for MDN1 (NM_014611.1,11986-12004).
ggtccattaagcaatctgt

SEQ ID NO: 90776 - DNA, 19 bp, Homo sapiens
  siRNA target sequence for MDN1 (NM_014611.1,11987-12005).
gtccattaagcaatctgta

SEQ ID NO: 90777 - DNA, 19 bp, Homo sapiens
  siRNA target sequence for MDN1 (NM_014611.1,12013-12031).
cacacaggacactctttaa

SEQ ID NO: 90778 - DNA, 19 bp, Homo sapiens
  siRNA target sequence for MDN1 (NM_014611.1,12154-12172).
cttccattcagaatctgaa

SEQ ID NO: 90779 - DNA, 19 bp, Homo sapiens
  siRNA target sequence for MDN1 (NM_014611.1,12492-12510).
gctttgtcagacctcttta

SEQ ID NO: 90780 - DNA, 19 bp, Homo sapiens
  siRNA target sequence for MDN1 (NM_014611.1,12493-12511).
ctttgtcagacctctttaa

SEQ ID NO: 90781 - DNA, 19 bp, Homo sapiens
  siRNA target sequence for MDN1 (NM_014611.1,12682-12700).
gggatggatgccagaagta

SEQ ID NO: 90782 - DNA, 19 bp, Homo sapiens
  siRNA target sequence for MDN1 (NM_014611.1,12683-12701).
ggatggatgccagaagtat

SEQ ID NO: 90783 - DNA, 19 bp, Homo sapiens
  siRNA target sequence for MDN1 (NM_014611.1,12684-12702).
gatggatgccagaagtatt

SEQ ID NO: 90784 - DNA, 19 bp, Homo sapiens
  siRNA target sequence for MDN1 (NM_014611.1,12748-12766).
caactcctgccaaggaaat

SEQ ID NO: 90785 - DNA, 19 bp, Homo sapiens
  siRNA target sequence for MDN1 (NM_014611.1,12802-12820).
cagcacatttgatgaagat

SEQ ID NO: 90786 - DNA, 19 bp, Homo sapiens
  siRNA target sequence for MDN1 (NM_014611.1,12887-12905).
cagctgtgtgcaagagatt

SEQ ID NO: 90787 - DNA, 19 bp, Homo sapiens
  siRNA target sequence for MDN1 (NM_014611.1,13131-13149).
cttagcaagggacaacttt

SEQ ID NO: 90788 - DNA, 19 bp, Homo sapiens
  siRNA target sequence for MDN1 (NM_014611.1,13158-13176).
gtgctggacctaattcctt

SEQ ID NO: 90789 - DNA, 19 bp, Homo sapiens
  siRNA target sequence for MDN1 (NM_014611.1,13187-13205).
ctacccatctccaatacct

SEQ ID NO: 90790 - DNA, 19 bp, Homo sapiens
  siRNA target sequence for MDN1 (NM_014611.1,13260-13278).
cagtcaactacgagattaa

SEQ ID NO: 90791 - DNA, 19 bp, Homo sapiens
  siRNA target sequence for MDN1 (NM_014611.1,13262-13280).
gtcaactacgagattaaca

SEQ ID NO: 90792 - DNA, 19 bp, Homo sapiens
  siRNA target sequence for MDN1 (NM_014611.1,13264-13282).
caactacgagattaacaga

SEQ ID NO: 90793 - DNA, 19 bp, Homo sapiens
  siRNA target sequence for MDN1 (NM_014611.1,13281-13299).
gagatgctaaaaaccatta

SEQ ID NO: 90794 - DNA, 19 bp, Homo sapiens
  siRNA target sequence for MDN1 (NM_014611.1,13311-13329).
gctgacgtcgacaaaatta

SEQ ID NO: 90795 - DNA, 19 bp, Homo sapiens
  siRNA target sequence for MDN1 (NM_014611.1,13403-13421).
gtcccaggtgtcagttcat

SEQ ID NO: 90796 - DNA, 19 bp, Homo sapiens
  siRNA target sequence for MDN1 (NM_014611.1,13405-13423).
cccaggtgtcagttcattt

SEQ ID NO: 90797 - DNA, 19 bp, Homo sapiens
  siRNA target sequence for MDN1 (NM_014611.1,13428-13446).
ggcctagagtccttgttca

SEQ ID NO: 90798 - DNA, 19 bp, Homo sapiens
  siRNA target sequence for MDN1 (NM_014611.1,13480-13498).
cacaaatggcactagttga

SEQ ID NO: 90799 - DNA, 19 bp, Homo sapiens
  siRNA target sequence for MDN1 (NM_014611.1,13533-13551).
gccatggctgactttacta

SEQ ID NO: 90800 - DNA, 19 bp, Homo sapiens
  siRNA target sequence for MDN1 (NM_014611.1,13562-13580).
ccatctgcttacttcagat

SEQ ID NO: 90801 - DNA, 19 bp, Homo sapiens
  siRNA target sequence for MDN1 (NM_014611.1,13563-13581).
catctgcttacttcagata

SEQ ID NO: 90802 - DNA, 19 bp, Homo sapiens
  siRNA target sequence for MDN1 (NM_014611.1,13582-13600).
gccaaggaggaaatcaaat

SEQ ID NO: 90803 - DNA, 19 bp, Homo sapiens
  siRNA target sequence for MDN1 (NM_014611.1,13664-13682).
ctgtgccatccagaactta

SEQ ID NO: 90804 - DNA, 19 bp, Homo sapiens
  siRNA target sequence for MDN1 (NM_014611.1,13721-13739).
ccaagcaagcccacaagaa

SEQ ID NO: 90805 - DNA, 19 bp, Homo sapiens
  siRNA target sequence for MDN1 (NM_014611.1,13768-13786).
caggacatctaacaaaact

SEQ ID NO: 90806 - DNA, 19 bp, Homo sapiens
  siRNA target sequence for MDN1 (NM_014611.1,13819-13837).
ctttgcacgtgcagaaaat

SEQ ID NO: 90807 - DNA, 19 bp, Homo sapiens
  siRNA target sequence for MDN1 (NM_014611.1,14185-14203).
gtgaccagatcggaaatga

SEQ ID NO: 90808 - DNA, 19 bp, Homo sapiens
  siRNA target sequence for MDN1 (NM_014611.1,14252-14270).
ggatcctgattcaaaatct

SEQ ID NO: 90809 - DNA, 19 bp, Homo sapiens
  siRNA target sequence for MDN1 (NM_014611.1,14300-14318).
gatgtcggaagattttgat

SEQ ID NO: 90810 - DNA, 19 bp, Homo sapiens
  siRNA target sequence for MDN1 (NM_014611.1,14386-14404).
gagacctggataaacacat

SEQ ID NO: 90811 - DNA, 19 bp, Homo sapiens
  siRNA target sequence for MDN1 (NM_014611.1,14561-14579).
cttggatagtggcaattca

SEQ ID NO: 90812 - DNA, 19 bp, Homo sapiens
  siRNA target sequence for MDN1 (NM_014611.1,14901-14919).
gagaccgaccagaacgaaa

SEQ ID NO: 90813 - DNA, 19 bp, Homo sapiens
  siRNA target sequence for MDN1 (NM_014611.1,15109-15127).
gccctgctgaccaaggttt

SEQ ID NO: 90814 - DNA, 19 bp, Homo sapiens
  siRNA target sequence for MDN1 (NM_014611.1,15147-15165).
gaacgggaggactctgata

SEQ ID NO: 90815 - DNA, 19 bp, Homo sapiens
  siRNA target sequence for MDN1 (NM_014611.1,15334-15352).
cagaaggccatgaatcgaa

SEQ ID NO: 90816 - DNA, 19 bp, Homo sapiens
  siRNA target sequence for MDN1 (NM_014611.1,15341-15359).
ccatgaatcgaatttcatt

SEQ ID NO: 90817 - DNA, 19 bp, Homo sapiens
  siRNA target sequence for MDN1 (NM_014611.1,15439-15457).
gttccatgggtgatcacaa

SEQ ID NO: 90818 - DNA, 19 bp, Homo sapiens
  siRNA target sequence for MDN1 (NM_014611.1,15442-15460).
ccatgggtgatcacaatga

SEQ ID NO: 90819 - DNA, 19 bp, Homo sapiens
  siRNA target sequence for MDN1 (NM_014611.1,15552-15570).
gatgcattcgagcacatta

SEQ ID NO: 90820 - DNA, 19 bp, Homo sapiens
  siRNA target sequence for MDN1 (NM_014611.1,15590-15608).
cgatgcacagacctatgat

SEQ ID NO: 90821 - DNA, 19 bp, Homo sapiens
  siRNA target sequence for MDN1 (NM_014611.1,15795-15813).
gtggagatccaaactgtta

SEQ ID NO: 90822 - DNA, 19 bp, Homo sapiens
  siRNA target sequence for MDN1 (NM_014611.1,15887-15905).
ccgagagtctaccattcat

SEQ ID NO: 90823 - DNA, 19 bp, Homo sapiens
  siRNA target sequence for MDN1 (NM_014611.1,15888-15906).
cgagagtctaccattcata

SEQ ID NO: 90824 - DNA, 19 bp, Homo sapiens
  siRNA target sequence for MDN1 (NM_014611.1,15931-15949).
cgatcttccagcccttttt

SEQ ID NO: 90825 - DNA, 19 bp, Homo sapiens
  siRNA target sequence for MDN1 (NM_014611.1,15932-15950).
gatcttccagcccttttta

SEQ ID NO: 90826 - DNA, 19 bp, Homo sapiens
  siRNA target sequence for MDN1 (NM_014611.1,15981-15999).
gagagacagctggaaatgt

SEQ ID NO: 90827 - DNA, 19 bp, Homo sapiens
  siRNA target sequence for MDN1 (NM_014611.1,16055-16073).
gcagagttacctgatctta

SEQ ID NO: 90828 - DNA, 19 bp, Homo sapiens
  siRNA target sequence for MDN1 (NM_014611.1,16159-16177).
gaactgggaaacgactaaa

SEQ ID NO: 90829 - DNA, 19 bp, Homo sapiens
  siRNA target sequence for MDN1 (NM_014611.1,16162-16180).
ctgggaaacgactaaacat

SEQ ID NO: 90830 - DNA, 19 bp, Homo sapiens
  siRNA target sequence for MDN1 (NM_014611.1,16173-16191).
ctaaacatacggaaagtca

SEQ ID NO: 90831 - DNA, 19 bp, Homo sapiens
  siRNA target sequence for MDN1 (NM_014611.1,16183-16201).
ggaaagtcattccatacat

SEQ ID NO: 90832 - DNA, 19 bp, Homo sapiens
  siRNA target sequence for MDN1 (NM_014611.1,16188-16206).
gtcattccatacattgcta

SEQ ID NO: 90833 - DNA, 19 bp, Homo sapiens
  siRNA target sequence for MDN1 (NM_014611.1,16207-16225).
gtcaatttcggaaagacaa

SEQ ID NO: 90834 - DNA, 19 bp, Homo sapiens
  siRNA target sequence for MDN1 (NM_014611.1,16249-16267).
ccagtaaacgccagtatca

SEQ ID NO: 90835 - DNA, 19 bp, Homo sapiens
  siRNA target sequence for MDN1 (NM_014611.1,16252-16270).
gtaaacgccagtatcagat

SEQ ID NO: 90836 - DNA, 19 bp, Homo sapiens
  siRNA target sequence for MDN1 (NM_014611.1,16268-16286).
gatttgtttggctatcgat

SEQ ID NO: 90837 - DNA, 19 bp, Homo sapiens
  siRNA target sequence for MDN1 (NM_014611.1,16278-16296).
gctatcgatgactcttcta

SEQ ID NO: 90838 - DNA, 19 bp, Homo sapiens
  siRNA target sequence for MDN1 (NM_014611.1,16291-16309).
cttctagtatggtagacaa

SEQ ID NO: 90839 - DNA, 19 bp, Homo sapiens
  siRNA target sequence for MDN1 (NM_014611.1,16294-16312).
ctagtatggtagacaatca

SEQ ID NO: 90840 - DNA, 19 bp, Homo sapiens
  siRNA target sequence for MDN1 (NM_014611.1,16382-16400).
gattgcagtgtgtagtttt

SEQ ID NO: 90841 - DNA, 19 bp, Homo sapiens
  siRNA target sequence for MDN1 (NM_014611.1,16415-16433).
gctgttacacccatttcat

SEQ ID NO: 90842 - DNA, 19 bp, Homo sapiens
  siRNA target sequence for MDN1 (NM_014611.1,16434-16452).
gagcagttcagtgattact

SEQ ID NO: 90843 - DNA, 19 bp, Homo sapiens
  siRNA target sequence for MDN1 (NM_014611.1,16520-16538).
gtctgttgccaacatgttt

SEQ ID NO: 90844 - DNA, 19 bp, Homo sapiens
  siRNA target sequence for MDN1 (NM_014611.1,16622-16640).
ccttgagggcaaagaaaga

SEQ ID NO: 90845 - DNA, 19 bp, Homo sapiens
  siRNA target sequence for MDN1 (NM_014611.1,16659-16677).
gctgcccggaatgcaaata

SEQ ID NO: 90846 - DNA, 19 bp, Homo sapiens
  siRNA target sequence for MDN1 (NM_014611.1,16707-16725).
cccagttcacgggattcta

SEQ ID NO: 90847 - DNA, 19 bp, Homo sapiens
  siRNA target sequence for MDN1 (NM_014611.1,16708-16726).
ccagttcacgggattctat

SEQ ID NO: 90848 - DNA, 19 bp, Homo sapiens
  siRNA target sequence for MDN1 (NM_014611.1,16719-16737).
gattctatcttggacatta

SEQ ID NO: 90849 - DNA, 19 bp, Homo sapiens
  siRNA target sequence for MDN1 (NM_014611.1,16723-16741).
ctatcttggacattaaagt

SEQ ID NO: 90850 - DNA, 19 bp, Homo sapiens
  siRNA target sequence for MDN1 (NM_014611.1,16733-16751).
cattaaagtaccgatattt

SEQ ID NO: 90851 - DNA, 19 bp, Homo sapiens
  siRNA target sequence for MDN1 (NM_014611.1,16796-16814).
gttcccattcccatactat

SEQ ID NO: 90852 - DNA, 19 bp, Homo sapiens
  siRNA target sequence for MDN1 (NM_014611.1,16801-16819).
cattcccatactatatcat

SEQ ID NO: 90853 - DNA, 19 bp, Homo sapiens
  siRNA target sequence for MDN1 (NM_014611.1,16805-16823).
cccatactatatcattctt

SEQ ID NO: 90854 - DNA, 19 bp, Homo sapiens
  siRNA target sequence for MELK (NM_014791.1,173-191).
gaaagattatgatgaactt

SEQ ID NO: 90855 - DNA, 19 bp, Homo sapiens
  siRNA target sequence for MELK (NM_014791.1,328-346).
ggatcaaaacggagattga

SEQ ID NO: 90856 - DNA, 19 bp, Homo sapiens
  siRNA target sequence for MELK (NM_014791.1,395-413).
gctagagacagccaacaaa

SEQ ID NO: 90857 - DNA, 19 bp, Homo sapiens
  siRNA target sequence for MELK (NM_014791.1,504-522).
gtcttccgtcagatagtat

SEQ ID NO: 90858 - DNA, 19 bp, Homo sapiens
  siRNA target sequence for MELK (NM_014791.1,620-638).
ctttggtctctgtgcaaaa

SEQ ID NO: 90859 - DNA, 19 bp, Homo sapiens
  siRNA target sequence for MELK (NM_014791.1,634-652).
caaaacccaagggtaacaa

SEQ ID NO: 90860 - DNA, 19 bp, Homo sapiens
  siRNA target sequence for MELK (NM_014791.1,640-658).
ccaagggtaacaaggatta

SEQ ID NO: 90861 - DNA, 19 bp, Homo sapiens
  siRNA target sequence for MELK (NM_014791.1,644-662).
gggtaacaaggattaccat

SEQ ID NO: 90862 - DNA, 19 bp, Homo sapiens
  siRNA target sequence for MELK (NM_014791.1,704-722).
gttaatacaaggcaaatca

SEQ ID NO: 90863 - DNA, 19 bp, Homo sapiens
  siRNA target sequence for MELK (NM_014791.1,748-766).
ggagcatgggcatactgtt

SEQ ID NO: 90864 - DNA, 19 bp, Homo sapiens
  siRNA target sequence for MELK (NM_014791.1,749-767).
gagcatgggcatactgtta

SEQ ID NO: 90865 - DNA, 19 bp, Homo sapiens
  siRNA target sequence for MELK (NM_014791.1,751-769).
gcatgggcatactgttata

SEQ ID NO: 90866 - DNA, 19 bp, Homo sapiens
  siRNA target sequence for MELK (NM_014791.1,752-770).
catgggcatactgttatat

SEQ ID NO: 90867 - DNA, 19 bp, Homo sapiens
  siRNA target sequence for MELK (NM_014791.1,755-773).
gggcatactgttatatgtt

SEQ ID NO: 90868 - DNA, 19 bp, Homo sapiens
  siRNA target sequence for MELK (NM_014791.1,781-799).
gtggatttctaccatttga

SEQ ID NO: 90869 - DNA, 19 bp, Homo sapiens
  siRNA target sequence for MELK (NM_014791.1,784-802).
gatttctaccatttgatga

SEQ ID NO: 90870 - DNA, 19 bp, Homo sapiens
  siRNA target sequence for MELK (NM_014791.1,810-828).
gtaatggctttatacaaga

SEQ ID NO: 90871 - DNA, 19 bp, Homo sapiens
  siRNA target sequence for MELK (NM_014791.1,911-929).
cccaaagaaacggatttct

SEQ ID NO: 90872 - DNA, 19 bp, Homo sapiens
  siRNA target sequence for MELK (NM_014791.1,912-930).
ccaaagaaacggatttcta

SEQ ID NO: 90873 - DNA, 19 bp, Homo sapiens
  siRNA target sequence for MELK (NM_014791.1,928-946).
ctatgaaaaatctattgaa

SEQ ID NO: 90874 - DNA, 19 bp, Homo sapiens
  siRNA target sequence for MELK (NM_014791.1,951-969).
ccctggatcatgcaagatt

SEQ ID NO: 90875 - DNA, 19 bp, Homo sapiens
  siRNA target sequence for MELK (NM_014791.1,952-970).
cctggatcatgcaagatta

SEQ ID NO: 90876 - DNA, 19 bp, Homo sapiens
  siRNA target sequence for MELK (NM_014791.1,955-973).
ggatcatgcaagattacaa

SEQ ID NO: 90877 - DNA, 19 bp, Homo sapiens
  siRNA target sequence for MELK (NM_014791.1,990-1008).
caaagcaagaatcctttta

SEQ ID NO: 90878 - DNA, 19 bp, Homo sapiens
  siRNA target sequence for MELK (NM_014791.1,994-1012).
gcaagaatccttttattca

SEQ ID NO: 90879 - DNA, 19 bp, Homo sapiens
  siRNA target sequence for MELK (NM_014791.1,1023-1041).
gattgcgtaacagaacttt

SEQ ID NO: 90880 - DNA, 19 bp, Homo sapiens
  siRNA target sequence for MELK (NM_014791.1,1027-1045).
gcgtaacagaactttctgt

SEQ ID NO: 90881 - DNA, 19 bp, Homo sapiens
  siRNA target sequence for MELK (NM_014791.1,1028-1046).
cgtaacagaactttctgta

SEQ ID NO: 90882 - DNA, 19 bp, Homo sapiens
  siRNA target sequence for MELK (NM_014791.1,1087-1105).
cactgtggcagtatgatca

SEQ ID NO: 90883 - DNA, 19 bp, Homo sapiens
  siRNA target sequence for MELK (NM_014791.1,1106-1124).
cctcacggctacctatctt

SEQ ID NO: 90884 - DNA, 19 bp, Homo sapiens
  siRNA target sequence for MELK (NM_014791.1,1161-1179).
cgtttaaggctttcttctt

SEQ ID NO: 90885 - DNA, 19 bp, Homo sapiens
  siRNA target sequence for MELK (NM_014791.1,1215-1233).
gacatcaagtcaaataatt

SEQ ID NO: 90886 - DNA, 19 bp, Homo sapiens
  siRNA target sequence for MELK (NM_014791.1,1245-1263).
gatgtgaccgcaagtgata

SEQ ID NO: 90887 - DNA, 19 bp, Homo sapiens
  siRNA target sequence for MELK (NM_014791.1,1248-1266).
gtgaccgcaagtgataaaa

SEQ ID NO: 90888 - DNA, 19 bp, Homo sapiens
  siRNA target sequence for MELK (NM_014791.1,1250-1268).
gaccgcaagtgataaaaat

SEQ ID NO: 90889 - DNA, 19 bp, Homo sapiens
  siRNA target sequence for MELK (NM_014791.1,1272-1290).
gtggcgggattaatagact

SEQ ID NO: 90890 - DNA, 19 bp, Homo sapiens
  siRNA target sequence for MELK (NM_014791.1,1274-1292).
ggcgggattaatagactat

SEQ ID NO: 90891 - DNA, 19 bp, Homo sapiens
  siRNA target sequence for MELK (NM_014791.1,1276-1294).
cgggattaatagactatga

SEQ ID NO: 90892 - DNA, 19 bp, Homo sapiens
  siRNA target sequence for MELK (NM_014791.1,1298-1316).
gtgtgaagatgatttatca

SEQ ID NO: 90893 - DNA, 19 bp, Homo sapiens
  siRNA target sequence for MELK (NM_014791.1,1335-1353).
cgaacatcacagtttacca

SEQ ID NO: 90894 - DNA, 19 bp, Homo sapiens
  siRNA target sequence for MELK (NM_014791.1,1352-1370).
caagtactggacagaatca

SEQ ID NO: 90895 - DNA, 19 bp, Homo sapiens
  siRNA target sequence for MELK (NM_014791.1,1355-1373).
gtactggacagaatcaaat

SEQ ID NO: 90896 - DNA, 19 bp, Homo sapiens
  siRNA target sequence for MELK (NM_014791.1,1369-1387).
caaatggggtggaatctaa

SEQ ID NO: 90897 - DNA, 19 bp, Homo sapiens
  siRNA target sequence for MELK (NM_014791.1,1377-1395).
gtggaatctaaatcattaa

SEQ ID NO: 90898 - DNA, 19 bp, Homo sapiens
  siRNA target sequence for MELK (NM_014791.1,1490-1508).
gtttcctgagccaaagact

SEQ ID NO: 90899 - DNA, 19 bp, Homo sapiens
  siRNA target sequence for MELK (NM_014791.1,1499-1517).
gccaaagactccagttaat

SEQ ID NO: 90900 - DNA, 19 bp, Homo sapiens
  siRNA target sequence for MELK (NM_014791.1,1542-1560).
ctcactacgccaaatcgtt

SEQ ID NO: 90901 - DNA, 19 bp, Homo sapiens
  siRNA target sequence for MELK (NM_014791.1,1586-1604).
ccagtgcctgaaagaaact

SEQ ID NO: 90902 - DNA, 19 bp, Homo sapiens
  siRNA target sequence for MELK (NM_014791.1,1593-1611).
ctgaaagaaactccaatta

SEQ ID NO: 90903 - DNA, 19 bp, Homo sapiens
  siRNA target sequence for MELK (NM_014791.1,1630-1648).
caggaacagacaagttaat

SEQ ID NO: 90904 - DNA, 19 bp, Homo sapiens
  siRNA target sequence for MELK (NM_014791.1,1632-1650).
ggaacagacaagttaatga

SEQ ID NO: 90905 - DNA, 19 bp, Homo sapiens
  siRNA target sequence for MELK (NM_014791.1,1678-1696).
gccgctcagtggaattgga

SEQ ID NO: 90906 - DNA, 19 bp, Homo sapiens
  siRNA target sequence for MELK (NM_014791.1,1679-1697).
ccgctcagtggaattggat

SEQ ID NO: 90907 - DNA, 19 bp, Homo sapiens
  siRNA target sequence for MELK (NM_014791.1,1758-1776).
cttgaaagggggttggata

SEQ ID NO: 90908 - DNA, 19 bp, Homo sapiens
  siRNA target sequence for MELK (NM_014791.1,1767-1785).
gggttggataaggttatca

SEQ ID NO: 90909 - DNA, 19 bp, Homo sapiens
  siRNA target sequence for MELK (NM_014791.1,1834-1852).
gaagactaaagcttcacta

SEQ ID NO: 90910 - DNA, 19 bp, Homo sapiens
  siRNA target sequence for MELK (NM_014791.1,1884-1902).
gatcaactgttgaatgaaa

SEQ ID NO: 90911 - DNA, 19 bp, Homo sapiens
  siRNA target sequence for MELK (NM_014791.1,1993-2011).
caatgcaatttgaattaga

SEQ ID NO: 90912 - DNA, 19 bp, Homo sapiens
  siRNA target sequence for MELK (NM_014791.1,2010-2028).
gaagtgtgccagcttcaaa

SEQ ID NO: 90913 - DNA, 19 bp, Homo sapiens
  siRNA target sequence for MELK (NM_014791.1,2067-2085).
ggcgatgcctgggtttaca

SEQ ID NO: 90914 - DNA, 19 bp, Homo sapiens
  siRNA target sequence for MELK (NM_014791.1,2068-2086).
gcgatgcctgggtttacaa

SEQ ID NO: 90915 - DNA, 19 bp, Homo sapiens
  siRNA target sequence for MELK (NM_014791.1,2069-2087).
cgatgcctgggtttacaaa

SEQ ID NO: 90916 - DNA, 19 bp, Homo sapiens
  siRNA target sequence for MELK (NM_014791.1,2077-2095).
gggtttacaaaagattagt

SEQ ID NO: 90917 - DNA, 19 bp, Homo sapiens
  siRNA target sequence for MELK (NM_014791.1,2094-2112).
gtggaagacatcctatcta

SEQ ID NO: 90918 - DNA, 19 bp, Homo sapiens
  siRNA target sequence for MELK (NM_014791.1,2106-2124).
ctatctagctgcaaggtat

SEQ ID NO: 90919 - DNA, 19 bp, Homo sapiens
  siRNA target sequence for MERTK (NM_006343.1,188-206).
ctggcgtagagctatcact

SEQ ID NO: 90920 - DNA, 19 bp, Homo sapiens
  siRNA target sequence for MERTK (NM_006343.1,273-291).
gaccacacaccgctgttat

SEQ ID NO: 90921 - DNA, 19 bp, Homo sapiens
  siRNA target sequence for MERTK (NM_006343.1,384-402).
gtgacctctgtcgaatcaa

SEQ ID NO: 90922 - DNA, 19 bp, Homo sapiens
  siRNA target sequence for MERTK (NM_006343.1,412-430).
cgcctcttgccttcaaaca

SEQ ID NO: 90923 - DNA, 19 bp, Homo sapiens
  siRNA target sequence for MERTK (NM_006343.1,431-449).
cacagttggacacataata

SEQ ID NO: 90924 - DNA, 19 bp, Homo sapiens
  siRNA target sequence for MERTK (NM_006343.1,433-451).
cagttggacacataatact

SEQ ID NO: 90925 - DNA, 19 bp, Homo sapiens
  siRNA target sequence for MERTK (NM_006343.1,465-483).
ggtgtcaaatttaattgct

SEQ ID NO: 90926 - DNA, 19 bp, Homo sapiens
  siRNA target sequence for MERTK (NM_006343.1,507-525).
caggacaccacaatttctt

SEQ ID NO: 90927 - DNA, 19 bp, Homo sapiens
  siRNA target sequence for MERTK (NM_006343.1,640-658).
cagacaatgggtcgtatat

SEQ ID NO: 90928 - DNA, 19 bp, Homo sapiens
  siRNA target sequence for MERTK (NM_006343.1,648-666).
gggtcgtatatctgtaaga

SEQ ID NO: 90929 - DNA, 19 bp, Homo sapiens
  siRNA target sequence for MERTK (NM_006343.1,649-667).
ggtcgtatatctgtaagat

SEQ ID NO: 90930 - DNA, 19 bp, Homo sapiens
  siRNA target sequence for MERTK (NM_006343.1,652-670).
cgtatatctgtaagatgaa

SEQ ID NO: 90931 - DNA, 19 bp, Homo sapiens
  siRNA target sequence for MERTK (NM_006343.1,700-718).
ccatctacatcgaagtaca

SEQ ID NO: 90932 - DNA, 19 bp, Homo sapiens
  siRNA target sequence for MERTK (NM_006343.1,701-719).
catctacatcgaagtacaa

SEQ ID NO: 90933 - DNA, 19 bp, Homo sapiens
  siRNA target sequence for MERTK (NM_006343.1,717-735).
caaggacttcctcacttta

SEQ ID NO: 90934 - DNA, 19 bp, Homo sapiens
  siRNA target sequence for MERTK (NM_006343.1,720-738).
ggacttcctcactttacta

SEQ ID NO: 90935 - DNA, 19 bp, Homo sapiens
  siRNA target sequence for MERTK (NM_006343.1,721-739).
gacttcctcactttactaa

SEQ ID NO: 90936 - DNA, 19 bp, Homo sapiens
  siRNA target sequence for MERTK (NM_006343.1,744-762).
cctgagagcatgaatgtca

SEQ ID NO: 90937 - DNA, 19 bp, Homo sapiens
  siRNA target sequence for MERTK (NM_006343.1,807-825).
cctgagcccgtcaacattt

SEQ ID NO: 90938 - DNA, 19 bp, Homo sapiens
  siRNA target sequence for MERTK (NM_006343.1,808-826).
ctgagcccgtcaacatttt

SEQ ID NO: 90939 - DNA, 19 bp, Homo sapiens
  siRNA target sequence for MERTK (NM_006343.1,810-828).
gagcccgtcaacattttct

SEQ ID NO: 90940 - DNA, 19 bp, Homo sapiens
  siRNA target sequence for MERTK (NM_006343.1,839-857).
cagtagccgtgttaacgaa

SEQ ID NO: 90941 - DNA, 19 bp, Homo sapiens
  siRNA target sequence for MERTK (NM_006343.1,903-921).
gagatggcggtcttcagtt

SEQ ID NO: 90942 - DNA, 19 bp, Homo sapiens
  siRNA target sequence for MERTK (NM_006343.1,919-937).
gttgtgaggcccacaatga

SEQ ID NO: 90943 - DNA, 19 bp, Homo sapiens
  siRNA target sequence for MERTK (NM_006343.1,922-940).
gtgaggcccacaatgacaa

SEQ ID NO: 90944 - DNA, 19 bp, Homo sapiens
  siRNA target sequence for MERTK (NM_006343.1,960-978).
ggagtgcagatcaacatca

SEQ ID NO: 90945 - DNA, 19 bp, Homo sapiens
  siRNA target sequence for MERTK (NM_006343.1,1125-1143).
ggctcagtcatgattttta

SEQ ID NO: 90946 - DNA, 19 bp, Homo sapiens
  siRNA target sequence for MERTK (NM_006343.1,1150-1168).
ctgccttaccacatctgta

SEQ ID NO: 90947 - DNA, 19 bp, Homo sapiens
  siRNA target sequence for MERTK (NM_006343.1,1185-1203).
caagccctggctaattaca

SEQ ID NO: 90948 - DNA, 19 bp, Homo sapiens
  siRNA target sequence for MERTK (NM_006343.1,1284-1302).
ccatcagtagcacctttaa

SEQ ID NO: 90949 - DNA, 19 bp, Homo sapiens
  siRNA target sequence for MERTK (NM_006343.1,1285-1303).
catcagtagcacctttaaa

SEQ ID NO: 90950 - DNA, 19 bp, Homo sapiens
  siRNA target sequence for MERTK (NM_006343.1,1317-1335).
ctgaatgaatctagtgata

SEQ ID NO: 90951 - DNA, 19 bp, Homo sapiens
  siRNA target sequence for MERTK (NM_006343.1,1319-1337).
gaatgaatctagtgataat

SEQ ID NO: 90952 - DNA, 19 bp, Homo sapiens
  siRNA target sequence for MERTK (NM_006343.1,1474-1492).
ctcggatctctgttcaagt

SEQ ID NO: 90953 - DNA, 19 bp, Homo sapiens
  siRNA target sequence for MERTK (NM_006343.1,1550-1568).
cttcagtgatccagtgaaa

SEQ ID NO: 90954 - DNA, 19 bp, Homo sapiens
  siRNA target sequence for MERTK (NM_006343.1,1581-1599).
gcacacggttgggtagatt

SEQ ID NO: 90955 - DNA, 19 bp, Homo sapiens
  siRNA target sequence for MERTK (NM_006343.1,1582-1600).
cacacggttgggtagatta

SEQ ID NO: 90956 - DNA, 19 bp, Homo sapiens
  siRNA target sequence for MERTK (NM_006343.1,1596-1614).
gattatgccccctcttcaa

SEQ ID NO: 90957 - DNA, 19 bp, Homo sapiens
  siRNA target sequence for MERTK (NM_006343.1,1767-1785).
gaattagtggtgaattata

SEQ ID NO: 90958 - DNA, 19 bp, Homo sapiens
  siRNA target sequence for MERTK (NM_006343.1,1804-1822).
gtcggcgagccattgaact

SEQ ID NO: 90959 - DNA, 19 bp, Homo sapiens
  siRNA target sequence for MERTK (NM_006343.1,1806-1824).
cggcgagccattgaactta

SEQ ID NO: 90960 - DNA, 19 bp, Homo sapiens
  siRNA target sequence for MERTK (NM_006343.1,1814-1832).
cattgaacttaccttacat

SEQ ID NO: 90961 - DNA, 19 bp, Homo sapiens
  siRNA target sequence for MERTK (NM_006343.1,1844-1862).
cagtgaggaactacaaaat

SEQ ID NO: 90962 - DNA, 19 bp, Homo sapiens
  siRNA target sequence for MERTK (NM_006343.1,1880-1898).
gattgacaggaatcttcta

SEQ ID NO: 90963 - DNA, 19 bp, Homo sapiens
  siRNA target sequence for MERTK (NM_006343.1,1924-1942).
gagagtttgggtctgtaat

SEQ ID NO: 90964 - DNA, 19 bp, Homo sapiens
  siRNA target sequence for MERTK (NM_006343.1,1987-2005).
cagtgaagaccatgaagtt

SEQ ID NO: 90965 - DNA, 19 bp, Homo sapiens
  siRNA target sequence for MERTK (NM_006343.1,2049-2067).
gcagcgtgcatgaaagact

SEQ ID NO: 90966 - DNA, 19 bp, Homo sapiens
  siRNA target sequence for MERTK (NM_006343.1,2094-2112).
ctaggtgtgtgtatagaaa

SEQ ID NO: 90967 - DNA, 19 bp, Homo sapiens
  siRNA target sequence for MERTK (NM_006343.1,2166-2184).
ggggacctgcatacttact

SEQ ID NO: 90968 - DNA, 19 bp, Homo sapiens
  siRNA target sequence for MERTK (NM_006343.1,2167-2185).
gggacctgcatacttactt

SEQ ID NO: 90969 - DNA, 19 bp, Homo sapiens
  siRNA target sequence for MERTK (NM_006343.1,2168-2186).
ggacctgcatacttactta

SEQ ID NO: 90970 - DNA, 19 bp, Homo sapiens
  siRNA target sequence for MERTK (NM_006343.1,2204-2222).
gacaggaccaaagcatatt

SEQ ID NO: 90971 - DNA, 19 bp, Homo sapiens
  siRNA target sequence for MERTK (NM_006343.1,2229-2247).
cagacactattgaagttca

SEQ ID NO: 90972 - DNA, 19 bp, Homo sapiens
  siRNA target sequence for MERTK (NM_006343.1,2323-2341).
gcatgttgcgagatgacat

SEQ ID NO: 90973 - DNA, 19 bp, Homo sapiens
  siRNA target sequence for MERTK (NM_006343.1,2363-2381).
cggcctctctaagaagatt

SEQ ID NO: 90974 - DNA, 19 bp, Homo sapiens
  siRNA target sequence for MERTK (NM_006343.1,2364-2382).
ggcctctctaagaagattt

SEQ ID NO: 90975 - DNA, 19 bp, Homo sapiens
  siRNA target sequence for MERTK (NM_006343.1,2378-2396).
gatttacagtggcgattat

SEQ ID NO: 90976 - DNA, 19 bp, Homo sapiens
  siRNA target sequence for MERTK (NM_006343.1,2415-2433).
gctaagatgcctgttaaat

SEQ ID NO: 90977 - DNA, 19 bp, Homo sapiens
  siRNA target sequence for MERTK (NM_006343.1,2434-2452).
ggatcgccatagaaagtct

SEQ ID NO: 90978 - DNA, 19 bp, Homo sapiens
  siRNA target sequence for MERTK (NM_006343.1,2435-2453).
gatcgccatagaaagtctt

SEQ ID NO: 90979 - DNA, 19 bp, Homo sapiens
  siRNA target sequence for MERTK (NM_006343.1,2454-2472).
gcagaccgagtctacacaa

SEQ ID NO: 90980 - DNA, 19 bp, Homo sapiens
  siRNA target sequence for MERTK (NM_006343.1,2457-2475).
gaccgagtctacacaagta

SEQ ID NO: 90981 - DNA, 19 bp, Homo sapiens
  siRNA target sequence for MERTK (NM_006343.1,2459-2477).
ccgagtctacacaagtaaa

SEQ ID NO: 90982 - DNA, 19 bp, Homo sapiens
  siRNA target sequence for MERTK (NM_006343.1,2498-2516).
cgtgaccatgtgggaaata

SEQ ID NO: 90983 - DNA, 19 bp, Homo sapiens
  siRNA target sequence for MERTK (NM_006343.1,2616-2634).
gatgaactgtatgaaataa

SEQ ID NO: 90984 - DNA, 19 bp, Homo sapiens
  siRNA target sequence for MERTK (NM_006343.1,2619-2637).
gaactgtatgaaataatgt

SEQ ID NO: 90985 - DNA, 19 bp, Homo sapiens
  siRNA target sequence for MERTK (NM_006343.1,2622-2640).
ctgtatgaaataatgtact

SEQ ID NO: 90986 - DNA, 19 bp, Homo sapiens
  siRNA target sequence for MERTK (NM_006343.1,2670-2688).
cccaccttttcagtattga

SEQ ID NO: 90987 - DNA, 19 bp, Homo sapiens
  siRNA target sequence for MERTK (NM_006343.1,2693-2711).
gcagctagaaaaactctta

SEQ ID NO: 90988 - DNA, 19 bp, Homo sapiens
  siRNA target sequence for MERTK (NM_006343.1,2731-2749).
ggaaccaagcagacgttat

SEQ ID NO: 90989 - DNA, 19 bp, Homo sapiens
  siRNA target sequence for MERTK (NM_006343.1,2732-2750).
gaaccaagcagacgttatt

SEQ ID NO: 90990 - DNA, 19 bp, Homo sapiens
  siRNA target sequence for MERTK (NM_006343.1,2742-2760).
gacgttatttacgtcaata

SEQ ID NO: 90991 - DNA, 19 bp, Homo sapiens
  siRNA target sequence for MERTK (NM_006343.1,2744-2762).
cgttatttacgtcaataca

SEQ ID NO: 90992 - DNA, 19 bp, Homo sapiens
  siRNA target sequence for MERTK (NM_006343.1,2808-2826).
gctccactggacttgaaca

SEQ ID NO: 90993 - DNA, 19 bp, Homo sapiens
  siRNA target sequence for MERTK (NM_006343.1,2809-2827).
ctccactggacttgaacat

SEQ ID NO: 90994 - DNA, 19 bp, Homo sapiens
  siRNA target sequence for MERTK (NM_006343.1,2828-2846).
cgaccctgactctataatt

SEQ ID NO: 90995 - DNA, 19 bp, Homo sapiens
  siRNA target sequence for MERTK (NM_006343.1,3076-3094).
cattgcccgatgaactttt

SEQ ID NO: 90996 - DNA, 19 bp, Homo sapiens
  siRNA target sequence for MERTK (NM_006343.1,3080-3098).
gcccgatgaacttttgttt

SEQ ID NO: 90997 - DNA, 19 bp, Homo sapiens
  siRNA target sequence for MET (NM_000245.1,250-268).
ggagcaatggggagtgtaa

SEQ ID NO: 90998 - DNA, 19 bp, Homo sapiens
  siRNA target sequence for MET (NM_000245.1,265-283).
gtaaagaggcactagcaaa

SEQ ID NO: 90999 - DNA, 19 bp, Homo sapiens
  siRNA target sequence for MET (NM_000245.1,280-298).
caaagtccgagatgaatgt

SEQ ID NO: 91000 - DNA, 19 bp, Homo sapiens
  siRNA target sequence for MET (NM_000245.1,284-302).
gtccgagatgaatgtgaat

SEQ ID NO: 91001 - DNA, 19 bp, Homo sapiens
  siRNA target sequence for MET (NM_000245.1,382-400).
gtgccactaactacattta

SEQ ID NO: 91002 - DNA, 19 bp, Homo sapiens
  siRNA target sequence for MET (NM_000245.1,385-403).
ccactaactacatttatgt

SEQ ID NO: 91003 - DNA, 19 bp, Homo sapiens
  siRNA target sequence for MET (NM_000245.1,386-404).
cactaactacatttatgtt

SEQ ID NO: 91004 - DNA, 19 bp, Homo sapiens
  siRNA target sequence for MET (NM_000245.1,455-473).
gctggaacacccagattgt

SEQ ID NO: 91005 - DNA, 19 bp, Homo sapiens
  siRNA target sequence for MET (NM_000245.1,523-541).
ggaaagataacatcaacat

SEQ ID NO: 91006 - DNA, 19 bp, Homo sapiens
  siRNA target sequence for MET (NM_000245.1,554-572).
cgacacctactatgatgat

SEQ ID NO: 91007 - DNA, 19 bp, Homo sapiens
  siRNA target sequence for MET (NM_000245.1,567-585).
gatgatcaactcattagct

SEQ ID NO: 91008 - DNA, 19 bp, Homo sapiens
  siRNA target sequence for MET (NM_000245.1,608-626).
ctgccagcgacatgtcttt

SEQ ID NO: 91009 - DNA, 19 bp, Homo sapiens
  siRNA target sequence for MET (NM_000245.1,621-639).
gtctttccccacaatcata

SEQ ID NO: 91010 - DNA, 19 bp, Homo sapiens
  siRNA target sequence for MET (NM_000245.1,623-641).
ctttccccacaatcatact

SEQ ID NO: 91011 - DNA, 19 bp, Homo sapiens
  siRNA target sequence for MET (NM_000245.1,734-752).
caaagtcctttcatctgta

SEQ ID NO: 91012 - DNA, 19 bp, Homo sapiens
  siRNA target sequence for MET (NM_000245.1,750-768).
gtaaaggaccggttcatca

SEQ ID NO: 91013 - DNA, 19 bp, Homo sapiens
  siRNA target sequence for MET (NM_000245.1,777-795).
gtaggcaataccataaatt

SEQ ID NO: 91014 - DNA, 19 bp, Homo sapiens
  siRNA target sequence for MET (NM_000245.1,782-800).
caataccataaattcttct

SEQ ID NO: 91015 - DNA, 19 bp, Homo sapiens
  siRNA target sequence for MET (NM_000245.1,813-831).
catccattgcattcgatat

SEQ ID NO: 91016 - DNA, 19 bp, Homo sapiens
  siRNA target sequence for MET (NM_000245.1,817-835).
cattgcattcgatatcagt

SEQ ID NO: 91017 - DNA, 19 bp, Homo sapiens
  siRNA target sequence for MET (NM_000245.1,848-866).
ggaaacgaaagatggtttt

SEQ ID NO: 91018 - DNA, 19 bp, Homo sapiens
  siRNA target sequence for MET (NM_000245.1,853-871).
cgaaagatggttttatgtt

SEQ ID NO: 91019 - DNA, 19 bp, Homo sapiens
  siRNA target sequence for MET (NM_000245.1,875-893).
gacggaccagtcctacatt

SEQ ID NO: 91020 - DNA, 19 bp, Homo sapiens
  siRNA target sequence for MET (NM_000245.1,878-896).
ggaccagtcctacattgat

SEQ ID NO: 91021 - DNA, 19 bp, Homo sapiens
  siRNA target sequence for MET (NM_000245.1,913-931).
gagattcttaccccattaa

SEQ ID NO: 91022 - DNA, 19 bp, Homo sapiens
  siRNA target sequence for MET (NM_000245.1,915-933).
gattcttaccccattaagt

SEQ ID NO: 91023 - DNA, 19 bp, Homo sapiens
  siRNA target sequence for MET (NM_000245.1,919-937).
cttaccccattaagtatgt

SEQ ID NO: 91024 - DNA, 19 bp, Homo sapiens
  siRNA target sequence for MET (NM_000245.1,976-994).
cggtccaaagggaaactct

SEQ ID NO: 91025 - DNA, 19 bp, Homo sapiens
  siRNA target sequence for MET (NM_000245.1,980-998).
ccaaagggaaactctagat

SEQ ID NO: 91026 - DNA, 19 bp, Homo sapiens
  siRNA target sequence for MET (NM_000245.1,1037-1055).
cataaactctggattgcat

SEQ ID NO: 91027 - DNA, 19 bp, Homo sapiens
  siRNA target sequence for MET (NM_000245.1,1172-1190).
gcttgctagacaaatagga

SEQ ID NO: 91028 - DNA, 19 bp, Homo sapiens
  siRNA target sequence for MET (NM_000245.1,1195-1213).
gcctgaatgatgacattct

SEQ ID NO: 91029 - DNA, 19 bp, Homo sapiens
  siRNA target sequence for MET (NM_000245.1,1196-1214).
cctgaatgatgacattctt

SEQ ID NO: 91030 - DNA, 19 bp, Homo sapiens
  siRNA target sequence for MET (NM_000245.1,1219-1237).
gggtgttcgcacaaagcaa

SEQ ID NO: 91031 - DNA, 19 bp, Homo sapiens
  siRNA target sequence for MET (NM_000245.1,1240-1258).
cagattctgccgaaccaat

SEQ ID NO: 91032 - DNA, 19 bp, Homo sapiens
  siRNA target sequence for MET (NM_000245.1,1276-1294).
gtgcattccctatcaaata

SEQ ID NO: 91033 - DNA, 19 bp, Homo sapiens
  siRNA target sequence for MET (NM_000245.1,1310-1328).
caacaagatcgtcaacaaa

SEQ ID NO: 91034 - DNA, 19 bp, Homo sapiens
  siRNA target sequence for MET (NM_000245.1,1316-1334).
gatcgtcaacaaaaacaat

SEQ ID NO: 91035 - DNA, 19 bp, Homo sapiens
  siRNA target sequence for MET (NM_000245.1,1339-1357).
gatgtctccagcattttta

SEQ ID NO: 91036 - DNA, 19 bp, Homo sapiens
  siRNA target sequence for MET (NM_000245.1,1371-1389).
gagcactgctttaatagga

SEQ ID NO: 91037 - DNA, 19 bp, Homo sapiens
  siRNA target sequence for MET (NM_000245.1,1431-1449).
gaatatcgaacagagttta

SEQ ID NO: 91038 - DNA, 19 bp, Homo sapiens
  siRNA target sequence for MET (NM_000245.1,1456-1474).
ctttgcagcgcgttgactt

SEQ ID NO: 91039 - DNA, 19 bp, Homo sapiens
  siRNA target sequence for MET (NM_000245.1,1461-1479).
cagcgcgttgacttattca

SEQ ID NO: 91040 - DNA, 19 bp, Homo sapiens
  siRNA target sequence for MET (NM_000245.1,1490-1508).
cagcgaagtcctcttaaca

SEQ ID NO: 91041 - DNA, 19 bp, Homo sapiens
  siRNA target sequence for MET (NM_000245.1,1493-1511).
cgaagtcctcttaacatct

SEQ ID NO: 91042 - DNA, 19 bp, Homo sapiens
  siRNA target sequence for MET (NM_000245.1,1497-1515).
gtcctcttaacatctatat

SEQ ID NO: 91043 - DNA, 19 bp, Homo sapiens
  siRNA target sequence for MET (NM_000245.1,1510-1528).
ctatatccaccttcattaa

SEQ ID NO: 91044 - DNA, 19 bp, Homo sapiens
  siRNA target sequence for MET (NM_000245.1,1530-1548).
ggagacctcaccatagcta

SEQ ID NO: 91045 - DNA, 19 bp, Homo sapiens
  siRNA target sequence for MET (NM_000245.1,1531-1549).
gagacctcaccatagctaa

SEQ ID NO: 91046 - DNA, 19 bp, Homo sapiens
  siRNA target sequence for MET (NM_000245.1,1606-1624).
caacccctcatgtgaattt

SEQ ID NO: 91047 - DNA, 19 bp, Homo sapiens
  siRNA target sequence for MET (NM_000245.1,1656-1674).
gtgattgtggagcatacat

SEQ ID NO: 91048 - DNA, 19 bp, Homo sapiens
  siRNA target sequence for MET (NM_000245.1,1658-1676).
gattgtggagcatacatta

SEQ ID NO: 91049 - DNA, 19 bp, Homo sapiens
  siRNA target sequence for MET (NM_000245.1,1664-1682).
ggagcatacattaaaccaa

SEQ ID NO: 91050 - DNA, 19 bp, Homo sapiens
  siRNA target sequence for MET (NM_000245.1,1686-1704).
ggctacacactggttatca

SEQ ID NO: 91051 - DNA, 19 bp, Homo sapiens
  siRNA target sequence for MET (NM_000245.1,1718-1736).
cacgaagatcccattgaat

SEQ ID NO: 91052 - DNA, 19 bp, Homo sapiens
  siRNA target sequence for MET (NM_000245.1,1803-1821).
ggctggtgccacgacaaat

SEQ ID NO: 91053 - DNA, 19 bp, Homo sapiens
  siRNA target sequence for MET (NM_000245.1,1805-1823).
ctggtgccacgacaaatgt

SEQ ID NO: 91054 - DNA, 19 bp, Homo sapiens
  siRNA target sequence for MET (NM_000245.1,1807-1825).
ggtgccacgacaaatgtgt

SEQ ID NO: 91055 - DNA, 19 bp, Homo sapiens
  siRNA target sequence for MET (NM_000245.1,1849-1867).
ggacatggactcaacagat

SEQ ID NO: 91056 - DNA, 19 bp, Homo sapiens
  siRNA target sequence for MET (NM_000245.1,1870-1888).
gtctgcctgcaatctacaa

SEQ ID NO: 91057 - DNA, 19 bp, Homo sapiens
  siRNA target sequence for MET (NM_000245.1,1886-1904).
caaggttttcccaaatagt

SEQ ID NO: 91058 - DNA, 19 bp, Homo sapiens
  siRNA target sequence for MET (NM_000245.1,1953-1971).
ggatttcggaggaataata

SEQ ID NO: 91059 - DNA, 19 bp, Homo sapiens
  siRNA target sequence for MET (NM_000245.1,1954-1972).
gatttcggaggaataataa

SEQ ID NO: 91060 - DNA, 19 bp, Homo sapiens
  siRNA target sequence for MET (NM_000245.1,2034-2052).
gagagcacgatgaatacat

SEQ ID NO: 91061 - DNA, 19 bp, Homo sapiens
  siRNA target sequence for MET (NM_000245.1,2038-2056).
gcacgatgaatacattgaa

SEQ ID NO: 91062 - DNA, 19 bp, Homo sapiens
  siRNA target sequence for MET (NM_000245.1,2071-2089).
ctgccatgaataagcattt

SEQ ID NO: 91063 - DNA, 19 bp, Homo sapiens
  siRNA target sequence for MET (NM_000245.1,2085-2103).
catttcaatatgtccataa

SEQ ID NO: 91064 - DNA, 19 bp, Homo sapiens
  siRNA target sequence for MET (NM_000245.1,2116-2134).
gccacgggacaacacaata

SEQ ID NO: 91065 - DNA, 19 bp, Homo sapiens
  siRNA target sequence for MET (NM_000245.1,2118-2136).
cacgggacaacacaataca

SEQ ID NO: 91066 - DNA, 19 bp, Homo sapiens
  siRNA target sequence for MET (NM_000245.1,2120-2138).
cgggacaacacaatacagt

SEQ ID NO: 91067 - DNA, 19 bp, Homo sapiens
  siRNA target sequence for MET (NM_000245.1,2154-2172).
gatcctgtaataacaagta

SEQ ID NO: 91068 - DNA, 19 bp, Homo sapiens
  siRNA target sequence for MET (NM_000245.1,2196-2214).
gctggtggcactttactta

SEQ ID NO: 91069 - DNA, 19 bp, Homo sapiens
  siRNA target sequence for MET (NM_000245.1,2294-2312).
gtcaaacagtattcttgaa

SEQ ID NO: 91070 - DNA, 19 bp, Homo sapiens
  siRNA target sequence for MET (NM_000245.1,2403-2421).
cgtgaagatcccattgtct

SEQ ID NO: 91071 - DNA, 19 bp, Homo sapiens
  siRNA target sequence for MET (NM_000245.1,2404-2422).
gtgaagatcccattgtcta

SEQ ID NO: 91072 - DNA, 19 bp, Homo sapiens
  siRNA target sequence for MET (NM_000245.1,2424-2442).
gaaattcatccaaccaaat

SEQ ID NO: 91073 - DNA, 19 bp, Homo sapiens
  siRNA target sequence for MET (NM_000245.1,2466-2484).
gaacctctcaacattgtca

SEQ ID NO: 91074 - DNA, 19 bp, Homo sapiens
  siRNA target sequence for MET (NM_000245.1,2558-2576).
cccgagaatggtcataaat

SEQ ID NO: 91075 - DNA, 19 bp, Homo sapiens
  siRNA target sequence for MET (NM_000245.1,2560-2578).
cgagaatggtcataaatgt

SEQ ID NO: 91076 - DNA, 19 bp, Homo sapiens
  siRNA target sequence for MET (NM_000245.1,2619-2637).
cgctctaattcagagataa

SEQ ID NO: 91077 - DNA, 19 bp, Homo sapiens
  siRNA target sequence for MET (NM_000245.1,2620-2638).
gctctaattcagagataat

SEQ ID NO: 91078 - DNA, 19 bp, Homo sapiens
  siRNA target sequence for MET (NM_000245.1,2748-2766).
gtacataatcctgtgttta

SEQ ID NO: 91079 - DNA, 19 bp, Homo sapiens
  siRNA target sequence for MET (NM_000245.1,2891-2909).
gaatatacacttacattct

SEQ ID NO: 91080 - DNA, 19 bp, Homo sapiens
  siRNA target sequence for MET (NM_000245.1,2904-2922).
cattctgaagccgttttat

SEQ ID NO: 91081 - DNA, 19 bp, Homo sapiens
  siRNA target sequence for MET (NM_000245.1,2931-2949).
cccaatgacctgctgaaat

SEQ ID NO: 91082 - DNA, 19 bp, Homo sapiens
  siRNA target sequence for MET (NM_000245.1,2951-2969).
gaacagcgagctaaatata

SEQ ID NO: 91083 - DNA, 19 bp, Homo sapiens
  siRNA target sequence for MET (NM_000245.1,2995-3013).
ccgtccttggaaaagtaat

SEQ ID NO: 91084 - DNA, 19 bp, Homo sapiens
  siRNA target sequence for MET (NM_000245.1,2996-3014).
cgtccttggaaaagtaata

SEQ ID NO: 91085 - DNA, 19 bp, Homo sapiens
  siRNA target sequence for MET (NM_000245.1,3015-3033).
gttcaaccagatcagaatt

SEQ ID NO: 91086 - DNA, 19 bp, Homo sapiens
  siRNA target sequence for MET (NM_000245.1,3048-3066).
gctggtgttgtctcaatat

SEQ ID NO: 91087 - DNA, 19 bp, Homo sapiens
  siRNA target sequence for MET (NM_000245.1,3177-3195).
catttggataggcttgtaa

SEQ ID NO: 91088 - DNA, 19 bp, Homo sapiens
  siRNA target sequence for MET (NM_000245.1,3192-3210).
gtaagtgcccgaagtgtaa

SEQ ID NO: 91089 - DNA, 19 bp, Homo sapiens
  siRNA target sequence for MET (NM_000245.1,3211-3229).
gcccaactacagaaatggt

SEQ ID NO: 91090 - DNA, 19 bp, Homo sapiens
  siRNA target sequence for MET (NM_000245.1,3248-3266).
ctaccgagctacttttcca

SEQ ID NO: 91091 - DNA, 19 bp, Homo sapiens
  siRNA target sequence for MET (NM_000245.1,3256-3274).
ctacttttccagaagatca

SEQ ID NO: 91092 - DNA, 19 bp, Homo sapiens
  siRNA target sequence for MET (NM_000245.1,3270-3288).
gatcagtttcctaattcat

SEQ ID NO: 91093 - DNA, 19 bp, Homo sapiens
  siRNA target sequence for MET (NM_000245.1,3354-3372).
ggggactctgatatatcca

SEQ ID NO: 91094 - DNA, 19 bp, Homo sapiens
  siRNA target sequence for MET (NM_000245.1,3370-3388).
ccagtccattactgcaaaa

SEQ ID NO: 91095 - DNA, 19 bp, Homo sapiens
  siRNA target sequence for MET (NM_000245.1,3371-3389).
cagtccattactgcaaaat

SEQ ID NO: 91096 - DNA, 19 bp, Homo sapiens
  siRNA target sequence for MET (NM_000245.1,3436-3454).
cagtgcagcatgtagtgat

SEQ ID NO: 91097 - DNA, 19 bp, Homo sapiens
  siRNA target sequence for MET (NM_000245.1,3457-3475).
ggcccagtagcctgattgt

SEQ ID NO: 91098 - DNA, 19 bp, Homo sapiens
  siRNA target sequence for MET (NM_000245.1,3467-3485).
cctgattgtgcatttcaat

SEQ ID NO: 91099 - DNA, 19 bp, Homo sapiens
  siRNA target sequence for MET (NM_000245.1,3470-3488).
gattgtgcatttcaatgaa

SEQ ID NO: 91100 - DNA, 19 bp, Homo sapiens
  siRNA target sequence for MET (NM_000245.1,3476-3494).
gcatttcaatgaagtcata

SEQ ID NO: 91101 - DNA, 19 bp, Homo sapiens
  siRNA target sequence for MET (NM_000245.1,3502-3520).
ggcattttggttgtgtata

SEQ ID NO: 91102 - DNA, 19 bp, Homo sapiens
  siRNA target sequence for MET (NM_000245.1,3543-3561).
gatggcaagaaaattcact

SEQ ID NO: 91103 - DNA, 19 bp, Homo sapiens
  siRNA target sequence for MET (NM_000245.1,3558-3576).
cactgtgctgtgaaatcct

SEQ ID NO: 91104 - DNA, 19 bp, Homo sapiens
  siRNA target sequence for MET (NM_000245.1,3578-3596).
gaacagaatcactgacata

SEQ ID NO: 91105 - DNA, 19 bp, Homo sapiens
  siRNA target sequence for MET (NM_000245.1,3615-3633).
ctgaccgagggaatcatca

SEQ ID NO: 91106 - DNA, 19 bp, Homo sapiens
  siRNA target sequence for MET (NM_000245.1,3619-3637).
ccgagggaatcatcatgaa

SEQ ID NO: 91107 - DNA, 19 bp, Homo sapiens
  siRNA target sequence for MET (NM_000245.1,3620-3638).
cgagggaatcatcatgaaa

SEQ ID NO: 91108 - DNA, 19 bp, Homo sapiens
  siRNA target sequence for MET (NM_000245.1,3623-3641).
gggaatcatcatgaaagat

SEQ ID NO: 91109 - DNA, 19 bp, Homo sapiens
  siRNA target sequence for MET (NM_000245.1,3700-3718).
cgctggtggtcctaccata

SEQ ID NO: 91110 - DNA, 19 bp, Homo sapiens
  siRNA target sequence for MET (NM_000245.1,3726-3744).
catggagatcttcgaaatt

SEQ ID NO: 91111 - DNA, 19 bp, Homo sapiens
  siRNA target sequence for MET (NM_000245.1,3729-3747).
ggagatcttcgaaatttca

SEQ ID NO: 91112 - DNA, 19 bp, Homo sapiens
  siRNA target sequence for MET (NM_000245.1,3758-3776).
gactcataatccaactgta

SEQ ID NO: 91113 - DNA, 19 bp, Homo sapiens
  siRNA target sequence for MET (NM_000245.1,3913-3931).
gtcttgccagagacatgta

SEQ ID NO: 91114 - DNA, 19 bp, Homo sapiens
  siRNA target sequence for MET (NM_000245.1,3918-3936).
gccagagacatgtatgata

SEQ ID NO: 91115 - DNA, 19 bp, Homo sapiens
  siRNA target sequence for MET (NM_000245.1,3919-3937).
ccagagacatgtatgataa

SEQ ID NO: 91116 - DNA, 19 bp, Homo sapiens
  siRNA target sequence for MET (NM_000245.1,3920-3938).
cagagacatgtatgataaa

SEQ ID NO: 91117 - DNA, 19 bp, Homo sapiens
  siRNA target sequence for MET (NM_000245.1,4087-4105).
caccttatcctgacgtaaa

SEQ ID NO: 91118 - DNA, 19 bp, Homo sapiens
  siRNA target sequence for MET (NM_000245.1,4089-4107).
ccttatcctgacgtaaaca

SEQ ID NO: 91119 - DNA, 19 bp, Homo sapiens
  siRNA target sequence for MET (NM_000245.1,4146-4164).
ctcctacaacccgaatact

SEQ ID NO: 91120 - DNA, 19 bp, Homo sapiens
  siRNA target sequence for MET (NM_000245.1,4166-4184).
cccagaccccttatatgaa

SEQ ID NO: 91121 - DNA, 19 bp, Homo sapiens
  siRNA target sequence for MET (NM_000245.1,4168-4186).
cagaccccttatatgaagt

SEQ ID NO: 91122 - DNA, 19 bp, Homo sapiens
  siRNA target sequence for MET (NM_000245.1,4170-4188).
gaccccttatatgaagtaa

SEQ ID NO: 91123 - DNA, 19 bp, Homo sapiens
  siRNA target sequence for MET (NM_000245.1,4214-4232).
cgaaatgcgcccatccttt

SEQ ID NO: 91124 - DNA, 19 bp, Homo sapiens
  siRNA target sequence for MET (NM_000245.1,4215-4233).
gaaatgcgcccatcctttt

SEQ ID NO: 91125 - DNA, 19 bp, Homo sapiens
  siRNA target sequence for MET (NM_000245.1,4220-4238).
gcgcccatccttttctgaa

SEQ ID NO: 91126 - DNA, 19 bp, Homo sapiens
  siRNA target sequence for MET (NM_000245.1,4257-4275).
gcgatcttctctactttca

SEQ ID NO: 91127 - DNA, 19 bp, Homo sapiens
  siRNA target sequence for MET (NM_000245.1,4258-4276).
cgatcttctctactttcat

SEQ ID NO: 91128 - DNA, 19 bp, Homo sapiens
  siRNA target sequence for MET (NM_000245.1,4296-4314).
gtgaacgctacttatgtga

SEQ ID NO: 91129 - DNA, 19 bp, Homo sapiens
  siRNA target sequence for MGC13186 (NM_032324.1,176-194).
gtgtgcctgttgatggatt

SEQ ID NO: 91130 - DNA, 19 bp, Homo sapiens
  siRNA target sequence for MGC13186 (NM_032324.1,222-240).
gagaagaataggattcgat

SEQ ID NO: 91131 - DNA, 19 bp, Homo sapiens
  siRNA target sequence for MGC13186 (NM_032324.1,314-332).
gccgagttgggcagtatgt

SEQ ID NO: 91132 - DNA, 19 bp, Homo sapiens
  siRNA target sequence for MGC13186 (NM_032324.1,331-349).
gtggtcgacctgacttctt

SEQ ID NO: 91133 - DNA, 19 bp, Homo sapiens
  siRNA target sequence for MGC13186 (NM_032324.1,333-351).
ggtcgacctgacttctttt

SEQ ID NO: 91134 - DNA, 19 bp, Homo sapiens
  siRNA target sequence for MGC13186 (NM_032324.1,486-504).
gtctaccccagggactata

SEQ ID NO: 91135 - DNA, 19 bp, Homo sapiens
  siRNA target sequence for MGC13186 (NM_032324.1,488-506).
ctaccccagggactataat

SEQ ID NO: 91136 - DNA, 19 bp, Homo sapiens
  siRNA target sequence for MGC13186 (NM_032324.1,491-509).
ccccagggactataatcct

SEQ ID NO: 91137 - DNA, 19 bp, Homo sapiens
  siRNA target sequence for MGC14560 (NM_016301.2,149-167).
ccggtctgtccaagttgta

SEQ ID NO: 91138 - DNA, 19 bp, Homo sapiens
  siRNA target sequence for MGC14560 (NM_016301.2,150-168).
cggtctgtccaagttgtaa

SEQ ID NO: 91139 - DNA, 19 bp, Homo sapiens
  siRNA target sequence for MGC14560 (NM_016301.2,151-169).
ggtctgtccaagttgtaaa

SEQ ID NO: 91140 - DNA, 19 bp, Homo sapiens
  siRNA target sequence for MGC14560 (NM_016301.2,154-172).
ctgtccaagttgtaaacct

SEQ ID NO: 91141 - DNA, 19 bp, Homo sapiens
  siRNA target sequence for MGC14560 (NM_016301.2,178-196).
cagcagcagaacacttcaa

SEQ ID NO: 91142 - DNA, 19 bp, Homo sapiens
  siRNA target sequence for MGC14560 (NM_016301.2,183-201).
gcagaacacttcaactact

SEQ ID NO: 91143 - DNA, 19 bp, Homo sapiens
  siRNA target sequence for MGC14560 (NM_016301.2,211-229).
ctgacatccgggaactgat

SEQ ID NO: 91144 - DNA, 19 bp, Homo sapiens
  siRNA target sequence for MGC14560 (NM_016301.2,273-291).
cccaacggaggattggtat

SEQ ID NO: 91145 - DNA, 19 bp, Homo sapiens
  siRNA target sequence for MGC14560 (NM_016301.2,274-292).
ccaacggaggattggtatt

SEQ ID NO: 91146 - DNA, 19 bp, Homo sapiens
  siRNA target sequence for MGC14560 (NM_016301.2,280-298).
gaggattggtattttgcat

SEQ ID NO: 91147 - DNA, 19 bp, Homo sapiens
  siRNA target sequence for MGC14560 (NM_016301.2,345-363).
catgtagaggacgactata

SEQ ID NO: 91148 - DNA, 19 bp, Homo sapiens
  siRNA target sequence for MGC14560 (NM_016301.2,351-369).
gaggacgactatatccttt

SEQ ID NO: 91149 - DNA, 19 bp, Homo sapiens
  siRNA target sequence for MGC14560 (NM_016301.2,376-394).
gtccaggtcagattgagtt

SEQ ID NO: 91150 - DNA, 19 bp, Homo sapiens
  siRNA target sequence for MGC14560 (NM_016301.2,379-397).
caggtcagattgagttgta

SEQ ID NO: 91151 - DNA, 19 bp, Homo sapiens
  siRNA target sequence for MGC14560 (NM_016301.2,454-472).
gagtctgtggagtttttct

SEQ ID NO: 91152 - DNA, 19 bp, Homo sapiens
  siRNA target sequence for MGC14560 (NM_016301.2,494-512).
ggagtcattcaagtttatt

SEQ ID NO: 91153 - DNA, 19 bp, Homo sapiens
  siRNA target sequence for MGC14560 (NM_016301.2,558-576).
ccgcaagtcaacatcatga

SEQ ID NO: 91154 - DNA, 19 bp, Homo sapiens
  siRNA target sequence for MGC14560 (NM_016301.2,564-582).
gtcaacatcatgacaaaaa

SEQ ID NO: 91155 - DNA, 19 bp, Homo sapiens
  siRNA target sequence for MGC14560 (NM_016301.2,630-648).
gatccagacatgtattctt

SEQ ID NO: 91156 - DNA, 19 bp, Homo sapiens
  siRNA target sequence for MGC14560 (NM_016301.2,633-651).
ccagacatgtattctttat

SEQ ID NO: 91157 - DNA, 19 bp, Homo sapiens
  siRNA target sequence for MGC14560 (NM_016301.2,657-675).
gattctacaagtgacttaa

SEQ ID NO: 91158 - DNA, 19 bp, Homo sapiens
  siRNA target sequence for MGC14560 (NM_016301.2,689-707).
caagaaactgactaaagct

SEQ ID NO: 91159 - DNA, 19 bp, Homo sapiens
  siRNA target sequence for MGC14560 (NM_016301.2,692-710).
gaaactgactaaagctata

SEQ ID NO: 91160 - DNA, 19 bp, Homo sapiens
  siRNA target sequence for MGC14560 (NM_016301.2,706-724).
ctatatgtggactgattga

SEQ ID NO: 91161 - DNA, 19 bp, Homo sapiens
  siRNA target sequence for MGC14560 (NM_016301.2,712-730).
gtggactgattgatgacta

SEQ ID NO: 91162 - DNA, 19 bp, Homo sapiens
  siRNA target sequence for MGC14560 (NM_016301.2,728-746).
ctacagcatggttcgattt

SEQ ID NO: 91163 - DNA, 19 bp, Homo sapiens
  siRNA target sequence for MGC14560 (NM_016301.2,731-749).
cagcatggttcgattttta

SEQ ID NO: 91164 - DNA, 19 bp, Homo sapiens
  siRNA target sequence for MGC14560 (NM_016301.2,858-876).
gatgagtcttcctctatgt

SEQ ID NO: 91165 - DNA, 19 bp, Homo sapiens
  siRNA target sequence for MGC14560 (NM_016301.2,868-886).
cctctatgtttgacgaata

SEQ ID NO: 91166 - DNA, 19 bp, Homo sapiens
  siRNA target sequence for MGC14560 (NM_016301.2,869-887).
ctctatgtttgacgaatat

SEQ ID NO: 91167 - DNA, 19 bp, Homo sapiens
  siRNA target sequence for MGC14560 (NM_016301.2,871-889).
ctatgtttgacgaatattt

SEQ ID NO: 91168 - DNA, 19 bp, Homo sapiens
  siRNA target sequence for MGC14560 (NM_016301.2,875-893).
gtttgacgaatattttcaa

SEQ ID NO: 91169 - DNA, 19 bp, Homo sapiens
  siRNA target sequence for MGC16169 (NM_033115.2,606-624).
cttggcccctgaggtaatt

SEQ ID NO: 91170 - DNA, 19 bp, Homo sapiens
  siRNA target sequence for MGC16169 (NM_033115.2,675-693).
gccttctggccccaaatca

SEQ ID NO: 91171 - DNA, 19 bp, Homo sapiens
  siRNA target sequence for MGC16169 (NM_033115.2,786-804).
gcttactttggattgtgta

SEQ ID NO: 91172 - DNA, 19 bp, Homo sapiens
  siRNA target sequence for MGC16169 (NM_033115.2,800-818).
gtgtagatgacactttaat

SEQ ID NO: 91173 - DNA, 19 bp, Homo sapiens
  siRNA target sequence for MGC16169 (NM_033115.2,835-853).
catggttgtttggacatta

SEQ ID NO: 91174 - DNA, 19 bp, Homo sapiens
  siRNA target sequence for MGC16169 (NM_033115.2,942-960).
gaaggacaaagtattcagt

SEQ ID NO: 91175 - DNA, 19 bp, Homo sapiens
  siRNA target sequence for MGC16169 (NM_033115.2,990-1008).
caaacctgccagtctgttt

SEQ ID NO: 91176 - DNA, 19 bp, Homo sapiens
  siRNA target sequence for MGC16169 (NM_033115.2,997-1015).
gccagtctgttttcatctt

SEQ ID NO: 91177 - DNA, 19 bp, Homo sapiens
  siRNA target sequence for MGC16169 (NM_033115.2,1016-1034).
ctctgagatgtgctgattt

SEQ ID NO: 91178 - DNA, 19 bp, Homo sapiens
  siRNA target sequence for MGC16169 (NM_033115.2,1048-1066).
gatatcagtcagttgtgta

SEQ ID NO: 91179 - DNA, 19 bp, Homo sapiens
  siRNA target sequence for MGC16169 (NM_033115.2,1053-1071).
cagtcagttgtgtaaagat

SEQ ID NO: 91180 - DNA, 19 bp, Homo sapiens
  siRNA target sequence for MGC16169 (NM_033115.2,1055-1073).
gtcagttgtgtaaagatat

SEQ ID NO: 91181 - DNA, 19 bp, Homo sapiens
  siRNA target sequence for MGC16169 (NM_033115.2,1156-1174).
cttgtcaacaaggaaatca

SEQ ID NO: 91182 - DNA, 19 bp, Homo sapiens
  siRNA target sequence for MGC16169 (NM_033115.2,1253-1271).
gaagctcgcttttagatga

SEQ ID NO: 91183 - DNA, 19 bp, Homo sapiens
  siRNA target sequence for MGC16169 (NM_033115.2,1270-1288).
gataccactgtgacattgt

SEQ ID NO: 91184 - DNA, 19 bp, Homo sapiens
  siRNA target sequence for MGC16169 (NM_033115.2,1289-1307).
cgttatgccagctaagaaa

SEQ ID NO: 91185 - DNA, 19 bp, Homo sapiens
  siRNA target sequence for MGC16169 (NM_033115.2,1405-1423).
gctgccacgctccctttaa

SEQ ID NO: 91186 - DNA, 19 bp, Homo sapiens
  siRNA target sequence for MGC16169 (NM_033115.2,1406-1424).
ctgccacgctccctttaat

SEQ ID NO: 91187 - DNA, 19 bp, Homo sapiens
  siRNA target sequence for MGC16169 (NM_033115.2,1408-1426).
gccacgctccctttaatca

SEQ ID NO: 91188 - DNA, 19 bp, Homo sapiens
  siRNA target sequence for MGC16169 (NM_033115.2,1444-1462).
gagtaccaactaaatagaa

SEQ ID NO: 91189 - DNA, 19 bp, Homo sapiens
  siRNA target sequence for MGC16169 (NM_033115.2,1446-1464).
gtaccaactaaatagaatt

SEQ ID NO: 91190 - DNA, 19 bp, Homo sapiens
  siRNA target sequence for MGC16169 (NM_033115.2,1449-1467).
ccaactaaatagaattatt

SEQ ID NO: 91191 - DNA, 19 bp, Homo sapiens
  siRNA target sequence for MGC16169 (NM_033115.2,1479-1497).
gctgctaaaggcttatcca

SEQ ID NO: 91192 - DNA, 19 bp, Homo sapiens
  siRNA target sequence for MGC16169 (NM_033115.2,1483-1501).
ctaaaggcttatccatata

SEQ ID NO: 91193 - DNA, 19 bp, Homo sapiens
  siRNA target sequence for MGC16169 (NM_033115.2,1543-1561).
cctcttatgagaggtttaa

SEQ ID NO: 91194 - DNA, 19 bp, Homo sapiens
  siRNA target sequence for MGC16169 (NM_033115.2,1602-1620).
caagtacgatgcaattgat

SEQ ID NO: 91195 - DNA, 19 bp, Homo sapiens
  siRNA target sequence for MGC16169 (NM_033115.2,1605-1623).
gtacgatgcaattgataaa

SEQ ID NO: 91196 - DNA, 19 bp, Homo sapiens
  siRNA target sequence for MGC16169 (NM_033115.2,1609-1627).
gatgcaattgataaagaca

SEQ ID NO: 91197 - DNA, 19 bp, Homo sapiens
  siRNA target sequence for MGC16169 (NM_033115.2,1626-1644).
cactccaattcctacagat

SEQ ID NO: 91198 - DNA, 19 bp, Homo sapiens
  siRNA target sequence for MGC16169 (NM_033115.2,1678-1696).
cagtacgatgaactgttat

SEQ ID NO: 91199 - DNA, 19 bp, Homo sapiens
  siRNA target sequence for MGC16169 (NM_033115.2,1680-1698).
gtacgatgaactgttatca

SEQ ID NO: 91200 - DNA, 19 bp, Homo sapiens
  siRNA target sequence for MGC16169 (NM_033115.2,1683-1701).
cgatgaactgttatcatca

SEQ ID NO: 91201 - DNA, 19 bp, Homo sapiens
  siRNA target sequence for MGC16169 (NM_033115.2,1700-1718).
caccagaaggtcatgcaaa

SEQ ID NO: 91202 - DNA, 19 bp, Homo sapiens
  siRNA target sequence for MGC16169 (NM_033115.2,1715-1733).
caaaatttaggcgtgtatt

SEQ ID NO: 91203 - DNA, 19 bp, Homo sapiens
  siRNA target sequence for MGC16169 (NM_033115.2,1795-1813).
gctccattcctatatctaa

SEQ ID NO: 91204 - DNA, 19 bp, Homo sapiens
  siRNA target sequence for MGC16169 (NM_033115.2,1796-1814).
ctccattcctatatctaaa

SEQ ID NO: 91205 - DNA, 19 bp, Homo sapiens
  siRNA target sequence for MGC16169 (NM_033115.2,1798-1816).
ccattcctatatctaaact

SEQ ID NO: 91206 - DNA, 19 bp, Homo sapiens
  siRNA target sequence for MGC16169 (NM_033115.2,1804-1822).
ctatatctaaacttcaata

SEQ ID NO: 91207 - DNA, 19 bp, Homo sapiens
  siRNA target sequence for MGC16169 (NM_033115.2,1825-1843).
gaagccttggcttatgcat

SEQ ID NO: 91208 - DNA, 19 bp, Homo sapiens
  siRNA target sequence for MGC16169 (NM_033115.2,1833-1851).
ggcttatgcatgtatgtct

SEQ ID NO: 91209 - DNA, 19 bp, Homo sapiens
  siRNA target sequence for MGC16169 (NM_033115.2,1862-1880).
ccaaatacctgtataactt

SEQ ID NO: 91210 - DNA, 19 bp, Homo sapiens
  siRNA target sequence for MGC16169 (NM_033115.2,1898-1916).
cacatgtaatacaagagta

SEQ ID NO: 91211 - DNA, 19 bp, Homo sapiens
  siRNA target sequence for MGC16169 (NM_033115.2,1903-1921).
gtaatacaagagtatctga

SEQ ID NO: 91212 - DNA, 19 bp, Homo sapiens
  siRNA target sequence for MGC16169 (NM_033115.2,1955-1973).
cagagctgagtaatcatct

SEQ ID NO: 91213 - DNA, 19 bp, Homo sapiens
  siRNA target sequence for MGC16169 (NM_033115.2,1959-1977).
gctgagtaatcatctcaat

SEQ ID NO: 91214 - DNA, 19 bp, Homo sapiens
  siRNA target sequence for MGC16169 (NM_033115.2,2061-2079).
ccacctctgggatacctta

SEQ ID NO: 91215 - DNA, 19 bp, Homo sapiens
  siRNA target sequence for MGC16169 (NM_033115.2,2064-2082).
cctctgggataccttacta

SEQ ID NO: 91216 - DNA, 19 bp, Homo sapiens
  siRNA target sequence for MGC16169 (NM_033115.2,2067-2085).
ctgggataccttactactt

SEQ ID NO: 91217 - DNA, 19 bp, Homo sapiens
  siRNA target sequence for MGC16169 (NM_033115.2,2106-2124).
ctgtattggagtagcaatt

SEQ ID NO: 91218 - DNA, 19 bp, Homo sapiens
  siRNA target sequence for MGC16169 (NM_033115.2,2108-2126).
gtattggagtagcaattct

SEQ ID NO: 91219 - DNA, 19 bp, Homo sapiens
  siRNA target sequence for MGC16169 (NM_033115.2,2186-2204).
ccgatttaccagaaattga

SEQ ID NO: 91220 - DNA, 19 bp, Homo sapiens
  siRNA target sequence for MGC16169 (NM_033115.2,2212-2230).
cgctgtgtgagagaatcta

SEQ ID NO: 91221 - DNA, 19 bp, Homo sapiens
  siRNA target sequence for MGC16169 (NM_033115.2,2251-2269).
cctaaaagtgctacttaca

SEQ ID NO: 91222 - DNA, 19 bp, Homo sapiens
  siRNA target sequence for MGC16169 (NM_033115.2,2316-2334).
cagaagttcggcaccttat

SEQ ID NO: 91223 - DNA, 19 bp, Homo sapiens
  siRNA target sequence for MGC16169 (NM_033115.2,2464-2482).
gtgacaggccacttcaaaa

SEQ ID NO: 91224 - DNA, 19 bp, Homo sapiens
  siRNA target sequence for MGC16169 (NM_033115.2,2466-2484).
gacaggccacttcaaaaca

SEQ ID NO: 91225 - DNA, 19 bp, Homo sapiens
  siRNA target sequence for MGC16169 (NM_033115.2,2535-2553).
ccggaatagtgaagacttt

SEQ ID NO: 91226 - DNA, 19 bp, Homo sapiens
  siRNA target sequence for MGC16169 (NM_033115.2,2536-2554).
cggaatagtgaagacttta

SEQ ID NO: 91227 - DNA, 19 bp, Homo sapiens
  siRNA target sequence for MGC16169 (NM_033115.2,2538-2556).
gaatagtgaagactttatt

SEQ ID NO: 91228 - DNA, 19 bp, Homo sapiens
  siRNA target sequence for MGC16169 (NM_033115.2,2550-2568).
ctttattcgtggtcacatt

SEQ ID NO: 91229 - DNA, 19 bp, Homo sapiens
  siRNA target sequence for MGC16169 (NM_033115.2,2572-2590).
ggaagcatcaacattccat

SEQ ID NO: 91230 - DNA, 19 bp, Homo sapiens
  siRNA target sequence for MGC16169 (NM_033115.2,2573-2591).
gaagcatcaacattccatt

SEQ ID NO: 91231 - DNA, 19 bp, Homo sapiens
  siRNA target sequence for MGC16169 (NM_033115.2,2714-2732).
cagctcaccttgtgaagat

SEQ ID NO: 91232 - DNA, 19 bp, Homo sapiens
  siRNA target sequence for MGC22688 (NM_145001.1,297-315).
ggaaggtctgcattgtaca

SEQ ID NO: 91233 - DNA, 19 bp, Homo sapiens
  siRNA target sequence for MGC22688 (NM_145001.1,367-385).
gtgcgtggagcgcaatgaa

SEQ ID NO: 91234 - DNA, 19 bp, Homo sapiens
  siRNA target sequence for MGC22688 (NM_145001.1,369-387).
gcgtggagcgcaatgaagt

SEQ ID NO: 91235 - DNA, 19 bp, Homo sapiens
  siRNA target sequence for MGC22688 (NM_145001.1,378-396).
gcaatgaagtgagaaatgt

SEQ ID NO: 91236 - DNA, 19 bp, Homo sapiens
  siRNA target sequence for MGC22688 (NM_145001.1,507-525).
gtggagacctgcgttatca

SEQ ID NO: 91237 - DNA, 19 bp, Homo sapiens
  siRNA target sequence for MGC22688 (NM_145001.1,637-655).
gcctgacaatattttactt

SEQ ID NO: 91238 - DNA, 19 bp, Homo sapiens
  siRNA target sequence for MGC2599 (NM_032116.2,189-207).
ggaaattacgactcatcaa

SEQ ID NO: 91239 - DNA, 19 bp, Homo sapiens
  siRNA target sequence for MGC2599 (NM_032116.2,202-220).
catcaatggtatattacca

SEQ ID NO: 91240 - DNA, 19 bp, Homo sapiens
  siRNA target sequence for MGC2599 (NM_032116.2,260-278).
cagagatccagctatcaaa

SEQ ID NO: 91241 - DNA, 19 bp, Homo sapiens
  siRNA target sequence for MGC2599 (NM_032116.2,343-361).
gcactttagaaagttttaa

SEQ ID NO: 91242 - DNA, 19 bp, Homo sapiens
  siRNA target sequence for MGC2599 (NM_032116.2,473-491).
gcgtcccaatcgagaagta

SEQ ID NO: 91243 - DNA, 19 bp, Homo sapiens
  siRNA target sequence for MGC2599 (NM_032116.2,474-492).
cgtcccaatcgagaagtaa

SEQ ID NO: 91244 - DNA, 19 bp, Homo sapiens
  siRNA target sequence for MGC2599 (NM_032116.2,540-558).
ggccgagcacatcctatat

SEQ ID NO: 91245 - DNA, 19 bp, Homo sapiens
  siRNA target sequence for MGC2599 (NM_032116.2,542-560).
ccgagcacatcctatatca

SEQ ID NO: 91246 - DNA, 19 bp, Homo sapiens
  siRNA target sequence for MGC2599 (NM_032116.2,543-561).
cgagcacatcctatatcaa

SEQ ID NO: 91247 - DNA, 19 bp, Homo sapiens
  siRNA target sequence for MGC2599 (NM_032116.2,546-564).
gcacatcctatatcaaaga

SEQ ID NO: 91248 - DNA, 19 bp, Homo sapiens
  siRNA target sequence for MGC2599 (NM_032116.2,646-664).
gtgcaagtgatggtgaaat

SEQ ID NO: 91249 - DNA, 19 bp, Homo sapiens
  siRNA target sequence for MGC2599 (NM_032116.2,878-896).
cccaggcactggtaaaact

SEQ ID NO: 91250 - DNA, 19 bp, Homo sapiens
  siRNA target sequence for MGC2599 (NM_032116.2,879-897).
ccaggcactggtaaaacta

SEQ ID NO: 91251 - DNA, 19 bp, Homo sapiens
  siRNA target sequence for MGC2599 (NM_032116.2,880-898).
caggcactggtaaaactat

SEQ ID NO: 91252 - DNA, 19 bp, Homo sapiens
  siRNA target sequence for MGC2599 (NM_032116.2,917-935).
cactgaatgtggtacaaca

SEQ ID NO: 91253 - DNA, 19 bp, Homo sapiens
  siRNA target sequence for MGC2599 (NM_032116.2,919-937).
ctgaatgtggtacaacatt

SEQ ID NO: 91254 - DNA, 19 bp, Homo sapiens
  siRNA target sequence for MGC2599 (NM_032116.2,941-959).
caacgtttcgtcttctaca

SEQ ID NO: 91255 - DNA, 19 bp, Homo sapiens
  siRNA target sequence for MGC2599 (NM_032116.2,952-970).
cttctacactgacatctaa

SEQ ID NO: 91256 - DNA, 19 bp, Homo sapiens
  siRNA target sequence for MGC2599 (NM_032116.2,992-1010).
gttagttcgtctgttgttt

SEQ ID NO: 91257 - DNA, 19 bp, Homo sapiens
  siRNA target sequence for MGC2599 (NM_032116.2,1030-1048).
cccctaccacgatcttcat

SEQ ID NO: 91258 - DNA, 19 bp, Homo sapiens
  siRNA target sequence for MGC2599 (NM_032116.2,1039-1057).
cgatcttcattgatgagat

SEQ ID NO: 91259 - DNA, 19 bp, Homo sapiens
  siRNA target sequence for MGC2599 (NM_032116.2,1120-1138).
ctgaactgctcattcagat

SEQ ID NO: 91260 - DNA, 19 bp, Homo sapiens
  siRNA target sequence for MGC2599 (NM_032116.2,1235-1253).
gcgaagaaggttagaaaaa

SEQ ID NO: 91261 - DNA, 19 bp, Homo sapiens
  siRNA target sequence for MGC2599 (NM_032116.2,1310-1328).
ccttcgtgaggtcgaatta

SEQ ID NO: 91262 - DNA, 19 bp, Homo sapiens
  siRNA target sequence for MGC2599 (NM_032116.2,1423-1441).
caatgagacggcgtatcaa

SEQ ID NO: 91263 - DNA, 19 bp, Homo sapiens
  siRNA target sequence for MGC2599 (NM_032116.2,1433-1451).
gcgtatcaatggcttaagt

SEQ ID NO: 91264 - DNA, 19 bp, Homo sapiens
  siRNA target sequence for MGC2599 (NM_032116.2,1572-1590).
gaaaaatggatggttgaat

SEQ ID NO: 91265 - DNA, 19 bp, Homo sapiens
  siRNA target sequence for MGC2744 (NM_025267.2,172-190).
cgatgtccacgtgcttatt

SEQ ID NO: 91266 - DNA, 19 bp, Homo sapiens
  siRNA target sequence for MGC2744 (NM_025267.2,191-209).
gaggatcaccgcattgtgt

SEQ ID NO: 91267 - DNA, 19 bp, Homo sapiens
  siRNA target sequence for MGC2744 (NM_025267.2,225-243).
ccgatggagtggagttgta

SEQ ID NO: 91268 - DNA, 19 bp, Homo sapiens
  siRNA target sequence for MGC2744 (NM_025267.2,227-245).
gatggagtggagttgtaca

SEQ ID NO: 91269 - DNA, 19 bp, Homo sapiens
  siRNA target sequence for MGC2744 (NM_025267.2,231-249).
gagtggagttgtacaatga

SEQ ID NO: 91270 - DNA, 19 bp, Homo sapiens
  siRNA target sequence for MGC2744 (NM_025267.2,296-314).
cgctcttcccgctctatta

SEQ ID NO: 91271 - DNA, 19 bp, Homo sapiens
  siRNA target sequence for MGC2744 (NM_025267.2,303-321).
cccgctctattacttgttt

SEQ ID NO: 91272 - DNA, 19 bp, Homo sapiens
  siRNA target sequence for MGC2744 (NM_025267.2,304-322).
ccgctctattacttgtttt

SEQ ID NO: 91273 - DNA, 19 bp, Homo sapiens
  siRNA target sequence for MGC2744 (NM_025267.2,443-461).
ctggctcatgtggaacatt

SEQ ID NO: 91274 - DNA, 19 bp, Homo sapiens
  siRNA target sequence for MGC2744 (NM_025267.2,445-463).
ggctcatgtggaacattat

SEQ ID NO: 91275 - DNA, 19 bp, Homo sapiens
  siRNA target sequence for MGC2744 (NM_025267.2,458-476).
cattatgcagagcttttga

SEQ ID NO: 91276 - DNA, 19 bp, Homo sapiens
  siRNA target sequence for MGC2744 (NM_025267.2,500-518).
ccacctgccatggatgatt

SEQ ID NO: 91277 - DNA, 19 bp, Homo sapiens
  siRNA target sequence for MGC2744 (NM_025267.2,506-524).
gccatggatgatttggatt

SEQ ID NO: 91278 - DNA, 19 bp, Homo sapiens
  siRNA target sequence for MGC2744 (NM_025267.2,657-675).
ctgatgaccgtggtacaat

SEQ ID NO: 91279 - DNA, 19 bp, Homo sapiens
  siRNA target sequence for MGC2744 (NM_025267.2,659-677).
gatgaccgtggtacaatca

SEQ ID NO: 91280 - DNA, 19 bp, Homo sapiens
  siRNA target sequence for MGC2744 (NM_025267.2,665-683).
cgtggtacaatcaatgaca

SEQ ID NO: 91281 - DNA, 19 bp, Homo sapiens
  siRNA target sequence for MGC2744 (NM_025267.2,666-684).
gtggtacaatcaatgacat

SEQ ID NO: 91282 - DNA, 19 bp, Homo sapiens
  siRNA target sequence for MGC2744 (NM_025267.2,761-779).
gttctggtccgggtagatt

SEQ ID NO: 91283 - DNA, 19 bp, Homo sapiens
  siRNA target sequence for MGC2744 (NM_025267.2,833-851).
gcagttgctgaccatctat

SEQ ID NO: 91284 - DNA, 19 bp, Homo sapiens
  siRNA target sequence for MGC2744 (NM_025267.2,836-854).
gttgctgaccatctattta

SEQ ID NO: 91285 - DNA, 19 bp, Homo sapiens
  siRNA target sequence for MGC2744 (NM_025267.2,950-968).
cagagcgtcaatgaaaaaa

SEQ ID NO: 91286 - DNA, 19 bp, Homo sapiens
  siRNA target sequence for MGC2744 (NM_025267.2,1064-1082).
gggcccattcgggttgtta

SEQ ID NO: 91287 - DNA, 19 bp, Homo sapiens
  siRNA target sequence for MGC2744 (NM_025267.2,1065-1083).
ggcccattcgggttgttaa

SEQ ID NO: 91288 - DNA, 19 bp, Homo sapiens
  siRNA target sequence for MGC2744 (NM_025267.2,1068-1086).
ccattcgggttgttaacat

SEQ ID NO: 91289 - DNA, 19 bp, Homo sapiens
  siRNA target sequence for MGC2744 (NM_025267.2,1141-1159).
ccttcaggtcattaagatt

SEQ ID NO: 91290 - DNA, 19 bp, Homo sapiens
  siRNA target sequence for MGC2744 (NM_025267.2,1281-1299).
gtggagcagaggatcatgt

SEQ ID NO: 91291 - DNA, 19 bp, Homo sapiens
  siRNA target sequence for MGC2744 (NM_025267.2,1413-1431).
ggggaggtgtggtcatatt

SEQ ID NO: 91292 - DNA, 19 bp, Homo sapiens
  siRNA target sequence for MGC2744 (NM_025267.2,1414-1432).
gggaggtgtggtcatatta

SEQ ID NO: 91293 - DNA, 19 bp, Homo sapiens
  siRNA target sequence for MGC2744 (NM_025267.2,1418-1436).
ggtgtggtcatattacaca

SEQ ID NO: 91294 - DNA, 19 bp, Homo sapiens
  siRNA target sequence for MGC2744 (NM_025267.2,1445-1463).
ggtgattcagagttcatga

SEQ ID NO: 91295 - DNA, 19 bp, Homo sapiens
  siRNA target sequence for MGC2744 (NM_025267.2,1446-1464).
gtgattcagagttcatgaa

SEQ ID NO: 91296 - DNA, 19 bp, Homo sapiens
  siRNA target sequence for MGC33182 (NM_145203.2,444-462).
gttgtgggagggaaataca

SEQ ID NO: 91297 - DNA, 19 bp, Homo sapiens
  siRNA target sequence for MGC33182 (NM_145203.2,593-611).
caaactctacacgattctt

SEQ ID NO: 91298 - DNA, 19 bp, Homo sapiens
  siRNA target sequence for MGC33182 (NM_145203.2,1023-1041).
gaatccttaggctacgttt

SEQ ID NO: 91299 - DNA, 19 bp, Homo sapiens
  siRNA target sequence for MGC33182 (NM_145203.2,1027-1045).
ccttaggctacgttttcat

SEQ ID NO: 91300 - DNA, 19 bp, Homo sapiens
  siRNA target sequence for MGC33182 (NM_145203.2,1173-1191).
gaattcgccatgtacttga

SEQ ID NO: 91301 - DNA, 19 bp, Homo sapiens
  siRNA target sequence for MGC42105 (NM_153361.2,1158-1176).
cactccctaaccaaagaaa

SEQ ID NO: 91302 - DNA, 19 bp, Homo sapiens
  siRNA target sequence for MGC42105 (NM_153361.2,1162-1180).
ccctaaccaaagaaaaggt

SEQ ID NO: 91303 - DNA, 19 bp, Homo sapiens
  siRNA target sequence for MGC42105 (NM_153361.2,1228-1246).
ggctactatcccgagaaat

SEQ ID NO: 91304 - DNA, 19 bp, Homo sapiens
  siRNA target sequence for MGC42105 (NM_153361.2,1230-1248).
ctactatcccgagaaatct

SEQ ID NO: 91305 - DNA, 19 bp, Homo sapiens
  siRNA target sequence for MGC42105 (NM_153361.2,1347-1365).
ggggagctcttcggaaaaa

SEQ ID NO: 91306 - DNA, 19 bp, Homo sapiens
  siRNA target sequence for MGC42105 (NM_153361.2,1348-1366).
gggagctcttcggaaaaat

SEQ ID NO: 91307 - DNA, 19 bp, Homo sapiens
  siRNA target sequence for MGC42105 (NM_153361.2,1350-1368).
gagctcttcggaaaaatta

SEQ ID NO: 91308 - DNA, 19 bp, Homo sapiens
  siRNA target sequence for MGC42105 (NM_153361.2,1490-1508).
ctataccagtaatacttgt

SEQ ID NO: 91309 - DNA, 19 bp, Homo sapiens
  siRNA target sequence for MGC42105 (NM_153361.2,1535-1553).
cacagtaagcaaaaaaggt

SEQ ID NO: 91310 - DNA, 19 bp, Homo sapiens
  siRNA target sequence for MGC42105 (NM_153361.2,1626-1644).
ggcatttacgtggatatct

SEQ ID NO: 91311 - DNA, 19 bp, Homo sapiens
  siRNA target sequence for MGC42105 (NM_153361.2,1701-1719).
gaaaccgtggccaaactaa

SEQ ID NO: 91312 - DNA, 19 bp, Homo sapiens
  siRNA target sequence for MGC42105 (NM_153361.2,1730-1748).
cctcgagggcacatacagt

SEQ ID NO: 91313 - DNA, 19 bp, Homo sapiens
  siRNA target sequence for MGC42105 (NM_153361.2,1824-1842).
ggaatcgactgcatcatga

SEQ ID NO: 91314 - DNA, 19 bp, Homo sapiens
  siRNA target sequence for MGC42105 (NM_153361.2,1825-1843).
gaatcgactgcatcatgaa

SEQ ID NO: 91315 - DNA, 19 bp, Homo sapiens
  siRNA target sequence for MGC42105 (NM_153361.2,1981-1999).
cagaagagcatattcgaaa

SEQ ID NO: 91316 - DNA, 19 bp, Homo sapiens
  siRNA target sequence for MGC42105 (NM_153361.2,1988-2006).
gcatattcgaaataaccaa

SEQ ID NO: 91317 - DNA, 19 bp, Homo sapiens
  siRNA target sequence for MGC42105 (NM_153361.2,2013-2031).
gatgctcgcagctcaatca

SEQ ID NO: 91318 - DNA, 19 bp, Homo sapiens
  siRNA target sequence for MGC42105 (NM_153361.2,2030-2048).
cacaggggtctatagaatt

SEQ ID NO: 91319 - DNA, 19 bp, Homo sapiens
  siRNA target sequence for MGC42105 (NM_153361.2,2032-2050).
caggggtctatagaattat

SEQ ID NO: 91320 - DNA, 19 bp, Homo sapiens
  siRNA target sequence for MGC42105 (NM_153361.2,2044-2062).
gaattattttacatagagt

SEQ ID NO: 91321 - DNA, 19 bp, Homo sapiens
  siRNA target sequence for MGC42105 (NM_153361.2,2163-2181).
cacacatccaaattttgct

SEQ ID NO: 91322 - DNA, 19 bp, Homo sapiens
  siRNA target sequence for MGC45428 (NM_152619.1,399-417).
cagggtgtccgcactatct

SEQ ID NO: 91323 - DNA, 19 bp, Homo sapiens
  siRNA target sequence for MGC45428 (NM_152619.1,479-497).
cgtgtgtgcatccaatgaa

SEQ ID NO: 91324 - DNA, 19 bp, Homo sapiens
  siRNA target sequence for MGC45428 (NM_152619.1,490-508).
ccaatgaaccatttcgtaa

SEQ ID NO: 91325 - DNA, 19 bp, Homo sapiens
  siRNA target sequence for MGC45428 (NM_152619.1,491-509).
caatgaaccatttcgtaaa

SEQ ID NO: 91326 - DNA, 19 bp, Homo sapiens
  siRNA target sequence for MGC45428 (NM_152619.1,499-517).
catttcgtaaagtcgatta

SEQ ID NO: 91327 - DNA, 19 bp, Homo sapiens
  siRNA target sequence for MGC45428 (NM_152619.1,510-528).
gtcgattacaccaaaaata

SEQ ID NO: 91328 - DNA, 19 bp, Homo sapiens
  siRNA target sequence for MGC45428 (NM_152619.1,679-697).
ccgtgcggatccttctgaa

SEQ ID NO: 91329 - DNA, 19 bp, Homo sapiens
  siRNA target sequence for MGC45428 (NM_152619.1,680-698).
cgtgcggatccttctgaat

SEQ ID NO: 91330 - DNA, 19 bp, Homo sapiens
  siRNA target sequence for MGC45428 (NM_152619.1,683-701).
gcggatccttctgaataaa

SEQ ID NO: 91331 - DNA, 19 bp, Homo sapiens
  siRNA target sequence for MGC45428 (NM_152619.1,684-702).
cggatccttctgaataaaa

SEQ ID NO: 91332 - DNA, 19 bp, Homo sapiens
  siRNA target sequence for MGC45428 (NM_152619.1,720-738).
gaacaagtcttaacagata

SEQ ID NO: 91333 - DNA, 19 bp, Homo sapiens
  siRNA target sequence for MGC45428 (NM_152619.1,740-758).
caccgaagccattaaacta

SEQ ID NO: 91334 - DNA, 19 bp, Homo sapiens
  siRNA target sequence for MGC45428 (NM_152619.1,742-760).
ccgaagccattaaactaga

SEQ ID NO: 91335 - DNA, 19 bp, Homo sapiens
  siRNA target sequence for MGC45428 (NM_152619.1,834-852).
gacgatgtttttattgcat

SEQ ID NO: 91336 - DNA, 19 bp, Homo sapiens
  siRNA target sequence for MGC45428 (NM_152619.1,855-873).
ggaccagaaaaatttcgtt

SEQ ID NO: 91337 - DNA, 19 bp, Homo sapiens
  siRNA target sequence for MGC45428 (NM_152619.1,856-874).
gaccagaaaaatttcgtta

SEQ ID NO: 91338 - DNA, 19 bp, Homo sapiens
  siRNA target sequence for MGC45428 (NM_152619.1,885-903).
gactttgtcctggatcata

SEQ ID NO: 91339 - DNA, 19 bp, Homo sapiens
  siRNA target sequence for MGC45428 (NM_152619.1,887-905).
ctttgtcctggatcatagt

SEQ ID NO: 91340 - DNA, 19 bp, Homo sapiens
  siRNA target sequence for MGC45428 (NM_152619.1,891-909).
gtcctggatcatagtgaat

SEQ ID NO: 91341 - DNA, 19 bp, Homo sapiens
  siRNA target sequence for MGC45428 (NM_152619.1,893-911).
cctggatcatagtgaatgt

SEQ ID NO: 91342 - DNA, 19 bp, Homo sapiens
  siRNA target sequence for MGC45428 (NM_152619.1,912-930).
cgtgtcctgaagtcatctt

SEQ ID NO: 91343 - DNA, 19 bp, Homo sapiens
  siRNA target sequence for MGC45428 (NM_152619.1,913-931).
gtgtcctgaagtcatctta

SEQ ID NO: 91344 - DNA, 19 bp, Homo sapiens
  siRNA target sequence for MGC45428 (NM_152619.1,915-933).
gtcctgaagtcatcttatt

SEQ ID NO: 91345 - DNA, 19 bp, Homo sapiens
  siRNA target sequence for MGC45428 (NM_152619.1,917-935).
cctgaagtcatcttattct

SEQ ID NO: 91346 - DNA, 19 bp, Homo sapiens
  siRNA target sequence for MGC45428 (NM_152619.1,934-952).
ctcgatcctcagctgttaa

SEQ ID NO: 91347 - DNA, 19 bp, Homo sapiens
  siRNA target sequence for MGC45428 (NM_152619.1,936-954).
cgatcctcagctgttaagt

SEQ ID NO: 91348 - DNA, 19 bp, Homo sapiens
  siRNA target sequence for MGC45428 (NM_152619.1,978-996).
ccctctcgacgcagcaaat

SEQ ID NO: 91349 - DNA, 19 bp, Homo sapiens
  siRNA target sequence for MGC45428 (NM_152619.1,980-998).
ctctcgacgcagcaaatca

SEQ ID NO: 91350 - DNA, 19 bp, Homo sapiens
  siRNA target sequence for MGC45428 (NM_152619.1,1028-1046).
ccaactttctactcctaaa

SEQ ID NO: 91351 - DNA, 19 bp, Homo sapiens
  siRNA target sequence for MGC45428 (NM_152619.1,1029-1047).
caactttctactcctaaat

SEQ ID NO: 91352 - DNA, 19 bp, Homo sapiens
  siRNA target sequence for MGC45428 (NM_152619.1,1061-1079).
cagttcctctccaactagt

SEQ ID NO: 91353 - DNA, 19 bp, Homo sapiens
  siRNA target sequence for MGC45428 (NM_152619.1,1083-1101).
ggaagtttcagaggattaa

SEQ ID NO: 91354 - DNA, 19 bp, Homo sapiens
  siRNA target sequence for MGC45428 (NM_152619.1,1084-1102).
gaagtttcagaggattaaa

SEQ ID NO: 91355 - DNA, 19 bp, Homo sapiens
  siRNA target sequence for MGC45428 (NM_152619.1,1118-1136).
cagatcttcttccaatgta

SEQ ID NO: 91356 - DNA, 19 bp, Homo sapiens
  siRNA target sequence for MGC45428 (NM_152619.1,1149-1167).
gagcttgaccgttgcataa

SEQ ID NO: 91357 - DNA, 19 bp, Homo sapiens
  siRNA target sequence for MGC45428 (NM_152619.1,1151-1169).
gcttgaccgttgcataagt

SEQ ID NO: 91358 - DNA, 19 bp, Homo sapiens
  siRNA target sequence for MGC45428 (NM_152619.1,1252-1270).
gcaattttgcagtagtcaa

SEQ ID NO: 91359 - DNA, 19 bp, Homo sapiens
  siRNA target sequence for MGC45428 (NM_152619.1,1253-1271).
caattttgcagtagtcaaa

SEQ ID NO: 91360 - DNA, 19 bp, Homo sapiens
  siRNA target sequence for MGC45428 (NM_152619.1,1298-1316).
ggagtttgccctaaagatt

SEQ ID NO: 91361 - DNA, 19 bp, Homo sapiens
  siRNA target sequence for MGC45428 (NM_152619.1,1299-1317).
gagtttgccctaaagatta

SEQ ID NO: 91362 - DNA, 19 bp, Homo sapiens
  siRNA target sequence for MGC45428 (NM_152619.1,1301-1319).
gtttgccctaaagattata

SEQ ID NO: 91363 - DNA, 19 bp, Homo sapiens
  siRNA target sequence for MGC45428 (NM_152619.1,1305-1323).
gccctaaagattatagaca

SEQ ID NO: 91364 - DNA, 19 bp, Homo sapiens
  siRNA target sequence for MGC45428 (NM_152619.1,1339-1357).
gaaaggaacacctgattga

SEQ ID NO: 91365 - DNA, 19 bp, Homo sapiens
  siRNA target sequence for MGC45428 (NM_152619.1,1460-1478).
caaaggtggagatctcttt

SEQ ID NO: 91366 - DNA, 19 bp, Homo sapiens
  siRNA target sequence for MGC45428 (NM_152619.1,1468-1486).
gagatctctttgatgcaat

SEQ ID NO: 91367 - DNA, 19 bp, Homo sapiens
  siRNA target sequence for MGC45428 (NM_152619.1,1470-1488).
gatctctttgatgcaatta

SEQ ID NO: 91368 - DNA, 19 bp, Homo sapiens
  siRNA target sequence for MGC45428 (NM_152619.1,1671-1689).
gtggtagaaggccctttat

SEQ ID NO: 91369 - DNA, 19 bp, Homo sapiens
  siRNA target sequence for MGC45428 (NM_152619.1,1674-1692).
gtagaaggccctttataca

SEQ ID NO: 91370 - DNA, 19 bp, Homo sapiens
  siRNA target sequence for MGC45428 (NM_152619.1,1697-1715).
ctgtggcacacccacttat

SEQ ID NO: 91371 - DNA, 19 bp, Homo sapiens
  siRNA target sequence for MGC45428 (NM_152619.1,1699-1717).
gtggcacacccacttatgt

SEQ ID NO: 91372 - DNA, 19 bp, Homo sapiens
  siRNA target sequence for MGC45428 (NM_152619.1,1771-1789).
cagctggtgtgatcacata

SEQ ID NO: 91373 - DNA, 19 bp, Homo sapiens
  siRNA target sequence for MGC45428 (NM_152619.1,1937-1955).
gcttcaggtaaatgttgaa

SEQ ID NO: 91374 - DNA, 19 bp, Homo sapiens
  siRNA target sequence for MGC45428 (NM_152619.1,2098-2116).
ccggggtctccgtcatcat

SEQ ID NO: 91375 - DNA, 19 bp, Homo sapiens
  siRNA target sequence for MGC45428 (NM_152619.1,2100-2118).
ggggtctccgtcatcatgt

SEQ ID NO: 91376 - DNA, 19 bp, Homo sapiens
  siRNA target sequence for MGC45428 (NM_152619.1,2101-2119).
gggtctccgtcatcatgtt

SEQ ID NO: 91377 - DNA, 19 bp, Homo sapiens
  siRNA target sequence for MGC45428 (NM_152619.1,2102-2120).
ggtctccgtcatcatgttt

SEQ ID NO: 91378 - DNA, 19 bp, Homo sapiens
  siRNA target sequence for MGC4796 (NM_032017.1,476-494).
gatttctggaaataatgca

SEQ ID NO: 91379 - DNA, 19 bp, Homo sapiens
  siRNA target sequence for MGC4796 (NM_032017.1,536-554).
ctcaccggtgccaagcata

SEQ ID NO: 91380 - DNA, 19 bp, Homo sapiens
  siRNA target sequence for MGC4796 (NM_032017.1,560-578).
gtgtttggcgaggaaagat

SEQ ID NO: 91381 - DNA, 19 bp, Homo sapiens
  siRNA target sequence for MGC4796 (NM_032017.1,580-598).
gcacggatgacttctatca

SEQ ID NO: 91382 - DNA, 19 bp, Homo sapiens
  siRNA target sequence for MGC4796 (NM_032017.1,752-770).
ccgcacctgtgaaatcgtt

SEQ ID NO: 91383 - DNA, 19 bp, Homo sapiens
  siRNA target sequence for MGC4796 (NM_032017.1,780-798).
gaatccagccggatggtta

SEQ ID NO: 91384 - DNA, 19 bp, Homo sapiens
  siRNA target sequence for MGC4796 (NM_032017.1,789-807).
cggatggttaagaagatga

SEQ ID NO: 91385 - DNA, 19 bp, Homo sapiens
  siRNA target sequence for MGC4796 (NM_032017.1,846-864).
catgacttcagcgataaga

SEQ ID NO: 91386 - DNA, 19 bp, Homo sapiens
  siRNA target sequence for MGC4796 (NM_032017.1,922-940).
gggagactgtggtaatctt

SEQ ID NO: 91387 - DNA, 19 bp, Homo sapiens
  siRNA target sequence for MGC4796 (NM_032017.1,1030-1048).
ggacacatcggataaccat

SEQ ID NO: 91388 - DNA, 19 bp, Homo sapiens
  siRNA target sequence for MGC4796 (NM_032017.1,1268-1286).
ggctgccgagtataccatt

SEQ ID NO: 91389 - DNA, 19 bp, Homo sapiens
  siRNA target sequence for MGC4796 (NM_032017.1,1516-1534).
gctcccagtacgagtttga

SEQ ID NO: 91390 - DNA, 19 bp, Homo sapiens
  siRNA target sequence for MGC5347 (NM_024063.1,172-190).
ggctcggcagtgaagatct

SEQ ID NO: 91391 - DNA, 19 bp, Homo sapiens
  siRNA target sequence for MGC5347 (NM_024063.1,1142-1160).
ggactcccacacttaaaca

SEQ ID NO: 91392 - DNA, 19 bp, Homo sapiens
  siRNA target sequence for MGC5347 (NM_024063.1,1143-1161).
gactcccacacttaaacaa

SEQ ID NO: 91393 - DNA, 19 bp, Homo sapiens
  siRNA target sequence for MGC5347 (NM_024063.1,1168-1186).
gaaattctgcaagtgatta

SEQ ID NO: 91394 - DNA, 19 bp, Homo sapiens
  siRNA target sequence for MGC5347 (NM_024063.1,1197-1215).
gcccatctccagtcatgtt

SEQ ID NO: 91395 - DNA, 19 bp, Homo sapiens
  siRNA target sequence for MGC5347 (NM_024063.1,1200-1218).
catctccagtcatgttgat

SEQ ID NO: 91396 - DNA, 19 bp, Homo sapiens
  siRNA target sequence for MGC5347 (NM_024063.1,1224-1242).
ccttcttgcagaaatgaca

SEQ ID NO: 91397 - DNA, 19 bp, Homo sapiens
  siRNA target sequence for MGC5347 (NM_024063.1,1293-1311).
gcatgccctccttcatagt

SEQ ID NO: 91398 - DNA, 19 bp, Homo sapiens
  siRNA target sequence for MGC5347 (NM_024063.1,1320-1338).
ccaggacaatcctgtgatt

SEQ ID NO: 91399 - DNA, 19 bp, Homo sapiens
  siRNA target sequence for MGC5347 (NM_024063.1,1333-1351).
gtgattgatgaaatagact

SEQ ID NO: 91400 - DNA, 19 bp, Homo sapiens
  siRNA target sequence for MGC5347 (NM_024063.1,1348-1366).
gacttccttgaagctttta

SEQ ID NO: 91401 - DNA, 19 bp, Homo sapiens
  siRNA target sequence for MGC5347 (NM_024063.1,1375-1393).
cagccctcatcgtttcgaa

SEQ ID NO: 91402 - DNA, 19 bp, Homo sapiens
  siRNA target sequence for MGC5347 (NM_024063.1,1390-1408).
cgaagcgtcattggattaa

SEQ ID NO: 91403 - DNA, 19 bp, Homo sapiens
  siRNA target sequence for MGC5347 (NM_024063.1,1391-1409).
gaagcgtcattggattaat

SEQ ID NO: 91404 - DNA, 19 bp, Homo sapiens
  siRNA target sequence for MGC5347 (NM_024063.1,1394-1412).
gcgtcattggattaatgga

SEQ ID NO: 91405 - DNA, 19 bp, Homo sapiens
  siRNA target sequence for MGC5347 (NM_024063.1,1395-1413).
cgtcattggattaatggat

SEQ ID NO: 91406 - DNA, 19 bp, Homo sapiens
  siRNA target sequence for MGC5347 (NM_024063.1,1396-1414).
gtcattggattaatggata

SEQ ID NO: 91407 - DNA, 19 bp, Homo sapiens
  siRNA target sequence for MGC5347 (NM_024063.1,1437-1455).
gattggtggccttgaagat

SEQ ID NO: 91408 - DNA, 19 bp, Homo sapiens
  siRNA target sequence for MGC5347 (NM_024063.1,1447-1465).
cttgaagatgtaaaactga

SEQ ID NO: 91409 - DNA, 19 bp, Homo sapiens
  siRNA target sequence for MGC5347 (NM_024063.1,1605-1623).
ctgtcactgctctttcgtt

SEQ ID NO: 91410 - DNA, 19 bp, Homo sapiens
  siRNA target sequence for MGC5347 (NM_024063.1,1710-1728).
cactccagcaattttgttt

SEQ ID NO: 91411 - DNA, 19 bp, Homo sapiens
  siRNA target sequence for MGC5347 (NM_024063.1,1825-1843).
gatggtgttggacttaaga

SEQ ID NO: 91412 - DNA, 19 bp, Homo sapiens
  siRNA target sequence for MGC5347 (NM_024063.1,1828-1846).
ggtgttggacttaagacaa

SEQ ID NO: 91413 - DNA, 19 bp, Homo sapiens
  siRNA target sequence for MGC5347 (NM_024063.1,1829-1847).
gtgttggacttaagacaat

SEQ ID NO: 91414 - DNA, 19 bp, Homo sapiens
  siRNA target sequence for MGC5347 (NM_024063.1,1868-1886).
caagtcaacaggagtttca

SEQ ID NO: 91415 - DNA, 19 bp, Homo sapiens
  siRNA target sequence for MGC5347 (NM_024063.1,1899-1917).
ccgaagtgtcatgattatt

SEQ ID NO: 91416 - DNA, 19 bp, Homo sapiens
  siRNA target sequence for MGC5347 (NM_024063.1,1961-1979).
gacctggaagattagataa

SEQ ID NO: 91417 - DNA, 19 bp, Homo sapiens
  siRNA target sequence for MGC5347 (NM_024063.1,1964-1982).
ctggaagattagataagat

SEQ ID NO: 91418 - DNA, 19 bp, Homo sapiens
  siRNA target sequence for MGC5347 (NM_024063.1,1966-1984).
ggaagattagataagatca

SEQ ID NO: 91419 - DNA, 19 bp, Homo sapiens
  siRNA target sequence for MGC5347 (NM_024063.1,2007-2025).
caagggcaggctttctatt

SEQ ID NO: 91420 - DNA, 19 bp, Homo sapiens
  siRNA target sequence for MGC5347 (NM_024063.1,2010-2028).
gggcaggctttctatttta

SEQ ID NO: 91421 - DNA, 19 bp, Homo sapiens
  siRNA target sequence for MGC5347 (NM_024063.1,2011-2029).
ggcaggctttctattttaa

SEQ ID NO: 91422 - DNA, 19 bp, Homo sapiens
  siRNA target sequence for MGC5347 (NM_024063.1,2058-2076).
gcctgatgtctccttagaa

SEQ ID NO: 91423 - DNA, 19 bp, Homo sapiens
  siRNA target sequence for MGC5347 (NM_024063.1,2059-2077).
cctgatgtctccttagaaa

SEQ ID NO: 91424 - DNA, 19 bp, Homo sapiens
  siRNA target sequence for MGC5347 (NM_024063.1,2172-2190).
cgcaactacagtgaaacaa

SEQ ID NO: 91425 - DNA, 19 bp, Homo sapiens
  siRNA target sequence for MGC5347 (NM_024063.1,2218-2236).
gtaaaaccgtcgttaagtt

SEQ ID NO: 91426 - DNA, 19 bp, Homo sapiens
  siRNA target sequence for MGC5347 (NM_024063.1,2238-2256).
caaggacttggctttatat

SEQ ID NO: 91427 - DNA, 19 bp, Homo sapiens
  siRNA target sequence for MGC8407 (NM_024046.2,173-191).
ggcgacaagaagaactata

SEQ ID NO: 91428 - DNA, 19 bp, Homo sapiens
  siRNA target sequence for MGC8407 (NM_024046.2,202-220).
ggaggtgactgacagatat

SEQ ID NO: 91429 - DNA, 19 bp, Homo sapiens
  siRNA target sequence for MGC8407 (NM_024046.2,238-256).
caagactgaggagttttgt

SEQ ID NO: 91430 - DNA, 19 bp, Homo sapiens
  siRNA target sequence for MGC8407 (NM_024046.2,293-311).
ctgcacacctgcaagaagt

SEQ ID NO: 91431 - DNA, 19 bp, Homo sapiens
  siRNA target sequence for MGC8407 (NM_024046.2,420-438).
cccgcaaggagtactttat

SEQ ID NO: 91432 - DNA, 19 bp, Homo sapiens
  siRNA target sequence for MGC8407 (NM_024046.2,422-440).
cgcaaggagtactttatct

SEQ ID NO: 91433 - DNA, 19 bp, Homo sapiens
  siRNA target sequence for MGC8407 (NM_024046.2,762-780).
ccattggagtcatcatgta

SEQ ID NO: 91434 - DNA, 19 bp, Homo sapiens
  siRNA target sequence for MGC8407 (NM_024046.2,795-813).
gcaatccacctttctatga

SEQ ID NO: 91435 - DNA, 19 bp, Homo sapiens
  siRNA target sequence for MGC8407 (NM_024046.2,830-848).
gattatgagaaccatgata

SEQ ID NO: 91436 - DNA, 19 bp, Homo sapiens
  siRNA target sequence for MGC8407 (NM_024046.2,871-889).
ggctggtgactatgagttt

SEQ ID NO: 91437 - DNA, 19 bp, Homo sapiens
  siRNA target sequence for MGC8407 (NM_024046.2,894-912).
ctccatattgggatgatat

SEQ ID NO: 91438 - DNA, 19 bp, Homo sapiens
  siRNA target sequence for MGC8407 (NM_024046.2,896-914).
ccatattgggatgatattt

SEQ ID NO: 91439 - DNA, 19 bp, Homo sapiens
  siRNA target sequence for MGC8407 (NM_024046.2,1016-1034).
gctgcttctgataagaaca

SEQ ID NO: 91440 - DNA, 19 bp, Homo sapiens
  siRNA target sequence for MGC8407 (NM_024046.2,1017-1035).
ctgcttctgataagaacat

SEQ ID NO: 91441 - DNA, 19 bp, Homo sapiens
  siRNA target sequence for MGC8407 (NM_024046.2,1019-1037).
gcttctgataagaacatca

SEQ ID NO: 91442 - DNA, 19 bp, Homo sapiens
  siRNA target sequence for MGC8407 (NM_024046.2,1020-1038).
cttctgataagaacatcaa

SEQ ID NO: 91443 - DNA, 19 bp, Homo sapiens
  siRNA target sequence for MGC8407 (NM_024046.2,1046-1064).
gtctgtgcccagattgaaa

SEQ ID NO: 91444 - DNA, 19 bp, Homo sapiens
  siRNA target sequence for MGC8407 (NM_024046.2,1052-1070).
gcccagattgaaaagaact

SEQ ID NO: 91445 - DNA, 19 bp, Homo sapiens
  siRNA target sequence for MGC8407 (NM_024046.2,1053-1071).
cccagattgaaaagaactt

SEQ ID NO: 91446 - DNA, 19 bp, Homo sapiens
  siRNA target sequence for MGC8407 (NM_024046.2,1054-1072).
ccagattgaaaagaacttt

SEQ ID NO: 91447 - DNA, 19 bp, Homo sapiens
  siRNA target sequence for MGC8407 (NM_024046.2,1266-1284).
ctgcaaagagtgataatgt

SEQ ID NO: 91448 - DNA, 19 bp, Homo sapiens
  siRNA target sequence for MGC8407 (NM_024046.2,1582-1600).
ggctccaccctctagtaaa

SEQ ID NO: 91449 - DNA, 19 bp, Homo sapiens
  siRNA target sequence for MIDORI (NM_020778.1,173-191).
ggtggcttggcttgtctat

SEQ ID NO: 91450 - DNA, 19 bp, Homo sapiens
  siRNA target sequence for MIDORI (NM_020778.1,339-357).
cctcgtggacccctcatat

SEQ ID NO: 91451 - DNA, 19 bp, Homo sapiens
  siRNA target sequence for MIDORI (NM_020778.1,906-924).
cccgagaccagcttatcaa

SEQ ID NO: 91452 - DNA, 19 bp, Homo sapiens
  siRNA target sequence for MIDORI (NM_020778.1,1135-1153).
gtggcttgccaaaatatga

SEQ ID NO: 91453 - DNA, 19 bp, Homo sapiens
  siRNA target sequence for MIDORI (NM_020778.1,1282-1300).
gcaccatgactgagtacaa

SEQ ID NO: 91454 - DNA, 19 bp, Homo sapiens
  siRNA target sequence for MIDORI (NM_020778.1,1311-1329).
cgctggttcgccaagttga

SEQ ID NO: 91455 - DNA, 19 bp, Homo sapiens
  siRNA target sequence for MIDORI (NM_020778.1,1312-1330).
gctggttcgccaagttgaa

SEQ ID NO: 91456 - DNA, 19 bp, Homo sapiens
  siRNA target sequence for MIDORI (NM_020778.1,1641-1659).
catggcttgctgacataca

SEQ ID NO: 91457 - DNA, 19 bp, Homo sapiens
  siRNA target sequence for MIDORI (NM_020778.1,1644-1662).
ggcttgctgacatacatct

SEQ ID NO: 91458 - DNA, 19 bp, Homo sapiens
  siRNA target sequence for MIDORI (NM_020778.1,1751-1769).
cctgcggaagccagagtta

SEQ ID NO: 91459 - DNA, 19 bp, Homo sapiens
  siRNA target sequence for MIDORI (NM_020778.1,1755-1773).
cggaagccagagttagaga

SEQ ID NO: 91460 - DNA, 19 bp, Homo sapiens
  siRNA target sequence for MIDORI (NM_020778.1,1910-1928).
gtcctctggcacagatagt

SEQ ID NO: 91461 - DNA, 19 bp, Homo sapiens
  siRNA target sequence for MIDORI (NM_020778.1,1990-2008).
gcccaggccaggaagtgta

SEQ ID NO: 91462 - DNA, 19 bp, Homo sapiens
  siRNA target sequence for MIDORI (NM_020778.1,1993-2011).
caggccaggaagtgtattt

SEQ ID NO: 91463 - DNA, 19 bp, Homo sapiens
  siRNA target sequence for MIDORI (NM_020778.1,2193-2211).
ccgactaggcctttcaaca

SEQ ID NO: 91464 - DNA, 19 bp, Homo sapiens
  siRNA target sequence for MIDORI (NM_020778.1,2256-2274).
gacagcaagcccatttctt

SEQ ID NO: 91465 - DNA, 19 bp, Homo sapiens
  siRNA target sequence for MIDORI (NM_020778.1,2258-2276).
cagcaagcccatttcttct

SEQ ID NO: 91466 - DNA, 19 bp, Homo sapiens
  siRNA target sequence for MIDORI (NM_020778.1,2506-2524).
cttccggaagtcaaggtat

SEQ ID NO: 91467 - DNA, 19 bp, Homo sapiens
  siRNA target sequence for MIDORI (NM_020778.1,2509-2527).
ccggaagtcaaggtatcat

SEQ ID NO: 91468 - DNA, 19 bp, Homo sapiens
  siRNA target sequence for MIDORI (NM_020778.1,2510-2528).
cggaagtcaaggtatcatt

SEQ ID NO: 91469 - DNA, 19 bp, Homo sapiens
  siRNA target sequence for MIDORI (NM_020778.1,3016-3034).
gagctcctctgaatattga

SEQ ID NO: 91470 - DNA, 19 bp, Homo sapiens
  siRNA target sequence for MIDORI (NM_020778.1,3057-3075).
gggtcttgtttcccaaaaa

SEQ ID NO: 91471 - DNA, 19 bp, Homo sapiens
  siRNA target sequence for MIDORI (NM_020778.1,3124-3142).
ggaaccatgagcaaactgt

SEQ ID NO: 91472 - DNA, 19 bp, Homo sapiens
  siRNA target sequence for MIDORI (NM_020778.1,3477-3495).
gatcaggtcctgatgagtt

SEQ ID NO: 91473 - DNA, 19 bp, Homo sapiens
  siRNA target sequence for MIDORI (NM_020778.1,3630-3648).
gaccctggcctcatagatt

SEQ ID NO: 91474 - DNA, 19 bp, Homo sapiens
  siRNA target sequence for MIDORI (NM_020778.1,4787-4805).
cgtagactgcggtgtgtat

SEQ ID NO: 91475 - DNA, 19 bp, Homo sapiens
  siRNA target sequence for MIDORI (NM_020778.1,5003-5021).
gctccgagggggtggatat

SEQ ID NO: 91476 - DNA, 19 bp, Homo sapiens
  siRNA target sequence for MIDORI (NM_020778.1,5149-5167).
ctcttgtgggcagaaacta

SEQ ID NO: 91477 - DNA, 19 bp, Homo sapiens
  siRNA target sequence for MIDORI (NM_020778.1,5185-5203).
ggtgcaagatccagaacat

SEQ ID NO: 91478 - DNA, 19 bp, Homo sapiens
  siRNA target sequence for MIDORI (NM_020778.1,5206-5224).
gtcgggagtactgcaaaat

SEQ ID NO: 91479 - DNA, 19 bp, Homo sapiens
  siRNA target sequence for MIDORI (NM_020778.1,5208-5226).
cgggagtactgcaaaatct

SEQ ID NO: 91480 - DNA, 19 bp, Homo sapiens
  siRNA target sequence for MIDORI (NM_020778.1,5209-5227).
gggagtactgcaaaatctt

SEQ ID NO: 91481 - DNA, 19 bp, Homo sapiens
  siRNA target sequence for MIDORI (NM_020778.1,5294-5312).
ctaccggcctgcaaacaat

SEQ ID NO: 91482 - DNA, 19 bp, Homo sapiens
  siRNA target sequence for MIDORI (NM_020778.1,5450-5468).
gctgtatcagtggacaaat

SEQ ID NO: 91483 - DNA, 19 bp, Homo sapiens
  siRNA target sequence for MKI67 (NM_002417.2,207-225).
cgagacgcctggttactat

SEQ ID NO: 91484 - DNA, 19 bp, Homo sapiens
  siRNA target sequence for MKI67 (NM_002417.2,210-228).
gacgcctggttactatcaa

SEQ ID NO: 91485 - DNA, 19 bp, Homo sapiens
  siRNA target sequence for MKI67 (NM_002417.2,212-230).
cgcctggttactatcaaaa

SEQ ID NO: 91486 - DNA, 19 bp, Homo sapiens
  siRNA target sequence for MKI67 (NM_002417.2,280-298).
gtttggaaggggtattgaa

SEQ ID NO: 91487 - DNA, 19 bp, Homo sapiens
  siRNA target sequence for MKI67 (NM_002417.2,285-303).
gaaggggtattgaatgtga

SEQ ID NO: 91488 - DNA, 19 bp, Homo sapiens
  siRNA target sequence for MKI67 (NM_002417.2,316-334).
gcttcctgttgtgtcaaaa

SEQ ID NO: 91489 - DNA, 19 bp, Homo sapiens
  siRNA target sequence for MKI67 (NM_002417.2,364-382).
ggaggcaatattacataat

SEQ ID NO: 91490 - DNA, 19 bp, Homo sapiens
  siRNA target sequence for MKI67 (NM_002417.2,368-386).
gcaatattacataatttca

SEQ ID NO: 91491 - DNA, 19 bp, Homo sapiens
  siRNA target sequence for MKI67 (NM_002417.2,404-422).
caagtaaatgggtctgtta

SEQ ID NO: 91492 - DNA, 19 bp, Homo sapiens
  siRNA target sequence for MKI67 (NM_002417.2,430-448).
gcctgtacggctaaaacat

SEQ ID NO: 91493 - DNA, 19 bp, Homo sapiens
  siRNA target sequence for MKI67 (NM_002417.2,473-491).
cgttccttcaggtatgaaa

SEQ ID NO: 91494 - DNA, 19 bp, Homo sapiens
  siRNA target sequence for MKI67 (NM_002417.2,509-527).
ggaaggaagtcaactgaat

SEQ ID NO: 91495 - DNA, 19 bp, Homo sapiens
  siRNA target sequence for MKI67 (NM_002417.2,510-528).
gaaggaagtcaactgaatt

SEQ ID NO: 91496 - DNA, 19 bp, Homo sapiens
  siRNA target sequence for MKI67 (NM_002417.2,557-575).
gcacgtcgtgtctcaagat

SEQ ID NO: 91497 - DNA, 19 bp, Homo sapiens
  siRNA target sequence for MKI67 (NM_002417.2,560-578).
cgtcgtgtctcaagatcta

SEQ ID NO: 91498 - DNA, 19 bp, Homo sapiens
  siRNA target sequence for MKI67 (NM_002417.2,1282-1300).
gaacaaagacctgtatact

SEQ ID NO: 91499 - DNA, 19 bp, Homo sapiens
  siRNA target sequence for MKI67 (NM_002417.2,1294-1312).
gtatactactggtagaaga

SEQ ID NO: 91500 - DNA, 19 bp, Homo sapiens
  siRNA target sequence for MKI67 (NM_002417.2,1345-1363).
caaggctggtgataaaact

SEQ ID NO: 91501 - DNA, 19 bp, Homo sapiens
  siRNA target sequence for MKI67 (NM_002417.2,1348-1366).
ggctggtgataaaactctt

SEQ ID NO: 91502 - DNA, 19 bp, Homo sapiens
  siRNA target sequence for MKI67 (NM_002417.2,1493-1511).
ctgcctacggaaactgaaa

SEQ ID NO: 91503 - DNA, 19 bp, Homo sapiens
  siRNA target sequence for MKI67 (NM_002417.2,1495-1513).
gcctacggaaactgaaatt

SEQ ID NO: 91504 - DNA, 19 bp, Homo sapiens
  siRNA target sequence for MKI67 (NM_002417.2,1516-1534).
caatgagccatttttaact

SEQ ID NO: 91505 - DNA, 19 bp, Homo sapiens
  siRNA target sequence for MKI67 (NM_002417.2,1634-1652).
ggtcttagttcagttgata

SEQ ID NO: 91506 - DNA, 19 bp, Homo sapiens
  siRNA target sequence for MKI67 (NM_002417.2,1637-1655).
cttagttcagttgatatca

SEQ ID NO: 91507 - DNA, 19 bp, Homo sapiens
  siRNA target sequence for MKI67 (NM_002417.2,1641-1659).
gttcagttgatatcaacaa

SEQ ID NO: 91508 - DNA, 19 bp, Homo sapiens
  siRNA target sequence for MKI67 (NM_002417.2,1683-1701).
gtgagggaatacctttgaa

SEQ ID NO: 91509 - DNA, 19 bp, Homo sapiens
  siRNA target sequence for MKI67 (NM_002417.2,1685-1703).
gagggaatacctttgaaaa

SEQ ID NO: 91510 - DNA, 19 bp, Homo sapiens
  siRNA target sequence for MKI67 (NM_002417.2,1763-1781).
cctaatacgcctctcaaaa

SEQ ID NO: 91511 - DNA, 19 bp, Homo sapiens
  siRNA target sequence for MKI67 (NM_002417.2,1913-1931).
gcacaaagcttggttataa

SEQ ID NO: 91512 - DNA, 19 bp, Homo sapiens
  siRNA target sequence for MKI67 (NM_002417.2,1979-1997).
cgccgtaggtcctgcaaaa

SEQ ID NO: 91513 - DNA, 19 bp, Homo sapiens
  siRNA target sequence for MKI67 (NM_002417.2,1981-1999).
ccgtaggtcctgcaaaaca

SEQ ID NO: 91514 - DNA, 19 bp, Homo sapiens
  siRNA target sequence for MKI67 (NM_002417.2,2026-2044).
gacagaggttcctaagaga

SEQ ID NO: 91515 - DNA, 19 bp, Homo sapiens
  siRNA target sequence for MKI67 (NM_002417.2,2083-2101).
gtctatcagccgaagtcaa

SEQ ID NO: 91516 - DNA, 19 bp, Homo sapiens
  siRNA target sequence for MKI67 (NM_002417.2,2091-2109).
gccgaagtcaacatgatat

SEQ ID NO: 91517 - DNA, 19 bp, Homo sapiens
  siRNA target sequence for MKI67 (NM_002417.2,2092-2110).
ccgaagtcaacatgatatt

SEQ ID NO: 91518 - DNA, 19 bp, Homo sapiens
  siRNA target sequence for MKI67 (NM_002417.2,2094-2112).
gaagtcaacatgatatttt

SEQ ID NO: 91519 - DNA, 19 bp, Homo sapiens
  siRNA target sequence for MKI67 (NM_002417.2,2097-2115).
gtcaacatgatattttaca

SEQ ID NO: 91520 - DNA, 19 bp, Homo sapiens
  siRNA target sequence for MKI67 (NM_002417.2,2116-2134).
gatgatatgttccaaaaga

SEQ ID NO: 91521 - DNA, 19 bp, Homo sapiens
  siRNA target sequence for MKI67 (NM_002417.2,2144-2162).
gcttcggaagcaaatctga

SEQ ID NO: 91522 - DNA, 19 bp, Homo sapiens
  siRNA target sequence for MKI67 (NM_002417.2,2148-2166).
cggaagcaaatctgattgt

SEQ ID NO: 91523 - DNA, 19 bp, Homo sapiens
  siRNA target sequence for MKI67 (NM_002417.2,2178-2196).
gggcagatgtagtaaaact

SEQ ID NO: 91524 - DNA, 19 bp, Homo sapiens
  siRNA target sequence for MKI67 (NM_002417.2,2211-2229).
cacaaactaaagtcataaa

SEQ ID NO: 91525 - DNA, 19 bp, Homo sapiens
  siRNA target sequence for MKI67 (NM_002417.2,2235-2253).
gtcctcaaaggtcaatgaa

SEQ ID NO: 91526 - DNA, 19 bp, Homo sapiens
  siRNA target sequence for MKI67 (NM_002417.2,2294-2312).
ggcgaagttcacagtcaat

SEQ ID NO: 91527 - DNA, 19 bp, Homo sapiens
  siRNA target sequence for MKI67 (NM_002417.2,2295-2313).
gcgaagttcacagtcaatt

SEQ ID NO: 91528 - DNA, 19 bp, Homo sapiens
  siRNA target sequence for MKI67 (NM_002417.2,2300-2318).
gttcacagtcaatttagta

SEQ ID NO: 91529 - DNA, 19 bp, Homo sapiens
  siRNA target sequence for MKI67 (NM_002417.2,2354-2372).
gggaaagctcatactgaaa

SEQ ID NO: 91530 - DNA, 19 bp, Homo sapiens
  siRNA target sequence for MKI67 (NM_002417.2,2405-2423).
ctcaacaacttcatttcca

SEQ ID NO: 91531 - DNA, 19 bp, Homo sapiens
  siRNA target sequence for MKI67 (NM_002417.2,2434-2452).
ggactttaaggaagatctt

SEQ ID NO: 91532 - DNA, 19 bp, Homo sapiens
  siRNA target sequence for MKI67 (NM_002417.2,2457-2475).
gaatagctgaaatgttcaa

SEQ ID NO: 91533 - DNA, 19 bp, Homo sapiens
  siRNA target sequence for MKI67 (NM_002417.2,2489-2507).
gagcaaccgcagttgacaa

SEQ ID NO: 91534 - DNA, 19 bp, Homo sapiens
  siRNA target sequence for MKI67 (NM_002417.2,2514-2532).
gtcacatcgctatttcaaa

SEQ ID NO: 91535 - DNA, 19 bp, Homo sapiens
  siRNA target sequence for MKI67 (NM_002417.2,2516-2534).
cacatcgctatttcaaatt

SEQ ID NO: 91536 - DNA, 19 bp, Homo sapiens
  siRNA target sequence for MKI67 (NM_002417.2,2518-2536).
catcgctatttcaaattca

SEQ ID NO: 91537 - DNA, 19 bp, Homo sapiens
  siRNA target sequence for MKI67 (NM_002417.2,2593-2611).
ccccacctcagagagtttt

SEQ ID NO: 91538 - DNA, 19 bp, Homo sapiens
  siRNA target sequence for MKI67 (NM_002417.2,2623-2641).
gttcttcagtgcacagaat

SEQ ID NO: 91539 - DNA, 19 bp, Homo sapiens
  siRNA target sequence for MKI67 (NM_002417.2,2688-2706).
gacggcagtgtattagaga

SEQ ID NO: 91540 - DNA, 19 bp, Homo sapiens
  siRNA target sequence for MKI67 (NM_002417.2,2829-2847).
ctacagagttcaggaatat

SEQ ID NO: 91541 - DNA, 19 bp, Homo sapiens
  siRNA target sequence for MKI67 (NM_002417.2,2923-2941).
gaaggcaacactactacaa

SEQ ID NO: 91542 - DNA, 19 bp, Homo sapiens
  siRNA target sequence for MKI67 (NM_002417.2,2926-2944).
ggcaacactactacaacaa

SEQ ID NO: 91543 - DNA, 19 bp, Homo sapiens
  siRNA target sequence for MKI67 (NM_002417.2,3100-3118).
gagcttgcctgatacagaa

SEQ ID NO: 91544 - DNA, 19 bp, Homo sapiens
  siRNA target sequence for MKI67 (NM_002417.2,3188-3206).
gagaaaggcaaaatcacta

SEQ ID NO: 91545 - DNA, 19 bp, Homo sapiens
  siRNA target sequence for MKI67 (NM_002417.2,3222-3240).
cattacaaccagaaccaat

SEQ ID NO: 91546 - DNA, 19 bp, Homo sapiens
  siRNA target sequence for MKI67 (NM_002417.2,3435-3453).
cccgtgtaactggaatgaa

SEQ ID NO: 91547 - DNA, 19 bp, Homo sapiens
  siRNA target sequence for MKI67 (NM_002417.2,3437-3455).
cgtgtaactggaatgaaga

SEQ ID NO: 91548 - DNA, 19 bp, Homo sapiens
  siRNA target sequence for MKI67 (NM_002417.2,3438-3456).
gtgtaactggaatgaagaa

SEQ ID NO: 91549 - DNA, 19 bp, Homo sapiens
  siRNA target sequence for MKI67 (NM_002417.2,3900-3918).
gtcacaccgaggaattagt

SEQ ID NO: 91550 - DNA, 19 bp, Homo sapiens
  siRNA target sequence for MKI67 (NM_002417.2,3995-4013).
caacgacccaagagaagta

SEQ ID NO: 91551 - DNA, 19 bp, Homo sapiens
  siRNA target sequence for MKI67 (NM_002417.2,3998-4016).
cgacccaagagaagtatca

SEQ ID NO: 91552 - DNA, 19 bp, Homo sapiens
  siRNA target sequence for MKI67 (NM_002417.2,4042-4060).
cttagcgtgcaggaatcta

SEQ ID NO: 91553 - DNA, 19 bp, Homo sapiens
  siRNA target sequence for MKI67 (NM_002417.2,4255-4273).
ccagacccctggtcatact

SEQ ID NO: 91554 - DNA, 19 bp, Homo sapiens
  siRNA target sequence for MKI67 (NM_002417.2,4258-4276).
gacccctggtcatactgaa

SEQ ID NO: 91555 - DNA, 19 bp, Homo sapiens
  siRNA target sequence for MKI67 (NM_002417.2,4743-4761).
ggaaagtggacgtagaaga

SEQ ID NO: 91556 - DNA, 19 bp, Homo sapiens
  siRNA target sequence for MKI67 (NM_002417.2,4748-4766).
gtggacgtagaagaagaat

SEQ ID NO: 91557 - DNA, 19 bp, Homo sapiens
  siRNA target sequence for MKI67 (NM_002417.2,5204-5222).
ggtaagagcatgaaagcat

SEQ ID NO: 91558 - DNA, 19 bp, Homo sapiens
  siRNA target sequence for MKI67 (NM_002417.2,6343-6361).
gctggacccagcaaactat

SEQ ID NO: 91559 - DNA, 19 bp, Homo sapiens
  siRNA target sequence for MKI67 (NM_002417.2,6879-6897).
cagtgggtaccccaacaat

SEQ ID NO: 91560 - DNA, 19 bp, Homo sapiens
  siRNA target sequence for MKI67 (NM_002417.2,6884-6902).
ggtaccccaacaatcttca

SEQ ID NO: 91561 - DNA, 19 bp, Homo sapiens
  siRNA target sequence for MKI67 (NM_002417.2,7595-7613).
ccacagccagagtcattca

SEQ ID NO: 91562 - DNA, 19 bp, Homo sapiens
  siRNA target sequence for MKI67 (NM_002417.2,7601-7619).
ccagagtcattcaaaacct

SEQ ID NO: 91563 - DNA, 19 bp, Homo sapiens
  siRNA target sequence for MKI67 (NM_002417.2,7713-7731).
gggagactacgcaaacaca

SEQ ID NO: 91564 - DNA, 19 bp, Homo sapiens
  siRNA target sequence for MKI67 (NM_002417.2,7911-7929).
ctgaagagtcaatgactat

SEQ ID NO: 91565 - DNA, 19 bp, Homo sapiens
  siRNA target sequence for MKI67 (NM_002417.2,7985-8003).
gccacgagcacaaagagat

SEQ ID NO: 91566 - DNA, 19 bp, Homo sapiens
  siRNA target sequence for MKI67 (NM_002417.2,8054-8072).
gagaggctcacgcaaacat

SEQ ID NO: 91567 - DNA, 19 bp, Homo sapiens
  siRNA target sequence for MKI67 (NM_002417.2,8056-8074).
gaggctcacgcaaacatca

SEQ ID NO: 91568 - DNA, 19 bp, Homo sapiens
  siRNA target sequence for MKI67 (NM_002417.2,8110-8128).
cggtgatgagggcatcaaa

SEQ ID NO: 91569 - DNA, 19 bp, Homo sapiens
  siRNA target sequence for MKI67 (NM_002417.2,8414-8432).
gtcaagttcacacaaacat

SEQ ID NO: 91570 - DNA, 19 bp, Homo sapiens
  siRNA target sequence for MKI67 (NM_002417.2,8671-8689).
caaatcatcaccagaacta

SEQ ID NO: 91571 - DNA, 19 bp, Homo sapiens
  siRNA target sequence for MKI67 (NM_002417.2,8727-8745).
cacgtgcccagaaagtaga

SEQ ID NO: 91572 - DNA, 19 bp, Homo sapiens
  siRNA target sequence for MKI67 (NM_002417.2,8799-8817).
ccacgcacaccgacaaaga

SEQ ID NO: 91573 - DNA, 19 bp, Homo sapiens
  siRNA target sequence for MKI67 (NM_002417.2,8838-8856).
gcacgaaagcatttaagca

SEQ ID NO: 91574 - DNA, 19 bp, Homo sapiens
  siRNA target sequence for MKI67 (NM_002417.2,8875-8893).
ggacgcagaagatgtaatt

SEQ ID NO: 91575 - DNA, 19 bp, Homo sapiens
  siRNA target sequence for MKI67 (NM_002417.2,8959-8977).
ccaagagctctctcaaaca

SEQ ID NO: 91576 - DNA, 19 bp, Homo sapiens
  siRNA target sequence for MKI67 (NM_002417.2,9005-9023).
ggtgctgctgatagcttta

SEQ ID NO: 91577 - DNA, 19 bp, Homo sapiens
  siRNA target sequence for MKI67 (NM_002417.2,9243-9261).
cagcaccagaggaaattgt

SEQ ID NO: 91578 - DNA, 19 bp, Homo sapiens
  siRNA target sequence for MKI67 (NM_002417.2,9301-9319).
cagggcaagaggcaaatca

SEQ ID NO: 91579 - DNA, 19 bp, Homo sapiens
  siRNA target sequence for MKI67 (NM_002417.2,9321-9339).
ccgaacccgtggtcatcat

SEQ ID NO: 91580 - DNA, 19 bp, Homo sapiens
  siRNA target sequence for MKI67 (NM_002417.2,9520-9538).
ctttgtattagcagaaaga

SEQ ID NO: 91581 - DNA, 19 bp, Homo sapiens
  siRNA target sequence for MKI67 (NM_002417.2,9579-9597).
ccccagagatggacattca

SEQ ID NO: 91582 - DNA, 19 bp, Homo sapiens
  siRNA target sequence for MKI67 (NM_002417.2,9614-9632).
gcccggaaacccataccta

SEQ ID NO: 91583 - DNA, 19 bp, Homo sapiens
  siRNA target sequence for MKI67 (NM_002417.2,9624-9642).
ccatacctagagacaaagt

SEQ ID NO: 91584 - DNA, 19 bp, Homo sapiens
  siRNA target sequence for MKI67 (NM_002417.2,9641-9659).
gtcactgagaacaaaaggt

SEQ ID NO: 91585 - DNA, 19 bp, Homo sapiens
  siRNA target sequence for MKI67 (NM_002417.2,9664-9682).
gaggtctgctagacagaat

SEQ ID NO: 91586 - DNA, 19 bp, Homo sapiens
  siRNA target sequence for MKI67 (NM_002417.2,9666-9684).
ggtctgctagacagaatga

SEQ ID NO: 91587 - DNA, 19 bp, Homo sapiens
  siRNA target sequence for MKI67 (NM_002417.2,9832-9850).
cactttggagagcaaatct

SEQ ID NO: 91588 - DNA, 19 bp, Homo sapiens
  siRNA target sequence for MKI67 (NM_002417.2,9834-9852).
ctttggagagcaaatctgt

SEQ ID NO: 91589 - DNA, 19 bp, Homo sapiens
  siRNA target sequence for MKKS (NM_018848.2,903-921).
gctaagaagccatcattgt

SEQ ID NO: 91590 - DNA, 19 bp, Homo sapiens
  siRNA target sequence for MKKS (NM_018848.2,969-987).
gtcttgaaaagaattgtaa

SEQ ID NO: 91591 - DNA, 19 bp, Homo sapiens
  siRNA target sequence for MKKS (NM_018848.2,1038-1056).
ggaggttacgtgtgtacaa

SEQ ID NO: 91592 - DNA, 19 bp, Homo sapiens
  siRNA target sequence for MKKS (NM_018848.2,1140-1158).
gtgtcaagcttcagtgatt

SEQ ID NO: 91593 - DNA, 19 bp, Homo sapiens
  siRNA target sequence for MKKS (NM_018848.2,1183-1201).
gctgcaacctgattgaaaa

SEQ ID NO: 91594 - DNA, 19 bp, Homo sapiens
  siRNA target sequence for MKKS (NM_018848.2,1186-1204).
gcaacctgattgaaaatgt

SEQ ID NO: 91595 - DNA, 19 bp, Homo sapiens
  siRNA target sequence for MKKS (NM_018848.2,1220-1238).
gacacccaccactgtcatt

SEQ ID NO: 91596 - DNA, 19 bp, Homo sapiens
  siRNA target sequence for MKKS (NM_018848.2,1224-1242).
cccaccactgtcattagat

SEQ ID NO: 91597 - DNA, 19 bp, Homo sapiens
  siRNA target sequence for MKKS (NM_018848.2,1225-1243).
ccaccactgtcattagatt

SEQ ID NO: 91598 - DNA, 19 bp, Homo sapiens
  siRNA target sequence for MKKS (NM_018848.2,1259-1277).
gagtctttgcatcagttat

SEQ ID NO: 91599 - DNA, 19 bp, Homo sapiens
  siRNA target sequence for MKKS (NM_018848.2,1261-1279).
gtctttgcatcagttatct

SEQ ID NO: 91600 - DNA, 19 bp, Homo sapiens
  siRNA target sequence for MKKS (NM_018848.2,1307-1325).
cccagtggactttagtagt

SEQ ID NO: 91601 - DNA, 19 bp, Homo sapiens
  siRNA target sequence for MKKS (NM_018848.2,1342-1360).
gtttggtgcgtagtatatt

SEQ ID NO: 91602 - DNA, 19 bp, Homo sapiens
  siRNA target sequence for MKKS (NM_018848.2,1347-1365).
gtgcgtagtatattaacaa

SEQ ID NO: 91603 - DNA, 19 bp, Homo sapiens
  siRNA target sequence for MKKS (NM_018848.2,1349-1367).
gcgtagtatattaacaagt

SEQ ID NO: 91604 - DNA, 19 bp, Homo sapiens
  siRNA target sequence for MKKS (NM_018848.2,1350-1368).
cgtagtatattaacaagta

SEQ ID NO: 91605 - DNA, 19 bp, Homo sapiens
  siRNA target sequence for MKKS (NM_018848.2,1351-1369).
gtagtatattaacaagtaa

SEQ ID NO: 91606 - DNA, 19 bp, Homo sapiens
  siRNA target sequence for MKKS (NM_018848.2,1422-1440).
ctgagagcctttttgctta

SEQ ID NO: 91607 - DNA, 19 bp, Homo sapiens
  siRNA target sequence for MKKS (NM_018848.2,1426-1444).
gagcctttttgcttacaat

SEQ ID NO: 91608 - DNA, 19 bp, Homo sapiens
  siRNA target sequence for MKKS (NM_018848.2,1455-1473).
gctgaaggccacatcattt

SEQ ID NO: 91609 - DNA, 19 bp, Homo sapiens
  siRNA target sequence for MKKS (NM_018848.2,1461-1479).
ggccacatcattttaggaa

SEQ ID NO: 91610 - DNA, 19 bp, Homo sapiens
  siRNA target sequence for MKKS (NM_018848.2,1462-1480).
gccacatcattttaggaaa

SEQ ID NO: 91611 - DNA, 19 bp, Homo sapiens
  siRNA target sequence for MKKS (NM_018848.2,1527-1545).
gtattacctgggatactca

SEQ ID NO: 91612 - DNA, 19 bp, Homo sapiens
  siRNA target sequence for MKKS (NM_018848.2,1533-1551).
cctgggatactcattgaaa

SEQ ID NO: 91613 - DNA, 19 bp, Homo sapiens
  siRNA target sequence for MKKS (NM_018848.2,1534-1552).
ctgggatactcattgaaat

SEQ ID NO: 91614 - DNA, 19 bp, Homo sapiens
  siRNA target sequence for MKKS (NM_018848.2,1536-1554).
gggatactcattgaaatgt

SEQ ID NO: 91615 - DNA, 19 bp, Homo sapiens
  siRNA target sequence for MKKS (NM_018848.2,1571-1589).
gaggctattacctatcaaa

SEQ ID NO: 91616 - DNA, 19 bp, Homo sapiens
  siRNA target sequence for MKKS (NM_018848.2,1573-1591).
ggctattacctatcaaaaa

SEQ ID NO: 91617 - DNA, 19 bp, Homo sapiens
  siRNA target sequence for MKKS (NM_018848.2,1607-1625).
ggtggcactcttttgtaca

SEQ ID NO: 91618 - DNA, 19 bp, Homo sapiens
  siRNA target sequence for MKKS (NM_018848.2,1608-1626).
gtggcactcttttgtacaa

SEQ ID NO: 91619 - DNA, 19 bp, Homo sapiens
  siRNA target sequence for MKKS (NM_018848.2,1610-1628).
ggcactcttttgtacaact

SEQ ID NO: 91620 - DNA, 19 bp, Homo sapiens
  siRNA target sequence for MKKS (NM_018848.2,1612-1630).
cactcttttgtacaacttt

SEQ ID NO: 91621 - DNA, 19 bp, Homo sapiens
  siRNA target sequence for MKKS (NM_018848.2,1614-1632).
ctcttttgtacaactttat

SEQ ID NO: 91622 - DNA, 19 bp, Homo sapiens
  siRNA target sequence for MKKS (NM_018848.2,1682-1700).
ggtttctcttgaaaatgca

SEQ ID NO: 91623 - DNA, 19 bp, Homo sapiens
  siRNA target sequence for MKKS (NM_018848.2,1706-1724).
ggaccagctgcttaaccta

SEQ ID NO: 91624 - DNA, 19 bp, Homo sapiens
  siRNA target sequence for MKKS (NM_018848.2,1739-1757).
cagtgaccacgtagatctt

SEQ ID NO: 91625 - DNA, 19 bp, Homo sapiens
  siRNA target sequence for MKKS (NM_018848.2,1741-1759).
gtgaccacgtagatcttgt

SEQ ID NO: 91626 - DNA, 19 bp, Homo sapiens
  siRNA target sequence for MKKS (NM_018848.2,1758-1776).
gtcctgtgccaaaaagtta

SEQ ID NO: 91627 - DNA, 19 bp, Homo sapiens
  siRNA target sequence for MKKS (NM_018848.2,1812-1830).
cgtattattgccatagaca

SEQ ID NO: 91628 - DNA, 19 bp, Homo sapiens
  siRNA target sequence for MKKS (NM_018848.2,1872-1890).
ggaacacagcctattggat

SEQ ID NO: 91629 - DNA, 19 bp, Homo sapiens
  siRNA target sequence for MKKS (NM_018848.2,1896-1914).
ggctcaatatgtcctaata

SEQ ID NO: 91630 - DNA, 19 bp, Homo sapiens
  siRNA target sequence for MKKS (NM_018848.2,1932-1950).
gatgtgtgcactgcaaaat

SEQ ID NO: 91631 - DNA, 19 bp, Homo sapiens
  siRNA target sequence for MKKS (NM_018848.2,2069-2087).
gcatgtcctgcagttaaca

SEQ ID NO: 91632 - DNA, 19 bp, Homo sapiens
  siRNA target sequence for MKKS (NM_018848.2,2165-2183).
caacgacccagaaagcatt

SEQ ID NO: 91633 - DNA, 19 bp, Homo sapiens
  siRNA target sequence for MKKS (NM_018848.2,2169-2187).
gacccagaaagcattctca

SEQ ID NO: 91634 - DNA, 19 bp, Homo sapiens
  siRNA target sequence for MKKS (NM_018848.2,2186-2204).
caaagatgatgaatgtact

SEQ ID NO: 91635 - DNA, 19 bp, Homo sapiens
  siRNA target sequence for MKKS (NM_018848.2,2190-2208).
gatgatgaatgtactcaaa

SEQ ID NO: 91636 - DNA, 19 bp, Homo sapiens
  siRNA target sequence for MKKS (NM_018848.2,2200-2218).
gtactcaaacagaacttca

SEQ ID NO: 91637 - DNA, 19 bp, Homo sapiens
  siRNA target sequence for MKKS (NM_018848.2,2203-2221).
ctcaaacagaacttcaatt

SEQ ID NO: 91638 - DNA, 19 bp, Homo sapiens
  siRNA target sequence for MKKS (NM_018848.2,2205-2223).
caaacagaacttcaattaa

SEQ ID NO: 91639 - DNA, 19 bp, Homo sapiens
  siRNA target sequence for MKKS (NM_018848.2,2254-2272).
ctgttgttggctctttaga

SEQ ID NO: 91640 - DNA, 19 bp, Homo sapiens
  siRNA target sequence for MKKS (NM_018848.2,2350-2368).
ctaactggccagatttgct

SEQ ID NO: 91641 - DNA, 19 bp, Homo sapiens
  siRNA target sequence for MKKS (NM_018848.2,2377-2395).
gtggctgtggattatacaa

SEQ ID NO: 91642 - DNA, 19 bp, Homo sapiens
  siRNA target sequence for MKKS (NM_018848.2,2379-2397).
ggctgtggattatacaata

SEQ ID NO: 91643 - DNA, 19 bp, Homo sapiens
  siRNA target sequence for MKKS (NM_018848.2,2411-2429).
caactggtctttcttaaga

SEQ ID NO: 91644 - DNA, 19 bp, Homo sapiens
  siRNA target sequence for MKKS (NM_018848.2,2431-2449).
gcacacgtcgtccatttgt

SEQ ID NO: 91645 - DNA, 19 bp, Homo sapiens
  siRNA target sequence for MKKS (NM_018848.2,2496-2514).
ctgaccttggactgtttga

SEQ ID NO: 91646 - DNA, 19 bp, Homo sapiens
  siRNA target sequence for MKKS (NM_018848.2,2498-2516).
gaccttggactgtttgact

SEQ ID NO: 91647 - DNA, 19 bp, Homo sapiens
  siRNA target sequence for MKKS (NM_018848.2,2544-2562).
gtagagacagccaatttga

SEQ ID NO: 91648 - DNA, 19 bp, Homo sapiens
  siRNA target sequence for MKKS (NM_018848.2,2567-2585).
ggatctttcatatgttatt

SEQ ID NO: 91649 - DNA, 19 bp, Homo sapiens
  siRNA target sequence for MKNK1 (NM_003684.3,278-296).
ctccttgccaggaaagttt

SEQ ID NO: 91650 - DNA, 19 bp, Homo sapiens
  siRNA target sequence for MKNK1 (NM_003684.3,289-307).
gaaagtttgaagatatgta

SEQ ID NO: 91651 - DNA, 19 bp, Homo sapiens
  siRNA target sequence for MKNK1 (NM_003684.3,337-355).
gagcctatgccaaagttca

SEQ ID NO: 91652 - DNA, 19 bp, Homo sapiens
  siRNA target sequence for MKNK1 (NM_003684.3,545-563).
gcaaggaggttccatctta

SEQ ID NO: 91653 - DNA, 19 bp, Homo sapiens
  siRNA target sequence for MKNK1 (NM_003684.3,575-593).
gaagcaaaagcacttcaat

SEQ ID NO: 91654 - DNA, 19 bp, Homo sapiens
  siRNA target sequence for MKNK1 (NM_003684.3,644-662).
cctgcataccaaagacaaa

SEQ ID NO: 91655 - DNA, 19 bp, Homo sapiens
  siRNA target sequence for MKNK1 (NM_003684.3,648-666).
cataccaaagacaaagtct

SEQ ID NO: 91656 - DNA, 19 bp, Homo sapiens
  siRNA target sequence for MKNK1 (NM_003684.3,820-838).
gtgaatctccagaaaaggt

SEQ ID NO: 91657 - DNA, 19 bp, Homo sapiens
  siRNA target sequence for MKNK1 (NM_003684.3,839-857).
gtctccagtgaaaatctgt

SEQ ID NO: 91658 - DNA, 19 bp, Homo sapiens
  siRNA target sequence for MKNK1 (NM_003684.3,866-884).
cttgggcagtgggatgaaa

SEQ ID NO: 91659 - DNA, 19 bp, Homo sapiens
  siRNA target sequence for MKNK1 (NM_003684.3,979-997).
cggaccaggccacattcta

SEQ ID NO: 91660 - DNA, 19 bp, Homo sapiens
  siRNA target sequence for MKNK1 (NM_003684.3,1114-1132).
gcagggtgtgccagaacaa

SEQ ID NO: 91661 - DNA, 19 bp, Homo sapiens
  siRNA target sequence for MKNK2 (NM_017572.2,659-677).
gtcctagagctgattgagt

SEQ ID NO: 91662 - DNA, 19 bp, Homo sapiens
  siRNA target sequence for MKNK2 (NM_017572.2,814-832).
ggactttctgcataacaaa

SEQ ID NO: 91663 - DNA, 19 bp, Homo sapiens
  siRNA target sequence for MKNK2 (NM_017572.2,890-908).
gtctcccccgtgaagatct

SEQ ID NO: 91664 - DNA, 19 bp, Homo sapiens
  siRNA target sequence for MKNK2 (NM_017572.2,987-1005).
gcggctcggcggagtacat

SEQ ID NO: 91665 - DNA, 19 bp, Homo sapiens
  siRNA target sequence for MLH1 (NM_000249.2,140-158).
ggccagctaatgctatcaa

SEQ ID NO: 91666 - DNA, 19 bp, Homo sapiens
  siRNA target sequence for MLH1 (NM_000249.2,160-178).
gagatgattgagaactgtt

SEQ ID NO: 91667 - DNA, 19 bp, Homo sapiens
  siRNA target sequence for MLH1 (NM_000249.2,165-183).
gattgagaactgtttagat

SEQ ID NO: 91668 - DNA, 19 bp, Homo sapiens
  siRNA target sequence for MLH1 (NM_000249.2,197-215).
gtattcaagtgattgttaa

SEQ ID NO: 91669 - DNA, 19 bp, Homo sapiens
  siRNA target sequence for MLH1 (NM_000249.2,221-239).
gaggcctgaagttgattca

SEQ ID NO: 91670 - DNA, 19 bp, Homo sapiens
  siRNA target sequence for MLH1 (NM_000249.2,292-310).
gaaaggttcactactagta

SEQ ID NO: 91671 - DNA, 19 bp, Homo sapiens
  siRNA target sequence for MLH1 (NM_000249.2,296-314).
ggttcactactagtaaact

SEQ ID NO: 91672 - DNA, 19 bp, Homo sapiens
  siRNA target sequence for MLH1 (NM_000249.2,315-333).
gcagtcctttgaggattta

SEQ ID NO: 91673 - DNA, 19 bp, Homo sapiens
  siRNA target sequence for MLH1 (NM_000249.2,328-346).
gatttagccagtatttcta

SEQ ID NO: 91674 - DNA, 19 bp, Homo sapiens
  siRNA target sequence for MLH1 (NM_000249.2,384-402).
ccatgtggctcatgttact

SEQ ID NO: 91675 - DNA, 19 bp, Homo sapiens
  siRNA target sequence for MLH1 (NM_000249.2,385-403).
catgtggctcatgttacta

SEQ ID NO: 91676 - DNA, 19 bp, Homo sapiens
  siRNA target sequence for MLH1 (NM_000249.2,388-406).
gtggctcatgttactatta

SEQ ID NO: 91677 - DNA, 19 bp, Homo sapiens
  siRNA target sequence for MLH1 (NM_000249.2,390-408).
ggctcatgttactattaca

SEQ ID NO: 91678 - DNA, 19 bp, Homo sapiens
  siRNA target sequence for MLH1 (NM_000249.2,391-409).
gctcatgttactattacaa

SEQ ID NO: 91679 - DNA, 19 bp, Homo sapiens
  siRNA target sequence for MLH1 (NM_000249.2,397-415).
gttactattacaacgaaaa

SEQ ID NO: 91680 - DNA, 19 bp, Homo sapiens
  siRNA target sequence for MLH1 (NM_000249.2,431-449).
gtgcatacagagcaagtta

SEQ ID NO: 91681 - DNA, 19 bp, Homo sapiens
  siRNA target sequence for MLH1 (NM_000249.2,510-528).
cacggtggaggaccttttt

SEQ ID NO: 91682 - DNA, 19 bp, Homo sapiens
  siRNA target sequence for MLH1 (NM_000249.2,512-530).
cggtggaggacctttttta

SEQ ID NO: 91683 - DNA, 19 bp, Homo sapiens
  siRNA target sequence for MLH1 (NM_000249.2,517-535).
gaggaccttttttacaaca

SEQ ID NO: 91684 - DNA, 19 bp, Homo sapiens
  siRNA target sequence for MLH1 (NM_000249.2,625-643).
ggcattagtttctcagtta

SEQ ID NO: 91685 - DNA, 19 bp, Homo sapiens
  siRNA target sequence for MLH1 (NM_000249.2,655-673).
gagacagtagctgatgtta

SEQ ID NO: 91686 - DNA, 19 bp, Homo sapiens
  siRNA target sequence for MLH1 (NM_000249.2,688-706).
gcctcaaccgtggacaata

SEQ ID NO: 91687 - DNA, 19 bp, Homo sapiens
  siRNA target sequence for MLH1 (NM_000249.2,728-746).
ctgttagtcgagaactgat

SEQ ID NO: 91688 - DNA, 19 bp, Homo sapiens
  siRNA target sequence for MLH1 (NM_000249.2,786-804).
gaatggttacatatccaat

SEQ ID NO: 91689 - DNA, 19 bp, Homo sapiens
  siRNA target sequence for MLH1 (NM_000249.2,790-808).
ggttacatatccaatgcaa

SEQ ID NO: 91690 - DNA, 19 bp, Homo sapiens
  siRNA target sequence for MLH1 (NM_000249.2,791-809).
gttacatatccaatgcaaa

SEQ ID NO: 91691 - DNA, 19 bp, Homo sapiens
  siRNA target sequence for MLH1 (NM_000249.2,849-867).
ccatcgtctggtagaatca

SEQ ID NO: 91692 - DNA, 19 bp, Homo sapiens
  siRNA target sequence for MLH1 (NM_000249.2,850-868).
catcgtctggtagaatcaa

SEQ ID NO: 91693 - DNA, 19 bp, Homo sapiens
  siRNA target sequence for MLH1 (NM_000249.2,853-871).
cgtctggtagaatcaactt

SEQ ID NO: 91694 - DNA, 19 bp, Homo sapiens
  siRNA target sequence for MLH1 (NM_000249.2,933-951).
cctgtacctcagtttagaa

SEQ ID NO: 91695 - DNA, 19 bp, Homo sapiens
  siRNA target sequence for MLH1 (NM_000249.2,934-952).
ctgtacctcagtttagaaa

SEQ ID NO: 91696 - DNA, 19 bp, Homo sapiens
  siRNA target sequence for MLH1 (NM_000249.2,959-977).
cccagaatgtggatgttaa

SEQ ID NO: 91697 - DNA, 19 bp, Homo sapiens
  siRNA target sequence for MLH1 (NM_000249.2,984-1002).
ccccacaaagcatgaagtt

SEQ ID NO: 91698 - DNA, 19 bp, Homo sapiens
  siRNA target sequence for MLH1 (NM_000249.2,1158-1176).
gacctcgtcttctacttct

SEQ ID NO: 91699 - DNA, 19 bp, Homo sapiens
  siRNA target sequence for MLH1 (NM_000249.2,1175-1193).
ctggaagtagtgataaggt

SEQ ID NO: 91700 - DNA, 19 bp, Homo sapiens
  siRNA target sequence for MLH1 (NM_000249.2,1289-1307).
ccattgtcacagaggataa

SEQ ID NO: 91701 - DNA, 19 bp, Homo sapiens
  siRNA target sequence for MLH1 (NM_000249.2,1303-1321).
gataagacagatatttcta

SEQ ID NO: 91702 - DNA, 19 bp, Homo sapiens
  siRNA target sequence for MLH1 (NM_000249.2,1398-1416).
cttggagggggatacaaca

SEQ ID NO: 91703 - DNA, 19 bp, Homo sapiens
  siRNA target sequence for MLH1 (NM_000249.2,1560-1578).
cattaacctcactagtgtt

SEQ ID NO: 91704 - DNA, 19 bp, Homo sapiens
  siRNA target sequence for MLH1 (NM_000249.2,1675-1693).
gccttggcacagcatcaaa

SEQ ID NO: 91705 - DNA, 19 bp, Homo sapiens
  siRNA target sequence for MLH1 (NM_000249.2,1684-1702).
cagcatcaaaccaagttat

SEQ ID NO: 91706 - DNA, 19 bp, Homo sapiens
  siRNA target sequence for MLH1 (NM_000249.2,1737-1755).
gttctaccagatactcatt

SEQ ID NO: 91707 - DNA, 19 bp, Homo sapiens
  siRNA target sequence for MLH1 (NM_000249.2,1816-1834).
gccatgcttgccttagata

SEQ ID NO: 91708 - DNA, 19 bp, Homo sapiens
  siRNA target sequence for MLH1 (NM_000249.2,1818-1836).
catgcttgccttagatagt

SEQ ID NO: 91709 - DNA, 19 bp, Homo sapiens
  siRNA target sequence for MLH1 (NM_000249.2,1857-1875).
ggaagatggtcccaaagaa

SEQ ID NO: 91710 - DNA, 19 bp, Homo sapiens
  siRNA target sequence for MLH1 (NM_000249.2,1918-1936).
gagatgcttgcagactatt

SEQ ID NO: 91711 - DNA, 19 bp, Homo sapiens
  siRNA target sequence for MLH1 (NM_000249.2,1973-1991).
gattaccccttctgattga

SEQ ID NO: 91712 - DNA, 19 bp, Homo sapiens
  siRNA target sequence for MLH1 (NM_000249.2,1979-1997).
cccttctgattgacaacta

SEQ ID NO: 91713 - DNA, 19 bp, Homo sapiens
  siRNA target sequence for MLH1 (NM_000249.2,2090-2108).
gtaaagaatgcgctatgtt

SEQ ID NO: 91714 - DNA, 19 bp, Homo sapiens
  siRNA target sequence for MLH1 (NM_000249.2,2118-2136).
ccggaagcagtacatatct

SEQ ID NO: 91715 - DNA, 19 bp, Homo sapiens
  siRNA target sequence for MLH1 (NM_000249.2,2120-2138).
ggaagcagtacatatctga

SEQ ID NO: 91716 - DNA, 19 bp, Homo sapiens
  siRNA target sequence for MLH1 (NM_000249.2,2245-2263).
ctgcctcctaaacatttca

SEQ ID NO: 91717 - DNA, 19 bp, Homo sapiens
  siRNA target sequence for MLH1 (NM_000249.2,2290-2308).
gctaacctgcctgatctat

SEQ ID NO: 91718 - DNA, 19 bp, Homo sapiens
  siRNA target sequence for MLH1 (NM_000249.2,2295-2313).
cctgcctgatctatacaaa

SEQ ID NO: 91719 - DNA, 19 bp, Homo sapiens
  siRNA target sequence for MORC (NM_014429.1,234-252).
caggggggattcatgttgt

SEQ ID NO: 91720 - DNA, 19 bp, Homo sapiens
  siRNA target sequence for MORC (NM_014429.1,237-255).
gggggattcatgttgtgtt

SEQ ID NO: 91721 - DNA, 19 bp, Homo sapiens
  siRNA target sequence for MORC (NM_014429.1,308-326).
ctttggacgatccaaaaaa

SEQ ID NO: 91722 - DNA, 19 bp, Homo sapiens
  siRNA target sequence for MORC (NM_014429.1,327-345).
cggctgtcaaccttgaagt

SEQ ID NO: 91723 - DNA, 19 bp, Homo sapiens
  siRNA target sequence for MORC (NM_014429.1,330-348).
ctgtcaaccttgaagttca

SEQ ID NO: 91724 - DNA, 19 bp, Homo sapiens
  siRNA target sequence for MORC (NM_014429.1,332-350).
gtcaaccttgaagttcata

SEQ ID NO: 91725 - DNA, 19 bp, Homo sapiens
  siRNA target sequence for MORC (NM_014429.1,359-377).
cggcaatggtcttaaaagt

SEQ ID NO: 91726 - DNA, 19 bp, Homo sapiens
  siRNA target sequence for MORC (NM_014429.1,379-397).
ggtccatgagaattggaaa

SEQ ID NO: 91727 - DNA, 19 bp, Homo sapiens
  siRNA target sequence for MORC (NM_014429.1,380-398).
gtccatgagaattggaaaa

SEQ ID NO: 91728 - DNA, 19 bp, Homo sapiens
  siRNA target sequence for MORC (NM_014429.1,475-493).
gtcttagtgaggttgtagt

SEQ ID NO: 91729 - DNA, 19 bp, Homo sapiens
  siRNA target sequence for MORC (NM_014429.1,481-499).
gtgaggttgtagttccaat

SEQ ID NO: 91730 - DNA, 19 bp, Homo sapiens
  siRNA target sequence for MORC (NM_014429.1,496-514).
caatgccctcatggttaat

SEQ ID NO: 91731 - DNA, 19 bp, Homo sapiens
  siRNA target sequence for MORC (NM_014429.1,500-518).
gccctcatggttaataaga

SEQ ID NO: 91732 - DNA, 19 bp, Homo sapiens
  siRNA target sequence for MORC (NM_014429.1,540-558).
gatccccagaaatttgcaa

SEQ ID NO: 91733 - DNA, 19 bp, Homo sapiens
  siRNA target sequence for MORC (NM_014429.1,645-663).
ggtactttgctggttattt

SEQ ID NO: 91734 - DNA, 19 bp, Homo sapiens
  siRNA target sequence for MORC (NM_014429.1,671-689).
gaagcttctgcttaatgga

SEQ ID NO: 91735 - DNA, 19 bp, Homo sapiens
  siRNA target sequence for MORC (NM_014429.1,808-826).
ggatgagaatattcattca

SEQ ID NO: 91736 - DNA, 19 bp, Homo sapiens
  siRNA target sequence for MORC (NM_014429.1,866-884).
ctacagacccagaaagtat

SEQ ID NO: 91737 - DNA, 19 bp, Homo sapiens
  siRNA target sequence for MORC (NM_014429.1,893-911).
cacatcttcttttaaagga

SEQ ID NO: 91738 - DNA, 19 bp, Homo sapiens
  siRNA target sequence for MORC (NM_014429.1,1021-1039).
ctgccaaggatgtattaca

SEQ ID NO: 91739 - DNA, 19 bp, Homo sapiens
  siRNA target sequence for MORC (NM_014429.1,1111-1129).
gaacgctctccctgttcta

SEQ ID NO: 91740 - DNA, 19 bp, Homo sapiens
  siRNA target sequence for MORC (NM_014429.1,1162-1180).
gaatgttcatttacagtaa

SEQ ID NO: 91741 - DNA, 19 bp, Homo sapiens
  siRNA target sequence for MORC (NM_014429.1,1184-1202).
ccgtttgatcaaaatgcat

SEQ ID NO: 91742 - DNA, 19 bp, Homo sapiens
  siRNA target sequence for MORC (NM_014429.1,1243-1261).
gcgcaggcgtggttggaat

SEQ ID NO: 91743 - DNA, 19 bp, Homo sapiens
  siRNA target sequence for MORC (NM_014429.1,1246-1264).
caggcgtggttggaattgt

SEQ ID NO: 91744 - DNA, 19 bp, Homo sapiens
  siRNA target sequence for MORC (NM_014429.1,1249-1267).
gcgtggttggaattgttaa

SEQ ID NO: 91745 - DNA, 19 bp, Homo sapiens
  siRNA target sequence for MORC (NM_014429.1,1250-1268).
cgtggttggaattgttaat

SEQ ID NO: 91746 - DNA, 19 bp, Homo sapiens
  siRNA target sequence for MORC (NM_014429.1,1253-1271).
ggttggaattgttaatata

SEQ ID NO: 91747 - DNA, 19 bp, Homo sapiens
  siRNA target sequence for MORC (NM_014429.1,1286-1304).
ggaaccatcccataataaa

SEQ ID NO: 91748 - DNA, 19 bp, Homo sapiens
  siRNA target sequence for MORC (NM_014429.1,1314-1332).
ctcaatgtccaagagtata

SEQ ID NO: 91749 - DNA, 19 bp, Homo sapiens
  siRNA target sequence for MORC (NM_014429.1,1316-1334).
caatgtccaagagtataat

SEQ ID NO: 91750 - DNA, 19 bp, Homo sapiens
  siRNA target sequence for MORC (NM_014429.1,1322-1340).
ccaagagtataatcatcta

SEQ ID NO: 91751 - DNA, 19 bp, Homo sapiens
  siRNA target sequence for MORC (NM_014429.1,1328-1346).
gtataatcatctactaaaa

SEQ ID NO: 91752 - DNA, 19 bp, Homo sapiens
  siRNA target sequence for MORC (NM_014429.1,1379-1397).
ggacaccggcatcaataat

SEQ ID NO: 91753 - DNA, 19 bp, Homo sapiens
  siRNA target sequence for MORC (NM_014429.1,1380-1398).
gacaccggcatcaataata

SEQ ID NO: 91754 - DNA, 19 bp, Homo sapiens
  siRNA target sequence for MORC (NM_014429.1,1382-1400).
caccggcatcaataataga

SEQ ID NO: 91755 - DNA, 19 bp, Homo sapiens
  siRNA target sequence for MORC (NM_014429.1,1384-1402).
ccggcatcaataatagaaa

SEQ ID NO: 91756 - DNA, 19 bp, Homo sapiens
  siRNA target sequence for MORC (NM_014429.1,1385-1403).
cggcatcaataatagaaat

SEQ ID NO: 91757 - DNA, 19 bp, Homo sapiens
  siRNA target sequence for MORC (NM_014429.1,1496-1514).
gggtatcccattcatcata

SEQ ID NO: 91758 - DNA, 19 bp, Homo sapiens
  siRNA target sequence for MORC (NM_014429.1,1498-1516).
gtatcccattcatcataca

SEQ ID NO: 91759 - DNA, 19 bp, Homo sapiens
  siRNA target sequence for MORC (NM_014429.1,1502-1520).
cccattcatcatacaatgt

SEQ ID NO: 91760 - DNA, 19 bp, Homo sapiens
  siRNA target sequence for MORC (NM_014429.1,1515-1533).
caatgtgatctttgtctta

SEQ ID NO: 91761 - DNA, 19 bp, Homo sapiens
  siRNA target sequence for MORC (NM_014429.1,1542-1560).
gtcttgccttcctctacta

SEQ ID NO: 91762 - DNA, 19 bp, Homo sapiens
  siRNA target sequence for MORC (NM_014429.1,1608-1626).
cccaaccgcttggaaaaca

SEQ ID NO: 91763 - DNA, 19 bp, Homo sapiens
  siRNA target sequence for MORC (NM_014429.1,1630-1648).
gtcatcaggtagaatgtct

SEQ ID NO: 91764 - DNA, 19 bp, Homo sapiens
  siRNA target sequence for MORC (NM_014429.1,1664-1682).
gggcaccatgagcacaata

SEQ ID NO: 91765 - DNA, 19 bp, Homo sapiens
  siRNA target sequence for MORC (NM_014429.1,1713-1731).
cttagagagtcggtcataa

SEQ ID NO: 91766 - DNA, 19 bp, Homo sapiens
  siRNA target sequence for MORC (NM_014429.1,1717-1735).
gagagtcggtcataaagta

SEQ ID NO: 91767 - DNA, 19 bp, Homo sapiens
  siRNA target sequence for MORC (NM_014429.1,1721-1739).
gtcggtcataaagtatcaa

SEQ ID NO: 91768 - DNA, 19 bp, Homo sapiens
  siRNA target sequence for MORC (NM_014429.1,1723-1741).
cggtcataaagtatcaaaa

SEQ ID NO: 91769 - DNA, 19 bp, Homo sapiens
  siRNA target sequence for MORC (NM_014429.1,1724-1742).
ggtcataaagtatcaaaat

SEQ ID NO: 91770 - DNA, 19 bp, Homo sapiens
  siRNA target sequence for MORC (NM_014429.1,1758-1776).
cagccacagcctcaattta

SEQ ID NO: 91771 - DNA, 19 bp, Homo sapiens
  siRNA target sequence for MORC (NM_014429.1,1810-1828).
gcctaacttcagcacataa

SEQ ID NO: 91772 - DNA, 19 bp, Homo sapiens
  siRNA target sequence for MORC (NM_014429.1,1855-1873).
ggcttttgggcgatgactt

SEQ ID NO: 91773 - DNA, 19 bp, Homo sapiens
  siRNA target sequence for MORC (NM_014429.1,1866-1884).
gatgacttgaagcatgaat

SEQ ID NO: 91774 - DNA, 19 bp, Homo sapiens
  siRNA target sequence for MORC (NM_014429.1,1913-1931).
ccgtagaggacagaaaaga

SEQ ID NO: 91775 - DNA, 19 bp, Homo sapiens
  siRNA target sequence for MORC (NM_014429.1,1947-1965).
gactctgatgtagagtata

SEQ ID NO: 91776 - DNA, 19 bp, Homo sapiens
  siRNA target sequence for MORC (NM_014429.1,2193-2211).
gaggaatgtaaggtattga

SEQ ID NO: 91777 - DNA, 19 bp, Homo sapiens
  siRNA target sequence for MORC (NM_014429.1,2217-2235).
gatgagaacacgagtgatt

SEQ ID NO: 91778 - DNA, 19 bp, Homo sapiens
  siRNA target sequence for MORC (NM_014429.1,2225-2243).
cacgagtgattcagatata

SEQ ID NO: 91779 - DNA, 19 bp, Homo sapiens
  siRNA target sequence for MORC (NM_014429.1,2230-2248).
gtgattcagatataatcct

SEQ ID NO: 91780 - DNA, 19 bp, Homo sapiens
  siRNA target sequence for MORC (NM_014429.1,2330-2348).
gctgtgcaatgatgttcta

SEQ ID NO: 91781 - DNA, 19 bp, Homo sapiens
  siRNA target sequence for MORC (NM_014429.1,2335-2353).
gcaatgatgttctagcaat

SEQ ID NO: 91782 - DNA, 19 bp, Homo sapiens
  siRNA target sequence for MORC (NM_014429.1,2380-2398).
ggaaaagcttgctcaatgt

SEQ ID NO: 91783 - DNA, 19 bp, Homo sapiens
  siRNA target sequence for MORC (NM_014429.1,2427-2445).
ggacacatagccagagttt

SEQ ID NO: 91784 - DNA, 19 bp, Homo sapiens
  siRNA target sequence for MORC (NM_014429.1,2588-2606).
ggaagaacctgcattaagt

SEQ ID NO: 91785 - DNA, 19 bp, Homo sapiens
  siRNA target sequence for MORC (NM_014429.1,2717-2735).
gcagtccattatctatgat

SEQ ID NO: 91786 - DNA, 19 bp, Homo sapiens
  siRNA target sequence for MORC (NM_014429.1,2791-2809).
gaaaaatctctgaggataa

SEQ ID NO: 91787 - DNA, 19 bp, Homo sapiens
  siRNA target sequence for MORC (NM_014429.1,2804-2822).
ggataagctgaagaatctt

SEQ ID NO: 91788 - DNA, 19 bp, Homo sapiens
  siRNA target sequence for MORC (NM_014429.1,2810-2828).
gctgaagaatcttcgtata

SEQ ID NO: 91789 - DNA, 19 bp, Homo sapiens
  siRNA target sequence for MORC (NM_014429.1,2811-2829).
ctgaagaatcttcgtataa

SEQ ID NO: 91790 - DNA, 19 bp, Homo sapiens
  siRNA target sequence for MORC (NM_014429.1,2813-2831).
gaagaatcttcgtataaaa

SEQ ID NO: 91791 - DNA, 19 bp, Homo sapiens
  siRNA target sequence for MORC (NM_014429.1,2882-2900).
ggagcagactgacacttat

SEQ ID NO: 91792 - DNA, 19 bp, Homo sapiens
  siRNA target sequence for MORC (NM_014429.1,2883-2901).
gagcagactgacacttatt

SEQ ID NO: 91793 - DNA, 19 bp, Homo sapiens
  siRNA target sequence for MORC (NM_014429.1,2888-2906).
gactgacacttatttagaa

SEQ ID NO: 91794 - DNA, 19 bp, Homo sapiens
  siRNA target sequence for MOS (NM_005372.1,209-227).
ggtttggctcggtgtacaa

SEQ ID NO: 91795 - DNA, 19 bp, Homo sapiens
  siRNA target sequence for MOS (NM_005372.1,292-310).
gcatctcggcggagtttct

SEQ ID NO: 91796 - DNA, 19 bp, Homo sapiens
  siRNA target sequence for MOS (NM_005372.1,329-347).
caaggctgcgccacgataa

SEQ ID NO: 91797 - DNA, 19 bp, Homo sapiens
  siRNA target sequence for MOS (NM_005372.1,332-350).
ggctgcgccacgataacat

SEQ ID NO: 91798 - DNA, 19 bp, Homo sapiens
  siRNA target sequence for MOS (NM_005372.1,423-441).
cggtggcaacgtcacttta

SEQ ID NO: 91799 - DNA, 19 bp, Homo sapiens
  siRNA target sequence for MOS (NM_005372.1,526-544).
ggaaagtgtctcaagtact

SEQ ID NO: 91800 - DNA, 19 bp, Homo sapiens
  siRNA target sequence for MOS (NM_005372.1,573-591).
cctccactcgcaaagcatt

SEQ ID NO: 91801 - DNA, 19 bp, Homo sapiens
  siRNA target sequence for MOS (NM_005372.1,636-654).
ggatgtctgtaaaattagt

SEQ ID NO: 91802 - DNA, 19 bp, Homo sapiens
  siRNA target sequence for MOS (NM_005372.1,712-730).
cctctaggaggcacataca

SEQ ID NO: 91803 - DNA, 19 bp, Homo sapiens
  siRNA target sequence for MOS (NM_005372.1,770-788).
cgcctaaagccgacattta

SEQ ID NO: 91804 - DNA, 19 bp, Homo sapiens
  siRNA target sequence for MOS (NM_005372.1,771-789).
gcctaaagccgacatttat

SEQ ID NO: 91805 - DNA, 19 bp, Homo sapiens
  siRNA target sequence for MOS (NM_005372.1,772-790).
cctaaagccgacatttatt

SEQ ID NO: 91806 - DNA, 19 bp, Homo sapiens
  siRNA target sequence for MOV10 (NM_020963.1,111-129).
gccagtgtttcgagagttt

SEQ ID NO: 91807 - DNA, 19 bp, Homo sapiens
  siRNA target sequence for MOV10 (NM_020963.1,167-185).
gagcggctgcggaccattt

SEQ ID NO: 91808 - DNA, 19 bp, Homo sapiens
  siRNA target sequence for MOV10 (NM_020963.1,169-187).
gcggctgcggaccatttat

SEQ ID NO: 91809 - DNA, 19 bp, Homo sapiens
  siRNA target sequence for MOV10 (NM_020963.1,170-188).
cggctgcggaccatttata

SEQ ID NO: 91810 - DNA, 19 bp, Homo sapiens
  siRNA target sequence for MOV10 (NM_020963.1,384-402).
cactgctagccaagatctt

SEQ ID NO: 91811 - DNA, 19 bp, Homo sapiens
  siRNA target sequence for MOV10 (NM_020963.1,388-406).
gctagccaagatcttttat

SEQ ID NO: 91812 - DNA, 19 bp, Homo sapiens
  siRNA target sequence for MOV10 (NM_020963.1,488-506).
cttatccgcctggatttga

SEQ ID NO: 91813 - DNA, 19 bp, Homo sapiens
  siRNA target sequence for MOV10 (NM_020963.1,542-560).
ggcggaacccagtctgtta

SEQ ID NO: 91814 - DNA, 19 bp, Homo sapiens
  siRNA target sequence for MOV10 (NM_020963.1,659-677).
gaactccatgtccattgta

SEQ ID NO: 91815 - DNA, 19 bp, Homo sapiens
  siRNA target sequence for MOV10 (NM_020963.1,749-767).
gaaggagccggcacattct

SEQ ID NO: 91816 - DNA, 19 bp, Homo sapiens
  siRNA target sequence for MOV10 (NM_020963.1,752-770).
ggagccggcacattctaca

SEQ ID NO: 91817 - DNA, 19 bp, Homo sapiens
  siRNA target sequence for MOV10 (NM_020963.1,753-771).
gagccggcacattctacat

SEQ ID NO: 91818 - DNA, 19 bp, Homo sapiens
  siRNA target sequence for MOV10 (NM_020963.1,914-932).
ggctatgacctggagttaa

SEQ ID NO: 91819 - DNA, 19 bp, Homo sapiens
  siRNA target sequence for MOV10 (NM_020963.1,989-1007).
cttcttcagggaacaagta

SEQ ID NO: 91820 - DNA, 19 bp, Homo sapiens
  siRNA target sequence for MOV10 (NM_020963.1,992-1010).
cttcagggaacaagtatct

SEQ ID NO: 91821 - DNA, 19 bp, Homo sapiens
  siRNA target sequence for MOV10 (NM_020963.1,995-1013).
cagggaacaagtatcttca

SEQ ID NO: 91822 - DNA, 19 bp, Homo sapiens
  siRNA target sequence for MOV10 (NM_020963.1,1340-1358).
cgtgtcaagctgagctttt

SEQ ID NO: 91823 - DNA, 19 bp, Homo sapiens
  siRNA target sequence for MOV10 (NM_020963.1,1523-1541).
ccctcagatgtgaaactca

SEQ ID NO: 91824 - DNA, 19 bp, Homo sapiens
  siRNA target sequence for MOV10 (NM_020963.1,1585-1603).
ggccatgaggcacattgtt

SEQ ID NO: 91825 - DNA, 19 bp, Homo sapiens
  siRNA target sequence for MOV10 (NM_020963.1,1586-1604).
gccatgaggcacattgtta

SEQ ID NO: 91826 - DNA, 19 bp, Homo sapiens
  siRNA target sequence for MOV10 (NM_020963.1,1668-1686).
cgttagtggaggcaattaa

SEQ ID NO: 91827 - DNA, 19 bp, Homo sapiens
  siRNA target sequence for MOV10 (NM_020963.1,1748-1766).
gctgacctactctgtcaaa

SEQ ID NO: 91828 - DNA, 19 bp, Homo sapiens
  siRNA target sequence for MOV10 (NM_020963.1,1873-1891).
gaagggggagtatgtattt

SEQ ID NO: 91829 - DNA, 19 bp, Homo sapiens
  siRNA target sequence for MOV10 (NM_020963.1,1886-1904).
gtatttcccgccaagaaga

SEQ ID NO: 91830 - DNA, 19 bp, Homo sapiens
  siRNA target sequence for MOV10 (NM_020963.1,1912-1930).
ggaataccgggtcttaatt

SEQ ID NO: 91831 - DNA, 19 bp, Homo sapiens
  siRNA target sequence for MOV10 (NM_020963.1,1913-1931).
gaataccgggtcttaatta

SEQ ID NO: 91832 - DNA, 19 bp, Homo sapiens
  siRNA target sequence for MOV10 (NM_020963.1,1982-2000).
cacttcacacacatcttca

SEQ ID NO: 91833 - DNA, 19 bp, Homo sapiens
  siRNA target sequence for MOV10 (NM_020963.1,2032-2050).
gagtctggtagctatagca

SEQ ID NO: 91834 - DNA, 19 bp, Homo sapiens
  siRNA target sequence for MOV10 (NM_020963.1,2155-2173).
gcatggactgggatactca

SEQ ID NO: 91835 - DNA, 19 bp, Homo sapiens
  siRNA target sequence for MOV10 (NM_020963.1,2226-2244).
gctatgacccccagttcat

SEQ ID NO: 91836 - DNA, 19 bp, Homo sapiens
  siRNA target sequence for MOV10 (NM_020963.1,2227-2245).
ctatgacccccagttcata

SEQ ID NO: 91837 - DNA, 19 bp, Homo sapiens
  siRNA target sequence for MOV10 (NM_020963.1,2295-2313).
ctaaccagctctattatga

SEQ ID NO: 91838 - DNA, 19 bp, Homo sapiens
  siRNA target sequence for MOV10 (NM_020963.1,2407-2425).
cggcgtaatgggcaaagat

SEQ ID NO: 91839 - DNA, 19 bp, Homo sapiens
  siRNA target sequence for MOV10 (NM_020963.1,2650-2668).
gaaggtgggttcagtagaa

SEQ ID NO: 91840 - DNA, 19 bp, Homo sapiens
  siRNA target sequence for MOV10 (NM_020963.1,2658-2676).
gttcagtagaagaattcca

SEQ ID NO: 91841 - DNA, 19 bp, Homo sapiens
  siRNA target sequence for MOV10 (NM_020963.1,2773-2791).
ccccaagaggttcaatgta

SEQ ID NO: 91842 - DNA, 19 bp, Homo sapiens
  siRNA target sequence for MOV10 (NM_020963.1,2933-2951).
ctgcaacagggacagaatt

SEQ ID NO: 91843 - DNA, 19 bp, Homo sapiens
  siRNA target sequence for MPHOSPH1 (NM_016195.1,79-97).
ctcgaccatcttatgtttt

SEQ ID NO: 91844 - DNA, 19 bp, Homo sapiens
  siRNA target sequence for MPHOSPH1 (NM_016195.1,153-171).
gatctgtctcatgaatttt

SEQ ID NO: 91845 - DNA, 19 bp, Homo sapiens
  siRNA target sequence for MPHOSPH1 (NM_016195.1,158-176).
gtctcatgaattttcctta

SEQ ID NO: 91846 - DNA, 19 bp, Homo sapiens
  siRNA target sequence for MPHOSPH1 (NM_016195.1,173-191).
cttagttgctccaaatact

SEQ ID NO: 91847 - DNA, 19 bp, Homo sapiens
  siRNA target sequence for MPHOSPH1 (NM_016195.1,192-210).
gaggcaaacagtttcgaat

SEQ ID NO: 91848 - DNA, 19 bp, Homo sapiens
  siRNA target sequence for MPHOSPH1 (NM_016195.1,202-220).
gtttcgaatctaaagatta

SEQ ID NO: 91849 - DNA, 19 bp, Homo sapiens
  siRNA target sequence for MPHOSPH1 (NM_016195.1,224-242).
ccaggtttgtcttcgaata

SEQ ID NO: 91850 - DNA, 19 bp, Homo sapiens
  siRNA target sequence for MPHOSPH1 (NM_016195.1,225-243).
caggtttgtcttcgaataa

SEQ ID NO: 91851 - DNA, 19 bp, Homo sapiens
  siRNA target sequence for MPHOSPH1 (NM_016195.1,335-353).
catccttggtcggttaagt

SEQ ID NO: 91852 - DNA, 19 bp, Homo sapiens
  siRNA target sequence for MPHOSPH1 (NM_016195.1,338-356).
ccttggtcggttaagtgaa

SEQ ID NO: 91853 - DNA, 19 bp, Homo sapiens
  siRNA target sequence for MPHOSPH1 (NM_016195.1,339-357).
cttggtcggttaagtgaaa

SEQ ID NO: 91854 - DNA, 19 bp, Homo sapiens
  siRNA target sequence for MPHOSPH1 (NM_016195.1,342-360).
ggtcggttaagtgaaaaaa

SEQ ID NO: 91855 - DNA, 19 bp, Homo sapiens
  siRNA target sequence for MPHOSPH1 (NM_016195.1,345-363).
cggttaagtgaaaaaagct

SEQ ID NO: 91856 - DNA, 19 bp, Homo sapiens
  siRNA target sequence for MPHOSPH1 (NM_016195.1,411-429).
gcaactacacagaaggaat

SEQ ID NO: 91857 - DNA, 19 bp, Homo sapiens
  siRNA target sequence for MPHOSPH1 (NM_016195.1,412-430).
caactacacagaaggaatt

SEQ ID NO: 91858 - DNA, 19 bp, Homo sapiens
  siRNA target sequence for MPHOSPH1 (NM_016195.1,474-492).
ggacagagtcgtctgattt

SEQ ID NO: 91859 - DNA, 19 bp, Homo sapiens
  siRNA target sequence for MPHOSPH1 (NM_016195.1,475-493).
gacagagtcgtctgatttt

SEQ ID NO: 91860 - DNA, 19 bp, Homo sapiens
  siRNA target sequence for MPHOSPH1 (NM_016195.1,477-495).
cagagtcgtctgattttta

SEQ ID NO: 91861 - DNA, 19 bp, Homo sapiens
  siRNA target sequence for MPHOSPH1 (NM_016195.1,479-497).
gagtcgtctgatttttact

SEQ ID NO: 91862 - DNA, 19 bp, Homo sapiens
  siRNA target sequence for MPHOSPH1 (NM_016195.1,481-499).
gtcgtctgatttttactta

SEQ ID NO: 91863 - DNA, 19 bp, Homo sapiens
  siRNA target sequence for MPHOSPH1 (NM_016195.1,564-582).
cctcgaactttgaatgtat

SEQ ID NO: 91864 - DNA, 19 bp, Homo sapiens
  siRNA target sequence for MPHOSPH1 (NM_016195.1,565-583).
ctcgaactttgaatgtatt

SEQ ID NO: 91865 - DNA, 19 bp, Homo sapiens
  siRNA target sequence for MPHOSPH1 (NM_016195.1,633-651).
catagatccagagaatact

SEQ ID NO: 91866 - DNA, 19 bp, Homo sapiens
  siRNA target sequence for MPHOSPH1 (NM_016195.1,699-717).
gcattgcttcggcaaatta

SEQ ID NO: 91867 - DNA, 19 bp, Homo sapiens
  siRNA target sequence for MPHOSPH1 (NM_016195.1,700-718).
cattgcttcggcaaattaa

SEQ ID NO: 91868 - DNA, 19 bp, Homo sapiens
  siRNA target sequence for MPHOSPH1 (NM_016195.1,738-756).
gatagtgatgatactcttt

SEQ ID NO: 91869 - DNA, 19 bp, Homo sapiens
  siRNA target sequence for MPHOSPH1 (NM_016195.1,744-762).
gatgatactctttatggaa

SEQ ID NO: 91870 - DNA, 19 bp, Homo sapiens
  siRNA target sequence for MPHOSPH1 (NM_016195.1,753-771).
ctttatggaagtttaacta

SEQ ID NO: 91871 - DNA, 19 bp, Homo sapiens
  siRNA target sequence for MPHOSPH1 (NM_016195.1,779-797).
gaatatctcagagtttgaa

SEQ ID NO: 91872 - DNA, 19 bp, Homo sapiens
  siRNA target sequence for MPHOSPH1 (NM_016195.1,827-845).
cttgaatatggctaatagt

SEQ ID NO: 91873 - DNA, 19 bp, Homo sapiens
  siRNA target sequence for MPHOSPH1 (NM_016195.1,913-931).
ctgtatcatctaaattcca

SEQ ID NO: 91874 - DNA, 19 bp, Homo sapiens
  siRNA target sequence for MPHOSPH1 (NM_016195.1,960-978).
gacgtaaagggctattctt

SEQ ID NO: 91875 - DNA, 19 bp, Homo sapiens
  siRNA target sequence for MPHOSPH1 (NM_016195.1,962-980).
cgtaaagggctattctttt

SEQ ID NO: 91876 - DNA, 19 bp, Homo sapiens
  siRNA target sequence for MPHOSPH1 (NM_016195.1,1056-1074).
cagagtgttgccttcacaa

SEQ ID NO: 91877 - DNA, 19 bp, Homo sapiens
  siRNA target sequence for MPHOSPH1 (NM_016195.1,1058-1076).
gagtgttgccttcacaaaa

SEQ ID NO: 91878 - DNA, 19 bp, Homo sapiens
  siRNA target sequence for MPHOSPH1 (NM_016195.1,1062-1080).
gttgccttcacaaaattga

SEQ ID NO: 91879 - DNA, 19 bp, Homo sapiens
  siRNA target sequence for MPHOSPH1 (NM_016195.1,1065-1083).
gccttcacaaaattgaata

SEQ ID NO: 91880 - DNA, 19 bp, Homo sapiens
  siRNA target sequence for MPHOSPH1 (NM_016195.1,1066-1084).
ccttcacaaaattgaataa

SEQ ID NO: 91881 - DNA, 19 bp, Homo sapiens
  siRNA target sequence for MPHOSPH1 (NM_016195.1,1067-1085).
cttcacaaaattgaataat

SEQ ID NO: 91882 - DNA, 19 bp, Homo sapiens
  siRNA target sequence for MPHOSPH1 (NM_016195.1,1093-1111).
gtagaagtcacagcatatt

SEQ ID NO: 91883 - DNA, 19 bp, Homo sapiens
  siRNA target sequence for MPHOSPH1 (NM_016195.1,1101-1119).
cacagcatattcactgtta

SEQ ID NO: 91884 - DNA, 19 bp, Homo sapiens
  siRNA target sequence for MPHOSPH1 (NM_016195.1,1155-1173).
gtaattcgagtcagtgaat

SEQ ID NO: 91885 - DNA, 19 bp, Homo sapiens
  siRNA target sequence for MPHOSPH1 (NM_016195.1,1192-1210).
ctggttcagaacgaactat

SEQ ID NO: 91886 - DNA, 19 bp, Homo sapiens
  siRNA target sequence for MPHOSPH1 (NM_016195.1,1248-1266).
gggaatatcaacacttctt

SEQ ID NO: 91887 - DNA, 19 bp, Homo sapiens
  siRNA target sequence for MPHOSPH1 (NM_016195.1,1250-1268).
gaatatcaacacttcttta

SEQ ID NO: 91888 - DNA, 19 bp, Homo sapiens
  siRNA target sequence for MPHOSPH1 (NM_016195.1,1271-1289).
gactctgggaaagtgtatt

SEQ ID NO: 91889 - DNA, 19 bp, Homo sapiens
  siRNA target sequence for MPHOSPH1 (NM_016195.1,1273-1291).
ctctgggaaagtgtattaa

SEQ ID NO: 91890 - DNA, 19 bp, Homo sapiens
  siRNA target sequence for MPHOSPH1 (NM_016195.1,1332-1350).
gtgcctttccgggaaagta

SEQ ID NO: 91891 - DNA, 19 bp, Homo sapiens
  siRNA target sequence for MPHOSPH1 (NM_016195.1,1355-1373).
gactcactattttcaaagt

SEQ ID NO: 91892 - DNA, 19 bp, Homo sapiens
  siRNA target sequence for MPHOSPH1 (NM_016195.1,1357-1375).
ctcactattttcaaagttt

SEQ ID NO: 91893 - DNA, 19 bp, Homo sapiens
  siRNA target sequence for MPHOSPH1 (NM_016195.1,1423-1441).
gttatttagcctatgatga

SEQ ID NO: 91894 - DNA, 19 bp, Homo sapiens
  siRNA target sequence for MPHOSPH1 (NM_016195.1,1433-1451).
ctatgatgaaacactcaat

SEQ ID NO: 91895 - DNA, 19 bp, Homo sapiens
  siRNA target sequence for MPHOSPH1 (NM_016195.1,1437-1455).
gatgaaacactcaatgtat

SEQ ID NO: 91896 - DNA, 19 bp, Homo sapiens
  siRNA target sequence for MPHOSPH1 (NM_016195.1,1444-1462).
cactcaatgtattgaagtt

SEQ ID NO: 91897 - DNA, 19 bp, Homo sapiens
  siRNA target sequence for MPHOSPH1 (NM_016195.1,1463-1481).
ctccgccattgcacaaaaa

SEQ ID NO: 91898 - DNA, 19 bp, Homo sapiens
  siRNA target sequence for MPHOSPH1 (NM_016195.1,1535-1553).
caaatcttctcaagatgta

SEQ ID NO: 91899 - DNA, 19 bp, Homo sapiens
  siRNA target sequence for MPHOSPH1 (NM_016195.1,1551-1569).
gtatcactagacagtaatt

SEQ ID NO: 91900 - DNA, 19 bp, Homo sapiens
  siRNA target sequence for MPHOSPH1 (NM_016195.1,1564-1582).
gtaattcaaacagtaaaat

SEQ ID NO: 91901 - DNA, 19 bp, Homo sapiens
  siRNA target sequence for MPHOSPH1 (NM_016195.1,1691-1709).
ggaaactaaacttcttgat

SEQ ID NO: 91902 - DNA, 19 bp, Homo sapiens
  siRNA target sequence for MPHOSPH1 (NM_016195.1,1890-1908).
caacgggaagctgacttta

SEQ ID NO: 91903 - DNA, 19 bp, Homo sapiens
  siRNA target sequence for MPHOSPH1 (NM_016195.1,1920-1938).
cttcaagaacgagagatat

SEQ ID NO: 91904 - DNA, 19 bp, Homo sapiens
  siRNA target sequence for MPHOSPH1 (NM_016195.1,1929-1947).
cgagagatattagaagaaa

SEQ ID NO: 91905 - DNA, 19 bp, Homo sapiens
  siRNA target sequence for MPHOSPH1 (NM_016195.1,1956-1974).
cgtcgtttggctatcttca

SEQ ID NO: 91906 - DNA, 19 bp, Homo sapiens
  siRNA target sequence for MPHOSPH1 (NM_016195.1,1957-1975).
gtcgtttggctatcttcaa

SEQ ID NO: 91907 - DNA, 19 bp, Homo sapiens
  siRNA target sequence for MPHOSPH1 (NM_016195.1,2007-2025).
gaagcagcgaaagacattt

SEQ ID NO: 91908 - DNA, 19 bp, Homo sapiens
  siRNA target sequence for MPHOSPH1 (NM_016195.1,2029-2047).
ccacaaaagttgaaactga

SEQ ID NO: 91909 - DNA, 19 bp, Homo sapiens
  siRNA target sequence for MPHOSPH1 (NM_016195.1,2030-2048).
cacaaaagttgaaactgaa

SEQ ID NO: 91910 - DNA, 19 bp, Homo sapiens
  siRNA target sequence for MPHOSPH1 (NM_016195.1,2107-2125).
ccaaaggagaattaatcaa

SEQ ID NO: 91911 - DNA, 19 bp, Homo sapiens
  siRNA target sequence for MPHOSPH1 (NM_016195.1,2250-2268).
caaaaagaagatactatca

SEQ ID NO: 91912 - DNA, 19 bp, Homo sapiens
  siRNA target sequence for MPHOSPH1 (NM_016195.1,2263-2281).
ctatcaacgaatttcagaa

SEQ ID NO: 91913 - DNA, 19 bp, Homo sapiens
  siRNA target sequence for MPHOSPH1 (NM_016195.1,2277-2295).
cagaacctaaagtctcata

SEQ ID NO: 91914 - DNA, 19 bp, Homo sapiens
  siRNA target sequence for MPHOSPH1 (NM_016195.1,2282-2300).
cctaaagtctcatatggaa

SEQ ID NO: 91915 - DNA, 19 bp, Homo sapiens
  siRNA target sequence for MPHOSPH1 (NM_016195.1,2290-2308).
ctcatatggaaaacacatt

SEQ ID NO: 91916 - DNA, 19 bp, Homo sapiens
  siRNA target sequence for MPHOSPH1 (NM_016195.1,2298-2316).
gaaaacacatttaaatgca

SEQ ID NO: 91917 - DNA, 19 bp, Homo sapiens
  siRNA target sequence for MPHOSPH1 (NM_016195.1,2315-2333).
caatgacaaggctgataca

SEQ ID NO: 91918 - DNA, 19 bp, Homo sapiens
  siRNA target sequence for MPHOSPH1 (NM_016195.1,2319-2337).
gacaaggctgatacatctt

SEQ ID NO: 91919 - DNA, 19 bp, Homo sapiens
  siRNA target sequence for MPHOSPH1 (NM_016195.1,2391-2409).
gacagcaaatctaaaatct

SEQ ID NO: 91920 - DNA, 19 bp, Homo sapiens
  siRNA target sequence for MPHOSPH1 (NM_016195.1,2472-2490).
gggtctatccatgttagtt

SEQ ID NO: 91921 - DNA, 19 bp, Homo sapiens
  siRNA target sequence for MPHOSPH1 (NM_016195.1,2474-2492).
gtctatccatgttagttca

SEQ ID NO: 91922 - DNA, 19 bp, Homo sapiens
  siRNA target sequence for MPHOSPH1 (NM_016195.1,2530-2548).
gaccgaacattgcagaaat

SEQ ID NO: 91923 - DNA, 19 bp, Homo sapiens
  siRNA target sequence for MPHOSPH1 (NM_016195.1,2763-2781).
gaattacatgtgcagaaaa

SEQ ID NO: 91924 - DNA, 19 bp, Homo sapiens
  siRNA target sequence for MPHOSPH1 (NM_016195.1,2838-2856).
gctacaagaagcattacaa

SEQ ID NO: 91925 - DNA, 19 bp, Homo sapiens
  siRNA target sequence for MPHOSPH1 (NM_016195.1,2897-2915).
cgaactacgtactcttgat

SEQ ID NO: 91926 - DNA, 19 bp, Homo sapiens
  siRNA target sequence for MPHOSPH1 (NM_016195.1,2898-2916).
gaactacgtactcttgatt

SEQ ID NO: 91927 - DNA, 19 bp, Homo sapiens
  siRNA target sequence for MPHOSPH1 (NM_016195.1,2954-2972).
cagggatctgtcaaatggt

SEQ ID NO: 91928 - DNA, 19 bp, Homo sapiens
  siRNA target sequence for MPHOSPH1 (NM_016195.1,2981-2999).
ggataatttgccaaataca

SEQ ID NO: 91929 - DNA, 19 bp, Homo sapiens
  siRNA target sequence for MPHOSPH1 (NM_016195.1,3000-3018).
cagttagaccttttaggta

SEQ ID NO: 91930 - DNA, 19 bp, Homo sapiens
  siRNA target sequence for MPHOSPH1 (NM_016195.1,3002-3020).
gttagaccttttaggtaat

SEQ ID NO: 91931 - DNA, 19 bp, Homo sapiens
  siRNA target sequence for MPHOSPH1 (NM_016195.1,3006-3024).
gaccttttaggtaatgatt

SEQ ID NO: 91932 - DNA, 19 bp, Homo sapiens
  siRNA target sequence for MPHOSPH1 (NM_016195.1,3038-3056).
gcaagttaaagaatatcga

SEQ ID NO: 91933 - DNA, 19 bp, Homo sapiens
  siRNA target sequence for MPHOSPH1 (NM_016195.1,3063-3081).
gaacccaatagggaaaatt

SEQ ID NO: 91934 - DNA, 19 bp, Homo sapiens
  siRNA target sequence for MPHOSPH1 (NM_016195.1,3066-3084).
cccaatagggaaaattctt

SEQ ID NO: 91935 - DNA, 19 bp, Homo sapiens
  siRNA target sequence for MPHOSPH1 (NM_016195.1,3067-3085).
ccaatagggaaaattcttt

SEQ ID NO: 91936 - DNA, 19 bp, Homo sapiens
  siRNA target sequence for MPHOSPH1 (NM_016195.1,3082-3100).
ctttccactctagtattga

SEQ ID NO: 91937 - DNA, 19 bp, Homo sapiens
  siRNA target sequence for MPHOSPH1 (NM_016195.1,3114-3132).
gaatgtaaagagattgtga

SEQ ID NO: 91938 - DNA, 19 bp, Homo sapiens
  siRNA target sequence for MPHOSPH1 (NM_016195.1,3365-3383).
gagagcgctttcagaactt

SEQ ID NO: 91939 - DNA, 19 bp, Homo sapiens
  siRNA target sequence for MPHOSPH1 (NM_016195.1,3370-3388).
cgctttcagaacttacaca

SEQ ID NO: 91940 - DNA, 19 bp, Homo sapiens
  siRNA target sequence for MPHOSPH1 (NM_016195.1,3387-3405).
caaggtgttacttgctata

SEQ ID NO: 91941 - DNA, 19 bp, Homo sapiens
  siRNA target sequence for MPHOSPH1 (NM_016195.1,3397-3415).
cttgctataaggcaaaaat

SEQ ID NO: 91942 - DNA, 19 bp, Homo sapiens
  siRNA target sequence for MPHOSPH1 (NM_016195.1,3460-3478).
gtcattcagccaagttaga

SEQ ID NO: 91943 - DNA, 19 bp, Homo sapiens
  siRNA target sequence for MPHOSPH1 (NM_016195.1,3466-3484).
cagccaagttagaacaaga

SEQ ID NO: 91944 - DNA, 19 bp, Homo sapiens
  siRNA target sequence for MPHOSPH1 (NM_016195.1,3469-3487).
ccaagttagaacaagacat

SEQ ID NO: 91945 - DNA, 19 bp, Homo sapiens
  siRNA target sequence for MPHOSPH1 (NM_016195.1,3470-3488).
caagttagaacaagacatt

SEQ ID NO: 91946 - DNA, 19 bp, Homo sapiens
  siRNA target sequence for MPHOSPH1 (NM_016195.1,3533-3551).
ggaatttcaagaacatctt

SEQ ID NO: 91947 - DNA, 19 bp, Homo sapiens
  siRNA target sequence for MPHOSPH1 (NM_016195.1,3732-3750).
gctcgtacccagaatctga

SEQ ID NO: 91948 - DNA, 19 bp, Homo sapiens
  siRNA target sequence for MPHOSPH1 (NM_016195.1,3877-3895).
ggattaaaattaatgaact

SEQ ID NO: 91949 - DNA, 19 bp, Homo sapiens
  siRNA target sequence for MPHOSPH1 (NM_016195.1,3911-3929).
ccagtgttctcaggaatta

SEQ ID NO: 91950 - DNA, 19 bp, Homo sapiens
  siRNA target sequence for MPHOSPH1 (NM_016195.1,3954-3972).
caactcaaggagcagttaa

SEQ ID NO: 91951 - DNA, 19 bp, Homo sapiens
  siRNA target sequence for MPHOSPH1 (NM_016195.1,4010-4028).
gagagcatgcaaagatcta

SEQ ID NO: 91952 - DNA, 19 bp, Homo sapiens
  siRNA target sequence for MPHOSPH1 (NM_016195.1,4055-4073).
catgcgaatgacactagaa

SEQ ID NO: 91953 - DNA, 19 bp, Homo sapiens
  siRNA target sequence for MPHOSPH1 (NM_016195.1,4058-4076).
gcgaatgacactagaagaa

SEQ ID NO: 91954 - DNA, 19 bp, Homo sapiens
  siRNA target sequence for MPHOSPH1 (NM_016195.1,4238-4256).
gcttggaaagctcactaat

SEQ ID NO: 91955 - DNA, 19 bp, Homo sapiens
  siRNA target sequence for MPHOSPH1 (NM_016195.1,4243-4261).
gaaagctcactaatcttca

SEQ ID NO: 91956 - DNA, 19 bp, Homo sapiens
  siRNA target sequence for MPHOSPH1 (NM_016195.1,4247-4265).
gctcactaatcttcaagat

SEQ ID NO: 91957 - DNA, 19 bp, Homo sapiens
  siRNA target sequence for MPHOSPH1 (NM_016195.1,4392-4410).
gaggacagggagcgttttt

SEQ ID NO: 91958 - DNA, 19 bp, Homo sapiens
  siRNA target sequence for MPHOSPH1 (NM_016195.1,4394-4412).
ggacagggagcgttttttt

SEQ ID NO: 91959 - DNA, 19 bp, Homo sapiens
  siRNA target sequence for MPHOSPH1 (NM_016195.1,4395-4413).
gacagggagcgttttttta

SEQ ID NO: 91960 - DNA, 19 bp, Homo sapiens
  siRNA target sequence for MPHOSPH1 (NM_016195.1,4461-4479).
gatagtgaccttcaaaagt

SEQ ID NO: 91961 - DNA, 19 bp, Homo sapiens
  siRNA target sequence for MPHOSPH1 (NM_016195.1,4531-4549).
cactgatatccagtaatgt

SEQ ID NO: 91962 - DNA, 19 bp, Homo sapiens
  siRNA target sequence for MPHOSPH1 (NM_016195.1,4623-4641).
gatatcaagcccaaacgta

SEQ ID NO: 91963 - DNA, 19 bp, Homo sapiens
  siRNA target sequence for MPHOSPH1 (NM_016195.1,4628-4646).
caagcccaaacgtattagt

SEQ ID NO: 91964 - DNA, 19 bp, Homo sapiens
  siRNA target sequence for MPHOSPH1 (NM_016195.1,4631-4649).
gcccaaacgtattagttca

SEQ ID NO: 91965 - DNA, 19 bp, Homo sapiens
  siRNA target sequence for MPHOSPH1 (NM_016195.1,4648-4666).
cagcagatcctgacaaact

SEQ ID NO: 91966 - DNA, 19 bp, Homo sapiens
  siRNA target sequence for MPHOSPH1 (NM_016195.1,4674-4692).
gaacctctatcgacaagtt

SEQ ID NO: 91967 - DNA, 19 bp, Homo sapiens
  siRNA target sequence for MPHOSPH1 (NM_016195.1,4678-4696).
ctctatcgacaagttttga

SEQ ID NO: 91968 - DNA, 19 bp, Homo sapiens
  siRNA target sequence for MPHOSPH1 (NM_016195.1,4680-4698).
ctatcgacaagttttgaaa

SEQ ID NO: 91969 - DNA, 19 bp, Homo sapiens
  siRNA target sequence for MPHOSPH1 (NM_016195.1,4751-4769).
gtcaacagaaaatgatcaa

SEQ ID NO: 91970 - DNA, 19 bp, Homo sapiens
  siRNA target sequence for MPHOSPH1 (NM_016195.1,4772-4790).
cactcgatttccaaaacct

SEQ ID NO: 91971 - DNA, 19 bp, Homo sapiens
  siRNA target sequence for MPHOSPH1 (NM_016195.1,4782-4800).
ccaaaacctgagttagaga

SEQ ID NO: 91972 - DNA, 19 bp, Homo sapiens
  siRNA target sequence for MPHOSPH1 (NM_016195.1,4793-4811).
gttagagattcaatttaca

SEQ ID NO: 91973 - DNA, 19 bp, Homo sapiens
  siRNA target sequence for MPHOSPH1 (NM_016195.1,4799-4817).
gattcaatttacaccttta

SEQ ID NO: 91974 - DNA, 19 bp, Homo sapiens
  siRNA target sequence for MPHOSPH1 (NM_016195.1,4951-4969).
cacccagaactaatttgaa

SEQ ID NO: 91975 - DNA, 19 bp, Homo sapiens
  siRNA target sequence for MPHOSPH1 (NM_016195.1,5022-5040).
gccatacgtccatcatcta

SEQ ID NO: 91976 - DNA, 19 bp, Homo sapiens
  siRNA target sequence for MPHOSPH1 (NM_016195.1,5028-5046).
cgtccatcatctaagaaaa

SEQ ID NO: 91977 - DNA, 19 bp, Homo sapiens
  siRNA target sequence for MPHOSPH1 (NM_016195.1,5058-5076).
cggagtcaggcatccataa

SEQ ID NO: 91978 - DNA, 19 bp, Homo sapiens
  siRNA target sequence for MPHOSPH1 (NM_016195.1,5060-5078).
gagtcaggcatccataatt

SEQ ID NO: 91979 - DNA, 19 bp, Homo sapiens
  siRNA target sequence for MPHOSPH1 (NM_016195.1,5082-5100).
gtaaacctggccactaaga

SEQ ID NO: 91980 - DNA, 19 bp, Homo sapiens
  siRNA target sequence for MPHOSPH1 (NM_016195.1,5106-5124).
gaaggaacactacagaaat

SEQ ID NO: 91981 - DNA, 19 bp, Homo sapiens
  siRNA target sequence for MPHOSPH1 (NM_016195.1,5127-5145).
ggagacttcttacaacatt

SEQ ID NO: 91982 - DNA, 19 bp, Homo sapiens
  siRNA target sequence for MPHOSPH1 (NM_016195.1,5184-5202).
gaaacaatgagctcttcaa

SEQ ID NO: 91983 - DNA, 19 bp, Homo sapiens
  siRNA target sequence for MPHOSPH1 (NM_016195.1,5250-5268).
cgagccaaacggaaattat

SEQ ID NO: 91984 - DNA, 19 bp, Homo sapiens
  siRNA target sequence for MPHOSPH1 (NM_016195.1,5251-5269).
gagccaaacggaaattata

SEQ ID NO: 91985 - DNA, 19 bp, Homo sapiens
  siRNA target sequence for MPHOSPH1 (NM_016195.1,5255-5273).
caaacggaaattatacaca

SEQ ID NO: 91986 - DNA, 19 bp, Homo sapiens
  siRNA target sequence for MPHOSPH1 (NM_016195.1,5302-5320).
caggccaagtgattttaat

SEQ ID NO: 91987 - DNA, 19 bp, Homo sapiens
  siRNA target sequence for MPHOSPH1 (NM_016195.1,5337-5355).
gagagtgatcaccagatta

SEQ ID NO: 91988 - DNA, 19 bp, Homo sapiens
  siRNA target sequence for MPHOSPH1 (NM_016195.1,5341-5359).
gtgatcaccagattatcaa

SEQ ID NO: 91989 - DNA, 19 bp, Homo sapiens
  siRNA target sequence for MPHOSPH1 (NM_016195.1,5361-5379).
cgacgacttcgaacaaaaa

SEQ ID NO: 91990 - DNA, 19 bp, Homo sapiens
  siRNA target sequence for MST1R (NM_002447.1,141-159).
gcgactttgacgtgaagta

SEQ ID NO: 91991 - DNA, 19 bp, Homo sapiens
  siRNA target sequence for MST1R (NM_002447.1,372-390).
ccggtgacacagacacaaa

SEQ ID NO: 91992 - DNA, 19 bp, Homo sapiens
  siRNA target sequence for MST1R (NM_002447.1,755-773).
gtctcctacagtattgaat

SEQ ID NO: 91993 - DNA, 19 bp, Homo sapiens
  siRNA target sequence for MST1R (NM_002447.1,792-810).
cgggagccttcgtatactt

SEQ ID NO: 91994 - DNA, 19 bp, Homo sapiens
  siRNA target sequence for MST1R (NM_002447.1,889-907).
gccagagttgggtgactat

SEQ ID NO: 91995 - DNA, 19 bp, Homo sapiens
  siRNA target sequence for MST1R (NM_002447.1,916-934).
ggtcctcgactgcagattt

SEQ ID NO: 91996 - DNA, 19 bp, Homo sapiens
  siRNA target sequence for MST1R (NM_002447.1,919-937).
cctcgactgcagatttgct

SEQ ID NO: 91997 - DNA, 19 bp, Homo sapiens
  siRNA target sequence for MST1R (NM_002447.1,1051-1069).
gggccaggaagtactattt

SEQ ID NO: 91998 - DNA, 19 bp, Homo sapiens
  siRNA target sequence for MST1R (NM_002447.1,1142-1160).
gacctgctggacacactaa

SEQ ID NO: 91999 - DNA, 19 bp, Homo sapiens
  siRNA target sequence for MST1R (NM_002447.1,1172-1190).
gtggagcgctgttgtgaat

SEQ ID NO: 92000 - DNA, 19 bp, Homo sapiens
  siRNA target sequence for MST1R (NM_002447.1,1212-1230).
ggcgaggcctcgacttctt

SEQ ID NO: 92001 - DNA, 19 bp, Homo sapiens
  siRNA target sequence for MST1R (NM_002447.1,1228-1246).
cttccagtcgcccagtttt

SEQ ID NO: 92002 - DNA, 19 bp, Homo sapiens
  siRNA target sequence for MST1R (NM_002447.1,1329-1347).
cacgtgtggacctattcaa

SEQ ID NO: 92003 - DNA, 19 bp, Homo sapiens
  siRNA target sequence for MST1R (NM_002447.1,1370-1388).
gtcactgcattgtatgtga

SEQ ID NO: 92004 - DNA, 19 bp, Homo sapiens
  siRNA target sequence for MST1R (NM_002447.1,1451-1469).
gagctggtcaggtcactaa

SEQ ID NO: 92005 - DNA, 19 bp, Homo sapiens
  siRNA target sequence for MST1R (NM_002447.1,1454-1472).
ctggtcaggtcactaaact

SEQ ID NO: 92006 - DNA, 19 bp, Homo sapiens
  siRNA target sequence for MST1R (NM_002447.1,1563-1581).
cctctggggaccaggtttt

SEQ ID NO: 92007 - DNA, 19 bp, Homo sapiens
  siRNA target sequence for MST1R (NM_002447.1,1637-1655).
ctaagggcatggcatttca

SEQ ID NO: 92008 - DNA, 19 bp, Homo sapiens
  siRNA target sequence for MST1R (NM_002447.1,1885-1903).
gcccaaggacagctcaaaa

SEQ ID NO: 92009 - DNA, 19 bp, Homo sapiens
  siRNA target sequence for MST1R (NM_002447.1,2125-2143).
cacctgtctcactcttgaa

SEQ ID NO: 92010 - DNA, 19 bp, Homo sapiens
  siRNA target sequence for MST1R (NM_002447.1,2392-2410).
ctgtggccagcatctaact

SEQ ID NO: 92011 - DNA, 19 bp, Homo sapiens
  siRNA target sequence for MST1R (NM_002447.1,2571-2589).
gagctgctggctttacact

SEQ ID NO: 92012 - DNA, 19 bp, Homo sapiens
  siRNA target sequence for MST1R (NM_002447.1,2652-2670).
ctgaggagcatgccattaa

SEQ ID NO: 92013 - DNA, 19 bp, Homo sapiens
  siRNA target sequence for MST1R (NM_002447.1,2660-2678).
catgccattaagtttgagt

SEQ ID NO: 92014 - DNA, 19 bp, Homo sapiens
  siRNA target sequence for MST1R (NM_002447.1,2700-2718).
ctgactgtgtgggtatcaa

SEQ ID NO: 92015 - DNA, 19 bp, Homo sapiens
  siRNA target sequence for MST1R (NM_002447.1,2827-2845).
ctgcgtagatggtgaatgt

SEQ ID NO: 92016 - DNA, 19 bp, Homo sapiens
  siRNA target sequence for MST1R (NM_002447.1,2829-2847).
gcgtagatggtgaatgtca

SEQ ID NO: 92017 - DNA, 19 bp, Homo sapiens
  siRNA target sequence for MST1R (NM_002447.1,3141-3159).
catccttctccgatagtga

SEQ ID NO: 92018 - DNA, 19 bp, Homo sapiens
  siRNA target sequence for MST1R (NM_002447.1,3145-3163).
cttctccgatagtgaagat

SEQ ID NO: 92019 - DNA, 19 bp, Homo sapiens
  siRNA target sequence for MST1R (NM_002447.1,3176-3194).
ccactgctgcggaaagagt

SEQ ID NO: 92020 - DNA, 19 bp, Homo sapiens
  siRNA target sequence for MST1R (NM_002447.1,3314-3332).
gtctaccacggagaataca

SEQ ID NO: 92021 - DNA, 19 bp, Homo sapiens
  siRNA target sequence for MST1R (NM_002447.1,3316-3334).
ctaccacggagaatacata

SEQ ID NO: 92022 - DNA, 19 bp, Homo sapiens
  siRNA target sequence for MST1R (NM_002447.1,3335-3353).
gaccaggcccagaatcgaa

SEQ ID NO: 92023 - DNA, 19 bp, Homo sapiens
  siRNA target sequence for MST1R (NM_002447.1,3341-3359).
gcccagaatcgaatccaat

SEQ ID NO: 92024 - DNA, 19 bp, Homo sapiens
  siRNA target sequence for MST1R (NM_002447.1,3455-3473).
gtgctggctctcattggta

SEQ ID NO: 92025 - DNA, 19 bp, Homo sapiens
  siRNA target sequence for MST1R (NM_002447.1,3462-3480).
ctctcattggtatcatgtt

SEQ ID NO: 92026 - DNA, 19 bp, Homo sapiens
  siRNA target sequence for MST1R (NM_002447.1,3503-3521).
gtgctgctgccctatatgt

SEQ ID NO: 92027 - DNA, 19 bp, Homo sapiens
  siRNA target sequence for MST1R (NM_002447.1,3727-3745).
cctggacagggagtactat

SEQ ID NO: 92028 - DNA, 19 bp, Homo sapiens
  siRNA target sequence for MST1R (NM_002447.1,3728-3746).
ctggacagggagtactata

SEQ ID NO: 92029 - DNA, 19 bp, Homo sapiens
  siRNA target sequence for MST1R (NM_002447.1,3730-3748).
ggacagggagtactatagt

SEQ ID NO: 92030 - DNA, 19 bp, Homo sapiens
  siRNA target sequence for MST1R (NM_002447.1,3733-3751).
cagggagtactatagtgtt

SEQ ID NO: 92031 - DNA, 19 bp, Homo sapiens
  siRNA target sequence for MST1R (NM_002447.1,3736-3754).
ggagtactatagtgttcaa

SEQ ID NO: 92032 - DNA, 19 bp, Homo sapiens
  siRNA target sequence for MST1R (NM_002447.1,3797-3815).
gagagcctgcagacctata

SEQ ID NO: 92033 - DNA, 19 bp, Homo sapiens
  siRNA target sequence for MST1R (NM_002447.1,3799-3817).
gagcctgcagacctataga

SEQ ID NO: 92034 - DNA, 19 bp, Homo sapiens
  siRNA target sequence for MST1R (NM_002447.1,3802-3820).
cctgcagacctatagattt

SEQ ID NO: 92035 - DNA, 19 bp, Homo sapiens
  siRNA target sequence for MST1R (NM_002447.1,3803-3821).
ctgcagacctatagattta

SEQ ID NO: 92036 - DNA, 19 bp, Homo sapiens
  siRNA target sequence for MST1R (NM_002447.1,3806-3824).
cagacctatagatttacca

SEQ ID NO: 92037 - DNA, 19 bp, Homo sapiens
  siRNA target sequence for MST1R (NM_002447.1,3885-3903).
caccataccgccacattga

SEQ ID NO: 92038 - DNA, 19 bp, Homo sapiens
  siRNA target sequence for MST1R (NM_002447.1,3944-3962).
ctgccccagcctgagtatt

SEQ ID NO: 92039 - DNA, 19 bp, Homo sapiens
  siRNA target sequence for MST1R (NM_002447.1,4046-4064).
gaggtggagcagatagtgt

SEQ ID NO: 92040 - DNA, 19 bp, Homo sapiens
  siRNA target sequence for MST1R (NM_002447.1,4068-4086).
cactgcttggggaccatta

SEQ ID NO: 92041 - DNA, 19 bp, Homo sapiens
  siRNA target sequence for MST1R (NM_002447.1,4094-4112).
ctgccagcaacctacatga

SEQ ID NO: 92042 - DNA, 19 bp, Homo sapiens
  siRNA target sequence for MST1R (NM_002447.1,4125-4143).
gcacctcgcatgagatgaa

SEQ ID NO: 92043 - DNA, 19 bp, Homo sapiens
  siRNA target sequence for MST4 (NM_016542.2,278-296).
ccagaagaactgttcacaa

SEQ ID NO: 92044 - DNA, 19 bp, Homo sapiens
  siRNA target sequence for MST4 (NM_016542.2,281-299).
gaagaactgttcacaaaat

SEQ ID NO: 92045 - DNA, 19 bp, Homo sapiens
  siRNA target sequence for MST4 (NM_016542.2,357-375).
cccagcaagtcgttgctat

SEQ ID NO: 92046 - DNA, 19 bp, Homo sapiens
  siRNA target sequence for MST4 (NM_016542.2,358-376).
ccagcaagtcgttgctatt

SEQ ID NO: 92047 - DNA, 19 bp, Homo sapiens
  siRNA target sequence for MST4 (NM_016542.2,359-377).
cagcaagtcgttgctatta

SEQ ID NO: 92048 - DNA, 19 bp, Homo sapiens
  siRNA target sequence for MST4 (NM_016542.2,361-379).
gcaagtcgttgctattaaa

SEQ ID NO: 92049 - DNA, 19 bp, Homo sapiens
  siRNA target sequence for MST4 (NM_016542.2,365-383).
gtcgttgctattaaaatca

SEQ ID NO: 92050 - DNA, 19 bp, Homo sapiens
  siRNA target sequence for MST4 (NM_016542.2,367-385).
cgttgctattaaaatcata

SEQ ID NO: 92051 - DNA, 19 bp, Homo sapiens
  siRNA target sequence for MST4 (NM_016542.2,435-453).
ctgtcttgagtcaatgtga

SEQ ID NO: 92052 - DNA, 19 bp, Homo sapiens
  siRNA target sequence for MST4 (NM_016542.2,578-596).
cagattgctaccatgctaa

SEQ ID NO: 92053 - DNA, 19 bp, Homo sapiens
  siRNA target sequence for MST4 (NM_016542.2,588-606).
ccatgctaaaggaaatttt

SEQ ID NO: 92054 - DNA, 19 bp, Homo sapiens
  siRNA target sequence for MST4 (NM_016542.2,589-607).
catgctaaaggaaatttta

SEQ ID NO: 92055 - DNA, 19 bp, Homo sapiens
  siRNA target sequence for MST4 (NM_016542.2,616-634).
ggactatctgcattcagaa

SEQ ID NO: 92056 - DNA, 19 bp, Homo sapiens
  siRNA target sequence for MST4 (NM_016542.2,870-888).
cacctaactccgatatgca

SEQ ID NO: 92057 - DNA, 19 bp, Homo sapiens
  siRNA target sequence for MST4 (NM_016542.2,938-956).
gttggagactttactaagt

SEQ ID NO: 92058 - DNA, 19 bp, Homo sapiens
  siRNA target sequence for MST4 (NM_016542.2,941-959).
ggagactttactaagtctt

SEQ ID NO: 92059 - DNA, 19 bp, Homo sapiens
  siRNA target sequence for MST4 (NM_016542.2,1005-1023).
gtcctacagcaaaagaact

SEQ ID NO: 92060 - DNA, 19 bp, Homo sapiens
  siRNA target sequence for MST4 (NM_016542.2,1008-1026).
ctacagcaaaagaacttct

SEQ ID NO: 92061 - DNA, 19 bp, Homo sapiens
  siRNA target sequence for MST4 (NM_016542.2,1076-1094).
gaactgatagatcgtttta

SEQ ID NO: 92062 - DNA, 19 bp, Homo sapiens
  siRNA target sequence for MST4 (NM_016542.2,1079-1097).
ctgatagatcgttttaaga

SEQ ID NO: 92063 - DNA, 19 bp, Homo sapiens
  siRNA target sequence for MST4 (NM_016542.2,1142-1160).
ggctctgattcggaatcta

SEQ ID NO: 92064 - DNA, 19 bp, Homo sapiens
  siRNA target sequence for MST4 (NM_016542.2,1184-1202).
cctgaatggagctttacca

SEQ ID NO: 92065 - DNA, 19 bp, Homo sapiens
  siRNA target sequence for MST4 (NM_016542.2,1194-1212).
gctttaccaccgtacgaaa

SEQ ID NO: 92066 - DNA, 19 bp, Homo sapiens
  siRNA target sequence for MST4 (NM_016542.2,1216-1234).
gcctgatccaaagaaagta

SEQ ID NO: 92067 - DNA, 19 bp, Homo sapiens
  siRNA target sequence for MST4 (NM_016542.2,1259-1277).
gtgcaaaccctgagttgtt

SEQ ID NO: 92068 - DNA, 19 bp, Homo sapiens
  siRNA target sequence for MST4 (NM_016542.2,1285-1303).
gataatcacacctgcattt

SEQ ID NO: 92069 - DNA, 19 bp, Homo sapiens
  siRNA target sequence for MST4 (NM_016542.2,1295-1313).
cctgcatttgctgaactta

SEQ ID NO: 92070 - DNA, 19 bp, Homo sapiens
  siRNA target sequence for MST4 (NM_016542.2,1339-1357).
caggaatcaggcgattgaa

SEQ ID NO: 92071 - DNA, 19 bp, Homo sapiens
  siRNA target sequence for MST4 (NM_016542.2,1342-1360).
gaatcaggcgattgaagaa

SEQ ID NO: 92072 - DNA, 19 bp, Homo sapiens
  siRNA target sequence for MST4 (NM_016542.2,1395-1413).
gtcccggcatcacagataa

SEQ ID NO: 92073 - DNA, 19 bp, Homo sapiens
  siRNA target sequence for MST4 (NM_016542.2,1397-1415).
cccggcatcacagataaaa

SEQ ID NO: 92074 - DNA, 19 bp, Homo sapiens
  siRNA target sequence for MT (NM_014507.1,388-406).
ggccgctgtcgagaaacta

SEQ ID NO: 92075 - DNA, 19 bp, Homo sapiens
  siRNA target sequence for MT (NM_014507.1,391-409).
cgctgtcgagaaactacat

SEQ ID NO: 92076 - DNA, 19 bp, Homo sapiens
  siRNA target sequence for MT (NM_014507.1,393-411).
ctgtcgagaaactacatca

SEQ ID NO: 92077 - DNA, 19 bp, Homo sapiens
  siRNA target sequence for MT (NM_173467.2,641-659).
ctcagtccaagttcaactt

SEQ ID NO: 92078 - DNA, 19 bp, Homo sapiens
  siRNA target sequence for MT (NM_173467.2,654-672).
caacttcgcctgtttggaa

SEQ ID NO: 92079 - DNA, 19 bp, Homo sapiens
  siRNA target sequence for MT (NM_173467.2,879-897).
gcccctgacgcaagcttta

SEQ ID NO: 92080 - DNA, 19 bp, Homo sapiens
  siRNA target sequence for MT (NM_173467.2,880-898).
cccctgacgcaagctttaa

SEQ ID NO: 92081 - DNA, 19 bp, Homo sapiens
  siRNA target sequence for MT (NM_173467.2,881-899).
ccctgacgcaagctttaaa

SEQ ID NO: 92082 - DNA, 19 bp, Homo sapiens
  siRNA target sequence for MT (NM_173467.2,1028-1046).
cgatgcatgccatatacga

SEQ ID NO: 92083 - DNA, 19 bp, Homo sapiens
  siRNA target sequence for MT (NM_173467.2,1029-1047).
gatgcatgccatatacgaa

SEQ ID NO: 92084 - DNA, 19 bp, Homo sapiens
  siRNA target sequence for MT (NM_173467.2,1065-1083).
gttcccccaaactttcgaa

SEQ ID NO: 92085 - DNA, 19 bp, Homo sapiens
  siRNA target sequence for MTHFD1 (NM_005956.2,83-101).
ggagatctccgcgcaaata

SEQ ID NO: 92086 - DNA, 19 bp, Homo sapiens
  siRNA target sequence for MTHFD1 (NM_005956.2,84-102).
gagatctccgcgcaaataa

SEQ ID NO: 92087 - DNA, 19 bp, Homo sapiens
  siRNA target sequence for MTHFD1 (NM_005956.2,103-121).
gggcgagactgaaaaatca

SEQ ID NO: 92088 - DNA, 19 bp, Homo sapiens
  siRNA target sequence for MTHFD1 (NM_005956.2,104-122).
ggcgagactgaaaaatcaa

SEQ ID NO: 92089 - DNA, 19 bp, Homo sapiens
  siRNA target sequence for MTHFD1 (NM_005956.2,179-197).
ggttggcaacagagatgat

SEQ ID NO: 92090 - DNA, 19 bp, Homo sapiens
  siRNA target sequence for MTHFD1 (NM_005956.2,180-198).
gttggcaacagagatgatt

SEQ ID NO: 92091 - DNA, 19 bp, Homo sapiens
  siRNA target sequence for MTHFD1 (NM_005956.2,184-202).
gcaacagagatgattccaa

SEQ ID NO: 92092 - DNA, 19 bp, Homo sapiens
  siRNA target sequence for MTHFD1 (NM_005956.2,188-206).
cagagatgattccaatctt

SEQ ID NO: 92093 - DNA, 19 bp, Homo sapiens
  siRNA target sequence for MTHFD1 (NM_005956.2,245-263).
gatcaaagccactcacatt

SEQ ID NO: 92094 - DNA, 19 bp, Homo sapiens
  siRNA target sequence for MTHFD1 (NM_005956.2,291-309).
gaggtgatgaagtacatta

SEQ ID NO: 92095 - DNA, 19 bp, Homo sapiens
  siRNA target sequence for MTHFD1 (NM_005956.2,294-312).
gtgatgaagtacattacat

SEQ ID NO: 92096 - DNA, 19 bp, Homo sapiens
  siRNA target sequence for MTHFD1 (NM_005956.2,331-349).
ctgtacatgggttcttagt

SEQ ID NO: 92097 - DNA, 19 bp, Homo sapiens
  siRNA target sequence for MTHFD1 (NM_005956.2,344-362).
cttagtgcagctaccttta

SEQ ID NO: 92098 - DNA, 19 bp, Homo sapiens
  siRNA target sequence for MTHFD1 (NM_005956.2,350-368).
gcagctacctttagattca

SEQ ID NO: 92099 - DNA, 19 bp, Homo sapiens
  siRNA target sequence for MTHFD1 (NM_005956.2,363-381).
gattcagagaattccatta

SEQ ID NO: 92100 - DNA, 19 bp, Homo sapiens
  siRNA target sequence for MTHFD1 (NM_005956.2,420-438).
gatgtggatggattgacta

SEQ ID NO: 92101 - DNA, 19 bp, Homo sapiens
  siRNA target sequence for MTHFD1 (NM_005956.2,460-478).
ctagaggtgacctcaatga

SEQ ID NO: 92102 - DNA, 19 bp, Homo sapiens
  siRNA target sequence for MTHFD1 (NM_005956.2,505-523).
gatgcttggaactcatcaa

SEQ ID NO: 92103 - DNA, 19 bp, Homo sapiens
  siRNA target sequence for MTHFD1 (NM_005956.2,561-579).
gtggttgggcgcagtaaaa

SEQ ID NO: 92104 - DNA, 19 bp, Homo sapiens
  siRNA target sequence for MTHFD1 (NM_005956.2,563-581).
ggttgggcgcagtaaaata

SEQ ID NO: 92105 - DNA, 19 bp, Homo sapiens
  siRNA target sequence for MTHFD1 (NM_005956.2,657-675).
ctggatgaggaggtaaata

SEQ ID NO: 92106 - DNA, 19 bp, Homo sapiens
  siRNA target sequence for MTHFD1 (NM_005956.2,697-715).
caactggtcagcctgaaat

SEQ ID NO: 92107 - DNA, 19 bp, Homo sapiens
  siRNA target sequence for MTHFD1 (NM_005956.2,703-721).
gtcagcctgaaatggttaa

SEQ ID NO: 92108 - DNA, 19 bp, Homo sapiens
  siRNA target sequence for MTHFD1 (NM_005956.2,752-770).
catcgactgtggaatcaat

SEQ ID NO: 92109 - DNA, 19 bp, Homo sapiens
  siRNA target sequence for MTHFD1 (NM_005956.2,767-785).
caattatgtcccagatgat

SEQ ID NO: 92110 - DNA, 19 bp, Homo sapiens
  siRNA target sequence for MTHFD1 (NM_005956.2,840-858).
gagagggcgagcttcatca

SEQ ID NO: 92111 - DNA, 19 bp, Homo sapiens
  siRNA target sequence for MTHFD1 (NM_005956.2,950-968).
gccaggaaagtggatgatt

SEQ ID NO: 92112 - DNA, 19 bp, Homo sapiens
  siRNA target sequence for MTHFD1 (NM_005956.2,1014-1032).
gatatatcacgatcttgta

SEQ ID NO: 92113 - DNA, 19 bp, Homo sapiens
  siRNA target sequence for MTHFD1 (NM_005956.2,1048-1066).
gtaagctggctcgagaaat

SEQ ID NO: 92114 - DNA, 19 bp, Homo sapiens
  siRNA target sequence for MTHFD1 (NM_005956.2,1052-1070).
gctggctcgagaaattggt

SEQ ID NO: 92115 - DNA, 19 bp, Homo sapiens
  siRNA target sequence for MTHFD1 (NM_005956.2,1074-1092).
ctgtctgaagaggtagaat

SEQ ID NO: 92116 - DNA, 19 bp, Homo sapiens
  siRNA target sequence for MTHFD1 (NM_005956.2,1418-1436).
cgttgctgcggccattgat

SEQ ID NO: 92117 - DNA, 19 bp, Homo sapiens
  siRNA target sequence for MTHFD1 (NM_005956.2,1430-1448).
cattgatgctcggatattt

SEQ ID NO: 92118 - DNA, 19 bp, Homo sapiens
  siRNA target sequence for MTHFD1 (NM_005956.2,1465-1483).
cagacaaggctctctttaa

SEQ ID NO: 92119 - DNA, 19 bp, Homo sapiens
  siRNA target sequence for MTHFD1 (NM_005956.2,1469-1487).
caaggctctctttaatcgt

SEQ ID NO: 92120 - DNA, 19 bp, Homo sapiens
  siRNA target sequence for MTHFD1 (NM_005956.2,1485-1503).
cgtttggtgccatcagtaa

SEQ ID NO: 92121 - DNA, 19 bp, Homo sapiens
  siRNA target sequence for MTHFD1 (NM_005956.2,1516-1534).
ggttctctgacatccaaat

SEQ ID NO: 92122 - DNA, 19 bp, Homo sapiens
  siRNA target sequence for MTHFD1 (NM_005956.2,1526-1544).
catccaaatccgaaggtta

SEQ ID NO: 92123 - DNA, 19 bp, Homo sapiens
  siRNA target sequence for MTHFD1 (NM_005956.2,1530-1548).
caaatccgaaggttaaaga

SEQ ID NO: 92124 - DNA, 19 bp, Homo sapiens
  siRNA target sequence for MTHFD1 (NM_005956.2,1593-1611).
gagataaacagatttgcaa

SEQ ID NO: 92125 - DNA, 19 bp, Homo sapiens
  siRNA target sequence for MTHFD1 (NM_005956.2,1720-1738).
cacggacggcccagtttga

SEQ ID NO: 92126 - DNA, 19 bp, Homo sapiens
  siRNA target sequence for MTHFD1 (NM_005956.2,1722-1740).
cggacggcccagtttgata

SEQ ID NO: 92127 - DNA, 19 bp, Homo sapiens
  siRNA target sequence for MTHFD1 (NM_005956.2,1723-1741).
ggacggcccagtttgatat

SEQ ID NO: 92128 - DNA, 19 bp, Homo sapiens
  siRNA target sequence for MTHFD1 (NM_005956.2,1727-1745).
ggcccagtttgatatctct

SEQ ID NO: 92129 - DNA, 19 bp, Homo sapiens
  siRNA target sequence for MTHFD1 (NM_005956.2,1821-1839).
gtggtggcatccagtaaga

SEQ ID NO: 92130 - DNA, 19 bp, Homo sapiens
  siRNA target sequence for MTHFD1 (NM_005956.2,1849-1867).
ccgtcagtgccgaagatct

SEQ ID NO: 92131 - DNA, 19 bp, Homo sapiens
  siRNA target sequence for MTHFD1 (NM_005956.2,1881-1899).
gcactgacagtgcttatga

SEQ ID NO: 92132 - DNA, 19 bp, Homo sapiens
  siRNA target sequence for MTHFD1 (NM_005956.2,1905-1923).
gcaatcaagcccaatctca

SEQ ID NO: 92133 - DNA, 19 bp, Homo sapiens
  siRNA target sequence for MTHFD1 (NM_005956.2,1906-1924).
caatcaagcccaatctcat

SEQ ID NO: 92134 - DNA, 19 bp, Homo sapiens
  siRNA target sequence for MTHFD1 (NM_005956.2,1934-1952).
ggagggcactccagtgttt

SEQ ID NO: 92135 - DNA, 19 bp, Homo sapiens
  siRNA target sequence for MTHFD1 (NM_005956.2,2032-2050).
gcccagaagggtttgtagt

SEQ ID NO: 92136 - DNA, 19 bp, Homo sapiens
  siRNA target sequence for MTHFD1 (NM_005956.2,2152-2170).
ctgtcagggctctcaagat

SEQ ID NO: 92137 - DNA, 19 bp, Homo sapiens
  siRNA target sequence for MTHFD1 (NM_005956.2,2206-2224).
ctcttcccaaggcttacat

SEQ ID NO: 92138 - DNA, 19 bp, Homo sapiens
  siRNA target sequence for MTHFD1 (NM_005956.2,2294-2312).
gtttggaattccagtagta

SEQ ID NO: 92139 - DNA, 19 bp, Homo sapiens
  siRNA target sequence for MTHFD1 (NM_005956.2,2310-2328).
gtagtggccgtgaatgcat

SEQ ID NO: 92140 - DNA, 19 bp, Homo sapiens
  siRNA target sequence for MTHFD1 (NM_005956.2,2326-2344).
cattcaagacggatacaga

SEQ ID NO: 92141 - DNA, 19 bp, Homo sapiens
  siRNA target sequence for MTHFD1 (NM_005956.2,2522-2540).
ggataaaatcaggatcatt

SEQ ID NO: 92142 - DNA, 19 bp, Homo sapiens
  siRNA target sequence for MTHFD1 (NM_005956.2,2560-2578).
cagatgacattgaattact

SEQ ID NO: 92143 - DNA, 19 bp, Homo sapiens
  siRNA target sequence for MTHFD1 (NM_005956.2,2668-2686).
ctcacaacccagagcaaaa

SEQ ID NO: 92144 - DNA, 19 bp, Homo sapiens
  siRNA target sequence for MTHFD1 (NM_005956.2,2672-2690).
caacccagagcaaaaaggt

SEQ ID NO: 92145 - DNA, 19 bp, Homo sapiens
  siRNA target sequence for MTHFD1 (NM_005956.2,2801-2819).
gccctgtttttatgatatt

SEQ ID NO: 92146 - DNA, 19 bp, Homo sapiens
  siRNA target sequence for MTHFD1 (NM_005956.2,2803-2821).
cctgtttttatgatattga

SEQ ID NO: 92147 - DNA, 19 bp, Homo sapiens
  siRNA target sequence for MTHFD1 (NM_005956.2,2836-2854).
cagaacaggtgaatggatt

SEQ ID NO: 92148 - DNA, 19 bp, Homo sapiens
  siRNA target sequence for MTHFD1 (NM_005956.2,2838-2856).
gaacaggtgaatggattat

SEQ ID NO: 92149 - DNA, 19 bp, Homo sapiens
  siRNA target sequence for MUSK (NM_005592.1,49-67).
gagagagctcgtcaacatt

SEQ ID NO: 92150 - DNA, 19 bp, Homo sapiens
  siRNA target sequence for MUSK (NM_005592.1,136-154).
caccactcctcttgaaaca

SEQ ID NO: 92151 - DNA, 19 bp, Homo sapiens
  siRNA target sequence for MUSK (NM_005592.1,153-171).
cagtggatgccttagttga

SEQ ID NO: 92152 - DNA, 19 bp, Homo sapiens
  siRNA target sequence for MUSK (NM_005592.1,170-188).
gaagaagtggctactttca

SEQ ID NO: 92153 - DNA, 19 bp, Homo sapiens
  siRNA target sequence for MUSK (NM_005592.1,173-191).
gaagtggctactttcatgt

SEQ ID NO: 92154 - DNA, 19 bp, Homo sapiens
  siRNA target sequence for MUSK (NM_005592.1,218-236).
gagatttcctggactagaa

SEQ ID NO: 92155 - DNA, 19 bp, Homo sapiens
  siRNA target sequence for MUSK (NM_005592.1,226-244).
ctggactagaaataaaatt

SEQ ID NO: 92156 - DNA, 19 bp, Homo sapiens
  siRNA target sequence for MUSK (NM_005592.1,337-355).
ctgctgcacggccaacaat

SEQ ID NO: 92157 - DNA, 19 bp, Homo sapiens
  siRNA target sequence for MUSK (NM_005592.1,381-399).
gtggagccctgcaagtgaa

SEQ ID NO: 92158 - DNA, 19 bp, Homo sapiens
  siRNA target sequence for MUSK (NM_005592.1,422-440).
cctcccataaatgtgaaaa

SEQ ID NO: 92159 - DNA, 19 bp, Homo sapiens
  siRNA target sequence for MUSK (NM_005592.1,888-906).
catgcatagctaccaataa

SEQ ID NO: 92160 - DNA, 19 bp, Homo sapiens
  siRNA target sequence for MUSK (NM_005592.1,891-909).
gcatagctaccaataagca

SEQ ID NO: 92161 - DNA, 19 bp, Homo sapiens
  siRNA target sequence for MUSK (NM_005592.1,892-910).
catagctaccaataagcat

SEQ ID NO: 92162 - DNA, 19 bp, Homo sapiens
  siRNA target sequence for MUSK (NM_005592.1,1102-1120).
ccacacggcctggaatgaa

SEQ ID NO: 92163 - DNA, 19 bp, Homo sapiens
  siRNA target sequence for MUSK (NM_005592.1,1107-1125).
cggcctggaatgaactgaa

SEQ ID NO: 92164 - DNA, 19 bp, Homo sapiens
  siRNA target sequence for MUSK (NM_005592.1,1154-1172).
gctgaggctttgttgtgta

SEQ ID NO: 92165 - DNA, 19 bp, Homo sapiens
  siRNA target sequence for MUSK (NM_005592.1,1255-1273).
gctcttctgcgcaaaagaa

SEQ ID NO: 92166 - DNA, 19 bp, Homo sapiens
  siRNA target sequence for MUSK (NM_005592.1,1461-1479).
gtgtggacattccaaatct

SEQ ID NO: 92167 - DNA, 19 bp, Homo sapiens
  siRNA target sequence for MUSK (NM_005592.1,1546-1564).
catgtccagctttgcaata

SEQ ID NO: 92168 - DNA, 19 bp, Homo sapiens
  siRNA target sequence for MUSK (NM_005592.1,1568-1586).
gtgcttcttaccataacta

SEQ ID NO: 92169 - DNA, 19 bp, Homo sapiens
  siRNA target sequence for MUSK (NM_005592.1,1570-1588).
gcttcttaccataactact

SEQ ID NO: 92170 - DNA, 19 bp, Homo sapiens
  siRNA target sequence for MUSK (NM_005592.1,1665-1683).
cttctgagctcttactaga

SEQ ID NO: 92171 - DNA, 19 bp, Homo sapiens
  siRNA target sequence for MUSK (NM_005592.1,1675-1693).
cttactagatagacttcat

SEQ ID NO: 92172 - DNA, 19 bp, Homo sapiens
  siRNA target sequence for MUSK (NM_005592.1,1713-1731).
ggatgccgctccttctgaa

SEQ ID NO: 92173 - DNA, 19 bp, Homo sapiens
  siRNA target sequence for MUSK (NM_005592.1,1742-1760).
ctcagcctggagtatccaa

SEQ ID NO: 92174 - DNA, 19 bp, Homo sapiens
  siRNA target sequence for MUSK (NM_005592.1,1757-1775).
ccaaggaataacattgaat

SEQ ID NO: 92175 - DNA, 19 bp, Homo sapiens
  siRNA target sequence for MUSK (NM_005592.1,1842-1860).
cctatgaacctttcactat

SEQ ID NO: 92176 - DNA, 19 bp, Homo sapiens
  siRNA target sequence for MUSK (NM_005592.1,1926-1944).
cagccctcatggcagaatt

SEQ ID NO: 92177 - DNA, 19 bp, Homo sapiens
  siRNA target sequence for MUSK (NM_005592.1,1946-1964).
gacaaccctaacattgtga

SEQ ID NO: 92178 - DNA, 19 bp, Homo sapiens
  siRNA target sequence for MUSK (NM_005592.1,2187-2205).
cttacctctcagaacgtaa

SEQ ID NO: 92179 - DNA, 19 bp, Homo sapiens
  siRNA target sequence for MUSK (NM_005592.1,2196-2214).
cagaacgtaagtttgttca

SEQ ID NO: 92180 - DNA, 19 bp, Homo sapiens
  siRNA target sequence for MUSK (NM_005592.1,2303-2321).
gcagactactacaaagcta

SEQ ID NO: 92181 - DNA, 19 bp, Homo sapiens
  siRNA target sequence for MUSK (NM_005592.1,2304-2322).
cagactactacaaagctaa

SEQ ID NO: 92182 - DNA, 19 bp, Homo sapiens
  siRNA target sequence for MUSK (NM_005592.1,2468-2486).
catgaggaggtcatttact

SEQ ID NO: 92183 - DNA, 19 bp, Homo sapiens
  siRNA target sequence for MUSK (NM_005592.1,2542-2560).
caatctcatgcgtctatgt

SEQ ID NO: 92184 - DNA, 19 bp, Homo sapiens
  siRNA target sequence for MUSK (NM_005592.1,2586-2604).
ccagtttcaccagtattca

SEQ ID NO: 92185 - DNA, 19 bp, Homo sapiens
  siRNA target sequence for MUSK (NM_005592.1,2595-2613).
ccagtattcaccgaattct

SEQ ID NO: 92186 - DNA, 19 bp, Homo sapiens
  siRNA target sequence for MVD (NM_002461.1,26-44).
ctggcggcagtcacttgta

SEQ ID NO: 92187 - DNA, 19 bp, Homo sapiens
  siRNA target sequence for MVD (NM_002461.1,28-46).
ggcggcagtcacttgtaca

SEQ ID NO: 92188 - DNA, 19 bp, Homo sapiens
  siRNA target sequence for MVD (NM_002461.1,78-96).
ggggcaagcgcgatgaaga

SEQ ID NO: 92189 - DNA, 19 bp, Homo sapiens
  siRNA target sequence for MVD (NM_002461.1,136-154).
gcaccaggaccagttaaaa

SEQ ID NO: 92190 - DNA, 19 bp, Homo sapiens
  siRNA target sequence for MVD (NM_002461.1,1098-1116).
ccggtggggtcaaatacat

SEQ ID NO: 92191 - DNA, 19 bp, Homo sapiens
  siRNA target sequence for MVD (NM_002461.1,1100-1118).
ggtggggtcaaatacatca

SEQ ID NO: 92192 - DNA, 19 bp, Homo sapiens
  siRNA target sequence for MVD (NM_002461.1,1101-1119).
gtggggtcaaatacatcat

SEQ ID NO: 92193 - DNA, 19 bp, Homo sapiens
  siRNA target sequence for MVD (NM_002461.1,1104-1122).
gggtcaaatacatcattgt

SEQ ID NO: 92194 - DNA, 19 bp, Homo sapiens
  siRNA target sequence for MVK (NM_000431.1,118-136).
catccttcatggagaacat

SEQ ID NO: 92195 - DNA, 19 bp, Homo sapiens
  siRNA target sequence for MVK (NM_000431.1,164-182).
gctgtatccttgaacttga

SEQ ID NO: 92196 - DNA, 19 bp, Homo sapiens
  siRNA target sequence for MVK (NM_000431.1,231-249).
gcttacccaacattggtat

SEQ ID NO: 92197 - DNA, 19 bp, Homo sapiens
  siRNA target sequence for MVK (NM_000431.1,280-298).
gtcactggacacaagcttt

SEQ ID NO: 92198 - DNA, 19 bp, Homo sapiens
  siRNA target sequence for MVK (NM_000431.1,450-468).
ccctgccgagcctggatat

SEQ ID NO: 92199 - DNA, 19 bp, Homo sapiens
  siRNA target sequence for MVK (NM_000431.1,454-472).
gccgagcctggatatcgta

SEQ ID NO: 92200 - DNA, 19 bp, Homo sapiens
  siRNA target sequence for MVK (NM_000431.1,603-621).
ggtggaccaaggaggattt

SEQ ID NO: 92201 - DNA, 19 bp, Homo sapiens
  siRNA target sequence for MVK (NM_000431.1,613-631).
ggaggatttggagctaatt

SEQ ID NO: 92202 - DNA, 19 bp, Homo sapiens
  siRNA target sequence for MVK (NM_000431.1,614-632).
gaggatttggagctaatta

SEQ ID NO: 92203 - DNA, 19 bp, Homo sapiens
  siRNA target sequence for MYH1 (NM_005963.2,509-527).
gggagaatcagtctatctt

SEQ ID NO: 92204 - DNA, 19 bp, Homo sapiens
  siRNA target sequence for MYH1 (NM_005963.2,813-831).
ggagaagtctagagttact

SEQ ID NO: 92205 - DNA, 19 bp, Homo sapiens
  siRNA target sequence for MYH1 (NM_005963.2,2247-2265).
cctggggtccattgacatt

SEQ ID NO: 92206 - DNA, 19 bp, Homo sapiens
  siRNA target sequence for MYH1 (NM_005963.2,3912-3930).
gctctcgaggggcaaacaa

SEQ ID NO: 92207 - DNA, 19 bp, Homo sapiens
  siRNA target sequence for MYH1 (NM_005963.2,4437-4455).
ctcactcagcacagaacta

SEQ ID NO: 92208 - DNA, 19 bp, Homo sapiens
  siRNA target sequence for MYH1 (NM_005963.2,4441-4459).
ctcagcacagaactattta

SEQ ID NO: 92209 - DNA, 19 bp, Homo sapiens
  siRNA target sequence for MYH1 (NM_005963.2,5623-5641).
ctgcaagcaaaggtgaaat

SEQ ID NO: 92210 - DNA, 19 bp, Homo sapiens
  siRNA target sequence for MYH11 (NM_002474.1,292-310).
ggtcacggttgggaaagat

SEQ ID NO: 92211 - DNA, 19 bp, Homo sapiens
  siRNA target sequence for MYH11 (NM_002474.1,401-419).
ctgagggagcggtacttct

SEQ ID NO: 92212 - DNA, 19 bp, Homo sapiens
  siRNA target sequence for MYH11 (NM_002474.1,415-433).
cttctcagggctaatatat

SEQ ID NO: 92213 - DNA, 19 bp, Homo sapiens
  siRNA target sequence for MYH11 (NM_002474.1,420-438).
cagggctaatatatacgta

SEQ ID NO: 92214 - DNA, 19 bp, Homo sapiens
  siRNA target sequence for MYH11 (NM_002474.1,457-475).
ggtggtcaacccctataaa

SEQ ID NO: 92215 - DNA, 19 bp, Homo sapiens
  siRNA target sequence for MYH11 (NM_002474.1,574-592).
ccggagcatgcttcaagat

SEQ ID NO: 92216 - DNA, 19 bp, Homo sapiens
  siRNA target sequence for MYH11 (NM_002474.1,632-650).
gccgggaaaaccgaaaaca

SEQ ID NO: 92217 - DNA, 19 bp, Homo sapiens
  siRNA target sequence for MYH11 (NM_002474.1,698-716).
ggcaagaaagacacaagta

SEQ ID NO: 92218 - DNA, 19 bp, Homo sapiens
  siRNA target sequence for MYH11 (NM_002474.1,699-717).
gcaagaaagacacaagtat

SEQ ID NO: 92219 - DNA, 19 bp, Homo sapiens
  siRNA target sequence for MYH11 (NM_002474.1,877-895).
ctatctgctagaaaaatca

SEQ ID NO: 92220 - DNA, 19 bp, Homo sapiens
  siRNA target sequence for MYH11 (NM_002474.1,1233-1251).
gccacctcatgggaattaa

SEQ ID NO: 92221 - DNA, 19 bp, Homo sapiens
  siRNA target sequence for MYH11 (NM_002474.1,1234-1252).
ccacctcatgggaattaat

SEQ ID NO: 92222 - DNA, 19 bp, Homo sapiens
  siRNA target sequence for MYH11 (NM_002474.1,1356-1374).
ctttggccaaggcaacata

SEQ ID NO: 92223 - DNA, 19 bp, Homo sapiens
  siRNA target sequence for MYH11 (NM_002474.1,1808-1826).
gagttctccatcatccatt

SEQ ID NO: 92224 - DNA, 19 bp, Homo sapiens
  siRNA target sequence for MYH11 (NM_002474.1,2350-2368).
ggaacttgaccccaactta

SEQ ID NO: 92225 - DNA, 19 bp, Homo sapiens
  siRNA target sequence for MYH11 (NM_002474.1,2351-2369).
gaacttgaccccaacttat

SEQ ID NO: 92226 - DNA, 19 bp, Homo sapiens
  siRNA target sequence for MYH11 (NM_002474.1,2529-2547).
ccgccatgaaggtgattca

SEQ ID NO: 92227 - DNA, 19 bp, Homo sapiens
  siRNA target sequence for MYH11 (NM_002474.1,2595-2613).
ggcttttcaccaaagtgaa

SEQ ID NO: 92228 - DNA, 19 bp, Homo sapiens
  siRNA target sequence for MYH11 (NM_002474.1,3114-3132).
gtgacttaacgacaaatct

SEQ ID NO: 92229 - DNA, 19 bp, Homo sapiens
  siRNA target sequence for MYH11 (NM_002474.1,3181-3199).
gcatgaatctatgatttca

SEQ ID NO: 92230 - DNA, 19 bp, Homo sapiens
  siRNA target sequence for MYH11 (NM_002474.1,3203-3221).
ctggaagtgcggctaaaga

SEQ ID NO: 92231 - DNA, 19 bp, Homo sapiens
  siRNA target sequence for MYH11 (NM_002474.1,3741-3759).
ccaaggcgaacctagacaa

SEQ ID NO: 92232 - DNA, 19 bp, Homo sapiens
  siRNA target sequence for MYH11 (NM_002474.1,3745-3763).
ggcgaacctagacaagaat

SEQ ID NO: 92233 - DNA, 19 bp, Homo sapiens
  siRNA target sequence for MYH11 (NM_002474.1,3746-3764).
gcgaacctagacaagaata

SEQ ID NO: 92234 - DNA, 19 bp, Homo sapiens
  siRNA target sequence for MYH11 (NM_002474.1,3747-3765).
cgaacctagacaagaataa

SEQ ID NO: 92235 - DNA, 19 bp, Homo sapiens
  siRNA target sequence for MYH11 (NM_002474.1,4376-4394).
gacgacctggttgttgatt

SEQ ID NO: 92236 - DNA, 19 bp, Homo sapiens
  siRNA target sequence for MYH11 (NM_002474.1,4440-4458).
ggaaatttgatcagttgtt

SEQ ID NO: 92237 - DNA, 19 bp, Homo sapiens
  siRNA target sequence for MYH11 (NM_002474.1,4460-4478).
gccgaggagaaaaacatct

SEQ ID NO: 92238 - DNA, 19 bp, Homo sapiens
  siRNA target sequence for MYH11 (NM_002474.1,4592-4610).
ctcgagcggaccaacaaaa

SEQ ID NO: 92239 - DNA, 19 bp, Homo sapiens
  siRNA target sequence for MYH11 (NM_002474.1,4877-4895).
cagcttcacgagtatgaga

SEQ ID NO: 92240 - DNA, 19 bp, Homo sapiens
  siRNA target sequence for MYH11 (NM_002474.1,4903-4921).
ggaagacgagcgaaagcaa

SEQ ID NO: 92241 - DNA, 19 bp, Homo sapiens
  siRNA target sequence for MYH11 (NM_002474.1,5421-5439).
gcacggcccagaagaatga

SEQ ID NO: 92242 - DNA, 19 bp, Homo sapiens
  siRNA target sequence for MYH13 (NM_003802.1,172-190).
caaaatcgtccattcgatt

SEQ ID NO: 92243 - DNA, 19 bp, Homo sapiens
  siRNA target sequence for MYH13 (NM_003802.1,203-221).
gctttgtagcggataataa

SEQ ID NO: 92244 - DNA, 19 bp, Homo sapiens
  siRNA target sequence for MYH13 (NM_003802.1,208-226).
gtagcggataataaggaaa

SEQ ID NO: 92245 - DNA, 19 bp, Homo sapiens
  siRNA target sequence for MYH13 (NM_003802.1,211-229).
gcggataataaggaaatgt

SEQ ID NO: 92246 - DNA, 19 bp, Homo sapiens
  siRNA target sequence for MYH13 (NM_003802.1,212-230).
cggataataaggaaatgta

SEQ ID NO: 92247 - DNA, 19 bp, Homo sapiens
  siRNA target sequence for MYH13 (NM_003802.1,243-261).
gatccagactagggaaaat

SEQ ID NO: 92248 - DNA, 19 bp, Homo sapiens
  siRNA target sequence for MYH13 (NM_003802.1,293-311).
ggatgctcactctgaacaa

SEQ ID NO: 92249 - DNA, 19 bp, Homo sapiens
  siRNA target sequence for MYH13 (NM_003802.1,871-889).
gcatcggcagacatcgaaa

SEQ ID NO: 92250 - DNA, 19 bp, Homo sapiens
  siRNA target sequence for MYH13 (NM_003802.1,875-893).
cggcagacatcgaaactta

SEQ ID NO: 92251 - DNA, 19 bp, Homo sapiens
  siRNA target sequence for MYH13 (NM_003802.1,876-894).
ggcagacatcgaaacttat

SEQ ID NO: 92252 - DNA, 19 bp, Homo sapiens
  siRNA target sequence for MYH13 (NM_003802.1,880-898).
gacatcgaaacttatctgt

SEQ ID NO: 92253 - DNA, 19 bp, Homo sapiens
  siRNA target sequence for MYH13 (NM_003802.1,882-900).
catcgaaacttatctgtta

SEQ ID NO: 92254 - DNA, 19 bp, Homo sapiens
  siRNA target sequence for MYH13 (NM_003802.1,908-926).
ccagagtgacgtttcaatt

SEQ ID NO: 92255 - DNA, 19 bp, Homo sapiens
  siRNA target sequence for MYH13 (NM_003802.1,909-927).
cagagtgacgtttcaatta

SEQ ID NO: 92256 - DNA, 19 bp, Homo sapiens
  siRNA target sequence for MYH13 (NM_003802.1,913-931).
gtgacgtttcaattatcca

SEQ ID NO: 92257 - DNA, 19 bp, Homo sapiens
  siRNA target sequence for MYH13 (NM_003802.1,1050-1068).
cacggtagccagtatcgat

SEQ ID NO: 92258 - DNA, 19 bp, Homo sapiens
  siRNA target sequence for MYH13 (NM_003802.1,1129-1147).
gagaaagtcgggatctaca

SEQ ID NO: 92259 - DNA, 19 bp, Homo sapiens
  siRNA target sequence for MYH13 (NM_003802.1,1131-1149).
gaaagtcgggatctacaaa

SEQ ID NO: 92260 - DNA, 19 bp, Homo sapiens
  siRNA target sequence for MYH13 (NM_003802.1,1135-1153).
gtcgggatctacaaactga

SEQ ID NO: 92261 - DNA, 19 bp, Homo sapiens
  siRNA target sequence for MYH13 (NM_003802.1,1345-1363).
gtccagcaggtgaccaatt

SEQ ID NO: 92262 - DNA, 19 bp, Homo sapiens
  siRNA target sequence for MYH13 (NM_003802.1,2769-2787).
gcaggtccagtctgaaaca

SEQ ID NO: 92263 - DNA, 19 bp, Homo sapiens
  siRNA target sequence for MYH13 (NM_003802.1,2772-2790).
ggtccagtctgaaacagaa

SEQ ID NO: 92264 - DNA, 19 bp, Homo sapiens
  siRNA target sequence for MYH13 (NM_003802.1,2814-2832).
gtgtgaaggactcatcaaa

SEQ ID NO: 92265 - DNA, 19 bp, Homo sapiens
  siRNA target sequence for MYH13 (NM_003802.1,2838-2856).
gatcctactggaagcaaaa

SEQ ID NO: 92266 - DNA, 19 bp, Homo sapiens
  siRNA target sequence for MYH13 (NM_003802.1,2865-2883).
gctgacggagagattggaa

SEQ ID NO: 92267 - DNA, 19 bp, Homo sapiens
  siRNA target sequence for MYH13 (NM_003802.1,2946-2964).
ctctctcaagagagacatt

SEQ ID NO: 92268 - DNA, 19 bp, Homo sapiens
  siRNA target sequence for MYH13 (NM_003802.1,2948-2966).
ctctcaagagagacattga

SEQ ID NO: 92269 - DNA, 19 bp, Homo sapiens
  siRNA target sequence for MYH13 (NM_003802.1,2976-2994).
gctgaccttgacgaaagtt

SEQ ID NO: 92270 - DNA, 19 bp, Homo sapiens
  siRNA target sequence for MYH13 (NM_003802.1,2979-2997).
gaccttgacgaaagttgaa

SEQ ID NO: 92271 - DNA, 19 bp, Homo sapiens
  siRNA target sequence for MYH13 (NM_003802.1,2981-2999).
ccttgacgaaagttgaaaa

SEQ ID NO: 92272 - DNA, 19 bp, Homo sapiens
  siRNA target sequence for MYH13 (NM_003802.1,3288-3306).
ccaggaatccattatggat

SEQ ID NO: 92273 - DNA, 19 bp, Homo sapiens
  siRNA target sequence for MYH13 (NM_003802.1,3354-3372).
gtttgaactcagtcagtta

SEQ ID NO: 92274 - DNA, 19 bp, Homo sapiens
  siRNA target sequence for MYH13 (NM_003802.1,3399-3417).
ccacagtttgcagtttcaa

SEQ ID NO: 92275 - DNA, 19 bp, Homo sapiens
  siRNA target sequence for MYH13 (NM_003802.1,3484-3502).
ctcagagccaagattgaga

SEQ ID NO: 92276 - DNA, 19 bp, Homo sapiens
  siRNA target sequence for MYH13 (NM_003802.1,3814-3832).
ctctccaagtcaaagagta

SEQ ID NO: 92277 - DNA, 19 bp, Homo sapiens
  siRNA target sequence for MYH13 (NM_003802.1,3818-3836).
ccaagtcaaagagtaacat

SEQ ID NO: 92278 - DNA, 19 bp, Homo sapiens
  siRNA target sequence for MYH13 (NM_003802.1,3822-3840).
gtcaaagagtaacatagaa

SEQ ID NO: 92279 - DNA, 19 bp, Homo sapiens
  siRNA target sequence for MYH13 (NM_003802.1,3845-3863).
cgtgccggacggtagaaga

SEQ ID NO: 92280 - DNA, 19 bp, Homo sapiens
  siRNA target sequence for MYH13 (NM_003802.1,3848-3866).
gccggacggtagaagatca

SEQ ID NO: 92281 - DNA, 19 bp, Homo sapiens
  siRNA target sequence for MYH13 (NM_003802.1,3849-3867).
ccggacggtagaagatcaa

SEQ ID NO: 92282 - DNA, 19 bp, Homo sapiens
  siRNA target sequence for MYH13 (NM_003802.1,3850-3868).
cggacggtagaagatcaat

SEQ ID NO: 92283 - DNA, 19 bp, Homo sapiens
  siRNA target sequence for MYH13 (NM_003802.1,3851-3869).
ggacggtagaagatcaatt

SEQ ID NO: 92284 - DNA, 19 bp, Homo sapiens
  siRNA target sequence for MYH13 (NM_003802.1,3852-3870).
gacggtagaagatcaattt

SEQ ID NO: 92285 - DNA, 19 bp, Homo sapiens
  siRNA target sequence for MYH13 (NM_003802.1,4792-4810).
gagctgagccaggtgaaat

SEQ ID NO: 92286 - DNA, 19 bp, Homo sapiens
  siRNA target sequence for MYH13 (NM_003802.1,4930-4948).
gacgccctgaggctaaaga

SEQ ID NO: 92287 - DNA, 19 bp, Homo sapiens
  siRNA target sequence for MYH13 (NM_003802.1,5259-5277).
gaacacaagcctgataaat

SEQ ID NO: 92288 - DNA, 19 bp, Homo sapiens
  siRNA target sequence for MYH13 (NM_003802.1,5719-5737).
gccaaagtgaagtcttaca

SEQ ID NO: 92289 - DNA, 19 bp, Homo sapiens
  siRNA target sequence for MYH2 (NM_017534.1,70-88).
cgcattgaggcccagaata

SEQ ID NO: 92290 - DNA, 19 bp, Homo sapiens
  siRNA target sequence for MYH2 (NM_017534.1,81-99).
ccagaataggccctttgat

SEQ ID NO: 92291 - DNA, 19 bp, Homo sapiens
  siRNA target sequence for MYH2 (NM_017534.1,1018-1036).
gatattttgggctttacta

SEQ ID NO: 92292 - DNA, 19 bp, Homo sapiens
  siRNA target sequence for MYH2 (NM_017534.1,1026-1044).
gggctttactaatgaagaa

SEQ ID NO: 92293 - DNA, 19 bp, Homo sapiens
  siRNA target sequence for MYH2 (NM_017534.1,1088-1106).
ggaacctaaaatttaagca

SEQ ID NO: 92294 - DNA, 19 bp, Homo sapiens
  siRNA target sequence for MYH2 (NM_017534.1,1759-1777).
ggtgttgtggactacaaca

SEQ ID NO: 92295 - DNA, 19 bp, Homo sapiens
  siRNA target sequence for MYH2 (NM_017534.1,1760-1778).
gtgttgtggactacaacat

SEQ ID NO: 92296 - DNA, 19 bp, Homo sapiens
  siRNA target sequence for MYH2 (NM_017534.1,2646-2664).
gatggtgacgctgttgaaa

SEQ ID NO: 92297 - DNA, 19 bp, Homo sapiens
  siRNA target sequence for MYH2 (NM_017534.1,3310-3328).
caggcacttggcattcaat

SEQ ID NO: 92298 - DNA, 19 bp, Homo sapiens
  siRNA target sequence for MYH2 (NM_017534.1,3861-3879).
gactgaatctggtgagttt

SEQ ID NO: 92299 - DNA, 19 bp, Homo sapiens
  siRNA target sequence for MYH2 (NM_017534.1,3904-3922).
gctctggtgtctcagttat

SEQ ID NO: 92300 - DNA, 19 bp, Homo sapiens
  siRNA target sequence for MYH2 (NM_017534.1,3909-3927).
ggtgtctcagttatcaaga

SEQ ID NO: 92301 - DNA, 19 bp, Homo sapiens
  siRNA target sequence for MYH2 (NM_017534.1,3918-3936).
gttatcaagaggcaaacaa

SEQ ID NO: 92302 - DNA, 19 bp, Homo sapiens
  siRNA target sequence for MYH2 (NM_017534.1,4577-4595).
ggaaacgtatccatgaact

SEQ ID NO: 92303 - DNA, 19 bp, Homo sapiens
  siRNA target sequence for MYH2 (NM_017534.1,5574-5592).
ccagacggaagaagataga

SEQ ID NO: 92304 - DNA, 19 bp, Homo sapiens
  siRNA target sequence for MYH2 (NM_017534.1,5684-5702).
ccaacaccaatctagctaa

SEQ ID NO: 92305 - DNA, 19 bp, Homo sapiens
  siRNA target sequence for MYH2 (NM_017534.1,5685-5703).
caacaccaatctagctaaa

SEQ ID NO: 92306 - DNA, 19 bp, Homo sapiens
  siRNA target sequence for MYH3 (NM_002470.1,201-219).
cgtggtggactcaaaggaa

SEQ ID NO: 92307 - DNA, 19 bp, Homo sapiens
  siRNA target sequence for MYH3 (NM_002470.1,207-225).
ggactcaaaggaagaatat

SEQ ID NO: 92308 - DNA, 19 bp, Homo sapiens
  siRNA target sequence for MYH3 (NM_002470.1,1303-1321).
gttgggaatgagtacgtta

SEQ ID NO: 92309 - DNA, 19 bp, Homo sapiens
  siRNA target sequence for MYH3 (NM_002470.1,1308-1326).
gaatgagtacgttaccaaa

SEQ ID NO: 92310 - DNA, 19 bp, Homo sapiens
  siRNA target sequence for MYH3 (NM_002470.1,1344-1362).
ggttcaccatgctgtgaat

SEQ ID NO: 92311 - DNA, 19 bp, Homo sapiens
  siRNA target sequence for MYH3 (NM_002470.1,1359-1377).
gaatgctctttcaaaatca

SEQ ID NO: 92312 - DNA, 19 bp, Homo sapiens
  siRNA target sequence for MYH3 (NM_002470.1,2075-2093).
gaactactcaccctcattt

SEQ ID NO: 92313 - DNA, 19 bp, Homo sapiens
  siRNA target sequence for MYH3 (NM_002470.1,2089-2107).
cattttgtgcgttgtataa

SEQ ID NO: 92314 - DNA, 19 bp, Homo sapiens
  siRNA target sequence for MYH3 (NM_002470.1,2214-2232).
cccaaacaggattctctat

SEQ ID NO: 92315 - DNA, 19 bp, Homo sapiens
  siRNA target sequence for MYH3 (NM_002470.1,2480-2498).
gtgtggaattccagaagat

SEQ ID NO: 92316 - DNA, 19 bp, Homo sapiens
  siRNA target sequence for MYH3 (NM_002470.1,2764-2782).
gctgaaagcgaaaatttgt

SEQ ID NO: 92317 - DNA, 19 bp, Homo sapiens
  siRNA target sequence for MYH3 (NM_002470.1,3189-3207).
ggaaagctccctagaacaa

SEQ ID NO: 92318 - DNA, 19 bp, Homo sapiens
  siRNA target sequence for MYH3 (NM_002470.1,3272-3290).
ctcaagagtccatattaga

SEQ ID NO: 92319 - DNA, 19 bp, Homo sapiens
  siRNA target sequence for MYH3 (NM_002470.1,3318-3336).
cgaaaggctcaagaagaaa

SEQ ID NO: 92320 - DNA, 19 bp, Homo sapiens
  siRNA target sequence for MYH3 (NM_002470.1,3343-3361).
gaatattgtcaacttcaaa

SEQ ID NO: 92321 - DNA, 19 bp, Homo sapiens
  siRNA target sequence for MYH3 (NM_002470.1,3792-3810).
ggagagtgtgtcgaaatct

SEQ ID NO: 92322 - DNA, 19 bp, Homo sapiens
  siRNA target sequence for MYH3 (NM_002470.1,3793-3811).
gagagtgtgtcgaaatcta

SEQ ID NO: 92323 - DNA, 19 bp, Homo sapiens
  siRNA target sequence for MYH3 (NM_002470.1,3803-3821).
cgaaatctaaggcaaatct

SEQ ID NO: 92324 - DNA, 19 bp, Homo sapiens
  siRNA target sequence for MYH3 (NM_002470.1,3809-3827).
ctaaggcaaatctggaaaa

SEQ ID NO: 92325 - DNA, 19 bp, Homo sapiens
  siRNA target sequence for MYH3 (NM_002470.1,3840-3858).
cctggaggatcagttaagt

SEQ ID NO: 92326 - DNA, 19 bp, Homo sapiens
  siRNA target sequence for MYH3 (NM_002470.1,4007-4025).
cctttacccagcaaacaga

SEQ ID NO: 92327 - DNA, 19 bp, Homo sapiens
  siRNA target sequence for MYH3 (NM_002470.1,4300-4318).
gaggcagtgaatgctaaat

SEQ ID NO: 92328 - DNA, 19 bp, Homo sapiens
  siRNA target sequence for MYH3 (NM_002470.1,4302-4320).
ggcagtgaatgctaaatgt

SEQ ID NO: 92329 - DNA, 19 bp, Homo sapiens
  siRNA target sequence for MYH3 (NM_002470.1,4365-4383).
ggatctgatggttgatgtt

SEQ ID NO: 92330 - DNA, 19 bp, Homo sapiens
  siRNA target sequence for MYH3 (NM_002470.1,4548-4566).
ctacgaggaagccttagat

SEQ ID NO: 92331 - DNA, 19 bp, Homo sapiens
  siRNA target sequence for MYH3 (NM_002470.1,4762-4780).
ctccgaatccagcttgaat

SEQ ID NO: 92332 - DNA, 19 bp, Homo sapiens
  siRNA target sequence for MYH3 (NM_002470.1,4946-4964).
gggacctgaatgaaatcga

SEQ ID NO: 92333 - DNA, 19 bp, Homo sapiens
  siRNA target sequence for MYH3 (NM_002470.1,5816-5834).
cggatatcgcagaatctca

SEQ ID NO: 92334 - DNA, 19 bp, Homo sapiens
  siRNA target sequence for MYH3 (NM_002470.1,5817-5835).
ggatatcgcagaatctcaa

SEQ ID NO: 92335 - DNA, 19 bp, Homo sapiens
  siRNA target sequence for MYH3 (NM_002470.1,5841-5859).
caagctccgcgctaagact

SEQ ID NO: 92336 - DNA, 19 bp, Homo sapiens
  siRNA target sequence for MYH4 (NM_017533.1,246-264).
gtcctacgtgaaagcaata

SEQ ID NO: 92337 - DNA, 19 bp, Homo sapiens
  siRNA target sequence for MYH4 (NM_017533.1,619-637).
cgtgaaaaccagtcaatct

SEQ ID NO: 92338 - DNA, 19 bp, Homo sapiens
  siRNA target sequence for MYH4 (NM_017533.1,620-638).
gtgaaaaccagtcaatctt

SEQ ID NO: 92339 - DNA, 19 bp, Homo sapiens
  siRNA target sequence for MYH4 (NM_017533.1,982-1000).
caaatcctgtccaataaga

SEQ ID NO: 92340 - DNA, 19 bp, Homo sapiens
  siRNA target sequence for MYH4 (NM_017533.1,1040-1058).
catatgacttcgcatttgt

SEQ ID NO: 92341 - DNA, 19 bp, Homo sapiens
  siRNA target sequence for MYH4 (NM_017533.1,1061-1079).
gccaaggggaaattactgt

SEQ ID NO: 92342 - DNA, 19 bp, Homo sapiens
  siRNA target sequence for MYH4 (NM_017533.1,1264-1282).
gacaaagctgcttatctga

SEQ ID NO: 92343 - DNA, 19 bp, Homo sapiens
  siRNA target sequence for MYH4 (NM_017533.1,1336-1354).
gtcggcaatgagttcgtaa

SEQ ID NO: 92344 - DNA, 19 bp, Homo sapiens
  siRNA target sequence for MYH4 (NM_017533.1,1341-1359).
caatgagttcgtaaccaaa

SEQ ID NO: 92345 - DNA, 19 bp, Homo sapiens
  siRNA target sequence for MYH4 (NM_017533.1,2352-2370).
gaaacttctagggtctatt

SEQ ID NO: 92346 - DNA, 19 bp, Homo sapiens
  siRNA target sequence for MYH4 (NM_017533.1,2356-2374).
cttctagggtctattgaaa

SEQ ID NO: 92347 - DNA, 19 bp, Homo sapiens
  siRNA target sequence for MYH4 (NM_017533.1,2516-2534).
gagtggagttcagaaagat

SEQ ID NO: 92348 - DNA, 19 bp, Homo sapiens
  siRNA target sequence for MYH4 (NM_017533.1,2574-2592).
catccgtgctttcatgaat

SEQ ID NO: 92349 - DNA, 19 bp, Homo sapiens
  siRNA target sequence for MYH4 (NM_017533.1,2751-2769).
gatggtgacgctaatgcaa

SEQ ID NO: 92350 - DNA, 19 bp, Homo sapiens
  siRNA target sequence for MYH4 (NM_017533.1,2834-2852).
gatgtgatcagttgattaa

SEQ ID NO: 92351 - DNA, 19 bp, Homo sapiens
  siRNA target sequence for MYH4 (NM_017533.1,3880-3898).
gaggaccagcttagtgaaa

SEQ ID NO: 92352 - DNA, 19 bp, Homo sapiens
  siRNA target sequence for MYH4 (NM_017533.1,3882-3900).
ggaccagcttagtgaaata

SEQ ID NO: 92353 - DNA, 19 bp, Homo sapiens
  siRNA target sequence for MYH4 (NM_017533.1,3883-3901).
gaccagcttagtgaaataa

SEQ ID NO: 92354 - DNA, 19 bp, Homo sapiens
  siRNA target sequence for MYH4 (NM_017533.1,3922-3940).
caacgcttaataaatgagt

SEQ ID NO: 92355 - DNA, 19 bp, Homo sapiens
  siRNA target sequence for MYH4 (NM_017533.1,3949-3967).
cagaaggcacgtttacaca

SEQ ID NO: 92356 - DNA, 19 bp, Homo sapiens
  siRNA target sequence for MYH4 (NM_017533.1,4028-4046).
cccgaggcaaacaagcatt

SEQ ID NO: 92357 - DNA, 19 bp, Homo sapiens
  siRNA target sequence for MYH4 (NM_017533.1,4436-4454).
cctgcatagctctcgataa

SEQ ID NO: 92358 - DNA, 19 bp, Homo sapiens
  siRNA target sequence for MYH4 (NM_017533.1,4439-4457).
gcatagctctcgataagaa

SEQ ID NO: 92359 - DNA, 19 bp, Homo sapiens
  siRNA target sequence for MYH4 (NM_017533.1,4596-4614).
cctggatcatcttgaaact

SEQ ID NO: 92360 - DNA, 19 bp, Homo sapiens
  siRNA target sequence for MYH4 (NM_017533.1,4791-4809).
caaaattcttcgcattcaa

SEQ ID NO: 92361 - DNA, 19 bp, Homo sapiens
  siRNA target sequence for MYH4 (NM_017533.1,4802-4820).
gcattcaacttgagctaaa

SEQ ID NO: 92362 - DNA, 19 bp, Homo sapiens
  siRNA target sequence for MYH4 (NM_017533.1,4832-4850).
ctgagattgaccgaaaaat

SEQ ID NO: 92363 - DNA, 19 bp, Homo sapiens
  siRNA target sequence for MYH4 (NM_017533.1,4867-4885).
gaactcgatcagctaaaga

SEQ ID NO: 92364 - DNA, 19 bp, Homo sapiens
  siRNA target sequence for MYH4 (NM_017533.1,5035-5053).
gaggcactaaggaatctta

SEQ ID NO: 92365 - DNA, 19 bp, Homo sapiens
  siRNA target sequence for MYH4 (NM_017533.1,5037-5055).
ggcactaaggaatcttaga

SEQ ID NO: 92366 - DNA, 19 bp, Homo sapiens
  siRNA target sequence for MYH4 (NM_017533.1,5079-5097).
cactcagctacatttggat

SEQ ID NO: 92367 - DNA, 19 bp, Homo sapiens
  siRNA target sequence for MYH6 (NM_002471.1,187-205).
ccgatgacaaggaagagtt

SEQ ID NO: 92368 - DNA, 19 bp, Homo sapiens
  siRNA target sequence for MYH6 (NM_002471.1,2018-2036).
ggctctccaccgggaaaat

SEQ ID NO: 92369 - DNA, 19 bp, Homo sapiens
  siRNA target sequence for MYH6 (NM_002471.1,2022-2040).
ctccaccgggaaaatctca

SEQ ID NO: 92370 - DNA, 19 bp, Homo sapiens
  siRNA target sequence for MYH6 (NM_002471.1,2468-2486).
cattgagttcaagaagata

SEQ ID NO: 92371 - DNA, 19 bp, Homo sapiens
  siRNA target sequence for MYH6 (NM_002471.1,3320-3338).
gaaggagtttgacattaat

SEQ ID NO: 92372 - DNA, 19 bp, Homo sapiens
  siRNA target sequence for MYH6 (NM_002471.1,5850-5868).
gacattggtgccaagcaaa

SEQ ID NO: 92373 - DNA, 19 bp, Homo sapiens
  siRNA target sequence for MYH6 (NM_002471.1,5857-5875).
gtgccaagcaaaaaatgca

SEQ ID NO: 92374 - DNA, 19 bp, Homo sapiens
  siRNA target sequence for MYH7 (NM_000257.1,163-181).
cgcagaccaggccttttga

SEQ ID NO: 92375 - DNA, 19 bp, Homo sapiens
  siRNA target sequence for MYH7 (NM_000257.1,246-264).
cgagagggtggcaaagtca

SEQ ID NO: 92376 - DNA, 19 bp, Homo sapiens
  siRNA target sequence for MYH7 (NM_000257.1,665-683).
gtactttgctgttattgca

SEQ ID NO: 92377 - DNA, 19 bp, Homo sapiens
  siRNA target sequence for MYH7 (NM_000257.1,921-939).
gcagagagagattatcaca

SEQ ID NO: 92378 - DNA, 19 bp, Homo sapiens
  siRNA target sequence for MYH7 (NM_000257.1,1006-1024).
cctacgattatgcattcat

SEQ ID NO: 92379 - DNA, 19 bp, Homo sapiens
  siRNA target sequence for MYH7 (NM_000257.1,1078-1096).
ccactgataacgcttttga

SEQ ID NO: 92380 - DNA, 19 bp, Homo sapiens
  siRNA target sequence for MYH7 (NM_000257.1,1079-1097).
cactgataacgcttttgat

SEQ ID NO: 92381 - DNA, 19 bp, Homo sapiens
  siRNA target sequence for MYH7 (NM_000257.1,1905-1923).
ggcttgtatcagaagtctt

SEQ ID NO: 92382 - DNA, 19 bp, Homo sapiens
  siRNA target sequence for MYH7 (NM_000257.1,1963-1981).
gggctgatgcgcctattga

SEQ ID NO: 92383 - DNA, 19 bp, Homo sapiens
  siRNA target sequence for MYH7 (NM_000257.1,1965-1983).
gctgatgcgcctattgaga

SEQ ID NO: 92384 - DNA, 19 bp, Homo sapiens
  siRNA target sequence for MYH7 (NM_000257.1,1966-1984).
ctgatgcgcctattgagaa

SEQ ID NO: 92385 - DNA, 19 bp, Homo sapiens
  siRNA target sequence for MYH7 (NM_000257.1,2034-2052).
ctgcacagggaaaatctga

SEQ ID NO: 92386 - DNA, 19 bp, Homo sapiens
  siRNA target sequence for MYH7 (NM_000257.1,2086-2104).
cccactttgtacgttgtat

SEQ ID NO: 92387 - DNA, 19 bp, Homo sapiens
  siRNA target sequence for MYH7 (NM_000257.1,2474-2492).
cgccagaatggagtacaaa

SEQ ID NO: 92388 - DNA, 19 bp, Homo sapiens
  siRNA target sequence for MYH7 (NM_000257.1,3321-3339).
cggctgaaaaaaaaagact

SEQ ID NO: 92389 - DNA, 19 bp, Homo sapiens
  siRNA target sequence for MYH7 (NM_000257.1,4635-4653).
ggttccagcggaaagacta

SEQ ID NO: 92390 - DNA, 19 bp, Homo sapiens
  siRNA target sequence for MYH7 (NM_000257.1,4636-4654).
gttccagcggaaagactat

SEQ ID NO: 92391 - DNA, 19 bp, Homo sapiens
  siRNA target sequence for MYH8 (NM_002472.1,91-109).
cgctgagatggctgttttt

SEQ ID NO: 92392 - DNA, 19 bp, Homo sapiens
  siRNA target sequence for MYH8 (NM_002472.1,117-135).
ctgctccctaccttcgaaa

SEQ ID NO: 92393 - DNA, 19 bp, Homo sapiens
  siRNA target sequence for MYH8 (NM_002472.1,119-137).
gctccctaccttcgaaaat

SEQ ID NO: 92394 - DNA, 19 bp, Homo sapiens
  siRNA target sequence for MYH8 (NM_002472.1,150-168).
ggattgaggcccaaaacaa

SEQ ID NO: 92395 - DNA, 19 bp, Homo sapiens
  siRNA target sequence for MYH8 (NM_002472.1,217-235).
ctatgtgaagagcactata

SEQ ID NO: 92396 - DNA, 19 bp, Homo sapiens
  siRNA target sequence for MYH8 (NM_002472.1,221-239).
gtgaagagcactatacaaa

SEQ ID NO: 92397 - DNA, 19 bp, Homo sapiens
  siRNA target sequence for MYH8 (NM_002472.1,251-269).
gggaaagtaaccgtaaaga

SEQ ID NO: 92398 - DNA, 19 bp, Homo sapiens
  siRNA target sequence for MYH8 (NM_002472.1,253-271).
gaaagtaaccgtaaagact

SEQ ID NO: 92399 - DNA, 19 bp, Homo sapiens
  siRNA target sequence for MYH8 (NM_002472.1,272-290).
gaaggtggagcaactctaa

SEQ ID NO: 92400 - DNA, 19 bp, Homo sapiens
  siRNA target sequence for MYH8 (NM_002472.1,944-962).
cagatcacttccaataaga

SEQ ID NO: 92401 - DNA, 19 bp, Homo sapiens
  siRNA target sequence for MYH8 (NM_002472.1,1940-1958).
ctcttttccacgtatgcta

SEQ ID NO: 92402 - DNA, 19 bp, Homo sapiens
  siRNA target sequence for MYH8 (NM_002472.1,2086-2104).
cttcgtacggtgtatcatt

SEQ ID NO: 92403 - DNA, 19 bp, Homo sapiens
  siRNA target sequence for MYH8 (NM_002472.1,2127-2145).
gggcaatggaacatgaact

SEQ ID NO: 92404 - DNA, 19 bp, Homo sapiens
  siRNA target sequence for MYH8 (NM_002472.1,2217-2235).
gaatcttatatggtgattt

SEQ ID NO: 92405 - DNA, 19 bp, Homo sapiens
  siRNA target sequence for MYH8 (NM_002472.1,2221-2239).
cttatatggtgatttcaaa

SEQ ID NO: 92406 - DNA, 19 bp, Homo sapiens
  siRNA target sequence for MYH8 (NM_002472.1,2513-2531).
cttttctgcatccagtata

SEQ ID NO: 92407 - DNA, 19 bp, Homo sapiens
  siRNA target sequence for MYH8 (NM_002472.1,2796-2814).
gtgagcaactgattaaaaa

SEQ ID NO: 92408 - DNA, 19 bp, Homo sapiens
  siRNA target sequence for MYH8 (NM_002472.1,3211-3229).
gcttcgaatggatctagaa

SEQ ID NO: 92409 - DNA, 19 bp, Homo sapiens
  siRNA target sequence for MYH8 (NM_002472.1,3373-3391).
gcaagctgtagaaattcaa

SEQ ID NO: 92410 - DNA, 19 bp, Homo sapiens
  siRNA target sequence for MYH8 (NM_002472.1,3378-3396).
ctgtagaaattcaactaca

SEQ ID NO: 92411 - DNA, 19 bp, Homo sapiens
  siRNA target sequence for MYH8 (NM_002472.1,3627-3645).
ccctgcagcatgaagctat

SEQ ID NO: 92412 - DNA, 19 bp, Homo sapiens
  siRNA target sequence for MYH8 (NM_002472.1,3936-3954).
gtgaatattctcgacaatt

SEQ ID NO: 92413 - DNA, 19 bp, Homo sapiens
  siRNA target sequence for MYH8 (NM_002472.1,3991-4009).
gagcaagcaagcatctact

SEQ ID NO: 92414 - DNA, 19 bp, Homo sapiens
  siRNA target sequence for MYH8 (NM_002472.1,4015-4033).
gattgaagagctgaaacat

SEQ ID NO: 92415 - DNA, 19 bp, Homo sapiens
  siRNA target sequence for MYH8 (NM_002472.1,4562-4580).
caactcgaaacgctaagaa

SEQ ID NO: 92416 - DNA, 19 bp, Homo sapiens
  siRNA target sequence for MYH8 (NM_002472.1,4640-4658).
ggaaagcaaattcatgaat

SEQ ID NO: 92417 - DNA, 19 bp, Homo sapiens
  siRNA target sequence for MYH8 (NM_002472.1,4854-4872).
ctagagtcgtggagacaat

SEQ ID NO: 92418 - DNA, 19 bp, Homo sapiens
  siRNA target sequence for MYH8 (NM_002472.1,4883-4901).
ctggatgcagagattagaa

SEQ ID NO: 92419 - DNA, 19 bp, Homo sapiens
  siRNA target sequence for MYH8 (NM_002472.1,4984-5002).
cttagctgcagagagttta

SEQ ID NO: 92420 - DNA, 19 bp, Homo sapiens
  siRNA target sequence for MYH8 (NM_002472.1,4988-5006).
gctgcagagagtttaagga

SEQ ID NO: 92421 - DNA, 19 bp, Homo sapiens
  siRNA target sequence for MYH8 (NM_002472.1,5582-5600).
gcagaggctgttaaaggtt

SEQ ID NO: 92422 - DNA, 19 bp, Homo sapiens
  siRNA target sequence for MYH8 (NM_002472.1,5583-5601).
cagaggctgttaaaggttt

SEQ ID NO: 92423 - DNA, 19 bp, Homo sapiens
  siRNA target sequence for MYH8 (NM_002472.1,5677-5695).
ggacttggtagataaatta

SEQ ID NO: 92424 - DNA, 19 bp, Homo sapiens
  siRNA target sequence for MYH8 (NM_002472.1,5748-5766).
ccaatgctaatctatctaa

SEQ ID NO: 92425 - DNA, 19 bp, Homo sapiens
  siRNA target sequence for MYH8 (NM_002472.1,5749-5767).
caatgctaatctatctaaa

SEQ ID NO: 92426 - DNA, 19 bp, Homo sapiens
  siRNA target sequence for MYH9 (NM_002473.2,9-27).
gcaagctgccgataagtat

SEQ ID NO: 92427 - DNA, 19 bp, Homo sapiens
  siRNA target sequence for MYH9 (NM_002473.2,301-319).
ctcaaggagcgttactact

SEQ ID NO: 92428 - DNA, 19 bp, Homo sapiens
  siRNA target sequence for MYH9 (NM_002473.2,467-485).
ccgcctacaggagtatgat

SEQ ID NO: 92429 - DNA, 19 bp, Homo sapiens
  siRNA target sequence for MYH9 (NM_002473.2,483-501).
gatgcaagaccgagaagat

SEQ ID NO: 92430 - DNA, 19 bp, Homo sapiens
  siRNA target sequence for MYH9 (NM_002473.2,496-514).
gaagatcaatccatcttgt

SEQ ID NO: 92431 - DNA, 19 bp, Homo sapiens
  siRNA target sequence for MYH9 (NM_002473.2,877-895).
ctgttggagccgtacaaca

SEQ ID NO: 92432 - DNA, 19 bp, Homo sapiens
  siRNA target sequence for MYH9 (NM_002473.2,879-897).
gttggagccgtacaacaaa

SEQ ID NO: 92433 - DNA, 19 bp, Homo sapiens
  siRNA target sequence for MYH9 (NM_002473.2,1129-1147).
ctcttgggtatcaatgtga

SEQ ID NO: 92434 - DNA, 19 bp, Homo sapiens
  siRNA target sequence for MYH9 (NM_002473.2,1720-1738).
gccggcaaggtggattaca

SEQ ID NO: 92435 - DNA, 19 bp, Homo sapiens
  siRNA target sequence for MYH9 (NM_002473.2,1721-1739).
ccggcaaggtggattacaa

SEQ ID NO: 92436 - DNA, 19 bp, Homo sapiens
  siRNA target sequence for MYH9 (NM_002473.2,1722-1740).
cggcaaggtggattacaaa

SEQ ID NO: 92437 - DNA, 19 bp, Homo sapiens
  siRNA target sequence for MYH9 (NM_002473.2,1986-2004).
gaacacgaaccccaacttt

SEQ ID NO: 92438 - DNA, 19 bp, Homo sapiens
  siRNA target sequence for MYH9 (NM_002473.2,2145-2163).
ggagtttcggcagagatat

SEQ ID NO: 92439 - DNA, 19 bp, Homo sapiens
  siRNA target sequence for MYH9 (NM_002473.2,2214-2232).
ggcgtgcgtgctcatgata

SEQ ID NO: 92440 - DNA, 19 bp, Homo sapiens
  siRNA target sequence for MYH9 (NM_002473.2,2215-2233).
gcgtgcgtgctcatgataa

SEQ ID NO: 92441 - DNA, 19 bp, Homo sapiens
  siRNA target sequence for MYH9 (NM_002473.2,2720-2738).
ccgccaagaagcaggaatt

SEQ ID NO: 92442 - DNA, 19 bp, Homo sapiens
  siRNA target sequence for MYH9 (NM_002473.2,2721-2739).
cgccaagaagcaggaatta

SEQ ID NO: 92443 - DNA, 19 bp, Homo sapiens
  siRNA target sequence for MYH9 (NM_002473.2,3283-3301).
gaagctgcccagaagaaca

SEQ ID NO: 92444 - DNA, 19 bp, Homo sapiens
  siRNA target sequence for MYH9 (NM_002473.2,3367-3385).
gagcgtgcttccaggaata

SEQ ID NO: 92445 - DNA, 19 bp, Homo sapiens
  siRNA target sequence for MYH9 (NM_002473.2,3369-3387).
gcgtgcttccaggaataaa

SEQ ID NO: 92446 - DNA, 19 bp, Homo sapiens
  siRNA target sequence for MYH9 (NM_002473.2,3477-3495).
ggagctcaggtcaaaacgt

SEQ ID NO: 92447 - DNA, 19 bp, Homo sapiens
  siRNA target sequence for MYH9 (NM_002473.2,4000-4018).
gtggaggacgagaagaatt

SEQ ID NO: 92448 - DNA, 19 bp, Homo sapiens
  siRNA target sequence for MYH9 (NM_002473.2,4092-4110).
ccaggtggccgacatgaaa

SEQ ID NO: 92449 - DNA, 19 bp, Homo sapiens
  siRNA target sequence for MYH9 (NM_002473.2,4099-4117).
gccgacatgaaaaagaaga

SEQ ID NO: 92450 - DNA, 19 bp, Homo sapiens
  siRNA target sequence for MYH9 (NM_002473.2,5567-5585).
ggaacgccgagcagtacaa

SEQ ID NO: 92451 - DNA, 19 bp, Homo sapiens
  siRNA target sequence for MYH9 (NM_002473.2,5740-5758).
gtcagctccctaaagaaca

SEQ ID NO: 92452 - DNA, 19 bp, Homo sapiens
  siRNA target sequence for MYLK (NM_005965.2,408-426).
gcaagtgaagccaaagact

SEQ ID NO: 92453 - DNA, 19 bp, Homo sapiens
  siRNA target sequence for MYLK (NM_005965.2,455-473).
gcccccagcaggtcgattt

SEQ ID NO: 92454 - DNA, 19 bp, Homo sapiens
  siRNA target sequence for MYLK (NM_005965.2,456-474).
cccccagcaggtcgatttt

SEQ ID NO: 92455 - DNA, 19 bp, Homo sapiens
  siRNA target sequence for MYLK (NM_005965.2,525-543).
ggtgccaccgccaaaacct

SEQ ID NO: 92456 - DNA, 19 bp, Homo sapiens
  siRNA target sequence for MYLK (NM_005965.2,568-586).
ctgggtggcaagaagaaat

SEQ ID NO: 92457 - DNA, 19 bp, Homo sapiens
  siRNA target sequence for MYLK (NM_005965.2,789-807).
cctgaaatccgctagcaaa

SEQ ID NO: 92458 - DNA, 19 bp, Homo sapiens
  siRNA target sequence for MYLK (NM_005965.2,792-810).
gaaatccgctagcaaagaa

SEQ ID NO: 92459 - DNA, 19 bp, Homo sapiens
  siRNA target sequence for MYLK (NM_005965.2,1102-1120).
gaggacagaggcttataca

SEQ ID NO: 92460 - DNA, 19 bp, Homo sapiens
  siRNA target sequence for MYLK (NM_005965.2,1266-1284).
gagtgatgcgactgtgaaa

SEQ ID NO: 92461 - DNA, 19 bp, Homo sapiens
  siRNA target sequence for MYLK (NM_005965.2,1270-1288).
gatgcgactgtgaaaaaga

SEQ ID NO: 92462 - DNA, 19 bp, Homo sapiens
  siRNA target sequence for MYLK (NM_005965.2,1319-1337).
caatgccccctcagatcat

SEQ ID NO: 92463 - DNA, 19 bp, Homo sapiens
  siRNA target sequence for MYLK (NM_005965.2,1418-1436).
cctgtacctggatgaagtt

SEQ ID NO: 92464 - DNA, 19 bp, Homo sapiens
  siRNA target sequence for MYLK (NM_005965.2,1541-1559).
cactgctggtggagaacaa

SEQ ID NO: 92465 - DNA, 19 bp, Homo sapiens
  siRNA target sequence for MYLK (NM_005965.2,1668-1686).
ctggtatggctcctcatat

SEQ ID NO: 92466 - DNA, 19 bp, Homo sapiens
  siRNA target sequence for MYLK (NM_005965.2,1766-1784).
gccgcagcacctctttcaa

SEQ ID NO: 92467 - DNA, 19 bp, Homo sapiens
  siRNA target sequence for MYLK (NM_005965.2,1798-1816).
ctgcctgaccacgaatata

SEQ ID NO: 92468 - DNA, 19 bp, Homo sapiens
  siRNA target sequence for MYLK (NM_005965.2,1801-1819).
cctgaccacgaatataagt

SEQ ID NO: 92469 - DNA, 19 bp, Homo sapiens
  siRNA target sequence for MYLK (NM_005965.2,1802-1820).
ctgaccacgaatataagtt

SEQ ID NO: 92470 - DNA, 19 bp, Homo sapiens
  siRNA target sequence for MYLK (NM_005965.2,1831-1849).
gcaatcaacgtgtatggaa

SEQ ID NO: 92471 - DNA, 19 bp, Homo sapiens
  siRNA target sequence for MYLK (NM_005965.2,2140-2158).
gagattagcatcatgaact

SEQ ID NO: 92472 - DNA, 19 bp, Homo sapiens
  siRNA target sequence for MYLK (NM_005965.2,2293-2311).
cgtgagtgcatcaagtaca

SEQ ID NO: 92473 - DNA, 19 bp, Homo sapiens
  siRNA target sequence for MYLK (NM_005965.2,2324-2342).
cggagggagtggagtacat

SEQ ID NO: 92474 - DNA, 19 bp, Homo sapiens
  siRNA target sequence for MYLK (NM_005965.2,2601-2619).
gggagacaacgataacgaa

SEQ ID NO: 92475 - DNA, 19 bp, Homo sapiens
  siRNA target sequence for MYLK (NM_005965.2,2602-2620).
ggagacaacgataacgaaa

SEQ ID NO: 92476 - DNA, 19 bp, Homo sapiens
  siRNA target sequence for MYLK (NM_005965.2,2655-2673).
cgacgacgaggcattcgat

SEQ ID NO: 92477 - DNA, 19 bp, Homo sapiens
  siRNA target sequence for MYLK (NM_005965.2,2681-2699).
ccgacgatgccaaggattt

SEQ ID NO: 92478 - DNA, 19 bp, Homo sapiens
  siRNA target sequence for MYLK (NM_005965.2,2683-2701).
gacgatgccaaggatttca

SEQ ID NO: 92479 - DNA, 19 bp, Homo sapiens
  siRNA target sequence for MYLK (NM_005965.2,2760-2778).
gcatccatggctaatgaaa

SEQ ID NO: 92480 - DNA, 19 bp, Homo sapiens
  siRNA target sequence for MYLK (NM_005965.2,2768-2786).
ggctaatgaaagataccaa

SEQ ID NO: 92481 - DNA, 19 bp, Homo sapiens
  siRNA target sequence for MYLK (NM_005965.2,3053-3071).
ccattcgcgatttagaagt

SEQ ID NO: 92482 - DNA, 19 bp, Homo sapiens
  siRNA target sequence for MYLK (NM_005965.2,3054-3072).
cattcgcgatttagaagtt

SEQ ID NO: 92483 - DNA, 19 bp, Homo sapiens
  siRNA target sequence for MYLK (NM_005965.2,3167-3185).
cccgccacttccagataga

SEQ ID NO: 92484 - DNA, 19 bp, Homo sapiens
  siRNA target sequence for MYLK (NM_005965.2,3169-3187).
cgccacttccagatagact

SEQ ID NO: 92485 - DNA, 19 bp, Homo sapiens
  siRNA target sequence for MYLK (NM_005965.2,3195-3213).
ggacgggaactgctcttta

SEQ ID NO: 92486 - DNA, 19 bp, Homo sapiens
  siRNA target sequence for MYLK (NM_005965.2,3196-3214).
gacgggaactgctctttaa

SEQ ID NO: 92487 - DNA, 19 bp, Homo sapiens
  siRNA target sequence for MYLK (NM_005965.2,3199-3217).
gggaactgctctttaatta

SEQ ID NO: 92488 - DNA, 19 bp, Homo sapiens
  siRNA target sequence for MYLK (NM_053025.1,697-715).
cctggctcaagggaaatgt

SEQ ID NO: 92489 - DNA, 19 bp, Homo sapiens
  siRNA target sequence for MYLK (NM_053025.1,698-716).
ctggctcaagggaaatgtt

SEQ ID NO: 92490 - DNA, 19 bp, Homo sapiens
  siRNA target sequence for MYLK (NM_053025.1,1157-1175).
cctgcaggccgcaagagtt

SEQ ID NO: 92491 - DNA, 19 bp, Homo sapiens
  siRNA target sequence for MYLK (NM_053025.1,1425-1443).
gaagtttccgggattccaa

SEQ ID NO: 92492 - DNA, 19 bp, Homo sapiens
  siRNA target sequence for MYLK (NM_053025.1,1679-1697).
gaaggactgcgctgttatt

SEQ ID NO: 92493 - DNA, 19 bp, Homo sapiens
  siRNA target sequence for MYLK (NM_053025.1,2002-2020).
gcctctctgatctcaaagt

SEQ ID NO: 92494 - DNA, 19 bp, Homo sapiens
  siRNA target sequence for MYLK (NM_053025.1,2028-2046).
ggaagccaggtcactatga

SEQ ID NO: 92495 - DNA, 19 bp, Homo sapiens
  siRNA target sequence for MYLK (NM_053025.1,2116-2134).
cagaggacttccactttga

SEQ ID NO: 92496 - DNA, 19 bp, Homo sapiens
  siRNA target sequence for MYLK (NM_053025.1,2242-2260).
ccgtgctcacggtacaaga

SEQ ID NO: 92497 - DNA, 19 bp, Homo sapiens
  siRNA target sequence for MYLK (NM_053025.1,2445-2463).
gtgttcaccctggttctaa

SEQ ID NO: 92498 - DNA, 19 bp, Homo sapiens
  siRNA target sequence for MYLK (NM_053025.1,2874-2892).
ccagccgagcagatggatt

SEQ ID NO: 92499 - DNA, 19 bp, Homo sapiens
  siRNA target sequence for MYLK (NM_053029.1,4532-4550).
gattaggatcgctgtttga

SEQ ID NO: 92500 - DNA, 19 bp, Homo sapiens
  siRNA target sequence for MYLK2 (NM_033118.2,20-38).
cagttgagctgggaattca

SEQ ID NO: 92501 - DNA, 19 bp, Homo sapiens
  siRNA target sequence for MYLK2 (NM_033118.2,22-40).
gttgagctgggaattcaga

SEQ ID NO: 92502 - DNA, 19 bp, Homo sapiens
  siRNA target sequence for MYLK2 (NM_033118.2,671-689).
cctcgagggggattgagtt

SEQ ID NO: 92503 - DNA, 19 bp, Homo sapiens
  siRNA target sequence for MYLK2 (NM_033118.2,693-711).
ggctgttccctcagagaaa

SEQ ID NO: 92504 - DNA, 19 bp, Homo sapiens
  siRNA target sequence for MYLK2 (NM_033118.2,1009-1027).
ctgaaccaccgcaatctga

SEQ ID NO: 92505 - DNA, 19 bp, Homo sapiens
  siRNA target sequence for MYLK2 (NM_033118.2,1253-1271).
ccgggcatttggtgaagat

SEQ ID NO: 92506 - DNA, 19 bp, Homo sapiens
  siRNA target sequence for MYLK2 (NM_033118.2,1282-1300).
ggcctggcacggaggtata

SEQ ID NO: 92507 - DNA, 19 bp, Homo sapiens
  siRNA target sequence for MYLK2 (NM_033118.2,1283-1301).
gcctggcacggaggtataa

SEQ ID NO: 92508 - DNA, 19 bp, Homo sapiens
  siRNA target sequence for MYLK2 (NM_033118.2,1360-1378).
gtgaattatgaccaaatct

SEQ ID NO: 92509 - DNA, 19 bp, Homo sapiens
  siRNA target sequence for MYLK2 (NM_033118.2,1369-1387).
gaccaaatctccgataaga

SEQ ID NO: 92510 - DNA, 19 bp, Homo sapiens
  siRNA target sequence for MYLK2 (NM_033118.2,1470-1488).
cctaaacaacgttctatct

SEQ ID NO: 92511 - DNA, 19 bp, Homo sapiens
  siRNA target sequence for MYLK2 (NM_033118.2,1487-1505).
ctggcaactggtactttga

SEQ ID NO: 92512 - DNA, 19 bp, Homo sapiens
  siRNA target sequence for MYLK2 (NM_033118.2,1514-1532).
cctttgaggccgtatcaga

SEQ ID NO: 92513 - DNA, 19 bp, Homo sapiens
  siRNA target sequence for MYLK2 (NM_033118.2,1668-1686).
ccagatcttgcttaagaaa

SEQ ID NO: 92514 - DNA, 19 bp, Homo sapiens
  siRNA target sequence for MYLK2 (NM_033118.2,1669-1687).
cagatcttgcttaagaaat

SEQ ID NO: 92515 - DNA, 19 bp, Homo sapiens
  siRNA target sequence for MYLK2 (NM_033118.2,1732-1750).
gctgccaaccgcttcaaga

SEQ ID NO: 92516 - DNA, 19 bp, Homo sapiens
  siRNA target sequence for MYLK2 (NM_033118.2,1736-1754).
ccaaccgcttcaagaagat

SEQ ID NO: 92517 - DNA, 19 bp, Homo sapiens
  siRNA target sequence for MYO10 (NM_012334.1,318-336).
cgtcttccggacagactat

SEQ ID NO: 92518 - DNA, 19 bp, Homo sapiens
  siRNA target sequence for MYO10 (NM_012334.1,333-351).
ctatggtcaggtattcact

SEQ ID NO: 92519 - DNA, 19 bp, Homo sapiens
  siRNA target sequence for MYO10 (NM_012334.1,337-355).
ggtcaggtattcacttaca

SEQ ID NO: 92520 - DNA, 19 bp, Homo sapiens
  siRNA target sequence for MYO10 (NM_012334.1,338-356).
gtcaggtattcacttacaa

SEQ ID NO: 92521 - DNA, 19 bp, Homo sapiens
  siRNA target sequence for MYO10 (NM_012334.1,448-466).
ggcggctccatcatgtata

SEQ ID NO: 92522 - DNA, 19 bp, Homo sapiens
  siRNA target sequence for MYO10 (NM_012334.1,455-473).
ccatcatgtataacttatt

SEQ ID NO: 92523 - DNA, 19 bp, Homo sapiens
  siRNA target sequence for MYO10 (NM_012334.1,477-495).
gcggtataagagaaatcaa

SEQ ID NO: 92524 - DNA, 19 bp, Homo sapiens
  siRNA target sequence for MYO10 (NM_012334.1,478-496).
cggtataagagaaatcaaa

SEQ ID NO: 92525 - DNA, 19 bp, Homo sapiens
  siRNA target sequence for MYO10 (NM_012334.1,755-773).
gtcaacagtctttggaatt

SEQ ID NO: 92526 - DNA, 19 bp, Homo sapiens
  siRNA target sequence for MYO10 (NM_012334.1,795-813).
ctgtgttgaacgagctatt

SEQ ID NO: 92527 - DNA, 19 bp, Homo sapiens
  siRNA target sequence for MYO10 (NM_012334.1,797-815).
gtgttgaacgagctattct

SEQ ID NO: 92528 - DNA, 19 bp, Homo sapiens
  siRNA target sequence for MYO10 (NM_012334.1,802-820).
gaacgagctattcttgaaa

SEQ ID NO: 92529 - DNA, 19 bp, Homo sapiens
  siRNA target sequence for MYO10 (NM_012334.1,850-868).
gcgaagaccgtgtacaaca

SEQ ID NO: 92530 - DNA, 19 bp, Homo sapiens
  siRNA target sequence for MYO10 (NM_012334.1,851-869).
cgaagaccgtgtacaacaa

SEQ ID NO: 92531 - DNA, 19 bp, Homo sapiens
  siRNA target sequence for MYO10 (NM_012334.1,859-877).
gtgtacaacaacaactcta

SEQ ID NO: 92532 - DNA, 19 bp, Homo sapiens
  siRNA target sequence for MYO10 (NM_012334.1,966-984).
ccgagtagtaaggcaaaat

SEQ ID NO: 92533 - DNA, 19 bp, Homo sapiens
  siRNA target sequence for MYO10 (NM_012334.1,988-1006).
ggggaaaggaattatcaca

SEQ ID NO: 92534 - DNA, 19 bp, Homo sapiens
  siRNA target sequence for MYO10 (NM_012334.1,990-1008).
ggaaaggaattatcacata

SEQ ID NO: 92535 - DNA, 19 bp, Homo sapiens
  siRNA target sequence for MYO10 (NM_012334.1,991-1009).
gaaaggaattatcacatat

SEQ ID NO: 92536 - DNA, 19 bp, Homo sapiens
  siRNA target sequence for MYO10 (NM_012334.1,1260-1278).
ggcacaggtttccttcaaa

SEQ ID NO: 92537 - DNA, 19 bp, Homo sapiens
  siRNA target sequence for MYO10 (NM_012334.1,1289-1307).
gcagatctgcggagttact

SEQ ID NO: 92538 - DNA, 19 bp, Homo sapiens
  siRNA target sequence for MYO10 (NM_012334.1,1290-1308).
cagatctgcggagttactt

SEQ ID NO: 92539 - DNA, 19 bp, Homo sapiens
  siRNA target sequence for MYO10 (NM_012334.1,1337-1355).
ctttgacccagagatcaat

SEQ ID NO: 92540 - DNA, 19 bp, Homo sapiens
  siRNA target sequence for MYO10 (NM_012334.1,1374-1392).
gatcctcacgcctctcaat

SEQ ID NO: 92541 - DNA, 19 bp, Homo sapiens
  siRNA target sequence for MYO10 (NM_012334.1,1380-1398).
cacgcctctcaatgttcaa

SEQ ID NO: 92542 - DNA, 19 bp, Homo sapiens
  siRNA target sequence for MYO10 (NM_012334.1,1489-1507).
ggcaatgaggacttcaagt

SEQ ID NO: 92543 - DNA, 19 bp, Homo sapiens
  siRNA target sequence for MYO10 (NM_012334.1,1557-1575).
ctttgaacagttcaatata

SEQ ID NO: 92544 - DNA, 19 bp, Homo sapiens
  siRNA target sequence for MYO10 (NM_012334.1,1602-1620).
gtacttcaacaagcatatt

SEQ ID NO: 92545 - DNA, 19 bp, Homo sapiens
  siRNA target sequence for MYO10 (NM_012334.1,1691-1709).
gagaatgcctggacttgat

SEQ ID NO: 92546 - DNA, 19 bp, Homo sapiens
  siRNA target sequence for MYO10 (NM_012334.1,1723-1741).
ggcctcctagcccttatca

SEQ ID NO: 92547 - DNA, 19 bp, Homo sapiens
  siRNA target sequence for MYO10 (NM_012334.1,1724-1742).
gcctcctagcccttatcaa

SEQ ID NO: 92548 - DNA, 19 bp, Homo sapiens
  siRNA target sequence for MYO10 (NM_012334.1,1725-1743).
cctcctagcccttatcaat

SEQ ID NO: 92549 - DNA, 19 bp, Homo sapiens
  siRNA target sequence for MYO10 (NM_012334.1,1765-1783).
gccacagacagcaccttat

SEQ ID NO: 92550 - DNA, 19 bp, Homo sapiens
  siRNA target sequence for MYO10 (NM_012334.1,1769-1787).
cagacagcaccttattgga

SEQ ID NO: 92551 - DNA, 19 bp, Homo sapiens
  siRNA target sequence for MYO10 (NM_012334.1,1799-1817).
gtcagcatgcgaataacca

SEQ ID NO: 92552 - DNA, 19 bp, Homo sapiens
  siRNA target sequence for MYO10 (NM_012334.1,1804-1822).
catgcgaataaccactttt

SEQ ID NO: 92553 - DNA, 19 bp, Homo sapiens
  siRNA target sequence for MYO10 (NM_012334.1,1808-1826).
cgaataaccacttttatgt

SEQ ID NO: 92554 - DNA, 19 bp, Homo sapiens
  siRNA target sequence for MYO10 (NM_012334.1,1895-1913).
gaggtatcttggagaagaa

SEQ ID NO: 92555 - DNA, 19 bp, Homo sapiens
  siRNA target sequence for MYO10 (NM_012334.1,1911-1929).
gaacagagatacatttcga

SEQ ID NO: 92556 - DNA, 19 bp, Homo sapiens
  siRNA target sequence for MYO10 (NM_012334.1,1927-1945).
cgagatgaccttctcaatt

SEQ ID NO: 92557 - DNA, 19 bp, Homo sapiens
  siRNA target sequence for MYO10 (NM_012334.1,1958-1976).
gccgatttgactttatcta

SEQ ID NO: 92558 - DNA, 19 bp, Homo sapiens
  siRNA target sequence for MYO10 (NM_012334.1,1977-1995).
cgatctttttgaacatgtt

SEQ ID NO: 92559 - DNA, 19 bp, Homo sapiens
  siRNA target sequence for MYO10 (NM_012334.1,2007-2025).
caaccaggataccttgaaa

SEQ ID NO: 92560 - DNA, 19 bp, Homo sapiens
  siRNA target sequence for MYO10 (NM_012334.1,2010-2028).
ccaggataccttgaaatgt

SEQ ID NO: 92561 - DNA, 19 bp, Homo sapiens
  siRNA target sequence for MYO10 (NM_012334.1,2252-2270).
gaccctttcaggactttta

SEQ ID NO: 92562 - DNA, 19 bp, Homo sapiens
  siRNA target sequence for MYO10 (NM_012334.1,2254-2272).
ccctttcaggacttttaca

SEQ ID NO: 92563 - DNA, 19 bp, Homo sapiens
  siRNA target sequence for MYO10 (NM_012334.1,2262-2280).
ggacttttacaaaaggtat

SEQ ID NO: 92564 - DNA, 19 bp, Homo sapiens
  siRNA target sequence for MYO10 (NM_012334.1,2263-2281).
gacttttacaaaaggtata

SEQ ID NO: 92565 - DNA, 19 bp, Homo sapiens
  siRNA target sequence for MYO10 (NM_012334.1,2475-2493).
ccatgtcttgggcttctta

SEQ ID NO: 92566 - DNA, 19 bp, Homo sapiens
  siRNA target sequence for MYO10 (NM_012334.1,2484-2502).
gggcttcttagcacgaaaa

SEQ ID NO: 92567 - DNA, 19 bp, Homo sapiens
  siRNA target sequence for MYO10 (NM_012334.1,2487-2505).
cttcttagcacgaaaacaa

SEQ ID NO: 92568 - DNA, 19 bp, Homo sapiens
  siRNA target sequence for MYO10 (NM_012334.1,2494-2512).
gcacgaaaacaatacagaa

SEQ ID NO: 92569 - DNA, 19 bp, Homo sapiens
  siRNA target sequence for MYO10 (NM_012334.1,2559-2577).
ccttctgaggaggagattt

SEQ ID NO: 92570 - DNA, 19 bp, Homo sapiens
  siRNA target sequence for MYO10 (NM_012334.1,2613-2631).
gcaactcagaggtcagatt

SEQ ID NO: 92571 - DNA, 19 bp, Homo sapiens
  siRNA target sequence for MYO10 (NM_012334.1,3105-3123).
gtcggtgggaagcgaattt

SEQ ID NO: 92572 - DNA, 19 bp, Homo sapiens
  siRNA target sequence for MYO10 (NM_012334.1,3267-3285).
ctcagaccagcgaacaagt

SEQ ID NO: 92573 - DNA, 19 bp, Homo sapiens
  siRNA target sequence for MYO10 (NM_012334.1,3644-3662).
cgcagtcctcgtttgaaga

SEQ ID NO: 92574 - DNA, 19 bp, Homo sapiens
  siRNA target sequence for MYO10 (NM_012334.1,3645-3663).
gcagtcctcgtttgaagat

SEQ ID NO: 92575 - DNA, 19 bp, Homo sapiens
  siRNA target sequence for MYO10 (NM_012334.1,3648-3666).
gtcctcgtttgaagatagt

SEQ ID NO: 92576 - DNA, 19 bp, Homo sapiens
  siRNA target sequence for MYO10 (NM_012334.1,3651-3669).
ctcgtttgaagatagtgaa

SEQ ID NO: 92577 - DNA, 19 bp, Homo sapiens
  siRNA target sequence for MYO10 (NM_012334.1,3737-3755).
gtgtcactctgccgtattt

SEQ ID NO: 92578 - DNA, 19 bp, Homo sapiens
  siRNA target sequence for MYO10 (NM_012334.1,3778-3796).
ggtggcctgatgaactctt

SEQ ID NO: 92579 - DNA, 19 bp, Homo sapiens
  siRNA target sequence for MYO10 (NM_012334.1,3947-3965).
gccagtccaagctgatgta

SEQ ID NO: 92580 - DNA, 19 bp, Homo sapiens
  siRNA target sequence for MYO10 (NM_012334.1,3951-3969).
gtccaagctgatgtacttt

SEQ ID NO: 92581 - DNA, 19 bp, Homo sapiens
  siRNA target sequence for MYO10 (NM_012334.1,4013-4031).
gaacggcaaaagagatcat

SEQ ID NO: 92582 - DNA, 19 bp, Homo sapiens
  siRNA target sequence for MYO10 (NM_012334.1,4016-4034).
cggcaaaagagatcataga

SEQ ID NO: 92583 - DNA, 19 bp, Homo sapiens
  siRNA target sequence for MYO10 (NM_012334.1,4017-4035).
ggcaaaagagatcatagat

SEQ ID NO: 92584 - DNA, 19 bp, Homo sapiens
  siRNA target sequence for MYO10 (NM_012334.1,4222-4240).
gatgtggggctgattgatt

SEQ ID NO: 92585 - DNA, 19 bp, Homo sapiens
  siRNA target sequence for MYO10 (NM_012334.1,4251-4269).
ctctgacagccctgataga

SEQ ID NO: 92586 - DNA, 19 bp, Homo sapiens
  siRNA target sequence for MYO10 (NM_012334.1,4268-4286).
gacccaactcgtttgtgat

SEQ ID NO: 92587 - DNA, 19 bp, Homo sapiens
  siRNA target sequence for MYO10 (NM_012334.1,4271-4289).
ccaactcgtttgtgatcat

SEQ ID NO: 92588 - DNA, 19 bp, Homo sapiens
  siRNA target sequence for MYO10 (NM_012334.1,4382-4400).
gagtggagggccaggaatt

SEQ ID NO: 92589 - DNA, 19 bp, Homo sapiens
  siRNA target sequence for MYO10 (NM_012334.1,4577-4595).
ccccagatgagaagatatt

SEQ ID NO: 92590 - DNA, 19 bp, Homo sapiens
  siRNA target sequence for MYO10 (NM_012334.1,4683-4701).
gtggtccagtgccattcaa

SEQ ID NO: 92591 - DNA, 19 bp, Homo sapiens
  siRNA target sequence for MYO10 (NM_012334.1,4688-4706).
ccagtgccattcaaaacgt

SEQ ID NO: 92592 - DNA, 19 bp, Homo sapiens
  siRNA target sequence for MYO10 (NM_012334.1,4782-4800).
ggatgtggtggaacagatt

SEQ ID NO: 92593 - DNA, 19 bp, Homo sapiens
  siRNA target sequence for MYO10 (NM_012334.1,4808-4826).
ggaacccgatccttcgata

SEQ ID NO: 92594 - DNA, 19 bp, Homo sapiens
  siRNA target sequence for MYO10 (NM_012334.1,4861-4879).
cttccgtatggggacataa

SEQ ID NO: 92595 - DNA, 19 bp, Homo sapiens
  siRNA target sequence for MYO10 (NM_012334.1,4865-4883).
cgtatggggacataaatct

SEQ ID NO: 92596 - DNA, 19 bp, Homo sapiens
  siRNA target sequence for MYO10 (NM_012334.1,4871-4889).
gggacataaatctcaactt

SEQ ID NO: 92597 - DNA, 19 bp, Homo sapiens
  siRNA target sequence for MYO10 (NM_012334.1,4926-4944).
ggccatcaagatattcaat

SEQ ID NO: 92598 - DNA, 19 bp, Homo sapiens
  siRNA target sequence for MYO10 (NM_012334.1,4965-4983).
catgtctgacccaattcca

SEQ ID NO: 92599 - DNA, 19 bp, Homo sapiens
  siRNA target sequence for MYO10 (NM_012334.1,4968-4986).
gtctgacccaattccaata

SEQ ID NO: 92600 - DNA, 19 bp, Homo sapiens
  siRNA target sequence for MYO10 (NM_012334.1,4970-4988).
ctgacccaattccaataat

SEQ ID NO: 92601 - DNA, 19 bp, Homo sapiens
  siRNA target sequence for MYO10 (NM_012334.1,5040-5058).
gtactgccagcttatcaaa

SEQ ID NO: 92602 - DNA, 19 bp, Homo sapiens
  siRNA target sequence for MYO10 (NM_012334.1,5143-5161).
ccgagtcgagggattctca

SEQ ID NO: 92603 - DNA, 19 bp, Homo sapiens
  siRNA target sequence for MYO10 (NM_012334.1,5147-5165).
gtcgagggattctcaagta

SEQ ID NO: 92604 - DNA, 19 bp, Homo sapiens
  siRNA target sequence for MYO10 (NM_012334.1,5150-5168).
gagggattctcaagtatct

SEQ ID NO: 92605 - DNA, 19 bp, Homo sapiens
  siRNA target sequence for MYO10 (NM_012334.1,5152-5170).
gggattctcaagtatctca

SEQ ID NO: 92606 - DNA, 19 bp, Homo sapiens
  siRNA target sequence for MYO10 (NM_012334.1,5226-5244).
cgctctcttcacttacgaa

SEQ ID NO: 92607 - DNA, 19 bp, Homo sapiens
  siRNA target sequence for MYO10 (NM_012334.1,5232-5250).
cttcacttacgaatctctt

SEQ ID NO: 92608 - DNA, 19 bp, Homo sapiens
  siRNA target sequence for MYO10 (NM_012334.1,5237-5255).
cttacgaatctcttaagaa

SEQ ID NO: 92609 - DNA, 19 bp, Homo sapiens
  siRNA target sequence for MYO10 (NM_012334.1,5275-5293).
gtgccttcccgagatgaaa

SEQ ID NO: 92610 - DNA, 19 bp, Homo sapiens
  siRNA target sequence for MYO10 (NM_012334.1,5277-5295).
gccttcccgagatgaaata

SEQ ID NO: 92611 - DNA, 19 bp, Homo sapiens
  siRNA target sequence for MYO10 (NM_012334.1,5279-5297).
cttcccgagatgaaataga

SEQ ID NO: 92612 - DNA, 19 bp, Homo sapiens
  siRNA target sequence for MYO10 (NM_012334.1,5472-5490).
cgtcgacaaagccattgaa

SEQ ID NO: 92613 - DNA, 19 bp, Homo sapiens
  siRNA target sequence for MYO10 (NM_012334.1,5473-5491).
gtcgacaaagccattgaaa

SEQ ID NO: 92614 - DNA, 19 bp, Homo sapiens
  siRNA target sequence for MYO10 (NM_012334.1,5499-5517).
cgtcgtagctgatgtctta

SEQ ID NO: 92615 - DNA, 19 bp, Homo sapiens
  siRNA target sequence for MYO10 (NM_012334.1,5626-5644).
gtggagtttgcatttatgt

SEQ ID NO: 92616 - DNA, 19 bp, Homo sapiens
  siRNA target sequence for MYO10 (NM_012334.1,5654-5672).
cccacgaagcggttatcca

SEQ ID NO: 92617 - DNA, 19 bp, Homo sapiens
  siRNA target sequence for MYO10 (NM_012334.1,5655-5673).
ccacgaagcggttatccat

SEQ ID NO: 92618 - DNA, 19 bp, Homo sapiens
  siRNA target sequence for MYO10 (NM_012334.1,5768-5786).
cacctctcgaagaggttta

SEQ ID NO: 92619 - DNA, 19 bp, Homo sapiens
  siRNA target sequence for MYO10 (NM_012334.1,5770-5788).
cctctcgaagaggtttatt

SEQ ID NO: 92620 - DNA, 19 bp, Homo sapiens
  siRNA target sequence for MYO10 (NM_012334.1,5816-5834).
gccagtcaaccaaaacctt

SEQ ID NO: 92621 - DNA, 19 bp, Homo sapiens
  siRNA target sequence for MYO10 (NM_012334.1,5981-5999).
ctcgagccagtatcattga

SEQ ID NO: 92622 - DNA, 19 bp, Homo sapiens
  siRNA target sequence for MYO10 (NM_012334.1,5983-6001).
cgagccagtatcattgaca

SEQ ID NO: 92623 - DNA, 19 bp, Homo sapiens
  siRNA target sequence for MYO10 (NM_012334.1,5984-6002).
gagccagtatcattgacaa

SEQ ID NO: 92624 - DNA, 19 bp, Homo sapiens
  siRNA target sequence for MYO10 (NM_012334.1,6083-6101).
gctcgacgctgtttgatgt

SEQ ID NO: 92625 - DNA, 19 bp, Homo sapiens
  siRNA target sequence for MYO10 (NM_012334.1,6232-6250).
gcacccctggcgaatacgt

SEQ ID NO: 92626 - DNA, 19 bp, Homo sapiens
  siRNA target sequence for MYO10 (NM_012334.1,6233-6251).
cacccctggcgaatacgta

SEQ ID NO: 92627 - DNA, 19 bp, Homo sapiens
  siRNA target sequence for MYO10 (NM_012334.1,6235-6253).
cccctggcgaatacgtata

SEQ ID NO: 92628 - DNA, 19 bp, Homo sapiens
  siRNA target sequence for MYO10 (NM_012334.1,6236-6254).
ccctggcgaatacgtataa

SEQ ID NO: 92629 - DNA, 19 bp, Homo sapiens
  siRNA target sequence for MYO10 (NM_012334.1,6238-6256).
ctggcgaatacgtataaga

SEQ ID NO: 92630 - DNA, 19 bp, Homo sapiens
  siRNA target sequence for MYO15A (NM_016239.2,433-451).
ggacgtcgcggctgttcat

SEQ ID NO: 92631 - DNA, 19 bp, Homo sapiens
  siRNA target sequence for MYO15A (NM_016239.2,462-480).
gaccgtacacccaagatct

SEQ ID NO: 92632 - DNA, 19 bp, Homo sapiens
  siRNA target sequence for MYO15A (NM_016239.2,1028-1046).
ggacctgggcgagtattat

SEQ ID NO: 92633 - DNA, 19 bp, Homo sapiens
  siRNA target sequence for MYO15A (NM_016239.2,1032-1050).
ctgggcgagtattatgact

SEQ ID NO: 92634 - DNA, 19 bp, Homo sapiens
  siRNA target sequence for MYO15A (NM_016239.2,1034-1052).
gggcgagtattatgactat

SEQ ID NO: 92635 - DNA, 19 bp, Homo sapiens
  siRNA target sequence for MYO15A (NM_016239.2,1036-1054).
gcgagtattatgactatca

SEQ ID NO: 92636 - DNA, 19 bp, Homo sapiens
  siRNA target sequence for MYO15A (NM_016239.2,1156-1174).
cctacggcgaccactacta

SEQ ID NO: 92637 - DNA, 19 bp, Homo sapiens
  siRNA target sequence for MYO15A (NM_016239.2,1255-1273).
gctacggctacgacgatta

SEQ ID NO: 92638 - DNA, 19 bp, Homo sapiens
  siRNA target sequence for MYO15A (NM_016239.2,1259-1277).
cggctacgacgattacgaa

SEQ ID NO: 92639 - DNA, 19 bp, Homo sapiens
  siRNA target sequence for MYO15A (NM_016239.2,1427-1445).
ctacgatgtaccctacttt

SEQ ID NO: 92640 - DNA, 19 bp, Homo sapiens
  siRNA target sequence for MYO15A (NM_016239.2,1430-1448).
cgatgtaccctactttgat

SEQ ID NO: 92641 - DNA, 19 bp, Homo sapiens
  siRNA target sequence for MYO15A (NM_016239.2,1521-1539).
cccgaggtgccctattttt

SEQ ID NO: 92642 - DNA, 19 bp, Homo sapiens
  siRNA target sequence for MYO15A (NM_016239.2,1522-1540).
ccgaggtgccctattttta

SEQ ID NO: 92643 - DNA, 19 bp, Homo sapiens
  siRNA target sequence for MYO15A (NM_016239.2,1615-1633).
cccacgccatggatgacat

SEQ ID NO: 92644 - DNA, 19 bp, Homo sapiens
  siRNA target sequence for MYO15A (NM_016239.2,2055-2073).
gcgcggttcctcaagaaga

SEQ ID NO: 92645 - DNA, 19 bp, Homo sapiens
  siRNA target sequence for MYO15A (NM_016239.2,3330-3348).
cctggacagctcaccaaat

SEQ ID NO: 92646 - DNA, 19 bp, Homo sapiens
  siRNA target sequence for MYO15A (NM_016239.2,3489-3507).
ctcccagagcaaaagacat

SEQ ID NO: 92647 - DNA, 19 bp, Homo sapiens
  siRNA target sequence for MYO15A (NM_016239.2,3930-3948).
ccaagctggcggaacaaga

SEQ ID NO: 92648 - DNA, 19 bp, Homo sapiens
  siRNA target sequence for MYO15A (NM_016239.2,3931-3949).
caagctggcggaacaagat

SEQ ID NO: 92649 - DNA, 19 bp, Homo sapiens
  siRNA target sequence for MYO15A (NM_016239.2,4055-4073).
gtccaacctcaagattaga

SEQ ID NO: 92650 - DNA, 19 bp, Homo sapiens
  siRNA target sequence for MYO15A (NM_016239.2,4057-4075).
ccaacctcaagattagatt

SEQ ID NO: 92651 - DNA, 19 bp, Homo sapiens
  siRNA target sequence for MYO15A (NM_016239.2,4077-4095).
gaacggaacctcatctaca

SEQ ID NO: 92652 - DNA, 19 bp, Homo sapiens
  siRNA target sequence for MYO15A (NM_016239.2,4080-4098).
cggaacctcatctacacat

SEQ ID NO: 92653 - DNA, 19 bp, Homo sapiens
  siRNA target sequence for MYO15A (NM_016239.2,4081-4099).
ggaacctcatctacacata

SEQ ID NO: 92654 - DNA, 19 bp, Homo sapiens
  siRNA target sequence for MYO15A (NM_016239.2,4118-4136).
gtcggtgaacccataccaa

SEQ ID NO: 92655 - DNA, 19 bp, Homo sapiens
  siRNA target sequence for MYO15A (NM_016239.2,4120-4138).
cggtgaacccataccaaat

SEQ ID NO: 92656 - DNA, 19 bp, Homo sapiens
  siRNA target sequence for MYO15A (NM_016239.2,4286-4304).
gagcggctctggcaaaact

SEQ ID NO: 92657 - DNA, 19 bp, Homo sapiens
  siRNA target sequence for MYO15A (NM_016239.2,4452-4470).
gggaagtttgtggaaatct

SEQ ID NO: 92658 - DNA, 19 bp, Homo sapiens
  siRNA target sequence for MYO15A (NM_016239.2,4508-4526).
ccagtacctgcttgagaaa

SEQ ID NO: 92659 - DNA, 19 bp, Homo sapiens
  siRNA target sequence for MYO15A (NM_016239.2,4546-4564).
ccaaaaacgagaggaatta

SEQ ID NO: 92660 - DNA, 19 bp, Homo sapiens
  siRNA target sequence for MYO15A (NM_016239.2,4631-4649).
ggctgagacctactactat

SEQ ID NO: 92661 - DNA, 19 bp, Homo sapiens
  siRNA target sequence for MYO15A (NM_016239.2,4635-4653).
gagacctactactatctga

SEQ ID NO: 92662 - DNA, 19 bp, Homo sapiens
  siRNA target sequence for MYO15A (NM_016239.2,4658-4676).
gggtgggaactgtgagata

SEQ ID NO: 92663 - DNA, 19 bp, Homo sapiens
  siRNA target sequence for MYO15A (NM_016239.2,4999-5017).
ccatcgccaaggtcttgta

SEQ ID NO: 92664 - DNA, 19 bp, Homo sapiens
  siRNA target sequence for MYO15A (NM_016239.2,5000-5018).
catcgccaaggtcttgtat

SEQ ID NO: 92665 - DNA, 19 bp, Homo sapiens
  siRNA target sequence for MYO15A (NM_016239.2,5172-5190).
cttcagtaccttttcaaca

SEQ ID NO: 92666 - DNA, 19 bp, Homo sapiens
  siRNA target sequence for MYO15A (NM_016239.2,5391-5409).
gccaacccgctctattcca

SEQ ID NO: 92667 - DNA, 19 bp, Homo sapiens
  siRNA target sequence for MYO15A (NM_016239.2,5617-5635).
ccgtcactcggctctacaa

SEQ ID NO: 92668 - DNA, 19 bp, Homo sapiens
  siRNA target sequence for MYO15A (NM_016239.2,5777-5795).
ggcacaattacgctattca

SEQ ID NO: 92669 - DNA, 19 bp, Homo sapiens
  siRNA target sequence for MYO15A (NM_016239.2,5979-5997).
gtcagcaagctgttcctta

SEQ ID NO: 92670 - DNA, 19 bp, Homo sapiens
  siRNA target sequence for MYO15A (NM_016239.2,6031-6049).
gagagcatgtcctgaatct

SEQ ID NO: 92671 - DNA, 19 bp, Homo sapiens
  siRNA target sequence for MYO15A (NM_016239.2,6109-6127).
ctctgcgccacaagatcat

SEQ ID NO: 92672 - DNA, 19 bp, Homo sapiens
  siRNA target sequence for MYO15A (NM_016239.2,6468-6486).
gacatcaacaactatccta

SEQ ID NO: 92673 - DNA, 19 bp, Homo sapiens
  siRNA target sequence for MYO15A (NM_016239.2,6740-6758).
ggtgtggcacaatcacaat

SEQ ID NO: 92674 - DNA, 19 bp, Homo sapiens
  siRNA target sequence for MYO15A (NM_016239.2,6820-6838).
ccccgtgcttcaacaagta

SEQ ID NO: 92675 - DNA, 19 bp, Homo sapiens
  siRNA target sequence for MYO15A (NM_016239.2,6976-6994).
ggacagcgacctatgagaa

SEQ ID NO: 92676 - DNA, 19 bp, Homo sapiens
  siRNA target sequence for MYO15A (NM_016239.2,7010-7028).
ggacgtgggctgcttcaat

SEQ ID NO: 92677 - DNA, 19 bp, Homo sapiens
  siRNA target sequence for MYO15A (NM_016239.2,7130-7148).
gaccgtggccatgaagaat

SEQ ID NO: 92678 - DNA, 19 bp, Homo sapiens
  siRNA target sequence for MYO15A (NM_016239.2,7174-7192).
gccacgactacgtgttaga

SEQ ID NO: 92679 - DNA, 19 bp, Homo sapiens
  siRNA target sequence for MYO15A (NM_016239.2,7355-7373).
gcacatgcccaaagtactt

SEQ ID NO: 92680 - DNA, 19 bp, Homo sapiens
  siRNA target sequence for MYO15A (NM_016239.2,7397-7415).
caatcaggacggtacaaat

SEQ ID NO: 92681 - DNA, 19 bp, Homo sapiens
  siRNA target sequence for MYO15A (NM_016239.2,7571-7589).
cattgcctaccgcatgaaa

SEQ ID NO: 92682 - DNA, 19 bp, Homo sapiens
  siRNA target sequence for MYO15A (NM_016239.2,8007-8025).
gagctggtccggtactcta

SEQ ID NO: 92683 - DNA, 19 bp, Homo sapiens
  siRNA target sequence for MYO15A (NM_016239.2,8133-8151).
ggcgggaaagtgttcatga

SEQ ID NO: 92684 - DNA, 19 bp, Homo sapiens
  siRNA target sequence for MYO15A (NM_016239.2,8134-8152).
gcgggaaagtgttcatgaa

SEQ ID NO: 92685 - DNA, 19 bp, Homo sapiens
  siRNA target sequence for MYO15A (NM_016239.2,8353-8371).
ggctgcaccgcctcatcaa

SEQ ID NO: 92686 - DNA, 19 bp, Homo sapiens
  siRNA target sequence for MYO15A (NM_016239.2,8714-8732).
gtcccacgtgggcatcaaa

SEQ ID NO: 92687 - DNA, 19 bp, Homo sapiens
  siRNA target sequence for MYO15A (NM_016239.2,8905-8923).
ccctggtagatgacttcat

SEQ ID NO: 92688 - DNA, 19 bp, Homo sapiens
  siRNA target sequence for MYO15A (NM_016239.2,9354-9372).
gcgctcccaccctacacaa

SEQ ID NO: 92689 - DNA, 19 bp, Homo sapiens
  siRNA target sequence for MYO15A (NM_016239.2,9378-9396).
gagtttgcccagaagtatt

SEQ ID NO: 92690 - DNA, 19 bp, Homo sapiens
  siRNA target sequence for MYO15A (NM_016239.2,9612-9630).
gacctggacgtgctttgta

SEQ ID NO: 92691 - DNA, 19 bp, Homo sapiens
  siRNA target sequence for MYO15A (NM_016239.2,9657-9675).
gaggtcatgcgggatgaat

SEQ ID NO: 92692 - DNA, 19 bp, Homo sapiens
  siRNA target sequence for MYO15A (NM_016239.2,9660-9678).
gtcatgcgggatgaatgtt

SEQ ID NO: 92693 - DNA, 19 bp, Homo sapiens
  siRNA target sequence for MYO15A (NM_016239.2,9696-9714).
cagatcacagacaatacca

SEQ ID NO: 92694 - DNA, 19 bp, Homo sapiens
  siRNA target sequence for MYO15A (NM_016239.2,9745-9763).
ggaggctgctgtatatcgt

SEQ ID NO: 92695 - DNA, 19 bp, Homo sapiens
  siRNA target sequence for MYO15A (NM_016239.2,9961-9979).
gttccaagaggcaactctt

SEQ ID NO: 92696 - DNA, 19 bp, Homo sapiens
  siRNA target sequence for MYO15A (NM_016239.2,9994-10012).
gccttgaacgccatctcaa

SEQ ID NO: 92697 - DNA, 19 bp, Homo sapiens
  siRNA target sequence for MYO15A (NM_016239.2,9995-10013).
ccttgaacgccatctcaaa

SEQ ID NO: 92698 - DNA, 19 bp, Homo sapiens
  siRNA target sequence for MYO15A (NM_016239.2,9996-10014).
cttgaacgccatctcaaaa

SEQ ID NO: 92699 - DNA, 19 bp, Homo sapiens
  siRNA target sequence for MYO15A (NM_016239.2,10040-10058).
cgtggtggaagagatatgt

SEQ ID NO: 92700 - DNA, 19 bp, Homo sapiens
  siRNA target sequence for MYO15A (NM_016239.2,10080-10098).
cctgaggccttcaatgaat

SEQ ID NO: 92701 - DNA, 19 bp, Homo sapiens
  siRNA target sequence for MYO15A (NM_016239.2,10085-10103).
ggccttcaatgaatatgtt

SEQ ID NO: 92702 - DNA, 19 bp, Homo sapiens
  siRNA target sequence for MYO15A (NM_016239.2,10086-10104).
gccttcaatgaatatgtta

SEQ ID NO: 92703 - DNA, 19 bp, Homo sapiens
  siRNA target sequence for MYO15A (NM_016239.2,10087-10105).
ccttcaatgaatatgttat

SEQ ID NO: 92704 - DNA, 19 bp, Homo sapiens
  siRNA target sequence for MYO15A (NM_016239.2,10247-10265).
gttcgagaatgagctatat

SEQ ID NO: 92705 - DNA, 19 bp, Homo sapiens
  siRNA target sequence for MYO15A (NM_016239.2,10390-10408).
gcgccaaggaccacttcta

SEQ ID NO: 92706 - DNA, 19 bp, Homo sapiens
  siRNA target sequence for MYO15A (NM_016239.2,10652-10670).
ccacaatggcctcaacttt

SEQ ID NO: 92707 - DNA, 19 bp, Homo sapiens
  siRNA target sequence for MYO18B (NM_032608.4,351-369).
cagggggcttcattaagca

SEQ ID NO: 92708 - DNA, 19 bp, Homo sapiens
  siRNA target sequence for MYO18B (NM_032608.4,546-564).
ctgggagctcagacattct

SEQ ID NO: 92709 - DNA, 19 bp, Homo sapiens
  siRNA target sequence for MYO18B (NM_032608.4,604-622).
gcagatgacaagcatcaat

SEQ ID NO: 92710 - DNA, 19 bp, Homo sapiens
  siRNA target sequence for MYO18B (NM_032608.4,699-717).
ggggtgatgtgttgttgat

SEQ ID NO: 92711 - DNA, 19 bp, Homo sapiens
  siRNA target sequence for MYO18B (NM_032608.4,1262-1280).
gaaggggtgctcttaagta

SEQ ID NO: 92712 - DNA, 19 bp, Homo sapiens
  siRNA target sequence for MYO18B (NM_032608.4,1779-1797).
ggtatgaggcagagaaagt

SEQ ID NO: 92713 - DNA, 19 bp, Homo sapiens
  siRNA target sequence for MYO18B (NM_032608.4,1824-1842).
ctcttgctacggtgctaaa

SEQ ID NO: 92714 - DNA, 19 bp, Homo sapiens
  siRNA target sequence for MYO18B (NM_032608.4,1871-1889).
gcaggaagggtgagacttt

SEQ ID NO: 92715 - DNA, 19 bp, Homo sapiens
  siRNA target sequence for MYO18B (NM_032608.4,1879-1897).
ggtgagactttggattgat

SEQ ID NO: 92716 - DNA, 19 bp, Homo sapiens
  siRNA target sequence for MYO18B (NM_032608.4,1985-2003).
ctcatcagtgtcaacgaat

SEQ ID NO: 92717 - DNA, 19 bp, Homo sapiens
  siRNA target sequence for MYO18B (NM_032608.4,2020-2038).
gcttctgcagcgctacaaa

SEQ ID NO: 92718 - DNA, 19 bp, Homo sapiens
  siRNA target sequence for MYO18B (NM_032608.4,2453-2471).
cagctccagacaatgcttt

SEQ ID NO: 92719 - DNA, 19 bp, Homo sapiens
  siRNA target sequence for MYO18B (NM_032608.4,2620-2638).
gtccaagcctgaagataaa

SEQ ID NO: 92720 - DNA, 19 bp, Homo sapiens
  siRNA target sequence for MYO18B (NM_032608.4,2774-2792).
ggtcggaagcagttcatga

SEQ ID NO: 92721 - DNA, 19 bp, Homo sapiens
  siRNA target sequence for MYO18B (NM_032608.4,2793-2811).
ggtttgagtgggcaaacta

SEQ ID NO: 92722 - DNA, 19 bp, Homo sapiens
  siRNA target sequence for MYO18B (NM_032608.4,2823-2841).
ccctgggctgcgagtatga

SEQ ID NO: 92723 - DNA, 19 bp, Homo sapiens
  siRNA target sequence for MYO18B (NM_032608.4,2877-2895).
gacagatcatccagcaaat

SEQ ID NO: 92724 - DNA, 19 bp, Homo sapiens
  siRNA target sequence for MYO18B (NM_032608.4,3026-3044).
ctcatcaacagatcctttt

SEQ ID NO: 92725 - DNA, 19 bp, Homo sapiens
  siRNA target sequence for MYO18B (NM_032608.4,3207-3225).
ccacgctacagcgatatca

SEQ ID NO: 92726 - DNA, 19 bp, Homo sapiens
  siRNA target sequence for MYO18B (NM_032608.4,3208-3226).
cacgctacagcgatatcaa

SEQ ID NO: 92727 - DNA, 19 bp, Homo sapiens
  siRNA target sequence for MYO18B (NM_032608.4,3210-3228).
cgctacagcgatatcaaga

SEQ ID NO: 92728 - DNA, 19 bp, Homo sapiens
  siRNA target sequence for MYO18B (NM_032608.4,3487-3505).
gcccctccagtgtgagatt

SEQ ID NO: 92729 - DNA, 19 bp, Homo sapiens
  siRNA target sequence for MYO18B (NM_032608.4,3489-3507).
ccctccagtgtgagatttt

SEQ ID NO: 92730 - DNA, 19 bp, Homo sapiens
  siRNA target sequence for MYO18B (NM_032608.4,3774-3792).
ccccgtgctcccagatcaa

SEQ ID NO: 92731 - DNA, 19 bp, Homo sapiens
  siRNA target sequence for MYO18B (NM_032608.4,3806-3824).
gcgctgaccagcatgatca

SEQ ID NO: 92732 - DNA, 19 bp, Homo sapiens
  siRNA target sequence for MYO18B (NM_032608.4,3807-3825).
cgctgaccagcatgatcaa

SEQ ID NO: 92733 - DNA, 19 bp, Homo sapiens
  siRNA target sequence for MYO18B (NM_032608.4,3809-3827).
ctgaccagcatgatcaaaa

SEQ ID NO: 92734 - DNA, 19 bp, Homo sapiens
  siRNA target sequence for MYO18B (NM_032608.4,4107-4125).
cgacctccgagggaataga

SEQ ID NO: 92735 - DNA, 19 bp, Homo sapiens
  siRNA target sequence for MYO18B (NM_032608.4,4108-4126).
gacctccgagggaatagat

SEQ ID NO: 92736 - DNA, 19 bp, Homo sapiens
  siRNA target sequence for MYO18B (NM_032608.4,4110-4128).
cctccgagggaatagatga

SEQ ID NO: 92737 - DNA, 19 bp, Homo sapiens
  siRNA target sequence for MYO18B (NM_032608.4,4111-4129).
ctccgagggaatagatgaa

SEQ ID NO: 92738 - DNA, 19 bp, Homo sapiens
  siRNA target sequence for MYO18B (NM_032608.4,4193-4211).
cacagccaagtttttctca

SEQ ID NO: 92739 - DNA, 19 bp, Homo sapiens
  siRNA target sequence for MYO18B (NM_032608.4,4260-4278).
ctcagagcatcgttctctt

SEQ ID NO: 92740 - DNA, 19 bp, Homo sapiens
  siRNA target sequence for MYO18B (NM_032608.4,4305-4323).
ctcgccaggaattcaagaa

SEQ ID NO: 92741 - DNA, 19 bp, Homo sapiens
  siRNA target sequence for MYO18B (NM_032608.4,4433-4451).
cttagtgccaccattggaa

SEQ ID NO: 92742 - DNA, 19 bp, Homo sapiens
  siRNA target sequence for MYO18B (NM_032608.4,5023-5041).
gctagagaaccaacaaagt

SEQ ID NO: 92743 - DNA, 19 bp, Homo sapiens
  siRNA target sequence for MYO18B (NM_032608.4,5032-5050).
ccaacaaagtcgaaaccat

SEQ ID NO: 92744 - DNA, 19 bp, Homo sapiens
  siRNA target sequence for MYO18B (NM_032608.4,5119-5137).
gaagggtctccgtgagaaa

SEQ ID NO: 92745 - DNA, 19 bp, Homo sapiens
  siRNA target sequence for MYO18B (NM_032608.4,5123-5141).
ggtctccgtgagaaagtga

SEQ ID NO: 92746 - DNA, 19 bp, Homo sapiens
  siRNA target sequence for MYO18B (NM_032608.4,6303-6321).
gggagagcagccagtacta

SEQ ID NO: 92747 - DNA, 19 bp, Homo sapiens
  siRNA target sequence for MYO18B (NM_032608.4,6570-6588).
gccgaaaagagatggataa

SEQ ID NO: 92748 - DNA, 19 bp, Homo sapiens
  siRNA target sequence for MYO18B (NM_032608.4,6573-6591).
gaaaagagatggataacgt

SEQ ID NO: 92749 - DNA, 19 bp, Homo sapiens
  siRNA target sequence for MYO18B (NM_032608.4,6845-6863).
cggcaaaagtactgtcatt

SEQ ID NO: 92750 - DNA, 19 bp, Homo sapiens
  siRNA target sequence for MYO18B (NM_032608.4,6846-6864).
ggcaaaagtactgtcattt

SEQ ID NO: 92751 - DNA, 19 bp, Homo sapiens
  siRNA target sequence for MYO18B (NM_032608.4,6960-6978).
cgctgtcgagggaaaagct

SEQ ID NO: 92752 - DNA, 19 bp, Homo sapiens
  siRNA target sequence for MYO18B (NM_032608.4,7159-7177).
gagggttggggcaaagtca

SEQ ID NO: 92753 - DNA, 19 bp, Homo sapiens
  siRNA target sequence for MYO18B (NM_032608.4,7174-7192).
gtcacccctggaaatcgaa

SEQ ID NO: 92754 - DNA, 19 bp, Homo sapiens
  siRNA target sequence for MYO18B (NM_032608.4,7268-7286).
ctccccgaaaagtcgaaaa

SEQ ID NO: 92755 - DNA, 19 bp, Homo sapiens
  siRNA target sequence for MYO18B (NM_032608.4,7279-7297).
gtcgaaaacccaattcagt

SEQ ID NO: 92756 - DNA, 19 bp, Homo sapiens
  siRNA target sequence for MYO18B (NM_032608.4,7300-7318).
ctgcgagtccctcttagaa

SEQ ID NO: 92757 - DNA, 19 bp, Homo sapiens
  siRNA target sequence for MYO18B (NM_032608.4,7448-7466).
ggaaaggagccgcttgttt

SEQ ID NO: 92758 - DNA, 19 bp, Homo sapiens
  siRNA target sequence for MYO18B (NM_032608.4,7449-7467).
gaaaggagccgcttgtttt

SEQ ID NO: 92759 - DNA, 19 bp, Homo sapiens
  siRNA target sequence for MYO18B (NM_032608.4,7659-7677).
gttcaagcatccactttga

SEQ ID NO: 92760 - DNA, 19 bp, Homo sapiens
  siRNA target sequence for MYO18B (NM_032608.4,7789-7807).
ctccatcgtgtccttcaaa

SEQ ID NO: 92761 - DNA, 19 bp, Homo sapiens
  siRNA target sequence for MYO18B (NM_032608.4,7913-7931).
gacgatgttgcgagcataa

SEQ ID NO: 92762 - DNA, 19 bp, Homo sapiens
  siRNA target sequence for MYO18B (NM_032608.4,7916-7934).
gatgttgcgagcataatga

SEQ ID NO: 92763 - DNA, 19 bp, Homo sapiens
  siRNA target sequence for MYO18B (NM_032608.4,7919-7937).
gttgcgagcataatgaaga

SEQ ID NO: 92764 - DNA, 19 bp, Homo sapiens
  siRNA target sequence for MYO1A (NM_005379.2,306-324).
ggagtcactgctcaagaat

SEQ ID NO: 92765 - DNA, 19 bp, Homo sapiens
  siRNA target sequence for MYO1A (NM_005379.2,309-327).
gtcactgctcaagaatctt

SEQ ID NO: 92766 - DNA, 19 bp, Homo sapiens
  siRNA target sequence for MYO1A (NM_005379.2,328-346).
cagcttcgctatgaaaaca

SEQ ID NO: 92767 - DNA, 19 bp, Homo sapiens
  siRNA target sequence for MYO1A (NM_005379.2,381-399).
ctcagtgaatccctatcaa

SEQ ID NO: 92768 - DNA, 19 bp, Homo sapiens
  siRNA target sequence for MYO1A (NM_005379.2,411-429).
ctatgggccagagttcatt

SEQ ID NO: 92769 - DNA, 19 bp, Homo sapiens
  siRNA target sequence for MYO1A (NM_005379.2,705-723).
caattcctcccgatttgga

SEQ ID NO: 92770 - DNA, 19 bp, Homo sapiens
  siRNA target sequence for MYO1A (NM_005379.2,763-781).
ctcggtggtgtcatcacaa

SEQ ID NO: 92771 - DNA, 19 bp, Homo sapiens
  siRNA target sequence for MYO1A (NM_005379.2,767-785).
gtggtgtcatcacaaacta

SEQ ID NO: 92772 - DNA, 19 bp, Homo sapiens
  siRNA target sequence for MYO1A (NM_005379.2,894-912).
gcttgagcgggatacaact

SEQ ID NO: 92773 - DNA, 19 bp, Homo sapiens
  siRNA target sequence for MYO1A (NM_005379.2,911-929).
ctggctatgcctatctgaa

SEQ ID NO: 92774 - DNA, 19 bp, Homo sapiens
  siRNA target sequence for MYO1A (NM_005379.2,914-932).
gctatgcctatctgaatca

SEQ ID NO: 92775 - DNA, 19 bp, Homo sapiens
  siRNA target sequence for MYO1A (NM_005379.2,920-938).
cctatctgaatcatgaagt

SEQ ID NO: 92776 - DNA, 19 bp, Homo sapiens
  siRNA target sequence for MYO1A (NM_005379.2,1158-1176).
ggtgggcttgaattcagaa

SEQ ID NO: 92777 - DNA, 19 bp, Homo sapiens
  siRNA target sequence for MYO1A (NM_005379.2,1230-1248).
ggtcactgcactgaatgtt

SEQ ID NO: 92778 - DNA, 19 bp, Homo sapiens
  siRNA target sequence for MYO1A (NM_005379.2,1231-1249).
gtcactgcactgaatgtta

SEQ ID NO: 92779 - DNA, 19 bp, Homo sapiens
  siRNA target sequence for MYO1A (NM_005379.2,1270-1288).
gacgccctggctaagaaca

SEQ ID NO: 92780 - DNA, 19 bp, Homo sapiens
  siRNA target sequence for MYO1A (NM_005379.2,1300-1318).
ctctttgactggatagtga

SEQ ID NO: 92781 - DNA, 19 bp, Homo sapiens
  siRNA target sequence for MYO1A (NM_005379.2,1310-1328).
ggatagtgaatcgaatcaa

SEQ ID NO: 92782 - DNA, 19 bp, Homo sapiens
  siRNA target sequence for MYO1A (NM_005379.2,1311-1329).
gatagtgaatcgaatcaat

SEQ ID NO: 92783 - DNA, 19 bp, Homo sapiens
  siRNA target sequence for MYO1A (NM_005379.2,1342-1360).
gtgggcatcggggaaaaga

SEQ ID NO: 92784 - DNA, 19 bp, Homo sapiens
  siRNA target sequence for MYO1A (NM_005379.2,1345-1363).
ggcatcggggaaaagaaga

SEQ ID NO: 92785 - DNA, 19 bp, Homo sapiens
  siRNA target sequence for MYO1A (NM_005379.2,1366-1384).
gtaatgggagtccttgata

SEQ ID NO: 92786 - DNA, 19 bp, Homo sapiens
  siRNA target sequence for MYO1A (NM_005379.2,1381-1399).
gatatctacggttttgaga

SEQ ID NO: 92787 - DNA, 19 bp, Homo sapiens
  siRNA target sequence for MYO1A (NM_005379.2,1386-1404).
ctacggttttgagatatta

SEQ ID NO: 92788 - DNA, 19 bp, Homo sapiens
  siRNA target sequence for MYO1A (NM_005379.2,1396-1414).
gagatattagaggataata

SEQ ID NO: 92789 - DNA, 19 bp, Homo sapiens
  siRNA target sequence for MYO1A (NM_005379.2,1423-1441).
caatttgtgatcaactact

SEQ ID NO: 92790 - DNA, 19 bp, Homo sapiens
  siRNA target sequence for MYO1A (NM_005379.2,1456-1474).
cagcaggtgttcatagaga

SEQ ID NO: 92791 - DNA, 19 bp, Homo sapiens
  siRNA target sequence for MYO1A (NM_005379.2,1523-1541).
ggacaaaggtggactactt

SEQ ID NO: 92792 - DNA, 19 bp, Homo sapiens
  siRNA target sequence for MYO1A (NM_005379.2,1530-1548).
ggtggactactttgataat

SEQ ID NO: 92793 - DNA, 19 bp, Homo sapiens
  siRNA target sequence for MYO1A (NM_005379.2,1539-1557).
ctttgataatggcatcatt

SEQ ID NO: 92794 - DNA, 19 bp, Homo sapiens
  siRNA target sequence for MYO1A (NM_005379.2,1707-1725).
gaatgcccagcgtcagtat

SEQ ID NO: 92795 - DNA, 19 bp, Homo sapiens
  siRNA target sequence for MYO1A (NM_005379.2,1769-1787).
cgggcaaggtgacatacaa

SEQ ID NO: 92796 - DNA, 19 bp, Homo sapiens
  siRNA target sequence for MYO1A (NM_005379.2,1794-1812).
cagctttattgacaagaat

SEQ ID NO: 92797 - DNA, 19 bp, Homo sapiens
  siRNA target sequence for MYO1A (NM_005379.2,1982-2000).
ccaagagccccaactacat

SEQ ID NO: 92798 - DNA, 19 bp, Homo sapiens
  siRNA target sequence for MYO1A (NM_005379.2,2138-2156).
ggcccttcctggaaaggta

SEQ ID NO: 92799 - DNA, 19 bp, Homo sapiens
  siRNA target sequence for MYO1A (NM_005379.2,2258-2276).
cctttggcaagacaaagat

SEQ ID NO: 92800 - DNA, 19 bp, Homo sapiens
  siRNA target sequence for MYO1A (NM_005379.2,2285-2303).
gaagccccaagactctttt

SEQ ID NO: 92801 - DNA, 19 bp, Homo sapiens
  siRNA target sequence for MYO1A (NM_005379.2,2288-2306).
gccccaagactcttttcta

SEQ ID NO: 92802 - DNA, 19 bp, Homo sapiens
  siRNA target sequence for MYO1A (NM_005379.2,2337-2355).
gcagctggccacactcata

SEQ ID NO: 92803 - DNA, 19 bp, Homo sapiens
  siRNA target sequence for MYO1A (NM_005379.2,2341-2359).
ctggccacactcatacaga

SEQ ID NO: 92804 - DNA, 19 bp, Homo sapiens
  siRNA target sequence for MYO1A (NM_005379.2,2384-2402).
gcacccactaccaactgat

SEQ ID NO: 92805 - DNA, 19 bp, Homo sapiens
  siRNA target sequence for MYO1A (NM_005379.2,2394-2412).
ccaactgatgcgaaagagt

SEQ ID NO: 92806 - DNA, 19 bp, Homo sapiens
  siRNA target sequence for MYO1A (NM_005379.2,2445-2463).
catgcaaaagaaatgctat

SEQ ID NO: 92807 - DNA, 19 bp, Homo sapiens
  siRNA target sequence for MYO1A (NM_005379.2,2510-2528).
ggtggaaggcccgaaagaa

SEQ ID NO: 92808 - DNA, 19 bp, Homo sapiens
  siRNA target sequence for MYO1A (NM_005379.2,2511-2529).
gtggaaggcccgaaagaat

SEQ ID NO: 92809 - DNA, 19 bp, Homo sapiens
  siRNA target sequence for MYO1A (NM_005379.2,2588-2606).
gcatggtacagaaattcct

SEQ ID NO: 92810 - DNA, 19 bp, Homo sapiens
  siRNA target sequence for MYO1A (NM_005379.2,2633-2651).
ccacaaacgtcttagacaa

SEQ ID NO: 92811 - DNA, 19 bp, Homo sapiens
  siRNA target sequence for MYO1A (NM_005379.2,2678-2696).
gcctcagcacagcaaatca

SEQ ID NO: 92812 - DNA, 19 bp, Homo sapiens
  siRNA target sequence for MYO1A (NM_005379.2,2753-2771).
ccccgaagcaggtagagat

SEQ ID NO: 92813 - DNA, 19 bp, Homo sapiens
  siRNA target sequence for MYO1A (NM_005379.2,2808-2826).
gggcaagaaggcttcatat

SEQ ID NO: 92814 - DNA, 19 bp, Homo sapiens
  siRNA target sequence for MYO1A (NM_005379.2,2830-2848).
cagagtgtccccattccat

SEQ ID NO: 92815 - DNA, 19 bp, Homo sapiens
  siRNA target sequence for MYO1A (NM_005379.2,2953-2971).
cgtggcaatggcaagactt

SEQ ID NO: 92816 - DNA, 19 bp, Homo sapiens
  siRNA target sequence for MYO1A (NM_005379.2,2956-2974).
ggcaatggcaagacttctt

SEQ ID NO: 92817 - DNA, 19 bp, Homo sapiens
  siRNA target sequence for MYO1A (NM_005379.2,2991-3009).
gaccaagggccatgtgatt

SEQ ID NO: 92818 - DNA, 19 bp, Homo sapiens
  siRNA target sequence for MYO1A (NM_005379.2,2993-3011).
ccaagggccatgtgattct

SEQ ID NO: 92819 - DNA, 19 bp, Homo sapiens
  siRNA target sequence for MYO1A (NM_005379.2,3029-3047).
cccaggccaaaattgtcat

SEQ ID NO: 92820 - DNA, 19 bp, Homo sapiens
  siRNA target sequence for MYO1A (NM_005379.2,3109-3127).
catctgagtgagatgtcat

SEQ ID NO: 92821 - DNA, 19 bp, Homo sapiens
  siRNA target sequence for MYO1A (NM_005379.2,3156-3174).
ggtcagcgagcatgtgatt

SEQ ID NO: 92822 - DNA, 19 bp, Homo sapiens
  siRNA target sequence for MYO1A (NM_005379.2,3159-3177).
cagcgagcatgtgattgaa

SEQ ID NO: 92823 - DNA, 19 bp, Homo sapiens
  siRNA target sequence for MYO1A (NM_005379.2,3161-3179).
gcgagcatgtgattgaact

SEQ ID NO: 92824 - DNA, 19 bp, Homo sapiens
  siRNA target sequence for MYO1A (NM_005379.2,3175-3193).
gaactgctgaccaaaatgt

SEQ ID NO: 92825 - DNA, 19 bp, Homo sapiens
  siRNA target sequence for MYO1A (NM_005379.2,3318-3336).
cagcaagctacgctacaaa

SEQ ID NO: 92826 - DNA, 19 bp, Homo sapiens
  siRNA target sequence for MYO1A (NM_005379.2,3320-3338).
gcaagctacgctacaaaaa

SEQ ID NO: 92827 - DNA, 19 bp, Homo sapiens
  siRNA target sequence for MYO1A (NM_005379.2,3321-3339).
caagctacgctacaaaaaa

SEQ ID NO: 92828 - DNA, 19 bp, Homo sapiens
  siRNA target sequence for MYO1C (NM_033375.1,166-184).
ggcgatttcgggagaatct

SEQ ID NO: 92829 - DNA, 19 bp, Homo sapiens
  siRNA target sequence for MYO1C (NM_033375.1,168-186).
cgatttcgggagaatctca

SEQ ID NO: 92830 - DNA, 19 bp, Homo sapiens
  siRNA target sequence for MYO1C (NM_033375.1,174-192).
cgggagaatctcatctaca

SEQ ID NO: 92831 - DNA, 19 bp, Homo sapiens
  siRNA target sequence for MYO1C (NM_033375.1,231-249).
cgggacctgcagatctaca

SEQ ID NO: 92832 - DNA, 19 bp, Homo sapiens
  siRNA target sequence for MYO1C (NM_033375.1,274-292).
gtggcgtcagcttctatga

SEQ ID NO: 92833 - DNA, 19 bp, Homo sapiens
  siRNA target sequence for MYO1C (NM_033375.1,277-295).
gcgtcagcttctatgaagt

SEQ ID NO: 92834 - DNA, 19 bp, Homo sapiens
  siRNA target sequence for MYO1C (NM_033375.1,547-565).
gcaggttcgggaagtacat

SEQ ID NO: 92835 - DNA, 19 bp, Homo sapiens
  siRNA target sequence for MYO1C (NM_033375.1,601-619).
gtggccacatcctcagtta

SEQ ID NO: 92836 - DNA, 19 bp, Homo sapiens
  siRNA target sequence for MYO1C (NM_033375.1,637-655).
gagtggtgcaccagaatca

SEQ ID NO: 92837 - DNA, 19 bp, Homo sapiens
  siRNA target sequence for MYO1C (NM_033375.1,1113-1131).
gtgtacagccgcactttta

SEQ ID NO: 92838 - DNA, 19 bp, Homo sapiens
  siRNA target sequence for MYO1C (NM_033375.1,1368-1386).
cccgtccagtatttcaaca

SEQ ID NO: 92839 - DNA, 19 bp, Homo sapiens
  siRNA target sequence for MYO1C (NM_033375.1,1627-1645).
ccgggtttctggacaaaaa

SEQ ID NO: 92840 - DNA, 19 bp, Homo sapiens
  siRNA target sequence for MYO1C (NM_033375.1,1653-1671).
cttctcttccggaacctta

SEQ ID NO: 92841 - DNA, 19 bp, Homo sapiens
  siRNA target sequence for MYO1C (NM_033375.1,1679-1697).
catgtgtagctcaaagaat

SEQ ID NO: 92842 - DNA, 19 bp, Homo sapiens
  siRNA target sequence for MYO1C (NM_033375.1,1687-1705).
gctcaaagaatcccattat

SEQ ID NO: 92843 - DNA, 19 bp, Homo sapiens
  siRNA target sequence for MYO1C (NM_033375.1,1948-1966).
cctatcgccgcaaatacga

SEQ ID NO: 92844 - DNA, 19 bp, Homo sapiens
  siRNA target sequence for MYO1C (NM_033375.1,1949-1967).
ctatcgccgcaaatacgaa

SEQ ID NO: 92845 - DNA, 19 bp, Homo sapiens
  siRNA target sequence for MYO1C (NM_033375.1,1954-1972).
gccgcaaatacgaagcttt

SEQ ID NO: 92846 - DNA, 19 bp, Homo sapiens
  siRNA target sequence for MYO1C (NM_033375.1,2499-2517).
ctgcgggagttgtgcataa

SEQ ID NO: 92847 - DNA, 19 bp, Homo sapiens
  siRNA target sequence for MYO1C (NM_033375.1,2502-2520).
cgggagttgtgcataaaga

SEQ ID NO: 92848 - DNA, 19 bp, Homo sapiens
  siRNA target sequence for MYO1C (NM_033375.1,2584-2602).
ccgtggctagtgagatctt

SEQ ID NO: 92849 - DNA, 19 bp, Homo sapiens
  siRNA target sequence for MYO1C (NM_033375.1,2632-2650).
gtgtacccaggctcttcat

SEQ ID NO: 92850 - DNA, 19 bp, Homo sapiens
  siRNA target sequence for MYO1C (NM_033375.1,2654-2672).
cactcggcttggtacagat

SEQ ID NO: 92851 - DNA, 19 bp, Homo sapiens
  siRNA target sequence for MYO1C (NM_033375.1,2659-2677).
ggcttggtacagatgagat

SEQ ID NO: 92852 - DNA, 19 bp, Homo sapiens
  siRNA target sequence for MYO1C (NM_033375.1,2704-2722).
gctctgagcccattcagta

SEQ ID NO: 92853 - DNA, 19 bp, Homo sapiens
  siRNA target sequence for MYO1C (NM_033375.1,2724-2742).
gcggtgcctgttgtgaaat

SEQ ID NO: 92854 - DNA, 19 bp, Homo sapiens
  siRNA target sequence for MYO1C (NM_033375.1,2725-2743).
cggtgcctgttgtgaaata

SEQ ID NO: 92855 - DNA, 19 bp, Homo sapiens
  siRNA target sequence for MYO1C (NM_033375.1,2808-2826).
gtggaggacgccaaagtca

SEQ ID NO: 92856 - DNA, 19 bp, Homo sapiens
  siRNA target sequence for MYO1C (NM_033375.1,2872-2890).
gcctgagcgacagtctttt

SEQ ID NO: 92857 - DNA, 19 bp, Homo sapiens
  siRNA target sequence for MYO1C (NM_033375.1,2994-3012).
cgcgtgaacagcatcaaca

SEQ ID NO: 92858 - DNA, 19 bp, Homo sapiens
  siRNA target sequence for MYO1C (NM_033375.1,2995-3013).
gcgtgaacagcatcaacat

SEQ ID NO: 92859 - DNA, 19 bp, Homo sapiens
  siRNA target sequence for MYO1C (NM_033375.1,3126-3144).
gtcgccccacggctgaatt

SEQ ID NO: 92860 - DNA, 19 bp, Homo sapiens
  siRNA target sequence for MYO1E (NM_004998.1,407-425).
ggcaaagccacaatgtcaa

SEQ ID NO: 92861 - DNA, 19 bp, Homo sapiens
  siRNA target sequence for MYO1E (NM_004998.1,448-466).
gtgctactgtccaagatca

SEQ ID NO: 92862 - DNA, 19 bp, Homo sapiens
  siRNA target sequence for MYO1E (NM_004998.1,500-518).
gatacatggatgactacat

SEQ ID NO: 92863 - DNA, 19 bp, Homo sapiens
  siRNA target sequence for MYO1E (NM_004998.1,511-529).
gactacatttttacatata

SEQ ID NO: 92864 - DNA, 19 bp, Homo sapiens
  siRNA target sequence for MYO1E (NM_004998.1,524-542).
catatataggatctgtatt

SEQ ID NO: 92865 - DNA, 19 bp, Homo sapiens
  siRNA target sequence for MYO1E (NM_004998.1,607-625).
ggagcggcacagtatgaaa

SEQ ID NO: 92866 - DNA, 19 bp, Homo sapiens
  siRNA target sequence for MYO1E (NM_004998.1,622-640).
gaaaacccaccacatatct

SEQ ID NO: 92867 - DNA, 19 bp, Homo sapiens
  siRNA target sequence for MYO1E (NM_004998.1,643-661).
gcccttgcagataatatgt

SEQ ID NO: 92868 - DNA, 19 bp, Homo sapiens
  siRNA target sequence for MYO1E (NM_004998.1,644-662).
cccttgcagataatatgta

SEQ ID NO: 92869 - DNA, 19 bp, Homo sapiens
  siRNA target sequence for MYO1E (NM_004998.1,944-962).
ccaacttccttctggaaaa

SEQ ID NO: 92870 - DNA, 19 bp, Homo sapiens
  siRNA target sequence for MYO1E (NM_004998.1,948-966).
cttccttctggaaaaatct

SEQ ID NO: 92871 - DNA, 19 bp, Homo sapiens
  siRNA target sequence for MYO1E (NM_004998.1,986-1004).
caggagagcggagttttca

SEQ ID NO: 92872 - DNA, 19 bp, Homo sapiens
  siRNA target sequence for MYO1E (NM_004998.1,991-1009).
gagcggagttttcacatat

SEQ ID NO: 92873 - DNA, 19 bp, Homo sapiens
  siRNA target sequence for MYO1E (NM_004998.1,993-1011).
gcggagttttcacatattt

SEQ ID NO: 92874 - DNA, 19 bp, Homo sapiens
  siRNA target sequence for MYO1E (NM_004998.1,1100-1118).
gctcatacaaggttgatga

SEQ ID NO: 92875 - DNA, 19 bp, Homo sapiens
  siRNA target sequence for MYO1E (NM_004998.1,1103-1121).
catacaaggttgatgacat

SEQ ID NO: 92876 - DNA, 19 bp, Homo sapiens
  siRNA target sequence for MYO1E (NM_004998.1,1152-1170).
gcacgccatgaatgtgatt

SEQ ID NO: 92877 - DNA, 19 bp, Homo sapiens
  siRNA target sequence for MYO1E (NM_004998.1,1161-1179).
gaatgtgattgggatcttt

SEQ ID NO: 92878 - DNA, 19 bp, Homo sapiens
  siRNA target sequence for MYO1E (NM_004998.1,1193-1211).
cgctggtgttgcagatagt

SEQ ID NO: 92879 - DNA, 19 bp, Homo sapiens
  siRNA target sequence for MYO1E (NM_004998.1,1236-1254).
catcagcttcaaagaagtt

SEQ ID NO: 92880 - DNA, 19 bp, Homo sapiens
  siRNA target sequence for MYO1E (NM_004998.1,1326-1344).
ccggttgaaagaaaagcta

SEQ ID NO: 92881 - DNA, 19 bp, Homo sapiens
  siRNA target sequence for MYO1E (NM_004998.1,1327-1345).
cggttgaaagaaaagctaa

SEQ ID NO: 92882 - DNA, 19 bp, Homo sapiens
  siRNA target sequence for MYO1E (NM_004998.1,1373-1391).
gaggcaaatccgaatccat

SEQ ID NO: 92883 - DNA, 19 bp, Homo sapiens
  siRNA target sequence for MYO1E (NM_004998.1,1476-1494).
ggtagattccatcaataaa

SEQ ID NO: 92884 - DNA, 19 bp, Homo sapiens
  siRNA target sequence for MYO1E (NM_004998.1,1676-1694).
gatggacacccattgagta

SEQ ID NO: 92885 - DNA, 19 bp, Homo sapiens
  siRNA target sequence for MYO1E (NM_004998.1,1679-1697).
ggacacccattgagtactt

SEQ ID NO: 92886 - DNA, 19 bp, Homo sapiens
  siRNA target sequence for MYO1E (NM_004998.1,1680-1698).
gacacccattgagtacttt

SEQ ID NO: 92887 - DNA, 19 bp, Homo sapiens
  siRNA target sequence for MYO1E (NM_004998.1,1682-1700).
cacccattgagtactttaa

SEQ ID NO: 92888 - DNA, 19 bp, Homo sapiens
  siRNA target sequence for MYO1E (NM_004998.1,1685-1703).
ccattgagtactttaataa

SEQ ID NO: 92889 - DNA, 19 bp, Homo sapiens
  siRNA target sequence for MYO1E (NM_004998.1,1814-1832).
cgctgctccagaaacttca

SEQ ID NO: 92890 - DNA, 19 bp, Homo sapiens
  siRNA target sequence for MYO1E (NM_004998.1,1868-1886).
ggaaccaaggcttcatcat

SEQ ID NO: 92891 - DNA, 19 bp, Homo sapiens
  siRNA target sequence for MYO1E (NM_004998.1,1869-1887).
gaaccaaggcttcatcatt

SEQ ID NO: 92892 - DNA, 19 bp, Homo sapiens
  siRNA target sequence for MYO1E (NM_004998.1,1881-1899).
catcattcatcattatgct

SEQ ID NO: 92893 - DNA, 19 bp, Homo sapiens
  siRNA target sequence for MYO1E (NM_004998.1,1900-1918).
gggaaggtatcctatgaca

SEQ ID NO: 92894 - DNA, 19 bp, Homo sapiens
  siRNA target sequence for MYO1E (NM_004998.1,1901-1919).
ggaaggtatcctatgacat

SEQ ID NO: 92895 - DNA, 19 bp, Homo sapiens
  siRNA target sequence for MYO1E (NM_004998.1,1937-1955).
ggaaccgggatgtgctttt

SEQ ID NO: 92896 - DNA, 19 bp, Homo sapiens
  siRNA target sequence for MYO1E (NM_004998.1,1938-1956).
gaaccgggatgtgcttttt

SEQ ID NO: 92897 - DNA, 19 bp, Homo sapiens
  siRNA target sequence for MYO1E (NM_004998.1,1943-1961).
gggatgtgctttttatgga

SEQ ID NO: 92898 - DNA, 19 bp, Homo sapiens
  siRNA target sequence for MYO1E (NM_004998.1,1944-1962).
ggatgtgctttttatggat

SEQ ID NO: 92899 - DNA, 19 bp, Homo sapiens
  siRNA target sequence for MYO1E (NM_004998.1,1982-2000).
gcagcgagctgcctttcat

SEQ ID NO: 92900 - DNA, 19 bp, Homo sapiens
  siRNA target sequence for MYO1E (NM_004998.1,1983-2001).
cagcgagctgcctttcata

SEQ ID NO: 92901 - DNA, 19 bp, Homo sapiens
  siRNA target sequence for MYO1E (NM_004998.1,1987-2005).
gagctgcctttcataaagt

SEQ ID NO: 92902 - DNA, 19 bp, Homo sapiens
  siRNA target sequence for MYO1E (NM_004998.1,1993-2011).
cctttcataaagtctttat

SEQ ID NO: 92903 - DNA, 19 bp, Homo sapiens
  siRNA target sequence for MYO1E (NM_004998.1,2051-2069).
ctactgccggaagcaaaat

SEQ ID NO: 92904 - DNA, 19 bp, Homo sapiens
  siRNA target sequence for MYO1E (NM_004998.1,2054-2072).
ctgccggaagcaaaataaa

SEQ ID NO: 92905 - DNA, 19 bp, Homo sapiens
  siRNA target sequence for MYO1E (NM_004998.1,2177-2195).
gcagggtaaagcatcaagt

SEQ ID NO: 92906 - DNA, 19 bp, Homo sapiens
  siRNA target sequence for MYO1E (NM_004998.1,2196-2214).
cgaatatttgggtctgaaa

SEQ ID NO: 92907 - DNA, 19 bp, Homo sapiens
  siRNA target sequence for MYO1E (NM_004998.1,2251-2269).
cggcgcatcttccaaaaat

SEQ ID NO: 92908 - DNA, 19 bp, Homo sapiens
  siRNA target sequence for MYO1E (NM_004998.1,2252-2270).
ggcgcatcttccaaaaatt

SEQ ID NO: 92909 - DNA, 19 bp, Homo sapiens
  siRNA target sequence for MYO1E (NM_004998.1,2256-2274).
catcttccaaaaattccta

SEQ ID NO: 92910 - DNA, 19 bp, Homo sapiens
  siRNA target sequence for MYO1E (NM_004998.1,2394-2412).
gagtaaagtgttcatcaaa

SEQ ID NO: 92911 - DNA, 19 bp, Homo sapiens
  siRNA target sequence for MYO1E (NM_004998.1,2418-2436).
cgagtctctatttctttta

SEQ ID NO: 92912 - DNA, 19 bp, Homo sapiens
  siRNA target sequence for MYO1E (NM_004998.1,2465-2483).
ggtatgctcgagtgataca

SEQ ID NO: 92913 - DNA, 19 bp, Homo sapiens
  siRNA target sequence for MYO1E (NM_004998.1,2470-2488).
gctcgagtgatacagaaat

SEQ ID NO: 92914 - DNA, 19 bp, Homo sapiens
  siRNA target sequence for MYO1E (NM_004998.1,2509-2527).
cggaagaaatacgttcaaa

SEQ ID NO: 92915 - DNA, 19 bp, Homo sapiens
  siRNA target sequence for MYO1E (NM_004998.1,2536-2554).
gaagcctcagacctcttat

SEQ ID NO: 92916 - DNA, 19 bp, Homo sapiens
  siRNA target sequence for MYO1E (NM_004998.1,2539-2557).
gcctcagacctcttattga

SEQ ID NO: 92917 - DNA, 19 bp, Homo sapiens
  siRNA target sequence for MYO1E (NM_004998.1,2540-2558).
cctcagacctcttattgaa

SEQ ID NO: 92918 - DNA, 19 bp, Homo sapiens
  siRNA target sequence for MYO1E (NM_004998.1,2751-2769).
cttaatcggacgagaaaaa

SEQ ID NO: 92919 - DNA, 19 bp, Homo sapiens
  siRNA target sequence for MYO1E (NM_004998.1,2757-2775).
cggacgagaaaaagtcaaa

SEQ ID NO: 92920 - DNA, 19 bp, Homo sapiens
  siRNA target sequence for MYO1E (NM_004998.1,2824-2842).
gagatagaacggatcttgt

SEQ ID NO: 92921 - DNA, 19 bp, Homo sapiens
  siRNA target sequence for MYO1E (NM_004998.1,2855-2873).
gtactatgcaggatgacat

SEQ ID NO: 92922 - DNA, 19 bp, Homo sapiens
  siRNA target sequence for MYO1E (NM_004998.1,2907-2925).
gcttgaatctgtcttcaaa

SEQ ID NO: 92923 - DNA, 19 bp, Homo sapiens
  siRNA target sequence for MYO1E (NM_004998.1,2973-2991).
gaagcaactacctctgaaa

SEQ ID NO: 92924 - DNA, 19 bp, Homo sapiens
  siRNA target sequence for MYO1E (NM_004998.1,2996-3014).
gcaatacgcttgaactgaa

SEQ ID NO: 92925 - DNA, 19 bp, Homo sapiens
  siRNA target sequence for MYO1E (NM_004998.1,3002-3020).
cgcttgaactgaagttgaa

SEQ ID NO: 92926 - DNA, 19 bp, Homo sapiens
  siRNA target sequence for MYO1E (NM_004998.1,3100-3118).
gtcctcaagcccagtaaca

SEQ ID NO: 92927 - DNA, 19 bp, Homo sapiens
  siRNA target sequence for MYO1E (NM_004998.1,3142-3160).
cctggactgcccaagaact

SEQ ID NO: 92928 - DNA, 19 bp, Homo sapiens
  siRNA target sequence for MYO1F (NM_012335.2,376-394).
gccctcacggacaacatgt

SEQ ID NO: 92929 - DNA, 19 bp, Homo sapiens
  siRNA target sequence for MYO1F (NM_012335.2,377-395).
ccctcacggacaacatgta

SEQ ID NO: 92930 - DNA, 19 bp, Homo sapiens
  siRNA target sequence for MYO1F (NM_012335.2,423-441).
ccagtgtgtcatcattagt

SEQ ID NO: 92931 - DNA, 19 bp, Homo sapiens
  siRNA target sequence for MYO1F (NM_012335.2,526-544).
cagcacgtcaaagatatca

SEQ ID NO: 92932 - DNA, 19 bp, Homo sapiens
  siRNA target sequence for MYO1F (NM_012335.2,592-610).
gtgcgcaacaacaattcca

SEQ ID NO: 92933 - DNA, 19 bp, Homo sapiens
  siRNA target sequence for MYO1F (NM_012335.2,698-716).
cccgcgtggtcatgcaaaa

SEQ ID NO: 92934 - DNA, 19 bp, Homo sapiens
  siRNA target sequence for MYO1F (NM_012335.2,699-717).
ccgcgtggtcatgcaaaat

SEQ ID NO: 92935 - DNA, 19 bp, Homo sapiens
  siRNA target sequence for MYO1F (NM_012335.2,702-720).
cgtggtcatgcaaaatgaa

SEQ ID NO: 92936 - DNA, 19 bp, Homo sapiens
  siRNA target sequence for MYO1F (NM_012335.2,795-813).
catgacaccggactactat

SEQ ID NO: 92937 - DNA, 19 bp, Homo sapiens
  siRNA target sequence for MYO1F (NM_012335.2,800-818).
caccggactactattacta

SEQ ID NO: 92938 - DNA, 19 bp, Homo sapiens
  siRNA target sequence for MYO1F (NM_012335.2,961-979).
ctggggaacatcagtttct

SEQ ID NO: 92939 - DNA, 19 bp, Homo sapiens
  siRNA target sequence for MYO1F (NM_012335.2,1303-1321).
ggcttcgagcagttttgca

SEQ ID NO: 92940 - DNA, 19 bp, Homo sapiens
  siRNA target sequence for MYO1F (NM_012335.2,1576-1594).
gggacccacgagcatttca

SEQ ID NO: 92941 - DNA, 19 bp, Homo sapiens
  siRNA target sequence for MYO1F (NM_012335.2,1577-1595).
ggacccacgagcatttcaa

SEQ ID NO: 92942 - DNA, 19 bp, Homo sapiens
  siRNA target sequence for MYO1F (NM_012335.2,1670-1688).
ggaaccgagacgttctctt

SEQ ID NO: 92943 - DNA, 19 bp, Homo sapiens
  siRNA target sequence for MYO1F (NM_012335.2,2525-2543).
gccaggtgtgtgaagtctt

SEQ ID NO: 92944 - DNA, 19 bp, Homo sapiens
  siRNA target sequence for MYO1F (NM_012335.2,2591-2609).
cgcgacaggacgacttctt

SEQ ID NO: 92945 - DNA, 19 bp, Homo sapiens
  siRNA target sequence for MYO1F (NM_012335.2,3389-3407).
gaaactacgtggagaagat

SEQ ID NO: 92946 - DNA, 19 bp, Homo sapiens
  siRNA target sequence for MYO3A (NM_017433.3,189-207).
caatcatctttgataactt

SEQ ID NO: 92947 - DNA, 19 bp, Homo sapiens
  siRNA target sequence for MYO3A (NM_017433.3,254-272).
ggaacttatgggaaagttt

SEQ ID NO: 92948 - DNA, 19 bp, Homo sapiens
  siRNA target sequence for MYO3A (NM_017433.3,263-281).
gggaaagtttttaaagtat

SEQ ID NO: 92949 - DNA, 19 bp, Homo sapiens
  siRNA target sequence for MYO3A (NM_017433.3,334-352).
cgatattgacgaagagatt

SEQ ID NO: 92950 - DNA, 19 bp, Homo sapiens
  siRNA target sequence for MYO3A (NM_017433.3,356-374).
gcagaatataacatcttaa

SEQ ID NO: 92951 - DNA, 19 bp, Homo sapiens
  siRNA target sequence for MYO3A (NM_017433.3,392-410).
cctaatgtggtcagattct

SEQ ID NO: 92952 - DNA, 19 bp, Homo sapiens
  siRNA target sequence for MYO3A (NM_017433.3,517-535).
gaggggtgaaagaatgagt

SEQ ID NO: 92953 - DNA, 19 bp, Homo sapiens
  siRNA target sequence for MYO3A (NM_017433.3,538-556).
gcctctaattgcctatatt

SEQ ID NO: 92954 - DNA, 19 bp, Homo sapiens
  siRNA target sequence for MYO3A (NM_017433.3,539-557).
cctctaattgcctatattt

SEQ ID NO: 92955 - DNA, 19 bp, Homo sapiens
  siRNA target sequence for MYO3A (NM_017433.3,567-585).
cactaatgggacttcaaca

SEQ ID NO: 92956 - DNA, 19 bp, Homo sapiens
  siRNA target sequence for MYO3A (NM_017433.3,569-587).
ctaatgggacttcaacatt

SEQ ID NO: 92957 - DNA, 19 bp, Homo sapiens
  siRNA target sequence for MYO3A (NM_017433.3,575-593).
ggacttcaacatttgcata

SEQ ID NO: 92958 - DNA, 19 bp, Homo sapiens
  siRNA target sequence for MYO3A (NM_017433.3,581-599).
caacatttgcataacaaca

SEQ ID NO: 92959 - DNA, 19 bp, Homo sapiens
  siRNA target sequence for MYO3A (NM_017433.3,619-637).
gaaaggcaataacattcta

SEQ ID NO: 92960 - DNA, 19 bp, Homo sapiens
  siRNA target sequence for MYO3A (NM_017433.3,643-661).
cacggaaggtggagtgaaa

SEQ ID NO: 92961 - DNA, 19 bp, Homo sapiens
  siRNA target sequence for MYO3A (NM_017433.3,645-663).
cggaaggtggagtgaaact

SEQ ID NO: 92962 - DNA, 19 bp, Homo sapiens
  siRNA target sequence for MYO3A (NM_017433.3,651-669).
gtggagtgaaactagtaga

SEQ ID NO: 92963 - DNA, 19 bp, Homo sapiens
  siRNA target sequence for MYO3A (NM_017433.3,701-719).
cggcaccgtcggaacacat

SEQ ID NO: 92964 - DNA, 19 bp, Homo sapiens
  siRNA target sequence for MYO3A (NM_017433.3,743-761).
gctcctgaggtgattgcat

SEQ ID NO: 92965 - DNA, 19 bp, Homo sapiens
  siRNA target sequence for MYO3A (NM_017433.3,769-787).
gcaattggataccacttat

SEQ ID NO: 92966 - DNA, 19 bp, Homo sapiens
  siRNA target sequence for MYO3A (NM_017433.3,960-978).
gcaagtgcttgactaaaga

SEQ ID NO: 92967 - DNA, 19 bp, Homo sapiens
  siRNA target sequence for MYO3A (NM_017433.3,964-982).
gtgcttgactaaagattat

SEQ ID NO: 92968 - DNA, 19 bp, Homo sapiens
  siRNA target sequence for MYO3A (NM_017433.3,966-984).
gcttgactaaagattatga

SEQ ID NO: 92969 - DNA, 19 bp, Homo sapiens
  siRNA target sequence for MYO3A (NM_017433.3,1114-1132).
ggccagacgtgaacgtatt

SEQ ID NO: 92970 - DNA, 19 bp, Homo sapiens
  siRNA target sequence for MYO3A (NM_017433.3,1116-1134).
ccagacgtgaacgtattca

SEQ ID NO: 92971 - DNA, 19 bp, Homo sapiens
  siRNA target sequence for MYO3A (NM_017433.3,1150-1168).
cttcaaccgacctctaata

SEQ ID NO: 92972 - DNA, 19 bp, Homo sapiens
  siRNA target sequence for MYO3A (NM_017433.3,1156-1174).
ccgacctctaatatccaat

SEQ ID NO: 92973 - DNA, 19 bp, Homo sapiens
  siRNA target sequence for MYO3A (NM_017433.3,1160-1178).
cctctaatatccaatctga

SEQ ID NO: 92974 - DNA, 19 bp, Homo sapiens
  siRNA target sequence for MYO3A (NM_017433.3,1161-1179).
ctctaatatccaatctgaa

SEQ ID NO: 92975 - DNA, 19 bp, Homo sapiens
  siRNA target sequence for MYO3A (NM_017433.3,1190-1208).
gatttagcaaccctagaaa

SEQ ID NO: 92976 - DNA, 19 bp, Homo sapiens
  siRNA target sequence for MYO3A (NM_017433.3,1235-1253).
caacttgagaagtgttatt

SEQ ID NO: 92977 - DNA, 19 bp, Homo sapiens
  siRNA target sequence for MYO3A (NM_017433.3,1346-1364).
ctatatattggatcaaaga

SEQ ID NO: 92978 - DNA, 19 bp, Homo sapiens
  siRNA target sequence for MYO3A (NM_017433.3,1370-1388).
gccagtcctcctcacattt

SEQ ID NO: 92979 - DNA, 19 bp, Homo sapiens
  siRNA target sequence for MYO3A (NM_017433.3,1391-1409).
gcaatggctgacttaggat

SEQ ID NO: 92980 - DNA, 19 bp, Homo sapiens
  siRNA target sequence for MYO3A (NM_017433.3,1392-1410).
caatggctgacttaggata

SEQ ID NO: 92981 - DNA, 19 bp, Homo sapiens
  siRNA target sequence for MYO3A (NM_017433.3,1517-1535).
cttggaaaggctaataaca

SEQ ID NO: 92982 - DNA, 19 bp, Homo sapiens
  siRNA target sequence for MYO3A (NM_017433.3,1520-1538).
ggaaaggctaataacagaa

SEQ ID NO: 92983 - DNA, 19 bp, Homo sapiens
  siRNA target sequence for MYO3A (NM_017433.3,1588-1606).
caatgcctgcactattata

SEQ ID NO: 92984 - DNA, 19 bp, Homo sapiens
  siRNA target sequence for MYO3A (NM_017433.3,1593-1611).
cctgcactattataaatga

SEQ ID NO: 92985 - DNA, 19 bp, Homo sapiens
  siRNA target sequence for MYO3A (NM_017433.3,1673-1691).
ggagcacagatttctgaat

SEQ ID NO: 92986 - DNA, 19 bp, Homo sapiens
  siRNA target sequence for MYO3A (NM_017433.3,1710-1728).
gagttatccaccaagctat

SEQ ID NO: 92987 - DNA, 19 bp, Homo sapiens
  siRNA target sequence for MYO3A (NM_017433.3,1820-1838).
cctcccaggtacctacaaa

SEQ ID NO: 92988 - DNA, 19 bp, Homo sapiens
  siRNA target sequence for MYO3A (NM_017433.3,1821-1839).
ctcccaggtacctacaaaa

SEQ ID NO: 92989 - DNA, 19 bp, Homo sapiens
  siRNA target sequence for MYO3A (NM_017433.3,1824-1842).
ccaggtacctacaaaatga

SEQ ID NO: 92990 - DNA, 19 bp, Homo sapiens
  siRNA target sequence for MYO3A (NM_017433.3,1843-1861).
ccacctcagaacagtacaa

SEQ ID NO: 92991 - DNA, 19 bp, Homo sapiens
  siRNA target sequence for MYO3A (NM_017433.3,1859-1877).
caagacatcatgaataata

SEQ ID NO: 92992 - DNA, 19 bp, Homo sapiens
  siRNA target sequence for MYO3A (NM_017433.3,1909-1927).
gcaatgtttcaaagtcata

SEQ ID NO: 92993 - DNA, 19 bp, Homo sapiens
  siRNA target sequence for MYO3A (NM_017433.3,1940-1958).
gagcaacttggtagtatat

SEQ ID NO: 92994 - DNA, 19 bp, Homo sapiens
  siRNA target sequence for MYO3A (NM_017433.3,1943-1961).
caacttggtagtatataca

SEQ ID NO: 92995 - DNA, 19 bp, Homo sapiens
  siRNA target sequence for MYO3A (NM_017433.3,1969-1987).
cgctgcaatcttgaatgtt

SEQ ID NO: 92996 - DNA, 19 bp, Homo sapiens
  siRNA target sequence for MYO3A (NM_017433.3,1978-1996).
cttgaatgttggcaacatt

SEQ ID NO: 92997 - DNA, 19 bp, Homo sapiens
  siRNA target sequence for MYO3A (NM_017433.3,1981-1999).
gaatgttggcaacattgaa

SEQ ID NO: 92998 - DNA, 19 bp, Homo sapiens
  siRNA target sequence for MYO3A (NM_017433.3,2032-2050).
caagagccacatttctaat

SEQ ID NO: 92999 - DNA, 19 bp, Homo sapiens
  siRNA target sequence for MYO3A (NM_017433.3,2132-2150).
gtcactagaggagaaacaa

SEQ ID NO: 93000 - DNA, 19 bp, Homo sapiens
  siRNA target sequence for MYO3A (NM_017433.3,2157-2175).
gacccaatactgtagaaaa

SEQ ID NO: 93001 - DNA, 19 bp, Homo sapiens
  siRNA target sequence for MYO3A (NM_017433.3,2195-2213).
gccatggctaaaactttat

SEQ ID NO: 93002 - DNA, 19 bp, Homo sapiens
  siRNA target sequence for MYO3A (NM_017433.3,2196-2214).
ccatggctaaaactttata

SEQ ID NO: 93003 - DNA, 19 bp, Homo sapiens
  siRNA target sequence for MYO3A (NM_017433.3,2197-2215).
catggctaaaactttatat

SEQ ID NO: 93004 - DNA, 19 bp, Homo sapiens
  siRNA target sequence for MYO3A (NM_017433.3,2222-2240).
ctctttagttggatagtca

SEQ ID NO: 93005 - DNA, 19 bp, Homo sapiens
  siRNA target sequence for MYO3A (NM_017433.3,2224-2242).
ctttagttggatagtcaat

SEQ ID NO: 93006 - DNA, 19 bp, Homo sapiens
  siRNA target sequence for MYO3A (NM_017433.3,2229-2247).
gttggatagtcaattgcat

SEQ ID NO: 93007 - DNA, 19 bp, Homo sapiens
  siRNA target sequence for MYO3A (NM_017433.3,2244-2262).
gcattaacagtttgttgaa

SEQ ID NO: 93008 - DNA, 19 bp, Homo sapiens
  siRNA target sequence for MYO3A (NM_017433.3,2299-2317).
gagcattggcattcttgat

SEQ ID NO: 93009 - DNA, 19 bp, Homo sapiens
  siRNA target sequence for MYO3A (NM_017433.3,2360-2378).
ctgtgcattaacattgcaa

SEQ ID NO: 93010 - DNA, 19 bp, Homo sapiens
  siRNA target sequence for MYO3A (NM_017433.3,2422-2440).
ggaacagaatgaataccta

SEQ ID NO: 93011 - DNA, 19 bp, Homo sapiens
  siRNA target sequence for MYO3A (NM_017433.3,2423-2441).
gaacagaatgaatacctaa

SEQ ID NO: 93012 - DNA, 19 bp, Homo sapiens
  siRNA target sequence for MYO3A (NM_017433.3,2447-2465).
gatgtggatgctagagtta

SEQ ID NO: 93013 - DNA, 19 bp, Homo sapiens
  siRNA target sequence for MYO3A (NM_017433.3,2453-2471).
gatgctagagttattgaat

SEQ ID NO: 93014 - DNA, 19 bp, Homo sapiens
  siRNA target sequence for MYO3A (NM_017433.3,2484-2502).
ggcccctcttagatatgtt

SEQ ID NO: 93015 - DNA, 19 bp, Homo sapiens
  siRNA target sequence for MYO3A (NM_017433.3,2485-2503).
gcccctcttagatatgttt

SEQ ID NO: 93016 - DNA, 19 bp, Homo sapiens
  siRNA target sequence for MYO3A (NM_017433.3,2531-2549).
ctacttgatgaagaaagta

SEQ ID NO: 93017 - DNA, 19 bp, Homo sapiens
  siRNA target sequence for MYO3A (NM_017433.3,2594-2612).
ggtaacctgaaatcacaat

SEQ ID NO: 93018 - DNA, 19 bp, Homo sapiens
  siRNA target sequence for MYO3A (NM_017433.3,2595-2613).
gtaacctgaaatcacaata

SEQ ID NO: 93019 - DNA, 19 bp, Homo sapiens
  siRNA target sequence for MYO3A (NM_017433.3,2600-2618).
ctgaaatcacaatacttct

SEQ ID NO: 93020 - DNA, 19 bp, Homo sapiens
  siRNA target sequence for MYO3A (NM_017433.3,2663-2681).
gcaggaaaggtcctctata

SEQ ID NO: 93021 - DNA, 19 bp, Homo sapiens
  siRNA target sequence for MYO3A (NM_017433.3,2690-2708).
ggattcttagccaaaaaca

SEQ ID NO: 93022 - DNA, 19 bp, Homo sapiens
  siRNA target sequence for MYO3A (NM_017433.3,2748-2766).
catccgacaacagtgtaat

SEQ ID NO: 93023 - DNA, 19 bp, Homo sapiens
  siRNA target sequence for MYO3A (NM_017433.3,2760-2778).
gtgtaattaggcaactagt

SEQ ID NO: 93024 - DNA, 19 bp, Homo sapiens
  siRNA target sequence for MYO3A (NM_017433.3,2801-2819).
ggtaatctgccacattcta

SEQ ID NO: 93025 - DNA, 19 bp, Homo sapiens
  siRNA target sequence for MYO3A (NM_017433.3,2802-2820).
gtaatctgccacattctaa

SEQ ID NO: 93026 - DNA, 19 bp, Homo sapiens
  siRNA target sequence for MYO3A (NM_017433.3,2807-2825).
ctgccacattctaaaacta

SEQ ID NO: 93027 - DNA, 19 bp, Homo sapiens
  siRNA target sequence for MYO3A (NM_017433.3,2831-2849).
gttataaactatcaaatga

SEQ ID NO: 93028 - DNA, 19 bp, Homo sapiens
  siRNA target sequence for MYO3A (NM_017433.3,2934-2952).
cacaaacggttgcatcata

SEQ ID NO: 93029 - DNA, 19 bp, Homo sapiens
  siRNA target sequence for MYO3A (NM_017433.3,2941-2959).
ggttgcatcatattttaga

SEQ ID NO: 93030 - DNA, 19 bp, Homo sapiens
  siRNA target sequence for MYO3A (NM_017433.3,2958-2976).
gatattccctgatggattt

SEQ ID NO: 93031 - DNA, 19 bp, Homo sapiens
  siRNA target sequence for MYO3A (NM_017433.3,3079-3097).
gcttcggtacacaggaatt

SEQ ID NO: 93032 - DNA, 19 bp, Homo sapiens
  siRNA target sequence for MYO3A (NM_017433.3,3130-3148).
ctcccatcggatacttttt

SEQ ID NO: 93033 - DNA, 19 bp, Homo sapiens
  siRNA target sequence for MYO3A (NM_017433.3,3133-3151).
ccatcggatactttttgct

SEQ ID NO: 93034 - DNA, 19 bp, Homo sapiens
  siRNA target sequence for MYO3A (NM_017433.3,3134-3152).
catcggatactttttgcta

SEQ ID NO: 93035 - DNA, 19 bp, Homo sapiens
  siRNA target sequence for MYO3A (NM_017433.3,3138-3156).
ggatactttttgctaactt

SEQ ID NO: 93036 - DNA, 19 bp, Homo sapiens
  siRNA target sequence for MYO3A (NM_017433.3,3298-3316).
cgtggagcagttaaatcta

SEQ ID NO: 93037 - DNA, 19 bp, Homo sapiens
  siRNA target sequence for MYO3A (NM_017433.3,3299-3317).
gtggagcagttaaatctaa

SEQ ID NO: 93038 - DNA, 19 bp, Homo sapiens
  siRNA target sequence for MYO3A (NM_017433.3,3320-3338).
cgaaaggaagctattgaca

SEQ ID NO: 93039 - DNA, 19 bp, Homo sapiens
  siRNA target sequence for MYO3A (NM_017433.3,3362-3380).
gtcagagcattcttgtgtt

SEQ ID NO: 93040 - DNA, 19 bp, Homo sapiens
  siRNA target sequence for MYO3A (NM_017433.3,3368-3386).
gcattcttgtgttcaagaa

SEQ ID NO: 93041 - DNA, 19 bp, Homo sapiens
  siRNA target sequence for MYO3A (NM_017433.3,3519-3537).
cttctgatcaggaattcga

SEQ ID NO: 93042 - DNA, 19 bp, Homo sapiens
  siRNA target sequence for MYO3A (NM_017433.3,3527-3545).
caggaattcgactacaaga

SEQ ID NO: 93043 - DNA, 19 bp, Homo sapiens
  siRNA target sequence for MYO3A (NM_017433.3,3529-3547).
ggaattcgactacaagaaa

SEQ ID NO: 93044 - DNA, 19 bp, Homo sapiens
  siRNA target sequence for MYO3A (NM_017433.3,3530-3548).
gaattcgactacaagaaaa

SEQ ID NO: 93045 - DNA, 19 bp, Homo sapiens
  siRNA target sequence for MYO3A (NM_017433.3,3564-3582).
gggaatctttcgtgaagaa

SEQ ID NO: 93046 - DNA, 19 bp, Homo sapiens
  siRNA target sequence for MYO3A (NM_017433.3,3596-3614).
gcaatctctgctaatgaaa

SEQ ID NO: 93047 - DNA, 19 bp, Homo sapiens
  siRNA target sequence for MYO3A (NM_017433.3,3603-3621).
ctgctaatgaaagattcat

SEQ ID NO: 93048 - DNA, 19 bp, Homo sapiens
  siRNA target sequence for MYO3A (NM_017433.3,3642-3660).
gaagtgtatctgtagtgaa

SEQ ID NO: 93049 - DNA, 19 bp, Homo sapiens
  siRNA target sequence for MYO3A (NM_017433.3,3693-3711).
ccaatgctgtggagagtaa

SEQ ID NO: 93050 - DNA, 19 bp, Homo sapiens
  siRNA target sequence for MYO3A (NM_017433.3,3708-3726).
gtaacaacagagtgtatca

SEQ ID NO: 93051 - DNA, 19 bp, Homo sapiens
  siRNA target sequence for MYO3A (NM_017433.3,3781-3799).
ccttgtagggccagaagta

SEQ ID NO: 93052 - DNA, 19 bp, Homo sapiens
  siRNA target sequence for MYO3A (NM_017433.3,3869-3887).
gctatgatccagagttact

SEQ ID NO: 93053 - DNA, 19 bp, Homo sapiens
  siRNA target sequence for MYO3A (NM_017433.3,3870-3888).
ctatgatccagagttacta

SEQ ID NO: 93054 - DNA, 19 bp, Homo sapiens
  siRNA target sequence for MYO3A (NM_017433.3,3924-3942).
caaaagcagcatatctaga

SEQ ID NO: 93055 - DNA, 19 bp, Homo sapiens
  siRNA target sequence for MYO3A (NM_017433.3,4036-4054).
ccaaaggtcaatttatcaa

SEQ ID NO: 93056 - DNA, 19 bp, Homo sapiens
  siRNA target sequence for MYO3A (NM_017433.3,4159-4177).
caaagagaggcaagttgaa

SEQ ID NO: 93057 - DNA, 19 bp, Homo sapiens
  siRNA target sequence for MYO3A (NM_017433.3,4205-4223).
gataaagcagcggtattca

SEQ ID NO: 93058 - DNA, 19 bp, Homo sapiens
  siRNA target sequence for MYO3A (NM_017433.3,4217-4235).
gtattcattcagagcaaat

SEQ ID NO: 93059 - DNA, 19 bp, Homo sapiens
  siRNA target sequence for MYO3A (NM_017433.3,4335-4353).
ctcataatttgtattccta

SEQ ID NO: 93060 - DNA, 19 bp, Homo sapiens
  siRNA target sequence for MYO3A (NM_017433.3,4345-4363).
gtattcctatcccacaaaa

SEQ ID NO: 93061 - DNA, 19 bp, Homo sapiens
  siRNA target sequence for MYO3A (NM_017433.3,4350-4368).
cctatcccacaaaacatga

SEQ ID NO: 93062 - DNA, 19 bp, Homo sapiens
  siRNA target sequence for MYO3A (NM_017433.3,4405-4423).
ctcgaaagcaacttcagaa

SEQ ID NO: 93063 - DNA, 19 bp, Homo sapiens
  siRNA target sequence for MYO3A (NM_017433.3,4504-4522).
gaatgaaatgattttgtca

SEQ ID NO: 93064 - DNA, 19 bp, Homo sapiens
  siRNA target sequence for MYO3A (NM_017433.3,4556-4574).
caccataagccaattaata

SEQ ID NO: 93065 - DNA, 19 bp, Homo sapiens
  siRNA target sequence for MYO3A (NM_017433.3,4600-4618).
ctcaggtgtctgtaaagga

SEQ ID NO: 93066 - DNA, 19 bp, Homo sapiens
  siRNA target sequence for MYO3A (NM_017433.3,4616-4634).
ggagaggagccaaaaatat

SEQ ID NO: 93067 - DNA, 19 bp, Homo sapiens
  siRNA target sequence for MYO3A (NM_017433.3,4652-4670).
ccccggaaacccaaaacat

SEQ ID NO: 93068 - DNA, 19 bp, Homo sapiens
  siRNA target sequence for MYO3A (NM_017433.3,4680-4698).
ctgaagactccacatacta

SEQ ID NO: 93069 - DNA, 19 bp, Homo sapiens
  siRNA target sequence for MYO3A (NM_017433.3,4692-4710).
catactattatctacttca

SEQ ID NO: 93070 - DNA, 19 bp, Homo sapiens
  siRNA target sequence for MYO3A (NM_017433.3,4754-4772).
cagggaaaattattagatt

SEQ ID NO: 93071 - DNA, 19 bp, Homo sapiens
  siRNA target sequence for MYO3B (NM_138995.1,155-173).
gtatggattatttcactat

SEQ ID NO: 93072 - DNA, 19 bp, Homo sapiens
  siRNA target sequence for MYO3B (NM_138995.1,182-200).
gatgcttggacttgaatca

SEQ ID NO: 93073 - DNA, 19 bp, Homo sapiens
  siRNA target sequence for MYO3B (NM_138995.1,185-203).
gcttggacttgaatcactt

SEQ ID NO: 93074 - DNA, 19 bp, Homo sapiens
  siRNA target sequence for MYO3B (NM_138995.1,264-282).
gtctacaaggtaactaaca

SEQ ID NO: 93075 - DNA, 19 bp, Homo sapiens
  siRNA target sequence for MYO3B (NM_138995.1,295-313).
gcctggctgcagtgaaaat

SEQ ID NO: 93076 - DNA, 19 bp, Homo sapiens
  siRNA target sequence for MYO3B (NM_138995.1,379-397).
ctaatcatcccaatgttgt

SEQ ID NO: 93077 - DNA, 19 bp, Homo sapiens
  siRNA target sequence for MYO3B (NM_138995.1,523-541).
ggttggatgaagcaatgat

SEQ ID NO: 93078 - DNA, 19 bp, Homo sapiens
  siRNA target sequence for MYO3B (NM_138995.1,534-552).
gcaatgatctcatacatct

SEQ ID NO: 93079 - DNA, 19 bp, Homo sapiens
  siRNA target sequence for MYO3B (NM_138995.1,637-655).
caacagaaggaggagttaa

SEQ ID NO: 93080 - DNA, 19 bp, Homo sapiens
  siRNA target sequence for MYO3B (NM_138995.1,696-714).
cgtctgcggagaaacacat

SEQ ID NO: 93081 - DNA, 19 bp, Homo sapiens
  siRNA target sequence for MYO3B (NM_138995.1,701-719).
gcggagaaacacatctgtt

SEQ ID NO: 93082 - DNA, 19 bp, Homo sapiens
  siRNA target sequence for MYO3B (NM_138995.1,764-782).
gcagtatgactcttcctat

SEQ ID NO: 93083 - DNA, 19 bp, Homo sapiens
  siRNA target sequence for MYO3B (NM_138995.1,806-824).
cttggggatcacagctatt

SEQ ID NO: 93084 - DNA, 19 bp, Homo sapiens
  siRNA target sequence for MYO3B (NM_138995.1,855-873).
gacatgcatcctgtgaaaa

SEQ ID NO: 93085 - DNA, 19 bp, Homo sapiens
  siRNA target sequence for MYO3B (NM_138995.1,857-875).
catgcatcctgtgaaaaca

SEQ ID NO: 93086 - DNA, 19 bp, Homo sapiens
  siRNA target sequence for MYO3B (NM_138995.1,1010-1028).
ccacccatttattaaagga

SEQ ID NO: 93087 - DNA, 19 bp, Homo sapiens
  siRNA target sequence for MYO3B (NM_138995.1,1127-1145).
gcataccagaagaccttat

SEQ ID NO: 93088 - DNA, 19 bp, Homo sapiens
  siRNA target sequence for MYO3B (NM_138995.1,1132-1150).
ccagaagaccttatcatgt

SEQ ID NO: 93089 - DNA, 19 bp, Homo sapiens
  siRNA target sequence for MYO3B (NM_138995.1,1229-1247).
gttgcagaaacgttatgca

SEQ ID NO: 93090 - DNA, 19 bp, Homo sapiens
  siRNA target sequence for MYO3B (NM_138995.1,1239-1257).
cgttatgcagacttgctaa

SEQ ID NO: 93091 - DNA, 19 bp, Homo sapiens
  siRNA target sequence for MYO3B (NM_138995.1,1253-1271).
gctaatttacacatatgtt

SEQ ID NO: 93092 - DNA, 19 bp, Homo sapiens
  siRNA target sequence for MYO3B (NM_138995.1,1264-1282).
catatgttggagacatctt

SEQ ID NO: 93093 - DNA, 19 bp, Homo sapiens
  siRNA target sequence for MYO3B (NM_138995.1,1298-1316).
cttccagaatctaagcata

SEQ ID NO: 93094 - DNA, 19 bp, Homo sapiens
  siRNA target sequence for MYO3B (NM_138995.1,1313-1331).
catatactctccacagttt

SEQ ID NO: 93095 - DNA, 19 bp, Homo sapiens
  siRNA target sequence for MYO3B (NM_138995.1,1398-1416).
gcttaccagtgcatggtta

SEQ ID NO: 93096 - DNA, 19 bp, Homo sapiens
  siRNA target sequence for MYO3B (NM_138995.1,1477-1495).
gcgcccacctgattgttca

SEQ ID NO: 93097 - DNA, 19 bp, Homo sapiens
  siRNA target sequence for MYO3B (NM_138995.1,1583-1601).
ctcatgcactgccatcaat

SEQ ID NO: 93098 - DNA, 19 bp, Homo sapiens
  siRNA target sequence for MYO3B (NM_138995.1,1588-1606).
gcactgccatcaatgacaa

SEQ ID NO: 93099 - DNA, 19 bp, Homo sapiens
  siRNA target sequence for MYO3B (NM_138995.1,1665-1683).
ggggcaagaatctctgaat

SEQ ID NO: 93100 - DNA, 19 bp, Homo sapiens
  siRNA target sequence for MYO3B (NM_138995.1,1666-1684).
gggcaagaatctctgaata

SEQ ID NO: 93101 - DNA, 19 bp, Homo sapiens
  siRNA target sequence for MYO3B (NM_138995.1,1720-1738).
cgagagagaaaaattttca

SEQ ID NO: 93102 - DNA, 19 bp, Homo sapiens
  siRNA target sequence for MYO3B (NM_138995.1,1845-1863).
gtgatgcacgacataactt

SEQ ID NO: 93103 - DNA, 19 bp, Homo sapiens
  siRNA target sequence for MYO3B (NM_138995.1,1873-1891).
cttacagaagacaattcga

SEQ ID NO: 93104 - DNA, 19 bp, Homo sapiens
  siRNA target sequence for MYO3B (NM_138995.1,1879-1897).
gaagacaattcgaagcaat

SEQ ID NO: 93105 - DNA, 19 bp, Homo sapiens
  siRNA target sequence for MYO3B (NM_138995.1,1882-1900).
gacaattcgaagcaattca

SEQ ID NO: 93106 - DNA, 19 bp, Homo sapiens
  siRNA target sequence for MYO3B (NM_138995.1,1938-1956).
gtgcactcagtgtacagaa

SEQ ID NO: 93107 - DNA, 19 bp, Homo sapiens
  siRNA target sequence for MYO3B (NM_138995.1,1989-2007).
gagttcgcagctatttcct

SEQ ID NO: 93108 - DNA, 19 bp, Homo sapiens
  siRNA target sequence for MYO3B (NM_138995.1,2008-2026).
ctcaacatcagactgataa

SEQ ID NO: 93109 - DNA, 19 bp, Homo sapiens
  siRNA target sequence for MYO3B (NM_138995.1,2039-2057).
caatgctgaagctttgcaa

SEQ ID NO: 93110 - DNA, 19 bp, Homo sapiens
  siRNA target sequence for MYO3B (NM_138995.1,2225-2243).
gattgtgaatcgcattaat

SEQ ID NO: 93111 - DNA, 19 bp, Homo sapiens
  siRNA target sequence for MYO3B (NM_138995.1,2252-2270).
gcagccagacgaaaacata

SEQ ID NO: 93112 - DNA, 19 bp, Homo sapiens
  siRNA target sequence for MYO3B (NM_138995.1,2253-2271).
cagccagacgaaaacatat

SEQ ID NO: 93113 - DNA, 19 bp, Homo sapiens
  siRNA target sequence for MYO3B (NM_138995.1,2297-2315).
ggggatcttggatatcttt

SEQ ID NO: 93114 - DNA, 19 bp, Homo sapiens
  siRNA target sequence for MYO3B (NM_138995.1,2321-2339).
cgagaattttcagagaaat

SEQ ID NO: 93115 - DNA, 19 bp, Homo sapiens
  siRNA target sequence for MYO3B (NM_138995.1,2449-2467).
ctgtacccgtggaatatga

SEQ ID NO: 93116 - DNA, 19 bp, Homo sapiens
  siRNA target sequence for MYO3B (NM_138995.1,2559-2577).
gaccagaccctggttgata

SEQ ID NO: 93117 - DNA, 19 bp, Homo sapiens
  siRNA target sequence for MYO3B (NM_138995.1,2586-2604).
gataatctacgatgcaaat

SEQ ID NO: 93118 - DNA, 19 bp, Homo sapiens
  siRNA target sequence for MYO3B (NM_138995.1,2592-2610).
ctacgatgcaaatacttct

SEQ ID NO: 93119 - DNA, 19 bp, Homo sapiens
  siRNA target sequence for MYO3B (NM_138995.1,2636-2654).
ctttggcattcagcattat

SEQ ID NO: 93120 - DNA, 19 bp, Homo sapiens
  siRNA target sequence for MYO3B (NM_138995.1,2677-2695).
cttctggggttcttgagaa

SEQ ID NO: 93121 - DNA, 19 bp, Homo sapiens
  siRNA target sequence for MYO3B (NM_138995.1,2684-2702).
ggttcttgagaaaaataga

SEQ ID NO: 93122 - DNA, 19 bp, Homo sapiens
  siRNA target sequence for MYO3B (NM_138995.1,2807-2825).
gacaagagctaggataaca

SEQ ID NO: 93123 - DNA, 19 bp, Homo sapiens
  siRNA target sequence for MYO3B (NM_138995.1,2809-2827).
caagagctaggataacagt

SEQ ID NO: 93124 - DNA, 19 bp, Homo sapiens
  siRNA target sequence for MYO3B (NM_138995.1,2836-2854).
gttctttgcctccacattt

SEQ ID NO: 93125 - DNA, 19 bp, Homo sapiens
  siRNA target sequence for MYO3B (NM_138995.1,2999-3017).
ctttgtgcgctgcattaaa

SEQ ID NO: 93126 - DNA, 19 bp, Homo sapiens
  siRNA target sequence for MYO3B (NM_138995.1,3124-3142).
cccaccgcatcctttttga

SEQ ID NO: 93127 - DNA, 19 bp, Homo sapiens
  siRNA target sequence for MYO3B (NM_138995.1,3125-3143).
ccaccgcatcctttttgaa

SEQ ID NO: 93128 - DNA, 19 bp, Homo sapiens
  siRNA target sequence for MYO3B (NM_138995.1,3129-3147).
cgcatcctttttgaagaat

SEQ ID NO: 93129 - DNA, 19 bp, Homo sapiens
  siRNA target sequence for MYO3B (NM_138995.1,3130-3148).
gcatcctttttgaagaatt

SEQ ID NO: 93130 - DNA, 19 bp, Homo sapiens
  siRNA target sequence for MYO3B (NM_138995.1,3150-3168).
gtgaaaaggtattattact

SEQ ID NO: 93131 - DNA, 19 bp, Homo sapiens
  siRNA target sequence for MYO3B (NM_138995.1,3170-3188).
ggcattcacagcacatcaa

SEQ ID NO: 93132 - DNA, 19 bp, Homo sapiens
  siRNA target sequence for MYO3B (NM_138995.1,3192-3210).
cctcttgctagcaaagaga

SEQ ID NO: 93133 - DNA, 19 bp, Homo sapiens
  siRNA target sequence for MYO3B (NM_138995.1,3227-3245).
ggaaaagtccagattagat

SEQ ID NO: 93134 - DNA, 19 bp, Homo sapiens
  siRNA target sequence for MYO3B (NM_138995.1,3336-3354).
gttgtgctgcaggcatata

SEQ ID NO: 93135 - DNA, 19 bp, Homo sapiens
  siRNA target sequence for MYO3B (NM_138995.1,3447-3465).
gatgctcggaggaaattta

SEQ ID NO: 93136 - DNA, 19 bp, Homo sapiens
  siRNA target sequence for MYO3B (NM_138995.1,3596-3614).
cgagcctggtgaccataaa

SEQ ID NO: 93137 - DNA, 19 bp, Homo sapiens
  siRNA target sequence for MYO3B (NM_138995.1,3599-3617).
gcctggtgaccataaagtt

SEQ ID NO: 93138 - DNA, 19 bp, Homo sapiens
  siRNA target sequence for MYO3B (NM_138995.1,3742-3760).
caaaagggtgcgatatctt

SEQ ID NO: 93139 - DNA, 19 bp, Homo sapiens
  siRNA target sequence for MYO3B (NM_138995.1,3885-3903).
cattacggatgtaactttt

SEQ ID NO: 93140 - DNA, 19 bp, Homo sapiens
  siRNA target sequence for MYO5A (NM_000259.1,257-275).
gcgtcggagctctacacaa

SEQ ID NO: 93141 - DNA, 19 bp, Homo sapiens
  siRNA target sequence for MYO5A (NM_000259.1,258-276).
cgtcggagctctacacaaa

SEQ ID NO: 93142 - DNA, 19 bp, Homo sapiens
  siRNA target sequence for MYO5A (NM_000259.1,261-279).
cggagctctacacaaagtt

SEQ ID NO: 93143 - DNA, 19 bp, Homo sapiens
  siRNA target sequence for MYO5A (NM_000259.1,262-280).
ggagctctacacaaagttt

SEQ ID NO: 93144 - DNA, 19 bp, Homo sapiens
  siRNA target sequence for MYO5A (NM_000259.1,422-440).
gagctgcctcacttacgaa

SEQ ID NO: 93145 - DNA, 19 bp, Homo sapiens
  siRNA target sequence for MYO5A (NM_000259.1,433-451).
cttacgaaatcctgacata

SEQ ID NO: 93146 - DNA, 19 bp, Homo sapiens
  siRNA target sequence for MYO5A (NM_000259.1,517-535).
cagagtccgctttattgat

SEQ ID NO: 93147 - DNA, 19 bp, Homo sapiens
  siRNA target sequence for MYO5A (NM_000259.1,523-541).
ccgctttattgattccaaa

SEQ ID NO: 93148 - DNA, 19 bp, Homo sapiens
  siRNA target sequence for MYO5A (NM_000259.1,561-579).
gtatagtcctagtagctat

SEQ ID NO: 93149 - DNA, 19 bp, Homo sapiens
  siRNA target sequence for MYO5A (NM_000259.1,576-594).
ctataaatccctatgaaca

SEQ ID NO: 93150 - DNA, 19 bp, Homo sapiens
  siRNA target sequence for MYO5A (NM_000259.1,650-668).
gatatggatccacatatct

SEQ ID NO: 93151 - DNA, 19 bp, Homo sapiens
  siRNA target sequence for MYO5A (NM_000259.1,700-718).
ggccagagatgaacgaaat

SEQ ID NO: 93152 - DNA, 19 bp, Homo sapiens
  siRNA target sequence for MYO5A (NM_000259.1,702-720).
ccagagatgaacgaaatca

SEQ ID NO: 93153 - DNA, 19 bp, Homo sapiens
  siRNA target sequence for MYO5A (NM_000259.1,772-790).
gtatgccatgcgatacttt

SEQ ID NO: 93154 - DNA, 19 bp, Homo sapiens
  siRNA target sequence for MYO5A (NM_000259.1,776-794).
gccatgcgatactttgcaa

SEQ ID NO: 93155 - DNA, 19 bp, Homo sapiens
  siRNA target sequence for MYO5A (NM_000259.1,952-970).
cattggtgccaatatgaga

SEQ ID NO: 93156 - DNA, 19 bp, Homo sapiens
  siRNA target sequence for MYO5A (NM_000259.1,956-974).
ggtgccaatatgagaactt

SEQ ID NO: 93157 - DNA, 19 bp, Homo sapiens
  siRNA target sequence for MYO5A (NM_000259.1,957-975).
gtgccaatatgagaactta

SEQ ID NO: 93158 - DNA, 19 bp, Homo sapiens
  siRNA target sequence for MYO5A (NM_000259.1,960-978).
ccaatatgagaacttatct

SEQ ID NO: 93159 - DNA, 19 bp, Homo sapiens
  siRNA target sequence for MYO5A (NM_000259.1,1053-1071).
cagcaaagttacctgaatt

SEQ ID NO: 93160 - DNA, 19 bp, Homo sapiens
  siRNA target sequence for MYO5A (NM_000259.1,1078-1096).
gctacgattaggaaatgca

SEQ ID NO: 93161 - DNA, 19 bp, Homo sapiens
  siRNA target sequence for MYO5A (NM_000259.1,1097-1115).
gataactttaattacacaa

SEQ ID NO: 93162 - DNA, 19 bp, Homo sapiens
  siRNA target sequence for MYO5A (NM_000259.1,1177-1195).
gcaggcctgcactttgcta

SEQ ID NO: 93163 - DNA, 19 bp, Homo sapiens
  siRNA target sequence for MYO5A (NM_000259.1,1192-1210).
gctaggaattagtgaatct

SEQ ID NO: 93164 - DNA, 19 bp, Homo sapiens
  siRNA target sequence for MYO5A (NM_000259.1,1219-1237).
gggaattttccgaatactt

SEQ ID NO: 93165 - DNA, 19 bp, Homo sapiens
  siRNA target sequence for MYO5A (NM_000259.1,1246-1264).
ccttcacttaggcaatgtt

SEQ ID NO: 93166 - DNA, 19 bp, Homo sapiens
  siRNA target sequence for MYO5A (NM_000259.1,1392-1410).
ctactgccacagagacata

SEQ ID NO: 93167 - DNA, 19 bp, Homo sapiens
  siRNA target sequence for MYO5A (NM_000259.1,1395-1413).
ctgccacagagacatacat

SEQ ID NO: 93168 - DNA, 19 bp, Homo sapiens
  siRNA target sequence for MYO5A (NM_000259.1,1397-1415).
gccacagagacatacatca

SEQ ID NO: 93169 - DNA, 19 bp, Homo sapiens
  siRNA target sequence for MYO5A (NM_000259.1,1398-1416).
ccacagagacatacatcaa

SEQ ID NO: 93170 - DNA, 19 bp, Homo sapiens
  siRNA target sequence for MYO5A (NM_000259.1,1480-1498).
gctctttaactggattgta

SEQ ID NO: 93171 - DNA, 19 bp, Homo sapiens
  siRNA target sequence for MYO5A (NM_000259.1,1483-1501).
ctttaactggattgtagat

SEQ ID NO: 93172 - DNA, 19 bp, Homo sapiens
  siRNA target sequence for MYO5A (NM_000259.1,1529-1547).
gtcaaacagcactctttta

SEQ ID NO: 93173 - DNA, 19 bp, Homo sapiens
  siRNA target sequence for MYO5A (NM_000259.1,1561-1579).
catttacggatttgaaaca

SEQ ID NO: 93174 - DNA, 19 bp, Homo sapiens
  siRNA target sequence for MYO5A (NM_000259.1,1631-1649).
ctacagcaacaattcaata

SEQ ID NO: 93175 - DNA, 19 bp, Homo sapiens
  siRNA target sequence for MYO5A (NM_000259.1,1727-1745).
cagccttgtattaatctta

SEQ ID NO: 93176 - DNA, 19 bp, Homo sapiens
  siRNA target sequence for MYO5A (NM_000259.1,1729-1747).
gccttgtattaatcttata

SEQ ID NO: 93177 - DNA, 19 bp, Homo sapiens
  siRNA target sequence for MYO5A (NM_000259.1,1820-1838).
gcccaaaaattgtacaaca

SEQ ID NO: 93178 - DNA, 19 bp, Homo sapiens
  siRNA target sequence for MYO5A (NM_000259.1,1865-1883).
gaaaagcctcgtctatcaa

SEQ ID NO: 93179 - DNA, 19 bp, Homo sapiens
  siRNA target sequence for MYO5A (NM_000259.1,1870-1888).
gcctcgtctatcaaacaaa

SEQ ID NO: 93180 - DNA, 19 bp, Homo sapiens
  siRNA target sequence for MYO5A (NM_000259.1,1894-1912).
catcatccaacattttgct

SEQ ID NO: 93181 - DNA, 19 bp, Homo sapiens
  siRNA target sequence for MYO5A (NM_000259.1,1911-1929).
ctgacaaagtggaatacca

SEQ ID NO: 93182 - DNA, 19 bp, Homo sapiens
  siRNA target sequence for MYO5A (NM_000259.1,1934-1952).
gaaggatttctcgaaaaga

SEQ ID NO: 93183 - DNA, 19 bp, Homo sapiens
  siRNA target sequence for MYO5A (NM_000259.1,1937-1955).
ggatttctcgaaaagaata

SEQ ID NO: 93184 - DNA, 19 bp, Homo sapiens
  siRNA target sequence for MYO5A (NM_000259.1,1988-2006).
cttaaatcaagcaagttta

SEQ ID NO: 93185 - DNA, 19 bp, Homo sapiens
  siRNA target sequence for MYO5A (NM_000259.1,2008-2026).
gatgctaccagaactattt

SEQ ID NO: 93186 - DNA, 19 bp, Homo sapiens
  siRNA target sequence for MYO5A (NM_000259.1,2011-2029).
gctaccagaactatttcaa

SEQ ID NO: 93187 - DNA, 19 bp, Homo sapiens
  siRNA target sequence for MYO5A (NM_000259.1,2256-2274).
cattcacgtttgatgagaa

SEQ ID NO: 93188 - DNA, 19 bp, Homo sapiens
  siRNA target sequence for MYO5A (NM_000259.1,2311-2329).
ggaaaccatccgaatcagt

SEQ ID NO: 93189 - DNA, 19 bp, Homo sapiens
  siRNA target sequence for MYO5A (NM_000259.1,2344-2362).
ctcacggtggacttaccaa

SEQ ID NO: 93190 - DNA, 19 bp, Homo sapiens
  siRNA target sequence for MYO5A (NM_000259.1,2348-2366).
cggtggacttaccaagaat

SEQ ID NO: 93191 - DNA, 19 bp, Homo sapiens
  siRNA target sequence for MYO5A (NM_000259.1,2373-2391).
gccgctaccgtgtcctaat

SEQ ID NO: 93192 - DNA, 19 bp, Homo sapiens
  siRNA target sequence for MYO5A (NM_000259.1,2375-2393).
cgctaccgtgtcctaatga

SEQ ID NO: 93193 - DNA, 19 bp, Homo sapiens
  siRNA target sequence for MYO5A (NM_000259.1,2376-2394).
gctaccgtgtcctaatgaa

SEQ ID NO: 93194 - DNA, 19 bp, Homo sapiens
  siRNA target sequence for MYO5A (NM_000259.1,2506-2524).
cggtcaagtggcctatcta

SEQ ID NO: 93195 - DNA, 19 bp, Homo sapiens
  siRNA target sequence for MYO5A (NM_000259.1,2516-2534).
gcctatctagaaaaattga

SEQ ID NO: 93196 - DNA, 19 bp, Homo sapiens
  siRNA target sequence for MYO5A (NM_000259.1,2656-2674).
ctaccaggcccgatgctat

SEQ ID NO: 93197 - DNA, 19 bp, Homo sapiens
  siRNA target sequence for MYO5A (NM_000259.1,2664-2682).
cccgatgctatgctaagtt

SEQ ID NO: 93198 - DNA, 19 bp, Homo sapiens
  siRNA target sequence for MYO5A (NM_000259.1,2665-2683).
ccgatgctatgctaagttt

SEQ ID NO: 93199 - DNA, 19 bp, Homo sapiens
  siRNA target sequence for MYO5A (NM_000259.1,2695-2713).
caaggcagcaaccatcatt

SEQ ID NO: 93200 - DNA, 19 bp, Homo sapiens
  siRNA target sequence for MYO5A (NM_000259.1,2702-2720).
gcaaccatcattcaaaagt

SEQ ID NO: 93201 - DNA, 19 bp, Homo sapiens
  siRNA target sequence for MYO5A (NM_000259.1,2703-2721).
caaccatcattcaaaagta

SEQ ID NO: 93202 - DNA, 19 bp, Homo sapiens
  siRNA target sequence for MYO5A (NM_000259.1,2740-2758).
ccgcaggaggtacaagatt

SEQ ID NO: 93203 - DNA, 19 bp, Homo sapiens
  siRNA target sequence for MYO5A (NM_000259.1,2743-2761).
caggaggtacaagattaga

SEQ ID NO: 93204 - DNA, 19 bp, Homo sapiens
  siRNA target sequence for MYO5A (NM_000259.1,2798-2816).
ggcttcttggccagaaata

SEQ ID NO: 93205 - DNA, 19 bp, Homo sapiens
  siRNA target sequence for MYO5A (NM_000259.1,2991-3009).
cagtggagcgctataagaa

SEQ ID NO: 93206 - DNA, 19 bp, Homo sapiens
  siRNA target sequence for MYO5A (NM_000259.1,3107-3125).
ctggaaggaatatacaact

SEQ ID NO: 93207 - DNA, 19 bp, Homo sapiens
  siRNA target sequence for MYO5A (NM_000259.1,3136-3154).
gaaactacgaagtgactta

SEQ ID NO: 93208 - DNA, 19 bp, Homo sapiens
  siRNA target sequence for MYO5A (NM_000259.1,3451-3469).
ggaactcgaccttaatgat

SEQ ID NO: 93209 - DNA, 19 bp, Homo sapiens
  siRNA target sequence for MYO5A (NM_000259.1,3455-3473).
ctcgaccttaatgatgaaa

SEQ ID NO: 93210 - DNA, 19 bp, Homo sapiens
  siRNA target sequence for MYO5A (NM_000259.1,3507-3525).
gtcgcctggaagaaagata

SEQ ID NO: 93211 - DNA, 19 bp, Homo sapiens
  siRNA target sequence for MYO5A (NM_000259.1,3603-3621).
gcagcaacgagtctgaata

SEQ ID NO: 93212 - DNA, 19 bp, Homo sapiens
  siRNA target sequence for MYO5A (NM_000259.1,3606-3624).
gcaacgagtctgaatatat

SEQ ID NO: 93213 - DNA, 19 bp, Homo sapiens
  siRNA target sequence for MYO5A (NM_000259.1,3610-3628).
cgagtctgaatatatcttt

SEQ ID NO: 93214 - DNA, 19 bp, Homo sapiens
  siRNA target sequence for MYO5A (NM_000259.1,3695-3713).
cctctggacatgtcattgt

SEQ ID NO: 93215 - DNA, 19 bp, Homo sapiens
  siRNA target sequence for MYO5A (NM_000259.1,3845-3863).
gcagaactggaatatgagt

SEQ ID NO: 93216 - DNA, 19 bp, Homo sapiens
  siRNA target sequence for MYO5A (NM_000259.1,3864-3882).
cactcaagcgtcaagaact

SEQ ID NO: 93217 - DNA, 19 bp, Homo sapiens
  siRNA target sequence for MYO5A (NM_000259.1,3871-3889).
gcgtcaagaactagaatca

SEQ ID NO: 93218 - DNA, 19 bp, Homo sapiens
  siRNA target sequence for MYO5A (NM_000259.1,4039-4057).
ggaggaagtcctcatctta

SEQ ID NO: 93219 - DNA, 19 bp, Homo sapiens
  siRNA target sequence for MYO5A (NM_000259.1,4043-4061).
gaagtcctcatcttaaggt

SEQ ID NO: 93220 - DNA, 19 bp, Homo sapiens
  siRNA target sequence for MYO5A (NM_000259.1,4117-4135).
gacagattccacaatactt

SEQ ID NO: 93221 - DNA, 19 bp, Homo sapiens
  siRNA target sequence for MYO5A (NM_000259.1,4175-4193).
gcacaagcatacattggtt

SEQ ID NO: 93222 - DNA, 19 bp, Homo sapiens
  siRNA target sequence for MYO5A (NM_000259.1,4176-4194).
cacaagcatacattggttt

SEQ ID NO: 93223 - DNA, 19 bp, Homo sapiens
  siRNA target sequence for MYO5A (NM_000259.1,4182-4200).
catacattggtttgaaaga

SEQ ID NO: 93224 - DNA, 19 bp, Homo sapiens
  siRNA target sequence for MYO5A (NM_000259.1,4209-4227).
gatcatctgctctggatta

SEQ ID NO: 93225 - DNA, 19 bp, Homo sapiens
  siRNA target sequence for MYO5A (NM_000259.1,4212-4230).
catctgctctggattacca

SEQ ID NO: 93226 - DNA, 19 bp, Homo sapiens
  siRNA target sequence for MYO5A (NM_000259.1,4218-4236).
ctctggattaccatgagtt

SEQ ID NO: 93227 - DNA, 19 bp, Homo sapiens
  siRNA target sequence for MYO5A (NM_000259.1,4248-4266).
gagagctgtggctggttta

SEQ ID NO: 93228 - DNA, 19 bp, Homo sapiens
  siRNA target sequence for MYO5A (NM_000259.1,4469-4487).
cggctgaccaacgaaaact

SEQ ID NO: 93229 - DNA, 19 bp, Homo sapiens
  siRNA target sequence for MYO5A (NM_000259.1,4470-4488).
ggctgaccaacgaaaactt

SEQ ID NO: 93230 - DNA, 19 bp, Homo sapiens
  siRNA target sequence for MYO5A (NM_000259.1,4522-4540).
gacggtccgtaaactgaaa

SEQ ID NO: 93231 - DNA, 19 bp, Homo sapiens
  siRNA target sequence for MYO5A (NM_000259.1,4524-4542).
cggtccgtaaactgaaaaa

SEQ ID NO: 93232 - DNA, 19 bp, Homo sapiens
  siRNA target sequence for MYO5A (NM_000259.1,4605-4623).
ccccaggacagatcattga

SEQ ID NO: 93233 - DNA, 19 bp, Homo sapiens
  siRNA target sequence for MYO5A (NM_000259.1,4629-4647).
ccatccgaccagtcaacat

SEQ ID NO: 93234 - DNA, 19 bp, Homo sapiens
  siRNA target sequence for MYO5A (NM_000259.1,4630-4648).
catccgaccagtcaacatt

SEQ ID NO: 93235 - DNA, 19 bp, Homo sapiens
  siRNA target sequence for MYO5A (NM_000259.1,4742-4760).
cgtggtgtagcagtcaatt

SEQ ID NO: 93236 - DNA, 19 bp, Homo sapiens
  siRNA target sequence for MYO5A (NM_000259.1,4743-4761).
gtggtgtagcagtcaattt

SEQ ID NO: 93237 - DNA, 19 bp, Homo sapiens
  siRNA target sequence for MYO5A (NM_000259.1,4745-4763).
ggtgtagcagtcaatttga

SEQ ID NO: 93238 - DNA, 19 bp, Homo sapiens
  siRNA target sequence for MYO5A (NM_000259.1,4746-4764).
gtgtagcagtcaatttgat

SEQ ID NO: 93239 - DNA, 19 bp, Homo sapiens
  siRNA target sequence for MYO5A (NM_000259.1,4767-4785).
caggattaccggcatatat

SEQ ID NO: 93240 - DNA, 19 bp, Homo sapiens
  siRNA target sequence for MYO5A (NM_000259.1,4770-4788).
gattaccggcatatatcct

SEQ ID NO: 93241 - DNA, 19 bp, Homo sapiens
  siRNA target sequence for MYO5A (NM_000259.1,4835-4853).
gtaaggtcgttgctaacat

SEQ ID NO: 93242 - DNA, 19 bp, Homo sapiens
  siRNA target sequence for MYO5A (NM_000259.1,4840-4858).
gtcgttgctaacatcaaca

SEQ ID NO: 93243 - DNA, 19 bp, Homo sapiens
  siRNA target sequence for MYO5A (NM_000259.1,4842-4860).
cgttgctaacatcaacaat

SEQ ID NO: 93244 - DNA, 19 bp, Homo sapiens
  siRNA target sequence for MYO5A (NM_000259.1,4843-4861).
gttgctaacatcaacaatt

SEQ ID NO: 93245 - DNA, 19 bp, Homo sapiens
  siRNA target sequence for MYO5A (NM_000259.1,4915-4933).
cttctggctctctaacaca

SEQ ID NO: 93246 - DNA, 19 bp, Homo sapiens
  siRNA target sequence for MYO5A (NM_000259.1,4926-4944).
ctaacacatgccgattttt

SEQ ID NO: 93247 - DNA, 19 bp, Homo sapiens
  siRNA target sequence for MYO5A (NM_000259.1,4967-4985).
ggagaagagggctttatga

SEQ ID NO: 93248 - DNA, 19 bp, Homo sapiens
  siRNA target sequence for MYO5A (NM_000259.1,4993-5011).
cacatctcgccagaatgaa

SEQ ID NO: 93249 - DNA, 19 bp, Homo sapiens
  siRNA target sequence for MYO5A (NM_000259.1,5087-5105).
ctcgtgcgggtgttagaga

SEQ ID NO: 93250 - DNA, 19 bp, Homo sapiens
  siRNA target sequence for MYO5A (NM_000259.1,5312-5330).
gtggtcaagcagatgttct

SEQ ID NO: 93251 - DNA, 19 bp, Homo sapiens
  siRNA target sequence for MYO5A (NM_000259.1,5417-5435).
gtcagtcaactggaagaat

SEQ ID NO: 93252 - DNA, 19 bp, Homo sapiens
  siRNA target sequence for MYO5A (NM_000259.1,5444-5462).
gacaagaatctgatgaata

SEQ ID NO: 93253 - DNA, 19 bp, Homo sapiens
  siRNA target sequence for MYO5A (NM_000259.1,5541-5559).
cagaagccatttgttctat

SEQ ID NO: 93254 - DNA, 19 bp, Homo sapiens
  siRNA target sequence for MYO5A (NM_000259.1,5574-5592).
ctactgcccagattgtgaa

SEQ ID NO: 93255 - DNA, 19 bp, Homo sapiens
  siRNA target sequence for MYO5A (NM_000259.1,5610-5628).
ctccagttaatgagtttga

SEQ ID NO: 93256 - DNA, 19 bp, Homo sapiens
  siRNA target sequence for MYO5A (NM_000259.1,5644-5662).
gtcgttcattcgtactata

SEQ ID NO: 93257 - DNA, 19 bp, Homo sapiens
  siRNA target sequence for MYO5A (NM_000259.1,5646-5664).
cgttcattcgtactataca

SEQ ID NO: 93258 - DNA, 19 bp, Homo sapiens
  siRNA target sequence for MYO5A (NM_000259.1,5698-5716).
gctgctcatggatgctaaa

SEQ ID NO: 93259 - DNA, 19 bp, Homo sapiens
  siRNA target sequence for MYO5A (NM_000259.1,5754-5772).
ccctcgcactagaaaccat

SEQ ID NO: 93260 - DNA, 19 bp, Homo sapiens
  siRNA target sequence for MYO5C (NM_018728.1,61-79).
gattcccgatcctgaagaa

SEQ ID NO: 93261 - DNA, 19 bp, Homo sapiens
  siRNA target sequence for MYO5C (NM_018728.1,65-83).
cccgatcctgaagaagttt

SEQ ID NO: 93262 - DNA, 19 bp, Homo sapiens
  siRNA target sequence for MYO5C (NM_018728.1,156-174).
cggagctggattattctgt

SEQ ID NO: 93263 - DNA, 19 bp, Homo sapiens
  siRNA target sequence for MYO5C (NM_018728.1,286-304).
ccgctttgcagaatccaaa

SEQ ID NO: 93264 - DNA, 19 bp, Homo sapiens
  siRNA target sequence for MYO5C (NM_018728.1,296-314).
gaatccaaactcatttaca

SEQ ID NO: 93265 - DNA, 19 bp, Homo sapiens
  siRNA target sequence for MYO5C (NM_018728.1,315-333).
cctacagtggaatcatttt

SEQ ID NO: 93266 - DNA, 19 bp, Homo sapiens
  siRNA target sequence for MYO5C (NM_018728.1,390-408).
cctacagcgggcagaacat

SEQ ID NO: 93267 - DNA, 19 bp, Homo sapiens
  siRNA target sequence for MYO5C (NM_018728.1,412-430).
cgatatggacccacacata

SEQ ID NO: 93268 - DNA, 19 bp, Homo sapiens
  siRNA target sequence for MYO5C (NM_018728.1,481-499).
ccagtccataattgtaagt

SEQ ID NO: 93269 - DNA, 19 bp, Homo sapiens
  siRNA target sequence for MYO5C (NM_018728.1,535-553).
ctatgccatgaggtacttt

SEQ ID NO: 93270 - DNA, 19 bp, Homo sapiens
  siRNA target sequence for MYO5C (NM_018728.1,595-613).
caaggtcctggcatccaat

SEQ ID NO: 93271 - DNA, 19 bp, Homo sapiens
  siRNA target sequence for MYO5C (NM_018728.1,619-637).
caccgaggccgttggaaat

SEQ ID NO: 93272 - DNA, 19 bp, Homo sapiens
  siRNA target sequence for MYO5C (NM_018728.1,649-667).
ccgcaatgacaatagtagt

SEQ ID NO: 93273 - DNA, 19 bp, Homo sapiens
  siRNA target sequence for MYO5C (NM_018728.1,818-836).
gcacagcagtcggaattta

SEQ ID NO: 93274 - DNA, 19 bp, Homo sapiens
  siRNA target sequence for MYO5C (NM_018728.1,850-868).
ggggagtgccgaagaattt

SEQ ID NO: 93275 - DNA, 19 bp, Homo sapiens
  siRNA target sequence for MYO5C (NM_018728.1,851-869).
gggagtgccgaagaattta

SEQ ID NO: 93276 - DNA, 19 bp, Homo sapiens
  siRNA target sequence for MYO5C (NM_018728.1,853-871).
gagtgccgaagaatttaat

SEQ ID NO: 93277 - DNA, 19 bp, Homo sapiens
  siRNA target sequence for MYO5C (NM_018728.1,885-903).
gaggcaatactgtcattga

SEQ ID NO: 93278 - DNA, 19 bp, Homo sapiens
  siRNA target sequence for MYO5C (NM_018728.1,898-916).
cattgagggtgtgaatgat

SEQ ID NO: 93279 - DNA, 19 bp, Homo sapiens
  siRNA target sequence for MYO5C (NM_018728.1,1048-1066).
cgagaggtcctcagttagt

SEQ ID NO: 93280 - DNA, 19 bp, Homo sapiens
  siRNA target sequence for MYO5C (NM_018728.1,1134-1152).
ggctgtgcaatcgcaaaat

SEQ ID NO: 93281 - DNA, 19 bp, Homo sapiens
  siRNA target sequence for MYO5C (NM_018728.1,1161-1179).
gctctgagacggtggtaaa

SEQ ID NO: 93282 - DNA, 19 bp, Homo sapiens
  siRNA target sequence for MYO5C (NM_018728.1,1217-1235).
gcactggccaaaaagatct

SEQ ID NO: 93283 - DNA, 19 bp, Homo sapiens
  siRNA target sequence for MYO5C (NM_018728.1,1239-1257).
ctcacctgttcgacttcat

SEQ ID NO: 93284 - DNA, 19 bp, Homo sapiens
  siRNA target sequence for MYO5C (NM_018728.1,1273-1291).
ccaagcgttgcagttttca

SEQ ID NO: 93285 - DNA, 19 bp, Homo sapiens
  siRNA target sequence for MYO5C (NM_018728.1,1292-1310).
ggcaagcagcacactttta

SEQ ID NO: 93286 - DNA, 19 bp, Homo sapiens
  siRNA target sequence for MYO5C (NM_018728.1,1372-1390).
catcaattacgctaatgaa

SEQ ID NO: 93287 - DNA, 19 bp, Homo sapiens
  siRNA target sequence for MYO5C (NM_018728.1,1394-1412).
ctgcaacaacagtttaaca

SEQ ID NO: 93288 - DNA, 19 bp, Homo sapiens
  siRNA target sequence for MYO5C (NM_018728.1,1534-1552).
gttactggatgaagaatgt

SEQ ID NO: 93289 - DNA, 19 bp, Homo sapiens
  siRNA target sequence for MYO5C (NM_018728.1,1555-1573).
gttaccacatggaactgat

SEQ ID NO: 93290 - DNA, 19 bp, Homo sapiens
  siRNA target sequence for MYO5C (NM_018728.1,1666-1684).
gcactttgctgataaggta

SEQ ID NO: 93291 - DNA, 19 bp, Homo sapiens
  siRNA target sequence for MYO5C (NM_018728.1,1673-1691).
gctgataaggtagagtata

SEQ ID NO: 93292 - DNA, 19 bp, Homo sapiens
  siRNA target sequence for MYO5C (NM_018728.1,1674-1692).
ctgataaggtagagtataa

SEQ ID NO: 93293 - DNA, 19 bp, Homo sapiens
  siRNA target sequence for MYO5C (NM_018728.1,1719-1737).
gagacaccgtctatgacat

SEQ ID NO: 93294 - DNA, 19 bp, Homo sapiens
  siRNA target sequence for MYO5C (NM_018728.1,1750-1768).
cctgagagcaagcaagttt

SEQ ID NO: 93295 - DNA, 19 bp, Homo sapiens
  siRNA target sequence for MYO5C (NM_018728.1,1769-1787).
catctctgtgccaactttt

SEQ ID NO: 93296 - DNA, 19 bp, Homo sapiens
  siRNA target sequence for MYO5C (NM_018728.1,1821-1839).
gttcaatgattacagttaa

SEQ ID NO: 93297 - DNA, 19 bp, Homo sapiens
  siRNA target sequence for MYO5C (NM_018728.1,1982-2000).
gagaagttaccctttgaat

SEQ ID NO: 93298 - DNA, 19 bp, Homo sapiens
  siRNA target sequence for MYO5C (NM_018728.1,1984-2002).
gaagttaccctttgaattt

SEQ ID NO: 93299 - DNA, 19 bp, Homo sapiens
  siRNA target sequence for MYO5C (NM_018728.1,2029-2047).
gcgagcctgcggcgtttta

SEQ ID NO: 93300 - DNA, 19 bp, Homo sapiens
  siRNA target sequence for MYO5C (NM_018728.1,2031-2049).
gagcctgcggcgttttaga

SEQ ID NO: 93301 - DNA, 19 bp, Homo sapiens
  siRNA target sequence for MYO5C (NM_018728.1,2033-2051).
gcctgcggcgttttagaaa

SEQ ID NO: 93302 - DNA, 19 bp, Homo sapiens
  siRNA target sequence for MYO5C (NM_018728.1,2037-2055).
gcggcgttttagaaacgat

SEQ ID NO: 93303 - DNA, 19 bp, Homo sapiens
  siRNA target sequence for MYO5C (NM_018728.1,2088-2106).
ggacatacatcgagttcta

SEQ ID NO: 93304 - DNA, 19 bp, Homo sapiens
  siRNA target sequence for MYO5C (NM_018728.1,2109-2127).
gtcgctacggcattctcat

SEQ ID NO: 93305 - DNA, 19 bp, Homo sapiens
  siRNA target sequence for MYO5C (NM_018728.1,2164-2182).
ggtgtgcaaggtggtttta

SEQ ID NO: 93306 - DNA, 19 bp, Homo sapiens
  siRNA target sequence for MYO5C (NM_018728.1,2220-2238).
gtaaaaccaaaattttctt

SEQ ID NO: 93307 - DNA, 19 bp, Homo sapiens
  siRNA target sequence for MYO5C (NM_018728.1,2243-2261).
gcaggacaagtggcttatt

SEQ ID NO: 93308 - DNA, 19 bp, Homo sapiens
  siRNA target sequence for MYO5C (NM_018728.1,2244-2262).
caggacaagtggcttattt

SEQ ID NO: 93309 - DNA, 19 bp, Homo sapiens
  siRNA target sequence for MYO5C (NM_018728.1,2247-2265).
gacaagtggcttatttaga

SEQ ID NO: 93310 - DNA, 19 bp, Homo sapiens
  siRNA target sequence for MYO5C (NM_018728.1,2270-2288).
cttcgattggataaactga

SEQ ID NO: 93311 - DNA, 19 bp, Homo sapiens
  siRNA target sequence for MYO5C (NM_018728.1,2289-2307).
ggcagagttgtgttatggt

SEQ ID NO: 93312 - DNA, 19 bp, Homo sapiens
  siRNA target sequence for MYO5C (NM_018728.1,2290-2308).
gcagagttgtgttatggta

SEQ ID NO: 93313 - DNA, 19 bp, Homo sapiens
  siRNA target sequence for MYO5C (NM_018728.1,2295-2313).
gttgtgttatggtacaaaa

SEQ ID NO: 93314 - DNA, 19 bp, Homo sapiens
  siRNA target sequence for MYO5C (NM_018728.1,2421-2439).
ctgcagtggccttaaaaga

SEQ ID NO: 93315 - DNA, 19 bp, Homo sapiens
  siRNA target sequence for MYO5C (NM_018728.1,2445-2463).
gggcagccataatcattca

SEQ ID NO: 93316 - DNA, 19 bp, Homo sapiens
  siRNA target sequence for MYO5C (NM_018728.1,2447-2465).
gcagccataatcattcaga

SEQ ID NO: 93317 - DNA, 19 bp, Homo sapiens
  siRNA target sequence for MYO5C (NM_018728.1,2448-2466).
cagccataatcattcagaa

SEQ ID NO: 93318 - DNA, 19 bp, Homo sapiens
  siRNA target sequence for MYO5C (NM_018728.1,2486-2504).
gttcgcagcctgtatcagt

SEQ ID NO: 93319 - DNA, 19 bp, Homo sapiens
  siRNA target sequence for MYO5C (NM_018728.1,2490-2508).
gcagcctgtatcagttgat

SEQ ID NO: 93320 - DNA, 19 bp, Homo sapiens
  siRNA target sequence for MYO5C (NM_018728.1,2510-2528).
cgcatggccaccatcacaa

SEQ ID NO: 93321 - DNA, 19 bp, Homo sapiens
  siRNA target sequence for MYO5C (NM_018728.1,2594-2612).
gctgtgatcctacagaaat

SEQ ID NO: 93322 - DNA, 19 bp, Homo sapiens
  siRNA target sequence for MYO5C (NM_018728.1,2634-2652).
gacgcagattccagagtat

SEQ ID NO: 93323 - DNA, 19 bp, Homo sapiens
  siRNA target sequence for MYO5C (NM_018728.1,2653-2671).
ccgacgattcgtgcttaat

SEQ ID NO: 93324 - DNA, 19 bp, Homo sapiens
  siRNA target sequence for MYO5C (NM_018728.1,2654-2672).
cgacgattcgtgcttaata

SEQ ID NO: 93325 - DNA, 19 bp, Homo sapiens
  siRNA target sequence for MYO5C (NM_018728.1,2655-2673).
gacgattcgtgcttaatat

SEQ ID NO: 93326 - DNA, 19 bp, Homo sapiens
  siRNA target sequence for MYO5C (NM_018728.1,2658-2676).
gattcgtgcttaatattca

SEQ ID NO: 93327 - DNA, 19 bp, Homo sapiens
  siRNA target sequence for MYO5C (NM_018728.1,2666-2684).
cttaatattcagcttactt

SEQ ID NO: 93328 - DNA, 19 bp, Homo sapiens
  siRNA target sequence for MYO5C (NM_018728.1,2828-2846).
gccactcacaggcgaaatt

SEQ ID NO: 93329 - DNA, 19 bp, Homo sapiens
  siRNA target sequence for MYO5C (NM_018728.1,2829-2847).
ccactcacaggcgaaatta

SEQ ID NO: 93330 - DNA, 19 bp, Homo sapiens
  siRNA target sequence for MYO5C (NM_018728.1,2832-2850).
ctcacaggcgaaattacga

SEQ ID NO: 93331 - DNA, 19 bp, Homo sapiens
  siRNA target sequence for MYO5C (NM_018728.1,2899-2917).
gcttcagaagcataattca

SEQ ID NO: 93332 - DNA, 19 bp, Homo sapiens
  siRNA target sequence for MYO5C (NM_018728.1,3008-3026).
ctctttgatgatgtacaaa

SEQ ID NO: 93333 - DNA, 19 bp, Homo sapiens
  siRNA target sequence for MYO5C (NM_018728.1,3123-3141).
ctctcaaggatgagaagat

SEQ ID NO: 93334 - DNA, 19 bp, Homo sapiens
  siRNA target sequence for MYO5C (NM_018728.1,3166-3184).
ggagcacgtcacttctgat

SEQ ID NO: 93335 - DNA, 19 bp, Homo sapiens
  siRNA target sequence for MYO5C (NM_018728.1,3213-3231).
gcaagcaggtcaagacaat

SEQ ID NO: 93336 - DNA, 19 bp, Homo sapiens
  siRNA target sequence for MYO5C (NM_018728.1,3228-3246).
caatctctgagttcgaaaa

SEQ ID NO: 93337 - DNA, 19 bp, Homo sapiens
  siRNA target sequence for MYO5C (NM_018728.1,3238-3256).
gttcgaaaaagagatagaa

SEQ ID NO: 93338 - DNA, 19 bp, Homo sapiens
  siRNA target sequence for MYO5C (NM_018728.1,3347-3365).
cttctcgaaagctatgaca

SEQ ID NO: 93339 - DNA, 19 bp, Homo sapiens
  siRNA target sequence for MYO5C (NM_018728.1,3358-3376).
ctatgacattgaagatgta

SEQ ID NO: 93340 - DNA, 19 bp, Homo sapiens
  siRNA target sequence for MYO5C (NM_018728.1,3487-3505).
gtctcagaaggattgctat

SEQ ID NO: 93341 - DNA, 19 bp, Homo sapiens
  siRNA target sequence for MYO5C (NM_018728.1,3538-3556).
ggtgcatctcagtcaagaa

SEQ ID NO: 93342 - DNA, 19 bp, Homo sapiens
  siRNA target sequence for MYO5C (NM_018728.1,3539-3557).
gtgcatctcagtcaagaaa

SEQ ID NO: 93343 - DNA, 19 bp, Homo sapiens
  siRNA target sequence for MYO5C (NM_018728.1,3643-3661).
catgatgatcccagacttt

SEQ ID NO: 93344 - DNA, 19 bp, Homo sapiens
  siRNA target sequence for MYO5C (NM_018728.1,3914-3932).
gaaagtgaagtcaagtgta

SEQ ID NO: 93345 - DNA, 19 bp, Homo sapiens
  siRNA target sequence for MYO5C (NM_018728.1,3918-3936).
gtgaagtcaagtgtaactt

SEQ ID NO: 93346 - DNA, 19 bp, Homo sapiens
  siRNA target sequence for MYO5C (NM_018728.1,3951-3969).
cccggctcactttggaaaa

SEQ ID NO: 93347 - DNA, 19 bp, Homo sapiens
  siRNA target sequence for MYO5C (NM_018728.1,3953-3971).
cggctcactttggaaaaca

SEQ ID NO: 93348 - DNA, 19 bp, Homo sapiens
  siRNA target sequence for MYO5C (NM_018728.1,4003-4021).
cagagtgattaaaaagcta

SEQ ID NO: 93349 - DNA, 19 bp, Homo sapiens
  siRNA target sequence for MYO5C (NM_018728.1,4040-4058).
ctaagcaagacaattggaa

SEQ ID NO: 93350 - DNA, 19 bp, Homo sapiens
  siRNA target sequence for MYO5C (NM_018728.1,4141-4159).
cattcagaacctcattctt

SEQ ID NO: 93351 - DNA, 19 bp, Homo sapiens
  siRNA target sequence for MYO5C (NM_018728.1,4200-4218).
ggctgccggctcatatcct

SEQ ID NO: 93352 - DNA, 19 bp, Homo sapiens
  siRNA target sequence for MYO5C (NM_018728.1,4351-4369).
gctttccaacacttgtcat

SEQ ID NO: 93353 - DNA, 19 bp, Homo sapiens
  siRNA target sequence for MYO5C (NM_018728.1,4467-4485).
cagaatacagacagattct

SEQ ID NO: 93354 - DNA, 19 bp, Homo sapiens
  siRNA target sequence for MYO5C (NM_018728.1,4486-4504).
cagtgatgtggctatacga

SEQ ID NO: 93355 - DNA, 19 bp, Homo sapiens
  siRNA target sequence for MYO5C (NM_018728.1,4488-4506).
gtgatgtggctatacgaat

SEQ ID NO: 93356 - DNA, 19 bp, Homo sapiens
  siRNA target sequence for MYO5C (NM_018728.1,4497-4515).
ctatacgaatatatcatca

SEQ ID NO: 93357 - DNA, 19 bp, Homo sapiens
  siRNA target sequence for MYO5C (NM_018728.1,4537-4555).
gaatatccaaccgataata

SEQ ID NO: 93358 - DNA, 19 bp, Homo sapiens
  siRNA target sequence for MYO5C (NM_018728.1,4560-4578).
cgggaatgctggagtatga

SEQ ID NO: 93359 - DNA, 19 bp, Homo sapiens
  siRNA target sequence for MYO5C (NM_018728.1,4562-4580).
ggaatgctggagtatgaga

SEQ ID NO: 93360 - DNA, 19 bp, Homo sapiens
  siRNA target sequence for MYO5C (NM_018728.1,4675-4693).
gcaacagctgagctacttt

SEQ ID NO: 93361 - DNA, 19 bp, Homo sapiens
  siRNA target sequence for MYO5C (NM_018728.1,4676-4694).
caacagctgagctactttt

SEQ ID NO: 93362 - DNA, 19 bp, Homo sapiens
  siRNA target sequence for MYO5C (NM_018728.1,4843-4861).
caatatcagctacttagaa

SEQ ID NO: 93363 - DNA, 19 bp, Homo sapiens
  siRNA target sequence for MYO5C (NM_018728.1,4888-4906).
gaacagcttagcaaaggaa

SEQ ID NO: 93364 - DNA, 19 bp, Homo sapiens
  siRNA target sequence for MYO5C (NM_018728.1,4965-4983).
gtgatgccaaggagatcta

SEQ ID NO: 93365 - DNA, 19 bp, Homo sapiens
  siRNA target sequence for MYO5C (NM_018728.1,5023-5041).
gatccttaattcatacaca

SEQ ID NO: 93366 - DNA, 19 bp, Homo sapiens
  siRNA target sequence for MYO5C (NM_018728.1,5038-5056).
cacacctatagatgacttt

SEQ ID NO: 93367 - DNA, 19 bp, Homo sapiens
  siRNA target sequence for MYO5C (NM_018728.1,5062-5080).
gagagtgactccatccttt

SEQ ID NO: 93368 - DNA, 19 bp, Homo sapiens
  siRNA target sequence for MYO5C (NM_018728.1,5076-5094).
cctttgttcgcaaagtaca

SEQ ID NO: 93369 - DNA, 19 bp, Homo sapiens
  siRNA target sequence for MYO5C (NM_018728.1,5090-5108).
gtacaggctctcctaaata

SEQ ID NO: 93370 - DNA, 19 bp, Homo sapiens
  siRNA target sequence for MYO5C (NM_018728.1,5128-5146).
gctgatgttggataccaaa

SEQ ID NO: 93371 - DNA, 19 bp, Homo sapiens
  siRNA target sequence for MYO5C (NM_018728.1,5131-5149).
gatgttggataccaaatat

SEQ ID NO: 93372 - DNA, 19 bp, Homo sapiens
  siRNA target sequence for MYO5C (NM_018728.1,5184-5202).
cacatgctctggaaatgat

SEQ ID NO: 93373 - DNA, 19 bp, Homo sapiens
  siRNA target sequence for MYO5C (NM_018728.1,5221-5239).
caagctaggctttctgaat

SEQ ID NO: 93374 - DNA, 19 bp, Homo sapiens
  siRNA target sequence for MYO6 (NM_004999.1,168-186).
cacaccctacagatggatt

SEQ ID NO: 93375 - DNA, 19 bp, Homo sapiens
  siRNA target sequence for MYO6 (NM_004999.1,216-234).
ccgacagcttaacaattga

SEQ ID NO: 93376 - DNA, 19 bp, Homo sapiens
  siRNA target sequence for MYO6 (NM_004999.1,217-235).
cgacagcttaacaattgaa

SEQ ID NO: 93377 - DNA, 19 bp, Homo sapiens
  siRNA target sequence for MYO6 (NM_004999.1,320-338).
gataactgttcactaatgt

SEQ ID NO: 93378 - DNA, 19 bp, Homo sapiens
  siRNA target sequence for MYO6 (NM_004999.1,350-368).
gccacactgctccataata

SEQ ID NO: 93379 - DNA, 19 bp, Homo sapiens
  siRNA target sequence for MYO6 (NM_004999.1,351-369).
ccacactgctccataatat

SEQ ID NO: 93380 - DNA, 19 bp, Homo sapiens
  siRNA target sequence for MYO6 (NM_004999.1,358-376).
gctccataatatcaaagtt

SEQ ID NO: 93381 - DNA, 19 bp, Homo sapiens
  siRNA target sequence for MYO6 (NM_004999.1,370-388).
caaagttcgatatagtaaa

SEQ ID NO: 93382 - DNA, 19 bp, Homo sapiens
  siRNA target sequence for MYO6 (NM_004999.1,426-444).
cagtgaatccatactttga

SEQ ID NO: 93383 - DNA, 19 bp, Homo sapiens
  siRNA target sequence for MYO6 (NM_004999.1,430-448).
gaatccatactttgacata

SEQ ID NO: 93384 - DNA, 19 bp, Homo sapiens
  siRNA target sequence for MYO6 (NM_004999.1,478-496).
gtcatatcaaggaaaatct

SEQ ID NO: 93385 - DNA, 19 bp, Homo sapiens
  siRNA target sequence for MYO6 (NM_004999.1,504-522).
caagaccacctcatgtctt

SEQ ID NO: 93386 - DNA, 19 bp, Homo sapiens
  siRNA target sequence for MYO6 (NM_004999.1,524-542).
gcaattgctgataaagctt

SEQ ID NO: 93387 - DNA, 19 bp, Homo sapiens
  siRNA target sequence for MYO6 (NM_004999.1,568-586).
gagtcagtctatcattgta

SEQ ID NO: 93388 - DNA, 19 bp, Homo sapiens
  siRNA target sequence for MYO6 (NM_004999.1,580-598).
cattgtatctggagaatca

SEQ ID NO: 93389 - DNA, 19 bp, Homo sapiens
  siRNA target sequence for MYO6 (NM_004999.1,636-654).
gatacctgactgaatccta

SEQ ID NO: 93390 - DNA, 19 bp, Homo sapiens
  siRNA target sequence for MYO6 (NM_004999.1,724-742).
gaagactgttcgcaacaat

SEQ ID NO: 93391 - DNA, 19 bp, Homo sapiens
  siRNA target sequence for MYO6 (NM_004999.1,731-749).
gttcgcaacaataatagca

SEQ ID NO: 93392 - DNA, 19 bp, Homo sapiens
  siRNA target sequence for MYO6 (NM_004999.1,739-757).
caataatagcagtcgattt

SEQ ID NO: 93393 - DNA, 19 bp, Homo sapiens
  siRNA target sequence for MYO6 (NM_004999.1,803-821).
ggaggatttgtttcacatt

SEQ ID NO: 93394 - DNA, 19 bp, Homo sapiens
  siRNA target sequence for MYO6 (NM_004999.1,804-822).
gaggatttgtttcacatta

SEQ ID NO: 93395 - DNA, 19 bp, Homo sapiens
  siRNA target sequence for MYO6 (NM_004999.1,966-984).
gaggctgcactagatactt

SEQ ID NO: 93396 - DNA, 19 bp, Homo sapiens
  siRNA target sequence for MYO6 (NM_004999.1,972-990).
gcactagatactttgctaa

SEQ ID NO: 93397 - DNA, 19 bp, Homo sapiens
  siRNA target sequence for MYO6 (NM_004999.1,978-996).
gatactttgctaacaaaga

SEQ ID NO: 93398 - DNA, 19 bp, Homo sapiens
  siRNA target sequence for MYO6 (NM_004999.1,1040-1058).
cttaaggcaggttctatga

SEQ ID NO: 93399 - DNA, 19 bp, Homo sapiens
  siRNA target sequence for MYO6 (NM_004999.1,1095-1113).
gaatgtgcacggctatgaa

SEQ ID NO: 93400 - DNA, 19 bp, Homo sapiens
  siRNA target sequence for MYO6 (NM_004999.1,1102-1120).
cacggctatgaaaaaaatt

SEQ ID NO: 93401 - DNA, 19 bp, Homo sapiens
  siRNA target sequence for MYO6 (NM_004999.1,1106-1124).
gctatgaaaaaaattggtt

SEQ ID NO: 93402 - DNA, 19 bp, Homo sapiens
  siRNA target sequence for MYO6 (NM_004999.1,1167-1185).
gcgtcctgcaccttggaaa

SEQ ID NO: 93403 - DNA, 19 bp, Homo sapiens
  siRNA target sequence for MYO6 (NM_004999.1,1210-1228).
cacttcaggtggttgtaat

SEQ ID NO: 93404 - DNA, 19 bp, Homo sapiens
  siRNA target sequence for MYO6 (NM_004999.1,1212-1230).
cttcaggtggttgtaatct

SEQ ID NO: 93405 - DNA, 19 bp, Homo sapiens
  siRNA target sequence for MYO6 (NM_004999.1,1215-1233).
caggtggttgtaatctgaa

SEQ ID NO: 93406 - DNA, 19 bp, Homo sapiens
  siRNA target sequence for MYO6 (NM_004999.1,1276-1294).
gggtttggaccaagatgat

SEQ ID NO: 93407 - DNA, 19 bp, Homo sapiens
  siRNA target sequence for MYO6 (NM_004999.1,1289-1307).
gatgatcttcgagtaagtt

SEQ ID NO: 93408 - DNA, 19 bp, Homo sapiens
  siRNA target sequence for MYO6 (NM_004999.1,1292-1310).
gatcttcgagtaagtttga

SEQ ID NO: 93409 - DNA, 19 bp, Homo sapiens
  siRNA target sequence for MYO6 (NM_004999.1,1334-1352).
gcagggggcaccaaaggaa

SEQ ID NO: 93410 - DNA, 19 bp, Homo sapiens
  siRNA target sequence for MYO6 (NM_004999.1,1405-1423).
cctggcaaagacagtgtat

SEQ ID NO: 93411 - DNA, 19 bp, Homo sapiens
  siRNA target sequence for MYO6 (NM_004999.1,1406-1424).
ctggcaaagacagtgtata

SEQ ID NO: 93412 - DNA, 19 bp, Homo sapiens
  siRNA target sequence for MYO6 (NM_004999.1,1512-1530).
ctggttttgagtactttga

SEQ ID NO: 93413 - DNA, 19 bp, Homo sapiens
  siRNA target sequence for MYO6 (NM_004999.1,1547-1565).
caattttgcatcaactatt

SEQ ID NO: 93414 - DNA, 19 bp, Homo sapiens
  siRNA target sequence for MYO6 (NM_004999.1,1555-1573).
catcaactattgcaatgaa

SEQ ID NO: 93415 - DNA, 19 bp, Homo sapiens
  siRNA target sequence for MYO6 (NM_004999.1,1561-1579).
ctattgcaatgaaaaactt

SEQ ID NO: 93416 - DNA, 19 bp, Homo sapiens
  siRNA target sequence for MYO6 (NM_004999.1,1609-1627).
ggaggaacaagaactctat

SEQ ID NO: 93417 - DNA, 19 bp, Homo sapiens
  siRNA target sequence for MYO6 (NM_004999.1,1624-1642).
ctatcaaaaagaaggttta

SEQ ID NO: 93418 - DNA, 19 bp, Homo sapiens
  siRNA target sequence for MYO6 (NM_004999.1,1644-1662).
gtgttaatgaagtgcatta

SEQ ID NO: 93419 - DNA, 19 bp, Homo sapiens
  siRNA target sequence for MYO6 (NM_004999.1,1666-1684).
ggataatcaggactgtata

SEQ ID NO: 93420 - DNA, 19 bp, Homo sapiens
  siRNA target sequence for MYO6 (NM_004999.1,1675-1693).
ggactgtatagatttaatt

SEQ ID NO: 93421 - DNA, 19 bp, Homo sapiens
  siRNA target sequence for MYO6 (NM_004999.1,1750-1768).
gccaagtgatcaacacttt

SEQ ID NO: 93422 - DNA, 19 bp, Homo sapiens
  siRNA target sequence for MYO6 (NM_004999.1,1784-1802).
caaaagcacaaggatcatt

SEQ ID NO: 93423 - DNA, 19 bp, Homo sapiens
  siRNA target sequence for MYO6 (NM_004999.1,1831-1849).
gctggcagttcataggaat

SEQ ID NO: 93424 - DNA, 19 bp, Homo sapiens
  siRNA target sequence for MYO6 (NM_004999.1,1835-1853).
gcagttcataggaatatca

SEQ ID NO: 93425 - DNA, 19 bp, Homo sapiens
  siRNA target sequence for MYO6 (NM_004999.1,1856-1874).
gacgacgaaggcttcatta

SEQ ID NO: 93426 - DNA, 19 bp, Homo sapiens
  siRNA target sequence for MYO6 (NM_004999.1,1948-1966).
gtctcttgaatccttaata

SEQ ID NO: 93427 - DNA, 19 bp, Homo sapiens
  siRNA target sequence for MYO6 (NM_004999.1,1991-2009).
cgggaattatttgaatcat

SEQ ID NO: 93428 - DNA, 19 bp, Homo sapiens
  siRNA target sequence for MYO6 (NM_004999.1,2003-2021).
gaatcatccacaaataaca

SEQ ID NO: 93429 - DNA, 19 bp, Homo sapiens
  siRNA target sequence for MYO6 (NM_004999.1,2064-2082).
gcgtgggaaacaagtttaa

SEQ ID NO: 93430 - DNA, 19 bp, Homo sapiens
  siRNA target sequence for MYO6 (NM_004999.1,2104-2122).
ggataaacttcgaagtact

SEQ ID NO: 93431 - DNA, 19 bp, Homo sapiens
  siRNA target sequence for MYO6 (NM_004999.1,2123-2141).
ggagcaagctttattcgtt

SEQ ID NO: 93432 - DNA, 19 bp, Homo sapiens
  siRNA target sequence for MYO6 (NM_004999.1,2131-2149).
ctttattcgttgcatcaaa

SEQ ID NO: 93433 - DNA, 19 bp, Homo sapiens
  siRNA target sequence for MYO6 (NM_004999.1,2142-2160).
gcatcaaacctaacttaaa

SEQ ID NO: 93434 - DNA, 19 bp, Homo sapiens
  siRNA target sequence for MYO6 (NM_004999.1,2256-2274).
catcacgagcttcatttca

SEQ ID NO: 93435 - DNA, 19 bp, Homo sapiens
  siRNA target sequence for MYO6 (NM_004999.1,2265-2283).
cttcatttcatgaactcta

SEQ ID NO: 93436 - DNA, 19 bp, Homo sapiens
  siRNA target sequence for MYO6 (NM_004999.1,2268-2286).
catttcatgaactctacaa

SEQ ID NO: 93437 - DNA, 19 bp, Homo sapiens
  siRNA target sequence for MYO6 (NM_004999.1,2273-2291).
catgaactctacaacatgt

SEQ ID NO: 93438 - DNA, 19 bp, Homo sapiens
  siRNA target sequence for MYO6 (NM_004999.1,2276-2294).
gaactctacaacatgtaca

SEQ ID NO: 93439 - DNA, 19 bp, Homo sapiens
  siRNA target sequence for MYO6 (NM_004999.1,2299-2317).
gtatatgccagataaactt

SEQ ID NO: 93440 - DNA, 19 bp, Homo sapiens
  siRNA target sequence for MYO6 (NM_004999.1,2386-2404).
caagtttgggttaaccaaa

SEQ ID NO: 93441 - DNA, 19 bp, Homo sapiens
  siRNA target sequence for MYO6 (NM_004999.1,2393-2411).
gggttaaccaaagtatttt

SEQ ID NO: 93442 - DNA, 19 bp, Homo sapiens
  siRNA target sequence for MYO6 (NM_004999.1,2394-2412).
ggttaaccaaagtattttt

SEQ ID NO: 93443 - DNA, 19 bp, Homo sapiens
  siRNA target sequence for MYO6 (NM_004999.1,2465-2483).
cacttagcagagttggtta

SEQ ID NO: 93444 - DNA, 19 bp, Homo sapiens
  siRNA target sequence for MYO6 (NM_004999.1,2472-2490).
cagagttggttaaaagagt

SEQ ID NO: 93445 - DNA, 19 bp, Homo sapiens
  siRNA target sequence for MYO6 (NM_004999.1,2511-2529).
gtcgctggaagaaagttca

SEQ ID NO: 93446 - DNA, 19 bp, Homo sapiens
  siRNA target sequence for MYO6 (NM_004999.1,2576-2594).
cgagctgaagcctgcatta

SEQ ID NO: 93447 - DNA, 19 bp, Homo sapiens
  siRNA target sequence for MYO6 (NM_004999.1,2577-2595).
gagctgaagcctgcattaa

SEQ ID NO: 93448 - DNA, 19 bp, Homo sapiens
  siRNA target sequence for MYO6 (NM_004999.1,2646-2664).
gcattgatggtctggttaa

SEQ ID NO: 93449 - DNA, 19 bp, Homo sapiens
  siRNA target sequence for MYO6 (NM_004999.1,2726-2744).
ggaaaacccgagatgaata

SEQ ID NO: 93450 - DNA, 19 bp, Homo sapiens
  siRNA target sequence for MYO6 (NM_004999.1,2727-2745).
gaaaacccgagatgaataa

SEQ ID NO: 93451 - DNA, 19 bp, Homo sapiens
  siRNA target sequence for MYO6 (NM_004999.1,2732-2750).
cccgagatgaataaacaga

SEQ ID NO: 93452 - DNA, 19 bp, Homo sapiens
  siRNA target sequence for MYO6 (NM_004999.1,2733-2751).
ccgagatgaataaacagat

SEQ ID NO: 93453 - DNA, 19 bp, Homo sapiens
  siRNA target sequence for MYO6 (NM_004999.1,2860-2878).
ggaactcctcagtgcatta

SEQ ID NO: 93454 - DNA, 19 bp, Homo sapiens
  siRNA target sequence for MYO6 (NM_004999.1,2866-2884).
cctcagtgcattacagaaa

SEQ ID NO: 93455 - DNA, 19 bp, Homo sapiens
  siRNA target sequence for MYO6 (NM_004999.1,2913-2931).
ggctgaggcgtattcaaga

SEQ ID NO: 93456 - DNA, 19 bp, Homo sapiens
  siRNA target sequence for MYO6 (NM_004999.1,2914-2932).
gctgaggcgtattcaagaa

SEQ ID NO: 93457 - DNA, 19 bp, Homo sapiens
  siRNA target sequence for MYO6 (NM_004999.1,2917-2935).
gaggcgtattcaagaagaa

SEQ ID NO: 93458 - DNA, 19 bp, Homo sapiens
  siRNA target sequence for MYO6 (NM_004999.1,2919-2937).
ggcgtattcaagaagaaat

SEQ ID NO: 93459 - DNA, 19 bp, Homo sapiens
  siRNA target sequence for MYO6 (NM_004999.1,3000-3018).
ggcggatgaaacttgagat

SEQ ID NO: 93460 - DNA, 19 bp, Homo sapiens
  siRNA target sequence for MYO6 (NM_004999.1,3235-3253).
ggcgctgcggagaaatgat

SEQ ID NO: 93461 - DNA, 19 bp, Homo sapiens
  siRNA target sequence for MYO6 (NM_004999.1,3288-3306).
ccaaagaaatgtcagaatt

SEQ ID NO: 93462 - DNA, 19 bp, Homo sapiens
  siRNA target sequence for MYO6 (NM_004999.1,3344-3362).
gctgctggtactaagaaat

SEQ ID NO: 93463 - DNA, 19 bp, Homo sapiens
  siRNA target sequence for MYO6 (NM_004999.1,3358-3376).
gaaatatgatcttagtaaa

SEQ ID NO: 93464 - DNA, 19 bp, Homo sapiens
  siRNA target sequence for MYO6 (NM_004999.1,3387-3405).
cagaactacgtgataccat

SEQ ID NO: 93465 - DNA, 19 bp, Homo sapiens
  siRNA target sequence for MYO6 (NM_004999.1,3392-3410).
ctacgtgataccatcaata

SEQ ID NO: 93466 - DNA, 19 bp, Homo sapiens
  siRNA target sequence for MYO6 (NM_004999.1,3395-3413).
cgtgataccatcaatactt

SEQ ID NO: 93467 - DNA, 19 bp, Homo sapiens
  siRNA target sequence for MYO6 (NM_004999.1,3403-3421).
catcaatacttcttgtgat

SEQ ID NO: 93468 - DNA, 19 bp, Homo sapiens
  siRNA target sequence for MYO6 (NM_004999.1,3449-3467).
gaatttcataggagactaa

SEQ ID NO: 93469 - DNA, 19 bp, Homo sapiens
  siRNA target sequence for MYO6 (NM_004999.1,3470-3488).
gtgtatcatgcttggaaat

SEQ ID NO: 93470 - DNA, 19 bp, Homo sapiens
  siRNA target sequence for MYO6 (NM_004999.1,3472-3490).
gtatcatgcttggaaatct

SEQ ID NO: 93471 - DNA, 19 bp, Homo sapiens
  siRNA target sequence for MYO6 (NM_004999.1,3520-3538).
gcaacgtgctccaaagtct

SEQ ID NO: 93472 - DNA, 19 bp, Homo sapiens
  siRNA target sequence for MYO6 (NM_004999.1,3524-3542).
cgtgctccaaagtctgtta

SEQ ID NO: 93473 - DNA, 19 bp, Homo sapiens
  siRNA target sequence for MYO6 (NM_004999.1,3530-3548).
ccaaagtctgttactgatt

SEQ ID NO: 93474 - DNA, 19 bp, Homo sapiens
  siRNA target sequence for MYO6 (NM_004999.1,3531-3549).
caaagtctgttactgatta

SEQ ID NO: 93475 - DNA, 19 bp, Homo sapiens
  siRNA target sequence for MYO6 (NM_004999.1,3609-3627).
ccaggcagcgggagattga

SEQ ID NO: 93476 - DNA, 19 bp, Homo sapiens
  siRNA target sequence for MYO6 (NM_004999.1,3610-3628).
caggcagcgggagattgaa

SEQ ID NO: 93477 - DNA, 19 bp, Homo sapiens
  siRNA target sequence for MYO6 (NM_004999.1,3614-3632).
cagcgggagattgaaatga

SEQ ID NO: 93478 - DNA, 19 bp, Homo sapiens
  siRNA target sequence for MYO6 (NM_004999.1,3672-3690).
ctgccgaccagtacaaaga

SEQ ID NO: 93479 - DNA, 19 bp, Homo sapiens
  siRNA target sequence for MYO6 (NM_004999.1,3715-3733).
gtggtatgcccattttgat

SEQ ID NO: 93480 - DNA, 19 bp, Homo sapiens
  siRNA target sequence for MYO6 (NM_004999.1,3868-3886).
gatcttgccaagacagttt

SEQ ID NO: 93481 - DNA, 19 bp, Homo sapiens
  siRNA target sequence for MYO6 (NM_004999.1,3913-3931).
catccagtaccttcagaat

SEQ ID NO: 93482 - DNA, 19 bp, Homo sapiens
  siRNA target sequence for MYO6 (NM_004999.1,3923-3941).
cttcagaatgcgattgaga

SEQ ID NO: 93483 - DNA, 19 bp, Homo sapiens
  siRNA target sequence for MYO6 (NM_004999.1,3950-3968).
gctcggcccacctatgcaa

SEQ ID NO: 93484 - DNA, 19 bp, Homo sapiens
  siRNA target sequence for MYO7A (NM_000260.1,540-558).
cgggaccacctcatctaca

SEQ ID NO: 93485 - DNA, 19 bp, Homo sapiens
  siRNA target sequence for MYO7A (NM_000260.1,546-564).
cacctcatctacacgtata

SEQ ID NO: 93486 - DNA, 19 bp, Homo sapiens
  siRNA target sequence for MYO7A (NM_000260.1,621-639).
gagcacatccgccagtata

SEQ ID NO: 93487 - DNA, 19 bp, Homo sapiens
  siRNA target sequence for MYO7A (NM_000260.1,630-648).
cgccagtataccaacaaga

SEQ ID NO: 93488 - DNA, 19 bp, Homo sapiens
  siRNA target sequence for MYO7A (NM_000260.1,901-919).
caagccgtttcggaaagta

SEQ ID NO: 93489 - DNA, 19 bp, Homo sapiens
  siRNA target sequence for MYO7A (NM_000260.1,1043-1061).
catgctggagggtatgagt

SEQ ID NO: 93490 - DNA, 19 bp, Homo sapiens
  siRNA target sequence for MYO7A (NM_000260.1,1054-1072).
gtatgagtgaggatcagaa

SEQ ID NO: 93491 - DNA, 19 bp, Homo sapiens
  siRNA target sequence for MYO7A (NM_000260.1,1116-1134).
gccatgggtaactgcataa

SEQ ID NO: 93492 - DNA, 19 bp, Homo sapiens
  siRNA target sequence for MYO7A (NM_000260.1,1183-1201).
ccatgaaggtgctcatgtt

SEQ ID NO: 93493 - DNA, 19 bp, Homo sapiens
  siRNA target sequence for MYO7A (NM_000260.1,1452-1470).
gtgcgcgacgccttcgtaa

SEQ ID NO: 93494 - DNA, 19 bp, Homo sapiens
  siRNA target sequence for MYO7A (NM_000260.1,1508-1526).
caagatcaacgcagcaatt

SEQ ID NO: 93495 - DNA, 19 bp, Homo sapiens
  siRNA target sequence for MYO7A (NM_000260.1,1751-1769).
ggatgccctggacatgatt

SEQ ID NO: 93496 - DNA, 19 bp, Homo sapiens
  siRNA target sequence for MYO7A (NM_000260.1,1833-1851).
gacaccaccatgttacaca

SEQ ID NO: 93497 - DNA, 19 bp, Homo sapiens
  siRNA target sequence for MYO7A (NM_000260.1,1987-2005).
ccctgcatggggacattat

SEQ ID NO: 93498 - DNA, 19 bp, Homo sapiens
  siRNA target sequence for MYO7A (NM_000260.1,2296-2314).
gctacagcttcgtagagtt

SEQ ID NO: 93499 - DNA, 19 bp, Homo sapiens
  siRNA target sequence for MYO7A (NM_000260.1,2297-2315).
ctacagcttcgtagagttt

SEQ ID NO: 93500 - DNA, 19 bp, Homo sapiens
  siRNA target sequence for MYO7A (NM_000260.1,2546-2564).
caaagacaggtctaacttt

SEQ ID NO: 93501 - DNA, 19 bp, Homo sapiens
  siRNA target sequence for MYO7A (NM_000260.1,2845-2863).
gcctcagggctgagtatct

SEQ ID NO: 93502 - DNA, 19 bp, Homo sapiens
  siRNA target sequence for MYO7A (NM_000260.1,3595-3613).
ggcacaagctggtgcattt

SEQ ID NO: 93503 - DNA, 19 bp, Homo sapiens
  siRNA target sequence for MYO7A (NM_000260.1,3769-3787).
cactccgggacgagatcta

SEQ ID NO: 93504 - DNA, 19 bp, Homo sapiens
  siRNA target sequence for MYO7A (NM_000260.1,3886-3904).
ccgagaagtttgtcaagta

SEQ ID NO: 93505 - DNA, 19 bp, Homo sapiens
  siRNA target sequence for MYO7A (NM_000260.1,4163-4181).
cgggttctccctctacatt

SEQ ID NO: 93506 - DNA, 19 bp, Homo sapiens
  siRNA target sequence for MYO7A (NM_000260.1,4385-4403).
ggtgcgaggagtcaagttt

SEQ ID NO: 93507 - DNA, 19 bp, Homo sapiens
  siRNA target sequence for MYO7A (NM_000260.1,4585-4603).
cccacaagaaggggattta

SEQ ID NO: 93508 - DNA, 19 bp, Homo sapiens
  siRNA target sequence for MYO7A (NM_000260.1,4586-4604).
ccacaagaaggggatttat

SEQ ID NO: 93509 - DNA, 19 bp, Homo sapiens
  siRNA target sequence for MYO7A (NM_000260.1,4754-4772).
ctggacgggtgtgtacttt

SEQ ID NO: 93510 - DNA, 19 bp, Homo sapiens
  siRNA target sequence for MYO7A (NM_000260.1,4756-4774).
ggacgggtgtgtactttgt

SEQ ID NO: 93511 - DNA, 19 bp, Homo sapiens
  siRNA target sequence for MYO7A (NM_000260.1,4993-5011).
ccatcaagggggacgaata

SEQ ID NO: 93512 - DNA, 19 bp, Homo sapiens
  siRNA target sequence for MYO7A (NM_000260.1,5070-5088).
gggctccggaagagatcta

SEQ ID NO: 93513 - DNA, 19 bp, Homo sapiens
  siRNA target sequence for MYO7A (NM_000260.1,5071-5089).
ggctccggaagagatctaa

SEQ ID NO: 93514 - DNA, 19 bp, Homo sapiens
  siRNA target sequence for MYO7A (NM_000260.1,5073-5091).
ctccggaagagatctaagt

SEQ ID NO: 93515 - DNA, 19 bp, Homo sapiens
  siRNA target sequence for MYO7A (NM_000260.1,5075-5093).
ccggaagagatctaagtat

SEQ ID NO: 93516 - DNA, 19 bp, Homo sapiens
  siRNA target sequence for MYO7A (NM_000260.1,5188-5206).
cgggcgagcaggtcatgaa

SEQ ID NO: 93517 - DNA, 19 bp, Homo sapiens
  siRNA target sequence for MYO7A (NM_000260.1,5213-5231).
ctgggccaacggcatcaat

SEQ ID NO: 93518 - DNA, 19 bp, Homo sapiens
  siRNA target sequence for MYO7A (NM_000260.1,6104-6122).
cctctttgtcaaaattgca

SEQ ID NO: 93519 - DNA, 19 bp, Homo sapiens
  siRNA target sequence for MYO7A (NM_000260.1,6174-6192).
cacttgacagactggataa

SEQ ID NO: 93520 - DNA, 19 bp, Homo sapiens
  siRNA target sequence for MYO7A (NM_000260.1,6205-6223).
ccatcaaggacggaattgt

SEQ ID NO: 93521 - DNA, 19 bp, Homo sapiens
  siRNA target sequence for MYO7A (NM_000260.1,6657-6675).
ctcctaattgccatcaaca

SEQ ID NO: 93522 - DNA, 19 bp, Homo sapiens
  siRNA target sequence for MYO7A (NM_000260.1,6660-6678).
ctaattgccatcaacaagt

SEQ ID NO: 93523 - DNA, 19 bp, Homo sapiens
  siRNA target sequence for MYO7A (NM_000260.1,6690-6708).
ctcatcgatcccaaaacga

SEQ ID NO: 93524 - DNA, 19 bp, Homo sapiens
  siRNA target sequence for MYO7A (NM_000260.1,6696-6714).
gatcccaaaacgaaggata

SEQ ID NO: 93525 - DNA, 19 bp, Homo sapiens
  siRNA target sequence for MYO7A (NM_000260.1,6700-6718).
ccaaaacgaaggatatcct

SEQ ID NO: 93526 - DNA, 19 bp, Homo sapiens
  siRNA target sequence for MYO7A (NM_000260.1,6823-6841).
cgtcactgggctacaagat

SEQ ID NO: 93527 - DNA, 19 bp, Homo sapiens
  siRNA target sequence for MYO7A (NM_000260.1,6849-6867).
ctcctgacttcctacatta

SEQ ID NO: 93528 - DNA, 19 bp, Homo sapiens
  siRNA target sequence for MYO9A (NM_006901.1,339-357).
ccgattcctgccagaaaaa

SEQ ID NO: 93529 - DNA, 19 bp, Homo sapiens
  siRNA target sequence for MYO9A (NM_006901.1,340-358).
cgattcctgccagaaaaaa

SEQ ID NO: 93530 - DNA, 19 bp, Homo sapiens
  siRNA target sequence for MYO9A (NM_006901.1,366-384).
gctgctgaggtgattgagt

SEQ ID NO: 93531 - DNA, 19 bp, Homo sapiens
  siRNA target sequence for MYO9A (NM_006901.1,372-390).
gaggtgattgagtctctta

SEQ ID NO: 93532 - DNA, 19 bp, Homo sapiens
  siRNA target sequence for MYO9A (NM_006901.1,374-392).
ggtgattgagtctcttata

SEQ ID NO: 93533 - DNA, 19 bp, Homo sapiens
  siRNA target sequence for MYO9A (NM_006901.1,375-393).
gtgattgagtctcttataa

SEQ ID NO: 93534 - DNA, 19 bp, Homo sapiens
  siRNA target sequence for MYO9A (NM_006901.1,385-403).
ctcttataaacaaacttca

SEQ ID NO: 93535 - DNA, 19 bp, Homo sapiens
  siRNA target sequence for MYO9A (NM_006901.1,459-477).
gaatggattctcaatccaa

SEQ ID NO: 93536 - DNA, 19 bp, Homo sapiens
  siRNA target sequence for MYO9A (NM_006901.1,464-482).
gattctcaatccaacagat

SEQ ID NO: 93537 - DNA, 19 bp, Homo sapiens
  siRNA target sequence for MYO9A (NM_006901.1,575-593).
ccttgatggatcaatccat

SEQ ID NO: 93538 - DNA, 19 bp, Homo sapiens
  siRNA target sequence for MYO9A (NM_006901.1,582-600).
ggatcaatccattatggta

SEQ ID NO: 93539 - DNA, 19 bp, Homo sapiens
  siRNA target sequence for MYO9A (NM_006901.1,610-628).
catggctacgggtaacaga

SEQ ID NO: 93540 - DNA, 19 bp, Homo sapiens
  siRNA target sequence for MYO9A (NM_006901.1,614-632).
gctacgggtaacagaagaa

SEQ ID NO: 93541 - DNA, 19 bp, Homo sapiens
  siRNA target sequence for MYO9A (NM_006901.1,668-686).
gcctcaacagaaagacttt

SEQ ID NO: 93542 - DNA, 19 bp, Homo sapiens
  siRNA target sequence for MYO9A (NM_006901.1,697-715).
gtagtttacctgatttgaa

SEQ ID NO: 93543 - DNA, 19 bp, Homo sapiens
  siRNA target sequence for MYO9A (NM_006901.1,820-838).
ctatttataaccccaaata

SEQ ID NO: 93544 - DNA, 19 bp, Homo sapiens
  siRNA target sequence for MYO9A (NM_006901.1,892-910).
ctgtggctgatgtagctta

SEQ ID NO: 93545 - DNA, 19 bp, Homo sapiens
  siRNA target sequence for MYO9A (NM_006901.1,896-914).
ggctgatgtagcttatcat

SEQ ID NO: 93546 - DNA, 19 bp, Homo sapiens
  siRNA target sequence for MYO9A (NM_006901.1,916-934).
ccatgcttcagcgcaaaaa

SEQ ID NO: 93547 - DNA, 19 bp, Homo sapiens
  siRNA target sequence for MYO9A (NM_006901.1,920-938).
gcttcagcgcaaaaagaat

SEQ ID NO: 93548 - DNA, 19 bp, Homo sapiens
  siRNA target sequence for MYO9A (NM_006901.1,924-942).
cagcgcaaaaagaatcagt

SEQ ID NO: 93549 - DNA, 19 bp, Homo sapiens
  siRNA target sequence for MYO9A (NM_006901.1,977-995).
gactcaaagcacaaacttt

SEQ ID NO: 93550 - DNA, 19 bp, Homo sapiens
  siRNA target sequence for MYO9A (NM_006901.1,985-1003).
gcacaaactttcttattca

SEQ ID NO: 93551 - DNA, 19 bp, Homo sapiens
  siRNA target sequence for MYO9A (NM_006901.1,1014-1032).
gctctcagtcagaaaggat

SEQ ID NO: 93552 - DNA, 19 bp, Homo sapiens
  siRNA target sequence for MYO9A (NM_006901.1,1036-1054).
ccagtggagtagaacagat

SEQ ID NO: 93553 - DNA, 19 bp, Homo sapiens
  siRNA target sequence for MYO9A (NM_006901.1,1039-1057).
gtggagtagaacagattat

SEQ ID NO: 93554 - DNA, 19 bp, Homo sapiens
  siRNA target sequence for MYO9A (NM_006901.1,1104-1122).
gctcataataacaattcaa

SEQ ID NO: 93555 - DNA, 19 bp, Homo sapiens
  siRNA target sequence for MYO9A (NM_006901.1,1180-1198).
cctatgttgaaaaatatct

SEQ ID NO: 93556 - DNA, 19 bp, Homo sapiens
  siRNA target sequence for MYO9A (NM_006901.1,1229-1247).
gcataatgaacggaactat

SEQ ID NO: 93557 - DNA, 19 bp, Homo sapiens
  siRNA target sequence for MYO9A (NM_006901.1,1236-1254).
gaacggaactatcatgtat

SEQ ID NO: 93558 - DNA, 19 bp, Homo sapiens
  siRNA target sequence for MYO9A (NM_006901.1,1239-1257).
cggaactatcatgtattct

SEQ ID NO: 93559 - DNA, 19 bp, Homo sapiens
  siRNA target sequence for MYO9A (NM_006901.1,1291-1309).
gatcagcattccatcttaa

SEQ ID NO: 93560 - DNA, 19 bp, Homo sapiens
  siRNA target sequence for MYO9A (NM_006901.1,1294-1312).
cagcattccatcttaagca

SEQ ID NO: 93561 - DNA, 19 bp, Homo sapiens
  siRNA target sequence for MYO9A (NM_006901.1,1315-1333).
cagaggaatatcattatct

SEQ ID NO: 93562 - DNA, 19 bp, Homo sapiens
  siRNA target sequence for MYO9A (NM_006901.1,1326-1344).
cattatctcaatcagataa

SEQ ID NO: 93563 - DNA, 19 bp, Homo sapiens
  siRNA target sequence for MYO9A (NM_006901.1,1332-1350).
ctcaatcagataacaaaga

SEQ ID NO: 93564 - DNA, 19 bp, Homo sapiens
  siRNA target sequence for MYO9A (NM_006901.1,1410-1428).
gtggaaggagaagatttga

SEQ ID NO: 93565 - DNA, 19 bp, Homo sapiens
  siRNA target sequence for MYO9A (NM_006901.1,1446-1464).
ctacaacttgccatggaaa

SEQ ID NO: 93566 - DNA, 19 bp, Homo sapiens
  siRNA target sequence for MYO9A (NM_006901.1,1481-1499).
caagacacgaagacagatt

SEQ ID NO: 93567 - DNA, 19 bp, Homo sapiens
  siRNA target sequence for MYO9A (NM_006901.1,1521-1539).
ctacatttgggtaatatct

SEQ ID NO: 93568 - DNA, 19 bp, Homo sapiens
  siRNA target sequence for MYO9A (NM_006901.1,1529-1547).
gggtaatatctgttacaaa

SEQ ID NO: 93569 - DNA, 19 bp, Homo sapiens
  siRNA target sequence for MYO9A (NM_006901.1,1559-1577).
ccgggatgactccattgat

SEQ ID NO: 93570 - DNA, 19 bp, Homo sapiens
  siRNA target sequence for MYO9A (NM_006901.1,1560-1578).
cgggatgactccattgata

SEQ ID NO: 93571 - DNA, 19 bp, Homo sapiens
  siRNA target sequence for MYO9A (NM_006901.1,1568-1586).
ctccattgatatctgtaat

SEQ ID NO: 93572 - DNA, 19 bp, Homo sapiens
  siRNA target sequence for MYO9A (NM_006901.1,1571-1589).
cattgatatctgtaatcct

SEQ ID NO: 93573 - DNA, 19 bp, Homo sapiens
  siRNA target sequence for MYO9A (NM_006901.1,1588-1606).
ctgaagttctgcctattgt

SEQ ID NO: 93574 - DNA, 19 bp, Homo sapiens
  siRNA target sequence for MYO9A (NM_006901.1,1590-1608).
gaagttctgcctattgtct

SEQ ID NO: 93575 - DNA, 19 bp, Homo sapiens
  siRNA target sequence for MYO9A (NM_006901.1,1596-1614).
ctgcctattgtctcagaat

SEQ ID NO: 93576 - DNA, 19 bp, Homo sapiens
  siRNA target sequence for MYO9A (NM_006901.1,1686-1704).
cttattttgccatacaagt

SEQ ID NO: 93577 - DNA, 19 bp, Homo sapiens
  siRNA target sequence for MYO9A (NM_006901.1,1727-1745).
gaactccatggctaagtct

SEQ ID NO: 93578 - DNA, 19 bp, Homo sapiens
  siRNA target sequence for MYO9A (NM_006901.1,1736-1754).
ggctaagtctctgtatagt

SEQ ID NO: 93579 - DNA, 19 bp, Homo sapiens
  siRNA target sequence for MYO9A (NM_006901.1,1758-1776).
ctgtttgactggatagttt

SEQ ID NO: 93580 - DNA, 19 bp, Homo sapiens
  siRNA target sequence for MYO9A (NM_006901.1,1766-1784).
ctggatagtttttcgaatt

SEQ ID NO: 93581 - DNA, 19 bp, Homo sapiens
  siRNA target sequence for MYO9A (NM_006901.1,1768-1786).
ggatagtttttcgaattaa

SEQ ID NO: 93582 - DNA, 19 bp, Homo sapiens
  siRNA target sequence for MYO9A (NM_006901.1,1809-1827).
gatttagagcataatacca

SEQ ID NO: 93583 - DNA, 19 bp, Homo sapiens
  siRNA target sequence for MYO9A (NM_006901.1,1818-1836).
cataataccaagacattgt

SEQ ID NO: 93584 - DNA, 19 bp, Homo sapiens
  siRNA target sequence for MYO9A (NM_006901.1,1826-1844).
caagacattgtctattggt

SEQ ID NO: 93585 - DNA, 19 bp, Homo sapiens
  siRNA target sequence for MYO9A (NM_006901.1,1835-1853).
gtctattggtgttcttgat

SEQ ID NO: 93586 - DNA, 19 bp, Homo sapiens
  siRNA target sequence for MYO9A (NM_006901.1,1837-1855).
ctattggtgttcttgatat

SEQ ID NO: 93587 - DNA, 19 bp, Homo sapiens
  siRNA target sequence for MYO9A (NM_006901.1,1920-1938).
cgtttacagcactacttta

SEQ ID NO: 93588 - DNA, 19 bp, Homo sapiens
  siRNA target sequence for MYO9A (NM_006901.1,1984-2002).
gtatcagctggcacaacat

SEQ ID NO: 93589 - DNA, 19 bp, Homo sapiens
  siRNA target sequence for MYO9A (NM_006901.1,1988-2006).
cagctggcacaacatagat

SEQ ID NO: 93590 - DNA, 19 bp, Homo sapiens
  siRNA target sequence for MYO9A (NM_006901.1,1990-2008).
gctggcacaacatagatta

SEQ ID NO: 93591 - DNA, 19 bp, Homo sapiens
  siRNA target sequence for MYO9A (NM_006901.1,1997-2015).
caacatagattacattgat

SEQ ID NO: 93592 - DNA, 19 bp, Homo sapiens
  siRNA target sequence for MYO9A (NM_006901.1,2000-2018).
catagattacattgataat

SEQ ID NO: 93593 - DNA, 19 bp, Homo sapiens
  siRNA target sequence for MYO9A (NM_006901.1,2013-2031).
gataatacctgctgcataa

SEQ ID NO: 93594 - DNA, 19 bp, Homo sapiens
  siRNA target sequence for MYO9A (NM_006901.1,2087-2105).
ctttccacaggctacaaat

SEQ ID NO: 93595 - DNA, 19 bp, Homo sapiens
  siRNA target sequence for MYO9A (NM_006901.1,2114-2132).
gctagacaagtttaagcat

SEQ ID NO: 93596 - DNA, 19 bp, Homo sapiens
  siRNA target sequence for MYO9A (NM_006901.1,2136-2154).
catgaagataattcttaca

SEQ ID NO: 93597 - DNA, 19 bp, Homo sapiens
  siRNA target sequence for MYO9A (NM_006901.1,2142-2160).
gataattcttacatcgaat

SEQ ID NO: 93598 - DNA, 19 bp, Homo sapiens
  siRNA target sequence for MYO9A (NM_006901.1,2171-2189).
gatggagcctgctttcatt

SEQ ID NO: 93599 - DNA, 19 bp, Homo sapiens
  siRNA target sequence for MYO9A (NM_006901.1,2174-2192).
ggagcctgctttcattata

SEQ ID NO: 93600 - DNA, 19 bp, Homo sapiens
  siRNA target sequence for MYO9A (NM_006901.1,2175-2193).
gagcctgctttcattataa

SEQ ID NO: 93601 - DNA, 19 bp, Homo sapiens
  siRNA target sequence for MYO9A (NM_006901.1,2287-2305).
gcagcaagaatgcatttat

SEQ ID NO: 93602 - DNA, 19 bp, Homo sapiens
  siRNA target sequence for MYO9A (NM_006901.1,2350-2368).
caattctccgagctttttt

SEQ ID NO: 93603 - DNA, 19 bp, Homo sapiens
  siRNA target sequence for MYO9A (NM_006901.1,2440-2458).
cgccatgtgcaattttgaa

SEQ ID NO: 93604 - DNA, 19 bp, Homo sapiens
  siRNA target sequence for MYO9A (NM_006901.1,2461-2479).
gtatggatagttttagctt

SEQ ID NO: 93605 - DNA, 19 bp, Homo sapiens
  siRNA target sequence for MYO9A (NM_006901.1,2531-2549).
ggaagagaagtacagtata

SEQ ID NO: 93606 - DNA, 19 bp, Homo sapiens
  siRNA target sequence for MYO9A (NM_006901.1,2543-2561).
cagtataacccggaaaaat

SEQ ID NO: 93607 - DNA, 19 bp, Homo sapiens
  siRNA target sequence for MYO9A (NM_006901.1,2588-2606).
gggcatgaatgctctaaat

SEQ ID NO: 93608 - DNA, 19 bp, Homo sapiens
  siRNA target sequence for MYO9A (NM_006901.1,2590-2608).
gcatgaatgctctaaatga

SEQ ID NO: 93609 - DNA, 19 bp, Homo sapiens
  siRNA target sequence for MYO9A (NM_006901.1,2594-2612).
gaatgctctaaatgaaaaa

SEQ ID NO: 93610 - DNA, 19 bp, Homo sapiens
  siRNA target sequence for MYO9A (NM_006901.1,2616-2634).
caacatgatacatttgata

SEQ ID NO: 93611 - DNA, 19 bp, Homo sapiens
  siRNA target sequence for MYO9A (NM_006901.1,2661-2679).
cgccagagcagactatcaa

SEQ ID NO: 93612 - DNA, 19 bp, Homo sapiens
  siRNA target sequence for MYO9A (NM_006901.1,2663-2681).
ccagagcagactatcaagt

SEQ ID NO: 93613 - DNA, 19 bp, Homo sapiens
  siRNA target sequence for MYO9A (NM_006901.1,2684-2702).
cacctccttgcttgataaa

SEQ ID NO: 93614 - DNA, 19 bp, Homo sapiens
  siRNA target sequence for MYO9A (NM_006901.1,2687-2705).
ctccttgcttgataaagat

SEQ ID NO: 93615 - DNA, 19 bp, Homo sapiens
  siRNA target sequence for MYO9A (NM_006901.1,2741-2759).
ggagagagcccatggaatt

SEQ ID NO: 93616 - DNA, 19 bp, Homo sapiens
  siRNA target sequence for MYO9A (NM_006901.1,2755-2773).
gaattctcacgagaaacaa

SEQ ID NO: 93617 - DNA, 19 bp, Homo sapiens
  siRNA target sequence for MYO9A (NM_006901.1,2800-2818).
caaagcacttgctagaagt

SEQ ID NO: 93618 - DNA, 19 bp, Homo sapiens
  siRNA target sequence for MYO9A (NM_006901.1,2850-2868).
ctacaagatcgcattacca

SEQ ID NO: 93619 - DNA, 19 bp, Homo sapiens
  siRNA target sequence for MYO9A (NM_006901.1,2872-2890).
ctcttcttcatttacacaa

SEQ ID NO: 93620 - DNA, 19 bp, Homo sapiens
  siRNA target sequence for MYO9A (NM_006901.1,2918-2936).
ccagtttcaggcatcatta

SEQ ID NO: 93621 - DNA, 19 bp, Homo sapiens
  siRNA target sequence for MYO9A (NM_006901.1,2919-2937).
cagtttcaggcatcattaa

SEQ ID NO: 93622 - DNA, 19 bp, Homo sapiens
  siRNA target sequence for MYO9A (NM_006901.1,2958-2976).
ggtcaagcagaaccatatt

SEQ ID NO: 93623 - DNA, 19 bp, Homo sapiens
  siRNA target sequence for MYO9A (NM_006901.1,2959-2977).
gtcaagcagaaccatattt

SEQ ID NO: 93624 - DNA, 19 bp, Homo sapiens
  siRNA target sequence for MYO9A (NM_006901.1,2965-2983).
cagaaccatattttgtaaa

SEQ ID NO: 93625 - DNA, 19 bp, Homo sapiens
  siRNA target sequence for MYO9A (NM_006901.1,3003-3021).
gaaaagctgcccttaaggt

SEQ ID NO: 93626 - DNA, 19 bp, Homo sapiens
  siRNA target sequence for MYO9A (NM_006901.1,3058-3076).
ccgggatgctggaaacagt

SEQ ID NO: 93627 - DNA, 19 bp, Homo sapiens
  siRNA target sequence for MYO9A (NM_006901.1,3091-3109).
caggatacagctccaaata

SEQ ID NO: 93628 - DNA, 19 bp, Homo sapiens
  siRNA target sequence for MYO9A (NM_006901.1,3093-3111).
ggatacagctccaaatatt

SEQ ID NO: 93629 - DNA, 19 bp, Homo sapiens
  siRNA target sequence for MYO9A (NM_006901.1,3141-3159).
gtacttcttccccgaaata

SEQ ID NO: 93630 - DNA, 19 bp, Homo sapiens
  siRNA target sequence for MYO9A (NM_006901.1,3144-3162).
cttcttccccgaaatatta

SEQ ID NO: 93631 - DNA, 19 bp, Homo sapiens
  siRNA target sequence for MYO9A (NM_006901.1,3197-3215).
gaaaataaatcttaatcca

SEQ ID NO: 93632 - DNA, 19 bp, Homo sapiens
  siRNA target sequence for MYO9A (NM_006901.1,3260-3278).
ggaacgacagcacttacaa

SEQ ID NO: 93633 - DNA, 19 bp, Homo sapiens
  siRNA target sequence for MYO9A (NM_006901.1,3265-3283).
gacagcacttacaagatct

SEQ ID NO: 93634 - DNA, 19 bp, Homo sapiens
  siRNA target sequence for MYO9A (NM_006901.1,3296-3314).
ggtgctccgcagaatcata

SEQ ID NO: 93635 - DNA, 19 bp, Homo sapiens
  siRNA target sequence for MYO9A (NM_006901.1,3297-3315).
gtgctccgcagaatcatat

SEQ ID NO: 93636 - DNA, 19 bp, Homo sapiens
  siRNA target sequence for MYO9A (NM_006901.1,3300-3318).
ctccgcagaatcatattgt

SEQ ID NO: 93637 - DNA, 19 bp, Homo sapiens
  siRNA target sequence for MYO9A (NM_006901.1,3366-3384).
ctgagacaagcatctgtta

SEQ ID NO: 93638 - DNA, 19 bp, Homo sapiens
  siRNA target sequence for MYO9A (NM_006901.1,3379-3397).
ctgttattatccagagatt

SEQ ID NO: 93639 - DNA, 19 bp, Homo sapiens
  siRNA target sequence for MYO9A (NM_006901.1,3381-3399).
gttattatccagagattct

SEQ ID NO: 93640 - DNA, 19 bp, Homo sapiens
  siRNA target sequence for MYO9A (NM_006901.1,3398-3416).
ctggaggaattacctaaat

SEQ ID NO: 93641 - DNA, 19 bp, Homo sapiens
  siRNA target sequence for MYO9A (NM_006901.1,3400-3418).
ggaggaattacctaaatca

SEQ ID NO: 93642 - DNA, 19 bp, Homo sapiens
  siRNA target sequence for MYO9A (NM_006901.1,3403-3421).
ggaattacctaaatcagaa

SEQ ID NO: 93643 - DNA, 19 bp, Homo sapiens
  siRNA target sequence for MYO9A (NM_006901.1,3535-3553).
gggctgcagccatcgttat

SEQ ID NO: 93644 - DNA, 19 bp, Homo sapiens
  siRNA target sequence for MYO9A (NM_006901.1,3538-3556).
ctgcagccatcgttatcca

SEQ ID NO: 93645 - DNA, 19 bp, Homo sapiens
  siRNA target sequence for MYO9A (NM_006901.1,3584-3602).
caggcacatggctgctatt

SEQ ID NO: 93646 - DNA, 19 bp, Homo sapiens
  siRNA target sequence for MYO9A (NM_006901.1,3588-3606).
cacatggctgctatttgca

SEQ ID NO: 93647 - DNA, 19 bp, Homo sapiens
  siRNA target sequence for MYO9A (NM_006901.1,3643-3661).
ggtaccaagaacaaaggaa

SEQ ID NO: 93648 - DNA, 19 bp, Homo sapiens
  siRNA target sequence for MYO9A (NM_006901.1,3759-3777).
gttggattggtgaatatta

SEQ ID NO: 93649 - DNA, 19 bp, Homo sapiens
  siRNA target sequence for MYO9A (NM_006901.1,3781-3799).
gatatggatctctggaaat

SEQ ID NO: 93650 - DNA, 19 bp, Homo sapiens
  siRNA target sequence for MYO9A (NM_006901.1,3825-3843).
gaggattgttcttttgaca

SEQ ID NO: 93651 - DNA, 19 bp, Homo sapiens
  siRNA target sequence for MYO9A (NM_006901.1,3891-3909).
cgaattagccgtgaaagtt

SEQ ID NO: 93652 - DNA, 19 bp, Homo sapiens
  siRNA target sequence for MYO9A (NM_006901.1,4077-4095).
gaactagagcaagctatat

SEQ ID NO: 93653 - DNA, 19 bp, Homo sapiens
  siRNA target sequence for MYO9A (NM_006901.1,4085-4103).
gcaagctatatttagctta

SEQ ID NO: 93654 - DNA, 19 bp, Homo sapiens
  siRNA target sequence for MYO9A (NM_006901.1,4100-4118).
cttagaattgctgaaagtt

SEQ ID NO: 93655 - DNA, 19 bp, Homo sapiens
  siRNA target sequence for MYO9A (NM_006901.1,4119-4137).
cgttctcttggtggtattt

SEQ ID NO: 93656 - DNA, 19 bp, Homo sapiens
  siRNA target sequence for MYO9A (NM_006901.1,4152-4170).
cgcagatggtctacagaat

SEQ ID NO: 93657 - DNA, 19 bp, Homo sapiens
  siRNA target sequence for MYO9A (NM_006901.1,4198-4216).
ggggtacacctgatagtga

SEQ ID NO: 93658 - DNA, 19 bp, Homo sapiens
  siRNA target sequence for MYO9A (NM_006901.1,4311-4329).
ccatcacctaagatatcca

SEQ ID NO: 93659 - DNA, 19 bp, Homo sapiens
  siRNA target sequence for MYO9A (NM_006901.1,4322-4340).
gatatccagcagtccaaaa

SEQ ID NO: 93660 - DNA, 19 bp, Homo sapiens
  siRNA target sequence for MYO9A (NM_006901.1,4360-4378).
ccctcagtgcctcaaatga

SEQ ID NO: 93661 - DNA, 19 bp, Homo sapiens
  siRNA target sequence for MYO9A (NM_006901.1,4381-4399).
ctagcagtgcagagcattt

SEQ ID NO: 93662 - DNA, 19 bp, Homo sapiens
  siRNA target sequence for MYO9A (NM_006901.1,4464-4482).
ctgaaagactccttcattt

SEQ ID NO: 93663 - DNA, 19 bp, Homo sapiens
  siRNA target sequence for MYO9A (NM_006901.1,4489-4507).
gtctacctactttttttta

SEQ ID NO: 93664 - DNA, 19 bp, Homo sapiens
  siRNA target sequence for MYO9A (NM_006901.1,4515-4533).
caacaagacccactgaaaa

SEQ ID NO: 93665 - DNA, 19 bp, Homo sapiens
  siRNA target sequence for MYO9A (NM_006901.1,4521-4539).
gacccactgaaaacaaatt

SEQ ID NO: 93666 - DNA, 19 bp, Homo sapiens
  siRNA target sequence for MYO9A (NM_006901.1,4540-4558).
cccaactagacacaagtat

SEQ ID NO: 93667 - DNA, 19 bp, Homo sapiens
  siRNA target sequence for MYO9A (NM_006901.1,4545-4563).
ctagacacaagtatccaaa

SEQ ID NO: 93668 - DNA, 19 bp, Homo sapiens
  siRNA target sequence for MYO9A (NM_006901.1,4599-4617).
gaagctcttactttggata

SEQ ID NO: 93669 - DNA, 19 bp, Homo sapiens
  siRNA target sequence for MYO9A (NM_006901.1,4602-4620).
gctcttactttggatatca

SEQ ID NO: 93670 - DNA, 19 bp, Homo sapiens
  siRNA target sequence for MYO9A (NM_006901.1,4603-4621).
ctcttactttggatatcaa

SEQ ID NO: 93671 - DNA, 19 bp, Homo sapiens
  siRNA target sequence for MYO9A (NM_006901.1,4622-4640).
cagggaaactagaaggtat

SEQ ID NO: 93672 - DNA, 19 bp, Homo sapiens
  siRNA target sequence for MYO9A (NM_006901.1,4648-4666).
caggaaaagatcagattgt

SEQ ID NO: 93673 - DNA, 19 bp, Homo sapiens
  siRNA target sequence for MYO9A (NM_006901.1,4709-4727).
gttagaaaagctaaacact

SEQ ID NO: 93674 - DNA, 19 bp, Homo sapiens
  siRNA target sequence for MYO9A (NM_006901.1,4787-4805).
gattcgccagcaaacagat

SEQ ID NO: 93675 - DNA, 19 bp, Homo sapiens
  siRNA target sequence for MYO9A (NM_006901.1,4792-4810).
gccagcaaacagatatttt

SEQ ID NO: 93676 - DNA, 19 bp, Homo sapiens
  siRNA target sequence for MYO9A (NM_006901.1,4872-4890).
gcaccatcttcctatcagt

SEQ ID NO: 93677 - DNA, 19 bp, Homo sapiens
  siRNA target sequence for MYO9A (NM_006901.1,4876-4894).
catcttcctatcagtcaaa

SEQ ID NO: 93678 - DNA, 19 bp, Homo sapiens
  siRNA target sequence for MYO9A (NM_006901.1,4920-4938).
ctcctcagcttaaatacct

SEQ ID NO: 93679 - DNA, 19 bp, Homo sapiens
  siRNA target sequence for MYO9A (NM_006901.1,4959-4977).
gtactggggtccctatcat

SEQ ID NO: 93680 - DNA, 19 bp, Homo sapiens
  siRNA target sequence for MYO9A (NM_006901.1,4962-4980).
ctggggtccctatcattaa

SEQ ID NO: 93681 - DNA, 19 bp, Homo sapiens
  siRNA target sequence for MYO9A (NM_006901.1,4966-4984).
ggtccctatcattaaaaga

SEQ ID NO: 93682 - DNA, 19 bp, Homo sapiens
  siRNA target sequence for MYO9A (NM_006901.1,4967-4985).
gtccctatcattaaaagat

SEQ ID NO: 93683 - DNA, 19 bp, Homo sapiens
  siRNA target sequence for MYO9A (NM_006901.1,4989-5007).
gctcttgcccaaaaagaca

SEQ ID NO: 93684 - DNA, 19 bp, Homo sapiens
  siRNA target sequence for MYO9A (NM_006901.1,5038-5056).
gacctgtcaccgtgttctt

SEQ ID NO: 93685 - DNA, 19 bp, Homo sapiens
  siRNA target sequence for MYO9A (NM_006901.1,5083-5101).
ctagtactgtcaaggaatt

SEQ ID NO: 93686 - DNA, 19 bp, Homo sapiens
  siRNA target sequence for MYO9A (NM_006901.1,5129-5147).
gctgaatgtagcctgtaaa

SEQ ID NO: 93687 - DNA, 19 bp, Homo sapiens
  siRNA target sequence for MYO9A (NM_006901.1,5150-5168).
ctcaaataatcgcatttca

SEQ ID NO: 93688 - DNA, 19 bp, Homo sapiens
  siRNA target sequence for MYO9A (NM_006901.1,5195-5213).
gtcttacagccacaattct

SEQ ID NO: 93689 - DNA, 19 bp, Homo sapiens
  siRNA target sequence for MYO9A (NM_006901.1,5238-5256).
gctaggcccattttcttca

SEQ ID NO: 93690 - DNA, 19 bp, Homo sapiens
  siRNA target sequence for MYO9A (NM_006901.1,5382-5400).
gagacatcacagcgatttt

SEQ ID NO: 93691 - DNA, 19 bp, Homo sapiens
  siRNA target sequence for MYO9A (NM_006901.1,5393-5411).
gcgattttcgtcagttgat

SEQ ID NO: 93692 - DNA, 19 bp, Homo sapiens
  siRNA target sequence for MYO9A (NM_006901.1,5418-5436).
gcaaaacttcataagacta

SEQ ID NO: 93693 - DNA, 19 bp, Homo sapiens
  siRNA target sequence for MYO9A (NM_006901.1,5440-5458).
ctcaaggagagattaccaa

SEQ ID NO: 93694 - DNA, 19 bp, Homo sapiens
  siRNA target sequence for MYO9A (NM_006901.1,5478-5496).
gcttcagattcagatataa

SEQ ID NO: 93695 - DNA, 19 bp, Homo sapiens
  siRNA target sequence for MYO9A (NM_006901.1,5502-5520).
cagagagctaagatgagat

SEQ ID NO: 93696 - DNA, 19 bp, Homo sapiens
  siRNA target sequence for MYO9A (NM_006901.1,5538-5556).
caaggggagaagaagacta

SEQ ID NO: 93697 - DNA, 19 bp, Homo sapiens
  siRNA target sequence for MYO9A (NM_006901.1,5615-5633).
gattccagctcatcagttt

SEQ ID NO: 93698 - DNA, 19 bp, Homo sapiens
  siRNA target sequence for MYO9A (NM_006901.1,5630-5648).
gtttccagatgaattagct

SEQ ID NO: 93699 - DNA, 19 bp, Homo sapiens
  siRNA target sequence for MYO9A (NM_006901.1,5689-5707).
gcagttgccggaaggaatt

SEQ ID NO: 93700 - DNA, 19 bp, Homo sapiens
  siRNA target sequence for MYO9A (NM_006901.1,5748-5766).
cgaagtgtgaagattagca

SEQ ID NO: 93701 - DNA, 19 bp, Homo sapiens
  siRNA target sequence for MYO9A (NM_006901.1,5818-5836).
caagtgtcagtgatttaaa

SEQ ID NO: 93702 - DNA, 19 bp, Homo sapiens
  siRNA target sequence for MYO9A (NM_006901.1,5839-5857).
gcatggatgaatttcttct

SEQ ID NO: 93703 - DNA, 19 bp, Homo sapiens
  siRNA target sequence for MYO9A (NM_006901.1,5864-5882).
ggtgaatgacctagataat

SEQ ID NO: 93704 - DNA, 19 bp, Homo sapiens
  siRNA target sequence for MYO9A (NM_006901.1,5992-6010).
ggaaaagcatacggtataa

SEQ ID NO: 93705 - DNA, 19 bp, Homo sapiens
  siRNA target sequence for MYO9A (NM_006901.1,6014-6032).
cctctatgcactatttgaa

SEQ ID NO: 93706 - DNA, 19 bp, Homo sapiens
  siRNA target sequence for MYO9A (NM_006901.1,6094-6112).
gagtttgggtcaacacttt

SEQ ID NO: 93707 - DNA, 19 bp, Homo sapiens
  siRNA target sequence for MYO9A (NM_006901.1,6096-6114).
gtttgggtcaacactttta

SEQ ID NO: 93708 - DNA, 19 bp, Homo sapiens
  siRNA target sequence for MYO9A (NM_006901.1,6141-6159).
gaattcaagacttcagatt

SEQ ID NO: 93709 - DNA, 19 bp, Homo sapiens
  siRNA target sequence for MYO9A (NM_006901.1,6383-6401).
gtgctctaaaaagtatgat

SEQ ID NO: 93710 - DNA, 19 bp, Homo sapiens
  siRNA target sequence for MYO9A (NM_006901.1,6418-6436).
gacaatttggggttgaact

SEQ ID NO: 93711 - DNA, 19 bp, Homo sapiens
  siRNA target sequence for MYO9A (NM_006901.1,6539-6557).
gtctggttcgactaataaa

SEQ ID NO: 93712 - DNA, 19 bp, Homo sapiens
  siRNA target sequence for MYO9A (NM_006901.1,6541-6559).
ctggttcgactaataaaat

SEQ ID NO: 93713 - DNA, 19 bp, Homo sapiens
  siRNA target sequence for MYO9A (NM_006901.1,6543-6561).
ggttcgactaataaaatca

SEQ ID NO: 93714 - DNA, 19 bp, Homo sapiens
  siRNA target sequence for MYO9A (NM_006901.1,6544-6562).
gttcgactaataaaatcaa

SEQ ID NO: 93715 - DNA, 19 bp, Homo sapiens
  siRNA target sequence for MYO9A (NM_006901.1,6566-6584).
gcttcggcagggtctagat

SEQ ID NO: 93716 - DNA, 19 bp, Homo sapiens
  siRNA target sequence for MYO9A (NM_006901.1,6567-6585).
cttcggcagggtctagata

SEQ ID NO: 93717 - DNA, 19 bp, Homo sapiens
  siRNA target sequence for MYO9A (NM_006901.1,6571-6589).
ggcagggtctagatacaga

SEQ ID NO: 93718 - DNA, 19 bp, Homo sapiens
  siRNA target sequence for MYO9A (NM_006901.1,6624-6642).
cacgtcattgcaagtgtat

SEQ ID NO: 93719 - DNA, 19 bp, Homo sapiens
  siRNA target sequence for MYO9A (NM_006901.1,6627-6645).
gtcattgcaagtgtattca

SEQ ID NO: 93720 - DNA, 19 bp, Homo sapiens
  siRNA target sequence for MYO9A (NM_006901.1,6773-6791).
ctcccgaactcatctcaat

SEQ ID NO: 93721 - DNA, 19 bp, Homo sapiens
  siRNA target sequence for MYO9A (NM_006901.1,6778-6796).
gaactcatctcaatacact

SEQ ID NO: 93722 - DNA, 19 bp, Homo sapiens
  siRNA target sequence for MYO9A (NM_006901.1,6793-6811).
cactggaacgcctcatctt

SEQ ID NO: 93723 - DNA, 19 bp, Homo sapiens
  siRNA target sequence for MYO9A (NM_006901.1,6797-6815).
ggaacgcctcatctttcat

SEQ ID NO: 93724 - DNA, 19 bp, Homo sapiens
  siRNA target sequence for MYO9A (NM_006901.1,6829-6847).
ctctgcaggaagacactaa

SEQ ID NO: 93725 - DNA, 19 bp, Homo sapiens
  siRNA target sequence for MYO9A (NM_006901.1,6833-6851).
gcaggaagacactaatcga

SEQ ID NO: 93726 - DNA, 19 bp, Homo sapiens
  siRNA target sequence for MYO9A (NM_006901.1,6834-6852).
caggaagacactaatcgaa

SEQ ID NO: 93727 - DNA, 19 bp, Homo sapiens
  siRNA target sequence for MYO9A (NM_006901.1,6849-6867).
cgaatgtctgctaatgctt

SEQ ID NO: 93728 - DNA, 19 bp, Homo sapiens
  siRNA target sequence for MYO9A (NM_006901.1,6911-6929).
cactgacccactacaaagt

SEQ ID NO: 93729 - DNA, 19 bp, Homo sapiens
  siRNA target sequence for MYO9A (NM_006901.1,6955-6973).
cttgtgtggaactgattgt

SEQ ID NO: 93730 - DNA, 19 bp, Homo sapiens
  siRNA target sequence for MYO9A (NM_006901.1,6995-7013).
caaggctcgtctcaaagat

SEQ ID NO: 93731 - DNA, 19 bp, Homo sapiens
  siRNA target sequence for MYO9A (NM_006901.1,7002-7020).
cgtctcaaagatatcagta

SEQ ID NO: 93732 - DNA, 19 bp, Homo sapiens
  siRNA target sequence for MYO9A (NM_006901.1,7079-7097).
gggaaaggggcgtattcgt

SEQ ID NO: 93733 - DNA, 19 bp, Homo sapiens
  siRNA target sequence for MYO9A (NM_006901.1,7090-7108).
gtattcgtcgaggaaacta

SEQ ID NO: 93734 - DNA, 19 bp, Homo sapiens
  siRNA target sequence for MYO9A (NM_006901.1,7117-7135).
catcgtctcctgttgtagt

SEQ ID NO: 93735 - DNA, 19 bp, Homo sapiens
  siRNA target sequence for MYO9A (NM_006901.1,7484-7502).
gttgcgaaagcaacttaaa

SEQ ID NO: 93736 - DNA, 19 bp, Homo sapiens
  siRNA target sequence for MYO9A (NM_006901.1,7556-7574).
gtctaacacggcatcatct

SEQ ID NO: 93737 - DNA, 19 bp, Homo sapiens
  siRNA target sequence for MYO9A (NM_006901.1,7622-7640).
ccgagctgcctcaggtaat

SEQ ID NO: 93738 - DNA, 19 bp, Homo sapiens
  siRNA target sequence for MYO9A (NM_006901.1,7689-7707).
gacaagcctcagttcatca

SEQ ID NO: 93739 - DNA, 19 bp, Homo sapiens
  siRNA target sequence for MYO9A (NM_006901.1,7724-7742).
cccggaaaagggcaaacaa

SEQ ID NO: 93740 - DNA, 19 bp, Homo sapiens
  siRNA target sequence for MYO9A (NM_006901.1,7725-7743).
ccggaaaagggcaaacaaa

SEQ ID NO: 93741 - DNA, 19 bp, Homo sapiens
  siRNA target sequence for MYO9A (NM_006901.1,7802-7820).
catgtctggccgcagaaaa

SEQ ID NO: 93742 - DNA, 19 bp, Homo sapiens
  siRNA target sequence for MYO9A (NM_006901.1,7805-7823).
gtctggccgcagaaaaact

SEQ ID NO: 93743 - DNA, 19 bp, Homo sapiens
  siRNA target sequence for MYO9B (NM_004145.2,168-186).
gctggacggcaccaaatgt

SEQ ID NO: 93744 - DNA, 19 bp, Homo sapiens
  siRNA target sequence for MYO9B (NM_004145.2,169-187).
ctggacggcaccaaatgtt

SEQ ID NO: 93745 - DNA, 19 bp, Homo sapiens
  siRNA target sequence for MYO9B (NM_004145.2,340-358).
gcagatggaaccatcaagt

SEQ ID NO: 93746 - DNA, 19 bp, Homo sapiens
  siRNA target sequence for MYO9B (NM_004145.2,341-359).
cagatggaaccatcaagta

SEQ ID NO: 93747 - DNA, 19 bp, Homo sapiens
  siRNA target sequence for MYO9B (NM_004145.2,350-368).
ccatcaagtacgtgcatat

SEQ ID NO: 93748 - DNA, 19 bp, Homo sapiens
  siRNA target sequence for MYO9B (NM_004145.2,506-524).
gcttcctgcaacaaaagat

SEQ ID NO: 93749 - DNA, 19 bp, Homo sapiens
  siRNA target sequence for MYO9B (NM_004145.2,553-571).
gccatcaacccctttaagt

SEQ ID NO: 93750 - DNA, 19 bp, Homo sapiens
  siRNA target sequence for MYO9B (NM_004145.2,554-572).
ccatcaacccctttaagtt

SEQ ID NO: 93751 - DNA, 19 bp, Homo sapiens
  siRNA target sequence for MYO9B (NM_004145.2,589-607).
cccaagtacgtgaagatgt

SEQ ID NO: 93752 - DNA, 19 bp, Homo sapiens
  siRNA target sequence for MYO9B (NM_004145.2,590-608).
ccaagtacgtgaagatgta

SEQ ID NO: 93753 - DNA, 19 bp, Homo sapiens
  siRNA target sequence for MYO9B (NM_004145.2,938-956).
ctgtcgtcgagaaatatct

SEQ ID NO: 93754 - DNA, 19 bp, Homo sapiens
  siRNA target sequence for MYO9B (NM_004145.2,996-1014).
gaggaactaccatgtgttt

SEQ ID NO: 93755 - DNA, 19 bp, Homo sapiens
  siRNA target sequence for MYO9B (NM_004145.2,999-1017).
gaactaccatgtgttttat

SEQ ID NO: 93756 - DNA, 19 bp, Homo sapiens
  siRNA target sequence for MYO9B (NM_004145.2,1062-1080).
gctcaagcagcctgaagat

SEQ ID NO: 93757 - DNA, 19 bp, Homo sapiens
  siRNA target sequence for MYO9B (NM_004145.2,1063-1081).
ctcaagcagcctgaagatt

SEQ ID NO: 93758 - DNA, 19 bp, Homo sapiens
  siRNA target sequence for MYO9B (NM_004145.2,1065-1083).
caagcagcctgaagattat

SEQ ID NO: 93759 - DNA, 19 bp, Homo sapiens
  siRNA target sequence for MYO9B (NM_004145.2,1098-1116).
gcataacttgaagattgaa

SEQ ID NO: 93760 - DNA, 19 bp, Homo sapiens
  siRNA target sequence for MYO9B (NM_004145.2,1234-1252).
ggcaacgtcacttataaga

SEQ ID NO: 93761 - DNA, 19 bp, Homo sapiens
  siRNA target sequence for MYO9B (NM_004145.2,1379-1397).
ccgtcaacgacaagcttat

SEQ ID NO: 93762 - DNA, 19 bp, Homo sapiens
  siRNA target sequence for MYO9B (NM_004145.2,1691-1709).
ggatcacgtggcacaacat

SEQ ID NO: 93763 - DNA, 19 bp, Homo sapiens
  siRNA target sequence for MYO9B (NM_004145.2,1707-1725).
catcggctacacagacaat

SEQ ID NO: 93764 - DNA, 19 bp, Homo sapiens
  siRNA target sequence for MYO9B (NM_004145.2,1840-1858).
caacatgaggacaataagt

SEQ ID NO: 93765 - DNA, 19 bp, Homo sapiens
  siRNA target sequence for MYO9B (NM_004145.2,1908-1926).
cgcagggaaggtgaaatat

SEQ ID NO: 93766 - DNA, 19 bp, Homo sapiens
  siRNA target sequence for MYO9B (NM_004145.2,1910-1928).
cagggaaggtgaaatatca

SEQ ID NO: 93767 - DNA, 19 bp, Homo sapiens
  siRNA target sequence for MYO9B (NM_004145.2,2198-2216).
ccccttcggaaaaacttta

SEQ ID NO: 93768 - DNA, 19 bp, Homo sapiens
  siRNA target sequence for MYO9B (NM_004145.2,2212-2230).
ctttaccgcgatttgcata

SEQ ID NO: 93769 - DNA, 19 bp, Homo sapiens
  siRNA target sequence for MYO9B (NM_004145.2,2217-2235).
ccgcgatttgcataaccaa

SEQ ID NO: 93770 - DNA, 19 bp, Homo sapiens
  siRNA target sequence for MYO9B (NM_004145.2,2218-2236).
cgcgatttgcataaccaaa

SEQ ID NO: 93771 - DNA, 19 bp, Homo sapiens
  siRNA target sequence for MYO9B (NM_004145.2,2221-2239).
gatttgcataaccaaatga

SEQ ID NO: 93772 - DNA, 19 bp, Homo sapiens
  siRNA target sequence for MYO9B (NM_004145.2,2353-2371).
caaaagcagatcattccaa

SEQ ID NO: 93773 - DNA, 19 bp, Homo sapiens
  siRNA target sequence for MYO9B (NM_004145.2,2662-2680).
gggtacagcgccaagtaca

SEQ ID NO: 93774 - DNA, 19 bp, Homo sapiens
  siRNA target sequence for MYO9B (NM_004145.2,3404-3422).
ctgaaagtcacgagaaagt

SEQ ID NO: 93775 - DNA, 19 bp, Homo sapiens
  siRNA target sequence for MYO9B (NM_004145.2,4136-4154).
gagagcgaagtgcgaaaaa

SEQ ID NO: 93776 - DNA, 19 bp, Homo sapiens
  siRNA target sequence for MYO9B (NM_004145.2,4220-4238).
gctctcaggtcgactctaa

SEQ ID NO: 93777 - DNA, 19 bp, Homo sapiens
  siRNA target sequence for MYO9B (NM_004145.2,4221-4239).
ctctcaggtcgactctaaa

SEQ ID NO: 93778 - DNA, 19 bp, Homo sapiens
  siRNA target sequence for MYO9B (NM_004145.2,4231-4249).
gactctaaatccacgttta

SEQ ID NO: 93779 - DNA, 19 bp, Homo sapiens
  siRNA target sequence for MYO9B (NM_004145.2,4255-4273).
ctttttctgcataaaacca

SEQ ID NO: 93780 - DNA, 19 bp, Homo sapiens
  siRNA target sequence for MYO9B (NM_004145.2,4439-4457).
ggaagaagaaccgaaatgt

SEQ ID NO: 93781 - DNA, 19 bp, Homo sapiens
  siRNA target sequence for MYO9B (NM_004145.2,4446-4464).
gaaccgaaatgtcaagatt

SEQ ID NO: 93782 - DNA, 19 bp, Homo sapiens
  siRNA target sequence for MYO9B (NM_004145.2,4548-4566).
gttcctgctcaacaagata

SEQ ID NO: 93783 - DNA, 19 bp, Homo sapiens
  siRNA target sequence for MYO9B (NM_004145.2,4592-4610).
ccattgagagcttgtttat

SEQ ID NO: 93784 - DNA, 19 bp, Homo sapiens
  siRNA target sequence for MYO9B (NM_004145.2,4626-4644).
gttcaggagcaacatcaaa

SEQ ID NO: 93785 - DNA, 19 bp, Homo sapiens
  siRNA target sequence for MYO9B (NM_004145.2,4631-4649).
ggagcaacatcaaaacgat

SEQ ID NO: 93786 - DNA, 19 bp, Homo sapiens
  siRNA target sequence for MYO9B (NM_004145.2,4907-4925).
ccagctaccaggttagcat

SEQ ID NO: 93787 - DNA, 19 bp, Homo sapiens
  siRNA target sequence for MYO9B (NM_004145.2,4942-4960).
cagtgcctctcctatatct

SEQ ID NO: 93788 - DNA, 19 bp, Homo sapiens
  siRNA target sequence for MYO9B (NM_004145.2,5013-5031).
gaagtgcgtgcacaagatt

SEQ ID NO: 93789 - DNA, 19 bp, Homo sapiens
  siRNA target sequence for MYO9B (NM_004145.2,5881-5899).
cgggaaaaggagattctca

SEQ ID NO: 93790 - DNA, 19 bp, Homo sapiens
  siRNA target sequence for NADSYN1 (NM_018161.3,149-167).
gggcaatttgcaaagaatt

SEQ ID NO: 93791 - DNA, 19 bp, Homo sapiens
  siRNA target sequence for NADSYN1 (NM_018161.3,242-260).
cggatgttgggatcattat

SEQ ID NO: 93792 - DNA, 19 bp, Homo sapiens
  siRNA target sequence for NADSYN1 (NM_018161.3,243-261).
ggatgttgggatcattatt

SEQ ID NO: 93793 - DNA, 19 bp, Homo sapiens
  siRNA target sequence for NADSYN1 (NM_018161.3,244-262).
gatgttgggatcattatta

SEQ ID NO: 93794 - DNA, 19 bp, Homo sapiens
  siRNA target sequence for NADSYN1 (NM_018161.3,247-265).
gttgggatcattattacga

SEQ ID NO: 93795 - DNA, 19 bp, Homo sapiens
  siRNA target sequence for NADSYN1 (NM_018161.3,275-293).
cctcttgcactcgtttcaa

SEQ ID NO: 93796 - DNA, 19 bp, Homo sapiens
  siRNA target sequence for NADSYN1 (NM_018161.3,321-339).
gtcactcaggacatcatct

SEQ ID NO: 93797 - DNA, 19 bp, Homo sapiens
  siRNA target sequence for NADSYN1 (NM_018161.3,366-384).
cgaaacgtccgctacaact

SEQ ID NO: 93798 - DNA, 19 bp, Homo sapiens
  siRNA target sequence for NADSYN1 (NM_018161.3,377-395).
ctacaactgcagagtgata

SEQ ID NO: 93799 - DNA, 19 bp, Homo sapiens
  siRNA target sequence for NADSYN1 (NM_018161.3,431-449).
gatggccttggccaatgaa

SEQ ID NO: 93800 - DNA, 19 bp, Homo sapiens
  siRNA target sequence for NADSYN1 (NM_018161.3,497-515).
gcacacagaggagtacttt

SEQ ID NO: 93801 - DNA, 19 bp, Homo sapiens
  siRNA target sequence for NADSYN1 (NM_018161.3,660-678).
gatggcgtggagatcatca

SEQ ID NO: 93802 - DNA, 19 bp, Homo sapiens
  siRNA target sequence for NADSYN1 (NM_018161.3,724-742).
gggtggatctcgtgactat

SEQ ID NO: 93803 - DNA, 19 bp, Homo sapiens
  siRNA target sequence for NADSYN1 (NM_018161.3,751-769).
gcaagaacggtgggattta

SEQ ID NO: 93804 - DNA, 19 bp, Homo sapiens
  siRNA target sequence for NADSYN1 (NM_018161.3,929-947).
ctacagggcggagatttca

SEQ ID NO: 93805 - DNA, 19 bp, Homo sapiens
  siRNA target sequence for NADSYN1 (NM_018161.3,932-950).
cagggcggagatttcatct

SEQ ID NO: 93806 - DNA, 19 bp, Homo sapiens
  siRNA target sequence for NADSYN1 (NM_018161.3,1223-1241).
ggccgtgaggagtggaaat

SEQ ID NO: 93807 - DNA, 19 bp, Homo sapiens
  siRNA target sequence for NADSYN1 (NM_018161.3,1559-1577).
ggtcctcgcctatctgttt

SEQ ID NO: 93808 - DNA, 19 bp, Homo sapiens
  siRNA target sequence for NADSYN1 (NM_018161.3,1976-1994).
gagacaggtcgctgacaaa

SEQ ID NO: 93809 - DNA, 19 bp, Homo sapiens
  siRNA target sequence for NADSYN1 (NM_018161.3,1978-1996).
gacaggtcgctgacaaagt

SEQ ID NO: 93810 - DNA, 19 bp, Homo sapiens
  siRNA target sequence for NADSYN1 (NM_018161.3,1980-1998).
caggtcgctgacaaagtga

SEQ ID NO: 93811 - DNA, 19 bp, Homo sapiens
  siRNA target sequence for NADSYN1 (NM_018161.3,2056-2074).
cgtaccacgccgagaacta

SEQ ID NO: 93812 - DNA, 19 bp, Homo sapiens
  siRNA target sequence for NADSYN1 (NM_018161.3,2093-2111).
gtttgatctgcgaccattt

SEQ ID NO: 93813 - DNA, 19 bp, Homo sapiens
  siRNA target sequence for NADSYN1 (NM_018161.3,2097-2115).
gatctgcgaccatttctgt

SEQ ID NO: 93814 - DNA, 19 bp, Homo sapiens
  siRNA target sequence for NADSYN1 (NM_018161.3,2103-2121).
cgaccatttctgtacaaca

SEQ ID NO: 93815 - DNA, 19 bp, Homo sapiens
  siRNA target sequence for NADSYN1 (NM_018161.3,2106-2124).
ccatttctgtacaacacaa

SEQ ID NO: 93816 - DNA, 19 bp, Homo sapiens
  siRNA target sequence for NADSYN1 (NM_018161.3,2136-2154).
cagtttcggtgcatagaaa

SEQ ID NO: 93817 - DNA, 19 bp, Homo sapiens
  siRNA target sequence for NADSYN1 (NM_018161.3,2138-2156).
gtttcggtgcatagaaaat

SEQ ID NO: 93818 - DNA, 19 bp, Homo sapiens
  siRNA target sequence for NAGK (NM_017567.1,55-73).
cacgatccgaggtcctttt

SEQ ID NO: 93819 - DNA, 19 bp, Homo sapiens
  siRNA target sequence for NAGK (NM_017567.1,58-76).
gatccgaggtccttttagt

SEQ ID NO: 93820 - DNA, 19 bp, Homo sapiens
  siRNA target sequence for NAGK (NM_017567.1,308-326).
cctgagtgaaagctactta

SEQ ID NO: 93821 - DNA, 19 bp, Homo sapiens
  siRNA target sequence for NAGK (NM_017567.1,505-523).
cagtgaaaatagtgtttga

SEQ ID NO: 93822 - DNA, 19 bp, Homo sapiens
  siRNA target sequence for NAGK (NM_017567.1,540-558).
gaggcggctcctcatgata

SEQ ID NO: 93823 - DNA, 19 bp, Homo sapiens
  siRNA target sequence for NAGK (NM_017567.1,603-621).
gatcggctagggatactca

SEQ ID NO: 93824 - DNA, 19 bp, Homo sapiens
  siRNA target sequence for NAGK (NM_017567.1,629-647).
gtatagggactttgataaa

SEQ ID NO: 93825 - DNA, 19 bp, Homo sapiens
  siRNA target sequence for NAGK (NM_017567.1,662-680).
gttttgccggaaaattgca

SEQ ID NO: 93826 - DNA, 19 bp, Homo sapiens
  siRNA target sequence for NAGK (NM_017567.1,702-720).
cccctttcccgctatatct

SEQ ID NO: 93827 - DNA, 19 bp, Homo sapiens
  siRNA target sequence for NAGK (NM_017567.1,760-778).
cagtgttgcccgagattga

SEQ ID NO: 93828 - DNA, 19 bp, Homo sapiens
  siRNA target sequence for NAGK (NM_017567.1,785-803).
cttgttccagggcaagatt

SEQ ID NO: 93829 - DNA, 19 bp, Homo sapiens
  siRNA target sequence for NAGK (NM_017567.1,897-915).
caggctcagaacttcttct

SEQ ID NO: 93830 - DNA, 19 bp, Homo sapiens
  siRNA target sequence for NAGK (NM_017567.1,1021-1039).
ccattgccttctattccta

SEQ ID NO: 93831 - DNA, 19 bp, Homo sapiens
  siRNA target sequence for NALP1 (NM_014922.2,597-615).
gcttctgctcgccaataaa

SEQ ID NO: 93832 - DNA, 19 bp, Homo sapiens
  siRNA target sequence for NALP1 (NM_014922.2,687-705).
gtacctggtggctcagtat

SEQ ID NO: 93833 - DNA, 19 bp, Homo sapiens
  siRNA target sequence for NALP1 (NM_014922.2,1160-1178).
gaatttactacacagaaat

SEQ ID NO: 93834 - DNA, 19 bp, Homo sapiens
  siRNA target sequence for NALP1 (NM_014922.2,1413-1431).
gagaagctggcctgattat

SEQ ID NO: 93835 - DNA, 19 bp, Homo sapiens
  siRNA target sequence for NALP1 (NM_014922.2,1415-1433).
gaagctggcctgattatgt

SEQ ID NO: 93836 - DNA, 19 bp, Homo sapiens
  siRNA target sequence for NALP1 (NM_014922.2,1440-1458).
gaatcgaggacatttaatt

SEQ ID NO: 93837 - DNA, 19 bp, Homo sapiens
  siRNA target sequence for NALP1 (NM_014922.2,1445-1463).
gaggacatttaattgagat

SEQ ID NO: 93838 - DNA, 19 bp, Homo sapiens
  siRNA target sequence for NALP1 (NM_014922.2,1528-1546).
gctggaattgggaagtcaa

SEQ ID NO: 93839 - DNA, 19 bp, Homo sapiens
  siRNA target sequence for NALP1 (NM_014922.2,1664-1682).
ctgagctcatcggaaaaga

SEQ ID NO: 93840 - DNA, 19 bp, Homo sapiens
  siRNA target sequence for NALP1 (NM_014922.2,1692-1710).
cactccggctcccattaga

SEQ ID NO: 93841 - DNA, 19 bp, Homo sapiens
  siRNA target sequence for NALP1 (NM_014922.2,1743-1761).
catcctcgatggtgtagat

SEQ ID NO: 93842 - DNA, 19 bp, Homo sapiens
  siRNA target sequence for NALP1 (NM_014922.2,1983-2001).
ggaatatttctacagatat

SEQ ID NO: 93843 - DNA, 19 bp, Homo sapiens
  siRNA target sequence for NALP1 (NM_014922.2,2020-2038).
gcaattagagcctttaggt

SEQ ID NO: 93844 - DNA, 19 bp, Homo sapiens
  siRNA target sequence for NALP1 (NM_014922.2,2021-2039).
caattagagcctttaggtt

SEQ ID NO: 93845 - DNA, 19 bp, Homo sapiens
  siRNA target sequence for NALP1 (NM_014922.2,2029-2047).
gcctttaggttggtcaaat

SEQ ID NO: 93846 - DNA, 19 bp, Homo sapiens
  siRNA target sequence for NALP1 (NM_014922.2,2031-2049).
ctttaggttggtcaaatca

SEQ ID NO: 93847 - DNA, 19 bp, Homo sapiens
  siRNA target sequence for NALP1 (NM_014922.2,2163-2181).
cacaaccctctgtctacat

SEQ ID NO: 93848 - DNA, 19 bp, Homo sapiens
  siRNA target sequence for NALP1 (NM_014922.2,2169-2187).
cctctgtctacattacctt

SEQ ID NO: 93849 - DNA, 19 bp, Homo sapiens
  siRNA target sequence for NALP1 (NM_014922.2,2251-2269).
gagggcatctggcaaaaaa

SEQ ID NO: 93850 - DNA, 19 bp, Homo sapiens
  siRNA target sequence for NALP1 (NM_014922.2,2337-2355).
gaagatgggtattcttcaa

SEQ ID NO: 93851 - DNA, 19 bp, Homo sapiens
  siRNA target sequence for NALP1 (NM_014922.2,2414-2432).
cagcaatgtcctatgtctt

SEQ ID NO: 93852 - DNA, 19 bp, Homo sapiens
  siRNA target sequence for NALP1 (NM_014922.2,2445-2463).
ggggagaggtaaacattct

SEQ ID NO: 93853 - DNA, 19 bp, Homo sapiens
  siRNA target sequence for NALP1 (NM_014922.2,2446-2464).
gggagaggtaaacattcta

SEQ ID NO: 93854 - DNA, 19 bp, Homo sapiens
  siRNA target sequence for NALP1 (NM_014922.2,2447-2465).
ggagaggtaaacattctaa

SEQ ID NO: 93855 - DNA, 19 bp, Homo sapiens
  siRNA target sequence for NALP1 (NM_014922.2,2448-2466).
gagaggtaaacattctaat

SEQ ID NO: 93856 - DNA, 19 bp, Homo sapiens
  siRNA target sequence for NALP1 (NM_014922.2,2452-2470).
ggtaaacattctaattgca

SEQ ID NO: 93857 - DNA, 19 bp, Homo sapiens
  siRNA target sequence for NALP1 (NM_014922.2,2487-2505).
gacgctagaagcatatgga

SEQ ID NO: 93858 - DNA, 19 bp, Homo sapiens
  siRNA target sequence for NALP1 (NM_014922.2,2528-2546).
caaccacacgtttcctatt

SEQ ID NO: 93859 - DNA, 19 bp, Homo sapiens
  siRNA target sequence for NALP1 (NM_014922.2,2688-2706).
gtacgagactcggaacaaa

SEQ ID NO: 93860 - DNA, 19 bp, Homo sapiens
  siRNA target sequence for NALP1 (NM_014922.2,2692-2710).
gagactcggaacaaaacgt

SEQ ID NO: 93861 - DNA, 19 bp, Homo sapiens
  siRNA target sequence for NALP1 (NM_014922.2,2708-2726).
cgttcctgacacaagtgat

SEQ ID NO: 93862 - DNA, 19 bp, Homo sapiens
  siRNA target sequence for NALP1 (NM_014922.2,2773-2791).
ctcttagtgtgcactttct

SEQ ID NO: 93863 - DNA, 19 bp, Homo sapiens
  siRNA target sequence for NALP1 (NM_014922.2,2905-2923).
gcctattggcagattctct

SEQ ID NO: 93864 - DNA, 19 bp, Homo sapiens
  siRNA target sequence for NALP1 (NM_014922.2,2906-2924).
cctattggcagattctctt

SEQ ID NO: 93865 - DNA, 19 bp, Homo sapiens
  siRNA target sequence for NALP1 (NM_014922.2,3517-3535).
gatacgggagagatgagta

SEQ ID NO: 93866 - DNA, 19 bp, Homo sapiens
  siRNA target sequence for NALP1 (NM_014922.2,3523-3541).
ggagagatgagtaatagca

SEQ ID NO: 93867 - DNA, 19 bp, Homo sapiens
  siRNA target sequence for NALP1 (NM_014922.2,3616-3634).
ctggacgtgagcaagatct

SEQ ID NO: 93868 - DNA, 19 bp, Homo sapiens
  siRNA target sequence for NALP1 (NM_014922.2,3627-3645).
caagatcttcccaattgct

SEQ ID NO: 93869 - DNA, 19 bp, Homo sapiens
  siRNA target sequence for NALP1 (NM_014922.2,3782-3800).
ctactgaggtagttgacaa

SEQ ID NO: 93870 - DNA, 19 bp, Homo sapiens
  siRNA target sequence for NALP1 (NM_014922.2,3785-3803).
ctgaggtagttgacaaaga

SEQ ID NO: 93871 - DNA, 19 bp, Homo sapiens
  siRNA target sequence for NALP1 (NM_014922.2,3860-3878).
cgggtctctgctttgtgat

SEQ ID NO: 93872 - DNA, 19 bp, Homo sapiens
  siRNA target sequence for NALP1 (NM_014922.2,3888-3906).
ggtgaccgttgagattgaa

SEQ ID NO: 93873 - DNA, 19 bp, Homo sapiens
  siRNA target sequence for NALP1 (NM_014922.2,3889-3907).
gtgaccgttgagattgaat

SEQ ID NO: 93874 - DNA, 19 bp, Homo sapiens
  siRNA target sequence for NALP1 (NM_014922.2,3894-3912).
cgttgagattgaattctgt

SEQ ID NO: 93875 - DNA, 19 bp, Homo sapiens
  siRNA target sequence for NALP1 (NM_014922.2,4054-4072).
gacacatccctgttccaaa

SEQ ID NO: 93876 - DNA, 19 bp, Homo sapiens
  siRNA target sequence for NALP1 (NM_014922.2,4119-4137).
ggtggagctgcatcacata

SEQ ID NO: 93877 - DNA, 19 bp, Homo sapiens
  siRNA target sequence for NALP1 (NM_014922.2,4168-4186).
ggagtcctcctgaaaatga

SEQ ID NO: 93878 - DNA, 19 bp, Homo sapiens
  siRNA target sequence for NALP1 (NM_014922.2,4174-4192).
ctcctgaaaatgatccata

SEQ ID NO: 93879 - DNA, 19 bp, Homo sapiens
  siRNA target sequence for NALP1 (NM_014922.2,4176-4194).
cctgaaaatgatccataat

SEQ ID NO: 93880 - DNA, 19 bp, Homo sapiens
  siRNA target sequence for NALP1 (NM_014922.2,4309-4327).
ctggagctctgctatcgaa

SEQ ID NO: 93881 - DNA, 19 bp, Homo sapiens
  siRNA target sequence for NALP1 (NM_014922.2,4382-4400).
ggatcaggctgcaagtgaa

SEQ ID NO: 93882 - DNA, 19 bp, Homo sapiens
  siRNA target sequence for NALP1 (NM_014922.2,4517-4535).
cgcagttgctgcactttgt

SEQ ID NO: 93883 - DNA, 19 bp, Homo sapiens
  siRNA target sequence for NALP1 (NM_014922.2,4571-4589).
catcggtggaggttgtctt

SEQ ID NO: 93884 - DNA, 19 bp, Homo sapiens
  siRNA target sequence for NALP1 (NM_033004.1,3780-3798).
gaaggccatagatgatcta

SEQ ID NO: 93885 - DNA, 19 bp, Homo sapiens
  siRNA target sequence for NALP1 (NM_033004.1,3784-3802).
gccatagatgatctagaaa

SEQ ID NO: 93886 - DNA, 19 bp, Homo sapiens
  siRNA target sequence for NALP1 (NM_033004.1,3839-3857).
cgctgaccccactttatat

SEQ ID NO: 93887 - DNA, 19 bp, Homo sapiens
  siRNA target sequence for NALP11 (NM_145007.1,102-120).
ggcagaatcggattctact

SEQ ID NO: 93888 - DNA, 19 bp, Homo sapiens
  siRNA target sequence for NALP11 (NM_145007.1,189-207).
ggcacgcaagattcttgat

SEQ ID NO: 93889 - DNA, 19 bp, Homo sapiens
  siRNA target sequence for NALP11 (NM_145007.1,190-208).
gcacgcaagattcttgatt

SEQ ID NO: 93890 - DNA, 19 bp, Homo sapiens
  siRNA target sequence for NALP11 (NM_145007.1,191-209).
cacgcaagattcttgattt

SEQ ID NO: 93891 - DNA, 19 bp, Homo sapiens
  siRNA target sequence for NALP11 (NM_145007.1,261-279).
cgtgttgccaatctcttat

SEQ ID NO: 93892 - DNA, 19 bp, Homo sapiens
  siRNA target sequence for NALP11 (NM_145007.1,280-298).
gagggacagtatatatgga

SEQ ID NO: 93893 - DNA, 19 bp, Homo sapiens
  siRNA target sequence for NALP11 (NM_145007.1,284-302).
gacagtatatatggaatat

SEQ ID NO: 93894 - DNA, 19 bp, Homo sapiens
  siRNA target sequence for NALP11 (NM_145007.1,324-342).
gatgcgtaaggaagatctt

SEQ ID NO: 93895 - DNA, 19 bp, Homo sapiens
  siRNA target sequence for NALP11 (NM_145007.1,328-346).
cgtaaggaagatctttgta

SEQ ID NO: 93896 - DNA, 19 bp, Homo sapiens
  siRNA target sequence for NALP11 (NM_145007.1,337-355).
gatctttgtaggaagatca

SEQ ID NO: 93897 - DNA, 19 bp, Homo sapiens
  siRNA target sequence for NALP11 (NM_145007.1,473-491).
cgtcagatgtgttctacat

SEQ ID NO: 93898 - DNA, 19 bp, Homo sapiens
  siRNA target sequence for NALP11 (NM_145007.1,481-499).
gtgttctacatacttcaat

SEQ ID NO: 93899 - DNA, 19 bp, Homo sapiens
  siRNA target sequence for NALP11 (NM_145007.1,483-501).
gttctacatacttcaatta

SEQ ID NO: 93900 - DNA, 19 bp, Homo sapiens
  siRNA target sequence for NALP11 (NM_145007.1,496-514).
caattagcctatgattcta

SEQ ID NO: 93901 - DNA, 19 bp, Homo sapiens
  siRNA target sequence for NALP11 (NM_145007.1,508-526).
gattctaccagctattatt

SEQ ID NO: 93902 - DNA, 19 bp, Homo sapiens
  siRNA target sequence for NALP11 (NM_145007.1,566-584).
catctggaaaaactattgt

SEQ ID NO: 93903 - DNA, 19 bp, Homo sapiens
  siRNA target sequence for NALP11 (NM_145007.1,569-587).
ctggaaaaactattgttat

SEQ ID NO: 93904 - DNA, 19 bp, Homo sapiens
  siRNA target sequence for NALP11 (NM_145007.1,783-801).
cgaggacttggacaacata

SEQ ID NO: 93905 - DNA, 19 bp, Homo sapiens
  siRNA target sequence for NALP11 (NM_145007.1,786-804).
ggacttggacaacataaga

SEQ ID NO: 93906 - DNA, 19 bp, Homo sapiens
  siRNA target sequence for NALP11 (NM_145007.1,787-805).
gacttggacaacataagat

SEQ ID NO: 93907 - DNA, 19 bp, Homo sapiens
  siRNA target sequence for NALP11 (NM_145007.1,798-816).
cataagattcgagttaaat

SEQ ID NO: 93908 - DNA, 19 bp, Homo sapiens
  siRNA target sequence for NALP11 (NM_145007.1,823-841).
gaaagtgctttgtgtagta

SEQ ID NO: 93909 - DNA, 19 bp, Homo sapiens
  siRNA target sequence for NALP11 (NM_145007.1,839-857).
gtaacagcacccagaaagt

SEQ ID NO: 93910 - DNA, 19 bp, Homo sapiens
  siRNA target sequence for NALP11 (NM_145007.1,938-956).
cacgtgggaataatgtaaa

SEQ ID NO: 93911 - DNA, 19 bp, Homo sapiens
  siRNA target sequence for NALP11 (NM_145007.1,944-962).
ggaataatgtaaaaacgtt

SEQ ID NO: 93912 - DNA, 19 bp, Homo sapiens
  siRNA target sequence for NALP11 (NM_145007.1,1104-1122).
gtgccgagtcgccatctta

SEQ ID NO: 93913 - DNA, 19 bp, Homo sapiens
  siRNA target sequence for NALP11 (NM_145007.1,1108-1126).
cgagtcgccatcttatgct

SEQ ID NO: 93914 - DNA, 19 bp, Homo sapiens
  siRNA target sequence for NALP11 (NM_145007.1,1269-1287).
cctaggtctcctaaaacgt

SEQ ID NO: 93915 - DNA, 19 bp, Homo sapiens
  siRNA target sequence for NALP11 (NM_145007.1,1299-1317).
ggctgcaggaggactgttt

SEQ ID NO: 93916 - DNA, 19 bp, Homo sapiens
  siRNA target sequence for NALP11 (NM_145007.1,1303-1321).
gcaggaggactgtttctga

SEQ ID NO: 93917 - DNA, 19 bp, Homo sapiens
  siRNA target sequence for NALP11 (NM_145007.1,1410-1428).
gccgagcaacactcataaa

SEQ ID NO: 93918 - DNA, 19 bp, Homo sapiens
  siRNA target sequence for NALP11 (NM_145007.1,1412-1430).
cgagcaacactcataaaga

SEQ ID NO: 93919 - DNA, 19 bp, Homo sapiens
  siRNA target sequence for NALP11 (NM_145007.1,1421-1439).
ctcataaagaccgttacaa

SEQ ID NO: 93920 - DNA, 19 bp, Homo sapiens
  siRNA target sequence for NALP11 (NM_145007.1,1423-1441).
cataaagaccgttacaagt

SEQ ID NO: 93921 - DNA, 19 bp, Homo sapiens
  siRNA target sequence for NALP11 (NM_145007.1,1433-1451).
gttacaagttcatacactt

SEQ ID NO: 93922 - DNA, 19 bp, Homo sapiens
  siRNA target sequence for NALP11 (NM_145007.1,1452-1470).
gaacgtccaggagttttgt

SEQ ID NO: 93923 - DNA, 19 bp, Homo sapiens
  siRNA target sequence for NALP11 (NM_145007.1,1455-1473).
cgtccaggagttttgtaca

SEQ ID NO: 93924 - DNA, 19 bp, Homo sapiens
  siRNA target sequence for NALP11 (NM_145007.1,1469-1487).
gtacagccattgcatttct

SEQ ID NO: 93925 - DNA, 19 bp, Homo sapiens
  siRNA target sequence for NALP11 (NM_145007.1,1488-1506).
gatggcagtacccaactat

SEQ ID NO: 93926 - DNA, 19 bp, Homo sapiens
  siRNA target sequence for NALP11 (NM_145007.1,1667-1685).
ggtactcggtgggatacat

SEQ ID NO: 93927 - DNA, 19 bp, Homo sapiens
  siRNA target sequence for NALP11 (NM_145007.1,1671-1689).
ctcggtgggatacatgaaa

SEQ ID NO: 93928 - DNA, 19 bp, Homo sapiens
  siRNA target sequence for NALP11 (NM_145007.1,1673-1691).
cggtgggatacatgaaaca

SEQ ID NO: 93929 - DNA, 19 bp, Homo sapiens
  siRNA target sequence for NALP11 (NM_145007.1,1696-1714).
gaccgtgacccggaaaagt

SEQ ID NO: 93930 - DNA, 19 bp, Homo sapiens
  siRNA target sequence for NALP11 (NM_145007.1,1699-1717).
cgtgacccggaaaagttga

SEQ ID NO: 93931 - DNA, 19 bp, Homo sapiens
  siRNA target sequence for NALP11 (NM_145007.1,1756-1774).
cgggaagaagaatttgtga

SEQ ID NO: 93932 - DNA, 19 bp, Homo sapiens
  siRNA target sequence for NALP11 (NM_145007.1,1805-1823).
cagtttaccttcaatcaga

SEQ ID NO: 93933 - DNA, 19 bp, Homo sapiens
  siRNA target sequence for NALP11 (NM_145007.1,1813-1831).
cttcaatcagacaaggata

SEQ ID NO: 93934 - DNA, 19 bp, Homo sapiens
  siRNA target sequence for NALP11 (NM_145007.1,1816-1834).
caatcagacaaggatatga

SEQ ID NO: 93935 - DNA, 19 bp, Homo sapiens
  siRNA target sequence for NALP11 (NM_145007.1,1827-1845).
ggatatgatggtctcatta

SEQ ID NO: 93936 - DNA, 19 bp, Homo sapiens
  siRNA target sequence for NALP11 (NM_145007.1,1865-1883).
gtcacctgaggacacttaa

SEQ ID NO: 93937 - DNA, 19 bp, Homo sapiens
  siRNA target sequence for NALP11 (NM_145007.1,1867-1885).
cacctgaggacacttaagt

SEQ ID NO: 93938 - DNA, 19 bp, Homo sapiens
  siRNA target sequence for NALP11 (NM_145007.1,1870-1888).
ctgaggacacttaagttga

SEQ ID NO: 93939 - DNA, 19 bp, Homo sapiens
  siRNA target sequence for NALP11 (NM_145007.1,1891-1909).
gttcagcgcatctttcaaa

SEQ ID NO: 93940 - DNA, 19 bp, Homo sapiens
  siRNA target sequence for NALP11 (NM_145007.1,1896-1914).
gcgcatctttcaaaacaaa

SEQ ID NO: 93941 - DNA, 19 bp, Homo sapiens
  siRNA target sequence for NALP11 (NM_145007.1,1928-1946).
ggccaactgctagtcaaat

SEQ ID NO: 93942 - DNA, 19 bp, Homo sapiens
  siRNA target sequence for NALP11 (NM_145007.1,1930-1948).
ccaactgctagtcaaatga

SEQ ID NO: 93943 - DNA, 19 bp, Homo sapiens
  siRNA target sequence for NALP11 (NM_145007.1,1931-1949).
caactgctagtcaaatgaa

SEQ ID NO: 93944 - DNA, 19 bp, Homo sapiens
  siRNA target sequence for NALP11 (NM_145007.1,2004-2022).
ccgggagctgcatatcttt

SEQ ID NO: 93945 - DNA, 19 bp, Homo sapiens
  siRNA target sequence for NALP11 (NM_145007.1,2008-2026).
gagctgcatatctttgaca

SEQ ID NO: 93946 - DNA, 19 bp, Homo sapiens
  siRNA target sequence for NALP11 (NM_145007.1,2010-2028).
gctgcatatctttgacaat

SEQ ID NO: 93947 - DNA, 19 bp, Homo sapiens
  siRNA target sequence for NALP11 (NM_145007.1,2019-2037).
ctttgacaatgaccttaat

SEQ ID NO: 93948 - DNA, 19 bp, Homo sapiens
  siRNA target sequence for NALP11 (NM_145007.1,2070-2088).
ggagcattctagctgtaaa

SEQ ID NO: 93949 - DNA, 19 bp, Homo sapiens
  siRNA target sequence for NALP11 (NM_145007.1,2073-2091).
gcattctagctgtaaactt

SEQ ID NO: 93950 - DNA, 19 bp, Homo sapiens
  siRNA target sequence for NALP11 (NM_145007.1,2115-2133).
ctcgactgcttctggtttt

SEQ ID NO: 93951 - DNA, 19 bp, Homo sapiens
  siRNA target sequence for NALP11 (NM_145007.1,2159-2177).
gtaatcggagcctgacata

SEQ ID NO: 93952 - DNA, 19 bp, Homo sapiens
  siRNA target sequence for NALP11 (NM_145007.1,2168-2186).
gcctgacatacctgagtat

SEQ ID NO: 93953 - DNA, 19 bp, Homo sapiens
  siRNA target sequence for NALP11 (NM_145007.1,2170-2188).
ctgacatacctgagtatca

SEQ ID NO: 93954 - DNA, 19 bp, Homo sapiens
  siRNA target sequence for NALP11 (NM_145007.1,2195-2213).
cgtccatttccctaaatat

SEQ ID NO: 93955 - DNA, 19 bp, Homo sapiens
  siRNA target sequence for NALP11 (NM_145007.1,2241-2259).
cgagcccacatgccaaata

SEQ ID NO: 93956 - DNA, 19 bp, Homo sapiens
  siRNA target sequence for NALP11 (NM_145007.1,2244-2262).
gcccacatgccaaataagt

SEQ ID NO: 93957 - DNA, 19 bp, Homo sapiens
  siRNA target sequence for NALP11 (NM_145007.1,2247-2265).
cacatgccaaataagtcat

SEQ ID NO: 93958 - DNA, 19 bp, Homo sapiens
  siRNA target sequence for NALP11 (NM_145007.1,2261-2279).
gtcatctgagcttgatgaa

SEQ ID NO: 93959 - DNA, 19 bp, Homo sapiens
  siRNA target sequence for NALP11 (NM_145007.1,2375-2393).
ggagcgacgggatgaacat

SEQ ID NO: 93960 - DNA, 19 bp, Homo sapiens
  siRNA target sequence for NALP11 (NM_145007.1,2378-2396).
gcgacgggatgaacatact

SEQ ID NO: 93961 - DNA, 19 bp, Homo sapiens
  siRNA target sequence for NALP11 (NM_145007.1,2413-2431).
catcccaactgcactctta

SEQ ID NO: 93962 - DNA, 19 bp, Homo sapiens
  siRNA target sequence for NALP11 (NM_145007.1,2418-2436).
caactgcactcttatatca

SEQ ID NO: 93963 - DNA, 19 bp, Homo sapiens
  siRNA target sequence for NALP11 (NM_145007.1,2451-2469).
ctgctgtctcactgaaaat

SEQ ID NO: 93964 - DNA, 19 bp, Homo sapiens
  siRNA target sequence for NALP11 (NM_145007.1,2497-2515).
ctgttcagcccaactctaa

SEQ ID NO: 93965 - DNA, 19 bp, Homo sapiens
  siRNA target sequence for NALP11 (NM_145007.1,2531-2549).
gtgtgaatcgcttaaaaaa

SEQ ID NO: 93966 - DNA, 19 bp, Homo sapiens
  siRNA target sequence for NALP11 (NM_145007.1,2633-2651).
gcagcgatatctgtcaata

SEQ ID NO: 93967 - DNA, 19 bp, Homo sapiens
  siRNA target sequence for NALP11 (NM_145007.1,2634-2652).
cagcgatatctgtcaatat

SEQ ID NO: 93968 - DNA, 19 bp, Homo sapiens
  siRNA target sequence for NALP11 (NM_145007.1,2636-2654).
gcgatatctgtcaatatat

SEQ ID NO: 93969 - DNA, 19 bp, Homo sapiens
  siRNA target sequence for NALP11 (NM_145007.1,2637-2655).
cgatatctgtcaatatatt

SEQ ID NO: 93970 - DNA, 19 bp, Homo sapiens
  siRNA target sequence for NALP11 (NM_145007.1,2657-2675).
ccatagttattgctactaa

SEQ ID NO: 93971 - DNA, 19 bp, Homo sapiens
  siRNA target sequence for NALP11 (NM_145007.1,2658-2676).
catagttattgctactaat

SEQ ID NO: 93972 - DNA, 19 bp, Homo sapiens
  siRNA target sequence for NALP11 (NM_145007.1,2668-2686).
gctactaatgaaaaactga

SEQ ID NO: 93973 - DNA, 19 bp, Homo sapiens
  siRNA target sequence for NALP11 (NM_145007.1,2736-2754).
gctatgtggtggtttgaga

SEQ ID NO: 93974 - DNA, 19 bp, Homo sapiens
  siRNA target sequence for NALP11 (NM_145007.1,2784-2802).
gctagaagagtgcatgtta

SEQ ID NO: 93975 - DNA, 19 bp, Homo sapiens
  siRNA target sequence for NALP11 (NM_145007.1,2785-2803).
ctagaagagtgcatgttaa

SEQ ID NO: 93976 - DNA, 19 bp, Homo sapiens
  siRNA target sequence for NALP11 (NM_145007.1,2788-2806).
gaagagtgcatgttaacca

SEQ ID NO: 93977 - DNA, 19 bp, Homo sapiens
  siRNA target sequence for NALP11 (NM_145007.1,2852-2870).
cactagaaagactcaactt

SEQ ID NO: 93978 - DNA, 19 bp, Homo sapiens
  siRNA target sequence for NALP11 (NM_145007.1,2888-2906).
gcaatgatggagttgcaaa

SEQ ID NO: 93979 - DNA, 19 bp, Homo sapiens
  siRNA target sequence for NALP11 (NM_145007.1,2927-2945).
gcccagattgtgtacttaa

SEQ ID NO: 93980 - DNA, 19 bp, Homo sapiens
  siRNA target sequence for NALP11 (NM_145007.1,2930-2948).
cagattgtgtacttaaggt

SEQ ID NO: 93981 - DNA, 19 bp, Homo sapiens
  siRNA target sequence for NALP11 (NM_145007.1,2946-2964).
ggtagttgggcttccatta

SEQ ID NO: 93982 - DNA, 19 bp, Homo sapiens
  siRNA target sequence for NALP11 (NM_145007.1,3086-3104).
cttctcagccaggttcaat

SEQ ID NO: 93983 - DNA, 19 bp, Homo sapiens
  siRNA target sequence for NALP11 (NM_145007.1,3089-3107).
ctcagccaggttcaataat

SEQ ID NO: 93984 - DNA, 19 bp, Homo sapiens
  siRNA target sequence for NALP11 (NM_145007.1,3095-3113).
caggttcaataatacctaa

SEQ ID NO: 93985 - DNA, 19 bp, Homo sapiens
  siRNA target sequence for NALP11 (NM_145007.1,3097-3115).
ggttcaataatacctaatt

SEQ ID NO: 93986 - DNA, 19 bp, Homo sapiens
  siRNA target sequence for NALP11 (NM_145007.1,3109-3127).
cctaattctaatttggatt

SEQ ID NO: 93987 - DNA, 19 bp, Homo sapiens
  siRNA target sequence for NALP11 (NM_145007.1,3138-3156).
caaatttcccagaatgtct

SEQ ID NO: 93988 - DNA, 19 bp, Homo sapiens
  siRNA target sequence for NALP12 (NM_033297.1,1440-1458).
cctctctgcagctctcata

SEQ ID NO: 93989 - DNA, 19 bp, Homo sapiens
  siRNA target sequence for NALP12 (NM_033297.1,1451-1469).
ctctcatagccaataagaa

SEQ ID NO: 93990 - DNA, 19 bp, Homo sapiens
  siRNA target sequence for NALP12 (NM_033297.1,1453-1471).
ctcatagccaataagaatt

SEQ ID NO: 93991 - DNA, 19 bp, Homo sapiens
  siRNA target sequence for NALP12 (NM_033297.1,1490-1508).
gtggcaacggcgttggatt

SEQ ID NO: 93992 - DNA, 19 bp, Homo sapiens
  siRNA target sequence for NALP12 (NM_033297.1,1942-1960).
gcttgtgagaatctttact

SEQ ID NO: 93993 - DNA, 19 bp, Homo sapiens
  siRNA target sequence for NALP12 (NM_033297.1,2027-2045).
gtgtccgactgctttgcaa

SEQ ID NO: 93994 - DNA, 19 bp, Homo sapiens
  siRNA target sequence for NALP12 (NM_033297.1,2092-2110).
gggatggacctgaataaaa

SEQ ID NO: 93995 - DNA, 19 bp, Homo sapiens
  siRNA target sequence for NALP12 (NM_033297.1,2127-2145).
ggcagcgcttcgagtaaca

SEQ ID NO: 93996 - DNA, 19 bp, Homo sapiens
  siRNA target sequence for NALP12 (NM_033297.1,2128-2146).
gcagcgcttcgagtaacaa

SEQ ID NO: 93997 - DNA, 19 bp, Homo sapiens
  siRNA target sequence for NALP12 (NM_033297.1,2129-2147).
cagcgcttcgagtaacaaa

SEQ ID NO: 93998 - DNA, 19 bp, Homo sapiens
  siRNA target sequence for NALP12 (NM_033297.1,2133-2151).
gcttcgagtaacaaaacct

SEQ ID NO: 93999 - DNA, 19 bp, Homo sapiens
  siRNA target sequence for NALP12 (NM_033297.1,2134-2152).
cttcgagtaacaaaacctt

SEQ ID NO: 94000 - DNA, 19 bp, Homo sapiens
  siRNA target sequence for NALP12 (NM_033297.1,2137-2155).
cgagtaacaaaaccttatt

SEQ ID NO: 94001 - DNA, 19 bp, Homo sapiens
  siRNA target sequence for NALP12 (NM_144687.1,400-418).
gcacctttgagcggataaa

SEQ ID NO: 94002 - DNA, 19 bp, Homo sapiens
  siRNA target sequence for NALP12 (NM_144687.1,526-544).
ctcttgtcactccaagaaa

SEQ ID NO: 94003 - DNA, 19 bp, Homo sapiens
  siRNA target sequence for NALP12 (NM_144687.1,746-764).
ggctagccccatcaagata

SEQ ID NO: 94004 - DNA, 19 bp, Homo sapiens
  siRNA target sequence for NALP12 (NM_144687.1,748-766).
ctagccccatcaagataga

SEQ ID NO: 94005 - DNA, 19 bp, Homo sapiens
  siRNA target sequence for NALP12 (NM_144687.1,964-982).
gcatgcaagacctcatctt

SEQ ID NO: 94006 - DNA, 19 bp, Homo sapiens
  siRNA target sequence for NALP12 (NM_144687.1,1290-1308).
gaatacttctacaagtatt

SEQ ID NO: 94007 - DNA, 19 bp, Homo sapiens
  siRNA target sequence for NALP12 (NM_144687.1,1465-1483).
ccaccactgcagtgtacat

SEQ ID NO: 94008 - DNA, 19 bp, Homo sapiens
  siRNA target sequence for NALP12 (NM_144687.1,1654-1672).
ccttcctcaacatgaacat

SEQ ID NO: 94009 - DNA, 19 bp, Homo sapiens
  siRNA target sequence for NALP12 (NM_144687.1,1811-1829).
gaccgagtacgcgttttct

SEQ ID NO: 94010 - DNA, 19 bp, Homo sapiens
  siRNA target sequence for NALP12 (NM_144687.1,1813-1831).
ccgagtacgcgttttctga

SEQ ID NO: 94011 - DNA, 19 bp, Homo sapiens
  siRNA target sequence for NALP12 (NM_144687.1,1814-1832).
cgagtacgcgttttctgaa

SEQ ID NO: 94012 - DNA, 19 bp, Homo sapiens
  siRNA target sequence for NALP12 (NM_144687.1,1815-1833).
gagtacgcgttttctgaaa

SEQ ID NO: 94013 - DNA, 19 bp, Homo sapiens
  siRNA target sequence for NALP12 (NM_144687.1,2081-2099).
gatcgtggtcagcaacatt

SEQ ID NO: 94014 - DNA, 19 bp, Homo sapiens
  siRNA target sequence for NALP12 (NM_144687.1,2270-2288).
ggacgcctacagtgaacat

SEQ ID NO: 94015 - DNA, 19 bp, Homo sapiens
  siRNA target sequence for NALP12 (NM_144687.1,2299-2317).
ccctgtgcaccaatccaaa

SEQ ID NO: 94016 - DNA, 19 bp, Homo sapiens
  siRNA target sequence for NALP12 (NM_144687.1,2308-2326).
ccaatccaaacctgataga

SEQ ID NO: 94017 - DNA, 19 bp, Homo sapiens
  siRNA target sequence for NALP12 (NM_144687.1,2395-2413).
ccaactgcaaacttcagaa

SEQ ID NO: 94018 - DNA, 19 bp, Homo sapiens
  siRNA target sequence for NALP2 (NM_017852.1,194-212).
cacacgagctccagaagat

SEQ ID NO: 94019 - DNA, 19 bp, Homo sapiens
  siRNA target sequence for NALP2 (NM_017852.1,370-388).
gcagctttgaaatccttta

SEQ ID NO: 94020 - DNA, 19 bp, Homo sapiens
  siRNA target sequence for NALP2 (NM_017852.1,373-391).
gctttgaaatcctttaata

SEQ ID NO: 94021 - DNA, 19 bp, Homo sapiens
  siRNA target sequence for NALP2 (NM_017852.1,456-474).
gctggagcgcttcaaaaca

SEQ ID NO: 94022 - DNA, 19 bp, Homo sapiens
  siRNA target sequence for NALP2 (NM_017852.1,459-477).
ggagcgcttcaaaacagaa

SEQ ID NO: 94023 - DNA, 19 bp, Homo sapiens
  siRNA target sequence for NALP2 (NM_017852.1,556-574).
gacaataggtgcaggtata

SEQ ID NO: 94024 - DNA, 19 bp, Homo sapiens
  siRNA target sequence for NALP2 (NM_017852.1,558-576).
caataggtgcaggtatata

SEQ ID NO: 94025 - DNA, 19 bp, Homo sapiens
  siRNA target sequence for NALP2 (NM_017852.1,563-581).
ggtgcaggtatatattgaa

SEQ ID NO: 94026 - DNA, 19 bp, Homo sapiens
  siRNA target sequence for NALP2 (NM_017852.1,608-626).
gctggcctggagatagcaa

SEQ ID NO: 94027 - DNA, 19 bp, Homo sapiens
  siRNA target sequence for NALP2 (NM_017852.1,1132-1150).
gaggagccgatctacataa

SEQ ID NO: 94028 - DNA, 19 bp, Homo sapiens
  siRNA target sequence for NALP2 (NM_017852.1,1842-1860).
gctgcgatgcgacataagt

SEQ ID NO: 94029 - DNA, 19 bp, Homo sapiens
  siRNA target sequence for NALP2 (NM_017852.1,1843-1861).
ctgcgatgcgacataagtt

SEQ ID NO: 94030 - DNA, 19 bp, Homo sapiens
  siRNA target sequence for NALP2 (NM_017852.1,1845-1863).
gcgatgcgacataagttgt

SEQ ID NO: 94031 - DNA, 19 bp, Homo sapiens
  siRNA target sequence for NALP2 (NM_017852.1,1846-1864).
cgatgcgacataagttgta

SEQ ID NO: 94032 - DNA, 19 bp, Homo sapiens
  siRNA target sequence for NALP2 (NM_017852.1,1847-1865).
gatgcgacataagttgtaa

SEQ ID NO: 94033 - DNA, 19 bp, Homo sapiens
  siRNA target sequence for NALP2 (NM_017852.1,1993-2011).
gacgttgtgccatcttcat

SEQ ID NO: 94034 - DNA, 19 bp, Homo sapiens
  siRNA target sequence for NALP2 (NM_017852.1,1996-2014).
gttgtgccatcttcattct

SEQ ID NO: 94035 - DNA, 19 bp, Homo sapiens
  siRNA target sequence for NALP2 (NM_017852.1,2048-2066).
cactgcaggtaataaagga

SEQ ID NO: 94036 - DNA, 19 bp, Homo sapiens
  siRNA target sequence for NALP2 (NM_017852.1,2190-2208).
gatgggtctagcaatcaat

SEQ ID NO: 94037 - DNA, 19 bp, Homo sapiens
  siRNA target sequence for NALP2 (NM_017852.1,2193-2211).
gggtctagcaatcaatgat

SEQ ID NO: 94038 - DNA, 19 bp, Homo sapiens
  siRNA target sequence for NALP2 (NM_017852.1,2194-2212).
ggtctagcaatcaatgata

SEQ ID NO: 94039 - DNA, 19 bp, Homo sapiens
  siRNA target sequence for NALP2 (NM_017852.1,2218-2236).
ctcagtgcctccctagtaa

SEQ ID NO: 94040 - DNA, 19 bp, Homo sapiens
  siRNA target sequence for NALP2 (NM_017852.1,2222-2240).
gtgcctccctagtaaggat

SEQ ID NO: 94041 - DNA, 19 bp, Homo sapiens
  siRNA target sequence for NALP2 (NM_017852.1,2763-2781).
gaggtaccccgagtgtaaa

SEQ ID NO: 94042 - DNA, 19 bp, Homo sapiens
  siRNA target sequence for NALP2 (NM_017852.1,2765-2783).
ggtaccccgagtgtaaact

SEQ ID NO: 94043 - DNA, 19 bp, Homo sapiens
  siRNA target sequence for NALP2 (NM_017852.1,2825-2843).
gctgctgcgatctcacaaa

SEQ ID NO: 94044 - DNA, 19 bp, Homo sapiens
  siRNA target sequence for NALP5 (NM_153447.2,58-76).
cgtgctcttgtcactcttt

SEQ ID NO: 94045 - DNA, 19 bp, Homo sapiens
  siRNA target sequence for NALP5 (NM_153447.2,82-100).
ggtcctacttgctctatat

SEQ ID NO: 94046 - DNA, 19 bp, Homo sapiens
  siRNA target sequence for NALP5 (NM_153447.2,83-101).
gtcctacttgctctatatt

SEQ ID NO: 94047 - DNA, 19 bp, Homo sapiens
  siRNA target sequence for NALP5 (NM_153447.2,92-110).
gctctatattaccaaagaa

SEQ ID NO: 94048 - DNA, 19 bp, Homo sapiens
  siRNA target sequence for NALP5 (NM_153447.2,93-111).
ctctatattaccaaagaat

SEQ ID NO: 94049 - DNA, 19 bp, Homo sapiens
  siRNA target sequence for NALP5 (NM_153447.2,134-152).
gctctcagccttgtatcaa

SEQ ID NO: 94050 - DNA, 19 bp, Homo sapiens
  siRNA target sequence for NALP5 (NM_153447.2,192-210).
gctgcaatggtgtctctat

SEQ ID NO: 94051 - DNA, 19 bp, Homo sapiens
  siRNA target sequence for NALP5 (NM_153447.2,203-221).
gtctctatgagctagacaa

SEQ ID NO: 94052 - DNA, 19 bp, Homo sapiens
  siRNA target sequence for NALP5 (NM_153447.2,211-229).
gagctagacaaggaagaat

SEQ ID NO: 94053 - DNA, 19 bp, Homo sapiens
  siRNA target sequence for NALP5 (NM_153447.2,213-231).
gctagacaaggaagaattt

SEQ ID NO: 94054 - DNA, 19 bp, Homo sapiens
  siRNA target sequence for NALP5 (NM_153447.2,273-291).
gaccacatgctctattcca

SEQ ID NO: 94055 - DNA, 19 bp, Homo sapiens
  siRNA target sequence for NALP5 (NM_153447.2,336-354).
cttgcatgagtattatgga

SEQ ID NO: 94056 - DNA, 19 bp, Homo sapiens
  siRNA target sequence for NALP5 (NM_153447.2,364-382).
gcctgggctacgtccatta

SEQ ID NO: 94057 - DNA, 19 bp, Homo sapiens
  siRNA target sequence for NALP5 (NM_153447.2,368-386).
gggctacgtccattagcat

SEQ ID NO: 94058 - DNA, 19 bp, Homo sapiens
  siRNA target sequence for NALP5 (NM_153447.2,374-392).
cgtccattagcatctttga

SEQ ID NO: 94059 - DNA, 19 bp, Homo sapiens
  siRNA target sequence for NALP5 (NM_153447.2,423-441).
ggcacgggatgacatgaaa

SEQ ID NO: 94060 - DNA, 19 bp, Homo sapiens
  siRNA target sequence for NALP5 (NM_153447.2,481-499).
caaggaccaagcaaggaaa

SEQ ID NO: 94061 - DNA, 19 bp, Homo sapiens
  siRNA target sequence for NALP5 (NM_153447.2,689-707).
gtgacacatgggactacaa

SEQ ID NO: 94062 - DNA, 19 bp, Homo sapiens
  siRNA target sequence for NALP5 (NM_153447.2,741-759).
ggatgtacgtcgtagtttt

SEQ ID NO: 94063 - DNA, 19 bp, Homo sapiens
  siRNA target sequence for NALP5 (NM_153447.2,748-766).
cgtcgtagttttgaaaaca

SEQ ID NO: 94064 - DNA, 19 bp, Homo sapiens
  siRNA target sequence for NALP5 (NM_153447.2,775-793).
gactggccggaaatgcaaa

SEQ ID NO: 94065 - DNA, 19 bp, Homo sapiens
  siRNA target sequence for NALP5 (NM_153447.2,779-797).
ggccggaaatgcaaacgtt

SEQ ID NO: 94066 - DNA, 19 bp, Homo sapiens
  siRNA target sequence for NALP5 (NM_153447.2,795-813).
gttggctggtgcttttgat

SEQ ID NO: 94067 - DNA, 19 bp, Homo sapiens
  siRNA target sequence for NALP5 (NM_153447.2,846-864).
ggttctgcacggaaagtca

SEQ ID NO: 94068 - DNA, 19 bp, Homo sapiens
  siRNA target sequence for NALP5 (NM_153447.2,920-938).
gactctaccagggaatgtt

SEQ ID NO: 94069 - DNA, 19 bp, Homo sapiens
  siRNA target sequence for NALP5 (NM_153447.2,1034-1052).
ctccggtgacggagatcat

SEQ ID NO: 94070 - DNA, 19 bp, Homo sapiens
  siRNA target sequence for NALP5 (NM_153447.2,1036-1054).
ccggtgacggagatcatgt

SEQ ID NO: 94071 - DNA, 19 bp, Homo sapiens
  siRNA target sequence for NALP5 (NM_153447.2,1063-1081).
gaaaggctgttgttcatca

SEQ ID NO: 94072 - DNA, 19 bp, Homo sapiens
  siRNA target sequence for NALP5 (NM_153447.2,1067-1085).
ggctgttgttcatcattga

SEQ ID NO: 94073 - DNA, 19 bp, Homo sapiens
  siRNA target sequence for NALP5 (NM_153447.2,1103-1121).
gctctgtcctcaacaatga

SEQ ID NO: 94074 - DNA, 19 bp, Homo sapiens
  siRNA target sequence for NALP5 (NM_153447.2,1272-1290).
ccgttacctgttagttaga

SEQ ID NO: 94075 - DNA, 19 bp, Homo sapiens
  siRNA target sequence for NALP5 (NM_153447.2,1360-1378).
gggttgcgtgcgatcatga

SEQ ID NO: 94076 - DNA, 19 bp, Homo sapiens
  siRNA target sequence for NALP5 (NM_153447.2,1361-1379).
ggttgcgtgcgatcatgaa

SEQ ID NO: 94077 - DNA, 19 bp, Homo sapiens
  siRNA target sequence for NALP5 (NM_153447.2,1499-1517).
gcctgcacgccgcttttgt

SEQ ID NO: 94078 - DNA, 19 bp, Homo sapiens
  siRNA target sequence for NALP5 (NM_153447.2,1503-1521).
gcacgccgcttttgtgttt

SEQ ID NO: 94079 - DNA, 19 bp, Homo sapiens
  siRNA target sequence for NALP5 (NM_153447.2,1506-1524).
cgccgcttttgtgtttcat

SEQ ID NO: 94080 - DNA, 19 bp, Homo sapiens
  siRNA target sequence for NALP5 (NM_153447.2,1508-1526).
ccgcttttgtgtttcatca

SEQ ID NO: 94081 - DNA, 19 bp, Homo sapiens
  siRNA target sequence for NALP5 (NM_153447.2,1687-1705).
gctctgtttcacatgaaca

SEQ ID NO: 94082 - DNA, 19 bp, Homo sapiens
  siRNA target sequence for NALP5 (NM_153447.2,1688-1706).
ctctgtttcacatgaacat

SEQ ID NO: 94083 - DNA, 19 bp, Homo sapiens
  siRNA target sequence for NALP5 (NM_153447.2,1721-1739).
gccactgtgaggagtacta

SEQ ID NO: 94084 - DNA, 19 bp, Homo sapiens
  siRNA target sequence for NALP5 (NM_153447.2,1823-1841).
gccctctgtacgttgagaa

SEQ ID NO: 94085 - DNA, 19 bp, Homo sapiens
  siRNA target sequence for NALP5 (NM_153447.2,1828-1846).
ctgtacgttgagaagacaa

SEQ ID NO: 94086 - DNA, 19 bp, Homo sapiens
  siRNA target sequence for NALP5 (NM_153447.2,1850-1868).
ggtccatggagcttaaaca

SEQ ID NO: 94087 - DNA, 19 bp, Homo sapiens
  siRNA target sequence for NALP5 (NM_153447.2,1895-1913).
ggatgaagcgtttcttgtt

SEQ ID NO: 94088 - DNA, 19 bp, Homo sapiens
  siRNA target sequence for NALP5 (NM_153447.2,1896-1914).
gatgaagcgtttcttgttt

SEQ ID NO: 94089 - DNA, 19 bp, Homo sapiens
  siRNA target sequence for NALP5 (NM_153447.2,2056-2074).
gacgccttccactgtcttt

SEQ ID NO: 94090 - DNA, 19 bp, Homo sapiens
  siRNA target sequence for NALP5 (NM_153447.2,2060-2078).
ccttccactgtcttttcga

SEQ ID NO: 94091 - DNA, 19 bp, Homo sapiens
  siRNA target sequence for NALP5 (NM_153447.2,2081-2099).
ctcaagacaaagagtttgt

SEQ ID NO: 94092 - DNA, 19 bp, Homo sapiens
  siRNA target sequence for NALP5 (NM_153447.2,2098-2116).
gttcgcttggcattaaaca

SEQ ID NO: 94093 - DNA, 19 bp, Homo sapiens
  siRNA target sequence for NALP5 (NM_153447.2,2189-2207).
gtccgtatttgcggaaaat

SEQ ID NO: 94094 - DNA, 19 bp, Homo sapiens
  siRNA target sequence for NALP5 (NM_153447.2,2261-2279).
ctgtggtccctctatggat

SEQ ID NO: 94095 - DNA, 19 bp, Homo sapiens
  siRNA target sequence for NALP5 (NM_153447.2,2272-2290).
ctatggatgcgggataaga

SEQ ID NO: 94096 - DNA, 19 bp, Homo sapiens
  siRNA target sequence for NALP5 (NM_153447.2,2299-2317).
gaggagcagtgggaagatt

SEQ ID NO: 94097 - DNA, 19 bp, Homo sapiens
  siRNA target sequence for NALP5 (NM_153447.2,2302-2320).
gagcagtgggaagatttct

SEQ ID NO: 94098 - DNA, 19 bp, Homo sapiens
  siRNA target sequence for NALP5 (NM_153447.2,2418-2436).
gcatcccacctgcaagata

SEQ ID NO: 94099 - DNA, 19 bp, Homo sapiens
  siRNA target sequence for NALP5 (NM_153447.2,2503-2521).
gccaaccgtaacctaagat

SEQ ID NO: 94100 - DNA, 19 bp, Homo sapiens
  siRNA target sequence for NALP5 (NM_153447.2,2568-2586).
ggcgtgtgaagccttaaaa

SEQ ID NO: 94101 - DNA, 19 bp, Homo sapiens
  siRNA target sequence for NALP5 (NM_153447.2,2570-2588).
cgtgtgaagccttaaaaca

SEQ ID NO: 94102 - DNA, 19 bp, Homo sapiens
  siRNA target sequence for NALP5 (NM_153447.2,2866-2884).
ctgtgcctatccaacaaca

SEQ ID NO: 94103 - DNA, 19 bp, Homo sapiens
  siRNA target sequence for NALP5 (NM_153447.2,2889-2907).
ggggaacgaaggtgtaaat

SEQ ID NO: 94104 - DNA, 19 bp, Homo sapiens
  siRNA target sequence for NALP5 (NM_153447.2,3007-3025).
gcgcttatgggtaactcat

SEQ ID NO: 94105 - DNA, 19 bp, Homo sapiens
  siRNA target sequence for NALP5 (NM_153447.2,3093-3111).
catgagagaaccatcttgt

SEQ ID NO: 94106 - DNA, 19 bp, Homo sapiens
  siRNA target sequence for NALP5 (NM_153447.2,3364-3382).
cggcatctgaccagtctaa

SEQ ID NO: 94107 - DNA, 19 bp, Homo sapiens
  siRNA target sequence for NALP5 (NM_153447.2,3365-3383).
ggcatctgaccagtctaaa

SEQ ID NO: 94108 - DNA, 19 bp, Homo sapiens
  siRNA target sequence for NALP5 (NM_153447.2,3385-3403).
ctggtgcagaataacttca

SEQ ID NO: 94109 - DNA, 19 bp, Homo sapiens
  siRNA target sequence for NALP5 (NM_153447.2,3439-3457).
gcctgtcccacgtctaact

SEQ ID NO: 94110 - DNA, 19 bp, Homo sapiens
  siRNA target sequence for NALP5 (NM_153447.2,3440-3458).
cctgtcccacgtctaactt

SEQ ID NO: 94111 - DNA, 19 bp, Homo sapiens
  siRNA target sequence for NALP5 (NM_153447.2,3441-3459).
ctgtcccacgtctaactta

SEQ ID NO: 94112 - DNA, 19 bp, Homo sapiens
  siRNA target sequence for NALP5 (NM_153447.2,3443-3461).
gtcccacgtctaacttaca

SEQ ID NO: 94113 - DNA, 19 bp, Homo sapiens
  siRNA target sequence for NALP5 (NM_153447.2,3445-3463).
cccacgtctaacttacaga

SEQ ID NO: 94114 - DNA, 19 bp, Homo sapiens
  siRNA target sequence for NALP5 (NM_153447.2,3446-3464).
ccacgtctaacttacagat

SEQ ID NO: 94115 - DNA, 19 bp, Homo sapiens
  siRNA target sequence for NALP5 (NM_153447.2,3447-3465).
cacgtctaacttacagata

SEQ ID NO: 94116 - DNA, 19 bp, Homo sapiens
  siRNA target sequence for NALP5 (NM_153447.2,3449-3467).
cgtctaacttacagataat

SEQ ID NO: 94117 - DNA, 19 bp, Homo sapiens
  siRNA target sequence for NALP5 (NM_153447.2,3482-3500).
ggcagtaccctgtgcaaat

SEQ ID NO: 94118 - DNA, 19 bp, Homo sapiens
  siRNA target sequence for NALP5 (NM_153447.2,3531-3549).
caagccccgagtcgtaatt

SEQ ID NO: 94119 - DNA, 19 bp, Homo sapiens
  siRNA target sequence for NALP5 (NM_153447.2,3550-3568).
gacggtagttggcattctt

SEQ ID NO: 94120 - DNA, 19 bp, Homo sapiens
  siRNA target sequence for NALP5 (NM_153447.2,3552-3570).
cggtagttggcattctttt

SEQ ID NO: 94121 - DNA, 19 bp, Homo sapiens
  siRNA target sequence for NALP5 (NM_153447.2,3557-3575).
gttggcattcttttgatga

SEQ ID NO: 94122 - DNA, 19 bp, Homo sapiens
  siRNA target sequence for NALP5 (NM_153447.2,3560-3578).
ggcattcttttgatgaaga

SEQ ID NO: 94123 - DNA, 19 bp, Homo sapiens
  siRNA target sequence for NALP5 (NM_153447.2,3580-3598).
gaccggtactggtggaaaa

SEQ ID NO: 94124 - DNA, 19 bp, Homo sapiens
  siRNA target sequence for NALP6 (NM_138329.1,341-359).
ccgtgtccgagtacaagaa

SEQ ID NO: 94125 - DNA, 19 bp, Homo sapiens
  siRNA target sequence for NALP6 (NM_138329.1,527-545).
gctcggacacgcacacttt

SEQ ID NO: 94126 - DNA, 19 bp, Homo sapiens
  siRNA target sequence for NALP6 (NM_138329.1,530-548).
cggacacgcacactttcaa

SEQ ID NO: 94127 - DNA, 19 bp, Homo sapiens
  siRNA target sequence for NALP6 (NM_138329.1,1318-1336).
ggcgacctgcgcaatctgt

SEQ ID NO: 94128 - DNA, 19 bp, Homo sapiens
  siRNA target sequence for NALP6 (NM_138329.1,2111-2129).
ctcaaggcaccacaaaaca

SEQ ID NO: 94129 - DNA, 19 bp, Homo sapiens
  siRNA target sequence for NALP6 (NM_138329.1,2406-2424).
gtacctggtgggtatgctt

SEQ ID NO: 94130 - DNA, 19 bp, Homo sapiens
  siRNA target sequence for NALP7 (NM_139176.1,100-118).
cgaggatgaattaaagagt

SEQ ID NO: 94131 - DNA, 19 bp, Homo sapiens
  siRNA target sequence for NALP7 (NM_139176.1,249-267).
ggaatgcgactgtgaacat

SEQ ID NO: 94132 - DNA, 19 bp, Homo sapiens
  siRNA target sequence for NALP7 (NM_139176.1,284-302).
ctcacggaattgtgtaaga

SEQ ID NO: 94133 - DNA, 19 bp, Homo sapiens
  siRNA target sequence for NALP7 (NM_139176.1,330-348).
gacaggtgcaagaaataga

SEQ ID NO: 94134 - DNA, 19 bp, Homo sapiens
  siRNA target sequence for NALP7 (NM_139176.1,332-350).
caggtgcaagaaatagata

SEQ ID NO: 94135 - DNA, 19 bp, Homo sapiens
  siRNA target sequence for NALP7 (NM_139176.1,334-352).
ggtgcaagaaatagataat

SEQ ID NO: 94136 - DNA, 19 bp, Homo sapiens
  siRNA target sequence for NALP7 (NM_139176.1,463-481).
gcaaggagacattgacaat

SEQ ID NO: 94137 - DNA, 19 bp, Homo sapiens
  siRNA target sequence for NALP7 (NM_139176.1,493-511).
cgtcactctgagaaaccaa

SEQ ID NO: 94138 - DNA, 19 bp, Homo sapiens
  siRNA target sequence for NALP7 (NM_139176.1,502-520).
gagaaaccaacggttcatt

SEQ ID NO: 94139 - DNA, 19 bp, Homo sapiens
  siRNA target sequence for NALP7 (NM_139176.1,601-619).
cacgctggccaaaaagtgt

SEQ ID NO: 94140 - DNA, 19 bp, Homo sapiens
  siRNA target sequence for NALP7 (NM_139176.1,729-747).
ccaaagactggcctgaatt

SEQ ID NO: 94141 - DNA, 19 bp, Homo sapiens
  siRNA target sequence for NALP7 (NM_139176.1,807-825).
gccttgatgagctgaaagt

SEQ ID NO: 94142 - DNA, 19 bp, Homo sapiens
  siRNA target sequence for NALP7 (NM_139176.1,1709-1727).
gcacatcttcatgcaaata

SEQ ID NO: 94143 - DNA, 19 bp, Homo sapiens
  siRNA target sequence for NALP7 (NM_139176.1,1814-1832).
ccgttcaaggaaatttcta

SEQ ID NO: 94144 - DNA, 19 bp, Homo sapiens
  siRNA target sequence for NALP7 (NM_139176.1,1815-1833).
cgttcaaggaaatttctat

SEQ ID NO: 94145 - DNA, 19 bp, Homo sapiens
  siRNA target sequence for NALP7 (NM_139176.1,1925-1943).
ggggtgttcctggagaatt

SEQ ID NO: 94146 - DNA, 19 bp, Homo sapiens
  siRNA target sequence for NALP7 (NM_139176.1,1926-1944).
gggtgttcctggagaatta

SEQ ID NO: 94147 - DNA, 19 bp, Homo sapiens
  siRNA target sequence for NALP7 (NM_139176.1,1977-1995).
ggtgcacttacctaaccat

SEQ ID NO: 94148 - DNA, 19 bp, Homo sapiens
  siRNA target sequence for NALP7 (NM_139176.1,1978-1996).
gtgcacttacctaaccatt

SEQ ID NO: 94149 - DNA, 19 bp, Homo sapiens
  siRNA target sequence for NALP7 (NM_139176.1,2027-2045).
cttcgcctctggacagatt

SEQ ID NO: 94150 - DNA, 19 bp, Homo sapiens
  siRNA target sequence for NALP7 (NM_139176.1,2306-2324).
gacctgctcagaaatcata

SEQ ID NO: 94151 - DNA, 19 bp, Homo sapiens
  siRNA target sequence for NALP7 (NM_139176.1,2481-2499).
ccatgacacgcccaaaaca

SEQ ID NO: 94152 - DNA, 19 bp, Homo sapiens
  siRNA target sequence for NALP7 (NM_139176.1,2653-2671).
cttgagttaccctgattgt

SEQ ID NO: 94153 - DNA, 19 bp, Homo sapiens
  siRNA target sequence for NALP7 (NM_139176.1,2693-2711).
cagcaatgcagcataacca

SEQ ID NO: 94154 - DNA, 19 bp, Homo sapiens
  siRNA target sequence for NALP7 (NM_139176.1,2709-2727).
ccaagcttggctgtagata

SEQ ID NO: 94155 - DNA, 19 bp, Homo sapiens
  siRNA target sequence for NALP7 (NM_139176.1,2710-2728).
caagcttggctgtagatat

SEQ ID NO: 94156 - DNA, 19 bp, Homo sapiens
  siRNA target sequence for NALP7 (NM_139176.1,2763-2781).
caaacctggacttgagtat

SEQ ID NO: 94157 - DNA, 19 bp, Homo sapiens
  siRNA target sequence for NALP7 (NM_139176.1,2812-2830).
ctgtcaggcattagagaat

SEQ ID NO: 94158 - DNA, 19 bp, Homo sapiens
  siRNA target sequence for NALP7 (NM_139176.1,2855-2873).
cggttgaagacctatgaaa

SEQ ID NO: 94159 - DNA, 19 bp, Homo sapiens
  siRNA target sequence for NALP7 (NM_139176.1,2921-2939).
cccaagctgactattgatt

SEQ ID NO: 94160 - DNA, 19 bp, Homo sapiens
  siRNA target sequence for NALP7 (NM_139176.1,2926-2944).
gctgactattgattgcaat

SEQ ID NO: 94161 - DNA, 19 bp, Homo sapiens
  siRNA target sequence for NAV1 (NM_020443.2,636-654).
ctcacggactccgagaaaa

SEQ ID NO: 94162 - DNA, 19 bp, Homo sapiens
  siRNA target sequence for NAV1 (NM_020443.2,640-658).
cggactccgagaaaaagct

SEQ ID NO: 94163 - DNA, 19 bp, Homo sapiens
  siRNA target sequence for NAV1 (NM_020443.2,1500-1518).
ctcaagtccggctacatga

SEQ ID NO: 94164 - DNA, 19 bp, Homo sapiens
  siRNA target sequence for NAV1 (NM_020443.2,1690-1708).
ctcgcaggaactcaacaat

SEQ ID NO: 94165 - DNA, 19 bp, Homo sapiens
  siRNA target sequence for NAV1 (NM_020443.2,1759-1777).
gctggtttagtgaatcaga

SEQ ID NO: 94166 - DNA, 19 bp, Homo sapiens
  siRNA target sequence for NAV1 (NM_020443.2,1827-1845).
gaacctgggacttctaagt

SEQ ID NO: 94167 - DNA, 19 bp, Homo sapiens
  siRNA target sequence for NAV1 (NM_020443.2,1859-1877).
gcctgagagctgtgatgat

SEQ ID NO: 94168 - DNA, 19 bp, Homo sapiens
  siRNA target sequence for NAV1 (NM_020443.2,1882-1900).
ccaagggtggagaactgaa

SEQ ID NO: 94169 - DNA, 19 bp, Homo sapiens
  siRNA target sequence for NAV1 (NM_020443.2,1883-1901).
caagggtggagaactgaaa

SEQ ID NO: 94170 - DNA, 19 bp, Homo sapiens
  siRNA target sequence for NAV1 (NM_020443.2,1949-1967).
cccacctgtggctgtaact

SEQ ID NO: 94171 - DNA, 19 bp, Homo sapiens
  siRNA target sequence for NAV1 (NM_020443.2,2101-2119).
gcctgagtgatgctaagaa

SEQ ID NO: 94172 - DNA, 19 bp, Homo sapiens
  siRNA target sequence for NAV1 (NM_020443.2,2144-2162).
ctccacttcgggatccttt

SEQ ID NO: 94173 - DNA, 19 bp, Homo sapiens
  siRNA target sequence for NAV1 (NM_020443.2,2155-2173).
gatcctttggctacaagaa

SEQ ID NO: 94174 - DNA, 19 bp, Homo sapiens
  siRNA target sequence for NAV1 (NM_020443.2,2271-2289).
gtaaatgggcgcaagacta

SEQ ID NO: 94175 - DNA, 19 bp, Homo sapiens
  siRNA target sequence for NAV1 (NM_020443.2,2279-2297).
gcgcaagactagcttagat

SEQ ID NO: 94176 - DNA, 19 bp, Homo sapiens
  siRNA target sequence for NAV1 (NM_020443.2,2281-2299).
gcaagactagcttagatgt

SEQ ID NO: 94177 - DNA, 19 bp, Homo sapiens
  siRNA target sequence for NAV1 (NM_020443.2,2329-2347).
ctcctggagcccgttctaa

SEQ ID NO: 94178 - DNA, 19 bp, Homo sapiens
  siRNA target sequence for NAV1 (NM_020443.2,2331-2349).
cctggagcccgttctaaca

SEQ ID NO: 94179 - DNA, 19 bp, Homo sapiens
  siRNA target sequence for NAV1 (NM_020443.2,2332-2350).
ctggagcccgttctaacat

SEQ ID NO: 94180 - DNA, 19 bp, Homo sapiens
  siRNA target sequence for NAV1 (NM_020443.2,2373-2391).
ccagccaagtcaagttcta

SEQ ID NO: 94181 - DNA, 19 bp, Homo sapiens
  siRNA target sequence for NAV1 (NM_020443.2,2374-2392).
cagccaagtcaagttctat

SEQ ID NO: 94182 - DNA, 19 bp, Homo sapiens
  siRNA target sequence for NAV1 (NM_020443.2,2734-2752).
cctcactagccaatcttga

SEQ ID NO: 94183 - DNA, 19 bp, Homo sapiens
  siRNA target sequence for NAV1 (NM_020443.2,2737-2755).
cactagccaatcttgacaa

SEQ ID NO: 94184 - DNA, 19 bp, Homo sapiens
  siRNA target sequence for NAV1 (NM_020443.2,2778-2796).
ctaccatcatccagtgata

SEQ ID NO: 94185 - DNA, 19 bp, Homo sapiens
  siRNA target sequence for NAV1 (NM_020443.2,2881-2899).
cggcacccatcctcaatat

SEQ ID NO: 94186 - DNA, 19 bp, Homo sapiens
  siRNA target sequence for NAV1 (NM_020443.2,2964-2982).
cgcatgtaccccaaactct

SEQ ID NO: 94187 - DNA, 19 bp, Homo sapiens
  siRNA target sequence for NAV1 (NM_020443.2,3229-3247).
ggcgacattcccataccat

SEQ ID NO: 94188 - DNA, 19 bp, Homo sapiens
  siRNA target sequence for NAV1 (NM_020443.2,3230-3248).
gcgacattcccataccatt

SEQ ID NO: 94189 - DNA, 19 bp, Homo sapiens
  siRNA target sequence for NAV1 (NM_020443.2,3325-3343).
gccaacttaccaacatagt

SEQ ID NO: 94190 - DNA, 19 bp, Homo sapiens
  siRNA target sequence for NAV1 (NM_020443.2,3461-3479).
gagacccaagggaatgatt

SEQ ID NO: 94191 - DNA, 19 bp, Homo sapiens
  siRNA target sequence for NAV1 (NM_020443.2,3606-3624).
cgtagggaactggaatcat

SEQ ID NO: 94192 - DNA, 19 bp, Homo sapiens
  siRNA target sequence for NAV1 (NM_020443.2,3654-3672).
cagctttctgccaatgcta

SEQ ID NO: 94193 - DNA, 19 bp, Homo sapiens
  siRNA target sequence for NAV1 (NM_020443.2,3767-3785).
ggatttgcgagaaaccata

SEQ ID NO: 94194 - DNA, 19 bp, Homo sapiens
  siRNA target sequence for NAV1 (NM_020443.2,3775-3793).
gagaaaccatagactttct

SEQ ID NO: 94195 - DNA, 19 bp, Homo sapiens
  siRNA target sequence for NAV1 (NM_020443.2,3834-3852).
gcccttaatgcctcagaaa

SEQ ID NO: 94196 - DNA, 19 bp, Homo sapiens
  siRNA target sequence for NAV1 (NM_020443.2,3870-3888).
cggatcaagagacaaaact

SEQ ID NO: 94197 - DNA, 19 bp, Homo sapiens
  siRNA target sequence for NAV1 (NM_020443.2,3987-4005).
cttcgaagttccttcaaca

SEQ ID NO: 94198 - DNA, 19 bp, Homo sapiens
  siRNA target sequence for NAV1 (NM_020443.2,4001-4019).
caacaaagcgttcagtata

SEQ ID NO: 94199 - DNA, 19 bp, Homo sapiens
  siRNA target sequence for NAV1 (NM_020443.2,4210-4228).
ctaggctgttccatgcaaa

SEQ ID NO: 94200 - DNA, 19 bp, Homo sapiens
  siRNA target sequence for NAV1 (NM_020443.2,4354-4372).
gggagaccatgcacaacat

SEQ ID NO: 94201 - DNA, 19 bp, Homo sapiens
  siRNA target sequence for NAV1 (NM_020443.2,4454-4472).
gcaggtccctggatcatct

SEQ ID NO: 94202 - DNA, 19 bp, Homo sapiens
  siRNA target sequence for NAV1 (NM_020443.2,4559-4577).
ggatggcatcagtacttgt

SEQ ID NO: 94203 - DNA, 19 bp, Homo sapiens
  siRNA target sequence for NAV1 (NM_020443.2,4861-4879).
gccgtcgaggtgtcaataa

SEQ ID NO: 94204 - DNA, 19 bp, Homo sapiens
  siRNA target sequence for NAV1 (NM_020443.2,4863-4881).
cgtcgaggtgtcaataaca

SEQ ID NO: 94205 - DNA, 19 bp, Homo sapiens
  siRNA target sequence for NAV1 (NM_020443.2,4864-4882).
gtcgaggtgtcaataacat

SEQ ID NO: 94206 - DNA, 19 bp, Homo sapiens
  siRNA target sequence for NAV1 (NM_020443.2,4866-4884).
cgaggtgtcaataacatat

SEQ ID NO: 94207 - DNA, 19 bp, Homo sapiens
  siRNA target sequence for NAV1 (NM_020443.2,4870-4888).
gtgtcaataacatatcagt

SEQ ID NO: 94208 - DNA, 19 bp, Homo sapiens
  siRNA target sequence for NAV1 (NM_020443.2,4954-4972).
cgatgatgcagcactacat

SEQ ID NO: 94209 - DNA, 19 bp, Homo sapiens
  siRNA target sequence for NAV1 (NM_020443.2,4955-4973).
gatgatgcagcactacata

SEQ ID NO: 94210 - DNA, 19 bp, Homo sapiens
  siRNA target sequence for NAV1 (NM_020443.2,5132-5150).
caaggatctgcaactgtat

SEQ ID NO: 94211 - DNA, 19 bp, Homo sapiens
  siRNA target sequence for NAV1 (NM_020443.2,5135-5153).
ggatctgcaactgtatctt

SEQ ID NO: 94212 - DNA, 19 bp, Homo sapiens
  siRNA target sequence for NAV1 (NM_020443.2,5136-5154).
gatctgcaactgtatcttt

SEQ ID NO: 94213 - DNA, 19 bp, Homo sapiens
  siRNA target sequence for NAV1 (NM_020443.2,5283-5301).
cataaatgtccctatatta

SEQ ID NO: 94214 - DNA, 19 bp, Homo sapiens
  siRNA target sequence for NAV1 (NM_020443.2,5311-5329).
ccaatcagcctgtaaaaat

SEQ ID NO: 94215 - DNA, 19 bp, Homo sapiens
  siRNA target sequence for NAV1 (NM_020443.2,5497-5515).
ccaagctgtggtatcatct

SEQ ID NO: 94216 - DNA, 19 bp, Homo sapiens
  siRNA target sequence for NAV1 (NM_020443.2,5555-5573).
catcggcccttgcttcttt

SEQ ID NO: 94217 - DNA, 19 bp, Homo sapiens
  siRNA target sequence for NAV1 (NM_020443.2,5619-5637).
gacctgtggaacaactcta

SEQ ID NO: 94218 - DNA, 19 bp, Homo sapiens
  siRNA target sequence for NAV1 (NM_020443.2,5633-5651).
ctctatcattccctatcta

SEQ ID NO: 94219 - DNA, 19 bp, Homo sapiens
  siRNA target sequence for NAV1 (NM_020443.2,5662-5680).
ccaaggatgggataaaggt

SEQ ID NO: 94220 - DNA, 19 bp, Homo sapiens
  siRNA target sequence for NAV1 (NM_020443.2,5822-5840).
cgaggataggacagtcaaa

SEQ ID NO: 94221 - DNA, 19 bp, Homo sapiens
  siRNA target sequence for NAV1 (NM_020443.2,5904-5922).
gctgccaactacattgagt

SEQ ID NO: 94222 - DNA, 19 bp, Homo sapiens
  siRNA target sequence for NAV1 (NM_020443.2,5923-5941).
ctccagatcgagaaaccat

SEQ ID NO: 94223 - DNA, 19 bp, Homo sapiens
  siRNA target sequence for NAV2 (NM_145117.2,346-364).
gtcgcctccaaaatgaagt

SEQ ID NO: 94224 - DNA, 19 bp, Homo sapiens
  siRNA target sequence for NAV2 (NM_145117.2,574-592).
gtggaaaacgggttcgata

SEQ ID NO: 94225 - DNA, 19 bp, Homo sapiens
  siRNA target sequence for NAV2 (NM_145117.2,584-602).
ggttcgatacccagatcta

SEQ ID NO: 94226 - DNA, 19 bp, Homo sapiens
  siRNA target sequence for NAV2 (NM_145117.2,603-621).
cacagactgggccaatcat

SEQ ID NO: 94227 - DNA, 19 bp, Homo sapiens
  siRNA target sequence for NAV2 (NM_145117.2,605-623).
cagactgggccaatcatta

SEQ ID NO: 94228 - DNA, 19 bp, Homo sapiens
  siRNA target sequence for NAV2 (NM_145117.2,1059-1077).
gccacatcagcagtcaaaa

SEQ ID NO: 94229 - DNA, 19 bp, Homo sapiens
  siRNA target sequence for NAV2 (NM_145117.2,1160-1178).
ggtcaactactgctaacaa

SEQ ID NO: 94230 - DNA, 19 bp, Homo sapiens
  siRNA target sequence for NAV2 (NM_145117.2,1181-1199).
gacgcagccagagctttaa

SEQ ID NO: 94231 - DNA, 19 bp, Homo sapiens
  siRNA target sequence for NAV2 (NM_145117.2,1191-1209).
gagctttaacaactatgat

SEQ ID NO: 94232 - DNA, 19 bp, Homo sapiens
  siRNA target sequence for NAV2 (NM_145117.2,1290-1308).
ccccggaatgagtgacaat

SEQ ID NO: 94233 - DNA, 19 bp, Homo sapiens
  siRNA target sequence for NAV2 (NM_145117.2,1335-1353).
cagctccacccctactaat

SEQ ID NO: 94234 - DNA, 19 bp, Homo sapiens
  siRNA target sequence for NAV2 (NM_145117.2,1543-1561).
ctgaaacttttcaacagta

SEQ ID NO: 94235 - DNA, 19 bp, Homo sapiens
  siRNA target sequence for NAV2 (NM_145117.2,1915-1933).
gtgcccgagatgccaaaaa

SEQ ID NO: 94236 - DNA, 19 bp, Homo sapiens
  siRNA target sequence for NAV2 (NM_145117.2,1918-1936).
cccgagatgccaaaaaagt

SEQ ID NO: 94237 - DNA, 19 bp, Homo sapiens
  siRNA target sequence for NAV2 (NM_145117.2,2010-2028).
ccacagtggaataccaaaa

SEQ ID NO: 94238 - DNA, 19 bp, Homo sapiens
  siRNA target sequence for NAV2 (NM_145117.2,2178-2196).
ggcgtcctcagaaggaaaa

SEQ ID NO: 94239 - DNA, 19 bp, Homo sapiens
  siRNA target sequence for NAV2 (NM_145117.2,2305-2323).
cagccccagcagcaataca

SEQ ID NO: 94240 - DNA, 19 bp, Homo sapiens
  siRNA target sequence for NAV2 (NM_145117.2,2521-2539).
gctgatctgcggcagaatt

SEQ ID NO: 94241 - DNA, 19 bp, Homo sapiens
  siRNA target sequence for NAV2 (NM_145117.2,2522-2540).
ctgatctgcggcagaattt

SEQ ID NO: 94242 - DNA, 19 bp, Homo sapiens
  siRNA target sequence for NAV2 (NM_145117.2,2564-2582).
ggggaactcaggttacaca

SEQ ID NO: 94243 - DNA, 19 bp, Homo sapiens
  siRNA target sequence for NAV2 (NM_145117.2,2625-2643).
gatgagtggccgtagcata

SEQ ID NO: 94244 - DNA, 19 bp, Homo sapiens
  siRNA target sequence for NAV2 (NM_145117.2,2949-2967).
catccggaccgatgacatt

SEQ ID NO: 94245 - DNA, 19 bp, Homo sapiens
  siRNA target sequence for NAV2 (NM_145117.2,2952-2970).
ccggaccgatgacattaca

SEQ ID NO: 94246 - DNA, 19 bp, Homo sapiens
  siRNA target sequence for NAV2 (NM_145117.2,2953-2971).
cggaccgatgacattacaa

SEQ ID NO: 94247 - DNA, 19 bp, Homo sapiens
  siRNA target sequence for NAV2 (NM_145117.2,2989-3007).
ggtggacttggcctctata

SEQ ID NO: 94248 - DNA, 19 bp, Homo sapiens
  siRNA target sequence for NAV2 (NM_145117.2,3051-3069).
ggagaccctgcaacgaaat

SEQ ID NO: 94249 - DNA, 19 bp, Homo sapiens
  siRNA target sequence for NAV2 (NM_145117.2,3314-3332).
gctcagacagcggcataaa

SEQ ID NO: 94250 - DNA, 19 bp, Homo sapiens
  siRNA target sequence for NAV2 (NM_145117.2,3317-3335).
cagacagcggcataaaaat

SEQ ID NO: 94251 - DNA, 19 bp, Homo sapiens
  siRNA target sequence for NAV2 (NM_145117.2,3354-3372).
gaggcggaatccttctgat

SEQ ID NO: 94252 - DNA, 19 bp, Homo sapiens
  siRNA target sequence for NAV2 (NM_145117.2,3379-3397).
gacgagtccgacaaaagca

SEQ ID NO: 94253 - DNA, 19 bp, Homo sapiens
  siRNA target sequence for NAV2 (NM_145117.2,3396-3414).
cacgtcgggcaagaagaat

SEQ ID NO: 94254 - DNA, 19 bp, Homo sapiens
  siRNA target sequence for NAV2 (NM_145117.2,3591-3609).
gaagcgctccccatcagat

SEQ ID NO: 94255 - DNA, 19 bp, Homo sapiens
  siRNA target sequence for NAV2 (NM_145117.2,3620-3638).
gcagtggtgacgaatccaa

SEQ ID NO: 94256 - DNA, 19 bp, Homo sapiens
  siRNA target sequence for NAV2 (NM_145117.2,3621-3639).
cagtggtgacgaatccaaa

SEQ ID NO: 94257 - DNA, 19 bp, Homo sapiens
  siRNA target sequence for NAV2 (NM_145117.2,3778-3796).
ggcaaaatcccaaagtcat

SEQ ID NO: 94258 - DNA, 19 bp, Homo sapiens
  siRNA target sequence for NAV2 (NM_145117.2,3818-3836).
ctggtcggaagtcaagtat

SEQ ID NO: 94259 - DNA, 19 bp, Homo sapiens
  siRNA target sequence for NAV2 (NM_145117.2,3881-3899).
cccggacaaaccttcagta

SEQ ID NO: 94260 - DNA, 19 bp, Homo sapiens
  siRNA target sequence for NAV2 (NM_145117.2,4003-4021).
ctgccagtgcccaaactga

SEQ ID NO: 94261 - DNA, 19 bp, Homo sapiens
  siRNA target sequence for NAV2 (NM_145117.2,4124-4142).
gtaactcggtgaaagtgaa

SEQ ID NO: 94262 - DNA, 19 bp, Homo sapiens
  siRNA target sequence for NAV2 (NM_145117.2,4326-4344).
gactcagcaaggtaaccta

SEQ ID NO: 94263 - DNA, 19 bp, Homo sapiens
  siRNA target sequence for NAV2 (NM_145117.2,4499-4517).
gctcctccgcagttagcaa

SEQ ID NO: 94264 - DNA, 19 bp, Homo sapiens
  siRNA target sequence for NAV2 (NM_145117.2,4594-4612).
ggggtccccagccacaatt

SEQ ID NO: 94265 - DNA, 19 bp, Homo sapiens
  siRNA target sequence for NAV2 (NM_145117.2,4657-4675).
ccctttgtcagaactaaca

SEQ ID NO: 94266 - DNA, 19 bp, Homo sapiens
  siRNA target sequence for NAV2 (NM_145117.2,4659-4677).
ctttgtcagaactaacagt

SEQ ID NO: 94267 - DNA, 19 bp, Homo sapiens
  siRNA target sequence for NAV2 (NM_145117.2,4715-4733).
ctgctgctagccctaagtt

SEQ ID NO: 94268 - DNA, 19 bp, Homo sapiens
  siRNA target sequence for NAV2 (NM_145117.2,4717-4735).
gctgctagccctaagttct

SEQ ID NO: 94269 - DNA, 19 bp, Homo sapiens
  siRNA target sequence for NAV2 (NM_145117.2,4774-4792).
caccttgataggaacactt

SEQ ID NO: 94270 - DNA, 19 bp, Homo sapiens
  siRNA target sequence for NAV2 (NM_145117.2,4830-4848).
gcttcgcacgcaagaagat

SEQ ID NO: 94271 - DNA, 19 bp, Homo sapiens
  siRNA target sequence for NAV2 (NM_145117.2,4900-4918).
gccaattcccccttttcct

SEQ ID NO: 94272 - DNA, 19 bp, Homo sapiens
  siRNA target sequence for NAV2 (NM_145117.2,4939-4957).
ccctccggaacaagattca

SEQ ID NO: 94273 - DNA, 19 bp, Homo sapiens
  siRNA target sequence for NAV2 (NM_145117.2,4940-4958).
cctccggaacaagattcaa

SEQ ID NO: 94274 - DNA, 19 bp, Homo sapiens
  siRNA target sequence for NAV2 (NM_145117.2,4943-4961).
ccggaacaagattcaactt

SEQ ID NO: 94275 - DNA, 19 bp, Homo sapiens
  siRNA target sequence for NAV2 (NM_145117.2,5052-5070).
gcagtatgatccatacact

SEQ ID NO: 94276 - DNA, 19 bp, Homo sapiens
  siRNA target sequence for NAV2 (NM_145117.2,5398-5416).
gactcagaactgaatgagt

SEQ ID NO: 94277 - DNA, 19 bp, Homo sapiens
  siRNA target sequence for NAV2 (NM_145117.2,5465-5483).
ctgccattaatggagtaat

SEQ ID NO: 94278 - DNA, 19 bp, Homo sapiens
  siRNA target sequence for NAV2 (NM_145117.2,5467-5485).
gccattaatggagtaatta

SEQ ID NO: 94279 - DNA, 19 bp, Homo sapiens
  siRNA target sequence for NAV2 (NM_145117.2,5468-5486).
ccattaatggagtaattaa

SEQ ID NO: 94280 - DNA, 19 bp, Homo sapiens
  siRNA target sequence for NAV2 (NM_145117.2,5707-5725).
gcgtcctctcattcagata

SEQ ID NO: 94281 - DNA, 19 bp, Homo sapiens
  siRNA target sequence for NAV2 (NM_145117.2,5708-5726).
cgtcctctcattcagatat

SEQ ID NO: 94282 - DNA, 19 bp, Homo sapiens
  siRNA target sequence for NAV2 (NM_145117.2,5728-5746).
gaggagatgacggattctt

SEQ ID NO: 94283 - DNA, 19 bp, Homo sapiens
  siRNA target sequence for NAV2 (NM_145117.2,5730-5748).
ggagatgacggattcttct

SEQ ID NO: 94284 - DNA, 19 bp, Homo sapiens
  siRNA target sequence for NAV2 (NM_145117.2,5731-5749).
gagatgacggattcttctt

SEQ ID NO: 94285 - DNA, 19 bp, Homo sapiens
  siRNA target sequence for NAV2 (NM_145117.2,5798-5816).
cactgctgaggaattctca

SEQ ID NO: 94286 - DNA, 19 bp, Homo sapiens
  siRNA target sequence for NAV2 (NM_145117.2,5813-5831).
ctcactccaactctctaat

SEQ ID NO: 94287 - DNA, 19 bp, Homo sapiens
  siRNA target sequence for NAV2 (NM_145117.2,5815-5833).
cactccaactctctaattt

SEQ ID NO: 94288 - DNA, 19 bp, Homo sapiens
  siRNA target sequence for NAV2 (NM_145117.2,5817-5835).
ctccaactctctaatttca

SEQ ID NO: 94289 - DNA, 19 bp, Homo sapiens
  siRNA target sequence for NAV2 (NM_145117.2,5868-5886).
gcagctccgaaatgagtta

SEQ ID NO: 94290 - DNA, 19 bp, Homo sapiens
  siRNA target sequence for NAV2 (NM_145117.2,5871-5889).
gctccgaaatgagttaaga

SEQ ID NO: 94291 - DNA, 19 bp, Homo sapiens
  siRNA target sequence for NAV2 (NM_145117.2,5907-5925).
gacggatatccgcttagaa

SEQ ID NO: 94292 - DNA, 19 bp, Homo sapiens
  siRNA target sequence for NAV2 (NM_145117.2,6134-6152).
caaccagcctggacatgtt

SEQ ID NO: 94293 - DNA, 19 bp, Homo sapiens
  siRNA target sequence for NAV2 (NM_145117.2,6190-6208).
ggaggcaggcatgttaaga

SEQ ID NO: 94294 - DNA, 19 bp, Homo sapiens
  siRNA target sequence for NAV2 (NM_145117.2,6194-6212).
gcaggcatgttaagatagt

SEQ ID NO: 94295 - DNA, 19 bp, Homo sapiens
  siRNA target sequence for NAV2 (NM_145117.2,6195-6213).
caggcatgttaagatagtt

SEQ ID NO: 94296 - DNA, 19 bp, Homo sapiens
  siRNA target sequence for NAV2 (NM_145117.2,6197-6215).
ggcatgttaagatagttgt

SEQ ID NO: 94297 - DNA, 19 bp, Homo sapiens
  siRNA target sequence for NAV2 (NM_145117.2,6324-6342).
ggttagacggctgttcaaa

SEQ ID NO: 94298 - DNA, 19 bp, Homo sapiens
  siRNA target sequence for NAV2 (NM_145117.2,6329-6347).
gacggctgttcaaagaata

SEQ ID NO: 94299 - DNA, 19 bp, Homo sapiens
  siRNA target sequence for NAV2 (NM_145117.2,6601-6619).
caccgtcggatcattctct

SEQ ID NO: 94300 - DNA, 19 bp, Homo sapiens
  siRNA target sequence for NAV2 (NM_145117.2,6657-6675).
ccggctgtctgagtatata

SEQ ID NO: 94301 - DNA, 19 bp, Homo sapiens
  siRNA target sequence for NAV2 (NM_145117.2,6659-6677).
ggctgtctgagtatatagt

SEQ ID NO: 94302 - DNA, 19 bp, Homo sapiens
  siRNA target sequence for NAV2 (NM_145117.2,6706-6724).
ggggttatcgccaccttta

SEQ ID NO: 94303 - DNA, 19 bp, Homo sapiens
  siRNA target sequence for NAV2 (NM_145117.2,6707-6725).
gggttatcgccacctttaa

SEQ ID NO: 94304 - DNA, 19 bp, Homo sapiens
  siRNA target sequence for NAV2 (NM_145117.2,6719-6737).
cctttaacgtggaccataa

SEQ ID NO: 94305 - DNA, 19 bp, Homo sapiens
  siRNA target sequence for NAV2 (NM_145117.2,7227-7245).
caccgacttgtggaactat

SEQ ID NO: 94306 - DNA, 19 bp, Homo sapiens
  siRNA target sequence for NAV2 (NM_145117.2,7282-7300).
ggactccagctctatggaa

SEQ ID NO: 94307 - DNA, 19 bp, Homo sapiens
  siRNA target sequence for NAV2 (NM_145117.2,7483-7501).
ggtgacccgctgatgaaca

SEQ ID NO: 94308 - DNA, 19 bp, Homo sapiens
  siRNA target sequence for NAV2 (NM_145117.2,7484-7502).
gtgacccgctgatgaacat

SEQ ID NO: 94309 - DNA, 19 bp, Homo sapiens
  siRNA target sequence for NAV2 (NM_145117.2,7574-7592).
gccatcacgatgacatctt

SEQ ID NO: 94310 - DNA, 19 bp, Homo sapiens
  siRNA target sequence for NAV2 (NM_182964.3,1147-1165).
ctgggtcagaaaaagatct

SEQ ID NO: 94311 - DNA, 19 bp, Homo sapiens
  siRNA target sequence for NAV2 (NM_182964.3,1150-1168).
ggtcagaaaaagatctcta

SEQ ID NO: 94312 - DNA, 19 bp, Homo sapiens
  siRNA target sequence for NAV2 (NM_182964.3,5304-5322).
gttccatcacgcaaggtat

SEQ ID NO: 94313 - DNA, 19 bp, Homo sapiens
  siRNA target sequence for NAV2 (NM_182964.3,5308-5326).
catcacgcaaggtatgagt

SEQ ID NO: 94314 - DNA, 19 bp, Homo sapiens
  siRNA target sequence for NAV2 (NM_182964.3,5313-5331).
cgcaaggtatgagttagtt

SEQ ID NO: 94315 - DNA, 19 bp, Homo sapiens
  siRNA target sequence for NAV2 (NM_182964.3,5315-5333).
caaggtatgagttagttca

SEQ ID NO: 94316 - DNA, 19 bp, Homo sapiens
  siRNA target sequence for NAV3 (NM_014903.2,113-131).
ctcttccgataccaaatct

SEQ ID NO: 94317 - DNA, 19 bp, Homo sapiens
  siRNA target sequence for NAV3 (NM_014903.2,203-221).
cttgtcagcttgcgttaaa

SEQ ID NO: 94318 - DNA, 19 bp, Homo sapiens
  siRNA target sequence for NAV3 (NM_014903.2,306-324).
caaccactacctagcaaaa

SEQ ID NO: 94319 - DNA, 19 bp, Homo sapiens
  siRNA target sequence for NAV3 (NM_014903.2,385-403).
gcagaaatcatccagatta

SEQ ID NO: 94320 - DNA, 19 bp, Homo sapiens
  siRNA target sequence for NAV3 (NM_014903.2,386-404).
cagaaatcatccagattat

SEQ ID NO: 94321 - DNA, 19 bp, Homo sapiens
  siRNA target sequence for NAV3 (NM_014903.2,393-411).
catccagattattgcaaat

SEQ ID NO: 94322 - DNA, 19 bp, Homo sapiens
  siRNA target sequence for NAV3 (NM_014903.2,396-414).
ccagattattgcaaatgaa

SEQ ID NO: 94323 - DNA, 19 bp, Homo sapiens
  siRNA target sequence for NAV3 (NM_014903.2,429-447).
caatggatgtcctagaagt

SEQ ID NO: 94324 - DNA, 19 bp, Homo sapiens
  siRNA target sequence for NAV3 (NM_014903.2,446-464).
gtcagtctcagatgattga

SEQ ID NO: 94325 - DNA, 19 bp, Homo sapiens
  siRNA target sequence for NAV3 (NM_014903.2,494-512).
cagccagaggggtaaatgt

SEQ ID NO: 94326 - DNA, 19 bp, Homo sapiens
  siRNA target sequence for NAV3 (NM_014903.2,562-580).
ctagggctgtttttcagtt

SEQ ID NO: 94327 - DNA, 19 bp, Homo sapiens
  siRNA target sequence for NAV3 (NM_014903.2,606-624).
ccatcaacaacagtactat

SEQ ID NO: 94328 - DNA, 19 bp, Homo sapiens
  siRNA target sequence for NAV3 (NM_014903.2,728-746).
gatatgcaactcagtctaa

SEQ ID NO: 94329 - DNA, 19 bp, Homo sapiens
  siRNA target sequence for NAV3 (NM_014903.2,733-751).
gcaactcagtctaatcaca

SEQ ID NO: 94330 - DNA, 19 bp, Homo sapiens
  siRNA target sequence for NAV3 (NM_014903.2,754-772).
ggaattgcaaccagtcaaa

SEQ ID NO: 94331 - DNA, 19 bp, Homo sapiens
  siRNA target sequence for NAV3 (NM_014903.2,755-773).
gaattgcaaccagtcaaaa

SEQ ID NO: 94332 - DNA, 19 bp, Homo sapiens
  siRNA target sequence for NAV3 (NM_014903.2,834-852).
ccagggagcctctaattta

SEQ ID NO: 94333 - DNA, 19 bp, Homo sapiens
  siRNA target sequence for NAV3 (NM_014903.2,835-853).
cagggagcctctaatttaa

SEQ ID NO: 94334 - DNA, 19 bp, Homo sapiens
  siRNA target sequence for NAV3 (NM_014903.2,841-859).
gcctctaatttaaatagga

SEQ ID NO: 94335 - DNA, 19 bp, Homo sapiens
  siRNA target sequence for NAV3 (NM_014903.2,870-888).
ctttaacagcattgacaaa

SEQ ID NO: 94336 - DNA, 19 bp, Homo sapiens
  siRNA target sequence for NAV3 (NM_014903.2,948-966).
gtcttcaggtgtaaatggt

SEQ ID NO: 94337 - DNA, 19 bp, Homo sapiens
  siRNA target sequence for NAV3 (NM_014903.2,1079-1097).
ccaccatgttgactgtaaa

SEQ ID NO: 94338 - DNA, 19 bp, Homo sapiens
  siRNA target sequence for NAV3 (NM_014903.2,1082-1100).
ccatgttgactgtaaagca

SEQ ID NO: 94339 - DNA, 19 bp, Homo sapiens
  siRNA target sequence for NAV3 (NM_014903.2,1155-1173).
ctcagaaggggtcaaaact

SEQ ID NO: 94340 - DNA, 19 bp, Homo sapiens
  siRNA target sequence for NAV3 (NM_014903.2,1188-1206).
gaaatccatgcttgagaaa

SEQ ID NO: 94341 - DNA, 19 bp, Homo sapiens
  siRNA target sequence for NAV3 (NM_014903.2,1193-1211).
ccatgcttgagaaattcaa

SEQ ID NO: 94342 - DNA, 19 bp, Homo sapiens
  siRNA target sequence for NAV3 (NM_014903.2,1218-1236).
caatgcccggactgcttta

SEQ ID NO: 94343 - DNA, 19 bp, Homo sapiens
  siRNA target sequence for NAV3 (NM_014903.2,1281-1299).
ggatgatgatgccttttct

SEQ ID NO: 94344 - DNA, 19 bp, Homo sapiens
  siRNA target sequence for NAV3 (NM_014903.2,1298-1316).
ctgaatctggtgaaatgga

SEQ ID NO: 94345 - DNA, 19 bp, Homo sapiens
  siRNA target sequence for NAV3 (NM_014903.2,1586-1604).
cagctaagaaggaaagctt

SEQ ID NO: 94346 - DNA, 19 bp, Homo sapiens
  siRNA target sequence for NAV3 (NM_014903.2,1588-1606).
gctaagaaggaaagcttaa

SEQ ID NO: 94347 - DNA, 19 bp, Homo sapiens
  siRNA target sequence for NAV3 (NM_014903.2,1589-1607).
ctaagaaggaaagcttaat

SEQ ID NO: 94348 - DNA, 19 bp, Homo sapiens
  siRNA target sequence for NAV3 (NM_014903.2,1611-1629).
gtcttccagtggtattcca

SEQ ID NO: 94349 - DNA, 19 bp, Homo sapiens
  siRNA target sequence for NAV3 (NM_014903.2,1613-1631).
cttccagtggtattccaaa

SEQ ID NO: 94350 - DNA, 19 bp, Homo sapiens
  siRNA target sequence for NAV3 (NM_014903.2,1640-1658).
ctaaagttccaacagtaaa

SEQ ID NO: 94351 - DNA, 19 bp, Homo sapiens
  siRNA target sequence for NAV3 (NM_014903.2,1863-1881).
gcagagcacaggaaatggt

SEQ ID NO: 94352 - DNA, 19 bp, Homo sapiens
  siRNA target sequence for NAV3 (NM_014903.2,1894-1912).
cctcaacagcagcaacata

SEQ ID NO: 94353 - DNA, 19 bp, Homo sapiens
  siRNA target sequence for NAV3 (NM_014903.2,1928-1946).
cgacagtggcaccattcat

SEQ ID NO: 94354 - DNA, 19 bp, Homo sapiens
  siRNA target sequence for NAV3 (NM_014903.2,1931-1949).
cagtggcaccattcattta

SEQ ID NO: 94355 - DNA, 19 bp, Homo sapiens
  siRNA target sequence for NAV3 (NM_014903.2,1933-1951).
gtggcaccattcatttaca

SEQ ID NO: 94356 - DNA, 19 bp, Homo sapiens
  siRNA target sequence for NAV3 (NM_014903.2,1969-1987).
gaaggtaccgctttaccat

SEQ ID NO: 94357 - DNA, 19 bp, Homo sapiens
  siRNA target sequence for NAV3 (NM_014903.2,2016-2034).
gatggacttatcatatagt

SEQ ID NO: 94358 - DNA, 19 bp, Homo sapiens
  siRNA target sequence for NAV3 (NM_014903.2,2020-2038).
gacttatcatatagtaaga

SEQ ID NO: 94359 - DNA, 19 bp, Homo sapiens
  siRNA target sequence for NAV3 (NM_014903.2,2152-2170).
cttcgtgggactcagataa

SEQ ID NO: 94360 - DNA, 19 bp, Homo sapiens
  siRNA target sequence for NAV3 (NM_014903.2,2199-2217).
cagcactgtgacaacagaa

SEQ ID NO: 94361 - DNA, 19 bp, Homo sapiens
  siRNA target sequence for NAV3 (NM_014903.2,2204-2222).
ctgtgacaacagaagttaa

SEQ ID NO: 94362 - DNA, 19 bp, Homo sapiens
  siRNA target sequence for NAV3 (NM_014903.2,2208-2226).
gacaacagaagttaatgga

SEQ ID NO: 94363 - DNA, 19 bp, Homo sapiens
  siRNA target sequence for NAV3 (NM_014903.2,2342-2360).
gtggtaccagtcgattcat

SEQ ID NO: 94364 - DNA, 19 bp, Homo sapiens
  siRNA target sequence for NAV3 (NM_014903.2,2370-2388).
cccctcgaggttcatgtat

SEQ ID NO: 94365 - DNA, 19 bp, Homo sapiens
  siRNA target sequence for NAV3 (NM_014903.2,2371-2389).
ccctcgaggttcatgtata

SEQ ID NO: 94366 - DNA, 19 bp, Homo sapiens
  siRNA target sequence for NAV3 (NM_014903.2,2439-2457).
gattgacatgagtgagaaa

SEQ ID NO: 94367 - DNA, 19 bp, Homo sapiens
  siRNA target sequence for NAV3 (NM_014903.2,2487-2505).
ggtcgatgtgggtggatat

SEQ ID NO: 94368 - DNA, 19 bp, Homo sapiens
  siRNA target sequence for NAV3 (NM_014903.2,2488-2506).
gtcgatgtgggtggatata

SEQ ID NO: 94369 - DNA, 19 bp, Homo sapiens
  siRNA target sequence for NAV3 (NM_014903.2,2491-2509).
gatgtgggtggatatatga

SEQ ID NO: 94370 - DNA, 19 bp, Homo sapiens
  siRNA target sequence for NAV3 (NM_014903.2,2508-2526).
gagtgatggtgatatcctt

SEQ ID NO: 94371 - DNA, 19 bp, Homo sapiens
  siRNA target sequence for NAV3 (NM_014903.2,2572-2590).
gatggaggacttaacctat

SEQ ID NO: 94372 - DNA, 19 bp, Homo sapiens
  siRNA target sequence for NAV3 (NM_014903.2,2575-2593).
ggaggacttaacctatata

SEQ ID NO: 94373 - DNA, 19 bp, Homo sapiens
  siRNA target sequence for NAV3 (NM_014903.2,2578-2596).
ggacttaacctatatacta

SEQ ID NO: 94374 - DNA, 19 bp, Homo sapiens
  siRNA target sequence for NAV3 (NM_014903.2,2581-2599).
cttaacctatatactagaa

SEQ ID NO: 94375 - DNA, 19 bp, Homo sapiens
  siRNA target sequence for NAV3 (NM_014903.2,2790-2808).
cgtcccctctaggaagaat

SEQ ID NO: 94376 - DNA, 19 bp, Homo sapiens
  siRNA target sequence for NAV3 (NM_014903.2,2791-2809).
gtcccctctaggaagaata

SEQ ID NO: 94377 - DNA, 19 bp, Homo sapiens
  siRNA target sequence for NAV3 (NM_014903.2,2884-2902).
ccagaagaagattttgaca

SEQ ID NO: 94378 - DNA, 19 bp, Homo sapiens
  siRNA target sequence for NAV3 (NM_014903.2,3051-3069).
gcagaaagctggaacaagt

SEQ ID NO: 94379 - DNA, 19 bp, Homo sapiens
  siRNA target sequence for NAV3 (NM_014903.2,3129-3147).
cctaaaaggatcatctcta

SEQ ID NO: 94380 - DNA, 19 bp, Homo sapiens
  siRNA target sequence for NAV3 (NM_014903.2,3265-3283).
gggtcatctgccatgatca

SEQ ID NO: 94381 - DNA, 19 bp, Homo sapiens
  siRNA target sequence for NAV3 (NM_014903.2,3288-3306).
cagtggagcaaccataaca

SEQ ID NO: 94382 - DNA, 19 bp, Homo sapiens
  siRNA target sequence for NAV3 (NM_014903.2,3420-3438).
gcatgttagctcaaagact

SEQ ID NO: 94383 - DNA, 19 bp, Homo sapiens
  siRNA target sequence for NAV3 (NM_014903.2,3421-3439).
catgttagctcaaagacta

SEQ ID NO: 94384 - DNA, 19 bp, Homo sapiens
  siRNA target sequence for NAV3 (NM_014903.2,3515-3533).
ccagtaccagcagtattga

SEQ ID NO: 94385 - DNA, 19 bp, Homo sapiens
  siRNA target sequence for NAV3 (NM_014903.2,3562-3580).
gccaccacctcgaaactga

SEQ ID NO: 94386 - DNA, 19 bp, Homo sapiens
  siRNA target sequence for NAV3 (NM_014903.2,3579-3597).
gagagaaccaactaaaatt

SEQ ID NO: 94387 - DNA, 19 bp, Homo sapiens
  siRNA target sequence for NAV3 (NM_014903.2,3616-3634).
cctgtcaccgtcaaccaaa

SEQ ID NO: 94388 - DNA, 19 bp, Homo sapiens
  siRNA target sequence for NAV3 (NM_014903.2,3775-3793).
gcctcacccacatttcgaa

SEQ ID NO: 94389 - DNA, 19 bp, Homo sapiens
  siRNA target sequence for NAV3 (NM_014903.2,3827-3845).
cctctgcacctaatactga

SEQ ID NO: 94390 - DNA, 19 bp, Homo sapiens
  siRNA target sequence for NAV3 (NM_014903.2,3873-3891).
cagccctagtaccacatta

SEQ ID NO: 94391 - DNA, 19 bp, Homo sapiens
  siRNA target sequence for NAV3 (NM_014903.2,3966-3984).
cagcagccctctcttcaat

SEQ ID NO: 94392 - DNA, 19 bp, Homo sapiens
  siRNA target sequence for NAV3 (NM_014903.2,3990-4008).
ctcagacttaactacagat

SEQ ID NO: 94393 - DNA, 19 bp, Homo sapiens
  siRNA target sequence for NAV3 (NM_014903.2,3996-4014).
cttaactacagatgttata

SEQ ID NO: 94394 - DNA, 19 bp, Homo sapiens
  siRNA target sequence for NAV3 (NM_014903.2,4043-4061).
cagcatcggttcactcttt

SEQ ID NO: 94395 - DNA, 19 bp, Homo sapiens
  siRNA target sequence for NAV3 (NM_014903.2,4290-4308).
gcttgacagaaatacacta

SEQ ID NO: 94396 - DNA, 19 bp, Homo sapiens
  siRNA target sequence for NAV3 (NM_014903.2,4369-4387).
gagtggttgcgttctcatt

SEQ ID NO: 94397 - DNA, 19 bp, Homo sapiens
  siRNA target sequence for NAV3 (NM_014903.2,4462-4480).
ggaaaataccacttttcta

SEQ ID NO: 94398 - DNA, 19 bp, Homo sapiens
  siRNA target sequence for NAV3 (NM_014903.2,4486-4504).
gtgagcccaacaaatttgt

SEQ ID NO: 94399 - DNA, 19 bp, Homo sapiens
  siRNA target sequence for NAV3 (NM_014903.2,4488-4506).
gagcccaacaaatttgtct

SEQ ID NO: 94400 - DNA, 19 bp, Homo sapiens
  siRNA target sequence for NAV3 (NM_014903.2,4563-4581).
ctcttccttcgatctctat

SEQ ID NO: 94401 - DNA, 19 bp, Homo sapiens
  siRNA target sequence for NAV3 (NM_014903.2,4675-4693).
gttcatggctcttcattat

SEQ ID NO: 94402 - DNA, 19 bp, Homo sapiens
  siRNA target sequence for NAV3 (NM_014903.2,4698-4716).
ggtgtccagcacttcttct

SEQ ID NO: 94403 - DNA, 19 bp, Homo sapiens
  siRNA target sequence for NAV3 (NM_014903.2,4701-4719).
gtccagcacttcttctctt

SEQ ID NO: 94404 - DNA, 19 bp, Homo sapiens
  siRNA target sequence for NAV3 (NM_014903.2,4744-4762).
cattcagagcaaatccata

SEQ ID NO: 94405 - DNA, 19 bp, Homo sapiens
  siRNA target sequence for NAV3 (NM_014903.2,4776-4794).
gctggttgcatcacaagaa

SEQ ID NO: 94406 - DNA, 19 bp, Homo sapiens
  siRNA target sequence for NAV3 (NM_014903.2,4777-4795).
ctggttgcatcacaagaaa

SEQ ID NO: 94407 - DNA, 19 bp, Homo sapiens
  siRNA target sequence for NAV3 (NM_014903.2,4876-4894).
ggccgattgcaaagtctaa

SEQ ID NO: 94408 - DNA, 19 bp, Homo sapiens
  siRNA target sequence for NAV3 (NM_014903.2,4878-4896).
ccgattgcaaagtctaact

SEQ ID NO: 94409 - DNA, 19 bp, Homo sapiens
  siRNA target sequence for NAV3 (NM_014903.2,4879-4897).
cgattgcaaagtctaacta

SEQ ID NO: 94410 - DNA, 19 bp, Homo sapiens
  siRNA target sequence for NAV3 (NM_014903.2,4880-4898).
gattgcaaagtctaactat

SEQ ID NO: 94411 - DNA, 19 bp, Homo sapiens
  siRNA target sequence for NAV3 (NM_014903.2,4895-4913).
ctatgacagcggaacaaaa

SEQ ID NO: 94412 - DNA, 19 bp, Homo sapiens
  siRNA target sequence for NAV3 (NM_014903.2,4914-4932).
ggaatctgaacttatagaa

SEQ ID NO: 94413 - DNA, 19 bp, Homo sapiens
  siRNA target sequence for NAV3 (NM_014903.2,5054-5072).
ctgaaagtgtttctagtat

SEQ ID NO: 94414 - DNA, 19 bp, Homo sapiens
  siRNA target sequence for NAV3 (NM_014903.2,5096-5114).
gtattggcagtggtaatga

SEQ ID NO: 94415 - DNA, 19 bp, Homo sapiens
  siRNA target sequence for NAV3 (NM_014903.2,5161-5179).
ggaagtgagctgagaagtt

SEQ ID NO: 94416 - DNA, 19 bp, Homo sapiens
  siRNA target sequence for NAV3 (NM_014903.2,5225-5243).
catcacattctgacattga

SEQ ID NO: 94417 - DNA, 19 bp, Homo sapiens
  siRNA target sequence for NAV3 (NM_014903.2,5274-5292).
ccccaagttaccccataat

SEQ ID NO: 94418 - DNA, 19 bp, Homo sapiens
  siRNA target sequence for NAV3 (NM_014903.2,5316-5334).
catgaagccctcacaatct

SEQ ID NO: 94419 - DNA, 19 bp, Homo sapiens
  siRNA target sequence for NAV3 (NM_014903.2,5383-5401).
cctgtgatctacaagcata

SEQ ID NO: 94420 - DNA, 19 bp, Homo sapiens
  siRNA target sequence for NAV3 (NM_014903.2,5386-5404).
gtgatctacaagcatagat

SEQ ID NO: 94421 - DNA, 19 bp, Homo sapiens
  siRNA target sequence for NAV3 (NM_014903.2,5388-5406).
gatctacaagcatagatct

SEQ ID NO: 94422 - DNA, 19 bp, Homo sapiens
  siRNA target sequence for NAV3 (NM_014903.2,5429-5447).
ctgaggcagagataattct

SEQ ID NO: 94423 - DNA, 19 bp, Homo sapiens
  siRNA target sequence for NAV3 (NM_014903.2,5513-5531).
gctctgctcatcatcttga

SEQ ID NO: 94424 - DNA, 19 bp, Homo sapiens
  siRNA target sequence for NAV3 (NM_014903.2,5672-5690).
catcttccaggcagtcatt

SEQ ID NO: 94425 - DNA, 19 bp, Homo sapiens
  siRNA target sequence for NAV3 (NM_014903.2,5724-5742).
ggctgttagctcagatatt

SEQ ID NO: 94426 - DNA, 19 bp, Homo sapiens
  siRNA target sequence for NAV3 (NM_014903.2,5725-5743).
gctgttagctcagatattt

SEQ ID NO: 94427 - DNA, 19 bp, Homo sapiens
  siRNA target sequence for NAV3 (NM_014903.2,5759-5777).
gtgatgcaactggacataa

SEQ ID NO: 94428 - DNA, 19 bp, Homo sapiens
  siRNA target sequence for NAV3 (NM_014903.2,5779-5797).
gatggccgcagtgtgaaaa

SEQ ID NO: 94429 - DNA, 19 bp, Homo sapiens
  siRNA target sequence for NAV3 (NM_014903.2,5782-5800).
ggccgcagtgtgaaaatta

SEQ ID NO: 94430 - DNA, 19 bp, Homo sapiens
  siRNA target sequence for NAV3 (NM_014903.2,5783-5801).
gccgcagtgtgaaaattat

SEQ ID NO: 94431 - DNA, 19 bp, Homo sapiens
  siRNA target sequence for NAV3 (NM_014903.2,5786-5804).
gcagtgtgaaaattatagt

SEQ ID NO: 94432 - DNA, 19 bp, Homo sapiens
  siRNA target sequence for NAV3 (NM_014903.2,5825-5843).
gtcgagcaaaggaccaaaa

SEQ ID NO: 94433 - DNA, 19 bp, Homo sapiens
  siRNA target sequence for NAV3 (NM_014903.2,5827-5845).
cgagcaaaggaccaaaaat

SEQ ID NO: 94434 - DNA, 19 bp, Homo sapiens
  siRNA target sequence for NAV3 (NM_014903.2,5831-5849).
caaaggaccaaaaatctca

SEQ ID NO: 94435 - DNA, 19 bp, Homo sapiens
  siRNA target sequence for NAV3 (NM_014903.2,5839-5857).
caaaaatctcaggcatatt

SEQ ID NO: 94436 - DNA, 19 bp, Homo sapiens
  siRNA target sequence for NAV3 (NM_014903.2,5848-5866).
caggcatatttgataggat

SEQ ID NO: 94437 - DNA, 19 bp, Homo sapiens
  siRNA target sequence for NAV3 (NM_014903.2,5901-5919).
cttagatggtgtaataaga

SEQ ID NO: 94438 - DNA, 19 bp, Homo sapiens
  siRNA target sequence for NAV3 (NM_014903.2,5911-5929).
gtaataagacgtctcttta

SEQ ID NO: 94439 - DNA, 19 bp, Homo sapiens
  siRNA target sequence for NAV3 (NM_014903.2,5918-5936).
gacgtctctttaaggaata

SEQ ID NO: 94440 - DNA, 19 bp, Homo sapiens
  siRNA target sequence for NAV3 (NM_014903.2,5938-5956).
gtattccgaattgatacat

SEQ ID NO: 94441 - DNA, 19 bp, Homo sapiens
  siRNA target sequence for NAV3 (NM_014903.2,5984-6002).
gcattgctagctactgtat

SEQ ID NO: 94442 - DNA, 19 bp, Homo sapiens
  siRNA target sequence for NAV3 (NM_014903.2,5997-6015).
ctgtataggagacttaatt

SEQ ID NO: 94443 - DNA, 19 bp, Homo sapiens
  siRNA target sequence for NAV3 (NM_014903.2,6017-6035).
gatcccataacctagaagt

SEQ ID NO: 94444 - DNA, 19 bp, Homo sapiens
  siRNA target sequence for NAV3 (NM_014903.2,6140-6158).
cgctgattcctaaaccaat

SEQ ID NO: 94445 - DNA, 19 bp, Homo sapiens
  siRNA target sequence for NAV3 (NM_014903.2,6141-6159).
gctgattcctaaaccaatt

SEQ ID NO: 94446 - DNA, 19 bp, Homo sapiens
  siRNA target sequence for NAV3 (NM_014903.2,6220-6238).
ggtactggaaagacctatt

SEQ ID NO: 94447 - DNA, 19 bp, Homo sapiens
  siRNA target sequence for NAV3 (NM_014903.2,6256-6274).
gaatatgtaataaccaaat

SEQ ID NO: 94448 - DNA, 19 bp, Homo sapiens
  siRNA target sequence for NAV3 (NM_014903.2,6295-6313).
gatgcaattgccactttta

SEQ ID NO: 94449 - DNA, 19 bp, Homo sapiens
  siRNA target sequence for NAV3 (NM_014903.2,6316-6334).
gtggaccacaagtcaagta

SEQ ID NO: 94450 - DNA, 19 bp, Homo sapiens
  siRNA target sequence for NAV3 (NM_014903.2,6321-6339).
ccacaagtcaagtaaggaa

SEQ ID NO: 94451 - DNA, 19 bp, Homo sapiens
  siRNA target sequence for NAV3 (NM_014903.2,6322-6340).
cacaagtcaagtaaggaat

SEQ ID NO: 94452 - DNA, 19 bp, Homo sapiens
  siRNA target sequence for NAV3 (NM_014903.2,6332-6350).
gtaaggaattgcaacaata

SEQ ID NO: 94453 - DNA, 19 bp, Homo sapiens
  siRNA target sequence for NAV3 (NM_014903.2,6372-6390).
gtgcagtgctgataataat

SEQ ID NO: 94454 - DNA, 19 bp, Homo sapiens
  siRNA target sequence for NAV3 (NM_014903.2,6394-6412).
gtggagctcccagttgtaa

SEQ ID NO: 94455 - DNA, 19 bp, Homo sapiens
  siRNA target sequence for NAV3 (NM_014903.2,6396-6414).
ggagctcccagttgtaata

SEQ ID NO: 94456 - DNA, 19 bp, Homo sapiens
  siRNA target sequence for NAV3 (NM_014903.2,6436-6454).
gtgggctctctgagtgata

SEQ ID NO: 94457 - DNA, 19 bp, Homo sapiens
  siRNA target sequence for NAV3 (NM_014903.2,6439-6457).
ggctctctgagtgatatct

SEQ ID NO: 94458 - DNA, 19 bp, Homo sapiens
  siRNA target sequence for NAV3 (NM_014903.2,6443-6461).
ctctgagtgatatcttcaa

SEQ ID NO: 94459 - DNA, 19 bp, Homo sapiens
  siRNA target sequence for NAV3 (NM_014903.2,6555-6573).
caatttcaggtgggtatta

SEQ ID NO: 94460 - DNA, 19 bp, Homo sapiens
  siRNA target sequence for NAV3 (NM_014903.2,6566-6584).
gggtattatgtgcaaatca

SEQ ID NO: 94461 - DNA, 19 bp, Homo sapiens
  siRNA target sequence for NAV3 (NM_014903.2,6612-6630).
cagatatcttcgaagaaaa

SEQ ID NO: 94462 - DNA, 19 bp, Homo sapiens
  siRNA target sequence for NAV3 (NM_014903.2,6626-6644).
gaaaactcatagagataga

SEQ ID NO: 94463 - DNA, 19 bp, Homo sapiens
  siRNA target sequence for NAV3 (NM_014903.2,6653-6671).
ggaacattcgcaataatga

SEQ ID NO: 94464 - DNA, 19 bp, Homo sapiens
  siRNA target sequence for NAV3 (NM_014903.2,6698-6716).
cgaagacgtggcatcatct

SEQ ID NO: 94465 - DNA, 19 bp, Homo sapiens
  siRNA target sequence for NAV3 (NM_014903.2,6755-6773).
ccattggtccccgactatt

SEQ ID NO: 94466 - DNA, 19 bp, Homo sapiens
  siRNA target sequence for NAV3 (NM_014903.2,6793-6811).
gtagaaggttctagagtat

SEQ ID NO: 94467 - DNA, 19 bp, Homo sapiens
  siRNA target sequence for NAV3 (NM_014903.2,6820-6838).
gatctctggaactattctt

SEQ ID NO: 94468 - DNA, 19 bp, Homo sapiens
  siRNA target sequence for NAV3 (NM_014903.2,6825-6843).
ctggaactattctttagta

SEQ ID NO: 94469 - DNA, 19 bp, Homo sapiens
  siRNA target sequence for NAV3 (NM_014903.2,6866-6884).
gagagggtcttcagatgta

SEQ ID NO: 94470 - DNA, 19 bp, Homo sapiens
  siRNA target sequence for NAV3 (NM_014903.2,6994-7012).
gaagatgttgggtatgaaa

SEQ ID NO: 94471 - DNA, 19 bp, Homo sapiens
  siRNA target sequence for NAV3 (NM_014903.2,7073-7091).
gagatcccctgatgaatat

SEQ ID NO: 94472 - DNA, 19 bp, Homo sapiens
  siRNA target sequence for NAV3 (NM_014903.2,7177-7195).
gattcatctcttgaatcta

SEQ ID NO: 94473 - DNA, 19 bp, Homo sapiens
  siRNA target sequence for NDUFA10 (NM_004544.2,146-164).
ccagcgcgtgagaggaatt

SEQ ID NO: 94474 - DNA, 19 bp, Homo sapiens
  siRNA target sequence for NDUFA10 (NM_004544.2,149-167).
gcgcgtgagaggaattcat

SEQ ID NO: 94475 - DNA, 19 bp, Homo sapiens
  siRNA target sequence for NDUFA10 (NM_004544.2,150-168).
cgcgtgagaggaattcata

SEQ ID NO: 94476 - DNA, 19 bp, Homo sapiens
  siRNA target sequence for NDUFA10 (NM_004544.2,181-199).
gcaaactgcgctatggaat

SEQ ID NO: 94477 - DNA, 19 bp, Homo sapiens
  siRNA target sequence for NDUFA10 (NM_004544.2,209-227).
cctacttggggataaagca

SEQ ID NO: 94478 - DNA, 19 bp, Homo sapiens
  siRNA target sequence for NDUFA10 (NM_004544.2,340-358).
ctgaagcggggattcatta

SEQ ID NO: 94479 - DNA, 19 bp, Homo sapiens
  siRNA target sequence for NDUFA10 (NM_004544.2,387-405).
cccctcgccaccgactata

SEQ ID NO: 94480 - DNA, 19 bp, Homo sapiens
  siRNA target sequence for NDUFA10 (NM_004544.2,388-406).
ccctcgccaccgactataa

SEQ ID NO: 94481 - DNA, 19 bp, Homo sapiens
  siRNA target sequence for NDUFA10 (NM_004544.2,418-436).
gtttggagaaattttacga

SEQ ID NO: 94482 - DNA, 19 bp, Homo sapiens
  siRNA target sequence for NDUFA10 (NM_004544.2,434-452).
cgatgatccgagaagcaat

SEQ ID NO: 94483 - DNA, 19 bp, Homo sapiens
  siRNA target sequence for NDUFA10 (NM_004544.2,471-489).
ctgcagtcctggttgtaca

SEQ ID NO: 94484 - DNA, 19 bp, Homo sapiens
  siRNA target sequence for NDUFA10 (NM_004544.2,744-762).
ggagatccacatgaaatga

SEQ ID NO: 94485 - DNA, 19 bp, Homo sapiens
  siRNA target sequence for NDUFA10 (NM_004544.2,745-763).
gagatccacatgaaatgaa

SEQ ID NO: 94486 - DNA, 19 bp, Homo sapiens
  siRNA target sequence for NDUFA10 (NM_004544.2,764-782).
gatcacctctgcctatcta

SEQ ID NO: 94487 - DNA, 19 bp, Homo sapiens
  siRNA target sequence for NDUFA10 (NM_004544.2,775-793).
cctatctacaggacattga

SEQ ID NO: 94488 - DNA, 19 bp, Homo sapiens
  siRNA target sequence for NDUFA10 (NM_004544.2,862-880).
gggaagctcaagattcaaa

SEQ ID NO: 94489 - DNA, 19 bp, Homo sapiens
  siRNA target sequence for NDUFA10 (NM_004544.2,885-903).
gtggtagaggacattgaat

SEQ ID NO: 94490 - DNA, 19 bp, Homo sapiens
  siRNA target sequence for NDUFA10 (NM_004544.2,964-982).
gattactggttcaggataa

SEQ ID NO: 94491 - DNA, 19 bp, Homo sapiens
  siRNA target sequence for NDUFA10 (NM_004544.2,1001-1019).
cacaagcattcctatcttt

SEQ ID NO: 94492 - DNA, 19 bp, Homo sapiens
  siRNA target sequence for NEK11 (NM_024800.2,340-358).
ccatttccacttatccaaa

SEQ ID NO: 94493 - DNA, 19 bp, Homo sapiens
  siRNA target sequence for NEK11 (NM_024800.2,373-391).
gaagatacgtgcttcaaca

SEQ ID NO: 94494 - DNA, 19 bp, Homo sapiens
  siRNA target sequence for NEK11 (NM_024800.2,409-427).
gttttggaactgtctatct

SEQ ID NO: 94495 - DNA, 19 bp, Homo sapiens
  siRNA target sequence for NEK11 (NM_024800.2,456-474).
gaggaattaaaggtactta

SEQ ID NO: 94496 - DNA, 19 bp, Homo sapiens
  siRNA target sequence for NEK11 (NM_024800.2,486-504).
gttggagaactaaatccaa

SEQ ID NO: 94497 - DNA, 19 bp, Homo sapiens
  siRNA target sequence for NEK11 (NM_024800.2,490-508).
gagaactaaatccaaatga

SEQ ID NO: 94498 - DNA, 19 bp, Homo sapiens
  siRNA target sequence for NEK11 (NM_024800.2,569-587).
caagttccatgcaagtttt

SEQ ID NO: 94499 - DNA, 19 bp, Homo sapiens
  siRNA target sequence for NEK11 (NM_024800.2,583-601).
gttttgtggagcaagataa

SEQ ID NO: 94500 - DNA, 19 bp, Homo sapiens
  siRNA target sequence for NEK11 (NM_024800.2,588-606).
gtggagcaagataatttct

SEQ ID NO: 94501 - DNA, 19 bp, Homo sapiens
  siRNA target sequence for NEK11 (NM_024800.2,632-650).
ccgagatctggacgataaa

SEQ ID NO: 94502 - DNA, 19 bp, Homo sapiens
  siRNA target sequence for NEK11 (NM_024800.2,633-651).
cgagatctggacgataaaa

SEQ ID NO: 94503 - DNA, 19 bp, Homo sapiens
  siRNA target sequence for NEK11 (NM_024800.2,752-770).
gatacttcatcgagactta

SEQ ID NO: 94504 - DNA, 19 bp, Homo sapiens
  siRNA target sequence for NEK11 (NM_024800.2,822-840).
ggagtttctcgacttctaa

SEQ ID NO: 94505 - DNA, 19 bp, Homo sapiens
  siRNA target sequence for NEK11 (NM_024800.2,823-841).
gagtttctcgacttctaat

SEQ ID NO: 94506 - DNA, 19 bp, Homo sapiens
  siRNA target sequence for NEK11 (NM_024800.2,850-868).
gtgacctggccacaacttt

SEQ ID NO: 94507 - DNA, 19 bp, Homo sapiens
  siRNA target sequence for NEK11 (NM_024800.2,871-889).
ctggaactccccattatat

SEQ ID NO: 94508 - DNA, 19 bp, Homo sapiens
  siRNA target sequence for NEK11 (NM_024800.2,873-891).
ggaactccccattatatga

SEQ ID NO: 94509 - DNA, 19 bp, Homo sapiens
  siRNA target sequence for NEK11 (NM_024800.2,912-930).
caaggctatgacacaaagt

SEQ ID NO: 94510 - DNA, 19 bp, Homo sapiens
  siRNA target sequence for NEK11 (NM_024800.2,938-956).
ctggtcactggcatgcatt

SEQ ID NO: 94511 - DNA, 19 bp, Homo sapiens
  siRNA target sequence for NEK11 (NM_024800.2,943-961).
cactggcatgcattttgta

SEQ ID NO: 94512 - DNA, 19 bp, Homo sapiens
  siRNA target sequence for NEK11 (NM_024800.2,948-966).
gcatgcattttgtatgaga

SEQ ID NO: 94513 - DNA, 19 bp, Homo sapiens
  siRNA target sequence for NEK11 (NM_024800.2,970-988).
gctgcatgaatcatgcatt

SEQ ID NO: 94514 - DNA, 19 bp, Homo sapiens
  siRNA target sequence for NEK11 (NM_024800.2,984-1002).
gcattcgctggctccaatt

SEQ ID NO: 94515 - DNA, 19 bp, Homo sapiens
  siRNA target sequence for NEK11 (NM_024800.2,990-1008).
gctggctccaatttcttat

SEQ ID NO: 94516 - DNA, 19 bp, Homo sapiens
  siRNA target sequence for NEK11 (NM_024800.2,1049-1067).
ccctgagagatatccaaaa

SEQ ID NO: 94517 - DNA, 19 bp, Homo sapiens
  siRNA target sequence for NEK11 (NM_024800.2,1100-1118).
caagaatccttcattaaga

SEQ ID NO: 94518 - DNA, 19 bp, Homo sapiens
  siRNA target sequence for NEK11 (NM_024800.2,1117-1135).
gaccatctgctatcgaaat

SEQ ID NO: 94519 - DNA, 19 bp, Homo sapiens
  siRNA target sequence for NEK11 (NM_024800.2,1119-1137).
ccatctgctatcgaaattt

SEQ ID NO: 94520 - DNA, 19 bp, Homo sapiens
  siRNA target sequence for NEK11 (NM_024800.2,1158-1176).
gagcagctacagaacctaa

SEQ ID NO: 94521 - DNA, 19 bp, Homo sapiens
  siRNA target sequence for NEK11 (NM_024800.2,1161-1179).
cagctacagaacctaatgt

SEQ ID NO: 94522 - DNA, 19 bp, Homo sapiens
  siRNA target sequence for NEK11 (NM_024800.2,1163-1181).
gctacagaacctaatgtgt

SEQ ID NO: 94523 - DNA, 19 bp, Homo sapiens
  siRNA target sequence for NEK11 (NM_024800.2,1167-1185).
cagaacctaatgtgtagat

SEQ ID NO: 94524 - DNA, 19 bp, Homo sapiens
  siRNA target sequence for NEK11 (NM_024800.2,1169-1187).
gaacctaatgtgtagatat

SEQ ID NO: 94525 - DNA, 19 bp, Homo sapiens
  siRNA target sequence for NEK11 (NM_024800.2,1172-1190).
cctaatgtgtagatattca

SEQ ID NO: 94526 - DNA, 19 bp, Homo sapiens
  siRNA target sequence for NEK11 (NM_024800.2,1226-1244).
gaaggaggctgctcatata

SEQ ID NO: 94527 - DNA, 19 bp, Homo sapiens
  siRNA target sequence for NEK11 (NM_024800.2,1229-1247).
ggaggctgctcatataatt

SEQ ID NO: 94528 - DNA, 19 bp, Homo sapiens
  siRNA target sequence for NEK11 (NM_024800.2,1232-1250).
ggctgctcatataattaat

SEQ ID NO: 94529 - DNA, 19 bp, Homo sapiens
  siRNA target sequence for NEK11 (NM_024800.2,1285-1303).
gggcactgtcagaagtaca

SEQ ID NO: 94530 - DNA, 19 bp, Homo sapiens
  siRNA target sequence for NEK11 (NM_024800.2,1413-1431).
cgaatgcaagaattgagat

SEQ ID NO: 94531 - DNA, 19 bp, Homo sapiens
  siRNA target sequence for NEK11 (NM_024800.2,1455-1473).
gttgatgtactccatgaaa

SEQ ID NO: 94532 - DNA, 19 bp, Homo sapiens
  siRNA target sequence for NEK11 (NM_024800.2,1582-1600).
ctgatgaaccaactttaga

SEQ ID NO: 94533 - DNA, 19 bp, Homo sapiens
  siRNA target sequence for NEK11 (NM_024800.2,1635-1653).
gacctccacgaacttgaat

SEQ ID NO: 94534 - DNA, 19 bp, Homo sapiens
  siRNA target sequence for NEK11 (NM_024800.2,1637-1655).
cctccacgaacttgaatca

SEQ ID NO: 94535 - DNA, 19 bp, Homo sapiens
  siRNA target sequence for NEK11 (NM_024800.2,1638-1656).
ctccacgaacttgaatcaa

SEQ ID NO: 94536 - DNA, 19 bp, Homo sapiens
  siRNA target sequence for NEK11 (NM_024800.2,1640-1658).
ccacgaacttgaatcaatt

SEQ ID NO: 94537 - DNA, 19 bp, Homo sapiens
  siRNA target sequence for NEK11 (NM_024800.2,1643-1661).
cgaacttgaatcaattgta

SEQ ID NO: 94538 - DNA, 19 bp, Homo sapiens
  siRNA target sequence for NEK11 (NM_024800.2,1669-1687).
ccacatctgaccttggata

SEQ ID NO: 94539 - DNA, 19 bp, Homo sapiens
  siRNA target sequence for NEK11 (NM_024800.2,1724-1742).
gtactacgctgatgcattt

SEQ ID NO: 94540 - DNA, 19 bp, Homo sapiens
  siRNA target sequence for NEK11 (NM_024800.2,1871-1889).
gttggccaggtgtttggaa

SEQ ID NO: 94541 - DNA, 19 bp, Homo sapiens
  siRNA target sequence for NEK11 (NM_024800.2,1949-1967).
gtccccaggaccaccaatt

SEQ ID NO: 94542 - DNA, 19 bp, Homo sapiens
  siRNA target sequence for NEK11 (NM_024800.2,1953-1971).
ccaggaccaccaattttca

SEQ ID NO: 94543 - DNA, 19 bp, Homo sapiens
  siRNA target sequence for NEK11 (NM_024800.2,2073-2091).
gcaaggcatcagaatgcta

SEQ ID NO: 94544 - DNA, 19 bp, Homo sapiens
  siRNA target sequence for NEK11 (NM_024800.2,2098-2116).
cagagatccgcgagtgttt

SEQ ID NO: 94545 - DNA, 19 bp, Homo sapiens
  siRNA target sequence for NEK11 (NM_024800.2,2102-2120).
gatccgcgagtgtttggaa

SEQ ID NO: 94546 - DNA, 19 bp, Homo sapiens
  siRNA target sequence for NEK11 (NM_024800.2,2107-2125).
gcgagtgtttggaaaaagt

SEQ ID NO: 94547 - DNA, 19 bp, Homo sapiens
  siRNA target sequence for NEK11 (NM_024800.2,2131-2149).
ctcaagccagcgactgttt

SEQ ID NO: 94548 - DNA, 19 bp, Homo sapiens
  siRNA target sequence for NEK2 (NM_002497.1,220-238).
gtgatggcaagatattagt

SEQ ID NO: 94549 - DNA, 19 bp, Homo sapiens
  siRNA target sequence for NEK2 (NM_002497.1,308-326).
gcttcgtgaactgaaacat

SEQ ID NO: 94550 - DNA, 19 bp, Homo sapiens
  siRNA target sequence for NEK2 (NM_002497.1,532-550).
gtggtcataccgtattgca

SEQ ID NO: 94551 - DNA, 19 bp, Homo sapiens
  siRNA target sequence for NEK2 (NM_002497.1,611-629).
ctttgggctagctagaata

SEQ ID NO: 94552 - DNA, 19 bp, Homo sapiens
  siRNA target sequence for NEK2 (NM_002497.1,615-633).
gggctagctagaatattaa

SEQ ID NO: 94553 - DNA, 19 bp, Homo sapiens
  siRNA target sequence for NEK2 (NM_002497.1,635-653).
ccatgacacgagttttgca

SEQ ID NO: 94554 - DNA, 19 bp, Homo sapiens
  siRNA target sequence for NEK2 (NM_002497.1,636-654).
catgacacgagttttgcaa

SEQ ID NO: 94555 - DNA, 19 bp, Homo sapiens
  siRNA target sequence for NEK2 (NM_002497.1,641-659).
cacgagttttgcaaaaaca

SEQ ID NO: 94556 - DNA, 19 bp, Homo sapiens
  siRNA target sequence for NEK2 (NM_002497.1,643-661).
cgagttttgcaaaaacatt

SEQ ID NO: 94557 - DNA, 19 bp, Homo sapiens
  siRNA target sequence for NEK2 (NM_002497.1,683-701).
gtctcctgaacaaatgaat

SEQ ID NO: 94558 - DNA, 19 bp, Homo sapiens
  siRNA target sequence for NEK2 (NM_002497.1,703-721).
gcatgtcctacaatgagaa

SEQ ID NO: 94559 - DNA, 19 bp, Homo sapiens
  siRNA target sequence for NEK2 (NM_002497.1,704-722).
catgtcctacaatgagaaa

SEQ ID NO: 94560 - DNA, 19 bp, Homo sapiens
  siRNA target sequence for NEK2 (NM_002497.1,709-727).
cctacaatgagaaatcaga

SEQ ID NO: 94561 - DNA, 19 bp, Homo sapiens
  siRNA target sequence for NEK2 (NM_002497.1,746-764).
cttgctgtatgagttatgt

SEQ ID NO: 94562 - DNA, 19 bp, Homo sapiens
  siRNA target sequence for NEK2 (NM_002497.1,801-819).
gaactcgctgggaaaatca

SEQ ID NO: 94563 - DNA, 19 bp, Homo sapiens
  siRNA target sequence for NEK2 (NM_002497.1,827-845).
caaattcaggcgaattcca

SEQ ID NO: 94564 - DNA, 19 bp, Homo sapiens
  siRNA target sequence for NEK2 (NM_002497.1,849-867).
cgttactctgatgaattga

SEQ ID NO: 94565 - DNA, 19 bp, Homo sapiens
  siRNA target sequence for NEK2 (NM_002497.1,850-868).
gttactctgatgaattgaa

SEQ ID NO: 94566 - DNA, 19 bp, Homo sapiens
  siRNA target sequence for NEK2 (NM_002497.1,909-927).
cgaccttctgttgaagaaa

SEQ ID NO: 94567 - DNA, 19 bp, Homo sapiens
  siRNA target sequence for NEK2 (NM_002497.1,940-958).
ctttaatagcagatttggt

SEQ ID NO: 94568 - DNA, 19 bp, Homo sapiens
  siRNA target sequence for NEK2 (NM_002497.1,957-975).
gttgcagacgagcaaagaa

SEQ ID NO: 94569 - DNA, 19 bp, Homo sapiens
  siRNA target sequence for NEK2 (NM_002497.1,1026-1044).
gattccagccctgtattga

SEQ ID NO: 94570 - DNA, 19 bp, Homo sapiens
  siRNA target sequence for NEK2 (NM_002497.1,1079-1097).
gcgagagcgagctctcaaa

SEQ ID NO: 94571 - DNA, 19 bp, Homo sapiens
  siRNA target sequence for NEK2 (NM_002497.1,1170-1188).
gctagagcagaaaatctgt

SEQ ID NO: 94572 - DNA, 19 bp, Homo sapiens
  siRNA target sequence for NEK2 (NM_002497.1,1223-1241).
cctgtctctggcaagtaat

SEQ ID NO: 94573 - DNA, 19 bp, Homo sapiens
  siRNA target sequence for NEK2 (NM_002497.1,1226-1244).
gtctctggcaagtaatcca

SEQ ID NO: 94574 - DNA, 19 bp, Homo sapiens
  siRNA target sequence for NEK2 (NM_002497.1,1232-1250).
ggcaagtaatccagaactt

SEQ ID NO: 94575 - DNA, 19 bp, Homo sapiens
  siRNA target sequence for NEK2 (NM_002497.1,1234-1252).
caagtaatccagaacttct

SEQ ID NO: 94576 - DNA, 19 bp, Homo sapiens
  siRNA target sequence for NEK2 (NM_002497.1,1316-1334).
catgaggagtgagaattct

SEQ ID NO: 94577 - DNA, 19 bp, Homo sapiens
  siRNA target sequence for NEK2 (NM_002497.1,1411-1429).
ccctgtcagatattgagaa

SEQ ID NO: 94578 - DNA, 19 bp, Homo sapiens
  siRNA target sequence for NEK3 (NM_002498.1,435-453).
ctctaatacacagaattct

SEQ ID NO: 94579 - DNA, 19 bp, Homo sapiens
  siRNA target sequence for NEK3 (NM_002498.1,464-482).
ctgttcttttagccaaaat

SEQ ID NO: 94580 - DNA, 19 bp, Homo sapiens
  siRNA target sequence for NEK3 (NM_002498.1,524-542).
ctgaaggacacttgtatat

SEQ ID NO: 94581 - DNA, 19 bp, Homo sapiens
  siRNA target sequence for NEK3 (NM_002498.1,530-548).
gacacttgtatattgtgat

SEQ ID NO: 94582 - DNA, 19 bp, Homo sapiens
  siRNA target sequence for NEK3 (NM_002498.1,563-581).
gaggggatctaatgcaaaa

SEQ ID NO: 94583 - DNA, 19 bp, Homo sapiens
  siRNA target sequence for NEK3 (NM_002498.1,616-634).
gacatgatacttaattggt

SEQ ID NO: 94584 - DNA, 19 bp, Homo sapiens
  siRNA target sequence for NEK3 (NM_002498.1,648-666).
ccttggagtaaatcacatt

SEQ ID NO: 94585 - DNA, 19 bp, Homo sapiens
  siRNA target sequence for NEK3 (NM_002498.1,691-709).
gatatcaagtccaagaata

SEQ ID NO: 94586 - DNA, 19 bp, Homo sapiens
  siRNA target sequence for NEK3 (NM_002498.1,771-789).
caatccgatggcatttgct

SEQ ID NO: 94587 - DNA, 19 bp, Homo sapiens
  siRNA target sequence for NEK3 (NM_002498.1,780-798).
ggcatttgcttgtacctat

SEQ ID NO: 94588 - DNA, 19 bp, Homo sapiens
  siRNA target sequence for NEK3 (NM_002498.1,795-813).
ctatgtgggaactccttat

SEQ ID NO: 94589 - DNA, 19 bp, Homo sapiens
  siRNA target sequence for NEK3 (NM_002498.1,876-894).
gggttgcatcctgtatgaa

SEQ ID NO: 94590 - DNA, 19 bp, Homo sapiens
  siRNA target sequence for NEK3 (NM_002498.1,899-917).
gtacccttaagcatccatt

SEQ ID NO: 94591 - DNA, 19 bp, Homo sapiens
  siRNA target sequence for NEK3 (NM_002498.1,902-920).
cccttaagcatccatttca

SEQ ID NO: 94592 - DNA, 19 bp, Homo sapiens
  siRNA target sequence for NEK3 (NM_002498.1,921-939).
ggcaaatagttggaaaaat

SEQ ID NO: 94593 - DNA, 19 bp, Homo sapiens
  siRNA target sequence for NEK3 (NM_002498.1,923-941).
caaatagttggaaaaatct

SEQ ID NO: 94594 - DNA, 19 bp, Homo sapiens
  siRNA target sequence for NEK3 (NM_002498.1,971-989).
gtccactgccgtctcatta

SEQ ID NO: 94595 - DNA, 19 bp, Homo sapiens
  siRNA target sequence for NEK3 (NM_002498.1,973-991).
ccactgccgtctcattact

SEQ ID NO: 94596 - DNA, 19 bp, Homo sapiens
  siRNA target sequence for NEK3 (NM_002498.1,983-1001).
ctcattactcctatgaact

SEQ ID NO: 94597 - DNA, 19 bp, Homo sapiens
  siRNA target sequence for NEK3 (NM_002498.1,1112-1130).
ccgagatcatcatggaata

SEQ ID NO: 94598 - DNA, 19 bp, Homo sapiens
  siRNA target sequence for NEK3 (NM_002498.1,1259-1277).
gaaagggtagccatactga

SEQ ID NO: 94599 - DNA, 19 bp, Homo sapiens
  siRNA target sequence for NEK3 (NM_002498.1,1265-1283).
gtagccatactgatttgga

SEQ ID NO: 94600 - DNA, 19 bp, Homo sapiens
  siRNA target sequence for NEK3 (NM_002498.1,1404-1422).
gaaaaatgtacccaataca

SEQ ID NO: 94601 - DNA, 19 bp, Homo sapiens
  siRNA target sequence for NEK3 (NM_002498.1,1423-1441).
gctcttacagctttggaaa

SEQ ID NO: 94602 - DNA, 19 bp, Homo sapiens
  siRNA target sequence for NEK3 (NM_002498.1,1424-1442).
ctcttacagctttggaaaa

SEQ ID NO: 94603 - DNA, 19 bp, Homo sapiens
  siRNA target sequence for NEK3 (NM_002498.1,1438-1456).
gaaaatgcatccatactca

SEQ ID NO: 94604 - DNA, 19 bp, Homo sapiens
  siRNA target sequence for NEK3 (NM_002498.1,1484-1502).
gaggtggttctgtaataaa

SEQ ID NO: 94605 - DNA, 19 bp, Homo sapiens
  siRNA target sequence for NEK3 (NM_002498.1,1486-1504).
ggtggttctgtaataaagt

SEQ ID NO: 94606 - DNA, 19 bp, Homo sapiens
  siRNA target sequence for NEK3 (NM_002498.1,1544-1562).
cccctgacactttgttgaa

SEQ ID NO: 94607 - DNA, 19 bp, Homo sapiens
  siRNA target sequence for NEK3 (NM_002498.1,1547-1565).
ctgacactttgttgaacat

SEQ ID NO: 94608 - DNA, 19 bp, Homo sapiens
  siRNA target sequence for NEK3 (NM_002498.1,1553-1571).
ctttgttgaacatccttaa

SEQ ID NO: 94609 - DNA, 19 bp, Homo sapiens
  siRNA target sequence for NEK3 (NM_002498.1,1557-1575).
gttgaacatccttaagaat

SEQ ID NO: 94610 - DNA, 19 bp, Homo sapiens
  siRNA target sequence for NEK3 (NM_002498.1,1687-1705).
ggtcacgattctgtcattt

SEQ ID NO: 94611 - DNA, 19 bp, Homo sapiens
  siRNA target sequence for NEK3 (NM_002498.1,1688-1706).
gtcacgattctgtcatttt

SEQ ID NO: 94612 - DNA, 19 bp, Homo sapiens
  siRNA target sequence for NEK3 (NM_002498.1,1692-1710).
cgattctgtcattttggat

SEQ ID NO: 94613 - DNA, 19 bp, Homo sapiens
  siRNA target sequence for NEK4 (NM_003157.1,258-276).
gggacggcaagcagtatgt

SEQ ID NO: 94614 - DNA, 19 bp, Homo sapiens
  siRNA target sequence for NEK4 (NM_003157.1,408-426).
gtctgctctacattgtcat

SEQ ID NO: 94615 - DNA, 19 bp, Homo sapiens
  siRNA target sequence for NEK4 (NM_003157.1,435-453).
gtgaaggaggtgatttgta

SEQ ID NO: 94616 - DNA, 19 bp, Homo sapiens
  siRNA target sequence for NEK4 (NM_003157.1,499-517).
ggtggtagagtggtttgta

SEQ ID NO: 94617 - DNA, 19 bp, Homo sapiens
  siRNA target sequence for NEK4 (NM_003157.1,529-547).
ggctttgcagtatttacat

SEQ ID NO: 94618 - DNA, 19 bp, Homo sapiens
  siRNA target sequence for NEK4 (NM_003157.1,560-578).
cttcatcgagatctgaaaa

SEQ ID NO: 94619 - DNA, 19 bp, Homo sapiens
  siRNA target sequence for NEK4 (NM_003157.1,581-599).
caaaatgtcttcctaacaa

SEQ ID NO: 94620 - DNA, 19 bp, Homo sapiens
  siRNA target sequence for NEK4 (NM_003157.1,699-717).
gccctgaattgttctcaaa

SEQ ID NO: 94621 - DNA, 19 bp, Homo sapiens
  siRNA target sequence for NEK4 (NM_003157.1,806-824).
gatatgaattctttagttt

SEQ ID NO: 94622 - DNA, 19 bp, Homo sapiens
  siRNA target sequence for NEK4 (NM_003157.1,816-834).
ctttagtttatcggattat

SEQ ID NO: 94623 - DNA, 19 bp, Homo sapiens
  siRNA target sequence for NEK4 (NM_003157.1,904-922).
gagcaaaaggcctgaagaa

SEQ ID NO: 94624 - DNA, 19 bp, Homo sapiens
  siRNA target sequence for NEK4 (NM_003157.1,943-961).
cctgaggcagccttatata

SEQ ID NO: 94625 - DNA, 19 bp, Homo sapiens
  siRNA target sequence for NEK4 (NM_003157.1,944-962).
ctgaggcagccttatataa

SEQ ID NO: 94626 - DNA, 19 bp, Homo sapiens
  siRNA target sequence for NEK4 (NM_003157.1,964-982).
gcggcaaatctccttcttt

SEQ ID NO: 94627 - DNA, 19 bp, Homo sapiens
  siRNA target sequence for NEK4 (NM_003157.1,989-1007).
gccacaaagataaaaacct

SEQ ID NO: 94628 - DNA, 19 bp, Homo sapiens
  siRNA target sequence for NEK4 (NM_003157.1,1072-1090).
ggcagaatcaaatcatgaa

SEQ ID NO: 94629 - DNA, 19 bp, Homo sapiens
  siRNA target sequence for NEK4 (NM_003157.1,1118-1136).
gagggctcccagacatata

SEQ ID NO: 94630 - DNA, 19 bp, Homo sapiens
  siRNA target sequence for NEK4 (NM_003157.1,1120-1138).
gggctcccagacatatata

SEQ ID NO: 94631 - DNA, 19 bp, Homo sapiens
  siRNA target sequence for NEK4 (NM_003157.1,1121-1139).
ggctcccagacatatataa

SEQ ID NO: 94632 - DNA, 19 bp, Homo sapiens
  siRNA target sequence for NEK4 (NM_003157.1,1176-1194).
gggcctctggtctcttgaa

SEQ ID NO: 94633 - DNA, 19 bp, Homo sapiens
  siRNA target sequence for NEK4 (NM_003157.1,1258-1276).
cacaatcagtagcgtaaat

SEQ ID NO: 94634 - DNA, 19 bp, Homo sapiens
  siRNA target sequence for NEK4 (NM_003157.1,1293-1311).
caaaagggagggattcagt

SEQ ID NO: 94635 - DNA, 19 bp, Homo sapiens
  siRNA target sequence for NEK4 (NM_003157.1,1320-1338).
gctttgttcaggagaatca

SEQ ID NO: 94636 - DNA, 19 bp, Homo sapiens
  siRNA target sequence for NEK4 (NM_003157.1,1330-1348).
ggagaatcagccaagatat

SEQ ID NO: 94637 - DNA, 19 bp, Homo sapiens
  siRNA target sequence for NEK4 (NM_003157.1,1331-1349).
gagaatcagccaagatatt

SEQ ID NO: 94638 - DNA, 19 bp, Homo sapiens
  siRNA target sequence for NEK4 (NM_003157.1,1351-1369).
ggatgcctctaatgagtta

SEQ ID NO: 94639 - DNA, 19 bp, Homo sapiens
  siRNA target sequence for NEK4 (NM_003157.1,1364-1382).
gagttaggaggtatatgca

SEQ ID NO: 94640 - DNA, 19 bp, Homo sapiens
  siRNA target sequence for NEK4 (NM_003157.1,1412-1430).
caggacaacactaaatcca

SEQ ID NO: 94641 - DNA, 19 bp, Homo sapiens
  siRNA target sequence for NEK4 (NM_003157.1,1506-1524).
ctctgcagcccctaatcaa

SEQ ID NO: 94642 - DNA, 19 bp, Homo sapiens
  siRNA target sequence for NEK4 (NM_003157.1,1513-1531).
gcccctaatcaaagaacaa

SEQ ID NO: 94643 - DNA, 19 bp, Homo sapiens
  siRNA target sequence for NEK4 (NM_003157.1,1697-1715).
ggtgaatgtattatagaaa

SEQ ID NO: 94644 - DNA, 19 bp, Homo sapiens
  siRNA target sequence for NEK4 (NM_003157.1,1722-1740).
gcagaatccacccagattt

SEQ ID NO: 94645 - DNA, 19 bp, Homo sapiens
  siRNA target sequence for NEK4 (NM_003157.1,1725-1743).
gaatccacccagatttaca

SEQ ID NO: 94646 - DNA, 19 bp, Homo sapiens
  siRNA target sequence for NEK4 (NM_003157.1,1778-1796).
cgacagcgacggcaaaaga

SEQ ID NO: 94647 - DNA, 19 bp, Homo sapiens
  siRNA target sequence for NEK4 (NM_003157.1,1834-1852).
ggtccgcagagatctcttt

SEQ ID NO: 94648 - DNA, 19 bp, Homo sapiens
  siRNA target sequence for NEK4 (NM_003157.1,1862-1880).
gagtcgcctcctcgatttt

SEQ ID NO: 94649 - DNA, 19 bp, Homo sapiens
  siRNA target sequence for NEK4 (NM_003157.1,1882-1900).
gccttctcatcccattgtt

SEQ ID NO: 94650 - DNA, 19 bp, Homo sapiens
  siRNA target sequence for NEK4 (NM_003157.1,1909-1927).
ggatgtcacatcaacacaa

SEQ ID NO: 94651 - DNA, 19 bp, Homo sapiens
  siRNA target sequence for NEK4 (NM_003157.1,1961-1979).
gggtctgtgagcagttcaa

SEQ ID NO: 94652 - DNA, 19 bp, Homo sapiens
  siRNA target sequence for NEK4 (NM_003157.1,1986-2004).
gtgagatgtcatcatcaaa

SEQ ID NO: 94653 - DNA, 19 bp, Homo sapiens
  siRNA target sequence for NEK4 (NM_003157.1,2204-2222).
ctgtctgaggatgagttaa

SEQ ID NO: 94654 - DNA, 19 bp, Homo sapiens
  siRNA target sequence for NEK4 (NM_003157.1,2206-2224).
gtctgaggatgagttaagt

SEQ ID NO: 94655 - DNA, 19 bp, Homo sapiens
  siRNA target sequence for NEK4 (NM_003157.1,2210-2228).
gaggatgagttaagttctt

SEQ ID NO: 94656 - DNA, 19 bp, Homo sapiens
  siRNA target sequence for NEK4 (NM_003157.1,2216-2234).
gagttaagttcttctacaa

SEQ ID NO: 94657 - DNA, 19 bp, Homo sapiens
  siRNA target sequence for NEK4 (NM_003157.1,2218-2236).
gttaagttcttctacaagt

SEQ ID NO: 94658 - DNA, 19 bp, Homo sapiens
  siRNA target sequence for NEK4 (NM_003157.1,2229-2247).
ctacaagttcaactgataa

SEQ ID NO: 94659 - DNA, 19 bp, Homo sapiens
  siRNA target sequence for NEK4 (NM_003157.1,2297-2315).
gccttggtacaattgatga

SEQ ID NO: 94660 - DNA, 19 bp, Homo sapiens
  siRNA target sequence for NEK4 (NM_003157.1,2371-2389).
cccagtgtcagaattcaaa

SEQ ID NO: 94661 - DNA, 19 bp, Homo sapiens
  siRNA target sequence for NEK4 (NM_003157.1,2407-2425).
ggacacactgatacttcat

SEQ ID NO: 94662 - DNA, 19 bp, Homo sapiens
  siRNA target sequence for NEK4 (NM_003157.1,2465-2483).
gagctaccttcagctatta

SEQ ID NO: 94663 - DNA, 19 bp, Homo sapiens
  siRNA target sequence for NEK4 (NM_003157.1,2505-2523).
ggagactagttgaagtctt

SEQ ID NO: 94664 - DNA, 19 bp, Homo sapiens
  siRNA target sequence for NEK4 (NM_003157.1,2510-2528).
ctagttgaagtcttgagaa

SEQ ID NO: 94665 - DNA, 19 bp, Homo sapiens
  siRNA target sequence for NEK4 (NM_003157.1,2524-2542).
gagaactgatgtaattcgt

SEQ ID NO: 94666 - DNA, 19 bp, Homo sapiens
  siRNA target sequence for NEK4 (NM_003157.1,2545-2563).
cctgggagttcagctttta

SEQ ID NO: 94667 - DNA, 19 bp, Homo sapiens
  siRNA target sequence for NEK4 (NM_003157.1,2564-2582).
gagcaggtgtatgatcttt

SEQ ID NO: 94668 - DNA, 19 bp, Homo sapiens
  siRNA target sequence for NEK4 (NM_003157.1,2659-2677).
gaaagctcgccagttgaaa

SEQ ID NO: 94669 - DNA, 19 bp, Homo sapiens
  siRNA target sequence for NEK4 (NM_003157.1,2663-2681).
gctcgccagttgaaatttt

SEQ ID NO: 94670 - DNA, 19 bp, Homo sapiens
  siRNA target sequence for NEK4 (NM_003157.1,2664-2682).
ctcgccagttgaaattttt

SEQ ID NO: 94671 - DNA, 19 bp, Homo sapiens
  siRNA target sequence for NEK6 (NM_014397.3,272-290).
gcggacttccagatcgaaa

SEQ ID NO: 94672 - DNA, 19 bp, Homo sapiens
  siRNA target sequence for NEK6 (NM_014397.3,273-291).
cggacttccagatcgaaaa

SEQ ID NO: 94673 - DNA, 19 bp, Homo sapiens
  siRNA target sequence for NEK6 (NM_014397.3,275-293).
gacttccagatcgaaaaga

SEQ ID NO: 94674 - DNA, 19 bp, Homo sapiens
  siRNA target sequence for NEK6 (NM_014397.3,280-298).
ccagatcgaaaagaagata

SEQ ID NO: 94675 - DNA, 19 bp, Homo sapiens
  siRNA target sequence for NEK6 (NM_014397.3,440-458).
caactgaaccacccaaata

SEQ ID NO: 94676 - DNA, 19 bp, Homo sapiens
  siRNA target sequence for NEK6 (NM_014397.3,449-467).
cacccaaatatcatcaagt

SEQ ID NO: 94677 - DNA, 19 bp, Homo sapiens
  siRNA target sequence for NEK6 (NM_014397.3,452-470).
ccaaatatcatcaagtatt

SEQ ID NO: 94678 - DNA, 19 bp, Homo sapiens
  siRNA target sequence for NEK6 (NM_014397.3,528-546).
gggacctctcgcagatgat

SEQ ID NO: 94679 - DNA, 19 bp, Homo sapiens
  siRNA target sequence for NEK6 (NM_014397.3,530-548).
gacctctcgcagatgatca

SEQ ID NO: 94680 - DNA, 19 bp, Homo sapiens
  siRNA target sequence for NEK6 (NM_014397.3,533-551).
ctctcgcagatgatcaagt

SEQ ID NO: 94681 - DNA, 19 bp, Homo sapiens
  siRNA target sequence for NEK6 (NM_014397.3,579-597).
cggagaggacagtatggaa

SEQ ID NO: 94682 - DNA, 19 bp, Homo sapiens
  siRNA target sequence for NEK6 (NM_014397.3,586-604).
gacagtatggaagtacttt

SEQ ID NO: 94683 - DNA, 19 bp, Homo sapiens
  siRNA target sequence for NEK6 (NM_014397.3,767-785).
gtggggacgccctactaca

SEQ ID NO: 94684 - DNA, 19 bp, Homo sapiens
  siRNA target sequence for NEK6 (NM_014397.3,803-821).
catgagaacggctacaact

SEQ ID NO: 94685 - DNA, 19 bp, Homo sapiens
  siRNA target sequence for NEK6 (NM_014397.3,881-899).
cccttctatggagataaga

SEQ ID NO: 94686 - DNA, 19 bp, Homo sapiens
  siRNA target sequence for NEK6 (NM_014397.3,961-979).
gcactactccgagaagtta

SEQ ID NO: 94687 - DNA, 19 bp, Homo sapiens
  siRNA target sequence for NEK7 (NM_133494.1,114-132).
gaccggatatgggctataa

SEQ ID NO: 94688 - DNA, 19 bp, Homo sapiens
  siRNA target sequence for NEK7 (NM_133494.1,116-134).
ccggatatgggctataata

SEQ ID NO: 94689 - DNA, 19 bp, Homo sapiens
  siRNA target sequence for NEK7 (NM_133494.1,119-137).
gatatgggctataatacat

SEQ ID NO: 94690 - DNA, 19 bp, Homo sapiens
  siRNA target sequence for NEK7 (NM_133494.1,135-153).
cattagccaactttcgaat

SEQ ID NO: 94691 - DNA, 19 bp, Homo sapiens
  siRNA target sequence for NEK7 (NM_133494.1,172-190).
cggacaatttagtgaagtt

SEQ ID NO: 94692 - DNA, 19 bp, Homo sapiens
  siRNA target sequence for NEK7 (NM_133494.1,215-233).
ggagtaccagtagctttaa

SEQ ID NO: 94693 - DNA, 19 bp, Homo sapiens
  siRNA target sequence for NEK7 (NM_133494.1,216-234).
gagtaccagtagctttaaa

SEQ ID NO: 94694 - DNA, 19 bp, Homo sapiens
  siRNA target sequence for NEK7 (NM_133494.1,282-300).
gcatcaaagaaatagatct

SEQ ID NO: 94695 - DNA, 19 bp, Homo sapiens
  siRNA target sequence for NEK7 (NM_133494.1,283-301).
catcaaagaaatagatctt

SEQ ID NO: 94696 - DNA, 19 bp, Homo sapiens
  siRNA target sequence for NEK7 (NM_133494.1,313-331).
caaccatccaaatgtaata

SEQ ID NO: 94697 - DNA, 19 bp, Homo sapiens
  siRNA target sequence for NEK7 (NM_133494.1,341-359).
gcatcattcattgaagata

SEQ ID NO: 94698 - DNA, 19 bp, Homo sapiens
  siRNA target sequence for NEK7 (NM_133494.1,395-413).
ggcgacctatccagaatga

SEQ ID NO: 94699 - DNA, 19 bp, Homo sapiens
  siRNA target sequence for NEK7 (NM_133494.1,396-414).
gcgacctatccagaatgat

SEQ ID NO: 94700 - DNA, 19 bp, Homo sapiens
  siRNA target sequence for NEK7 (NM_133494.1,405-423).
ccagaatgatcaagcattt

SEQ ID NO: 94701 - DNA, 19 bp, Homo sapiens
  siRNA target sequence for NEK7 (NM_133494.1,427-445).
gaagcaaaagaggctaatt

SEQ ID NO: 94702 - DNA, 19 bp, Homo sapiens
  siRNA target sequence for NEK7 (NM_133494.1,555-573).
cagccactggggtggtaaa

SEQ ID NO: 94703 - DNA, 19 bp, Homo sapiens
  siRNA target sequence for NEK7 (NM_133494.1,558-576).
ccactggggtggtaaaact

SEQ ID NO: 94704 - DNA, 19 bp, Homo sapiens
  siRNA target sequence for NEK7 (NM_133494.1,587-605).
gggcttggccggtttttca

SEQ ID NO: 94705 - DNA, 19 bp, Homo sapiens
  siRNA target sequence for NEK7 (NM_133494.1,618-636).
cagctgcacattctttagt

SEQ ID NO: 94706 - DNA, 19 bp, Homo sapiens
  siRNA target sequence for NEK7 (NM_133494.1,652-670).
catgtctccagagagaata

SEQ ID NO: 94707 - DNA, 19 bp, Homo sapiens
  siRNA target sequence for NEK7 (NM_133494.1,681-699).
gatacaacttcaaatctga

SEQ ID NO: 94708 - DNA, 19 bp, Homo sapiens
  siRNA target sequence for NEK7 (NM_133494.1,713-731).
ggctgtctactatatgaga

SEQ ID NO: 94709 - DNA, 19 bp, Homo sapiens
  siRNA target sequence for NEK7 (NM_133494.1,714-732).
gctgtctactatatgagat

SEQ ID NO: 94710 - DNA, 19 bp, Homo sapiens
  siRNA target sequence for NEK7 (NM_133494.1,728-746).
gagatggctgcattacaaa

SEQ ID NO: 94711 - DNA, 19 bp, Homo sapiens
  siRNA target sequence for NEK7 (NM_133494.1,730-748).
gatggctgcattacaaagt

SEQ ID NO: 94712 - DNA, 19 bp, Homo sapiens
  siRNA target sequence for NEK7 (NM_133494.1,759-777).
gtgacaaaatgaatttata

SEQ ID NO: 94713 - DNA, 19 bp, Homo sapiens
  siRNA target sequence for NEK7 (NM_133494.1,778-796).
ctcactgtgtaagaagata

SEQ ID NO: 94714 - DNA, 19 bp, Homo sapiens
  siRNA target sequence for NEK7 (NM_133494.1,845-863).
ctccgacagttagttaata

SEQ ID NO: 94715 - DNA, 19 bp, Homo sapiens
  siRNA target sequence for NEK7 (NM_133494.1,848-866).
cgacagttagttaatatgt

SEQ ID NO: 94716 - DNA, 19 bp, Homo sapiens
  siRNA target sequence for NEK7 (NM_133494.1,893-911).
ccagacgtcacctatgttt

SEQ ID NO: 94717 - DNA, 19 bp, Homo sapiens
  siRNA target sequence for NEK7 (NM_133494.1,894-912).
cagacgtcacctatgttta

SEQ ID NO: 94718 - DNA, 19 bp, Homo sapiens
  siRNA target sequence for NEK8 (NM_178170.2,178-196).
caccccaatgtcattgagt

SEQ ID NO: 94719 - DNA, 19 bp, Homo sapiens
  siRNA target sequence for NEK8 (NM_178170.2,182-200).
ccaatgtcattgagtacta

SEQ ID NO: 94720 - DNA, 19 bp, Homo sapiens
  siRNA target sequence for NEK8 (NM_178170.2,226-244).
cttatgatcgccatggaat

SEQ ID NO: 94721 - DNA, 19 bp, Homo sapiens
  siRNA target sequence for NEK8 (NM_178170.2,231-249).
gatcgccatggaatatgca

SEQ ID NO: 94722 - DNA, 19 bp, Homo sapiens
  siRNA target sequence for NEK8 (NM_178170.2,489-507).
ggtgggtaccccatgctat

SEQ ID NO: 94723 - DNA, 19 bp, Homo sapiens
  siRNA target sequence for NEK8 (NM_178170.2,493-511).
ggtaccccatgctatatct

SEQ ID NO: 94724 - DNA, 19 bp, Homo sapiens
  siRNA target sequence for NEK8 (NM_178170.2,1220-1238).
ctgacagaggcatcatcat

SEQ ID NO: 94725 - DNA, 19 bp, Homo sapiens
  siRNA target sequence for NEK8 (NM_178170.2,1226-1244).
gaggcatcatcatgacatt

SEQ ID NO: 94726 - DNA, 19 bp, Homo sapiens
  siRNA target sequence for NEK8 (NM_178170.2,1374-1392).
gtccactgagcgagaacta

SEQ ID NO: 94727 - DNA, 19 bp, Homo sapiens
  siRNA target sequence for NEK8 (NM_178170.2,1736-1754).
cgggtgattgctacacttt

SEQ ID NO: 94728 - DNA, 19 bp, Homo sapiens
  siRNA target sequence for NEK8 (NM_178170.2,1737-1755).
gggtgattgctacactttt

SEQ ID NO: 94729 - DNA, 19 bp, Homo sapiens
  siRNA target sequence for NEK8 (NM_178170.2,1771-1789).
ggacagttgggcaccaata

SEQ ID NO: 94730 - DNA, 19 bp, Homo sapiens
  siRNA target sequence for NEK8 (NM_178170.2,1825-1843).
ggccttgagggcatcaaga

SEQ ID NO: 94731 - DNA, 19 bp, Homo sapiens
  siRNA target sequence for NEK8 (NM_178170.2,1826-1844).
gccttgagggcatcaagat

SEQ ID NO: 94732 - DNA, 19 bp, Homo sapiens
  siRNA target sequence for NEK8 (NM_178170.2,1836-1854).
catcaagatggcaatggta

SEQ ID NO: 94733 - DNA, 19 bp, Homo sapiens
  siRNA target sequence for NEK9 (NM_033116.3,40-58).
cactgcgattccatcaact

SEQ ID NO: 94734 - DNA, 19 bp, Homo sapiens
  siRNA target sequence for NEK9 (NM_033116.3,290-308).
gtcgtgatgccttgaatga

SEQ ID NO: 94735 - DNA, 19 bp, Homo sapiens
  siRNA target sequence for NEK9 (NM_033116.3,292-310).
cgtgatgccttgaatgaga

SEQ ID NO: 94736 - DNA, 19 bp, Homo sapiens
  siRNA target sequence for NEK9 (NM_033116.3,328-346).
ctgcagcacgacaacatta

SEQ ID NO: 94737 - DNA, 19 bp, Homo sapiens
  siRNA target sequence for NEK9 (NM_033116.3,330-348).
gcagcacgacaacattatt

SEQ ID NO: 94738 - DNA, 19 bp, Homo sapiens
  siRNA target sequence for NEK9 (NM_033116.3,361-379).
cacttcatggacaatacca

SEQ ID NO: 94739 - DNA, 19 bp, Homo sapiens
  siRNA target sequence for NEK9 (NM_033116.3,413-431).
ggaacctgtatgacaaaat

SEQ ID NO: 94740 - DNA, 19 bp, Homo sapiens
  siRNA target sequence for NEK9 (NM_033116.3,437-455).
gtcagaaggacaagttgtt

SEQ ID NO: 94741 - DNA, 19 bp, Homo sapiens
  siRNA target sequence for NEK9 (NM_033116.3,472-490).
gtgtggtacctatttcaga

SEQ ID NO: 94742 - DNA, 19 bp, Homo sapiens
  siRNA target sequence for NEK9 (NM_033116.3,499-517).
gcagtgagctgcatccata

SEQ ID NO: 94743 - DNA, 19 bp, Homo sapiens
  siRNA target sequence for NEK9 (NM_033116.3,500-518).
cagtgagctgcatccataa

SEQ ID NO: 94744 - DNA, 19 bp, Homo sapiens
  siRNA target sequence for NEK9 (NM_033116.3,523-541).
ggaatccttcatagagata

SEQ ID NO: 94745 - DNA, 19 bp, Homo sapiens
  siRNA target sequence for NEK9 (NM_033116.3,524-542).
gaatccttcatagagatat

SEQ ID NO: 94746 - DNA, 19 bp, Homo sapiens
  siRNA target sequence for NEK9 (NM_033116.3,579-597).
gataaaacttggagattat

SEQ ID NO: 94747 - DNA, 19 bp, Homo sapiens
  siRNA target sequence for NEK9 (NM_033116.3,600-618).
cctagcaaagaaacttaat

SEQ ID NO: 94748 - DNA, 19 bp, Homo sapiens
  siRNA target sequence for NEK9 (NM_033116.3,601-619).
ctagcaaagaaacttaatt

SEQ ID NO: 94749 - DNA, 19 bp, Homo sapiens
  siRNA target sequence for NEK9 (NM_033116.3,649-667).
ggaaccccatattacatgt

SEQ ID NO: 94750 - DNA, 19 bp, Homo sapiens
  siRNA target sequence for NEK9 (NM_033116.3,676-694).
ctctgtcaaggagtaaagt

SEQ ID NO: 94751 - DNA, 19 bp, Homo sapiens
  siRNA target sequence for NEK9 (NM_033116.3,682-700).
caaggagtaaagtacaatt

SEQ ID NO: 94752 - DNA, 19 bp, Homo sapiens
  siRNA target sequence for NEK9 (NM_033116.3,688-706).
gtaaagtacaatttcaagt

SEQ ID NO: 94753 - DNA, 19 bp, Homo sapiens
  siRNA target sequence for NEK9 (NM_033116.3,718-736).
gcagttggctgcgtcattt

SEQ ID NO: 94754 - DNA, 19 bp, Homo sapiens
  siRNA target sequence for NEK9 (NM_033116.3,725-743).
gctgcgtcatttttgaact

SEQ ID NO: 94755 - DNA, 19 bp, Homo sapiens
  siRNA target sequence for NEK9 (NM_033116.3,739-757).
gaactgcttaccttaaaga

SEQ ID NO: 94756 - DNA, 19 bp, Homo sapiens
  siRNA target sequence for NEK9 (NM_033116.3,758-776).
ggacgtttgatgctacaaa

SEQ ID NO: 94757 - DNA, 19 bp, Homo sapiens
  siRNA target sequence for NEK9 (NM_033116.3,795-813).
gaagatcgtgcaaggaatt

SEQ ID NO: 94758 - DNA, 19 bp, Homo sapiens
  siRNA target sequence for NEK9 (NM_033116.3,836-854).
gccagtactctttggaatt

SEQ ID NO: 94759 - DNA, 19 bp, Homo sapiens
  siRNA target sequence for NEK9 (NM_033116.3,838-856).
cagtactctttggaattga

SEQ ID NO: 94760 - DNA, 19 bp, Homo sapiens
  siRNA target sequence for NEK9 (NM_033116.3,897-915).
gagacctactgcagatgaa

SEQ ID NO: 94761 - DNA, 19 bp, Homo sapiens
  siRNA target sequence for NEK9 (NM_033116.3,1024-1042).
cccattgctgtagtaacat

SEQ ID NO: 94762 - DNA, 19 bp, Homo sapiens
  siRNA target sequence for NEK9 (NM_033116.3,1026-1044).
cattgctgtagtaacatca

SEQ ID NO: 94763 - DNA, 19 bp, Homo sapiens
  siRNA target sequence for NEK9 (NM_033116.3,1043-1061).
cacgaaccagtgaagtcta

SEQ ID NO: 94764 - DNA, 19 bp, Homo sapiens
  siRNA target sequence for NEK9 (NM_033116.3,1088-1106).
cccagaaactggatgttat

SEQ ID NO: 94765 - DNA, 19 bp, Homo sapiens
  siRNA target sequence for NEK9 (NM_033116.3,1171-1189).
gagaaggaactgtacactt

SEQ ID NO: 94766 - DNA, 19 bp, Homo sapiens
  siRNA target sequence for NEK9 (NM_033116.3,1251-1269).
ctatcgacagccaaagcat

SEQ ID NO: 94767 - DNA, 19 bp, Homo sapiens
  siRNA target sequence for NEK9 (NM_033116.3,1302-1320).
ggtgtcatgtggtgatgat

SEQ ID NO: 94768 - DNA, 19 bp, Homo sapiens
  siRNA target sequence for NEK9 (NM_033116.3,1303-1321).
gtgtcatgtggtgatgatt

SEQ ID NO: 94769 - DNA, 19 bp, Homo sapiens
  siRNA target sequence for NEK9 (NM_033116.3,1357-1375).
gccttcggatcagattatt

SEQ ID NO: 94770 - DNA, 19 bp, Homo sapiens
  siRNA target sequence for NEK9 (NM_033116.3,1358-1376).
ccttcggatcagattatta

SEQ ID NO: 94771 - DNA, 19 bp, Homo sapiens
  siRNA target sequence for NEK9 (NM_033116.3,1359-1377).
cttcggatcagattattat

SEQ ID NO: 94772 - DNA, 19 bp, Homo sapiens
  siRNA target sequence for NEK9 (NM_033116.3,1382-1400).
gcatgggggtggacaaagt

SEQ ID NO: 94773 - DNA, 19 bp, Homo sapiens
  siRNA target sequence for NEK9 (NM_033116.3,1424-1442).
ccatgcagctgaacttctt

SEQ ID NO: 94774 - DNA, 19 bp, Homo sapiens
  siRNA target sequence for NEK9 (NM_033116.3,1464-1482).
ggtctcctgtggagataat

SEQ ID NO: 94775 - DNA, 19 bp, Homo sapiens
  siRNA target sequence for NEK9 (NM_033116.3,1467-1485).
ctcctgtggagataatcat

SEQ ID NO: 94776 - DNA, 19 bp, Homo sapiens
  siRNA target sequence for NEK9 (NM_033116.3,1499-1517).
cacgaaacaaggaagtcta

SEQ ID NO: 94777 - DNA, 19 bp, Homo sapiens
  siRNA target sequence for NEK9 (NM_033116.3,1501-1519).
cgaaacaaggaagtctatt

SEQ ID NO: 94778 - DNA, 19 bp, Homo sapiens
  siRNA target sequence for NEK9 (NM_033116.3,1524-1542).
gggctgtggcgaatatgga

SEQ ID NO: 94779 - DNA, 19 bp, Homo sapiens
  siRNA target sequence for NEK9 (NM_033116.3,1594-1612).
gttcccaaggccttgatta

SEQ ID NO: 94780 - DNA, 19 bp, Homo sapiens
  siRNA target sequence for NEK9 (NM_033116.3,1634-1652).
gtgatgggacatttctgtt

SEQ ID NO: 94781 - DNA, 19 bp, Homo sapiens
  siRNA target sequence for NEK9 (NM_033116.3,1671-1689).
gctggcctgtggactcaat

SEQ ID NO: 94782 - DNA, 19 bp, Homo sapiens
  siRNA target sequence for NEK9 (NM_033116.3,1679-1697).
gtggactcaatgaattcaa

SEQ ID NO: 94783 - DNA, 19 bp, Homo sapiens
  siRNA target sequence for NEK9 (NM_033116.3,1714-1732).
cagtgcatgtcgggaatta

SEQ ID NO: 94784 - DNA, 19 bp, Homo sapiens
  siRNA target sequence for NEK9 (NM_033116.3,1734-1752).
caaccatgaagcataccat

SEQ ID NO: 94785 - DNA, 19 bp, Homo sapiens
  siRNA target sequence for NEK9 (NM_033116.3,1750-1768).
catgaagttccctacacaa

SEQ ID NO: 94786 - DNA, 19 bp, Homo sapiens
  siRNA target sequence for NEK9 (NM_033116.3,1759-1777).
ccctacacaacgtccttta

SEQ ID NO: 94787 - DNA, 19 bp, Homo sapiens
  siRNA target sequence for NEK9 (NM_033116.3,1897-1915).
ctgggcgttgggaactaca

SEQ ID NO: 94788 - DNA, 19 bp, Homo sapiens
  siRNA target sequence for NEK9 (NM_033116.3,1982-2000).
gcggtgatgagtttaccat

SEQ ID NO: 94789 - DNA, 19 bp, Homo sapiens
  siRNA target sequence for NEK9 (NM_033116.3,2031-2049).
ctggggcaatggtggtaat

SEQ ID NO: 94790 - DNA, 19 bp, Homo sapiens
  siRNA target sequence for NEK9 (NM_033116.3,2078-2096).
gaccacatggctctgatat

SEQ ID NO: 94791 - DNA, 19 bp, Homo sapiens
  siRNA target sequence for NEK9 (NM_033116.3,2105-2123).
catggcctcggcctatttt

SEQ ID NO: 94792 - DNA, 19 bp, Homo sapiens
  siRNA target sequence for NEK9 (NM_033116.3,2109-2127).
gcctcggcctatttttgga

SEQ ID NO: 94793 - DNA, 19 bp, Homo sapiens
  siRNA target sequence for NEK9 (NM_033116.3,2156-2174).
gccgtggatggcataccat

SEQ ID NO: 94794 - DNA, 19 bp, Homo sapiens
  siRNA target sequence for NEK9 (NM_033116.3,2157-2175).
ccgtggatggcataccatt

SEQ ID NO: 94795 - DNA, 19 bp, Homo sapiens
  siRNA target sequence for NEK9 (NM_033116.3,2161-2179).
ggatggcataccattctca

SEQ ID NO: 94796 - DNA, 19 bp, Homo sapiens
  siRNA target sequence for NEK9 (NM_033116.3,2172-2190).
cattctcatcgttgagaaa

SEQ ID NO: 94797 - DNA, 19 bp, Homo sapiens
  siRNA target sequence for NEK9 (NM_033116.3,2176-2194).
ctcatcgttgagaaagtat

SEQ ID NO: 94798 - DNA, 19 bp, Homo sapiens
  siRNA target sequence for NEK9 (NM_033116.3,2234-2252).
ccattggaactgtgtttca

SEQ ID NO: 94799 - DNA, 19 bp, Homo sapiens
  siRNA target sequence for NEK9 (NM_033116.3,2339-2357).
gaggcttccgaggaacaat

SEQ ID NO: 94800 - DNA, 19 bp, Homo sapiens
  siRNA target sequence for NEK9 (NM_033116.3,2371-2389).
ggaatggaaggtttaatca

SEQ ID NO: 94801 - DNA, 19 bp, Homo sapiens
  siRNA target sequence for NEK9 (NM_033116.3,2400-2418).
ggccatggggaacagtaat

SEQ ID NO: 94802 - DNA, 19 bp, Homo sapiens
  siRNA target sequence for NEK9 (NM_033116.3,2435-2453).
gtcctggctggcttcgaaa

SEQ ID NO: 94803 - DNA, 19 bp, Homo sapiens
  siRNA target sequence for NEK9 (NM_033116.3,2721-2739).
gggtctggtgttaaagtgt

SEQ ID NO: 94804 - DNA, 19 bp, Homo sapiens
  siRNA target sequence for NLK (NM_016231.1,629-647).
gccggatagacctattgga

SEQ ID NO: 94805 - DNA, 19 bp, Homo sapiens
  siRNA target sequence for NLK (NM_016231.1,630-648).
ccggatagacctattggat

SEQ ID NO: 94806 - DNA, 19 bp, Homo sapiens
  siRNA target sequence for NLK (NM_016231.1,631-649).
cggatagacctattggata

SEQ ID NO: 94807 - DNA, 19 bp, Homo sapiens
  siRNA target sequence for NLK (NM_016231.1,632-650).
ggatagacctattggatat

SEQ ID NO: 94808 - DNA, 19 bp, Homo sapiens
  siRNA target sequence for NLK (NM_016231.1,660-678).
ggtgttgtctggtcagtaa

SEQ ID NO: 94809 - DNA, 19 bp, Homo sapiens
  siRNA target sequence for NLK (NM_016231.1,700-718).
gagtagcgctcaaaaagat

SEQ ID NO: 94810 - DNA, 19 bp, Homo sapiens
  siRNA target sequence for NLK (NM_016231.1,734-752).
gaatctggtctcttgcaaa

SEQ ID NO: 94811 - DNA, 19 bp, Homo sapiens
  siRNA target sequence for NLK (NM_016231.1,756-774).
gtcttccgggaattgaaga

SEQ ID NO: 94812 - DNA, 19 bp, Homo sapiens
  siRNA target sequence for NLK (NM_016231.1,762-780).
cgggaattgaagatgttgt

SEQ ID NO: 94813 - DNA, 19 bp, Homo sapiens
  siRNA target sequence for NLK (NM_016231.1,832-850).
cacacattgactattttga

SEQ ID NO: 94814 - DNA, 19 bp, Homo sapiens
  siRNA target sequence for NLK (NM_016231.1,883-901).
gtgacctacataaaattat

SEQ ID NO: 94815 - DNA, 19 bp, Homo sapiens
  siRNA target sequence for NLK (NM_016231.1,922-940).
gctcagatcatgtcaaagt

SEQ ID NO: 94816 - DNA, 19 bp, Homo sapiens
  siRNA target sequence for NLK (NM_016231.1,923-941).
ctcagatcatgtcaaagtt

SEQ ID NO: 94817 - DNA, 19 bp, Homo sapiens
  siRNA target sequence for NLK (NM_016231.1,953-971).
gattttgcgaggtttgaaa

SEQ ID NO: 94818 - DNA, 19 bp, Homo sapiens
  siRNA target sequence for NLK (NM_016231.1,989-1007).
cattttacatcgagacatt

SEQ ID NO: 94819 - DNA, 19 bp, Homo sapiens
  siRNA target sequence for NLK (NM_016231.1,1086-1104).
gatgaatcccgtcatatga

SEQ ID NO: 94820 - DNA, 19 bp, Homo sapiens
  siRNA target sequence for NLK (NM_016231.1,1158-1176).
cgtcattacagcaatgcta

SEQ ID NO: 94821 - DNA, 19 bp, Homo sapiens
  siRNA target sequence for NLK (NM_016231.1,1159-1177).
gtcattacagcaatgctat

SEQ ID NO: 94822 - DNA, 19 bp, Homo sapiens
  siRNA target sequence for NLK (NM_016231.1,1212-1230).
ctactaggacgaagaatat

SEQ ID NO: 94823 - DNA, 19 bp, Homo sapiens
  siRNA target sequence for NLK (NM_016231.1,1219-1237).
gacgaagaatattgtttca

SEQ ID NO: 94824 - DNA, 19 bp, Homo sapiens
  siRNA target sequence for NLK (NM_016231.1,1249-1267).
ccattcagcagttggattt

SEQ ID NO: 94825 - DNA, 19 bp, Homo sapiens
  siRNA target sequence for NLK (NM_016231.1,1324-1342).
gcgctaaggcacatatact

SEQ ID NO: 94826 - DNA, 19 bp, Homo sapiens
  siRNA target sequence for NLK (NM_016231.1,1326-1344).
gctaaggcacatatactca

SEQ ID NO: 94827 - DNA, 19 bp, Homo sapiens
  siRNA target sequence for NLK (NM_016231.1,1363-1381).
catctcttcctgtactcta

SEQ ID NO: 94828 - DNA, 19 bp, Homo sapiens
  siRNA target sequence for NLK (NM_016231.1,1427-1445).
caggatgttggtctttgat

SEQ ID NO: 94829 - DNA, 19 bp, Homo sapiens
  siRNA target sequence for NLK (NM_016231.1,1436-1454).
ggtctttgatccatccaaa

SEQ ID NO: 94830 - DNA, 19 bp, Homo sapiens
  siRNA target sequence for NLK (NM_016231.1,1437-1455).
gtctttgatccatccaaaa

SEQ ID NO: 94831 - DNA, 19 bp, Homo sapiens
  siRNA target sequence for NLK (NM_016231.1,1439-1457).
ctttgatccatccaaaaga

SEQ ID NO: 94832 - DNA, 19 bp, Homo sapiens
  siRNA target sequence for NLK (NM_016231.1,1480-1498).
cccacccctacctagatga

SEQ ID NO: 94833 - DNA, 19 bp, Homo sapiens
  siRNA target sequence for NLK (NM_016231.1,1481-1499).
ccacccctacctagatgaa

SEQ ID NO: 94834 - DNA, 19 bp, Homo sapiens
  siRNA target sequence for NLK (NM_016231.1,1500-1518).
gggcgactacgatatcaca

SEQ ID NO: 94835 - DNA, 19 bp, Homo sapiens
  siRNA target sequence for NLK (NM_016231.1,1506-1524).
ctacgatatcacacatgta

SEQ ID NO: 94836 - DNA, 19 bp, Homo sapiens
  siRNA target sequence for NLK (NM_016231.1,1509-1527).
cgatatcacacatgtatgt

SEQ ID NO: 94837 - DNA, 19 bp, Homo sapiens
  siRNA target sequence for NLK (NM_016231.1,1546-1564).
cctccactggaagagttta

SEQ ID NO: 94838 - DNA, 19 bp, Homo sapiens
  siRNA target sequence for NLK (NM_016231.1,1627-1645).
gttctgtccgacaggttaa

SEQ ID NO: 94839 - DNA, 19 bp, Homo sapiens
  siRNA target sequence for NLK (NM_016231.1,1632-1650).
gtccgacaggttaaagaaa

SEQ ID NO: 94840 - DNA, 19 bp, Homo sapiens
  siRNA target sequence for NLK (NM_016231.1,1640-1658).
ggttaaagaaattattcat

SEQ ID NO: 94841 - DNA, 19 bp, Homo sapiens
  siRNA target sequence for NME1 (NM_000269.2,162-180).
gggtcttgtgggagagatt

SEQ ID NO: 94842 - DNA, 19 bp, Homo sapiens
  siRNA target sequence for NME1 (NM_000269.2,163-181).
ggtcttgtgggagagatta

SEQ ID NO: 94843 - DNA, 19 bp, Homo sapiens
  siRNA target sequence for NME1 (NM_000269.2,166-184).
cttgtgggagagattatca

SEQ ID NO: 94844 - DNA, 19 bp, Homo sapiens
  siRNA target sequence for NME1 (NM_000269.2,187-205).
cgttttgagcagaaaggat

SEQ ID NO: 94845 - DNA, 19 bp, Homo sapiens
  siRNA target sequence for NME1 (NM_000269.2,207-225).
ccgccttgttggtctgaaa

SEQ ID NO: 94846 - DNA, 19 bp, Homo sapiens
  siRNA target sequence for NME1 (NM_000269.2,231-249).
gcaagcttccgaagatctt

SEQ ID NO: 94847 - DNA, 19 bp, Homo sapiens
  siRNA target sequence for NME1 (NM_000269.2,236-254).
cttccgaagatcttctcaa

SEQ ID NO: 94848 - DNA, 19 bp, Homo sapiens
  siRNA target sequence for NME1 (NM_000269.2,425-443).
gagacttctgcatacaagt

SEQ ID NO: 94849 - DNA, 19 bp, Homo sapiens
  siRNA target sequence for NME1 (NM_000269.2,545-563).
ctcagaactggatctatga

SEQ ID NO: 94850 - DNA, 19 bp, Homo sapiens
  siRNA target sequence for NME1 (NM_198175.1,256-274).
ggtgctactgtctacttta

SEQ ID NO: 94851 - DNA, 19 bp, Homo sapiens
  siRNA target sequence for NME1 (NM_198175.1,270-288).
ctttagggatcgtctttca

SEQ ID NO: 94852 - DNA, 19 bp, Homo sapiens
  siRNA target sequence for NME3 (NM_002513.2,665-683).
gggcactggctgtatgagt

SEQ ID NO: 94853 - DNA, 19 bp, Homo sapiens
  siRNA target sequence for NME4 (NM_005009.2,358-376).
ggtctgggaagggtacaat

SEQ ID NO: 94854 - DNA, 19 bp, Homo sapiens
  siRNA target sequence for NME4 (NM_005009.2,424-442).
ggctgccccaggaaccata

SEQ ID NO: 94855 - DNA, 19 bp, Homo sapiens
  siRNA target sequence for NME5 (NM_003551.2,98-116).
cacctcagatatatgtaga

SEQ ID NO: 94856 - DNA, 19 bp, Homo sapiens
  siRNA target sequence for NME5 (NM_003551.2,225-243).
cagccctgagcaatgtagt

SEQ ID NO: 94857 - DNA, 19 bp, Homo sapiens
  siRNA target sequence for NME5 (NM_003551.2,227-245).
gccctgagcaatgtagtaa

SEQ ID NO: 94858 - DNA, 19 bp, Homo sapiens
  siRNA target sequence for NME5 (NM_003551.2,281-299).
ccaacttaacagcttacat

SEQ ID NO: 94859 - DNA, 19 bp, Homo sapiens
  siRNA target sequence for NME5 (NM_003551.2,316-334).
gtcgccatgatattagcta

SEQ ID NO: 94860 - DNA, 19 bp, Homo sapiens
  siRNA target sequence for NME5 (NM_003551.2,321-339).
catgatattagctagacat

SEQ ID NO: 94861 - DNA, 19 bp, Homo sapiens
  siRNA target sequence for NME5 (NM_003551.2,324-342).
gatattagctagacataaa

SEQ ID NO: 94862 - DNA, 19 bp, Homo sapiens
  siRNA target sequence for NME5 (NM_003551.2,337-355).
cataaagccatctcttatt

SEQ ID NO: 94863 - DNA, 19 bp, Homo sapiens
  siRNA target sequence for NME5 (NM_003551.2,348-366).
ctcttattggttagaactt

SEQ ID NO: 94864 - DNA, 19 bp, Homo sapiens
  siRNA target sequence for NME5 (NM_003551.2,350-368).
cttattggttagaactttt

SEQ ID NO: 94865 - DNA, 19 bp, Homo sapiens
  siRNA target sequence for NME5 (NM_003551.2,364-382).
cttttgggaccaaataata

SEQ ID NO: 94866 - DNA, 19 bp, Homo sapiens
  siRNA target sequence for NME5 (NM_003551.2,409-427).
gacagtctgagggcaattt

SEQ ID NO: 94867 - DNA, 19 bp, Homo sapiens
  siRNA target sequence for NME5 (NM_003551.2,411-429).
cagtctgagggcaatttat

SEQ ID NO: 94868 - DNA, 19 bp, Homo sapiens
  siRNA target sequence for NME5 (NM_003551.2,431-449).
gcacagatgacctaaggaa

SEQ ID NO: 94869 - DNA, 19 bp, Homo sapiens
  siRNA target sequence for NME5 (NM_003551.2,432-450).
cacagatgacctaaggaat

SEQ ID NO: 94870 - DNA, 19 bp, Homo sapiens
  siRNA target sequence for NME5 (NM_003551.2,476-494).
ctgctgcggaaagagaaat

SEQ ID NO: 94871 - DNA, 19 bp, Homo sapiens
  siRNA target sequence for NME5 (NM_003551.2,481-499).
gcggaaagagaaatacgtt

SEQ ID NO: 94872 - DNA, 19 bp, Homo sapiens
  siRNA target sequence for NME5 (NM_003551.2,482-500).
cggaaagagaaatacgttt

SEQ ID NO: 94873 - DNA, 19 bp, Homo sapiens
  siRNA target sequence for NME5 (NM_003551.2,593-611).
gactcacagagctttgtaa

SEQ ID NO: 94874 - DNA, 19 bp, Homo sapiens
  siRNA target sequence for NME5 (NM_003551.2,597-615).
cacagagctttgtaagcaa

SEQ ID NO: 94875 - DNA, 19 bp, Homo sapiens
  siRNA target sequence for NME5 (NM_003551.2,646-664).
gattggctgctgaaaaata

SEQ ID NO: 94876 - DNA, 19 bp, Homo sapiens
  siRNA target sequence for NME5 (NM_003551.2,667-685).
cctaacaaacccaaacttt

SEQ ID NO: 94877 - DNA, 19 bp, Homo sapiens
  siRNA target sequence for NME5 (NM_003551.2,686-704).
gtcaccatccaattgtaga

SEQ ID NO: 94878 - DNA, 19 bp, Homo sapiens
  siRNA target sequence for NME5 (NM_003551.2,690-708).
ccatccaattgtagaagaa

SEQ ID NO: 94879 - DNA, 19 bp, Homo sapiens
  siRNA target sequence for NME5 (NM_003551.2,695-713).
caattgtagaagaacctta

SEQ ID NO: 94880 - DNA, 19 bp, Homo sapiens
  siRNA target sequence for NME6 (NM_005793.3,162-180).
ctgttcatcagcagattct

SEQ ID NO: 94881 - DNA, 19 bp, Homo sapiens
  siRNA target sequence for NME6 (NM_005793.3,184-202).
caacaagttcctgattgta

SEQ ID NO: 94882 - DNA, 19 bp, Homo sapiens
  siRNA target sequence for NME6 (NM_005793.3,257-275).
catgaagggcgttttttct

SEQ ID NO: 94883 - DNA, 19 bp, Homo sapiens
  siRNA target sequence for NME6 (NM_005793.3,263-281).
gggcgttttttctatcaga

SEQ ID NO: 94884 - DNA, 19 bp, Homo sapiens
  siRNA target sequence for NME6 (NM_005793.3,395-413).
catgtggccccagattcta

SEQ ID NO: 94885 - DNA, 19 bp, Homo sapiens
  siRNA target sequence for NME7 (NM_013330.3,274-292).
gtggtatgatccaaatgct

SEQ ID NO: 94886 - DNA, 19 bp, Homo sapiens
  siRNA target sequence for NME7 (NM_013330.3,294-312).
cacttcttcgacgttatga

SEQ ID NO: 94887 - DNA, 19 bp, Homo sapiens
  siRNA target sequence for NME7 (NM_013330.3,302-320).
cgacgttatgagcttttat

SEQ ID NO: 94888 - DNA, 19 bp, Homo sapiens
  siRNA target sequence for NME7 (NM_013330.3,341-359).
gttgaaatgcatgatgtaa

SEQ ID NO: 94889 - DNA, 19 bp, Homo sapiens
  siRNA target sequence for NME7 (NM_013330.3,349-367).
gcatgatgtaaagaatcat

SEQ ID NO: 94890 - DNA, 19 bp, Homo sapiens
  siRNA target sequence for NME7 (NM_013330.3,361-379).
gaatcatcgcaccttttta

SEQ ID NO: 94891 - DNA, 19 bp, Homo sapiens
  siRNA target sequence for NME7 (NM_013330.3,447-465).
ctcgacaactggtattaat

SEQ ID NO: 94892 - DNA, 19 bp, Homo sapiens
  siRNA target sequence for NME7 (NM_013330.3,450-468).
gacaactggtattaattga

SEQ ID NO: 94893 - DNA, 19 bp, Homo sapiens
  siRNA target sequence for NME7 (NM_013330.3,467-485).
gactatggggatcaatata

SEQ ID NO: 94894 - DNA, 19 bp, Homo sapiens
  siRNA target sequence for NME7 (NM_013330.3,469-487).
ctatggggatcaatataca

SEQ ID NO: 94895 - DNA, 19 bp, Homo sapiens
  siRNA target sequence for NME7 (NM_013330.3,496-514).
gctgggcagtaggaaagaa

SEQ ID NO: 94896 - DNA, 19 bp, Homo sapiens
  siRNA target sequence for NME7 (NM_013330.3,584-602).
gctggatttactataacca

SEQ ID NO: 94897 - DNA, 19 bp, Homo sapiens
  siRNA target sequence for NME7 (NM_013330.3,585-603).
ctggatttactataaccaa

SEQ ID NO: 94898 - DNA, 19 bp, Homo sapiens
  siRNA target sequence for NME7 (NM_013330.3,636-654).
cattggattttcatgtaga

SEQ ID NO: 94899 - DNA, 19 bp, Homo sapiens
  siRNA target sequence for NME7 (NM_013330.3,659-677).
cagtcaagaccctttttca

SEQ ID NO: 94900 - DNA, 19 bp, Homo sapiens
  siRNA target sequence for NME7 (NM_013330.3,661-679).
gtcaagaccctttttcaat

SEQ ID NO: 94901 - DNA, 19 bp, Homo sapiens
  siRNA target sequence for NME7 (NM_013330.3,680-698).
gagctgatccagtttatta

SEQ ID NO: 94902 - DNA, 19 bp, Homo sapiens
  siRNA target sequence for NME7 (NM_013330.3,682-700).
gctgatccagtttattaca

SEQ ID NO: 94903 - DNA, 19 bp, Homo sapiens
  siRNA target sequence for NME7 (NM_013330.3,685-703).
gatccagtttattacaact

SEQ ID NO: 94904 - DNA, 19 bp, Homo sapiens
  siRNA target sequence for NME7 (NM_013330.3,791-809).
cgcacagatgcttctgaaa

SEQ ID NO: 94905 - DNA, 19 bp, Homo sapiens
  siRNA target sequence for NME7 (NM_013330.3,851-869).
gcgcatggccctgattctt

SEQ ID NO: 94906 - DNA, 19 bp, Homo sapiens
  siRNA target sequence for NME7 (NM_013330.3,852-870).
cgcatggccctgattcttt

SEQ ID NO: 94907 - DNA, 19 bp, Homo sapiens
  siRNA target sequence for NME7 (NM_013330.3,927-945).
cggcaaacactgctaaatt

SEQ ID NO: 94908 - DNA, 19 bp, Homo sapiens
  siRNA target sequence for NME7 (NM_013330.3,928-946).
ggcaaacactgctaaattt

SEQ ID NO: 94909 - DNA, 19 bp, Homo sapiens
  siRNA target sequence for NME7 (NM_013330.3,954-972).
gtacctgttgcattgttaa

SEQ ID NO: 94910 - DNA, 19 bp, Homo sapiens
  siRNA target sequence for NME7 (NM_013330.3,1021-1039).
ccgagatgcaggttttgaa

SEQ ID NO: 94911 - DNA, 19 bp, Homo sapiens
  siRNA target sequence for NME7 (NM_013330.3,1044-1062).
cagctatgcagatgttcaa

SEQ ID NO: 94912 - DNA, 19 bp, Homo sapiens
  siRNA target sequence for NME7 (NM_013330.3,1060-1078).
caatatggatcgggttaat

SEQ ID NO: 94913 - DNA, 19 bp, Homo sapiens
  siRNA target sequence for NME7 (NM_013330.3,1073-1091).
gttaatgttgaggaattct

SEQ ID NO: 94914 - DNA, 19 bp, Homo sapiens
  siRNA target sequence for NME7 (NM_013330.3,1144-1162).
gtattctggcccttgtgta

SEQ ID NO: 94915 - DNA, 19 bp, Homo sapiens
  siRNA target sequence for NME7 (NM_013330.3,1149-1167).
ctggcccttgtgtagcaat

SEQ ID NO: 94916 - DNA, 19 bp, Homo sapiens
  siRNA target sequence for NME7 (NM_013330.3,1158-1176).
gtgtagcaatggagattca

SEQ ID NO: 94917 - DNA, 19 bp, Homo sapiens
  siRNA target sequence for NME7 (NM_013330.3,1164-1182).
caatggagattcaacagaa

SEQ ID NO: 94918 - DNA, 19 bp, Homo sapiens
  siRNA target sequence for NME7 (NM_013330.3,1180-1198).
gaataatgctacaaagaca

SEQ ID NO: 94919 - DNA, 19 bp, Homo sapiens
  siRNA target sequence for NME7 (NM_013330.3,1195-1213).
gacatttcgagaattttgt

SEQ ID NO: 94920 - DNA, 19 bp, Homo sapiens
  siRNA target sequence for NME7 (NM_013330.3,1334-1352).
gaggttcaatacttcttca

SEQ ID NO: 94921 - DNA, 19 bp, Homo sapiens
  siRNA target sequence for NOLC1 (NM_004741.1,626-644).
cagttaaagctcagactaa

SEQ ID NO: 94922 - DNA, 19 bp, Homo sapiens
  siRNA target sequence for NOLC1 (NM_004741.1,661-679).
gctcgagcagcacctaaaa

SEQ ID NO: 94923 - DNA, 19 bp, Homo sapiens
  siRNA target sequence for NOLC1 (NM_004741.1,662-680).
ctcgagcagcacctaaaat

SEQ ID NO: 94924 - DNA, 19 bp, Homo sapiens
  siRNA target sequence for NOLC1 (NM_004741.1,673-691).
cctaaaatagccaatggta

SEQ ID NO: 94925 - DNA, 19 bp, Homo sapiens
  siRNA target sequence for NOLC1 (NM_004741.1,1038-1056).
gtctgattcaagttctgaa

SEQ ID NO: 94926 - DNA, 19 bp, Homo sapiens
  siRNA target sequence for NOLC1 (NM_004741.1,1076-1094).
ctaaggcagtagtctctaa

SEQ ID NO: 94927 - DNA, 19 bp, Homo sapiens
  siRNA target sequence for NOLC1 (NM_004741.1,1866-1884).
gcttcagacccctaacaca

SEQ ID NO: 94928 - DNA, 19 bp, Homo sapiens
  siRNA target sequence for NOLC1 (NM_004741.1,1867-1885).
cttcagacccctaacacat

SEQ ID NO: 94929 - DNA, 19 bp, Homo sapiens
  siRNA target sequence for NOLC1 (NM_004741.1,1872-1890).
gacccctaacacatttcca

SEQ ID NO: 94930 - DNA, 19 bp, Homo sapiens
  siRNA target sequence for NOLC1 (NM_004741.1,1874-1892).
cccctaacacatttccaaa

SEQ ID NO: 94931 - DNA, 19 bp, Homo sapiens
  siRNA target sequence for NOLC1 (NM_004741.1,2023-2041).
cgagccaatcaggttttga

SEQ ID NO: 94932 - DNA, 19 bp, Homo sapiens
  siRNA target sequence for NOLC1 (NM_004741.1,2058-2076).
gtcctttcggcatgagaaa

SEQ ID NO: 94933 - DNA, 19 bp, Homo sapiens
  siRNA target sequence for NOLC1 (NM_004741.1,2100-2118).
ccggggaggctcaatctct

SEQ ID NO: 94934 - DNA, 19 bp, Homo sapiens
  siRNA target sequence for NOLC1 (NM_004741.1,2117-2135).
ctgtccaggtcaattctat

SEQ ID NO: 94935 - DNA, 19 bp, Homo sapiens
  siRNA target sequence for NOLC1 (NM_004741.1,2119-2137).
gtccaggtcaattctatta

SEQ ID NO: 94936 - DNA, 19 bp, Homo sapiens
  siRNA target sequence for NOLC1 (NM_004741.1,2122-2140).
caggtcaattctattaagt

SEQ ID NO: 94937 - DNA, 19 bp, Homo sapiens
  siRNA target sequence for NPR2 (NM_000907.1,389-407).
cggctaagaatgaccatta

SEQ ID NO: 94938 - DNA, 19 bp, Homo sapiens
  siRNA target sequence for NPR2 (NM_000907.1,390-408).
ggctaagaatgaccattat

SEQ ID NO: 94939 - DNA, 19 bp, Homo sapiens
  siRNA target sequence for NPR2 (NM_000907.1,464-482).
cactacacgggcacttcaa

SEQ ID NO: 94940 - DNA, 19 bp, Homo sapiens
  siRNA target sequence for NPR2 (NM_000907.1,466-484).
ctacacgggcacttcaatt

SEQ ID NO: 94941 - DNA, 19 bp, Homo sapiens
  siRNA target sequence for NPR2 (NM_000907.1,469-487).
cacgggcacttcaattgga

SEQ ID NO: 94942 - DNA, 19 bp, Homo sapiens
  siRNA target sequence for NPR2 (NM_000907.1,529-547).
gaccggcctcactacttca

SEQ ID NO: 94943 - DNA, 19 bp, Homo sapiens
  siRNA target sequence for NPR2 (NM_000907.1,737-755).
ccaatggggattatgtctt

SEQ ID NO: 94944 - DNA, 19 bp, Homo sapiens
  siRNA target sequence for NPR2 (NM_000907.1,862-880).
gaggcctttcagactgtat

SEQ ID NO: 94945 - DNA, 19 bp, Homo sapiens
  siRNA target sequence for NPR2 (NM_000907.1,902-920).
ccccaaatcctgagtatca

SEQ ID NO: 94946 - DNA, 19 bp, Homo sapiens
  siRNA target sequence for NPR2 (NM_000907.1,930-948).
gaatcgtctgctgataaga

SEQ ID NO: 94947 - DNA, 19 bp, Homo sapiens
  siRNA target sequence for NPR2 (NM_000907.1,1073-1091).
gggaggatggacttcgaat

SEQ ID NO: 94948 - DNA, 19 bp, Homo sapiens
  siRNA target sequence for NPR2 (NM_000907.1,1082-1100).
gacttcgaattgtggaaaa

SEQ ID NO: 94949 - DNA, 19 bp, Homo sapiens
  siRNA target sequence for NPR2 (NM_000907.1,1101-1119).
gatgcagggacgaagatat

SEQ ID NO: 94950 - DNA, 19 bp, Homo sapiens
  siRNA target sequence for NPR2 (NM_000907.1,1330-1348).
gacgacccatcctgtgata

SEQ ID NO: 94951 - DNA, 19 bp, Homo sapiens
  siRNA target sequence for NPR2 (NM_000907.1,1332-1350).
cgacccatcctgtgataaa

SEQ ID NO: 94952 - DNA, 19 bp, Homo sapiens
  siRNA target sequence for NPR2 (NM_000907.1,1456-1474).
gagctggctagcatgttgt

SEQ ID NO: 94953 - DNA, 19 bp, Homo sapiens
  siRNA target sequence for NPR2 (NM_000907.1,1478-1496).
gtattcgctgggaagaact

SEQ ID NO: 94954 - DNA, 19 bp, Homo sapiens
  siRNA target sequence for NPR2 (NM_000907.1,1505-1523).
gcaactcagagcgttatca

SEQ ID NO: 94955 - DNA, 19 bp, Homo sapiens
  siRNA target sequence for NPR2 (NM_000907.1,1509-1527).
ctcagagcgttatcacaaa

SEQ ID NO: 94956 - DNA, 19 bp, Homo sapiens
  siRNA target sequence for NPR2 (NM_000907.1,1613-1631).
ccaacaccggtcacttcaa

SEQ ID NO: 94957 - DNA, 19 bp, Homo sapiens
  siRNA target sequence for NPR2 (NM_000907.1,1644-1662).
cgccatcaaacatgtgaat

SEQ ID NO: 94958 - DNA, 19 bp, Homo sapiens
  siRNA target sequence for NPR2 (NM_000907.1,1689-1707).
ggttctgtttgaactcaaa

SEQ ID NO: 94959 - DNA, 19 bp, Homo sapiens
  siRNA target sequence for NPR2 (NM_000907.1,1758-1776).
catagaccctcccaacatt

SEQ ID NO: 94960 - DNA, 19 bp, Homo sapiens
  siRNA target sequence for NPR2 (NM_000907.1,1762-1780).
gaccctcccaacatttgca

SEQ ID NO: 94961 - DNA, 19 bp, Homo sapiens
  siRNA target sequence for NPR2 (NM_000907.1,1796-1814).
gtcctcgtgggagtttaca

SEQ ID NO: 94962 - DNA, 19 bp, Homo sapiens
  siRNA target sequence for NPR2 (NM_000907.1,1802-1820).
gtgggagtttacaggatat

SEQ ID NO: 94963 - DNA, 19 bp, Homo sapiens
  siRNA target sequence for NPR2 (NM_000907.1,1846-1864).
gactggatgtttcgttatt

SEQ ID NO: 94964 - DNA, 19 bp, Homo sapiens
  siRNA target sequence for NPR2 (NM_000907.1,1848-1866).
ctggatgtttcgttattca

SEQ ID NO: 94965 - DNA, 19 bp, Homo sapiens
  siRNA target sequence for NPR2 (NM_000907.1,1850-1868).
ggatgtttcgttattcact

SEQ ID NO: 94966 - DNA, 19 bp, Homo sapiens
  siRNA target sequence for NPR2 (NM_000907.1,1995-2013).
ggccagcttccgatcaact

SEQ ID NO: 94967 - DNA, 19 bp, Homo sapiens
  siRNA target sequence for NPR2 (NM_000907.1,2112-2130).
ggctgacgtctatagcttt

SEQ ID NO: 94968 - DNA, 19 bp, Homo sapiens
  siRNA target sequence for NPR2 (NM_000907.1,2158-2176).
cgcagtggtcctttctact

SEQ ID NO: 94969 - DNA, 19 bp, Homo sapiens
  siRNA target sequence for NPR2 (NM_000907.1,2211-2229).
ccagaaggtacgaaatggt

SEQ ID NO: 94970 - DNA, 19 bp, Homo sapiens
  siRNA target sequence for NPR2 (NM_000907.1,2259-2277).
ccggacccaactgaatgaa

SEQ ID NO: 94971 - DNA, 19 bp, Homo sapiens
  siRNA target sequence for NPR2 (NM_000907.1,2329-2347).
ccagactttggacagatta

SEQ ID NO: 94972 - DNA, 19 bp, Homo sapiens
  siRNA target sequence for NPR2 (NM_000907.1,2330-2348).
cagactttggacagattaa

SEQ ID NO: 94973 - DNA, 19 bp, Homo sapiens
  siRNA target sequence for NPR2 (NM_000907.1,2351-2369).
gcttcattcggcgctttaa

SEQ ID NO: 94974 - DNA, 19 bp, Homo sapiens
  siRNA target sequence for NPR2 (NM_000907.1,2406-2424).
gctgcgcatggaacagtat

SEQ ID NO: 94975 - DNA, 19 bp, Homo sapiens
  siRNA target sequence for NPR2 (NM_000907.1,2640-2658).
gcaggtagtgacacttctt

SEQ ID NO: 94976 - DNA, 19 bp, Homo sapiens
  siRNA target sequence for NPR2 (NM_000907.1,2641-2659).
caggtagtgacacttctta

SEQ ID NO: 94977 - DNA, 19 bp, Homo sapiens
  siRNA target sequence for NPR2 (NM_000907.1,2684-2702).
ccataattgacaactttga

SEQ ID NO: 94978 - DNA, 19 bp, Homo sapiens
  siRNA target sequence for NPR2 (NM_000907.1,2720-2738).
cgattggggatgcttacat

SEQ ID NO: 94979 - DNA, 19 bp, Homo sapiens
  siRNA target sequence for NPR2 (NM_000907.1,2792-2810).
ctcgtatggccctagcatt

SEQ ID NO: 94980 - DNA, 19 bp, Homo sapiens
  siRNA target sequence for NPR2 (NM_000907.1,2795-2813).
gtatggccctagcattact

SEQ ID NO: 94981 - DNA, 19 bp, Homo sapiens
  siRNA target sequence for NPR2 (NM_000907.1,2799-2817).
ggccctagcattactagat

SEQ ID NO: 94982 - DNA, 19 bp, Homo sapiens
  siRNA target sequence for NPR2 (NM_003995.2,2960-2978).
cttctcgaatggagtctaa

SEQ ID NO: 94983 - DNA, 19 bp, Homo sapiens
  siRNA target sequence for NPR2 (NM_003995.2,3085-3103).
ggaaagatgcgaacatact

SEQ ID NO: 94984 - DNA, 19 bp, Homo sapiens
  siRNA target sequence for NRBP (NM_013392.1,125-143).
gagtcccagacagtactta

SEQ ID NO: 94985 - DNA, 19 bp, Homo sapiens
  siRNA target sequence for NRBP (NM_013392.1,260-278).
gaagatgagtctgagattt

SEQ ID NO: 94986 - DNA, 19 bp, Homo sapiens
  siRNA target sequence for NRBP (NM_013392.1,322-340).
ggtgaatcaacggaatgta

SEQ ID NO: 94987 - DNA, 19 bp, Homo sapiens
  siRNA target sequence for NRBP (NM_013392.1,333-351).
ggaatgtaccaggtattga

SEQ ID NO: 94988 - DNA, 19 bp, Homo sapiens
  siRNA target sequence for NRBP (NM_013392.1,356-374).
gcatacctggccatggata

SEQ ID NO: 94989 - DNA, 19 bp, Homo sapiens
  siRNA target sequence for NRBP (NM_013392.1,417-435).
ctgaacgcaagaactacaa

SEQ ID NO: 94990 - DNA, 19 bp, Homo sapiens
  siRNA target sequence for NRBP (NM_013392.1,452-470).
gttcgtgctgtgtttgata

SEQ ID NO: 94991 - DNA, 19 bp, Homo sapiens
  siRNA target sequence for NRBP (NM_013392.1,479-497).
caattggagcatcttaaca

SEQ ID NO: 94992 - DNA, 19 bp, Homo sapiens
  siRNA target sequence for NRBP (NM_013392.1,500-518).
gttaagtttcacaaatatt

SEQ ID NO: 94993 - DNA, 19 bp, Homo sapiens
  siRNA target sequence for NRBP (NM_013392.1,576-594).
ctgggagtctgaagcaatt

SEQ ID NO: 94994 - DNA, 19 bp, Homo sapiens
  siRNA target sequence for NRBP (NM_013392.1,579-597).
ggagtctgaagcaatttct

SEQ ID NO: 94995 - DNA, 19 bp, Homo sapiens
  siRNA target sequence for NRBP (NM_013392.1,616-634).
ccacaagacgatgaatgaa

SEQ ID NO: 94996 - DNA, 19 bp, Homo sapiens
  siRNA target sequence for NRBP (NM_013392.1,617-635).
cacaagacgatgaatgaaa

SEQ ID NO: 94997 - DNA, 19 bp, Homo sapiens
  siRNA target sequence for NRBP (NM_013392.1,648-666).
gttggtgcacacaaatcct

SEQ ID NO: 94998 - DNA, 19 bp, Homo sapiens
  siRNA target sequence for NRBP (NM_013392.1,771-789).
ctgtggctcctgacactat

SEQ ID NO: 94999 - DNA, 19 bp, Homo sapiens
  siRNA target sequence for NRBP (NM_013392.1,776-794).
gctcctgacactatcaaca

SEQ ID NO: 95000 - DNA, 19 bp, Homo sapiens
  siRNA target sequence for NRBP (NM_013392.1,786-804).
ctatcaacaatcatgtgaa

SEQ ID NO: 95001 - DNA, 19 bp, Homo sapiens
  siRNA target sequence for NRBP (NM_013392.1,835-853).
cttctttgcaccagagtat

SEQ ID NO: 95002 - DNA, 19 bp, Homo sapiens
  siRNA target sequence for NRBP (NM_013392.1,940-958).
caatggagagtcctcatat

SEQ ID NO: 95003 - DNA, 19 bp, Homo sapiens
  siRNA target sequence for NRBP (NM_013392.1,1010-1028).
cagagggagttcattcaaa

SEQ ID NO: 95004 - DNA, 19 bp, Homo sapiens
  siRNA target sequence for NRBP (NM_013392.1,1059-1077).
caacagccagagaacttct

SEQ ID NO: 95005 - DNA, 19 bp, Homo sapiens
  siRNA target sequence for NRBP (NM_013392.1,1200-1218).
gtgccgtactggctgaaat

SEQ ID NO: 95006 - DNA, 19 bp, Homo sapiens
  siRNA target sequence for NRBP (NM_013392.1,1236-1254).
gagaaccagttcagacttt

SEQ ID NO: 95007 - DNA, 19 bp, Homo sapiens
  siRNA target sequence for NRBP (NM_013392.1,1241-1259).
ccagttcagactttgtact

SEQ ID NO: 95008 - DNA, 19 bp, Homo sapiens
  siRNA target sequence for NRBP (NM_013392.1,1264-1282).
gtcaccagctctggaatta

SEQ ID NO: 95009 - DNA, 19 bp, Homo sapiens
  siRNA target sequence for NRBP (NM_013392.1,1271-1289).
gctctggaattagataaat

SEQ ID NO: 95010 - DNA, 19 bp, Homo sapiens
  siRNA target sequence for NRBP (NM_013392.1,1272-1290).
ctctggaattagataaatt

SEQ ID NO: 95011 - DNA, 19 bp, Homo sapiens
  siRNA target sequence for NRBP (NM_013392.1,1619-1637).
gaccagagccggttgactt

SEQ ID NO: 95012 - DNA, 19 bp, Homo sapiens
  siRNA target sequence for NRBP (NM_013392.1,1653-1671).
ccttgaacaagttcaattt

SEQ ID NO: 95013 - DNA, 19 bp, Homo sapiens
  siRNA target sequence for NRBP (NM_013392.1,1654-1672).
cttgaacaagttcaatttt

SEQ ID NO: 95014 - DNA, 19 bp, Homo sapiens
  siRNA target sequence for NSF (NM_006178.1,89-107).
gatgtcctacagatgaatt

SEQ ID NO: 95015 - DNA, 19 bp, Homo sapiens
  siRNA target sequence for NSF (NM_006178.1,94-112).
cctacagatgaattatctt

SEQ ID NO: 95016 - DNA, 19 bp, Homo sapiens
  siRNA target sequence for NSF (NM_006178.1,341-359).
caatgaccatcgagattga

SEQ ID NO: 95017 - DNA, 19 bp, Homo sapiens
  siRNA target sequence for NSF (NM_006178.1,392-410).
cttatgacaccgacaagat

SEQ ID NO: 95018 - DNA, 19 bp, Homo sapiens
  siRNA target sequence for NSF (NM_006178.1,457-475).
ggacaacagcttgtcttta

SEQ ID NO: 95019 - DNA, 19 bp, Homo sapiens
  siRNA target sequence for NSF (NM_006178.1,465-483).
gcttgtctttagcttcaat

SEQ ID NO: 95020 - DNA, 19 bp, Homo sapiens
  siRNA target sequence for NSF (NM_006178.1,666-684).
ggaaaatcgccaatcaatt

SEQ ID NO: 95021 - DNA, 19 bp, Homo sapiens
  siRNA target sequence for NSF (NM_006178.1,716-734).
gaataggaggtctagacaa

SEQ ID NO: 95022 - DNA, 19 bp, Homo sapiens
  siRNA target sequence for NSF (NM_006178.1,721-739).
ggaggtctagacaaggaat

SEQ ID NO: 95023 - DNA, 19 bp, Homo sapiens
  siRNA target sequence for NSF (NM_006178.1,724-742).
ggtctagacaaggaatttt

SEQ ID NO: 95024 - DNA, 19 bp, Homo sapiens
  siRNA target sequence for NSF (NM_006178.1,871-889).
cgacagattggcaagatgt

SEQ ID NO: 95025 - DNA, 19 bp, Homo sapiens
  siRNA target sequence for NSF (NM_006178.1,874-892).
cagattggcaagatgttga

SEQ ID NO: 95026 - DNA, 19 bp, Homo sapiens
  siRNA target sequence for NSF (NM_006178.1,880-898).
ggcaagatgttgaatgcaa

SEQ ID NO: 95027 - DNA, 19 bp, Homo sapiens
  siRNA target sequence for NSF (NM_006178.1,915-933).
caatgggccagaaatcctt

SEQ ID NO: 95028 - DNA, 19 bp, Homo sapiens
  siRNA target sequence for NSF (NM_006178.1,957-975).
ggctaacattcgcaaactt

SEQ ID NO: 95029 - DNA, 19 bp, Homo sapiens
  siRNA target sequence for NSF (NM_006178.1,958-976).
gctaacattcgcaaacttt

SEQ ID NO: 95030 - DNA, 19 bp, Homo sapiens
  siRNA target sequence for NSF (NM_006178.1,1021-1039).
ggtttgcacatcatcatct

SEQ ID NO: 95031 - DNA, 19 bp, Homo sapiens
  siRNA target sequence for NSF (NM_006178.1,1085-1103).
gtagcacgggagttcatga

SEQ ID NO: 95032 - DNA, 19 bp, Homo sapiens
  siRNA target sequence for NSF (NM_006178.1,1138-1156).
ggcgtggagcagctaaaca

SEQ ID NO: 95033 - DNA, 19 bp, Homo sapiens
  siRNA target sequence for NSF (NM_006178.1,1139-1157).
gcgtggagcagctaaacaa

SEQ ID NO: 95034 - DNA, 19 bp, Homo sapiens
  siRNA target sequence for NSF (NM_006178.1,1167-1185).
cattggaatgaccaataga

SEQ ID NO: 95035 - DNA, 19 bp, Homo sapiens
  siRNA target sequence for NSF (NM_006178.1,1178-1196).
ccaatagaccagatctgat

SEQ ID NO: 95036 - DNA, 19 bp, Homo sapiens
  siRNA target sequence for NSF (NM_006178.1,1179-1197).
caatagaccagatctgata

SEQ ID NO: 95037 - DNA, 19 bp, Homo sapiens
  siRNA target sequence for NSF (NM_006178.1,1184-1202).
gaccagatctgatagatga

SEQ ID NO: 95038 - DNA, 19 bp, Homo sapiens
  siRNA target sequence for NSF (NM_006178.1,1223-1241).
gactggaagttaaaatgga

SEQ ID NO: 95039 - DNA, 19 bp, Homo sapiens
  siRNA target sequence for NSF (NM_006178.1,1260-1278).
gaaaggccgactacagatt

SEQ ID NO: 95040 - DNA, 19 bp, Homo sapiens
  siRNA target sequence for NSF (NM_006178.1,1268-1286).
gactacagattcttcacat

SEQ ID NO: 95041 - DNA, 19 bp, Homo sapiens
  siRNA target sequence for NSF (NM_006178.1,1298-1316).
gaatgagagggcatcagtt

SEQ ID NO: 95042 - DNA, 19 bp, Homo sapiens
  siRNA target sequence for NSF (NM_006178.1,1314-1332).
gttactctctgctgatgta

SEQ ID NO: 95043 - DNA, 19 bp, Homo sapiens
  siRNA target sequence for NSF (NM_006178.1,1325-1343).
ctgatgtagacattaaaga

SEQ ID NO: 95044 - DNA, 19 bp, Homo sapiens
  siRNA target sequence for NSF (NM_006178.1,1351-1369).
gtggagaccaagaatttca

SEQ ID NO: 95045 - DNA, 19 bp, Homo sapiens
  siRNA target sequence for NSF (NM_006178.1,1407-1425).
gtccactgctatgaataga

SEQ ID NO: 95046 - DNA, 19 bp, Homo sapiens
  siRNA target sequence for NSF (NM_006178.1,1426-1444).
cacataaaggccagtacta

SEQ ID NO: 95047 - DNA, 19 bp, Homo sapiens
  siRNA target sequence for NSF (NM_006178.1,1428-1446).
cataaaggccagtactaaa

SEQ ID NO: 95048 - DNA, 19 bp, Homo sapiens
  siRNA target sequence for NSF (NM_006178.1,1552-1570).
gattatgcaagttacatta

SEQ ID NO: 95049 - DNA, 19 bp, Homo sapiens
  siRNA target sequence for NSF (NM_006178.1,1596-1614).
cccagttactcgagttcta

SEQ ID NO: 95050 - DNA, 19 bp, Homo sapiens
  siRNA target sequence for NSF (NM_006178.1,1598-1616).
cagttactcgagttctaga

SEQ ID NO: 95051 - DNA, 19 bp, Homo sapiens
  siRNA target sequence for NSF (NM_006178.1,1709-1727).
ctgctttagctgcaaaaat

SEQ ID NO: 95052 - DNA, 19 bp, Homo sapiens
  siRNA target sequence for NSF (NM_006178.1,1747-1765).
ccgttcatcaagatctgtt

SEQ ID NO: 95053 - DNA, 19 bp, Homo sapiens
  siRNA target sequence for NSF (NM_006178.1,1763-1781).
gttctcctgataaaatgat

SEQ ID NO: 95054 - DNA, 19 bp, Homo sapiens
  siRNA target sequence for NSF (NM_006178.1,1861-1879).
gttgtggatgacattgaga

SEQ ID NO: 95055 - DNA, 19 bp, Homo sapiens
  siRNA target sequence for NSF (NM_006178.1,1896-1914).
ccctattggccctcgattt

SEQ ID NO: 95056 - DNA, 19 bp, Homo sapiens
  siRNA target sequence for NSF (NM_006178.1,1933-1951).
gctcttctcgttttactga

SEQ ID NO: 95057 - DNA, 19 bp, Homo sapiens
  siRNA target sequence for NSF (NM_006178.1,1971-1989).
ccgcaagcttcttatcatt

SEQ ID NO: 95058 - DNA, 19 bp, Homo sapiens
  siRNA target sequence for NSF (NM_006178.1,1992-2010).
gaccactagccgcaaagat

SEQ ID NO: 95059 - DNA, 19 bp, Homo sapiens
  siRNA target sequence for NSF (NM_006178.1,1994-2012).
ccactagccgcaaagatgt

SEQ ID NO: 95060 - DNA, 19 bp, Homo sapiens
  siRNA target sequence for NSF (NM_006178.1,2127-2145).
ggaacgcaccacaattgca

SEQ ID NO: 95061 - DNA, 19 bp, Homo sapiens
  siRNA target sequence for NSF (NM_006178.1,2138-2156).
caattgcacagcaagtcaa

SEQ ID NO: 95062 - DNA, 19 bp, Homo sapiens
  siRNA target sequence for NSF (NM_006178.1,2171-2189).
ggataggaatcaagaagtt

SEQ ID NO: 95063 - DNA, 19 bp, Homo sapiens
  siRNA target sequence for NSF (NM_006178.1,2176-2194).
ggaatcaagaagttactaa

SEQ ID NO: 95064 - DNA, 19 bp, Homo sapiens
  siRNA target sequence for NSF (NM_006178.1,2225-2243).
ctgaataccgtgtgagaaa

SEQ ID NO: 95065 - DNA, 19 bp, Homo sapiens
  siRNA target sequence for NSF (NM_006178.1,2227-2245).
gaataccgtgtgagaaaat

SEQ ID NO: 95066 - DNA, 19 bp, Homo sapiens
  siRNA target sequence for NSF (NM_006178.1,2250-2268).
ggccctcttaagagaagaa

SEQ ID NO: 95067 - DNA, 19 bp, Homo sapiens
  siRNA target sequence for NSF (NM_006178.1,2273-2291).
ctagcccccttgattttga

SEQ ID NO: 95068 - DNA, 19 bp, Homo sapiens
  siRNA target sequence for NTRK1 (NM_002529.2,1305-1323).
gctccttgtgctcaacaaa

SEQ ID NO: 95069 - DNA, 19 bp, Homo sapiens
  siRNA target sequence for NTRK1 (NM_002529.2,1325-1343).
gtggacggagaaacaagtt

SEQ ID NO: 95070 - DNA, 19 bp, Homo sapiens
  siRNA target sequence for NTRK1 (NM_002529.2,1474-1492).
gagaacccacaatacttca

SEQ ID NO: 95071 - DNA, 19 bp, Homo sapiens
  siRNA target sequence for NTRK1 (NM_002529.2,1980-1998).
gggactggtggtcaagatt

SEQ ID NO: 95072 - DNA, 19 bp, Homo sapiens
  siRNA target sequence for NTRK1 (NM_002529.2,2008-2026).
ggcatgagcagggatatct

SEQ ID NO: 95073 - DNA, 19 bp, Homo sapiens
  siRNA target sequence for NTRK2 (NM_006180.2,650-668).
gagattggagcctaacagt

SEQ ID NO: 95074 - DNA, 19 bp, Homo sapiens
  siRNA target sequence for NTRK2 (NM_006180.2,656-674).
ggagcctaacagtgtagat

SEQ ID NO: 95075 - DNA, 19 bp, Homo sapiens
  siRNA target sequence for NTRK2 (NM_006180.2,701-719).
cgcaaaccagaaaaggtta

SEQ ID NO: 95076 - DNA, 19 bp, Homo sapiens
  siRNA target sequence for NTRK2 (NM_006180.2,753-771).
gtgggactgagaaatctga

SEQ ID NO: 95077 - DNA, 19 bp, Homo sapiens
  siRNA target sequence for NTRK2 (NM_006180.2,842-860).
caattttacccgaaacaaa

SEQ ID NO: 95078 - DNA, 19 bp, Homo sapiens
  siRNA target sequence for NTRK2 (NM_006180.2,857-875).
caaactgacgagtttgtct

SEQ ID NO: 95079 - DNA, 19 bp, Homo sapiens
  siRNA target sequence for NTRK2 (NM_006180.2,863-881).
gacgagtttgtctaggaaa

SEQ ID NO: 95080 - DNA, 19 bp, Homo sapiens
  siRNA target sequence for NTRK2 (NM_006180.2,866-884).
gagtttgtctaggaaacat

SEQ ID NO: 95081 - DNA, 19 bp, Homo sapiens
  siRNA target sequence for NTRK2 (NM_006180.2,914-932).
cctggtgggcaatccattt

SEQ ID NO: 95082 - DNA, 19 bp, Homo sapiens
  siRNA target sequence for NTRK2 (NM_006180.2,915-933).
ctggtgggcaatccattta

SEQ ID NO: 95083 - DNA, 19 bp, Homo sapiens
  siRNA target sequence for NTRK2 (NM_006180.2,917-935).
ggtgggcaatccatttaca

SEQ ID NO: 95084 - DNA, 19 bp, Homo sapiens
  siRNA target sequence for NTRK2 (NM_006180.2,918-936).
gtgggcaatccatttacat

SEQ ID NO: 95085 - DNA, 19 bp, Homo sapiens
  siRNA target sequence for NTRK2 (NM_006180.2,934-952).
catgctcctgtgacattat

SEQ ID NO: 95086 - DNA, 19 bp, Homo sapiens
  siRNA target sequence for NTRK2 (NM_006180.2,945-963).
gacattatgtggatcaaga

SEQ ID NO: 95087 - DNA, 19 bp, Homo sapiens
  siRNA target sequence for NTRK2 (NM_006180.2,966-984).
ctccaagaggctaaatcca

SEQ ID NO: 95088 - DNA, 19 bp, Homo sapiens
  siRNA target sequence for NTRK2 (NM_006180.2,985-1003).
gtccagacactcaggattt

SEQ ID NO: 95089 - DNA, 19 bp, Homo sapiens
  siRNA target sequence for NTRK2 (NM_006180.2,987-1005).
ccagacactcaggatttgt

SEQ ID NO: 95090 - DNA, 19 bp, Homo sapiens
  siRNA target sequence for NTRK2 (NM_006180.2,1113-1131).
ggaaagtctatcacattat

SEQ ID NO: 95091 - DNA, 19 bp, Homo sapiens
  siRNA target sequence for NTRK2 (NM_006180.2,1146-1164).
ggtgatccggttcctaata

SEQ ID NO: 95092 - DNA, 19 bp, Homo sapiens
  siRNA target sequence for NTRK2 (NM_006180.2,1147-1165).
gtgatccggttcctaatat

SEQ ID NO: 95093 - DNA, 19 bp, Homo sapiens
  siRNA target sequence for NTRK2 (NM_006180.2,1149-1167).
gatccggttcctaatatgt

SEQ ID NO: 95094 - DNA, 19 bp, Homo sapiens
  siRNA target sequence for NTRK2 (NM_006180.2,1223-1241).
gggctccttaaggataact

SEQ ID NO: 95095 - DNA, 19 bp, Homo sapiens
  siRNA target sequence for NTRK2 (NM_006180.2,1229-1247).
cttaaggataactaacatt

SEQ ID NO: 95096 - DNA, 19 bp, Homo sapiens
  siRNA target sequence for NTRK2 (NM_006180.2,1274-1292).
ctcttgtgtggcggaaaat

SEQ ID NO: 95097 - DNA, 19 bp, Homo sapiens
  siRNA target sequence for NTRK2 (NM_006180.2,1276-1294).
cttgtgtggcggaaaatct

SEQ ID NO: 95098 - DNA, 19 bp, Homo sapiens
  siRNA target sequence for NTRK2 (NM_006180.2,1279-1297).
gtgtggcggaaaatcttgt

SEQ ID NO: 95099 - DNA, 19 bp, Homo sapiens
  siRNA target sequence for NTRK2 (NM_006180.2,1322-1340).
cctcactgtgcattttgca

SEQ ID NO: 95100 - DNA, 19 bp, Homo sapiens
  siRNA target sequence for NTRK2 (NM_006180.2,1382-1400).
ctggtgcattccattcact

SEQ ID NO: 95101 - DNA, 19 bp, Homo sapiens
  siRNA target sequence for NTRK2 (NM_006180.2,1422-1440).
gcgcttcagtggttctata

SEQ ID NO: 95102 - DNA, 19 bp, Homo sapiens
  siRNA target sequence for NTRK2 (NM_006180.2,1443-1461).
ggggcaatattgaatgagt

SEQ ID NO: 95103 - DNA, 19 bp, Homo sapiens
  siRNA target sequence for NTRK2 (NM_006180.2,1458-1476).
gagtccaaatacatctgta

SEQ ID NO: 95104 - DNA, 19 bp, Homo sapiens
  siRNA target sequence for NTRK2 (NM_006180.2,1462-1480).
ccaaatacatctgtactaa

SEQ ID NO: 95105 - DNA, 19 bp, Homo sapiens
  siRNA target sequence for NTRK2 (NM_006180.2,1649-1667).
cccaaattatcctgatgta

SEQ ID NO: 95106 - DNA, 19 bp, Homo sapiens
  siRNA target sequence for NTRK2 (NM_006180.2,1683-1701).
ggaactgcagcgaatgaca

SEQ ID NO: 95107 - DNA, 19 bp, Homo sapiens
  siRNA target sequence for NTRK2 (NM_006180.2,1684-1702).
gaactgcagcgaatgacat

SEQ ID NO: 95108 - DNA, 19 bp, Homo sapiens
  siRNA target sequence for NTRK2 (NM_006180.2,1707-1725).
gacaccacgaacagaagta

SEQ ID NO: 95109 - DNA, 19 bp, Homo sapiens
  siRNA target sequence for NTRK2 (NM_006180.2,1711-1729).
ccacgaacagaagtaatga

SEQ ID NO: 95110 - DNA, 19 bp, Homo sapiens
  siRNA target sequence for NTRK2 (NM_006180.2,1712-1730).
cacgaacagaagtaatgaa

SEQ ID NO: 95111 - DNA, 19 bp, Homo sapiens
  siRNA target sequence for NTRK2 (NM_006180.2,1739-1757).
cacagacgtcactgataaa

SEQ ID NO: 95112 - DNA, 19 bp, Homo sapiens
  siRNA target sequence for NTRK2 (NM_006180.2,1811-1829).
gggattttgccttttggta

SEQ ID NO: 95113 - DNA, 19 bp, Homo sapiens
  siRNA target sequence for NTRK2 (NM_006180.2,1812-1830).
ggattttgccttttggtaa

SEQ ID NO: 95114 - DNA, 19 bp, Homo sapiens
  siRNA target sequence for NTRK2 (NM_006180.2,1861-1879).
ccaagtttggcatgaaaga

SEQ ID NO: 95115 - DNA, 19 bp, Homo sapiens
  siRNA target sequence for NTRK2 (NM_006180.2,1862-1880).
caagtttggcatgaaagat

SEQ ID NO: 95116 - DNA, 19 bp, Homo sapiens
  siRNA target sequence for NTRK2 (NM_006180.2,1874-1892).
gaaagatttctcatggttt

SEQ ID NO: 95117 - DNA, 19 bp, Homo sapiens
  siRNA target sequence for NTRK2 (NM_006180.2,1926-1944).
ggcccagcctccgttatca

SEQ ID NO: 95118 - DNA, 19 bp, Homo sapiens
  siRNA target sequence for NTRK2 (NM_006180.2,2045-2063).
gaccaagatccctgtcatt

SEQ ID NO: 95119 - DNA, 19 bp, Homo sapiens
  siRNA target sequence for NTRK2 (NM_006180.2,2047-2065).
ccaagatccctgtcattga

SEQ ID NO: 95120 - DNA, 19 bp, Homo sapiens
  siRNA target sequence for NTRK2 (NM_006180.2,2124-2142).
cacatcaagcgacataaca

SEQ ID NO: 95121 - DNA, 19 bp, Homo sapiens
  siRNA target sequence for NTRK2 (NM_006180.2,2126-2144).
catcaagcgacataacatt

SEQ ID NO: 95122 - DNA, 19 bp, Homo sapiens
  siRNA target sequence for NTRK2 (NM_006180.2,2129-2147).
caagcgacataacattgtt

SEQ ID NO: 95123 - DNA, 19 bp, Homo sapiens
  siRNA target sequence for NTRK2 (NM_006180.2,2653-2671).
gggtcggtggccacacaat

SEQ ID NO: 95124 - DNA, 19 bp, Homo sapiens
  siRNA target sequence for NTRK2 (NM_006180.2,2792-2810).
gtaccagctgtcaaacaat

SEQ ID NO: 95125 - DNA, 19 bp, Homo sapiens
  siRNA target sequence for NTRK2 (NM_006180.2,2811-2829).
gaggtgatagagtgtatca

SEQ ID NO: 95126 - DNA, 19 bp, Homo sapiens
  siRNA target sequence for NTRK2 (NM_006180.2,2813-2831).
ggtgatagagtgtatcact

SEQ ID NO: 95127 - DNA, 19 bp, Homo sapiens
  siRNA target sequence for NTRK3 (NM_002530.1,184-202).
gtagtttctggcggatttt

SEQ ID NO: 95128 - DNA, 19 bp, Homo sapiens
  siRNA target sequence for NTRK3 (NM_002530.1,214-232).
gcgtctggctggactatgt

SEQ ID NO: 95129 - DNA, 19 bp, Homo sapiens
  siRNA target sequence for NTRK3 (NM_002530.1,247-265).
cttgccctgcaaattgtgt

SEQ ID NO: 95130 - DNA, 19 bp, Homo sapiens
  siRNA target sequence for NTRK3 (NM_002530.1,354-372).
gggaacgccagtatcaaca

SEQ ID NO: 95131 - DNA, 19 bp, Homo sapiens
  siRNA target sequence for NTRK3 (NM_002530.1,355-373).
ggaacgccagtatcaacat

SEQ ID NO: 95132 - DNA, 19 bp, Homo sapiens
  siRNA target sequence for NTRK3 (NM_002530.1,374-392).
cacggacatctcaaggaat

SEQ ID NO: 95133 - DNA, 19 bp, Homo sapiens
  siRNA target sequence for NTRK3 (NM_002530.1,397-415).
cttccatacacatagagaa

SEQ ID NO: 95134 - DNA, 19 bp, Homo sapiens
  siRNA target sequence for NTRK3 (NM_002530.1,455-473).
gctctacaccggacttcaa

SEQ ID NO: 95135 - DNA, 19 bp, Homo sapiens
  siRNA target sequence for NTRK3 (NM_002530.1,456-474).
ctctacaccggacttcaaa

SEQ ID NO: 95136 - DNA, 19 bp, Homo sapiens
  siRNA target sequence for NTRK3 (NM_002530.1,533-551).
cccccatttgcgttatata

SEQ ID NO: 95137 - DNA, 19 bp, Homo sapiens
  siRNA target sequence for NTRK3 (NM_002530.1,534-552).
ccccatttgcgttatataa

SEQ ID NO: 95138 - DNA, 19 bp, Homo sapiens
  siRNA target sequence for NTRK3 (NM_002530.1,535-553).
cccatttgcgttatataaa

SEQ ID NO: 95139 - DNA, 19 bp, Homo sapiens
  siRNA target sequence for NTRK3 (NM_002530.1,873-891).
gatgtggactggatagtca

SEQ ID NO: 95140 - DNA, 19 bp, Homo sapiens
  siRNA target sequence for NTRK3 (NM_002530.1,913-931).
ctcaccagaccaatctgaa

SEQ ID NO: 95141 - DNA, 19 bp, Homo sapiens
  siRNA target sequence for NTRK3 (NM_002530.1,1211-1229).
ctaccaagagggagagatt

SEQ ID NO: 95142 - DNA, 19 bp, Homo sapiens
  siRNA target sequence for NTRK3 (NM_002530.1,1256-1274).
gcccacccactacaacaat

SEQ ID NO: 95143 - DNA, 19 bp, Homo sapiens
  siRNA target sequence for NTRK3 (NM_002530.1,1359-1377).
gagagcacggataacttta

SEQ ID NO: 95144 - DNA, 19 bp, Homo sapiens
  siRNA target sequence for NTRK3 (NM_002530.1,1439-1457).
cacttttggggtatccata

SEQ ID NO: 95145 - DNA, 19 bp, Homo sapiens
  siRNA target sequence for NTRK3 (NM_002530.1,1527-1545).
cgacggtccaaatttggaa

SEQ ID NO: 95146 - DNA, 19 bp, Homo sapiens
  siRNA target sequence for NTRK3 (NM_002530.1,1528-1546).
gacggtccaaatttggaat

SEQ ID NO: 95147 - DNA, 19 bp, Homo sapiens
  siRNA target sequence for NTRK3 (NM_002530.1,1670-1688).
gactcgcatccctgtcatt

SEQ ID NO: 95148 - DNA, 19 bp, Homo sapiens
  siRNA target sequence for NTRK3 (NM_002530.1,1738-1756).
cgtatgtgcagcacattaa

SEQ ID NO: 95149 - DNA, 19 bp, Homo sapiens
  siRNA target sequence for NTRK3 (NM_002530.1,1837-1855).
gcccgaccaaggacaagat

SEQ ID NO: 95150 - DNA, 19 bp, Homo sapiens
  siRNA target sequence for NTRK3 (NM_002530.1,2218-2236).
gagcgaatctgctagtgaa

SEQ ID NO: 95151 - DNA, 19 bp, Homo sapiens
  siRNA target sequence for NTRK3 (NM_002530.1,2265-2283).
gtctacagcacggattatt

SEQ ID NO: 95152 - DNA, 19 bp, Homo sapiens
  siRNA target sequence for NTRK3 (NM_002530.1,2354-2372).
cactacagagagtgatgta

SEQ ID NO: 95153 - DNA, 19 bp, Homo sapiens
  siRNA target sequence for NTRK3 (NM_002530.1,2422-2440).
catggttccaactctcaaa

SEQ ID NO: 95154 - DNA, 19 bp, Homo sapiens
  siRNA target sequence for NTRK3 (NM_002530.1,2596-2614).
ggaaggccaccccaatcta

SEQ ID NO: 95155 - DNA, 19 bp, Homo sapiens
  siRNA target sequence for NUBP1 (NM_002484.1,117-135).
ctccggacacggctataga

SEQ ID NO: 95156 - DNA, 19 bp, Homo sapiens
  siRNA target sequence for NUBP1 (NM_002484.1,126-144).
cggctatagaggaaatcaa

SEQ ID NO: 95157 - DNA, 19 bp, Homo sapiens
  siRNA target sequence for NUBP1 (NM_002484.1,127-145).
ggctatagaggaaatcaaa

SEQ ID NO: 95158 - DNA, 19 bp, Homo sapiens
  siRNA target sequence for NUBP1 (NM_002484.1,167-185).
cacaaaatcttggtattgt

SEQ ID NO: 95159 - DNA, 19 bp, Homo sapiens
  siRNA target sequence for NUBP1 (NM_002484.1,266-284).
gctcttctagacatcgata

SEQ ID NO: 95160 - DNA, 19 bp, Homo sapiens
  siRNA target sequence for NUBP1 (NM_002484.1,267-285).
ctcttctagacatcgatat

SEQ ID NO: 95161 - DNA, 19 bp, Homo sapiens
  siRNA target sequence for NUBP1 (NM_002484.1,269-287).
cttctagacatcgatatat

SEQ ID NO: 95162 - DNA, 19 bp, Homo sapiens
  siRNA target sequence for NUBP1 (NM_002484.1,294-312).
catcgattcccaagataat

SEQ ID NO: 95163 - DNA, 19 bp, Homo sapiens
  siRNA target sequence for NUBP1 (NM_002484.1,406-424).
gctcagcagtcctgatgat

SEQ ID NO: 95164 - DNA, 19 bp, Homo sapiens
  siRNA target sequence for NUBP1 (NM_002484.1,626-644).
gatgtccggaaagaaatca

SEQ ID NO: 95165 - DNA, 19 bp, Homo sapiens
  siRNA target sequence for NUBP1 (NM_002484.1,706-724).
ctgtcctaagtgcaagaaa

SEQ ID NO: 95166 - DNA, 19 bp, Homo sapiens
  siRNA target sequence for NUBP1 (NM_002484.1,809-827).
ctggatccgctcataggta

SEQ ID NO: 95167 - DNA, 19 bp, Homo sapiens
  siRNA target sequence for NUBP1 (NM_002484.1,843-861).
gccagtcttttttcattga

SEQ ID NO: 95168 - DNA, 19 bp, Homo sapiens
  siRNA target sequence for NUBP1 (NM_002484.1,878-896).
gccacgttagcctacagaa

SEQ ID NO: 95169 - DNA, 19 bp, Homo sapiens
  siRNA target sequence for NUBP1 (NM_002484.1,882-900).
cgttagcctacagaagtat

SEQ ID NO: 95170 - DNA, 19 bp, Homo sapiens
  siRNA target sequence for NUBP1 (NM_002484.1,883-901).
gttagcctacagaagtata

SEQ ID NO: 95171 - DNA, 19 bp, Homo sapiens
  siRNA target sequence for NUBP1 (NM_002484.1,888-906).
cctacagaagtataattca

SEQ ID NO: 95172 - DNA, 19 bp, Homo sapiens
  siRNA target sequence for NUBP1 (NM_002484.1,909-927).
gaatccaagagttttgtaa

SEQ ID NO: 95173 - DNA, 19 bp, Homo sapiens
  siRNA target sequence for NUBP1 (NM_002484.1,924-942).
gtaatctccatcagtcaaa

SEQ ID NO: 95174 - DNA, 19 bp, Homo sapiens
  siRNA target sequence for NUBP2 (NM_012225.1,375-393).
gtggagaggccccaagaaa

SEQ ID NO: 95175 - DNA, 19 bp, Homo sapiens
  siRNA target sequence for NUBP2 (NM_012225.1,577-595).
cgcgagctgaccttctgta

SEQ ID NO: 95176 - DNA, 19 bp, Homo sapiens
  siRNA target sequence for NVL (NM_002533.1,363-381).
cctgattctgtttcaaata

SEQ ID NO: 95177 - DNA, 19 bp, Homo sapiens
  siRNA target sequence for NVL (NM_002533.1,481-499).
gaggatggtttattgacaa

SEQ ID NO: 95178 - DNA, 19 bp, Homo sapiens
  siRNA target sequence for NVL (NM_002533.1,533-551).
ggacctgtcatgtgagaaa

SEQ ID NO: 95179 - DNA, 19 bp, Homo sapiens
  siRNA target sequence for NVL (NM_002533.1,534-552).
gacctgtcatgtgagaaaa

SEQ ID NO: 95180 - DNA, 19 bp, Homo sapiens
  siRNA target sequence for NVL (NM_002533.1,563-581).
gaagccaataactgagata

SEQ ID NO: 95181 - DNA, 19 bp, Homo sapiens
  siRNA target sequence for NVL (NM_002533.1,624-642).
cggaaaggcaagctaaaga

SEQ ID NO: 95182 - DNA, 19 bp, Homo sapiens
  siRNA target sequence for NVL (NM_002533.1,743-761).
gatctccaacgtgaagttt

SEQ ID NO: 95183 - DNA, 19 bp, Homo sapiens
  siRNA target sequence for NVL (NM_002533.1,746-764).
ctccaacgtgaagtttgaa

SEQ ID NO: 95184 - DNA, 19 bp, Homo sapiens
  siRNA target sequence for NVL (NM_002533.1,768-786).
gtgggaggcaatgatatga

SEQ ID NO: 95185 - DNA, 19 bp, Homo sapiens
  siRNA target sequence for NVL (NM_002533.1,904-922).
cattacttgcacatgcaat

SEQ ID NO: 95186 - DNA, 19 bp, Homo sapiens
  siRNA target sequence for NVL (NM_002533.1,930-948).
gaacttgacctgccaattt

SEQ ID NO: 95187 - DNA, 19 bp, Homo sapiens
  siRNA target sequence for NVL (NM_002533.1,933-951).
cttgacctgccaattttga

SEQ ID NO: 95188 - DNA, 19 bp, Homo sapiens
  siRNA target sequence for NVL (NM_002533.1,1089-1107).
gaagtggcttcaaaagata

SEQ ID NO: 95189 - DNA, 19 bp, Homo sapiens
  siRNA target sequence for NVL (NM_002533.1,1141-1159).
gcatggatgatctgaataa

SEQ ID NO: 95190 - DNA, 19 bp, Homo sapiens
  siRNA target sequence for NVL (NM_002533.1,1240-1258).
gaaggttcgaccgagaaat

SEQ ID NO: 95191 - DNA, 19 bp, Homo sapiens
  siRNA target sequence for NVL (NM_002533.1,1252-1270).
gagaaatatgcctaggtat

SEQ ID NO: 95192 - DNA, 19 bp, Homo sapiens
  siRNA target sequence for NVL (NM_002533.1,1262-1280).
cctaggtatcccagatgaa

SEQ ID NO: 95193 - DNA, 19 bp, Homo sapiens
  siRNA target sequence for NVL (NM_002533.1,1289-1307).
ggaaagaatacttcaaaca

SEQ ID NO: 95194 - DNA, 19 bp, Homo sapiens
  siRNA target sequence for NVL (NM_002533.1,1290-1308).
gaaagaatacttcaaacat

SEQ ID NO: 95195 - DNA, 19 bp, Homo sapiens
  siRNA target sequence for NVL (NM_002533.1,1322-1340).
gaggcttcctcaagctttt

SEQ ID NO: 95196 - DNA, 19 bp, Homo sapiens
  siRNA target sequence for NVL (NM_002533.1,1403-1421).
ccgagaggcagcaatgtgt

SEQ ID NO: 95197 - DNA, 19 bp, Homo sapiens
  siRNA target sequence for NVL (NM_002533.1,1425-1443).
gtcaatagagtcttaatga

SEQ ID NO: 95198 - DNA, 19 bp, Homo sapiens
  siRNA target sequence for NVL (NM_002533.1,1616-1634).
gtgcattgaactgaatgat

SEQ ID NO: 95199 - DNA, 19 bp, Homo sapiens
  siRNA target sequence for NVL (NM_002533.1,1686-1704).
gtcactgtccctaatgtga

SEQ ID NO: 95200 - DNA, 19 bp, Homo sapiens
  siRNA target sequence for NVL (NM_002533.1,1743-1761).
gagctcaccatggcaatat

SEQ ID NO: 95201 - DNA, 19 bp, Homo sapiens
  siRNA target sequence for NVL (NM_002533.1,1862-1880).
ggcgaaggctgttgcaaat

SEQ ID NO: 95202 - DNA, 19 bp, Homo sapiens
  siRNA target sequence for NVL (NM_002533.1,1864-1882).
cgaaggctgttgcaaatga

SEQ ID NO: 95203 - DNA, 19 bp, Homo sapiens
  siRNA target sequence for NVL (NM_002533.1,1876-1894).
caaatgagtccggactaaa

SEQ ID NO: 95204 - DNA, 19 bp, Homo sapiens
  siRNA target sequence for NVL (NM_002533.1,1883-1901).
gtccggactaaattttata

SEQ ID NO: 95205 - DNA, 19 bp, Homo sapiens
  siRNA target sequence for NVL (NM_002533.1,1886-1904).
cggactaaattttatatct

SEQ ID NO: 95206 - DNA, 19 bp, Homo sapiens
  siRNA target sequence for NVL (NM_002533.1,1915-1933).
ccgaattactaaacatgta

SEQ ID NO: 95207 - DNA, 19 bp, Homo sapiens
  siRNA target sequence for NVL (NM_002533.1,1950-1968).
cgtgctgtgcgacaagttt

SEQ ID NO: 95208 - DNA, 19 bp, Homo sapiens
  siRNA target sequence for NVL (NM_002533.1,1951-1969).
gtgctgtgcgacaagtttt

SEQ ID NO: 95209 - DNA, 19 bp, Homo sapiens
  siRNA target sequence for NVL (NM_002533.1,1954-1972).
ctgtgcgacaagtttttca

SEQ ID NO: 95210 - DNA, 19 bp, Homo sapiens
  siRNA target sequence for NVL (NM_002533.1,2062-2080).
gtgtccgagtggtgaatca

SEQ ID NO: 95211 - DNA, 19 bp, Homo sapiens
  siRNA target sequence for NVL (NM_002533.1,2070-2088).
gtggtgaatcagctactta

SEQ ID NO: 95212 - DNA, 19 bp, Homo sapiens
  siRNA target sequence for NVL (NM_002533.1,2072-2090).
ggtgaatcagctacttaca

SEQ ID NO: 95213 - DNA, 19 bp, Homo sapiens
  siRNA target sequence for NVL (NM_002533.1,2112-2130).
cgccagcaggtttttatta

SEQ ID NO: 95214 - DNA, 19 bp, Homo sapiens
  siRNA target sequence for NVL (NM_002533.1,2140-2158).
ctaacaggccagatataat

SEQ ID NO: 95215 - DNA, 19 bp, Homo sapiens
  siRNA target sequence for NVL (NM_002533.1,2226-2244).
gatcgccttgccatcttaa

SEQ ID NO: 95216 - DNA, 19 bp, Homo sapiens
  siRNA target sequence for NVL (NM_002533.1,2231-2249).
ccttgccatcttaaaaact

SEQ ID NO: 95217 - DNA, 19 bp, Homo sapiens
  siRNA target sequence for NVL (NM_002533.1,2232-2250).
cttgccatcttaaaaacta

SEQ ID NO: 95218 - DNA, 19 bp, Homo sapiens
  siRNA target sequence for NVL (NM_002533.1,2274-2292).
ccactggatgcagatgtaa

SEQ ID NO: 95219 - DNA, 19 bp, Homo sapiens
  siRNA target sequence for NVL (NM_002533.1,2275-2293).
cactggatgcagatgtaaa

SEQ ID NO: 95220 - DNA, 19 bp, Homo sapiens
  siRNA target sequence for NVL (NM_002533.1,2315-2333).
ccttcgctgtgattgctat

SEQ ID NO: 95221 - DNA, 19 bp, Homo sapiens
  siRNA target sequence for NVL (NM_002533.1,2316-2334).
cttcgctgtgattgctata

SEQ ID NO: 95222 - DNA, 19 bp, Homo sapiens
  siRNA target sequence for NVL (NM_002533.1,2358-2376).
gtacgagaagcttctatct

SEQ ID NO: 95223 - DNA, 19 bp, Homo sapiens
  siRNA target sequence for NVL (NM_002533.1,2427-2445).
gaactcaaggttagtcata

SEQ ID NO: 95224 - DNA, 19 bp, Homo sapiens
  siRNA target sequence for NVL (NM_002533.1,2432-2450).
caaggttagtcataagcat

SEQ ID NO: 95225 - DNA, 19 bp, Homo sapiens
  siRNA target sequence for NVL (NM_002533.1,2435-2453).
ggttagtcataagcatttt

SEQ ID NO: 95226 - DNA, 19 bp, Homo sapiens
  siRNA target sequence for NVL (NM_002533.1,2440-2458).
gtcataagcattttgaaga

SEQ ID NO: 95227 - DNA, 19 bp, Homo sapiens
  siRNA target sequence for NVL (NM_002533.1,2460-2478).
gctttcaagaaagtaagat

SEQ ID NO: 95228 - DNA, 19 bp, Homo sapiens
  siRNA target sequence for NVL (NM_002533.1,2472-2490).
gtaagatcatctatatcaa

SEQ ID NO: 95229 - DNA, 19 bp, Homo sapiens
  siRNA target sequence for NVL (NM_002533.1,2495-2513).
ggatcaaatcatgtatgaa

SEQ ID NO: 95230 - DNA, 19 bp, Homo sapiens
  siRNA target sequence for OSR1 (NM_005109.1,374-392).
ccatcaacagggacgatta

SEQ ID NO: 95231 - DNA, 19 bp, Homo sapiens
  siRNA target sequence for OSR1 (NM_005109.1,481-499).
cggataaaccttgagaaat

SEQ ID NO: 95232 - DNA, 19 bp, Homo sapiens
  siRNA target sequence for OSR1 (NM_005109.1,551-569).
gccatcatcctaatattgt

SEQ ID NO: 95233 - DNA, 19 bp, Homo sapiens
  siRNA target sequence for OSR1 (NM_005109.1,552-570).
ccatcatcctaatattgta

SEQ ID NO: 95234 - DNA, 19 bp, Homo sapiens
  siRNA target sequence for OSR1 (NM_005109.1,553-571).
catcatcctaatattgtat

SEQ ID NO: 95235 - DNA, 19 bp, Homo sapiens
  siRNA target sequence for OSR1 (NM_005109.1,559-577).
cctaatattgtatcttact

SEQ ID NO: 95236 - DNA, 19 bp, Homo sapiens
  siRNA target sequence for OSR1 (NM_005109.1,560-578).
ctaatattgtatcttacta

SEQ ID NO: 95237 - DNA, 19 bp, Homo sapiens
  siRNA target sequence for OSR1 (NM_005109.1,666-684).
ggcaaaaggggaacacaaa

SEQ ID NO: 95238 - DNA, 19 bp, Homo sapiens
  siRNA target sequence for OSR1 (NM_005109.1,693-711).
cctagatgaatctaccatt

SEQ ID NO: 95239 - DNA, 19 bp, Homo sapiens
  siRNA target sequence for OSR1 (NM_005109.1,716-734).
cgatactccgagaagtact

SEQ ID NO: 95240 - DNA, 19 bp, Homo sapiens
  siRNA target sequence for OSR1 (NM_005109.1,740-758).
ggctggaatatctgcataa

SEQ ID NO: 95241 - DNA, 19 bp, Homo sapiens
  siRNA target sequence for OSR1 (NM_005109.1,741-759).
gctggaatatctgcataaa

SEQ ID NO: 95242 - DNA, 19 bp, Homo sapiens
  siRNA target sequence for OSR1 (NM_005109.1,936-954).
ggaacaggtccgtggttat

SEQ ID NO: 95243 - DNA, 19 bp, Homo sapiens
  siRNA target sequence for OSR1 (NM_005109.1,943-961).
gtccgtggttatgatttca

SEQ ID NO: 95244 - DNA, 19 bp, Homo sapiens
  siRNA target sequence for OSR1 (NM_005109.1,945-963).
ccgtggttatgatttcaaa

SEQ ID NO: 95245 - DNA, 19 bp, Homo sapiens
  siRNA target sequence for OSR1 (NM_005109.1,1033-1051).
ccaccaatgaaggttttaa

SEQ ID NO: 95246 - DNA, 19 bp, Homo sapiens
  siRNA target sequence for OSR1 (NM_005109.1,1034-1052).
caccaatgaaggttttaat

SEQ ID NO: 95247 - DNA, 19 bp, Homo sapiens
  siRNA target sequence for OSR1 (NM_005109.1,1068-1086).
cgatcctccttctttggaa

SEQ ID NO: 95248 - DNA, 19 bp, Homo sapiens
  siRNA target sequence for OSR1 (NM_005109.1,1091-1109).
gtgttcaagataaagaaat

SEQ ID NO: 95249 - DNA, 19 bp, Homo sapiens
  siRNA target sequence for OSR1 (NM_005109.1,1192-1210).
gaactattaaggcacaaat

SEQ ID NO: 95250 - DNA, 19 bp, Homo sapiens
  siRNA target sequence for OSR1 (NM_005109.1,1257-1275).
gcagagagcaccaaccatt

SEQ ID NO: 95251 - DNA, 19 bp, Homo sapiens
  siRNA target sequence for OSR1 (NM_005109.1,1313-1331).
ccagtgggcgtcttcataa

SEQ ID NO: 95252 - DNA, 19 bp, Homo sapiens
  siRNA target sequence for OSR1 (NM_005109.1,1415-1433).
ggtctccccgagtgaaaga

SEQ ID NO: 95253 - DNA, 19 bp, Homo sapiens
  siRNA target sequence for OSR1 (NM_005109.1,1420-1438).
ccccgagtgaaagaatcaa

SEQ ID NO: 95254 - DNA, 19 bp, Homo sapiens
  siRNA target sequence for OSR1 (NM_005109.1,1421-1439).
cccgagtgaaagaatcaat

SEQ ID NO: 95255 - DNA, 19 bp, Homo sapiens
  siRNA target sequence for OSR1 (NM_005109.1,1422-1440).
ccgagtgaaagaatcaata

SEQ ID NO: 95256 - DNA, 19 bp, Homo sapiens
  siRNA target sequence for OSR1 (NM_005109.1,1466-1484).
ctgatcctgtgggtacttt

SEQ ID NO: 95257 - DNA, 19 bp, Homo sapiens
  siRNA target sequence for OSR1 (NM_005109.1,1572-1590).
caccgcagagccagcaaaa

SEQ ID NO: 95258 - DNA, 19 bp, Homo sapiens
  siRNA target sequence for OSR1 (NM_005109.1,1638-1656).
cccaatcagtctagtacta

SEQ ID NO: 95259 - DNA, 19 bp, Homo sapiens
  siRNA target sequence for OSR1 (NM_005109.1,1639-1657).
ccaatcagtctagtactaa

SEQ ID NO: 95260 - DNA, 19 bp, Homo sapiens
  siRNA target sequence for OSR1 (NM_005109.1,1644-1662).
cagtctagtactaagatta

SEQ ID NO: 95261 - DNA, 19 bp, Homo sapiens
  siRNA target sequence for OSR1 (NM_005109.1,1648-1666).
ctagtactaagattaagga

SEQ ID NO: 95262 - DNA, 19 bp, Homo sapiens
  siRNA target sequence for OSR1 (NM_005109.1,1651-1669).
gtactaagattaaggaatt

SEQ ID NO: 95263 - DNA, 19 bp, Homo sapiens
  siRNA target sequence for OSR1 (NM_005109.1,1654-1672).
ctaagattaaggaattcca

SEQ ID NO: 95264 - DNA, 19 bp, Homo sapiens
  siRNA target sequence for OSR1 (NM_005109.1,1678-1696).
gaactaaatgatattcgat

SEQ ID NO: 95265 - DNA, 19 bp, Homo sapiens
  siRNA target sequence for OSR1 (NM_005109.1,1761-1779).
ggtcgacggaagggattta

SEQ ID NO: 95266 - DNA, 19 bp, Homo sapiens
  siRNA target sequence for OSR1 (NM_005109.1,1767-1785).
cggaagggatttagtaata

SEQ ID NO: 95267 - DNA, 19 bp, Homo sapiens
  siRNA target sequence for OSR1 (NM_005109.1,1769-1787).
gaagggatttagtaatagt

SEQ ID NO: 95268 - DNA, 19 bp, Homo sapiens
  siRNA target sequence for OSR1 (NM_005109.1,1789-1807).
gcagctaatttgcagaaaa

SEQ ID NO: 95269 - DNA, 19 bp, Homo sapiens
  siRNA target sequence for OSR1 (NM_005109.1,1816-1834).
gaacctcagtcaaatcgat

SEQ ID NO: 95270 - DNA, 19 bp, Homo sapiens
  siRNA target sequence for OSR1 (NM_005109.1,1858-1876).
ggtgtcgaaggctcagata

SEQ ID NO: 95271 - DNA, 19 bp, Homo sapiens
  siRNA target sequence for OSR1 (NM_005109.1,1859-1877).
gtgtcgaaggctcagatat

SEQ ID NO: 95272 - DNA, 19 bp, Homo sapiens
  siRNA target sequence for OSR1 (NM_005109.1,1863-1881).
cgaaggctcagatattcct

SEQ ID NO: 95273 - DNA, 19 bp, Homo sapiens
  siRNA target sequence for P2RX1 (NM_002558.2,505-523).
gtgctggtgcgtaataaga

SEQ ID NO: 95274 - DNA, 19 bp, Homo sapiens
  siRNA target sequence for P2RX1 (NM_002558.2,578-596).
ggtgggtgtttctctatga

SEQ ID NO: 95275 - DNA, 19 bp, Homo sapiens
  siRNA target sequence for P2RX1 (NM_002558.2,802-820).
ccagaagggggcatatgca

SEQ ID NO: 95276 - DNA, 19 bp, Homo sapiens
  siRNA target sequence for P2RX1 (NM_002558.2,803-821).
cagaagggggcatatgcaa

SEQ ID NO: 95277 - DNA, 19 bp, Homo sapiens
  siRNA target sequence for P2RX1 (NM_002558.2,909-927).
gaagacgtgtgagatcttt

SEQ ID NO: 95278 - DNA, 19 bp, Homo sapiens
  siRNA target sequence for P2RX1 (NM_002558.2,979-997).
cgagaggccgagaacttca

SEQ ID NO: 95279 - DNA, 19 bp, Homo sapiens
  siRNA target sequence for P2RX1 (NM_002558.2,1245-1263).
gcactgcagacccatctat

SEQ ID NO: 95280 - DNA, 19 bp, Homo sapiens
  siRNA target sequence for P2RX1 (NM_002558.2,1250-1268).
gcagacccatctatgagtt

SEQ ID NO: 95281 - DNA, 19 bp, Homo sapiens
  siRNA target sequence for P2RX1 (NM_002558.2,1513-1531).
cctaagaggcactactaca

SEQ ID NO: 95282 - DNA, 19 bp, Homo sapiens
  siRNA target sequence for P2RX1 (NM_002558.2,1514-1532).
ctaagaggcactactacaa

SEQ ID NO: 95283 - DNA, 19 bp, Homo sapiens
  siRNA target sequence for P2RX2 (NM_012226.3,96-114).
ggtgatcgtggtacgtatt

SEQ ID NO: 95284 - DNA, 19 bp, Homo sapiens
  siRNA target sequence for P2RX2 (NM_012226.3,99-117).
gatcgtggtacgtattcat

SEQ ID NO: 95285 - DNA, 19 bp, Homo sapiens
  siRNA target sequence for P2RX2 (NM_012226.3,110-128).
gtattcatcgtgcagaaaa

SEQ ID NO: 95286 - DNA, 19 bp, Homo sapiens
  siRNA target sequence for P2RX2 (NM_012226.3,189-207).
ccacgtccgagcacaaagt

SEQ ID NO: 95287 - DNA, 19 bp, Homo sapiens
  siRNA target sequence for P2RX2 (NM_012226.3,254-272).
ggcgctgtgtgccctatta

SEQ ID NO: 95288 - DNA, 19 bp, Homo sapiens
  siRNA target sequence for P2RX2 (NM_012226.3,257-275).
gctgtgtgccctattacca

SEQ ID NO: 95289 - DNA, 19 bp, Homo sapiens
  siRNA target sequence for P2RX2 (NM_012226.3,349-367).
ggtacgatggccccaaatt

SEQ ID NO: 95290 - DNA, 19 bp, Homo sapiens
  siRNA target sequence for P2RX2 (NM_012226.3,562-580).
ggtgtcatcggggtcatta

SEQ ID NO: 95291 - DNA, 19 bp, Homo sapiens
  siRNA target sequence for P2RX2 (NM_012226.3,563-581).
gtgtcatcggggtcattat

SEQ ID NO: 95292 - DNA, 19 bp, Homo sapiens
  siRNA target sequence for P2RX2 (NM_012226.3,565-583).
gtcatcggggtcattatca

SEQ ID NO: 95293 - DNA, 19 bp, Homo sapiens
  siRNA target sequence for P2RX2 (NM_012226.3,667-685).
gcctcgtcaggctacaact

SEQ ID NO: 95294 - DNA, 19 bp, Homo sapiens
  siRNA target sequence for P2RX2 (NM_012226.3,862-880).
gactggatcttgctaacat

SEQ ID NO: 95295 - DNA, 19 bp, Homo sapiens
  siRNA target sequence for P2RX3 (NM_002559.2,114-132).
ccaagtcggtggttgtgaa

SEQ ID NO: 95296 - DNA, 19 bp, Homo sapiens
  siRNA target sequence for P2RX3 (NM_002559.2,138-156).
ggaccatcgggatcatcaa

SEQ ID NO: 95297 - DNA, 19 bp, Homo sapiens
  siRNA target sequence for P2RX3 (NM_002559.2,148-166).
gatcatcaaccgagtagtt

SEQ ID NO: 95298 - DNA, 19 bp, Homo sapiens
  siRNA target sequence for P2RX3 (NM_002559.2,164-182).
gttcagcttctgatcatct

SEQ ID NO: 95299 - DNA, 19 bp, Homo sapiens
  siRNA target sequence for P2RX3 (NM_002559.2,175-193).
gatcatctcctactttgta

SEQ ID NO: 95300 - DNA, 19 bp, Homo sapiens
  siRNA target sequence for P2RX3 (NM_002559.2,230-248).
cgggacacagccattgagt

SEQ ID NO: 95301 - DNA, 19 bp, Homo sapiens
  siRNA target sequence for P2RX3 (NM_002559.2,332-350).
ggcacctcggtctttgtca

SEQ ID NO: 95302 - DNA, 19 bp, Homo sapiens
  siRNA target sequence for P2RX3 (NM_002559.2,333-351).
gcacctcggtctttgtcat

SEQ ID NO: 95303 - DNA, 19 bp, Homo sapiens
  siRNA target sequence for P2RX3 (NM_002559.2,410-428).
gagaaataccgctgtgtat

SEQ ID NO: 95304 - DNA, 19 bp, Homo sapiens
  siRNA target sequence for P2RX3 (NM_002559.2,412-430).
gaaataccgctgtgtatca

SEQ ID NO: 95305 - DNA, 19 bp, Homo sapiens
  siRNA target sequence for P2RX3 (NM_002559.2,477-495).
ctggccgctgcgtgaacta

SEQ ID NO: 95306 - DNA, 19 bp, Homo sapiens
  siRNA target sequence for P2RX3 (NM_002559.2,479-497).
ggccgctgcgtgaactaca

SEQ ID NO: 95307 - DNA, 19 bp, Homo sapiens
  siRNA target sequence for P2RX3 (NM_002559.2,554-572).
gtggaaacgcccatcatga

SEQ ID NO: 95308 - DNA, 19 bp, Homo sapiens
  siRNA target sequence for P2RX3 (NM_002559.2,614-632).
cgtttccccctcttcaact

SEQ ID NO: 95309 - DNA, 19 bp, Homo sapiens
  siRNA target sequence for P2RX3 (NM_002559.2,615-633).
gtttccccctcttcaactt

SEQ ID NO: 95310 - DNA, 19 bp, Homo sapiens
  siRNA target sequence for P2RX3 (NM_002559.2,867-885).
ggctcgacagcgtttctga

SEQ ID NO: 95311 - DNA, 19 bp, Homo sapiens
  siRNA target sequence for P2RX3 (NM_002559.2,871-889).
cgacagcgtttctgagaaa

SEQ ID NO: 95312 - DNA, 19 bp, Homo sapiens
  siRNA target sequence for P2RX3 (NM_002559.2,896-914).
gtgtccccaggctacaact

SEQ ID NO: 95313 - DNA, 19 bp, Homo sapiens
  siRNA target sequence for P2RX3 (NM_002559.2,987-1005).
gcttcgacgtgctggtata

SEQ ID NO: 95314 - DNA, 19 bp, Homo sapiens
  siRNA target sequence for P2RX3 (NM_002559.2,1007-1025).
gggaatgctggcaagttca

SEQ ID NO: 95315 - DNA, 19 bp, Homo sapiens
  siRNA target sequence for P2RX4 (NM_002560.2,515-533).
gtggctgtgaccaacactt

SEQ ID NO: 95316 - DNA, 19 bp, Homo sapiens
  siRNA target sequence for P2RX4 (NM_002560.2,518-536).
gctgtgaccaacacttcta

SEQ ID NO: 95317 - DNA, 19 bp, Homo sapiens
  siRNA target sequence for P2RX4 (NM_002560.2,519-537).
ctgtgaccaacacttctaa

SEQ ID NO: 95318 - DNA, 19 bp, Homo sapiens
  siRNA target sequence for P2RX4 (NM_002560.2,553-571).
ctgggatgtggcggattat

SEQ ID NO: 95319 - DNA, 19 bp, Homo sapiens
  siRNA target sequence for P2RX4 (NM_002560.2,555-573).
gggatgtggcggattatgt

SEQ ID NO: 95320 - DNA, 19 bp, Homo sapiens
  siRNA target sequence for P2RX4 (NM_002560.2,557-575).
gatgtggcggattatgtga

SEQ ID NO: 95321 - DNA, 19 bp, Homo sapiens
  siRNA target sequence for P2RX4 (NM_002560.2,668-686).
gcgaccactgtgtgtaaat

SEQ ID NO: 95322 - DNA, 19 bp, Homo sapiens
  siRNA target sequence for P2RX4 (NM_002560.2,672-690).
ccactgtgtgtaaatcaga

SEQ ID NO: 95323 - DNA, 19 bp, Homo sapiens
  siRNA target sequence for P2RX4 (NM_002560.2,741-759).
caggcaggtgcgtagcttt

SEQ ID NO: 95324 - DNA, 19 bp, Homo sapiens
  siRNA target sequence for P2RX4 (NM_002560.2,744-762).
gcaggtgcgtagctttcaa

SEQ ID NO: 95325 - DNA, 19 bp, Homo sapiens
  siRNA target sequence for P2RX4 (NM_002560.2,820-838).
cgtgccacaacctgctttt

SEQ ID NO: 95326 - DNA, 19 bp, Homo sapiens
  siRNA target sequence for P2RX4 (NM_002560.2,880-898).
catctggtatcccaaattt

SEQ ID NO: 95327 - DNA, 19 bp, Homo sapiens
  siRNA target sequence for P2RX4 (NM_002560.2,883-901).
ctggtatcccaaatttaat

SEQ ID NO: 95328 - DNA, 19 bp, Homo sapiens
  siRNA target sequence for P2RX4 (NM_002560.2,946-964).
caagtcgtgcatttatgat

SEQ ID NO: 95329 - DNA, 19 bp, Homo sapiens
  siRNA target sequence for P2RX4 (NM_002560.2,1151-1169).
gacgttgagcacaacgtat

SEQ ID NO: 95330 - DNA, 19 bp, Homo sapiens
  siRNA target sequence for P2RX4 (NM_002560.2,1252-1270).
catccgcttcgacatcatt

SEQ ID NO: 95331 - DNA, 19 bp, Homo sapiens
  siRNA target sequence for P2RX4 (NM_002560.2,1256-1274).
cgcttcgacatcattgtgt

SEQ ID NO: 95332 - DNA, 19 bp, Homo sapiens
  siRNA target sequence for P2RX4 (NM_002560.2,1257-1275).
gcttcgacatcattgtgtt

SEQ ID NO: 95333 - DNA, 19 bp, Homo sapiens
  siRNA target sequence for P2RX4 (NM_002560.2,1354-1372).
cgtgctgtgtgacatcata

SEQ ID NO: 95334 - DNA, 19 bp, Homo sapiens
  siRNA target sequence for P2RX4 (NM_002560.2,1399-1417).
ctactatcgggagaagaaa

SEQ ID NO: 95335 - DNA, 19 bp, Homo sapiens
  siRNA target sequence for P2RX4 (NM_002560.2,1406-1424).
cgggagaagaaatataaat

SEQ ID NO: 95336 - DNA, 19 bp, Homo sapiens
  siRNA target sequence for P2RX4 (NM_175567.1,430-448).
cgtcatcgggaggaaaact

SEQ ID NO: 95337 - DNA, 19 bp, Homo sapiens
  siRNA target sequence for P2RX5 (NM_002561.2,329-347).
ctacaagaccgagaagtat

SEQ ID NO: 95338 - DNA, 19 bp, Homo sapiens
  siRNA target sequence for P2RX5 (NM_002561.2,348-366).
gtcatcgccaagaacaaga

SEQ ID NO: 95339 - DNA, 19 bp, Homo sapiens
  siRNA target sequence for P2RX5 (NM_002561.2,629-647).
gaacgtctgtgctgagaat

SEQ ID NO: 95340 - DNA, 19 bp, Homo sapiens
  siRNA target sequence for P2RX5 (NM_002561.2,739-757).
gcctgcggagagagaactt

SEQ ID NO: 95341 - DNA, 19 bp, Homo sapiens
  siRNA target sequence for P2RX5 (NM_002561.2,763-781).
ggggcacctgtgagatctt

SEQ ID NO: 95342 - DNA, 19 bp, Homo sapiens
  siRNA target sequence for P2RX5 (NM_002561.2,873-891).
cgtttccccaaattcaact

SEQ ID NO: 95343 - DNA, 19 bp, Homo sapiens
  siRNA target sequence for P2RX5 (NM_002561.2,912-930).
gacgtcaaggacagatctt

SEQ ID NO: 95344 - DNA, 19 bp, Homo sapiens
  siRNA target sequence for P2RX5 (NM_002561.2,921-939).
gacagatctttcctgaaat

SEQ ID NO: 95345 - DNA, 19 bp, Homo sapiens
  siRNA target sequence for P2RX5 (NM_002561.2,1009-1027).
ggagcgacttccaggatat

SEQ ID NO: 95346 - DNA, 19 bp, Homo sapiens
  siRNA target sequence for P2RX5 (NM_002561.2,1010-1028).
gagcgacttccaggatata

SEQ ID NO: 95347 - DNA, 19 bp, Homo sapiens
  siRNA target sequence for P2RX5 (NM_002561.2,1035-1053).
gagggtggcgtgataggaa

SEQ ID NO: 95348 - DNA, 19 bp, Homo sapiens
  siRNA target sequence for P2RX5 (NM_002561.2,1037-1055).
gggtggcgtgataggaatt

SEQ ID NO: 95349 - DNA, 19 bp, Homo sapiens
  siRNA target sequence for P2RX5 (NM_002561.2,1038-1056).
ggtggcgtgataggaatta

SEQ ID NO: 95350 - DNA, 19 bp, Homo sapiens
  siRNA target sequence for P2RX5 (NM_002561.2,1039-1057).
gtggcgtgataggaattaa

SEQ ID NO: 95351 - DNA, 19 bp, Homo sapiens
  siRNA target sequence for P2RX5 (NM_002561.2,1043-1061).
cgtgataggaattaatatt

SEQ ID NO: 95352 - DNA, 19 bp, Homo sapiens
  siRNA target sequence for P2RX5 (NM_002561.2,1067-1085).
gaactgtgatcttgataaa

SEQ ID NO: 95353 - DNA, 19 bp, Homo sapiens
  siRNA target sequence for P2RX5 (NM_002561.2,1099-1117).
gccaccctcactattcttt

SEQ ID NO: 95354 - DNA, 19 bp, Homo sapiens
  siRNA target sequence for P2RX5 (NM_002561.2,1120-1138).
gccgtctggacaataaact

SEQ ID NO: 95355 - DNA, 19 bp, Homo sapiens
  siRNA target sequence for P2RX5 (NM_002561.2,1121-1139).
ccgtctggacaataaactt

SEQ ID NO: 95356 - DNA, 19 bp, Homo sapiens
  siRNA target sequence for P2RX5 (NM_002561.2,1149-1167).
gtctcctccgggtacaact

SEQ ID NO: 95357 - DNA, 19 bp, Homo sapiens
  siRNA target sequence for P2RX5 (NM_002561.2,1208-1226).
gttccgcaccctgatgaaa

SEQ ID NO: 95358 - DNA, 19 bp, Homo sapiens
  siRNA target sequence for P2RX5 (NM_002561.2,1279-1297).
gcgacctggtactcatcta

SEQ ID NO: 95359 - DNA, 19 bp, Homo sapiens
  siRNA target sequence for P2RX5 (NM_002561.2,1390-1408).
cggggctggggctatctga

SEQ ID NO: 95360 - DNA, 19 bp, Homo sapiens
  siRNA target sequence for P2RX7 (NM_002562.4,402-420).
cttcgtgatgacaaacttt

SEQ ID NO: 95361 - DNA, 19 bp, Homo sapiens
  siRNA target sequence for P2RX7 (NM_002562.4,485-503).
cctctgaccgaggttgtaa

SEQ ID NO: 95362 - DNA, 19 bp, Homo sapiens
  siRNA target sequence for P2RX7 (NM_002562.4,488-506).
ctgaccgaggttgtaaaaa

SEQ ID NO: 95363 - DNA, 19 bp, Homo sapiens
  siRNA target sequence for P2RX7 (NM_002562.4,521-539).
cgcagagcaaaggaattca

SEQ ID NO: 95364 - DNA, 19 bp, Homo sapiens
  siRNA target sequence for P2RX7 (NM_002562.4,542-560).
ccggaaggtgtgtagtgta

SEQ ID NO: 95365 - DNA, 19 bp, Homo sapiens
  siRNA target sequence for P2RX7 (NM_002562.4,543-561).
cggaaggtgtgtagtgtat

SEQ ID NO: 95366 - DNA, 19 bp, Homo sapiens
  siRNA target sequence for P2RX7 (NM_002562.4,545-563).
gaaggtgtgtagtgtatga

SEQ ID NO: 95367 - DNA, 19 bp, Homo sapiens
  siRNA target sequence for P2RX7 (NM_002562.4,721-739).
ctgccaggtttaaacatca

SEQ ID NO: 95368 - DNA, 19 bp, Homo sapiens
  siRNA target sequence for P2RX7 (NM_002562.4,724-742).
ccaggtttaaacatcactt

SEQ ID NO: 95369 - DNA, 19 bp, Homo sapiens
  siRNA target sequence for P2RX7 (NM_002562.4,801-819).
ccgagaaacaggcgataat

SEQ ID NO: 95370 - DNA, 19 bp, Homo sapiens
  siRNA target sequence for P2RX7 (NM_002562.4,802-820).
cgagaaacaggcgataatt

SEQ ID NO: 95371 - DNA, 19 bp, Homo sapiens
  siRNA target sequence for P2RX7 (NM_002562.4,809-827).
caggcgataatttttcaga

SEQ ID NO: 95372 - DNA, 19 bp, Homo sapiens
  siRNA target sequence for P2RX7 (NM_002562.4,832-850).
gcaattcagggcggaataa

SEQ ID NO: 95373 - DNA, 19 bp, Homo sapiens
  siRNA target sequence for P2RX7 (NM_002562.4,833-851).
caattcagggcggaataat

SEQ ID NO: 95374 - DNA, 19 bp, Homo sapiens
  siRNA target sequence for P2RX7 (NM_002562.4,845-863).
gaataatgggcattgagat

SEQ ID NO: 95375 - DNA, 19 bp, Homo sapiens
  siRNA target sequence for P2RX7 (NM_002562.4,898-916).
cactgccgtcccaaataca

SEQ ID NO: 95376 - DNA, 19 bp, Homo sapiens
  siRNA target sequence for P2RX7 (NM_002562.4,900-918).
ctgccgtcccaaatacagt

SEQ ID NO: 95377 - DNA, 19 bp, Homo sapiens
  siRNA target sequence for P2RX7 (NM_002562.4,977-995).
gatacgccaagtactacaa

SEQ ID NO: 95378 - DNA, 19 bp, Homo sapiens
  siRNA target sequence for P2RX7 (NM_002562.4,1015-1033).
cggactctgataaaagtct

SEQ ID NO: 95379 - DNA, 19 bp, Homo sapiens
  siRNA target sequence for P2RX7 (NM_002562.4,1067-1085).
ccggaggaaaatttgacat

SEQ ID NO: 95380 - DNA, 19 bp, Homo sapiens
  siRNA target sequence for P2RX7 (NM_002562.4,1068-1086).
cggaggaaaatttgacatt

SEQ ID NO: 95381 - DNA, 19 bp, Homo sapiens
  siRNA target sequence for P2RX7 (NM_002562.4,1070-1088).
gaggaaaatttgacattat

SEQ ID NO: 95382 - DNA, 19 bp, Homo sapiens
  siRNA target sequence for P2RX7 (NM_002562.4,1179-1197).
ctgctgtcgctcccatatt

SEQ ID NO: 95383 - DNA, 19 bp, Homo sapiens
  siRNA target sequence for P2RX7 (NM_002562.4,1181-1199).
gctgtcgctcccatattta

SEQ ID NO: 95384 - DNA, 19 bp, Homo sapiens
  siRNA target sequence for P2RX7 (NM_002562.4,1222-1240).
ccctgtgtggtcaacgaat

SEQ ID NO: 95385 - DNA, 19 bp, Homo sapiens
  siRNA target sequence for P2RX7 (NM_002562.4,1223-1241).
cctgtgtggtcaacgaata

SEQ ID NO: 95386 - DNA, 19 bp, Homo sapiens
  siRNA target sequence for P2RX7 (NM_002562.4,1226-1244).
gtgtggtcaacgaatacta

SEQ ID NO: 95387 - DNA, 19 bp, Homo sapiens
  siRNA target sequence for P2RX7 (NM_002562.4,1231-1249).
gtcaacgaatactactaca

SEQ ID NO: 95388 - DNA, 19 bp, Homo sapiens
  siRNA target sequence for P2RX7 (NM_002562.4,1272-1290).
ggagccaaagccgacatta

SEQ ID NO: 95389 - DNA, 19 bp, Homo sapiens
  siRNA target sequence for P2RX7 (NM_002562.4,1273-1291).
gagccaaagccgacattaa

SEQ ID NO: 95390 - DNA, 19 bp, Homo sapiens
  siRNA target sequence for P2RX7 (NM_002562.4,1282-1300).
ccgacattaaagtatgtgt

SEQ ID NO: 95391 - DNA, 19 bp, Homo sapiens
  siRNA target sequence for P2RX7 (NM_002562.4,1309-1327).
gatgaatcccacattagga

SEQ ID NO: 95392 - DNA, 19 bp, Homo sapiens
  siRNA target sequence for P2RX7 (NM_002562.4,1352-1370).
gaagtctgcaagatgtcaa

SEQ ID NO: 95393 - DNA, 19 bp, Homo sapiens
  siRNA target sequence for P2RX7 (NM_002562.4,1393-1411).
gcgatggacttcacagatt

SEQ ID NO: 95394 - DNA, 19 bp, Homo sapiens
  siRNA target sequence for P2RX7 (NM_002562.4,1394-1412).
cgatggacttcacagattt

SEQ ID NO: 95395 - DNA, 19 bp, Homo sapiens
  siRNA target sequence for P2RX7 (NM_002562.4,1821-1839).
gaggatccggaaagagttt

SEQ ID NO: 95396 - DNA, 19 bp, Homo sapiens
  siRNA target sequence for P2RXL1 (NM_005446.2,226-244).
ccccagttttccatcatca

SEQ ID NO: 95397 - DNA, 19 bp, Homo sapiens
  siRNA target sequence for P2RXL1 (NM_005446.2,331-349).
ggagagaacgtgttcttct

SEQ ID NO: 95398 - DNA, 19 bp, Homo sapiens
  siRNA target sequence for P2RXL1 (NM_005446.2,332-350).
gagagaacgtgttcttctt

SEQ ID NO: 95399 - DNA, 19 bp, Homo sapiens
  siRNA target sequence for P2RXL1 (NM_005446.2,471-489).
cagccacggtgtaaaaaca

SEQ ID NO: 95400 - DNA, 19 bp, Homo sapiens
  siRNA target sequence for P2RXL1 (NM_005446.2,629-647).
ccttcagcaagttcaactt

SEQ ID NO: 95401 - DNA, 19 bp, Homo sapiens
  siRNA target sequence for P2RXL1 (NM_005446.2,674-692).
gggaccccacctattttaa

SEQ ID NO: 95402 - DNA, 19 bp, Homo sapiens
  siRNA target sequence for P2RXL1 (NM_005446.2,698-716).
gccgctatgaaccacaatt

SEQ ID NO: 95403 - DNA, 19 bp, Homo sapiens
  siRNA target sequence for P2RXL1 (NM_005446.2,700-718).
cgctatgaaccacaattca

SEQ ID NO: 95404 - DNA, 19 bp, Homo sapiens
  siRNA target sequence for P2RXL1 (NM_005446.2,952-970).
ctgctcaagctctatggaa

SEQ ID NO: 95405 - DNA, 19 bp, Homo sapiens
  siRNA target sequence for P2RXL1 (NM_005446.2,1057-1075).
ctgggcgtggtcacctttt

SEQ ID NO: 95406 - DNA, 19 bp, Homo sapiens
  siRNA target sequence for P2RXL1 (NM_005446.2,1060-1078).
ggcgtggtcacctttttct

SEQ ID NO: 95407 - DNA, 19 bp, Homo sapiens
  siRNA target sequence for PACE-1 (NM_020423.4,196-214).
ctgagagaaccaccattta

SEQ ID NO: 95408 - DNA, 19 bp, Homo sapiens
  siRNA target sequence for PACE-1 (NM_020423.4,200-218).
gagaaccaccatttacctt

SEQ ID NO: 95409 - DNA, 19 bp, Homo sapiens
  siRNA target sequence for PACE-1 (NM_020423.4,252-270).
gcaagatggcaaatttgct

SEQ ID NO: 95410 - DNA, 19 bp, Homo sapiens
  siRNA target sequence for PACE-1 (NM_020423.4,343-361).
cacccttgcttgctaagat

SEQ ID NO: 95411 - DNA, 19 bp, Homo sapiens
  siRNA target sequence for PACE-1 (NM_020423.4,378-396).
ggaagcggatggcattcat

SEQ ID NO: 95412 - DNA, 19 bp, Homo sapiens
  siRNA target sequence for PACE-1 (NM_020423.4,463-481).
gctgggatctatgacatat

SEQ ID NO: 95413 - DNA, 19 bp, Homo sapiens
  siRNA target sequence for PACE-1 (NM_020423.4,467-485).
ggatctatgacatattgct

SEQ ID NO: 95414 - DNA, 19 bp, Homo sapiens
  siRNA target sequence for PACE-1 (NM_020423.4,488-506).
ctcttatcttccttcatga

SEQ ID NO: 95415 - DNA, 19 bp, Homo sapiens
  siRNA target sequence for PACE-1 (NM_020423.4,511-529).
ggacacctaacacacaata

SEQ ID NO: 95416 - DNA, 19 bp, Homo sapiens
  siRNA target sequence for PACE-1 (NM_020423.4,521-539).
cacacaataatgtctgttt

SEQ ID NO: 95417 - DNA, 19 bp, Homo sapiens
  siRNA target sequence for PACE-1 (NM_020423.4,676-694).
gagatgtctccagaattca

SEQ ID NO: 95418 - DNA, 19 bp, Homo sapiens
  siRNA target sequence for PACE-1 (NM_020423.4,754-772).
gaaagtttgctcacaatct

SEQ ID NO: 95419 - DNA, 19 bp, Homo sapiens
  siRNA target sequence for PACE-1 (NM_020423.4,814-832).
cagaccttgcactcaactt

SEQ ID NO: 95420 - DNA, 19 bp, Homo sapiens
  siRNA target sequence for PACE-1 (NM_020423.4,862-880).
gcgctctgcaccttactat

SEQ ID NO: 95421 - DNA, 19 bp, Homo sapiens
  siRNA target sequence for PACE-1 (NM_020423.4,867-885).
ctgcaccttactatctcat

SEQ ID NO: 95422 - DNA, 19 bp, Homo sapiens
  siRNA target sequence for PACE-1 (NM_020423.4,886-904).
gacttcttcagaaatgatt

SEQ ID NO: 95423 - DNA, 19 bp, Homo sapiens
  siRNA target sequence for PACE-1 (NM_020423.4,1029-1047).
ggtgcctcttctgcttaat

SEQ ID NO: 95424 - DNA, 19 bp, Homo sapiens
  siRNA target sequence for PACE-1 (NM_020423.4,1034-1052).
ctcttctgcttaatcagtt

SEQ ID NO: 95425 - DNA, 19 bp, Homo sapiens
  siRNA target sequence for PACE-1 (NM_020423.4,1182-1200).
gcttctccagttgtttgaa

SEQ ID NO: 95426 - DNA, 19 bp, Homo sapiens
  siRNA target sequence for PACE-1 (NM_020423.4,1306-1324).
ctgggcctgcgtgatacta

SEQ ID NO: 95427 - DNA, 19 bp, Homo sapiens
  siRNA target sequence for PACE-1 (NM_020423.4,1402-1420).
ggagaacgaaccaagatct

SEQ ID NO: 95428 - DNA, 19 bp, Homo sapiens
  siRNA target sequence for PACE-1 (NM_020423.4,1428-1446).
cactgccccaagttttact

SEQ ID NO: 95429 - DNA, 19 bp, Homo sapiens
  siRNA target sequence for PACE-1 (NM_020423.4,1432-1450).
gccccaagttttactaaaa

SEQ ID NO: 95430 - DNA, 19 bp, Homo sapiens
  siRNA target sequence for PACE-1 (NM_020423.4,1463-1481).
ctctagaaggtgatccatt

SEQ ID NO: 95431 - DNA, 19 bp, Homo sapiens
  siRNA target sequence for PACE-1 (NM_020423.4,1465-1483).
ctagaaggtgatccatttt

SEQ ID NO: 95432 - DNA, 19 bp, Homo sapiens
  siRNA target sequence for PACE-1 (NM_020423.4,1546-1564).
gaaaacttcccatcaagtt

SEQ ID NO: 95433 - DNA, 19 bp, Homo sapiens
  siRNA target sequence for PACE-1 (NM_020423.4,1618-1636).
caaactgtcaacatacaga

SEQ ID NO: 95434 - DNA, 19 bp, Homo sapiens
  siRNA target sequence for PACE-1 (NM_020423.4,1641-1659).
gcctagagaaccttgtgat

SEQ ID NO: 95435 - DNA, 19 bp, Homo sapiens
  siRNA target sequence for PACE-1 (NM_020423.4,1719-1737).
gcccagcagcttagatact

SEQ ID NO: 95436 - DNA, 19 bp, Homo sapiens
  siRNA target sequence for PACE-1 (NM_020423.4,1724-1742).
gcagcttagatactaaagt

SEQ ID NO: 95437 - DNA, 19 bp, Homo sapiens
  siRNA target sequence for PACE-1 (NM_020423.4,1725-1743).
cagcttagatactaaagta

SEQ ID NO: 95438 - DNA, 19 bp, Homo sapiens
  siRNA target sequence for PACE-1 (NM_020423.4,1727-1745).
gcttagatactaaagtaaa

SEQ ID NO: 95439 - DNA, 19 bp, Homo sapiens
  siRNA target sequence for PACE-1 (NM_020423.4,1754-1772).
gtggaatcactgctacaaa

SEQ ID NO: 95440 - DNA, 19 bp, Homo sapiens
  siRNA target sequence for PACE-1 (NM_020423.4,1828-1846).
gagtctatgccttggaaat

SEQ ID NO: 95441 - DNA, 19 bp, Homo sapiens
  siRNA target sequence for PACE-1 (NM_020423.4,1836-1854).
gccttggaaatcaagctta

SEQ ID NO: 95442 - DNA, 19 bp, Homo sapiens
  siRNA target sequence for PACE-1 (NM_020423.4,1847-1865).
caagcttaccccaaaagat

SEQ ID NO: 95443 - DNA, 19 bp, Homo sapiens
  siRNA target sequence for PACE-1 (NM_020423.4,1908-1926).
gccaaaagtgtcatcacaa

SEQ ID NO: 95444 - DNA, 19 bp, Homo sapiens
  siRNA target sequence for PACE-1 (NM_020423.4,2027-2045).
ctgatatgatcccagaaat

SEQ ID NO: 95445 - DNA, 19 bp, Homo sapiens
  siRNA target sequence for PACE-1 (NM_020423.4,2147-2165).
ctgcagcagaaattactga

SEQ ID NO: 95446 - DNA, 19 bp, Homo sapiens
  siRNA target sequence for PACE-1 (NM_020423.4,2200-2218).
ctgaactgggaagataata

SEQ ID NO: 95447 - DNA, 19 bp, Homo sapiens
  siRNA target sequence for PAK1 (NM_002576.2,430-448).
ccagcccctccgatgagaa

SEQ ID NO: 95448 - DNA, 19 bp, Homo sapiens
  siRNA target sequence for PAK1 (NM_002576.2,436-454).
cctccgatgagaaatacca

SEQ ID NO: 95449 - DNA, 19 bp, Homo sapiens
  siRNA target sequence for PAK1 (NM_002576.2,446-464).
gaaataccagcactatgat

SEQ ID NO: 95450 - DNA, 19 bp, Homo sapiens
  siRNA target sequence for PAK1 (NM_002576.2,549-567).
ccgattttaccgatccatt

SEQ ID NO: 95451 - DNA, 19 bp, Homo sapiens
  siRNA target sequence for PAK1 (NM_002576.2,550-568).
cgattttaccgatccattt

SEQ ID NO: 95452 - DNA, 19 bp, Homo sapiens
  siRNA target sequence for PAK1 (NM_002576.2,551-569).
gattttaccgatccatttt

SEQ ID NO: 95453 - DNA, 19 bp, Homo sapiens
  siRNA target sequence for PAK1 (NM_002576.2,563-581).
ccattttacctggagataa

SEQ ID NO: 95454 - DNA, 19 bp, Homo sapiens
  siRNA target sequence for PAK1 (NM_002576.2,629-647).
cagattttgaacacacaat

SEQ ID NO: 95455 - DNA, 19 bp, Homo sapiens
  siRNA target sequence for PAK1 (NM_002576.2,644-662).
caattcatgtcggttttga

SEQ ID NO: 95456 - DNA, 19 bp, Homo sapiens
  siRNA target sequence for PAK1 (NM_002576.2,706-724).
cgcttgcttcagacatcaa

SEQ ID NO: 95457 - DNA, 19 bp, Homo sapiens
  siRNA target sequence for PAK1 (NM_002576.2,837-855).
gtcagctgaggattacaat

SEQ ID NO: 95458 - DNA, 19 bp, Homo sapiens
  siRNA target sequence for PAK1 (NM_002576.2,844-862).
gaggattacaattcttcta

SEQ ID NO: 95459 - DNA, 19 bp, Homo sapiens
  siRNA target sequence for PAK1 (NM_002576.2,846-864).
ggattacaattcttctaat

SEQ ID NO: 95460 - DNA, 19 bp, Homo sapiens
  siRNA target sequence for PAK1 (NM_002576.2,970-988).
cgcccagagcacacaaaat

SEQ ID NO: 95461 - DNA, 19 bp, Homo sapiens
  siRNA target sequence for PAK1 (NM_002576.2,1094-1112).
ctttgacccggaatactga

SEQ ID NO: 95462 - DNA, 19 bp, Homo sapiens
  siRNA target sequence for PAK1 (NM_002576.2,1155-1173).
ggagaaattacgaagcata

SEQ ID NO: 95463 - DNA, 19 bp, Homo sapiens
  siRNA target sequence for PAK1 (NM_002576.2,1183-1201).
ggcgatcctaagaagaaat

SEQ ID NO: 95464 - DNA, 19 bp, Homo sapiens
  siRNA target sequence for PAK1 (NM_002576.2,1184-1202).
gcgatcctaagaagaaata

SEQ ID NO: 95465 - DNA, 19 bp, Homo sapiens
  siRNA target sequence for PAK1 (NM_002576.2,1185-1203).
cgatcctaagaagaaatat

SEQ ID NO: 95466 - DNA, 19 bp, Homo sapiens
  siRNA target sequence for PAK1 (NM_002576.2,1242-1260).
cgtgtacacagcaatggat

SEQ ID NO: 95467 - DNA, 19 bp, Homo sapiens
  siRNA target sequence for PAK1 (NM_002576.2,1367-1385).
caaacattgtgaattactt

SEQ ID NO: 95468 - DNA, 19 bp, Homo sapiens
  siRNA target sequence for PAK1 (NM_002576.2,1410-1428).
gctgtgggttgttatggaa

SEQ ID NO: 95469 - DNA, 19 bp, Homo sapiens
  siRNA target sequence for PAK1 (NM_002576.2,1933-1951).
gagctgctacagcatcaat

SEQ ID NO: 95470 - DNA, 19 bp, Homo sapiens
  siRNA target sequence for PAK1 (NM_002576.2,1944-1962).
gcatcaattcctgaagatt

SEQ ID NO: 95471 - DNA, 19 bp, Homo sapiens
  siRNA target sequence for PAK1 (NM_002576.2,2011-2029).
gcaacaaagaacaatcact

SEQ ID NO: 95472 - DNA, 19 bp, Homo sapiens
  siRNA target sequence for PAK2 (NM_002577.2,280-298).
cccaggcataaaatcatct

SEQ ID NO: 95473 - DNA, 19 bp, Homo sapiens
  siRNA target sequence for PAK2 (NM_002577.2,451-469).
ctacagacctccaatatca

SEQ ID NO: 95474 - DNA, 19 bp, Homo sapiens
  siRNA target sequence for PAK2 (NM_002577.2,546-564).
gaaatatctgagctttact

SEQ ID NO: 95475 - DNA, 19 bp, Homo sapiens
  siRNA target sequence for PAK2 (NM_002577.2,666-684).
gactgctcctcccgttatt

SEQ ID NO: 95476 - DNA, 19 bp, Homo sapiens
  siRNA target sequence for PAK2 (NM_002577.2,689-707).
cgcgaccggatcatacgaa

SEQ ID NO: 95477 - DNA, 19 bp, Homo sapiens
  siRNA target sequence for PAK2 (NM_002577.2,690-708).
gcgaccggatcatacgaaa

SEQ ID NO: 95478 - DNA, 19 bp, Homo sapiens
  siRNA target sequence for PAK2 (NM_002577.2,691-709).
cgaccggatcatacgaaat

SEQ ID NO: 95479 - DNA, 19 bp, Homo sapiens
  siRNA target sequence for PAK2 (NM_002577.2,694-712).
ccggatcatacgaaatcaa

SEQ ID NO: 95480 - DNA, 19 bp, Homo sapiens
  siRNA target sequence for PAK2 (NM_002577.2,695-713).
cggatcatacgaaatcaat

SEQ ID NO: 95481 - DNA, 19 bp, Homo sapiens
  siRNA target sequence for PAK2 (NM_002577.2,696-714).
ggatcatacgaaatcaatt

SEQ ID NO: 95482 - DNA, 19 bp, Homo sapiens
  siRNA target sequence for PAK2 (NM_002577.2,697-715).
gatcatacgaaatcaattt

SEQ ID NO: 95483 - DNA, 19 bp, Homo sapiens
  siRNA target sequence for PAK2 (NM_002577.2,700-718).
catacgaaatcaatttaca

SEQ ID NO: 95484 - DNA, 19 bp, Homo sapiens
  siRNA target sequence for PAK2 (NM_002577.2,746-764).
caccagttggtgattcaca

SEQ ID NO: 95485 - DNA, 19 bp, Homo sapiens
  siRNA target sequence for PAK2 (NM_002577.2,776-794).
ctgccaagtctttagacaa

SEQ ID NO: 95486 - DNA, 19 bp, Homo sapiens
  siRNA target sequence for PAK2 (NM_002577.2,1396-1414).
ggccctaaagtcgacatat

SEQ ID NO: 95487 - DNA, 19 bp, Homo sapiens
  siRNA target sequence for PAK2 (NM_002577.2,1399-1417).
cctaaagtcgacatatggt

SEQ ID NO: 95488 - DNA, 19 bp, Homo sapiens
  siRNA target sequence for PAK2 (NM_002577.2,1639-1657).
ctggccaaaccgttatcta

SEQ ID NO: 95489 - DNA, 19 bp, Homo sapiens
  siRNA target sequence for PAK3 (NM_002578.1,3-21).
gtctgacggtctggataat

SEQ ID NO: 95490 - DNA, 19 bp, Homo sapiens
  siRNA target sequence for PAK3 (NM_002578.1,5-23).
ctgacggtctggataatga

SEQ ID NO: 95491 - DNA, 19 bp, Homo sapiens
  siRNA target sequence for PAK3 (NM_002578.1,43-61).
ccactgaggatgaatagta

SEQ ID NO: 95492 - DNA, 19 bp, Homo sapiens
  siRNA target sequence for PAK3 (NM_002578.1,46-64).
ctgaggatgaatagtaaca

SEQ ID NO: 95493 - DNA, 19 bp, Homo sapiens
  siRNA target sequence for PAK3 (NM_002578.1,137-155).
ccaggcttcgctctatctt

SEQ ID NO: 95494 - DNA, 19 bp, Homo sapiens
  siRNA target sequence for PAK3 (NM_002578.1,164-182).
gaggggataaaaccaataa

SEQ ID NO: 95495 - DNA, 19 bp, Homo sapiens
  siRNA target sequence for PAK3 (NM_002578.1,237-255).
gattcatgtggggtttgat

SEQ ID NO: 95496 - DNA, 19 bp, Homo sapiens
  siRNA target sequence for PAK3 (NM_002578.1,264-282).
cggggaattcactggaatt

SEQ ID NO: 95497 - DNA, 19 bp, Homo sapiens
  siRNA target sequence for PAK3 (NM_002578.1,295-313).
gcacgattactccaaactt

SEQ ID NO: 95498 - DNA, 19 bp, Homo sapiens
  siRNA target sequence for PAK3 (NM_002578.1,306-324).
ccaaacttccaacataaca

SEQ ID NO: 95499 - DNA, 19 bp, Homo sapiens
  siRNA target sequence for PAK3 (NM_002578.1,307-325).
caaacttccaacataacaa

SEQ ID NO: 95500 - DNA, 19 bp, Homo sapiens
  siRNA target sequence for PAK3 (NM_002578.1,342-360).
gaacccacaagctgttcta

SEQ ID NO: 95501 - DNA, 19 bp, Homo sapiens
  siRNA target sequence for PAK3 (NM_002578.1,416-434).
gctttacatcaggagataa

SEQ ID NO: 95502 - DNA, 19 bp, Homo sapiens
  siRNA target sequence for PAK3 (NM_002578.1,457-475).
gcccatccttcgagtacaa

SEQ ID NO: 95503 - DNA, 19 bp, Homo sapiens
  siRNA target sequence for PAK3 (NM_002578.1,459-477).
ccatccttcgagtacaaaa

SEQ ID NO: 95504 - DNA, 19 bp, Homo sapiens
  siRNA target sequence for PAK3 (NM_002578.1,460-478).
catccttcgagtacaaaaa

SEQ ID NO: 95505 - DNA, 19 bp, Homo sapiens
  siRNA target sequence for PAK3 (NM_002578.1,578-596).
caagaccagagcatacaaa

SEQ ID NO: 95506 - DNA, 19 bp, Homo sapiens
  siRNA target sequence for PAK3 (NM_002578.1,829-847).
ggggcatcaggtactgttt

SEQ ID NO: 95507 - DNA, 19 bp, Homo sapiens
  siRNA target sequence for PAK3 (NM_002578.1,830-848).
gggcatcaggtactgttta

SEQ ID NO: 95508 - DNA, 19 bp, Homo sapiens
  siRNA target sequence for PAK3 (NM_002578.1,831-849).
ggcatcaggtactgtttat

SEQ ID NO: 95509 - DNA, 19 bp, Homo sapiens
  siRNA target sequence for PAK3 (NM_002578.1,832-850).
gcatcaggtactgtttata

SEQ ID NO: 95510 - DNA, 19 bp, Homo sapiens
  siRNA target sequence for PAK3 (NM_002578.1,963-981).
gaaccctaatattgttaat

SEQ ID NO: 95511 - DNA, 19 bp, Homo sapiens
  siRNA target sequence for PAK3 (NM_002578.1,1062-1080).
cacagagacctgtatggat

SEQ ID NO: 95512 - DNA, 19 bp, Homo sapiens
  siRNA target sequence for PAK3 (NM_002578.1,1106-1124).
gagagtgcctgcaagcttt

SEQ ID NO: 95513 - DNA, 19 bp, Homo sapiens
  siRNA target sequence for PAK3 (NM_002578.1,1112-1130).
gcctgcaagctttggattt

SEQ ID NO: 95514 - DNA, 19 bp, Homo sapiens
  siRNA target sequence for PAK3 (NM_002578.1,1143-1161).
ccaggtgatccatagagat

SEQ ID NO: 95515 - DNA, 19 bp, Homo sapiens
  siRNA target sequence for PAK3 (NM_002578.1,1236-1254).
cactcctgagcaaagtaaa

SEQ ID NO: 95516 - DNA, 19 bp, Homo sapiens
  siRNA target sequence for PAK3 (NM_002578.1,1297-1315).
gtggtgactcgaaaagctt

SEQ ID NO: 95517 - DNA, 19 bp, Homo sapiens
  siRNA target sequence for PAK3 (NM_002578.1,1302-1320).
gactcgaaaagcttatggt

SEQ ID NO: 95518 - DNA, 19 bp, Homo sapiens
  siRNA target sequence for PAK3 (NM_002578.1,1313-1331).
cttatggtccgaaagttga

SEQ ID NO: 95519 - DNA, 19 bp, Homo sapiens
  siRNA target sequence for PAK3 (NM_002578.1,1372-1390).
ggtgaacccccttacctta

SEQ ID NO: 95520 - DNA, 19 bp, Homo sapiens
  siRNA target sequence for PAK3 (NM_002578.1,1373-1391).
gtgaacccccttaccttaa

SEQ ID NO: 95521 - DNA, 19 bp, Homo sapiens
  siRNA target sequence for PAK3 (NM_002578.1,1380-1398).
cccttaccttaatgaaaat

SEQ ID NO: 95522 - DNA, 19 bp, Homo sapiens
  siRNA target sequence for PAK3 (NM_002578.1,1413-1431).
gtatctgatagccactaat

SEQ ID NO: 95523 - DNA, 19 bp, Homo sapiens
  siRNA target sequence for PAK3 (NM_002578.1,1468-1486).
gctgtattccgtgactttt

SEQ ID NO: 95524 - DNA, 19 bp, Homo sapiens
  siRNA target sequence for PAK3 (NM_002578.1,1580-1598).
gcctgactcctctgattat

SEQ ID NO: 95525 - DNA, 19 bp, Homo sapiens
  siRNA target sequence for PAK4 (NM_005884.2,1706-1724).
ggtcgctggggataatggt

SEQ ID NO: 95526 - DNA, 19 bp, Homo sapiens
  siRNA target sequence for PAK6 (NM_020168.3,582-600).
ggacccttcgcgaatcaca

SEQ ID NO: 95527 - DNA, 19 bp, Homo sapiens
  siRNA target sequence for PAK6 (NM_020168.3,788-806).
ccaccgacccagacatgta

SEQ ID NO: 95528 - DNA, 19 bp, Homo sapiens
  siRNA target sequence for PAK6 (NM_020168.3,1055-1073).
ccaataggcatggaatgaa

SEQ ID NO: 95529 - DNA, 19 bp, Homo sapiens
  siRNA target sequence for PAK6 (NM_020168.3,1901-1919).
cccaagtcaggctgaatga

SEQ ID NO: 95530 - DNA, 19 bp, Homo sapiens
  siRNA target sequence for PAK6 (NM_020168.3,2046-2064).
ctcggacttcggattctgt

SEQ ID NO: 95531 - DNA, 19 bp, Homo sapiens
  siRNA target sequence for PAK6 (NM_020168.3,2136-2154).
gatctccaggtctttgtat

SEQ ID NO: 95532 - DNA, 19 bp, Homo sapiens
  siRNA target sequence for PAK6 (NM_020168.3,2209-2227).
ggggagccaccgtacttca

SEQ ID NO: 95533 - DNA, 19 bp, Homo sapiens
  siRNA target sequence for PAK7 (NM_020341.2,461-479).
gcccgtccaactttgaaca

SEQ ID NO: 95534 - DNA, 19 bp, Homo sapiens
  siRNA target sequence for PAK7 (NM_020341.2,483-501).
ggttcatactgggtttgat

SEQ ID NO: 95535 - DNA, 19 bp, Homo sapiens
  siRNA target sequence for PAK7 (NM_020341.2,619-637).
cctatgaagacaatcgtta

SEQ ID NO: 95536 - DNA, 19 bp, Homo sapiens
  siRNA target sequence for PAK7 (NM_020341.2,672-690).
cggcctgctagaggatttt

SEQ ID NO: 95537 - DNA, 19 bp, Homo sapiens
  siRNA target sequence for PAK7 (NM_020341.2,773-791).
caggccacgcggaagaaaa

SEQ ID NO: 95538 - DNA, 19 bp, Homo sapiens
  siRNA target sequence for PAK7 (NM_020341.2,819-837).
cagcgaatccgatactact

SEQ ID NO: 95539 - DNA, 19 bp, Homo sapiens
  siRNA target sequence for PAK7 (NM_020341.2,870-888).
gagtctctatggagatgat

SEQ ID NO: 95540 - DNA, 19 bp, Homo sapiens
  siRNA target sequence for PAK7 (NM_020341.2,886-904).
gatctggatccgtattata

SEQ ID NO: 95541 - DNA, 19 bp, Homo sapiens
  siRNA target sequence for PAK7 (NM_020341.2,925-943).
caaaatgggcacgtaatga

SEQ ID NO: 95542 - DNA, 19 bp, Homo sapiens
  siRNA target sequence for PAK7 (NM_020341.2,951-969).
gcacggggaggcctactat

SEQ ID NO: 95543 - DNA, 19 bp, Homo sapiens
  siRNA target sequence for PAK7 (NM_020341.2,952-970).
cacggggaggcctactatt

SEQ ID NO: 95544 - DNA, 19 bp, Homo sapiens
  siRNA target sequence for PAK7 (NM_020341.2,954-972).
cggggaggcctactattct

SEQ ID NO: 95545 - DNA, 19 bp, Homo sapiens
  siRNA target sequence for PAK7 (NM_020341.2,981-999).
gcctttgaaatccgatttt

SEQ ID NO: 95546 - DNA, 19 bp, Homo sapiens
  siRNA target sequence for PAK7 (NM_020341.2,1004-1022).
gattttctgccgattatca

SEQ ID NO: 95547 - DNA, 19 bp, Homo sapiens
  siRNA target sequence for PAK7 (NM_020341.2,1012-1030).
gccgattatcactcacatt

SEQ ID NO: 95548 - DNA, 19 bp, Homo sapiens
  siRNA target sequence for PAK7 (NM_020341.2,1013-1031).
ccgattatcactcacattt

SEQ ID NO: 95549 - DNA, 19 bp, Homo sapiens
  siRNA target sequence for PAK7 (NM_020341.2,1033-1051).
gactcactgagcaaaccaa

SEQ ID NO: 95550 - DNA, 19 bp, Homo sapiens
  siRNA target sequence for PAK7 (NM_020341.2,1094-1112).
gtagctcccctctggatta

SEQ ID NO: 95551 - DNA, 19 bp, Homo sapiens
  siRNA target sequence for PAK7 (NM_020341.2,1105-1123).
ctggattattcattccaat

SEQ ID NO: 95552 - DNA, 19 bp, Homo sapiens
  siRNA target sequence for PAK7 (NM_020341.2,1108-1126).
gattattcattccaattca

SEQ ID NO: 95553 - DNA, 19 bp, Homo sapiens
  siRNA target sequence for PAK7 (NM_020341.2,1170-1188).
cctggcgtacagtgaaagt

SEQ ID NO: 95554 - DNA, 19 bp, Homo sapiens
  siRNA target sequence for PAK7 (NM_020341.2,1173-1191).
ggcgtacagtgaaagtgaa

SEQ ID NO: 95555 - DNA, 19 bp, Homo sapiens
  siRNA target sequence for PAK7 (NM_020341.2,1174-1192).
gcgtacagtgaaagtgaat

SEQ ID NO: 95556 - DNA, 19 bp, Homo sapiens
  siRNA target sequence for PAK7 (NM_020341.2,1697-1715).
ccagggtgtcccatgaaca

SEQ ID NO: 95557 - DNA, 19 bp, Homo sapiens
  siRNA target sequence for PAK7 (NM_020341.2,1700-1718).
gggtgtcccatgaacagtt

SEQ ID NO: 95558 - DNA, 19 bp, Homo sapiens
  siRNA target sequence for PAK7 (NM_020341.2,1701-1719).
ggtgtcccatgaacagttt

SEQ ID NO: 95559 - DNA, 19 bp, Homo sapiens
  siRNA target sequence for PAK7 (NM_020341.2,1750-1768).
ggagaccccagggaatact

SEQ ID NO: 95560 - DNA, 19 bp, Homo sapiens
  siRNA target sequence for PAK7 (NM_020341.2,1799-1817).
caaccggcatcgtatgcat

SEQ ID NO: 95561 - DNA, 19 bp, Homo sapiens
  siRNA target sequence for PAK7 (NM_020341.2,1814-1832).
gcatcgccaccgagaaaca

SEQ ID NO: 95562 - DNA, 19 bp, Homo sapiens
  siRNA target sequence for PAK7 (NM_020341.2,1883-1901).
gacgagaactgcttttcaa

SEQ ID NO: 95563 - DNA, 19 bp, Homo sapiens
  siRNA target sequence for PAK7 (NM_020341.2,1919-1937).
gggattaccaccatgacaa

SEQ ID NO: 95564 - DNA, 19 bp, Homo sapiens
  siRNA target sequence for PAK7 (NM_020341.2,2028-2046).
gactcacaccagaatgaat

SEQ ID NO: 95565 - DNA, 19 bp, Homo sapiens
  siRNA target sequence for PAK7 (NM_020341.2,2153-2171).
caagcgatggccggataaa

SEQ ID NO: 95566 - DNA, 19 bp, Homo sapiens
  siRNA target sequence for PAK7 (NM_020341.2,2156-2174).
gcgatggccggataaagtt

SEQ ID NO: 95567 - DNA, 19 bp, Homo sapiens
  siRNA target sequence for PAK7 (NM_020341.2,2158-2176).
gatggccggataaagttgt

SEQ ID NO: 95568 - DNA, 19 bp, Homo sapiens
  siRNA target sequence for PAK7 (NM_020341.2,2164-2182).
cggataaagttgtctgatt

SEQ ID NO: 95569 - DNA, 19 bp, Homo sapiens
  siRNA target sequence for PAK7 (NM_020341.2,2165-2183).
ggataaagttgtctgattt

SEQ ID NO: 95570 - DNA, 19 bp, Homo sapiens
  siRNA target sequence for PAK7 (NM_020341.2,2211-2229).
ggtgccgaagaggaaatca

SEQ ID NO: 95571 - DNA, 19 bp, Homo sapiens
  siRNA target sequence for PAK7 (NM_020341.2,2212-2230).
gtgccgaagaggaaatcat

SEQ ID NO: 95572 - DNA, 19 bp, Homo sapiens
  siRNA target sequence for PAK7 (NM_020341.2,2253-2271).
ggcccctgaggtgatttct

SEQ ID NO: 95573 - DNA, 19 bp, Homo sapiens
  siRNA target sequence for PAK7 (NM_020341.2,2311-2329).
gggatcatggtgatagaaa

SEQ ID NO: 95574 - DNA, 19 bp, Homo sapiens
  siRNA target sequence for PAK7 (NM_020341.2,2312-2330).
ggatcatggtgatagaaat

SEQ ID NO: 95575 - DNA, 19 bp, Homo sapiens
  siRNA target sequence for PAK7 (NM_020341.2,2316-2334).
catggtgatagaaatgatt

SEQ ID NO: 95576 - DNA, 19 bp, Homo sapiens
  siRNA target sequence for PAK7 (NM_020341.2,2381-2399).
ggaggatccgggacagttt

SEQ ID NO: 95577 - DNA, 19 bp, Homo sapiens
  siRNA target sequence for PAK7 (NM_020341.2,2382-2400).
gaggatccgggacagttta

SEQ ID NO: 95578 - DNA, 19 bp, Homo sapiens
  siRNA target sequence for PAK7 (NM_020341.2,2408-2426).
gagtgaaggacctacacaa

SEQ ID NO: 95579 - DNA, 19 bp, Homo sapiens
  siRNA target sequence for PAK7 (NM_020341.2,2416-2434).
gacctacacaaggtttctt

SEQ ID NO: 95580 - DNA, 19 bp, Homo sapiens
  siRNA target sequence for PAK7 (NM_020341.2,2418-2436).
cctacacaaggtttcttca

SEQ ID NO: 95581 - DNA, 19 bp, Homo sapiens
  siRNA target sequence for PAK7 (NM_020341.2,2446-2464).
ggattcctagacttgatgt

SEQ ID NO: 95582 - DNA, 19 bp, Homo sapiens
  siRNA target sequence for PAK7 (NM_020341.2,2447-2465).
gattcctagacttgatgtt

SEQ ID NO: 95583 - DNA, 19 bp, Homo sapiens
  siRNA target sequence for PANK1 (NM_138316.2,190-208).
gcaaacattcccatggttt

SEQ ID NO: 95584 - DNA, 19 bp, Homo sapiens
  siRNA target sequence for PANK1 (NM_138316.2,220-238).
cggtggaacgctggttaaa

SEQ ID NO: 95585 - DNA, 19 bp, Homo sapiens
  siRNA target sequence for PANK1 (NM_138316.2,221-239).
ggtggaacgctggttaaat

SEQ ID NO: 95586 - DNA, 19 bp, Homo sapiens
  siRNA target sequence for PANK1 (NM_138316.2,250-268).
cgagccgaaggatattaca

SEQ ID NO: 95587 - DNA, 19 bp, Homo sapiens
  siRNA target sequence for PANK1 (NM_138316.2,301-319).
gaagagcatccggaagtat

SEQ ID NO: 95588 - DNA, 19 bp, Homo sapiens
  siRNA target sequence for PANK1 (NM_138316.2,307-325).
catccggaagtatttgact

SEQ ID NO: 95589 - DNA, 19 bp, Homo sapiens
  siRNA target sequence for PANK1 (NM_138316.2,662-680).
cccacaaatcctgaattgt

SEQ ID NO: 95590 - DNA, 19 bp, Homo sapiens
  siRNA target sequence for PANK1 (NM_138316.2,664-682).
cacaaatcctgaattgtgt

SEQ ID NO: 95591 - DNA, 19 bp, Homo sapiens
  siRNA target sequence for PANK1 (NM_138316.2,716-734).
cctatgttgctggttaaca

SEQ ID NO: 95592 - DNA, 19 bp, Homo sapiens
  siRNA target sequence for PANK1 (NM_138316.2,763-781).
gtactccaaggacaactat

SEQ ID NO: 95593 - DNA, 19 bp, Homo sapiens
  siRNA target sequence for PANK1 (NM_138316.2,912-930).
gcgcgttgaatgagaacat

SEQ ID NO: 95594 - DNA, 19 bp, Homo sapiens
  siRNA target sequence for PANK1 (NM_138316.2,913-931).
cgcgttgaatgagaacata

SEQ ID NO: 95595 - DNA, 19 bp, Homo sapiens
  siRNA target sequence for PANK1 (NM_138316.2,915-933).
cgttgaatgagaacataga

SEQ ID NO: 95596 - DNA, 19 bp, Homo sapiens
  siRNA target sequence for PANK1 (NM_138316.2,992-1010).
gcatatgccatggattttt

SEQ ID NO: 95597 - DNA, 19 bp, Homo sapiens
  siRNA target sequence for PANK1 (NM_148977.1,477-495).
gggaggatccggggaaata

SEQ ID NO: 95598 - DNA, 19 bp, Homo sapiens
  siRNA target sequence for PANK1 (NM_148977.1,478-496).
ggaggatccggggaaataa

SEQ ID NO: 95599 - DNA, 19 bp, Homo sapiens
  siRNA target sequence for PANK1 (NM_148977.1,1553-1571).
gcgacagcaccaatgttga

SEQ ID NO: 95600 - DNA, 19 bp, Homo sapiens
  siRNA target sequence for PANK1 (NM_148977.1,1555-1573).
gacagcaccaatgttgata

SEQ ID NO: 95601 - DNA, 19 bp, Homo sapiens
  siRNA target sequence for PANK1 (NM_148977.1,1587-1605).
catttacggaggagactat

SEQ ID NO: 95602 - DNA, 19 bp, Homo sapiens
  siRNA target sequence for PANK2 (NM_024960.3,381-399).
ggaggtggagcgtacaaat

SEQ ID NO: 95603 - DNA, 19 bp, Homo sapiens
  siRNA target sequence for PANK2 (NM_024960.3,382-400).
gaggtggagcgtacaaatt

SEQ ID NO: 95604 - DNA, 19 bp, Homo sapiens
  siRNA target sequence for PANK2 (NM_024960.3,385-403).
gtggagcgtacaaatttga

SEQ ID NO: 95605 - DNA, 19 bp, Homo sapiens
  siRNA target sequence for PANK2 (NM_024960.3,407-425).
ggattttctcacaataggt

SEQ ID NO: 95606 - DNA, 19 bp, Homo sapiens
  siRNA target sequence for PANK2 (NM_024960.3,504-522).
ggacggtcacagtgctatt

SEQ ID NO: 95607 - DNA, 19 bp, Homo sapiens
  siRNA target sequence for PANK2 (NM_024960.3,505-523).
gacggtcacagtgctatta

SEQ ID NO: 95608 - DNA, 19 bp, Homo sapiens
  siRNA target sequence for PANK2 (NM_024960.3,507-525).
cggtcacagtgctattact

SEQ ID NO: 95609 - DNA, 19 bp, Homo sapiens
  siRNA target sequence for PANK2 (NM_024960.3,508-526).
ggtcacagtgctattactt

SEQ ID NO: 95610 - DNA, 19 bp, Homo sapiens
  siRNA target sequence for PANK2 (NM_024960.3,511-529).
cacagtgctattactttga

SEQ ID NO: 95611 - DNA, 19 bp, Homo sapiens
  siRNA target sequence for PANK2 (NM_024960.3,611-629).
ctcaggggttagcatctta

SEQ ID NO: 95612 - DNA, 19 bp, Homo sapiens
  siRNA target sequence for PANK2 (NM_024960.3,659-677).
ggtcacaggtactagtctt

SEQ ID NO: 95613 - DNA, 19 bp, Homo sapiens
  siRNA target sequence for PANK2 (NM_024960.3,769-787).
ccaaagtggataaactagt

SEQ ID NO: 95614 - DNA, 19 bp, Homo sapiens
  siRNA target sequence for PANK2 (NM_024960.3,770-788).
caaagtggataaactagta

SEQ ID NO: 95615 - DNA, 19 bp, Homo sapiens
  siRNA target sequence for PANK2 (NM_024960.3,836-854).
ggctgtggcttcaagcttt

SEQ ID NO: 95616 - DNA, 19 bp, Homo sapiens
  siRNA target sequence for PANK2 (NM_024960.3,903-921).
ctggccagagcgactttga

SEQ ID NO: 95617 - DNA, 19 bp, Homo sapiens
  siRNA target sequence for PANK2 (NM_024960.3,906-924).
gccagagcgactttgatca

SEQ ID NO: 95618 - DNA, 19 bp, Homo sapiens
  siRNA target sequence for PANK2 (NM_024960.3,944-962).
ctcaatagcaagaatgtgt

SEQ ID NO: 95619 - DNA, 19 bp, Homo sapiens
  siRNA target sequence for PANK2 (NM_024960.3,1031-1049).
gcggcttttggcatatgct

SEQ ID NO: 95620 - DNA, 19 bp, Homo sapiens
  siRNA target sequence for PANK2 (NM_024960.3,1069-1087).
ggcagttgaaagcactttt

SEQ ID NO: 95621 - DNA, 19 bp, Homo sapiens
  siRNA target sequence for PANK2 (NM_024960.3,1070-1088).
gcagttgaaagcacttttt

SEQ ID NO: 95622 - DNA, 19 bp, Homo sapiens
  siRNA target sequence for PANK2 (NM_024960.3,1123-1141).
cactccttgagctgttgaa

SEQ ID NO: 95623 - DNA, 19 bp, Homo sapiens
  siRNA target sequence for PANK2 (NM_153638.1,239-257).
gatcgactgggctcttaca

SEQ ID NO: 95624 - DNA, 19 bp, Homo sapiens
  siRNA target sequence for PANK2 (NM_153638.1,287-305).
gtcgaaagcctgaggaaaa

SEQ ID NO: 95625 - DNA, 19 bp, Homo sapiens
  siRNA target sequence for PANK2 (NM_153638.1,348-366).
ctctggtcaagctggtata

SEQ ID NO: 95626 - DNA, 19 bp, Homo sapiens
  siRNA target sequence for PANK2 (NM_153638.1,352-370).
ggtcaagctggtatatttt

SEQ ID NO: 95627 - DNA, 19 bp, Homo sapiens
  siRNA target sequence for PANK2 (NM_153638.1,410-428).
gtggaaagtcttaaaagca

SEQ ID NO: 95628 - DNA, 19 bp, Homo sapiens
  siRNA target sequence for PANK3 (NM_024594.2,348-366).
ggacattgggggaactcta

SEQ ID NO: 95629 - DNA, 19 bp, Homo sapiens
  siRNA target sequence for PANK3 (NM_024594.2,351-369).
cattgggggaactctagta

SEQ ID NO: 95630 - DNA, 19 bp, Homo sapiens
  siRNA target sequence for PANK3 (NM_024594.2,375-393).
ctcgtactttgaacctatt

SEQ ID NO: 95631 - DNA, 19 bp, Homo sapiens
  siRNA target sequence for PANK3 (NM_024594.2,377-395).
cgtactttgaacctattga

SEQ ID NO: 95632 - DNA, 19 bp, Homo sapiens
  siRNA target sequence for PANK3 (NM_024594.2,424-442).
gttgagagtttaaaaagta

SEQ ID NO: 95633 - DNA, 19 bp, Homo sapiens
  siRNA target sequence for PANK3 (NM_024594.2,482-500).
ccggcattcgggatgtaca

SEQ ID NO: 95634 - DNA, 19 bp, Homo sapiens
  siRNA target sequence for PANK3 (NM_024594.2,491-509).
gggatgtacaccttgaact

SEQ ID NO: 95635 - DNA, 19 bp, Homo sapiens
  siRNA target sequence for PANK3 (NM_024594.2,499-517).
caccttgaactgaaagatt

SEQ ID NO: 95636 - DNA, 19 bp, Homo sapiens
  siRNA target sequence for PANK3 (NM_024594.2,536-554).
gagggaacttgcactttat

SEQ ID NO: 95637 - DNA, 19 bp, Homo sapiens
  siRNA target sequence for PANK3 (NM_024594.2,547-565).
cactttatcaggtttccaa

SEQ ID NO: 95638 - DNA, 19 bp, Homo sapiens
  siRNA target sequence for PANK3 (NM_024594.2,568-586).
caggacctgcctactttta

SEQ ID NO: 95639 - DNA, 19 bp, Homo sapiens
  siRNA target sequence for PANK3 (NM_024594.2,727-745).
gtaaagggcttgctgtata

SEQ ID NO: 95640 - DNA, 19 bp, Homo sapiens
  siRNA target sequence for PANK3 (NM_024594.2,733-751).
ggcttgctgtatatagact

SEQ ID NO: 95641 - DNA, 19 bp, Homo sapiens
  siRNA target sequence for PANK3 (NM_024594.2,766-784).
ggacaagccgagtgctatt

SEQ ID NO: 95642 - DNA, 19 bp, Homo sapiens
  siRNA target sequence for PANK3 (NM_024594.2,767-785).
gacaagccgagtgctatta

SEQ ID NO: 95643 - DNA, 19 bp, Homo sapiens
  siRNA target sequence for PANK3 (NM_024594.2,769-787).
caagccgagtgctattatt

SEQ ID NO: 95644 - DNA, 19 bp, Homo sapiens
  siRNA target sequence for PANK3 (NM_024594.2,775-793).
gagtgctattattttgcta

SEQ ID NO: 95645 - DNA, 19 bp, Homo sapiens
  siRNA target sequence for PANK3 (NM_024594.2,805-823).
cctgagcgatgccaaaaga

SEQ ID NO: 95646 - DNA, 19 bp, Homo sapiens
  siRNA target sequence for PANK3 (NM_024594.2,806-824).
ctgagcgatgccaaaagat

SEQ ID NO: 95647 - DNA, 19 bp, Homo sapiens
  siRNA target sequence for PANK3 (NM_024594.2,845-863).
cctatccactgcttgtagt

SEQ ID NO: 95648 - DNA, 19 bp, Homo sapiens
  siRNA target sequence for PANK3 (NM_024594.2,892-910).
gcagtccattccaaagaca

SEQ ID NO: 95649 - DNA, 19 bp, Homo sapiens
  siRNA target sequence for PANK3 (NM_024594.2,897-915).
ccattccaaagacaactat

SEQ ID NO: 95650 - DNA, 19 bp, Homo sapiens
  siRNA target sequence for PANK3 (NM_024594.2,946-964).
ggtacctttctgggtttat

SEQ ID NO: 95651 - DNA, 19 bp, Homo sapiens
  siRNA target sequence for PANK3 (NM_024594.2,975-993).
gactggctgtgaaagtttt

SEQ ID NO: 95652 - DNA, 19 bp, Homo sapiens
  siRNA target sequence for PANK3 (NM_024594.2,1041-1059).
caagctggtccgtgatatt

SEQ ID NO: 95653 - DNA, 19 bp, Homo sapiens
  siRNA target sequence for PANK3 (NM_024594.2,1044-1062).
gctggtccgtgatatttat

SEQ ID NO: 95654 - DNA, 19 bp, Homo sapiens
  siRNA target sequence for PANK3 (NM_024594.2,1047-1065).
ggtccgtgatatttatgga

SEQ ID NO: 95655 - DNA, 19 bp, Homo sapiens
  siRNA target sequence for PANK3 (NM_024594.2,1097-1115).
gggctgtagcatctagttt

SEQ ID NO: 95656 - DNA, 19 bp, Homo sapiens
  siRNA target sequence for PANK3 (NM_024594.2,1140-1158).
gcgagaatctgttagtaaa

SEQ ID NO: 95657 - DNA, 19 bp, Homo sapiens
  siRNA target sequence for PANK3 (NM_024594.2,1148-1166).
ctgttagtaaagaagatct

SEQ ID NO: 95658 - DNA, 19 bp, Homo sapiens
  siRNA target sequence for PANK3 (NM_024594.2,1252-1270).
gtctttgttggaaactttt

SEQ ID NO: 95659 - DNA, 19 bp, Homo sapiens
  siRNA target sequence for PANK3 (NM_024594.2,1293-1311).
gaaacttttggcatatgca

SEQ ID NO: 95660 - DNA, 19 bp, Homo sapiens
  siRNA target sequence for PANK3 (NM_024594.2,1322-1340).
ggtcaaaaggtcaactaaa

SEQ ID NO: 95661 - DNA, 19 bp, Homo sapiens
  siRNA target sequence for PANK4 (NM_018216.1,127-145).
gacataggcgggtcgttaa

SEQ ID NO: 95662 - DNA, 19 bp, Homo sapiens
  siRNA target sequence for PANK4 (NM_018216.1,147-165).
caagctggcctactattca

SEQ ID NO: 95663 - DNA, 19 bp, Homo sapiens
  siRNA target sequence for PANK4 (NM_018216.1,240-258).
gccctatgagatttcagtt

SEQ ID NO: 95664 - DNA, 19 bp, Homo sapiens
  siRNA target sequence for PANK4 (NM_018216.1,275-293).
ctcgactgcacttcattaa

SEQ ID NO: 95665 - DNA, 19 bp, Homo sapiens
  siRNA target sequence for PANK4 (NM_018216.1,283-301).
cacttcattaagtttgaga

SEQ ID NO: 95666 - DNA, 19 bp, Homo sapiens
  siRNA target sequence for PANK4 (NM_018216.1,448-466).
gtgatgacgtgcctgatta

SEQ ID NO: 95667 - DNA, 19 bp, Homo sapiens
  siRNA target sequence for PANK4 (NM_018216.1,685-703).
ggcgctctgctcaccaaaa

SEQ ID NO: 95668 - DNA, 19 bp, Homo sapiens
  siRNA target sequence for PANK4 (NM_018216.1,848-866).
ccaccgccgaccaagagtt

SEQ ID NO: 95669 - DNA, 19 bp, Homo sapiens
  siRNA target sequence for PANK4 (NM_018216.1,953-971).
gcctggaccgcgtgtactt

SEQ ID NO: 95670 - DNA, 19 bp, Homo sapiens
  siRNA target sequence for PANK4 (NM_018216.1,1010-1028).
gcaccatcacctatagcat

SEQ ID NO: 95671 - DNA, 19 bp, Homo sapiens
  siRNA target sequence for PANK4 (NM_018216.1,1019-1037).
cctatagcatcaacttctt

SEQ ID NO: 95672 - DNA, 19 bp, Homo sapiens
  siRNA target sequence for PANK4 (NM_018216.1,1114-1132).
gctgagcaggacaatccta

SEQ ID NO: 95673 - DNA, 19 bp, Homo sapiens
  siRNA target sequence for PANK4 (NM_018216.1,1115-1133).
ctgagcaggacaatcctaa

SEQ ID NO: 95674 - DNA, 19 bp, Homo sapiens
  siRNA target sequence for PANK4 (NM_018216.1,1216-1234).
cggagtggcacttttgact

SEQ ID NO: 95675 - DNA, 19 bp, Homo sapiens
  siRNA target sequence for PANK4 (NM_018216.1,1330-1348).
gacgctctggcccgaaaat

SEQ ID NO: 95676 - DNA, 19 bp, Homo sapiens
  siRNA target sequence for PANK4 (NM_018216.1,1430-1448).
ccgagagggcggagaagtt

SEQ ID NO: 95677 - DNA, 19 bp, Homo sapiens
  siRNA target sequence for PANK4 (NM_018216.1,1547-1565).
gtctgaacgagttcaactt

SEQ ID NO: 95678 - DNA, 19 bp, Homo sapiens
  siRNA target sequence for PANK4 (NM_018216.1,1752-1770).
cccctactttgggtttgaa

SEQ ID NO: 95679 - DNA, 19 bp, Homo sapiens
  siRNA target sequence for PANK4 (NM_018216.1,1755-1773).
ctactttgggtttgaagaa

SEQ ID NO: 95680 - DNA, 19 bp, Homo sapiens
  siRNA target sequence for PANK4 (NM_018216.1,1862-1880).
ccttaattttcgcagataa

SEQ ID NO: 95681 - DNA, 19 bp, Homo sapiens
  siRNA target sequence for PANK4 (NM_018216.1,1874-1892).
cagataacagtggaataga

SEQ ID NO: 95682 - DNA, 19 bp, Homo sapiens
  siRNA target sequence for PANK4 (NM_018216.1,1876-1894).
gataacagtggaatagaca

SEQ ID NO: 95683 - DNA, 19 bp, Homo sapiens
  siRNA target sequence for PANK4 (NM_018216.1,1883-1901).
gtggaatagacatcatttt

SEQ ID NO: 95684 - DNA, 19 bp, Homo sapiens
  siRNA target sequence for PANK4 (NM_018216.1,2189-2207).
gccgtgctgtccacacaaa

SEQ ID NO: 95685 - DNA, 19 bp, Homo sapiens
  siRNA target sequence for PANK4 (NM_018216.1,2191-2209).
cgtgctgtccacacaaact

SEQ ID NO: 95686 - DNA, 19 bp, Homo sapiens
  siRNA target sequence for PANK4 (NM_018216.1,2192-2210).
gtgctgtccacacaaacta

SEQ ID NO: 95687 - DNA, 19 bp, Homo sapiens
  siRNA target sequence for PAPSS1 (NM_005443.3,216-234).
gtctggagcgggaaagact

SEQ ID NO: 95688 - DNA, 19 bp, Homo sapiens
  siRNA target sequence for PAPSS1 (NM_005443.3,265-283).
gtttgtcatggtattccat

SEQ ID NO: 95689 - DNA, 19 bp, Homo sapiens
  siRNA target sequence for PAPSS1 (NM_005443.3,294-312).
ggatggtgacaatattcgt

SEQ ID NO: 95690 - DNA, 19 bp, Homo sapiens
  siRNA target sequence for PAPSS1 (NM_005443.3,372-390).
catcgcagaagttgctaaa

SEQ ID NO: 95691 - DNA, 19 bp, Homo sapiens
  siRNA target sequence for PAPSS1 (NM_005443.3,406-424).
ggcttagtgtgcatcacaa

SEQ ID NO: 95692 - DNA, 19 bp, Homo sapiens
  siRNA target sequence for PAPSS1 (NM_005443.3,453-471).
caacaatgcaaggcaaatt

SEQ ID NO: 95693 - DNA, 19 bp, Homo sapiens
  siRNA target sequence for PAPSS1 (NM_005443.3,456-474).
caatgcaaggcaaattcat

SEQ ID NO: 95694 - DNA, 19 bp, Homo sapiens
  siRNA target sequence for PAPSS1 (NM_005443.3,479-497).
gtgcaagtttaccgttttt

SEQ ID NO: 95695 - DNA, 19 bp, Homo sapiens
  siRNA target sequence for PAPSS1 (NM_005443.3,482-500).
caagtttaccgttttttga

SEQ ID NO: 95696 - DNA, 19 bp, Homo sapiens
  siRNA target sequence for PAPSS1 (NM_005443.3,491-509).
cgttttttgaagtatttgt

SEQ ID NO: 95697 - DNA, 19 bp, Homo sapiens
  siRNA target sequence for PAPSS1 (NM_005443.3,515-533).
ctcctctgcatgtttgtga

SEQ ID NO: 95698 - DNA, 19 bp, Homo sapiens
  siRNA target sequence for PAPSS1 (NM_005443.3,586-604).
ggtttcactgggatcgatt

SEQ ID NO: 95699 - DNA, 19 bp, Homo sapiens
  siRNA target sequence for PAPSS1 (NM_005443.3,591-609).
cactgggatcgattctgaa

SEQ ID NO: 95700 - DNA, 19 bp, Homo sapiens
  siRNA target sequence for PAPSS1 (NM_005443.3,593-611).
ctgggatcgattctgaata

SEQ ID NO: 95701 - DNA, 19 bp, Homo sapiens
  siRNA target sequence for PAPSS1 (NM_005443.3,597-615).
gatcgattctgaatatgaa

SEQ ID NO: 95702 - DNA, 19 bp, Homo sapiens
  siRNA target sequence for PAPSS1 (NM_005443.3,628-646).
cctgagttggtgctgaaaa

SEQ ID NO: 95703 - DNA, 19 bp, Homo sapiens
  siRNA target sequence for PAPSS1 (NM_005443.3,678-696).
gcaagttgtggaacttcta

SEQ ID NO: 95704 - DNA, 19 bp, Homo sapiens
  siRNA target sequence for PAPSS1 (NM_005443.3,745-763).
ctatatgtgccagaaaata

SEQ ID NO: 95705 - DNA, 19 bp, Homo sapiens
  siRNA target sequence for PAPSS1 (NM_005443.3,854-872).
gttgggcaaccccattgaa

SEQ ID NO: 95706 - DNA, 19 bp, Homo sapiens
  siRNA target sequence for PAPSS1 (NM_005443.3,966-984).
gactgcgactcatgaagat

SEQ ID NO: 95707 - DNA, 19 bp, Homo sapiens
  siRNA target sequence for PAPSS1 (NM_005443.3,996-1014).
ggacggctgtacagcattt

SEQ ID NO: 95708 - DNA, 19 bp, Homo sapiens
  siRNA target sequence for PAPSS1 (NM_005443.3,1048-1066).
cttcgcaatccagagtttt

SEQ ID NO: 95709 - DNA, 19 bp, Homo sapiens
  siRNA target sequence for PAPSS1 (NM_005443.3,1052-1070).
gcaatccagagttttttga

SEQ ID NO: 95710 - DNA, 19 bp, Homo sapiens
  siRNA target sequence for PAPSS1 (NM_005443.3,1183-1201).
gtcttggatcgagtttatt

SEQ ID NO: 95711 - DNA, 19 bp, Homo sapiens
  siRNA target sequence for PAPSS1 (NM_005443.3,1188-1206).
ggatcgagtttattggaat

SEQ ID NO: 95712 - DNA, 19 bp, Homo sapiens
  siRNA target sequence for PAPSS1 (NM_005443.3,1202-1220).
ggaatgatggtcttgatca

SEQ ID NO: 95713 - DNA, 19 bp, Homo sapiens
  siRNA target sequence for PAPSS1 (NM_005443.3,1427-1445).
ctttgatgtggcgtatgaa

SEQ ID NO: 95714 - DNA, 19 bp, Homo sapiens
  siRNA target sequence for PAPSS1 (NM_005443.3,1509-1527).
cccatctcccatgatgtat

SEQ ID NO: 95715 - DNA, 19 bp, Homo sapiens
  siRNA target sequence for PAPSS1 (NM_005443.3,1574-1592).
caggagccaacttttacat

SEQ ID NO: 95716 - DNA, 19 bp, Homo sapiens
  siRNA target sequence for PAPSS1 (NM_005443.3,1631-1649).
cagggaaggatctttatga

SEQ ID NO: 95717 - DNA, 19 bp, Homo sapiens
  siRNA target sequence for PAPSS1 (NM_005443.3,1676-1694).
cgatggcccctggtttaat

SEQ ID NO: 95718 - DNA, 19 bp, Homo sapiens
  siRNA target sequence for PAPSS1 (NM_005443.3,1681-1699).
gcccctggtttaatcactt

SEQ ID NO: 95719 - DNA, 19 bp, Homo sapiens
  siRNA target sequence for PAPSS1 (NM_005443.3,1718-1736).
gagttgcagcttacaacaa

SEQ ID NO: 95720 - DNA, 19 bp, Homo sapiens
  siRNA target sequence for PAPSS1 (NM_005443.3,1743-1761).
gaagcgtatggactactat

SEQ ID NO: 95721 - DNA, 19 bp, Homo sapiens
  siRNA target sequence for PAPSS1 (NM_005443.3,1747-1765).
cgtatggactactatgact

SEQ ID NO: 95722 - DNA, 19 bp, Homo sapiens
  siRNA target sequence for PAPSS1 (NM_005443.3,1871-1889).
ccgtgctgacagaatacta

SEQ ID NO: 95723 - DNA, 19 bp, Homo sapiens
  siRNA target sequence for PAPSS1 (NM_005443.3,1875-1893).
gctgacagaatactacaaa

SEQ ID NO: 95724 - DNA, 19 bp, Homo sapiens
  siRNA target sequence for PAPSS1 (NM_005443.3,1876-1894).
ctgacagaatactacaaat

SEQ ID NO: 95725 - DNA, 19 bp, Homo sapiens
  siRNA target sequence for PAPSS1 (NM_005443.3,1880-1898).
cagaatactacaaatcctt

SEQ ID NO: 95726 - DNA, 19 bp, Homo sapiens
  siRNA target sequence for PAPSS2 (NM_004670.2,155-173).
ccaccaatgtagtctatca

SEQ ID NO: 95727 - DNA, 19 bp, Homo sapiens
  siRNA target sequence for PAPSS2 (NM_004670.2,178-196).
caccatgtgagcaggaata

SEQ ID NO: 95728 - DNA, 19 bp, Homo sapiens
  siRNA target sequence for PAPSS2 (NM_004670.2,268-286).
gctggaaaaacaacgataa

SEQ ID NO: 95729 - DNA, 19 bp, Homo sapiens
  siRNA target sequence for PAPSS2 (NM_004670.2,271-289).
ggaaaaacaacgataagtt

SEQ ID NO: 95730 - DNA, 19 bp, Homo sapiens
  siRNA target sequence for PAPSS2 (NM_004670.2,352-370).
gtccgtcatggccttaaca

SEQ ID NO: 95731 - DNA, 19 bp, Homo sapiens
  siRNA target sequence for PAPSS2 (NM_004670.2,354-372).
ccgtcatggccttaacaga

SEQ ID NO: 95732 - DNA, 19 bp, Homo sapiens
  siRNA target sequence for PAPSS2 (NM_004670.2,355-373).
cgtcatggccttaacagaa

SEQ ID NO: 95733 - DNA, 19 bp, Homo sapiens
  siRNA target sequence for PAPSS2 (NM_004670.2,369-387).
cagaaatctcggattctct

SEQ ID NO: 95734 - DNA, 19 bp, Homo sapiens
  siRNA target sequence for PAPSS2 (NM_004670.2,448-466).
gctggtctggtctgcatta

SEQ ID NO: 95735 - DNA, 19 bp, Homo sapiens
  siRNA target sequence for PAPSS2 (NM_004670.2,486-504).
cgcaaaggatcgtgagaat

SEQ ID NO: 95736 - DNA, 19 bp, Homo sapiens
  siRNA target sequence for PAPSS2 (NM_004670.2,497-515).
gtgagaatgcccgcaaaat

SEQ ID NO: 95737 - DNA, 19 bp, Homo sapiens
  siRNA target sequence for PAPSS2 (NM_004670.2,505-523).
gcccgcaaaatacatgaat

SEQ ID NO: 95738 - DNA, 19 bp, Homo sapiens
  siRNA target sequence for PAPSS2 (NM_004670.2,507-525).
ccgcaaaatacatgaatca

SEQ ID NO: 95739 - DNA, 19 bp, Homo sapiens
  siRNA target sequence for PAPSS2 (NM_004670.2,532-550).
ctgccattctttgaaatat

SEQ ID NO: 95740 - DNA, 19 bp, Homo sapiens
  siRNA target sequence for PAPSS2 (NM_004670.2,586-604).
gacgtaaaaggcctctata

SEQ ID NO: 95741 - DNA, 19 bp, Homo sapiens
  siRNA target sequence for PAPSS2 (NM_004670.2,588-606).
cgtaaaaggcctctataaa

SEQ ID NO: 95742 - DNA, 19 bp, Homo sapiens
  siRNA target sequence for PAPSS2 (NM_004670.2,589-607).
gtaaaaggcctctataaaa

SEQ ID NO: 95743 - DNA, 19 bp, Homo sapiens
  siRNA target sequence for PAPSS2 (NM_004670.2,612-630).
cagagctggggagattaaa

SEQ ID NO: 95744 - DNA, 19 bp, Homo sapiens
  siRNA target sequence for PAPSS2 (NM_004670.2,621-639).
ggagattaaaggatttaca

SEQ ID NO: 95745 - DNA, 19 bp, Homo sapiens
  siRNA target sequence for PAPSS2 (NM_004670.2,671-689).
ctcctgagcgtgtgcttaa

SEQ ID NO: 95746 - DNA, 19 bp, Homo sapiens
  siRNA target sequence for PAPSS2 (NM_004670.2,673-691).
cctgagcgtgtgcttaaaa

SEQ ID NO: 95747 - DNA, 19 bp, Homo sapiens
  siRNA target sequence for PAPSS2 (NM_004670.2,676-694).
gagcgtgtgcttaaaacca

SEQ ID NO: 95748 - DNA, 19 bp, Homo sapiens
  siRNA target sequence for PAPSS2 (NM_004670.2,678-696).
gcgtgtgcttaaaaccaat

SEQ ID NO: 95749 - DNA, 19 bp, Homo sapiens
  siRNA target sequence for PAPSS2 (NM_004670.2,682-700).
gtgcttaaaaccaatttgt

SEQ ID NO: 95750 - DNA, 19 bp, Homo sapiens
  siRNA target sequence for PAPSS2 (NM_004670.2,741-759).
gcaagagcagaacattgta

SEQ ID NO: 95751 - DNA, 19 bp, Homo sapiens
  siRNA target sequence for PAPSS2 (NM_004670.2,750-768).
gaacattgtaccctatact

SEQ ID NO: 95752 - DNA, 19 bp, Homo sapiens
  siRNA target sequence for PAPSS2 (NM_004670.2,761-779).
cctatactataatcaaaga

SEQ ID NO: 95753 - DNA, 19 bp, Homo sapiens
  siRNA target sequence for PAPSS2 (NM_004670.2,762-780).
ctatactataatcaaagat

SEQ ID NO: 95754 - DNA, 19 bp, Homo sapiens
  siRNA target sequence for PAPSS2 (NM_004670.2,822-840).
ccgagctgaggctgaaact

SEQ ID NO: 95755 - DNA, 19 bp, Homo sapiens
  siRNA target sequence for PAPSS2 (NM_004670.2,841-859).
ctcccttcattatcaatta

SEQ ID NO: 95756 - DNA, 19 bp, Homo sapiens
  siRNA target sequence for PAPSS2 (NM_004670.2,843-861).
cccttcattatcaattact

SEQ ID NO: 95757 - DNA, 19 bp, Homo sapiens
  siRNA target sequence for PAPSS2 (NM_004670.2,904-922).
gccactcccctcaaaggtt

SEQ ID NO: 95758 - DNA, 19 bp, Homo sapiens
  siRNA target sequence for PAPSS2 (NM_004670.2,927-945).
gcgggagaaggagtactta

SEQ ID NO: 95759 - DNA, 19 bp, Homo sapiens
  siRNA target sequence for PAPSS2 (NM_004670.2,946-964).
caggttatgcactttgaca

SEQ ID NO: 95760 - DNA, 19 bp, Homo sapiens
  siRNA target sequence for PAPSS2 (NM_004670.2,990-1008).
catgagcatccccattgta

SEQ ID NO: 95761 - DNA, 19 bp, Homo sapiens
  siRNA target sequence for PAPSS2 (NM_004670.2,1073-1091).
gtggacggagggtagctat

SEQ ID NO: 95762 - DNA, 19 bp, Homo sapiens
  siRNA target sequence for PAPSS2 (NM_004670.2,1076-1094).
gacggagggtagctatctt

SEQ ID NO: 95763 - DNA, 19 bp, Homo sapiens
  siRNA target sequence for PAPSS2 (NM_004670.2,1097-1115).
gagacgctgaattctatga

SEQ ID NO: 95764 - DNA, 19 bp, Homo sapiens
  siRNA target sequence for PAPSS2 (NM_004670.2,1141-1159).
cgtgtttgggggacaacat

SEQ ID NO: 95765 - DNA, 19 bp, Homo sapiens
  siRNA target sequence for PAPSS2 (NM_004670.2,1163-1181).
caaaacacccccatatcaa

SEQ ID NO: 95766 - DNA, 19 bp, Homo sapiens
  siRNA target sequence for PAPSS2 (NM_004670.2,1228-1246).
gtgctggagaaaataagat

SEQ ID NO: 95767 - DNA, 19 bp, Homo sapiens
  siRNA target sequence for PAPSS2 (NM_004670.2,1285-1303).
gagctcaaacagaaatgta

SEQ ID NO: 95768 - DNA, 19 bp, Homo sapiens
  siRNA target sequence for PAPSS2 (NM_004670.2,1519-1537).
gtcctggatcccaagtcaa

SEQ ID NO: 95769 - DNA, 19 bp, Homo sapiens
  siRNA target sequence for PAPSS2 (NM_004670.2,1599-1617).
ctgcaggtcccggatgatt

SEQ ID NO: 95770 - DNA, 19 bp, Homo sapiens
  siRNA target sequence for PAPSS2 (NM_004670.2,1618-1636).
gcgggtgccaatttctaca

SEQ ID NO: 95771 - DNA, 19 bp, Homo sapiens
  siRNA target sequence for PAPSS2 (NM_004670.2,1620-1638).
gggtgccaatttctacatt

SEQ ID NO: 95772 - DNA, 19 bp, Homo sapiens
  siRNA target sequence for PAPSS2 (NM_004670.2,1763-1781).
gagtggctgcctacaacaa

SEQ ID NO: 95773 - DNA, 19 bp, Homo sapiens
  siRNA target sequence for PAPSS2 (NM_004670.2,1914-1932).
gaaggtcctgacagattat

SEQ ID NO: 95774 - DNA, 19 bp, Homo sapiens
  siRNA target sequence for PAPSS2 (NM_004670.2,1918-1936).
gtcctgacagattattaca

SEQ ID NO: 95775 - DNA, 19 bp, Homo sapiens
  siRNA target sequence for PASK (NM_015148.2,198-216).
gagcccagcaggtcgtttt

SEQ ID NO: 95776 - DNA, 19 bp, Homo sapiens
  siRNA target sequence for PASK (NM_015148.2,291-309).
gacagatggagctcctatt

SEQ ID NO: 95777 - DNA, 19 bp, Homo sapiens
  siRNA target sequence for PASK (NM_015148.2,295-313).
gatggagctcctattgtct

SEQ ID NO: 95778 - DNA, 19 bp, Homo sapiens
  siRNA target sequence for PASK (NM_015148.2,323-341).
ggctgcccagaatatttgt

SEQ ID NO: 95779 - DNA, 19 bp, Homo sapiens
  siRNA target sequence for PASK (NM_015148.2,324-342).
gctgcccagaatatttgta

SEQ ID NO: 95780 - DNA, 19 bp, Homo sapiens
  siRNA target sequence for PASK (NM_015148.2,327-345).
gcccagaatatttgtacaa

SEQ ID NO: 95781 - DNA, 19 bp, Homo sapiens
  siRNA target sequence for PASK (NM_015148.2,329-347).
ccagaatatttgtacaagt

SEQ ID NO: 95782 - DNA, 19 bp, Homo sapiens
  siRNA target sequence for PASK (NM_015148.2,330-348).
cagaatatttgtacaagta

SEQ ID NO: 95783 - DNA, 19 bp, Homo sapiens
  siRNA target sequence for PASK (NM_015148.2,469-487).
ctgtgtgcaaccctaacaa

SEQ ID NO: 95784 - DNA, 19 bp, Homo sapiens
  siRNA target sequence for PASK (NM_015148.2,528-546).
gttgctaacgacaaagctt

SEQ ID NO: 95785 - DNA, 19 bp, Homo sapiens
  siRNA target sequence for PASK (NM_015148.2,587-605).
gaagctcacgcagttcttt

SEQ ID NO: 95786 - DNA, 19 bp, Homo sapiens
  siRNA target sequence for PASK (NM_015148.2,685-703).
gcacggtggtggacatcat

SEQ ID NO: 95787 - DNA, 19 bp, Homo sapiens
  siRNA target sequence for PASK (NM_015148.2,706-724).
gccgtagtggggagaagat

SEQ ID NO: 95788 - DNA, 19 bp, Homo sapiens
  siRNA target sequence for PASK (NM_015148.2,707-725).
ccgtagtggggagaagatt

SEQ ID NO: 95789 - DNA, 19 bp, Homo sapiens
  siRNA target sequence for PASK (NM_015148.2,897-915).
gtggctgggcagcatatca

SEQ ID NO: 95790 - DNA, 19 bp, Homo sapiens
  siRNA target sequence for PASK (NM_015148.2,953-971).
ccagcacatcccaaagaat

SEQ ID NO: 95791 - DNA, 19 bp, Homo sapiens
  siRNA target sequence for PASK (NM_015148.2,1181-1199).
cttcgcgctgacactgttt

SEQ ID NO: 95792 - DNA, 19 bp, Homo sapiens
  siRNA target sequence for PASK (NM_015148.2,1186-1204).
cgctgacactgtttggtta

SEQ ID NO: 95793 - DNA, 19 bp, Homo sapiens
  siRNA target sequence for PASK (NM_015148.2,1242-1260).
ctgattcctggtttctaca

SEQ ID NO: 95794 - DNA, 19 bp, Homo sapiens
  siRNA target sequence for PASK (NM_015148.2,1276-1294).
cgtacaacagctcattaca

SEQ ID NO: 95795 - DNA, 19 bp, Homo sapiens
  siRNA target sequence for PASK (NM_015148.2,1392-1410).
ggccaggatccaaggatta

SEQ ID NO: 95796 - DNA, 19 bp, Homo sapiens
  siRNA target sequence for PASK (NM_015148.2,1549-1567).
ctccaggggtggacaatgt

SEQ ID NO: 95797 - DNA, 19 bp, Homo sapiens
  siRNA target sequence for PASK (NM_015148.2,1913-1931).
gatgcactgcccttgctat

SEQ ID NO: 95798 - DNA, 19 bp, Homo sapiens
  siRNA target sequence for PASK (NM_015148.2,1923-1941).
ccttgctatgggagtgaat

SEQ ID NO: 95799 - DNA, 19 bp, Homo sapiens
  siRNA target sequence for PASK (NM_015148.2,2008-2026).
ggacacctactctagatga

SEQ ID NO: 95800 - DNA, 19 bp, Homo sapiens
  siRNA target sequence for PASK (NM_015148.2,2060-2078).
gctgcagacctgcttgatt

SEQ ID NO: 95801 - DNA, 19 bp, Homo sapiens
  siRNA target sequence for PASK (NM_015148.2,2289-2307).
gaggttgatgtgaattcgt

SEQ ID NO: 95802 - DNA, 19 bp, Homo sapiens
  siRNA target sequence for PASK (NM_015148.2,2291-2309).
ggttgatgtgaattcgttt

SEQ ID NO: 95803 - DNA, 19 bp, Homo sapiens
  siRNA target sequence for PASK (NM_015148.2,2292-2310).
gttgatgtgaattcgtttt

SEQ ID NO: 95804 - DNA, 19 bp, Homo sapiens
  siRNA target sequence for PASK (NM_015148.2,2349-2367).
gaccaaacgtcatcaaatt

SEQ ID NO: 95805 - DNA, 19 bp, Homo sapiens
  siRNA target sequence for PASK (NM_015148.2,2417-2435).
gggctccgatccagatgta

SEQ ID NO: 95806 - DNA, 19 bp, Homo sapiens
  siRNA target sequence for PASK (NM_015148.2,2582-2600).
ggtgtcctctgagcattat

SEQ ID NO: 95807 - DNA, 19 bp, Homo sapiens
  siRNA target sequence for PASK (NM_015148.2,2585-2603).
gtcctctgagcattatgca

SEQ ID NO: 95808 - DNA, 19 bp, Homo sapiens
  siRNA target sequence for PASK (NM_015148.2,3069-3087).
ggcgagtactcccaaaagt

SEQ ID NO: 95809 - DNA, 19 bp, Homo sapiens
  siRNA target sequence for PASK (NM_015148.2,3070-3088).
gcgagtactcccaaaagta

SEQ ID NO: 95810 - DNA, 19 bp, Homo sapiens
  siRNA target sequence for PASK (NM_015148.2,3072-3090).
gagtactcccaaaagtaca

SEQ ID NO: 95811 - DNA, 19 bp, Homo sapiens
  siRNA target sequence for PASK (NM_015148.2,3267-3285).
gtggagcacgccaatatca

SEQ ID NO: 95812 - DNA, 19 bp, Homo sapiens
  siRNA target sequence for PASK (NM_015148.2,3276-3294).
gccaatatcatcaaggtat

SEQ ID NO: 95813 - DNA, 19 bp, Homo sapiens
  siRNA target sequence for PASK (NM_015148.2,3316-3334).
ggttcttccagcttgtgat

SEQ ID NO: 95814 - DNA, 19 bp, Homo sapiens
  siRNA target sequence for PASK (NM_015148.2,3399-3417).
cccctggcgagctacatct

SEQ ID NO: 95815 - DNA, 19 bp, Homo sapiens
  siRNA target sequence for PASK (NM_015148.2,3400-3418).
ccctggcgagctacatctt

SEQ ID NO: 95816 - DNA, 19 bp, Homo sapiens
  siRNA target sequence for PASK (NM_015148.2,3410-3428).
ctacatcttccgacaacta

SEQ ID NO: 95817 - DNA, 19 bp, Homo sapiens
  siRNA target sequence for PASK (NM_015148.2,3501-3519).
gccgaggacttcacaatca

SEQ ID NO: 95818 - DNA, 19 bp, Homo sapiens
  siRNA target sequence for PASK (NM_015148.2,3832-3850).
cagacccgtgggtaacaca

SEQ ID NO: 95819 - DNA, 19 bp, Homo sapiens
  siRNA target sequence for PASK (NM_015148.2,3855-3873).
gtgaatcttgctgactata

SEQ ID NO: 95820 - DNA, 19 bp, Homo sapiens
  siRNA target sequence for PASK (NM_015148.2,3857-3875).
gaatcttgctgactataca

SEQ ID NO: 95821 - DNA, 19 bp, Homo sapiens
  siRNA target sequence for PC (NM_000920.2,385-403).
cgcaccgtagccatctact

SEQ ID NO: 95822 - DNA, 19 bp, Homo sapiens
  siRNA target sequence for PC (NM_000920.2,440-458).
cagatgaagcctatctcat

SEQ ID NO: 95823 - DNA, 19 bp, Homo sapiens
  siRNA target sequence for PC (NM_000920.2,896-914).
cgctgtttgtggagaagtt

SEQ ID NO: 95824 - DNA, 19 bp, Homo sapiens
  siRNA target sequence for PC (NM_000920.2,1085-1103).
ctgtgaaactcgctaaaca

SEQ ID NO: 95825 - DNA, 19 bp, Homo sapiens
  siRNA target sequence for PC (NM_000920.2,1148-1166).
ggcacggcaagcactactt

SEQ ID NO: 95826 - DNA, 19 bp, Homo sapiens
  siRNA target sequence for PC (NM_000920.2,1150-1168).
cacggcaagcactacttca

SEQ ID NO: 95827 - DNA, 19 bp, Homo sapiens
  siRNA target sequence for PC (NM_000920.2,1410-1428).
gggcatccgcctggataat

SEQ ID NO: 95828 - DNA, 19 bp, Homo sapiens
  siRNA target sequence for PC (NM_000920.2,1413-1431).
catccgcctggataatgct

SEQ ID NO: 95829 - DNA, 19 bp, Homo sapiens
  siRNA target sequence for PC (NM_000920.2,1711-1729).
ctcggccatgtcatggtaa

SEQ ID NO: 95830 - DNA, 19 bp, Homo sapiens
  siRNA target sequence for PC (NM_000920.2,1947-1965).
gcgcacccacgatctcaaa

SEQ ID NO: 95831 - DNA, 19 bp, Homo sapiens
  siRNA target sequence for PC (NM_000920.2,1948-1966).
cgcacccacgatctcaaaa

SEQ ID NO: 95832 - DNA, 19 bp, Homo sapiens
  siRNA target sequence for PC (NM_000920.2,1949-1967).
gcacccacgatctcaaaaa

SEQ ID NO: 95833 - DNA, 19 bp, Homo sapiens
  siRNA target sequence for PC (NM_000920.2,1976-1994).
cctatgttgcccacaactt

SEQ ID NO: 95834 - DNA, 19 bp, Homo sapiens
  siRNA target sequence for PC (NM_000920.2,2218-2236).
gtcttccgtgtgtttgact

SEQ ID NO: 95835 - DNA, 19 bp, Homo sapiens
  siRNA target sequence for PC (NM_000920.2,2302-2320).
gaggctgccatctcataca

SEQ ID NO: 95836 - DNA, 19 bp, Homo sapiens
  siRNA target sequence for PC (NM_000920.2,2771-2789).
gcaactcggacgtgtatga

SEQ ID NO: 95837 - DNA, 19 bp, Homo sapiens
  siRNA target sequence for PC (NM_000920.2,2772-2790).
caactcggacgtgtatgaa

SEQ ID NO: 95838 - DNA, 19 bp, Homo sapiens
  siRNA target sequence for PC (NM_000920.2,2775-2793).
ctcggacgtgtatgaaaat

SEQ ID NO: 95839 - DNA, 19 bp, Homo sapiens
  siRNA target sequence for PC (NM_000920.2,2944-2962).
ggggacctggcccagttta

SEQ ID NO: 95840 - DNA, 19 bp, Homo sapiens
  siRNA target sequence for PC (NM_000920.2,2945-2963).
gggacctggcccagtttat

SEQ ID NO: 95841 - DNA, 19 bp, Homo sapiens
  siRNA target sequence for PC (NM_000920.2,3233-3251).
ctatgtaccccgatgtgtt

SEQ ID NO: 95842 - DNA, 19 bp, Homo sapiens
  siRNA target sequence for PC (NM_000920.2,3668-3686).
ctgtccgcaaggttcatgt

SEQ ID NO: 95843 - DNA, 19 bp, Homo sapiens
  siRNA target sequence for PCCA (NM_000282.1,68-86).
ggaccctgaagcatgttct

SEQ ID NO: 95844 - DNA, 19 bp, Homo sapiens
  siRNA target sequence for PCCA (NM_000282.1,95-113).
caagacagtgcttaatggt

SEQ ID NO: 95845 - DNA, 19 bp, Homo sapiens
  siRNA target sequence for PCCA (NM_000282.1,131-149).
cagtgggatatgatcctaa

SEQ ID NO: 95846 - DNA, 19 bp, Homo sapiens
  siRNA target sequence for PCCA (NM_000282.1,135-153).
gggatatgatcctaatgaa

SEQ ID NO: 95847 - DNA, 19 bp, Homo sapiens
  siRNA target sequence for PCCA (NM_000282.1,136-154).
ggatatgatcctaatgaaa

SEQ ID NO: 95848 - DNA, 19 bp, Homo sapiens
  siRNA target sequence for PCCA (NM_000282.1,196-214).
gcatgtcgggttattagaa

SEQ ID NO: 95849 - DNA, 19 bp, Homo sapiens
  siRNA target sequence for PCCA (NM_000282.1,316-334).
gctcccaccagtaaaagct

SEQ ID NO: 95850 - DNA, 19 bp, Homo sapiens
  siRNA target sequence for PCCA (NM_000282.1,317-335).
ctcccaccagtaaaagcta

SEQ ID NO: 95851 - DNA, 19 bp, Homo sapiens
  siRNA target sequence for PCCA (NM_000282.1,437-455).
gtttggcagcagaagatgt

SEQ ID NO: 95852 - DNA, 19 bp, Homo sapiens
  siRNA target sequence for PCCA (NM_000282.1,443-461).
cagcagaagatgtcgtttt

SEQ ID NO: 95853 - DNA, 19 bp, Homo sapiens
  siRNA target sequence for PCCA (NM_000282.1,467-485).
gacctgacacacatgctat

SEQ ID NO: 95854 - DNA, 19 bp, Homo sapiens
  siRNA target sequence for PCCA (NM_000282.1,470-488).
ctgacacacatgctattca

SEQ ID NO: 95855 - DNA, 19 bp, Homo sapiens
  siRNA target sequence for PCCA (NM_000282.1,491-509).
ccatgggcgacaagattga

SEQ ID NO: 95856 - DNA, 19 bp, Homo sapiens
  siRNA target sequence for PCCA (NM_000282.1,524-542).
ctaagaaagcagaggttaa

SEQ ID NO: 95857 - DNA, 19 bp, Homo sapiens
  siRNA target sequence for PCCA (NM_000282.1,662-680).
gcattgcttgggatgatga

SEQ ID NO: 95858 - DNA, 19 bp, Homo sapiens
  siRNA target sequence for PCCA (NM_000282.1,663-681).
cattgcttgggatgatgaa

SEQ ID NO: 95859 - DNA, 19 bp, Homo sapiens
  siRNA target sequence for PCCA (NM_000282.1,684-702).
gaccagggatggttttaga

SEQ ID NO: 95860 - DNA, 19 bp, Homo sapiens
  siRNA target sequence for PCCA (NM_000282.1,686-704).
ccagggatggttttagatt

SEQ ID NO: 95861 - DNA, 19 bp, Homo sapiens
  siRNA target sequence for PCCA (NM_000282.1,690-708).
ggatggttttagattgtca

SEQ ID NO: 95862 - DNA, 19 bp, Homo sapiens
  siRNA target sequence for PCCA (NM_000282.1,691-709).
gatggttttagattgtcat

SEQ ID NO: 95863 - DNA, 19 bp, Homo sapiens
  siRNA target sequence for PCCA (NM_000282.1,728-746).
gttttggcgatgatagact

SEQ ID NO: 95864 - DNA, 19 bp, Homo sapiens
  siRNA target sequence for PCCA (NM_000282.1,733-751).
ggcgatgatagactactaa

SEQ ID NO: 95865 - DNA, 19 bp, Homo sapiens
  siRNA target sequence for PCCA (NM_000282.1,734-752).
gcgatgatagactactaat

SEQ ID NO: 95866 - DNA, 19 bp, Homo sapiens
  siRNA target sequence for PCCA (NM_000282.1,735-753).
cgatgatagactactaata

SEQ ID NO: 95867 - DNA, 19 bp, Homo sapiens
  siRNA target sequence for PCCA (NM_000282.1,773-791).
ctcgtcatatagaaatcca

SEQ ID NO: 95868 - DNA, 19 bp, Homo sapiens
  siRNA target sequence for PCCA (NM_000282.1,802-820).
gataaacatgggaatgctt

SEQ ID NO: 95869 - DNA, 19 bp, Homo sapiens
  siRNA target sequence for PCCA (NM_000282.1,817-835).
gctttatggcttaatgaaa

SEQ ID NO: 95870 - DNA, 19 bp, Homo sapiens
  siRNA target sequence for PCCA (NM_000282.1,842-860).
gctcaattcagagaagaaa

SEQ ID NO: 95871 - DNA, 19 bp, Homo sapiens
  siRNA target sequence for PCCA (NM_000282.1,876-894).
ggaagcaccaagcattttt

SEQ ID NO: 95872 - DNA, 19 bp, Homo sapiens
  siRNA target sequence for PCCA (NM_000282.1,938-956).
ctcttgccagagcagtaaa

SEQ ID NO: 95873 - DNA, 19 bp, Homo sapiens
  siRNA target sequence for PCCA (NM_000282.1,988-1006).
gtggactctaagaagaatt

SEQ ID NO: 95874 - DNA, 19 bp, Homo sapiens
  siRNA target sequence for PCCA (NM_000282.1,1048-1066).
cctgtcacagaatgcatta

SEQ ID NO: 95875 - DNA, 19 bp, Homo sapiens
  siRNA target sequence for PCCA (NM_000282.1,1075-1093).
gacctagtccaggaaatga

SEQ ID NO: 95876 - DNA, 19 bp, Homo sapiens
  siRNA target sequence for PCCA (NM_000282.1,1121-1139).
ggcacaaacaagctgatat

SEQ ID NO: 95877 - DNA, 19 bp, Homo sapiens
  siRNA target sequence for PCCA (NM_000282.1,1146-1164).
caacggctgggcagttgaa

SEQ ID NO: 95878 - DNA, 19 bp, Homo sapiens
  siRNA target sequence for PCCA (NM_000282.1,1185-1203).
cccctacaagtcttttggt

SEQ ID NO: 95879 - DNA, 19 bp, Homo sapiens
  siRNA target sequence for PCCA (NM_000282.1,1186-1204).
ccctacaagtcttttggtt

SEQ ID NO: 95880 - DNA, 19 bp, Homo sapiens
  siRNA target sequence for PCCA (NM_000282.1,1230-1248).
gtaccaagaaccgttacat

SEQ ID NO: 95881 - DNA, 19 bp, Homo sapiens
  siRNA target sequence for PCCA (NM_000282.1,1283-1301).
caggaagtgatattagcat

SEQ ID NO: 95882 - DNA, 19 bp, Homo sapiens
  siRNA target sequence for PCCA (NM_000282.1,1332-1350).
cacatatggctctgataga

SEQ ID NO: 95883 - DNA, 19 bp, Homo sapiens
  siRNA target sequence for PCCA (NM_000282.1,1373-1391).
cagatgcactggataacta

SEQ ID NO: 95884 - DNA, 19 bp, Homo sapiens
  siRNA target sequence for PCCA (NM_000282.1,1378-1396).
gcactggataactatgtta

SEQ ID NO: 95885 - DNA, 19 bp, Homo sapiens
  siRNA target sequence for PCCA (NM_000282.1,1379-1397).
cactggataactatgttat

SEQ ID NO: 95886 - DNA, 19 bp, Homo sapiens
  siRNA target sequence for PCCA (NM_000282.1,1383-1401).
ggataactatgttattcga

SEQ ID NO: 95887 - DNA, 19 bp, Homo sapiens
  siRNA target sequence for PCCA (NM_000282.1,1399-1417).
cgaggtgttacacataata

SEQ ID NO: 95888 - DNA, 19 bp, Homo sapiens
  siRNA target sequence for PCCA (NM_000282.1,1400-1418).
gaggtgttacacataatat

SEQ ID NO: 95889 - DNA, 19 bp, Homo sapiens
  siRNA target sequence for PCCA (NM_000282.1,1409-1427).
cacataatattgcattact

SEQ ID NO: 95890 - DNA, 19 bp, Homo sapiens
  siRNA target sequence for PCCA (NM_000282.1,1426-1444).
cttcgagaggtgataatca

SEQ ID NO: 95891 - DNA, 19 bp, Homo sapiens
  siRNA target sequence for PCCA (NM_000282.1,1443-1461).
caactcacgctttgtaaaa

SEQ ID NO: 95892 - DNA, 19 bp, Homo sapiens
  siRNA target sequence for PCCA (NM_000282.1,1446-1464).
ctcacgctttgtaaaagga

SEQ ID NO: 95893 - DNA, 19 bp, Homo sapiens
  siRNA target sequence for PCCA (NM_000282.1,1462-1480).
ggagacatcagcactaaat

SEQ ID NO: 95894 - DNA, 19 bp, Homo sapiens
  siRNA target sequence for PCCA (NM_000282.1,1463-1481).
gagacatcagcactaaatt

SEQ ID NO: 95895 - DNA, 19 bp, Homo sapiens
  siRNA target sequence for PCCA (NM_000282.1,1543-1561).
cagttattggcaatagcat

SEQ ID NO: 95896 - DNA, 19 bp, Homo sapiens
  siRNA target sequence for PCCA (NM_000282.1,1553-1571).
caatagcatcatcattgtt

SEQ ID NO: 95897 - DNA, 19 bp, Homo sapiens
  siRNA target sequence for PCCA (NM_000282.1,1582-1600).
cagttaagagcacaacatt

SEQ ID NO: 95898 - DNA, 19 bp, Homo sapiens
  siRNA target sequence for PCCA (NM_000282.1,1647-1665).
ctgggagctctcagtaaaa

SEQ ID NO: 95899 - DNA, 19 bp, Homo sapiens
  siRNA target sequence for PCCA (NM_000282.1,1649-1667).
gggagctctcagtaaaatt

SEQ ID NO: 95900 - DNA, 19 bp, Homo sapiens
  siRNA target sequence for PCCA (NM_000282.1,1653-1671).
gctctcagtaaaattgcat

SEQ ID NO: 95901 - DNA, 19 bp, Homo sapiens
  siRNA target sequence for PCCA (NM_000282.1,1686-1704).
cgtagtagcatcaaacaat

SEQ ID NO: 95902 - DNA, 19 bp, Homo sapiens
  siRNA target sequence for PCCA (NM_000282.1,1726-1744).
gttgatgggtcgaaactaa

SEQ ID NO: 95903 - DNA, 19 bp, Homo sapiens
  siRNA target sequence for PCCA (NM_000282.1,1765-1783).
ctggcttcgcccttattgt

SEQ ID NO: 95904 - DNA, 19 bp, Homo sapiens
  siRNA target sequence for PCCA (NM_000282.1,1767-1785).
ggcttcgcccttattgtct

SEQ ID NO: 95905 - DNA, 19 bp, Homo sapiens
  siRNA target sequence for PCCA (NM_000282.1,1809-1827).
gactgtccagtgtctttct

SEQ ID NO: 95906 - DNA, 19 bp, Homo sapiens
  siRNA target sequence for PCCA (NM_000282.1,1870-1888).
gtgtacaaggtgaatatct

SEQ ID NO: 95907 - DNA, 19 bp, Homo sapiens
  siRNA target sequence for PCCA (NM_000282.1,1872-1890).
gtacaaggtgaatatctta

SEQ ID NO: 95908 - DNA, 19 bp, Homo sapiens
  siRNA target sequence for PCCA (NM_000282.1,1892-1910).
ccagacttgccgcagaatt

SEQ ID NO: 95909 - DNA, 19 bp, Homo sapiens
  siRNA target sequence for PCCA (NM_000282.1,1895-1913).
gacttgccgcagaattgaa

SEQ ID NO: 95910 - DNA, 19 bp, Homo sapiens
  siRNA target sequence for PCCA (NM_000282.1,1900-1918).
gccgcagaattgaacaaat

SEQ ID NO: 95911 - DNA, 19 bp, Homo sapiens
  siRNA target sequence for PCCA (NM_000282.1,1901-1919).
ccgcagaattgaacaaatt

SEQ ID NO: 95912 - DNA, 19 bp, Homo sapiens
  siRNA target sequence for PCCA (NM_000282.1,1902-1920).
cgcagaattgaacaaattt

SEQ ID NO: 95913 - DNA, 19 bp, Homo sapiens
  siRNA target sequence for PCOLCE2 (NM_013363.2,275-293).
gagagacctgttttcacat

SEQ ID NO: 95914 - DNA, 19 bp, Homo sapiens
  siRNA target sequence for PCOLCE2 (NM_013363.2,347-365).
ggagtgtaccctccaaata

SEQ ID NO: 95915 - DNA, 19 bp, Homo sapiens
  siRNA target sequence for PCOLCE2 (NM_013363.2,350-368).
gtgtaccctccaaatagca

SEQ ID NO: 95916 - DNA, 19 bp, Homo sapiens
  siRNA target sequence for PCOLCE2 (NM_013363.2,355-373).
ccctccaaatagcaaatgt

SEQ ID NO: 95917 - DNA, 19 bp, Homo sapiens
  siRNA target sequence for PCOLCE2 (NM_013363.2,399-417).
gaaaagtagtcgttctcaa

SEQ ID NO: 95918 - DNA, 19 bp, Homo sapiens
  siRNA target sequence for PCOLCE2 (NM_013363.2,448-466).
cctgtgccgctatgacttt

SEQ ID NO: 95919 - DNA, 19 bp, Homo sapiens
  siRNA target sequence for PCOLCE2 (NM_013363.2,565-583).
ggtgcagatgatttctgat

SEQ ID NO: 95920 - DNA, 19 bp, Homo sapiens
  siRNA target sequence for PCOLCE2 (NM_013363.2,622-640).
cgctgctgaaccaaacgaa

SEQ ID NO: 95921 - DNA, 19 bp, Homo sapiens
  siRNA target sequence for PCOLCE2 (NM_013363.2,637-655).
cgaaagaggggatcagtat

SEQ ID NO: 95922 - DNA, 19 bp, Homo sapiens
  siRNA target sequence for PCOLCE2 (NM_013363.2,675-693).
gaccttccggctcttttaa

SEQ ID NO: 95923 - DNA, 19 bp, Homo sapiens
  siRNA target sequence for PCOLCE2 (NM_013363.2,677-695).
ccttccggctcttttaaaa

SEQ ID NO: 95924 - DNA, 19 bp, Homo sapiens
  siRNA target sequence for PCOLCE2 (NM_013363.2,748-766).
cattgtagccccaaagaat

SEQ ID NO: 95925 - DNA, 19 bp, Homo sapiens
  siRNA target sequence for PCOLCE2 (NM_013363.2,756-774).
ccccaaagaatcagcttat

SEQ ID NO: 95926 - DNA, 19 bp, Homo sapiens
  siRNA target sequence for PCOLCE2 (NM_013363.2,757-775).
cccaaagaatcagcttata

SEQ ID NO: 95927 - DNA, 19 bp, Homo sapiens
  siRNA target sequence for PCOLCE2 (NM_013363.2,769-787).
gcttatagaattaaagttt

SEQ ID NO: 95928 - DNA, 19 bp, Homo sapiens
  siRNA target sequence for PCOLCE2 (NM_013363.2,800-818).
gtggagcgagataactact

SEQ ID NO: 95929 - DNA, 19 bp, Homo sapiens
  siRNA target sequence for PCOLCE2 (NM_013363.2,859-877).
caacgatgctagaagaatt

SEQ ID NO: 95930 - DNA, 19 bp, Homo sapiens
  siRNA target sequence for PCOLCE2 (NM_013363.2,975-993).
ggtttattggtcactacat

SEQ ID NO: 95931 - DNA, 19 bp, Homo sapiens
  siRNA target sequence for PCOLCE2 (NM_013363.2,976-994).
gtttattggtcactacata

SEQ ID NO: 95932 - DNA, 19 bp, Homo sapiens
  siRNA target sequence for PCOLCE2 (NM_013363.2,1049-1067).
cctgtaaccacgggtttaa

SEQ ID NO: 95933 - DNA, 19 bp, Homo sapiens
  siRNA target sequence for PCOLCE2 (NM_013363.2,1050-1068).
ctgtaaccacgggtttaaa

SEQ ID NO: 95934 - DNA, 19 bp, Homo sapiens
  siRNA target sequence for PCOLCE2 (NM_013363.2,1076-1094).
gtggccttgtgtcaacaaa

SEQ ID NO: 95935 - DNA, 19 bp, Homo sapiens
  siRNA target sequence for PCOLCE2 (NM_013363.2,1110-1128).
ggactctggagggcaatta

SEQ ID NO: 95936 - DNA, 19 bp, Homo sapiens
  siRNA target sequence for PCOLCE2 (NM_013363.2,1111-1129).
gactctggagggcaattat

SEQ ID NO: 95937 - DNA, 19 bp, Homo sapiens
  siRNA target sequence for PCOLCE2 (NM_013363.2,1115-1133).
ctggagggcaattattgtt

SEQ ID NO: 95938 - DNA, 19 bp, Homo sapiens
  siRNA target sequence for PCOLCE2 (NM_013363.2,1118-1136).
gagggcaattattgttcaa

SEQ ID NO: 95939 - DNA, 19 bp, Homo sapiens
  siRNA target sequence for PCOLCE2 (NM_013363.2,1131-1149).
gttcaagtgactttgtatt

SEQ ID NO: 95940 - DNA, 19 bp, Homo sapiens
  siRNA target sequence for PCOLCE2 (NM_013363.2,1196-1214).
gccacagtctcgatcatca

SEQ ID NO: 95941 - DNA, 19 bp, Homo sapiens
  siRNA target sequence for PCOLCE2 (NM_013363.2,1304-1322).
ctcagaagaggtctaaatt

SEQ ID NO: 95942 - DNA, 19 bp, Homo sapiens
  siRNA target sequence for PCOLCE2 (NM_013363.2,1349-1367).
gatgggcgaggcaaaatca

SEQ ID NO: 95943 - DNA, 19 bp, Homo sapiens
  siRNA target sequence for PCOLCE2 (NM_013363.2,1412-1430).
ctcctggatgccttaaaaa

SEQ ID NO: 95944 - DNA, 19 bp, Homo sapiens
  siRNA target sequence for PCTK1 (NM_006201.2,706-724).
catcccccacgcaagatct

SEQ ID NO: 95945 - DNA, 19 bp, Homo sapiens
  siRNA target sequence for PCTK1 (NM_006201.2,738-756).
caacaagcgcctatcacta

SEQ ID NO: 95946 - DNA, 19 bp, Homo sapiens
  siRNA target sequence for PCTK1 (NM_006201.2,845-863).
gtcgtgtcagcctatctga

SEQ ID NO: 95947 - DNA, 19 bp, Homo sapiens
  siRNA target sequence for PCTK1 (NM_006201.2,876-894).
gaaactggagacctacatt

SEQ ID NO: 95948 - DNA, 19 bp, Homo sapiens
  siRNA target sequence for PCTK1 (NM_006201.2,1065-1083).
cgttacgctacatgacatt

SEQ ID NO: 95949 - DNA, 19 bp, Homo sapiens
  siRNA target sequence for PCTK1 (NM_006201.2,1070-1088).
cgctacatgacattatcca

SEQ ID NO: 95950 - DNA, 19 bp, Homo sapiens
  siRNA target sequence for PCTK1 (NM_006201.2,1331-1349).
caatcccaacaaagacata

SEQ ID NO: 95951 - DNA, 19 bp, Homo sapiens
  siRNA target sequence for PCTK1 (NM_006201.2,1501-1519).
gaacagctacacttcatct

SEQ ID NO: 95952 - DNA, 19 bp, Homo sapiens
  siRNA target sequence for PCTK1 (NM_006201.2,1606-1624).
cgagccgaggcccttttga

SEQ ID NO: 95953 - DNA, 19 bp, Homo sapiens
  siRNA target sequence for PCTK1 (NM_006201.2,1626-1644).
ccacgcaccccgacttgat

SEQ ID NO: 95954 - DNA, 19 bp, Homo sapiens
  siRNA target sequence for PCTK1 (NM_006201.2,1627-1645).
cacgcaccccgacttgata

SEQ ID NO: 95955 - DNA, 19 bp, Homo sapiens
  siRNA target sequence for PCTK1 (NM_006201.2,1667-1685).
ccaagctgttgcagtttga

SEQ ID NO: 95956 - DNA, 19 bp, Homo sapiens
  siRNA target sequence for PCTK1 (NM_006201.2,1745-1763).
gggagcggatccacaaact

SEQ ID NO: 95957 - DNA, 19 bp, Homo sapiens
  siRNA target sequence for PCTK1 (NM_006201.2,1746-1764).
ggagcggatccacaaactt

SEQ ID NO: 95958 - DNA, 19 bp, Homo sapiens
  siRNA target sequence for PCTK1 (NM_006201.2,1765-1783).
cctgacactacttccatat

SEQ ID NO: 95959 - DNA, 19 bp, Homo sapiens
  siRNA target sequence for PCTK1 (NM_006201.2,1775-1793).
cttccatatttgcactaaa

SEQ ID NO: 95960 - DNA, 19 bp, Homo sapiens
  siRNA target sequence for PCTK1 (NM_006201.2,1778-1796).
ccatatttgcactaaagga

SEQ ID NO: 95961 - DNA, 19 bp, Homo sapiens
  siRNA target sequence for PCTK2 (NM_002595.2,525-543).
ccgaggaagtcagactatt

SEQ ID NO: 95962 - DNA, 19 bp, Homo sapiens
  siRNA target sequence for PCTK2 (NM_002595.2,527-545).
gaggaagtcagactattga

SEQ ID NO: 95963 - DNA, 19 bp, Homo sapiens
  siRNA target sequence for PCTK2 (NM_002595.2,530-548).
gaagtcagactattgatga

SEQ ID NO: 95964 - DNA, 19 bp, Homo sapiens
  siRNA target sequence for PCTK2 (NM_002595.2,535-553).
cagactattgatgaatcat

SEQ ID NO: 95965 - DNA, 19 bp, Homo sapiens
  siRNA target sequence for PCTK2 (NM_002595.2,555-573).
gtctgaattggctgaacaa

SEQ ID NO: 95966 - DNA, 19 bp, Homo sapiens
  siRNA target sequence for PCTK2 (NM_002595.2,601-619).
gataatgagcctattgtga

SEQ ID NO: 95967 - DNA, 19 bp, Homo sapiens
  siRNA target sequence for PCTK2 (NM_002595.2,632-650).
ctccaacgtctcacagtat

SEQ ID NO: 95968 - DNA, 19 bp, Homo sapiens
  siRNA target sequence for PCTK2 (NM_002595.2,700-718).
cggagaccacacagtgtta

SEQ ID NO: 95969 - DNA, 19 bp, Homo sapiens
  siRNA target sequence for PCTK2 (NM_002595.2,702-720).
gagaccacacagtgttatt

SEQ ID NO: 95970 - DNA, 19 bp, Homo sapiens
  siRNA target sequence for PCTK2 (NM_002595.2,745-763).
gcaatgcccagaaatggaa

SEQ ID NO: 95971 - DNA, 19 bp, Homo sapiens
  siRNA target sequence for PCTK2 (NM_002595.2,761-779).
gaagcagattagatattgt

SEQ ID NO: 95972 - DNA, 19 bp, Homo sapiens
  siRNA target sequence for PCTK2 (NM_002595.2,764-782).
gcagattagatattgttca

SEQ ID NO: 95973 - DNA, 19 bp, Homo sapiens
  siRNA target sequence for PCTK2 (NM_002595.2,767-785).
gattagatattgttcatga

SEQ ID NO: 95974 - DNA, 19 bp, Homo sapiens
  siRNA target sequence for PCTK2 (NM_002595.2,869-887).
gtctcagaaatcgtataca

SEQ ID NO: 95975 - DNA, 19 bp, Homo sapiens
  siRNA target sequence for PCTK2 (NM_002595.2,871-889).
ctcagaaatcgtatacata

SEQ ID NO: 95976 - DNA, 19 bp, Homo sapiens
  siRNA target sequence for PCTK2 (NM_002595.2,893-911).
ggatctcaatggaggattt

SEQ ID NO: 95977 - DNA, 19 bp, Homo sapiens
  siRNA target sequence for PCTK2 (NM_002595.2,894-912).
gatctcaatggaggattta

SEQ ID NO: 95978 - DNA, 19 bp, Homo sapiens
  siRNA target sequence for PCTK2 (NM_002595.2,899-917).
caatggaggatttaaataa

SEQ ID NO: 95979 - DNA, 19 bp, Homo sapiens
  siRNA target sequence for PCTK2 (NM_002595.2,952-970).
gatggatatcttgaaaagt

SEQ ID NO: 95980 - DNA, 19 bp, Homo sapiens
  siRNA target sequence for PCTK2 (NM_002595.2,1014-1032).
gtctcgtagagcttcctta

SEQ ID NO: 95981 - DNA, 19 bp, Homo sapiens
  siRNA target sequence for PCTK2 (NM_002595.2,1019-1037).
gtagagcttccttatcaga

SEQ ID NO: 95982 - DNA, 19 bp, Homo sapiens
  siRNA target sequence for PCTK2 (NM_002595.2,1084-1102).
ggagagggtacatatgcaa

SEQ ID NO: 95983 - DNA, 19 bp, Homo sapiens
  siRNA target sequence for PCTK2 (NM_002595.2,1132-1150).
gagaatttggtggcattaa

SEQ ID NO: 95984 - DNA, 19 bp, Homo sapiens
  siRNA target sequence for PCTK2 (NM_002595.2,1184-1202).
cctgcacagctataagaga

SEQ ID NO: 95985 - DNA, 19 bp, Homo sapiens
  siRNA target sequence for PCTK2 (NM_002595.2,1188-1206).
cacagctataagagaagtt

SEQ ID NO: 95986 - DNA, 19 bp, Homo sapiens
  siRNA target sequence for PCTK2 (NM_002595.2,1258-1276).
gttcacacagataaatcct

SEQ ID NO: 95987 - DNA, 19 bp, Homo sapiens
  siRNA target sequence for PCTK2 (NM_002595.2,1278-1296).
gactttggtgtttgagtat

SEQ ID NO: 95988 - DNA, 19 bp, Homo sapiens
  siRNA target sequence for PCTK2 (NM_002595.2,1287-1305).
gtttgagtatctggataaa

SEQ ID NO: 95989 - DNA, 19 bp, Homo sapiens
  siRNA target sequence for PCTK2 (NM_002595.2,1346-1364).
gtatgcacaacgtaaagct

SEQ ID NO: 95990 - DNA, 19 bp, Homo sapiens
  siRNA target sequence for PCTK2 (NM_002595.2,1381-1399).
ctacgtggtttggcatatt

SEQ ID NO: 95991 - DNA, 19 bp, Homo sapiens
  siRNA target sequence for PCTK2 (NM_002595.2,1393-1411).
gcatattgccatagaagaa

SEQ ID NO: 95992 - DNA, 19 bp, Homo sapiens
  siRNA target sequence for PCTK2 (NM_002595.2,1520-1538).
cctactcaaatgaagttgt

SEQ ID NO: 95993 - DNA, 19 bp, Homo sapiens
  siRNA target sequence for PCTK2 (NM_002595.2,1607-1625).
ggggtgttggttgcatttt

SEQ ID NO: 95994 - DNA, 19 bp, Homo sapiens
  siRNA target sequence for PCTK2 (NM_002595.2,1664-1682).
caaccgtggaagatgaact

SEQ ID NO: 95995 - DNA, 19 bp, Homo sapiens
  siRNA target sequence for PCTK2 (NM_002595.2,1675-1693).
gatgaactgcacttaattt

SEQ ID NO: 95996 - DNA, 19 bp, Homo sapiens
  siRNA target sequence for PCTK2 (NM_002595.2,1801-1819).
cacgcacccaggttagact

SEQ ID NO: 95997 - DNA, 19 bp, Homo sapiens
  siRNA target sequence for PCTK2 (NM_002595.2,1811-1829).
ggttagactctgaaggaat

SEQ ID NO: 95998 - DNA, 19 bp, Homo sapiens
  siRNA target sequence for PCTK2 (NM_002595.2,1812-1830).
gttagactctgaaggaatt

SEQ ID NO: 95999 - DNA, 19 bp, Homo sapiens
  siRNA target sequence for PCTK2 (NM_002595.2,1816-1834).
gactctgaaggaattgagt

SEQ ID NO: 96000 - DNA, 19 bp, Homo sapiens
  siRNA target sequence for PCTK2 (NM_002595.2,1820-1838).
ctgaaggaattgagttgat

SEQ ID NO: 96001 - DNA, 19 bp, Homo sapiens
  siRNA target sequence for PCTK2 (NM_002595.2,1822-1840).
gaaggaattgagttgataa

SEQ ID NO: 96002 - DNA, 19 bp, Homo sapiens
  siRNA target sequence for PCTK2 (NM_002595.2,1833-1851).
gttgataacaaaatttctt

SEQ ID NO: 96003 - DNA, 19 bp, Homo sapiens
  siRNA target sequence for PCTK2 (NM_002595.2,1986-2004).
ggacccgggttttcgaaat

SEQ ID NO: 96004 - DNA, 19 bp, Homo sapiens
  siRNA target sequence for PCTK2 (NM_002595.2,1987-2005).
gacccgggttttcgaaatt

SEQ ID NO: 96005 - DNA, 19 bp, Homo sapiens
  siRNA target sequence for PCTK2 (NM_002595.2,1993-2011).
ggttttcgaaattcttctt

SEQ ID NO: 96006 - DNA, 19 bp, Homo sapiens
  siRNA target sequence for PCTK3 (NM_002596.1,355-373).
ccgcactgagaccattgaa

SEQ ID NO: 96007 - DNA, 19 bp, Homo sapiens
  siRNA target sequence for PCTK3 (NM_002596.1,386-404).
gaattcacggagcaattca

SEQ ID NO: 96008 - DNA, 19 bp, Homo sapiens
  siRNA target sequence for PCTK3 (NM_002596.1,1019-1037).
cacaacgtcaagattttca

SEQ ID NO: 96009 - DNA, 19 bp, Homo sapiens
  siRNA target sequence for PCTK3 (NM_002596.1,1252-1270).
gtactccacccccattgat

SEQ ID NO: 96010 - DNA, 19 bp, Homo sapiens
  siRNA target sequence for PCTK3 (NM_002596.1,1593-1611).
gtgtgcaccagcttgaaga

SEQ ID NO: 96011 - DNA, 19 bp, Homo sapiens
  siRNA target sequence for PCTK3 (NM_002596.1,1610-1628).
gacactgcctccatcttct

SEQ ID NO: 96012 - DNA, 19 bp, Homo sapiens
  siRNA target sequence for PDGFRA (NM_006206.2,477-495).
cctctatccttccaaatga

SEQ ID NO: 96013 - DNA, 19 bp, Homo sapiens
  siRNA target sequence for PDGFRA (NM_006206.2,478-496).
ctctatccttccaaatgaa

SEQ ID NO: 96014 - DNA, 19 bp, Homo sapiens
  siRNA target sequence for PDGFRA (NM_006206.2,735-753).
gcaggcacatttacatcta

SEQ ID NO: 96015 - DNA, 19 bp, Homo sapiens
  siRNA target sequence for PDGFRA (NM_006206.2,785-803).
ctaggaatgacggattatt

SEQ ID NO: 96016 - DNA, 19 bp, Homo sapiens
  siRNA target sequence for PDGFRA (NM_006206.2,789-807).
gaatgacggattatttagt

SEQ ID NO: 96017 - DNA, 19 bp, Homo sapiens
  siRNA target sequence for PDGFRA (NM_006206.2,858-876).
ccgagactcctgtaacctt

SEQ ID NO: 96018 - DNA, 19 bp, Homo sapiens
  siRNA target sequence for PDGFRA (NM_006206.2,859-877).
cgagactcctgtaacctta

SEQ ID NO: 96019 - DNA, 19 bp, Homo sapiens
  siRNA target sequence for PDGFRA (NM_006206.2,1052-1070).
gctcttaaaaccgtgtata

SEQ ID NO: 96020 - DNA, 19 bp, Homo sapiens
  siRNA target sequence for PDGFRA (NM_006206.2,1055-1073).
cttaaaaccgtgtataagt

SEQ ID NO: 96021 - DNA, 19 bp, Homo sapiens
  siRNA target sequence for PDGFRA (NM_006206.2,1090-1108).
ggtcacctgtgctgttttt

SEQ ID NO: 96022 - DNA, 19 bp, Homo sapiens
  siRNA target sequence for PDGFRA (NM_006206.2,1227-1245).
ccgaggccacggtgaaaga

SEQ ID NO: 96023 - DNA, 19 bp, Homo sapiens
  siRNA target sequence for PDGFRA (NM_006206.2,1317-1335).
ctgtccatgagaaaggttt

SEQ ID NO: 96024 - DNA, 19 bp, Homo sapiens
  siRNA target sequence for PDGFRA (NM_006206.2,1379-1397).
ctgcatgaagtcaaacatt

SEQ ID NO: 96025 - DNA, 19 bp, Homo sapiens
  siRNA target sequence for PDGFRA (NM_006206.2,1534-1552).
gctgatccgtgctaaggaa

SEQ ID NO: 96026 - DNA, 19 bp, Homo sapiens
  siRNA target sequence for PDGFRA (NM_006206.2,1558-1576).
cagtggccattatactatt

SEQ ID NO: 96027 - DNA, 19 bp, Homo sapiens
  siRNA target sequence for PDGFRA (NM_006206.2,1560-1578).
gtggccattatactattgt

SEQ ID NO: 96028 - DNA, 19 bp, Homo sapiens
  siRNA target sequence for PDGFRA (NM_006206.2,1605-1623).
gctatacttttgaactgtt

SEQ ID NO: 96029 - DNA, 19 bp, Homo sapiens
  siRNA target sequence for PDGFRA (NM_006206.2,1713-1731).
cgccgcttcctgatattga

SEQ ID NO: 96030 - DNA, 19 bp, Homo sapiens
  siRNA target sequence for PDGFRA (NM_006206.2,1715-1733).
ccgcttcctgatattgagt

SEQ ID NO: 96031 - DNA, 19 bp, Homo sapiens
  siRNA target sequence for PDGFRA (NM_006206.2,1891-1909).
gcgatgcctggctaagaat

SEQ ID NO: 96032 - DNA, 19 bp, Homo sapiens
  siRNA target sequence for PDGFRA (NM_006206.2,2030-2048).
gttgtcatttggaaacaga

SEQ ID NO: 96033 - DNA, 19 bp, Homo sapiens
  siRNA target sequence for PDGFRA (NM_006206.2,2045-2063).
cagaaaccgaggtatgaaa

SEQ ID NO: 96034 - DNA, 19 bp, Homo sapiens
  siRNA target sequence for PDGFRA (NM_006206.2,2047-2065).
gaaaccgaggtatgaaatt

SEQ ID NO: 96035 - DNA, 19 bp, Homo sapiens
  siRNA target sequence for PDGFRA (NM_006206.2,2066-2084).
cgctggagggtcattgaat

SEQ ID NO: 96036 - DNA, 19 bp, Homo sapiens
  siRNA target sequence for PDGFRA (NM_006206.2,2132-2150).
ctgccttatgactcaagat

SEQ ID NO: 96037 - DNA, 19 bp, Homo sapiens
  siRNA target sequence for PDGFRA (NM_006206.2,2244-2262).
ggtcccaacctgtcatgaa

SEQ ID NO: 96038 - DNA, 19 bp, Homo sapiens
  siRNA target sequence for PDGFRA (NM_006206.2,2245-2263).
gtcccaacctgtcatgaaa

SEQ ID NO: 96039 - DNA, 19 bp, Homo sapiens
  siRNA target sequence for PDGFRA (NM_006206.2,2290-2308).
ggccagatccagtgaaaaa

SEQ ID NO: 96040 - DNA, 19 bp, Homo sapiens
  siRNA target sequence for PDGFRA (NM_006206.2,2350-2368).
gccacatttgaacattgta

SEQ ID NO: 96041 - DNA, 19 bp, Homo sapiens
  siRNA target sequence for PDGFRA (NM_006206.2,2541-2559).
gcacacggagctatgttat

SEQ ID NO: 96042 - DNA, 19 bp, Homo sapiens
  siRNA target sequence for PDGFRA (NM_006206.2,2542-2560).
cacacggagctatgttatt

SEQ ID NO: 96043 - DNA, 19 bp, Homo sapiens
  siRNA target sequence for PDGFRA (NM_006206.2,2544-2562).
cacggagctatgttatttt

SEQ ID NO: 96044 - DNA, 19 bp, Homo sapiens
  siRNA target sequence for PDGFRA (NM_006206.2,2546-2564).
cggagctatgttattttat

SEQ ID NO: 96045 - DNA, 19 bp, Homo sapiens
  siRNA target sequence for PDGFRA (NM_006206.2,2596-2614).
gaagcaggctgatactaca

SEQ ID NO: 96046 - DNA, 19 bp, Homo sapiens
  siRNA target sequence for PDGFRA (NM_006206.2,2602-2620).
ggctgatactacacagtat

SEQ ID NO: 96047 - DNA, 19 bp, Homo sapiens
  siRNA target sequence for PDGFRA (NM_006206.2,2684-2702).
cgtccagcctcatataaga

SEQ ID NO: 96048 - DNA, 19 bp, Homo sapiens
  siRNA target sequence for PDGFRA (NM_006206.2,2685-2703).
gtccagcctcatataagaa

SEQ ID NO: 96049 - DNA, 19 bp, Homo sapiens
  siRNA target sequence for PDGFRA (NM_006206.2,2737-2755).
cctttcagatgataactca

SEQ ID NO: 96050 - DNA, 19 bp, Homo sapiens
  siRNA target sequence for PDGFRA (NM_006206.2,2759-2777).
ggccttactttattggatt

SEQ ID NO: 96051 - DNA, 19 bp, Homo sapiens
  siRNA target sequence for PDGFRA (NM_006206.2,2760-2778).
gccttactttattggattt

SEQ ID NO: 96052 - DNA, 19 bp, Homo sapiens
  siRNA target sequence for PDGFRA (NM_006206.2,2801-2819).
gcccgaggaatggagtttt

SEQ ID NO: 96053 - DNA, 19 bp, Homo sapiens
  siRNA target sequence for PDGFRA (NM_006206.2,2802-2820).
cccgaggaatggagttttt

SEQ ID NO: 96054 - DNA, 19 bp, Homo sapiens
  siRNA target sequence for PDGFRA (NM_006206.2,2927-2945).
catgattcgaactatgtgt

SEQ ID NO: 96055 - DNA, 19 bp, Homo sapiens
  siRNA target sequence for PDGFRA (NM_006206.2,3086-3104).
ggcatgatggtggattcta

SEQ ID NO: 96056 - DNA, 19 bp, Homo sapiens
  siRNA target sequence for PDGFRA (NM_006206.2,3088-3106).
catgatggtggattctact

SEQ ID NO: 96057 - DNA, 19 bp, Homo sapiens
  siRNA target sequence for PDGFRA (NM_006206.2,3162-3180).
gtgaagtctacgagatcat

SEQ ID NO: 96058 - DNA, 19 bp, Homo sapiens
  siRNA target sequence for PDGFRA (NM_006206.2,3334-3352).
gcgtgtggactcagacaat

SEQ ID NO: 96059 - DNA, 19 bp, Homo sapiens
  siRNA target sequence for PDGFRB (NM_002609.2,410-428).
gctgtctctcctgttactt

SEQ ID NO: 96060 - DNA, 19 bp, Homo sapiens
  siRNA target sequence for PDGFRB (NM_002609.2,477-495).
gagcttgtcctcaatgtct

SEQ ID NO: 96061 - DNA, 19 bp, Homo sapiens
  siRNA target sequence for PDGFRB (NM_002609.2,631-649).
ggctagacacgggagaata

SEQ ID NO: 96062 - DNA, 19 bp, Homo sapiens
  siRNA target sequence for PDGFRB (NM_002609.2,633-651).
ctagacacgggagaatact

SEQ ID NO: 96063 - DNA, 19 bp, Homo sapiens
  siRNA target sequence for PDGFRB (NM_002609.2,693-711).
cggaaacggctctacatct

SEQ ID NO: 96064 - DNA, 19 bp, Homo sapiens
  siRNA target sequence for PDGFRB (NM_002609.2,694-712).
ggaaacggctctacatctt

SEQ ID NO: 96065 - DNA, 19 bp, Homo sapiens
  siRNA target sequence for PDGFRB (NM_002609.2,695-713).
gaaacggctctacatcttt

SEQ ID NO: 96066 - DNA, 19 bp, Homo sapiens
  siRNA target sequence for PDGFRB (NM_002609.2,731-749).
gggcttcctccctaatgat

SEQ ID NO: 96067 - DNA, 19 bp, Homo sapiens
  siRNA target sequence for PDGFRB (NM_002609.2,747-765).
gatgccgaggaactattca

SEQ ID NO: 96068 - DNA, 19 bp, Homo sapiens
  siRNA target sequence for PDGFRB (NM_002609.2,750-768).
gccgaggaactattcatct

SEQ ID NO: 96069 - DNA, 19 bp, Homo sapiens
  siRNA target sequence for PDGFRB (NM_002609.2,752-770).
cgaggaactattcatcttt

SEQ ID NO: 96070 - DNA, 19 bp, Homo sapiens
  siRNA target sequence for PDGFRB (NM_002609.2,764-782).
catctttctcacggaaata

SEQ ID NO: 96071 - DNA, 19 bp, Homo sapiens
  siRNA target sequence for PDGFRB (NM_002609.2,767-785).
ctttctcacggaaataact

SEQ ID NO: 96072 - DNA, 19 bp, Homo sapiens
  siRNA target sequence for PDGFRB (NM_002609.2,794-812).
cattccatgccgagtaaca

SEQ ID NO: 96073 - DNA, 19 bp, Homo sapiens
  siRNA target sequence for PDGFRB (NM_002609.2,830-848).
gacactgcacgagaagaaa

SEQ ID NO: 96074 - DNA, 19 bp, Homo sapiens
  siRNA target sequence for PDGFRB (NM_002609.2,1051-1069).
ccctcatgtgcattgtgat

SEQ ID NO: 96075 - DNA, 19 bp, Homo sapiens
  siRNA target sequence for PDGFRB (NM_002609.2,1190-1208).
ccccagtgccgagttagaa

SEQ ID NO: 96076 - DNA, 19 bp, Homo sapiens
  siRNA target sequence for PDGFRB (NM_002609.2,1192-1210).
ccagtgccgagttagaaga

SEQ ID NO: 96077 - DNA, 19 bp, Homo sapiens
  siRNA target sequence for PDGFRB (NM_002609.2,1357-1375).
ggacactgcaggtagtgtt

SEQ ID NO: 96078 - DNA, 19 bp, Homo sapiens
  siRNA target sequence for PDGFRB (NM_002609.2,1930-1948).
cacactccttgccctttaa

SEQ ID NO: 96079 - DNA, 19 bp, Homo sapiens
  siRNA target sequence for PDGFRB (NM_002609.2,2074-2092).
gctctgacggccatgagta

SEQ ID NO: 96080 - DNA, 19 bp, Homo sapiens
  siRNA target sequence for PDGFRB (NM_002609.2,2077-2095).
ctgacggccatgagtacat

SEQ ID NO: 96081 - DNA, 19 bp, Homo sapiens
  siRNA target sequence for PDGFRB (NM_002609.2,2253-2271).
gtcaagatgcttaaatcca

SEQ ID NO: 96082 - DNA, 19 bp, Homo sapiens
  siRNA target sequence for PDGFRB (NM_002609.2,2286-2304).
gagaagcaagcccttatgt

SEQ ID NO: 96083 - DNA, 19 bp, Homo sapiens
  siRNA target sequence for PDGFRB (NM_002609.2,2376-2394).
ggaggacccatctatatca

SEQ ID NO: 96084 - DNA, 19 bp, Homo sapiens
  siRNA target sequence for PDGFRB (NM_002609.2,2377-2395).
gaggacccatctatatcat

SEQ ID NO: 96085 - DNA, 19 bp, Homo sapiens
  siRNA target sequence for PDGFRB (NM_002609.2,2433-2451).
ctgcaccgcaacaaacaca

SEQ ID NO: 96086 - DNA, 19 bp, Homo sapiens
  siRNA target sequence for PDGFRB (NM_002609.2,2627-2645).
gaaaggagacgtcaaatat

SEQ ID NO: 96087 - DNA, 19 bp, Homo sapiens
  siRNA target sequence for PDGFRB (NM_002609.2,2666-2684).
ctacatggccccttacgat

SEQ ID NO: 96088 - DNA, 19 bp, Homo sapiens
  siRNA target sequence for PDGFRB (NM_002609.2,2710-2728).
ggacctgccgagcaacttt

SEQ ID NO: 96089 - DNA, 19 bp, Homo sapiens
  siRNA target sequence for PDGFRB (NM_002609.2,2713-2731).
cctgccgagcaactttgat

SEQ ID NO: 96090 - DNA, 19 bp, Homo sapiens
  siRNA target sequence for PDGFRB (NM_002609.2,2716-2734).
gccgagcaactttgatcaa

SEQ ID NO: 96091 - DNA, 19 bp, Homo sapiens
  siRNA target sequence for PDGFRB (NM_002609.2,2913-2931).
cgggactcgaattacatct

SEQ ID NO: 96092 - DNA, 19 bp, Homo sapiens
  siRNA target sequence for PDGFRB (NM_002609.2,2932-2950).
ccaaaggcagcaccttttt

SEQ ID NO: 96093 - DNA, 19 bp, Homo sapiens
  siRNA target sequence for PDGFRB (NM_002609.2,3079-3097).
ccatgaacgagcagttcta

SEQ ID NO: 96094 - DNA, 19 bp, Homo sapiens
  siRNA target sequence for PDGFRB (NM_002609.2,3142-3160).
cctccgacgagatctatga

SEQ ID NO: 96095 - DNA, 19 bp, Homo sapiens
  siRNA target sequence for PDGFRB (NM_002609.2,3145-3163).
ccgacgagatctatgagat

SEQ ID NO: 96096 - DNA, 19 bp, Homo sapiens
  siRNA target sequence for PDGFRB (NM_002609.2,3235-3253).
gactgttgggcgaaggtta

SEQ ID NO: 96097 - DNA, 19 bp, Homo sapiens
  siRNA target sequence for PDGFRB (NM_002609.2,3244-3262).
gcgaaggttacaaaaagaa

SEQ ID NO: 96098 - DNA, 19 bp, Homo sapiens
  siRNA target sequence for PDGFRB (NM_002609.2,3368-3386).
cagctccgtcctctatact

SEQ ID NO: 96099 - DNA, 19 bp, Homo sapiens
  siRNA target sequence for PDGFRB (NM_002609.2,3402-3420).
gagggtgacaacgactata

SEQ ID NO: 96100 - DNA, 19 bp, Homo sapiens
  siRNA target sequence for PDGFRB (NM_002609.2,3405-3423).
ggtgacaacgactatatca

SEQ ID NO: 96101 - DNA, 19 bp, Homo sapiens
  siRNA target sequence for PDGFRB (NM_002609.2,3406-3424).
gtgacaacgactatatcat

SEQ ID NO: 96102 - DNA, 19 bp, Homo sapiens
  siRNA target sequence for PDGFRB (NM_002609.2,3493-3511).
gctccaccctgaatgaagt

SEQ ID NO: 96103 - DNA, 19 bp, Homo sapiens
  siRNA target sequence for PDK1 (NM_002610.3,289-307).
ggacttcggatcagtgaat

SEQ ID NO: 96104 - DNA, 19 bp, Homo sapiens
  siRNA target sequence for PDK1 (NM_002610.3,312-330).
gtgaaaagacctcatttat

SEQ ID NO: 96105 - DNA, 19 bp, Homo sapiens
  siRNA target sequence for PDK1 (NM_002610.3,353-371).
gtcagactggcaaatataa

SEQ ID NO: 96106 - DNA, 19 bp, Homo sapiens
  siRNA target sequence for PDK1 (NM_002610.3,384-402).
gtctccttccagataatct

SEQ ID NO: 96107 - DNA, 19 bp, Homo sapiens
  siRNA target sequence for PDK1 (NM_002610.3,408-426).
ggacaccatccgttcaatt

SEQ ID NO: 96108 - DNA, 19 bp, Homo sapiens
  siRNA target sequence for PDK1 (NM_002610.3,411-429).
caccatccgttcaattggt

SEQ ID NO: 96109 - DNA, 19 bp, Homo sapiens
  siRNA target sequence for PDK1 (NM_002610.3,485-503).
gctgaggatgctaaagcta

SEQ ID NO: 96110 - DNA, 19 bp, Homo sapiens
  siRNA target sequence for PDK1 (NM_002610.3,486-504).
ctgaggatgctaaagctat

SEQ ID NO: 96111 - DNA, 19 bp, Homo sapiens
  siRNA target sequence for PDK1 (NM_002610.3,488-506).
gaggatgctaaagctattt

SEQ ID NO: 96112 - DNA, 19 bp, Homo sapiens
  siRNA target sequence for PDK1 (NM_002610.3,494-512).
gctaaagctatttatgact

SEQ ID NO: 96113 - DNA, 19 bp, Homo sapiens
  siRNA target sequence for PDK1 (NM_002610.3,495-513).
ctaaagctatttatgactt

SEQ ID NO: 96114 - DNA, 19 bp, Homo sapiens
  siRNA target sequence for PDK1 (NM_002610.3,522-540).
ctgtgatacggatcagaaa

SEQ ID NO: 96115 - DNA, 19 bp, Homo sapiens
  siRNA target sequence for PDK1 (NM_002610.3,532-550).
gatcagaaaccgacacaat

SEQ ID NO: 96116 - DNA, 19 bp, Homo sapiens
  siRNA target sequence for PDK1 (NM_002610.3,541-559).
ccgacacaatgatgtcatt

SEQ ID NO: 96117 - DNA, 19 bp, Homo sapiens
  siRNA target sequence for PDK1 (NM_002610.3,570-588).
cccagggtgtgattgaata

SEQ ID NO: 96118 - DNA, 19 bp, Homo sapiens
  siRNA target sequence for PDK1 (NM_002610.3,621-639).
gccagaatgttcagtactt

SEQ ID NO: 96119 - DNA, 19 bp, Homo sapiens
  siRNA target sequence for PDK1 (NM_002610.3,652-670).
ctacatgagtcgcatttca

SEQ ID NO: 96120 - DNA, 19 bp, Homo sapiens
  siRNA target sequence for PDK1 (NM_002610.3,655-673).
catgagtcgcatttcaatt

SEQ ID NO: 96121 - DNA, 19 bp, Homo sapiens
  siRNA target sequence for PDK1 (NM_002610.3,658-676).
gagtcgcatttcaattaga

SEQ ID NO: 96122 - DNA, 19 bp, Homo sapiens
  siRNA target sequence for PDK1 (NM_002610.3,660-678).
gtcgcatttcaattagaat

SEQ ID NO: 96123 - DNA, 19 bp, Homo sapiens
  siRNA target sequence for PDK1 (NM_002610.3,718-736).
caaaggaagtccatctcat

SEQ ID NO: 96124 - DNA, 19 bp, Homo sapiens
  siRNA target sequence for PDK1 (NM_002610.3,723-741).
gaagtccatctcatcgaaa

SEQ ID NO: 96125 - DNA, 19 bp, Homo sapiens
  siRNA target sequence for PDK1 (NM_002610.3,726-744).
gtccatctcatcgaaaaca

SEQ ID NO: 96126 - DNA, 19 bp, Homo sapiens
  siRNA target sequence for PDK1 (NM_002610.3,762-780).
caaactgcaatgtacttga

SEQ ID NO: 96127 - DNA, 19 bp, Homo sapiens
  siRNA target sequence for PDK1 (NM_002610.3,806-824).
gctaggcgtctgtgtgatt

SEQ ID NO: 96128 - DNA, 19 bp, Homo sapiens
  siRNA target sequence for PDK1 (NM_002610.3,807-825).
ctaggcgtctgtgtgattt

SEQ ID NO: 96129 - DNA, 19 bp, Homo sapiens
  siRNA target sequence for PDK1 (NM_002610.3,838-856).
ctctcccgaactagaactt

SEQ ID NO: 96130 - DNA, 19 bp, Homo sapiens
  siRNA target sequence for PDK1 (NM_002610.3,876-894).
caccaggacagccaataca

SEQ ID NO: 96131 - DNA, 19 bp, Homo sapiens
  siRNA target sequence for PDK1 (NM_002610.3,886-904).
gccaatacaagtggtttat

SEQ ID NO: 96132 - DNA, 19 bp, Homo sapiens
  siRNA target sequence for PDK1 (NM_002610.3,919-937).
ctatcacatggtgtttgaa

SEQ ID NO: 96133 - DNA, 19 bp, Homo sapiens
  siRNA target sequence for PDK1 (NM_002610.3,994-1012).
cccccctattcaagttcat

SEQ ID NO: 96134 - DNA, 19 bp, Homo sapiens
  siRNA target sequence for PDK1 (NM_002610.3,1017-1035).
cgctgggtaatgaggattt

SEQ ID NO: 96135 - DNA, 19 bp, Homo sapiens
  siRNA target sequence for PDK1 (NM_002610.3,1021-1039).
gggtaatgaggatttgact

SEQ ID NO: 96136 - DNA, 19 bp, Homo sapiens
  siRNA target sequence for PDK1 (NM_002610.3,1056-1074).
gaggaggtggcgttccttt

SEQ ID NO: 96137 - DNA, 19 bp, Homo sapiens
  siRNA target sequence for PDK1 (NM_002610.3,1185-1203).
cacgtctttacgcacaata

SEQ ID NO: 96138 - DNA, 19 bp, Homo sapiens
  siRNA target sequence for PDK1 (NM_002610.3,1187-1205).
cgtctttacgcacaatact

SEQ ID NO: 96139 - DNA, 19 bp, Homo sapiens
  siRNA target sequence for PDK1 (NM_002610.3,1188-1206).
gtctttacgcacaatactt

SEQ ID NO: 96140 - DNA, 19 bp, Homo sapiens
  siRNA target sequence for PDK1 (NM_002610.3,1276-1294).
gtcaacagactcaatagaa

SEQ ID NO: 96141 - DNA, 19 bp, Homo sapiens
  siRNA target sequence for PDK1 (NM_002610.3,1292-1310).
gaaagactcccagtgtata

SEQ ID NO: 96142 - DNA, 19 bp, Homo sapiens
  siRNA target sequence for PDK2 (NM_002611.3,165-183).
gagcacttcagcaagttct

SEQ ID NO: 96143 - DNA, 19 bp, Homo sapiens
  siRNA target sequence for PDK2 (NM_002611.3,732-750).
ctcctgtgtgacaagtatt

SEQ ID NO: 96144 - DNA, 19 bp, Homo sapiens
  siRNA target sequence for PDK2 (NM_002611.3,1008-1026).
cgactcttcagctacatgt

SEQ ID NO: 96145 - DNA, 19 bp, Homo sapiens
  siRNA target sequence for PDK2 (NM_002611.3,1104-1122).
cgcctctacgccaagtact

SEQ ID NO: 96146 - DNA, 19 bp, Homo sapiens
  siRNA target sequence for PDK2 (NM_002611.3,1162-1180).
ggaccgatgctgtcatcta

SEQ ID NO: 96147 - DNA, 19 bp, Homo sapiens
  siRNA target sequence for PDK2 (NM_002611.3,1163-1181).
gaccgatgctgtcatctat

SEQ ID NO: 96148 - DNA, 19 bp, Homo sapiens
  siRNA target sequence for PDK2 (NM_002611.3,1165-1183).
ccgatgctgtcatctatct

SEQ ID NO: 96149 - DNA, 19 bp, Homo sapiens
  siRNA target sequence for PDK3 (NM_005391.1,96-114).
cgccgctctccatcaaaca

SEQ ID NO: 96150 - DNA, 19 bp, Homo sapiens
  siRNA target sequence for PDK3 (NM_005391.1,97-115).
gccgctctccatcaaacaa

SEQ ID NO: 96151 - DNA, 19 bp, Homo sapiens
  siRNA target sequence for PDK3 (NM_005391.1,99-117).
cgctctccatcaaacaatt

SEQ ID NO: 96152 - DNA, 19 bp, Homo sapiens
  siRNA target sequence for PDK3 (NM_005391.1,124-142).
cttcgggagagataatgca

SEQ ID NO: 96153 - DNA, 19 bp, Homo sapiens
  siRNA target sequence for PDK3 (NM_005391.1,141-159).
catgtgagaaaacttcata

SEQ ID NO: 96154 - DNA, 19 bp, Homo sapiens
  siRNA target sequence for PDK3 (NM_005391.1,146-164).
gagaaaacttcatatatgt

SEQ ID NO: 96155 - DNA, 19 bp, Homo sapiens
  siRNA target sequence for PDK3 (NM_005391.1,185-203).
gtgcggctggctaacacaa

SEQ ID NO: 96156 - DNA, 19 bp, Homo sapiens
  siRNA target sequence for PDK3 (NM_005391.1,188-206).
cggctggctaacacaatga

SEQ ID NO: 96157 - DNA, 19 bp, Homo sapiens
  siRNA target sequence for PDK3 (NM_005391.1,221-239).
ctgccggataatttactta

SEQ ID NO: 96158 - DNA, 19 bp, Homo sapiens
  siRNA target sequence for PDK3 (NM_005391.1,244-262).
cccttcagtgggattggtt

SEQ ID NO: 96159 - DNA, 19 bp, Homo sapiens
  siRNA target sequence for PDK3 (NM_005391.1,267-285).
gttggtatatgcagagttt

SEQ ID NO: 96160 - DNA, 19 bp, Homo sapiens
  siRNA target sequence for PDK3 (NM_005391.1,326-344).
ccacaggtcttggataact

SEQ ID NO: 96161 - DNA, 19 bp, Homo sapiens
  siRNA target sequence for PDK3 (NM_005391.1,327-345).
cacaggtcttggataactt

SEQ ID NO: 96162 - DNA, 19 bp, Homo sapiens
  siRNA target sequence for PDK3 (NM_005391.1,434-452).
gggtttgatcctttcatta

SEQ ID NO: 96163 - DNA, 19 bp, Homo sapiens
  siRNA target sequence for PDK3 (NM_005391.1,443-461).
cctttcattagcactaaca

SEQ ID NO: 96164 - DNA, 19 bp, Homo sapiens
  siRNA target sequence for PDK3 (NM_005391.1,444-462).
ctttcattagcactaacat

SEQ ID NO: 96165 - DNA, 19 bp, Homo sapiens
  siRNA target sequence for PDK3 (NM_005391.1,473-491).
ctggatcggttttatacca

SEQ ID NO: 96166 - DNA, 19 bp, Homo sapiens
  siRNA target sequence for PDK3 (NM_005391.1,499-517).
ctctttccgcatgcttatt

SEQ ID NO: 96167 - DNA, 19 bp, Homo sapiens
  siRNA target sequence for PDK3 (NM_005391.1,535-553).
gtttgggggtgacactaat

SEQ ID NO: 96168 - DNA, 19 bp, Homo sapiens
  siRNA target sequence for PDK3 (NM_005391.1,560-578).
catcctaaacacataggaa

SEQ ID NO: 96169 - DNA, 19 bp, Homo sapiens
  siRNA target sequence for PDK3 (NM_005391.1,601-619).
ggcggatgtggtgaaagat

SEQ ID NO: 96170 - DNA, 19 bp, Homo sapiens
  siRNA target sequence for PDK3 (NM_005391.1,702-720).
cgccagacaaacctattca

SEQ ID NO: 96171 - DNA, 19 bp, Homo sapiens
  siRNA target sequence for PDK3 (NM_005391.1,714-732).
ctattcaggtggtttatgt

SEQ ID NO: 96172 - DNA, 19 bp, Homo sapiens
  siRNA target sequence for PDK3 (NM_005391.1,733-751).
gccctcacatctgtttcat

SEQ ID NO: 96173 - DNA, 19 bp, Homo sapiens
  siRNA target sequence for PDK3 (NM_005391.1,734-752).
ccctcacatctgtttcata

SEQ ID NO: 96174 - DNA, 19 bp, Homo sapiens
  siRNA target sequence for PDK3 (NM_005391.1,735-753).
cctcacatctgtttcatat

SEQ ID NO: 96175 - DNA, 19 bp, Homo sapiens
  siRNA target sequence for PDK3 (NM_005391.1,783-801).
gagcgacagttgaactcta

SEQ ID NO: 96176 - DNA, 19 bp, Homo sapiens
  siRNA target sequence for PDK3 (NM_005391.1,786-804).
cgacagttgaactctatga

SEQ ID NO: 96177 - DNA, 19 bp, Homo sapiens
  siRNA target sequence for PDK3 (NM_005391.1,852-870).
gtaaagaagacttatccat

SEQ ID NO: 96178 - DNA, 19 bp, Homo sapiens
  siRNA target sequence for PDK3 (NM_005391.1,857-875).
gaagacttatccattaaga

SEQ ID NO: 96179 - DNA, 19 bp, Homo sapiens
  siRNA target sequence for PDK3 (NM_005391.1,860-878).
gacttatccattaagatca

SEQ ID NO: 96180 - DNA, 19 bp, Homo sapiens
  siRNA target sequence for PDK3 (NM_005391.1,891-909).
gtggtgtcccacttcgaaa

SEQ ID NO: 96181 - DNA, 19 bp, Homo sapiens
  siRNA target sequence for PDK3 (NM_005391.1,893-911).
ggtgtcccacttcgaaaaa

SEQ ID NO: 96182 - DNA, 19 bp, Homo sapiens
  siRNA target sequence for PDK3 (NM_005391.1,894-912).
gtgtcccacttcgaaaaat

SEQ ID NO: 96183 - DNA, 19 bp, Homo sapiens
  siRNA target sequence for PDK3 (NM_005391.1,898-916).
cccacttcgaaaaatagat

SEQ ID NO: 96184 - DNA, 19 bp, Homo sapiens
  siRNA target sequence for PDK3 (NM_005391.1,917-935).
cgtctttttaactacatgt

SEQ ID NO: 96185 - DNA, 19 bp, Homo sapiens
  siRNA target sequence for PDK3 (NM_005391.1,1014-1032).
cccgtctgtatgctagata

SEQ ID NO: 96186 - DNA, 19 bp, Homo sapiens
  siRNA target sequence for PDK3 (NM_005391.1,1016-1034).
cgtctgtatgctagatatt

SEQ ID NO: 96187 - DNA, 19 bp, Homo sapiens
  siRNA target sequence for PDK3 (NM_005391.1,1043-1061).
gatctgaaactgtattcca

SEQ ID NO: 96188 - DNA, 19 bp, Homo sapiens
  siRNA target sequence for PDK3 (NM_005391.1,1074-1092).
gtactgatgctgtcattta

SEQ ID NO: 96189 - DNA, 19 bp, Homo sapiens
  siRNA target sequence for PDK3 (NM_005391.1,1146-1164).
ccgcatggcgccattacaa

SEQ ID NO: 96190 - DNA, 19 bp, Homo sapiens
  siRNA target sequence for PDK3 (NM_005391.1,1148-1166).
gcatggcgccattacaaga

SEQ ID NO: 96191 - DNA, 19 bp, Homo sapiens
  siRNA target sequence for PDK3 (NM_005391.1,1208-1226).
cccagggatgcttcaaaat

SEQ ID NO: 96192 - DNA, 19 bp, Homo sapiens
  siRNA target sequence for PDK4 (NM_002612.2,262-280).
cccgagaggtggagcattt

SEQ ID NO: 96193 - DNA, 19 bp, Homo sapiens
  siRNA target sequence for PDK4 (NM_002612.2,264-282).
cgagaggtggagcatttct

SEQ ID NO: 96194 - DNA, 19 bp, Homo sapiens
  siRNA target sequence for PDK4 (NM_002612.2,315-333).
cagctactggactttggtt

SEQ ID NO: 96195 - DNA, 19 bp, Homo sapiens
  siRNA target sequence for PDK4 (NM_002612.2,363-381).
gcatttttgcgacaagaat

SEQ ID NO: 96196 - DNA, 19 bp, Homo sapiens
  siRNA target sequence for PDK4 (NM_002612.2,422-440).
cctcccgacccaattagta

SEQ ID NO: 96197 - DNA, 19 bp, Homo sapiens
  siRNA target sequence for PDK4 (NM_002612.2,423-441).
ctcccgacccaattagtaa

SEQ ID NO: 96198 - DNA, 19 bp, Homo sapiens
  siRNA target sequence for PDK4 (NM_002612.2,425-443).
cccgacccaattagtaaat

SEQ ID NO: 96199 - DNA, 19 bp, Homo sapiens
  siRNA target sequence for PDK4 (NM_002612.2,426-444).
ccgacccaattagtaaata

SEQ ID NO: 96200 - DNA, 19 bp, Homo sapiens
  siRNA target sequence for PDK4 (NM_002612.2,445-463).
cctcttcagtgcaattggt

SEQ ID NO: 96201 - DNA, 19 bp, Homo sapiens
  siRNA target sequence for PDK4 (NM_002612.2,448-466).
cttcagtgcaattggttaa

SEQ ID NO: 96202 - DNA, 19 bp, Homo sapiens
  siRNA target sequence for PDK4 (NM_002612.2,453-471).
gtgcaattggttaaaagct

SEQ ID NO: 96203 - DNA, 19 bp, Homo sapiens
  siRNA target sequence for PDK4 (NM_002612.2,461-479).
ggttaaaagctggtatata

SEQ ID NO: 96204 - DNA, 19 bp, Homo sapiens
  siRNA target sequence for PDK4 (NM_002612.2,491-509).
ggatttggtggaattccat

SEQ ID NO: 96205 - DNA, 19 bp, Homo sapiens
  siRNA target sequence for PDK4 (NM_002612.2,497-515).
ggtggaattccatgagaaa

SEQ ID NO: 96206 - DNA, 19 bp, Homo sapiens
  siRNA target sequence for PDK4 (NM_002612.2,558-576).
ctcatcaaagttcgaaata

SEQ ID NO: 96207 - DNA, 19 bp, Homo sapiens
  siRNA target sequence for PDK4 (NM_002612.2,644-662).
cccagtcaccaatcaaaat

SEQ ID NO: 96208 - DNA, 19 bp, Homo sapiens
  siRNA target sequence for PDK4 (NM_002612.2,646-664).
cagtcaccaatcaaaatct

SEQ ID NO: 96209 - DNA, 19 bp, Homo sapiens
  siRNA target sequence for PDK4 (NM_002612.2,650-668).
caccaatcaaaatcttcaa

SEQ ID NO: 96210 - DNA, 19 bp, Homo sapiens
  siRNA target sequence for PDK4 (NM_002612.2,652-670).
ccaatcaaaatcttcaata

SEQ ID NO: 96211 - DNA, 19 bp, Homo sapiens
  siRNA target sequence for PDK4 (NM_002612.2,703-721).
ctactcggatgctgatgaa

SEQ ID NO: 96212 - DNA, 19 bp, Homo sapiens
  siRNA target sequence for PDK4 (NM_002612.2,716-734).
gatgaaccagcacattctt

SEQ ID NO: 96213 - DNA, 19 bp, Homo sapiens
  siRNA target sequence for PDK4 (NM_002612.2,816-834).
gatgcctttgagtgttcaa

SEQ ID NO: 96214 - DNA, 19 bp, Homo sapiens
  siRNA target sequence for PDK4 (NM_002612.2,913-931).
caattcacatcgtgtatgt

SEQ ID NO: 96215 - DNA, 19 bp, Homo sapiens
  siRNA target sequence for PDK4 (NM_002612.2,933-951).
ccttctcacctccatcata

SEQ ID NO: 96216 - DNA, 19 bp, Homo sapiens
  siRNA target sequence for PDK4 (NM_002612.2,1012-1030).
cttcccttacaccaataga

SEQ ID NO: 96217 - DNA, 19 bp, Homo sapiens
  siRNA target sequence for PDK4 (NM_002612.2,1021-1039).
caccaatagaggttattgt

SEQ ID NO: 96218 - DNA, 19 bp, Homo sapiens
  siRNA target sequence for PDK4 (NM_002612.2,1024-1042).
caatagaggttattgttgt

SEQ ID NO: 96219 - DNA, 19 bp, Homo sapiens
  siRNA target sequence for PDK4 (NM_002612.2,1056-1074).
gaccttaccattaagattt

SEQ ID NO: 96220 - DNA, 19 bp, Homo sapiens
  siRNA target sequence for PDK4 (NM_002612.2,1058-1076).
ccttaccattaagatttca

SEQ ID NO: 96221 - DNA, 19 bp, Homo sapiens
  siRNA target sequence for PDK4 (NM_002612.2,1089-1107).
ggtgttcccctgagaatta

SEQ ID NO: 96222 - DNA, 19 bp, Homo sapiens
  siRNA target sequence for PDK4 (NM_002612.2,1110-1128).
gaccgcctctttagttata

SEQ ID NO: 96223 - DNA, 19 bp, Homo sapiens
  siRNA target sequence for PDK4 (NM_002612.2,1112-1130).
ccgcctctttagttataca

SEQ ID NO: 96224 - DNA, 19 bp, Homo sapiens
  siRNA target sequence for PDK4 (NM_002612.2,1113-1131).
cgcctctttagttatacat

SEQ ID NO: 96225 - DNA, 19 bp, Homo sapiens
  siRNA target sequence for PDK4 (NM_002612.2,1116-1134).
ctctttagttatacatact

SEQ ID NO: 96226 - DNA, 19 bp, Homo sapiens
  siRNA target sequence for PDK4 (NM_002612.2,1143-1161).
ccaacgcctgtgatggata

SEQ ID NO: 96227 - DNA, 19 bp, Homo sapiens
  siRNA target sequence for PDK4 (NM_002612.2,1144-1162).
caacgcctgtgatggataa

SEQ ID NO: 96228 - DNA, 19 bp, Homo sapiens
  siRNA target sequence for PDK4 (NM_002612.2,1239-1257).
gatctgaatctctactctt

SEQ ID NO: 96229 - DNA, 19 bp, Homo sapiens
  siRNA target sequence for PDK4 (NM_002612.2,1250-1268).
ctactctttatcaggatat

SEQ ID NO: 96230 - DNA, 19 bp, Homo sapiens
  siRNA target sequence for PDK4 (NM_002612.2,1253-1271).
ctctttatcaggatatgga

SEQ ID NO: 96231 - DNA, 19 bp, Homo sapiens
  siRNA target sequence for PDK4 (NM_002612.2,1273-1291).
cagatgctatcatctactt

SEQ ID NO: 96232 - DNA, 19 bp, Homo sapiens
  siRNA target sequence for PDK4 (NM_002612.2,1275-1293).
gatgctatcatctacttaa

SEQ ID NO: 96233 - DNA, 19 bp, Homo sapiens
  siRNA target sequence for PDK4 (NM_002612.2,1337-1355).
caagtcagccttcaaacat

SEQ ID NO: 96234 - DNA, 19 bp, Homo sapiens
  siRNA target sequence for PDPK1 (NM_002613.1,543-561).
ctgtatttcggccttagtt

SEQ ID NO: 96235 - DNA, 19 bp, Homo sapiens
  siRNA target sequence for PDPK1 (NM_002613.1,573-591).
ggagaactacttaaatata

SEQ ID NO: 96236 - DNA, 19 bp, Homo sapiens
  siRNA target sequence for PDPK1 (NM_002613.1,574-592).
gagaactacttaaatatat

SEQ ID NO: 96237 - DNA, 19 bp, Homo sapiens
  siRNA target sequence for PDPK1 (NM_002613.1,695-713).
ccttaaaccggaaaacatt

SEQ ID NO: 96238 - DNA, 19 bp, Homo sapiens
  siRNA target sequence for PDPK1 (NM_002613.1,696-714).
cttaaaccggaaaacattt

SEQ ID NO: 96239 - DNA, 19 bp, Homo sapiens
  siRNA target sequence for PDPK1 (NM_002613.1,753-771).
ggaacagcaaaagtcttat

SEQ ID NO: 96240 - DNA, 19 bp, Homo sapiens
  siRNA target sequence for PDPK1 (NM_002613.1,810-828).
ggaacagcgcagtacgttt

SEQ ID NO: 96241 - DNA, 19 bp, Homo sapiens
  siRNA target sequence for PDPK1 (NM_002613.1,877-895).
gggctcttggatgcataat

SEQ ID NO: 96242 - DNA, 19 bp, Homo sapiens
  siRNA target sequence for PDPK1 (NM_002613.1,928-946).
gagctggaaacgagtatct

SEQ ID NO: 96243 - DNA, 19 bp, Homo sapiens
  siRNA target sequence for PDPK1 (NM_002613.1,930-948).
gctggaaacgagtatctta

SEQ ID NO: 96244 - DNA, 19 bp, Homo sapiens
  siRNA target sequence for PDPK1 (NM_002613.1,1022-1040).
gaaacttttggttttagat

SEQ ID NO: 96245 - DNA, 19 bp, Homo sapiens
  siRNA target sequence for PDPK1 (NM_002613.1,1051-1069).
ggttaggctgtgaggaaat

SEQ ID NO: 96246 - DNA, 19 bp, Homo sapiens
  siRNA target sequence for PDPK1 (NM_002613.1,1190-1208).
ggactgctatggcaattat

SEQ ID NO: 96247 - DNA, 19 bp, Homo sapiens
  siRNA target sequence for PDPK1 (NM_002613.1,1298-1316).
gaggtcaggcagcaacata

SEQ ID NO: 96248 - DNA, 19 bp, Homo sapiens
  siRNA target sequence for PDPK1 (NM_002613.1,1300-1318).
ggtcaggcagcaacataga

SEQ ID NO: 96249 - DNA, 19 bp, Homo sapiens
  siRNA target sequence for PDPK1 (NM_002613.1,1337-1355).
ggactcgaactcctttgaa

SEQ ID NO: 96250 - DNA, 19 bp, Homo sapiens
  siRNA target sequence for PDPK1 (NM_002613.1,1348-1366).
cctttgaactggacttaca

SEQ ID NO: 96251 - DNA, 19 bp, Homo sapiens
  siRNA target sequence for PDPK1 (NM_002613.1,1353-1371).
gaactggacttacagtttt

SEQ ID NO: 96252 - DNA, 19 bp, Homo sapiens
  siRNA target sequence for PDPK1 (NM_002613.1,1377-1395).
gatgagaagaggttgttgt

SEQ ID NO: 96253 - DNA, 19 bp, Homo sapiens
  siRNA target sequence for PDPK1 (NM_002613.1,1470-1488).
gataagcggaagggtttat

SEQ ID NO: 96254 - DNA, 19 bp, Homo sapiens
  siRNA target sequence for PDPK1 (NM_002613.1,1475-1493).
gcggaagggtttatttgca

SEQ ID NO: 96255 - DNA, 19 bp, Homo sapiens
  siRNA target sequence for PDPK1 (NM_002613.1,1476-1494).
cggaagggtttatttgcaa

SEQ ID NO: 96256 - DNA, 19 bp, Homo sapiens
  siRNA target sequence for PDPK1 (NM_002613.1,1546-1564).
ctgtcaacaaagttctgaa

SEQ ID NO: 96257 - DNA, 19 bp, Homo sapiens
  siRNA target sequence for PDPK1 (NM_002613.1,1593-1611).
cgaccagaggccaagaatt

SEQ ID NO: 96258 - DNA, 19 bp, Homo sapiens
  siRNA target sequence for PDPK1 (NM_002613.1,1594-1612).
gaccagaggccaagaattt

SEQ ID NO: 96259 - DNA, 19 bp, Homo sapiens
  siRNA target sequence for PDPK1 (NM_002613.1,1633-1651).
cgcctaacaggacgtatta

SEQ ID NO: 96260 - DNA, 19 bp, Homo sapiens
  siRNA target sequence for PDZK3 (NM_015022.2,520-538).
gtacatccagctgaacttt

SEQ ID NO: 96261 - DNA, 19 bp, Homo sapiens
  siRNA target sequence for PDZK3 (NM_015022.2,578-596).
cccgaaatggagatctgta

SEQ ID NO: 96262 - DNA, 19 bp, Homo sapiens
  siRNA target sequence for PDZK3 (NM_015022.2,832-850).
gctgatggttggagttgat

SEQ ID NO: 96263 - DNA, 19 bp, Homo sapiens
  siRNA target sequence for PDZK3 (NM_015022.2,894-912).
gctttatctacctgatcat

SEQ ID NO: 96264 - DNA, 19 bp, Homo sapiens
  siRNA target sequence for PDZK3 (NM_015022.2,931-949).
caaagcccactccacttat

SEQ ID NO: 96265 - DNA, 19 bp, Homo sapiens
  siRNA target sequence for PDZK3 (NM_015022.2,1005-1023).
gtgaccgaactgcgaaaaa

SEQ ID NO: 96266 - DNA, 19 bp, Homo sapiens
  siRNA target sequence for PDZK3 (NM_015022.2,1164-1182).
gaaacggccatgtctttca

SEQ ID NO: 96267 - DNA, 19 bp, Homo sapiens
  siRNA target sequence for PDZK3 (NM_015022.2,1172-1190).
catgtctttcagctagaaa

SEQ ID NO: 96268 - DNA, 19 bp, Homo sapiens
  siRNA target sequence for PDZK3 (NM_015022.2,1257-1275).
cagagcatagaattccaaa

SEQ ID NO: 96269 - DNA, 19 bp, Homo sapiens
  siRNA target sequence for PDZK3 (NM_015022.2,1306-1324).
caaacgccgcttctcaaaa

SEQ ID NO: 96270 - DNA, 19 bp, Homo sapiens
  siRNA target sequence for PDZK3 (NM_015022.2,1367-1385).
gaggaagttggccgaatat

SEQ ID NO: 96271 - DNA, 19 bp, Homo sapiens
  siRNA target sequence for PDZK3 (NM_015022.2,1370-1388).
gaagttggccgaatatgga

SEQ ID NO: 96272 - DNA, 19 bp, Homo sapiens
  siRNA target sequence for PDZK3 (NM_015022.2,1410-1428).
cggatgggctgggaattca

SEQ ID NO: 96273 - DNA, 19 bp, Homo sapiens
  siRNA target sequence for PDZK3 (NM_015022.2,1456-1474).
ctcacctcacgctatcgtt

SEQ ID NO: 96274 - DNA, 19 bp, Homo sapiens
  siRNA target sequence for PDZK3 (NM_015022.2,1599-1617).
cgatcattgggttgtacaa

SEQ ID NO: 96275 - DNA, 19 bp, Homo sapiens
  siRNA target sequence for PDZK3 (NM_015022.2,1600-1618).
gatcattgggttgtacaaa

SEQ ID NO: 96276 - DNA, 19 bp, Homo sapiens
  siRNA target sequence for PDZK3 (NM_015022.2,1674-1692).
gacagatggggatttttgt

SEQ ID NO: 96277 - DNA, 19 bp, Homo sapiens
  siRNA target sequence for PDZK3 (NM_015022.2,1756-1774).
cctagatgtaaatggaata

SEQ ID NO: 96278 - DNA, 19 bp, Homo sapiens
  siRNA target sequence for PDZK3 (NM_015022.2,1760-1778).
gatgtaaatggaataccaa

SEQ ID NO: 96279 - DNA, 19 bp, Homo sapiens
  siRNA target sequence for PDZK3 (NM_015022.2,1763-1781).
gtaaatggaataccaataa

SEQ ID NO: 96280 - DNA, 19 bp, Homo sapiens
  siRNA target sequence for PDZK3 (NM_015022.2,1783-1801).
gggcttgacatttcaagaa

SEQ ID NO: 96281 - DNA, 19 bp, Homo sapiens
  siRNA target sequence for PDZK3 (NM_015022.2,1820-1838).
caaatccggagtggattat

SEQ ID NO: 96282 - DNA, 19 bp, Homo sapiens
  siRNA target sequence for PDZK3 (NM_015022.2,1826-1844).
cggagtggattatttgttt

SEQ ID NO: 96283 - DNA, 19 bp, Homo sapiens
  siRNA target sequence for PDZK3 (NM_015022.2,1915-1933).
cgcctccccgaacttcaat

SEQ ID NO: 96284 - DNA, 19 bp, Homo sapiens
  siRNA target sequence for PDZK3 (NM_015022.2,1916-1934).
gcctccccgaacttcaata

SEQ ID NO: 96285 - DNA, 19 bp, Homo sapiens
  siRNA target sequence for PDZK3 (NM_015022.2,1963-1981).
cgatgaaggcagttcttca

SEQ ID NO: 96286 - DNA, 19 bp, Homo sapiens
  siRNA target sequence for PDZK3 (NM_015022.2,2097-2115).
gtcctcctggcatctacat

SEQ ID NO: 96287 - DNA, 19 bp, Homo sapiens
  siRNA target sequence for PDZK3 (NM_015022.2,2102-2120).
cctggcatctacattcaca

SEQ ID NO: 96288 - DNA, 19 bp, Homo sapiens
  siRNA target sequence for PDZK3 (NM_015022.2,2200-2218).
cgtccgccatgctgcttta

SEQ ID NO: 96289 - DNA, 19 bp, Homo sapiens
  siRNA target sequence for PDZK3 (NM_015022.2,2201-2219).
gtccgccatgctgctttaa

SEQ ID NO: 96290 - DNA, 19 bp, Homo sapiens
  siRNA target sequence for PDZK3 (NM_015022.2,2204-2222).
cgccatgctgctttaagca

SEQ ID NO: 96291 - DNA, 19 bp, Homo sapiens
  siRNA target sequence for PDZK3 (NM_015022.2,2205-2223).
gccatgctgctttaagcaa

SEQ ID NO: 96292 - DNA, 19 bp, Homo sapiens
  siRNA target sequence for PDZK3 (NM_015022.2,2206-2224).
ccatgctgctttaagcaaa

SEQ ID NO: 96293 - DNA, 19 bp, Homo sapiens
  siRNA target sequence for PDZK3 (NM_015022.2,2228-2246).
cacgccatcttgagtaaat

SEQ ID NO: 96294 - DNA, 19 bp, Homo sapiens
  siRNA target sequence for PDZK3 (NM_015022.2,2278-2296).
catagcacgcagcacttat

SEQ ID NO: 96295 - DNA, 19 bp, Homo sapiens
  siRNA target sequence for PDZK3 (NM_015022.2,2794-2812).
cccgaggcgtgtctcaatt

SEQ ID NO: 96296 - DNA, 19 bp, Homo sapiens
  siRNA target sequence for PDZK3 (NM_015022.2,2795-2813).
ccgaggcgtgtctcaattt

SEQ ID NO: 96297 - DNA, 19 bp, Homo sapiens
  siRNA target sequence for PDZK3 (NM_015022.2,2848-2866).
ggaacgaccccggaaaaca

SEQ ID NO: 96298 - DNA, 19 bp, Homo sapiens
  siRNA target sequence for PDZK3 (NM_015022.2,3039-3057).
gtagcgcacccaaattgga

SEQ ID NO: 96299 - DNA, 19 bp, Homo sapiens
  siRNA target sequence for PDZK3 (NM_015022.2,3042-3060).
gcgcacccaaattggaata

SEQ ID NO: 96300 - DNA, 19 bp, Homo sapiens
  siRNA target sequence for PDZK3 (NM_015022.2,3044-3062).
gcacccaaattggaataca

SEQ ID NO: 96301 - DNA, 19 bp, Homo sapiens
  siRNA target sequence for PDZK3 (NM_015022.2,3271-3289).
ccaggccacttctgtcaaa

SEQ ID NO: 96302 - DNA, 19 bp, Homo sapiens
  siRNA target sequence for PDZK3 (NM_015022.2,3852-3870).
ctccaggtaaccacagtaa

SEQ ID NO: 96303 - DNA, 19 bp, Homo sapiens
  siRNA target sequence for PDZK3 (NM_015022.2,4285-4303).
ctcccagccttcggtttta

SEQ ID NO: 96304 - DNA, 19 bp, Homo sapiens
  siRNA target sequence for PDZK3 (NM_015022.2,4287-4305).
cccagccttcggttttaga

SEQ ID NO: 96305 - DNA, 19 bp, Homo sapiens
  siRNA target sequence for PDZK3 (NM_015022.2,4288-4306).
ccagccttcggttttagat

SEQ ID NO: 96306 - DNA, 19 bp, Homo sapiens
  siRNA target sequence for PDZK3 (NM_015022.2,4308-4326).
caattaatcccgacaaaca

SEQ ID NO: 96307 - DNA, 19 bp, Homo sapiens
  siRNA target sequence for PDZK3 (NM_015022.2,4317-4335).
ccgacaaacattttactgt

SEQ ID NO: 96308 - DNA, 19 bp, Homo sapiens
  siRNA target sequence for PDZK3 (NM_015022.2,4349-4367).
ctgagcaactactctagaa

SEQ ID NO: 96309 - DNA, 19 bp, Homo sapiens
  siRNA target sequence for PDZK3 (NM_015022.2,4351-4369).
gagcaactactctagaaat

SEQ ID NO: 96310 - DNA, 19 bp, Homo sapiens
  siRNA target sequence for PDZK3 (NM_015022.2,4353-4371).
gcaactactctagaaattt

SEQ ID NO: 96311 - DNA, 19 bp, Homo sapiens
  siRNA target sequence for PDZK3 (NM_015022.2,4448-4466).
ggcgatgctgaggattctt

SEQ ID NO: 96312 - DNA, 19 bp, Homo sapiens
  siRNA target sequence for PDZK3 (NM_015022.2,4530-4548).
ctcgttcccgtgtgtcttt

SEQ ID NO: 96313 - DNA, 19 bp, Homo sapiens
  siRNA target sequence for PDZK3 (NM_015022.2,4624-4642).
ctcgagtcctgctcatctt

SEQ ID NO: 96314 - DNA, 19 bp, Homo sapiens
  siRNA target sequence for PDZK3 (NM_015022.2,4858-4876).
gccctcgtgtgcagaagaa

SEQ ID NO: 96315 - DNA, 19 bp, Homo sapiens
  siRNA target sequence for PDZK3 (NM_015022.2,4859-4877).
ccctcgtgtgcagaagaaa

SEQ ID NO: 96316 - DNA, 19 bp, Homo sapiens
  siRNA target sequence for PDZK3 (NM_015022.2,4895-4913).
gctagctcagccatggaaa

SEQ ID NO: 96317 - DNA, 19 bp, Homo sapiens
  siRNA target sequence for PDZK3 (NM_015022.2,4915-4933).
cagtccgctgtctaaagta

SEQ ID NO: 96318 - DNA, 19 bp, Homo sapiens
  siRNA target sequence for PDZK3 (NM_015022.2,4968-4986).
gctcccccaacatggtaaa

SEQ ID NO: 96319 - DNA, 19 bp, Homo sapiens
  siRNA target sequence for PDZK3 (NM_015022.2,4969-4987).
ctcccccaacatggtaaat

SEQ ID NO: 96320 - DNA, 19 bp, Homo sapiens
  siRNA target sequence for PDZK3 (NM_015022.2,5012-5030).
gacgaaaccctgaatcaat

SEQ ID NO: 96321 - DNA, 19 bp, Homo sapiens
  siRNA target sequence for PDZK3 (NM_015022.2,5083-5101).
ccctaagaatggagaatct

SEQ ID NO: 96322 - DNA, 19 bp, Homo sapiens
  siRNA target sequence for PDZK3 (NM_015022.2,5182-5200).
catcatggcctggtttaaa

SEQ ID NO: 96323 - DNA, 19 bp, Homo sapiens
  siRNA target sequence for PDZK3 (NM_015022.2,5213-5231).
cataaccaaggcacacatt

SEQ ID NO: 96324 - DNA, 19 bp, Homo sapiens
  siRNA target sequence for PDZK3 (NM_015022.2,5277-5295).
gtcccgactccaagattca

SEQ ID NO: 96325 - DNA, 19 bp, Homo sapiens
  siRNA target sequence for PDZK3 (NM_015022.2,5342-5360).
cctcctcagccgaaaacaa

SEQ ID NO: 96326 - DNA, 19 bp, Homo sapiens
  siRNA target sequence for PDZK3 (NM_015022.2,5343-5361).
ctcctcagccgaaaacaaa

SEQ ID NO: 96327 - DNA, 19 bp, Homo sapiens
  siRNA target sequence for PDZK3 (NM_015022.2,5389-5407).
gagtccggcagaaatgctt

SEQ ID NO: 96328 - DNA, 19 bp, Homo sapiens
  siRNA target sequence for PDZK3 (NM_015022.2,5528-5546).
cacaggaaacccttgatct

SEQ ID NO: 96329 - DNA, 19 bp, Homo sapiens
  siRNA target sequence for PDZK3 (NM_015022.2,5995-6013).
caggccgactggcgaaaaa

SEQ ID NO: 96330 - DNA, 19 bp, Homo sapiens
  siRNA target sequence for PDZK3 (NM_015022.2,5998-6016).
gccgactggcgaaaaagga

SEQ ID NO: 96331 - DNA, 19 bp, Homo sapiens
  siRNA target sequence for PDZK3 (NM_015022.2,6034-6052).
cgatcgcctcgaaagaaca

SEQ ID NO: 96332 - DNA, 19 bp, Homo sapiens
  siRNA target sequence for PDZK3 (NM_015022.2,6035-6053).
gatcgcctcgaaagaacaa

SEQ ID NO: 96333 - DNA, 19 bp, Homo sapiens
  siRNA target sequence for PDZK3 (NM_015022.2,6086-6104).
gcagtgtcagagactgtat

SEQ ID NO: 96334 - DNA, 19 bp, Homo sapiens
  siRNA target sequence for PDZK3 (NM_015022.2,6162-6180).
gtcaggagaagagtgaaat

SEQ ID NO: 96335 - DNA, 19 bp, Homo sapiens
  siRNA target sequence for PDZK3 (NM_015022.2,6191-6209).
cgccaggtcgcagaatcat

SEQ ID NO: 96336 - DNA, 19 bp, Homo sapiens
  siRNA target sequence for PDZK3 (NM_015022.2,6260-6278).
gaaatgtcacgatcattca

SEQ ID NO: 96337 - DNA, 19 bp, Homo sapiens
  siRNA target sequence for PDZK3 (NM_015022.2,6310-6328).
ccttcaaacagccattaga

SEQ ID NO: 96338 - DNA, 19 bp, Homo sapiens
  siRNA target sequence for PDZK3 (NM_015022.2,6335-6353).
gaatactcccagggaaaat

SEQ ID NO: 96339 - DNA, 19 bp, Homo sapiens
  siRNA target sequence for PDZK3 (NM_015022.2,6374-6392).
cgaggggtgcccagaaaca

SEQ ID NO: 96340 - DNA, 19 bp, Homo sapiens
  siRNA target sequence for PDZK3 (NM_015022.2,6414-6432).
gggaggaccatctctactt

SEQ ID NO: 96341 - DNA, 19 bp, Homo sapiens
  siRNA target sequence for PDZK3 (NM_015022.2,6614-6632).
cagggcatatatagtgtaa

SEQ ID NO: 96342 - DNA, 19 bp, Homo sapiens
  siRNA target sequence for PDZK3 (NM_015022.2,6643-6661).
ggacacatcgaggaatctt

SEQ ID NO: 96343 - DNA, 19 bp, Homo sapiens
  siRNA target sequence for PDZK3 (NM_015022.2,6708-6726).
gcctagtcacagacaaaat

SEQ ID NO: 96344 - DNA, 19 bp, Homo sapiens
  siRNA target sequence for PDZK3 (NM_015022.2,6758-6776).
cagaactggccccatgaat

SEQ ID NO: 96345 - DNA, 19 bp, Homo sapiens
  siRNA target sequence for PDZK3 (NM_015022.2,6769-6787).
ccatgaatctacctcattt

SEQ ID NO: 96346 - DNA, 19 bp, Homo sapiens
  siRNA target sequence for PDZK3 (NM_015022.2,6907-6925).
gtcttccggcagcattgtt

SEQ ID NO: 96347 - DNA, 19 bp, Homo sapiens
  siRNA target sequence for PDZK3 (NM_015022.2,7035-7053).
ccaagtctccctcaatcat

SEQ ID NO: 96348 - DNA, 19 bp, Homo sapiens
  siRNA target sequence for PDZK3 (NM_015022.2,7100-7118).
ggctctgattcggaactaa

SEQ ID NO: 96349 - DNA, 19 bp, Homo sapiens
  siRNA target sequence for PDZK3 (NM_015022.2,7101-7119).
gctctgattcggaactaaa

SEQ ID NO: 96350 - DNA, 19 bp, Homo sapiens
  siRNA target sequence for PDZK3 (NM_015022.2,7104-7122).
ctgattcggaactaaagaa

SEQ ID NO: 96351 - DNA, 19 bp, Homo sapiens
  siRNA target sequence for PDZK3 (NM_015022.2,7279-7297).
ctgcagcgaggattactca

SEQ ID NO: 96352 - DNA, 19 bp, Homo sapiens
  siRNA target sequence for PDZK3 (NM_015022.2,7305-7323).
cgagcgccgtgctcttcaa

SEQ ID NO: 96353 - DNA, 19 bp, Homo sapiens
  siRNA target sequence for PDZK3 (NM_015022.2,7309-7327).
cgccgtgctcttcaaaact

SEQ ID NO: 96354 - DNA, 19 bp, Homo sapiens
  siRNA target sequence for PDZK3 (NM_015022.2,7486-7504).
ggatctgccttttagaaga

SEQ ID NO: 96355 - DNA, 19 bp, Homo sapiens
  siRNA target sequence for PDZK3 (NM_015022.2,7576-7594).
gtcagtgggatcgaaatct

SEQ ID NO: 96356 - DNA, 19 bp, Homo sapiens
  siRNA target sequence for PDZK3 (NM_015022.2,7646-7664).
gatgtttgcttcatagtct

SEQ ID NO: 96357 - DNA, 19 bp, Homo sapiens
  siRNA target sequence for PDZK3 (NM_015022.2,7770-7788).
ctcaggaagggactatgaa

SEQ ID NO: 96358 - DNA, 19 bp, Homo sapiens
  siRNA target sequence for PDZK3 (NM_015022.2,8181-8199).
gagatgaaattcttgctat

SEQ ID NO: 96359 - DNA, 19 bp, Homo sapiens
  siRNA target sequence for PDZK3 (NM_015022.2,8237-8255).
gcctggaatattatgaagt

SEQ ID NO: 96360 - DNA, 19 bp, Homo sapiens
  siRNA target sequence for PDZK3 (NM_015022.2,8264-8282).
gaaggacctgtgcagttat

SEQ ID NO: 96361 - DNA, 19 bp, Homo sapiens
  siRNA target sequence for PDZK3 (NM_015022.2,8267-8285).
ggacctgtgcagttattaa

SEQ ID NO: 96362 - DNA, 19 bp, Homo sapiens
  siRNA target sequence for PDZK3 (NM_178140.1,1530-1548).
gagatgagctgctggtaat

SEQ ID NO: 96363 - DNA, 19 bp, Homo sapiens
  siRNA target sequence for PDZK3 (NM_178140.1,1657-1675).
ggacctcctcaggttaaca

SEQ ID NO: 96364 - DNA, 19 bp, Homo sapiens
  siRNA target sequence for PDZK3 (NM_178140.1,1658-1676).
gacctcctcaggttaacat

SEQ ID NO: 96365 - DNA, 19 bp, Homo sapiens
  siRNA target sequence for PDZK3 (NM_178140.1,1660-1678).
cctcctcaggttaacatct

SEQ ID NO: 96366 - DNA, 19 bp, Homo sapiens
  siRNA target sequence for PDZK3 (NM_178140.1,1661-1679).
ctcctcaggttaacatcta

SEQ ID NO: 96367 - DNA, 19 bp, Homo sapiens
  siRNA target sequence for PDZK3 (NM_178140.1,1664-1682).
ctcaggttaacatctaaga

SEQ ID NO: 96368 - DNA, 19 bp, Homo sapiens
  siRNA target sequence for PDZK3 (NM_178140.1,1696-1714).
gaccagctcggtagaagat

SEQ ID NO: 96369 - DNA, 19 bp, Homo sapiens
  siRNA target sequence for PDZK3 (NM_178140.1,1698-1716).
ccagctcggtagaagatgt

SEQ ID NO: 96370 - DNA, 19 bp, Homo sapiens
  siRNA target sequence for PDZK3 (NM_178140.1,1715-1733).
gtgtcctcctggactgata

SEQ ID NO: 96371 - DNA, 19 bp, Homo sapiens
  siRNA target sequence for PDZK3 (NM_178140.1,1862-1880).
cccaaacagggcagcaata

SEQ ID NO: 96372 - DNA, 19 bp, Homo sapiens
  siRNA target sequence for PDZK3 (NM_178140.1,1918-1936).
ccgccttgagtcagttgaa

SEQ ID NO: 96373 - DNA, 19 bp, Homo sapiens
  siRNA target sequence for PDZK3 (NM_178140.1,1997-2015).
cgagatggccggaaacact

SEQ ID NO: 96374 - DNA, 19 bp, Homo sapiens
  siRNA target sequence for PDZK3 (NM_178140.1,2799-2817).
gacccgttcgccttgtcat

SEQ ID NO: 96375 - DNA, 19 bp, Homo sapiens
  siRNA target sequence for PDZK3 (NM_178140.1,3915-3933).
ctgtggagaaggaatctct

SEQ ID NO: 96376 - DNA, 19 bp, Homo sapiens
  siRNA target sequence for PEX1 (NM_000466.1,249-267).
caggcattttagtgatcaa

SEQ ID NO: 96377 - DNA, 19 bp, Homo sapiens
  siRNA target sequence for PEX1 (NM_000466.1,325-343).
gggggacaggtatttctca

SEQ ID NO: 96378 - DNA, 19 bp, Homo sapiens
  siRNA target sequence for PEX1 (NM_000466.1,354-372).
ccatgtggtatcttgtcaa

SEQ ID NO: 96379 - DNA, 19 bp, Homo sapiens
  siRNA target sequence for PEX1 (NM_000466.1,360-378).
ggtatcttgtcaacaagtt

SEQ ID NO: 96380 - DNA, 19 bp, Homo sapiens
  siRNA target sequence for PEX1 (NM_000466.1,398-416).
cagatgattgggagatact

SEQ ID NO: 96381 - DNA, 19 bp, Homo sapiens
  siRNA target sequence for PEX1 (NM_000466.1,448-466).
cttctagatcaaattcgaa

SEQ ID NO: 96382 - DNA, 19 bp, Homo sapiens
  siRNA target sequence for PEX1 (NM_000466.1,454-472).
gatcaaattcgaatagttt

SEQ ID NO: 96383 - DNA, 19 bp, Homo sapiens
  siRNA target sequence for PEX1 (NM_000466.1,491-509).
ctgtttgggttgatcaaca

SEQ ID NO: 96384 - DNA, 19 bp, Homo sapiens
  siRNA target sequence for PEX1 (NM_000466.1,497-515).
gggttgatcaacaaacgta

SEQ ID NO: 96385 - DNA, 19 bp, Homo sapiens
  siRNA target sequence for PEX1 (NM_000466.1,502-520).
gatcaacaaacgtacatat

SEQ ID NO: 96386 - DNA, 19 bp, Homo sapiens
  siRNA target sequence for PEX1 (NM_000466.1,525-543).
ccaaattgttgcactaata

SEQ ID NO: 96387 - DNA, 19 bp, Homo sapiens
  siRNA target sequence for PEX1 (NM_000466.1,585-603).
ccttattcagccaaagaca

SEQ ID NO: 96388 - DNA, 19 bp, Homo sapiens
  siRNA target sequence for PEX1 (NM_000466.1,602-620).
cacgccgagccaaagagaa

SEQ ID NO: 96389 - DNA, 19 bp, Homo sapiens
  siRNA target sequence for PEX1 (NM_000466.1,604-622).
cgccgagccaaagagaata

SEQ ID NO: 96390 - DNA, 19 bp, Homo sapiens
  siRNA target sequence for PEX1 (NM_000466.1,606-624).
ccgagccaaagagaataca

SEQ ID NO: 96391 - DNA, 19 bp, Homo sapiens
  siRNA target sequence for PEX1 (NM_000466.1,708-726).
gcaacttcagtcaaatact

SEQ ID NO: 96392 - DNA, 19 bp, Homo sapiens
  siRNA target sequence for PEX1 (NM_000466.1,729-747).
gggaatcactgaatctaat

SEQ ID NO: 96393 - DNA, 19 bp, Homo sapiens
  siRNA target sequence for PEX1 (NM_000466.1,844-862).
gagacatcttggggtttaa

SEQ ID NO: 96394 - DNA, 19 bp, Homo sapiens
  siRNA target sequence for PEX1 (NM_000466.1,846-864).
gacatcttggggtttaact

SEQ ID NO: 96395 - DNA, 19 bp, Homo sapiens
  siRNA target sequence for PEX1 (NM_000466.1,848-866).
catcttggggtttaactga

SEQ ID NO: 96396 - DNA, 19 bp, Homo sapiens
  siRNA target sequence for PEX1 (NM_000466.1,851-869).
cttggggtttaactgaaat

SEQ ID NO: 96397 - DNA, 19 bp, Homo sapiens
  siRNA target sequence for PEX1 (NM_000466.1,854-872).
ggggtttaactgaaatcaa

SEQ ID NO: 96398 - DNA, 19 bp, Homo sapiens
  siRNA target sequence for PEX1 (NM_000466.1,897-915).
ggttgttcctctagacaat

SEQ ID NO: 96399 - DNA, 19 bp, Homo sapiens
  siRNA target sequence for PEX1 (NM_000466.1,898-916).
gttgttcctctagacaata

SEQ ID NO: 96400 - DNA, 19 bp, Homo sapiens
  siRNA target sequence for PEX1 (NM_000466.1,901-919).
gttcctctagacaatattt

SEQ ID NO: 96401 - DNA, 19 bp, Homo sapiens
  siRNA target sequence for PEX1 (NM_000466.1,904-922).
cctctagacaatattttca

SEQ ID NO: 96402 - DNA, 19 bp, Homo sapiens
  siRNA target sequence for PEX1 (NM_000466.1,935-953).
ctcaacctcctagtatata

SEQ ID NO: 96403 - DNA, 19 bp, Homo sapiens
  siRNA target sequence for PEX1 (NM_000466.1,937-955).
caacctcctagtatatata

SEQ ID NO: 96404 - DNA, 19 bp, Homo sapiens
  siRNA target sequence for PEX1 (NM_000466.1,958-976).
gcgtcagcaacctctgttt

SEQ ID NO: 96405 - DNA, 19 bp, Homo sapiens
  siRNA target sequence for PEX1 (NM_000466.1,959-977).
cgtcagcaacctctgtttt

SEQ ID NO: 96406 - DNA, 19 bp, Homo sapiens
  siRNA target sequence for PEX1 (NM_000466.1,1006-1024).
ccatgggaccaggaatatt

SEQ ID NO: 96407 - DNA, 19 bp, Homo sapiens
  siRNA target sequence for PEX1 (NM_000466.1,1027-1045).
gatgtagagcccagcttta

SEQ ID NO: 96408 - DNA, 19 bp, Homo sapiens
  siRNA target sequence for PEX1 (NM_000466.1,1143-1161).
gtcagagccactagatcaa

SEQ ID NO: 96409 - DNA, 19 bp, Homo sapiens
  siRNA target sequence for PEX1 (NM_000466.1,1147-1165).
gagccactagatcaaaaaa

SEQ ID NO: 96410 - DNA, 19 bp, Homo sapiens
  siRNA target sequence for PEX1 (NM_000466.1,1172-1190).
ggtcagatcataatgaaga

SEQ ID NO: 96411 - DNA, 19 bp, Homo sapiens
  siRNA target sequence for PEX1 (NM_000466.1,1173-1191).
gtcagatcataatgaagaa

SEQ ID NO: 96412 - DNA, 19 bp, Homo sapiens
  siRNA target sequence for PEX1 (NM_000466.1,1200-1218).
ggcctgtgtgctacaagta

SEQ ID NO: 96413 - DNA, 19 bp, Homo sapiens
  siRNA target sequence for PEX1 (NM_000466.1,1339-1357).
catgccgtagtcaggataa

SEQ ID NO: 96414 - DNA, 19 bp, Homo sapiens
  siRNA target sequence for PEX1 (NM_000466.1,1363-1381).
gtggaagttacccctaaaa

SEQ ID NO: 96415 - DNA, 19 bp, Homo sapiens
  siRNA target sequence for PEX1 (NM_000466.1,1365-1383).
ggaagttacccctaaaatt

SEQ ID NO: 96416 - DNA, 19 bp, Homo sapiens
  siRNA target sequence for PEX1 (NM_000466.1,1369-1387).
gttacccctaaaattccaa

SEQ ID NO: 96417 - DNA, 19 bp, Homo sapiens
  siRNA target sequence for PEX1 (NM_000466.1,1411-1429).
gagaatttacctaaagaca

SEQ ID NO: 96418 - DNA, 19 bp, Homo sapiens
  siRNA target sequence for PEX1 (NM_000466.1,1438-1456).
gaagacataaaaactgtat

SEQ ID NO: 96419 - DNA, 19 bp, Homo sapiens
  siRNA target sequence for PEX1 (NM_000466.1,1485-1503).
caccatgcttcctttggta

SEQ ID NO: 96420 - DNA, 19 bp, Homo sapiens
  siRNA target sequence for PEX1 (NM_000466.1,1491-1509).
gcttcctttggtaatatca

SEQ ID NO: 96421 - DNA, 19 bp, Homo sapiens
  siRNA target sequence for PEX1 (NM_000466.1,1561-1579).
ctgagtatagttcattctt

SEQ ID NO: 96422 - DNA, 19 bp, Homo sapiens
  siRNA target sequence for PEX1 (NM_000466.1,1640-1658).
caatacaagtccttctaga

SEQ ID NO: 96423 - DNA, 19 bp, Homo sapiens
  siRNA target sequence for PEX1 (NM_000466.1,1650-1668).
ccttctagatcctatggta

SEQ ID NO: 96424 - DNA, 19 bp, Homo sapiens
  siRNA target sequence for PEX1 (NM_000466.1,1651-1669).
cttctagatcctatggtaa

SEQ ID NO: 96425 - DNA, 19 bp, Homo sapiens
  siRNA target sequence for PEX1 (NM_000466.1,1863-1881).
gggaagtggaaaatcaact

SEQ ID NO: 96426 - DNA, 19 bp, Homo sapiens
  siRNA target sequence for PEX1 (NM_000466.1,1864-1882).
ggaagtggaaaatcaactt

SEQ ID NO: 96427 - DNA, 19 bp, Homo sapiens
  siRNA target sequence for PEX1 (NM_000466.1,1877-1895).
caactttagccaaagcaat

SEQ ID NO: 96428 - DNA, 19 bp, Homo sapiens
  siRNA target sequence for PEX1 (NM_000466.1,1935-1953).
gagagttgactgtaaagct

SEQ ID NO: 96429 - DNA, 19 bp, Homo sapiens
  siRNA target sequence for PEX1 (NM_000466.1,1937-1955).
gagttgactgtaaagcttt

SEQ ID NO: 96430 - DNA, 19 bp, Homo sapiens
  siRNA target sequence for PEX1 (NM_000466.1,1957-1975).
cgaggaaaaaggcttgaaa

SEQ ID NO: 96431 - DNA, 19 bp, Homo sapiens
  siRNA target sequence for PEX1 (NM_000466.1,1967-1985).
ggcttgaaaacatacaaaa

SEQ ID NO: 96432 - DNA, 19 bp, Homo sapiens
  siRNA target sequence for PEX1 (NM_000466.1,2072-2090).
ctgctgtcccggaacatga

SEQ ID NO: 96433 - DNA, 19 bp, Homo sapiens
  siRNA target sequence for PEX1 (NM_000466.1,2128-2146).
catgctttgaatgatatga

SEQ ID NO: 96434 - DNA, 19 bp, Homo sapiens
  siRNA target sequence for PEX1 (NM_000466.1,2199-2217).
gtctcagcaatctctacat

SEQ ID NO: 96435 - DNA, 19 bp, Homo sapiens
  siRNA target sequence for PEX1 (NM_000466.1,2239-2257).
ggagttcacatatttcagt

SEQ ID NO: 96436 - DNA, 19 bp, Homo sapiens
  siRNA target sequence for PEX1 (NM_000466.1,2275-2293).
cctcctaatcaggaacaaa

SEQ ID NO: 96437 - DNA, 19 bp, Homo sapiens
  siRNA target sequence for PEX1 (NM_000466.1,2299-2317).
gaaattctgtgtaatgtaa

SEQ ID NO: 96438 - DNA, 19 bp, Homo sapiens
  siRNA target sequence for PEX1 (NM_000466.1,2393-2411).
ggtttgtggctagagattt

SEQ ID NO: 96439 - DNA, 19 bp, Homo sapiens
  siRNA target sequence for PEX1 (NM_000466.1,2394-2412).
gtttgtggctagagatttt

SEQ ID NO: 96440 - DNA, 19 bp, Homo sapiens
  siRNA target sequence for PEX1 (NM_000466.1,2405-2423).
gagattttacagtacttgt

SEQ ID NO: 96441 - DNA, 19 bp, Homo sapiens
  siRNA target sequence for PEX1 (NM_000466.1,2422-2440).
gtggatcgagccatacatt

SEQ ID NO: 96442 - DNA, 19 bp, Homo sapiens
  siRNA target sequence for PEX1 (NM_000466.1,2424-2442).
ggatcgagccatacattct

SEQ ID NO: 96443 - DNA, 19 bp, Homo sapiens
  siRNA target sequence for PEX1 (NM_000466.1,2444-2462).
gactctctcgtcagagtat

SEQ ID NO: 96444 - DNA, 19 bp, Homo sapiens
  siRNA target sequence for PEX1 (NM_000466.1,2446-2464).
ctctctcgtcagagtatat

SEQ ID NO: 96445 - DNA, 19 bp, Homo sapiens
  siRNA target sequence for PEX1 (NM_000466.1,2508-2526).
ggctctccgcggatttctt

SEQ ID NO: 96446 - DNA, 19 bp, Homo sapiens
  siRNA target sequence for PEX1 (NM_000466.1,2545-2563).
gtcaacctgcataaaccta

SEQ ID NO: 96447 - DNA, 19 bp, Homo sapiens
  siRNA target sequence for PEX1 (NM_000466.1,2608-2626).
cagatactcatggatacta

SEQ ID NO: 96448 - DNA, 19 bp, Homo sapiens
  siRNA target sequence for PEX1 (NM_000466.1,2628-2646).
ccagttacctgccaagtat

SEQ ID NO: 96449 - DNA, 19 bp, Homo sapiens
  siRNA target sequence for PEX1 (NM_000466.1,2639-2657).
ccaagtatccagaattatt

SEQ ID NO: 96450 - DNA, 19 bp, Homo sapiens
  siRNA target sequence for PEX1 (NM_000466.1,2667-2685).
gcccatacgacaaagaaca

SEQ ID NO: 96451 - DNA, 19 bp, Homo sapiens
  siRNA target sequence for PEX1 (NM_000466.1,2675-2693).
gacaaagaacaggaatact

SEQ ID NO: 96452 - DNA, 19 bp, Homo sapiens
  siRNA target sequence for PEX1 (NM_000466.1,2681-2699).
gaacaggaatactgttgta

SEQ ID NO: 96453 - DNA, 19 bp, Homo sapiens
  siRNA target sequence for PEX1 (NM_000466.1,2724-2742).
cttactagctggggtaatt

SEQ ID NO: 96454 - DNA, 19 bp, Homo sapiens
  siRNA target sequence for PEX1 (NM_000466.1,2743-2761).
gcacgagagagtagaatga

SEQ ID NO: 96455 - DNA, 19 bp, Homo sapiens
  siRNA target sequence for PEX1 (NM_000466.1,2746-2764).
cgagagagtagaatgaatt

SEQ ID NO: 96456 - DNA, 19 bp, Homo sapiens
  siRNA target sequence for PEX1 (NM_000466.1,2782-2800).
ccagagttactcagcaaat

SEQ ID NO: 96457 - DNA, 19 bp, Homo sapiens
  siRNA target sequence for PEX1 (NM_000466.1,2818-2836).
caagctgttcgggatattt

SEQ ID NO: 96458 - DNA, 19 bp, Homo sapiens
  siRNA target sequence for PEX1 (NM_000466.1,2926-2944).
gttacagaccgagtagtta

SEQ ID NO: 96459 - DNA, 19 bp, Homo sapiens
  siRNA target sequence for PEX1 (NM_000466.1,2930-2948).
cagaccgagtagttaacca

SEQ ID NO: 96460 - DNA, 19 bp, Homo sapiens
  siRNA target sequence for PEX1 (NM_000466.1,2978-2996).
gcttacagggtgtttatgt

SEQ ID NO: 96461 - DNA, 19 bp, Homo sapiens
  siRNA target sequence for PEX1 (NM_000466.1,2979-2997).
cttacagggtgtttatgta

SEQ ID NO: 96462 - DNA, 19 bp, Homo sapiens
  siRNA target sequence for PEX1 (NM_000466.1,3008-3026).
ctagtcgccctgacttgat

SEQ ID NO: 96463 - DNA, 19 bp, Homo sapiens
  siRNA target sequence for PEX1 (NM_000466.1,3044-3062).
ggcctggtcgactagataa

SEQ ID NO: 96464 - DNA, 19 bp, Homo sapiens
  siRNA target sequence for PEX1 (NM_000466.1,3046-3064).
cctggtcgactagataaat

SEQ ID NO: 96465 - DNA, 19 bp, Homo sapiens
  siRNA target sequence for PEX1 (NM_000466.1,3050-3068).
gtcgactagataaatgtgt

SEQ ID NO: 96466 - DNA, 19 bp, Homo sapiens
  siRNA target sequence for PEX1 (NM_000466.1,3091-3109).
gtgtcacgtcttgaaattt

SEQ ID NO: 96467 - DNA, 19 bp, Homo sapiens
  siRNA target sequence for PEX1 (NM_000466.1,3191-3209).
gagctgatctgaaagcttt

SEQ ID NO: 96468 - DNA, 19 bp, Homo sapiens
  siRNA target sequence for PEX1 (NM_000466.1,3194-3212).
ctgatctgaaagctttact

SEQ ID NO: 96469 - DNA, 19 bp, Homo sapiens
  siRNA target sequence for PEX1 (NM_000466.1,3284-3302).
ctgatagtgacctaagtct

SEQ ID NO: 96470 - DNA, 19 bp, Homo sapiens
  siRNA target sequence for PEX1 (NM_000466.1,3308-3326).
caatggtctttcttaacca

SEQ ID NO: 96471 - DNA, 19 bp, Homo sapiens
  siRNA target sequence for PEX1 (NM_000466.1,3380-3398).
cccttgtttctttagagat

SEQ ID NO: 96472 - DNA, 19 bp, Homo sapiens
  siRNA target sequence for PEX1 (NM_000466.1,3402-3420).
cgagatccttccagatgaa

SEQ ID NO: 96473 - DNA, 19 bp, Homo sapiens
  siRNA target sequence for PEX1 (NM_000466.1,3444-3462).
ctactttggaagctcttat

SEQ ID NO: 96474 - DNA, 19 bp, Homo sapiens
  siRNA target sequence for PEX1 (NM_000466.1,3577-3595).
cagcctccagtgttaagga

SEQ ID NO: 96475 - DNA, 19 bp, Homo sapiens
  siRNA target sequence for PEX1 (NM_000466.1,3588-3606).
gttaaggacagcttcacaa

SEQ ID NO: 96476 - DNA, 19 bp, Homo sapiens
  siRNA target sequence for PEX1 (NM_000466.1,3609-3627).
gggttgccaagaacttaca

SEQ ID NO: 96477 - DNA, 19 bp, Homo sapiens
  siRNA target sequence for PEX1 (NM_000466.1,3611-3629).
gttgccaagaacttacaca

SEQ ID NO: 96478 - DNA, 19 bp, Homo sapiens
  siRNA target sequence for PEX1 (NM_000466.1,3643-3661).
caactgagggcagatatca

SEQ ID NO: 96479 - DNA, 19 bp, Homo sapiens
  siRNA target sequence for PEX1 (NM_000466.1,3648-3666).
gagggcagatatcagtatt

SEQ ID NO: 96480 - DNA, 19 bp, Homo sapiens
  siRNA target sequence for PEX1 (NM_000466.1,3692-3710).
gtggagaggacgaatccat

SEQ ID NO: 96481 - DNA, 19 bp, Homo sapiens
  siRNA target sequence for PEX1 (NM_000466.1,3780-3798).
cacaagaccatccattagt

SEQ ID NO: 96482 - DNA, 19 bp, Homo sapiens
  siRNA target sequence for PEX1 (NM_000466.1,3821-3839).
ctgagctatatgaaagctt

SEQ ID NO: 96483 - DNA, 19 bp, Homo sapiens
  siRNA target sequence for PEX1 (NM_000466.1,3826-3844).
ctatatgaaagctttcaaa

SEQ ID NO: 96484 - DNA, 19 bp, Homo sapiens
  siRNA target sequence for PEX1 (NM_000466.1,3879-3897).
gtttcgacctggacagaaa

SEQ ID NO: 96485 - DNA, 19 bp, Homo sapiens
  siRNA target sequence for PEX1 (NM_000466.1,3883-3901).
cgacctggacagaaagtaa

SEQ ID NO: 96486 - DNA, 19 bp, Homo sapiens
  siRNA target sequence for PEX1 (NM_000466.1,3886-3904).
cctggacagaaagtaactt

SEQ ID NO: 96487 - DNA, 19 bp, Homo sapiens
  siRNA target sequence for PEX6 (NM_000287.2,746-764).
gggacctctctgatagact

SEQ ID NO: 96488 - DNA, 19 bp, Homo sapiens
  siRNA target sequence for PEX6 (NM_000287.2,824-842).
ccactttggcttttaatct

SEQ ID NO: 96489 - DNA, 19 bp, Homo sapiens
  siRNA target sequence for PEX6 (NM_000287.2,900-918).
catcgcccctgaagacaaa

SEQ ID NO: 96490 - DNA, 19 bp, Homo sapiens
  siRNA target sequence for PEX6 (NM_000287.2,947-965).
catttgccagagagttaca

SEQ ID NO: 96491 - DNA, 19 bp, Homo sapiens
  siRNA target sequence for PEX6 (NM_000287.2,1079-1097).
caacaattgggcaagtaga

SEQ ID NO: 96492 - DNA, 19 bp, Homo sapiens
  siRNA target sequence for PEX6 (NM_000287.2,1082-1100).
caattgggcaagtagagat

SEQ ID NO: 96493 - DNA, 19 bp, Homo sapiens
  siRNA target sequence for PEX6 (NM_000287.2,1126-1144).
cccaggtggcgggaaatgt

SEQ ID NO: 96494 - DNA, 19 bp, Homo sapiens
  siRNA target sequence for PEX6 (NM_000287.2,1133-1151).
ggcgggaaatgttttttaa

SEQ ID NO: 96495 - DNA, 19 bp, Homo sapiens
  siRNA target sequence for PEX6 (NM_000287.2,1459-1477).
cttgggctccacttactga

SEQ ID NO: 96496 - DNA, 19 bp, Homo sapiens
  siRNA target sequence for PEX6 (NM_000287.2,1655-1673).
gtcacctcctcctcaatga

SEQ ID NO: 96497 - DNA, 19 bp, Homo sapiens
  siRNA target sequence for PEX6 (NM_000287.2,2381-2399).
ctgcagctccatgcattat

SEQ ID NO: 96498 - DNA, 19 bp, Homo sapiens
  siRNA target sequence for PEX6 (NM_000287.2,2383-2401).
gcagctccatgcattatct

SEQ ID NO: 96499 - DNA, 19 bp, Homo sapiens
  siRNA target sequence for PEX6 (NM_000287.2,2386-2404).
gctccatgcattatcttct

SEQ ID NO: 96500 - DNA, 19 bp, Homo sapiens
  siRNA target sequence for PEX6 (NM_000287.2,2513-2531).
gcactcaggatgtgtttgt

SEQ ID NO: 96501 - DNA, 19 bp, Homo sapiens
  siRNA target sequence for PEX6 (NM_000287.2,2578-2596).
cggcctggcagatttgaca

SEQ ID NO: 96502 - DNA, 19 bp, Homo sapiens
  siRNA target sequence for PEX6 (NM_000287.2,2579-2597).
ggcctggcagatttgacaa

SEQ ID NO: 96503 - DNA, 19 bp, Homo sapiens
  siRNA target sequence for PEX6 (NM_000287.2,2684-2702).
ctgtgagcctggtaaacgt

SEQ ID NO: 96504 - DNA, 19 bp, Homo sapiens
  siRNA target sequence for PEX6 (NM_000287.2,2692-2710).
ctggtaaacgtgctagatt

SEQ ID NO: 96505 - DNA, 19 bp, Homo sapiens
  siRNA target sequence for PEX6 (NM_000287.2,2751-2769).
ctgctctgatgctatgaca

SEQ ID NO: 96506 - DNA, 19 bp, Homo sapiens
  siRNA target sequence for PEX6 (NM_000287.2,2913-2931).
gcgcatccagcgcaagttt

SEQ ID NO: 96507 - DNA, 19 bp, Homo sapiens
  siRNA target sequence for PFAS (NM_012393.1,105-123).
ccccagtccttcacttcta

SEQ ID NO: 96508 - DNA, 19 bp, Homo sapiens
  siRNA target sequence for PFAS (NM_012393.1,108-126).
cagtccttcacttctatgt

SEQ ID NO: 96509 - DNA, 19 bp, Homo sapiens
  siRNA target sequence for PFAS (NM_012393.1,278-296).
ctgatgtggctgtttggtt

SEQ ID NO: 96510 - DNA, 19 bp, Homo sapiens
  siRNA target sequence for PFAS (NM_012393.1,606-624).
ccctcaatggccctatcaa

SEQ ID NO: 96511 - DNA, 19 bp, Homo sapiens
  siRNA target sequence for PFAS (NM_012393.1,607-625).
cctcaatggccctatcaat

SEQ ID NO: 96512 - DNA, 19 bp, Homo sapiens
  siRNA target sequence for PFAS (NM_012393.1,608-626).
ctcaatggccctatcaata

SEQ ID NO: 96513 - DNA, 19 bp, Homo sapiens
  siRNA target sequence for PFAS (NM_012393.1,610-628).
caatggccctatcaatata

SEQ ID NO: 96514 - DNA, 19 bp, Homo sapiens
  siRNA target sequence for PFAS (NM_012393.1,671-689).
cttggtctggctttagact

SEQ ID NO: 96515 - DNA, 19 bp, Homo sapiens
  siRNA target sequence for PFAS (NM_012393.1,690-708).
cttgggacctagacttcta

SEQ ID NO: 96516 - DNA, 19 bp, Homo sapiens
  siRNA target sequence for PFAS (NM_012393.1,761-779).
gacttggcgcagtccaata

SEQ ID NO: 96517 - DNA, 19 bp, Homo sapiens
  siRNA target sequence for PFAS (NM_012393.1,789-807).
gccgacactggttcttcaa

SEQ ID NO: 96518 - DNA, 19 bp, Homo sapiens
  siRNA target sequence for PFAS (NM_012393.1,839-857).
gtgcactcactgtttgagt

SEQ ID NO: 96519 - DNA, 19 bp, Homo sapiens
  siRNA target sequence for PFAS (NM_012393.1,887-905).
cccaacaacgtcctcaaat

SEQ ID NO: 96520 - DNA, 19 bp, Homo sapiens
  siRNA target sequence for PFAS (NM_012393.1,888-906).
ccaacaacgtcctcaaatt

SEQ ID NO: 96521 - DNA, 19 bp, Homo sapiens
  siRNA target sequence for PFAS (NM_012393.1,892-910).
caacgtcctcaaattctgt

SEQ ID NO: 96522 - DNA, 19 bp, Homo sapiens
  siRNA target sequence for PFAS (NM_012393.1,994-1012).
gcaagggctgagacatgtt

SEQ ID NO: 96523 - DNA, 19 bp, Homo sapiens
  siRNA target sequence for PFAS (NM_012393.1,1138-1156).
cactgccggctattgcttt

SEQ ID NO: 96524 - DNA, 19 bp, Homo sapiens
  siRNA target sequence for PFAS (NM_012393.1,1142-1160).
gccggctattgctttggaa

SEQ ID NO: 96525 - DNA, 19 bp, Homo sapiens
  siRNA target sequence for PFAS (NM_012393.1,1144-1162).
cggctattgctttggaaat

SEQ ID NO: 96526 - DNA, 19 bp, Homo sapiens
  siRNA target sequence for PFAS (NM_012393.1,1234-1252).
cctggaggttgccattgaa

SEQ ID NO: 96527 - DNA, 19 bp, Homo sapiens
  siRNA target sequence for PFAS (NM_012393.1,1246-1264).
cattgaagccagtaatgga

SEQ ID NO: 96528 - DNA, 19 bp, Homo sapiens
  siRNA target sequence for PFAS (NM_012393.1,1360-1378).
gatcaagcccatcatgttt

SEQ ID NO: 96529 - DNA, 19 bp, Homo sapiens
  siRNA target sequence for PFAS (NM_012393.1,1400-1418).
gaagctgaccacataagca

SEQ ID NO: 96530 - DNA, 19 bp, Homo sapiens
  siRNA target sequence for PFAS (NM_012393.1,1432-1450).
gccaggcatggaagttgta

SEQ ID NO: 96531 - DNA, 19 bp, Homo sapiens
  siRNA target sequence for PFAS (NM_012393.1,1433-1451).
ccaggcatggaagttgtaa

SEQ ID NO: 96532 - DNA, 19 bp, Homo sapiens
  siRNA target sequence for PFAS (NM_012393.1,1437-1455).
gcatggaagttgtaaaggt

SEQ ID NO: 96533 - DNA, 19 bp, Homo sapiens
  siRNA target sequence for PFAS (NM_012393.1,1438-1456).
catggaagttgtaaaggtt

SEQ ID NO: 96534 - DNA, 19 bp, Homo sapiens
  siRNA target sequence for PFAS (NM_012393.1,1508-1526).
caggtgcagggagataaca

SEQ ID NO: 96535 - DNA, 19 bp, Homo sapiens
  siRNA target sequence for PFAS (NM_012393.1,2133-2151).
gctacctcaccaataaggt

SEQ ID NO: 96536 - DNA, 19 bp, Homo sapiens
  siRNA target sequence for PFAS (NM_012393.1,2643-2661).
gaggccatctgctctatgt

SEQ ID NO: 96537 - DNA, 19 bp, Homo sapiens
  siRNA target sequence for PFAS (NM_012393.1,3304-3322).
gcgagaggagggcagtaat

SEQ ID NO: 96538 - DNA, 19 bp, Homo sapiens
  siRNA target sequence for PFAS (NM_012393.1,3405-3423).
caattgggctggacacttt

SEQ ID NO: 96539 - DNA, 19 bp, Homo sapiens
  siRNA target sequence for PFAS (NM_012393.1,3792-3810).
gtgcgcacggggaaggtta

SEQ ID NO: 96540 - DNA, 19 bp, Homo sapiens
  siRNA target sequence for PFAS (NM_012393.1,3796-3814).
gcacggggaaggttacgta

SEQ ID NO: 96541 - DNA, 19 bp, Homo sapiens
  siRNA target sequence for PFAS (NM_012393.1,3801-3819).
gggaaggttacgtagcatt

SEQ ID NO: 96542 - DNA, 19 bp, Homo sapiens
  siRNA target sequence for PFAS (NM_012393.1,3803-3821).
gaaggttacgtagcatttt

SEQ ID NO: 96543 - DNA, 19 bp, Homo sapiens
  siRNA target sequence for PFAS (NM_012393.1,3806-3824).
ggttacgtagcattttctt

SEQ ID NO: 96544 - DNA, 19 bp, Homo sapiens
  siRNA target sequence for PFAS (NM_012393.1,4026-4044).
ggcgaccccctccatttga

SEQ ID NO: 96545 - DNA, 19 bp, Homo sapiens
  siRNA target sequence for PFAS (NM_012393.1,4027-4045).
gcgaccccctccatttgat

SEQ ID NO: 96546 - DNA, 19 bp, Homo sapiens
  siRNA target sequence for PFAS (NM_012393.1,4028-4046).
cgaccccctccatttgata

SEQ ID NO: 96547 - DNA, 19 bp, Homo sapiens
  siRNA target sequence for PFAS (NM_012393.1,4032-4050).
cccctccatttgatactct

SEQ ID NO: 96548 - DNA, 19 bp, Homo sapiens
  siRNA target sequence for PFAS (NM_012393.1,4065-4083).
ggctccagctctttatcaa

SEQ ID NO: 96549 - DNA, 19 bp, Homo sapiens
  siRNA target sequence for PFAS (NM_012393.1,4066-4084).
gctccagctctttatcaat

SEQ ID NO: 96550 - DNA, 19 bp, Homo sapiens
  siRNA target sequence for PFKFB1 (NM_002625.1,166-184).
gagaaggggctcatccata

SEQ ID NO: 96551 - DNA, 19 bp, Homo sapiens
  siRNA target sequence for PFKFB1 (NM_002625.1,180-198).
ccataccccagtttaccaa

SEQ ID NO: 96552 - DNA, 19 bp, Homo sapiens
  siRNA target sequence for PFKFB1 (NM_002625.1,214-232).
gatcatggtgggtttacca

SEQ ID NO: 96553 - DNA, 19 bp, Homo sapiens
  siRNA target sequence for PFKFB1 (NM_002625.1,234-252).
ctcgaggcaagacctatat

SEQ ID NO: 96554 - DNA, 19 bp, Homo sapiens
  siRNA target sequence for PFKFB1 (NM_002625.1,256-274).
cacaaagctcacacgatat

SEQ ID NO: 96555 - DNA, 19 bp, Homo sapiens
  siRNA target sequence for PFKFB1 (NM_002625.1,258-276).
caaagctcacacgatatct

SEQ ID NO: 96556 - DNA, 19 bp, Homo sapiens
  siRNA target sequence for PFKFB1 (NM_002625.1,282-300).
ggataggaacaccaactaa

SEQ ID NO: 96557 - DNA, 19 bp, Homo sapiens
  siRNA target sequence for PFKFB1 (NM_002625.1,287-305).
ggaacaccaactaaagtgt

SEQ ID NO: 96558 - DNA, 19 bp, Homo sapiens
  siRNA target sequence for PFKFB1 (NM_002625.1,288-306).
gaacaccaactaaagtgtt

SEQ ID NO: 96559 - DNA, 19 bp, Homo sapiens
  siRNA target sequence for PFKFB1 (NM_002625.1,332-350).
gcagtgagctacaagaact

SEQ ID NO: 96560 - DNA, 19 bp, Homo sapiens
  siRNA target sequence for PFKFB1 (NM_002625.1,418-436).
gaaggatgttcacaactat

SEQ ID NO: 96561 - DNA, 19 bp, Homo sapiens
  siRNA target sequence for PFKFB1 (NM_002625.1,422-440).
gatgttcacaactatctca

SEQ ID NO: 96562 - DNA, 19 bp, Homo sapiens
  siRNA target sequence for PFKFB1 (NM_002625.1,503-521).
ctgatcctgcagtttgcaa

SEQ ID NO: 96563 - DNA, 19 bp, Homo sapiens
  siRNA target sequence for PFKFB1 (NM_002625.1,505-523).
gatcctgcagtttgcaaaa

SEQ ID NO: 96564 - DNA, 19 bp, Homo sapiens
  siRNA target sequence for PFKFB1 (NM_002625.1,531-549).
gttacaaggtgtttttcat

SEQ ID NO: 96565 - DNA, 19 bp, Homo sapiens
  siRNA target sequence for PFKFB1 (NM_002625.1,561-579).
gtaatgaccctggcataat

SEQ ID NO: 96566 - DNA, 19 bp, Homo sapiens
  siRNA target sequence for PFKFB1 (NM_002625.1,609-627).
gcagccctgattatataga

SEQ ID NO: 96567 - DNA, 19 bp, Homo sapiens
  siRNA target sequence for PFKFB1 (NM_002625.1,858-876).
gcgagagtgaactcaacat

SEQ ID NO: 96568 - DNA, 19 bp, Homo sapiens
  siRNA target sequence for PFKFB1 (NM_002625.1,1084-1102).
ggagatgacctatgaagaa

SEQ ID NO: 96569 - DNA, 19 bp, Homo sapiens
  siRNA target sequence for PFKFB1 (NM_002625.1,1109-1127).
gaacattaccctgaagaat

SEQ ID NO: 96570 - DNA, 19 bp, Homo sapiens
  siRNA target sequence for PFKFB1 (NM_002625.1,1130-1148).
gcactgcgagaccaagata

SEQ ID NO: 96571 - DNA, 19 bp, Homo sapiens
  siRNA target sequence for PFKFB1 (NM_002625.1,1133-1151).
ctgcgagaccaagataaat

SEQ ID NO: 96572 - DNA, 19 bp, Homo sapiens
  siRNA target sequence for PFKFB1 (NM_002625.1,1199-1217).
cgtctggagccagtgataa

SEQ ID NO: 96573 - DNA, 19 bp, Homo sapiens
  siRNA target sequence for PFKFB1 (NM_002625.1,1282-1300).
ggcctatttcctggataaa

SEQ ID NO: 96574 - DNA, 19 bp, Homo sapiens
  siRNA target sequence for PFKFB1 (NM_002625.1,1302-1320).
gttcagatgagcttccata

SEQ ID NO: 96575 - DNA, 19 bp, Homo sapiens
  siRNA target sequence for PFKFB2 (NM_006212.1,140-158).
cccaaatcttcgaatgtca

SEQ ID NO: 96576 - DNA, 19 bp, Homo sapiens
  siRNA target sequence for PFKFB2 (NM_006212.1,155-173).
gtcagagaagaaatgttca

SEQ ID NO: 96577 - DNA, 19 bp, Homo sapiens
  siRNA target sequence for PFKFB2 (NM_006212.1,196-214).
ccccgactctgatcgttat

SEQ ID NO: 96578 - DNA, 19 bp, Homo sapiens
  siRNA target sequence for PFKFB2 (NM_006212.1,198-216).
ccgactctgatcgttatga

SEQ ID NO: 96579 - DNA, 19 bp, Homo sapiens
  siRNA target sequence for PFKFB2 (NM_006212.1,204-222).
ctgatcgttatgattggtt

SEQ ID NO: 96580 - DNA, 19 bp, Homo sapiens
  siRNA target sequence for PFKFB2 (NM_006212.1,287-305).
ccccaccaaagtgtttaat

SEQ ID NO: 96581 - DNA, 19 bp, Homo sapiens
  siRNA target sequence for PFKFB2 (NM_006212.1,289-307).
ccaccaaagtgtttaatct

SEQ ID NO: 96582 - DNA, 19 bp, Homo sapiens
  siRNA target sequence for PFKFB2 (NM_006212.1,324-342).
gaagcagtcaagtcctata

SEQ ID NO: 96583 - DNA, 19 bp, Homo sapiens
  siRNA target sequence for PFKFB2 (NM_006212.1,327-345).
gcagtcaagtcctataagt

SEQ ID NO: 96584 - DNA, 19 bp, Homo sapiens
  siRNA target sequence for PFKFB2 (NM_006212.1,353-371).
cttctttcggcatgacaat

SEQ ID NO: 96585 - DNA, 19 bp, Homo sapiens
  siRNA target sequence for PFKFB2 (NM_006212.1,407-425).
ggtggcgctggaagatgtt

SEQ ID NO: 96586 - DNA, 19 bp, Homo sapiens
  siRNA target sequence for PFKFB2 (NM_006212.1,408-426).
gtggcgctggaagatgtta

SEQ ID NO: 96587 - DNA, 19 bp, Homo sapiens
  siRNA target sequence for PFKFB2 (NM_006212.1,420-438).
gatgttaaggcgtatctca

SEQ ID NO: 96588 - DNA, 19 bp, Homo sapiens
  siRNA target sequence for PFKFB2 (NM_006212.1,464-482).
gtttgatgccaccaataca

SEQ ID NO: 96589 - DNA, 19 bp, Homo sapiens
  siRNA target sequence for PFKFB2 (NM_006212.1,489-507).
gagaggagggacatgattt

SEQ ID NO: 96590 - DNA, 19 bp, Homo sapiens
  siRNA target sequence for PFKFB2 (NM_006212.1,559-577).
gtgatgatcctgatgtcat

SEQ ID NO: 96591 - DNA, 19 bp, Homo sapiens
  siRNA target sequence for PFKFB2 (NM_006212.1,602-620).
ggtatcaagccctgactat

SEQ ID NO: 96592 - DNA, 19 bp, Homo sapiens
  siRNA target sequence for PFKFB2 (NM_006212.1,694-712).
ctcttgacccagacaacta

SEQ ID NO: 96593 - DNA, 19 bp, Homo sapiens
  siRNA target sequence for PFKFB2 (NM_006212.1,710-728).
ctatgacaaggatctttct

SEQ ID NO: 96594 - DNA, 19 bp, Homo sapiens
  siRNA target sequence for PFKFB2 (NM_006212.1,727-745).
ctttcatcaaggtgataaa

SEQ ID NO: 96595 - DNA, 19 bp, Homo sapiens
  siRNA target sequence for PFKFB2 (NM_006212.1,751-769).
gccagcgatttttagtcaa

SEQ ID NO: 96596 - DNA, 19 bp, Homo sapiens
  siRNA target sequence for PFKFB2 (NM_006212.1,825-843).
gtccagcctcgcaccattt

SEQ ID NO: 96597 - DNA, 19 bp, Homo sapiens
  siRNA target sequence for PFKFB2 (NM_006212.1,872-890).
caatctcttggggaagatt

SEQ ID NO: 96598 - DNA, 19 bp, Homo sapiens
  siRNA target sequence for PFKFB2 (NM_006212.1,931-949).
cccaagctctaaggaaatt

SEQ ID NO: 96599 - DNA, 19 bp, Homo sapiens
  siRNA target sequence for PFKFB2 (NM_006212.1,1088-1106).
gatgacctatgcagagatt

SEQ ID NO: 96600 - DNA, 19 bp, Homo sapiens
  siRNA target sequence for PFKFB2 (NM_006212.1,1127-1145).
gtttgcacttcgagatcaa

SEQ ID NO: 96601 - DNA, 19 bp, Homo sapiens
  siRNA target sequence for PFKFB2 (NM_006212.1,1138-1156).
gagatcaagagaagtatct

SEQ ID NO: 96602 - DNA, 19 bp, Homo sapiens
  siRNA target sequence for PFKFB2 (NM_006212.1,1146-1164).
gagaagtatctgtatcgat

SEQ ID NO: 96603 - DNA, 19 bp, Homo sapiens
  siRNA target sequence for PFKFB2 (NM_006212.1,1151-1169).
gtatctgtatcgatatcct

SEQ ID NO: 96604 - DNA, 19 bp, Homo sapiens
  siRNA target sequence for PFKFB2 (NM_006212.1,1308-1326).
gatgagctaccatacttga

SEQ ID NO: 96605 - DNA, 19 bp, Homo sapiens
  siRNA target sequence for PFKFB2 (NM_006212.1,1327-1345).
gatgccctctccataccat

SEQ ID NO: 96606 - DNA, 19 bp, Homo sapiens
  siRNA target sequence for PFKFB2 (NM_006212.1,1338-1356).
cataccatcttcaaactta

SEQ ID NO: 96607 - DNA, 19 bp, Homo sapiens
  siRNA target sequence for PFKFB2 (NM_006212.1,1372-1390).
ggtgcaaagtggaaacaat

SEQ ID NO: 96608 - DNA, 19 bp, Homo sapiens
  siRNA target sequence for PFKFB2 (NM_006212.1,1422-1440).
cgtgacaagccaactaaca

SEQ ID NO: 96609 - DNA, 19 bp, Homo sapiens
  siRNA target sequence for PFKFB2 (NM_006212.1,1425-1443).
gacaagccaactaacaact

SEQ ID NO: 96610 - DNA, 19 bp, Homo sapiens
  siRNA target sequence for PFKFB2 (NM_006212.1,1496-1514).
gtccagttcgaatacaata

SEQ ID NO: 96611 - DNA, 19 bp, Homo sapiens
  siRNA target sequence for PFKFB3 (NM_004566.1,430-448).
gccttgagagatgtcaaaa

SEQ ID NO: 96612 - DNA, 19 bp, Homo sapiens
  siRNA target sequence for PFKFB3 (NM_004566.1,576-594).
gtgcgacgaccctacagtt

SEQ ID NO: 96613 - DNA, 19 bp, Homo sapiens
  siRNA target sequence for PFKFB3 (NM_004566.1,590-608).
cagttgtggcctccaatat

SEQ ID NO: 96614 - DNA, 19 bp, Homo sapiens
  siRNA target sequence for PFKFB3 (NM_004566.1,592-610).
gttgtggcctccaatatca

SEQ ID NO: 96615 - DNA, 19 bp, Homo sapiens
  siRNA target sequence for PFKFB3 (NM_004566.1,678-696).
gaagaggatcagttgctat

SEQ ID NO: 96616 - DNA, 19 bp, Homo sapiens
  siRNA target sequence for PFKFB3 (NM_004566.1,681-699).
gaggatcagttgctatgaa

SEQ ID NO: 96617 - DNA, 19 bp, Homo sapiens
  siRNA target sequence for PFKFB3 (NM_004566.1,737-755).
gggacttgtcgctgatcaa

SEQ ID NO: 96618 - DNA, 19 bp, Homo sapiens
  siRNA target sequence for PFKFB3 (NM_004566.1,746-764).
cgctgatcaaggtgattga

SEQ ID NO: 96619 - DNA, 19 bp, Homo sapiens
  siRNA target sequence for PFKFB3 (NM_004566.1,820-838).
gtgtactacctgatgaaca

SEQ ID NO: 96620 - DNA, 19 bp, Homo sapiens
  siRNA target sequence for PFKFB3 (NM_004566.1,1220-1238).
gcttggagccagtgatcat

SEQ ID NO: 96621 - DNA, 19 bp, Homo sapiens
  siRNA target sequence for PFKFB3 (NM_004566.1,1391-1409).
gctgccgtgtggaatccat

SEQ ID NO: 96622 - DNA, 19 bp, Homo sapiens
  siRNA target sequence for PFKFB3 (NM_004566.1,1479-1497).
gctcatgagacgcaatagt

SEQ ID NO: 96623 - DNA, 19 bp, Homo sapiens
  siRNA target sequence for PFKFB3 (NM_004566.1,1620-1638).
gcctggacaaaacatgaaa

SEQ ID NO: 96624 - DNA, 19 bp, Homo sapiens
  siRNA target sequence for PFKFB3 (NM_004566.1,1657-1675).
gactcctccaggaaacact

SEQ ID NO: 96625 - DNA, 19 bp, Homo sapiens
  siRNA target sequence for PFKFB4 (NM_004567.2,21-39).
gcgtccccacgggaattga

SEQ ID NO: 96626 - DNA, 19 bp, Homo sapiens
  siRNA target sequence for PFKFB4 (NM_004567.2,23-41).
gtccccacgggaattgaca

SEQ ID NO: 96627 - DNA, 19 bp, Homo sapiens
  siRNA target sequence for PFKFB4 (NM_004567.2,125-143).
caactgcccaactctcatt

SEQ ID NO: 96628 - DNA, 19 bp, Homo sapiens
  siRNA target sequence for PFKFB4 (NM_004567.2,130-148).
gcccaactctcattgtcat

SEQ ID NO: 96629 - DNA, 19 bp, Homo sapiens
  siRNA target sequence for PFKFB4 (NM_004567.2,221-239).
gcccactcgggagttcaat

SEQ ID NO: 96630 - DNA, 19 bp, Homo sapiens
  siRNA target sequence for PFKFB4 (NM_004567.2,224-242).
cactcgggagttcaatgtt

SEQ ID NO: 96631 - DNA, 19 bp, Homo sapiens
  siRNA target sequence for PFKFB4 (NM_004567.2,264-282).
gtcaagacctacaaatctt

SEQ ID NO: 96632 - DNA, 19 bp, Homo sapiens
  siRNA target sequence for PFKFB4 (NM_004567.2,269-287).
gacctacaaatcttttgaa

SEQ ID NO: 96633 - DNA, 19 bp, Homo sapiens
  siRNA target sequence for PFKFB4 (NM_004567.2,306-324).
gaagagggcctgaaaatca

SEQ ID NO: 96634 - DNA, 19 bp, Homo sapiens
  siRNA target sequence for PFKFB4 (NM_004567.2,383-401).
gggacatgtggcggttttt

SEQ ID NO: 96635 - DNA, 19 bp, Homo sapiens
  siRNA target sequence for PFKFB4 (NM_004567.2,426-444).
cggagagcgaccatcttta

SEQ ID NO: 96636 - DNA, 19 bp, Homo sapiens
  siRNA target sequence for PFKFB4 (NM_004567.2,427-445).
ggagagcgaccatctttaa

SEQ ID NO: 96637 - DNA, 19 bp, Homo sapiens
  siRNA target sequence for PFKFB4 (NM_004567.2,428-446).
gagagcgaccatctttaat

SEQ ID NO: 96638 - DNA, 19 bp, Homo sapiens
  siRNA target sequence for PFKFB4 (NM_004567.2,430-448).
gagcgaccatctttaattt

SEQ ID NO: 96639 - DNA, 19 bp, Homo sapiens
  siRNA target sequence for PFKFB4 (NM_004567.2,434-452).
gaccatctttaattttgga

SEQ ID NO: 96640 - DNA, 19 bp, Homo sapiens
  siRNA target sequence for PFKFB4 (NM_004567.2,517-535).
ccaacatcgtgcaagtgaa

SEQ ID NO: 96641 - DNA, 19 bp, Homo sapiens
  siRNA target sequence for PFKFB4 (NM_004567.2,576-594).
gctacggaggacttcatga

SEQ ID NO: 96642 - DNA, 19 bp, Homo sapiens
  siRNA target sequence for PFKFB4 (NM_004567.2,619-637).
cctacgagtcgctagatga

SEQ ID NO: 96643 - DNA, 19 bp, Homo sapiens
  siRNA target sequence for PFKFB4 (NM_004567.2,645-663).
gatagggacctgtcctata

SEQ ID NO: 96644 - DNA, 19 bp, Homo sapiens
  siRNA target sequence for PFKFB4 (NM_004567.2,649-667).
gggacctgtcctatatcaa

SEQ ID NO: 96645 - DNA, 19 bp, Homo sapiens
  siRNA target sequence for PFKFB4 (NM_004567.2,1028-1046).
cgaggaaattcaggataat

SEQ ID NO: 96646 - DNA, 19 bp, Homo sapiens
  siRNA target sequence for PFKFB4 (NM_004567.2,1306-1324).
gtaaagtggagtccatatt

SEQ ID NO: 96647 - DNA, 19 bp, Homo sapiens
  siRNA target sequence for PFKFB4 (NM_004567.2,1365-1383).
cagaacgtggacatctcaa

SEQ ID NO: 96648 - DNA, 19 bp, Homo sapiens
  siRNA target sequence for PFTK1 (NM_012395.2,198-216).
cgtgggaactccacagata

SEQ ID NO: 96649 - DNA, 19 bp, Homo sapiens
  siRNA target sequence for PFTK1 (NM_012395.2,203-221).
gaactccacagatatgtgt

SEQ ID NO: 96650 - DNA, 19 bp, Homo sapiens
  siRNA target sequence for PFTK1 (NM_012395.2,312-330).
gaggacacagagcactttt

SEQ ID NO: 96651 - DNA, 19 bp, Homo sapiens
  siRNA target sequence for PFTK1 (NM_012395.2,314-332).
ggacacagagcacttttga

SEQ ID NO: 96652 - DNA, 19 bp, Homo sapiens
  siRNA target sequence for PFTK1 (NM_012395.2,342-360).
gaaaccagctaatcaagta

SEQ ID NO: 96653 - DNA, 19 bp, Homo sapiens
  siRNA target sequence for PFTK1 (NM_012395.2,376-394).
gagaacaatgcttgcatta

SEQ ID NO: 96654 - DNA, 19 bp, Homo sapiens
  siRNA target sequence for PFTK1 (NM_012395.2,417-435).
caaagagtcacctaaagtt

SEQ ID NO: 96655 - DNA, 19 bp, Homo sapiens
  siRNA target sequence for PFTK1 (NM_012395.2,458-476).
cgccaacaagtcccaaatt

SEQ ID NO: 96656 - DNA, 19 bp, Homo sapiens
  siRNA target sequence for PFTK1 (NM_012395.2,514-532).
ggggaaggatcttatgcta

SEQ ID NO: 96657 - DNA, 19 bp, Homo sapiens
  siRNA target sequence for PFTK1 (NM_012395.2,520-538).
ggatcttatgctacagtat

SEQ ID NO: 96658 - DNA, 19 bp, Homo sapiens
  siRNA target sequence for PFTK1 (NM_012395.2,662-680).
ctaacatagtgctacttca

SEQ ID NO: 96659 - DNA, 19 bp, Homo sapiens
  siRNA target sequence for PFTK1 (NM_012395.2,702-720).
gacgctgacacttgtgttt

SEQ ID NO: 96660 - DNA, 19 bp, Homo sapiens
  siRNA target sequence for PFTK1 (NM_012395.2,704-722).
cgctgacacttgtgtttga

SEQ ID NO: 96661 - DNA, 19 bp, Homo sapiens
  siRNA target sequence for PFTK1 (NM_012395.2,708-726).
gacacttgtgtttgaatat

SEQ ID NO: 96662 - DNA, 19 bp, Homo sapiens
  siRNA target sequence for PFTK1 (NM_012395.2,828-846).
catccaccagcgttatatt

SEQ ID NO: 96663 - DNA, 19 bp, Homo sapiens
  siRNA target sequence for PFTK1 (NM_012395.2,884-902).
gtgacacgggggagttaaa

SEQ ID NO: 96664 - DNA, 19 bp, Homo sapiens
  siRNA target sequence for PFTK1 (NM_012395.2,915-933).
cggtcttgcaagagcaaaa

SEQ ID NO: 96665 - DNA, 19 bp, Homo sapiens
  siRNA target sequence for PFTK1 (NM_012395.2,935-953).
ccgtccctagccacacata

SEQ ID NO: 96666 - DNA, 19 bp, Homo sapiens
  siRNA target sequence for PFTK1 (NM_012395.2,996-1014).
ccttctaggctcaacagaa

SEQ ID NO: 96667 - DNA, 19 bp, Homo sapiens
  siRNA target sequence for PFTK1 (NM_012395.2,997-1015).
cttctaggctcaacagaat

SEQ ID NO: 96668 - DNA, 19 bp, Homo sapiens
  siRNA target sequence for PFTK1 (NM_012395.2,1000-1018).
ctaggctcaacagaatatt

SEQ ID NO: 96669 - DNA, 19 bp, Homo sapiens
  siRNA target sequence for PFTK1 (NM_012395.2,1003-1021).
ggctcaacagaatattcca

SEQ ID NO: 96670 - DNA, 19 bp, Homo sapiens
  siRNA target sequence for PFTK1 (NM_012395.2,1107-1125).
ggatcaacttgaacgaata

SEQ ID NO: 96671 - DNA, 19 bp, Homo sapiens
  siRNA target sequence for PFTK1 (NM_012395.2,1108-1126).
gatcaacttgaacgaatat

SEQ ID NO: 96672 - DNA, 19 bp, Homo sapiens
  siRNA target sequence for PFTK1 (NM_012395.2,1215-1233).
ctctaaaaaccttagacaa

SEQ ID NO: 96673 - DNA, 19 bp, Homo sapiens
  siRNA target sequence for PFTK1 (NM_012395.2,1327-1345).
gccttgagccacgagtatt

SEQ ID NO: 96674 - DNA, 19 bp, Homo sapiens
  siRNA target sequence for PFTK1 (NM_012395.2,1329-1347).
cttgagccacgagtatttt

SEQ ID NO: 96675 - DNA, 19 bp, Homo sapiens
  siRNA target sequence for PFTK1 (NM_012395.2,1334-1352).
gccacgagtattttagtga

SEQ ID NO: 96676 - DNA, 19 bp, Homo sapiens
  siRNA target sequence for PFTK1 (NM_012395.2,1377-1395).
caccgacatgtcttctatt

SEQ ID NO: 96677 - DNA, 19 bp, Homo sapiens
  siRNA target sequence for PFTK1 (NM_012395.2,1379-1397).
ccgacatgtcttctatttt

SEQ ID NO: 96678 - DNA, 19 bp, Homo sapiens
  siRNA target sequence for PFTK1 (NM_012395.2,1380-1398).
cgacatgtcttctattttt

SEQ ID NO: 96679 - DNA, 19 bp, Homo sapiens
  siRNA target sequence for PHKG1 (NM_006213.2,416-434).
gagaccaacactttcttct

SEQ ID NO: 96680 - DNA, 19 bp, Homo sapiens
  siRNA target sequence for PHKG1 (NM_006213.2,549-567).
gcaccttgcacaaactcaa

SEQ ID NO: 96681 - DNA, 19 bp, Homo sapiens
  siRNA target sequence for PHKG1 (NM_006213.2,1073-1091).
gcttcagtgcggatctact

SEQ ID NO: 96682 - DNA, 19 bp, Homo sapiens
  siRNA target sequence for PHKG2 (NM_000294.1,204-222).
ggtccgccgttgtgttcat

SEQ ID NO: 96683 - DNA, 19 bp, Homo sapiens
  siRNA target sequence for PHKG2 (NM_000294.1,376-394).
gattcctacgagtcttcta

SEQ ID NO: 96684 - DNA, 19 bp, Homo sapiens
  siRNA target sequence for PHKG2 (NM_000294.1,385-403).
gagtcttctagcttcatgt

SEQ ID NO: 96685 - DNA, 19 bp, Homo sapiens
  siRNA target sequence for PHKG2 (NM_000294.1,589-607).
cagatccgactttcagatt

SEQ ID NO: 96686 - DNA, 19 bp, Homo sapiens
  siRNA target sequence for PHKG2 (NM_000294.1,673-691).
ctagcgccagagatcctta

SEQ ID NO: 96687 - DNA, 19 bp, Homo sapiens
  siRNA target sequence for PHKG2 (NM_000294.1,676-694).
gcgccagagatccttaaat

SEQ ID NO: 96688 - DNA, 19 bp, Homo sapiens
  siRNA target sequence for PHKG2 (NM_000294.1,679-697).
ccagagatccttaaatgct

SEQ ID NO: 96689 - DNA, 19 bp, Homo sapiens
  siRNA target sequence for PHKG2 (NM_000294.1,811-829).
ctgatgttacgcatgatca

SEQ ID NO: 96690 - DNA, 19 bp, Homo sapiens
  siRNA target sequence for PHKG2 (NM_000294.1,870-888).
ccgttccagcactgtcaaa

SEQ ID NO: 96691 - DNA, 19 bp, Homo sapiens
  siRNA target sequence for PHKG2 (NM_000294.1,872-890).
gttccagcactgtcaaaga

SEQ ID NO: 96692 - DNA, 19 bp, Homo sapiens
  siRNA target sequence for PHKG2 (NM_000294.1,960-978).
cttctttgagcgttgtgaa

SEQ ID NO: 96693 - DNA, 19 bp, Homo sapiens
  siRNA target sequence for PHKG2 (NM_000294.1,1167-1185).
cgggcactgggtaaagaaa

SEQ ID NO: 96694 - DNA, 19 bp, Homo sapiens
  siRNA target sequence for PHKG2 (NM_000294.1,1263-1281).
gggagactctgctgctata

SEQ ID NO: 96695 - DNA, 19 bp, Homo sapiens
  siRNA target sequence for PHKG2 (NM_000294.1,1264-1282).
ggagactctgctgctataa

SEQ ID NO: 96696 - DNA, 19 bp, Homo sapiens
  siRNA target sequence for PIK3R4 (NM_014602.1,638-656).
ggggagtactcggtttttt

SEQ ID NO: 96697 - DNA, 19 bp, Homo sapiens
  siRNA target sequence for PIK3R4 (NM_014602.1,639-657).
gggagtactcggtttttta

SEQ ID NO: 96698 - DNA, 19 bp, Homo sapiens
  siRNA target sequence for PIK3R4 (NM_014602.1,641-659).
gagtactcggttttttaaa

SEQ ID NO: 96699 - DNA, 19 bp, Homo sapiens
  siRNA target sequence for PIK3R4 (NM_014602.1,689-707).
ggtcgttgtgaaggttttt

SEQ ID NO: 96700 - DNA, 19 bp, Homo sapiens
  siRNA target sequence for PIK3R4 (NM_014602.1,692-710).
cgttgtgaaggtttttgca

SEQ ID NO: 96701 - DNA, 19 bp, Homo sapiens
  siRNA target sequence for PIK3R4 (NM_014602.1,717-735).
gatcccacattgcctttaa

SEQ ID NO: 96702 - DNA, 19 bp, Homo sapiens
  siRNA target sequence for PIK3R4 (NM_014602.1,720-738).
cccacattgcctttaacca

SEQ ID NO: 96703 - DNA, 19 bp, Homo sapiens
  siRNA target sequence for PIK3R4 (NM_014602.1,764-782).
gaaaatcaggcttaattct

SEQ ID NO: 96704 - DNA, 19 bp, Homo sapiens
  siRNA target sequence for PIK3R4 (NM_014602.1,773-791).
gcttaattctgcacagaat

SEQ ID NO: 96705 - DNA, 19 bp, Homo sapiens
  siRNA target sequence for PIK3R4 (NM_014602.1,851-869).
gcagtatgtgcgagacaat

SEQ ID NO: 96706 - DNA, 19 bp, Homo sapiens
  siRNA target sequence for PIK3R4 (NM_014602.1,860-878).
gcgagacaatctctatgat

SEQ ID NO: 96707 - DNA, 19 bp, Homo sapiens
  siRNA target sequence for PIK3R4 (NM_014602.1,886-904).
gtacccgtccattcttgaa

SEQ ID NO: 96708 - DNA, 19 bp, Homo sapiens
  siRNA target sequence for PIK3R4 (NM_014602.1,889-907).
cccgtccattcttgaataa

SEQ ID NO: 96709 - DNA, 19 bp, Homo sapiens
  siRNA target sequence for PIK3R4 (NM_014602.1,891-909).
cgtccattcttgaataaca

SEQ ID NO: 96710 - DNA, 19 bp, Homo sapiens
  siRNA target sequence for PIK3R4 (NM_014602.1,892-910).
gtccattcttgaataacat

SEQ ID NO: 96711 - DNA, 19 bp, Homo sapiens
  siRNA target sequence for PIK3R4 (NM_014602.1,912-930).
gagaagcgctggattgctt

SEQ ID NO: 96712 - DNA, 19 bp, Homo sapiens
  siRNA target sequence for PIK3R4 (NM_014602.1,948-966).
gtggaccaagcacacaaat

SEQ ID NO: 96713 - DNA, 19 bp, Homo sapiens
  siRNA target sequence for PIK3R4 (NM_014602.1,975-993).
cgtcatggggacatcaaga

SEQ ID NO: 96714 - DNA, 19 bp, Homo sapiens
  siRNA target sequence for PIK3R4 (NM_014602.1,1004-1022).
gatggtcaccagttggaat

SEQ ID NO: 96715 - DNA, 19 bp, Homo sapiens
  siRNA target sequence for PIK3R4 (NM_014602.1,1015-1033).
gttggaattgggttcttct

SEQ ID NO: 96716 - DNA, 19 bp, Homo sapiens
  siRNA target sequence for PIK3R4 (NM_014602.1,1025-1043).
ggttcttctaactgatttt

SEQ ID NO: 96717 - DNA, 19 bp, Homo sapiens
  siRNA target sequence for PIK3R4 (NM_014602.1,1046-1064).
cagttttaagcccacttat

SEQ ID NO: 96718 - DNA, 19 bp, Homo sapiens
  siRNA target sequence for PIK3R4 (NM_014602.1,1048-1066).
gttttaagcccacttatct

SEQ ID NO: 96719 - DNA, 19 bp, Homo sapiens
  siRNA target sequence for PIK3R4 (NM_014602.1,1076-1094).
caacccggcagatttcaat

SEQ ID NO: 96720 - DNA, 19 bp, Homo sapiens
  siRNA target sequence for PIK3R4 (NM_014602.1,1079-1097).
cccggcagatttcaattat

SEQ ID NO: 96721 - DNA, 19 bp, Homo sapiens
  siRNA target sequence for PIK3R4 (NM_014602.1,1080-1098).
ccggcagatttcaattatt

SEQ ID NO: 96722 - DNA, 19 bp, Homo sapiens
  siRNA target sequence for PIK3R4 (NM_014602.1,1113-1131).
cggaggagaacttgctata

SEQ ID NO: 96723 - DNA, 19 bp, Homo sapiens
  siRNA target sequence for PIK3R4 (NM_014602.1,1167-1185).
gccactgagttagaatata

SEQ ID NO: 96724 - DNA, 19 bp, Homo sapiens
  siRNA target sequence for PIK3R4 (NM_014602.1,1195-1213).
cttcaactccgcttgtaga

SEQ ID NO: 96725 - DNA, 19 bp, Homo sapiens
  siRNA target sequence for PIK3R4 (NM_014602.1,1198-1216).
caactccgcttgtagactt

SEQ ID NO: 96726 - DNA, 19 bp, Homo sapiens
  siRNA target sequence for PIK3R4 (NM_014602.1,1203-1221).
ccgcttgtagacttaaata

SEQ ID NO: 96727 - DNA, 19 bp, Homo sapiens
  siRNA target sequence for PIK3R4 (NM_014602.1,1231-1249).
gaacaagaggagagttgaa

SEQ ID NO: 96728 - DNA, 19 bp, Homo sapiens
  siRNA target sequence for PIK3R4 (NM_014602.1,1281-1299).
gtgatagctgagcttttta

SEQ ID NO: 96729 - DNA, 19 bp, Homo sapiens
  siRNA target sequence for PIK3R4 (NM_014602.1,1283-1301).
gatagctgagctttttaca

SEQ ID NO: 96730 - DNA, 19 bp, Homo sapiens
  siRNA target sequence for PIK3R4 (NM_014602.1,1300-1318).
cagaaggtgtaccattatt

SEQ ID NO: 96731 - DNA, 19 bp, Homo sapiens
  siRNA target sequence for PIK3R4 (NM_014602.1,1361-1379).
ccctgaacaagtgctaaat

SEQ ID NO: 96732 - DNA, 19 bp, Homo sapiens
  siRNA target sequence for PIK3R4 (NM_014602.1,1428-1446).
cgtgagccagataaacgtt

SEQ ID NO: 96733 - DNA, 19 bp, Homo sapiens
  siRNA target sequence for PIK3R4 (NM_014602.1,1443-1461).
cgtttagaggcagaagatt

SEQ ID NO: 96734 - DNA, 19 bp, Homo sapiens
  siRNA target sequence for PIK3R4 (NM_014602.1,1555-1573).
ctgcagatgagcgtattct

SEQ ID NO: 96735 - DNA, 19 bp, Homo sapiens
  siRNA target sequence for PIK3R4 (NM_014602.1,1572-1590).
ctggttatacggaaggatt

SEQ ID NO: 96736 - DNA, 19 bp, Homo sapiens
  siRNA target sequence for PIK3R4 (NM_014602.1,1667-1685).
ggttatcttggtatctgtt

SEQ ID NO: 96737 - DNA, 19 bp, Homo sapiens
  siRNA target sequence for PIK3R4 (NM_014602.1,1696-1714).
gcctacagacccttaaata

SEQ ID NO: 96738 - DNA, 19 bp, Homo sapiens
  siRNA target sequence for PIK3R4 (NM_014602.1,1698-1716).
ctacagacccttaaatact

SEQ ID NO: 96739 - DNA, 19 bp, Homo sapiens
  siRNA target sequence for PIK3R4 (NM_014602.1,1781-1799).
ccttttggatcgtattact

SEQ ID NO: 96740 - DNA, 19 bp, Homo sapiens
  siRNA target sequence for PIK3R4 (NM_014602.1,1787-1805).
ggatcgtattactccatat

SEQ ID NO: 96741 - DNA, 19 bp, Homo sapiens
  siRNA target sequence for PIK3R4 (NM_014602.1,1792-1810).
gtattactccatatctttt

SEQ ID NO: 96742 - DNA, 19 bp, Homo sapiens
  siRNA target sequence for PIK3R4 (NM_014602.1,1856-1874).
gaggacgttgaccaaagtt

SEQ ID NO: 96743 - DNA, 19 bp, Homo sapiens
  siRNA target sequence for PIK3R4 (NM_014602.1,1886-1904).
caaagaggttcctcgtaat

SEQ ID NO: 96744 - DNA, 19 bp, Homo sapiens
  siRNA target sequence for PIK3R4 (NM_014602.1,1890-1908).
gaggttcctcgtaatgata

SEQ ID NO: 96745 - DNA, 19 bp, Homo sapiens
  siRNA target sequence for PIK3R4 (NM_014602.1,1893-1911).
gttcctcgtaatgatatca

SEQ ID NO: 96746 - DNA, 19 bp, Homo sapiens
  siRNA target sequence for PIK3R4 (NM_014602.1,1896-1914).
cctcgtaatgatatcaata

SEQ ID NO: 96747 - DNA, 19 bp, Homo sapiens
  siRNA target sequence for PIK3R4 (NM_014602.1,1897-1915).
ctcgtaatgatatcaatat

SEQ ID NO: 96748 - DNA, 19 bp, Homo sapiens
  siRNA target sequence for PIK3R4 (NM_014602.1,1954-1972).
cccaagatgatgctactat

SEQ ID NO: 96749 - DNA, 19 bp, Homo sapiens
  siRNA target sequence for PIK3R4 (NM_014602.1,1959-1977).
gatgatgctactatcgtta

SEQ ID NO: 96750 - DNA, 19 bp, Homo sapiens
  siRNA target sequence for PIK3R4 (NM_014602.1,2097-2115).
gttacacatccaaatggaa

SEQ ID NO: 96751 - DNA, 19 bp, Homo sapiens
  siRNA target sequence for PIK3R4 (NM_014602.1,2150-2168).
ggtccagcagaaagttgtt

SEQ ID NO: 96752 - DNA, 19 bp, Homo sapiens
  siRNA target sequence for PIK3R4 (NM_014602.1,2151-2169).
gtccagcagaaagttgtta

SEQ ID NO: 96753 - DNA, 19 bp, Homo sapiens
  siRNA target sequence for PIK3R4 (NM_014602.1,2154-2172).
cagcagaaagttgttactt

SEQ ID NO: 96754 - DNA, 19 bp, Homo sapiens
  siRNA target sequence for PIK3R4 (NM_014602.1,2159-2177).
gaaagttgttactttgcta

SEQ ID NO: 96755 - DNA, 19 bp, Homo sapiens
  siRNA target sequence for PIK3R4 (NM_014602.1,2179-2197).
gtgaccctgaaaatattgt

SEQ ID NO: 96756 - DNA, 19 bp, Homo sapiens
  siRNA target sequence for PIK3R4 (NM_014602.1,2181-2199).
gaccctgaaaatattgtaa

SEQ ID NO: 96757 - DNA, 19 bp, Homo sapiens
  siRNA target sequence for PIK3R4 (NM_014602.1,2259-2277).
gccaacgatgttttgttgt

SEQ ID NO: 96758 - DNA, 19 bp, Homo sapiens
  siRNA target sequence for PIK3R4 (NM_014602.1,2273-2291).
gttgtcccacatgattact

SEQ ID NO: 96759 - DNA, 19 bp, Homo sapiens
  siRNA target sequence for PIK3R4 (NM_014602.1,2316-2334).
catctacgtggagcatttt

SEQ ID NO: 96760 - DNA, 19 bp, Homo sapiens
  siRNA target sequence for PIK3R4 (NM_014602.1,2399-2417).
gctgcaacaaggtcttagt

SEQ ID NO: 96761 - DNA, 19 bp, Homo sapiens
  siRNA target sequence for PIK3R4 (NM_014602.1,2472-2490).
cagttaggactgctacaaa

SEQ ID NO: 96762 - DNA, 19 bp, Homo sapiens
  siRNA target sequence for PIK3R4 (NM_014602.1,2504-2522).
cgaatttgccagtgatatt

SEQ ID NO: 96763 - DNA, 19 bp, Homo sapiens
  siRNA target sequence for PIK3R4 (NM_014602.1,2531-2549).
cctgtgtcatcccaattta

SEQ ID NO: 96764 - DNA, 19 bp, Homo sapiens
  siRNA target sequence for PIK3R4 (NM_014602.1,2532-2550).
ctgtgtcatcccaatttat

SEQ ID NO: 96765 - DNA, 19 bp, Homo sapiens
  siRNA target sequence for PIK3R4 (NM_014602.1,2541-2559).
cccaatttatggatacgtt

SEQ ID NO: 96766 - DNA, 19 bp, Homo sapiens
  siRNA target sequence for PIK3R4 (NM_014602.1,2542-2560).
ccaatttatggatacgtta

SEQ ID NO: 96767 - DNA, 19 bp, Homo sapiens
  siRNA target sequence for PIK3R4 (NM_014602.1,2581-2599).
cagtggtagctcgtcaaat

SEQ ID NO: 96768 - DNA, 19 bp, Homo sapiens
  siRNA target sequence for PIK3R4 (NM_014602.1,2585-2603).
ggtagctcgtcaaataagt

SEQ ID NO: 96769 - DNA, 19 bp, Homo sapiens
  siRNA target sequence for PIK3R4 (NM_014602.1,2605-2623).
cagctgatgtctactgtaa

SEQ ID NO: 96770 - DNA, 19 bp, Homo sapiens
  siRNA target sequence for PIK3R4 (NM_014602.1,2608-2626).
ctgatgtctactgtaaact

SEQ ID NO: 96771 - DNA, 19 bp, Homo sapiens
  siRNA target sequence for PIK3R4 (NM_014602.1,2632-2650).
cttatcttgacccatatat

SEQ ID NO: 96772 - DNA, 19 bp, Homo sapiens
  siRNA target sequence for PIK3R4 (NM_014602.1,2644-2662).
catatattacccaaccaat

SEQ ID NO: 96773 - DNA, 19 bp, Homo sapiens
  siRNA target sequence for PIK3R4 (NM_014602.1,2654-2672).
ccaaccaataatacagatt

SEQ ID NO: 96774 - DNA, 19 bp, Homo sapiens
  siRNA target sequence for PIK3R4 (NM_014602.1,2682-2700).
cttgttctgctcagtgttt

SEQ ID NO: 96775 - DNA, 19 bp, Homo sapiens
  siRNA target sequence for PIK3R4 (NM_014602.1,2709-2727).
ccagtaagtcgttctatat

SEQ ID NO: 96776 - DNA, 19 bp, Homo sapiens
  siRNA target sequence for PIK3R4 (NM_014602.1,2710-2728).
cagtaagtcgttctatatt

SEQ ID NO: 96777 - DNA, 19 bp, Homo sapiens
  siRNA target sequence for PIK3R4 (NM_014602.1,2716-2734).
gtcgttctatatttgatta

SEQ ID NO: 96778 - DNA, 19 bp, Homo sapiens
  siRNA target sequence for PIK3R4 (NM_014602.1,2736-2754).
gctttgaggtctaaagata

SEQ ID NO: 96779 - DNA, 19 bp, Homo sapiens
  siRNA target sequence for PIK3R4 (NM_014602.1,2741-2759).
gaggtctaaagatattact

SEQ ID NO: 96780 - DNA, 19 bp, Homo sapiens
  siRNA target sequence for PIK3R4 (NM_014602.1,2864-2882).
gctctcacagggaatgaca

SEQ ID NO: 96781 - DNA, 19 bp, Homo sapiens
  siRNA target sequence for PIK3R4 (NM_014602.1,2916-2934).
gacttcatgatgaaatcta

SEQ ID NO: 96782 - DNA, 19 bp, Homo sapiens
  siRNA target sequence for PIK3R4 (NM_014602.1,2918-2936).
cttcatgatgaaatctaat

SEQ ID NO: 96783 - DNA, 19 bp, Homo sapiens
  siRNA target sequence for PIK3R4 (NM_014602.1,2980-2998).
gtagtcagaaaggtgtaat

SEQ ID NO: 96784 - DNA, 19 bp, Homo sapiens
  siRNA target sequence for PIK3R4 (NM_014602.1,3025-3043).
ggagacaagttgatcttgt

SEQ ID NO: 96785 - DNA, 19 bp, Homo sapiens
  siRNA target sequence for PIK3R4 (NM_014602.1,3178-3196).
gtgatcaggaggtgattca

SEQ ID NO: 96786 - DNA, 19 bp, Homo sapiens
  siRNA target sequence for PIK3R4 (NM_014602.1,3233-3251).
catttgtgtccctttgtca

SEQ ID NO: 96787 - DNA, 19 bp, Homo sapiens
  siRNA target sequence for PIK3R4 (NM_014602.1,3273-3291).
gtgacaactgtccaaaata

SEQ ID NO: 96788 - DNA, 19 bp, Homo sapiens
  siRNA target sequence for PIK3R4 (NM_014602.1,3297-3315).
ccagtaataccggttttaa

SEQ ID NO: 96789 - DNA, 19 bp, Homo sapiens
  siRNA target sequence for PIK3R4 (NM_014602.1,3306-3324).
ccggttttaagtagtacaa

SEQ ID NO: 96790 - DNA, 19 bp, Homo sapiens
  siRNA target sequence for PIK3R4 (NM_014602.1,3307-3325).
cggttttaagtagtacaat

SEQ ID NO: 96791 - DNA, 19 bp, Homo sapiens
  siRNA target sequence for PIK3R4 (NM_014602.1,3334-3352).
ccacctatcagattcgaat

SEQ ID NO: 96792 - DNA, 19 bp, Homo sapiens
  siRNA target sequence for PIK3R4 (NM_014602.1,3335-3353).
cacctatcagattcgaatt

SEQ ID NO: 96793 - DNA, 19 bp, Homo sapiens
  siRNA target sequence for PIK3R4 (NM_014602.1,3342-3360).
cagattcgaattacaactt

SEQ ID NO: 96794 - DNA, 19 bp, Homo sapiens
  siRNA target sequence for PIK3R4 (NM_014602.1,3348-3366).
cgaattacaacttgtaaaa

SEQ ID NO: 96795 - DNA, 19 bp, Homo sapiens
  siRNA target sequence for PIK3R4 (NM_014602.1,3404-3422).
gtgcaatgctgagagaata

SEQ ID NO: 96796 - DNA, 19 bp, Homo sapiens
  siRNA target sequence for PIK3R4 (NM_014602.1,3418-3436).
gaatagctaagcagatgat

SEQ ID NO: 96797 - DNA, 19 bp, Homo sapiens
  siRNA target sequence for PIK3R4 (NM_014602.1,3481-3499).
gtcctaaagggctgttagt

SEQ ID NO: 96798 - DNA, 19 bp, Homo sapiens
  siRNA target sequence for PIK3R4 (NM_014602.1,3504-3522).
catcttcatgagcataaat

SEQ ID NO: 96799 - DNA, 19 bp, Homo sapiens
  siRNA target sequence for PIK3R4 (NM_014602.1,3526-3544).
ctgtgaatcgaattagagt

SEQ ID NO: 96800 - DNA, 19 bp, Homo sapiens
  siRNA target sequence for PIK3R4 (NM_014602.1,3547-3565).
ctgatgaacactcactttt

SEQ ID NO: 96801 - DNA, 19 bp, Homo sapiens
  siRNA target sequence for PIK3R4 (NM_014602.1,3673-3691).
gagtcaagacgctcacatt

SEQ ID NO: 96802 - DNA, 19 bp, Homo sapiens
  siRNA target sequence for PIK3R4 (NM_014602.1,3695-3713).
ccaaggctcccactattta

SEQ ID NO: 96803 - DNA, 19 bp, Homo sapiens
  siRNA target sequence for PIK3R4 (NM_014602.1,3716-3734).
catagcatctgataatggt

SEQ ID NO: 96804 - DNA, 19 bp, Homo sapiens
  siRNA target sequence for PIK3R4 (NM_014602.1,3773-3791).
caagtctcctaaaatccat

SEQ ID NO: 96805 - DNA, 19 bp, Homo sapiens
  siRNA target sequence for PIK3R4 (NM_014602.1,3802-3820).
gcagaattctagatcagaa

SEQ ID NO: 96806 - DNA, 19 bp, Homo sapiens
  siRNA target sequence for PIK3R4 (NM_014602.1,3818-3836).
gaaggaggacggttgtgtt

SEQ ID NO: 96807 - DNA, 19 bp, Homo sapiens
  siRNA target sequence for PIK3R4 (NM_014602.1,3829-3847).
gttgtgttgtggatatgca

SEQ ID NO: 96808 - DNA, 19 bp, Homo sapiens
  siRNA target sequence for PIK3R4 (NM_014602.1,3931-3949).
gcaatgcgtggactttaaa

SEQ ID NO: 96809 - DNA, 19 bp, Homo sapiens
  siRNA target sequence for PIK3R4 (NM_014602.1,4055-4073).
gttccagttgccaatttca

SEQ ID NO: 96810 - DNA, 19 bp, Homo sapiens
  siRNA target sequence for PIK3R4 (NM_014602.1,4099-4117).
gaatcagacgcctctcaat

SEQ ID NO: 96811 - DNA, 19 bp, Homo sapiens
  siRNA target sequence for PIK3R4 (NM_014602.1,4114-4132).
caatgcaccctctgtatca

SEQ ID NO: 96812 - DNA, 19 bp, Homo sapiens
  siRNA target sequence for PIK3R4 (NM_014602.1,4227-4245).
gcaccaccactttctgaat

SEQ ID NO: 96813 - DNA, 19 bp, Homo sapiens
  siRNA target sequence for PIK3R4 (NM_014602.1,4258-4276).
ctcatagcgtccatggtat

SEQ ID NO: 96814 - DNA, 19 bp, Homo sapiens
  siRNA target sequence for PIK3R4 (NM_014602.1,4266-4284).
gtccatggtatctactgta

SEQ ID NO: 96815 - DNA, 19 bp, Homo sapiens
  siRNA target sequence for PIK3R4 (NM_014602.1,4296-4314).
ggaaatcctatcctactaa

SEQ ID NO: 96816 - DNA, 19 bp, Homo sapiens
  siRNA target sequence for PIK3R4 (NM_014602.1,4315-4333).
cagctggctcagatatgaa

SEQ ID NO: 96817 - DNA, 19 bp, Homo sapiens
  siRNA target sequence for PIK3R4 (NM_014602.1,4317-4335).
gctggctcagatatgaaaa

SEQ ID NO: 96818 - DNA, 19 bp, Homo sapiens
  siRNA target sequence for PIK3R4 (NM_014602.1,4358-4376).
cccagaaaggtcctatgtt

SEQ ID NO: 96819 - DNA, 19 bp, Homo sapiens
  siRNA target sequence for PIK3R4 (NM_014602.1,4374-4392).
gttgttgcaggaagtacta

SEQ ID NO: 96820 - DNA, 19 bp, Homo sapiens
  siRNA target sequence for PIK3R4 (NM_014602.1,4377-4395).
gttgcaggaagtactagtt

SEQ ID NO: 96821 - DNA, 19 bp, Homo sapiens
  siRNA target sequence for PIK3R4 (NM_014602.1,4406-4424).
gtcctactacaggaaaata

SEQ ID NO: 96822 - DNA, 19 bp, Homo sapiens
  siRNA target sequence for PIK3R4 (NM_014602.1,4511-4529).
cctgcccgtgggacatcat

SEQ ID NO: 96823 - DNA, 19 bp, Homo sapiens
  siRNA target sequence for PIK3R4 (NM_014602.1,4516-4534).
ccgtgggacatcatgacat

SEQ ID NO: 96824 - DNA, 19 bp, Homo sapiens
  siRNA target sequence for PIK3R4 (NM_014602.1,4574-4592).
catcgtaactgcttctaga

SEQ ID NO: 96825 - DNA, 19 bp, Homo sapiens
  siRNA target sequence for PIK3R4 (NM_014602.1,4588-4606).
ctagagatgggattgtgaa

SEQ ID NO: 96826 - DNA, 19 bp, Homo sapiens
  siRNA target sequence for PIM1 (NM_002648.2,658-676).
ggtttctccggcgtcatta

SEQ ID NO: 96827 - DNA, 19 bp, Homo sapiens
  siRNA target sequence for PIM1 (NM_002648.2,966-984).
cgatgggacccgagtgtat

SEQ ID NO: 96828 - DNA, 19 bp, Homo sapiens
  siRNA target sequence for PIM1 (NM_002648.2,967-985).
gatgggacccgagtgtata

SEQ ID NO: 96829 - DNA, 19 bp, Homo sapiens
  siRNA target sequence for PIM1 (NM_002648.2,1177-1195).
gccctgagaccatcagata

SEQ ID NO: 96830 - DNA, 19 bp, Homo sapiens
  siRNA target sequence for PIM1 (NM_002648.2,1199-1217).
caaccttcgaagaaatcca

SEQ ID NO: 96831 - DNA, 19 bp, Homo sapiens
  siRNA target sequence for PIM2 (NM_006875.1,550-568).
cccaggatctctttgacta

SEQ ID NO: 96832 - DNA, 19 bp, Homo sapiens
  siRNA target sequence for PIM2 (NM_006875.1,551-569).
ccaggatctctttgactat

SEQ ID NO: 96833 - DNA, 19 bp, Homo sapiens
  siRNA target sequence for PIM2 (NM_006875.1,1029-1047).
ctggacccctggatgcaaa

SEQ ID NO: 96834 - DNA, 19 bp, Homo sapiens
  siRNA target sequence for PINK1 (NM_032409.1,470-488).
caggagatccaggcaattt

SEQ ID NO: 96835 - DNA, 19 bp, Homo sapiens
  siRNA target sequence for PINK1 (NM_032409.1,473-491).
gagatccaggcaattttta

SEQ ID NO: 96836 - DNA, 19 bp, Homo sapiens
  siRNA target sequence for PINK1 (NM_032409.1,860-878).
gtcacttacagaaaatcca

SEQ ID NO: 96837 - DNA, 19 bp, Homo sapiens
  siRNA target sequence for PINK1 (NM_032409.1,899-917).
gcccctcaccccaacatca

SEQ ID NO: 96838 - DNA, 19 bp, Homo sapiens
  siRNA target sequence for PINK1 (NM_032409.1,1029-1047).
ggacgctgttcctcgttat

SEQ ID NO: 96839 - DNA, 19 bp, Homo sapiens
  siRNA target sequence for PINK1 (NM_032409.1,1032-1050).
cgctgttcctcgttatgaa

SEQ ID NO: 96840 - DNA, 19 bp, Homo sapiens
  siRNA target sequence for PINK1 (NM_032409.1,1169-1187).
gcgcacagagacctgaaat

SEQ ID NO: 96841 - DNA, 19 bp, Homo sapiens
  siRNA target sequence for PINK1 (NM_032409.1,1367-1385).
cccagggcagtgattgact

SEQ ID NO: 96842 - DNA, 19 bp, Homo sapiens
  siRNA target sequence for PINK1 (NM_032409.1,1368-1386).
ccagggcagtgattgacta

SEQ ID NO: 96843 - DNA, 19 bp, Homo sapiens
  siRNA target sequence for PINK1 (NM_032409.1,1412-1430).
ggagccatcgcctatgaaa

SEQ ID NO: 96844 - DNA, 19 bp, Homo sapiens
  siRNA target sequence for PINK1 (NM_032409.1,1413-1431).
gagccatcgcctatgaaat

SEQ ID NO: 96845 - DNA, 19 bp, Homo sapiens
  siRNA target sequence for PINK1 (NM_032409.1,1415-1433).
gccatcgcctatgaaatct

SEQ ID NO: 96846 - DNA, 19 bp, Homo sapiens
  siRNA target sequence for PINK1 (NM_032409.1,1416-1434).
ccatcgcctatgaaatctt

SEQ ID NO: 96847 - DNA, 19 bp, Homo sapiens
  siRNA target sequence for PINK1 (NM_032409.1,1463-1481).
ggcaaggcccaccttgaaa

SEQ ID NO: 96848 - DNA, 19 bp, Homo sapiens
  siRNA target sequence for PINK1 (NM_032409.1,1593-1611).
cccgagtagccgcaaatgt

SEQ ID NO: 96849 - DNA, 19 bp, Homo sapiens
  siRNA target sequence for PINK1 (NM_032409.1,1623-1641).
gcctctggggtgaacatat

SEQ ID NO: 96850 - DNA, 19 bp, Homo sapiens
  siRNA target sequence for PINK1 (NM_032409.1,1624-1642).
cctctggggtgaacatatt

SEQ ID NO: 96851 - DNA, 19 bp, Homo sapiens
  siRNA target sequence for PINK1 (NM_032409.1,1643-1661).
ctagccctgaagaatctga

SEQ ID NO: 96852 - DNA, 19 bp, Homo sapiens
  siRNA target sequence for PINK1 (NM_032409.1,1772-1790).
gctaacctggagtgtgaaa

SEQ ID NO: 96853 - DNA, 19 bp, Homo sapiens
  siRNA target sequence for PKE (NM_173575.2,829-847).
cacacctgaccgacttcaa

SEQ ID NO: 96854 - DNA, 19 bp, Homo sapiens
  siRNA target sequence for PKE (NM_173575.2,831-849).
cacctgaccgacttcaaca

SEQ ID NO: 96855 - DNA, 19 bp, Homo sapiens
  siRNA target sequence for PKE (NM_173575.2,833-851).
cctgaccgacttcaacatt

SEQ ID NO: 96856 - DNA, 19 bp, Homo sapiens
  siRNA target sequence for PKE (NM_173575.2,1011-1029).
ggatggaggccctatgaca

SEQ ID NO: 96857 - DNA, 19 bp, Homo sapiens
  siRNA target sequence for PKE (NM_173575.2,1384-1402).
cccagtccgagaatgacta

SEQ ID NO: 96858 - DNA, 19 bp, Homo sapiens
  siRNA target sequence for PKE (NM_173575.2,1385-1403).
ccagtccgagaatgactat

SEQ ID NO: 96859 - DNA, 19 bp, Homo sapiens
  siRNA target sequence for PKE (NM_173575.2,1388-1406).
gtccgagaatgactatctt

SEQ ID NO: 96860 - DNA, 19 bp, Homo sapiens
  siRNA target sequence for PKE (NM_173575.2,1390-1408).
ccgagaatgactatcttca

SEQ ID NO: 96861 - DNA, 19 bp, Homo sapiens
  siRNA target sequence for PKE (NM_173575.2,1391-1409).
cgagaatgactatcttcaa

SEQ ID NO: 96862 - DNA, 19 bp, Homo sapiens
  siRNA target sequence for PKE (NM_173575.2,1430-1448).
gcaagacttcgtgattttt

SEQ ID NO: 96863 - DNA, 19 bp, Homo sapiens
  siRNA target sequence for PKMYT1 (NM_004203.3,802-820).
cctacggagaggtcttcaa

SEQ ID NO: 96864 - DNA, 19 bp, Homo sapiens
  siRNA target sequence for PKMYT1 (NM_004203.3,1126-1144).
gcctggtgcaccttgatgt

SEQ ID NO: 96865 - DNA, 19 bp, Homo sapiens
  siRNA target sequence for PKMYT1 (NM_004203.3,1143-1161).
gtcaagcctgccaacatct

SEQ ID NO: 96866 - DNA, 19 bp, Homo sapiens
  siRNA target sequence for PKMYT1 (NM_004203.3,1441-1459).
gttctgtccttgtcatgat

SEQ ID NO: 96867 - DNA, 19 bp, Homo sapiens
  siRNA target sequence for PKMYT1 (NM_004203.3,1842-1860).
gacctaagtgacatcaact

SEQ ID NO: 96868 - DNA, 19 bp, Homo sapiens
  siRNA target sequence for PLK (NM_005030.3,153-171).
gctccaccggcgaaagaga

SEQ ID NO: 96869 - DNA, 19 bp, Homo sapiens
  siRNA target sequence for PLK (NM_005030.3,397-415).
gattccacggctttttcga

SEQ ID NO: 96870 - DNA, 19 bp, Homo sapiens
  siRNA target sequence for PLK (NM_005030.3,554-572).
gcaccgaaaccgagttatt

SEQ ID NO: 96871 - DNA, 19 bp, Homo sapiens
  siRNA target sequence for PLK (NM_005030.3,557-575).
ccgaaaccgagttattcat

SEQ ID NO: 96872 - DNA, 19 bp, Homo sapiens
  siRNA target sequence for PLK (NM_005030.3,757-775).
ggtccattgggtgtatcat

SEQ ID NO: 96873 - DNA, 19 bp, Homo sapiens
  siRNA target sequence for PLK (NM_005030.3,760-778).
ccattgggtgtatcatgta

SEQ ID NO: 96874 - DNA, 19 bp, Homo sapiens
  siRNA target sequence for PLK (NM_005030.3,765-783).
gggtgtatcatgtatacct

SEQ ID NO: 96875 - DNA, 19 bp, Homo sapiens
  siRNA target sequence for PLK (NM_005030.3,766-784).
ggtgtatcatgtatacctt

SEQ ID NO: 96876 - DNA, 19 bp, Homo sapiens
  siRNA target sequence for PLK (NM_005030.3,829-847).
cctacctccggatcaagaa

SEQ ID NO: 96877 - DNA, 19 bp, Homo sapiens
  siRNA target sequence for PLK (NM_005030.3,837-855).
cggatcaagaagaatgaat

SEQ ID NO: 96878 - DNA, 19 bp, Homo sapiens
  siRNA target sequence for PLK (NM_005030.3,938-956).
cattaacgagctgcttaat

SEQ ID NO: 96879 - DNA, 19 bp, Homo sapiens
  siRNA target sequence for PLK (NM_005030.3,951-969).
cttaatgacgagttcttta

SEQ ID NO: 96880 - DNA, 19 bp, Homo sapiens
  siRNA target sequence for PLK (NM_005030.3,1345-1363).
gcgtgggggtgctcttcaa

SEQ ID NO: 96881 - DNA, 19 bp, Homo sapiens
  siRNA target sequence for PLK (NM_005030.3,1350-1368).
ggggtgctcttcaatgact

SEQ ID NO: 96882 - DNA, 19 bp, Homo sapiens
  siRNA target sequence for PLK (NM_005030.3,1396-1414).
gtgacagcctgcagtacat

SEQ ID NO: 96883 - DNA, 19 bp, Homo sapiens
  siRNA target sequence for PP13 (NM_013268.2,48-66).
ctttacccgtgccatacaa

SEQ ID NO: 96884 - DNA, 19 bp, Homo sapiens
  siRNA target sequence for PP13 (NM_013268.2,116-134).
ccaatccactcttttatca

SEQ ID NO: 96885 - DNA, 19 bp, Homo sapiens
  siRNA target sequence for PP13 (NM_013268.2,117-135).
caatccactcttttatcaa

SEQ ID NO: 96886 - DNA, 19 bp, Homo sapiens
  siRNA target sequence for PP13 (NM_013268.2,311-329).
ctgtgcatctacgtacatt

SEQ ID NO: 96887 - DNA, 19 bp, Homo sapiens
  siRNA target sequence for PP13 (NM_013268.2,315-333).
gcatctacgtacattacaa

SEQ ID NO: 96888 - DNA, 19 bp, Homo sapiens
  siRNA target sequence for PP13 (NM_013268.2,316-334).
catctacgtacattacaat

SEQ ID NO: 96889 - DNA, 19 bp, Homo sapiens
  siRNA target sequence for PP13 (NM_013268.2,322-340).
cgtacattacaatgagtat

SEQ ID NO: 96890 - DNA, 19 bp, Homo sapiens
  siRNA target sequence for PP13 (NM_013268.2,326-344).
cattacaatgagtatgaga

SEQ ID NO: 96891 - DNA, 19 bp, Homo sapiens
  siRNA target sequence for PRKAA2 (NM_006252.1,157-175).
gattggagaacatcaatta

SEQ ID NO: 96892 - DNA, 19 bp, Homo sapiens
  siRNA target sequence for PRKAA2 (NM_006252.1,214-232).
gaagattcgcagtttagat

SEQ ID NO: 96893 - DNA, 19 bp, Homo sapiens
  siRNA target sequence for PRKAA2 (NM_006252.1,217-235).
gattcgcagtttagatgtt

SEQ ID NO: 96894 - DNA, 19 bp, Homo sapiens
  siRNA target sequence for PRKAA2 (NM_006252.1,251-269).
cgagaaattcaaaatctaa

SEQ ID NO: 96895 - DNA, 19 bp, Homo sapiens
  siRNA target sequence for PRKAA2 (NM_006252.1,274-292).
ctttcgtcatcctcatatt

SEQ ID NO: 96896 - DNA, 19 bp, Homo sapiens
  siRNA target sequence for PRKAA2 (NM_006252.1,278-296).
cgtcatcctcatattatca

SEQ ID NO: 96897 - DNA, 19 bp, Homo sapiens
  siRNA target sequence for PRKAA2 (NM_006252.1,279-297).
gtcatcctcatattatcaa

SEQ ID NO: 96898 - DNA, 19 bp, Homo sapiens
  siRNA target sequence for PRKAA2 (NM_006252.1,350-368).
gtgtctggaggtgaattat

SEQ ID NO: 96899 - DNA, 19 bp, Homo sapiens
  siRNA target sequence for PRKAA2 (NM_006252.1,417-435).
ggctctttcagcagattct

SEQ ID NO: 96900 - DNA, 19 bp, Homo sapiens
  siRNA target sequence for PRKAA2 (NM_006252.1,451-469).
ctgtcataggcatatggtt

SEQ ID NO: 96901 - DNA, 19 bp, Homo sapiens
  siRNA target sequence for PRKAA2 (NM_006252.1,530-548).
gccgatttcggattatcta

SEQ ID NO: 96902 - DNA, 19 bp, Homo sapiens
  siRNA target sequence for PRKAA2 (NM_006252.1,532-550).
cgatttcggattatctaat

SEQ ID NO: 96903 - DNA, 19 bp, Homo sapiens
  siRNA target sequence for PRKAA2 (NM_006252.1,533-551).
gatttcggattatctaata

SEQ ID NO: 96904 - DNA, 19 bp, Homo sapiens
  siRNA target sequence for PRKAA2 (NM_006252.1,563-581).
ggtgaatttctgagaacta

SEQ ID NO: 96905 - DNA, 19 bp, Homo sapiens
  siRNA target sequence for PRKAA2 (NM_006252.1,566-584).
gaatttctgagaactagtt

SEQ ID NO: 96906 - DNA, 19 bp, Homo sapiens
  siRNA target sequence for PRKAA2 (NM_006252.1,616-634).
catctcaggcagattgtat

SEQ ID NO: 96907 - DNA, 19 bp, Homo sapiens
  siRNA target sequence for PRKAA2 (NM_006252.1,713-731).
gagcatgtacctacgttat

SEQ ID NO: 96908 - DNA, 19 bp, Homo sapiens
  siRNA target sequence for PRKAA2 (NM_006252.1,715-733).
gcatgtacctacgttattt

SEQ ID NO: 96909 - DNA, 19 bp, Homo sapiens
  siRNA target sequence for PRKAA2 (NM_006252.1,716-734).
catgtacctacgttattta

SEQ ID NO: 96910 - DNA, 19 bp, Homo sapiens
  siRNA target sequence for PRKAA2 (NM_006252.1,719-737).
gtacctacgttatttaaga

SEQ ID NO: 96911 - DNA, 19 bp, Homo sapiens
  siRNA target sequence for PRKAA2 (NM_006252.1,722-740).
cctacgttatttaagaaga

SEQ ID NO: 96912 - DNA, 19 bp, Homo sapiens
  siRNA target sequence for PRKAA2 (NM_006252.1,723-741).
ctacgttatttaagaagat

SEQ ID NO: 96913 - DNA, 19 bp, Homo sapiens
  siRNA target sequence for PRKAA2 (NM_006252.1,739-757).
gatccgagggggtgtcttt

SEQ ID NO: 96914 - DNA, 19 bp, Homo sapiens
  siRNA target sequence for PRKAA2 (NM_006252.1,743-761).
cgagggggtgtcttttata

SEQ ID NO: 96915 - DNA, 19 bp, Homo sapiens
  siRNA target sequence for PRKAA2 (NM_006252.1,788-806).
gccactctcctgatgcata

SEQ ID NO: 96916 - DNA, 19 bp, Homo sapiens
  siRNA target sequence for PRKAA2 (NM_006252.1,811-829).
gcaggttgacccactgaaa

SEQ ID NO: 96917 - DNA, 19 bp, Homo sapiens
  siRNA target sequence for PRKAA2 (NM_006252.1,822-840).
cactgaaacgagcaactat

SEQ ID NO: 96918 - DNA, 19 bp, Homo sapiens
  siRNA target sequence for PRKAA2 (NM_006252.1,824-842).
ctgaaacgagcaactatca

SEQ ID NO: 96919 - DNA, 19 bp, Homo sapiens
  siRNA target sequence for PRKAA2 (NM_006252.1,826-844).
gaaacgagcaactatcaaa

SEQ ID NO: 96920 - DNA, 19 bp, Homo sapiens
  siRNA target sequence for PRKAA2 (NM_006252.1,830-848).
cgagcaactatcaaagaca

SEQ ID NO: 96921 - DNA, 19 bp, Homo sapiens
  siRNA target sequence for PRKAA2 (NM_006252.1,845-863).
gacataagagagcatgaat

SEQ ID NO: 96922 - DNA, 19 bp, Homo sapiens
  siRNA target sequence for PRKAA2 (NM_006252.1,880-898).
gcccagttacttatttcct

SEQ ID NO: 96923 - DNA, 19 bp, Homo sapiens
  siRNA target sequence for PRKAA2 (NM_006252.1,969-987).
gtacagaatcagaagtaat

SEQ ID NO: 96924 - DNA, 19 bp, Homo sapiens
  siRNA target sequence for PRKAA2 (NM_006252.1,978-996).
cagaagtaatgaacagttt

SEQ ID NO: 96925 - DNA, 19 bp, Homo sapiens
  siRNA target sequence for PRKAA2 (NM_006252.1,1025-1043).
gcagtggcttatcatctta

SEQ ID NO: 96926 - DNA, 19 bp, Homo sapiens
  siRNA target sequence for PRKAA2 (NM_006252.1,1045-1063).
cattgacaatcggagaata

SEQ ID NO: 96927 - DNA, 19 bp, Homo sapiens
  siRNA target sequence for PRKAA2 (NM_006252.1,1101-1119).
ctccatctggttcttttat

SEQ ID NO: 96928 - DNA, 19 bp, Homo sapiens
  siRNA target sequence for PRKAA2 (NM_006252.1,1230-1248).
cgactaagcccaaatcttt

SEQ ID NO: 96929 - DNA, 19 bp, Homo sapiens
  siRNA target sequence for PRKAA2 (NM_006252.1,1231-1249).
gactaagcccaaatcttta

SEQ ID NO: 96930 - DNA, 19 bp, Homo sapiens
  siRNA target sequence for PRKAA2 (NM_006252.1,1289-1307).
cagagcaaaccgtatgaca

SEQ ID NO: 96931 - DNA, 19 bp, Homo sapiens
  siRNA target sequence for PRKAA2 (NM_006252.1,1291-1309).
gagcaaaccgtatgacatt

SEQ ID NO: 96932 - DNA, 19 bp, Homo sapiens
  siRNA target sequence for PRKAA2 (NM_006252.1,1293-1311).
gcaaaccgtatgacattat

SEQ ID NO: 96933 - DNA, 19 bp, Homo sapiens
  siRNA target sequence for PRKAA2 (NM_006252.1,1353-1371).
ggaaggtagtgaatgcata

SEQ ID NO: 96934 - DNA, 19 bp, Homo sapiens
  siRNA target sequence for PRKAA2 (NM_006252.1,1357-1375).
ggtagtgaatgcataccat

SEQ ID NO: 96935 - DNA, 19 bp, Homo sapiens
  siRNA target sequence for PRKAA2 (NM_006252.1,1372-1390).
ccatcttcgtgtaagaaga

SEQ ID NO: 96936 - DNA, 19 bp, Homo sapiens
  siRNA target sequence for PRKAA2 (NM_006252.1,1373-1391).
catcttcgtgtaagaagaa

SEQ ID NO: 96937 - DNA, 19 bp, Homo sapiens
  siRNA target sequence for PRKAA2 (NM_006252.1,1404-1422).
ctggcaattacgtgaaaat

SEQ ID NO: 96938 - DNA, 19 bp, Homo sapiens
  siRNA target sequence for PRKAA2 (NM_006252.1,1414-1432).
cgtgaaaatgagcttacaa

SEQ ID NO: 96939 - DNA, 19 bp, Homo sapiens
  siRNA target sequence for PRKAA2 (NM_006252.1,1430-1448).
caactttacctggttgata

SEQ ID NO: 96940 - DNA, 19 bp, Homo sapiens
  siRNA target sequence for PRKAA2 (NM_006252.1,1445-1463).
gataacaggagctatcttt

SEQ ID NO: 96941 - DNA, 19 bp, Homo sapiens
  siRNA target sequence for PRKAA2 (NM_006252.1,1546-1564).
cttacacagaccaagatca

SEQ ID NO: 96942 - DNA, 19 bp, Homo sapiens
  siRNA target sequence for PRKAA2 (NM_006252.1,1624-1642).
gaccggaagcacattgtct

SEQ ID NO: 96943 - DNA, 19 bp, Homo sapiens
  siRNA target sequence for PRKAA2 (NM_006252.1,1662-1680).
gcagtcacaccatggattt

SEQ ID NO: 96944 - DNA, 19 bp, Homo sapiens
  siRNA target sequence for PRKAA2 (NM_006252.1,1694-1712).
gccagtctgattactactt

SEQ ID NO: 96945 - DNA, 19 bp, Homo sapiens
  siRNA target sequence for PRKAA2 (NM_006252.1,1695-1713).
ccagtctgattactacttt

SEQ ID NO: 96946 - DNA, 19 bp, Homo sapiens
  siRNA target sequence for PRKAA2 (NM_006252.1,1696-1714).
cagtctgattactacttta

SEQ ID NO: 96947 - DNA, 19 bp, Homo sapiens
  siRNA target sequence for PRKACA (NM_002730.2,238-256).
gagcgtgaaagaattctta

SEQ ID NO: 96948 - DNA, 19 bp, Homo sapiens
  siRNA target sequence for PRKACA (NM_002730.2,312-330).
cccacttggatcagtttga

SEQ ID NO: 96949 - DNA, 19 bp, Homo sapiens
  siRNA target sequence for PRKACA (NM_002730.2,313-331).
ccacttggatcagtttgaa

SEQ ID NO: 96950 - DNA, 19 bp, Homo sapiens
  siRNA target sequence for PRKACA (NM_002730.2,454-472).
cgaacacaccctgaatgaa

SEQ ID NO: 96951 - DNA, 19 bp, Homo sapiens
  siRNA target sequence for PRKACA (NM_002730.2,533-551).
gacaactcaaacttataca

SEQ ID NO: 96952 - DNA, 19 bp, Homo sapiens
  siRNA target sequence for PRKACA (NM_002730.2,705-723).
cggagaatctgctcattga

SEQ ID NO: 96953 - DNA, 19 bp, Homo sapiens
  siRNA target sequence for PRKACA (NM_002730.2,867-885).
ccctgggggttcttatcta

SEQ ID NO: 96954 - DNA, 19 bp, Homo sapiens
  siRNA target sequence for PRKACA (NM_002730.2,871-889).
gggggttcttatctatgaa

SEQ ID NO: 96955 - DNA, 19 bp, Homo sapiens
  siRNA target sequence for PRKACA (NM_002730.2,1058-1076).
ggggtcaacgatatcaaga

SEQ ID NO: 96956 - DNA, 19 bp, Homo sapiens
  siRNA target sequence for PRKACA (NM_002730.2,1059-1077).
gggtcaacgatatcaagaa

SEQ ID NO: 96957 - DNA, 19 bp, Homo sapiens
  siRNA target sequence for PRKACB (NM_002731.1,143-161).
gaatccaactcagaataat

SEQ ID NO: 96958 - DNA, 19 bp, Homo sapiens
  siRNA target sequence for PRKACB (NM_002731.1,193-211).
cccttggaacaggttcatt

SEQ ID NO: 96959 - DNA, 19 bp, Homo sapiens
  siRNA target sequence for PRKACB (NM_002731.1,219-237).
gtcatgttggtaaaacaca

SEQ ID NO: 96960 - DNA, 19 bp, Homo sapiens
  siRNA target sequence for PRKACB (NM_002731.1,249-267).
cagtattatgccatgaaga

SEQ ID NO: 96961 - DNA, 19 bp, Homo sapiens
  siRNA target sequence for PRKACB (NM_002731.1,300-318).
caaatagagcatactttga

SEQ ID NO: 96962 - DNA, 19 bp, Homo sapiens
  siRNA target sequence for PRKACB (NM_002731.1,360-378).
gttcgactggagtatgctt

SEQ ID NO: 96963 - DNA, 19 bp, Homo sapiens
  siRNA target sequence for PRKACB (NM_002731.1,363-381).
cgactggagtatgctttta

SEQ ID NO: 96964 - DNA, 19 bp, Homo sapiens
  siRNA target sequence for PRKACB (NM_002731.1,364-382).
gactggagtatgcttttaa

SEQ ID NO: 96965 - DNA, 19 bp, Homo sapiens
  siRNA target sequence for PRKACB (NM_002731.1,371-389).
gtatgcttttaaggataat

SEQ ID NO: 96966 - DNA, 19 bp, Homo sapiens
  siRNA target sequence for PRKACB (NM_002731.1,419-437).
ccctgggggtgaaatgttt

SEQ ID NO: 96967 - DNA, 19 bp, Homo sapiens
  siRNA target sequence for PRKACB (NM_002731.1,420-438).
cctgggggtgaaatgtttt

SEQ ID NO: 96968 - DNA, 19 bp, Homo sapiens
  siRNA target sequence for PRKACB (NM_002731.1,470-488).
gccccatgcacggttctat

SEQ ID NO: 96969 - DNA, 19 bp, Homo sapiens
  siRNA target sequence for PRKACB (NM_002731.1,482-500).
gttctatgcagctcagata

SEQ ID NO: 96970 - DNA, 19 bp, Homo sapiens
  siRNA target sequence for PRKACB (NM_002731.1,492-510).
gctcagatagtgctaacat

SEQ ID NO: 96971 - DNA, 19 bp, Homo sapiens
  siRNA target sequence for PRKACB (NM_002731.1,493-511).
ctcagatagtgctaacatt

SEQ ID NO: 96972 - DNA, 19 bp, Homo sapiens
  siRNA target sequence for PRKACB (NM_002731.1,512-530).
cgagtacctccattcacta

SEQ ID NO: 96973 - DNA, 19 bp, Homo sapiens
  siRNA target sequence for PRKACB (NM_002731.1,533-551).
cctcatctacagagatcta

SEQ ID NO: 96974 - DNA, 19 bp, Homo sapiens
  siRNA target sequence for PRKACB (NM_002731.1,602-620).
ctttgggtttgccaaaaga

SEQ ID NO: 96975 - DNA, 19 bp, Homo sapiens
  siRNA target sequence for PRKACB (NM_002731.1,607-625).
ggtttgccaaaagagttaa

SEQ ID NO: 96976 - DNA, 19 bp, Homo sapiens
  siRNA target sequence for PRKACB (NM_002731.1,608-626).
gtttgccaaaagagttaaa

SEQ ID NO: 96977 - DNA, 19 bp, Homo sapiens
  siRNA target sequence for PRKACB (NM_002731.1,627-645).
ggcagaacttggacattat

SEQ ID NO: 96978 - DNA, 19 bp, Homo sapiens
  siRNA target sequence for PRKACB (NM_002731.1,629-647).
cagaacttggacattatgt

SEQ ID NO: 96979 - DNA, 19 bp, Homo sapiens
  siRNA target sequence for PRKACB (NM_002731.1,681-699).
ctcagcaagggctacaata

SEQ ID NO: 96980 - DNA, 19 bp, Homo sapiens
  siRNA target sequence for PRKACB (NM_002731.1,717-735).
gcattaggagtgctaatct

SEQ ID NO: 96981 - DNA, 19 bp, Homo sapiens
  siRNA target sequence for PRKACB (NM_002731.1,718-736).
cattaggagtgctaatcta

SEQ ID NO: 96982 - DNA, 19 bp, Homo sapiens
  siRNA target sequence for PRKACB (NM_002731.1,771-789).
gaccaaccaattcagattt

SEQ ID NO: 96983 - DNA, 19 bp, Homo sapiens
  siRNA target sequence for PRKACB (NM_002731.1,773-791).
ccaaccaattcagatttat

SEQ ID NO: 96984 - DNA, 19 bp, Homo sapiens
  siRNA target sequence for PRKACB (NM_002731.1,905-923).
gaatggtgtcagtgatata

SEQ ID NO: 96985 - DNA, 19 bp, Homo sapiens
  siRNA target sequence for PRKACB (NM_002731.1,946-964).
cgacagattggattgctat

SEQ ID NO: 96986 - DNA, 19 bp, Homo sapiens
  siRNA target sequence for PRKACB (NM_002731.1,947-965).
gacagattggattgctatt

SEQ ID NO: 96987 - DNA, 19 bp, Homo sapiens
  siRNA target sequence for PRKACB (NM_002731.1,949-967).
cagattggattgctattta

SEQ ID NO: 96988 - DNA, 19 bp, Homo sapiens
  siRNA target sequence for PRKACB (NM_002731.1,1050-1068).
gatatccgtgtctctataa

SEQ ID NO: 96989 - DNA, 19 bp, Homo sapiens
  siRNA target sequence for PRKACB (NM_182948.1,110-128).
ccaccttgtaaccagtata

SEQ ID NO: 96990 - DNA, 19 bp, Homo sapiens
  siRNA target sequence for PRKACB (NM_182948.1,121-139).
ccagtatacaggtacaact

SEQ ID NO: 96991 - DNA, 19 bp, Homo sapiens
  siRNA target sequence for PRKACB (NM_182948.1,122-140).
cagtatacaggtacaacta

SEQ ID NO: 96992 - DNA, 19 bp, Homo sapiens
  siRNA target sequence for PRKACB (NM_182948.1,124-142).
gtatacaggtacaactaca

SEQ ID NO: 96993 - DNA, 19 bp, Homo sapiens
  siRNA target sequence for PRKACB (NM_182948.1,138-156).
ctacagctcttcagaaatt

SEQ ID NO: 96994 - DNA, 19 bp, Homo sapiens
  siRNA target sequence for PRKACB (NM_182948.1,162-180).
gttttgctagccggttatt

SEQ ID NO: 96995 - DNA, 19 bp, Homo sapiens
  siRNA target sequence for PRKACB (NM_182948.1,167-185).
gctagccggttatttcata

SEQ ID NO: 96996 - DNA, 19 bp, Homo sapiens
  siRNA target sequence for PRKACB (NM_182948.1,171-189).
gccggttatttcatagaca

SEQ ID NO: 96997 - DNA, 19 bp, Homo sapiens
  siRNA target sequence for PRKACB (NM_182948.1,182-200).
catagacactctaaaggta

SEQ ID NO: 96998 - DNA, 19 bp, Homo sapiens
  siRNA target sequence for PRKACB (NM_182948.1,260-278).
gccttatgggacagatcaa

SEQ ID NO: 96999 - DNA, 19 bp, Homo sapiens
  siRNA target sequence for PRKACG (NM_002732.2,92-110).
ggggaaaccccgctcaaaa

SEQ ID NO: 97000 - DNA, 19 bp, Homo sapiens
  siRNA target sequence for PRKACG (NM_002732.2,94-112).
ggaaaccccgctcaaaaca

SEQ ID NO: 97001 - DNA, 19 bp, Homo sapiens
  siRNA target sequence for PRKACG (NM_002732.2,113-131).
ccgccagctcggatcagtt

SEQ ID NO: 97002 - DNA, 19 bp, Homo sapiens
  siRNA target sequence for PRKACG (NM_002732.2,253-271).
caggtcgagcacatactga

SEQ ID NO: 97003 - DNA, 19 bp, Homo sapiens
  siRNA target sequence for PRKACG (NM_002732.2,400-418).
cagcgcgtcggaaggttta

SEQ ID NO: 97004 - DNA, 19 bp, Homo sapiens
  siRNA target sequence for PRKACG (NM_002732.2,769-787).
cggtttccctccaaactca

SEQ ID NO: 97005 - DNA, 19 bp, Homo sapiens
  siRNA target sequence for PRKACG (NM_002732.2,862-880).
ggggttggcgacatcaaga

SEQ ID NO: 97006 - DNA, 19 bp, Homo sapiens
  siRNA target sequence for PRKACG (NM_002732.2,863-881).
gggttggcgacatcaagaa

SEQ ID NO: 97007 - DNA, 19 bp, Homo sapiens
  siRNA target sequence for PRKACG (NM_002732.2,903-921).
cagctggatcgccatctat

SEQ ID NO: 97008 - DNA, 19 bp, Homo sapiens
  siRNA target sequence for PRKACG (NM_002732.2,940-958).
cccttcatcccgaagtaca

SEQ ID NO: 97009 - DNA, 19 bp, Homo sapiens
  siRNA target sequence for PRKCA (NM_002737.1,390-408).
gctctatggacttatccat

SEQ ID NO: 97010 - DNA, 19 bp, Homo sapiens
  siRNA target sequence for PRKCA (NM_002737.1,422-440).
gtgacacctgcgatatgaa

SEQ ID NO: 97011 - DNA, 19 bp, Homo sapiens
  siRNA target sequence for PRKCA (NM_002737.1,431-449).
gcgatatgaacgttcacaa

SEQ ID NO: 97012 - DNA, 19 bp, Homo sapiens
  siRNA target sequence for PRKCA (NM_002737.1,447-465).
caagcaatgcgtcatcaat

SEQ ID NO: 97013 - DNA, 19 bp, Homo sapiens
  siRNA target sequence for PRKCA (NM_002737.1,552-570).
cacagtacgagatgcaaaa

SEQ ID NO: 97014 - DNA, 19 bp, Homo sapiens
  siRNA target sequence for PRKCA (NM_002737.1,554-572).
cagtacgagatgcaaaaaa

SEQ ID NO: 97015 - DNA, 19 bp, Homo sapiens
  siRNA target sequence for PRKCA (NM_002737.1,668-686).
ccatccgctccacactaaa

SEQ ID NO: 97016 - DNA, 19 bp, Homo sapiens
  siRNA target sequence for PRKCA (NM_002737.1,669-687).
catccgctccacactaaat

SEQ ID NO: 97017 - DNA, 19 bp, Homo sapiens
  siRNA target sequence for PRKCA (NM_002737.1,691-709).
cagtggaatgagtccttta

SEQ ID NO: 97018 - DNA, 19 bp, Homo sapiens
  siRNA target sequence for PRKCA (NM_002737.1,693-711).
gtggaatgagtcctttaca

SEQ ID NO: 97019 - DNA, 19 bp, Homo sapiens
  siRNA target sequence for PRKCA (NM_002737.1,695-713).
ggaatgagtcctttacatt

SEQ ID NO: 97020 - DNA, 19 bp, Homo sapiens
  siRNA target sequence for PRKCA (NM_002737.1,742-760).
cgactgtctgtagaaatct

SEQ ID NO: 97021 - DNA, 19 bp, Homo sapiens
  siRNA target sequence for PRKCA (NM_002737.1,762-780).
ggactgggatcgaacaaca

SEQ ID NO: 97022 - DNA, 19 bp, Homo sapiens
  siRNA target sequence for PRKCA (NM_002737.1,772-790).
cgaacaacaaggaatgact

SEQ ID NO: 97023 - DNA, 19 bp, Homo sapiens
  siRNA target sequence for PRKCA (NM_002737.1,773-791).
gaacaacaaggaatgactt

SEQ ID NO: 97024 - DNA, 19 bp, Homo sapiens
  siRNA target sequence for PRKCA (NM_002737.1,812-830).
gagtttcggagctgatgaa

SEQ ID NO: 97025 - DNA, 19 bp, Homo sapiens
  siRNA target sequence for PRKCA (NM_002737.1,838-856).
gccagtggatggtacaagt

SEQ ID NO: 97026 - DNA, 19 bp, Homo sapiens
  siRNA target sequence for PRKCA (NM_002737.1,868-886).
gaagaaggtgagtactaca

SEQ ID NO: 97027 - DNA, 19 bp, Homo sapiens
  siRNA target sequence for PRKCA (NM_002737.1,1014-1032).
caaccttgaccgagtgaaa

SEQ ID NO: 97028 - DNA, 19 bp, Homo sapiens
  siRNA target sequence for PRKCA (NM_002737.1,1018-1036).
cttgaccgagtgaaactca

SEQ ID NO: 97029 - DNA, 19 bp, Homo sapiens
  siRNA target sequence for PRKCA (NM_002737.1,1029-1047).
gaaactcacggacttcaat

SEQ ID NO: 97030 - DNA, 19 bp, Homo sapiens
  siRNA target sequence for PRKCA (NM_002737.1,1210-1228).
gacaaacccccgttcttga

SEQ ID NO: 97031 - DNA, 19 bp, Homo sapiens
  siRNA target sequence for PRKCA (NM_002737.1,1253-1271).
cagtggatcggctgtactt

SEQ ID NO: 97032 - DNA, 19 bp, Homo sapiens
  siRNA target sequence for PRKCA (NM_002737.1,1266-1284).
gtacttcgtcatggaatat

SEQ ID NO: 97033 - DNA, 19 bp, Homo sapiens
  siRNA target sequence for PRKCA (NM_002737.1,1431-1449).
cgtcatgttggattcagaa

SEQ ID NO: 97034 - DNA, 19 bp, Homo sapiens
  siRNA target sequence for PRKCA (NM_002737.1,1475-1493).
ggatgtgcaaggaacacat

SEQ ID NO: 97035 - DNA, 19 bp, Homo sapiens
  siRNA target sequence for PRKCA (NM_002737.1,1595-1613).
cctatggcgtcctgttgta

SEQ ID NO: 97036 - DNA, 19 bp, Homo sapiens
  siRNA target sequence for PRKCA (NM_002737.1,1596-1614).
ctatggcgtcctgttgtat

SEQ ID NO: 97037 - DNA, 19 bp, Homo sapiens
  siRNA target sequence for PRKCA (NM_002737.1,1654-1672).
gaagacgagctatttcagt

SEQ ID NO: 97038 - DNA, 19 bp, Homo sapiens
  siRNA target sequence for PRKCA (NM_002737.1,1921-1939).
cgaggacagcccgtcttaa

SEQ ID NO: 97039 - DNA, 19 bp, Homo sapiens
  siRNA target sequence for PRKCA (NM_002737.1,1943-1961).
cacctgatcagctggttat

SEQ ID NO: 97040 - DNA, 19 bp, Homo sapiens
  siRNA target sequence for PRKCB1 (NM_002738.4,430-448).
ccgcagcaaacacaagttt

SEQ ID NO: 97041 - DNA, 19 bp, Homo sapiens
  siRNA target sequence for PRKCB1 (NM_002738.4,431-449).
cgcagcaaacacaagttta

SEQ ID NO: 97042 - DNA, 19 bp, Homo sapiens
  siRNA target sequence for PRKCB1 (NM_002738.4,435-453).
gcaaacacaagtttaagat

SEQ ID NO: 97043 - DNA, 19 bp, Homo sapiens
  siRNA target sequence for PRKCB1 (NM_002738.4,465-483).
ccagccccacgttttgtga

SEQ ID NO: 97044 - DNA, 19 bp, Homo sapiens
  siRNA target sequence for PRKCB1 (NM_002738.4,511-529).
catccaccaggggatgaaa

SEQ ID NO: 97045 - DNA, 19 bp, Homo sapiens
  siRNA target sequence for PRKCB1 (NM_002738.4,556-574).
caagcgctgcgtgatgaat

SEQ ID NO: 97046 - DNA, 19 bp, Homo sapiens
  siRNA target sequence for PRKCB1 (NM_002738.4,559-577).
gcgctgcgtgatgaatgtt

SEQ ID NO: 97047 - DNA, 19 bp, Homo sapiens
  siRNA target sequence for PRKCB1 (NM_002738.4,655-673).
cattgtcctcgtaagagat

SEQ ID NO: 97048 - DNA, 19 bp, Homo sapiens
  siRNA target sequence for PRKCB1 (NM_002738.4,661-679).
cctcgtaagagatgctaaa

SEQ ID NO: 97049 - DNA, 19 bp, Homo sapiens
  siRNA target sequence for PRKCB1 (NM_002738.4,662-680).
ctcgtaagagatgctaaaa

SEQ ID NO: 97050 - DNA, 19 bp, Homo sapiens
  siRNA target sequence for PRKCB1 (NM_002738.4,711-729).
cagatccctacgtaaaact

SEQ ID NO: 97051 - DNA, 19 bp, Homo sapiens
  siRNA target sequence for PRKCB1 (NM_002738.4,717-735).
cctacgtaaaactgaaact

SEQ ID NO: 97052 - DNA, 19 bp, Homo sapiens
  siRNA target sequence for PRKCB1 (NM_002738.4,800-818).
gagtggaatgagacattta

SEQ ID NO: 97053 - DNA, 19 bp, Homo sapiens
  siRNA target sequence for PRKCB1 (NM_002738.4,802-820).
gtggaatgagacatttaga

SEQ ID NO: 97054 - DNA, 19 bp, Homo sapiens
  siRNA target sequence for PRKCB1 (NM_002738.4,805-823).
gaatgagacatttagattt

SEQ ID NO: 97055 - DNA, 19 bp, Homo sapiens
  siRNA target sequence for PRKCB1 (NM_002738.4,979-997).
ggaaggcgagtacttcaat

SEQ ID NO: 97056 - DNA, 19 bp, Homo sapiens
  siRNA target sequence for PRKCB1 (NM_002738.4,1155-1173).
ccgattttaacttcctaat

SEQ ID NO: 97057 - DNA, 19 bp, Homo sapiens
  siRNA target sequence for PRKCB1 (NM_002738.4,1264-1282).
cgttgtgatccaagatgat

SEQ ID NO: 97058 - DNA, 19 bp, Homo sapiens
  siRNA target sequence for PRKCB1 (NM_002738.4,1489-1507).
catcggtctgttcttctta

SEQ ID NO: 97059 - DNA, 19 bp, Homo sapiens
  siRNA target sequence for PRKCB1 (NM_002738.4,1493-1511).
ggtctgttcttcttacaga

SEQ ID NO: 97060 - DNA, 19 bp, Homo sapiens
  siRNA target sequence for PRKCB1 (NM_002738.4,1620-1638).
gggtgacaaccaagacatt

SEQ ID NO: 97061 - DNA, 19 bp, Homo sapiens
  siRNA target sequence for PRKCB1 (NM_002738.4,1811-1829).
gcctatcccaagtctatgt

SEQ ID NO: 97062 - DNA, 19 bp, Homo sapiens
  siRNA target sequence for PRKCB1 (NM_002738.4,1899-1917).
ctgaaggcgaacgtgatat

SEQ ID NO: 97063 - DNA, 19 bp, Homo sapiens
  siRNA target sequence for PRKCB1 (NM_002738.4,1901-1919).
gaaggcgaacgtgatatca

SEQ ID NO: 97064 - DNA, 19 bp, Homo sapiens
  siRNA target sequence for PRKCB1 (NM_002738.4,1905-1923).
gcgaacgtgatatcaaaga

SEQ ID NO: 97065 - DNA, 19 bp, Homo sapiens
  siRNA target sequence for PRKCB1 (NM_002738.4,1929-1947).
catttttccggtatattga

SEQ ID NO: 97066 - DNA, 19 bp, Homo sapiens
  siRNA target sequence for PRKCB1 (NM_002738.4,1970-1988).
gagatccagcccccttata

SEQ ID NO: 97067 - DNA, 19 bp, Homo sapiens
  siRNA target sequence for PRKCB1 (NM_002738.4,2015-2033).
gaaaacttcgaccgatttt

SEQ ID NO: 97068 - DNA, 19 bp, Homo sapiens
  siRNA target sequence for PRKCB1 (NM_002738.4,2104-2122).
cgaaggattttcctttgtt

SEQ ID NO: 97069 - DNA, 19 bp, Homo sapiens
  siRNA target sequence for PRKCB1 (NM_002738.4,2108-2126).
ggattttcctttgttaact

SEQ ID NO: 97070 - DNA, 19 bp, Homo sapiens
  siRNA target sequence for PRKCD (NM_006254.2,649-667).
gagcgctgcaagaagaaca

SEQ ID NO: 97071 - DNA, 19 bp, Homo sapiens
  siRNA target sequence for PRKCD (NM_006254.2,651-669).
gcgctgcaagaagaacaat

SEQ ID NO: 97072 - DNA, 19 bp, Homo sapiens
  siRNA target sequence for PRKCD (NM_006254.2,714-732).
gttgatgtctgttcagtat

SEQ ID NO: 97073 - DNA, 19 bp, Homo sapiens
  siRNA target sequence for PRKCD (NM_006254.2,823-841).
gccaaaatccactacatca

SEQ ID NO: 97074 - DNA, 19 bp, Homo sapiens
  siRNA target sequence for PRKCD (NM_006254.2,824-842).
ccaaaatccactacatcaa

SEQ ID NO: 97075 - DNA, 19 bp, Homo sapiens
  siRNA target sequence for PRKCD (NM_006254.2,852-870).
gtttatcgccaccttcttt

SEQ ID NO: 97076 - DNA, 19 bp, Homo sapiens
  siRNA target sequence for PRKCD (NM_006254.2,871-889).
gggcaacccaccttctgtt

SEQ ID NO: 97077 - DNA, 19 bp, Homo sapiens
  siRNA target sequence for PRKCD (NM_006254.2,1010-1028).
ccaacagccgggacactat

SEQ ID NO: 97078 - DNA, 19 bp, Homo sapiens
  siRNA target sequence for PRKCD (NM_006254.2,1011-1029).
caacagccgggacactata

SEQ ID NO: 97079 - DNA, 19 bp, Homo sapiens
  siRNA target sequence for PRKCD (NM_006254.2,1033-1051).
cagaaagaacgcttcaaca

SEQ ID NO: 97080 - DNA, 19 bp, Homo sapiens
  siRNA target sequence for PRKCD (NM_006254.2,1067-1085).
gcttcaaggttcacaacta

SEQ ID NO: 97081 - DNA, 19 bp, Homo sapiens
  siRNA target sequence for PRKCD (NM_006254.2,1135-1153).
gtgaagcagggattaaagt

SEQ ID NO: 97082 - DNA, 19 bp, Homo sapiens
  siRNA target sequence for PRKCD (NM_006254.2,1137-1155).
gaagcagggattaaagtgt

SEQ ID NO: 97083 - DNA, 19 bp, Homo sapiens
  siRNA target sequence for PRKCD (NM_006254.2,1312-1330).
cagggtttcgagaagaaga

SEQ ID NO: 97084 - DNA, 19 bp, Homo sapiens
  siRNA target sequence for PRKCD (NM_006254.2,1629-1647).
caaggaccacctgttcttt

SEQ ID NO: 97085 - DNA, 19 bp, Homo sapiens
  siRNA target sequence for PRKCD (NM_006254.2,1692-1710).
ggacaaaggccgctttgaa

SEQ ID NO: 97086 - DNA, 19 bp, Homo sapiens
  siRNA target sequence for PRKCD (NM_006254.2,1711-1729).
ctctaccgtgccacgtttt

SEQ ID NO: 97087 - DNA, 19 bp, Homo sapiens
  siRNA target sequence for PRKCD (NM_006254.2,1713-1731).
ctaccgtgccacgttttat

SEQ ID NO: 97088 - DNA, 19 bp, Homo sapiens
  siRNA target sequence for PRKCD (NM_006254.2,1725-1743).
gttttatgccgctgagata

SEQ ID NO: 97089 - DNA, 19 bp, Homo sapiens
  siRNA target sequence for PRKCD (NM_006254.2,1898-1916).
gcggcacccctgactatat

SEQ ID NO: 97090 - DNA, 19 bp, Homo sapiens
  siRNA target sequence for PRKCD (NM_006254.2,1936-1954).
ggcctgaagtacacattct

SEQ ID NO: 97091 - DNA, 19 bp, Homo sapiens
  siRNA target sequence for PRKCD (NM_006254.2,1938-1956).
cctgaagtacacattctct

SEQ ID NO: 97092 - DNA, 19 bp, Homo sapiens
  siRNA target sequence for PRKCD (NM_006254.2,1970-1988).
ctttcggggtccttctgta

SEQ ID NO: 97093 - DNA, 19 bp, Homo sapiens
  siRNA target sequence for PRKCD (NM_006254.2,2054-2072).
gtgtggacacgccacatta

SEQ ID NO: 97094 - DNA, 19 bp, Homo sapiens
  siRNA target sequence for PRKCD (NM_006254.2,2173-2191).
cccttcttcaagaccataa

SEQ ID NO: 97095 - DNA, 19 bp, Homo sapiens
  siRNA target sequence for PRKCD (NM_006254.2,2251-2269).
cccagagactacagtaact

SEQ ID NO: 97096 - DNA, 19 bp, Homo sapiens
  siRNA target sequence for PRKCD (NM_006254.2,2253-2271).
cagagactacagtaacttt

SEQ ID NO: 97097 - DNA, 19 bp, Homo sapiens
  siRNA target sequence for PRKCE (NM_005400.1,123-141).
ccttctcgacccctacatt

SEQ ID NO: 97098 - DNA, 19 bp, Homo sapiens
  siRNA target sequence for PRKCE (NM_005400.1,134-152).
cctacattgccctcaatgt

SEQ ID NO: 97099 - DNA, 19 bp, Homo sapiens
  siRNA target sequence for PRKCE (NM_005400.1,421-439).
ggtgaagcccctaaagaca

SEQ ID NO: 97100 - DNA, 19 bp, Homo sapiens
  siRNA target sequence for PRKCE (NM_005400.1,428-446).
cccctaaagacaatgaaga

SEQ ID NO: 97101 - DNA, 19 bp, Homo sapiens
  siRNA target sequence for PRKCE (NM_005400.1,579-597).
cttcatctggggtgtcata

SEQ ID NO: 97102 - DNA, 19 bp, Homo sapiens
  siRNA target sequence for PRKCE (NM_005400.1,652-670).
cacgagctcataatcacaa

SEQ ID NO: 97103 - DNA, 19 bp, Homo sapiens
  siRNA target sequence for PRKCE (NM_005400.1,829-847).
cagtgtaaagtctgcaaaa

SEQ ID NO: 97104 - DNA, 19 bp, Homo sapiens
  siRNA target sequence for PRKCE (NM_005400.1,903-921).
cagaggaatcgccaaagta

SEQ ID NO: 97105 - DNA, 19 bp, Homo sapiens
  siRNA target sequence for PRKCE (NM_005400.1,905-923).
gaggaatcgccaaagtact

SEQ ID NO: 97106 - DNA, 19 bp, Homo sapiens
  siRNA target sequence for PRKCE (NM_005400.1,933-951).
gggcgttaccccagacaaa

SEQ ID NO: 97107 - DNA, 19 bp, Homo sapiens
  siRNA target sequence for PRKCE (NM_005400.1,934-952).
ggcgttaccccagacaaaa

SEQ ID NO: 97108 - DNA, 19 bp, Homo sapiens
  siRNA target sequence for PRKCE (NM_005400.1,935-953).
gcgttaccccagacaaaat

SEQ ID NO: 97109 - DNA, 19 bp, Homo sapiens
  siRNA target sequence for PRKCE (NM_005400.1,1064-1082).
ccccttgtgaccaggaaat

SEQ ID NO: 97110 - DNA, 19 bp, Homo sapiens
  siRNA target sequence for PRKCE (NM_005400.1,1065-1083).
cccttgtgaccaggaaata

SEQ ID NO: 97111 - DNA, 19 bp, Homo sapiens
  siRNA target sequence for PRKCE (NM_005400.1,1360-1378).
gacgtggactgcacaatga

SEQ ID NO: 97112 - DNA, 19 bp, Homo sapiens
  siRNA target sequence for PRKCE (NM_005400.1,1362-1380).
cgtggactgcacaatgaca

SEQ ID NO: 97113 - DNA, 19 bp, Homo sapiens
  siRNA target sequence for PRKCE (NM_005400.1,1405-1423).
cggaaacacccgtacctta

SEQ ID NO: 97114 - DNA, 19 bp, Homo sapiens
  siRNA target sequence for PRKCE (NM_005400.1,1415-1433).
cgtaccttacccaactcta

SEQ ID NO: 97115 - DNA, 19 bp, Homo sapiens
  siRNA target sequence for PRKCE (NM_005400.1,1459-1477).
ctctttttcgtcatggaat

SEQ ID NO: 97116 - DNA, 19 bp, Homo sapiens
  siRNA target sequence for PRKCE (NM_005400.1,1461-1479).
ctttttcgtcatggaatat

SEQ ID NO: 97117 - DNA, 19 bp, Homo sapiens
  siRNA target sequence for PRKCE (NM_005400.1,1533-1551).
gcctcgttcacggttctat

SEQ ID NO: 97118 - DNA, 19 bp, Homo sapiens
  siRNA target sequence for PRKCE (NM_005400.1,1845-1863).
caatgaggacgacctattt

SEQ ID NO: 97119 - DNA, 19 bp, Homo sapiens
  siRNA target sequence for PRKCE (NM_005400.1,1849-1867).
gaggacgacctatttgagt

SEQ ID NO: 97120 - DNA, 19 bp, Homo sapiens
  siRNA target sequence for PRKCE (NM_005400.1,2004-2022).
gcagcacccattcttcaaa

SEQ ID NO: 97121 - DNA, 19 bp, Homo sapiens
  siRNA target sequence for PRKCE (NM_005400.1,2066-2084).
ccttcaaaccacgcattaa

SEQ ID NO: 97122 - DNA, 19 bp, Homo sapiens
  siRNA target sequence for PRKCE (NM_005400.1,2087-2105).
ccaaaagagacgtcaataa

SEQ ID NO: 97123 - DNA, 19 bp, Homo sapiens
  siRNA target sequence for PRKCE (NM_005400.1,2088-2106).
caaaagagacgtcaataat

SEQ ID NO: 97124 - DNA, 19 bp, Homo sapiens
  siRNA target sequence for PRKCE (NM_005400.1,2093-2111).
gagacgtcaataattttga

SEQ ID NO: 97125 - DNA, 19 bp, Homo sapiens
  siRNA target sequence for PRKCE (NM_005400.1,2144-2162).
cccttgtggacgaagcaat

SEQ ID NO: 97126 - DNA, 19 bp, Homo sapiens
  siRNA target sequence for PRKCE (NM_005400.1,2149-2167).
gtggacgaagcaattgtaa

SEQ ID NO: 97127 - DNA, 19 bp, Homo sapiens
  siRNA target sequence for PRKCE (NM_005400.1,2179-2197).
caggaggaattcaaaggtt

SEQ ID NO: 97128 - DNA, 19 bp, Homo sapiens
  siRNA target sequence for PRKCG (NM_002739.2,410-428).
gacgatgccacgaatttgt

SEQ ID NO: 97129 - DNA, 19 bp, Homo sapiens
  siRNA target sequence for PRKCG (NM_002739.2,559-577).
gtgcaccagggcatgaaat

SEQ ID NO: 97130 - DNA, 19 bp, Homo sapiens
  siRNA target sequence for PRKCG (NM_002739.2,562-580).
caccagggcatgaaatgct

SEQ ID NO: 97131 - DNA, 19 bp, Homo sapiens
  siRNA target sequence for PRKCG (NM_002739.2,719-737).
gcgaggcccgtaacctaat

SEQ ID NO: 97132 - DNA, 19 bp, Homo sapiens
  siRNA target sequence for PRKCG (NM_002739.2,720-738).
cgaggcccgtaacctaatt

SEQ ID NO: 97133 - DNA, 19 bp, Homo sapiens
  siRNA target sequence for PRKCG (NM_002739.2,723-741).
ggcccgtaacctaattcct

SEQ ID NO: 97134 - DNA, 19 bp, Homo sapiens
  siRNA target sequence for PRKCG (NM_002739.2,724-742).
gcccgtaacctaattccta

SEQ ID NO: 97135 - DNA, 19 bp, Homo sapiens
  siRNA target sequence for PRKCG (NM_002739.2,725-743).
cccgtaacctaattcctat

SEQ ID NO: 97136 - DNA, 19 bp, Homo sapiens
  siRNA target sequence for PRKCG (NM_002739.2,799-817).
cggaacctgacgaaacaga

SEQ ID NO: 97137 - DNA, 19 bp, Homo sapiens
  siRNA target sequence for PRKCG (NM_002739.2,935-953).
cctcccgcaacgacttcat

SEQ ID NO: 97138 - DNA, 19 bp, Homo sapiens
  siRNA target sequence for PRKCG (NM_002739.2,997-1015).
gtggatggctggtacaagt

SEQ ID NO: 97139 - DNA, 19 bp, Homo sapiens
  siRNA target sequence for PRKCG (NM_002739.2,1029-1047).
ggagggcgagtattacaat

SEQ ID NO: 97140 - DNA, 19 bp, Homo sapiens
  siRNA target sequence for PRKCG (NM_002739.2,1100-1118).
gtaactaccccctggaatt

SEQ ID NO: 97141 - DNA, 19 bp, Homo sapiens
  siRNA target sequence for PRKCG (NM_002739.2,1309-1327).
gagctctacgccatcaaga

SEQ ID NO: 97142 - DNA, 19 bp, Homo sapiens
  siRNA target sequence for PRKCG (NM_002739.2,1312-1330).
ctctacgccatcaagatct

SEQ ID NO: 97143 - DNA, 19 bp, Homo sapiens
  siRNA target sequence for PRKCG (NM_002739.2,1463-1481).
ccccggaccgcctgtattt

SEQ ID NO: 97144 - DNA, 19 bp, Homo sapiens
  siRNA target sequence for PRKCG (NM_002739.2,1466-1484).
cggaccgcctgtatttcgt

SEQ ID NO: 97145 - DNA, 19 bp, Homo sapiens
  siRNA target sequence for PRKCG (NM_002739.2,1525-1543).
caacagctgggcaagttta

SEQ ID NO: 97146 - DNA, 19 bp, Homo sapiens
  siRNA target sequence for PRKCG (NM_002739.2,1559-1577).
cgttctacgcggcagaaat

SEQ ID NO: 97147 - DNA, 19 bp, Homo sapiens
  siRNA target sequence for PRKCG (NM_002739.2,1734-1752).
cgggaccccggactacata

SEQ ID NO: 97148 - DNA, 19 bp, Homo sapiens
  siRNA target sequence for PRKCG (NM_002739.2,1881-1899).
ggccatcatggaacaaact

SEQ ID NO: 97149 - DNA, 19 bp, Homo sapiens
  siRNA target sequence for PRKCG (NM_002739.2,2042-2060).
gggagcggctggaacgatt

SEQ ID NO: 97150 - DNA, 19 bp, Homo sapiens
  siRNA target sequence for PRKCG (NM_002739.2,2097-2115).
ccgcagcggcgagaacttt

SEQ ID NO: 97151 - DNA, 19 bp, Homo sapiens
  siRNA target sequence for PRKCG (NM_002739.2,2099-2117).
gcagcggcgagaactttga

SEQ ID NO: 97152 - DNA, 19 bp, Homo sapiens
  siRNA target sequence for PRKCG (NM_002739.2,2102-2120).
gcggcgagaactttgacaa

SEQ ID NO: 97153 - DNA, 19 bp, Homo sapiens
  siRNA target sequence for PRKCH (NM_006255.2,476-494).
cgccactcgctcttcaaga

SEQ ID NO: 97154 - DNA, 19 bp, Homo sapiens
  siRNA target sequence for PRKCH (NM_006255.2,477-495).
gccactcgctcttcaagaa

SEQ ID NO: 97155 - DNA, 19 bp, Homo sapiens
  siRNA target sequence for PRKCH (NM_006255.2,793-811).
ccttaccgggagtttcact

SEQ ID NO: 97156 - DNA, 19 bp, Homo sapiens
  siRNA target sequence for PRKCH (NM_006255.2,824-842).
cagagagaccggatcttca

SEQ ID NO: 97157 - DNA, 19 bp, Homo sapiens
  siRNA target sequence for PRKCH (NM_006255.2,828-846).
gagaccggatcttcaaaca

SEQ ID NO: 97158 - DNA, 19 bp, Homo sapiens
  siRNA target sequence for PRKCH (NM_006255.2,830-848).
gaccggatcttcaaacatt

SEQ ID NO: 97159 - DNA, 19 bp, Homo sapiens
  siRNA target sequence for PRKCH (NM_006255.2,832-850).
ccggatcttcaaacatttt

SEQ ID NO: 97160 - DNA, 19 bp, Homo sapiens
  siRNA target sequence for PRKCH (NM_006255.2,833-851).
cggatcttcaaacatttta

SEQ ID NO: 97161 - DNA, 19 bp, Homo sapiens
  siRNA target sequence for PRKCH (NM_006255.2,879-897).
ggcgagtccaccagatcaa

SEQ ID NO: 97162 - DNA, 19 bp, Homo sapiens
  siRNA target sequence for PRKCH (NM_006255.2,880-898).
gcgagtccaccagatcaat

SEQ ID NO: 97163 - DNA, 19 bp, Homo sapiens
  siRNA target sequence for PRKCH (NM_006255.2,1005-1023).
gcacctgtgtcgtccataa

SEQ ID NO: 97164 - DNA, 19 bp, Homo sapiens
  siRNA target sequence for PRKCH (NM_006255.2,1006-1024).
cacctgtgtcgtccataaa

SEQ ID NO: 97165 - DNA, 19 bp, Homo sapiens
  siRNA target sequence for PRKCH (NM_006255.2,1026-1044).
gctgccatcatctaattgt

SEQ ID NO: 97166 - DNA, 19 bp, Homo sapiens
  siRNA target sequence for PRKCH (NM_006255.2,1027-1045).
ctgccatcatctaattgtt

SEQ ID NO: 97167 - DNA, 19 bp, Homo sapiens
  siRNA target sequence for PRKCH (NM_006255.2,1030-1048).
ccatcatctaattgttaca

SEQ ID NO: 97168 - DNA, 19 bp, Homo sapiens
  siRNA target sequence for PRKCH (NM_006255.2,1075-1093).
caaagtggattcaaagatt

SEQ ID NO: 97169 - DNA, 19 bp, Homo sapiens
  siRNA target sequence for PRKCH (NM_006255.2,1179-1197).
cactgctctggggaataat

SEQ ID NO: 97170 - DNA, 19 bp, Homo sapiens
  siRNA target sequence for PRKCH (NM_006255.2,1200-1218).
gacaaggacttcagtgtaa

SEQ ID NO: 97171 - DNA, 19 bp, Homo sapiens
  siRNA target sequence for PRKCH (NM_006255.2,1255-1273).
gaacgtggcccctaactgt

SEQ ID NO: 97172 - DNA, 19 bp, Homo sapiens
  siRNA target sequence for PRKCH (NM_006255.2,1316-1334).
ggtctccaacccggaaata

SEQ ID NO: 97173 - DNA, 19 bp, Homo sapiens
  siRNA target sequence for PRKCH (NM_006255.2,1317-1335).
gtctccaacccggaaatat

SEQ ID NO: 97174 - DNA, 19 bp, Homo sapiens
  siRNA target sequence for PRKCH (NM_006255.2,1319-1337).
ctccaacccggaaatattt

SEQ ID NO: 97175 - DNA, 19 bp, Homo sapiens
  siRNA target sequence for PRKCH (NM_006255.2,1321-1339).
ccaacccggaaatatttct

SEQ ID NO: 97176 - DNA, 19 bp, Homo sapiens
  siRNA target sequence for PRKCH (NM_006255.2,1425-1443).
cttccaaccgacttggtat

SEQ ID NO: 97177 - DNA, 19 bp, Homo sapiens
  siRNA target sequence for PRKCH (NM_006255.2,1434-1452).
gacttggtatcgacaactt

SEQ ID NO: 97178 - DNA, 19 bp, Homo sapiens
  siRNA target sequence for PRKCH (NM_006255.2,1439-1457).
ggtatcgacaactttgagt

SEQ ID NO: 97179 - DNA, 19 bp, Homo sapiens
  siRNA target sequence for PRKCH (NM_006255.2,1495-1513).
gatgcttgcaagagtaaaa

SEQ ID NO: 97180 - DNA, 19 bp, Homo sapiens
  siRNA target sequence for PRKCH (NM_006255.2,1660-1678).
gacccccgatcgtctgttt

SEQ ID NO: 97181 - DNA, 19 bp, Homo sapiens
  siRNA target sequence for PRKCH (NM_006255.2,1662-1680).
cccccgatcgtctgttttt

SEQ ID NO: 97182 - DNA, 19 bp, Homo sapiens
  siRNA target sequence for PRKCH (NM_006255.2,1665-1683).
ccgatcgtctgttttttgt

SEQ ID NO: 97183 - DNA, 19 bp, Homo sapiens
  siRNA target sequence for PRKCH (NM_006255.2,1667-1685).
gatcgtctgttttttgtga

SEQ ID NO: 97184 - DNA, 19 bp, Homo sapiens
  siRNA target sequence for PRKCH (NM_006255.2,1792-1810).
gttcctccatgataaagga

SEQ ID NO: 97185 - DNA, 19 bp, Homo sapiens
  siRNA target sequence for PRKCH (NM_006255.2,1852-1870).
ccacgagggtcactgtaaa

SEQ ID NO: 97186 - DNA, 19 bp, Homo sapiens
  siRNA target sequence for PRKCH (NM_006255.2,1913-1931).
gtcaccacggccacattct

SEQ ID NO: 97187 - DNA, 19 bp, Homo sapiens
  siRNA target sequence for PRKCH (NM_006255.2,2009-2027).
ggcgtgttgctctatgaga

SEQ ID NO: 97188 - DNA, 19 bp, Homo sapiens
  siRNA target sequence for PRKCH (NM_006255.2,2034-2052).
gtggtcacgcgccttttga

SEQ ID NO: 97189 - DNA, 19 bp, Homo sapiens
  siRNA target sequence for PRKCH (NM_006255.2,2109-2127).
ctacctggctccatgaaga

SEQ ID NO: 97190 - DNA, 19 bp, Homo sapiens
  siRNA target sequence for PRKCH (NM_006255.2,2133-2151).
cagggatcctaaaatcttt

SEQ ID NO: 97191 - DNA, 19 bp, Homo sapiens
  siRNA target sequence for PRKCH (NM_006255.2,2135-2153).
gggatcctaaaatctttca

SEQ ID NO: 97192 - DNA, 19 bp, Homo sapiens
  siRNA target sequence for PRKCH (NM_006255.2,2198-2216).
ggcgagcacgccatcttga

SEQ ID NO: 97193 - DNA, 19 bp, Homo sapiens
  siRNA target sequence for PRKCH (NM_006255.2,2208-2226).
ccatcttgagacatccttt

SEQ ID NO: 97194 - DNA, 19 bp, Homo sapiens
  siRNA target sequence for PRKCH (NM_006255.2,2209-2227).
catcttgagacatcctttt

SEQ ID NO: 97195 - DNA, 19 bp, Homo sapiens
  siRNA target sequence for PRKCH (NM_006255.2,2217-2235).
gacatcctttttttaagga

SEQ ID NO: 97196 - DNA, 19 bp, Homo sapiens
  siRNA target sequence for PRKCH (NM_006255.2,2251-2269).
gctgaaccatcgccaaata

SEQ ID NO: 97197 - DNA, 19 bp, Homo sapiens
  siRNA target sequence for PRKCH (NM_006255.2,2276-2294).
cctttcagacccagaatca

SEQ ID NO: 97198 - DNA, 19 bp, Homo sapiens
  siRNA target sequence for PRKCH (NM_006255.2,2277-2295).
ctttcagacccagaatcaa

SEQ ID NO: 97199 - DNA, 19 bp, Homo sapiens
  siRNA target sequence for PRKCH (NM_006255.2,2323-2341).
ccctgacttcataaaggaa

SEQ ID NO: 97200 - DNA, 19 bp, Homo sapiens
  siRNA target sequence for PRKCH (NM_006255.2,2344-2362).
gccagttttaactccaatt

SEQ ID NO: 97201 - DNA, 19 bp, Homo sapiens
  siRNA target sequence for PRKCH (NM_006255.2,2346-2364).
cagttttaactccaattga

SEQ ID NO: 97202 - DNA, 19 bp, Homo sapiens
  siRNA target sequence for PRKCH (NM_006255.2,2392-2410).
ggatgagtttagaaacttt

SEQ ID NO: 97203 - DNA, 19 bp, Homo sapiens
  siRNA target sequence for PRKCH (NM_006255.2,2412-2430).
cctatgtgtctccagaatt

SEQ ID NO: 97204 - DNA, 19 bp, Homo sapiens
  siRNA target sequence for PRKCI (NM_002740.3,336-354).
gatatcatgataacacatt

SEQ ID NO: 97205 - DNA, 19 bp, Homo sapiens
  siRNA target sequence for PRKCI (NM_002740.3,390-408).
gaggttcgagacatgtgtt

SEQ ID NO: 97206 - DNA, 19 bp, Homo sapiens
  siRNA target sequence for PRKCI (NM_002740.3,393-411).
gttcgagacatgtgttctt

SEQ ID NO: 97207 - DNA, 19 bp, Homo sapiens
  siRNA target sequence for PRKCI (NM_002740.3,426-444).
ctcttcaccatgaaatgga

SEQ ID NO: 97208 - DNA, 19 bp, Homo sapiens
  siRNA target sequence for PRKCI (NM_002740.3,428-446).
cttcaccatgaaatggata

SEQ ID NO: 97209 - DNA, 19 bp, Homo sapiens
  siRNA target sequence for PRKCI (NM_002740.3,433-451).
ccatgaaatggatagatga

SEQ ID NO: 97210 - DNA, 19 bp, Homo sapiens
  siRNA target sequence for PRKCI (NM_002740.3,456-474).
ggagacccgtgtacagtat

SEQ ID NO: 97211 - DNA, 19 bp, Homo sapiens
  siRNA target sequence for PRKCI (NM_002740.3,459-477).
gacccgtgtacagtatcat

SEQ ID NO: 97212 - DNA, 19 bp, Homo sapiens
  siRNA target sequence for PRKCI (NM_002740.3,461-479).
cccgtgtacagtatcatct

SEQ ID NO: 97213 - DNA, 19 bp, Homo sapiens
  siRNA target sequence for PRKCI (NM_002740.3,475-493).
catctcagttggagttaga

SEQ ID NO: 97214 - DNA, 19 bp, Homo sapiens
  siRNA target sequence for PRKCI (NM_002740.3,505-523).
gactttatgagctaaacaa

SEQ ID NO: 97215 - DNA, 19 bp, Homo sapiens
  siRNA target sequence for PRKCI (NM_002740.3,515-533).
gctaaacaaggattctgaa

SEQ ID NO: 97216 - DNA, 19 bp, Homo sapiens
  siRNA target sequence for PRKCI (NM_002740.3,524-542).
ggattctgaactcttgatt

SEQ ID NO: 97217 - DNA, 19 bp, Homo sapiens
  siRNA target sequence for PRKCI (NM_002740.3,580-598).
cttgtccaggagaagataa

SEQ ID NO: 97218 - DNA, 19 bp, Homo sapiens
  siRNA target sequence for PRKCI (NM_002740.3,621-639).
cgccgctggagaaagcttt

SEQ ID NO: 97219 - DNA, 19 bp, Homo sapiens
  siRNA target sequence for PRKCI (NM_002740.3,622-640).
gccgctggagaaagcttta

SEQ ID NO: 97220 - DNA, 19 bp, Homo sapiens
  siRNA target sequence for PRKCI (NM_002740.3,623-641).
ccgctggagaaagctttat

SEQ ID NO: 97221 - DNA, 19 bp, Homo sapiens
  siRNA target sequence for PRKCI (NM_002740.3,721-739).
gacttggacgccaaggata

SEQ ID NO: 97222 - DNA, 19 bp, Homo sapiens
  siRNA target sequence for PRKCI (NM_002740.3,723-741).
cttggacgccaaggatata

SEQ ID NO: 97223 - DNA, 19 bp, Homo sapiens
  siRNA target sequence for PRKCI (NM_002740.3,726-744).
ggacgccaaggatataagt

SEQ ID NO: 97224 - DNA, 19 bp, Homo sapiens
  siRNA target sequence for PRKCI (NM_002740.3,759-777).
ctcttggttcataagaagt

SEQ ID NO: 97225 - DNA, 19 bp, Homo sapiens
  siRNA target sequence for PRKCI (NM_002740.3,778-796).
gccataaactcgtcacaat

SEQ ID NO: 97226 - DNA, 19 bp, Homo sapiens
  siRNA target sequence for PRKCI (NM_002740.3,779-797).
ccataaactcgtcacaatt

SEQ ID NO: 97227 - DNA, 19 bp, Homo sapiens
  siRNA target sequence for PRKCI (NM_002740.3,875-893).
gacagtaattccatataat

SEQ ID NO: 97228 - DNA, 19 bp, Homo sapiens
  siRNA target sequence for PRKCI (NM_002740.3,879-897).
gtaattccatataatcctt

SEQ ID NO: 97229 - DNA, 19 bp, Homo sapiens
  siRNA target sequence for PRKCI (NM_002740.3,895-913).
cttcaagtcatgagagttt

SEQ ID NO: 97230 - DNA, 19 bp, Homo sapiens
  siRNA target sequence for PRKCI (NM_002740.3,1035-1053).
gtactgttggttcgattaa

SEQ ID NO: 97231 - DNA, 19 bp, Homo sapiens
  siRNA target sequence for PRKCI (NM_002740.3,1060-1078).
cagatcgtatttatgcaat

SEQ ID NO: 97232 - DNA, 19 bp, Homo sapiens
  siRNA target sequence for PRKCI (NM_002740.3,1260-1278).
catatgcagcgacaaagaa

SEQ ID NO: 97233 - DNA, 19 bp, Homo sapiens
  siRNA target sequence for PRKCI (NM_002740.3,1314-1332).
gaaatcagtctagcattaa

SEQ ID NO: 97234 - DNA, 19 bp, Homo sapiens
  siRNA target sequence for PRKCI (NM_002740.3,1341-1359).
catgagcgagggataattt

SEQ ID NO: 97235 - DNA, 19 bp, Homo sapiens
  siRNA target sequence for PRKCI (NM_002740.3,1344-1362).
gagcgagggataatttata

SEQ ID NO: 97236 - DNA, 19 bp, Homo sapiens
  siRNA target sequence for PRKCI (NM_002740.3,1348-1366).
gagggataatttatagaga

SEQ ID NO: 97237 - DNA, 19 bp, Homo sapiens
  siRNA target sequence for PRKCI (NM_002740.3,1576-1594).
caggaaggtctccatttga

SEQ ID NO: 97238 - DNA, 19 bp, Homo sapiens
  siRNA target sequence for PRKCI (NM_002740.3,1578-1596).
ggaaggtctccatttgata

SEQ ID NO: 97239 - DNA, 19 bp, Homo sapiens
  siRNA target sequence for PRKCI (NM_002740.3,1579-1597).
gaaggtctccatttgatat

SEQ ID NO: 97240 - DNA, 19 bp, Homo sapiens
  siRNA target sequence for PRKCI (NM_002740.3,1622-1640).
ccagaacacagaggattat

SEQ ID NO: 97241 - DNA, 19 bp, Homo sapiens
  siRNA target sequence for PRKCI (NM_002740.3,1845-1863).
ccctttaaaccaaatattt

SEQ ID NO: 97242 - DNA, 19 bp, Homo sapiens
  siRNA target sequence for PRKCI (NM_002740.3,1924-1942).
ctccagatgacgatgacat

SEQ ID NO: 97243 - DNA, 19 bp, Homo sapiens
  siRNA target sequence for PRKCI (NM_002740.3,1952-1970).
gattgatcagtctgaattt

SEQ ID NO: 97244 - DNA, 19 bp, Homo sapiens
  siRNA target sequence for PRKCL1 (NM_002741.1,602-620).
gtaagaccaagattgacat

SEQ ID NO: 97245 - DNA, 19 bp, Homo sapiens
  siRNA target sequence for PRKCL1 (NM_002741.1,836-854).
gcgaggcccaggagaaatt

SEQ ID NO: 97246 - DNA, 19 bp, Homo sapiens
  siRNA target sequence for PRKCL1 (NM_002741.1,1266-1284).
gcttaagctggataacaca

SEQ ID NO: 97247 - DNA, 19 bp, Homo sapiens
  siRNA target sequence for PRKCL1 (NM_002741.1,1402-1420).
ggcctgtgtgccctcaaat

SEQ ID NO: 97248 - DNA, 19 bp, Homo sapiens
  siRNA target sequence for PRKCL1 (NM_002741.1,1412-1430).
ccctcaaattcctgaagtt

SEQ ID NO: 97249 - DNA, 19 bp, Homo sapiens
  siRNA target sequence for PRKCL1 (NM_002741.1,1509-1527).
cttccgcaaccctgtcatt

SEQ ID NO: 97250 - DNA, 19 bp, Homo sapiens
  siRNA target sequence for PRKCL1 (NM_002741.1,1541-1559).
ggctccgacggcagaagaa

SEQ ID NO: 97251 - DNA, 19 bp, Homo sapiens
  siRNA target sequence for PRKCL1 (NM_002741.1,1542-1560).
gctccgacggcagaagaaa

SEQ ID NO: 97252 - DNA, 19 bp, Homo sapiens
  siRNA target sequence for PRKCL1 (NM_002741.1,1594-1612).
cgtgctaggcagatgaaca

SEQ ID NO: 97253 - DNA, 19 bp, Homo sapiens
  siRNA target sequence for PRKCL1 (NM_002741.1,1595-1613).
gtgctaggcagatgaacat

SEQ ID NO: 97254 - DNA, 19 bp, Homo sapiens
  siRNA target sequence for PRKCL1 (NM_002741.1,1710-1728).
ccggaccacgggtgacata

SEQ ID NO: 97255 - DNA, 19 bp, Homo sapiens
  siRNA target sequence for PRKCL1 (NM_002741.1,1909-1927).
cctctgaccctcgaagatt

SEQ ID NO: 97256 - DNA, 19 bp, Homo sapiens
  siRNA target sequence for PRKCL1 (NM_002741.1,1910-1928).
ctctgaccctcgaagattt

SEQ ID NO: 97257 - DNA, 19 bp, Homo sapiens
  siRNA target sequence for PRKCL1 (NM_002741.1,1912-1930).
ctgaccctcgaagatttca

SEQ ID NO: 97258 - DNA, 19 bp, Homo sapiens
  siRNA target sequence for PRKCL1 (NM_002741.1,2224-2242).
gagccccgtgccatctttt

SEQ ID NO: 97259 - DNA, 19 bp, Homo sapiens
  siRNA target sequence for PRKCL1 (NM_002741.1,2226-2244).
gccccgtgccatcttttat

SEQ ID NO: 97260 - DNA, 19 bp, Homo sapiens
  siRNA target sequence for PRKCL1 (NM_002741.1,2333-2351).
ccgagggctacgtcaagat

SEQ ID NO: 97261 - DNA, 19 bp, Homo sapiens
  siRNA target sequence for PRKCL1 (NM_002741.1,2605-2623).
gaagccatcggcatcatga

SEQ ID NO: 97262 - DNA, 19 bp, Homo sapiens
  siRNA target sequence for PRKCL2 (NM_006256.1,57-75).
gggggattcccgaagtctt

SEQ ID NO: 97263 - DNA, 19 bp, Homo sapiens
  siRNA target sequence for PRKCL2 (NM_006256.1,66-84).
ccgaagtcttccgttttct

SEQ ID NO: 97264 - DNA, 19 bp, Homo sapiens
  siRNA target sequence for PRKCL2 (NM_006256.1,68-86).
gaagtcttccgttttctga

SEQ ID NO: 97265 - DNA, 19 bp, Homo sapiens
  siRNA target sequence for PRKCL2 (NM_006256.1,76-94).
ccgttttctgagaatgtga

SEQ ID NO: 97266 - DNA, 19 bp, Homo sapiens
  siRNA target sequence for PRKCL2 (NM_006256.1,93-111).
gagtgctgttcaaaaatta

SEQ ID NO: 97267 - DNA, 19 bp, Homo sapiens
  siRNA target sequence for PRKCL2 (NM_006256.1,97-115).
gctgttcaaaaattagact

SEQ ID NO: 97268 - DNA, 19 bp, Homo sapiens
  siRNA target sequence for PRKCL2 (NM_006256.1,148-166).
gatatcaaggatcgaatta

SEQ ID NO: 97269 - DNA, 19 bp, Homo sapiens
  siRNA target sequence for PRKCL2 (NM_006256.1,153-171).
caaggatcgaattaagaga

SEQ ID NO: 97270 - DNA, 19 bp, Homo sapiens
  siRNA target sequence for PRKCL2 (NM_006256.1,157-175).
gatcgaattaagagagaaa

SEQ ID NO: 97271 - DNA, 19 bp, Homo sapiens
  siRNA target sequence for PRKCL2 (NM_006256.1,246-264).
ggcttatgtagacaacatt

SEQ ID NO: 97272 - DNA, 19 bp, Homo sapiens
  siRNA target sequence for PRKCL2 (NM_006256.1,247-265).
gcttatgtagacaacattt

SEQ ID NO: 97273 - DNA, 19 bp, Homo sapiens
  siRNA target sequence for PRKCL2 (NM_006256.1,248-266).
cttatgtagacaacatttt

SEQ ID NO: 97274 - DNA, 19 bp, Homo sapiens
  siRNA target sequence for PRKCL2 (NM_006256.1,253-271).
gtagacaacattttgaaaa

SEQ ID NO: 97275 - DNA, 19 bp, Homo sapiens
  siRNA target sequence for PRKCL2 (NM_006256.1,301-319).
cacaagctgcaggaattaa

SEQ ID NO: 97276 - DNA, 19 bp, Homo sapiens
  siRNA target sequence for PRKCL2 (NM_006256.1,303-321).
caagctgcaggaattaaat

SEQ ID NO: 97277 - DNA, 19 bp, Homo sapiens
  siRNA target sequence for PRKCL2 (NM_006256.1,343-361).
ccagaagatattacagatt

SEQ ID NO: 97278 - DNA, 19 bp, Homo sapiens
  siRNA target sequence for PRKCL2 (NM_006256.1,391-409).
gaccctcgttgttctacta

SEQ ID NO: 97279 - DNA, 19 bp, Homo sapiens
  siRNA target sequence for PRKCL2 (NM_006256.1,404-422).
ctactagcaacaatagatt

SEQ ID NO: 97280 - DNA, 19 bp, Homo sapiens
  siRNA target sequence for PRKCL2 (NM_006256.1,439-457).
caattggatatagaactta

SEQ ID NO: 97281 - DNA, 19 bp, Homo sapiens
  siRNA target sequence for PRKCL2 (NM_006256.1,444-462).
ggatatagaacttaaagta

SEQ ID NO: 97282 - DNA, 19 bp, Homo sapiens
  siRNA target sequence for PRKCL2 (NM_006256.1,470-488).
gtgcagagaatatgataca

SEQ ID NO: 97283 - DNA, 19 bp, Homo sapiens
  siRNA target sequence for PRKCL2 (NM_006256.1,477-495).
gaatatgatacagatgtat

SEQ ID NO: 97284 - DNA, 19 bp, Homo sapiens
  siRNA target sequence for PRKCL2 (NM_006256.1,597-615).
ggcagtccagactaatgaa

SEQ ID NO: 97285 - DNA, 19 bp, Homo sapiens
  siRNA target sequence for PRKCL2 (NM_006256.1,598-616).
gcagtccagactaatgaat

SEQ ID NO: 97286 - DNA, 19 bp, Homo sapiens
  siRNA target sequence for PRKCL2 (NM_006256.1,599-617).
cagtccagactaatgaatt

SEQ ID NO: 97287 - DNA, 19 bp, Homo sapiens
  siRNA target sequence for PRKCL2 (NM_006256.1,642-660).
gataagtcctcttgaactt

SEQ ID NO: 97288 - DNA, 19 bp, Homo sapiens
  siRNA target sequence for PRKCL2 (NM_006256.1,655-673).
gaacttcggatggaagaat

SEQ ID NO: 97289 - DNA, 19 bp, Homo sapiens
  siRNA target sequence for PRKCL2 (NM_006256.1,658-676).
cttcggatggaagaattaa

SEQ ID NO: 97290 - DNA, 19 bp, Homo sapiens
  siRNA target sequence for PRKCL2 (NM_006256.1,667-685).
gaagaattaaggcatcatt

SEQ ID NO: 97291 - DNA, 19 bp, Homo sapiens
  siRNA target sequence for PRKCL2 (NM_006256.1,670-688).
gaattaaggcatcatttta

SEQ ID NO: 97292 - DNA, 19 bp, Homo sapiens
  siRNA target sequence for PRKCL2 (NM_006256.1,712-730).
ggtgcaaagaatgtaatga

SEQ ID NO: 97293 - DNA, 19 bp, Homo sapiens
  siRNA target sequence for PRKCL2 (NM_006256.1,773-791).
cagaagctcaagcaagatt

SEQ ID NO: 97294 - DNA, 19 bp, Homo sapiens
  siRNA target sequence for PRKCL2 (NM_006256.1,813-831).
ggaccttttaaagtattca

SEQ ID NO: 97295 - DNA, 19 bp, Homo sapiens
  siRNA target sequence for PRKCL2 (NM_006256.1,814-832).
gaccttttaaagtattcat

SEQ ID NO: 97296 - DNA, 19 bp, Homo sapiens
  siRNA target sequence for PRKCL2 (NM_006256.1,849-867).
cgaagtccccaagaatcat

SEQ ID NO: 97297 - DNA, 19 bp, Homo sapiens
  siRNA target sequence for PRKCL2 (NM_006256.1,865-883).
catcccaaaagcaggatta

SEQ ID NO: 97298 - DNA, 19 bp, Homo sapiens
  siRNA target sequence for PRKCL2 (NM_006256.1,879-897).
gattattattgaagaactt

SEQ ID NO: 97299 - DNA, 19 bp, Homo sapiens
  siRNA target sequence for PRKCL2 (NM_006256.1,922-940).
ctaagtccacgtcaaagta

SEQ ID NO: 97300 - DNA, 19 bp, Homo sapiens
  siRNA target sequence for PRKCL2 (NM_006256.1,926-944).
gtccacgtcaaagtatgat

SEQ ID NO: 97301 - DNA, 19 bp, Homo sapiens
  siRNA target sequence for PRKCL2 (NM_006256.1,928-946).
ccacgtcaaagtatgatat

SEQ ID NO: 97302 - DNA, 19 bp, Homo sapiens
  siRNA target sequence for PRKCL2 (NM_006256.1,931-949).
cgtcaaagtatgatatcta

SEQ ID NO: 97303 - DNA, 19 bp, Homo sapiens
  siRNA target sequence for PRKCL2 (NM_006256.1,1012-1030).
cttatgggctgccaagata

SEQ ID NO: 97304 - DNA, 19 bp, Homo sapiens
  siRNA target sequence for PRKCL2 (NM_006256.1,1017-1035).
gggctgccaagatatccta

SEQ ID NO: 97305 - DNA, 19 bp, Homo sapiens
  siRNA target sequence for PRKCL2 (NM_006256.1,1044-1062).
ccctggacggtcaaaagca

SEQ ID NO: 97306 - DNA, 19 bp, Homo sapiens
  siRNA target sequence for PRKCL2 (NM_006256.1,1045-1063).
cctggacggtcaaaagcaa

SEQ ID NO: 97307 - DNA, 19 bp, Homo sapiens
  siRNA target sequence for PRKCL2 (NM_006256.1,1081-1099).
ggttggagtccaagtgaaa

SEQ ID NO: 97308 - DNA, 19 bp, Homo sapiens
  siRNA target sequence for PRKCL2 (NM_006256.1,1090-1108).
ccaagtgaaaccagatcat

SEQ ID NO: 97309 - DNA, 19 bp, Homo sapiens
  siRNA target sequence for PRKCL2 (NM_006256.1,1096-1114).
gaaaccagatcatctttca

SEQ ID NO: 97310 - DNA, 19 bp, Homo sapiens
  siRNA target sequence for PRKCL2 (NM_006256.1,1113-1131).
catgagcagaacgagtaaa

SEQ ID NO: 97311 - DNA, 19 bp, Homo sapiens
  siRNA target sequence for PRKCL2 (NM_006256.1,1116-1134).
gagcagaacgagtaaaagt

SEQ ID NO: 97312 - DNA, 19 bp, Homo sapiens
  siRNA target sequence for PRKCL2 (NM_006256.1,1118-1136).
gcagaacgagtaaaagtaa

SEQ ID NO: 97313 - DNA, 19 bp, Homo sapiens
  siRNA target sequence for PRKCL2 (NM_006256.1,1139-1157).
gcggaagtagtcgaaatct

SEQ ID NO: 97314 - DNA, 19 bp, Homo sapiens
  siRNA target sequence for PRKCL2 (NM_006256.1,1140-1158).
cggaagtagtcgaaatctt

SEQ ID NO: 97315 - DNA, 19 bp, Homo sapiens
  siRNA target sequence for PRKCL2 (NM_006256.1,1145-1163).
gtagtcgaaatcttctaaa

SEQ ID NO: 97316 - DNA, 19 bp, Homo sapiens
  siRNA target sequence for PRKCL2 (NM_006256.1,1195-1213).
gttttgaagctcgataata

SEQ ID NO: 97317 - DNA, 19 bp, Homo sapiens
  siRNA target sequence for PRKCL2 (NM_006256.1,1232-1250).
gctggaaacccatttccaa

SEQ ID NO: 97318 - DNA, 19 bp, Homo sapiens
  siRNA target sequence for PRKCL2 (NM_006256.1,1254-1272).
gtcatgggaccagaagttt

SEQ ID NO: 97319 - DNA, 19 bp, Homo sapiens
  siRNA target sequence for PRKCL2 (NM_006256.1,1259-1277).
gggaccagaagtttacact

SEQ ID NO: 97320 - DNA, 19 bp, Homo sapiens
  siRNA target sequence for PRKCL2 (NM_006256.1,1289-1307).
ggtcacgtgaactggaaat

SEQ ID NO: 97321 - DNA, 19 bp, Homo sapiens
  siRNA target sequence for PRKCL2 (NM_006256.1,1466-1484).
gaccaaaacttcaaagaca

SEQ ID NO: 97322 - DNA, 19 bp, Homo sapiens
  siRNA target sequence for PRKCL2 (NM_006256.1,1566-1584).
gctagtaagaagagctatt

SEQ ID NO: 97323 - DNA, 19 bp, Homo sapiens
  siRNA target sequence for PRKCL2 (NM_006256.1,1672-1690).
gcacctccagctagtgatt

SEQ ID NO: 97324 - DNA, 19 bp, Homo sapiens
  siRNA target sequence for PRKCL2 (NM_006256.1,1740-1758).
cccaccacgagcttcttct

SEQ ID NO: 97325 - DNA, 19 bp, Homo sapiens
  siRNA target sequence for PRKCL2 (NM_006256.1,1762-1780).
ggagaaatagatgaatctt

SEQ ID NO: 97326 - DNA, 19 bp, Homo sapiens
  siRNA target sequence for PRKCL2 (NM_006256.1,1781-1799).
ctgaattaagagttttgga

SEQ ID NO: 97327 - DNA, 19 bp, Homo sapiens
  siRNA target sequence for PRKCL2 (NM_006256.1,1783-1801).
gaattaagagttttggata

SEQ ID NO: 97328 - DNA, 19 bp, Homo sapiens
  siRNA target sequence for PRKCL2 (NM_006256.1,1847-1865).
gaaatagtatacttccaaa

SEQ ID NO: 97329 - DNA, 19 bp, Homo sapiens
  siRNA target sequence for PRKCL2 (NM_006256.1,1853-1871).
gtatacttccaaaatctca

SEQ ID NO: 97330 - DNA, 19 bp, Homo sapiens
  siRNA target sequence for PRKCL2 (NM_006256.1,1894-1912).
cctcagtcaggcctagaat

SEQ ID NO: 97331 - DNA, 19 bp, Homo sapiens
  siRNA target sequence for PRKCL2 (NM_006256.1,1895-1913).
ctcagtcaggcctagaata

SEQ ID NO: 97332 - DNA, 19 bp, Homo sapiens
  siRNA target sequence for PRKCL2 (NM_006256.1,1899-1917).
gtcaggcctagaatatagt

SEQ ID NO: 97333 - DNA, 19 bp, Homo sapiens
  siRNA target sequence for PRKCL2 (NM_006256.1,1940-1958).
gaagatctcagcaaaggtt

SEQ ID NO: 97334 - DNA, 19 bp, Homo sapiens
  siRNA target sequence for PRKCL2 (NM_006256.1,1950-1968).
gcaaaggtttcagtttaat

SEQ ID NO: 97335 - DNA, 19 bp, Homo sapiens
  siRNA target sequence for PRKCL2 (NM_006256.1,1955-1973).
ggtttcagtttaatctaca

SEQ ID NO: 97336 - DNA, 19 bp, Homo sapiens
  siRNA target sequence for PRKCL2 (NM_006256.1,1956-1974).
gtttcagtttaatctacaa

SEQ ID NO: 97337 - DNA, 19 bp, Homo sapiens
  siRNA target sequence for PRKCL2 (NM_006256.1,1960-1978).
cagtttaatctacaagatt

SEQ ID NO: 97338 - DNA, 19 bp, Homo sapiens
  siRNA target sequence for PRKCL2 (NM_006256.1,2200-2218).
gagcatgtttgctttgtaa

SEQ ID NO: 97339 - DNA, 19 bp, Homo sapiens
  siRNA target sequence for PRKCL2 (NM_006256.1,2247-2265).
gatgcacattcatactgat

SEQ ID NO: 97340 - DNA, 19 bp, Homo sapiens
  siRNA target sequence for PRKCL2 (NM_006256.1,2253-2271).
cattcatactgatgtcttt

SEQ ID NO: 97341 - DNA, 19 bp, Homo sapiens
  siRNA target sequence for PRKCL2 (NM_006256.1,2275-2293).
gaaccaagagctgtatttt

SEQ ID NO: 97342 - DNA, 19 bp, Homo sapiens
  siRNA target sequence for PRKCL2 (NM_006256.1,2353-2371).
gatttgaaattggataact

SEQ ID NO: 97343 - DNA, 19 bp, Homo sapiens
  siRNA target sequence for PRKCL2 (NM_006256.1,2380-2398).
gatacagagggctttgtga

SEQ ID NO: 97344 - DNA, 19 bp, Homo sapiens
  siRNA target sequence for PRKCL2 (NM_006256.1,2479-2497).
cttgccccagaagtattaa

SEQ ID NO: 97345 - DNA, 19 bp, Homo sapiens
  siRNA target sequence for PRKCL2 (NM_006256.1,2532-2550).
gggccttggcgtgcttata

SEQ ID NO: 97346 - DNA, 19 bp, Homo sapiens
  siRNA target sequence for PRKCL2 (NM_006256.1,2535-2553).
ccttggcgtgcttatatat

SEQ ID NO: 97347 - DNA, 19 bp, Homo sapiens
  siRNA target sequence for PRKCL2 (NM_006256.1,2539-2557).
ggcgtgcttatatatgaaa

SEQ ID NO: 97348 - DNA, 19 bp, Homo sapiens
  siRNA target sequence for PRKCL2 (NM_006256.1,2623-2641).
gatgaagtaaggtatccaa

SEQ ID NO: 97349 - DNA, 19 bp, Homo sapiens
  siRNA target sequence for PRKCL2 (NM_006256.1,2656-2674).
gaagccatttctataatga

SEQ ID NO: 97350 - DNA, 19 bp, Homo sapiens
  siRNA target sequence for PRKCL2 (NM_006256.1,2750-2768).
catttttccggctaattga

SEQ ID NO: 97351 - DNA, 19 bp, Homo sapiens
  siRNA target sequence for PRKCL2 (NM_006256.1,2817-2835).
cataagaggacgagaagat

SEQ ID NO: 97352 - DNA, 19 bp, Homo sapiens
  siRNA target sequence for PRKCM (NM_002742.1,551-569).
catgaccctacctctgaaa

SEQ ID NO: 97353 - DNA, 19 bp, Homo sapiens
  siRNA target sequence for PRKCM (NM_002742.1,584-602).
gtgaaagcggccagtgata

SEQ ID NO: 97354 - DNA, 19 bp, Homo sapiens
  siRNA target sequence for PRKCM (NM_002742.1,604-622).
ccaggaaggcgatcttatt

SEQ ID NO: 97355 - DNA, 19 bp, Homo sapiens
  siRNA target sequence for PRKCM (NM_002742.1,645-663).
ccacctttgaagactttca

SEQ ID NO: 97356 - DNA, 19 bp, Homo sapiens
  siRNA target sequence for PRKCM (NM_002742.1,669-687).
gtccccacgctctctttgt

SEQ ID NO: 97357 - DNA, 19 bp, Homo sapiens
  siRNA target sequence for PRKCM (NM_002742.1,676-694).
cgctctctttgttcattca

SEQ ID NO: 97358 - DNA, 19 bp, Homo sapiens
  siRNA target sequence for PRKCM (NM_002742.1,767-785).
gaagggtgtggtctgaatt

SEQ ID NO: 97359 - DNA, 19 bp, Homo sapiens
  siRNA target sequence for PRKCM (NM_002742.1,774-792).
gtggtctgaattaccataa

SEQ ID NO: 97360 - DNA, 19 bp, Homo sapiens
  siRNA target sequence for PRKCM (NM_002742.1,776-794).
ggtctgaattaccataaga

SEQ ID NO: 97361 - DNA, 19 bp, Homo sapiens
  siRNA target sequence for PRKCM (NM_002742.1,779-797).
ctgaattaccataagagat

SEQ ID NO: 97362 - DNA, 19 bp, Homo sapiens
  siRNA target sequence for PRKCM (NM_002742.1,788-806).
cataagagatgtgcattta

SEQ ID NO: 97363 - DNA, 19 bp, Homo sapiens
  siRNA target sequence for PRKCM (NM_002742.1,838-856).
gagaaggctctcaaacgtt

SEQ ID NO: 97364 - DNA, 19 bp, Homo sapiens
  siRNA target sequence for PRKCM (NM_002742.1,874-892).
caccatccgcacatcatct

SEQ ID NO: 97365 - DNA, 19 bp, Homo sapiens
  siRNA target sequence for PRKCM (NM_002742.1,939-957).
caccatcagagtcgtttat

SEQ ID NO: 97366 - DNA, 19 bp, Homo sapiens
  siRNA target sequence for PRKCM (NM_002742.1,962-980).
cgagagaagaggtcaaatt

SEQ ID NO: 97367 - DNA, 19 bp, Homo sapiens
  siRNA target sequence for PRKCM (NM_002742.1,970-988).
gaggtcaaattctcaatca

SEQ ID NO: 97368 - DNA, 19 bp, Homo sapiens
  siRNA target sequence for PRKCM (NM_002742.1,1002-1020).
caattcaccttgacaagat

SEQ ID NO: 97369 - DNA, 19 bp, Homo sapiens
  siRNA target sequence for PRKCM (NM_002742.1,1013-1031).
gacaagattttgatgtcta

SEQ ID NO: 97370 - DNA, 19 bp, Homo sapiens
  siRNA target sequence for PRKCM (NM_002742.1,1015-1033).
caagattttgatgtctaaa

SEQ ID NO: 97371 - DNA, 19 bp, Homo sapiens
  siRNA target sequence for PRKCM (NM_002742.1,1127-1145).
ggcttgcagtgcaaagatt

SEQ ID NO: 97372 - DNA, 19 bp, Homo sapiens
  siRNA target sequence for PRKCM (NM_002742.1,1170-1188).
gtgcaccgaaagtaccaaa

SEQ ID NO: 97373 - DNA, 19 bp, Homo sapiens
  siRNA target sequence for PRKCM (NM_002742.1,1173-1191).
caccgaaagtaccaaacaa

SEQ ID NO: 97374 - DNA, 19 bp, Homo sapiens
  siRNA target sequence for PRKCM (NM_002742.1,1175-1193).
ccgaaagtaccaaacaact

SEQ ID NO: 97375 - DNA, 19 bp, Homo sapiens
  siRNA target sequence for PRKCM (NM_002742.1,1196-1214).
cttggcgaagtgaccatta

SEQ ID NO: 97376 - DNA, 19 bp, Homo sapiens
  siRNA target sequence for PRKCM (NM_002742.1,1296-1314).
gtgggctcatggatgatat

SEQ ID NO: 97377 - DNA, 19 bp, Homo sapiens
  siRNA target sequence for PRKCM (NM_002742.1,1299-1317).
ggctcatggatgatatgga

SEQ ID NO: 97378 - DNA, 19 bp, Homo sapiens
  siRNA target sequence for PRKCM (NM_002742.1,1400-1418).
cacgaggacgccaacagaa

SEQ ID NO: 97379 - DNA, 19 bp, Homo sapiens
  siRNA target sequence for PRKCM (NM_002742.1,1459-1477).
ggtagtgcagtctgtcaaa

SEQ ID NO: 97380 - DNA, 19 bp, Homo sapiens
  siRNA target sequence for PRKCM (NM_002742.1,1463-1481).
gtgcagtctgtcaaacaca

SEQ ID NO: 97381 - DNA, 19 bp, Homo sapiens
  siRNA target sequence for PRKCM (NM_002742.1,1547-1565).
ctgcggaaacggcactatt

SEQ ID NO: 97382 - DNA, 19 bp, Homo sapiens
  siRNA target sequence for PRKCM (NM_002742.1,1550-1568).
cggaaacggcactattgga

SEQ ID NO: 97383 - DNA, 19 bp, Homo sapiens
  siRNA target sequence for PRKCM (NM_002742.1,1558-1576).
gcactattggagattggat

SEQ ID NO: 97384 - DNA, 19 bp, Homo sapiens
  siRNA target sequence for PRKCM (NM_002742.1,1559-1577).
cactattggagattggata

SEQ ID NO: 97385 - DNA, 19 bp, Homo sapiens
  siRNA target sequence for PRKCM (NM_002742.1,1567-1585).
gagattggatagcaaatgt

SEQ ID NO: 97386 - DNA, 19 bp, Homo sapiens
  siRNA target sequence for PRKCM (NM_002742.1,1569-1587).
gattggatagcaaatgtat

SEQ ID NO: 97387 - DNA, 19 bp, Homo sapiens
  siRNA target sequence for PRKCM (NM_002742.1,1651-1669).
gtctctggaaccagtaaaa

SEQ ID NO: 97388 - DNA, 19 bp, Homo sapiens
  siRNA target sequence for PRKCM (NM_002742.1,1664-1682).
gtaaaaacttcagctttaa

SEQ ID NO: 97389 - DNA, 19 bp, Homo sapiens
  siRNA target sequence for PRKCM (NM_002742.1,1691-1709).
ggggccaatcctcattgtt

SEQ ID NO: 97390 - DNA, 19 bp, Homo sapiens
  siRNA target sequence for PRKCM (NM_002742.1,1692-1710).
gggccaatcctcattgttt

SEQ ID NO: 97391 - DNA, 19 bp, Homo sapiens
  siRNA target sequence for PRKCM (NM_002742.1,1696-1714).
caatcctcattgtttcgaa

SEQ ID NO: 97392 - DNA, 19 bp, Homo sapiens
  siRNA target sequence for PRKCM (NM_002742.1,1719-1737).
ctacggcaaatgtagtgta

SEQ ID NO: 97393 - DNA, 19 bp, Homo sapiens
  siRNA target sequence for PRKCM (NM_002742.1,1900-1918).
cttgcacagagatatctct

SEQ ID NO: 97394 - DNA, 19 bp, Homo sapiens
  siRNA target sequence for PRKCM (NM_002742.1,1908-1926).
gagatatctctgtgagtat

SEQ ID NO: 97395 - DNA, 19 bp, Homo sapiens
  siRNA target sequence for PRKCM (NM_002742.1,1941-1959).
gccagattcaagaaaatgt

SEQ ID NO: 97396 - DNA, 19 bp, Homo sapiens
  siRNA target sequence for PRKCM (NM_002742.1,1966-1984).
cagcacagtatatcagatt

SEQ ID NO: 97397 - DNA, 19 bp, Homo sapiens
  siRNA target sequence for PRKCM (NM_002742.1,2004-2022).
gttctggacagtttggaat

SEQ ID NO: 97398 - DNA, 19 bp, Homo sapiens
  siRNA target sequence for PRKCM (NM_002742.1,2007-2025).
ctggacagtttggaattgt

SEQ ID NO: 97399 - DNA, 19 bp, Homo sapiens
  siRNA target sequence for PRKCM (NM_002742.1,2049-2067).
caggaagagatgtagctat

SEQ ID NO: 97400 - DNA, 19 bp, Homo sapiens
  siRNA target sequence for PRKCM (NM_002742.1,2147-2165).
catcaccctggtgttgtaa

SEQ ID NO: 97401 - DNA, 19 bp, Homo sapiens
  siRNA target sequence for PRKCM (NM_002742.1,2188-2206).
gcctgaaagagtgtttgtt

SEQ ID NO: 97402 - DNA, 19 bp, Homo sapiens
  siRNA target sequence for PRKCM (NM_002742.1,2196-2214).
gagtgtttgttgttatgga

SEQ ID NO: 97403 - DNA, 19 bp, Homo sapiens
  siRNA target sequence for PRKCM (NM_002742.1,2273-2291).
gagcacataacgaagtttt

SEQ ID NO: 97404 - DNA, 19 bp, Homo sapiens
  siRNA target sequence for PRKCM (NM_002742.1,2275-2293).
gcacataacgaagttttta

SEQ ID NO: 97405 - DNA, 19 bp, Homo sapiens
  siRNA target sequence for PRKCM (NM_002742.1,2276-2294).
cacataacgaagtttttaa

SEQ ID NO: 97406 - DNA, 19 bp, Homo sapiens
  siRNA target sequence for PRKCM (NM_002742.1,2278-2296).
cataacgaagtttttaatt

SEQ ID NO: 97407 - DNA, 19 bp, Homo sapiens
  siRNA target sequence for PRKCM (NM_002742.1,2318-2336).
cggcaccttcattttaaaa

SEQ ID NO: 97408 - DNA, 19 bp, Homo sapiens
  siRNA target sequence for PRKCM (NM_002742.1,2535-2553).
ggtctgttggggtcatcat

SEQ ID NO: 97409 - DNA, 19 bp, Homo sapiens
  siRNA target sequence for PRKCM (NM_002742.1,2543-2561).
ggggtcatcatctatgtaa

SEQ ID NO: 97410 - DNA, 19 bp, Homo sapiens
  siRNA target sequence for PRKCM (NM_002742.1,2568-2586).
gcggcacattcccatttaa

SEQ ID NO: 97411 - DNA, 19 bp, Homo sapiens
  siRNA target sequence for PRKCM (NM_002742.1,2569-2587).
cggcacattcccatttaat

SEQ ID NO: 97412 - DNA, 19 bp, Homo sapiens
  siRNA target sequence for PRKCM (NM_002742.1,2572-2590).
cacattcccatttaatgaa

SEQ ID NO: 97413 - DNA, 19 bp, Homo sapiens
  siRNA target sequence for PRKCM (NM_002742.1,2574-2592).
cattcccatttaatgaaga

SEQ ID NO: 97414 - DNA, 19 bp, Homo sapiens
  siRNA target sequence for PRKCM (NM_002742.1,2671-2689).
cattgatcttatcaacaat

SEQ ID NO: 97415 - DNA, 19 bp, Homo sapiens
  siRNA target sequence for PRKCM (NM_002742.1,2686-2704).
caatttgctgcaagtaaaa

SEQ ID NO: 97416 - DNA, 19 bp, Homo sapiens
  siRNA target sequence for PRKCM (NM_002742.1,2714-2732).
cgctacagtgtggataaga

SEQ ID NO: 97417 - DNA, 19 bp, Homo sapiens
  siRNA target sequence for PRKCM (NM_002742.1,2758-2776).
ctatcagacctggttagat

SEQ ID NO: 97418 - DNA, 19 bp, Homo sapiens
  siRNA target sequence for PRKCM (NM_002742.1,2780-2798).
cgagagctggaatgcaaaa

SEQ ID NO: 97419 - DNA, 19 bp, Homo sapiens
  siRNA target sequence for PRKCN (NM_005813.2,628-646).
gctgcttctccgtgttcaa

SEQ ID NO: 97420 - DNA, 19 bp, Homo sapiens
  siRNA target sequence for PRKCN (NM_005813.2,663-681).
ctctgcccgactctctaat

SEQ ID NO: 97421 - DNA, 19 bp, Homo sapiens
  siRNA target sequence for PRKCN (NM_005813.2,716-734).
gaggctcagtgcatacagt

SEQ ID NO: 97422 - DNA, 19 bp, Homo sapiens
  siRNA target sequence for PRKCN (NM_005813.2,718-736).
ggctcagtgcatacagttt

SEQ ID NO: 97423 - DNA, 19 bp, Homo sapiens
  siRNA target sequence for PRKCN (NM_005813.2,726-744).
gcatacagtttcatttcta

SEQ ID NO: 97424 - DNA, 19 bp, Homo sapiens
  siRNA target sequence for PRKCN (NM_005813.2,757-775).
ctcacacgggagagtgtta

SEQ ID NO: 97425 - DNA, 19 bp, Homo sapiens
  siRNA target sequence for PRKCN (NM_005813.2,761-779).
cacgggagagtgttaccat

SEQ ID NO: 97426 - DNA, 19 bp, Homo sapiens
  siRNA target sequence for PRKCN (NM_005813.2,765-783).
ggagagtgttaccattgaa

SEQ ID NO: 97427 - DNA, 19 bp, Homo sapiens
  siRNA target sequence for PRKCN (NM_005813.2,817-835).
cttgtgtgctccatagttt

SEQ ID NO: 97428 - DNA, 19 bp, Homo sapiens
  siRNA target sequence for PRKCN (NM_005813.2,824-842).
gctccatagtttatcaaaa

SEQ ID NO: 97429 - DNA, 19 bp, Homo sapiens
  siRNA target sequence for PRKCN (NM_005813.2,827-845).
ccatagtttatcaaaagtt

SEQ ID NO: 97430 - DNA, 19 bp, Homo sapiens
  siRNA target sequence for PRKCN (NM_005813.2,861-879).
ctttggcatgtatgacaaa

SEQ ID NO: 97431 - DNA, 19 bp, Homo sapiens
  siRNA target sequence for PRKCN (NM_005813.2,866-884).
gcatgtatgacaaaattct

SEQ ID NO: 97432 - DNA, 19 bp, Homo sapiens
  siRNA target sequence for PRKCN (NM_005813.2,927-945).
gattacctcagcagatgaa

SEQ ID NO: 97433 - DNA, 19 bp, Homo sapiens
  siRNA target sequence for PRKCN (NM_005813.2,983-1001).
ctttagccacagtagaaga

SEQ ID NO: 97434 - DNA, 19 bp, Homo sapiens
  siRNA target sequence for PRKCN (NM_005813.2,1005-1023).
ccagattcgtccacatact

SEQ ID NO: 97435 - DNA, 19 bp, Homo sapiens
  siRNA target sequence for PRKCN (NM_005813.2,1018-1036).
catactctctatgtacatt

SEQ ID NO: 97436 - DNA, 19 bp, Homo sapiens
  siRNA target sequence for PRKCN (NM_005813.2,1022-1040).
ctctctatgtacattctta

SEQ ID NO: 97437 - DNA, 19 bp, Homo sapiens
  siRNA target sequence for PRKCN (NM_005813.2,1048-1066).
cctactttctgtgattact

SEQ ID NO: 97438 - DNA, 19 bp, Homo sapiens
  siRNA target sequence for PRKCN (NM_005813.2,1115-1133).
gctgtggattaaattacca

SEQ ID NO: 97439 - DNA, 19 bp, Homo sapiens
  siRNA target sequence for PRKCN (NM_005813.2,1178-1196).
gaaagagacgtctgtcaaa

SEQ ID NO: 97440 - DNA, 19 bp, Homo sapiens
  siRNA target sequence for PRKCN (NM_005813.2,1191-1209).
gtcaaatgtatctttacca

SEQ ID NO: 97441 - DNA, 19 bp, Homo sapiens
  siRNA target sequence for PRKCN (NM_005813.2,1236-1254).
cctacagcctgaatatgta

SEQ ID NO: 97442 - DNA, 19 bp, Homo sapiens
  siRNA target sequence for PRKCN (NM_005813.2,1291-1309).
ccaagtaagagaattcctt

SEQ ID NO: 97443 - DNA, 19 bp, Homo sapiens
  siRNA target sequence for PRKCN (NM_005813.2,1321-1339).
cgcccaatctggatggaaa

SEQ ID NO: 97444 - DNA, 19 bp, Homo sapiens
  siRNA target sequence for PRKCN (NM_005813.2,1322-1340).
gcccaatctggatggaaaa

SEQ ID NO: 97445 - DNA, 19 bp, Homo sapiens
  siRNA target sequence for PRKCN (NM_005813.2,1392-1410).
cacccgtcccacgatatgt

SEQ ID NO: 97446 - DNA, 19 bp, Homo sapiens
  siRNA target sequence for PRKCN (NM_005813.2,1394-1412).
cccgtcccacgatatgtca

SEQ ID NO: 97447 - DNA, 19 bp, Homo sapiens
  siRNA target sequence for PRKCN (NM_005813.2,1416-1434).
ctgcaagcggttactgaaa

SEQ ID NO: 97448 - DNA, 19 bp, Homo sapiens
  siRNA target sequence for PRKCN (NM_005813.2,1445-1463).
gccaaggaatgcagtgtaa

SEQ ID NO: 97449 - DNA, 19 bp, Homo sapiens
  siRNA target sequence for PRKCN (NM_005813.2,1562-1580).
cagatacagatataccaat

SEQ ID NO: 97450 - DNA, 19 bp, Homo sapiens
  siRNA target sequence for PRKCN (NM_005813.2,1576-1594).
ccaatggatattgacaata

SEQ ID NO: 97451 - DNA, 19 bp, Homo sapiens
  siRNA target sequence for PRKCN (NM_005813.2,1702-1720).
gatgaagaagccgttaaaa

SEQ ID NO: 97452 - DNA, 19 bp, Homo sapiens
  siRNA target sequence for PRKCN (NM_005813.2,1708-1726).
gaagccgttaaaacaatca

SEQ ID NO: 97453 - DNA, 19 bp, Homo sapiens
  siRNA target sequence for PRKCN (NM_005813.2,1751-1769).
cgctaatgagggttgtaca

SEQ ID NO: 97454 - DNA, 19 bp, Homo sapiens
  siRNA target sequence for PRKCN (NM_005813.2,1752-1770).
gctaatgagggttgtacaa

SEQ ID NO: 97455 - DNA, 19 bp, Homo sapiens
  siRNA target sequence for PRKCN (NM_005813.2,1871-1889).
gacttgacagcaaatgtct

SEQ ID NO: 97456 - DNA, 19 bp, Homo sapiens
  siRNA target sequence for PRKCN (NM_005813.2,1910-1928).
ctggatcaaagtattataa

SEQ ID NO: 97457 - DNA, 19 bp, Homo sapiens
  siRNA target sequence for PRKCN (NM_005813.2,1945-1963).
gaaattctccgcatatctt

SEQ ID NO: 97458 - DNA, 19 bp, Homo sapiens
  siRNA target sequence for PRKCN (NM_005813.2,1966-1984).
ccacgagatttcacaaaca

SEQ ID NO: 97459 - DNA, 19 bp, Homo sapiens
  siRNA target sequence for PRKCN (NM_005813.2,2019-2037).
cattactgatactatggta

SEQ ID NO: 97460 - DNA, 19 bp, Homo sapiens
  siRNA target sequence for PRKCN (NM_005813.2,2024-2042).
ctgatactatggtatactt

SEQ ID NO: 97461 - DNA, 19 bp, Homo sapiens
  siRNA target sequence for PRKCN (NM_005813.2,2040-2058).
cttcgttggtgagaacaat

SEQ ID NO: 97462 - DNA, 19 bp, Homo sapiens
  siRNA target sequence for PRKCN (NM_005813.2,2061-2079).
ggacagctctcataatcct

SEQ ID NO: 97463 - DNA, 19 bp, Homo sapiens
  siRNA target sequence for PRKCN (NM_005813.2,2091-2109).
cactggagttggacttgat

SEQ ID NO: 97464 - DNA, 19 bp, Homo sapiens
  siRNA target sequence for PRKCN (NM_005813.2,2093-2111).
ctggagttggacttgatgt

SEQ ID NO: 97465 - DNA, 19 bp, Homo sapiens
  siRNA target sequence for PRKCN (NM_005813.2,2194-2212).
gggaaagatcacaaagatt

SEQ ID NO: 97466 - DNA, 19 bp, Homo sapiens
  siRNA target sequence for PRKCN (NM_005813.2,2209-2227).
gatttgtctacaagtatct

SEQ ID NO: 97467 - DNA, 19 bp, Homo sapiens
  siRNA target sequence for PRKCN (NM_005813.2,2257-2275).
gtggatatcagtactgttt

SEQ ID NO: 97468 - DNA, 19 bp, Homo sapiens
  siRNA target sequence for PRKCN (NM_005813.2,2309-2327).
gccagtttggcatcgttta

SEQ ID NO: 97469 - DNA, 19 bp, Homo sapiens
  siRNA target sequence for PRKCN (NM_005813.2,2310-2328).
ccagtttggcatcgtttat

SEQ ID NO: 97470 - DNA, 19 bp, Homo sapiens
  siRNA target sequence for PRKCN (NM_005813.2,2416-2434).
cgtaatgaagtggctattt

SEQ ID NO: 97471 - DNA, 19 bp, Homo sapiens
  siRNA target sequence for PRKCN (NM_005813.2,2487-2505).
cccagaacgagtctttgta

SEQ ID NO: 97472 - DNA, 19 bp, Homo sapiens
  siRNA target sequence for PRKCN (NM_005813.2,2491-2509).
gaacgagtctttgtagtaa

SEQ ID NO: 97473 - DNA, 19 bp, Homo sapiens
  siRNA target sequence for PRKCN (NM_005813.2,2495-2513).
gagtctttgtagtaatgga

SEQ ID NO: 97474 - DNA, 19 bp, Homo sapiens
  siRNA target sequence for PRKCN (NM_005813.2,2541-2559).
gattctatccagtgagaaa

SEQ ID NO: 97475 - DNA, 19 bp, Homo sapiens
  siRNA target sequence for PRKCN (NM_005813.2,2561-2579).
gtcggcttccagaacgaat

SEQ ID NO: 97476 - DNA, 19 bp, Homo sapiens
  siRNA target sequence for PRKCN (NM_005813.2,2569-2587).
ccagaacgaattactaaat

SEQ ID NO: 97477 - DNA, 19 bp, Homo sapiens
  siRNA target sequence for PRKCN (NM_005813.2,2572-2590).
gaacgaattactaaattca

SEQ ID NO: 97478 - DNA, 19 bp, Homo sapiens
  siRNA target sequence for PRKCN (NM_005813.2,2592-2610).
ggtcacacagatacttgtt

SEQ ID NO: 97479 - DNA, 19 bp, Homo sapiens
  siRNA target sequence for PRKCN (NM_005813.2,2726-2744).
cacgcatcattggtgaaaa

SEQ ID NO: 97480 - DNA, 19 bp, Homo sapiens
  siRNA target sequence for PRKCN (NM_005813.2,2728-2746).
cgcatcattggtgaaaagt

SEQ ID NO: 97481 - DNA, 19 bp, Homo sapiens
  siRNA target sequence for PRKCN (NM_005813.2,2794-2812).
gttctccggagcaaaggtt

SEQ ID NO: 97482 - DNA, 19 bp, Homo sapiens
  siRNA target sequence for PRKCN (NM_005813.2,2859-2877).
gagcctcagtggcacattt

SEQ ID NO: 97483 - DNA, 19 bp, Homo sapiens
  siRNA target sequence for PRKCN (NM_005813.2,2862-2880).
cctcagtggcacatttcct

SEQ ID NO: 97484 - DNA, 19 bp, Homo sapiens
  siRNA target sequence for PRKCN (NM_005813.2,2998-3016).
gtgaagatgagaaaacgtt

SEQ ID NO: 97485 - DNA, 19 bp, Homo sapiens
  siRNA target sequence for PRKCN (NM_005813.2,3013-3031).
cgttacagtgttgacaaat

SEQ ID NO: 97486 - DNA, 19 bp, Homo sapiens
  siRNA target sequence for PRKCN (NM_005813.2,3065-3083).
cttggcttgaccttagaga

SEQ ID NO: 97487 - DNA, 19 bp, Homo sapiens
  siRNA target sequence for PRKCN (NM_005813.2,3073-3091).
gaccttagagaatttgaaa

SEQ ID NO: 97488 - DNA, 19 bp, Homo sapiens
  siRNA target sequence for PRKCN (NM_005813.2,3092-3110).
ctcgcattggagaacgtta

SEQ ID NO: 97489 - DNA, 19 bp, Homo sapiens
  siRNA target sequence for PRKCN (NM_005813.2,3095-3113).
gcattggagaacgttacat

SEQ ID NO: 97490 - DNA, 19 bp, Homo sapiens
  siRNA target sequence for PRKCN (NM_005813.2,3096-3114).
cattggagaacgttacatt

SEQ ID NO: 97491 - DNA, 19 bp, Homo sapiens
  siRNA target sequence for PRKCN (NM_005813.2,3101-3119).
gagaacgttacattacaca

SEQ ID NO: 97492 - DNA, 19 bp, Homo sapiens
  siRNA target sequence for PRKCN (NM_005813.2,3106-3124).
cgttacattacacatgaaa

SEQ ID NO: 97493 - DNA, 19 bp, Homo sapiens
  siRNA target sequence for PRKCN (NM_005813.2,3141-3159).
ggaaatacatgcatacaca

SEQ ID NO: 97494 - DNA, 19 bp, Homo sapiens
  siRNA target sequence for PRKCN (NM_005813.2,3183-3201).
cttcattatggctcctaat

SEQ ID NO: 97495 - DNA, 19 bp, Homo sapiens
  siRNA target sequence for PRKCQ (NM_006257.1,39-57).
gattggcttgtccaacttt

SEQ ID NO: 97496 - DNA, 19 bp, Homo sapiens
  siRNA target sequence for PRKCQ (NM_006257.1,80-98).
gtcagggcgaggctgttaa

SEQ ID NO: 97497 - DNA, 19 bp, Homo sapiens
  siRNA target sequence for PRKCQ (NM_006257.1,90-108).
ggctgttaacccttactgt

SEQ ID NO: 97498 - DNA, 19 bp, Homo sapiens
  siRNA target sequence for PRKCQ (NM_006257.1,107-125).
gtgctgtgctcgtcaaaga

SEQ ID NO: 97499 - DNA, 19 bp, Homo sapiens
  siRNA target sequence for PRKCQ (NM_006257.1,185-203).
cctgggacagcacttttga

SEQ ID NO: 97500 - DNA, 19 bp, Homo sapiens
  siRNA target sequence for PRKCQ (NM_006257.1,186-204).
ctgggacagcacttttgat

SEQ ID NO: 97501 - DNA, 19 bp, Homo sapiens
  siRNA target sequence for PRKCQ (NM_006257.1,224-242).
gagtcatgcagatcattgt

SEQ ID NO: 97502 - DNA, 19 bp, Homo sapiens
  siRNA target sequence for PRKCQ (NM_006257.1,322-340).
gggaagacagaaatatggt

SEQ ID NO: 97503 - DNA, 19 bp, Homo sapiens
  siRNA target sequence for PRKCQ (NM_006257.1,324-342).
gaagacagaaatatggtta

SEQ ID NO: 97504 - DNA, 19 bp, Homo sapiens
  siRNA target sequence for PRKCQ (NM_006257.1,355-373).
caaggccgaatgctaatga

SEQ ID NO: 97505 - DNA, 19 bp, Homo sapiens
  siRNA target sequence for PRKCQ (NM_006257.1,361-379).
cgaatgctaatgaatgcaa

SEQ ID NO: 97506 - DNA, 19 bp, Homo sapiens
  siRNA target sequence for PRKCQ (NM_006257.1,542-560).
ctgtctgccacgagtttgt

SEQ ID NO: 97507 - DNA, 19 bp, Homo sapiens
  siRNA target sequence for PRKCQ (NM_006257.1,544-562).
gtctgccacgagtttgtct

SEQ ID NO: 97508 - DNA, 19 bp, Homo sapiens
  siRNA target sequence for PRKCQ (NM_006257.1,585-603).
ccagtgccgacaatgcaat

SEQ ID NO: 97509 - DNA, 19 bp, Homo sapiens
  siRNA target sequence for PRKCQ (NM_006257.1,599-617).
gcaatgcagcaattcacaa

SEQ ID NO: 97510 - DNA, 19 bp, Homo sapiens
  siRNA target sequence for PRKCQ (NM_006257.1,621-639).
gtgtattgataaagttata

SEQ ID NO: 97511 - DNA, 19 bp, Homo sapiens
  siRNA target sequence for PRKCQ (NM_006257.1,684-702).
ccacaaggagagattcaaa

SEQ ID NO: 97512 - DNA, 19 bp, Homo sapiens
  siRNA target sequence for PRKCQ (NM_006257.1,706-724).
gacatgccacacagattta

SEQ ID NO: 97513 - DNA, 19 bp, Homo sapiens
  siRNA target sequence for PRKCQ (NM_006257.1,865-883).
ggcataaaccagaagctaa

SEQ ID NO: 97514 - DNA, 19 bp, Homo sapiens
  siRNA target sequence for PRKCQ (NM_006257.1,866-884).
gcataaaccagaagctaat

SEQ ID NO: 97515 - DNA, 19 bp, Homo sapiens
  siRNA target sequence for PRKCQ (NM_006257.1,916-934).
caacaggctcgctgcttaa

SEQ ID NO: 97516 - DNA, 19 bp, Homo sapiens
  siRNA target sequence for PRKCQ (NM_006257.1,921-939).
ggctcgctgcttaagagat

SEQ ID NO: 97517 - DNA, 19 bp, Homo sapiens
  siRNA target sequence for PRKCQ (NM_006257.1,979-997).
ctcccatgctccatcaaaa

SEQ ID NO: 97518 - DNA, 19 bp, Homo sapiens
  siRNA target sequence for PRKCQ (NM_006257.1,981-999).
cccatgctccatcaaaaat

SEQ ID NO: 97519 - DNA, 19 bp, Homo sapiens
  siRNA target sequence for PRKCQ (NM_006257.1,1039-1057).
gagcctcagggcatttcct

SEQ ID NO: 97520 - DNA, 19 bp, Homo sapiens
  siRNA target sequence for PRKCQ (NM_006257.1,1067-1085).
cgttggatgaggtggataa

SEQ ID NO: 97521 - DNA, 19 bp, Homo sapiens
  siRNA target sequence for PRKCQ (NM_006257.1,1127-1145).
catctctgcagattaaact

SEQ ID NO: 97522 - DNA, 19 bp, Homo sapiens
  siRNA target sequence for PRKCQ (NM_006257.1,1337-1355).
cgtttctgacgcacatgtt

SEQ ID NO: 97523 - DNA, 19 bp, Homo sapiens
  siRNA target sequence for PRKCQ (NM_006257.1,1338-1356).
gtttctgacgcacatgttt

SEQ ID NO: 97524 - DNA, 19 bp, Homo sapiens
  siRNA target sequence for PRKCQ (NM_006257.1,1342-1360).
ctgacgcacatgttttgta

SEQ ID NO: 97525 - DNA, 19 bp, Homo sapiens
  siRNA target sequence for PRKCQ (NM_006257.1,1344-1362).
gacgcacatgttttgtaca

SEQ ID NO: 97526 - DNA, 19 bp, Homo sapiens
  siRNA target sequence for PRKCQ (NM_006257.1,1346-1364).
cgcacatgttttgtacatt

SEQ ID NO: 97527 - DNA, 19 bp, Homo sapiens
  siRNA target sequence for PRKCQ (NM_006257.1,1402-1420).
ctcaacggaggggacttaa

SEQ ID NO: 97528 - DNA, 19 bp, Homo sapiens
  siRNA target sequence for PRKCQ (NM_006257.1,1453-1471).
ctttccagagcgacgtttt

SEQ ID NO: 97529 - DNA, 19 bp, Homo sapiens
  siRNA target sequence for PRKCQ (NM_006257.1,1458-1476).
cagagcgacgttttatgct

SEQ ID NO: 97530 - DNA, 19 bp, Homo sapiens
  siRNA target sequence for PRKCQ (NM_006257.1,1492-1510).
ggtctgcagttccttcatt

SEQ ID NO: 97531 - DNA, 19 bp, Homo sapiens
  siRNA target sequence for PRKCQ (NM_006257.1,1497-1515).
gcagttccttcattccaaa

SEQ ID NO: 97532 - DNA, 19 bp, Homo sapiens
  siRNA target sequence for PRKCQ (NM_006257.1,1548-1566).
catcctgttagacaaagat

SEQ ID NO: 97533 - DNA, 19 bp, Homo sapiens
  siRNA target sequence for PRKCQ (NM_006257.1,1618-1636).
gatgccaagacgaatacct

SEQ ID NO: 97534 - DNA, 19 bp, Homo sapiens
  siRNA target sequence for PRKCQ (NM_006257.1,1712-1730).
ccttcggggttctccttta

SEQ ID NO: 97535 - DNA, 19 bp, Homo sapiens
  siRNA target sequence for PRKCQ (NM_006257.1,1713-1731).
cttcggggttctcctttat

SEQ ID NO: 97536 - DNA, 19 bp, Homo sapiens
  siRNA target sequence for PRKCQ (NM_006257.1,1716-1734).
cggggttctcctttatgaa

SEQ ID NO: 97537 - DNA, 19 bp, Homo sapiens
  siRNA target sequence for PRKCQ (NM_006257.1,1796-1814).
gcatggacaatccctttta

SEQ ID NO: 97538 - DNA, 19 bp, Homo sapiens
  siRNA target sequence for PRKCQ (NM_006257.1,2003-2021).
gcagcaatttcgacaaaga

SEQ ID NO: 97539 - DNA, 19 bp, Homo sapiens
  siRNA target sequence for PRKCQ (NM_006257.1,2004-2022).
cagcaatttcgacaaagaa

SEQ ID NO: 97540 - DNA, 19 bp, Homo sapiens
  siRNA target sequence for PRKCQ (NM_006257.1,2006-2024).
gcaatttcgacaaagaatt

SEQ ID NO: 97541 - DNA, 19 bp, Homo sapiens
  siRNA target sequence for PRKCQ (NM_006257.1,2054-2072).
ccgacagagcactgatcaa

SEQ ID NO: 97542 - DNA, 19 bp, Homo sapiens
  siRNA target sequence for PRKCQ (NM_006257.1,2056-2074).
gacagagcactgatcaaca

SEQ ID NO: 97543 - DNA, 19 bp, Homo sapiens
  siRNA target sequence for PRKCQ (NM_006257.1,2119-2137).
gggatggagcggctgatat

SEQ ID NO: 97544 - DNA, 19 bp, Homo sapiens
  siRNA target sequence for PRKD2 (NM_016457.2,167-185).
ccggggtctcctttcacat

SEQ ID NO: 97545 - DNA, 19 bp, Homo sapiens
  siRNA target sequence for PRKD2 (NM_016457.2,293-311).
gcttctacggcctttacga

SEQ ID NO: 97546 - DNA, 19 bp, Homo sapiens
  siRNA target sequence for PRKD2 (NM_016457.2,840-858).
cctcatccacagctataca

SEQ ID NO: 97547 - DNA, 19 bp, Homo sapiens
  siRNA target sequence for PRKD2 (NM_016457.2,959-977).
ccacccgcgtccctaatga

SEQ ID NO: 97548 - DNA, 19 bp, Homo sapiens
  siRNA target sequence for PRKD2 (NM_016457.2,1168-1186).
gggtacatccccctaatga

SEQ ID NO: 97549 - DNA, 19 bp, Homo sapiens
  siRNA target sequence for PRKD2 (NM_016457.2,1207-1225).
cacacgacgcggaaatcca

SEQ ID NO: 97550 - DNA, 19 bp, Homo sapiens
  siRNA target sequence for PRKD2 (NM_016457.2,1243-1261).
ggttgggtggttcattaca

SEQ ID NO: 97551 - DNA, 19 bp, Homo sapiens
  siRNA target sequence for PRKD2 (NM_016457.2,1297-1315).
cgcctggactgcaagtgta

SEQ ID NO: 97552 - DNA, 19 bp, Homo sapiens
  siRNA target sequence for PRKD2 (NM_016457.2,1300-1318).
ctggactgcaagtgtatca

SEQ ID NO: 97553 - DNA, 19 bp, Homo sapiens
  siRNA target sequence for PRKD2 (NM_016457.2,1337-1355).
cgaccaacagatactataa

SEQ ID NO: 97554 - DNA, 19 bp, Homo sapiens
  siRNA target sequence for PRKD2 (NM_016457.2,1340-1358).
ccaacagatactataagga

SEQ ID NO: 97555 - DNA, 19 bp, Homo sapiens
  siRNA target sequence for PRKD2 (NM_016457.2,1676-1694).
ccactgtctaccagatctt

SEQ ID NO: 97556 - DNA, 19 bp, Homo sapiens
  siRNA target sequence for PRKD2 (NM_016457.2,1763-1781).
gggacgtggcagttaaggt

SEQ ID NO: 97557 - DNA, 19 bp, Homo sapiens
  siRNA target sequence for PRKD2 (NM_016457.2,1817-1835).
gccagctccggaatgaagt

SEQ ID NO: 97558 - DNA, 19 bp, Homo sapiens
  siRNA target sequence for PRKD2 (NM_016457.2,1887-1905).
gttcgagacgcctgagaaa

SEQ ID NO: 97559 - DNA, 19 bp, Homo sapiens
  siRNA target sequence for PRKD2 (NM_016457.2,1934-1952).
gggacatgttggagatgat

SEQ ID NO: 97560 - DNA, 19 bp, Homo sapiens
  siRNA target sequence for PRKD2 (NM_016457.2,2027-2045).
gacaccttcacttcaagaa

SEQ ID NO: 97561 - DNA, 19 bp, Homo sapiens
  siRNA target sequence for PRKD2 (NM_016457.2,2276-2294).
gcggcaccttccctttcaa

SEQ ID NO: 97562 - DNA, 19 bp, Homo sapiens
  siRNA target sequence for PRKD2 (NM_016457.2,2424-2442).
ctacagcgtggacaaatct

SEQ ID NO: 97563 - DNA, 19 bp, Homo sapiens
  siRNA target sequence for PRKG1 (NM_006258.1,61-79).
gggcaccttgcgggattta

SEQ ID NO: 97564 - DNA, 19 bp, Homo sapiens
  siRNA target sequence for PRKG1 (NM_006258.1,63-81).
gcaccttgcgggatttaca

SEQ ID NO: 97565 - DNA, 19 bp, Homo sapiens
  siRNA target sequence for PRKG1 (NM_006258.1,66-84).
ccttgcgggatttacagta

SEQ ID NO: 97566 - DNA, 19 bp, Homo sapiens
  siRNA target sequence for PRKG1 (NM_006258.1,368-386).
cagtccaaggatcttataa

SEQ ID NO: 97567 - DNA, 19 bp, Homo sapiens
  siRNA target sequence for PRKG1 (NM_006258.1,440-458).
caggagattgtggattgta

SEQ ID NO: 97568 - DNA, 19 bp, Homo sapiens
  siRNA target sequence for PRKG1 (NM_006258.1,481-499).
ggacagttgcatcatcaaa

SEQ ID NO: 97569 - DNA, 19 bp, Homo sapiens
  siRNA target sequence for PRKG1 (NM_006258.1,512-530).
gggtcactggtgtatgtca

SEQ ID NO: 97570 - DNA, 19 bp, Homo sapiens
  siRNA target sequence for PRKG1 (NM_006258.1,513-531).
ggtcactggtgtatgtcat

SEQ ID NO: 97571 - DNA, 19 bp, Homo sapiens
  siRNA target sequence for PRKG1 (NM_006258.1,536-554).
gatggtaaggttgaagtta

SEQ ID NO: 97572 - DNA, 19 bp, Homo sapiens
  siRNA target sequence for PRKG1 (NM_006258.1,579-597).
ccatgggtccaggaaaagt

SEQ ID NO: 97573 - DNA, 19 bp, Homo sapiens
  siRNA target sequence for PRKG1 (NM_006258.1,583-601).
gggtccaggaaaagtgttt

SEQ ID NO: 97574 - DNA, 19 bp, Homo sapiens
  siRNA target sequence for PRKG1 (NM_006258.1,603-621).
gggaattggctattcttta

SEQ ID NO: 97575 - DNA, 19 bp, Homo sapiens
  siRNA target sequence for PRKG1 (NM_006258.1,605-623).
gaattggctattctttaca

SEQ ID NO: 97576 - DNA, 19 bp, Homo sapiens
  siRNA target sequence for PRKG1 (NM_006258.1,642-660).
ccgtcaagactcttgtaaa

SEQ ID NO: 97577 - DNA, 19 bp, Homo sapiens
  siRNA target sequence for PRKG1 (NM_006258.1,643-661).
cgtcaagactcttgtaaat

SEQ ID NO: 97578 - DNA, 19 bp, Homo sapiens
  siRNA target sequence for PRKG1 (NM_006258.1,673-691).
ggccattgatcgacaatgt

SEQ ID NO: 97579 - DNA, 19 bp, Homo sapiens
  siRNA target sequence for PRKG1 (NM_006258.1,674-692).
gccattgatcgacaatgtt

SEQ ID NO: 97580 - DNA, 19 bp, Homo sapiens
  siRNA target sequence for PRKG1 (NM_006258.1,675-693).
ccattgatcgacaatgttt

SEQ ID NO: 97581 - DNA, 19 bp, Homo sapiens
  siRNA target sequence for PRKG1 (NM_006258.1,680-698).
gatcgacaatgttttcaaa

SEQ ID NO: 97582 - DNA, 19 bp, Homo sapiens
  siRNA target sequence for PRKG1 (NM_006258.1,727-745).
gcataccgagtatatggaa

SEQ ID NO: 97583 - DNA, 19 bp, Homo sapiens
  siRNA target sequence for PRKG1 (NM_006258.1,728-746).
cataccgagtatatggaat

SEQ ID NO: 97584 - DNA, 19 bp, Homo sapiens
  siRNA target sequence for PRKG1 (NM_006258.1,820-838).
gacccactatgaaaatgga

SEQ ID NO: 97585 - DNA, 19 bp, Homo sapiens
  siRNA target sequence for PRKG1 (NM_006258.1,864-882).
gaggggacaccttctttat

SEQ ID NO: 97586 - DNA, 19 bp, Homo sapiens
  siRNA target sequence for PRKG1 (NM_006258.1,866-884).
ggggacaccttctttatca

SEQ ID NO: 97587 - DNA, 19 bp, Homo sapiens
  siRNA target sequence for PRKG1 (NM_006258.1,867-885).
gggacaccttctttatcat

SEQ ID NO: 97588 - DNA, 19 bp, Homo sapiens
  siRNA target sequence for PRKG1 (NM_006258.1,886-904).
cagcaaaggaacggtaaat

SEQ ID NO: 97589 - DNA, 19 bp, Homo sapiens
  siRNA target sequence for PRKG1 (NM_006258.1,1001-1019).
gtgagaacagcaaacgtaa

SEQ ID NO: 97590 - DNA, 19 bp, Homo sapiens
  siRNA target sequence for PRKG1 (NM_006258.1,1048-1066).
gattgacagagactctttt

SEQ ID NO: 97591 - DNA, 19 bp, Homo sapiens
  siRNA target sequence for PRKG1 (NM_006258.1,1085-1103).
ctggatgatgtttctaata

SEQ ID NO: 97592 - DNA, 19 bp, Homo sapiens
  siRNA target sequence for PRKG1 (NM_006258.1,1212-1230).
gtttcggacgagtagaact

SEQ ID NO: 97593 - DNA, 19 bp, Homo sapiens
  siRNA target sequence for PRKG1 (NM_006258.1,1226-1244).
gaactggtccagttgaaaa

SEQ ID NO: 97594 - DNA, 19 bp, Homo sapiens
  siRNA target sequence for PRKG1 (NM_006258.1,1245-1263).
gtgaagaatccaaaacgtt

SEQ ID NO: 97595 - DNA, 19 bp, Homo sapiens
  siRNA target sequence for PRKG1 (NM_006258.1,1250-1268).
gaatccaaaacgtttgcaa

SEQ ID NO: 97596 - DNA, 19 bp, Homo sapiens
  siRNA target sequence for PRKG1 (NM_006258.1,1346-1364).
ggggctcattccgatttca

SEQ ID NO: 97597 - DNA, 19 bp, Homo sapiens
  siRNA target sequence for PRKG1 (NM_006258.1,1347-1365).
gggctcattccgatttcat

SEQ ID NO: 97598 - DNA, 19 bp, Homo sapiens
  siRNA target sequence for PRKG1 (NM_006258.1,1348-1366).
ggctcattccgatttcata

SEQ ID NO: 97599 - DNA, 19 bp, Homo sapiens
  siRNA target sequence for PRKG1 (NM_006258.1,1350-1368).
ctcattccgatttcatagt

SEQ ID NO: 97600 - DNA, 19 bp, Homo sapiens
  siRNA target sequence for PRKG1 (NM_006258.1,1369-1387).
gagactgtacagaacattt

SEQ ID NO: 97601 - DNA, 19 bp, Homo sapiens
  siRNA target sequence for PRKG1 (NM_006258.1,1436-1454).
gagctctggaccattctca

SEQ ID NO: 97602 - DNA, 19 bp, Homo sapiens
  siRNA target sequence for PRKG1 (NM_006258.1,1453-1471).
cagggatagaggttcgttt

SEQ ID NO: 97603 - DNA, 19 bp, Homo sapiens
  siRNA target sequence for PRKG1 (NM_006258.1,1463-1481).
ggttcgtttgaagattcta

SEQ ID NO: 97604 - DNA, 19 bp, Homo sapiens
  siRNA target sequence for PRKG1 (NM_006258.1,1500-1518).
catgtgtggtagaagcttt

SEQ ID NO: 97605 - DNA, 19 bp, Homo sapiens
  siRNA target sequence for PRKG1 (NM_006258.1,1576-1594).
cctagatcaccgaggttat

SEQ ID NO: 97606 - DNA, 19 bp, Homo sapiens
  siRNA target sequence for PRKG1 (NM_006258.1,1631-1649).
ggatttggaaagaaaacat

SEQ ID NO: 97607 - DNA, 19 bp, Homo sapiens
  siRNA target sequence for PRKG1 (NM_006258.1,1737-1755).
gaatcctaatgtatgaact

SEQ ID NO: 97608 - DNA, 19 bp, Homo sapiens
  siRNA target sequence for PRKG1 (NM_006258.1,1781-1799).
ggcccagatcctatgaaaa

SEQ ID NO: 97609 - DNA, 19 bp, Homo sapiens
  siRNA target sequence for PRKG1 (NM_006258.1,1787-1805).
gatcctatgaaaacctata

SEQ ID NO: 97610 - DNA, 19 bp, Homo sapiens
  siRNA target sequence for PRKG1 (NM_006258.1,1790-1808).
cctatgaaaacctataaca

SEQ ID NO: 97611 - DNA, 19 bp, Homo sapiens
  siRNA target sequence for PRKG1 (NM_006258.1,1791-1809).
ctatgaaaacctataacat

SEQ ID NO: 97612 - DNA, 19 bp, Homo sapiens
  siRNA target sequence for PRKG1 (NM_006258.1,1816-1834).
gagggggattgacatgata

SEQ ID NO: 97613 - DNA, 19 bp, Homo sapiens
  siRNA target sequence for PRKG1 (NM_006258.1,1818-1836).
gggggattgacatgataga

SEQ ID NO: 97614 - DNA, 19 bp, Homo sapiens
  siRNA target sequence for PRKG1 (NM_006258.1,1826-1844).
gacatgatagaatttccaa

SEQ ID NO: 97615 - DNA, 19 bp, Homo sapiens
  siRNA target sequence for PRKG1 (NM_006258.1,1846-1864).
gaagattgccaaaaatgct

SEQ ID NO: 97616 - DNA, 19 bp, Homo sapiens
  siRNA target sequence for PRKG1 (NM_006258.1,1928-1946).
ggagtaaaagacattcaaa

SEQ ID NO: 97617 - DNA, 19 bp, Homo sapiens
  siRNA target sequence for PRKG1 (NM_006258.1,1995-2013).
ccttgacacctcctataat

SEQ ID NO: 97618 - DNA, 19 bp, Homo sapiens
  siRNA target sequence for PRKG1 (NM_006258.1,2092-2110).
caactcaggatgggatata

SEQ ID NO: 97619 - DNA, 19 bp, Homo sapiens
  siRNA target sequence for PRKG2 (NM_006259.1,147-165).
caggagcgggagtaccatt

SEQ ID NO: 97620 - DNA, 19 bp, Homo sapiens
  siRNA target sequence for PRKG2 (NM_006259.1,150-168).
gagcgggagtaccatttga

SEQ ID NO: 97621 - DNA, 19 bp, Homo sapiens
  siRNA target sequence for PRKG2 (NM_006259.1,422-440).
gaacaaaccccctgaattt

SEQ ID NO: 97622 - DNA, 19 bp, Homo sapiens
  siRNA target sequence for PRKG2 (NM_006259.1,498-516).
gcccttaataaaaatcagt

SEQ ID NO: 97623 - DNA, 19 bp, Homo sapiens
  siRNA target sequence for PRKG2 (NM_006259.1,563-581).
catgtatgggagaaactat

SEQ ID NO: 97624 - DNA, 19 bp, Homo sapiens
  siRNA target sequence for PRKG2 (NM_006259.1,616-634).
caggaaaccatatctttgt

SEQ ID NO: 97625 - DNA, 19 bp, Homo sapiens
  siRNA target sequence for PRKG2 (NM_006259.1,657-675).
gtgttccaaggggagaaat

SEQ ID NO: 97626 - DNA, 19 bp, Homo sapiens
  siRNA target sequence for PRKG2 (NM_006259.1,709-727).
gggagcttgccattttata

SEQ ID NO: 97627 - DNA, 19 bp, Homo sapiens
  siRNA target sequence for PRKG2 (NM_006259.1,744-762).
gcctctgtgaaagctatta

SEQ ID NO: 97628 - DNA, 19 bp, Homo sapiens
  siRNA target sequence for PRKG2 (NM_006259.1,781-799).
cactagatcgagaggtatt

SEQ ID NO: 97629 - DNA, 19 bp, Homo sapiens
  siRNA target sequence for PRKG2 (NM_006259.1,789-807).
cgagaggtattccagaata

SEQ ID NO: 97630 - DNA, 19 bp, Homo sapiens
  siRNA target sequence for PRKG2 (NM_006259.1,790-808).
gagaggtattccagaatat

SEQ ID NO: 97631 - DNA, 19 bp, Homo sapiens
  siRNA target sequence for PRKG2 (NM_006259.1,862-880).
gtgtatccttgctgaagaa

SEQ ID NO: 97632 - DNA, 19 bp, Homo sapiens
  siRNA target sequence for PRKG2 (NM_006259.1,864-882).
gtatccttgctgaagaatt

SEQ ID NO: 97633 - DNA, 19 bp, Homo sapiens
  siRNA target sequence for PRKG2 (NM_006259.1,917-935).
cttggaagtggaatactat

SEQ ID NO: 97634 - DNA, 19 bp, Homo sapiens
  siRNA target sequence for PRKG2 (NM_006259.1,943-961).
gagattacatcattagaga

SEQ ID NO: 97635 - DNA, 19 bp, Homo sapiens
  siRNA target sequence for PRKG2 (NM_006259.1,965-983).
cgaggaaggaagtaccttt

SEQ ID NO: 97636 - DNA, 19 bp, Homo sapiens
  siRNA target sequence for PRKG2 (NM_006259.1,1090-1108).
ctcttatcagtgatgatgt

SEQ ID NO: 97637 - DNA, 19 bp, Homo sapiens
  siRNA target sequence for PRKG2 (NM_006259.1,1112-1130).
gtcagctaacattattgct

SEQ ID NO: 97638 - DNA, 19 bp, Homo sapiens
  siRNA target sequence for PRKG2 (NM_006259.1,1155-1173).
gttatagatcgagaaacat

SEQ ID NO: 97639 - DNA, 19 bp, Homo sapiens
  siRNA target sequence for PRKG2 (NM_006259.1,1164-1182).
cgagaaacattcaaccaaa

SEQ ID NO: 97640 - DNA, 19 bp, Homo sapiens
  siRNA target sequence for PRKG2 (NM_006259.1,1178-1196).
ccaaactgtcggtacattt

SEQ ID NO: 97641 - DNA, 19 bp, Homo sapiens
  siRNA target sequence for PRKG2 (NM_006259.1,1263-1281).
gcgaagcggtccatgtcta

SEQ ID NO: 97642 - DNA, 19 bp, Homo sapiens
  siRNA target sequence for PRKG2 (NM_006259.1,1264-1282).
cgaagcggtccatgtctaa

SEQ ID NO: 97643 - DNA, 19 bp, Homo sapiens
  siRNA target sequence for PRKG2 (NM_006259.1,1364-1382).
ccagaaccttgagattatt

SEQ ID NO: 97644 - DNA, 19 bp, Homo sapiens
  siRNA target sequence for PRKG2 (NM_006259.1,1407-1425).
ggaagagttgagcttgtta

SEQ ID NO: 97645 - DNA, 19 bp, Homo sapiens
  siRNA target sequence for PRKG2 (NM_006259.1,1453-1471).
ctatgaagtgtataaggaa

SEQ ID NO: 97646 - DNA, 19 bp, Homo sapiens
  siRNA target sequence for PRKG2 (NM_006259.1,1545-1563).
ccattcattgtgaaattat

SEQ ID NO: 97647 - DNA, 19 bp, Homo sapiens
  siRNA target sequence for PRKG2 (NM_006259.1,1550-1568).
cattgtgaaattatatcgt

SEQ ID NO: 97648 - DNA, 19 bp, Homo sapiens
  siRNA target sequence for PRKG2 (NM_006259.1,1566-1584).
cgtactttcaaggacaata

SEQ ID NO: 97649 - DNA, 19 bp, Homo sapiens
  siRNA target sequence for PRKG2 (NM_006259.1,1567-1585).
gtactttcaaggacaataa

SEQ ID NO: 97650 - DNA, 19 bp, Homo sapiens
  siRNA target sequence for PRKG2 (NM_006259.1,1578-1596).
gacaataagtatgtataca

SEQ ID NO: 97651 - DNA, 19 bp, Homo sapiens
  siRNA target sequence for PRKG2 (NM_006259.1,1621-1639).
gggagctctggagtatatt

SEQ ID NO: 97652 - DNA, 19 bp, Homo sapiens
  siRNA target sequence for PRKG2 (NM_006259.1,1622-1640).
ggagctctggagtatatta

SEQ ID NO: 97653 - DNA, 19 bp, Homo sapiens
  siRNA target sequence for PRKG2 (NM_006259.1,1623-1641).
gagctctggagtatattaa

SEQ ID NO: 97654 - DNA, 19 bp, Homo sapiens
  siRNA target sequence for PRKG2 (NM_006259.1,1712-1730).
cctgcatcgactaggtatt

SEQ ID NO: 97655 - DNA, 19 bp, Homo sapiens
  siRNA target sequence for PRKG2 (NM_006259.1,1713-1731).
ctgcatcgactaggtatta

SEQ ID NO: 97656 - DNA, 19 bp, Homo sapiens
  siRNA target sequence for PRKG2 (NM_006259.1,1716-1734).
catcgactaggtattatct

SEQ ID NO: 97657 - DNA, 19 bp, Homo sapiens
  siRNA target sequence for PRKG2 (NM_006259.1,1767-1785).
gatgctgagggttacctta

SEQ ID NO: 97658 - DNA, 19 bp, Homo sapiens
  siRNA target sequence for PRKG2 (NM_006259.1,1775-1793).
gggttaccttaaattggtt

SEQ ID NO: 97659 - DNA, 19 bp, Homo sapiens
  siRNA target sequence for PRKG2 (NM_006259.1,1796-1814).
ctttggatttgcgaagaaa

SEQ ID NO: 97660 - DNA, 19 bp, Homo sapiens
  siRNA target sequence for PRKG2 (NM_006259.1,1968-1986).
ggggttgaccaaatgatga

SEQ ID NO: 97661 - DNA, 19 bp, Homo sapiens
  siRNA target sequence for PRKG2 (NM_006259.1,2007-2025).
ggaattgaaaaaatggatt

SEQ ID NO: 97662 - DNA, 19 bp, Homo sapiens
  siRNA target sequence for PRKG2 (NM_006259.1,2041-2059).
cacgacgacctgaggattt

SEQ ID NO: 97663 - DNA, 19 bp, Homo sapiens
  siRNA target sequence for PRKG2 (NM_006259.1,2043-2061).
cgacgacctgaggatttga

SEQ ID NO: 97664 - DNA, 19 bp, Homo sapiens
  siRNA target sequence for PRKG2 (NM_006259.1,2089-2107).
cagaaaggctgggaaatct

SEQ ID NO: 97665 - DNA, 19 bp, Homo sapiens
  siRNA target sequence for PRKG2 (NM_006259.1,2136-2154).
cacaggtggttaaatggtt

SEQ ID NO: 97666 - DNA, 19 bp, Homo sapiens
  siRNA target sequence for PRKG2 (NM_006259.1,2138-2156).
caggtggttaaatggtttt

SEQ ID NO: 97667 - DNA, 19 bp, Homo sapiens
  siRNA target sequence for PRKG2 (NM_006259.1,2276-2294).
gctatcaggctgggataaa

SEQ ID NO: 97668 - DNA, 19 bp, Homo sapiens
  siRNA target sequence for PRKWNK1 (NM_018979.1,597-615).
gcagcaggatgatatcgaa

SEQ ID NO: 97669 - DNA, 19 bp, Homo sapiens
  siRNA target sequence for PRKWNK1 (NM_018979.1,633-651).
cgtgggaatgtctaacgat

SEQ ID NO: 97670 - DNA, 19 bp, Homo sapiens
  siRNA target sequence for PRKWNK1 (NM_018979.1,751-769).
gaactgcaggatcgaaaat

SEQ ID NO: 97671 - DNA, 19 bp, Homo sapiens
  siRNA target sequence for PRKWNK1 (NM_018979.1,756-774).
gcaggatcgaaaattaaca

SEQ ID NO: 97672 - DNA, 19 bp, Homo sapiens
  siRNA target sequence for PRKWNK1 (NM_018979.1,757-775).
caggatcgaaaattaacaa

SEQ ID NO: 97673 - DNA, 19 bp, Homo sapiens
  siRNA target sequence for PRKWNK1 (NM_018979.1,829-847).
catcccaatattgttagat

SEQ ID NO: 97674 - DNA, 19 bp, Homo sapiens
  siRNA target sequence for PRKWNK1 (NM_018979.1,892-910).
gttttggtgactgaactta

SEQ ID NO: 97675 - DNA, 19 bp, Homo sapiens
  siRNA target sequence for PRKWNK1 (NM_018979.1,923-941).
cacttaaaacgtatctgaa

SEQ ID NO: 97676 - DNA, 19 bp, Homo sapiens
  siRNA target sequence for PRKWNK1 (NM_018979.1,981-999).
gtgccgtcagatccttaaa

SEQ ID NO: 97677 - DNA, 19 bp, Homo sapiens
  siRNA target sequence for PRKWNK1 (NM_018979.1,984-1002).
ccgtcagatccttaaaggt

SEQ ID NO: 97678 - DNA, 19 bp, Homo sapiens
  siRNA target sequence for PRKWNK1 (NM_018979.1,1019-1037).
ctcgaactccacctatcat

SEQ ID NO: 97679 - DNA, 19 bp, Homo sapiens
  siRNA target sequence for PRKWNK1 (NM_018979.1,1035-1053).
cattcaccgcgatcttaaa

SEQ ID NO: 97680 - DNA, 19 bp, Homo sapiens
  siRNA target sequence for PRKWNK1 (NM_018979.1,1119-1137).
cctgaagcgggcttctttt

SEQ ID NO: 97681 - DNA, 19 bp, Homo sapiens
  siRNA target sequence for PRKWNK1 (NM_018979.1,1240-1258).
gagatggctacatctgaat

SEQ ID NO: 97682 - DNA, 19 bp, Homo sapiens
  siRNA target sequence for PRKWNK1 (NM_018979.1,1245-1263).
ggctacatctgaatatcct

SEQ ID NO: 97683 - DNA, 19 bp, Homo sapiens
  siRNA target sequence for PRKWNK1 (NM_018979.1,1246-1264).
gctacatctgaatatcctt

SEQ ID NO: 97684 - DNA, 19 bp, Homo sapiens
  siRNA target sequence for PRKWNK1 (NM_018979.1,1247-1265).
ctacatctgaatatcctta

SEQ ID NO: 97685 - DNA, 19 bp, Homo sapiens
  siRNA target sequence for PRKWNK1 (NM_018979.1,1314-1332).
ggtgaagccagccagtttt

SEQ ID NO: 97686 - DNA, 19 bp, Homo sapiens
  siRNA target sequence for PRKWNK1 (NM_018979.1,1322-1340).
cagccagttttgacaaagt

SEQ ID NO: 97687 - DNA, 19 bp, Homo sapiens
  siRNA target sequence for PRKWNK1 (NM_018979.1,1348-1366).
cctgaagtgaaggaaatta

SEQ ID NO: 97688 - DNA, 19 bp, Homo sapiens
  siRNA target sequence for PRKWNK1 (NM_018979.1,1372-1390).
ggatgcatacgacaaaaca

SEQ ID NO: 97689 - DNA, 19 bp, Homo sapiens
  siRNA target sequence for PRKWNK1 (NM_018979.1,1373-1391).
gatgcatacgacaaaacaa

SEQ ID NO: 97690 - DNA, 19 bp, Homo sapiens
  siRNA target sequence for PRKWNK1 (NM_018979.1,1376-1394).
gcatacgacaaaacaaaga

SEQ ID NO: 97691 - DNA, 19 bp, Homo sapiens
  siRNA target sequence for PRKWNK1 (NM_018979.1,1377-1395).
catacgacaaaacaaagat

SEQ ID NO: 97692 - DNA, 19 bp, Homo sapiens
  siRNA target sequence for PRKWNK1 (NM_018979.1,1448-1466).
caggagtacgggtagaatt

SEQ ID NO: 97693 - DNA, 19 bp, Homo sapiens
  siRNA target sequence for PRKWNK1 (NM_018979.1,1621-1639).
gtagagtctgggtatgtct

SEQ ID NO: 97694 - DNA, 19 bp, Homo sapiens
  siRNA target sequence for PRKWNK1 (NM_018979.1,1658-1676).
ccatggctaaagctatcaa

SEQ ID NO: 97695 - DNA, 19 bp, Homo sapiens
  siRNA target sequence for PRKWNK1 (NM_018979.1,1669-1687).
gctatcaaagacagagtat

SEQ ID NO: 97696 - DNA, 19 bp, Homo sapiens
  siRNA target sequence for PRKWNK1 (NM_018979.1,1678-1696).
gacagagtatcattaatta

SEQ ID NO: 97697 - DNA, 19 bp, Homo sapiens
  siRNA target sequence for PRKWNK1 (NM_018979.1,1825-1843).
gctagcaccggcataccta

SEQ ID NO: 97698 - DNA, 19 bp, Homo sapiens
  siRNA target sequence for PRKWNK1 (NM_018979.1,1923-1941).
gtaccagcaacccagtata

SEQ ID NO: 97699 - DNA, 19 bp, Homo sapiens
  siRNA target sequence for PRKWNK1 (NM_018979.1,1935-1953).
cagtatatctgtgttatct

SEQ ID NO: 97700 - DNA, 19 bp, Homo sapiens
  siRNA target sequence for PRKWNK1 (NM_018979.1,1937-1955).
gtatatctgtgttatctga

SEQ ID NO: 97701 - DNA, 19 bp, Homo sapiens
  siRNA target sequence for PRKWNK1 (NM_018979.1,2010-2028).
cagccaacagacagtttca

SEQ ID NO: 97702 - DNA, 19 bp, Homo sapiens
  siRNA target sequence for PRKWNK1 (NM_018979.1,2027-2045).
catatggttcccaacatga

SEQ ID NO: 97703 - DNA, 19 bp, Homo sapiens
  siRNA target sequence for PRKWNK1 (NM_018979.1,2041-2059).
catgaacaggcacattcta

SEQ ID NO: 97704 - DNA, 19 bp, Homo sapiens
  siRNA target sequence for PRKWNK1 (NM_018979.1,2068-2086).
gtcccagggcatatacctt

SEQ ID NO: 97705 - DNA, 19 bp, Homo sapiens
  siRNA target sequence for PRKWNK1 (NM_018979.1,2163-2181).
gccatcctcaagtagctta

SEQ ID NO: 97706 - DNA, 19 bp, Homo sapiens
  siRNA target sequence for PRKWNK1 (NM_018979.1,2164-2182).
ccatcctcaagtagcttaa

SEQ ID NO: 97707 - DNA, 19 bp, Homo sapiens
  siRNA target sequence for PRKWNK1 (NM_018979.1,2178-2196).
cttaacaggggtttcatct

SEQ ID NO: 97708 - DNA, 19 bp, Homo sapiens
  siRNA target sequence for PRKWNK1 (NM_018979.1,2384-2402).
cccagccagtaccaactat

SEQ ID NO: 97709 - DNA, 19 bp, Homo sapiens
  siRNA target sequence for PRKWNK1 (NM_018979.1,2388-2406).
gccagtaccaactatccaa

SEQ ID NO: 97710 - DNA, 19 bp, Homo sapiens
  siRNA target sequence for PRKWNK1 (NM_018979.1,2514-2532).
gtaccctgtctctcagatt

SEQ ID NO: 97711 - DNA, 19 bp, Homo sapiens
  siRNA target sequence for PRKWNK1 (NM_018979.1,2560-2578).
gctcagacaggtttctcat

SEQ ID NO: 97712 - DNA, 19 bp, Homo sapiens
  siRNA target sequence for PRKWNK1 (NM_018979.1,2619-2637).
gctcacgttggcttcatct

SEQ ID NO: 97713 - DNA, 19 bp, Homo sapiens
  siRNA target sequence for PRKWNK1 (NM_018979.1,2857-2875).
cagtacccaggagattcaa

SEQ ID NO: 97714 - DNA, 19 bp, Homo sapiens
  siRNA target sequence for PRKWNK1 (NM_018979.1,2936-2954).
ccatgccgacagaagtact

SEQ ID NO: 97715 - DNA, 19 bp, Homo sapiens
  siRNA target sequence for PRKWNK1 (NM_018979.1,2955-2973).
ggctacacctgggtacttt

SEQ ID NO: 97716 - DNA, 19 bp, Homo sapiens
  siRNA target sequence for PRKWNK1 (NM_018979.1,2986-3004).
cagccttatgtggaatcaa

SEQ ID NO: 97717 - DNA, 19 bp, Homo sapiens
  siRNA target sequence for PRKWNK1 (NM_018979.1,3051-3069).
ccagccaggagggagttta

SEQ ID NO: 97718 - DNA, 19 bp, Homo sapiens
  siRNA target sequence for PRKWNK1 (NM_018979.1,3054-3072).
gccaggagggagtttagca

SEQ ID NO: 97719 - DNA, 19 bp, Homo sapiens
  siRNA target sequence for PRKWNK1 (NM_018979.1,3321-3339).
gagtcgctctcgacatgaa

SEQ ID NO: 97720 - DNA, 19 bp, Homo sapiens
  siRNA target sequence for PRKWNK1 (NM_018979.1,3325-3343).
cgctctcgacatgaaaaaa

SEQ ID NO: 97721 - DNA, 19 bp, Homo sapiens
  siRNA target sequence for PRKWNK1 (NM_018979.1,3347-3365).
cacgcccaaaattaagaat

SEQ ID NO: 97722 - DNA, 19 bp, Homo sapiens
  siRNA target sequence for PRKWNK1 (NM_018979.1,3390-3408).
ccgagtagtagaatgtcaa

SEQ ID NO: 97723 - DNA, 19 bp, Homo sapiens
  siRNA target sequence for PRKWNK1 (NM_018979.1,3391-3409).
cgagtagtagaatgtcaat

SEQ ID NO: 97724 - DNA, 19 bp, Homo sapiens
  siRNA target sequence for PRKWNK1 (NM_018979.1,3397-3415).
gtagaatgtcaattagaga

SEQ ID NO: 97725 - DNA, 19 bp, Homo sapiens
  siRNA target sequence for PRKWNK1 (NM_018979.1,3406-3424).
caattagagactcataata

SEQ ID NO: 97726 - DNA, 19 bp, Homo sapiens
  siRNA target sequence for PRKWNK1 (NM_018979.1,3467-3485).
ccgaggagatagcaacaat

SEQ ID NO: 97727 - DNA, 19 bp, Homo sapiens
  siRNA target sequence for PRKWNK1 (NM_018979.1,3468-3486).
cgaggagatagcaacaatt

SEQ ID NO: 97728 - DNA, 19 bp, Homo sapiens
  siRNA target sequence for PRKWNK1 (NM_018979.1,3482-3500).
caattatggtgaacaatga

SEQ ID NO: 97729 - DNA, 19 bp, Homo sapiens
  siRNA target sequence for PRKWNK1 (NM_018979.1,3534-3552).
ggatcaagtgcgagaaatt

SEQ ID NO: 97730 - DNA, 19 bp, Homo sapiens
  siRNA target sequence for PRKWNK1 (NM_018979.1,3535-3553).
gatcaagtgcgagaaatta

SEQ ID NO: 97731 - DNA, 19 bp, Homo sapiens
  siRNA target sequence for PRKWNK1 (NM_018979.1,3612-3630).
gggattggagagtctacaa

SEQ ID NO: 97732 - DNA, 19 bp, Homo sapiens
  siRNA target sequence for PRKWNK1 (NM_018979.1,3636-3654).
ggatgactatggcttttca

SEQ ID NO: 97733 - DNA, 19 bp, Homo sapiens
  siRNA target sequence for PRKWNK1 (NM_018979.1,3678-3696).
gttcaaacaaccaattcct

SEQ ID NO: 97734 - DNA, 19 bp, Homo sapiens
  siRNA target sequence for PRKWNK1 (NM_018979.1,3712-3730).
cagcaaataggcattccta

SEQ ID NO: 97735 - DNA, 19 bp, Homo sapiens
  siRNA target sequence for PRKWNK1 (NM_018979.1,3728-3746).
ctaccagttctttaactca

SEQ ID NO: 97736 - DNA, 19 bp, Homo sapiens
  siRNA target sequence for PRKWNK1 (NM_018979.1,3737-3755).
ctttaactcaagttgttca

SEQ ID NO: 97737 - DNA, 19 bp, Homo sapiens
  siRNA target sequence for PRKWNK1 (NM_018979.1,3758-3776).
ctgcgggaaggcggtttat

SEQ ID NO: 97738 - DNA, 19 bp, Homo sapiens
  siRNA target sequence for PRKWNK1 (NM_018979.1,3761-3779).
cgggaaggcggtttatagt

SEQ ID NO: 97739 - DNA, 19 bp, Homo sapiens
  siRNA target sequence for PRKWNK1 (NM_018979.1,3763-3781).
ggaaggcggtttatagtga

SEQ ID NO: 97740 - DNA, 19 bp, Homo sapiens
  siRNA target sequence for PRKWNK1 (NM_018979.1,3789-3807).
gccagaaagccgattacga

SEQ ID NO: 97741 - DNA, 19 bp, Homo sapiens
  siRNA target sequence for PRKWNK1 (NM_018979.1,3798-3816).
ccgattacgagaatcaaaa

SEQ ID NO: 97742 - DNA, 19 bp, Homo sapiens
  siRNA target sequence for PRKWNK1 (NM_018979.1,3800-3818).
gattacgagaatcaaaagt

SEQ ID NO: 97743 - DNA, 19 bp, Homo sapiens
  siRNA target sequence for PRKWNK1 (NM_018979.1,3928-3946).
cttagacgtgcccaaatga

SEQ ID NO: 97744 - DNA, 19 bp, Homo sapiens
  siRNA target sequence for PRKWNK1 (NM_018979.1,3967-3985).
cctccaaactttagtcata

SEQ ID NO: 97745 - DNA, 19 bp, Homo sapiens
  siRNA target sequence for PRKWNK1 (NM_018979.1,3980-3998).
gtcatacaggaccaacatt

SEQ ID NO: 97746 - DNA, 19 bp, Homo sapiens
  siRNA target sequence for PRKWNK1 (NM_018979.1,4006-4024).
gtacctcctttcttaagta

SEQ ID NO: 97747 - DNA, 19 bp, Homo sapiens
  siRNA target sequence for PRKWNK1 (NM_018979.1,4076-4094).
caagcagccctcctaatga

SEQ ID NO: 97748 - DNA, 19 bp, Homo sapiens
  siRNA target sequence for PRKWNK1 (NM_018979.1,4095-4113).
catttccacatcagtaatt

SEQ ID NO: 97749 - DNA, 19 bp, Homo sapiens
  siRNA target sequence for PRKWNK1 (NM_018979.1,4167-4185).
cacaggtgtggtaacttca

SEQ ID NO: 97750 - DNA, 19 bp, Homo sapiens
  siRNA target sequence for PRKWNK1 (NM_018979.1,4209-4227).
gtctgaatcaccagtactt

SEQ ID NO: 97751 - DNA, 19 bp, Homo sapiens
  siRNA target sequence for PRKWNK1 (NM_018979.1,4222-4240).
gtactttccagcgtagttt

SEQ ID NO: 97752 - DNA, 19 bp, Homo sapiens
  siRNA target sequence for PRKWNK1 (NM_018979.1,4225-4243).
ctttccagcgtagtttcaa

SEQ ID NO: 97753 - DNA, 19 bp, Homo sapiens
  siRNA target sequence for PRKWNK1 (NM_018979.1,4255-4273).
cctgcagttgtctcaatat

SEQ ID NO: 97754 - DNA, 19 bp, Homo sapiens
  siRNA target sequence for PRKWNK1 (NM_018979.1,4258-4276).
gcagttgtctcaatatcta

SEQ ID NO: 97755 - DNA, 19 bp, Homo sapiens
  siRNA target sequence for PRKWNK1 (NM_018979.1,4261-4279).
gttgtctcaatatctacta

SEQ ID NO: 97756 - DNA, 19 bp, Homo sapiens
  siRNA target sequence for PRKWNK1 (NM_018979.1,4280-4298).
catccccgtcacttcaagt

SEQ ID NO: 97757 - DNA, 19 bp, Homo sapiens
  siRNA target sequence for PRKWNK1 (NM_018979.1,4315-4333).
gagatcgttgtttctagta

SEQ ID NO: 97758 - DNA, 19 bp, Homo sapiens
  siRNA target sequence for PRKWNK1 (NM_018979.1,4317-4335).
gatcgttgtttctagtaca

SEQ ID NO: 97759 - DNA, 19 bp, Homo sapiens
  siRNA target sequence for PRKWNK1 (NM_018979.1,4455-4473).
gggagccacattaacatca

SEQ ID NO: 97760 - DNA, 19 bp, Homo sapiens
  siRNA target sequence for PRKWNK1 (NM_018979.1,4459-4477).
gccacattaacatcagttt

SEQ ID NO: 97761 - DNA, 19 bp, Homo sapiens
  siRNA target sequence for PRKWNK1 (NM_018979.1,4522-4540).
cagcttagcagcagtactt

SEQ ID NO: 97762 - DNA, 19 bp, Homo sapiens
  siRNA target sequence for PRKWNK1 (NM_018979.1,4524-4542).
gcttagcagcagtacttct

SEQ ID NO: 97763 - DNA, 19 bp, Homo sapiens
  siRNA target sequence for PRKWNK1 (NM_018979.1,4525-4543).
cttagcagcagtacttcta

SEQ ID NO: 97764 - DNA, 19 bp, Homo sapiens
  siRNA target sequence for PRKWNK1 (NM_018979.1,4555-4573).
gctgaaaccgtggtagtta

SEQ ID NO: 97765 - DNA, 19 bp, Homo sapiens
  siRNA target sequence for PRKWNK1 (NM_018979.1,4574-4592).
gcgcacactcactagataa

SEQ ID NO: 97766 - DNA, 19 bp, Homo sapiens
  siRNA target sequence for PRKWNK1 (NM_018979.1,4579-4597).
cactcactagataagacat

SEQ ID NO: 97767 - DNA, 19 bp, Homo sapiens
  siRNA target sequence for PRKWNK1 (NM_018979.1,4585-4603).
ctagataagacatctcata

SEQ ID NO: 97768 - DNA, 19 bp, Homo sapiens
  siRNA target sequence for PRKWNK1 (NM_018979.1,4663-4681).
gcaggagtgtctagttata

SEQ ID NO: 97769 - DNA, 19 bp, Homo sapiens
  siRNA target sequence for PRKWNK1 (NM_018979.1,4664-4682).
caggagtgtctagttatat

SEQ ID NO: 97770 - DNA, 19 bp, Homo sapiens
  siRNA target sequence for PRKWNK1 (NM_018979.1,4702-4720).
catcctttggtcattccat

SEQ ID NO: 97771 - DNA, 19 bp, Homo sapiens
  siRNA target sequence for PRKWNK1 (NM_018979.1,4842-4860).
gcagacactaattcatagt

SEQ ID NO: 97772 - DNA, 19 bp, Homo sapiens
  siRNA target sequence for PRKWNK1 (NM_018979.1,4887-4905).
ccagccccatactcattgt

SEQ ID NO: 97773 - DNA, 19 bp, Homo sapiens
  siRNA target sequence for PRKWNK1 (NM_018979.1,4937-4955).
ctcctggaattgatgacat

SEQ ID NO: 97774 - DNA, 19 bp, Homo sapiens
  siRNA target sequence for PRKWNK1 (NM_018979.1,5034-5052).
ggagacctcactagtcata

SEQ ID NO: 97775 - DNA, 19 bp, Homo sapiens
  siRNA target sequence for PRKWNK1 (NM_018979.1,5185-5203).
gtcacacctgggcaagttt

SEQ ID NO: 97776 - DNA, 19 bp, Homo sapiens
  siRNA target sequence for PRKWNK1 (NM_018979.1,5253-5271).
ctccaagccacctctaact

SEQ ID NO: 97777 - DNA, 19 bp, Homo sapiens
  siRNA target sequence for PRKWNK1 (NM_018979.1,5255-5273).
ccaagccacctctaactaa

SEQ ID NO: 97778 - DNA, 19 bp, Homo sapiens
  siRNA target sequence for PRKWNK1 (NM_018979.1,5463-5481).
ggctccaacagcaatcaca

SEQ ID NO: 97779 - DNA, 19 bp, Homo sapiens
  siRNA target sequence for PRKWNK1 (NM_018979.1,5507-5525).
gtgtttctcaagtcaaaga

SEQ ID NO: 97780 - DNA, 19 bp, Homo sapiens
  siRNA target sequence for PRKWNK1 (NM_018979.1,5530-5548).
cctgtcctagcaactagtt

SEQ ID NO: 97781 - DNA, 19 bp, Homo sapiens
  siRNA target sequence for PRKWNK1 (NM_018979.1,5573-5591).
gacgatttcaggtttctgt

SEQ ID NO: 97782 - DNA, 19 bp, Homo sapiens
  siRNA target sequence for PRKWNK1 (NM_018979.1,5597-5615).
cagacggtgcccagaaaga

SEQ ID NO: 97783 - DNA, 19 bp, Homo sapiens
  siRNA target sequence for PRKWNK1 (NM_018979.1,5635-5653).
gatgcaaagtctgttcatt

SEQ ID NO: 97784 - DNA, 19 bp, Homo sapiens
  siRNA target sequence for PRKWNK1 (NM_018979.1,5676-5694).
ctcagtgctatcaagtagt

SEQ ID NO: 97785 - DNA, 19 bp, Homo sapiens
  siRNA target sequence for PRKWNK1 (NM_018979.1,5722-5740).
gagccgaatggcataacca

SEQ ID NO: 97786 - DNA, 19 bp, Homo sapiens
  siRNA target sequence for PRKWNK1 (NM_018979.1,5742-5760).
ccctggtatctcttcagat

SEQ ID NO: 97787 - DNA, 19 bp, Homo sapiens
  siRNA target sequence for PRKWNK1 (NM_018979.1,5822-5840).
ccaaggttggacgttttca

SEQ ID NO: 97788 - DNA, 19 bp, Homo sapiens
  siRNA target sequence for PRKWNK1 (NM_018979.1,5833-5851).
cgttttcaggtgacaacta

SEQ ID NO: 97789 - DNA, 19 bp, Homo sapiens
  siRNA target sequence for PRKWNK1 (NM_018979.1,5865-5883).
gggtcgtttctctgtatca

SEQ ID NO: 97790 - DNA, 19 bp, Homo sapiens
  siRNA target sequence for PRKWNK1 (NM_018979.1,5866-5884).
ggtcgtttctctgtatcaa

SEQ ID NO: 97791 - DNA, 19 bp, Homo sapiens
  siRNA target sequence for PRKWNK1 (NM_018979.1,5867-5885).
gtcgtttctctgtatcaaa

SEQ ID NO: 97792 - DNA, 19 bp, Homo sapiens
  siRNA target sequence for PRKWNK1 (NM_018979.1,5869-5887).
cgtttctctgtatcaaaaa

SEQ ID NO: 97793 - DNA, 19 bp, Homo sapiens
  siRNA target sequence for PRKWNK1 (NM_018979.1,5926-5944).
gtggcatctcctcctttta

SEQ ID NO: 97794 - DNA, 19 bp, Homo sapiens
  siRNA target sequence for PRKWNK1 (NM_018979.1,5965-5983).
cttcctgctgtgataccaa

SEQ ID NO: 97795 - DNA, 19 bp, Homo sapiens
  siRNA target sequence for PRKWNK1 (NM_018979.1,6003-6021).
gtcagagccttcacatcta

SEQ ID NO: 97796 - DNA, 19 bp, Homo sapiens
  siRNA target sequence for PRKWNK1 (NM_018979.1,6037-6055).
gacccggaggccgcttttt

SEQ ID NO: 97797 - DNA, 19 bp, Homo sapiens
  siRNA target sequence for PRKWNK1 (NM_018979.1,6040-6058).
ccggaggccgcttttttaa

SEQ ID NO: 97798 - DNA, 19 bp, Homo sapiens
  siRNA target sequence for PRKWNK1 (NM_018979.1,6043-6061).
gaggccgcttttttaagta

SEQ ID NO: 97799 - DNA, 19 bp, Homo sapiens
  siRNA target sequence for PRKWNK1 (NM_018979.1,6120-6138).
ccttcctagccagaatcta

SEQ ID NO: 97800 - DNA, 19 bp, Homo sapiens
  siRNA target sequence for PRKWNK1 (NM_018979.1,6136-6154).
ctaagtcaaagccttagta

SEQ ID NO: 97801 - DNA, 19 bp, Homo sapiens
  siRNA target sequence for PRKWNK1 (NM_018979.1,6182-6200).
gcgacaatgagtcagatat

SEQ ID NO: 97802 - DNA, 19 bp, Homo sapiens
  siRNA target sequence for PRKWNK1 (NM_018979.1,6228-6246).
gcgacgactacgagataaa

SEQ ID NO: 97803 - DNA, 19 bp, Homo sapiens
  siRNA target sequence for PRKWNK1 (NM_018979.1,6230-6248).
gacgactacgagataaaca

SEQ ID NO: 97804 - DNA, 19 bp, Homo sapiens
  siRNA target sequence for PRKWNK1 (NM_018979.1,6275-6293).
gtcgccagaagcatgaaat

SEQ ID NO: 97805 - DNA, 19 bp, Homo sapiens
  siRNA target sequence for PRKWNK1 (NM_018979.1,6321-6339).
ggtgccccctgctgttatt

SEQ ID NO: 97806 - DNA, 19 bp, Homo sapiens
  siRNA target sequence for PRKWNK1 (NM_018979.1,6322-6340).
gtgccccctgctgttatta

SEQ ID NO: 97807 - DNA, 19 bp, Homo sapiens
  siRNA target sequence for PRKWNK1 (NM_018979.1,6373-6391).
cgacgacccactaaaagca

SEQ ID NO: 97808 - DNA, 19 bp, Homo sapiens
  siRNA target sequence for PRKWNK1 (NM_018979.1,6374-6392).
gacgacccactaaaagcaa

SEQ ID NO: 97809 - DNA, 19 bp, Homo sapiens
  siRNA target sequence for PRKWNK1 (NM_018979.1,6750-6768).
gcacaagttggtagacaat

SEQ ID NO: 97810 - DNA, 19 bp, Homo sapiens
  siRNA target sequence for PRKWNK1 (NM_018979.1,6775-6793).
cgagatgccatgaatctct

SEQ ID NO: 97811 - DNA, 19 bp, Homo sapiens
  siRNA target sequence for PRKWNK1 (NM_018979.1,6809-6827).
gcaaagggcacatgaatta

SEQ ID NO: 97812 - DNA, 19 bp, Homo sapiens
  siRNA target sequence for PRKWNK1 (NM_018979.1,6943-6961).
cacttcaccaagtctatgt

SEQ ID NO: 97813 - DNA, 19 bp, Homo sapiens
  siRNA target sequence for PRKWNK1 (NM_018979.1,7070-7088).
cctccttgcagaatttcaa

SEQ ID NO: 97814 - DNA, 19 bp, Homo sapiens
  siRNA target sequence for PRKWNK2 (NM_006648.3,839-857).
cagggacgctgaagacata

SEQ ID NO: 97815 - DNA, 19 bp, Homo sapiens
  siRNA target sequence for PRKWNK2 (NM_006648.3,1261-1279).
gtgcacgatcctgaaatca

SEQ ID NO: 97816 - DNA, 19 bp, Homo sapiens
  siRNA target sequence for PRKWNK2 (NM_006648.3,1291-1309).
ggggagtgtatctgcaaaa

SEQ ID NO: 97817 - DNA, 19 bp, Homo sapiens
  siRNA target sequence for PRKWNK2 (NM_006648.3,1292-1310).
gggagtgtatctgcaaaaa

SEQ ID NO: 97818 - DNA, 19 bp, Homo sapiens
  siRNA target sequence for PRKWNK2 (NM_006648.3,1317-1335).
ggaaaggtacgagatcaaa

SEQ ID NO: 97819 - DNA, 19 bp, Homo sapiens
  siRNA target sequence for PRKWNK2 (NM_006648.3,1474-1492).
gacaatggagccatagagt

SEQ ID NO: 97820 - DNA, 19 bp, Homo sapiens
  siRNA target sequence for PRKWNK2 (NM_006648.3,2481-2499).
cgtgccaccacctcagtat

SEQ ID NO: 97821 - DNA, 19 bp, Homo sapiens
  siRNA target sequence for PRKWNK2 (NM_006648.3,2482-2500).
gtgccaccacctcagtatt

SEQ ID NO: 97822 - DNA, 19 bp, Homo sapiens
  siRNA target sequence for PRKWNK2 (NM_006648.3,2622-2640).
gaccattgtgccaaatgca

SEQ ID NO: 97823 - DNA, 19 bp, Homo sapiens
  siRNA target sequence for PRKWNK2 (NM_006648.3,2788-2806).
cacacggtgcagaatatga

SEQ ID NO: 97824 - DNA, 19 bp, Homo sapiens
  siRNA target sequence for PRKWNK2 (NM_006648.3,3408-3426).
gagctatggaggttctgat

SEQ ID NO: 97825 - DNA, 19 bp, Homo sapiens
  siRNA target sequence for PRKWNK2 (NM_006648.3,3664-3682).
ggggacgcacccgatgaaa

SEQ ID NO: 97826 - DNA, 19 bp, Homo sapiens
  siRNA target sequence for PRKWNK2 (NM_006648.3,3665-3683).
gggacgcacccgatgaaat

SEQ ID NO: 97827 - DNA, 19 bp, Homo sapiens
  siRNA target sequence for PRKWNK2 (NM_006648.3,3666-3684).
ggacgcacccgatgaaatt

SEQ ID NO: 97828 - DNA, 19 bp, Homo sapiens
  siRNA target sequence for PRKWNK2 (NM_006648.3,4915-4933).
ggcacgtcctcgtcaatga

SEQ ID NO: 97829 - DNA, 19 bp, Homo sapiens
  siRNA target sequence for PRKWNK2 (NM_006648.3,4917-4935).
cacgtcctcgtcaatgaca

SEQ ID NO: 97830 - DNA, 19 bp, Homo sapiens
  siRNA target sequence for PRKWNK2 (NM_006648.3,5026-5044).
gatgtacctgcttttgtga

SEQ ID NO: 97831 - DNA, 19 bp, Homo sapiens
  siRNA target sequence for PRKWNK2 (NM_006648.3,5282-5300).
ccccccacagcctgagata

SEQ ID NO: 97832 - DNA, 19 bp, Homo sapiens
  siRNA target sequence for PRKWNK2 (NM_006648.3,5498-5516).
ctggcgacttcgtgaagaa

SEQ ID NO: 97833 - DNA, 19 bp, Homo sapiens
  siRNA target sequence for PRKWNK2 (NM_006648.3,5662-5680).
ctcgaggatgctgacataa

SEQ ID NO: 97834 - DNA, 19 bp, Homo sapiens
  siRNA target sequence for PRKWNK2 (NM_006648.3,6140-6158).
ctgagagagtgacctataa

SEQ ID NO: 97835 - DNA, 19 bp, Homo sapiens
  siRNA target sequence for PRKWNK2 (NM_006648.3,6144-6162).
gagagtgacctataagtct

SEQ ID NO: 97836 - DNA, 19 bp, Homo sapiens
  siRNA target sequence for PRKWNK2 (NM_006648.3,6148-6166).
gtgacctataagtctagta

SEQ ID NO: 97837 - DNA, 19 bp, Homo sapiens
  siRNA target sequence for PRKWNK3 (NM_020922.1,99-117).
gacagtagaagctagacta

SEQ ID NO: 97838 - DNA, 19 bp, Homo sapiens
  siRNA target sequence for PRKWNK3 (NM_020922.1,168-186).
gagatttttccgaaagagt

SEQ ID NO: 97839 - DNA, 19 bp, Homo sapiens
  siRNA target sequence for PRKWNK3 (NM_020922.1,178-196).
cgaaagagtgttgaaatga

SEQ ID NO: 97840 - DNA, 19 bp, Homo sapiens
  siRNA target sequence for PRKWNK3 (NM_020922.1,216-234).
cgaatcatcccccaaagat

SEQ ID NO: 97841 - DNA, 19 bp, Homo sapiens
  siRNA target sequence for PRKWNK3 (NM_020922.1,224-242).
cccccaaagatgagagaat

SEQ ID NO: 97842 - DNA, 19 bp, Homo sapiens
  siRNA target sequence for PRKWNK3 (NM_020922.1,319-337).
gaacagtgttcaaagtcaa

SEQ ID NO: 97843 - DNA, 19 bp, Homo sapiens
  siRNA target sequence for PRKWNK3 (NM_020922.1,490-508).
ggactggacactgaaacat

SEQ ID NO: 97844 - DNA, 19 bp, Homo sapiens
  siRNA target sequence for PRKWNK3 (NM_020922.1,531-549).
gctgcaggaccgaaagtta

SEQ ID NO: 97845 - DNA, 19 bp, Homo sapiens
  siRNA target sequence for PRKWNK3 (NM_020922.1,535-553).
caggaccgaaagttaacca

SEQ ID NO: 97846 - DNA, 19 bp, Homo sapiens
  siRNA target sequence for PRKWNK3 (NM_020922.1,537-555).
ggaccgaaagttaaccaaa

SEQ ID NO: 97847 - DNA, 19 bp, Homo sapiens
  siRNA target sequence for PRKWNK3 (NM_020922.1,556-574).
gctgagcagcaaagattca

SEQ ID NO: 97848 - DNA, 19 bp, Homo sapiens
  siRNA target sequence for PRKWNK3 (NM_020922.1,609-627).
ccccaatatagttcgattt

SEQ ID NO: 97849 - DNA, 19 bp, Homo sapiens
  siRNA target sequence for PRKWNK3 (NM_020922.1,635-653).
cctgggaatctatattaaa

SEQ ID NO: 97850 - DNA, 19 bp, Homo sapiens
  siRNA target sequence for PRKWNK3 (NM_020922.1,701-719).
ccttaaagacgtacttaaa

SEQ ID NO: 97851 - DNA, 19 bp, Homo sapiens
  siRNA target sequence for PRKWNK3 (NM_020922.1,702-720).
cttaaagacgtacttaaaa

SEQ ID NO: 97852 - DNA, 19 bp, Homo sapiens
  siRNA target sequence for PRKWNK3 (NM_020922.1,708-726).
gacgtacttaaaacgattt

SEQ ID NO: 97853 - DNA, 19 bp, Homo sapiens
  siRNA target sequence for PRKWNK3 (NM_020922.1,795-813).
cactaggactcctcctatt

SEQ ID NO: 97854 - DNA, 19 bp, Homo sapiens
  siRNA target sequence for PRKWNK3 (NM_020922.1,797-815).
ctaggactcctcctattat

SEQ ID NO: 97855 - DNA, 19 bp, Homo sapiens
  siRNA target sequence for PRKWNK3 (NM_020922.1,800-818).
ggactcctcctattattca

SEQ ID NO: 97856 - DNA, 19 bp, Homo sapiens
  siRNA target sequence for PRKWNK3 (NM_020922.1,873-891).
gattggtgatctaggatta

SEQ ID NO: 97857 - DNA, 19 bp, Homo sapiens
  siRNA target sequence for PRKWNK3 (NM_020922.1,883-901).
ctaggattagccaccttaa

SEQ ID NO: 97858 - DNA, 19 bp, Homo sapiens
  siRNA target sequence for PRKWNK3 (NM_020922.1,927-945).
cattggaactcctgagttt

SEQ ID NO: 97859 - DNA, 19 bp, Homo sapiens
  siRNA target sequence for PRKWNK3 (NM_020922.1,1024-1042).
gccacatcggagtatcctt

SEQ ID NO: 97860 - DNA, 19 bp, Homo sapiens
  siRNA target sequence for PRKWNK3 (NM_020922.1,1025-1043).
ccacatcggagtatcctta

SEQ ID NO: 97861 - DNA, 19 bp, Homo sapiens
  siRNA target sequence for PRKWNK3 (NM_020922.1,1026-1044).
cacatcggagtatccttat

SEQ ID NO: 97862 - DNA, 19 bp, Homo sapiens
  siRNA target sequence for PRKWNK3 (NM_020922.1,1031-1049).
cggagtatccttattctga

SEQ ID NO: 97863 - DNA, 19 bp, Homo sapiens
  siRNA target sequence for PRKWNK3 (NM_020922.1,1066-1084).
caaatataccggaaagtaa

SEQ ID NO: 97864 - DNA, 19 bp, Homo sapiens
  siRNA target sequence for PRKWNK3 (NM_020922.1,1100-1118).
cagccagcttcaataaagt

SEQ ID NO: 97865 - DNA, 19 bp, Homo sapiens
  siRNA target sequence for PRKWNK3 (NM_020922.1,1102-1120).
gccagcttcaataaagtca

SEQ ID NO: 97866 - DNA, 19 bp, Homo sapiens
  siRNA target sequence for PRKWNK3 (NM_020922.1,1143-1161).
cattgaaggatgtattcgt

SEQ ID NO: 97867 - DNA, 19 bp, Homo sapiens
  siRNA target sequence for PRKWNK3 (NM_020922.1,1150-1168).
ggatgtattcgtcaaaaca

SEQ ID NO: 97868 - DNA, 19 bp, Homo sapiens
  siRNA target sequence for PRKWNK3 (NM_020922.1,1159-1177).
cgtcaaaacaaatctgaaa

SEQ ID NO: 97869 - DNA, 19 bp, Homo sapiens
  siRNA target sequence for PRKWNK3 (NM_020922.1,1182-1200).
gtctatcagggacctatta

SEQ ID NO: 97870 - DNA, 19 bp, Homo sapiens
  siRNA target sequence for PRKWNK3 (NM_020922.1,1184-1202).
ctatcagggacctattaaa

SEQ ID NO: 97871 - DNA, 19 bp, Homo sapiens
  siRNA target sequence for PRKWNK3 (NM_020922.1,1188-1206).
cagggacctattaaaccat

SEQ ID NO: 97872 - DNA, 19 bp, Homo sapiens
  siRNA target sequence for PRKWNK3 (NM_020922.1,1194-1212).
cctattaaaccatgcattt

SEQ ID NO: 97873 - DNA, 19 bp, Homo sapiens
  siRNA target sequence for PRKWNK3 (NM_020922.1,1339-1357).
gctattgaatttagtttca

SEQ ID NO: 97874 - DNA, 19 bp, Homo sapiens
  siRNA target sequence for PRKWNK3 (NM_020922.1,1340-1358).
ctattgaatttagtttcaa

SEQ ID NO: 97875 - DNA, 19 bp, Homo sapiens
  siRNA target sequence for PRKWNK3 (NM_020922.1,1356-1374).
caacttagaaacagataca

SEQ ID NO: 97876 - DNA, 19 bp, Homo sapiens
  siRNA target sequence for PRKWNK3 (NM_020922.1,1373-1391).
cacctgaggaagtagcata

SEQ ID NO: 97877 - DNA, 19 bp, Homo sapiens
  siRNA target sequence for PRKWNK3 (NM_020922.1,1416-1434).
ccatgaaagtgattccaaa

SEQ ID NO: 97878 - DNA, 19 bp, Homo sapiens
  siRNA target sequence for PRKWNK3 (NM_020922.1,1435-1453).
gctgttgctaaatccatta

SEQ ID NO: 97879 - DNA, 19 bp, Homo sapiens
  siRNA target sequence for PRKWNK3 (NM_020922.1,1456-1474).
gaccgggtgacgccaataa

SEQ ID NO: 97880 - DNA, 19 bp, Homo sapiens
  siRNA target sequence for PRKWNK3 (NM_020922.1,1459-1477).
cgggtgacgccaataaaga

SEQ ID NO: 97881 - DNA, 19 bp, Homo sapiens
  siRNA target sequence for PRKWNK3 (NM_020922.1,1460-1478).
gggtgacgccaataaagaa

SEQ ID NO: 97882 - DNA, 19 bp, Homo sapiens
  siRNA target sequence for PRKWNK3 (NM_020922.1,1462-1480).
gtgacgccaataaagaaga

SEQ ID NO: 97883 - DNA, 19 bp, Homo sapiens
  siRNA target sequence for PRKWNK3 (NM_020922.1,1624-1642).
gaagttgatcaacatgtta

SEQ ID NO: 97884 - DNA, 19 bp, Homo sapiens
  siRNA target sequence for PRKWNK3 (NM_020922.1,1683-1701).
ctctgttacaggtgacaat

SEQ ID NO: 97885 - DNA, 19 bp, Homo sapiens
  siRNA target sequence for PRKWNK3 (NM_020922.1,1687-1705).
gttacaggtgacaatttgt

SEQ ID NO: 97886 - DNA, 19 bp, Homo sapiens
  siRNA target sequence for PRKWNK3 (NM_020922.1,1717-1735).
gctgcatcagttatacatt

SEQ ID NO: 97887 - DNA, 19 bp, Homo sapiens
  siRNA target sequence for PRKWNK3 (NM_020922.1,1777-1795).
caaacgatgggctctcaaa

SEQ ID NO: 97888 - DNA, 19 bp, Homo sapiens
  siRNA target sequence for PRKWNK3 (NM_020922.1,1781-1799).
cgatgggctctcaaatggt

SEQ ID NO: 97889 - DNA, 19 bp, Homo sapiens
  siRNA target sequence for PRKWNK3 (NM_020922.1,1782-1800).
gatgggctctcaaatggtt

SEQ ID NO: 97890 - DNA, 19 bp, Homo sapiens
  siRNA target sequence for PRKWNK3 (NM_020922.1,1790-1808).
ctcaaatggtttctaatat

SEQ ID NO: 97891 - DNA, 19 bp, Homo sapiens
  siRNA target sequence for PRKWNK3 (NM_020922.1,1809-1827).
cccgcaggctgaagtaaat

SEQ ID NO: 97892 - DNA, 19 bp, Homo sapiens
  siRNA target sequence for PRKWNK3 (NM_020922.1,1811-1829).
cgcaggctgaagtaaatgt

SEQ ID NO: 97893 - DNA, 19 bp, Homo sapiens
  siRNA target sequence for PRKWNK3 (NM_020922.1,1828-1846).
gttccagggcaaatttatt

SEQ ID NO: 97894 - DNA, 19 bp, Homo sapiens
  siRNA target sequence for PRKWNK3 (NM_020922.1,1831-1849).
ccagggcaaatttattcat

SEQ ID NO: 97895 - DNA, 19 bp, Homo sapiens
  siRNA target sequence for PRKWNK3 (NM_020922.1,1864-1882).
ggacattaccagcaagttt

SEQ ID NO: 97896 - DNA, 19 bp, Homo sapiens
  siRNA target sequence for PRKWNK3 (NM_020922.1,1886-1904).
ggttacagaagcattcaaa

SEQ ID NO: 97897 - DNA, 19 bp, Homo sapiens
  siRNA target sequence for PRKWNK3 (NM_020922.1,1906-1924).
ctgactcagccgcagattt

SEQ ID NO: 97898 - DNA, 19 bp, Homo sapiens
  siRNA target sequence for PRKWNK3 (NM_020922.1,1968-1986).
ccttggaccgacagttgtt

SEQ ID NO: 97899 - DNA, 19 bp, Homo sapiens
  siRNA target sequence for PRKWNK3 (NM_020922.1,2120-2138).
caactacgaaggaaaacgt

SEQ ID NO: 97900 - DNA, 19 bp, Homo sapiens
  siRNA target sequence for PRKWNK3 (NM_020922.1,2169-2187).
caaacaggatcggatcaaa

SEQ ID NO: 97901 - DNA, 19 bp, Homo sapiens
  siRNA target sequence for PRKWNK3 (NM_020922.1,2173-2191).
caggatcggatcaaacaga

SEQ ID NO: 97902 - DNA, 19 bp, Homo sapiens
  siRNA target sequence for PRKWNK3 (NM_020922.1,2255-2273).
caacctctggagataacat

SEQ ID NO: 97903 - DNA, 19 bp, Homo sapiens
  siRNA target sequence for PRKWNK3 (NM_020922.1,2336-2354).
gtgatgcgccagaggatat

SEQ ID NO: 97904 - DNA, 19 bp, Homo sapiens
  siRNA target sequence for PRKWNK3 (NM_020922.1,2359-2377).
gactatatggttgaagata

SEQ ID NO: 97905 - DNA, 19 bp, Homo sapiens
  siRNA target sequence for PRKWNK3 (NM_020922.1,2480-2498).
ccactggagttgattctat

SEQ ID NO: 97906 - DNA, 19 bp, Homo sapiens
  siRNA target sequence for PRKWNK3 (NM_020922.1,2481-2499).
cactggagttgattctatt

SEQ ID NO: 97907 - DNA, 19 bp, Homo sapiens
  siRNA target sequence for PRKWNK3 (NM_020922.1,2523-2541).
gacagggtcatctgaacaa

SEQ ID NO: 97908 - DNA, 19 bp, Homo sapiens
  siRNA target sequence for PRKWNK3 (NM_020922.1,2528-2546).
ggtcatctgaacaagtaca

SEQ ID NO: 97909 - DNA, 19 bp, Homo sapiens
  siRNA target sequence for PRKWNK3 (NM_020922.1,2531-2549).
catctgaacaagtacagat

SEQ ID NO: 97910 - DNA, 19 bp, Homo sapiens
  siRNA target sequence for PRKWNK3 (NM_020922.1,2539-2557).
caagtacagataaattcta

SEQ ID NO: 97911 - DNA, 19 bp, Homo sapiens
  siRNA target sequence for PRKWNK3 (NM_020922.1,2605-2623).
ggtcggtggcgattctgta

SEQ ID NO: 97912 - DNA, 19 bp, Homo sapiens
  siRNA target sequence for PRKWNK3 (NM_020922.1,2606-2624).
gtcggtggcgattctgtat

SEQ ID NO: 97913 - DNA, 19 bp, Homo sapiens
  siRNA target sequence for PRKWNK3 (NM_020922.1,2608-2626).
cggtggcgattctgtatca

SEQ ID NO: 97914 - DNA, 19 bp, Homo sapiens
  siRNA target sequence for PRKWNK3 (NM_020922.1,2609-2627).
ggtggcgattctgtatcaa

SEQ ID NO: 97915 - DNA, 19 bp, Homo sapiens
  siRNA target sequence for PRKWNK3 (NM_020922.1,2610-2628).
gtggcgattctgtatcaat

SEQ ID NO: 97916 - DNA, 19 bp, Homo sapiens
  siRNA target sequence for PRKWNK3 (NM_020922.1,2612-2630).
ggcgattctgtatcaatca

SEQ ID NO: 97917 - DNA, 19 bp, Homo sapiens
  siRNA target sequence for PRKWNK3 (NM_020922.1,2724-2742).
cacaagtaataaggaaata

SEQ ID NO: 97918 - DNA, 19 bp, Homo sapiens
  siRNA target sequence for PRKWNK3 (NM_020922.1,2747-2765).
gggacacattgctcactat

SEQ ID NO: 97919 - DNA, 19 bp, Homo sapiens
  siRNA target sequence for PRKWNK3 (NM_020922.1,2751-2769).
cacattgctcactatagaa

SEQ ID NO: 97920 - DNA, 19 bp, Homo sapiens
  siRNA target sequence for PRKWNK3 (NM_020922.1,2777-2795).
catgccaccgtgcactttt

SEQ ID NO: 97921 - DNA, 19 bp, Homo sapiens
  siRNA target sequence for PRKWNK3 (NM_020922.1,2910-2928).
ggcaccagttactaatagt

SEQ ID NO: 97922 - DNA, 19 bp, Homo sapiens
  siRNA target sequence for PRKWNK3 (NM_020922.1,2931-2949).
cagttactctactacttca

SEQ ID NO: 97923 - DNA, 19 bp, Homo sapiens
  siRNA target sequence for PRKWNK3 (NM_020922.1,2982-3000).
caccaaacaagcaagcata

SEQ ID NO: 97924 - DNA, 19 bp, Homo sapiens
  siRNA target sequence for PRKWNK3 (NM_020922.1,3035-3053).
gtcaggctgatgcacttat

SEQ ID NO: 97925 - DNA, 19 bp, Homo sapiens
  siRNA target sequence for PRKWNK3 (NM_020922.1,3098-3116).
caactctggcatttgatca

SEQ ID NO: 97926 - DNA, 19 bp, Homo sapiens
  siRNA target sequence for PRKWNK3 (NM_020922.1,3115-3133).
caaaagcctcaaaccttat

SEQ ID NO: 97927 - DNA, 19 bp, Homo sapiens
  siRNA target sequence for PRKWNK3 (NM_020922.1,3120-3138).
gcctcaaaccttatcagta

SEQ ID NO: 97928 - DNA, 19 bp, Homo sapiens
  siRNA target sequence for PRKWNK3 (NM_020922.1,3148-3166).
gctatggatgcagagttta

SEQ ID NO: 97929 - DNA, 19 bp, Homo sapiens
  siRNA target sequence for PRKWNK3 (NM_020922.1,3290-3308).
gagaaagacctccaaaact

SEQ ID NO: 97930 - DNA, 19 bp, Homo sapiens
  siRNA target sequence for PRKWNK3 (NM_020922.1,3316-3334).
gcagacaaccgaattaaaa

SEQ ID NO: 97931 - DNA, 19 bp, Homo sapiens
  siRNA target sequence for PRKWNK3 (NM_020922.1,3394-3412).
cccgagagtcagaaggata

SEQ ID NO: 97932 - DNA, 19 bp, Homo sapiens
  siRNA target sequence for PRKWNK3 (NM_020922.1,3405-3423).
gaaggatacccaaagcata

SEQ ID NO: 97933 - DNA, 19 bp, Homo sapiens
  siRNA target sequence for PRKWNK3 (NM_020922.1,3409-3427).
gatacccaaagcatagact

SEQ ID NO: 97934 - DNA, 19 bp, Homo sapiens
  siRNA target sequence for PRKWNK3 (NM_020922.1,3464-3482).
gtccagtgacagaagtcat

SEQ ID NO: 97935 - DNA, 19 bp, Homo sapiens
  siRNA target sequence for PRKWNK3 (NM_020922.1,3486-3504).
catcagtcactgtggaatt

SEQ ID NO: 97936 - DNA, 19 bp, Homo sapiens
  siRNA target sequence for PRKWNK3 (NM_020922.1,3514-3532).
cctgtacaatcccctaatt

SEQ ID NO: 97937 - DNA, 19 bp, Homo sapiens
  siRNA target sequence for PRKWNK3 (NM_020922.1,3515-3533).
ctgtacaatcccctaattt

SEQ ID NO: 97938 - DNA, 19 bp, Homo sapiens
  siRNA target sequence for PRKWNK3 (NM_020922.1,3606-3624).
ggacctgaatgtgataact

SEQ ID NO: 97939 - DNA, 19 bp, Homo sapiens
  siRNA target sequence for PRKWNK3 (NM_020922.1,3607-3625).
gacctgaatgtgataactt

SEQ ID NO: 97940 - DNA, 19 bp, Homo sapiens
  siRNA target sequence for PRKWNK3 (NM_020922.1,3609-3627).
cctgaatgtgataacttct

SEQ ID NO: 97941 - DNA, 19 bp, Homo sapiens
  siRNA target sequence for PRKWNK3 (NM_020922.1,3628-3646).
gtacccagcgaattgtgtt

SEQ ID NO: 97942 - DNA, 19 bp, Homo sapiens
  siRNA target sequence for PRKWNK3 (NM_020922.1,3635-3653).
gcgaattgtgtttacatga

SEQ ID NO: 97943 - DNA, 19 bp, Homo sapiens
  siRNA target sequence for PRKWNK3 (NM_020922.1,3713-3731).
gcggtggagccattcatct

SEQ ID NO: 97944 - DNA, 19 bp, Homo sapiens
  siRNA target sequence for PRKWNK3 (NM_020922.1,3746-3764).
gatattttggcctaagctt

SEQ ID NO: 97945 - DNA, 19 bp, Homo sapiens
  siRNA target sequence for PRKWNK3 (NM_020922.1,3772-3790).
cctagtctcaaaaatccta

SEQ ID NO: 97946 - DNA, 19 bp, Homo sapiens
  siRNA target sequence for PRKWNK3 (NM_020922.1,3773-3791).
ctagtctcaaaaatcctat

SEQ ID NO: 97947 - DNA, 19 bp, Homo sapiens
  siRNA target sequence for PRKWNK3 (NM_020922.1,3803-3821).
cctggactcgcaaattaaa

SEQ ID NO: 97948 - DNA, 19 bp, Homo sapiens
  siRNA target sequence for PRKWNK3 (NM_020922.1,3876-3894).
ccgtcaagtggaaacagaa

SEQ ID NO: 97949 - DNA, 19 bp, Homo sapiens
  siRNA target sequence for PRKWNK3 (NM_020922.1,3950-3968).
ctgatactagggctttgaa

SEQ ID NO: 97950 - DNA, 19 bp, Homo sapiens
  siRNA target sequence for PRKWNK3 (NM_020922.1,3980-3998).
cgatgagtggatcatttca

SEQ ID NO: 97951 - DNA, 19 bp, Homo sapiens
  siRNA target sequence for PRKWNK3 (NM_020922.1,4003-4021).
ggtcggttccaggtgatta

SEQ ID NO: 97952 - DNA, 19 bp, Homo sapiens
  siRNA target sequence for PRKWNK3 (NM_020922.1,4007-4025).
ggttccaggtgattacaat

SEQ ID NO: 97953 - DNA, 19 bp, Homo sapiens
  siRNA target sequence for PRKWNK3 (NM_020922.1,4008-4026).
gttccaggtgattacaatt

SEQ ID NO: 97954 - DNA, 19 bp, Homo sapiens
  siRNA target sequence for PRKWNK3 (NM_020922.1,4011-4029).
ccaggtgattacaattcct

SEQ ID NO: 97955 - DNA, 19 bp, Homo sapiens
  siRNA target sequence for PRKWNK3 (NM_020922.1,4100-4118).
ctagtgaagaagcctttat

SEQ ID NO: 97956 - DNA, 19 bp, Homo sapiens
  siRNA target sequence for PRKWNK3 (NM_020922.1,4133-4151).
ctcagttggtagaaataga

SEQ ID NO: 97957 - DNA, 19 bp, Homo sapiens
  siRNA target sequence for PRKWNK3 (NM_020922.1,4169-4187).
caaaaacttcgttttctta

SEQ ID NO: 97958 - DNA, 19 bp, Homo sapiens
  siRNA target sequence for PRKWNK3 (NM_020922.1,4301-4319).
ccccagaaaaggaatttga

SEQ ID NO: 97959 - DNA, 19 bp, Homo sapiens
  siRNA target sequence for PRKWNK3 (NM_020922.1,4344-4362).
catgcagtctggatctgaa

SEQ ID NO: 97960 - DNA, 19 bp, Homo sapiens
  siRNA target sequence for PRKWNK3 (NM_020922.1,4405-4423).
cctagctctgatagtgaat

SEQ ID NO: 97961 - DNA, 19 bp, Homo sapiens
  siRNA target sequence for PRKWNK3 (NM_020922.1,4406-4424).
ctagctctgatagtgaatt

SEQ ID NO: 97962 - DNA, 19 bp, Homo sapiens
  siRNA target sequence for PRKWNK3 (NM_020922.1,4464-4482).
gactggtccagagagtaat

SEQ ID NO: 97963 - DNA, 19 bp, Homo sapiens
  siRNA target sequence for PRKWNK3 (NM_020922.1,4466-4484).
ctggtccagagagtaatca

SEQ ID NO: 97964 - DNA, 19 bp, Homo sapiens
  siRNA target sequence for PRKWNK3 (NM_020922.1,4468-4486).
ggtccagagagtaatcagt

SEQ ID NO: 97965 - DNA, 19 bp, Homo sapiens
  siRNA target sequence for PRKWNK3 (NM_020922.1,4500-4518).
cgaagaacaagcttatgct

SEQ ID NO: 97966 - DNA, 19 bp, Homo sapiens
  siRNA target sequence for PRKWNK3 (NM_020922.1,4616-4634).
gattacgagaaaaacacat

SEQ ID NO: 97967 - DNA, 19 bp, Homo sapiens
  siRNA target sequence for PRKWNK3 (NM_020922.1,4690-4708).
gaacgccttcggtcaatta

SEQ ID NO: 97968 - DNA, 19 bp, Homo sapiens
  siRNA target sequence for PRKWNK3 (NM_020922.1,4694-4712).
gccttcggtcaattaaaga

SEQ ID NO: 97969 - DNA, 19 bp, Homo sapiens
  siRNA target sequence for PRKWNK3 (NM_020922.1,4695-4713).
ccttcggtcaattaaagat

SEQ ID NO: 97970 - DNA, 19 bp, Homo sapiens
  siRNA target sequence for PRKWNK3 (NM_020922.1,4696-4714).
cttcggtcaattaaagata

SEQ ID NO: 97971 - DNA, 19 bp, Homo sapiens
  siRNA target sequence for PRKWNK3 (NM_020922.1,4711-4729).
gatagcaaaacccaatcta

SEQ ID NO: 97972 - DNA, 19 bp, Homo sapiens
  siRNA target sequence for PRKWNK3 (NM_020922.1,4723-4741).
caatctactgagattcctt

SEQ ID NO: 97973 - DNA, 19 bp, Homo sapiens
  siRNA target sequence for PRKWNK3 (NM_020922.1,4757-4775).
cacgtcgaccaagatcttt

SEQ ID NO: 97974 - DNA, 19 bp, Homo sapiens
  siRNA target sequence for PRKWNK3 (NM_020922.1,4759-4777).
cgtcgaccaagatctttca

SEQ ID NO: 97975 - DNA, 19 bp, Homo sapiens
  siRNA target sequence for PRKWNK3 (NM_020922.1,4760-4778).
gtcgaccaagatctttcaa

SEQ ID NO: 97976 - DNA, 19 bp, Homo sapiens
  siRNA target sequence for PRKWNK3 (NM_020922.1,4762-4780).
cgaccaagatctttcaaaa

SEQ ID NO: 97977 - DNA, 19 bp, Homo sapiens
  siRNA target sequence for PRKWNK3 (NM_020922.1,4874-4892).
cactgtgtgtggagagtaa

SEQ ID NO: 97978 - DNA, 19 bp, Homo sapiens
  siRNA target sequence for PRKWNK3 (NM_020922.1,4878-4896).
gtgtgtggagagtaatgca

SEQ ID NO: 97979 - DNA, 19 bp, Homo sapiens
  siRNA target sequence for PRKWNK3 (NM_020922.1,4931-4949).
ggatgttcacagatgactt

SEQ ID NO: 97980 - DNA, 19 bp, Homo sapiens
  siRNA target sequence for PRKWNK3 (NM_020922.1,4982-5000).
cagtaggaaattctcttat

SEQ ID NO: 97981 - DNA, 19 bp, Homo sapiens
  siRNA target sequence for PRKWNK3 (NM_020922.1,4994-5012).
ctcttattaagccaagttt

SEQ ID NO: 97982 - DNA, 19 bp, Homo sapiens
  siRNA target sequence for PRKWNK3 (NM_020922.1,5005-5023).
ccaagtttaaaccaactta

SEQ ID NO: 97983 - DNA, 19 bp, Homo sapiens
  siRNA target sequence for PRKWNK3 (NM_020922.1,5055-5073).
ctggaataaagtatctgaa

SEQ ID NO: 97984 - DNA, 19 bp, Homo sapiens
  siRNA target sequence for PRKWNK3 (NM_020922.1,5071-5089).
gaaaatactccgtctacta

SEQ ID NO: 97985 - DNA, 19 bp, Homo sapiens
  siRNA target sequence for PRKWNK3 (NM_020922.1,5094-5112).
ctacacatcaacatggatt

SEQ ID NO: 97986 - DNA, 19 bp, Homo sapiens
  siRNA target sequence for PRKWNK3 (NM_020922.1,5183-5201).
ctgggccattatcatcata

SEQ ID NO: 97987 - DNA, 19 bp, Homo sapiens
  siRNA target sequence for PRKWNK3 (NM_020922.1,5187-5205).
gccattatcatcatatgga

SEQ ID NO: 97988 - DNA, 19 bp, Homo sapiens
  siRNA target sequence for PRKWNK3 (NM_020922.1,5208-5226).
gcctcacgtttgtcagtat

SEQ ID NO: 97989 - DNA, 19 bp, Homo sapiens
  siRNA target sequence for PRKWNK3 (NM_020922.1,5209-5227).
cctcacgtttgtcagtata

SEQ ID NO: 97990 - DNA, 19 bp, Homo sapiens
  siRNA target sequence for PRKWNK3 (NM_020922.1,5210-5228).
ctcacgtttgtcagtataa

SEQ ID NO: 97991 - DNA, 19 bp, Homo sapiens
  siRNA target sequence for PRKWNK3 (NM_020922.1,5214-5232).
cgtttgtcagtataatgct

SEQ ID NO: 97992 - DNA, 19 bp, Homo sapiens
  siRNA target sequence for PRKWNK3 (NM_020922.1,5282-5300).
cacaacaatctgtagtaat

SEQ ID NO: 97993 - DNA, 19 bp, Homo sapiens
  siRNA target sequence for PRKWNK3 (NM_020922.1,5343-5361).
gcaggcatttccaacttca

SEQ ID NO: 97994 - DNA, 19 bp, Homo sapiens
  siRNA target sequence for PRKWNK4 (NM_032387.2,533-551).
gccgatacctcaagtttga

SEQ ID NO: 97995 - DNA, 19 bp, Homo sapiens
  siRNA target sequence for PRKWNK4 (NM_032387.2,535-553).
cgatacctcaagtttgaca

SEQ ID NO: 97996 - DNA, 19 bp, Homo sapiens
  siRNA target sequence for PRKWNK4 (NM_032387.2,536-554).
gatacctcaagtttgacat

SEQ ID NO: 97997 - DNA, 19 bp, Homo sapiens
  siRNA target sequence for PRKWNK4 (NM_032387.2,562-580).
ggacgtggctccttcaaga

SEQ ID NO: 97998 - DNA, 19 bp, Homo sapiens
  siRNA target sequence for PRKWNK4 (NM_032387.2,821-839).
ggcggttccgggagatgaa

SEQ ID NO: 97999 - DNA, 19 bp, Homo sapiens
  siRNA target sequence for PRKWNK4 (NM_032387.2,857-875).
gctggagccgccaaatcct

SEQ ID NO: 98000 - DNA, 19 bp, Homo sapiens
  siRNA target sequence for PRKWNK4 (NM_032387.2,1057-1075).
gagatgtacgaggaaaagt

SEQ ID NO: 98001 - DNA, 19 bp, Homo sapiens
  siRNA target sequence for PRKWNK4 (NM_032387.2,1256-1274).
gcatccgcacggataagaa

SEQ ID NO: 98002 - DNA, 19 bp, Homo sapiens
  siRNA target sequence for PRKWNK4 (NM_032387.2,1738-1756).
cacgccagctactcatcta

SEQ ID NO: 98003 - DNA, 19 bp, Homo sapiens
  siRNA target sequence for PRKWNK4 (NM_032387.2,1883-1901).
cggcttttgccctatccat

SEQ ID NO: 98004 - DNA, 19 bp, Homo sapiens
  siRNA target sequence for PRKWNK4 (NM_032387.2,1884-1902).
ggcttttgccctatccatt

SEQ ID NO: 98005 - DNA, 19 bp, Homo sapiens
  siRNA target sequence for PRKWNK4 (NM_032387.2,1912-1930).
ggccctggaagtgactttt

SEQ ID NO: 98006 - DNA, 19 bp, Homo sapiens
  siRNA target sequence for PRKWNK4 (NM_032387.2,2095-2113).
cagctacagacccataaca

SEQ ID NO: 98007 - DNA, 19 bp, Homo sapiens
  siRNA target sequence for PRKWNK4 (NM_032387.2,2121-2139).
ggtgaccttccgatttgat

SEQ ID NO: 98008 - DNA, 19 bp, Homo sapiens
  siRNA target sequence for PRKWNK4 (NM_032387.2,2167-2185).
gcagctgccatggtatata

SEQ ID NO: 98009 - DNA, 19 bp, Homo sapiens
  siRNA target sequence for PRKWNK4 (NM_032387.2,2171-2189).
ctgccatggtatataacga

SEQ ID NO: 98010 - DNA, 19 bp, Homo sapiens
  siRNA target sequence for PRKWNK4 (NM_032387.2,2178-2196).
ggtatataacgagttcatt

SEQ ID NO: 98011 - DNA, 19 bp, Homo sapiens
  siRNA target sequence for PRKWNK4 (NM_032387.2,2201-2219).
cttcggagcgagatggatt

SEQ ID NO: 98012 - DNA, 19 bp, Homo sapiens
  siRNA target sequence for PRKWNK4 (NM_032387.2,2204-2222).
cggagcgagatggatttct

SEQ ID NO: 98013 - DNA, 19 bp, Homo sapiens
  siRNA target sequence for PRKWNK4 (NM_032387.2,2206-2224).
gagcgagatggatttctca

SEQ ID NO: 98014 - DNA, 19 bp, Homo sapiens
  siRNA target sequence for PRKWNK4 (NM_032387.2,2225-2243).
gacggattcgggagattat

SEQ ID NO: 98015 - DNA, 19 bp, Homo sapiens
  siRNA target sequence for PRKWNK4 (NM_032387.2,2228-2246).
ggattcgggagattatcca

SEQ ID NO: 98016 - DNA, 19 bp, Homo sapiens
  siRNA target sequence for PRKWNK4 (NM_032387.2,2319-2337).
ggagccagcaccattacct

SEQ ID NO: 98017 - DNA, 19 bp, Homo sapiens
  siRNA target sequence for PRKWNK4 (NM_032387.2,2355-2373).
cccagacccatccaatgaa

SEQ ID NO: 98018 - DNA, 19 bp, Homo sapiens
  siRNA target sequence for PRKWNK4 (NM_032387.2,2357-2375).
cagacccatccaatgaaga

SEQ ID NO: 98019 - DNA, 19 bp, Homo sapiens
  siRNA target sequence for PRKWNK4 (NM_032387.2,2514-2532).
cacttctcccccatgtcat

SEQ ID NO: 98020 - DNA, 19 bp, Homo sapiens
  siRNA target sequence for PRKWNK4 (NM_032387.2,3057-3075).
gcttgttgggcgtttccaa

SEQ ID NO: 98021 - DNA, 19 bp, Homo sapiens
  siRNA target sequence for PRKWNK4 (NM_032387.2,3067-3085).
cgtttccaagtgacttcat

SEQ ID NO: 98022 - DNA, 19 bp, Homo sapiens
  siRNA target sequence for PRKX (NM_005044.1,1217-1235).
caaggcgattaggaaacat

SEQ ID NO: 98023 - DNA, 19 bp, Homo sapiens
  siRNA target sequence for PRKX (NM_005044.1,1222-1240).
cgattaggaaacatgaaga

SEQ ID NO: 98024 - DNA, 19 bp, Homo sapiens
  siRNA target sequence for PRO2000 (NM_014109.2,259-277).
ggcgatgggtcatcagtta

SEQ ID NO: 98025 - DNA, 19 bp, Homo sapiens
  siRNA target sequence for PRO2000 (NM_014109.2,260-278).
gcgatgggtcatcagttaa

SEQ ID NO: 98026 - DNA, 19 bp, Homo sapiens
  siRNA target sequence for PRO2000 (NM_014109.2,294-312).
ccaccggacacgtgcttta

SEQ ID NO: 98027 - DNA, 19 bp, Homo sapiens
  siRNA target sequence for PRO2000 (NM_014109.2,297-315).
ccggacacgtgctttaaga

SEQ ID NO: 98028 - DNA, 19 bp, Homo sapiens
  siRNA target sequence for PRO2000 (NM_014109.2,298-316).
cggacacgtgctttaagat

SEQ ID NO: 98029 - DNA, 19 bp, Homo sapiens
  siRNA target sequence for PRO2000 (NM_014109.2,350-368).
ctagttttgagaagaatgt

SEQ ID NO: 98030 - DNA, 19 bp, Homo sapiens
  siRNA target sequence for PRO2000 (NM_014109.2,388-406).
gctaatggcaggcatttta

SEQ ID NO: 98031 - DNA, 19 bp, Homo sapiens
  siRNA target sequence for PRO2000 (NM_014109.2,501-519).
catcgttcaaagtacagaa

SEQ ID NO: 98032 - DNA, 19 bp, Homo sapiens
  siRNA target sequence for PRO2000 (NM_014109.2,515-533).
cagaacacttacatgaaga

SEQ ID NO: 98033 - DNA, 19 bp, Homo sapiens
  siRNA target sequence for PRO2000 (NM_014109.2,517-535).
gaacacttacatgaagata

SEQ ID NO: 98034 - DNA, 19 bp, Homo sapiens
  siRNA target sequence for PRO2000 (NM_014109.2,522-540).
cttacatgaagataatggt

SEQ ID NO: 98035 - DNA, 19 bp, Homo sapiens
  siRNA target sequence for PRO2000 (NM_014109.2,552-570).
gcgtcgaagttgtaggatt

SEQ ID NO: 98036 - DNA, 19 bp, Homo sapiens
  siRNA target sequence for PRO2000 (NM_014109.2,553-571).
cgtcgaagttgtaggatta

SEQ ID NO: 98037 - DNA, 19 bp, Homo sapiens
  siRNA target sequence for PRO2000 (NM_014109.2,567-585).
gattagaagtcgttatagt

SEQ ID NO: 98038 - DNA, 19 bp, Homo sapiens
  siRNA target sequence for PRO2000 (NM_014109.2,575-593).
gtcgttatagtggtgtaaa

SEQ ID NO: 98039 - DNA, 19 bp, Homo sapiens
  siRNA target sequence for PRO2000 (NM_014109.2,597-615).
gtccatgctgtttgacaaa

SEQ ID NO: 98040 - DNA, 19 bp, Homo sapiens
  siRNA target sequence for PRO2000 (NM_014109.2,599-617).
ccatgctgtttgacaaact

SEQ ID NO: 98041 - DNA, 19 bp, Homo sapiens
  siRNA target sequence for PRO2000 (NM_014109.2,606-624).
gtttgacaaacttataact

SEQ ID NO: 98042 - DNA, 19 bp, Homo sapiens
  siRNA target sequence for PRO2000 (NM_014109.2,612-630).
caaacttataactaacact

SEQ ID NO: 98043 - DNA, 19 bp, Homo sapiens
  siRNA target sequence for PRO2000 (NM_014109.2,705-723).
gggagtgtttaatgaaaca

SEQ ID NO: 98044 - DNA, 19 bp, Homo sapiens
  siRNA target sequence for PRO2000 (NM_014109.2,727-745).
gaaagcaatcttaatatgt

SEQ ID NO: 98045 - DNA, 19 bp, Homo sapiens
  siRNA target sequence for PRO2000 (NM_014109.2,955-973).
gagaatcagaagcgatatt

SEQ ID NO: 98046 - DNA, 19 bp, Homo sapiens
  siRNA target sequence for PRO2000 (NM_014109.2,961-979).
cagaagcgatattatctta

SEQ ID NO: 98047 - DNA, 19 bp, Homo sapiens
  siRNA target sequence for PRO2000 (NM_014109.2,976-994).
cttagacagagaaaagcta

SEQ ID NO: 98048 - DNA, 19 bp, Homo sapiens
  siRNA target sequence for PRO2000 (NM_014109.2,986-1004).
gaaaagctactgtttacta

SEQ ID NO: 98049 - DNA, 19 bp, Homo sapiens
  siRNA target sequence for PRO2000 (NM_014109.2,1002-1020).
ctatcaggctccattggaa

SEQ ID NO: 98050 - DNA, 19 bp, Homo sapiens
  siRNA target sequence for PRO2000 (NM_014109.2,1081-1099).
ccaagataccgattatctt

SEQ ID NO: 98051 - DNA, 19 bp, Homo sapiens
  siRNA target sequence for PRO2000 (NM_014109.2,1108-1126).
ccaagaagtccttactgta

SEQ ID NO: 98052 - DNA, 19 bp, Homo sapiens
  siRNA target sequence for PRO2000 (NM_014109.2,1109-1127).
caagaagtccttactgtaa

SEQ ID NO: 98053 - DNA, 19 bp, Homo sapiens
  siRNA target sequence for PRO2000 (NM_014109.2,1115-1133).
gtccttactgtaaacgaat

SEQ ID NO: 98054 - DNA, 19 bp, Homo sapiens
  siRNA target sequence for PRO2000 (NM_014109.2,1226-1244).
gtcgtaatagggctatcaa

SEQ ID NO: 98055 - DNA, 19 bp, Homo sapiens
  siRNA target sequence for PRO2000 (NM_014109.2,1228-1246).
cgtaatagggctatcaata

SEQ ID NO: 98056 - DNA, 19 bp, Homo sapiens
  siRNA target sequence for PRO2000 (NM_014109.2,1247-1265).
ggtgcctcccactaaattt

SEQ ID NO: 98057 - DNA, 19 bp, Homo sapiens
  siRNA target sequence for PRO2000 (NM_014109.2,1248-1266).
gtgcctcccactaaatttt

SEQ ID NO: 98058 - DNA, 19 bp, Homo sapiens
  siRNA target sequence for PRO2000 (NM_014109.2,1316-1334).
caagccttgccgatgttga

SEQ ID NO: 98059 - DNA, 19 bp, Homo sapiens
  siRNA target sequence for PRO2000 (NM_014109.2,1326-1344).
cgatgttgatccaatgcaa

SEQ ID NO: 98060 - DNA, 19 bp, Homo sapiens
  siRNA target sequence for PRO2000 (NM_014109.2,1333-1351).
gatccaatgcaactagatt

SEQ ID NO: 98061 - DNA, 19 bp, Homo sapiens
  siRNA target sequence for PRO2000 (NM_014109.2,1355-1373).
cagtacgatttgatagtgt

SEQ ID NO: 98062 - DNA, 19 bp, Homo sapiens
  siRNA target sequence for PRO2000 (NM_014109.2,1370-1388).
gtgttggtggcctgtctaa

SEQ ID NO: 98063 - DNA, 19 bp, Homo sapiens
  siRNA target sequence for PRO2000 (NM_014109.2,1375-1393).
ggtggcctgtctaatcata

SEQ ID NO: 98064 - DNA, 19 bp, Homo sapiens
  siRNA target sequence for PRO2000 (NM_014109.2,1376-1394).
gtggcctgtctaatcatat

SEQ ID NO: 98065 - DNA, 19 bp, Homo sapiens
  siRNA target sequence for PRO2000 (NM_014109.2,1380-1398).
cctgtctaatcatatagca

SEQ ID NO: 98066 - DNA, 19 bp, Homo sapiens
  siRNA target sequence for PRO2000 (NM_014109.2,1544-1562).
gtcaaggggataaaagagt

SEQ ID NO: 98067 - DNA, 19 bp, Homo sapiens
  siRNA target sequence for PRO2000 (NM_014109.2,1582-1600).
ggtgctgattgtctaagta

SEQ ID NO: 98068 - DNA, 19 bp, Homo sapiens
  siRNA target sequence for PRO2000 (NM_014109.2,1583-1601).
gtgctgattgtctaagtaa

SEQ ID NO: 98069 - DNA, 19 bp, Homo sapiens
  siRNA target sequence for PRO2000 (NM_014109.2,1585-1603).
gctgattgtctaagtaaat

SEQ ID NO: 98070 - DNA, 19 bp, Homo sapiens
  siRNA target sequence for PRO2000 (NM_014109.2,1626-1644).
gctacgattgctgtttgat

SEQ ID NO: 98071 - DNA, 19 bp, Homo sapiens
  siRNA target sequence for PRO2000 (NM_014109.2,1654-1672).
cagatgcgcccatcaatta

SEQ ID NO: 98072 - DNA, 19 bp, Homo sapiens
  siRNA target sequence for PRO2000 (NM_014109.2,1656-1674).
gatgcgcccatcaattatt

SEQ ID NO: 98073 - DNA, 19 bp, Homo sapiens
  siRNA target sequence for PRO2000 (NM_014109.2,1748-1766).
ccaccctgctagctcttat

SEQ ID NO: 98074 - DNA, 19 bp, Homo sapiens
  siRNA target sequence for PRO2000 (NM_014109.2,1807-1825).
gctacgaacaggctagatt

SEQ ID NO: 98075 - DNA, 19 bp, Homo sapiens
  siRNA target sequence for PRO2000 (NM_014109.2,1811-1829).
cgaacaggctagattctat

SEQ ID NO: 98076 - DNA, 19 bp, Homo sapiens
  siRNA target sequence for PRO2000 (NM_014109.2,1815-1833).
caggctagattctatagat

SEQ ID NO: 98077 - DNA, 19 bp, Homo sapiens
  siRNA target sequence for PRO2000 (NM_014109.2,1848-1866).
gcctggtcgctttgataga

SEQ ID NO: 98078 - DNA, 19 bp, Homo sapiens
  siRNA target sequence for PRO2000 (NM_014109.2,1875-1893).
ctttagcctgcctgataaa

SEQ ID NO: 98079 - DNA, 19 bp, Homo sapiens
  siRNA target sequence for PRO2000 (NM_014109.2,1940-1958).
ccaaaccactggacacatt

SEQ ID NO: 98080 - DNA, 19 bp, Homo sapiens
  siRNA target sequence for PRO2000 (NM_014109.2,2048-2066).
gacgctacccacagatcta

SEQ ID NO: 98081 - DNA, 19 bp, Homo sapiens
  siRNA target sequence for PRO2000 (NM_014109.2,2050-2068).
cgctacccacagatctata

SEQ ID NO: 98082 - DNA, 19 bp, Homo sapiens
  siRNA target sequence for PRO2000 (NM_014109.2,2092-2110).
gatctctcttcaattaata

SEQ ID NO: 98083 - DNA, 19 bp, Homo sapiens
  siRNA target sequence for PRO2000 (NM_014109.2,2095-2113).
ctctcttcaattaatatct

SEQ ID NO: 98084 - DNA, 19 bp, Homo sapiens
  siRNA target sequence for PRO2000 (NM_014109.2,2097-2115).
ctcttcaattaatatctca

SEQ ID NO: 98085 - DNA, 19 bp, Homo sapiens
  siRNA target sequence for PRO2000 (NM_014109.2,2128-2146).
gaggtagctatgcaaaaga

SEQ ID NO: 98086 - DNA, 19 bp, Homo sapiens
  siRNA target sequence for PRO2000 (NM_014109.2,2189-2207).
cactgtccaccgttgtgaa

SEQ ID NO: 98087 - DNA, 19 bp, Homo sapiens
  siRNA target sequence for PRO2000 (NM_014109.2,2247-2265).
cctgcagagagtatttcca

SEQ ID NO: 98088 - DNA, 19 bp, Homo sapiens
  siRNA target sequence for PRO2000 (NM_014109.2,2312-2330).
gtcctctgctagaaagtga

SEQ ID NO: 98089 - DNA, 19 bp, Homo sapiens
  siRNA target sequence for PRO2000 (NM_014109.2,2331-2349).
cttggcttacagtgatgat

SEQ ID NO: 98090 - DNA, 19 bp, Homo sapiens
  siRNA target sequence for PRO2000 (NM_014109.2,2374-2392).
ggactttctcagaaatctt

SEQ ID NO: 98091 - DNA, 19 bp, Homo sapiens
  siRNA target sequence for PRO2000 (NM_014109.2,2457-2475).
gtcttttcgaccaagaata

SEQ ID NO: 98092 - DNA, 19 bp, Homo sapiens
  siRNA target sequence for PRO2000 (NM_014109.2,2465-2483).
gaccaagaatattgatagt

SEQ ID NO: 98093 - DNA, 19 bp, Homo sapiens
  siRNA target sequence for PRO2000 (NM_014109.2,2645-2663).
cagcaccaagtatagtgta

SEQ ID NO: 98094 - DNA, 19 bp, Homo sapiens
  siRNA target sequence for PRO2000 (NM_014109.2,2648-2666).
caccaagtatagtgtatgt

SEQ ID NO: 98095 - DNA, 19 bp, Homo sapiens
  siRNA target sequence for PRO2000 (NM_014109.2,2676-2694).
ccacgtgtggtgggaaata

SEQ ID NO: 98096 - DNA, 19 bp, Homo sapiens
  siRNA target sequence for PRO2000 (NM_014109.2,2679-2697).
cgtgtggtgggaaatagtt

SEQ ID NO: 98097 - DNA, 19 bp, Homo sapiens
  siRNA target sequence for PRO2000 (NM_014109.2,2707-2725).
cttaaagccacatttacca

SEQ ID NO: 98098 - DNA, 19 bp, Homo sapiens
  siRNA target sequence for PRO2000 (NM_014109.2,2717-2735).
catttaccacattattaca

SEQ ID NO: 98099 - DNA, 19 bp, Homo sapiens
  siRNA target sequence for PRO2000 (NM_014109.2,2826-2844).
ccgtgattatggagagatt

SEQ ID NO: 98100 - DNA, 19 bp, Homo sapiens
  siRNA target sequence for PRO2000 (NM_014109.2,2830-2848).
gattatggagagattttta

SEQ ID NO: 98101 - DNA, 19 bp, Homo sapiens
  siRNA target sequence for PRO2000 (NM_014109.2,2853-2871).
ccagttaccggataaagaa

SEQ ID NO: 98102 - DNA, 19 bp, Homo sapiens
  siRNA target sequence for PRO2000 (NM_014109.2,2914-2932).
gctaagcctcctatatcaa

SEQ ID NO: 98103 - DNA, 19 bp, Homo sapiens
  siRNA target sequence for PRO2000 (NM_014109.2,2915-2933).
ctaagcctcctatatcaaa

SEQ ID NO: 98104 - DNA, 19 bp, Homo sapiens
  siRNA target sequence for PRO2000 (NM_014109.2,3080-3098).
cacataggcttgctattga

SEQ ID NO: 98105 - DNA, 19 bp, Homo sapiens
  siRNA target sequence for PRO2000 (NM_014109.2,3099-3117).
caagcgattccgagtgttt

SEQ ID NO: 98106 - DNA, 19 bp, Homo sapiens
  siRNA target sequence for PRO2000 (NM_014109.2,3102-3120).
gcgattccgagtgtttact

SEQ ID NO: 98107 - DNA, 19 bp, Homo sapiens
  siRNA target sequence for PRO2000 (NM_014109.2,3103-3121).
cgattccgagtgtttacta

SEQ ID NO: 98108 - DNA, 19 bp, Homo sapiens
  siRNA target sequence for PRO2000 (NM_014109.2,3104-3122).
gattccgagtgtttactaa

SEQ ID NO: 98109 - DNA, 19 bp, Homo sapiens
  siRNA target sequence for PRO2000 (NM_014109.2,3158-3176).
ctgtaataaagcaaccaat

SEQ ID NO: 98110 - DNA, 19 bp, Homo sapiens
  siRNA target sequence for PRO2000 (NM_014109.2,3169-3187).
caaccaatggacctttcat

SEQ ID NO: 98111 - DNA, 19 bp, Homo sapiens
  siRNA target sequence for PRO2000 (NM_014109.2,3178-3196).
gacctttcatctgtaatca

SEQ ID NO: 98112 - DNA, 19 bp, Homo sapiens
  siRNA target sequence for PRO2000 (NM_014109.2,3197-3215).
gtaaaattgatctacacaa

SEQ ID NO: 98113 - DNA, 19 bp, Homo sapiens
  siRNA target sequence for PRO2000 (NM_014109.2,3220-3238).
ctgactgtgaaagactatt

SEQ ID NO: 98114 - DNA, 19 bp, Homo sapiens
  siRNA target sequence for PRO2000 (NM_014109.2,3234-3252).
ctatttgagagatattgat

SEQ ID NO: 98115 - DNA, 19 bp, Homo sapiens
  siRNA target sequence for PRO2000 (NM_014109.2,3295-3313).
cctggagatcgtcttatta

SEQ ID NO: 98116 - DNA, 19 bp, Homo sapiens
  siRNA target sequence for PRO2000 (NM_014109.2,3341-3359).
ctgcctatgccataattaa

SEQ ID NO: 98117 - DNA, 19 bp, Homo sapiens
  siRNA target sequence for PRO2000 (NM_014109.2,3424-3442).
ggttgtagctcctccaaat

SEQ ID NO: 98118 - DNA, 19 bp, Homo sapiens
  siRNA target sequence for PRO2000 (NM_014109.2,3425-3443).
gttgtagctcctccaaata

SEQ ID NO: 98119 - DNA, 19 bp, Homo sapiens
  siRNA target sequence for PRO2000 (NM_014109.2,3449-3467).
cgtcttactaccatgtgat

SEQ ID NO: 98120 - DNA, 19 bp, Homo sapiens
  siRNA target sequence for PRO2000 (NM_014109.2,3482-3500).
ccactcttgttggtgataa

SEQ ID NO: 98121 - DNA, 19 bp, Homo sapiens
  siRNA target sequence for PRO2000 (NM_014109.2,3560-3578).
gcactcctgctcagttgaa

SEQ ID NO: 98122 - DNA, 19 bp, Homo sapiens
  siRNA target sequence for PRO2000 (NM_014109.2,3663-3681).
gaatgccatagatcacaaa

SEQ ID NO: 98123 - DNA, 19 bp, Homo sapiens
  siRNA target sequence for PRO2000 (NM_014109.2,3668-3686).
ccatagatcacaaaattga

SEQ ID NO: 98124 - DNA, 19 bp, Homo sapiens
  siRNA target sequence for PRO2000 (NM_014109.2,3711-3729).
cacaagtgtagatcataat

SEQ ID NO: 98125 - DNA, 19 bp, Homo sapiens
  siRNA target sequence for PRO2000 (NM_014109.2,3713-3731).
caagtgtagatcataatga

SEQ ID NO: 98126 - DNA, 19 bp, Homo sapiens
  siRNA target sequence for PRO2000 (NM_014109.2,3750-3768).
gtcttcggtggaagaaaat

SEQ ID NO: 98127 - DNA, 19 bp, Homo sapiens
  siRNA target sequence for PRO2000 (NM_014109.2,3858-3876).
gaagactacagcatgtaca

SEQ ID NO: 98128 - DNA, 19 bp, Homo sapiens
  siRNA target sequence for PRO2000 (NM_014109.2,3875-3893).
cagaattgagagacaagat

SEQ ID NO: 98129 - DNA, 19 bp, Homo sapiens
  siRNA target sequence for PRO2000 (NM_014109.2,3910-3928).
gcttctagctctcagataa

SEQ ID NO: 98130 - DNA, 19 bp, Homo sapiens
  siRNA target sequence for PRO2000 (NM_014109.2,3911-3929).
cttctagctctcagataat

SEQ ID NO: 98131 - DNA, 19 bp, Homo sapiens
  siRNA target sequence for PRO2000 (NM_014109.2,4053-4071).
gcctacaccctcacttgtt

SEQ ID NO: 98132 - DNA, 19 bp, Homo sapiens
  siRNA target sequence for PRO2000 (NM_014109.2,4064-4082).
cacttgttgtggatcatga

SEQ ID NO: 98133 - DNA, 19 bp, Homo sapiens
  siRNA target sequence for PRO2000 (NM_014109.2,4072-4090).
gtggatcatgagcgattaa

SEQ ID NO: 98134 - DNA, 19 bp, Homo sapiens
  siRNA target sequence for PRO2000 (NM_014109.2,4074-4092).
ggatcatgagcgattaaaa

SEQ ID NO: 98135 - DNA, 19 bp, Homo sapiens
  siRNA target sequence for PRO2000 (NM_014109.2,4075-4093).
gatcatgagcgattaaaaa

SEQ ID NO: 98136 - DNA, 19 bp, Homo sapiens
  siRNA target sequence for PRO2000 (NM_014109.2,4096-4114).
cttttgaagactgttgtta

SEQ ID NO: 98137 - DNA, 19 bp, Homo sapiens
  siRNA target sequence for PRO2000 (NM_014109.2,4159-4177).
gcagtaatcagccaatgta

SEQ ID NO: 98138 - DNA, 19 bp, Homo sapiens
  siRNA target sequence for PRO2000 (NM_014109.2,4160-4178).
cagtaatcagccaatgtat

SEQ ID NO: 98139 - DNA, 19 bp, Homo sapiens
  siRNA target sequence for PRO2000 (NM_014109.2,4186-4204).
catcgcaaggaccatgata

SEQ ID NO: 98140 - DNA, 19 bp, Homo sapiens
  siRNA target sequence for PRO2000 (NM_014109.2,4189-4207).
cgcaaggaccatgataaaa

SEQ ID NO: 98141 - DNA, 19 bp, Homo sapiens
  siRNA target sequence for PRO2000 (NM_014109.2,4191-4209).
caaggaccatgataaaaca

SEQ ID NO: 98142 - DNA, 19 bp, Homo sapiens
  siRNA target sequence for PRO2000 (NM_014109.2,4194-4212).
ggaccatgataaaacatca

SEQ ID NO: 98143 - DNA, 19 bp, Homo sapiens
  siRNA target sequence for PRO2000 (NM_014109.2,4197-4215).
ccatgataaaacatcactt

SEQ ID NO: 98144 - DNA, 19 bp, Homo sapiens
  siRNA target sequence for PRPF4B (NM_003913.3,335-353).
ggtatgtctccagcaaaaa

SEQ ID NO: 98145 - DNA, 19 bp, Homo sapiens
  siRNA target sequence for PRPF4B (NM_003913.3,409-427).
gattaaggccgaacttgat

SEQ ID NO: 98146 - DNA, 19 bp, Homo sapiens
  siRNA target sequence for PRPF4B (NM_003913.3,416-434).
gccgaacttgataatgagt

SEQ ID NO: 98147 - DNA, 19 bp, Homo sapiens
  siRNA target sequence for PRPF4B (NM_003913.3,417-435).
ccgaacttgataatgagtt

SEQ ID NO: 98148 - DNA, 19 bp, Homo sapiens
  siRNA target sequence for PRPF4B (NM_003913.3,418-436).
cgaacttgataatgagtta

SEQ ID NO: 98149 - DNA, 19 bp, Homo sapiens
  siRNA target sequence for PRPF4B (NM_003913.3,456-474).
ctggtatggggctcatttt

SEQ ID NO: 98150 - DNA, 19 bp, Homo sapiens
  siRNA target sequence for PRPF4B (NM_003913.3,459-477).
gtatggggctcattttgca

SEQ ID NO: 98151 - DNA, 19 bp, Homo sapiens
  siRNA target sequence for PRPF4B (NM_003913.3,465-483).
ggctcattttgcaaggtta

SEQ ID NO: 98152 - DNA, 19 bp, Homo sapiens
  siRNA target sequence for PRPF4B (NM_003913.3,533-551).
ggaaataggtctagtacta

SEQ ID NO: 98153 - DNA, 19 bp, Homo sapiens
  siRNA target sequence for PRPF4B (NM_003913.3,541-559).
gtctagtactagatcttca

SEQ ID NO: 98154 - DNA, 19 bp, Homo sapiens
  siRNA target sequence for PRPF4B (NM_003913.3,561-579).
gtacaaaggggaaacttga

SEQ ID NO: 98155 - DNA, 19 bp, Homo sapiens
  siRNA target sequence for PRPF4B (NM_003913.3,575-593).
cttgaacttgtggacaata

SEQ ID NO: 98156 - DNA, 19 bp, Homo sapiens
  siRNA target sequence for PRPF4B (NM_003913.3,584-602).
gtggacaataaaattacta

SEQ ID NO: 98157 - DNA, 19 bp, Homo sapiens
  siRNA target sequence for PRPF4B (NM_003913.3,586-604).
ggacaataaaattactaca

SEQ ID NO: 98158 - DNA, 19 bp, Homo sapiens
  siRNA target sequence for PRPF4B (NM_003913.3,600-618).
ctacaaagaaacgaagtaa

SEQ ID NO: 98159 - DNA, 19 bp, Homo sapiens
  siRNA target sequence for PRPF4B (NM_003913.3,642-660).
gacataggtctgataaaaa

SEQ ID NO: 98160 - DNA, 19 bp, Homo sapiens
  siRNA target sequence for PRPF4B (NM_003913.3,670-688).
ggggggtattgaaatcgtt

SEQ ID NO: 98161 - DNA, 19 bp, Homo sapiens
  siRNA target sequence for PRPF4B (NM_003913.3,671-689).
gggggtattgaaatcgtta

SEQ ID NO: 98162 - DNA, 19 bp, Homo sapiens
  siRNA target sequence for PRPF4B (NM_003913.3,685-703).
cgttaaagagaaaacaact

SEQ ID NO: 98163 - DNA, 19 bp, Homo sapiens
  siRNA target sequence for PRPF4B (NM_003913.3,738-756).
gcccatccaaaagaagtaa

SEQ ID NO: 98164 - DNA, 19 bp, Homo sapiens
  siRNA target sequence for PRPF4B (NM_003913.3,740-758).
ccatccaaaagaagtaagt

SEQ ID NO: 98165 - DNA, 19 bp, Homo sapiens
  siRNA target sequence for PRPF4B (NM_003913.3,750-768).
gaagtaagtctcaagatca

SEQ ID NO: 98166 - DNA, 19 bp, Homo sapiens
  siRNA target sequence for PRPF4B (NM_003913.3,793-811).
ccttagaaggcgatctcaa

SEQ ID NO: 98167 - DNA, 19 bp, Homo sapiens
  siRNA target sequence for PRPF4B (NM_003913.3,801-819).
ggcgatctcaagagaaaat

SEQ ID NO: 98168 - DNA, 19 bp, Homo sapiens
  siRNA target sequence for PRPF4B (NM_003913.3,802-820).
gcgatctcaagagaaaatt

SEQ ID NO: 98169 - DNA, 19 bp, Homo sapiens
  siRNA target sequence for PRPF4B (NM_003913.3,831-849).
gatctcctactgatgataa

SEQ ID NO: 98170 - DNA, 19 bp, Homo sapiens
  siRNA target sequence for PRPF4B (NM_003913.3,836-854).
cctactgatgataaggtta

SEQ ID NO: 98171 - DNA, 19 bp, Homo sapiens
  siRNA target sequence for PRPF4B (NM_003913.3,840-858).
ctgatgataaggttaaaat

SEQ ID NO: 98172 - DNA, 19 bp, Homo sapiens
  siRNA target sequence for PRPF4B (NM_003913.3,895-913).
cccaattataaatgaaagt

SEQ ID NO: 98173 - DNA, 19 bp, Homo sapiens
  siRNA target sequence for PRPF4B (NM_003913.3,918-936).
gtcgcgatcgaggtaaaaa

SEQ ID NO: 98174 - DNA, 19 bp, Homo sapiens
  siRNA target sequence for PRPF4B (NM_003913.3,920-938).
cgcgatcgaggtaaaaaat

SEQ ID NO: 98175 - DNA, 19 bp, Homo sapiens
  siRNA target sequence for PRPF4B (NM_003913.3,923-941).
gatcgaggtaaaaaatcca

SEQ ID NO: 98176 - DNA, 19 bp, Homo sapiens
  siRNA target sequence for PRPF4B (NM_003913.3,953-971).
gatttaagaggtaaatcca

SEQ ID NO: 98177 - DNA, 19 bp, Homo sapiens
  siRNA target sequence for PRPF4B (NM_003913.3,1005-1023).
caaaacggtctgaaactga

SEQ ID NO: 98178 - DNA, 19 bp, Homo sapiens
  siRNA target sequence for PRPF4B (NM_003913.3,1103-1121).
ggtcgtagtcctaaaagaa

SEQ ID NO: 98179 - DNA, 19 bp, Homo sapiens
  siRNA target sequence for PRPF4B (NM_003913.3,1133-1151).
ccaaaaccacgtgataaat

SEQ ID NO: 98180 - DNA, 19 bp, Homo sapiens
  siRNA target sequence for PRPF4B (NM_003913.3,1139-1157).
ccacgtgataaatcaagaa

SEQ ID NO: 98181 - DNA, 19 bp, Homo sapiens
  siRNA target sequence for PRPF4B (NM_003913.3,1158-1176).
gaagcaggtctccactttt

SEQ ID NO: 98182 - DNA, 19 bp, Homo sapiens
  siRNA target sequence for PRPF4B (NM_003913.3,1243-1261).
gagccgatccttagaaaga

SEQ ID NO: 98183 - DNA, 19 bp, Homo sapiens
  siRNA target sequence for PRPF4B (NM_003913.3,1277-1295).
gagaggagacgactttctt

SEQ ID NO: 98184 - DNA, 19 bp, Homo sapiens
  siRNA target sequence for PRPF4B (NM_003913.3,1305-1323).
cacgacctcgagatgatat

SEQ ID NO: 98185 - DNA, 19 bp, Homo sapiens
  siRNA target sequence for PRPF4B (NM_003913.3,1325-1343).
ctcagtagacgtgaaagat

SEQ ID NO: 98186 - DNA, 19 bp, Homo sapiens
  siRNA target sequence for PRPF4B (NM_003913.3,1327-1345).
cagtagacgtgaaagatca

SEQ ID NO: 98187 - DNA, 19 bp, Homo sapiens
  siRNA target sequence for PRPF4B (NM_003913.3,1329-1347).
gtagacgtgaaagatcaaa

SEQ ID NO: 98188 - DNA, 19 bp, Homo sapiens
  siRNA target sequence for PRPF4B (NM_003913.3,1613-1631).
gaatcttcgtctgatgata

SEQ ID NO: 98189 - DNA, 19 bp, Homo sapiens
  siRNA target sequence for PRPF4B (NM_003913.3,1673-1691).
ctaatagaacagagaagaa

SEQ ID NO: 98190 - DNA, 19 bp, Homo sapiens
  siRNA target sequence for PRPF4B (NM_003913.3,1693-1711).
ccaaaggcaggcaattgtt

SEQ ID NO: 98191 - DNA, 19 bp, Homo sapiens
  siRNA target sequence for PRPF4B (NM_003913.3,1797-1815).
caccatctccagatgacat

SEQ ID NO: 98192 - DNA, 19 bp, Homo sapiens
  siRNA target sequence for PRPF4B (NM_003913.3,1823-1841).
cgagtagctgctgatgtta

SEQ ID NO: 98193 - DNA, 19 bp, Homo sapiens
  siRNA target sequence for PRPF4B (NM_003913.3,1824-1842).
gagtagctgctgatgttaa

SEQ ID NO: 98194 - DNA, 19 bp, Homo sapiens
  siRNA target sequence for PRPF4B (NM_003913.3,1829-1847).
gctgctgatgttaaagagt

SEQ ID NO: 98195 - DNA, 19 bp, Homo sapiens
  siRNA target sequence for PRPF4B (NM_003913.3,1830-1848).
ctgctgatgttaaagagta

SEQ ID NO: 98196 - DNA, 19 bp, Homo sapiens
  siRNA target sequence for PRPF4B (NM_003913.3,1881-1899).
cagtgaaagccaagcataa

SEQ ID NO: 98197 - DNA, 19 bp, Homo sapiens
  siRNA target sequence for PRPF4B (NM_003913.3,1889-1907).
gccaagcataatctaatga

SEQ ID NO: 98198 - DNA, 19 bp, Homo sapiens
  siRNA target sequence for PRPF4B (NM_003913.3,1925-1943).
ggttcatctcagaagaagt

SEQ ID NO: 98199 - DNA, 19 bp, Homo sapiens
  siRNA target sequence for PRPF4B (NM_003913.3,1926-1944).
gttcatctcagaagaagtt

SEQ ID NO: 98200 - DNA, 19 bp, Homo sapiens
  siRNA target sequence for PRPF4B (NM_003913.3,1945-1963).
gttggcacctgatatgttt

SEQ ID NO: 98201 - DNA, 19 bp, Homo sapiens
  siRNA target sequence for PRPF4B (NM_003913.3,1948-1966).
ggcacctgatatgtttaca

SEQ ID NO: 98202 - DNA, 19 bp, Homo sapiens
  siRNA target sequence for PRPF4B (NM_003913.3,1981-1999).
gtttgctgcgtattttgat

SEQ ID NO: 98203 - DNA, 19 bp, Homo sapiens
  siRNA target sequence for PRPF4B (NM_003913.3,2016-2034).
ccgctggcattggaaaaga

SEQ ID NO: 98204 - DNA, 19 bp, Homo sapiens
  siRNA target sequence for PRPF4B (NM_003913.3,2017-2035).
cgctggcattggaaaagat

SEQ ID NO: 98205 - DNA, 19 bp, Homo sapiens
  siRNA target sequence for PRPF4B (NM_003913.3,2070-2088).
ccgatgcagaaggctatta

SEQ ID NO: 98206 - DNA, 19 bp, Homo sapiens
  siRNA target sequence for PRPF4B (NM_003913.3,2071-2089).
cgatgcagaaggctattat

SEQ ID NO: 98207 - DNA, 19 bp, Homo sapiens
  siRNA target sequence for PRPF4B (NM_003913.3,2082-2100).
gctattatcgtgtgaacat

SEQ ID NO: 98208 - DNA, 19 bp, Homo sapiens
  siRNA target sequence for PRPF4B (NM_003913.3,2083-2101).
ctattatcgtgtgaacata

SEQ ID NO: 98209 - DNA, 19 bp, Homo sapiens
  siRNA target sequence for PRPF4B (NM_003913.3,2105-2123).
gaagtcctagataaacgtt

SEQ ID NO: 98210 - DNA, 19 bp, Homo sapiens
  siRNA target sequence for PRPF4B (NM_003913.3,2110-2128).
cctagataaacgttacaat

SEQ ID NO: 98211 - DNA, 19 bp, Homo sapiens
  siRNA target sequence for PRPF4B (NM_003913.3,2144-2162).
gggcaaggtgtattcagta

SEQ ID NO: 98212 - DNA, 19 bp, Homo sapiens
  siRNA target sequence for PRPF4B (NM_003913.3,2145-2163).
ggcaaggtgtattcagtaa

SEQ ID NO: 98213 - DNA, 19 bp, Homo sapiens
  siRNA target sequence for PRPF4B (NM_003913.3,2146-2164).
gcaaggtgtattcagtaat

SEQ ID NO: 98214 - DNA, 19 bp, Homo sapiens
  siRNA target sequence for PRPF4B (NM_003913.3,2165-2183).
gttgtacgagccagagata

SEQ ID NO: 98215 - DNA, 19 bp, Homo sapiens
  siRNA target sequence for PRPF4B (NM_003913.3,2201-2219).
gaagtggctgtaaagatca

SEQ ID NO: 98216 - DNA, 19 bp, Homo sapiens
  siRNA target sequence for PRPF4B (NM_003913.3,2264-2282).
gagttcttgaaaaaactta

SEQ ID NO: 98217 - DNA, 19 bp, Homo sapiens
  siRNA target sequence for PRPF4B (NM_003913.3,2288-2306).
gctgatcctgatgacaaat

SEQ ID NO: 98218 - DNA, 19 bp, Homo sapiens
  siRNA target sequence for PRPF4B (NM_003913.3,2289-2307).
ctgatcctgatgacaaatt

SEQ ID NO: 98219 - DNA, 19 bp, Homo sapiens
  siRNA target sequence for PRPF4B (NM_003913.3,2368-2386).
gcctctcagcatgaactta

SEQ ID NO: 98220 - DNA, 19 bp, Homo sapiens
  siRNA target sequence for PRPF4B (NM_003913.3,2393-2411).
gtgttaaaaaaatatggta

SEQ ID NO: 98221 - DNA, 19 bp, Homo sapiens
  siRNA target sequence for PRPF4B (NM_003913.3,2414-2432).
gatgttggtcttcatatta

SEQ ID NO: 98222 - DNA, 19 bp, Homo sapiens
  siRNA target sequence for PRPF4B (NM_003913.3,2426-2444).
catattaaagctgtaagat

SEQ ID NO: 98223 - DNA, 19 bp, Homo sapiens
  siRNA target sequence for PRPF4B (NM_003913.3,2436-2454).
ctgtaagatcctatagtca

SEQ ID NO: 98224 - DNA, 19 bp, Homo sapiens
  siRNA target sequence for PRPF4B (NM_003913.3,2467-2485).
ggcattgaaactccttaaa

SEQ ID NO: 98225 - DNA, 19 bp, Homo sapiens
  siRNA target sequence for PRPF4B (NM_003913.3,2531-2549).
gttaatgaatccaaaacta

SEQ ID NO: 98226 - DNA, 19 bp, Homo sapiens
  siRNA target sequence for PRPF4B (NM_003913.3,2580-2598).
cacatgttgcggataatga

SEQ ID NO: 98227 - DNA, 19 bp, Homo sapiens
  siRNA target sequence for PRPF4B (NM_003913.3,2585-2603).
gttgcggataatgacataa

SEQ ID NO: 98228 - DNA, 19 bp, Homo sapiens
  siRNA target sequence for PRPF4B (NM_003913.3,2636-2654).
cctgaaatcattataggta

SEQ ID NO: 98229 - DNA, 19 bp, Homo sapiens
  siRNA target sequence for PRPF4B (NM_003913.3,2659-2677).
ctatgactatggtatagat

SEQ ID NO: 98230 - DNA, 19 bp, Homo sapiens
  siRNA target sequence for PRPF4B (NM_003913.3,2663-2681).
gactatggtatagatatgt

SEQ ID NO: 98231 - DNA, 19 bp, Homo sapiens
  siRNA target sequence for PRPF4B (NM_003913.3,2685-2703).
ctgtaggttgcaccttata

SEQ ID NO: 98232 - DNA, 19 bp, Homo sapiens
  siRNA target sequence for PRPF4B (NM_003913.3,2694-2712).
gcaccttatacgaactcta

SEQ ID NO: 98233 - DNA, 19 bp, Homo sapiens
  siRNA target sequence for PRPF4B (NM_003913.3,2695-2713).
caccttatacgaactctat

SEQ ID NO: 98234 - DNA, 19 bp, Homo sapiens
  siRNA target sequence for PRPF4B (NM_003913.3,2698-2716).
cttatacgaactctatact

SEQ ID NO: 98235 - DNA, 19 bp, Homo sapiens
  siRNA target sequence for PRPF4B (NM_003913.3,2704-2722).
cgaactctatactggaaaa

SEQ ID NO: 98236 - DNA, 19 bp, Homo sapiens
  siRNA target sequence for PRPF4B (NM_003913.3,2755-2773).
gctgaagcttgcaatggat

SEQ ID NO: 98237 - DNA, 19 bp, Homo sapiens
  siRNA target sequence for PRPF4B (NM_003913.3,2761-2779).
gcttgcaatggatctcaaa

SEQ ID NO: 98238 - DNA, 19 bp, Homo sapiens
  siRNA target sequence for PRPF4B (NM_003913.3,2845-2863).
caacttcatgtacatagaa

SEQ ID NO: 98239 - DNA, 19 bp, Homo sapiens
  siRNA target sequence for PRPF4B (NM_003913.3,2848-2866).
cttcatgtacatagaagtt

SEQ ID NO: 98240 - DNA, 19 bp, Homo sapiens
  siRNA target sequence for PRPF4B (NM_003913.3,2851-2869).
catgtacatagaagttgat

SEQ ID NO: 98241 - DNA, 19 bp, Homo sapiens
  siRNA target sequence for PRSS15 (NM_004793.2,453-471).
gattatcgaggttaaaaat

SEQ ID NO: 98242 - DNA, 19 bp, Homo sapiens
  siRNA target sequence for PRSS15 (NM_004793.2,506-524).
gtctcgcccagccttatgt

SEQ ID NO: 98243 - DNA, 19 bp, Homo sapiens
  siRNA target sequence for PRSS15 (NM_004793.2,518-536).
cttatgtcggcgtctttct

SEQ ID NO: 98244 - DNA, 19 bp, Homo sapiens
  siRNA target sequence for PRSS15 (NM_004793.2,523-541).
gtcggcgtctttctaaaga

SEQ ID NO: 98245 - DNA, 19 bp, Homo sapiens
  siRNA target sequence for PRSS15 (NM_004793.2,525-543).
cggcgtctttctaaagaga

SEQ ID NO: 98246 - DNA, 19 bp, Homo sapiens
  siRNA target sequence for PRSS15 (NM_004793.2,664-682).
cacagaagagtccatatca

SEQ ID NO: 98247 - DNA, 19 bp, Homo sapiens
  siRNA target sequence for PRSS15 (NM_004793.2,1083-1101).
ggaagagaccaatattcct

SEQ ID NO: 98248 - DNA, 19 bp, Homo sapiens
  siRNA target sequence for PRSS15 (NM_004793.2,1124-1142).
ccctgctgaagaaggaatt

SEQ ID NO: 98249 - DNA, 19 bp, Homo sapiens
  siRNA target sequence for PRSS15 (NM_004793.2,1125-1143).
cctgctgaagaaggaattt

SEQ ID NO: 98250 - DNA, 19 bp, Homo sapiens
  siRNA target sequence for PRSS15 (NM_004793.2,1383-1401).
ccactcctcggagttcaat

SEQ ID NO: 98251 - DNA, 19 bp, Homo sapiens
  siRNA target sequence for PRSS15 (NM_004793.2,1649-1667).
ccctgaaccgagagtactt

SEQ ID NO: 98252 - DNA, 19 bp, Homo sapiens
  siRNA target sequence for PRSS15 (NM_004793.2,1982-2000).
gagaccgtatggagatgat

SEQ ID NO: 98253 - DNA, 19 bp, Homo sapiens
  siRNA target sequence for PRSS15 (NM_004793.2,2194-2212).
cggaaatcggcctacaaga

SEQ ID NO: 98254 - DNA, 19 bp, Homo sapiens
  siRNA target sequence for PRSS15 (NM_004793.2,2195-2213).
ggaaatcggcctacaagat

SEQ ID NO: 98255 - DNA, 19 bp, Homo sapiens
  siRNA target sequence for PRSS15 (NM_004793.2,2196-2214).
gaaatcggcctacaagatt

SEQ ID NO: 98256 - DNA, 19 bp, Homo sapiens
  siRNA target sequence for PSK (NM_016151.1,2975-2993).
gcccaagagcctcaaagta

SEQ ID NO: 98257 - DNA, 19 bp, Homo sapiens
  siRNA target sequence for PSK (NM_016151.1,3056-3074).
cacaggcacccctatagaa

SEQ ID NO: 98258 - DNA, 19 bp, Homo sapiens
  siRNA target sequence for PSK (NM_016151.1,3058-3076).
caggcacccctatagaaca

SEQ ID NO: 98259 - DNA, 19 bp, Homo sapiens
  siRNA target sequence for PSK (NM_016151.1,3103-3121).
cagtcctggaccaaagaat

SEQ ID NO: 98260 - DNA, 19 bp, Homo sapiens
  siRNA target sequence for PSK (NM_016151.1,3232-3250).
gtcccagtccacaaaaaca

SEQ ID NO: 98261 - DNA, 19 bp, Homo sapiens
  siRNA target sequence for PSK (NM_016151.1,3764-3782).
ctacctgctcctttgtaca

SEQ ID NO: 98262 - DNA, 19 bp, Homo sapiens
  siRNA target sequence for PSK (NM_016151.1,4175-4193).
cacccaacacccattagct

SEQ ID NO: 98263 - DNA, 19 bp, Homo sapiens
  siRNA target sequence for PSKH1 (NM_006742.1,206-224).
cccttcagtggcactaaga

SEQ ID NO: 98264 - DNA, 19 bp, Homo sapiens
  siRNA target sequence for PSKH1 (NM_006742.1,208-226).
cttcagtggcactaagagt

SEQ ID NO: 98265 - DNA, 19 bp, Homo sapiens
  siRNA target sequence for PSKH1 (NM_006742.1,230-248).
gtgtacaagcacttcatca

SEQ ID NO: 98266 - DNA, 19 bp, Homo sapiens
  siRNA target sequence for PSKH1 (NM_006742.1,366-384).
gcagggccagggtagctaa

SEQ ID NO: 98267 - DNA, 19 bp, Homo sapiens
  siRNA target sequence for PSKH1 (NM_006742.1,369-387).
gggccagggtagctaagta

SEQ ID NO: 98268 - DNA, 19 bp, Homo sapiens
  siRNA target sequence for PSKH1 (NM_006742.1,397-415).
gtttgacccacgtgttaca

SEQ ID NO: 98269 - DNA, 19 bp, Homo sapiens
  siRNA target sequence for PSKH1 (NM_006742.1,405-423).
cacgtgttacagctaagta

SEQ ID NO: 98270 - DNA, 19 bp, Homo sapiens
  siRNA target sequence for PSKH1 (NM_006742.1,408-426).
gtgttacagctaagtatga

SEQ ID NO: 98271 - DNA, 19 bp, Homo sapiens
  siRNA target sequence for PSKH1 (NM_006742.1,494-512).
cagccgtatgccatcaaga

SEQ ID NO: 98272 - DNA, 19 bp, Homo sapiens
  siRNA target sequence for PSKH1 (NM_006742.1,497-515).
ccgtatgccatcaagatga

SEQ ID NO: 98273 - DNA, 19 bp, Homo sapiens
  siRNA target sequence for PSKH1 (NM_006742.1,578-596).
gtgcgtcatgccaacatca

SEQ ID NO: 98274 - DNA, 19 bp, Homo sapiens
  siRNA target sequence for PSKH1 (NM_006742.1,878-896).
gatgactgcttgatgaaga

SEQ ID NO: 98275 - DNA, 19 bp, Homo sapiens
  siRNA target sequence for PSKH1 (NM_006742.1,1063-1081).
gggcaagtacagttactct

SEQ ID NO: 98276 - DNA, 19 bp, Homo sapiens
  siRNA target sequence for PSKH1 (NM_006742.1,1147-1165).
ccctggagcccgtatgact

SEQ ID NO: 98277 - DNA, 19 bp, Homo sapiens
  siRNA target sequence for PSKH1 (NM_006742.1,1246-1264).
ccagaacctccttaaacgt

SEQ ID NO: 98278 - DNA, 19 bp, Homo sapiens
  siRNA target sequence for PSKH1 (NM_006742.1,1274-1292).
cgctgccagagcaccaaat

SEQ ID NO: 98279 - DNA, 19 bp, Homo sapiens
  siRNA target sequence for PSKH1 (NM_006742.1,1276-1294).
ctgccagagcaccaaatct

SEQ ID NO: 98280 - DNA, 19 bp, Homo sapiens
  siRNA target sequence for PSKH1 (NM_006742.1,1316-1334).
cgctccacacgctccaata

SEQ ID NO: 98281 - DNA, 19 bp, Homo sapiens
  siRNA target sequence for PSKH1 (NM_006742.1,1317-1335).
gctccacacgctccaataa

SEQ ID NO: 98282 - DNA, 19 bp, Homo sapiens
  siRNA target sequence for PSKH1 (NM_006742.1,1321-1339).
cacacgctccaataagtca

SEQ ID NO: 98283 - DNA, 19 bp, Homo sapiens
  siRNA target sequence for PSKH1 (NM_006742.1,1379-1397).
cgctaccagcagcaataca

SEQ ID NO: 98284 - DNA, 19 bp, Homo sapiens
  siRNA target sequence for PSKH2 (NM_033126.1,60-78).
gcacgaaggtcaaaaccaa

SEQ ID NO: 98285 - DNA, 19 bp, Homo sapiens
  siRNA target sequence for PSKH2 (NM_033126.1,341-359).
gggttagccatcgttacat

SEQ ID NO: 98286 - DNA, 19 bp, Homo sapiens
  siRNA target sequence for PSKH2 (NM_033126.1,342-360).
ggttagccatcgttacatt

SEQ ID NO: 98287 - DNA, 19 bp, Homo sapiens
  siRNA target sequence for PSKH2 (NM_033126.1,386-404).
ctgaggatcaagtttacat

SEQ ID NO: 98288 - DNA, 19 bp, Homo sapiens
  siRNA target sequence for PSKH2 (NM_033126.1,391-409).
gatcaagtttacatggtaa

SEQ ID NO: 98289 - DNA, 19 bp, Homo sapiens
  siRNA target sequence for PSKH2 (NM_033126.1,423-441).
cggaggggagctctttgat

SEQ ID NO: 98290 - DNA, 19 bp, Homo sapiens
  siRNA target sequence for PSKH2 (NM_033126.1,432-450).
gctctttgatcgactcatt

SEQ ID NO: 98291 - DNA, 19 bp, Homo sapiens
  siRNA target sequence for PSKH2 (NM_033126.1,502-520).
gctgatgggattaggtatt

SEQ ID NO: 98292 - DNA, 19 bp, Homo sapiens
  siRNA target sequence for PSKH2 (NM_033126.1,503-521).
ctgatgggattaggtattt

SEQ ID NO: 98293 - DNA, 19 bp, Homo sapiens
  siRNA target sequence for PSKH2 (NM_033126.1,522-540).
gcatgcgctgcagataact

SEQ ID NO: 98294 - DNA, 19 bp, Homo sapiens
  siRNA target sequence for PSKH2 (NM_033126.1,526-544).
gcgctgcagataactcata

SEQ ID NO: 98295 - DNA, 19 bp, Homo sapiens
  siRNA target sequence for PSKH2 (NM_033126.1,531-549).
gcagataactcataggaat

SEQ ID NO: 98296 - DNA, 19 bp, Homo sapiens
  siRNA target sequence for PSKH2 (NM_033126.1,583-601).
ggtgaagagtcgaaaattt

SEQ ID NO: 98297 - DNA, 19 bp, Homo sapiens
  siRNA target sequence for PSKH2 (NM_033126.1,584-602).
gtgaagagtcgaaaatttt

SEQ ID NO: 98298 - DNA, 19 bp, Homo sapiens
  siRNA target sequence for PSKH2 (NM_033126.1,591-609).
gtcgaaaattttaattaca

SEQ ID NO: 98299 - DNA, 19 bp, Homo sapiens
  siRNA target sequence for PSKH2 (NM_033126.1,621-639).
ggcatactccgggaaaaaa

SEQ ID NO: 98300 - DNA, 19 bp, Homo sapiens
  siRNA target sequence for PSKH2 (NM_033126.1,641-659).
gtggtgactggacaatgaa

SEQ ID NO: 98301 - DNA, 19 bp, Homo sapiens
  siRNA target sequence for PSKH2 (NM_033126.1,703-721).
ctaaggaagccttatacca

SEQ ID NO: 98302 - DNA, 19 bp, Homo sapiens
  siRNA target sequence for PSKH2 (NM_033126.1,745-763).
ggtgtgatcacatatgctt

SEQ ID NO: 98303 - DNA, 19 bp, Homo sapiens
  siRNA target sequence for PSKH2 (NM_033126.1,750-768).
gatcacatatgctttactt

SEQ ID NO: 98304 - DNA, 19 bp, Homo sapiens
  siRNA target sequence for PSKH2 (NM_033126.1,1063-1081).
cagtcttctaagtcacatt

SEQ ID NO: 98305 - DNA, 19 bp, Homo sapiens
  siRNA target sequence for PSKH2 (NM_033126.1,1074-1092).
gtcacattattctcacaaa

SEQ ID NO: 98306 - DNA, 19 bp, Homo sapiens
  siRNA target sequence for PSKH2 (NM_033126.1,1109-1127).
gcaagagaaacttaaggat

SEQ ID NO: 98307 - DNA, 19 bp, Homo sapiens
  siRNA target sequence for PSKH2 (NM_033126.1,1138-1156).
ccactgtctgcgcttttgt

SEQ ID NO: 98308 - DNA, 19 bp, Homo sapiens
  siRNA target sequence for PSMC1 (NM_002802.2,798-816).
ggttggctctgaacttatt

SEQ ID NO: 98309 - DNA, 19 bp, Homo sapiens
  siRNA target sequence for PSMC1 (NM_002802.2,881-899).
caccgtccatcgtgtttat

SEQ ID NO: 98310 - DNA, 19 bp, Homo sapiens
  siRNA target sequence for PSMC1 (NM_002802.2,884-902).
cgtccatcgtgtttattga

SEQ ID NO: 98311 - DNA, 19 bp, Homo sapiens
  siRNA target sequence for PSMC1 (NM_002802.2,1035-1053).
ggccacaaaccgaatagaa

SEQ ID NO: 98312 - DNA, 19 bp, Homo sapiens
  siRNA target sequence for PSMC1 (NM_002802.2,1036-1054).
gccacaaaccgaatagaaa

SEQ ID NO: 98313 - DNA, 19 bp, Homo sapiens
  siRNA target sequence for PSMC1 (NM_002802.2,1038-1056).
cacaaaccgaatagaaact

SEQ ID NO: 98314 - DNA, 19 bp, Homo sapiens
  siRNA target sequence for PSMC1 (NM_002802.2,1040-1058).
caaaccgaatagaaacttt

SEQ ID NO: 98315 - DNA, 19 bp, Homo sapiens
  siRNA target sequence for PSMC1 (NM_002802.2,1044-1062).
ccgaatagaaactttggat

SEQ ID NO: 98316 - DNA, 19 bp, Homo sapiens
  siRNA target sequence for PSMC2 (NM_002803.2,152-170).
ggggatattgccttgttga

SEQ ID NO: 98317 - DNA, 19 bp, Homo sapiens
  siRNA target sequence for PSMC2 (NM_002803.2,179-197).
ggtcagagcacttactcta

SEQ ID NO: 98318 - DNA, 19 bp, Homo sapiens
  siRNA target sequence for PSMC2 (NM_002803.2,198-216).
ggcagatcaagcaagttga

SEQ ID NO: 98319 - DNA, 19 bp, Homo sapiens
  siRNA target sequence for PSMC2 (NM_002803.2,199-217).
gcagatcaagcaagttgaa

SEQ ID NO: 98320 - DNA, 19 bp, Homo sapiens
  siRNA target sequence for PSMC2 (NM_002803.2,229-247).
gcaacttctcaagaaaatt

SEQ ID NO: 98321 - DNA, 19 bp, Homo sapiens
  siRNA target sequence for PSMC2 (NM_002803.2,353-371).
gttgccaggtgtacaaaga

SEQ ID NO: 98322 - DNA, 19 bp, Homo sapiens
  siRNA target sequence for PSMC2 (NM_002803.2,387-405).
cggaggacccaaaatacat

SEQ ID NO: 98323 - DNA, 19 bp, Homo sapiens
  siRNA target sequence for PSMC2 (NM_002803.2,388-406).
ggaggacccaaaatacatt

SEQ ID NO: 98324 - DNA, 19 bp, Homo sapiens
  siRNA target sequence for PSMC2 (NM_002803.2,389-407).
gaggacccaaaatacatta

SEQ ID NO: 98325 - DNA, 19 bp, Homo sapiens
  siRNA target sequence for PSMC2 (NM_002803.2,454-472).
ggtggcacctactgacatt

SEQ ID NO: 98326 - DNA, 19 bp, Homo sapiens
  siRNA target sequence for PSMC2 (NM_002803.2,457-475).
ggcacctactgacattgaa

SEQ ID NO: 98327 - DNA, 19 bp, Homo sapiens
  siRNA target sequence for PSMC2 (NM_002803.2,486-504).
gagtgggcgtggatagaaa

SEQ ID NO: 98328 - DNA, 19 bp, Homo sapiens
  siRNA target sequence for PSMC2 (NM_002803.2,488-506).
gtgggcgtggatagaaata

SEQ ID NO: 98329 - DNA, 19 bp, Homo sapiens
  siRNA target sequence for PSMC2 (NM_002803.2,490-508).
gggcgtggatagaaataaa

SEQ ID NO: 98330 - DNA, 19 bp, Homo sapiens
  siRNA target sequence for PSMC2 (NM_002803.2,491-509).
ggcgtggatagaaataaat

SEQ ID NO: 98331 - DNA, 19 bp, Homo sapiens
  siRNA target sequence for PSMC2 (NM_002803.2,492-510).
gcgtggatagaaataaata

SEQ ID NO: 98332 - DNA, 19 bp, Homo sapiens
  siRNA target sequence for PSMC2 (NM_002803.2,525-543).
cattgcctcctaagattga

SEQ ID NO: 98333 - DNA, 19 bp, Homo sapiens
  siRNA target sequence for PSMC2 (NM_002803.2,659-677).
catccagagaggtttgtga

SEQ ID NO: 98334 - DNA, 19 bp, Homo sapiens
  siRNA target sequence for PSMC2 (NM_002803.2,766-784).
gactgatgcgtgcttcatt

SEQ ID NO: 98335 - DNA, 19 bp, Homo sapiens
  siRNA target sequence for PSMC2 (NM_002803.2,774-792).
cgtgcttcattcgagttat

SEQ ID NO: 98336 - DNA, 19 bp, Homo sapiens
  siRNA target sequence for PSMC2 (NM_002803.2,775-793).
gtgcttcattcgagttatt

SEQ ID NO: 98337 - DNA, 19 bp, Homo sapiens
  siRNA target sequence for PSMC2 (NM_002803.2,778-796).
cttcattcgagttattgga

SEQ ID NO: 98338 - DNA, 19 bp, Homo sapiens
  siRNA target sequence for PSMC2 (NM_002803.2,795-813).
gatctgagcttgtacagaa

SEQ ID NO: 98339 - DNA, 19 bp, Homo sapiens
  siRNA target sequence for PSMC2 (NM_002803.2,839-857).
gttcgtgaactctttgaaa

SEQ ID NO: 98340 - DNA, 19 bp, Homo sapiens
  siRNA target sequence for PSMC2 (NM_002803.2,912-930).
gaggggctcgttttgatga

SEQ ID NO: 98341 - DNA, 19 bp, Homo sapiens
  siRNA target sequence for PSMC2 (NM_002803.2,1030-1048).
cactaacagacctgatact

SEQ ID NO: 98342 - DNA, 19 bp, Homo sapiens
  siRNA target sequence for PSMC2 (NM_002803.2,1115-1133).
gagggtcggacccacatat

SEQ ID NO: 98343 - DNA, 19 bp, Homo sapiens
  siRNA target sequence for PSMC2 (NM_002803.2,1117-1135).
gggtcggacccacatattt

SEQ ID NO: 98344 - DNA, 19 bp, Homo sapiens
  siRNA target sequence for PSMC2 (NM_002803.2,1118-1136).
ggtcggacccacatattta

SEQ ID NO: 98345 - DNA, 19 bp, Homo sapiens
  siRNA target sequence for PSMC2 (NM_002803.2,1119-1137).
gtcggacccacatatttaa

SEQ ID NO: 98346 - DNA, 19 bp, Homo sapiens
  siRNA target sequence for PSMC2 (NM_002803.2,1121-1139).
cggacccacatatttaaga

SEQ ID NO: 98347 - DNA, 19 bp, Homo sapiens
  siRNA target sequence for PSMC2 (NM_002803.2,1122-1140).
ggacccacatatttaagat

SEQ ID NO: 98348 - DNA, 19 bp, Homo sapiens
  siRNA target sequence for PSMC2 (NM_002803.2,1148-1166).
cgttcaatgagtgttgaaa

SEQ ID NO: 98349 - DNA, 19 bp, Homo sapiens
  siRNA target sequence for PSMC2 (NM_002803.2,1190-1208).
gcacgactgtgtccaaata

SEQ ID NO: 98350 - DNA, 19 bp, Homo sapiens
  siRNA target sequence for PSMC2 (NM_002803.2,1261-1279).
cagagcacggcgaaaaatt

SEQ ID NO: 98351 - DNA, 19 bp, Homo sapiens
  siRNA target sequence for PSMC2 (NM_002803.2,1265-1283).
gcacggcgaaaaattgcta

SEQ ID NO: 98352 - DNA, 19 bp, Homo sapiens
  siRNA target sequence for PSMC2 (NM_002803.2,1280-1298).
gctaccgagaaggatttct

SEQ ID NO: 98353 - DNA, 19 bp, Homo sapiens
  siRNA target sequence for PSMC2 (NM_002803.2,1281-1299).
ctaccgagaaggatttctt

SEQ ID NO: 98354 - DNA, 19 bp, Homo sapiens
  siRNA target sequence for PSMC2 (NM_002803.2,1307-1325).
gtaaataaggtcattaagt

SEQ ID NO: 98355 - DNA, 19 bp, Homo sapiens
  siRNA target sequence for PSMC2 (NM_002803.2,1324-1342).
gtcttatgccaaattcagt

SEQ ID NO: 98356 - DNA, 19 bp, Homo sapiens
  siRNA target sequence for PSMC2 (NM_002803.2,1343-1361).
gctactcctcgttacatga

SEQ ID NO: 98357 - DNA, 19 bp, Homo sapiens
  siRNA target sequence for PSMC2 (NM_002803.2,1347-1365).
ctcctcgttacatgacata

SEQ ID NO: 98358 - DNA, 19 bp, Homo sapiens
  siRNA target sequence for PSMC2 (NM_002803.2,1349-1367).
cctcgttacatgacataca

SEQ ID NO: 98359 - DNA, 19 bp, Homo sapiens
  siRNA target sequence for PSMC2 (NM_002803.2,1350-1368).
ctcgttacatgacatacaa

SEQ ID NO: 98360 - DNA, 19 bp, Homo sapiens
  siRNA target sequence for PSMC3 (NM_002804.3,166-184).
ctgctgccgaatattgaga

SEQ ID NO: 98361 - DNA, 19 bp, Homo sapiens
  siRNA target sequence for PSMC3 (NM_002804.3,441-459).
cgagctcctggatgttgat

SEQ ID NO: 98362 - DNA, 19 bp, Homo sapiens
  siRNA target sequence for PSMC3 (NM_002804.3,447-465).
cctggatgttgatcctaat

SEQ ID NO: 98363 - DNA, 19 bp, Homo sapiens
  siRNA target sequence for PSMC3 (NM_002804.3,474-492).
ggaggatggtgccaatatt

SEQ ID NO: 98364 - DNA, 19 bp, Homo sapiens
  siRNA target sequence for PSMC3 (NM_002804.3,572-590).
ggttggtggatgctgaaaa

SEQ ID NO: 98365 - DNA, 19 bp, Homo sapiens
  siRNA target sequence for PSMC3 (NM_002804.3,699-717).
gcccacggagcaatacagt

SEQ ID NO: 98366 - DNA, 19 bp, Homo sapiens
  siRNA target sequence for PSMC3 (NM_002804.3,804-822).
ggggatccaacctccaaaa

SEQ ID NO: 98367 - DNA, 19 bp, Homo sapiens
  siRNA target sequence for PSMC3 (NM_002804.3,875-893).
cctgtgccgcacagactaa

SEQ ID NO: 98368 - DNA, 19 bp, Homo sapiens
  siRNA target sequence for PSMC3 (NM_002804.3,988-1006).
gagaaagcgccctctatca

SEQ ID NO: 98369 - DNA, 19 bp, Homo sapiens
  siRNA target sequence for PSMC3 (NM_002804.3,1120-1138).
cagcccaacacccaagtta

SEQ ID NO: 98370 - DNA, 19 bp, Homo sapiens
  siRNA target sequence for PSMC3 (NM_002804.3,1128-1146).
cacccaagttaaggtaatt

SEQ ID NO: 98371 - DNA, 19 bp, Homo sapiens
  siRNA target sequence for PSMC3 (NM_002804.3,1131-1149).
ccaagttaaggtaattgca

SEQ ID NO: 98372 - DNA, 19 bp, Homo sapiens
  siRNA target sequence for PSMC3 (NM_002804.3,1141-1159).
gtaattgcagccacaaaca

SEQ ID NO: 98373 - DNA, 19 bp, Homo sapiens
  siRNA target sequence for PSMC3 (NM_002804.3,1199-1217).
gccttgaccgcaagataga

SEQ ID NO: 98374 - DNA, 19 bp, Homo sapiens
  siRNA target sequence for PSMC3 (NM_002804.3,1201-1219).
cttgaccgcaagatagagt

SEQ ID NO: 98375 - DNA, 19 bp, Homo sapiens
  siRNA target sequence for PSMC4 (NM_006503.2,269-287).
gaggtgaagcgaatccaaa

SEQ ID NO: 98376 - DNA, 19 bp, Homo sapiens
  siRNA target sequence for PSMC4 (NM_006503.2,294-312).
cgctggtcatcggacaatt

SEQ ID NO: 98377 - DNA, 19 bp, Homo sapiens
  siRNA target sequence for PSMC4 (NM_006503.2,295-313).
gctggtcatcggacaattt

SEQ ID NO: 98378 - DNA, 19 bp, Homo sapiens
  siRNA target sequence for PSMC4 (NM_006503.2,319-337).
ggctgtggatcagaataca

SEQ ID NO: 98379 - DNA, 19 bp, Homo sapiens
  siRNA target sequence for PSMC4 (NM_006503.2,357-375).
caggctccaactattatgt

SEQ ID NO: 98380 - DNA, 19 bp, Homo sapiens
  siRNA target sequence for PSMC4 (NM_006503.2,594-612).
cgcatttcgagctctacaa

SEQ ID NO: 98381 - DNA, 19 bp, Homo sapiens
  siRNA target sequence for PSMC4 (NM_006503.2,633-651).
cccgaggcgtcctcatgta

SEQ ID NO: 98382 - DNA, 19 bp, Homo sapiens
  siRNA target sequence for PSMC4 (NM_006503.2,634-652).
ccgaggcgtcctcatgtat

SEQ ID NO: 98383 - DNA, 19 bp, Homo sapiens
  siRNA target sequence for PSMC4 (NM_006503.2,842-860).
gccatcgccaccaagagat

SEQ ID NO: 98384 - DNA, 19 bp, Homo sapiens
  siRNA target sequence for PSMC4 (NM_006503.2,843-861).
ccatcgccaccaagagatt

SEQ ID NO: 98385 - DNA, 19 bp, Homo sapiens
  siRNA target sequence for PSMC4 (NM_006503.2,847-865).
cgccaccaagagattcgat

SEQ ID NO: 98386 - DNA, 19 bp, Homo sapiens
  siRNA target sequence for PSMC4 (NM_006503.2,925-943).
ggatggatttgatcagaat

SEQ ID NO: 98387 - DNA, 19 bp, Homo sapiens
  siRNA target sequence for PSMC4 (NM_006503.2,929-947).
ggatttgatcagaatgtca

SEQ ID NO: 98388 - DNA, 19 bp, Homo sapiens
  siRNA target sequence for PSMC4 (NM_006503.2,930-948).
gatttgatcagaatgtcaa

SEQ ID NO: 98389 - DNA, 19 bp, Homo sapiens
  siRNA target sequence for PSMC4 (NM_006503.2,1010-1028).
ggacggctggaccgtaaaa

SEQ ID NO: 98390 - DNA, 19 bp, Homo sapiens
  siRNA target sequence for PSMC4 (NM_006503.2,1011-1029).
gacggctggaccgtaaaat

SEQ ID NO: 98391 - DNA, 19 bp, Homo sapiens
  siRNA target sequence for PSMC4 (NM_006503.2,1014-1032).
ggctggaccgtaaaattga

SEQ ID NO: 98392 - DNA, 19 bp, Homo sapiens
  siRNA target sequence for PSMC4 (NM_006503.2,1015-1033).
gctggaccgtaaaattgaa

SEQ ID NO: 98393 - DNA, 19 bp, Homo sapiens
  siRNA target sequence for PSMC4 (NM_006503.2,1016-1034).
ctggaccgtaaaattgaat

SEQ ID NO: 98394 - DNA, 19 bp, Homo sapiens
  siRNA target sequence for PSMC4 (NM_006503.2,1018-1036).
ggaccgtaaaattgaattt

SEQ ID NO: 98395 - DNA, 19 bp, Homo sapiens
  siRNA target sequence for PSMC4 (NM_006503.2,1021-1039).
ccgtaaaattgaatttcca

SEQ ID NO: 98396 - DNA, 19 bp, Homo sapiens
  siRNA target sequence for PSMC4 (NM_006503.2,1077-1095).
ctatcactagcaagatgaa

SEQ ID NO: 98397 - DNA, 19 bp, Homo sapiens
  siRNA target sequence for PSMC4 (NM_006503.2,1198-1216).
ccgtgaaaaccgctacatt

SEQ ID NO: 98398 - DNA, 19 bp, Homo sapiens
  siRNA target sequence for PSMC4 (NM_006503.2,1267-1285).
cgagcaggagcatgagttt

SEQ ID NO: 98399 - DNA, 19 bp, Homo sapiens
  siRNA target sequence for PSMC5 (NM_002805.4,92-110).
cagcggactccgccaatat

SEQ ID NO: 98400 - DNA, 19 bp, Homo sapiens
  siRNA target sequence for PSMC5 (NM_002805.4,94-112).
gcggactccgccaatatta

SEQ ID NO: 98401 - DNA, 19 bp, Homo sapiens
  siRNA target sequence for PSMC5 (NM_002805.4,95-113).
cggactccgccaatattat

SEQ ID NO: 98402 - DNA, 19 bp, Homo sapiens
  siRNA target sequence for PSMC5 (NM_002805.4,181-199).
cacagaggaacgaactaaa

SEQ ID NO: 98403 - DNA, 19 bp, Homo sapiens
  siRNA target sequence for PSMC5 (NM_002805.4,185-203).
gaggaacgaactaaatgct

SEQ ID NO: 98404 - DNA, 19 bp, Homo sapiens
  siRNA target sequence for PSMC5 (NM_002805.4,253-271).
cctatgtgggggaagtagt

SEQ ID NO: 98405 - DNA, 19 bp, Homo sapiens
  siRNA target sequence for PSMC5 (NM_002805.4,305-323).
ggtacatcctgaaggtaaa

SEQ ID NO: 98406 - DNA, 19 bp, Homo sapiens
  siRNA target sequence for PSMC5 (NM_002805.4,306-324).
gtacatcctgaaggtaaat

SEQ ID NO: 98407 - DNA, 19 bp, Homo sapiens
  siRNA target sequence for PSMC5 (NM_002805.4,327-345).
gttgtagacgtggacaaaa

SEQ ID NO: 98408 - DNA, 19 bp, Homo sapiens
  siRNA target sequence for PSMC5 (NM_002805.4,376-394).
gccgggtggctctaaggaa

SEQ ID NO: 98409 - DNA, 19 bp, Homo sapiens
  siRNA target sequence for PSMC5 (NM_002805.4,377-395).
ccgggtggctctaaggaat

SEQ ID NO: 98410 - DNA, 19 bp, Homo sapiens
  siRNA target sequence for PSMC5 (NM_002805.4,662-680).
ggactgtacctttattcgt

SEQ ID NO: 98411 - DNA, 19 bp, Homo sapiens
  siRNA target sequence for PSMC5 (NM_002805.4,757-775).
gggaacatgctccatctat

SEQ ID NO: 98412 - DNA, 19 bp, Homo sapiens
  siRNA target sequence for PSMC5 (NM_002805.4,911-929).
ggttatcatggctactaat

SEQ ID NO: 98413 - DNA, 19 bp, Homo sapiens
  siRNA target sequence for PSMC5 (NM_002805.4,1014-1032).
cggctggacattttgaaga

SEQ ID NO: 98414 - DNA, 19 bp, Homo sapiens
  siRNA target sequence for PSMC6 (NM_002806.2,90-108).
ggccgtcttaaggagttaa

SEQ ID NO: 98415 - DNA, 19 bp, Homo sapiens
  siRNA target sequence for PSMC6 (NM_002806.2,188-206).
cgtgggtgaagtgcttaaa

SEQ ID NO: 98416 - DNA, 19 bp, Homo sapiens
  siRNA target sequence for PSMC6 (NM_002806.2,192-210).
ggtgaagtgcttaaacagt

SEQ ID NO: 98417 - DNA, 19 bp, Homo sapiens
  siRNA target sequence for PSMC6 (NM_002806.2,200-218).
gcttaaacagttaactgaa

SEQ ID NO: 98418 - DNA, 19 bp, Homo sapiens
  siRNA target sequence for PSMC6 (NM_002806.2,238-256).
ctaccaatggaccaagata

SEQ ID NO: 98419 - DNA, 19 bp, Homo sapiens
  siRNA target sequence for PSMC6 (NM_002806.2,242-260).
caatggaccaagatatgtt

SEQ ID NO: 98420 - DNA, 19 bp, Homo sapiens
  siRNA target sequence for PSMC6 (NM_002806.2,268-286).
gtcgtcgacagcttgacaa

SEQ ID NO: 98421 - DNA, 19 bp, Homo sapiens
  siRNA target sequence for PSMC6 (NM_002806.2,270-288).
cgtcgacagcttgacaaaa

SEQ ID NO: 98422 - DNA, 19 bp, Homo sapiens
  siRNA target sequence for PSMC6 (NM_002806.2,273-291).
cgacagcttgacaaaagta

SEQ ID NO: 98423 - DNA, 19 bp, Homo sapiens
  siRNA target sequence for PSMC6 (NM_002806.2,274-292).
gacagcttgacaaaagtaa

SEQ ID NO: 98424 - DNA, 19 bp, Homo sapiens
  siRNA target sequence for PSMC6 (NM_002806.2,320-338).
ggatatgactacactaact

SEQ ID NO: 98425 - DNA, 19 bp, Homo sapiens
  siRNA target sequence for PSMC6 (NM_002806.2,321-339).
gatatgactacactaacta

SEQ ID NO: 98426 - DNA, 19 bp, Homo sapiens
  siRNA target sequence for PSMC6 (NM_002806.2,366-384).
gatccactggtttataaca

SEQ ID NO: 98427 - DNA, 19 bp, Homo sapiens
  siRNA target sequence for PSMC6 (NM_002806.2,422-440).
gattggagggctatcagaa

SEQ ID NO: 98428 - DNA, 19 bp, Homo sapiens
  siRNA target sequence for PSMC6 (NM_002806.2,438-456).
gaacagatccgggaattaa

SEQ ID NO: 98429 - DNA, 19 bp, Homo sapiens
  siRNA target sequence for PSMC6 (NM_002806.2,464-482).
gatagaattacctcttaca

SEQ ID NO: 98430 - DNA, 19 bp, Homo sapiens
  siRNA target sequence for PSMC6 (NM_002806.2,481-499).
caaacccagagttatttca

SEQ ID NO: 98431 - DNA, 19 bp, Homo sapiens
  siRNA target sequence for PSMC6 (NM_002806.2,500-518).
gcgtgtaggaataatacct

SEQ ID NO: 98432 - DNA, 19 bp, Homo sapiens
  siRNA target sequence for PSMC6 (NM_002806.2,586-604).
gccagctggactgcaattt

SEQ ID NO: 98433 - DNA, 19 bp, Homo sapiens
  siRNA target sequence for PSMC6 (NM_002806.2,596-614).
ctgcaatttcttaaaggtt

SEQ ID NO: 98434 - DNA, 19 bp, Homo sapiens
  siRNA target sequence for PSMC6 (NM_002806.2,605-623).
cttaaaggttgtatctagt

SEQ ID NO: 98435 - DNA, 19 bp, Homo sapiens
  siRNA target sequence for PSMC6 (NM_002806.2,622-640).
gttctattgtagacaagta

SEQ ID NO: 98436 - DNA, 19 bp, Homo sapiens
  siRNA target sequence for PSMC6 (NM_002806.2,625-643).
ctattgtagacaagtacat

SEQ ID NO: 98437 - DNA, 19 bp, Homo sapiens
  siRNA target sequence for PSMC6 (NM_002806.2,646-664).
gtgaaagtgctcgtttgat

SEQ ID NO: 98438 - DNA, 19 bp, Homo sapiens
  siRNA target sequence for PSMC6 (NM_002806.2,648-666).
gaaagtgctcgtttgatca

SEQ ID NO: 98439 - DNA, 19 bp, Homo sapiens
  siRNA target sequence for PSMC6 (NM_002806.2,654-672).
gctcgtttgatcagagaaa

SEQ ID NO: 98440 - DNA, 19 bp, Homo sapiens
  siRNA target sequence for PSMC6 (NM_002806.2,658-676).
gtttgatcagagaaatgtt

SEQ ID NO: 98441 - DNA, 19 bp, Homo sapiens
  siRNA target sequence for PSMC6 (NM_002806.2,693-711).
catcaaccatgcatcattt

SEQ ID NO: 98442 - DNA, 19 bp, Homo sapiens
  siRNA target sequence for PSMC6 (NM_002806.2,736-754).
gtggtcgtcggttttctga

SEQ ID NO: 98443 - DNA, 19 bp, Homo sapiens
  siRNA target sequence for PSMC6 (NM_002806.2,787-805).
cgttaatggagttactgaa

SEQ ID NO: 98444 - DNA, 19 bp, Homo sapiens
  siRNA target sequence for PTK2 (NM_005607.3,201-219).
cctagcatctagcaaaata

SEQ ID NO: 98445 - DNA, 19 bp, Homo sapiens
  siRNA target sequence for PTK2 (NM_005607.3,234-252).
ccttgaccccaacttgaat

SEQ ID NO: 98446 - DNA, 19 bp, Homo sapiens
  siRNA target sequence for PTK2 (NM_005607.3,238-256).
gaccccaacttgaatcaca

SEQ ID NO: 98447 - DNA, 19 bp, Homo sapiens
  siRNA target sequence for PTK2 (NM_005607.3,257-275).
caccaaattcgagtactaa

SEQ ID NO: 98448 - DNA, 19 bp, Homo sapiens
  siRNA target sequence for PTK2 (NM_005607.3,313-331).
gcaatggagcgagtattaa

SEQ ID NO: 98449 - DNA, 19 bp, Homo sapiens
  siRNA target sequence for PTK2 (NM_005607.3,314-332).
caatggagcgagtattaaa

SEQ ID NO: 98450 - DNA, 19 bp, Homo sapiens
  siRNA target sequence for PTK2 (NM_005607.3,390-408).
gcatggagatgctactgat

SEQ ID NO: 98451 - DNA, 19 bp, Homo sapiens
  siRNA target sequence for PTK2 (NM_005607.3,416-434).
gcatcattcagaagatagt

SEQ ID NO: 98452 - DNA, 19 bp, Homo sapiens
  siRNA target sequence for PTK2 (NM_005607.3,429-447).
gatagtggacagtcacaaa

SEQ ID NO: 98453 - DNA, 19 bp, Homo sapiens
  siRNA target sequence for PTK2 (NM_005607.3,566-584).
caccagaggagtggaaata

SEQ ID NO: 98454 - DNA, 19 bp, Homo sapiens
  siRNA target sequence for PTK2 (NM_005607.3,586-604).
gaattgagaattcgttatt

SEQ ID NO: 98455 - DNA, 19 bp, Homo sapiens
  siRNA target sequence for PTK2 (NM_005607.3,599-617).
gttatttgccaaaaggatt

SEQ ID NO: 98456 - DNA, 19 bp, Homo sapiens
  siRNA target sequence for PTK2 (NM_005607.3,667-685).
caggtgaagagcgattata

SEQ ID NO: 98457 - DNA, 19 bp, Homo sapiens
  siRNA target sequence for PTK2 (NM_005607.3,677-695).
gcgattatatgttagagat

SEQ ID NO: 98458 - DNA, 19 bp, Homo sapiens
  siRNA target sequence for PTK2 (NM_005607.3,678-696).
cgattatatgttagagata

SEQ ID NO: 98459 - DNA, 19 bp, Homo sapiens
  siRNA target sequence for PTK2 (NM_005607.3,742-760).
gaaatacggcgatcatact

SEQ ID NO: 98460 - DNA, 19 bp, Homo sapiens
  siRNA target sequence for PTK2 (NM_005607.3,781-799).
ctagaaaagaagtctaact

SEQ ID NO: 98461 - DNA, 19 bp, Homo sapiens
  siRNA target sequence for PTK2 (NM_005607.3,789-807).
gaagtctaactatgaagta

SEQ ID NO: 98462 - DNA, 19 bp, Homo sapiens
  siRNA target sequence for PTK2 (NM_005607.3,792-810).
gtctaactatgaagtatta

SEQ ID NO: 98463 - DNA, 19 bp, Homo sapiens
  siRNA target sequence for PTK2 (NM_005607.3,794-812).
ctaactatgaagtattaga

SEQ ID NO: 98464 - DNA, 19 bp, Homo sapiens
  siRNA target sequence for PTK2 (NM_005607.3,820-838).
gttggtttaaagcgatttt

SEQ ID NO: 98465 - DNA, 19 bp, Homo sapiens
  siRNA target sequence for PTK2 (NM_005607.3,831-849).
gcgattttttcctaagagt

SEQ ID NO: 98466 - DNA, 19 bp, Homo sapiens
  siRNA target sequence for PTK2 (NM_005607.3,860-878).
ctgtcaaggccaaaacact

SEQ ID NO: 98467 - DNA, 19 bp, Homo sapiens
  siRNA target sequence for PTK2 (NM_005607.3,862-880).
gtcaaggccaaaacactaa

SEQ ID NO: 98468 - DNA, 19 bp, Homo sapiens
  siRNA target sequence for PTK2 (NM_005607.3,888-906).
gatccaacaaacatttaga

SEQ ID NO: 98469 - DNA, 19 bp, Homo sapiens
  siRNA target sequence for PTK2 (NM_005607.3,891-909).
ccaacaaacatttagacaa

SEQ ID NO: 98470 - DNA, 19 bp, Homo sapiens
  siRNA target sequence for PTK2 (NM_005607.3,907-925).
caatttgccaaccttaata

SEQ ID NO: 98471 - DNA, 19 bp, Homo sapiens
  siRNA target sequence for PTK2 (NM_005607.3,960-978).
gtctccagtctacagattt

SEQ ID NO: 98472 - DNA, 19 bp, Homo sapiens
  siRNA target sequence for PTK2 (NM_005607.3,974-992).
gatttgataaggaatgctt

SEQ ID NO: 98473 - DNA, 19 bp, Homo sapiens
  siRNA target sequence for PTK2 (NM_005607.3,979-997).
gataaggaatgcttcaagt

SEQ ID NO: 98474 - DNA, 19 bp, Homo sapiens
  siRNA target sequence for PTK2 (NM_005607.3,1003-1021).
cttggttcaagctggatta

SEQ ID NO: 98475 - DNA, 19 bp, Homo sapiens
  siRNA target sequence for PTK2 (NM_005607.3,1006-1024).
ggttcaagctggattattt

SEQ ID NO: 98476 - DNA, 19 bp, Homo sapiens
  siRNA target sequence for PTK2 (NM_005607.3,1035-1053).
ggcaatcggcccagaagaa

SEQ ID NO: 98477 - DNA, 19 bp, Homo sapiens
  siRNA target sequence for PTK2 (NM_005607.3,1159-1177).
ggaatgctacaactaaaaa

SEQ ID NO: 98478 - DNA, 19 bp, Homo sapiens
  siRNA target sequence for PTK2 (NM_005607.3,1164-1182).
gctacaactaaaaatagca

SEQ ID NO: 98479 - DNA, 19 bp, Homo sapiens
  siRNA target sequence for PTK2 (NM_005607.3,1209-1227).
ggcaccatccctaaccatt

SEQ ID NO: 98480 - DNA, 19 bp, Homo sapiens
  siRNA target sequence for PTK2 (NM_005607.3,1219-1237).
ctaaccattgcggagaata

SEQ ID NO: 98481 - DNA, 19 bp, Homo sapiens
  siRNA target sequence for PTK2 (NM_005607.3,1276-1294).
ggaacctcgcagtcattta

SEQ ID NO: 98482 - DNA, 19 bp, Homo sapiens
  siRNA target sequence for PTK2 (NM_005607.3,1277-1295).
gaacctcgcagtcatttat

SEQ ID NO: 98483 - DNA, 19 bp, Homo sapiens
  siRNA target sequence for PTK2 (NM_005607.3,1280-1298).
cctcgcagtcatttatcat

SEQ ID NO: 98484 - DNA, 19 bp, Homo sapiens
  siRNA target sequence for PTK2 (NM_005607.3,1347-1365).
ggccaacagcgaaaagcaa

SEQ ID NO: 98485 - DNA, 19 bp, Homo sapiens
  siRNA target sequence for PTK2 (NM_005607.3,1381-1399).
gccgtctctgtgtcagaaa

SEQ ID NO: 98486 - DNA, 19 bp, Homo sapiens
  siRNA target sequence for PTK2 (NM_005607.3,1451-1469).
caaccagggattatgagat

SEQ ID NO: 98487 - DNA, 19 bp, Homo sapiens
  siRNA target sequence for PTK2 (NM_005607.3,1454-1472).
ccagggattatgagattca

SEQ ID NO: 98488 - DNA, 19 bp, Homo sapiens
  siRNA target sequence for PTK2 (NM_005607.3,1455-1473).
cagggattatgagattcaa

SEQ ID NO: 98489 - DNA, 19 bp, Homo sapiens
  siRNA target sequence for PTK2 (NM_005607.3,1458-1476).
ggattatgagattcaaaga

SEQ ID NO: 98490 - DNA, 19 bp, Homo sapiens
  siRNA target sequence for PTK2 (NM_005607.3,1511-1529).
gccaatttggagatgtaca

SEQ ID NO: 98491 - DNA, 19 bp, Homo sapiens
  siRNA target sequence for PTK2 (NM_005607.3,1512-1530).
ccaatttggagatgtacat

SEQ ID NO: 98492 - DNA, 19 bp, Homo sapiens
  siRNA target sequence for PTK2 (NM_005607.3,1525-1543).
gtacatcaaggcatttata

SEQ ID NO: 98493 - DNA, 19 bp, Homo sapiens
  siRNA target sequence for PTK2 (NM_005607.3,1562-1580).
ctttggcggttgcaattaa

SEQ ID NO: 98494 - DNA, 19 bp, Homo sapiens
  siRNA target sequence for PTK2 (NM_005607.3,1566-1584).
ggcggttgcaattaaaaca

SEQ ID NO: 98495 - DNA, 19 bp, Homo sapiens
  siRNA target sequence for PTK2 (NM_005607.3,1567-1585).
gcggttgcaattaaaacat

SEQ ID NO: 98496 - DNA, 19 bp, Homo sapiens
  siRNA target sequence for PTK2 (NM_005607.3,1607-1625).
gcgtgagagagaaatttct

SEQ ID NO: 98497 - DNA, 19 bp, Homo sapiens
  siRNA target sequence for PTK2 (NM_005607.3,1608-1626).
cgtgagagagaaatttctt

SEQ ID NO: 98498 - DNA, 19 bp, Homo sapiens
  siRNA target sequence for PTK2 (NM_005607.3,1650-1668).
gtttgaccatcctcatatt

SEQ ID NO: 98499 - DNA, 19 bp, Homo sapiens
  siRNA target sequence for PTK2 (NM_005607.3,1654-1672).
gaccatcctcatattgtga

SEQ ID NO: 98500 - DNA, 19 bp, Homo sapiens
  siRNA target sequence for PTK2 (NM_005607.3,1693-1711).
gagaatcctgtctggataa

SEQ ID NO: 98501 - DNA, 19 bp, Homo sapiens
  siRNA target sequence for PTK2 (NM_005607.3,1732-1750).
ggagagctgaggtcatttt

SEQ ID NO: 98502 - DNA, 19 bp, Homo sapiens
  siRNA target sequence for PTK2 (NM_005607.3,1769-1787).
gtttggatctagcatcttt

SEQ ID NO: 98503 - DNA, 19 bp, Homo sapiens
  siRNA target sequence for PTK2 (NM_005607.3,1811-1829).
gtacagctcttgcatatct

SEQ ID NO: 98504 - DNA, 19 bp, Homo sapiens
  siRNA target sequence for PTK2 (NM_005607.3,1916-1934).
gattatcccgatatatgga

SEQ ID NO: 98505 - DNA, 19 bp, Homo sapiens
  siRNA target sequence for PTK2 (NM_005607.3,1933-1951).
gaagatagtacttactaca

SEQ ID NO: 98506 - DNA, 19 bp, Homo sapiens
  siRNA target sequence for PTK2 (NM_005607.3,1982-2000).
ggatggctccagagtcaat

SEQ ID NO: 98507 - DNA, 19 bp, Homo sapiens
  siRNA target sequence for PTK2 (NM_005607.3,1988-2006).
ctccagagtcaatcaattt

SEQ ID NO: 98508 - DNA, 19 bp, Homo sapiens
  siRNA target sequence for PTK2 (NM_005607.3,2110-2128).
gtaatcggtcgaattgaaa

SEQ ID NO: 98509 - DNA, 19 bp, Homo sapiens
  siRNA target sequence for PTK2 (NM_005607.3,2218-2236).
cccaggtttactgaactta

SEQ ID NO: 98510 - DNA, 19 bp, Homo sapiens
  siRNA target sequence for PTK2 (NM_005607.3,2219-2237).
ccaggtttactgaacttaa

SEQ ID NO: 98511 - DNA, 19 bp, Homo sapiens
  siRNA target sequence for PTK2 (NM_005607.3,2223-2241).
gtttactgaacttaaagct

SEQ ID NO: 98512 - DNA, 19 bp, Homo sapiens
  siRNA target sequence for PTK2 (NM_005607.3,2331-2349).
ctccggagggtctgatgaa

SEQ ID NO: 98513 - DNA, 19 bp, Homo sapiens
  siRNA target sequence for PTK2 (NM_005607.3,2387-2405).
cgaggtccagcgaaggatt

SEQ ID NO: 98514 - DNA, 19 bp, Homo sapiens
  siRNA target sequence for PTK2 (NM_005607.3,2390-2408).
ggtccagcgaaggatttta

SEQ ID NO: 98515 - DNA, 19 bp, Homo sapiens
  siRNA target sequence for PTK2 (NM_005607.3,2391-2409).
gtccagcgaaggattttat

SEQ ID NO: 98516 - DNA, 19 bp, Homo sapiens
  siRNA target sequence for PTK2 (NM_005607.3,2421-2439).
gcacatggtacaaaccaat

SEQ ID NO: 98517 - DNA, 19 bp, Homo sapiens
  siRNA target sequence for PTK2 (NM_005607.3,2503-2521).
ccaggtcaggcatctcttt

SEQ ID NO: 98518 - DNA, 19 bp, Homo sapiens
  siRNA target sequence for PTK2 (NM_005607.3,2518-2536).
cttttggaccaaacagatt

SEQ ID NO: 98519 - DNA, 19 bp, Homo sapiens
  siRNA target sequence for PTK2 (NM_005607.3,2581-2599).
gtggaggactctacagtat

SEQ ID NO: 98520 - DNA, 19 bp, Homo sapiens
  siRNA target sequence for PTK2 (NM_005607.3,2609-2627).
gagggattgggcaagtgtt

SEQ ID NO: 98521 - DNA, 19 bp, Homo sapiens
  siRNA target sequence for PTK2 (NM_005607.3,2770-2788).
cttcagggtccgattggaa

SEQ ID NO: 98522 - DNA, 19 bp, Homo sapiens
  siRNA target sequence for PTK2 (NM_005607.3,2775-2793).
gggtccgattggaaaccaa

SEQ ID NO: 98523 - DNA, 19 bp, Homo sapiens
  siRNA target sequence for PTK2 (NM_005607.3,2967-2985).
cctggaccggtcgaatgat

SEQ ID NO: 98524 - DNA, 19 bp, Homo sapiens
  siRNA target sequence for PTK2 (NM_005607.3,2968-2986).
ctggaccggtcgaatgata

SEQ ID NO: 98525 - DNA, 19 bp, Homo sapiens
  siRNA target sequence for PTK2 (NM_005607.3,3053-3071).
ccccaccagaggagtatgt

SEQ ID NO: 98526 - DNA, 19 bp, Homo sapiens
  siRNA target sequence for PTK2 (NM_005607.3,3152-3170).
gcacccaccgagagattga

SEQ ID NO: 98527 - DNA, 19 bp, Homo sapiens
  siRNA target sequence for PTK2 (NM_005607.3,3155-3173).
cccaccgagagattgagat

SEQ ID NO: 98528 - DNA, 19 bp, Homo sapiens
  siRNA target sequence for PTK2 (NM_005607.3,3301-3319).
gctgtggatgccaaaaact

SEQ ID NO: 98529 - DNA, 19 bp, Homo sapiens
  siRNA target sequence for PTK2B (NM_004103.3,783-801).
ctatagcaacagcttcaat

SEQ ID NO: 98530 - DNA, 19 bp, Homo sapiens
  siRNA target sequence for PTK2B (NM_004103.3,1028-1046).
ggaggtatgaccttcaaat

SEQ ID NO: 98531 - DNA, 19 bp, Homo sapiens
  siRNA target sequence for PTK2B (NM_004103.3,1049-1067).
gctacttgccagaagactt

SEQ ID NO: 98532 - DNA, 19 bp, Homo sapiens
  siRNA target sequence for PTK2B (NM_004103.3,1092-1110).
gaccacgctgctctatttt

SEQ ID NO: 98533 - DNA, 19 bp, Homo sapiens
  siRNA target sequence for PTK2B (NM_004103.3,1097-1115).
cgctgctctatttttacca

SEQ ID NO: 98534 - DNA, 19 bp, Homo sapiens
  siRNA target sequence for PTK2B (NM_004103.3,1378-1396).
gaggagtgcgtcatgaagt

SEQ ID NO: 98535 - DNA, 19 bp, Homo sapiens
  siRNA target sequence for PTK2B (NM_004103.3,1381-1399).
gagtgcgtcatgaagttct

SEQ ID NO: 98536 - DNA, 19 bp, Homo sapiens
  siRNA target sequence for PTK2B (NM_004103.3,1385-1403).
gcgtcatgaagttcttcaa

SEQ ID NO: 98537 - DNA, 19 bp, Homo sapiens
  siRNA target sequence for PTK2B (NM_004103.3,1439-1457).
cctaccgctgtgaactcat

SEQ ID NO: 98538 - DNA, 19 bp, Homo sapiens
  siRNA target sequence for PTK2B (NM_004103.3,1825-1843).
gagagctgcagcatagagt

SEQ ID NO: 98539 - DNA, 19 bp, Homo sapiens
  siRNA target sequence for PTK2B (NM_004103.3,1972-1990).
ggtgtctacacaaatcaca

SEQ ID NO: 98540 - DNA, 19 bp, Homo sapiens
  siRNA target sequence for PTK2B (NM_004103.3,1973-1991).
gtgtctacacaaatcacaa

SEQ ID NO: 98541 - DNA, 19 bp, Homo sapiens
  siRNA target sequence for PTK2B (NM_004103.3,2066-2084).
gcgaggcagtgatcatgaa

SEQ ID NO: 98542 - DNA, 19 bp, Homo sapiens
  siRNA target sequence for PTK2B (NM_004103.3,2112-2130).
gctgatcggcatcattgaa

SEQ ID NO: 98543 - DNA, 19 bp, Homo sapiens
  siRNA target sequence for PTK2B (NM_004103.3,2144-2162).
ggatcatcatggaattgta

SEQ ID NO: 98544 - DNA, 19 bp, Homo sapiens
  siRNA target sequence for PTK2B (NM_004103.3,2145-2163).
gatcatcatggaattgtat

SEQ ID NO: 98545 - DNA, 19 bp, Homo sapiens
  siRNA target sequence for PTK2B (NM_004103.3,2188-2206).
ctggagcggaacaagaact

SEQ ID NO: 98546 - DNA, 19 bp, Homo sapiens
  siRNA target sequence for PTK2B (NM_004103.3,2230-2248).
ctgtactcactgcagatat

SEQ ID NO: 98547 - DNA, 19 bp, Homo sapiens
  siRNA target sequence for PTK2B (NM_004103.3,2235-2253).
ctcactgcagatatgcaaa

SEQ ID NO: 98548 - DNA, 19 bp, Homo sapiens
  siRNA target sequence for PTK2B (NM_004103.3,2400-2418).
gactcgtctccccatcaaa

SEQ ID NO: 98549 - DNA, 19 bp, Homo sapiens
  siRNA target sequence for PTK2B (NM_004103.3,2405-2423).
gtctccccatcaaatggat

SEQ ID NO: 98550 - DNA, 19 bp, Homo sapiens
  siRNA target sequence for PTK2B (NM_004103.3,2595-2613).
ctgtccaccggtcctttat

SEQ ID NO: 98551 - DNA, 19 bp, Homo sapiens
  siRNA target sequence for PTK2B (NM_004103.3,2683-2701).
ctcagtgacgtttatcaga

SEQ ID NO: 98552 - DNA, 19 bp, Homo sapiens
  siRNA target sequence for PTK2B (NM_004103.3,2741-2759).
gctaccgaacccccaaaat

SEQ ID NO: 98553 - DNA, 19 bp, Homo sapiens
  siRNA target sequence for PTK2B (NM_004103.3,2797-2815).
cccagccgacctaagtaca

SEQ ID NO: 98554 - DNA, 19 bp, Homo sapiens
  siRNA target sequence for PTK2B (NM_004103.3,2816-2834).
gaccccctccgcaaaccaa

SEQ ID NO: 98555 - DNA, 19 bp, Homo sapiens
  siRNA target sequence for PTK2B (NM_004103.3,2950-2968).
ctccaccggcacaatgtct

SEQ ID NO: 98556 - DNA, 19 bp, Homo sapiens
  siRNA target sequence for PTK2B (NM_004103.3,3140-3158).
ccatggtttatatgaatga

SEQ ID NO: 98557 - DNA, 19 bp, Homo sapiens
  siRNA target sequence for PTK2B (NM_004103.3,3283-3301).
ctggtgtacctcaatgtca

SEQ ID NO: 98558 - DNA, 19 bp, Homo sapiens
  siRNA target sequence for PTK6 (NM_005975.2,219-237).
gctatgtgccccacaacta

SEQ ID NO: 98559 - DNA, 19 bp, Homo sapiens
  siRNA target sequence for PTK6 (NM_005975.2,262-280).
gtcggaaccgtggttcttt

SEQ ID NO: 98560 - DNA, 19 bp, Homo sapiens
  siRNA target sequence for PTK6 (NM_005975.2,407-425).
gctgtgcggcactacaaga

SEQ ID NO: 98561 - DNA, 19 bp, Homo sapiens
  siRNA target sequence for PTK6 (NM_005975.2,408-426).
ctgtgcggcactacaagat

SEQ ID NO: 98562 - DNA, 19 bp, Homo sapiens
  siRNA target sequence for PTK6 (NM_005975.2,678-696).
gggtccaggtggccattaa

SEQ ID NO: 98563 - DNA, 19 bp, Homo sapiens
  siRNA target sequence for PTK6 (NM_005975.2,686-704).
gtggccattaaggtgattt

SEQ ID NO: 98564 - DNA, 19 bp, Homo sapiens
  siRNA target sequence for PTK6 (NM_005975.2,688-706).
ggccattaaggtgatttct

SEQ ID NO: 98565 - DNA, 19 bp, Homo sapiens
  siRNA target sequence for PTK6 (NM_005975.2,947-965).
ctggagtcgcagaattaca

SEQ ID NO: 98566 - DNA, 19 bp, Homo sapiens
  siRNA target sequence for PTK6 (NM_005975.2,1034-1052).
gggttagccaggcttatca

SEQ ID NO: 98567 - DNA, 19 bp, Homo sapiens
  siRNA target sequence for PTK6 (NM_005975.2,1035-1053).
ggttagccaggcttatcaa

SEQ ID NO: 98568 - DNA, 19 bp, Homo sapiens
  siRNA target sequence for PTK6 (NM_005975.2,1115-1133).
ctctcccgaggccattact

SEQ ID NO: 98569 - DNA, 19 bp, Homo sapiens
  siRNA target sequence for PTK6 (NM_005975.2,1124-1142).
ggccattactccaccaaat

SEQ ID NO: 98570 - DNA, 19 bp, Homo sapiens
  siRNA target sequence for PTK7 (NM_002821.3,500-518).
gtgtggctcgggatgatgt

SEQ ID NO: 98571 - DNA, 19 bp, Homo sapiens
  siRNA target sequence for PTK7 (NM_002821.3,546-564).
cgcctccttcaacatcaaa

SEQ ID NO: 98572 - DNA, 19 bp, Homo sapiens
  siRNA target sequence for PTK7 (NM_002821.3,638-656).
cacttcgttgccacattga

SEQ ID NO: 98573 - DNA, 19 bp, Homo sapiens
  siRNA target sequence for PTK7 (NM_002821.3,664-682).
cctcggcccacctaccaat

SEQ ID NO: 98574 - DNA, 19 bp, Homo sapiens
  siRNA target sequence for PTK7 (NM_002821.3,1500-1518).
gacccaggccacaccaaaa

SEQ ID NO: 98575 - DNA, 19 bp, Homo sapiens
  siRNA target sequence for PTK7 (NM_002821.3,1565-1583).
cacggttcgaggtcttcaa

SEQ ID NO: 98576 - DNA, 19 bp, Homo sapiens
  siRNA target sequence for PTK7 (NM_002821.3,1567-1585).
cggttcgaggtcttcaaga

SEQ ID NO: 98577 - DNA, 19 bp, Homo sapiens
  siRNA target sequence for PTK7 (NM_002821.3,1569-1587).
gttcgaggtcttcaagaat

SEQ ID NO: 98578 - DNA, 19 bp, Homo sapiens
  siRNA target sequence for PTK7 (NM_002821.3,1588-1606).
gggaccttgcgcatcaaca

SEQ ID NO: 98579 - DNA, 19 bp, Homo sapiens
  siRNA target sequence for PTK7 (NM_002821.3,1625-1643).
ggacatggtaccgttgtat

SEQ ID NO: 98580 - DNA, 19 bp, Homo sapiens
  siRNA target sequence for PTK7 (NM_002821.3,1732-1750).
cagtgcatggagtttgaca

SEQ ID NO: 98581 - DNA, 19 bp, Homo sapiens
  siRNA target sequence for PTK7 (NM_002821.3,1783-1801).
cgagagaagcccactatta

SEQ ID NO: 98582 - DNA, 19 bp, Homo sapiens
  siRNA target sequence for PTK7 (NM_002821.3,1784-1802).
gagagaagcccactattaa

SEQ ID NO: 98583 - DNA, 19 bp, Homo sapiens
  siRNA target sequence for PTK7 (NM_002821.3,1786-1804).
gagaagcccactattaagt

SEQ ID NO: 98584 - DNA, 19 bp, Homo sapiens
  siRNA target sequence for PTK7 (NM_002821.3,1851-1869).
cgctgggaccctgcatttt

SEQ ID NO: 98585 - DNA, 19 bp, Homo sapiens
  siRNA target sequence for PTK7 (NM_002821.3,2053-2071).
cccaagccgctgattcagt

SEQ ID NO: 98586 - DNA, 19 bp, Homo sapiens
  siRNA target sequence for PTK7 (NM_002821.3,2545-2563).
cacagcacaagtgataaga

SEQ ID NO: 98587 - DNA, 19 bp, Homo sapiens
  siRNA target sequence for PTK7 (NM_002821.3,3014-3032).
gtgcccagagacaagtgaa

SEQ ID NO: 98588 - DNA, 19 bp, Homo sapiens
  siRNA target sequence for PTOV1 (NM_017432.2,850-868).
cagtccagatcgtcaacaa

SEQ ID NO: 98589 - DNA, 19 bp, Homo sapiens
  siRNA target sequence for PTOV1 (NM_017432.2,1150-1168).
gctgcgtgcacttttccta

SEQ ID NO: 98590 - DNA, 19 bp, Homo sapiens
  siRNA target sequence for PTOV1 (NM_017432.2,1154-1172).
cgtgcacttttcctacaaa

SEQ ID NO: 98591 - DNA, 19 bp, Homo sapiens
  siRNA target sequence for PTOV1 (NM_017432.2,1180-1198).
gtgagatccgcgtgcttat

SEQ ID NO: 98592 - DNA, 19 bp, Homo sapiens
  siRNA target sequence for PXK (NM_017771.2,189-207).
gcagtcccacacggaatat

SEQ ID NO: 98593 - DNA, 19 bp, Homo sapiens
  siRNA target sequence for PXK (NM_017771.2,190-208).
cagtcccacacggaatata

SEQ ID NO: 98594 - DNA, 19 bp, Homo sapiens
  siRNA target sequence for PXK (NM_017771.2,192-210).
gtcccacacggaatatatt

SEQ ID NO: 98595 - DNA, 19 bp, Homo sapiens
  siRNA target sequence for PXK (NM_017771.2,194-212).
cccacacggaatatattat

SEQ ID NO: 98596 - DNA, 19 bp, Homo sapiens
  siRNA target sequence for PXK (NM_017771.2,195-213).
ccacacggaatatattatt

SEQ ID NO: 98597 - DNA, 19 bp, Homo sapiens
  siRNA target sequence for PXK (NM_017771.2,243-261).
cagctggcagattgttaga

SEQ ID NO: 98598 - DNA, 19 bp, Homo sapiens
  siRNA target sequence for PXK (NM_017771.2,283-301).
cttaacaacagcttacaga

SEQ ID NO: 98599 - DNA, 19 bp, Homo sapiens
  siRNA target sequence for PXK (NM_017771.2,300-318).
gattgcaggcctaagtcta

SEQ ID NO: 98600 - DNA, 19 bp, Homo sapiens
  siRNA target sequence for PXK (NM_017771.2,397-415).
ctcaacgtgatcacaacaa

SEQ ID NO: 98601 - DNA, 19 bp, Homo sapiens
  siRNA target sequence for PXK (NM_017771.2,399-417).
caacgtgatcacaacaaat

SEQ ID NO: 98602 - DNA, 19 bp, Homo sapiens
  siRNA target sequence for PXK (NM_017771.2,402-420).
cgtgatcacaacaaatcat

SEQ ID NO: 98603 - DNA, 19 bp, Homo sapiens
  siRNA target sequence for PXK (NM_017771.2,403-421).
gtgatcacaacaaatcata

SEQ ID NO: 98604 - DNA, 19 bp, Homo sapiens
  siRNA target sequence for PXK (NM_017771.2,438-456).
gctggttaagaagttttta

SEQ ID NO: 98605 - DNA, 19 bp, Homo sapiens
  siRNA target sequence for PXK (NM_017771.2,441-459).
ggttaagaagtttttagat

SEQ ID NO: 98606 - DNA, 19 bp, Homo sapiens
  siRNA target sequence for PXK (NM_017771.2,468-486).
ctattccgcaaactatact

SEQ ID NO: 98607 - DNA, 19 bp, Homo sapiens
  siRNA target sequence for PXK (NM_017771.2,474-492).
cgcaaactatactgagatt

SEQ ID NO: 98608 - DNA, 19 bp, Homo sapiens
  siRNA target sequence for PXK (NM_017771.2,510-528).
catgttcttccgatcagaa

SEQ ID NO: 98609 - DNA, 19 bp, Homo sapiens
  siRNA target sequence for PXK (NM_017771.2,578-596).
ggaagaaatatttcttgat

SEQ ID NO: 98610 - DNA, 19 bp, Homo sapiens
  siRNA target sequence for PXK (NM_017771.2,614-632).
caaaggaacggctagtgtt

SEQ ID NO: 98611 - DNA, 19 bp, Homo sapiens
  siRNA target sequence for PXK (NM_017771.2,619-637).
gaacggctagtgttaagct

SEQ ID NO: 98612 - DNA, 19 bp, Homo sapiens
  siRNA target sequence for PXK (NM_017771.2,646-664).
cttggcccagacaagtatt

SEQ ID NO: 98613 - DNA, 19 bp, Homo sapiens
  siRNA target sequence for PXK (NM_017771.2,710-728).
gtttgcacccttacatcta

SEQ ID NO: 98614 - DNA, 19 bp, Homo sapiens
  siRNA target sequence for PXK (NM_017771.2,723-741).
catctatcgggttaccttt

SEQ ID NO: 98615 - DNA, 19 bp, Homo sapiens
  siRNA target sequence for PXK (NM_017771.2,754-772).
gaatcctcagcgttgctaa

SEQ ID NO: 98616 - DNA, 19 bp, Homo sapiens
  siRNA target sequence for PXK (NM_017771.2,761-779).
cagcgttgctaattaggat

SEQ ID NO: 98617 - DNA, 19 bp, Homo sapiens
  siRNA target sequence for PXK (NM_017771.2,810-828).
gatctacaaggcaaaacca

SEQ ID NO: 98618 - DNA, 19 bp, Homo sapiens
  siRNA target sequence for PXK (NM_017771.2,813-831).
ctacaaggcaaaaccaaaa

SEQ ID NO: 98619 - DNA, 19 bp, Homo sapiens
  siRNA target sequence for PXK (NM_017771.2,852-870).
ctgcaaccctaagaagatt

SEQ ID NO: 98620 - DNA, 19 bp, Homo sapiens
  siRNA target sequence for PXK (NM_017771.2,899-917).
catatggacggcaaatatt

SEQ ID NO: 98621 - DNA, 19 bp, Homo sapiens
  siRNA target sequence for PXK (NM_017771.2,921-939).
ggtactgaagtttcttcat

SEQ ID NO: 98622 - DNA, 19 bp, Homo sapiens
  siRNA target sequence for PXK (NM_017771.2,964-982).
cttcacgcctccaatgtga

SEQ ID NO: 98623 - DNA, 19 bp, Homo sapiens
  siRNA target sequence for PXK (NM_017771.2,1006-1024).
ctgctggaccttgagaatt

SEQ ID NO: 98624 - DNA, 19 bp, Homo sapiens
  siRNA target sequence for PXK (NM_017771.2,1043-1061).
ccttctaccgatcttattt

SEQ ID NO: 98625 - DNA, 19 bp, Homo sapiens
  siRNA target sequence for PXK (NM_017771.2,1044-1062).
cttctaccgatcttatttt

SEQ ID NO: 98626 - DNA, 19 bp, Homo sapiens
  siRNA target sequence for PXK (NM_017771.2,1047-1065).
ctaccgatcttatttttca

SEQ ID NO: 98627 - DNA, 19 bp, Homo sapiens
  siRNA target sequence for PXK (NM_017771.2,1050-1068).
ccgatcttatttttcacaa

SEQ ID NO: 98628 - DNA, 19 bp, Homo sapiens
  siRNA target sequence for PXK (NM_017771.2,1051-1069).
cgatcttatttttcacaat

SEQ ID NO: 98629 - DNA, 19 bp, Homo sapiens
  siRNA target sequence for PXK (NM_017771.2,1125-1143).
gtatgaaatgacttatgga

SEQ ID NO: 98630 - DNA, 19 bp, Homo sapiens
  siRNA target sequence for PXK (NM_017771.2,1267-1285).
ctcttacagatgccattat

SEQ ID NO: 98631 - DNA, 19 bp, Homo sapiens
  siRNA target sequence for PXK (NM_017771.2,1279-1297).
ccattattcagcgatgttt

SEQ ID NO: 98632 - DNA, 19 bp, Homo sapiens
  siRNA target sequence for PXK (NM_017771.2,1280-1298).
cattattcagcgatgtttt

SEQ ID NO: 98633 - DNA, 19 bp, Homo sapiens
  siRNA target sequence for PXK (NM_017771.2,1489-1507).
cgaaagaagtcaaaacgat

SEQ ID NO: 98634 - DNA, 19 bp, Homo sapiens
  siRNA target sequence for PXK (NM_017771.2,1504-1522).
cgatctgctcttgaaaata

SEQ ID NO: 98635 - DNA, 19 bp, Homo sapiens
  siRNA target sequence for PXK (NM_017771.2,1528-1546).
gagcattcagcgaagtaca

SEQ ID NO: 98636 - DNA, 19 bp, Homo sapiens
  siRNA target sequence for PXK (NM_017771.2,1716-1734).
ctcgtctcaggctgtgaat

SEQ ID NO: 98637 - DNA, 19 bp, Homo sapiens
  siRNA target sequence for QARS (NM_005051.1,137-155).
gggttccaccattgacaaa

SEQ ID NO: 98638 - DNA, 19 bp, Homo sapiens
  siRNA target sequence for QARS (NM_005051.1,156-174).
gctaccgggatcctgttat

SEQ ID NO: 98639 - DNA, 19 bp, Homo sapiens
  siRNA target sequence for QARS (NM_005051.1,157-175).
ctaccgggatcctgttata

SEQ ID NO: 98640 - DNA, 19 bp, Homo sapiens
  siRNA target sequence for QARS (NM_005051.1,207-225).
cgtctctccttccttgtaa

SEQ ID NO: 98641 - DNA, 19 bp, Homo sapiens
  siRNA target sequence for QARS (NM_005051.1,268-286).
gcgctgcccttgagtatgt

SEQ ID NO: 98642 - DNA, 19 bp, Homo sapiens
  siRNA target sequence for QARS (NM_005051.1,339-357).
ggcgtgggtgtcattgtga

SEQ ID NO: 98643 - DNA, 19 bp, Homo sapiens
  siRNA target sequence for QARS (NM_005051.1,379-397).
ctgtggaggctgctattaa

SEQ ID NO: 98644 - DNA, 19 bp, Homo sapiens
  siRNA target sequence for QARS (NM_005051.1,416-434).
cctggtggaacgttaccat

SEQ ID NO: 98645 - DNA, 19 bp, Homo sapiens
  siRNA target sequence for QARS (NM_005051.1,417-435).
ctggtggaacgttaccatt

SEQ ID NO: 98646 - DNA, 19 bp, Homo sapiens
  siRNA target sequence for QARS (NM_005051.1,420-438).
gtggaacgttaccatttca

SEQ ID NO: 98647 - DNA, 19 bp, Homo sapiens
  siRNA target sequence for QARS (NM_005051.1,423-441).
gaacgttaccatttcaaca

SEQ ID NO: 98648 - DNA, 19 bp, Homo sapiens
  siRNA target sequence for QARS (NM_005051.1,481-499).
gggcagatggcaaaatgat

SEQ ID NO: 98649 - DNA, 19 bp, Homo sapiens
  siRNA target sequence for QARS (NM_005051.1,586-604).
ctcggctagaagaaacaga

SEQ ID NO: 98650 - DNA, 19 bp, Homo sapiens
  siRNA target sequence for QARS (NM_005051.1,740-758).
cactccacacaccatgaat

SEQ ID NO: 98651 - DNA, 19 bp, Homo sapiens
  siRNA target sequence for QARS (NM_005051.1,745-763).
cacacaccatgaatctact

SEQ ID NO: 98652 - DNA, 19 bp, Homo sapiens
  siRNA target sequence for QARS (NM_005051.1,767-785).
gcagcacctggagattact

SEQ ID NO: 98653 - DNA, 19 bp, Homo sapiens
  siRNA target sequence for QARS (NM_005051.1,810-828).
ccgccagaacccaatggaa

SEQ ID NO: 98654 - DNA, 19 bp, Homo sapiens
  siRNA target sequence for QARS (NM_005051.1,811-829).
cgccagaacccaatggaat

SEQ ID NO: 98655 - DNA, 19 bp, Homo sapiens
  siRNA target sequence for QARS (NM_005051.1,820-838).
ccaatggaatcctgcatat

SEQ ID NO: 98656 - DNA, 19 bp, Homo sapiens
  siRNA target sequence for QARS (NM_005051.1,988-1006).
caccttacaaagtcacata

SEQ ID NO: 98657 - DNA, 19 bp, Homo sapiens
  siRNA target sequence for QARS (NM_005051.1,1001-1019).
cacatatgcgtctgactat

SEQ ID NO: 98658 - DNA, 19 bp, Homo sapiens
  siRNA target sequence for QARS (NM_005051.1,1016-1034).
ctattttgaccagctatat

SEQ ID NO: 98659 - DNA, 19 bp, Homo sapiens
  siRNA target sequence for QARS (NM_005051.1,1094-1112).
ggagctcaaaggccataat

SEQ ID NO: 98660 - DNA, 19 bp, Homo sapiens
  siRNA target sequence for QARS (NM_005051.1,1095-1113).
gagctcaaaggccataata

SEQ ID NO: 98661 - DNA, 19 bp, Homo sapiens
  siRNA target sequence for QARS (NM_005051.1,1175-1193).
gcgcaagggcaagttttca

SEQ ID NO: 98662 - DNA, 19 bp, Homo sapiens
  siRNA target sequence for QARS (NM_005051.1,1254-1272).
gcctatcgagtcaagtata

SEQ ID NO: 98663 - DNA, 19 bp, Homo sapiens
  siRNA target sequence for QARS (NM_005051.1,1256-1274).
ctatcgagtcaagtataca

SEQ ID NO: 98664 - DNA, 19 bp, Homo sapiens
  siRNA target sequence for QARS (NM_005051.1,1292-1310).
ggacaaatggtgcatctat

SEQ ID NO: 98665 - DNA, 19 bp, Homo sapiens
  siRNA target sequence for QARS (NM_005051.1,1392-1410).
cgacgctcttcctacttct

SEQ ID NO: 98666 - DNA, 19 bp, Homo sapiens
  siRNA target sequence for QARS (NM_005051.1,1539-1557).
gatgacccacggctcttta

SEQ ID NO: 98667 - DNA, 19 bp, Homo sapiens
  siRNA target sequence for QARS (NM_005051.1,1643-1661).
cacaatggagccacatctt

SEQ ID NO: 98668 - DNA, 19 bp, Homo sapiens
  siRNA target sequence for QARS (NM_005051.1,1649-1667).
ggagccacatcttctagaa

SEQ ID NO: 98669 - DNA, 19 bp, Homo sapiens
  siRNA target sequence for QARS (NM_005051.1,1677-1695).
cgtgatgtgctgaatgaca

SEQ ID NO: 98670 - DNA, 19 bp, Homo sapiens
  siRNA target sequence for QARS (NM_005051.1,1831-1849).
cacccattgtcttcattga

SEQ ID NO: 98671 - DNA, 19 bp, Homo sapiens
  siRNA target sequence for QARS (NM_005051.1,1833-1851).
cccattgtcttcattgaga

SEQ ID NO: 98672 - DNA, 19 bp, Homo sapiens
  siRNA target sequence for QARS (NM_005051.1,2044-2062).
gggtgtcacagcctttgat

SEQ ID NO: 98673 - DNA, 19 bp, Homo sapiens
  siRNA target sequence for QARS (NM_005051.1,2065-2083).
gtgaggttcgcctctatga

SEQ ID NO: 98674 - DNA, 19 bp, Homo sapiens
  siRNA target sequence for QARS (NM_005051.1,2074-2092).
gcctctatgagcgactatt

SEQ ID NO: 98675 - DNA, 19 bp, Homo sapiens
  siRNA target sequence for QARS (NM_005051.1,2086-2104).
gactattccagcacaagaa

SEQ ID NO: 98676 - DNA, 19 bp, Homo sapiens
  siRNA target sequence for QARS (NM_005051.1,2121-2139).
gaggtgcctggtggatttt

SEQ ID NO: 98677 - DNA, 19 bp, Homo sapiens
  siRNA target sequence for QARS (NM_005051.1,2168-2186).
cgtggtggatgcagcatta

SEQ ID NO: 98678 - DNA, 19 bp, Homo sapiens
  siRNA target sequence for QARS (NM_005051.1,2209-2227).
caaaacccttcgacaagtt

SEQ ID NO: 98679 - DNA, 19 bp, Homo sapiens
  siRNA target sequence for QARS (NM_005051.1,2231-2249).
gtttgagcgtcttggatat

SEQ ID NO: 98680 - DNA, 19 bp, Homo sapiens
  siRNA target sequence for QARS (NM_005051.1,2235-2253).
gagcgtcttggatatttct

SEQ ID NO: 98681 - DNA, 19 bp, Homo sapiens
  siRNA target sequence for RAD50 (NM_005732.2,417-435).
gggcgtgcggagttttgga

SEQ ID NO: 98682 - DNA, 19 bp, Homo sapiens
  siRNA target sequence for RAD50 (NM_005732.2,419-437).
gcgtgcggagttttggaat

SEQ ID NO: 98683 - DNA, 19 bp, Homo sapiens
  siRNA target sequence for RAD50 (NM_005732.2,448-466).
gataagcaaattatcactt

SEQ ID NO: 98684 - DNA, 19 bp, Homo sapiens
  siRNA target sequence for RAD50 (NM_005732.2,468-486).
cttcagcccccttacaatt

SEQ ID NO: 98685 - DNA, 19 bp, Homo sapiens
  siRNA target sequence for RAD50 (NM_005732.2,473-491).
gcccccttacaattttggt

SEQ ID NO: 98686 - DNA, 19 bp, Homo sapiens
  siRNA target sequence for RAD50 (NM_005732.2,474-492).
cccccttacaattttggtt

SEQ ID NO: 98687 - DNA, 19 bp, Homo sapiens
  siRNA target sequence for RAD50 (NM_005732.2,513-531).
gacgaccatcattgaatgt

SEQ ID NO: 98688 - DNA, 19 bp, Homo sapiens
  siRNA target sequence for RAD50 (NM_005732.2,515-533).
cgaccatcattgaatgtct

SEQ ID NO: 98689 - DNA, 19 bp, Homo sapiens
  siRNA target sequence for RAD50 (NM_005732.2,518-536).
ccatcattgaatgtctaaa

SEQ ID NO: 98690 - DNA, 19 bp, Homo sapiens
  siRNA target sequence for RAD50 (NM_005732.2,519-537).
catcattgaatgtctaaaa

SEQ ID NO: 98691 - DNA, 19 bp, Homo sapiens
  siRNA target sequence for RAD50 (NM_005732.2,600-618).
ggttgctcaagaaacagat

SEQ ID NO: 98692 - DNA, 19 bp, Homo sapiens
  siRNA target sequence for RAD50 (NM_005732.2,627-645).
ccagattcgtctgcaattt

SEQ ID NO: 98693 - DNA, 19 bp, Homo sapiens
  siRNA target sequence for RAD50 (NM_005732.2,630-648).
gattcgtctgcaatttcgt

SEQ ID NO: 98694 - DNA, 19 bp, Homo sapiens
  siRNA target sequence for RAD50 (NM_005732.2,639-657).
gcaatttcgtgatgtcaat

SEQ ID NO: 98695 - DNA, 19 bp, Homo sapiens
  siRNA target sequence for RAD50 (NM_005732.2,654-672).
caatggagaacttatagct

SEQ ID NO: 98696 - DNA, 19 bp, Homo sapiens
  siRNA target sequence for RAD50 (NM_005732.2,777-795).
ctctaagtgtgcagaaatt

SEQ ID NO: 98697 - DNA, 19 bp, Homo sapiens
  siRNA target sequence for RAD50 (NM_005732.2,779-797).
ctaagtgtgcagaaattga

SEQ ID NO: 98698 - DNA, 19 bp, Homo sapiens
  siRNA target sequence for RAD50 (NM_005732.2,790-808).
gaaattgaccgagaaatga

SEQ ID NO: 98699 - DNA, 19 bp, Homo sapiens
  siRNA target sequence for RAD50 (NM_005732.2,796-814).
gaccgagaaatgatcagtt

SEQ ID NO: 98700 - DNA, 19 bp, Homo sapiens
  siRNA target sequence for RAD50 (NM_005732.2,827-845).
ccaaggctgtgctaaataa

SEQ ID NO: 98701 - DNA, 19 bp, Homo sapiens
  siRNA target sequence for RAD50 (NM_005732.2,828-846).
caaggctgtgctaaataat

SEQ ID NO: 98702 - DNA, 19 bp, Homo sapiens
  siRNA target sequence for RAD50 (NM_005732.2,833-851).
ctgtgctaaataatgtcat

SEQ ID NO: 98703 - DNA, 19 bp, Homo sapiens
  siRNA target sequence for RAD50 (NM_005732.2,859-877).
catcaagaagattctaatt

SEQ ID NO: 98704 - DNA, 19 bp, Homo sapiens
  siRNA target sequence for RAD50 (NM_005732.2,878-896).
ggcctttaagtgaaggaaa

SEQ ID NO: 98705 - DNA, 19 bp, Homo sapiens
  siRNA target sequence for RAD50 (NM_005732.2,906-924).
gcaaaagtttgatgagatt

SEQ ID NO: 98706 - DNA, 19 bp, Homo sapiens
  siRNA target sequence for RAD50 (NM_005732.2,921-939).
gattttttcagcaacaaga

SEQ ID NO: 98707 - DNA, 19 bp, Homo sapiens
  siRNA target sequence for RAD50 (NM_005732.2,929-947).
cagcaacaagatacattaa

SEQ ID NO: 98708 - DNA, 19 bp, Homo sapiens
  siRNA target sequence for RAD50 (NM_005732.2,942-960).
cattaaagccttagaaaca

SEQ ID NO: 98709 - DNA, 19 bp, Homo sapiens
  siRNA target sequence for RAD50 (NM_005732.2,978-996).
gacacaaggtcagaaagta

SEQ ID NO: 98710 - DNA, 19 bp, Homo sapiens
  siRNA target sequence for RAD50 (NM_005732.2,1029-1047).
gcaatataaggaaaaagct

SEQ ID NO: 98711 - DNA, 19 bp, Homo sapiens
  siRNA target sequence for RAD50 (NM_005732.2,1030-1048).
caatataaggaaaaagctt

SEQ ID NO: 98712 - DNA, 19 bp, Homo sapiens
  siRNA target sequence for RAD50 (NM_005732.2,1049-1067).
gtgagattcgtgatcagat

SEQ ID NO: 98713 - DNA, 19 bp, Homo sapiens
  siRNA target sequence for RAD50 (NM_005732.2,1051-1069).
gagattcgtgatcagatta

SEQ ID NO: 98714 - DNA, 19 bp, Homo sapiens
  siRNA target sequence for RAD50 (NM_005732.2,1053-1071).
gattcgtgatcagattaca

SEQ ID NO: 98715 - DNA, 19 bp, Homo sapiens
  siRNA target sequence for RAD50 (NM_005732.2,1057-1075).
cgtgatcagattacaagta

SEQ ID NO: 98716 - DNA, 19 bp, Homo sapiens
  siRNA target sequence for RAD50 (NM_005732.2,1058-1076).
gtgatcagattacaagtaa

SEQ ID NO: 98717 - DNA, 19 bp, Homo sapiens
  siRNA target sequence for RAD50 (NM_005732.2,1101-1119).
ggaaattgtcaaatcctat

SEQ ID NO: 98718 - DNA, 19 bp, Homo sapiens
  siRNA target sequence for RAD50 (NM_005732.2,1115-1133).
cctatgagaatgaacttga

SEQ ID NO: 98719 - DNA, 19 bp, Homo sapiens
  siRNA target sequence for RAD50 (NM_005732.2,1126-1144).
gaacttgatccattgaaga

SEQ ID NO: 98720 - DNA, 19 bp, Homo sapiens
  siRNA target sequence for RAD50 (NM_005732.2,1143-1161).
gaatcgtctaaaagaaatt

SEQ ID NO: 98721 - DNA, 19 bp, Homo sapiens
  siRNA target sequence for RAD50 (NM_005732.2,1208-1226).
ccttggatagccgaaagaa

SEQ ID NO: 98722 - DNA, 19 bp, Homo sapiens
  siRNA target sequence for RAD50 (NM_005732.2,1282-1300).
gggactgatgagcaactaa

SEQ ID NO: 98723 - DNA, 19 bp, Homo sapiens
  siRNA target sequence for RAD50 (NM_005732.2,1283-1301).
ggactgatgagcaactaaa

SEQ ID NO: 98724 - DNA, 19 bp, Homo sapiens
  siRNA target sequence for RAD50 (NM_005732.2,1284-1302).
gactgatgagcaactaaat

SEQ ID NO: 98725 - DNA, 19 bp, Homo sapiens
  siRNA target sequence for RAD50 (NM_005732.2,1293-1311).
gcaactaaatgacttatat

SEQ ID NO: 98726 - DNA, 19 bp, Homo sapiens
  siRNA target sequence for RAD50 (NM_005732.2,1297-1315).
ctaaatgacttatatcaca

SEQ ID NO: 98727 - DNA, 19 bp, Homo sapiens
  siRNA target sequence for RAD50 (NM_005732.2,1314-1332).
caatcaccagagaacagta

SEQ ID NO: 98728 - DNA, 19 bp, Homo sapiens
  siRNA target sequence for RAD50 (NM_005732.2,1474-1492).
catatccgagctagagatt

SEQ ID NO: 98729 - DNA, 19 bp, Homo sapiens
  siRNA target sequence for RAD50 (NM_005732.2,1479-1497).
ccgagctagagattcatta

SEQ ID NO: 98730 - DNA, 19 bp, Homo sapiens
  siRNA target sequence for RAD50 (NM_005732.2,1480-1498).
cgagctagagattcattaa

SEQ ID NO: 98731 - DNA, 19 bp, Homo sapiens
  siRNA target sequence for RAD50 (NM_005732.2,1511-1529).
caacacagctagaattgga

SEQ ID NO: 98732 - DNA, 19 bp, Homo sapiens
  siRNA target sequence for RAD50 (NM_005732.2,1540-1558).
cgtggaccattcagtgaaa

SEQ ID NO: 98733 - DNA, 19 bp, Homo sapiens
  siRNA target sequence for RAD50 (NM_005732.2,1544-1562).
gaccattcagtgaaagaca

SEQ ID NO: 98734 - DNA, 19 bp, Homo sapiens
  siRNA target sequence for RAD50 (NM_005732.2,1680-1698).
gataagagataagaaaact

SEQ ID NO: 98735 - DNA, 19 bp, Homo sapiens
  siRNA target sequence for RAD50 (NM_005732.2,1705-1723).
ggaagaataattgagttaa

SEQ ID NO: 98736 - DNA, 19 bp, Homo sapiens
  siRNA target sequence for RAD50 (NM_005732.2,1755-1773).
gctgaaaaatgtgaagtat

SEQ ID NO: 98737 - DNA, 19 bp, Homo sapiens
  siRNA target sequence for RAD50 (NM_005732.2,1821-1839).
ccaggagctcataaaagct

SEQ ID NO: 98738 - DNA, 19 bp, Homo sapiens
  siRNA target sequence for RAD50 (NM_005732.2,1837-1855).
gctgaacgtgagttaagca

SEQ ID NO: 98739 - DNA, 19 bp, Homo sapiens
  siRNA target sequence for RAD50 (NM_005732.2,1838-1856).
ctgaacgtgagttaagcaa

SEQ ID NO: 98740 - DNA, 19 bp, Homo sapiens
  siRNA target sequence for RAD50 (NM_005732.2,1869-1887).
cagcaatgtagaaacctta

SEQ ID NO: 98741 - DNA, 19 bp, Homo sapiens
  siRNA target sequence for RAD50 (NM_005732.2,1932-1950).
caggaccctgcgtaaactt

SEQ ID NO: 98742 - DNA, 19 bp, Homo sapiens
  siRNA target sequence for RAD50 (NM_005732.2,1934-1952).
ggaccctgcgtaaacttga

SEQ ID NO: 98743 - DNA, 19 bp, Homo sapiens
  siRNA target sequence for RAD50 (NM_005732.2,1959-1977).
gatggagcagttaaaccat

SEQ ID NO: 98744 - DNA, 19 bp, Homo sapiens
  siRNA target sequence for RAD50 (NM_005732.2,1965-1983).
gcagttaaaccatcataca

SEQ ID NO: 98745 - DNA, 19 bp, Homo sapiens
  siRNA target sequence for RAD50 (NM_005732.2,1985-2003).
caacacgtacccaaatgga

SEQ ID NO: 98746 - DNA, 19 bp, Homo sapiens
  siRNA target sequence for RAD50 (NM_005732.2,2004-2022).
gatgctgaccaaagacaaa

SEQ ID NO: 98747 - DNA, 19 bp, Homo sapiens
  siRNA target sequence for RAD50 (NM_005732.2,2057-2075).
ctaggcacagtgatgaatt

SEQ ID NO: 98748 - DNA, 19 bp, Homo sapiens
  siRNA target sequence for RAD50 (NM_005732.2,2062-2080).
cacagtgatgaattaacct

SEQ ID NO: 98749 - DNA, 19 bp, Homo sapiens
  siRNA target sequence for RAD50 (NM_005732.2,2078-2096).
cctcactgttgggatattt

SEQ ID NO: 98750 - DNA, 19 bp, Homo sapiens
  siRNA target sequence for RAD50 (NM_005732.2,2113-2131).
cttgaagactggctacata

SEQ ID NO: 98751 - DNA, 19 bp, Homo sapiens
  siRNA target sequence for RAD50 (NM_005732.2,2119-2137).
gactggctacatagtaaat

SEQ ID NO: 98752 - DNA, 19 bp, Homo sapiens
  siRNA target sequence for RAD50 (NM_005732.2,2121-2139).
ctggctacatagtaaatca

SEQ ID NO: 98753 - DNA, 19 bp, Homo sapiens
  siRNA target sequence for RAD50 (NM_005732.2,2159-2177).
gggacagacttgccaaatt

SEQ ID NO: 98754 - DNA, 19 bp, Homo sapiens
  siRNA target sequence for RAD50 (NM_005732.2,2165-2183).
gacttgccaaattgaacaa

SEQ ID NO: 98755 - DNA, 19 bp, Homo sapiens
  siRNA target sequence for RAD50 (NM_005732.2,2191-2209).
gcttcatctgagcagaata

SEQ ID NO: 98756 - DNA, 19 bp, Homo sapiens
  siRNA target sequence for RAD50 (NM_005732.2,2192-2210).
cttcatctgagcagaataa

SEQ ID NO: 98757 - DNA, 19 bp, Homo sapiens
  siRNA target sequence for RAD50 (NM_005732.2,2247-2265).
gcagttgtccagttacgaa

SEQ ID NO: 98758 - DNA, 19 bp, Homo sapiens
  siRNA target sequence for RAD50 (NM_005732.2,2268-2286).
caagctgtttgatgtttgt

SEQ ID NO: 98759 - DNA, 19 bp, Homo sapiens
  siRNA target sequence for RAD50 (NM_005732.2,2285-2303).
gtggtagccaggattttga

SEQ ID NO: 98760 - DNA, 19 bp, Homo sapiens
  siRNA target sequence for RAD50 (NM_005732.2,2287-2305).
ggtagccaggattttgaaa

SEQ ID NO: 98761 - DNA, 19 bp, Homo sapiens
  siRNA target sequence for RAD50 (NM_005732.2,2368-2386).
ggagccacagcagtttact

SEQ ID NO: 98762 - DNA, 19 bp, Homo sapiens
  siRNA target sequence for RAD50 (NM_005732.2,2423-2441).
catgttgccccgtttgtca

SEQ ID NO: 98763 - DNA, 19 bp, Homo sapiens
  siRNA target sequence for RAD50 (NM_005732.2,2481-2499).
cagtgatttgcagtctaaa

SEQ ID NO: 98764 - DNA, 19 bp, Homo sapiens
  siRNA target sequence for RAD50 (NM_005732.2,2502-2520).
gcgacttgctccagataaa

SEQ ID NO: 98765 - DNA, 19 bp, Homo sapiens
  siRNA target sequence for RAD50 (NM_005732.2,2587-2605).
cccatgaggcaaagcataa

SEQ ID NO: 98766 - DNA, 19 bp, Homo sapiens
  siRNA target sequence for RAD50 (NM_005732.2,2589-2607).
catgaggcaaagcataatt

SEQ ID NO: 98767 - DNA, 19 bp, Homo sapiens
  siRNA target sequence for RAD50 (NM_005732.2,2596-2614).
caaagcataattgatttga

SEQ ID NO: 98768 - DNA, 19 bp, Homo sapiens
  siRNA target sequence for RAD50 (NM_005732.2,2665-2683).
gacatacagcgcctaaaga

SEQ ID NO: 98769 - DNA, 19 bp, Homo sapiens
  siRNA target sequence for RAD50 (NM_005732.2,2675-2693).
gcctaaagaacgacataga

SEQ ID NO: 98770 - DNA, 19 bp, Homo sapiens
  siRNA target sequence for RAD50 (NM_005732.2,2676-2694).
cctaaagaacgacatagaa

SEQ ID NO: 98771 - DNA, 19 bp, Homo sapiens
  siRNA target sequence for RAD50 (NM_005732.2,2750-2768).
gcctgacagatgttacaat

SEQ ID NO: 98772 - DNA, 19 bp, Homo sapiens
  siRNA target sequence for RAD50 (NM_005732.2,2751-2769).
cctgacagatgttacaatt

SEQ ID NO: 98773 - DNA, 19 bp, Homo sapiens
  siRNA target sequence for RAD50 (NM_005732.2,2752-2770).
ctgacagatgttacaatta

SEQ ID NO: 98774 - DNA, 19 bp, Homo sapiens
  siRNA target sequence for RAD50 (NM_005732.2,2825-2843).
cagctaagctacaaggaat

SEQ ID NO: 98775 - DNA, 19 bp, Homo sapiens
  siRNA target sequence for RAD50 (NM_005732.2,2828-2846).
ctaagctacaaggaataga

SEQ ID NO: 98776 - DNA, 19 bp, Homo sapiens
  siRNA target sequence for RAD50 (NM_005732.2,2896-2914).
cacaagttagacacagttt

SEQ ID NO: 98777 - DNA, 19 bp, Homo sapiens
  siRNA target sequence for RAD50 (NM_005732.2,2898-2916).
caagttagacacagtttct

SEQ ID NO: 98778 - DNA, 19 bp, Homo sapiens
  siRNA target sequence for RAD50 (NM_005732.2,2901-2919).
gttagacacagtttctagt

SEQ ID NO: 98779 - DNA, 19 bp, Homo sapiens
  siRNA target sequence for RAD50 (NM_005732.2,2907-2925).
cacagtttctagtaagatt

SEQ ID NO: 98780 - DNA, 19 bp, Homo sapiens
  siRNA target sequence for RAD50 (NM_005732.2,2909-2927).
cagtttctagtaagattga

SEQ ID NO: 98781 - DNA, 19 bp, Homo sapiens
  siRNA target sequence for RAD50 (NM_005732.2,2926-2944).
gaattgaatcgtaagctta

SEQ ID NO: 98782 - DNA, 19 bp, Homo sapiens
  siRNA target sequence for RAD50 (NM_005732.2,2962-2980).
cagattcaacatctaaaaa

SEQ ID NO: 98783 - DNA, 19 bp, Homo sapiens
  siRNA target sequence for RAD50 (NM_005732.2,2981-2999).
gtacaacaaatgagctaaa

SEQ ID NO: 98784 - DNA, 19 bp, Homo sapiens
  siRNA target sequence for RAD50 (NM_005732.2,2994-3012).
gctaaaatctgagaaactt

SEQ ID NO: 98785 - DNA, 19 bp, Homo sapiens
  siRNA target sequence for RAD50 (NM_005732.2,3076-3094).
gaagttcagtctttgtaca

SEQ ID NO: 98786 - DNA, 19 bp, Homo sapiens
  siRNA target sequence for RAD50 (NM_005732.2,3118-3136).
caggtaagccctttggaaa

SEQ ID NO: 98787 - DNA, 19 bp, Homo sapiens
  siRNA target sequence for RAD50 (NM_005732.2,3210-3228).
ggataaactgaatgatatt

SEQ ID NO: 98788 - DNA, 19 bp, Homo sapiens
  siRNA target sequence for RAD50 (NM_005732.2,3211-3229).
gataaactgaatgatatta

SEQ ID NO: 98789 - DNA, 19 bp, Homo sapiens
  siRNA target sequence for RAD50 (NM_005732.2,3250-3268).
catggctatatgaaagaca

SEQ ID NO: 98790 - DNA, 19 bp, Homo sapiens
  siRNA target sequence for RAD50 (NM_005732.2,3254-3272).
gctatatgaaagacattga

SEQ ID NO: 98791 - DNA, 19 bp, Homo sapiens
  siRNA target sequence for RAD50 (NM_005732.2,3289-3307).
gggaaagacgactataaga

SEQ ID NO: 98792 - DNA, 19 bp, Homo sapiens
  siRNA target sequence for RAD50 (NM_005732.2,3290-3308).
ggaaagacgactataagaa

SEQ ID NO: 98793 - DNA, 19 bp, Homo sapiens
  siRNA target sequence for RAD50 (NM_005732.2,3350-3368).
gtgaatgcgagaaacacaa

SEQ ID NO: 98794 - DNA, 19 bp, Homo sapiens
  siRNA target sequence for RAD50 (NM_005732.2,3390-3408).
gagactcatgagacaagat

SEQ ID NO: 98795 - DNA, 19 bp, Homo sapiens
  siRNA target sequence for RAD50 (NM_005732.2,3392-3410).
gactcatgagacaagatat

SEQ ID NO: 98796 - DNA, 19 bp, Homo sapiens
  siRNA target sequence for RAD50 (NM_005732.2,3399-3417).
gagacaagatattgataca

SEQ ID NO: 98797 - DNA, 19 bp, Homo sapiens
  siRNA target sequence for RAD50 (NM_005732.2,3430-3448).
gaaaggtggctacaagata

SEQ ID NO: 98798 - DNA, 19 bp, Homo sapiens
  siRNA target sequence for RAD50 (NM_005732.2,3434-3452).
ggtggctacaagataacct

SEQ ID NO: 98799 - DNA, 19 bp, Homo sapiens
  siRNA target sequence for RAD50 (NM_005732.2,3435-3453).
gtggctacaagataacctt

SEQ ID NO: 98800 - DNA, 19 bp, Homo sapiens
  siRNA target sequence for RAD50 (NM_005732.2,3445-3463).
gataaccttactttaagaa

SEQ ID NO: 98801 - DNA, 19 bp, Homo sapiens
  siRNA target sequence for RAD50 (NM_005732.2,3534-3552).
ggttttgcaaatgaaaagt

SEQ ID NO: 98802 - DNA, 19 bp, Homo sapiens
  siRNA target sequence for RAD50 (NM_005732.2,3561-3579).
gaagttggaagagaacata

SEQ ID NO: 98803 - DNA, 19 bp, Homo sapiens
  siRNA target sequence for RAD50 (NM_005732.2,3606-3624).
ggcattagggcgacagaaa

SEQ ID NO: 98804 - DNA, 19 bp, Homo sapiens
  siRNA target sequence for RAD50 (NM_005732.2,3614-3632).
ggcgacagaaaggttatga

SEQ ID NO: 98805 - DNA, 19 bp, Homo sapiens
  siRNA target sequence for RAD50 (NM_005732.2,3615-3633).
gcgacagaaaggttatgaa

SEQ ID NO: 98806 - DNA, 19 bp, Homo sapiens
  siRNA target sequence for RAD50 (NM_005732.2,3680-3698).
gggatgctgaggaaaagta

SEQ ID NO: 98807 - DNA, 19 bp, Homo sapiens
  siRNA target sequence for RAD50 (NM_005732.2,3765-3783).
gactcttgaccaagcaata

SEQ ID NO: 98808 - DNA, 19 bp, Homo sapiens
  siRNA target sequence for RAD50 (NM_005732.2,3767-3785).
ctcttgaccaagcaataat

SEQ ID NO: 98809 - DNA, 19 bp, Homo sapiens
  siRNA target sequence for RAD50 (NM_005732.2,3769-3787).
cttgaccaagcaataatga

SEQ ID NO: 98810 - DNA, 19 bp, Homo sapiens
  siRNA target sequence for RAD50 (NM_005732.2,3834-3852).
cctgtggcgaagtacctat

SEQ ID NO: 98811 - DNA, 19 bp, Homo sapiens
  siRNA target sequence for RAD50 (NM_005732.2,3853-3871).
cgtggacaagatattgaat

SEQ ID NO: 98812 - DNA, 19 bp, Homo sapiens
  siRNA target sequence for RAD50 (NM_005732.2,3854-3872).
gtggacaagatattgaata

SEQ ID NO: 98813 - DNA, 19 bp, Homo sapiens
  siRNA target sequence for RAD50 (NM_005732.2,3856-3874).
ggacaagatattgaataca

SEQ ID NO: 98814 - DNA, 19 bp, Homo sapiens
  siRNA target sequence for RAD50 (NM_005732.2,3883-3901).
cggtctgatgccgatgaaa

SEQ ID NO: 98815 - DNA, 19 bp, Homo sapiens
  siRNA target sequence for RAD50 (NM_005732.2,3885-3903).
gtctgatgccgatgaaaat

SEQ ID NO: 98816 - DNA, 19 bp, Homo sapiens
  siRNA target sequence for RAD50 (NM_005732.2,3887-3905).
ctgatgccgatgaaaatgt

SEQ ID NO: 98817 - DNA, 19 bp, Homo sapiens
  siRNA target sequence for RAD50 (NM_005732.2,3889-3907).
gatgccgatgaaaatgtat

SEQ ID NO: 98818 - DNA, 19 bp, Homo sapiens
  siRNA target sequence for RAD50 (NM_005732.2,3914-3932).
ctgataaaaggcggaatta

SEQ ID NO: 98819 - DNA, 19 bp, Homo sapiens
  siRNA target sequence for RAD50 (NM_005732.2,3916-3934).
gataaaaggcggaattata

SEQ ID NO: 98820 - DNA, 19 bp, Homo sapiens
  siRNA target sequence for RAD50 (NM_005732.2,3989-4007).
gcagtgctggacaaaaggt

SEQ ID NO: 98821 - DNA, 19 bp, Homo sapiens
  siRNA target sequence for RAD50 (NM_005732.2,4077-4095).
ggatgagccaacaacaaat

SEQ ID NO: 98822 - DNA, 19 bp, Homo sapiens
  siRNA target sequence for RAD50 (NM_005732.2,4099-4117).
gaccgagaaaacattgaat

SEQ ID NO: 98823 - DNA, 19 bp, Homo sapiens
  siRNA target sequence for RAD50 (NM_005732.2,4101-4119).
ccgagaaaacattgaatct

SEQ ID NO: 98824 - DNA, 19 bp, Homo sapiens
  siRNA target sequence for RAD50 (NM_005732.2,4124-4142).
cacatgctctggttgagat

SEQ ID NO: 98825 - DNA, 19 bp, Homo sapiens
  siRNA target sequence for RAD50 (NM_005732.2,4266-4284).
cgatcagtgctcagagatt

SEQ ID NO: 98826 - DNA, 19 bp, Homo sapiens
  siRNA target sequence for RAD50 (NM_005732.2,4304-4322).
ccctgggattcaatgttca

SEQ ID NO: 98827 - DNA, 19 bp, Homo sapiens
  siRNA target sequence for RAD50 (NM_005732.2,4305-4323).
cctgggattcaatgttcat

SEQ ID NO: 98828 - DNA, 19 bp, Homo sapiens
  siRNA target sequence for RAD50 (NM_005732.2,4306-4324).
ctgggattcaatgttcatt

SEQ ID NO: 98829 - DNA, 19 bp, Homo sapiens
  siRNA target sequence for RAF1 (NM_002880.1,156-174).
gacgatcagcaatggtttt

SEQ ID NO: 98830 - DNA, 19 bp, Homo sapiens
  siRNA target sequence for RAF1 (NM_002880.1,180-198).
caaagatgccgtgtttgat

SEQ ID NO: 98831 - DNA, 19 bp, Homo sapiens
  siRNA target sequence for RAF1 (NM_002880.1,210-228).
catctctcctacaatagtt

SEQ ID NO: 98832 - DNA, 19 bp, Homo sapiens
  siRNA target sequence for RAF1 (NM_002880.1,293-311).
gcaacactatccgtgtttt

SEQ ID NO: 98833 - DNA, 19 bp, Homo sapiens
  siRNA target sequence for RAF1 (NM_002880.1,428-446).
gacttctccacgaacacaa

SEQ ID NO: 98834 - DNA, 19 bp, Homo sapiens
  siRNA target sequence for RAF1 (NM_002880.1,457-475).
gcacgcttagattggaata

SEQ ID NO: 98835 - DNA, 19 bp, Homo sapiens
  siRNA target sequence for RAF1 (NM_002880.1,486-504).
gtctttgattggagaagaa

SEQ ID NO: 98836 - DNA, 19 bp, Homo sapiens
  siRNA target sequence for RAF1 (NM_002880.1,603-621).
cctgctcaatggatttcga

SEQ ID NO: 98837 - DNA, 19 bp, Homo sapiens
  siRNA target sequence for RAF1 (NM_002880.1,604-622).
ctgctcaatggatttcgat

SEQ ID NO: 98838 - DNA, 19 bp, Homo sapiens
  siRNA target sequence for RAF1 (NM_002880.1,627-645).
gacttgtggctacaaattt

SEQ ID NO: 98839 - DNA, 19 bp, Homo sapiens
  siRNA target sequence for RAF1 (NM_002880.1,651-669).
gcactgtagcaccaaagta

SEQ ID NO: 98840 - DNA, 19 bp, Homo sapiens
  siRNA target sequence for RAF1 (NM_002880.1,659-677).
gcaccaaagtacctactat

SEQ ID NO: 98841 - DNA, 19 bp, Homo sapiens
  siRNA target sequence for RAF1 (NM_002880.1,680-698).
gtgtggactggagtaacat

SEQ ID NO: 98842 - DNA, 19 bp, Homo sapiens
  siRNA target sequence for RAF1 (NM_002880.1,682-700).
gtggactggagtaacatca

SEQ ID NO: 98843 - DNA, 19 bp, Homo sapiens
  siRNA target sequence for RAF1 (NM_002880.1,748-766).
ccagcactaccttctttga

SEQ ID NO: 98844 - DNA, 19 bp, Homo sapiens
  siRNA target sequence for RAF1 (NM_002880.1,751-769).
gcactaccttctttgacta

SEQ ID NO: 98845 - DNA, 19 bp, Homo sapiens
  siRNA target sequence for RAF1 (NM_002880.1,752-770).
cactaccttctttgactat

SEQ ID NO: 98846 - DNA, 19 bp, Homo sapiens
  siRNA target sequence for RAF1 (NM_002880.1,775-793).
cgtatgcgagagtctgttt

SEQ ID NO: 98847 - DNA, 19 bp, Homo sapiens
  siRNA target sequence for RAF1 (NM_002880.1,833-851).
ctcacgccttcacctttaa

SEQ ID NO: 98848 - DNA, 19 bp, Homo sapiens
  siRNA target sequence for RAF1 (NM_002880.1,835-853).
cacgccttcacctttaaca

SEQ ID NO: 98849 - DNA, 19 bp, Homo sapiens
  siRNA target sequence for RAF1 (NM_002880.1,897-915).
gtcgacatccacacctaat

SEQ ID NO: 98850 - DNA, 19 bp, Homo sapiens
  siRNA target sequence for RAF1 (NM_002880.1,899-917).
cgacatccacacctaatgt

SEQ ID NO: 98851 - DNA, 19 bp, Homo sapiens
  siRNA target sequence for RAF1 (NM_002880.1,1008-1026).
gtccagtagccccaacaat

SEQ ID NO: 98852 - DNA, 19 bp, Homo sapiens
  siRNA target sequence for RAF1 (NM_002880.1,1061-1079).
ccgtgccagcacaaagaga

SEQ ID NO: 98853 - DNA, 19 bp, Homo sapiens
  siRNA target sequence for RAF1 (NM_002880.1,1311-1329).
ggctgttctgcgcaaaaca

SEQ ID NO: 98854 - DNA, 19 bp, Homo sapiens
  siRNA target sequence for RAF1 (NM_002880.1,1348-1366).
cttttcatggggtacatga

SEQ ID NO: 98855 - DNA, 19 bp, Homo sapiens
  siRNA target sequence for RAF1 (NM_002880.1,1455-1473).
gttccagctaattgacatt

SEQ ID NO: 98856 - DNA, 19 bp, Homo sapiens
  siRNA target sequence for RAF1 (NM_002880.1,1491-1509).
gggaatggactatttgcat

SEQ ID NO: 98857 - DNA, 19 bp, Homo sapiens
  siRNA target sequence for RAF1 (NM_002880.1,1525-1543).
catagagacatgaaatcca

SEQ ID NO: 98858 - DNA, 19 bp, Homo sapiens
  siRNA target sequence for RAF1 (NM_002880.1,1536-1554).
gaaatccaacaatatattt

SEQ ID NO: 98859 - DNA, 19 bp, Homo sapiens
  siRNA target sequence for RAF1 (NM_002880.1,1591-1609).
ggtttggcaacagtaaagt

SEQ ID NO: 98860 - DNA, 19 bp, Homo sapiens
  siRNA target sequence for RAF1 (NM_002880.1,1727-1745).
cctatggcatcgtattgta

SEQ ID NO: 98861 - DNA, 19 bp, Homo sapiens
  siRNA target sequence for RAF1 (NM_002880.1,1728-1746).
ctatggcatcgtattgtat

SEQ ID NO: 98862 - DNA, 19 bp, Homo sapiens
  siRNA target sequence for RAF1 (NM_002880.1,1825-1843).
gcctccccagatcttagta

SEQ ID NO: 98863 - DNA, 19 bp, Homo sapiens
  siRNA target sequence for RAF1 (NM_002880.1,1830-1848).
cccagatcttagtaagcta

SEQ ID NO: 98864 - DNA, 19 bp, Homo sapiens
  siRNA target sequence for RAF1 (NM_002880.1,1831-1849).
ccagatcttagtaagctat

SEQ ID NO: 98865 - DNA, 19 bp, Homo sapiens
  siRNA target sequence for RAF1 (NM_002880.1,1832-1850).
cagatcttagtaagctata

SEQ ID NO: 98866 - DNA, 19 bp, Homo sapiens
  siRNA target sequence for RAF1 (NM_002880.1,1834-1852).
gatcttagtaagctatata

SEQ ID NO: 98867 - DNA, 19 bp, Homo sapiens
  siRNA target sequence for RAF1 (NM_002880.1,1908-1926).
ggaagagaggcctcttttt

SEQ ID NO: 98868 - DNA, 19 bp, Homo sapiens
  siRNA target sequence for RAF1 (NM_002880.1,1960-1978).
cactctctaccgaagatca

SEQ ID NO: 98869 - DNA, 19 bp, Homo sapiens
  siRNA target sequence for RAF1 (NM_002880.1,2012-2030).
cagcccacactgaggatat

SEQ ID NO: 98870 - DNA, 19 bp, Homo sapiens
  siRNA target sequence for RAGE (NM_014226.1,262-280).
gggaacgttttctgaagtt

SEQ ID NO: 98871 - DNA, 19 bp, Homo sapiens
  siRNA target sequence for RAGE (NM_014226.1,263-281).
ggaacgttttctgaagtta

SEQ ID NO: 98872 - DNA, 19 bp, Homo sapiens
  siRNA target sequence for RAGE (NM_014226.1,264-282).
gaacgttttctgaagttat

SEQ ID NO: 98873 - DNA, 19 bp, Homo sapiens
  siRNA target sequence for RAGE (NM_014226.1,331-349).
gaagcagcgctttgaaagt

SEQ ID NO: 98874 - DNA, 19 bp, Homo sapiens
  siRNA target sequence for RAGE (NM_014226.1,334-352).
gcagcgctttgaaagtatt

SEQ ID NO: 98875 - DNA, 19 bp, Homo sapiens
  siRNA target sequence for RAGE (NM_014226.1,401-419).
ccgcacccaaacattctta

SEQ ID NO: 98876 - DNA, 19 bp, Homo sapiens
  siRNA target sequence for RAGE (NM_014226.1,402-420).
cgcacccaaacattcttat

SEQ ID NO: 98877 - DNA, 19 bp, Homo sapiens
  siRNA target sequence for RAGE (NM_014226.1,452-470).
ggttctcttgcactaatat

SEQ ID NO: 98878 - DNA, 19 bp, Homo sapiens
  siRNA target sequence for RAGE (NM_014226.1,456-474).
ctcttgcactaatatgtga

SEQ ID NO: 98879 - DNA, 19 bp, Homo sapiens
  siRNA target sequence for RAGE (NM_014226.1,461-479).
gcactaatatgtgaactta

SEQ ID NO: 98880 - DNA, 19 bp, Homo sapiens
  siRNA target sequence for RAGE (NM_014226.1,471-489).
gtgaacttatggacatgaa

SEQ ID NO: 98881 - DNA, 19 bp, Homo sapiens
  siRNA target sequence for RAGE (NM_014226.1,473-491).
gaacttatggacatgaata

SEQ ID NO: 98882 - DNA, 19 bp, Homo sapiens
  siRNA target sequence for RAGE (NM_014226.1,509-527).
gggagaagatacccattat

SEQ ID NO: 98883 - DNA, 19 bp, Homo sapiens
  siRNA target sequence for RAGE (NM_014226.1,511-529).
gagaagatacccattatca

SEQ ID NO: 98884 - DNA, 19 bp, Homo sapiens
  siRNA target sequence for RAGE (NM_014226.1,547-565).
ctatatgtaccagttatgt

SEQ ID NO: 98885 - DNA, 19 bp, Homo sapiens
  siRNA target sequence for RAGE (NM_014226.1,564-582).
gtaagtccctggatcatat

SEQ ID NO: 98886 - DNA, 19 bp, Homo sapiens
  siRNA target sequence for RAGE (NM_014226.1,667-685).
ctcctgccggagtgtctat

SEQ ID NO: 98887 - DNA, 19 bp, Homo sapiens
  siRNA target sequence for RAGE (NM_014226.1,672-690).
gccggagtgtctattccaa

SEQ ID NO: 98888 - DNA, 19 bp, Homo sapiens
  siRNA target sequence for RAGE (NM_014226.1,692-710).
cagccgtacacggaataca

SEQ ID NO: 98889 - DNA, 19 bp, Homo sapiens
  siRNA target sequence for RAGE (NM_014226.1,695-713).
ccgtacacggaatacatct

SEQ ID NO: 98890 - DNA, 19 bp, Homo sapiens
  siRNA target sequence for RAGE (NM_014226.1,746-764).
ctcactgatgggttctaca

SEQ ID NO: 98891 - DNA, 19 bp, Homo sapiens
  siRNA target sequence for RAGE (NM_014226.1,755-773).
gggttctacacgtacaaga

SEQ ID NO: 98892 - DNA, 19 bp, Homo sapiens
  siRNA target sequence for RAGE (NM_014226.1,756-774).
ggttctacacgtacaagat

SEQ ID NO: 98893 - DNA, 19 bp, Homo sapiens
  siRNA target sequence for RAGE (NM_014226.1,917-935).
cagtcgagagctatgaatt

SEQ ID NO: 98894 - DNA, 19 bp, Homo sapiens
  siRNA target sequence for RAGE (NM_014226.1,919-937).
gtcgagagctatgaatttt

SEQ ID NO: 98895 - DNA, 19 bp, Homo sapiens
  siRNA target sequence for RAGE (NM_014226.1,921-939).
cgagagctatgaattttga

SEQ ID NO: 98896 - DNA, 19 bp, Homo sapiens
  siRNA target sequence for RAGE (NM_014226.1,922-940).
gagagctatgaattttgat

SEQ ID NO: 98897 - DNA, 19 bp, Homo sapiens
  siRNA target sequence for RAGE (NM_014226.1,968-986).
cctctactaacaaccaatt

SEQ ID NO: 98898 - DNA, 19 bp, Homo sapiens
  siRNA target sequence for RAGE (NM_014226.1,969-987).
ctctactaacaaccaattt

SEQ ID NO: 98899 - DNA, 19 bp, Homo sapiens
  siRNA target sequence for RAGE (NM_014226.1,971-989).
ctactaacaaccaatttgt

SEQ ID NO: 98900 - DNA, 19 bp, Homo sapiens
  siRNA target sequence for RAGE (NM_014226.1,1015-1033).
cgcaatggtggcctatgat

SEQ ID NO: 98901 - DNA, 19 bp, Homo sapiens
  siRNA target sequence for RAGE (NM_014226.1,1155-1173).
caccggaaccactcagtaa

SEQ ID NO: 98902 - DNA, 19 bp, Homo sapiens
  siRNA target sequence for RAGE (NM_014226.1,1157-1175).
ccggaaccactcagtaaca

SEQ ID NO: 98903 - DNA, 19 bp, Homo sapiens
  siRNA target sequence for RAGE (NM_014226.1,1247-1265).
cgaggaccggcctatgtca

SEQ ID NO: 98904 - DNA, 19 bp, Homo sapiens
  siRNA target sequence for RAGE (NM_014226.1,1248-1266).
gaggaccggcctatgtcat

SEQ ID NO: 98905 - DNA, 19 bp, Homo sapiens
  siRNA target sequence for RAGE (NM_014226.1,1298-1316).
gtcagactgtcgtcttact

SEQ ID NO: 98906 - DNA, 19 bp, Homo sapiens
  siRNA target sequence for RAGE (NM_014226.1,1339-1357).
gcttggatctggaacaaat

SEQ ID NO: 98907 - DNA, 19 bp, Homo sapiens
  siRNA target sequence for RAGE (NM_014226.1,1370-1388).
gtgctgagacccttgaagt

SEQ ID NO: 98908 - DNA, 19 bp, Homo sapiens
  siRNA target sequence for RARSL (NM_020320.2,104-122).
ccaccagaaaacttgatca

SEQ ID NO: 98909 - DNA, 19 bp, Homo sapiens
  siRNA target sequence for RARSL (NM_020320.2,115-133).
cttgatcacatcaatatct

SEQ ID NO: 98910 - DNA, 19 bp, Homo sapiens
  siRNA target sequence for RARSL (NM_020320.2,248-266).
ctagcagagaagctaagat

SEQ ID NO: 98911 - DNA, 19 bp, Homo sapiens
  siRNA target sequence for RARSL (NM_020320.2,256-274).
gaagctaagatgtgataca

SEQ ID NO: 98912 - DNA, 19 bp, Homo sapiens
  siRNA target sequence for RARSL (NM_020320.2,294-312).
ctggtcaaaggactgtaaa

SEQ ID NO: 98913 - DNA, 19 bp, Homo sapiens
  siRNA target sequence for RARSL (NM_020320.2,343-361).
gacagtgctacaacaagta

SEQ ID NO: 98914 - DNA, 19 bp, Homo sapiens
  siRNA target sequence for RARSL (NM_020320.2,349-367).
gctacaacaagtaattgaa

SEQ ID NO: 98915 - DNA, 19 bp, Homo sapiens
  siRNA target sequence for RARSL (NM_020320.2,424-442).
gattgtggttgaattcagt

SEQ ID NO: 98916 - DNA, 19 bp, Homo sapiens
  siRNA target sequence for RARSL (NM_020320.2,482-500).
cgttctaccatcataggaa

SEQ ID NO: 98917 - DNA, 19 bp, Homo sapiens
  siRNA target sequence for RARSL (NM_020320.2,483-501).
gttctaccatcataggaaa

SEQ ID NO: 98918 - DNA, 19 bp, Homo sapiens
  siRNA target sequence for RARSL (NM_020320.2,486-504).
ctaccatcataggaaattt

SEQ ID NO: 98919 - DNA, 19 bp, Homo sapiens
  siRNA target sequence for RARSL (NM_020320.2,525-543).
ctttaggacatcaagtaat

SEQ ID NO: 98920 - DNA, 19 bp, Homo sapiens
  siRNA target sequence for RARSL (NM_020320.2,646-664).
gcatctctttgaagtttat

SEQ ID NO: 98921 - DNA, 19 bp, Homo sapiens
  siRNA target sequence for RARSL (NM_020320.2,684-702).
cagcagatgataaaagtgt

SEQ ID NO: 98922 - DNA, 19 bp, Homo sapiens
  siRNA target sequence for RARSL (NM_020320.2,721-739).
gttcttccaacgattggaa

SEQ ID NO: 98923 - DNA, 19 bp, Homo sapiens
  siRNA target sequence for RARSL (NM_020320.2,797-815).
gagtacattcgggtttaca

SEQ ID NO: 98924 - DNA, 19 bp, Homo sapiens
  siRNA target sequence for RARSL (NM_020320.2,814-832).
caagcgtctgggagtatat

SEQ ID NO: 98925 - DNA, 19 bp, Homo sapiens
  siRNA target sequence for RARSL (NM_020320.2,817-835).
gcgtctgggagtatatttt

SEQ ID NO: 98926 - DNA, 19 bp, Homo sapiens
  siRNA target sequence for RARSL (NM_020320.2,823-841).
gggagtatattttgatgaa

SEQ ID NO: 98927 - DNA, 19 bp, Homo sapiens
  siRNA target sequence for RARSL (NM_020320.2,873-891).
ctcaagaggtcttaaagtt

SEQ ID NO: 98928 - DNA, 19 bp, Homo sapiens
  siRNA target sequence for RARSL (NM_020320.2,930-948).
gaacggctgtagtagatct

SEQ ID NO: 98929 - DNA, 19 bp, Homo sapiens
  siRNA target sequence for RARSL (NM_020320.2,964-982).
cccctcctcaatttgtact

SEQ ID NO: 98930 - DNA, 19 bp, Homo sapiens
  siRNA target sequence for RARSL (NM_020320.2,998-1016).
gggacttctctctatgcaa

SEQ ID NO: 98931 - DNA, 19 bp, Homo sapiens
  siRNA target sequence for RARSL (NM_020320.2,1043-1061).
cgaatggacaagtataatt

SEQ ID NO: 98932 - DNA, 19 bp, Homo sapiens
  siRNA target sequence for RARSL (NM_020320.2,1048-1066).
ggacaagtataattttgat

SEQ ID NO: 98933 - DNA, 19 bp, Homo sapiens
  siRNA target sequence for RARSL (NM_020320.2,1049-1067).
gacaagtataattttgata

SEQ ID NO: 98934 - DNA, 19 bp, Homo sapiens
  siRNA target sequence for RARSL (NM_020320.2,1081-1099).
gacagataaaggacaaaaa

SEQ ID NO: 98935 - DNA, 19 bp, Homo sapiens
  siRNA target sequence for RARSL (NM_020320.2,1168-1186).
cgtgccctttggagtagta

SEQ ID NO: 98936 - DNA, 19 bp, Homo sapiens
  siRNA target sequence for RARSL (NM_020320.2,1181-1199).
gtagtacagggaatgaaga

SEQ ID NO: 98937 - DNA, 19 bp, Homo sapiens
  siRNA target sequence for RARSL (NM_020320.2,1262-1280).
cagaacatggcttcaatta

SEQ ID NO: 98938 - DNA, 19 bp, Homo sapiens
  siRNA target sequence for RARSL (NM_020320.2,1271-1289).
gcttcaattaagacaacta

SEQ ID NO: 98939 - DNA, 19 bp, Homo sapiens
  siRNA target sequence for RARSL (NM_020320.2,1272-1290).
cttcaattaagacaactaa

SEQ ID NO: 98940 - DNA, 19 bp, Homo sapiens
  siRNA target sequence for RARSL (NM_020320.2,1327-1345).
cgggctcgcagcactcatt

SEQ ID NO: 98941 - DNA, 19 bp, Homo sapiens
  siRNA target sequence for RARSL (NM_020320.2,1328-1346).
gggctcgcagcactcatta

SEQ ID NO: 98942 - DNA, 19 bp, Homo sapiens
  siRNA target sequence for RARSL (NM_020320.2,1329-1347).
ggctcgcagcactcattat

SEQ ID NO: 98943 - DNA, 19 bp, Homo sapiens
  siRNA target sequence for RARSL (NM_020320.2,1342-1360).
cattattcaggacttcaaa

SEQ ID NO: 98944 - DNA, 19 bp, Homo sapiens
  siRNA target sequence for RARSL (NM_020320.2,1354-1372).
cttcaaaggtttactctta

SEQ ID NO: 98945 - DNA, 19 bp, Homo sapiens
  siRNA target sequence for RARSL (NM_020320.2,1357-1375).
caaaggtttactcttatct

SEQ ID NO: 98946 - DNA, 19 bp, Homo sapiens
  siRNA target sequence for RARSL (NM_020320.2,1422-1440).
caggagtcttcctacagta

SEQ ID NO: 98947 - DNA, 19 bp, Homo sapiens
  siRNA target sequence for RARSL (NM_020320.2,1479-1497).
gatgtgggtacctgaatga

SEQ ID NO: 98948 - DNA, 19 bp, Homo sapiens
  siRNA target sequence for RARSL (NM_020320.2,1498-1516).
cttcaacactgcttgttta

SEQ ID NO: 98949 - DNA, 19 bp, Homo sapiens
  siRNA target sequence for RARSL (NM_020320.2,1557-1575).
ggttcgacgaggtgcttta

SEQ ID NO: 98950 - DNA, 19 bp, Homo sapiens
  siRNA target sequence for RARSL (NM_020320.2,1558-1576).
gttcgacgaggtgctttat

SEQ ID NO: 98951 - DNA, 19 bp, Homo sapiens
  siRNA target sequence for RARSL (NM_020320.2,1561-1579).
cgacgaggtgctttataaa

SEQ ID NO: 98952 - DNA, 19 bp, Homo sapiens
  siRNA target sequence for RARSL (NM_020320.2,1562-1580).
gacgaggtgctttataaat

SEQ ID NO: 98953 - DNA, 19 bp, Homo sapiens
  siRNA target sequence for RARSL (NM_020320.2,1564-1582).
cgaggtgctttataaatca

SEQ ID NO: 98954 - DNA, 19 bp, Homo sapiens
  siRNA target sequence for RARSL (NM_020320.2,1603-1621).
gcatatcgtcagttacctt

SEQ ID NO: 98955 - DNA, 19 bp, Homo sapiens
  siRNA target sequence for RARSL (NM_020320.2,1609-1627).
cgtcagttaccttctaact

SEQ ID NO: 98956 - DNA, 19 bp, Homo sapiens
  siRNA target sequence for RARSL (NM_020320.2,1694-1712).
ggggccagacttcatcttt

SEQ ID NO: 98957 - DNA, 19 bp, Homo sapiens
  siRNA target sequence for RARSL (NM_020320.2,1695-1713).
gggccagacttcatctttt

SEQ ID NO: 98958 - DNA, 19 bp, Homo sapiens
  siRNA target sequence for RARSL (NM_020320.2,1728-1746).
ctgtcctagccaatggaat

SEQ ID NO: 98959 - DNA, 19 bp, Homo sapiens
  siRNA target sequence for RARSL (NM_020320.2,1732-1750).
cctagccaatggaatgaaa

SEQ ID NO: 98960 - DNA, 19 bp, Homo sapiens
  siRNA target sequence for RARSL (NM_020320.2,1757-1775).
ggaataacacctgtatgta

SEQ ID NO: 98961 - DNA, 19 bp, Homo sapiens
  siRNA target sequence for RET (NM_000323.2,271-289).
gcattgggcctctacttct

SEQ ID NO: 98962 - DNA, 19 bp, Homo sapiens
  siRNA target sequence for RET (NM_000323.2,425-443).
gcacacggctgcatgagaa

SEQ ID NO: 98963 - DNA, 19 bp, Homo sapiens
  siRNA target sequence for RET (NM_000323.2,428-446).
cacggctgcatgagaacaa

SEQ ID NO: 98964 - DNA, 19 bp, Homo sapiens
  siRNA target sequence for RET (NM_000323.2,430-448).
cggctgcatgagaacaact

SEQ ID NO: 98965 - DNA, 19 bp, Homo sapiens
  siRNA target sequence for RET (NM_000323.2,470-488).
ccggcctcctctaccttaa

SEQ ID NO: 98966 - DNA, 19 bp, Homo sapiens
  siRNA target sequence for RET (NM_000323.2,1123-1141).
ctggtgaggcggtacacaa

SEQ ID NO: 98967 - DNA, 19 bp, Homo sapiens
  siRNA target sequence for RET (NM_000323.2,1239-1257).
ggcgaccgtacatgactat

SEQ ID NO: 98968 - DNA, 19 bp, Homo sapiens
  siRNA target sequence for RET (NM_000323.2,1240-1258).
gcgaccgtacatgactata

SEQ ID NO: 98969 - DNA, 19 bp, Homo sapiens
  siRNA target sequence for RET (NM_000323.2,1312-1330).
gcggtgctggtcaatgact

SEQ ID NO: 98970 - DNA, 19 bp, Homo sapiens
  siRNA target sequence for RET (NM_000323.2,1453-1471).
gcccagatcgggaaagtct

SEQ ID NO: 98971 - DNA, 19 bp, Homo sapiens
  siRNA target sequence for RET (NM_000323.2,1622-1640).
ccaagtgtgccgaacttca

SEQ ID NO: 98972 - DNA, 19 bp, Homo sapiens
  siRNA target sequence for RET (NM_000323.2,1628-1646).
gtgccgaacttcactacat

SEQ ID NO: 98973 - DNA, 19 bp, Homo sapiens
  siRNA target sequence for RET (NM_000323.2,1686-1704).
ggcccagctgcttgtaaca

SEQ ID NO: 98974 - DNA, 19 bp, Homo sapiens
  siRNA target sequence for RET (NM_000323.2,1688-1706).
cccagctgcttgtaacagt

SEQ ID NO: 98975 - DNA, 19 bp, Homo sapiens
  siRNA target sequence for RET (NM_000323.2,1703-1721).
cagtggaggggtcatatgt

SEQ ID NO: 98976 - DNA, 19 bp, Homo sapiens
  siRNA target sequence for RET (NM_000323.2,1915-1933).
gagacccaagacatcaaca

SEQ ID NO: 98977 - DNA, 19 bp, Homo sapiens
  siRNA target sequence for RET (NM_000323.2,2544-2562).
ccacccacatgtcatcaaa

SEQ ID NO: 98978 - DNA, 19 bp, Homo sapiens
  siRNA target sequence for RET (NM_000323.2,2545-2563).
cacccacatgtcatcaaat

SEQ ID NO: 98979 - DNA, 19 bp, Homo sapiens
  siRNA target sequence for RET (NM_000323.2,2739-2757).
gggcgacctcatctcattt

SEQ ID NO: 98980 - DNA, 19 bp, Homo sapiens
  siRNA target sequence for RET (NM_000323.2,2771-2789).
cacaggggatgcagtatct

SEQ ID NO: 98981 - DNA, 19 bp, Homo sapiens
  siRNA target sequence for RET (NM_000323.2,2874-2892).
cggcttgtcccgagatgtt

SEQ ID NO: 98982 - DNA, 19 bp, Homo sapiens
  siRNA target sequence for RET (NM_000323.2,2875-2893).
ggcttgtcccgagatgttt

SEQ ID NO: 98983 - DNA, 19 bp, Homo sapiens
  siRNA target sequence for RET (NM_000323.2,2876-2894).
gcttgtcccgagatgttta

SEQ ID NO: 98984 - DNA, 19 bp, Homo sapiens
  siRNA target sequence for RET (NM_000323.2,2880-2898).
gtcccgagatgtttatgaa

SEQ ID NO: 98985 - DNA, 19 bp, Homo sapiens
  siRNA target sequence for RET (NM_000323.2,2925-2943).
gggtcggattccagttaaa

SEQ ID NO: 98986 - DNA, 19 bp, Homo sapiens
  siRNA target sequence for RET (NM_000323.2,2930-2948).
ggattccagttaaatggat

SEQ ID NO: 98987 - DNA, 19 bp, Homo sapiens
  siRNA target sequence for RET (NM_000323.2,2962-2980).
ctttttgatcatatctaca

SEQ ID NO: 98988 - DNA, 19 bp, Homo sapiens
  siRNA target sequence for RET (NM_000323.2,2976-2994).
ctacaccacgcaaagtgat

SEQ ID NO: 98989 - DNA, 19 bp, Homo sapiens
  siRNA target sequence for RET (NM_000323.2,3266-3284).
ctgactccctgatttatga

SEQ ID NO: 98990 - DNA, 19 bp, Homo sapiens
  siRNA target sequence for RET (NM_000323.2,3308-3326).
caccgctggtggactgtaa

SEQ ID NO: 98991 - DNA, 19 bp, Homo sapiens
  siRNA target sequence for RET (NM_000323.2,3310-3328).
ccgctggtggactgtaata

SEQ ID NO: 98992 - DNA, 19 bp, Homo sapiens
  siRNA target sequence for RET (NM_000323.2,3311-3329).
cgctggtggactgtaataa

SEQ ID NO: 98993 - DNA, 19 bp, Homo sapiens
  siRNA target sequence for RET (NM_000323.2,3312-3330).
gctggtggactgtaataat

SEQ ID NO: 98994 - DNA, 19 bp, Homo sapiens
  siRNA target sequence for RET (NM_000323.2,3348-3366).
cctcccttccacatggatt

SEQ ID NO: 98995 - DNA, 19 bp, Homo sapiens
  siRNA target sequence for RET (NM_000323.2,3362-3380).
ggattgaaaacaaactcta

SEQ ID NO: 98996 - DNA, 19 bp, Homo sapiens
  siRNA target sequence for RET (NM_000323.2,3451-3469).
gggtttccaagatatccaa

SEQ ID NO: 98997 - DNA, 19 bp, Homo sapiens
  siRNA target sequence for RET (NM_000323.2,3452-3470).
ggtttccaagatatccaaa

SEQ ID NO: 98998 - DNA, 19 bp, Homo sapiens
  siRNA target sequence for RET (NM_000323.2,3453-3471).
gtttccaagatatccaaat

SEQ ID NO: 98999 - DNA, 19 bp, Homo sapiens
  siRNA target sequence for RET (NM_000323.2,3457-3475).
ccaagatatccaaatgata

SEQ ID NO: 99000 - DNA, 19 bp, Homo sapiens
  siRNA target sequence for RET (NM_000323.2,3506-3524).
cagcggcaaaattaatgga

SEQ ID NO: 99001 - DNA, 19 bp, Homo sapiens
  siRNA target sequence for RET (NM_020629.2,3477-3495).
gagtcggattaccaaaaca

SEQ ID NO: 99002 - DNA, 19 bp, Homo sapiens
  siRNA target sequence for RET (NM_020629.2,3479-3497).
gtcggattaccaaaacact

SEQ ID NO: 99003 - DNA, 19 bp, Homo sapiens
  siRNA target sequence for RHOK (NM_002929.1,390-408).
ctatgacacggcagacaat

SEQ ID NO: 99004 - DNA, 19 bp, Homo sapiens
  siRNA target sequence for RHOK (NM_002929.1,492-510).
ggggatagtggcgaagttt

SEQ ID NO: 99005 - DNA, 19 bp, Homo sapiens
  siRNA target sequence for RHOK (NM_002929.1,493-511).
gggatagtggcgaagttta

SEQ ID NO: 99006 - DNA, 19 bp, Homo sapiens
  siRNA target sequence for RHOK (NM_002929.1,870-888).
ctatgcgtttgaaaccaaa

SEQ ID NO: 99007 - DNA, 19 bp, Homo sapiens
  siRNA target sequence for RHOK (NM_002929.1,1166-1184).
cagggaccccaggtttcat

SEQ ID NO: 99008 - DNA, 19 bp, Homo sapiens
  siRNA target sequence for RHOK (NM_002929.1,1343-1361).
ccgtgaagtaccctgataa

SEQ ID NO: 99009 - DNA, 19 bp, Homo sapiens
  siRNA target sequence for RHOK (NM_002929.1,1345-1363).
gtgaagtaccctgataagt

SEQ ID NO: 99010 - DNA, 19 bp, Homo sapiens
  siRNA target sequence for RHOK (NM_002929.1,1674-1692).
gatcgagacgggcatcttt

SEQ ID NO: 99011 - DNA, 19 bp, Homo sapiens
  siRNA target sequence for RICH1 (NM_018054.3,140-158).
gtccttagtgaagatctat

SEQ ID NO: 99012 - DNA, 19 bp, Homo sapiens
  siRNA target sequence for RICH1 (NM_018054.3,142-160).
ccttagtgaagatctatta

SEQ ID NO: 99013 - DNA, 19 bp, Homo sapiens
  siRNA target sequence for RICH1 (NM_018054.3,152-170).
gatctattacagattgaga

SEQ ID NO: 99014 - DNA, 19 bp, Homo sapiens
  siRNA target sequence for RICH1 (NM_018054.3,178-196).
ggacacggtgcggtcaata

SEQ ID NO: 99015 - DNA, 19 bp, Homo sapiens
  siRNA target sequence for RICH1 (NM_018054.3,179-197).
gacacggtgcggtcaatat

SEQ ID NO: 99016 - DNA, 19 bp, Homo sapiens
  siRNA target sequence for RICH1 (NM_018054.3,254-272).
gccgagaggagacacaaaa

SEQ ID NO: 99017 - DNA, 19 bp, Homo sapiens
  siRNA target sequence for RICH1 (NM_018054.3,397-415).
ccagcacgaagtctttgtt

SEQ ID NO: 99018 - DNA, 19 bp, Homo sapiens
  siRNA target sequence for RICH1 (NM_018054.3,494-512).
gcaagattggtgttagact

SEQ ID NO: 99019 - DNA, 19 bp, Homo sapiens
  siRNA target sequence for RICH1 (NM_018054.3,552-570).
cctcaggaaccaactttca

SEQ ID NO: 99020 - DNA, 19 bp, Homo sapiens
  siRNA target sequence for RICH1 (NM_018054.3,653-671).
gcagcagacatgtacaact

SEQ ID NO: 99021 - DNA, 19 bp, Homo sapiens
  siRNA target sequence for RICH1 (NM_018054.3,654-672).
cagcagacatgtacaactt

SEQ ID NO: 99022 - DNA, 19 bp, Homo sapiens
  siRNA target sequence for RICH1 (NM_018054.3,656-674).
gcagacatgtacaacttta

SEQ ID NO: 99023 - DNA, 19 bp, Homo sapiens
  siRNA target sequence for RICH1 (NM_018054.3,686-704).
ggggagtatggcaaattct

SEQ ID NO: 99024 - DNA, 19 bp, Homo sapiens
  siRNA target sequence for RICH1 (NM_018054.3,687-705).
gggagtatggcaaattctt

SEQ ID NO: 99025 - DNA, 19 bp, Homo sapiens
  siRNA target sequence for RICH1 (NM_018054.3,696-714).
gcaaattctttgttacgtt

SEQ ID NO: 99026 - DNA, 19 bp, Homo sapiens
  siRNA target sequence for RICH1 (NM_018054.3,697-715).
caaattctttgttacgtta

SEQ ID NO: 99027 - DNA, 19 bp, Homo sapiens
  siRNA target sequence for RICH1 (NM_018054.3,703-721).
ctttgttacgttattagaa

SEQ ID NO: 99028 - DNA, 19 bp, Homo sapiens
  siRNA target sequence for RICH1 (NM_018054.3,782-800).
cgagcccatcaagataagt

SEQ ID NO: 99029 - DNA, 19 bp, Homo sapiens
  siRNA target sequence for RICH1 (NM_018054.3,822-840).
ggactcccctagaagaaca

SEQ ID NO: 99030 - DNA, 19 bp, Homo sapiens
  siRNA target sequence for RICH1 (NM_018054.3,862-880).
gattgcgctgcccattgaa

SEQ ID NO: 99031 - DNA, 19 bp, Homo sapiens
  siRNA target sequence for RICH1 (NM_018054.3,940-958).
ggctggggcctccaagtta

SEQ ID NO: 99032 - DNA, 19 bp, Homo sapiens
  siRNA target sequence for RICH1 (NM_018054.3,941-959).
gctggggcctccaagttaa

SEQ ID NO: 99033 - DNA, 19 bp, Homo sapiens
  siRNA target sequence for RICH1 (NM_018054.3,942-960).
ctggggcctccaagttaaa

SEQ ID NO: 99034 - DNA, 19 bp, Homo sapiens
  siRNA target sequence for RICH1 (NM_018054.3,995-1013).
cacctggatgagttctatt

SEQ ID NO: 99035 - DNA, 19 bp, Homo sapiens
  siRNA target sequence for RICH1 (NM_018054.3,1028-1046).
gtagcaggtgctttaaaat

SEQ ID NO: 99036 - DNA, 19 bp, Homo sapiens
  siRNA target sequence for RICH1 (NM_018054.3,1032-1050).
caggtgctttaaaatccta

SEQ ID NO: 99037 - DNA, 19 bp, Homo sapiens
  siRNA target sequence for RICH1 (NM_018054.3,1056-1074).
gggaattgcctgaaccttt

SEQ ID NO: 99038 - DNA, 19 bp, Homo sapiens
  siRNA target sequence for RICH1 (NM_018054.3,1067-1085).
gaacctttgatgactttta

SEQ ID NO: 99039 - DNA, 19 bp, Homo sapiens
  siRNA target sequence for RICH1 (NM_018054.3,1118-1136).
gtgcaggatcaagacaaaa

SEQ ID NO: 99040 - DNA, 19 bp, Homo sapiens
  siRNA target sequence for RICH1 (NM_018054.3,1168-1186).
gttgccaccacaaaatttt

SEQ ID NO: 99041 - DNA, 19 bp, Homo sapiens
  siRNA target sequence for RICH1 (NM_018054.3,1171-1189).
gccaccacaaaattttgtt

SEQ ID NO: 99042 - DNA, 19 bp, Homo sapiens
  siRNA target sequence for RICH1 (NM_018054.3,1175-1193).
ccacaaaattttgttaact

SEQ ID NO: 99043 - DNA, 19 bp, Homo sapiens
  siRNA target sequence for RICH1 (NM_018054.3,1227-1245).
ctcagaccagcgatgtgaa

SEQ ID NO: 99044 - DNA, 19 bp, Homo sapiens
  siRNA target sequence for RICH1 (NM_018054.3,1237-1255).
cgatgtgaataaaatgact

SEQ ID NO: 99045 - DNA, 19 bp, Homo sapiens
  siRNA target sequence for RICH1 (NM_018054.3,1260-1278).
gcaacattgcgattgtgtt

SEQ ID NO: 99046 - DNA, 19 bp, Homo sapiens
  siRNA target sequence for RICH1 (NM_018054.3,1261-1279).
caacattgcgattgtgtta

SEQ ID NO: 99047 - DNA, 19 bp, Homo sapiens
  siRNA target sequence for RICH1 (NM_018054.3,1405-1423).
ggtggaatttaatgtatca

SEQ ID NO: 99048 - DNA, 19 bp, Homo sapiens
  siRNA target sequence for RICH1 (NM_018054.3,1441-1459).
caccaccccgagttctaat

SEQ ID NO: 99049 - DNA, 19 bp, Homo sapiens
  siRNA target sequence for RICH1 (NM_018054.3,1443-1461).
ccaccccgagttctaatca

SEQ ID NO: 99050 - DNA, 19 bp, Homo sapiens
  siRNA target sequence for RICH1 (NM_018054.3,1449-1467).
cgagttctaatcactcatt

SEQ ID NO: 99051 - DNA, 19 bp, Homo sapiens
  siRNA target sequence for RICH1 (NM_018054.3,1601-1619).
gcaccagggagaaacaaca

SEQ ID NO: 99052 - DNA, 19 bp, Homo sapiens
  siRNA target sequence for RICH1 (NM_018054.3,1678-1696).
catgggccaacctcacaat

SEQ ID NO: 99053 - DNA, 19 bp, Homo sapiens
  siRNA target sequence for RICH1 (NM_018054.3,1704-1722).
ggcccagcccgcatacact

SEQ ID NO: 99054 - DNA, 19 bp, Homo sapiens
  siRNA target sequence for RICH1 (NM_018054.3,1719-1737).
cactgcgccgagctgttaa

SEQ ID NO: 99055 - DNA, 19 bp, Homo sapiens
  siRNA target sequence for RICH1 (NM_018054.3,1721-1739).
ctgcgccgagctgttaaaa

SEQ ID NO: 99056 - DNA, 19 bp, Homo sapiens
  siRNA target sequence for RICH1 (NM_018054.3,1723-1741).
gcgccgagctgttaaaaaa

SEQ ID NO: 99057 - DNA, 19 bp, Homo sapiens
  siRNA target sequence for RICH1 (NM_018054.3,2223-2241).
gaccgagaccagtaccaaa

SEQ ID NO: 99058 - DNA, 19 bp, Homo sapiens
  siRNA target sequence for RICH1 (NM_018054.3,2345-2363).
gtaacagactccaattcca

SEQ ID NO: 99059 - DNA, 19 bp, Homo sapiens
  siRNA target sequence for RICH1 (NM_018054.3,2433-2451).
gccgcatcctgctggatat

SEQ ID NO: 99060 - DNA, 19 bp, Homo sapiens
  siRNA target sequence for RICH1 (NM_018054.3,2434-2452).
ccgcatcctgctggatata

SEQ ID NO: 99061 - DNA, 19 bp, Homo sapiens
  siRNA target sequence for RICH1 (NM_018054.3,2440-2458).
cctgctggatatagacaat

SEQ ID NO: 99062 - DNA, 19 bp, Homo sapiens
  siRNA target sequence for RIOK1 (NM_031480.2,321-339).
gaatggtgaaggtgaaata

SEQ ID NO: 99063 - DNA, 19 bp, Homo sapiens
  siRNA target sequence for RIOK1 (NM_031480.2,441-459).
caacccacaggcaaatcga

SEQ ID NO: 99064 - DNA, 19 bp, Homo sapiens
  siRNA target sequence for RIOK1 (NM_031480.2,504-522).
caaggtcttacggaaattt

SEQ ID NO: 99065 - DNA, 19 bp, Homo sapiens
  siRNA target sequence for RIOK1 (NM_031480.2,508-526).
gtcttacggaaatttgaga

SEQ ID NO: 99066 - DNA, 19 bp, Homo sapiens
  siRNA target sequence for RIOK1 (NM_031480.2,510-528).
cttacggaaatttgagaat

SEQ ID NO: 99067 - DNA, 19 bp, Homo sapiens
  siRNA target sequence for RIOK1 (NM_031480.2,579-597).
caccgaaaagtctagacaa

SEQ ID NO: 99068 - DNA, 19 bp, Homo sapiens
  siRNA target sequence for RIOK1 (NM_031480.2,581-599).
ccgaaaagtctagacaaaa

SEQ ID NO: 99069 - DNA, 19 bp, Homo sapiens
  siRNA target sequence for RIOK1 (NM_031480.2,630-648).
ggcagacagagcaactgta

SEQ ID NO: 99070 - DNA, 19 bp, Homo sapiens
  siRNA target sequence for RIOK1 (NM_031480.2,664-682).
cccagaacaagaatgattt

SEQ ID NO: 99071 - DNA, 19 bp, Homo sapiens
  siRNA target sequence for RIOK1 (NM_031480.2,693-711).
gttgactagaggaatcata

SEQ ID NO: 99072 - DNA, 19 bp, Homo sapiens
  siRNA target sequence for RIOK1 (NM_031480.2,698-716).
ctagaggaatcataacaga

SEQ ID NO: 99073 - DNA, 19 bp, Homo sapiens
  siRNA target sequence for RIOK1 (NM_031480.2,739-757).
ggaaaagaagctaatgtat

SEQ ID NO: 99074 - DNA, 19 bp, Homo sapiens
  siRNA target sequence for RIOK1 (NM_031480.2,740-758).
gaaaagaagctaatgtata

SEQ ID NO: 99075 - DNA, 19 bp, Homo sapiens
  siRNA target sequence for RIOK1 (NM_031480.2,759-777).
ccatgctagcacagcaaat

SEQ ID NO: 99076 - DNA, 19 bp, Homo sapiens
  siRNA target sequence for RIOK1 (NM_031480.2,785-803).
gcagagcaatcaaaattta

SEQ ID NO: 99077 - DNA, 19 bp, Homo sapiens
  siRNA target sequence for RIOK1 (NM_031480.2,786-804).
cagagcaatcaaaatttat

SEQ ID NO: 99078 - DNA, 19 bp, Homo sapiens
  siRNA target sequence for RIOK1 (NM_031480.2,933-951).
cttaatcaggctaaacaca

SEQ ID NO: 99079 - DNA, 19 bp, Homo sapiens
  siRNA target sequence for RIOK1 (NM_031480.2,962-980).
catgtccagaaccaataat

SEQ ID NO: 99080 - DNA, 19 bp, Homo sapiens
  siRNA target sequence for RIOK1 (NM_031480.2,965-983).
gtccagaaccaataatgct

SEQ ID NO: 99081 - DNA, 19 bp, Homo sapiens
  siRNA target sequence for RIOK1 (NM_031480.2,981-999).
gctaagaagtcatgttctt

SEQ ID NO: 99082 - DNA, 19 bp, Homo sapiens
  siRNA target sequence for RIOK1 (NM_031480.2,1005-1023).
gagtttcatcggtaaagat

SEQ ID NO: 99083 - DNA, 19 bp, Homo sapiens
  siRNA target sequence for RIOK1 (NM_031480.2,1007-1025).
gtttcatcggtaaagatga

SEQ ID NO: 99084 - DNA, 19 bp, Homo sapiens
  siRNA target sequence for RIOK1 (NM_031480.2,1029-1047).
gcctgcaccactcttgaaa

SEQ ID NO: 99085 - DNA, 19 bp, Homo sapiens
  siRNA target sequence for RIOK1 (NM_031480.2,1171-1189).
cacggtggaggcgtgtata

SEQ ID NO: 99086 - DNA, 19 bp, Homo sapiens
  siRNA target sequence for RIOK1 (NM_031480.2,1174-1192).
ggtggaggcgtgtatatca

SEQ ID NO: 99087 - DNA, 19 bp, Homo sapiens
  siRNA target sequence for RIOK1 (NM_031480.2,1175-1193).
gtggaggcgtgtatatcat

SEQ ID NO: 99088 - DNA, 19 bp, Homo sapiens
  siRNA target sequence for RIOK1 (NM_031480.2,1237-1255).
gagttcttgagaaaggatt

SEQ ID NO: 99089 - DNA, 19 bp, Homo sapiens
  siRNA target sequence for RIOK1 (NM_031480.2,1256-1274).
gcgccaacgtcaatgattt

SEQ ID NO: 99090 - DNA, 19 bp, Homo sapiens
  siRNA target sequence for RIOK1 (NM_031480.2,1308-1326).
gcgggagctctttgaattt

SEQ ID NO: 99091 - DNA, 19 bp, Homo sapiens
  siRNA target sequence for RIOK1 (NM_031480.2,1327-1345).
gtcacagatccatccatta

SEQ ID NO: 99092 - DNA, 19 bp, Homo sapiens
  siRNA target sequence for RIOK1 (NM_031480.2,1331-1349).
cagatccatccattacaca

SEQ ID NO: 99093 - DNA, 19 bp, Homo sapiens
  siRNA target sequence for RIOK1 (NM_031480.2,1369-1387).
ctctcaaaggccatggaaa

SEQ ID NO: 99094 - DNA, 19 bp, Homo sapiens
  siRNA target sequence for RIOK1 (NM_031480.2,1443-1461).
ggtgtttaagcgagcatat

SEQ ID NO: 99095 - DNA, 19 bp, Homo sapiens
  siRNA target sequence for RIOK1 (NM_031480.2,1444-1462).
gtgtttaagcgagcatata

SEQ ID NO: 99096 - DNA, 19 bp, Homo sapiens
  siRNA target sequence for RIOK1 (NM_031480.2,1446-1464).
gtttaagcgagcatatatt

SEQ ID NO: 99097 - DNA, 19 bp, Homo sapiens
  siRNA target sequence for RIOK1 (NM_031480.2,1469-1487).
gaaccttgaatgaagtgaa

SEQ ID NO: 99098 - DNA, 19 bp, Homo sapiens
  siRNA target sequence for RIOK1 (NM_031480.2,1495-1513).
gagagggatatggacataa

SEQ ID NO: 99099 - DNA, 19 bp, Homo sapiens
  siRNA target sequence for RIOK1 (NM_031480.2,1499-1517).
gggatatggacataattat

SEQ ID NO: 99100 - DNA, 19 bp, Homo sapiens
  siRNA target sequence for RIOK1 (NM_031480.2,1507-1525).
gacataattatgaaattga

SEQ ID NO: 99101 - DNA, 19 bp, Homo sapiens
  siRNA target sequence for RIOK1 (NM_031480.2,1541-1559).
ccatgaatgcccaacaaga

SEQ ID NO: 99102 - DNA, 19 bp, Homo sapiens
  siRNA target sequence for RIOK1 (NM_031480.2,1545-1563).
gaatgcccaacaagataat

SEQ ID NO: 99103 - DNA, 19 bp, Homo sapiens
  siRNA target sequence for RIOK1 (NM_031480.2,1551-1569).
ccaacaagataatattcta

SEQ ID NO: 99104 - DNA, 19 bp, Homo sapiens
  siRNA target sequence for RIOK1 (NM_031480.2,1552-1570).
caacaagataatattctat

SEQ ID NO: 99105 - DNA, 19 bp, Homo sapiens
  siRNA target sequence for RIOK1 (NM_031480.2,1620-1638).
ccctgcactcctagaaaat

SEQ ID NO: 99106 - DNA, 19 bp, Homo sapiens
  siRNA target sequence for RIOK1 (NM_031480.2,1743-1761).
caccacggaccctgacatt

SEQ ID NO: 99107 - DNA, 19 bp, Homo sapiens
  siRNA target sequence for RIOK1 (NM_031480.2,1745-1763).
ccacggaccctgacattga

SEQ ID NO: 99108 - DNA, 19 bp, Homo sapiens
  siRNA target sequence for RIOK1 (NM_031480.2,1746-1764).
cacggaccctgacattgat

SEQ ID NO: 99109 - DNA, 19 bp, Homo sapiens
  siRNA target sequence for RIOK1 (NM_031480.2,1748-1766).
cggaccctgacattgataa

SEQ ID NO: 99110 - DNA, 19 bp, Homo sapiens
  siRNA target sequence for RIOK1 (NM_031480.2,1749-1767).
ggaccctgacattgataaa

SEQ ID NO: 99111 - DNA, 19 bp, Homo sapiens
  siRNA target sequence for RIPK1 (NM_003804.2,8-26).
cagacatgtccttgaatgt

SEQ ID NO: 99112 - DNA, 19 bp, Homo sapiens
  siRNA target sequence for RIPK1 (NM_003804.2,12-30).
catgtccttgaatgtcatt

SEQ ID NO: 99113 - DNA, 19 bp, Homo sapiens
  siRNA target sequence for RIPK1 (NM_003804.2,110-128).
gaacccagggactcatgat

SEQ ID NO: 99114 - DNA, 19 bp, Homo sapiens
  siRNA target sequence for RIPK1 (NM_003804.2,113-131).
cccagggactcatgatcat

SEQ ID NO: 99115 - DNA, 19 bp, Homo sapiens
  siRNA target sequence for RIPK1 (NM_003804.2,324-342).
gagtactccgctttctgta

SEQ ID NO: 99116 - DNA, 19 bp, Homo sapiens
  siRNA target sequence for RIPK1 (NM_003804.2,326-344).
gtactccgctttctgtaaa

SEQ ID NO: 99117 - DNA, 19 bp, Homo sapiens
  siRNA target sequence for RIPK1 (NM_003804.2,331-349).
ccgctttctgtaaaaggaa

SEQ ID NO: 99118 - DNA, 19 bp, Homo sapiens
  siRNA target sequence for RIPK1 (NM_003804.2,338-356).
ctgtaaaaggaaggataat

SEQ ID NO: 99119 - DNA, 19 bp, Homo sapiens
  siRNA target sequence for RIPK1 (NM_003804.2,439-457).
gataatgacttccacatta

SEQ ID NO: 99120 - DNA, 19 bp, Homo sapiens
  siRNA target sequence for RIPK1 (NM_003804.2,469-487).
ctcggccttgcctccttta

SEQ ID NO: 99121 - DNA, 19 bp, Homo sapiens
  siRNA target sequence for RIPK1 (NM_003804.2,475-493).
cttgcctcctttaagatgt

SEQ ID NO: 99122 - DNA, 19 bp, Homo sapiens
  siRNA target sequence for RIPK1 (NM_003804.2,492-510).
gtggagcaaactgaataat

SEQ ID NO: 99123 - DNA, 19 bp, Homo sapiens
  siRNA target sequence for RIPK1 (NM_003804.2,538-556).
gacggcaccgctaagaaga

SEQ ID NO: 99124 - DNA, 19 bp, Homo sapiens
  siRNA target sequence for RIPK1 (NM_003804.2,540-558).
cggcaccgctaagaagaat

SEQ ID NO: 99125 - DNA, 19 bp, Homo sapiens
  siRNA target sequence for RIPK1 (NM_003804.2,560-578).
gcggcaccctctactacat

SEQ ID NO: 99126 - DNA, 19 bp, Homo sapiens
  siRNA target sequence for RIPK1 (NM_003804.2,656-674).
gggcgatatttgcaaataa

SEQ ID NO: 99127 - DNA, 19 bp, Homo sapiens
  siRNA target sequence for RIPK1 (NM_003804.2,698-716).
gtgagcagcagttgataat

SEQ ID NO: 99128 - DNA, 19 bp, Homo sapiens
  siRNA target sequence for RIPK1 (NM_003804.2,737-755).
ggccagatgtggatgacat

SEQ ID NO: 99129 - DNA, 19 bp, Homo sapiens
  siRNA target sequence for RIPK1 (NM_003804.2,816-834).
ggaagctcggccgacattt

SEQ ID NO: 99130 - DNA, 19 bp, Homo sapiens
  siRNA target sequence for RIPK1 (NM_003804.2,948-966).
gagaatgcagtctcttcaa

SEQ ID NO: 99131 - DNA, 19 bp, Homo sapiens
  siRNA target sequence for RIPK1 (NM_003804.2,954-972).
gcagtctcttcaacttgat

SEQ ID NO: 99132 - DNA, 19 bp, Homo sapiens
  siRNA target sequence for RIPK1 (NM_003804.2,957-975).
gtctcttcaacttgattgt

SEQ ID NO: 99133 - DNA, 19 bp, Homo sapiens
  siRNA target sequence for RIPK1 (NM_003804.2,985-1003).
ccttcaagccggtcaaatt

SEQ ID NO: 99134 - DNA, 19 bp, Homo sapiens
  siRNA target sequence for RIPK1 (NM_003804.2,1199-1217).
gacagaatgtggcttacaa

SEQ ID NO: 99135 - DNA, 19 bp, Homo sapiens
  siRNA target sequence for RIPK1 (NM_003804.2,1245-1263).
ctcccatgacccttttgca

SEQ ID NO: 99136 - DNA, 19 bp, Homo sapiens
  siRNA target sequence for RIPK1 (NM_003804.2,1271-1289).
gaccttacgagaattttca

SEQ ID NO: 99137 - DNA, 19 bp, Homo sapiens
  siRNA target sequence for RIPK1 (NM_003804.2,1273-1291).
ccttacgagaattttcaga

SEQ ID NO: 99138 - DNA, 19 bp, Homo sapiens
  siRNA target sequence for RIPK1 (NM_003804.2,1322-1340).
gtgcagccagtcatggtaa

SEQ ID NO: 99139 - DNA, 19 bp, Homo sapiens
  siRNA target sequence for RIPK1 (NM_003804.2,1365-1383).
caccagccaacctcaagta

SEQ ID NO: 99140 - DNA, 19 bp, Homo sapiens
  siRNA target sequence for RIPK1 (NM_003804.2,1375-1393).
cctcaagtactgtatcaga

SEQ ID NO: 99141 - DNA, 19 bp, Homo sapiens
  siRNA target sequence for RIPK1 (NM_003804.2,1390-1408).
cagaacaatggattatata

SEQ ID NO: 99142 - DNA, 19 bp, Homo sapiens
  siRNA target sequence for RIPK1 (NM_003804.2,1451-1469).
caggtcccagagtttggta

SEQ ID NO: 99143 - DNA, 19 bp, Homo sapiens
  siRNA target sequence for RIPK1 (NM_003804.2,1515-1533).
gcctgagaccaactatcta

SEQ ID NO: 99144 - DNA, 19 bp, Homo sapiens
  siRNA target sequence for RIPK1 (NM_003804.2,1521-1539).
gaccaactatctaggaaat

SEQ ID NO: 99145 - DNA, 19 bp, Homo sapiens
  siRNA target sequence for RIPK1 (NM_003804.2,1579-1597).
gaatctataaaatatacca

SEQ ID NO: 99146 - DNA, 19 bp, Homo sapiens
  siRNA target sequence for RIPK1 (NM_003804.2,1620-1638).
gattggagcctacaattat

SEQ ID NO: 99147 - DNA, 19 bp, Homo sapiens
  siRNA target sequence for RIPK1 (NM_003804.2,1625-1643).
gagcctacaattatatgga

SEQ ID NO: 99148 - DNA, 19 bp, Homo sapiens
  siRNA target sequence for RIPK1 (NM_003804.2,1653-1671).
gacgagttcatcactacta

SEQ ID NO: 99149 - DNA, 19 bp, Homo sapiens
  siRNA target sequence for RIPK1 (NM_003804.2,1655-1673).
cgagttcatcactactaga

SEQ ID NO: 99150 - DNA, 19 bp, Homo sapiens
  siRNA target sequence for RIPK1 (NM_003804.2,1666-1684).
ctactagacagcacaaata

SEQ ID NO: 99151 - DNA, 19 bp, Homo sapiens
  siRNA target sequence for RIPK1 (NM_003804.2,1676-1694).
gcacaaatacgaacttcaa

SEQ ID NO: 99152 - DNA, 19 bp, Homo sapiens
  siRNA target sequence for RIPK1 (NM_003804.2,1706-1724).
ctgctaagtaccaagctat

SEQ ID NO: 99153 - DNA, 19 bp, Homo sapiens
  siRNA target sequence for RIPK1 (NM_003804.2,1709-1727).
ctaagtaccaagctatctt

SEQ ID NO: 99154 - DNA, 19 bp, Homo sapiens
  siRNA target sequence for RIPK1 (NM_003804.2,1713-1731).
gtaccaagctatctttgat

SEQ ID NO: 99155 - DNA, 19 bp, Homo sapiens
  siRNA target sequence for RIPK1 (NM_003804.2,1737-1755).
cactagtctgacggataaa

SEQ ID NO: 99156 - DNA, 19 bp, Homo sapiens
  siRNA target sequence for RIPK1 (NM_003804.2,1739-1757).
ctagtctgacggataaaca

SEQ ID NO: 99157 - DNA, 19 bp, Homo sapiens
  siRNA target sequence for RIPK1 (NM_003804.2,1761-1779).
ggacccaatcagggaaaat

SEQ ID NO: 99158 - DNA, 19 bp, Homo sapiens
  siRNA target sequence for RIPK1 (NM_003804.2,1867-1885).
ggactgaaagaaaaggttt

SEQ ID NO: 99159 - DNA, 19 bp, Homo sapiens
  siRNA target sequence for RIPK2 (NM_003821.4,411-429).
ccgctgctcgacagtgaaa

SEQ ID NO: 99160 - DNA, 19 bp, Homo sapiens
  siRNA target sequence for RIPK2 (NM_003821.4,414-432).
ctgctcgacagtgaaagaa

SEQ ID NO: 99161 - DNA, 19 bp, Homo sapiens
  siRNA target sequence for RIPK2 (NM_003821.4,419-437).
cgacagtgaaagaaaggat

SEQ ID NO: 99162 - DNA, 19 bp, Homo sapiens
  siRNA target sequence for RIPK2 (NM_003821.4,440-458).
cttaagagaagctgaaatt

SEQ ID NO: 99163 - DNA, 19 bp, Homo sapiens
  siRNA target sequence for RIPK2 (NM_003821.4,462-480).
cacaaagctagatttagtt

SEQ ID NO: 99164 - DNA, 19 bp, Homo sapiens
  siRNA target sequence for RIPK2 (NM_003821.4,469-487).
ctagatttagttacattct

SEQ ID NO: 99165 - DNA, 19 bp, Homo sapiens
  siRNA target sequence for RIPK2 (NM_003821.4,597-615).
gttgcttggccattgagat

SEQ ID NO: 99166 - DNA, 19 bp, Homo sapiens
  siRNA target sequence for RIPK2 (NM_003821.4,645-663).
gtaaattacctgcacaata

SEQ ID NO: 99167 - DNA, 19 bp, Homo sapiens
  siRNA target sequence for RIPK2 (NM_003821.4,673-691).
ctttacttcatcatgactt

SEQ ID NO: 99168 - DNA, 19 bp, Homo sapiens
  siRNA target sequence for RIPK2 (NM_003821.4,741-759).
gattttggtttatcaaagt

SEQ ID NO: 99169 - DNA, 19 bp, Homo sapiens
  siRNA target sequence for RIPK2 (NM_003821.4,780-798).
cagtcacgaagtagcaaat

SEQ ID NO: 99170 - DNA, 19 bp, Homo sapiens
  siRNA target sequence for RIPK2 (NM_003821.4,807-825).
gaaggagggacaattatct

SEQ ID NO: 99171 - DNA, 19 bp, Homo sapiens
  siRNA target sequence for RIPK2 (NM_003821.4,810-828).
ggagggacaattatctata

SEQ ID NO: 99172 - DNA, 19 bp, Homo sapiens
  siRNA target sequence for RIPK2 (NM_003821.4,811-829).
gagggacaattatctatat

SEQ ID NO: 99173 - DNA, 19 bp, Homo sapiens
  siRNA target sequence for RIPK2 (NM_003821.4,871-889).
gtatcaagcacgatatata

SEQ ID NO: 99174 - DNA, 19 bp, Homo sapiens
  siRNA target sequence for RIPK2 (NM_003821.4,939-957).
gaagatgtcaccaatcctt

SEQ ID NO: 99175 - DNA, 19 bp, Homo sapiens
  siRNA target sequence for RIPK2 (NM_003821.4,949-967).
ccaatcctttgcagataat

SEQ ID NO: 99176 - DNA, 19 bp, Homo sapiens
  siRNA target sequence for RIPK2 (NM_003821.4,984-1002).
ggacatcgacctgttatta

SEQ ID NO: 99177 - DNA, 19 bp, Homo sapiens
  siRNA target sequence for RIPK2 (NM_003821.4,985-1003).
gacatcgacctgttattaa

SEQ ID NO: 99178 - DNA, 19 bp, Homo sapiens
  siRNA target sequence for RIPK2 (NM_003821.4,1030-1048).
ctcaccgagcacgtatgat

SEQ ID NO: 99179 - DNA, 19 bp, Homo sapiens
  siRNA target sequence for RIPK2 (NM_003821.4,1032-1050).
caccgagcacgtatgatct

SEQ ID NO: 99180 - DNA, 19 bp, Homo sapiens
  siRNA target sequence for RIPK2 (NM_003821.4,1038-1056).
gcacgtatgatctctctaa

SEQ ID NO: 99181 - DNA, 19 bp, Homo sapiens
  siRNA target sequence for RIPK2 (NM_003821.4,1046-1064).
gatctctctaatagaaagt

SEQ ID NO: 99182 - DNA, 19 bp, Homo sapiens
  siRNA target sequence for RIPK2 (NM_003821.4,1207-1225).
gtgccattcacctatgtga

SEQ ID NO: 99183 - DNA, 19 bp, Homo sapiens
  siRNA target sequence for RIPK2 (NM_003821.4,1269-1287).
ggtccacaagaggaatcat

SEQ ID NO: 99184 - DNA, 19 bp, Homo sapiens
  siRNA target sequence for RIPK2 (NM_003821.4,1358-1376).
caatgattttttatctaga

SEQ ID NO: 99185 - DNA, 19 bp, Homo sapiens
  siRNA target sequence for RIPK2 (NM_003821.4,1380-1398).
gctcaagactgttatttta

SEQ ID NO: 99186 - DNA, 19 bp, Homo sapiens
  siRNA target sequence for RIPK2 (NM_003821.4,1439-1457).
caccatttctggatctcaa

SEQ ID NO: 99187 - DNA, 19 bp, Homo sapiens
  siRNA target sequence for RIPK2 (NM_003821.4,1584-1602).
gaagacattgtgaaccaaa

SEQ ID NO: 99188 - DNA, 19 bp, Homo sapiens
  siRNA target sequence for RIPK2 (NM_003821.4,1645-1663).
ccagggacttgatcatgaa

SEQ ID NO: 99189 - DNA, 19 bp, Homo sapiens
  siRNA target sequence for RIPK2 (NM_003821.4,1646-1664).
cagggacttgatcatgaaa

SEQ ID NO: 99190 - DNA, 19 bp, Homo sapiens
  siRNA target sequence for RIPK2 (NM_003821.4,1648-1666).
gggacttgatcatgaaaga

SEQ ID NO: 99191 - DNA, 19 bp, Homo sapiens
  siRNA target sequence for RIPK2 (NM_003821.4,1665-1683).
gaggactatgaacttgtta

SEQ ID NO: 99192 - DNA, 19 bp, Homo sapiens
  siRNA target sequence for RIPK2 (NM_003821.4,1667-1685).
ggactatgaacttgttagt

SEQ ID NO: 99193 - DNA, 19 bp, Homo sapiens
  siRNA target sequence for RIPK2 (NM_003821.4,1668-1686).
gactatgaacttgttagta

SEQ ID NO: 99194 - DNA, 19 bp, Homo sapiens
  siRNA target sequence for RIPK2 (NM_003821.4,1691-1709).
gcctacaaggacctcaaaa

SEQ ID NO: 99195 - DNA, 19 bp, Homo sapiens
  siRNA target sequence for RIPK2 (NM_003821.4,1693-1711).
ctacaaggacctcaaaagt

SEQ ID NO: 99196 - DNA, 19 bp, Homo sapiens
  siRNA target sequence for RIPK2 (NM_003821.4,1705-1723).
caaaagtcagacaattact

SEQ ID NO: 99197 - DNA, 19 bp, Homo sapiens
  siRNA target sequence for RIPK2 (NM_003821.4,1755-1773).
gccaaagttatagtacaaa

SEQ ID NO: 99198 - DNA, 19 bp, Homo sapiens
  siRNA target sequence for RIPK2 (NM_003821.4,1756-1774).
ccaaagttatagtacaaaa

SEQ ID NO: 99199 - DNA, 19 bp, Homo sapiens
  siRNA target sequence for RIPK2 (NM_003821.4,1805-1823).
gccttacccggaaatactt

SEQ ID NO: 99200 - DNA, 19 bp, Homo sapiens
  siRNA target sequence for RIPK2 (NM_003821.4,1807-1825).
cttacccggaaatacttgt

SEQ ID NO: 99201 - DNA, 19 bp, Homo sapiens
  siRNA target sequence for RIPK2 (NM_003821.4,1834-1852).
gatcaccatctttaaattt

SEQ ID NO: 99202 - DNA, 19 bp, Homo sapiens
  siRNA target sequence for RIPK2 (NM_003821.4,1837-1855).
caccatctttaaatttact

SEQ ID NO: 99203 - DNA, 19 bp, Homo sapiens
  siRNA target sequence for RIPK2 (NM_003821.4,1840-1858).
catctttaaatttacttca

SEQ ID NO: 99204 - DNA, 19 bp, Homo sapiens
  siRNA target sequence for ROCK1 (NM_005406.1,3-21).
gtcgactggggacagtttt

SEQ ID NO: 99205 - DNA, 19 bp, Homo sapiens
  siRNA target sequence for ROCK1 (NM_005406.1,5-23).
cgactggggacagttttga

SEQ ID NO: 99206 - DNA, 19 bp, Homo sapiens
  siRNA target sequence for ROCK1 (NM_005406.1,70-88).
gaagtgaattcggattgtt

SEQ ID NO: 99207 - DNA, 19 bp, Homo sapiens
  siRNA target sequence for ROCK1 (NM_005406.1,170-188).
gcagatataaagacacaat

SEQ ID NO: 99208 - DNA, 19 bp, Homo sapiens
  siRNA target sequence for ROCK1 (NM_005406.1,232-250).
gtagtgaaggtgattggta

SEQ ID NO: 99209 - DNA, 19 bp, Homo sapiens
  siRNA target sequence for ROCK1 (NM_005406.1,243-261).
gattggtagaggtgcattt

SEQ ID NO: 99210 - DNA, 19 bp, Homo sapiens
  siRNA target sequence for ROCK1 (NM_005406.1,262-280).
ggagaagttcaattggtaa

SEQ ID NO: 99211 - DNA, 19 bp, Homo sapiens
  siRNA target sequence for ROCK1 (NM_005406.1,425-443).
cattccaagatgatcgtta

SEQ ID NO: 99212 - DNA, 19 bp, Homo sapiens
  siRNA target sequence for ROCK1 (NM_005406.1,430-448).
caagatgatcgttatctct

SEQ ID NO: 99213 - DNA, 19 bp, Homo sapiens
  siRNA target sequence for ROCK1 (NM_005406.1,476-494).
gagatcttgtaaacttaat

SEQ ID NO: 99214 - DNA, 19 bp, Homo sapiens
  siRNA target sequence for ROCK1 (NM_005406.1,478-496).
gatcttgtaaacttaatga

SEQ ID NO: 99215 - DNA, 19 bp, Homo sapiens
  siRNA target sequence for ROCK1 (NM_005406.1,531-549).
ctatactgcagaagtagtt

SEQ ID NO: 99216 - DNA, 19 bp, Homo sapiens
  siRNA target sequence for ROCK1 (NM_005406.1,553-571).
gcattggatgcaatccatt

SEQ ID NO: 99217 - DNA, 19 bp, Homo sapiens
  siRNA target sequence for ROCK1 (NM_005406.1,609-627).
catgctgctggataaatct

SEQ ID NO: 99218 - DNA, 19 bp, Homo sapiens
  siRNA target sequence for ROCK1 (NM_005406.1,652-670).
ggtacttgtatgaagatga

SEQ ID NO: 99219 - DNA, 19 bp, Homo sapiens
  siRNA target sequence for ROCK1 (NM_005406.1,744-762).
ccaaggtggtgatggttat

SEQ ID NO: 99220 - DNA, 19 bp, Homo sapiens
  siRNA target sequence for ROCK1 (NM_005406.1,783-801).
gtggtcggttggggtattt

SEQ ID NO: 99221 - DNA, 19 bp, Homo sapiens
  siRNA target sequence for ROCK1 (NM_005406.1,786-804).
gtcggttggggtattttta

SEQ ID NO: 99222 - DNA, 19 bp, Homo sapiens
  siRNA target sequence for ROCK1 (NM_005406.1,793-811).
ggggtatttttatacgaaa

SEQ ID NO: 99223 - DNA, 19 bp, Homo sapiens
  siRNA target sequence for ROCK1 (NM_005406.1,966-984).
gaggttagggcgaaatggt

SEQ ID NO: 99224 - DNA, 19 bp, Homo sapiens
  siRNA target sequence for ROCK1 (NM_005406.1,1060-1078).
ccagttgtacccgatttaa

SEQ ID NO: 99225 - DNA, 19 bp, Homo sapiens
  siRNA target sequence for ROCK1 (NM_005406.1,1084-1102).
gacattgatactagtaatt

SEQ ID NO: 99226 - DNA, 19 bp, Homo sapiens
  siRNA target sequence for ROCK1 (NM_005406.1,1157-1175).
ctttcgttggcaatcaact

SEQ ID NO: 99227 - DNA, 19 bp, Homo sapiens
  siRNA target sequence for ROCK1 (NM_005406.1,1186-1204).
ggatttacatattatagca

SEQ ID NO: 99228 - DNA, 19 bp, Homo sapiens
  siRNA target sequence for ROCK1 (NM_005406.1,1203-1221).
caatcgtagatacttatct

SEQ ID NO: 99229 - DNA, 19 bp, Homo sapiens
  siRNA target sequence for ROCK1 (NM_005406.1,1231-1249).
cctaatgataacagaacta

SEQ ID NO: 99230 - DNA, 19 bp, Homo sapiens
  siRNA target sequence for ROCK1 (NM_005406.1,1247-1265).
ctagctccaatgcagataa

SEQ ID NO: 99231 - DNA, 19 bp, Homo sapiens
  siRNA target sequence for ROCK1 (NM_005406.1,1356-1374).
gtgcagaacctcaaacata

SEQ ID NO: 99232 - DNA, 19 bp, Homo sapiens
  siRNA target sequence for ROCK1 (NM_005406.1,1358-1376).
gcagaacctcaaacataaa

SEQ ID NO: 99233 - DNA, 19 bp, Homo sapiens
  siRNA target sequence for ROCK1 (NM_005406.1,1364-1382).
cctcaaacataaaactaga

SEQ ID NO: 99234 - DNA, 19 bp, Homo sapiens
  siRNA target sequence for ROCK1 (NM_005406.1,1581-1599).
gaaagtcagtcagaattca

SEQ ID NO: 99235 - DNA, 19 bp, Homo sapiens
  siRNA target sequence for ROCK1 (NM_005406.1,1645-1663).
gaagccaatgacttactta

SEQ ID NO: 99236 - DNA, 19 bp, Homo sapiens
  siRNA target sequence for ROCK1 (NM_005406.1,1654-1672).
gacttacttaggacagaat

SEQ ID NO: 99237 - DNA, 19 bp, Homo sapiens
  siRNA target sequence for ROCK1 (NM_005406.1,1706-1724).
cagagatgagcaagtcaat

SEQ ID NO: 99238 - DNA, 19 bp, Homo sapiens
  siRNA target sequence for ROCK1 (NM_005406.1,1716-1734).
caagtcaattagtcagtta

SEQ ID NO: 99239 - DNA, 19 bp, Homo sapiens
  siRNA target sequence for ROCK1 (NM_005406.1,1752-1770).
gttgcaagagagaaatcga

SEQ ID NO: 99240 - DNA, 19 bp, Homo sapiens
  siRNA target sequence for ROCK1 (NM_005406.1,1763-1781).
gaaatcgaattttagagaa

SEQ ID NO: 99241 - DNA, 19 bp, Homo sapiens
  siRNA target sequence for ROCK1 (NM_005406.1,1812-1830).
ccagctgcaagctatatta

SEQ ID NO: 99242 - DNA, 19 bp, Homo sapiens
  siRNA target sequence for ROCK1 (NM_005406.1,1815-1833).
gctgcaagctatattagaa

SEQ ID NO: 99243 - DNA, 19 bp, Homo sapiens
  siRNA target sequence for ROCK1 (NM_005406.1,1876-1894).
gaccttcaagctcgaatta

SEQ ID NO: 99244 - DNA, 19 bp, Homo sapiens
  siRNA target sequence for ROCK1 (NM_005406.1,1878-1896).
ccttcaagctcgaattaca

SEQ ID NO: 99245 - DNA, 19 bp, Homo sapiens
  siRNA target sequence for ROCK1 (NM_005406.1,1879-1897).
cttcaagctcgaattacat

SEQ ID NO: 99246 - DNA, 19 bp, Homo sapiens
  siRNA target sequence for ROCK1 (NM_005406.1,1882-1900).
caagctcgaattacatctt

SEQ ID NO: 99247 - DNA, 19 bp, Homo sapiens
  siRNA target sequence for ROCK1 (NM_005406.1,1923-1941).
caaacataatctcgaaaaa

SEQ ID NO: 99248 - DNA, 19 bp, Homo sapiens
  siRNA target sequence for ROCK1 (NM_005406.1,1966-1984).
caagacatgcttaatcact

SEQ ID NO: 99249 - DNA, 19 bp, Homo sapiens
  siRNA target sequence for ROCK1 (NM_005406.1,2022-2040).
ctacaaacttaaatcatta

SEQ ID NO: 99250 - DNA, 19 bp, Homo sapiens
  siRNA target sequence for ROCK1 (NM_005406.1,2049-2067).
gttagaacaagaggtaaat

SEQ ID NO: 99251 - DNA, 19 bp, Homo sapiens
  siRNA target sequence for ROCK1 (NM_005406.1,2077-2095).
gtaaccaaagctcgtttaa

SEQ ID NO: 99252 - DNA, 19 bp, Homo sapiens
  siRNA target sequence for ROCK1 (NM_005406.1,2081-2099).
ccaaagctcgtttaactga

SEQ ID NO: 99253 - DNA, 19 bp, Homo sapiens
  siRNA target sequence for ROCK1 (NM_005406.1,2087-2105).
ctcgtttaactgacaaaca

SEQ ID NO: 99254 - DNA, 19 bp, Homo sapiens
  siRNA target sequence for ROCK1 (NM_005406.1,2090-2108).
gtttaactgacaaacatca

SEQ ID NO: 99255 - DNA, 19 bp, Homo sapiens
  siRNA target sequence for ROCK1 (NM_005406.1,2096-2114).
ctgacaaacatcaatctat

SEQ ID NO: 99256 - DNA, 19 bp, Homo sapiens
  siRNA target sequence for ROCK1 (NM_005406.1,2197-2215).
cgggttgttcagattgaga

SEQ ID NO: 99257 - DNA, 19 bp, Homo sapiens
  siRNA target sequence for ROCK1 (NM_005406.1,2225-2243).
ccatgctagacgttgatct

SEQ ID NO: 99258 - DNA, 19 bp, Homo sapiens
  siRNA target sequence for ROCK1 (NM_005406.1,2298-2316).
ggatgaagttaagaatcta

SEQ ID NO: 99259 - DNA, 19 bp, Homo sapiens
  siRNA target sequence for ROCK1 (NM_005406.1,2323-2341).
caactggagcaggaatcaa

SEQ ID NO: 99260 - DNA, 19 bp, Homo sapiens
  siRNA target sequence for ROCK1 (NM_005406.1,2326-2344).
ctggagcaggaatcaaata

SEQ ID NO: 99261 - DNA, 19 bp, Homo sapiens
  siRNA target sequence for ROCK1 (NM_005406.1,2349-2367).
gctgttgttacaaaatgaa

SEQ ID NO: 99262 - DNA, 19 bp, Homo sapiens
  siRNA target sequence for ROCK1 (NM_005406.1,2381-2399).
catttgaggcagacaattt

SEQ ID NO: 99263 - DNA, 19 bp, Homo sapiens
  siRNA target sequence for ROCK1 (NM_005406.1,2477-2495).
ctcagcttacgaaacagta

SEQ ID NO: 99264 - DNA, 19 bp, Homo sapiens
  siRNA target sequence for ROCK1 (NM_005406.1,2481-2499).
gcttacgaaacagtataga

SEQ ID NO: 99265 - DNA, 19 bp, Homo sapiens
  siRNA target sequence for ROCK1 (NM_005406.1,2514-2532).
gatgcgggagctacaagat

SEQ ID NO: 99266 - DNA, 19 bp, Homo sapiens
  siRNA target sequence for ROCK1 (NM_005406.1,2536-2554).
cttgaagctgagcaatatt

SEQ ID NO: 99267 - DNA, 19 bp, Homo sapiens
  siRNA target sequence for ROCK1 (NM_005406.1,2720-2738).
gccttctggaagaacagta

SEQ ID NO: 99268 - DNA, 19 bp, Homo sapiens
  siRNA target sequence for ROCK1 (NM_005406.1,2731-2749).
gaacagtattttgaattga

SEQ ID NO: 99269 - DNA, 19 bp, Homo sapiens
  siRNA target sequence for ROCK1 (NM_005406.1,2810-2828).
ctgttagtcggcttgaaga

SEQ ID NO: 99270 - DNA, 19 bp, Homo sapiens
  siRNA target sequence for ROCK1 (NM_005406.1,2816-2834).
gtcggcttgaagaagcaaa

SEQ ID NO: 99271 - DNA, 19 bp, Homo sapiens
  siRNA target sequence for ROCK1 (NM_005406.1,2835-2853).
cagcatgctaaccaaagat

SEQ ID NO: 99272 - DNA, 19 bp, Homo sapiens
  siRNA target sequence for ROCK1 (NM_005406.1,2979-2997).
cactgaacgaacccttaaa

SEQ ID NO: 99273 - DNA, 19 bp, Homo sapiens
  siRNA target sequence for ROCK1 (NM_005406.1,3071-3089).
cacaagatttgagaaagaa

SEQ ID NO: 99274 - DNA, 19 bp, Homo sapiens
  siRNA target sequence for ROCK1 (NM_005406.1,3144-3162).
caaccagatggtagtgaaa

SEQ ID NO: 99275 - DNA, 19 bp, Homo sapiens
  siRNA target sequence for ROCK1 (NM_005406.1,3147-3165).
ccagatggtagtgaaacat

SEQ ID NO: 99276 - DNA, 19 bp, Homo sapiens
  siRNA target sequence for ROCK1 (NM_005406.1,3183-3201).
catgcaagcgcaattggta

SEQ ID NO: 99277 - DNA, 19 bp, Homo sapiens
  siRNA target sequence for ROCK1 (NM_005406.1,3190-3208).
gcgcaattggtagaagaat

SEQ ID NO: 99278 - DNA, 19 bp, Homo sapiens
  siRNA target sequence for ROCK1 (NM_005406.1,3242-3260).
ccagcaaagagagtgatat

SEQ ID NO: 99279 - DNA, 19 bp, Homo sapiens
  siRNA target sequence for ROCK1 (NM_005406.1,3265-3283).
caattgcgtgctaaacttt

SEQ ID NO: 99280 - DNA, 19 bp, Homo sapiens
  siRNA target sequence for ROCK1 (NM_005406.1,3286-3304).
gacctctcggattctacaa

SEQ ID NO: 99281 - DNA, 19 bp, Homo sapiens
  siRNA target sequence for ROCK1 (NM_005406.1,3288-3306).
cctctcggattctacaagt

SEQ ID NO: 99282 - DNA, 19 bp, Homo sapiens
  siRNA target sequence for ROCK1 (NM_005406.1,3299-3317).
ctacaagtgttgctagttt

SEQ ID NO: 99283 - DNA, 19 bp, Homo sapiens
  siRNA target sequence for ROCK1 (NM_005406.1,3320-3338).
ctagtgctgatgaaactga

SEQ ID NO: 99284 - DNA, 19 bp, Homo sapiens
  siRNA target sequence for ROCK1 (NM_005406.1,3368-3386).
gttggctttcagtaccaaa

SEQ ID NO: 99285 - DNA, 19 bp, Homo sapiens
  siRNA target sequence for ROCK1 (NM_005406.1,3372-3390).
gctttcagtaccaaataga

SEQ ID NO: 99286 - DNA, 19 bp, Homo sapiens
  siRNA target sequence for ROCK1 (NM_005406.1,3410-3428).
gctggaagaaacagtatgt

SEQ ID NO: 99287 - DNA, 19 bp, Homo sapiens
  siRNA target sequence for ROCK2 (NM_004850.2,795-813).
cgcagaaggtttatgctat

SEQ ID NO: 99288 - DNA, 19 bp, Homo sapiens
  siRNA target sequence for ROCK2 (NM_004850.2,942-960).
ggtatctgtacatggtaat

SEQ ID NO: 99289 - DNA, 19 bp, Homo sapiens
  siRNA target sequence for ROCK2 (NM_004850.2,977-995).
ggagaccttgtaaacctta

SEQ ID NO: 99290 - DNA, 19 bp, Homo sapiens
  siRNA target sequence for ROCK2 (NM_004850.2,982-1000).
ccttgtaaaccttatgagt

SEQ ID NO: 99291 - DNA, 19 bp, Homo sapiens
  siRNA target sequence for ROCK2 (NM_004850.2,983-1001).
cttgtaaaccttatgagta

SEQ ID NO: 99292 - DNA, 19 bp, Homo sapiens
  siRNA target sequence for ROCK2 (NM_004850.2,986-1004).
gtaaaccttatgagtaatt

SEQ ID NO: 99293 - DNA, 19 bp, Homo sapiens
  siRNA target sequence for ROCK2 (NM_004850.2,1055-1073).
gctctggatgcaatacact

SEQ ID NO: 99294 - DNA, 19 bp, Homo sapiens
  siRNA target sequence for ROCK2 (NM_004850.2,1175-1193).
gaaacaggcatggtacatt

SEQ ID NO: 99295 - DNA, 19 bp, Homo sapiens
  siRNA target sequence for ROCK2 (NM_004850.2,1284-1302).
ggtggtctgtaggtgtttt

SEQ ID NO: 99296 - DNA, 19 bp, Homo sapiens
  siRNA target sequence for ROCK2 (NM_004850.2,1287-1305).
ggtctgtaggtgttttcct

SEQ ID NO: 99297 - DNA, 19 bp, Homo sapiens
  siRNA target sequence for ROCK2 (NM_004850.2,1321-1339).
gggggatactccattttat

SEQ ID NO: 99298 - DNA, 19 bp, Homo sapiens
  siRNA target sequence for ROCK2 (NM_004850.2,1349-1367).
cttgtaggaacatatagca

SEQ ID NO: 99299 - DNA, 19 bp, Homo sapiens
  siRNA target sequence for ROCK2 (NM_004850.2,1465-1483).
ggtacgacttgggagaaat

SEQ ID NO: 99300 - DNA, 19 bp, Homo sapiens
  siRNA target sequence for ROCK2 (NM_004850.2,1528-1546).
gtggcattgggataacata

SEQ ID NO: 99301 - DNA, 19 bp, Homo sapiens
  siRNA target sequence for ROCK2 (NM_004850.2,1531-1549).
gcattgggataacataaga

SEQ ID NO: 99302 - DNA, 19 bp, Homo sapiens
  siRNA target sequence for ROCK2 (NM_004850.2,1577-1595).
ctcagcagtgacatagaca

SEQ ID NO: 99303 - DNA, 19 bp, Homo sapiens
  siRNA target sequence for ROCK2 (NM_004850.2,1596-1614).
gcagcaatttcgatgacat

SEQ ID NO: 99304 - DNA, 19 bp, Homo sapiens
  siRNA target sequence for ROCK2 (NM_004850.2,1597-1615).
cagcaatttcgatgacatt

SEQ ID NO: 99305 - DNA, 19 bp, Homo sapiens
  siRNA target sequence for ROCK2 (NM_004850.2,1599-1617).
gcaatttcgatgacattga

SEQ ID NO: 99306 - DNA, 19 bp, Homo sapiens
  siRNA target sequence for ROCK2 (NM_004850.2,1668-1686).
gaaatcagctgcctttcat

SEQ ID NO: 99307 - DNA, 19 bp, Homo sapiens
  siRNA target sequence for ROCK2 (NM_004850.2,1676-1694).
ctgcctttcatcggattta

SEQ ID NO: 99308 - DNA, 19 bp, Homo sapiens
  siRNA target sequence for ROCK2 (NM_004850.2,1680-1698).
ctttcatcggatttaccta

SEQ ID NO: 99309 - DNA, 19 bp, Homo sapiens
  siRNA target sequence for ROCK2 (NM_004850.2,1684-1702).
catcggatttacctactat

SEQ ID NO: 99310 - DNA, 19 bp, Homo sapiens
  siRNA target sequence for ROCK2 (NM_004850.2,1687-1705).
cggatttacctactataga

SEQ ID NO: 99311 - DNA, 19 bp, Homo sapiens
  siRNA target sequence for ROCK2 (NM_004850.2,1695-1713).
cctactatagagaaaattt

SEQ ID NO: 99312 - DNA, 19 bp, Homo sapiens
  siRNA target sequence for ROCK2 (NM_004850.2,1861-1879).
gtgcaaatctgttaatact

SEQ ID NO: 99313 - DNA, 19 bp, Homo sapiens
  siRNA target sequence for ROCK2 (NM_004850.2,1871-1889).
gttaatactcgcctagaaa

SEQ ID NO: 99314 - DNA, 19 bp, Homo sapiens
  siRNA target sequence for ROCK2 (NM_004850.2,1915-1933).
gattaccttacggaaaagt

SEQ ID NO: 99315 - DNA, 19 bp, Homo sapiens
  siRNA target sequence for ROCK2 (NM_004850.2,1941-1959).
cagcattaagacagttaga

SEQ ID NO: 99316 - DNA, 19 bp, Homo sapiens
  siRNA target sequence for ROCK2 (NM_004850.2,1970-1988).
gcgcttcttcagcacaaaa

SEQ ID NO: 99317 - DNA, 19 bp, Homo sapiens
  siRNA target sequence for ROCK2 (NM_004850.2,2021-2039).
gcagacaaaaaacgaaatt

SEQ ID NO: 99318 - DNA, 19 bp, Homo sapiens
  siRNA target sequence for ROCK2 (NM_004850.2,2056-2074).
cagcttaaaagatcaactt

SEQ ID NO: 99319 - DNA, 19 bp, Homo sapiens
  siRNA target sequence for ROCK2 (NM_004850.2,2059-2077).
cttaaaagatcaacttgaa

SEQ ID NO: 99320 - DNA, 19 bp, Homo sapiens
  siRNA target sequence for ROCK2 (NM_004850.2,2146-2164).
ggatgaaaccaatgcttta

SEQ ID NO: 99321 - DNA, 19 bp, Homo sapiens
  siRNA target sequence for ROCK2 (NM_004850.2,2165-2183).
ctgcgaacagagtctgata

SEQ ID NO: 99322 - DNA, 19 bp, Homo sapiens
  siRNA target sequence for ROCK2 (NM_004850.2,2167-2185).
gcgaacagagtctgatact

SEQ ID NO: 99323 - DNA, 19 bp, Homo sapiens
  siRNA target sequence for ROCK2 (NM_004850.2,2184-2202).
ctgcagcccggttaaggaa

SEQ ID NO: 99324 - DNA, 19 bp, Homo sapiens
  siRNA target sequence for ROCK2 (NM_004850.2,2186-2204).
gcagcccggttaaggaaaa

SEQ ID NO: 99325 - DNA, 19 bp, Homo sapiens
  siRNA target sequence for ROCK2 (NM_004850.2,2210-2228).
gcagaaagttcaaaacaga

SEQ ID NO: 99326 - DNA, 19 bp, Homo sapiens
  siRNA target sequence for ROCK2 (NM_004850.2,2236-2254).
gctggaatctaacaataga

SEQ ID NO: 99327 - DNA, 19 bp, Homo sapiens
  siRNA target sequence for ROCK2 (NM_004850.2,2244-2262).
ctaacaatagagatctaca

SEQ ID NO: 99328 - DNA, 19 bp, Homo sapiens
  siRNA target sequence for ROCK2 (NM_004850.2,2248-2266).
caatagagatctacaagat

SEQ ID NO: 99329 - DNA, 19 bp, Homo sapiens
  siRNA target sequence for ROCK2 (NM_004850.2,2422-2440).
gaacggcaaaatcttacta

SEQ ID NO: 99330 - DNA, 19 bp, Homo sapiens
  siRNA target sequence for ROCK2 (NM_004850.2,2465-2483).
caacttcaggagagattta

SEQ ID NO: 99331 - DNA, 19 bp, Homo sapiens
  siRNA target sequence for ROCK2 (NM_004850.2,2509-2527).
catggaaatagatatgaca

SEQ ID NO: 99332 - DNA, 19 bp, Homo sapiens
  siRNA target sequence for ROCK2 (NM_004850.2,2519-2537).
gatatgacataccaactaa

SEQ ID NO: 99333 - DNA, 19 bp, Homo sapiens
  siRNA target sequence for ROCK2 (NM_004850.2,2524-2542).
gacataccaactaaaagtt

SEQ ID NO: 99334 - DNA, 19 bp, Homo sapiens
  siRNA target sequence for ROCK2 (NM_004850.2,2526-2544).
cataccaactaaaagttat

SEQ ID NO: 99335 - DNA, 19 bp, Homo sapiens
  siRNA target sequence for ROCK2 (NM_004850.2,2590-2608).
ggcacgactagcagataaa

SEQ ID NO: 99336 - DNA, 19 bp, Homo sapiens
  siRNA target sequence for ROCK2 (NM_004850.2,2591-2609).
gcacgactagcagataaaa

SEQ ID NO: 99337 - DNA, 19 bp, Homo sapiens
  siRNA target sequence for ROCK2 (NM_004850.2,2592-2610).
cacgactagcagataaaaa

SEQ ID NO: 99338 - DNA, 19 bp, Homo sapiens
  siRNA target sequence for ROCK2 (NM_004850.2,2594-2612).
cgactagcagataaaaata

SEQ ID NO: 99339 - DNA, 19 bp, Homo sapiens
  siRNA target sequence for ROCK2 (NM_004850.2,2671-2689).
gctcttggaggaaagaact

SEQ ID NO: 99340 - DNA, 19 bp, Homo sapiens
  siRNA target sequence for ROCK2 (NM_004850.2,2696-2714).
cagaaagtggagaacctat

SEQ ID NO: 99341 - DNA, 19 bp, Homo sapiens
  siRNA target sequence for ROCK2 (NM_004850.2,2728-2746).
gaaaagatgttctctatta

SEQ ID NO: 99342 - DNA, 19 bp, Homo sapiens
  siRNA target sequence for ROCK2 (NM_004850.2,2747-2765).
gactgtgacctcaaacagt

SEQ ID NO: 99343 - DNA, 19 bp, Homo sapiens
  siRNA target sequence for ROCK2 (NM_004850.2,2819-2837).
gttagaaacctgacattaa

SEQ ID NO: 99344 - DNA, 19 bp, Homo sapiens
  siRNA target sequence for ROCK2 (NM_004850.2,2891-2909).
caaacacaacaggttaaca

SEQ ID NO: 99345 - DNA, 19 bp, Homo sapiens
  siRNA target sequence for ROCK2 (NM_004850.2,2897-2915).
caacaggttaacacactaa

SEQ ID NO: 99346 - DNA, 19 bp, Homo sapiens
  siRNA target sequence for ROCK2 (NM_004850.2,2903-2921).
gttaacacactaaaaatgt

SEQ ID NO: 99347 - DNA, 19 bp, Homo sapiens
  siRNA target sequence for ROCK2 (NM_004850.2,3014-3032).
gatgcagatgggcaaatga

SEQ ID NO: 99348 - DNA, 19 bp, Homo sapiens
  siRNA target sequence for ROCK2 (NM_004850.2,3049-3067).
gctcgaagcagaacagtat

SEQ ID NO: 99349 - DNA, 19 bp, Homo sapiens
  siRNA target sequence for ROCK2 (NM_004850.2,3050-3068).
ctcgaagcagaacagtatt

SEQ ID NO: 99350 - DNA, 19 bp, Homo sapiens
  siRNA target sequence for ROCK2 (NM_004850.2,3056-3074).
gcagaacagtatttctcaa

SEQ ID NO: 99351 - DNA, 19 bp, Homo sapiens
  siRNA target sequence for ROCK2 (NM_004850.2,3070-3088).
ctcaaccctttataaaaca

SEQ ID NO: 99352 - DNA, 19 bp, Homo sapiens
  siRNA target sequence for ROCK2 (NM_004850.2,3087-3105).
cacaagttagggagcttaa

SEQ ID NO: 99353 - DNA, 19 bp, Homo sapiens
  siRNA target sequence for ROCK2 (NM_004850.2,3229-3247).
gcaactggctcgttcaatt

SEQ ID NO: 99354 - DNA, 19 bp, Homo sapiens
  siRNA target sequence for ROCK2 (NM_004850.2,3310-3328).
gatgatggctagacacaaa

SEQ ID NO: 99355 - DNA, 19 bp, Homo sapiens
  siRNA target sequence for ROCK2 (NM_004850.2,3365-3383).
cttgaggaaactaatagga

SEQ ID NO: 99356 - DNA, 19 bp, Homo sapiens
  siRNA target sequence for ROCK2 (NM_004850.2,3371-3389).
gaaactaataggacactaa

SEQ ID NO: 99357 - DNA, 19 bp, Homo sapiens
  siRNA target sequence for ROCK2 (NM_004850.2,3401-3419).
gccaatcttgcaaatgaga

SEQ ID NO: 99358 - DNA, 19 bp, Homo sapiens
  siRNA target sequence for ROCK2 (NM_004850.2,3455-3473).
gagcaactgtcaagattga

SEQ ID NO: 99359 - DNA, 19 bp, Homo sapiens
  siRNA target sequence for ROCK2 (NM_004850.2,3463-3481).
gtcaagattgaaagatgaa

SEQ ID NO: 99360 - DNA, 19 bp, Homo sapiens
  siRNA target sequence for ROCK2 (NM_004850.2,3549-3567).
ctcaagctgtgaataagtt

SEQ ID NO: 99361 - DNA, 19 bp, Homo sapiens
  siRNA target sequence for ROCK2 (NM_004850.2,3570-3588).
ctgagatcatgaatcgaaa

SEQ ID NO: 99362 - DNA, 19 bp, Homo sapiens
  siRNA target sequence for ROCK2 (NM_004850.2,3574-3592).
gatcatgaatcgaaaagaa

SEQ ID NO: 99363 - DNA, 19 bp, Homo sapiens
  siRNA target sequence for ROCK2 (NM_004850.2,3596-3614).
gtcaagcgtggtaatgaca

SEQ ID NO: 99364 - DNA, 19 bp, Homo sapiens
  siRNA target sequence for ROCK2 (NM_004850.2,3613-3631).
cacagatgtgcggagaaaa

SEQ ID NO: 99365 - DNA, 19 bp, Homo sapiens
  siRNA target sequence for ROCK2 (NM_004850.2,3649-3667).
gctacatatggagcttaaa

SEQ ID NO: 99366 - DNA, 19 bp, Homo sapiens
  siRNA target sequence for ROCK2 (NM_004850.2,3650-3668).
ctacatatggagcttaaat

SEQ ID NO: 99367 - DNA, 19 bp, Homo sapiens
  siRNA target sequence for ROCK2 (NM_004850.2,3687-3705).
cccagcagatgatcaagta

SEQ ID NO: 99368 - DNA, 19 bp, Homo sapiens
  siRNA target sequence for ROCK2 (NM_004850.2,3743-3761).
gaagagagccagattcgaa

SEQ ID NO: 99369 - DNA, 19 bp, Homo sapiens
  siRNA target sequence for ROCK2 (NM_004850.2,3750-3768).
gccagattcgaattgaact

SEQ ID NO: 99370 - DNA, 19 bp, Homo sapiens
  siRNA target sequence for ROCK2 (NM_004850.2,3833-3851).
catattggtctggatagtt

SEQ ID NO: 99371 - DNA, 19 bp, Homo sapiens
  siRNA target sequence for ROCK2 (NM_004850.2,3890-3908).
gatgggtttccagaatcaa

SEQ ID NO: 99372 - DNA, 19 bp, Homo sapiens
  siRNA target sequence for ROCK2 (NM_004850.2,3894-3912).
ggtttccagaatcaagatt

SEQ ID NO: 99373 - DNA, 19 bp, Homo sapiens
  siRNA target sequence for ROCK2 (NM_004850.2,3927-3945).
cattgcctgtacgaaacaa

SEQ ID NO: 99374 - DNA, 19 bp, Homo sapiens
  siRNA target sequence for ROCK2 (NM_004850.2,3935-3953).
gtacgaaacaacactaaga

SEQ ID NO: 99375 - DNA, 19 bp, Homo sapiens
  siRNA target sequence for ROCK2 (NM_004850.2,3938-3956).
cgaaacaacactaagaaat

SEQ ID NO: 99376 - DNA, 19 bp, Homo sapiens
  siRNA target sequence for ROCK2 (NM_004850.2,3977-3995).
gtgattgtaagcagtaaga

SEQ ID NO: 99377 - DNA, 19 bp, Homo sapiens
  siRNA target sequence for ROCK2 (NM_004850.2,4036-4054).
caatccttacatggtttta

SEQ ID NO: 99378 - DNA, 19 bp, Homo sapiens
  siRNA target sequence for ROCK2 (NM_004850.2,4041-4059).
cttacatggttttagatat

SEQ ID NO: 99379 - DNA, 19 bp, Homo sapiens
  siRNA target sequence for ROCK2 (NM_004850.2,4336-4354).
ccgttgccatattaagtgt

SEQ ID NO: 99380 - DNA, 19 bp, Homo sapiens
  siRNA target sequence for ROCK2 (NM_004850.2,4341-4359).
gccatattaagtgtcataa

SEQ ID NO: 99381 - DNA, 19 bp, Homo sapiens
  siRNA target sequence for ROCK2 (NM_004850.2,4372-4390).
caaaaaggaggagattata

SEQ ID NO: 99382 - DNA, 19 bp, Homo sapiens
  siRNA target sequence for ROCK2 (NM_004850.2,4384-4402).
gattatagcaccttgcaaa

SEQ ID NO: 99383 - DNA, 19 bp, Homo sapiens
  siRNA target sequence for ROCK2 (NM_004850.2,4391-4409).
gcaccttgcaaagtatatt

SEQ ID NO: 99384 - DNA, 19 bp, Homo sapiens
  siRNA target sequence for ROCK2 (NM_004850.2,4392-4410).
caccttgcaaagtatatta

SEQ ID NO: 99385 - DNA, 19 bp, Homo sapiens
  siRNA target sequence for ROCK2 (NM_004850.2,4403-4421).
gtatattatgatatttcaa

SEQ ID NO: 99386 - DNA, 19 bp, Homo sapiens
  siRNA target sequence for ROCK2 (NM_004850.2,4422-4440).
cggcaaagaatctgttatt

SEQ ID NO: 99387 - DNA, 19 bp, Homo sapiens
  siRNA target sequence for ROCK2 (NM_004850.2,4423-4441).
ggcaaagaatctgttatta

SEQ ID NO: 99388 - DNA, 19 bp, Homo sapiens
  siRNA target sequence for ROCK2 (NM_004850.2,4435-4453).
gttattactagcaaattct

SEQ ID NO: 99389 - DNA, 19 bp, Homo sapiens
  siRNA target sequence for ROCK2 (NM_004850.2,4475-4493).
gttagtcggttggtgaaaa

SEQ ID NO: 99390 - DNA, 19 bp, Homo sapiens
  siRNA target sequence for ROCK2 (NM_004850.2,4522-4540).
cccttttgcccgatcatct

SEQ ID NO: 99391 - DNA, 19 bp, Homo sapiens
  siRNA target sequence for ROCK2 (NM_004850.2,4536-4554).
catctcctagaacttcaat

SEQ ID NO: 99392 - DNA, 19 bp, Homo sapiens
  siRNA target sequence for ROCK2 (NM_004850.2,4541-4559).
cctagaacttcaatgaaga

SEQ ID NO: 99393 - DNA, 19 bp, Homo sapiens
  siRNA target sequence for ROCK2 (NM_004850.2,4545-4563).
gaacttcaatgaagataca

SEQ ID NO: 99394 - DNA, 19 bp, Homo sapiens
  siRNA target sequence for ROCK2 (NM_004850.2,4564-4582).
gcaaaaccagtctattaga

SEQ ID NO: 99395 - DNA, 19 bp, Homo sapiens
  siRNA target sequence for ROCK2 (NM_004850.2,4593-4611).
gacagcttgccccaaacaa

SEQ ID NO: 99396 - DNA, 19 bp, Homo sapiens
  siRNA target sequence for ROCK2 (NM_004850.2,4598-4616).
cttgccccaaacaaaccta

SEQ ID NO: 99397 - DNA, 19 bp, Homo sapiens
  siRNA target sequence for ROR1 (NM_005012.1,477-495).
gtcagtcagtgctgaatta

SEQ ID NO: 99398 - DNA, 19 bp, Homo sapiens
  siRNA target sequence for ROR1 (NM_005012.1,479-497).
cagtcagtgctgaattagt

SEQ ID NO: 99399 - DNA, 19 bp, Homo sapiens
  siRNA target sequence for ROR1 (NM_005012.1,601-619).
gaactgcactgcaaagtct

SEQ ID NO: 99400 - DNA, 19 bp, Homo sapiens
  siRNA target sequence for ROR1 (NM_005012.1,638-656).
ccatccgctggttcaaaaa

SEQ ID NO: 99401 - DNA, 19 bp, Homo sapiens
  siRNA target sequence for ROR1 (NM_005012.1,639-657).
catccgctggttcaaaaat

SEQ ID NO: 99402 - DNA, 19 bp, Homo sapiens
  siRNA target sequence for ROR1 (NM_005012.1,642-660).
ccgctggttcaaaaatgat

SEQ ID NO: 99403 - DNA, 19 bp, Homo sapiens
  siRNA target sequence for ROR1 (NM_005012.1,693-711).
ctttcggtccaccatctat

SEQ ID NO: 99404 - DNA, 19 bp, Homo sapiens
  siRNA target sequence for ROR1 (NM_005012.1,714-732).
ctctcggctgcggattaga

SEQ ID NO: 99405 - DNA, 19 bp, Homo sapiens
  siRNA target sequence for ROR1 (NM_005012.1,806-824).
gagtcttgtttgtcaagtt

SEQ ID NO: 99406 - DNA, 19 bp, Homo sapiens
  siRNA target sequence for ROR1 (NM_005012.1,889-907).
ccatacagagggattgcat

SEQ ID NO: 99407 - DNA, 19 bp, Homo sapiens
  siRNA target sequence for ROR1 (NM_005012.1,922-940).
ggcaaccgcaccgtctata

SEQ ID NO: 99408 - DNA, 19 bp, Homo sapiens
  siRNA target sequence for ROR1 (NM_005012.1,923-941).
gcaaccgcaccgtctatat

SEQ ID NO: 99409 - DNA, 19 bp, Homo sapiens
  siRNA target sequence for ROR1 (NM_005012.1,932-950).
ccgtctatatggagtcttt

SEQ ID NO: 99410 - DNA, 19 bp, Homo sapiens
  siRNA target sequence for ROR1 (NM_005012.1,951-969).
gcacatgcaaggggaaata

SEQ ID NO: 99411 - DNA, 19 bp, Homo sapiens
  siRNA target sequence for ROR1 (NM_005012.1,1005-1023).
cacttccagtcacttatct

SEQ ID NO: 99412 - DNA, 19 bp, Homo sapiens
  siRNA target sequence for ROR1 (NM_005012.1,1071-1089).
cccgtactgcgatgaaact

SEQ ID NO: 99413 - DNA, 19 bp, Homo sapiens
  siRNA target sequence for ROR1 (NM_005012.1,1072-1090).
ccgtactgcgatgaaactt

SEQ ID NO: 99414 - DNA, 19 bp, Homo sapiens
  siRNA target sequence for ROR1 (NM_005012.1,1074-1092).
gtactgcgatgaaacttca

SEQ ID NO: 99415 - DNA, 19 bp, Homo sapiens
  siRNA target sequence for ROR1 (NM_005012.1,1111-1129).
gacttgtgtcgcgatgaat

SEQ ID NO: 99416 - DNA, 19 bp, Homo sapiens
  siRNA target sequence for ROR1 (NM_005012.1,1113-1131).
cttgtgtcgcgatgaatgt

SEQ ID NO: 99417 - DNA, 19 bp, Homo sapiens
  siRNA target sequence for ROR1 (NM_005012.1,1116-1134).
gtgtcgcgatgaatgtgaa

SEQ ID NO: 99418 - DNA, 19 bp, Homo sapiens
  siRNA target sequence for ROR1 (NM_005012.1,1118-1136).
gtcgcgatgaatgtgaaat

SEQ ID NO: 99419 - DNA, 19 bp, Homo sapiens
  siRNA target sequence for ROR1 (NM_005012.1,1143-1161).
gaatgtcctgtgtcaaaca

SEQ ID NO: 99420 - DNA, 19 bp, Homo sapiens
  siRNA target sequence for ROR1 (NM_005012.1,1152-1170).
gtgtcaaacagagtacatt

SEQ ID NO: 99421 - DNA, 19 bp, Homo sapiens
  siRNA target sequence for ROR1 (NM_005012.1,1164-1182).
gtacatttttgcaagatca

SEQ ID NO: 99422 - DNA, 19 bp, Homo sapiens
  siRNA target sequence for ROR1 (NM_005012.1,1246-1264).
ccagaagctgcgaactgta

SEQ ID NO: 99423 - DNA, 19 bp, Homo sapiens
  siRNA target sequence for ROR1 (NM_005012.1,1260-1278).
ctgtatccggattggaatt

SEQ ID NO: 99424 - DNA, 19 bp, Homo sapiens
  siRNA target sequence for ROR1 (NM_005012.1,1279-1297).
cccatggcagatcctataa

SEQ ID NO: 99425 - DNA, 19 bp, Homo sapiens
  siRNA target sequence for ROR1 (NM_005012.1,1280-1298).
ccatggcagatcctataaa

SEQ ID NO: 99426 - DNA, 19 bp, Homo sapiens
  siRNA target sequence for ROR1 (NM_005012.1,1412-1430).
ctttcaccgcccttcgttt

SEQ ID NO: 99427 - DNA, 19 bp, Homo sapiens
  siRNA target sequence for ROR1 (NM_005012.1,1461-1479).
ccgcaacccagggaatcaa

SEQ ID NO: 99428 - DNA, 19 bp, Homo sapiens
  siRNA target sequence for ROR1 (NM_005012.1,1547-1565).
gcgattcaaaggattccaa

SEQ ID NO: 99429 - DNA, 19 bp, Homo sapiens
  siRNA target sequence for ROR1 (NM_005012.1,1621-1639).
ctggccattgctttactct

SEQ ID NO: 99430 - DNA, 19 bp, Homo sapiens
  siRNA target sequence for ROR1 (NM_005012.1,1652-1670).
gcgtctgtcggaataacca

SEQ ID NO: 99431 - DNA, 19 bp, Homo sapiens
  siRNA target sequence for ROR1 (NM_005012.1,1734-1752).
gtcaatgctgaatgcatat

SEQ ID NO: 99432 - DNA, 19 bp, Homo sapiens
  siRNA target sequence for ROR1 (NM_005012.1,1736-1754).
caatgctgaatgcatataa

SEQ ID NO: 99433 - DNA, 19 bp, Homo sapiens
  siRNA target sequence for ROR1 (NM_005012.1,1787-1805).
ctgctgtacgctttatgga

SEQ ID NO: 99434 - DNA, 19 bp, Homo sapiens
  siRNA target sequence for ROR1 (NM_005012.1,1792-1810).
gtacgctttatggaagaat

SEQ ID NO: 99435 - DNA, 19 bp, Homo sapiens
  siRNA target sequence for ROR1 (NM_005012.1,1820-1838).
gtgcctttggaaaaatcta

SEQ ID NO: 99436 - DNA, 19 bp, Homo sapiens
  siRNA target sequence for ROR1 (NM_005012.1,1874-1892).
ctcagctggttgctatcaa

SEQ ID NO: 99437 - DNA, 19 bp, Homo sapiens
  siRNA target sequence for ROR1 (NM_005012.1,1876-1894).
cagctggttgctatcaaga

SEQ ID NO: 99438 - DNA, 19 bp, Homo sapiens
  siRNA target sequence for ROR1 (NM_005012.1,1966-1984).
caccaccccaatattgtct

SEQ ID NO: 99439 - DNA, 19 bp, Homo sapiens
  siRNA target sequence for ROR1 (NM_005012.1,2011-2029).
caacctgtgtgcatgcttt

SEQ ID NO: 99440 - DNA, 19 bp, Homo sapiens
  siRNA target sequence for ROR1 (NM_005012.1,2017-2035).
gtgtgcatgctttttgagt

SEQ ID NO: 99441 - DNA, 19 bp, Homo sapiens
  siRNA target sequence for ROR1 (NM_005012.1,2019-2037).
gtgcatgctttttgagtat

SEQ ID NO: 99442 - DNA, 19 bp, Homo sapiens
  siRNA target sequence for ROR1 (NM_005012.1,2113-2131).
gatgggactgtgaaatcca

SEQ ID NO: 99443 - DNA, 19 bp, Homo sapiens
  siRNA target sequence for ROR1 (NM_005012.1,2132-2150).
gcctggaccacggagattt

SEQ ID NO: 99444 - DNA, 19 bp, Homo sapiens
  siRNA target sequence for ROR1 (NM_005012.1,2152-2170).
ctgcacattgcaattcaga

SEQ ID NO: 99445 - DNA, 19 bp, Homo sapiens
  siRNA target sequence for ROR1 (NM_005012.1,2224-2242).
gcagctcgcaatattttaa

SEQ ID NO: 99446 - DNA, 19 bp, Homo sapiens
  siRNA target sequence for ROR1 (NM_005012.1,2225-2243).
cagctcgcaatattttaat

SEQ ID NO: 99447 - DNA, 19 bp, Homo sapiens
  siRNA target sequence for ROR1 (NM_005012.1,2244-2262).
cggagagcaacttcatgta

SEQ ID NO: 99448 - DNA, 19 bp, Homo sapiens
  siRNA target sequence for ROR1 (NM_005012.1,2245-2263).
ggagagcaacttcatgtaa

SEQ ID NO: 99449 - DNA, 19 bp, Homo sapiens
  siRNA target sequence for ROR1 (NM_005012.1,2246-2264).
gagagcaacttcatgtaaa

SEQ ID NO: 99450 - DNA, 19 bp, Homo sapiens
  siRNA target sequence for ROR1 (NM_005012.1,2248-2266).
gagcaacttcatgtaaaga

SEQ ID NO: 99451 - DNA, 19 bp, Homo sapiens
  siRNA target sequence for ROR1 (NM_005012.1,2355-2373).
ccctgaagccatcatgtat

SEQ ID NO: 99452 - DNA, 19 bp, Homo sapiens
  siRNA target sequence for ROR1 (NM_005012.1,2367-2385).
catgtatggcaaattctct

SEQ ID NO: 99453 - DNA, 19 bp, Homo sapiens
  siRNA target sequence for ROR1 (NM_005012.1,2402-2420).
ggtcctttggggttgtctt

SEQ ID NO: 99454 - DNA, 19 bp, Homo sapiens
  siRNA target sequence for ROR1 (NM_005012.1,2443-2461).
ctccagccatattatggat

SEQ ID NO: 99455 - DNA, 19 bp, Homo sapiens
  siRNA target sequence for ROR1 (NM_005012.1,2449-2467).
ccatattatggattcagta

SEQ ID NO: 99456 - DNA, 19 bp, Homo sapiens
  siRNA target sequence for ROR1 (NM_005012.1,2521-2539).
gactgcccacccagaatgt

SEQ ID NO: 99457 - DNA, 19 bp, Homo sapiens
  siRNA target sequence for ROR1 (NM_005012.1,2725-2743).
cccagatatcctaattaca

SEQ ID NO: 99458 - DNA, 19 bp, Homo sapiens
  siRNA target sequence for ROR1 (NM_005012.1,2726-2744).
ccagatatcctaattacat

SEQ ID NO: 99459 - DNA, 19 bp, Homo sapiens
  siRNA target sequence for ROR1 (NM_005012.1,2729-2747).
gatatcctaattacatgtt

SEQ ID NO: 99460 - DNA, 19 bp, Homo sapiens
  siRNA target sequence for ROR1 (NM_005012.1,2748-2766).
cccgagccagggtattaca

SEQ ID NO: 99461 - DNA, 19 bp, Homo sapiens
  siRNA target sequence for ROR1 (NM_005012.1,3009-3027).
ggaagcaaatattccttta

SEQ ID NO: 99462 - DNA, 19 bp, Homo sapiens
  siRNA target sequence for ROR1 (NM_005012.1,3072-3090).
caccgtttttggcaacaaa

SEQ ID NO: 99463 - DNA, 19 bp, Homo sapiens
  siRNA target sequence for ROR1 (NM_005012.1,3151-3169).
catggacacaccgaatcta

SEQ ID NO: 99464 - DNA, 19 bp, Homo sapiens
  siRNA target sequence for ROR1 (NM_005012.1,3157-3175).
cacaccgaatctatgattt

SEQ ID NO: 99465 - DNA, 19 bp, Homo sapiens
  siRNA target sequence for ROR1 (NM_005012.1,3159-3177).
caccgaatctatgatttct

SEQ ID NO: 99466 - DNA, 19 bp, Homo sapiens
  siRNA target sequence for ROR2 (NM_004560.2,355-373).
cccgattccaactctgaaa

SEQ ID NO: 99467 - DNA, 19 bp, Homo sapiens
  siRNA target sequence for ROR2 (NM_004560.2,392-410).
ctggagccagtaaacaata

SEQ ID NO: 99468 - DNA, 19 bp, Homo sapiens
  siRNA target sequence for ROR2 (NM_004560.2,475-493).
cgtgcggtggctaaagaat

SEQ ID NO: 99469 - DNA, 19 bp, Homo sapiens
  siRNA target sequence for ROR2 (NM_004560.2,478-496).
gcggtggctaaagaatgat

SEQ ID NO: 99470 - DNA, 19 bp, Homo sapiens
  siRNA target sequence for ROR2 (NM_004560.2,669-687).
cgcacagcccaaatcataa

SEQ ID NO: 99471 - DNA, 19 bp, Homo sapiens
  siRNA target sequence for ROR2 (NM_004560.2,759-777).
gcaaccggaccatttatgt

SEQ ID NO: 99472 - DNA, 19 bp, Homo sapiens
  siRNA target sequence for ROR2 (NM_004560.2,790-808).
gatgcagggggagattgaa

SEQ ID NO: 99473 - DNA, 19 bp, Homo sapiens
  siRNA target sequence for ROR2 (NM_004560.2,1133-1151).
cgctaccatcagtgctata

SEQ ID NO: 99474 - DNA, 19 bp, Homo sapiens
  siRNA target sequence for ROR2 (NM_004560.2,1134-1152).
gctaccatcagtgctataa

SEQ ID NO: 99475 - DNA, 19 bp, Homo sapiens
  siRNA target sequence for ROR2 (NM_004560.2,1156-1174).
ctcaggcatggattacaga

SEQ ID NO: 99476 - DNA, 19 bp, Homo sapiens
  siRNA target sequence for ROR2 (NM_004560.2,1326-1344).
ggtgctttacgcagaataa

SEQ ID NO: 99477 - DNA, 19 bp, Homo sapiens
  siRNA target sequence for ROR2 (NM_004560.2,1327-1345).
gtgctttacgcagaataaa

SEQ ID NO: 99478 - DNA, 19 bp, Homo sapiens
  siRNA target sequence for ROR2 (NM_004560.2,1448-1466).
gtcatcgcttgccttttct

SEQ ID NO: 99479 - DNA, 19 bp, Homo sapiens
  siRNA target sequence for ROR2 (NM_004560.2,1647-1665).
ggtttgggaaagtctacaa

SEQ ID NO: 99480 - DNA, 19 bp, Homo sapiens
  siRNA target sequence for ROR2 (NM_004560.2,1702-1720).
ccaggctgtggccatcaaa

SEQ ID NO: 99481 - DNA, 19 bp, Homo sapiens
  siRNA target sequence for ROR2 (NM_004560.2,2358-2376).
gggtgtatgccctcatgat

SEQ ID NO: 99482 - DNA, 19 bp, Homo sapiens
  siRNA target sequence for ROR2 (NM_004560.2,2438-2456).
cgagcctggggcaaccttt

SEQ ID NO: 99483 - DNA, 19 bp, Homo sapiens
  siRNA target sequence for ROS1 (NM_002944.2,246-264).
ctcttggctgcctatggat

SEQ ID NO: 99484 - DNA, 19 bp, Homo sapiens
  siRNA target sequence for ROS1 (NM_002944.2,269-287).
gtggtgcagtgtacagttt

SEQ ID NO: 99485 - DNA, 19 bp, Homo sapiens
  siRNA target sequence for ROS1 (NM_002944.2,272-290).
gtgcagtgtacagttttaa

SEQ ID NO: 99486 - DNA, 19 bp, Homo sapiens
  siRNA target sequence for ROS1 (NM_002944.2,298-316).
cctaaagtcgtgtgtaact

SEQ ID NO: 99487 - DNA, 19 bp, Homo sapiens
  siRNA target sequence for ROS1 (NM_002944.2,299-317).
ctaaagtcgtgtgtaacta

SEQ ID NO: 99488 - DNA, 19 bp, Homo sapiens
  siRNA target sequence for ROS1 (NM_002944.2,341-359).
ggcacaccacataatctga

SEQ ID NO: 99489 - DNA, 19 bp, Homo sapiens
  siRNA target sequence for ROS1 (NM_002944.2,358-376).
gagtgaaccgtgtatccaa

SEQ ID NO: 99490 - DNA, 19 bp, Homo sapiens
  siRNA target sequence for ROS1 (NM_002944.2,385-403).
cttttggaactctgtagat

SEQ ID NO: 99491 - DNA, 19 bp, Homo sapiens
  siRNA target sequence for ROS1 (NM_002944.2,454-472).
cagcgcggaaggtgcatat

SEQ ID NO: 99492 - DNA, 19 bp, Homo sapiens
  siRNA target sequence for ROS1 (NM_002944.2,456-474).
gcgcggaaggtgcatatga

SEQ ID NO: 99493 - DNA, 19 bp, Homo sapiens
  siRNA target sequence for ROS1 (NM_002944.2,457-475).
cgcggaaggtgcatatgaa

SEQ ID NO: 99494 - DNA, 19 bp, Homo sapiens
  siRNA target sequence for ROS1 (NM_002944.2,503-521).
ccaactgctccctttgctt

SEQ ID NO: 99495 - DNA, 19 bp, Homo sapiens
  siRNA target sequence for ROS1 (NM_002944.2,525-543).
ccattggaagccacaatat

SEQ ID NO: 99496 - DNA, 19 bp, Homo sapiens
  siRNA target sequence for ROS1 (NM_002944.2,535-553).
ccacaatatgacattacga

SEQ ID NO: 99497 - DNA, 19 bp, Homo sapiens
  siRNA target sequence for ROS1 (NM_002944.2,544-562).
gacattacgatggaaatct

SEQ ID NO: 99498 - DNA, 19 bp, Homo sapiens
  siRNA target sequence for ROS1 (NM_002944.2,614-632).
ctgggaagctggacttata

SEQ ID NO: 99499 - DNA, 19 bp, Homo sapiens
  siRNA target sequence for ROS1 (NM_002944.2,616-634).
gggaagctggacttatact

SEQ ID NO: 99500 - DNA, 19 bp, Homo sapiens
  siRNA target sequence for ROS1 (NM_002944.2,617-635).
ggaagctggacttatacta

SEQ ID NO: 99501 - DNA, 19 bp, Homo sapiens
  siRNA target sequence for ROS1 (NM_002944.2,622-640).
ctggacttatactaagact

SEQ ID NO: 99502 - DNA, 19 bp, Homo sapiens
  siRNA target sequence for ROS1 (NM_002944.2,676-694).
ccccttcactgagtacatt

SEQ ID NO: 99503 - DNA, 19 bp, Homo sapiens
  siRNA target sequence for ROS1 (NM_002944.2,678-696).
ccttcactgagtacatttt

SEQ ID NO: 99504 - DNA, 19 bp, Homo sapiens
  siRNA target sequence for ROS1 (NM_002944.2,698-716).
cgagtggtttggatcttca

SEQ ID NO: 99505 - DNA, 19 bp, Homo sapiens
  siRNA target sequence for ROS1 (NM_002944.2,792-810).
ctttgattaggaatattga

SEQ ID NO: 99506 - DNA, 19 bp, Homo sapiens
  siRNA target sequence for ROS1 (NM_002944.2,866-884).
ggacctattttgggttata

SEQ ID NO: 99507 - DNA, 19 bp, Homo sapiens
  siRNA target sequence for ROS1 (NM_002944.2,867-885).
gacctattttgggttataa

SEQ ID NO: 99508 - DNA, 19 bp, Homo sapiens
  siRNA target sequence for ROS1 (NM_002944.2,869-887).
cctattttgggttataact

SEQ ID NO: 99509 - DNA, 19 bp, Homo sapiens
  siRNA target sequence for ROS1 (NM_002944.2,946-964).
gttttactccactttacca

SEQ ID NO: 99510 - DNA, 19 bp, Homo sapiens
  siRNA target sequence for ROS1 (NM_002944.2,952-970).
ctccactttaccaaatact

SEQ ID NO: 99511 - DNA, 19 bp, Homo sapiens
  siRNA target sequence for ROS1 (NM_002944.2,984-1002).
ctattgcagcagtaaatga

SEQ ID NO: 99512 - DNA, 19 bp, Homo sapiens
  siRNA target sequence for ROS1 (NM_002944.2,1022-1040).
gcagaatctagtattacca

SEQ ID NO: 99513 - DNA, 19 bp, Homo sapiens
  siRNA target sequence for ROS1 (NM_002944.2,1067-1085).
gaacagtggctctttttat

SEQ ID NO: 99514 - DNA, 19 bp, Homo sapiens
  siRNA target sequence for ROS1 (NM_002944.2,1070-1088).
cagtggctctttttatcca

SEQ ID NO: 99515 - DNA, 19 bp, Homo sapiens
  siRNA target sequence for ROS1 (NM_002944.2,1143-1161).
gccttcggttggatgctat

SEQ ID NO: 99516 - DNA, 19 bp, Homo sapiens
  siRNA target sequence for ROS1 (NM_002944.2,1144-1162).
ccttcggttggatgctata

SEQ ID NO: 99517 - DNA, 19 bp, Homo sapiens
  siRNA target sequence for ROS1 (NM_002944.2,1145-1163).
cttcggttggatgctatat

SEQ ID NO: 99518 - DNA, 19 bp, Homo sapiens
  siRNA target sequence for ROS1 (NM_002944.2,1149-1167).
ggttggatgctatatacca

SEQ ID NO: 99519 - DNA, 19 bp, Homo sapiens
  siRNA target sequence for ROS1 (NM_002944.2,1153-1171).
ggatgctatataccataat

SEQ ID NO: 99520 - DNA, 19 bp, Homo sapiens
  siRNA target sequence for ROS1 (NM_002944.2,1165-1183).
ccataatattacaggaata

SEQ ID NO: 99521 - DNA, 19 bp, Homo sapiens
  siRNA target sequence for ROS1 (NM_002944.2,1176-1194).
caggaatatctgttgatgt

SEQ ID NO: 99522 - DNA, 19 bp, Homo sapiens
  siRNA target sequence for ROS1 (NM_002944.2,1193-1211).
gtccaccagcaaattgttt

SEQ ID NO: 99523 - DNA, 19 bp, Homo sapiens
  siRNA target sequence for ROS1 (NM_002944.2,1216-1234).
ctctgaaggaactctcata

SEQ ID NO: 99524 - DNA, 19 bp, Homo sapiens
  siRNA target sequence for ROS1 (NM_002944.2,1250-1268).
gccaacatgtctgatgtat

SEQ ID NO: 99525 - DNA, 19 bp, Homo sapiens
  siRNA target sequence for ROS1 (NM_002944.2,1265-1283).
gtatctgacctgagaattt

SEQ ID NO: 99526 - DNA, 19 bp, Homo sapiens
  siRNA target sequence for ROS1 (NM_002944.2,1273-1291).
cctgagaattttttacaga

SEQ ID NO: 99527 - DNA, 19 bp, Homo sapiens
  siRNA target sequence for ROS1 (NM_002944.2,1292-1310).
ggttcaggattaatttctt

SEQ ID NO: 99528 - DNA, 19 bp, Homo sapiens
  siRNA target sequence for ROS1 (NM_002944.2,1315-1333).
ctccatagattggctttat

SEQ ID NO: 99529 - DNA, 19 bp, Homo sapiens
  siRNA target sequence for ROS1 (NM_002944.2,1317-1335).
ccatagattggctttatca

SEQ ID NO: 99530 - DNA, 19 bp, Homo sapiens
  siRNA target sequence for ROS1 (NM_002944.2,1318-1336).
catagattggctttatcaa

SEQ ID NO: 99531 - DNA, 19 bp, Homo sapiens
  siRNA target sequence for ROS1 (NM_002944.2,1326-1344).
ggctttatcaaagaatgta

SEQ ID NO: 99532 - DNA, 19 bp, Homo sapiens
  siRNA target sequence for ROS1 (NM_002944.2,1389-1407).
gctcaaacatcgaggaaat

SEQ ID NO: 99533 - DNA, 19 bp, Homo sapiens
  siRNA target sequence for ROS1 (NM_002944.2,1477-1495).
cctgagagatggcatttat

SEQ ID NO: 99534 - DNA, 19 bp, Homo sapiens
  siRNA target sequence for ROS1 (NM_002944.2,1480-1498).
gagagatggcatttataga

SEQ ID NO: 99535 - DNA, 19 bp, Homo sapiens
  siRNA target sequence for ROS1 (NM_002944.2,1547-1565).
gtggagagttgcacgttaa

SEQ ID NO: 99536 - DNA, 19 bp, Homo sapiens
  siRNA target sequence for ROS1 (NM_002944.2,1560-1578).
cgttaaaggactttgcaat

SEQ ID NO: 99537 - DNA, 19 bp, Homo sapiens
  siRNA target sequence for ROS1 (NM_002944.2,1586-1604).
caagccaagcgaatcattt

SEQ ID NO: 99538 - DNA, 19 bp, Homo sapiens
  siRNA target sequence for ROS1 (NM_002944.2,1622-1640).
caagtcttcatgtcaacat

SEQ ID NO: 99539 - DNA, 19 bp, Homo sapiens
  siRNA target sequence for ROS1 (NM_002944.2,1811-1829).
gaagaatttgggtttggta

SEQ ID NO: 99540 - DNA, 19 bp, Homo sapiens
  siRNA target sequence for ROS1 (NM_002944.2,1963-1981).
catcctgatcagtgatatt

SEQ ID NO: 99541 - DNA, 19 bp, Homo sapiens
  siRNA target sequence for ROS1 (NM_002944.2,2022-2040).
ggacctatgaggtgaaagt

SEQ ID NO: 99542 - DNA, 19 bp, Homo sapiens
  siRNA target sequence for ROS1 (NM_002944.2,2023-2041).
gacctatgaggtgaaagta

SEQ ID NO: 99543 - DNA, 19 bp, Homo sapiens
  siRNA target sequence for ROS1 (NM_002944.2,2054-2072).
cctcctgaagtcactcata

SEQ ID NO: 99544 - DNA, 19 bp, Homo sapiens
  siRNA target sequence for ROS1 (NM_002944.2,2055-2073).
ctcctgaagtcactcatat

SEQ ID NO: 99545 - DNA, 19 bp, Homo sapiens
  siRNA target sequence for ROS1 (NM_002944.2,2203-2221).
cctggtgccagctagtgaa

SEQ ID NO: 99546 - DNA, 19 bp, Homo sapiens
  siRNA target sequence for ROS1 (NM_002944.2,2262-2280).
gtaaaccattaaatagctt

SEQ ID NO: 99547 - DNA, 19 bp, Homo sapiens
  siRNA target sequence for ROS1 (NM_002944.2,2291-2309).
gagttcttatcctctgata

SEQ ID NO: 99548 - DNA, 19 bp, Homo sapiens
  siRNA target sequence for ROS1 (NM_002944.2,2296-2314).
cttatcctctgatatagga

SEQ ID NO: 99549 - DNA, 19 bp, Homo sapiens
  siRNA target sequence for ROS1 (NM_002944.2,2301-2319).
cctctgatataggaaatgt

SEQ ID NO: 99550 - DNA, 19 bp, Homo sapiens
  siRNA target sequence for ROS1 (NM_002944.2,2320-2338).
gtcagacatggattggtat

SEQ ID NO: 99551 - DNA, 19 bp, Homo sapiens
  siRNA target sequence for ROS1 (NM_002944.2,2324-2342).
gacatggattggtataaca

SEQ ID NO: 99552 - DNA, 19 bp, Homo sapiens
  siRNA target sequence for ROS1 (NM_002944.2,2364-2382).
cgaaaggcgacgtttttgt

SEQ ID NO: 99553 - DNA, 19 bp, Homo sapiens
  siRNA target sequence for ROS1 (NM_002944.2,2392-2410).
gaatgggacggatatctca

SEQ ID NO: 99554 - DNA, 19 bp, Homo sapiens
  siRNA target sequence for ROS1 (NM_002944.2,2398-2416).
gacggatatctcagagaat

SEQ ID NO: 99555 - DNA, 19 bp, Homo sapiens
  siRNA target sequence for ROS1 (NM_002944.2,2400-2418).
cggatatctcagagaatta

SEQ ID NO: 99556 - DNA, 19 bp, Homo sapiens
  siRNA target sequence for ROS1 (NM_002944.2,2463-2481).
ggctgggtcactttctcta

SEQ ID NO: 99557 - DNA, 19 bp, Homo sapiens
  siRNA target sequence for ROS1 (NM_002944.2,2479-2497).
ctactgggctggaaagaca

SEQ ID NO: 99558 - DNA, 19 bp, Homo sapiens
  siRNA target sequence for ROS1 (NM_002944.2,2524-2542).
gacgggacacacagacatt

SEQ ID NO: 99559 - DNA, 19 bp, Homo sapiens
  siRNA target sequence for ROS1 (NM_002944.2,2543-2561).
gttacccacgtgaagctat

SEQ ID NO: 99560 - DNA, 19 bp, Homo sapiens
  siRNA target sequence for ROS1 (NM_002944.2,2602-2620).
ctactggaccacactctat

SEQ ID NO: 99561 - DNA, 19 bp, Homo sapiens
  siRNA target sequence for ROS1 (NM_002944.2,2607-2625).
ggaccacactctattcagt

SEQ ID NO: 99562 - DNA, 19 bp, Homo sapiens
  siRNA target sequence for ROS1 (NM_002944.2,2646-2664).
gggaaagttcccttgtact

SEQ ID NO: 99563 - DNA, 19 bp, Homo sapiens
  siRNA target sequence for ROS1 (NM_002944.2,2647-2665).
ggaaagttcccttgtacta

SEQ ID NO: 99564 - DNA, 19 bp, Homo sapiens
  siRNA target sequence for ROS1 (NM_002944.2,2695-2713).
ggtaattgctctaacttta

SEQ ID NO: 99565 - DNA, 19 bp, Homo sapiens
  siRNA target sequence for ROS1 (NM_002944.2,2723-2741).
gatgggctcctgtattggt

SEQ ID NO: 99566 - DNA, 19 bp, Homo sapiens
  siRNA target sequence for ROS1 (NM_002944.2,2804-2822).
gataccaccatcacagaat

SEQ ID NO: 99567 - DNA, 19 bp, Homo sapiens
  siRNA target sequence for ROS1 (NM_002944.2,2829-2847).
cctggagtacttctgaaat

SEQ ID NO: 99568 - DNA, 19 bp, Homo sapiens
  siRNA target sequence for ROS1 (NM_002944.2,2830-2848).
ctggagtacttctgaaatt

SEQ ID NO: 99569 - DNA, 19 bp, Homo sapiens
  siRNA target sequence for ROS1 (NM_002944.2,2852-2870).
cagaatgcactgatgtact

SEQ ID NO: 99570 - DNA, 19 bp, Homo sapiens
  siRNA target sequence for ROS1 (NM_002944.2,2889-2907).
ggatcaatggctttaggat

SEQ ID NO: 99571 - DNA, 19 bp, Homo sapiens
  siRNA target sequence for ROS1 (NM_002944.2,2890-2908).
gatcaatggctttaggatt

SEQ ID NO: 99572 - DNA, 19 bp, Homo sapiens
  siRNA target sequence for ROS1 (NM_002944.2,2897-2915).
ggctttaggattatcacaa

SEQ ID NO: 99573 - DNA, 19 bp, Homo sapiens
  siRNA target sequence for ROS1 (NM_002944.2,2953-2971).
ggaaccagccagatttaat

SEQ ID NO: 99574 - DNA, 19 bp, Homo sapiens
  siRNA target sequence for ROS1 (NM_002944.2,3021-3039).
cctttacccctaaggttat

SEQ ID NO: 99575 - DNA, 19 bp, Homo sapiens
  siRNA target sequence for ROS1 (NM_002944.2,3022-3040).
ctttacccctaaggttatt

SEQ ID NO: 99576 - DNA, 19 bp, Homo sapiens
  siRNA target sequence for ROS1 (NM_002944.2,3053-3071).
caagagtcttcatttagga

SEQ ID NO: 99577 - DNA, 19 bp, Homo sapiens
  siRNA target sequence for ROS1 (NM_002944.2,3121-3139).
ggtagactggggtgtagtt

SEQ ID NO: 99578 - DNA, 19 bp, Homo sapiens
  siRNA target sequence for ROS1 (NM_002944.2,3125-3143).
gactggggtgtagttttct

SEQ ID NO: 99579 - DNA, 19 bp, Homo sapiens
  siRNA target sequence for ROS1 (NM_002944.2,3142-3160).
ctacagtgtagaatttagt

SEQ ID NO: 99580 - DNA, 19 bp, Homo sapiens
  siRNA target sequence for ROS1 (NM_002944.2,3180-3198).
ctagtgaacaacactcttt

SEQ ID NO: 99581 - DNA, 19 bp, Homo sapiens
  siRNA target sequence for ROS1 (NM_002944.2,3228-3246).
cttatgccttatttaatct

SEQ ID NO: 99582 - DNA, 19 bp, Homo sapiens
  siRNA target sequence for ROS1 (NM_002944.2,3249-3267).
ctgtcactccttataccta

SEQ ID NO: 99583 - DNA, 19 bp, Homo sapiens
  siRNA target sequence for ROS1 (NM_002944.2,3369-3387).
gctgcaacaagaatgaagt

SEQ ID NO: 99584 - DNA, 19 bp, Homo sapiens
  siRNA target sequence for ROS1 (NM_002944.2,3386-3404).
gttgtggtggaatttaggt

SEQ ID NO: 99585 - DNA, 19 bp, Homo sapiens
  siRNA target sequence for ROS1 (NM_002944.2,3419-3437).
catgaaaatggggtgttaa

SEQ ID NO: 99586 - DNA, 19 bp, Homo sapiens
  siRNA target sequence for ROS1 (NM_002944.2,3429-3447).
gggtgttaacaaaatttga

SEQ ID NO: 99587 - DNA, 19 bp, Homo sapiens
  siRNA target sequence for ROS1 (NM_002944.2,3430-3448).
ggtgttaacaaaatttgaa

SEQ ID NO: 99588 - DNA, 19 bp, Homo sapiens
  siRNA target sequence for ROS1 (NM_002944.2,3465-3483).
ccaatcaaagtattacaaa

SEQ ID NO: 99589 - DNA, 19 bp, Homo sapiens
  siRNA target sequence for ROS1 (NM_002944.2,3523-3541).
ctcagtgatgtcttttcaa

SEQ ID NO: 99590 - DNA, 19 bp, Homo sapiens
  siRNA target sequence for ROS1 (NM_002944.2,3580-3598).
ggttagggcctttacatct

SEQ ID NO: 99591 - DNA, 19 bp, Homo sapiens
  siRNA target sequence for ROS1 (NM_002944.2,3581-3599).
gttagggcctttacatcta

SEQ ID NO: 99592 - DNA, 19 bp, Homo sapiens
  siRNA target sequence for ROS1 (NM_002944.2,3601-3619).
ggggccaggaccatatgct

SEQ ID NO: 99593 - DNA, 19 bp, Homo sapiens
  siRNA target sequence for ROS1 (NM_002944.2,3611-3629).
ccatatgctgacgttgtaa

SEQ ID NO: 99594 - DNA, 19 bp, Homo sapiens
  siRNA target sequence for ROS1 (NM_002944.2,3617-3635).
gctgacgttgtaaagtcta

SEQ ID NO: 99595 - DNA, 19 bp, Homo sapiens
  siRNA target sequence for ROS1 (NM_002944.2,3620-3638).
gacgttgtaaagtctacaa

SEQ ID NO: 99596 - DNA, 19 bp, Homo sapiens
  siRNA target sequence for ROS1 (NM_002944.2,3622-3640).
cgttgtaaagtctacaaca

SEQ ID NO: 99597 - DNA, 19 bp, Homo sapiens
  siRNA target sequence for ROS1 (NM_002944.2,3677-3695).
cttggtaacaagatagttt

SEQ ID NO: 99598 - DNA, 19 bp, Homo sapiens
  siRNA target sequence for ROS1 (NM_002944.2,3716-3734).
caagttgtgtggacgtttt

SEQ ID NO: 99599 - DNA, 19 bp, Homo sapiens
  siRNA target sequence for ROS1 (NM_002944.2,3762-3780).
gctacacagctgataatga

SEQ ID NO: 99600 - DNA, 19 bp, Homo sapiens
  siRNA target sequence for ROS1 (NM_002944.2,3773-3791).
gataatgagatgggatatt

SEQ ID NO: 99601 - DNA, 19 bp, Homo sapiens
  siRNA target sequence for ROS1 (NM_002944.2,3965-3983).
cttgaacacaaggtgaaat

SEQ ID NO: 99602 - DNA, 19 bp, Homo sapiens
  siRNA target sequence for ROS1 (NM_002944.2,3995-4013).
gtgaagattcacaatagga

SEQ ID NO: 99603 - DNA, 19 bp, Homo sapiens
  siRNA target sequence for ROS1 (NM_002944.2,4046-4064).
cttttaagtcgcttgtatt

SEQ ID NO: 99604 - DNA, 19 bp, Homo sapiens
  siRNA target sequence for ROS1 (NM_002944.2,4085-4103).
ggctaccagatgttctact

SEQ ID NO: 99605 - DNA, 19 bp, Homo sapiens
  siRNA target sequence for ROS1 (NM_002944.2,4091-4109).
cagatgttctactacagta

SEQ ID NO: 99606 - DNA, 19 bp, Homo sapiens
  siRNA target sequence for ROS1 (NM_002944.2,4093-4111).
gatgttctactacagtatt

SEQ ID NO: 99607 - DNA, 19 bp, Homo sapiens
  siRNA target sequence for ROS1 (NM_002944.2,4099-4117).
ctactacagtattatcagt

SEQ ID NO: 99608 - DNA, 19 bp, Homo sapiens
  siRNA target sequence for ROS1 (NM_002944.2,4170-4188).
ggaatcaatgttcttgtaa

SEQ ID NO: 99609 - DNA, 19 bp, Homo sapiens
  siRNA target sequence for ROS1 (NM_002944.2,4175-4193).
caatgttcttgtaatgtga

SEQ ID NO: 99610 - DNA, 19 bp, Homo sapiens
  siRNA target sequence for ROS1 (NM_002944.2,4192-4210).
gactgaatttgagttaagt

SEQ ID NO: 99611 - DNA, 19 bp, Homo sapiens
  siRNA target sequence for ROS1 (NM_002944.2,4238-4256).
ctagagaaaccattgatat

SEQ ID NO: 99612 - DNA, 19 bp, Homo sapiens
  siRNA target sequence for ROS1 (NM_002944.2,4306-4324).
gtgttggagagttatcaca

SEQ ID NO: 99613 - DNA, 19 bp, Homo sapiens
  siRNA target sequence for ROS1 (NM_002944.2,4344-4362).
gaaaaacccttgttagctt

SEQ ID NO: 99614 - DNA, 19 bp, Homo sapiens
  siRNA target sequence for ROS1 (NM_002944.2,4350-4368).
cccttgttagcttaactgt

SEQ ID NO: 99615 - DNA, 19 bp, Homo sapiens
  siRNA target sequence for ROS1 (NM_002944.2,4367-4385).
gtggatggagatcttatat

SEQ ID NO: 99616 - DNA, 19 bp, Homo sapiens
  siRNA target sequence for ROS1 (NM_002944.2,4370-4388).
gatggagatcttatatact

SEQ ID NO: 99617 - DNA, 19 bp, Homo sapiens
  siRNA target sequence for ROS1 (NM_002944.2,4379-4397).
cttatatactggatcatca

SEQ ID NO: 99618 - DNA, 19 bp, Homo sapiens
  siRNA target sequence for ROS1 (NM_002944.2,4480-4498).
gcatatcttggcttacagt

SEQ ID NO: 99619 - DNA, 19 bp, Homo sapiens
  siRNA target sequence for ROS1 (NM_002944.2,4481-4499).
catatcttggcttacagtt

SEQ ID NO: 99620 - DNA, 19 bp, Homo sapiens
  siRNA target sequence for ROS1 (NM_002944.2,4517-4535).
ccagataaagcgtttctgt

SEQ ID NO: 99621 - DNA, 19 bp, Homo sapiens
  siRNA target sequence for ROS1 (NM_002944.2,4553-4571).
gtggaaccaactatactta

SEQ ID NO: 99622 - DNA, 19 bp, Homo sapiens
  siRNA target sequence for ROS1 (NM_002944.2,4568-4586).
cttaatgccactaacacta

SEQ ID NO: 99623 - DNA, 19 bp, Homo sapiens
  siRNA target sequence for ROS1 (NM_002944.2,4582-4600).
cactagcctcacaatcaga

SEQ ID NO: 99624 - DNA, 19 bp, Homo sapiens
  siRNA target sequence for ROS1 (NM_002944.2,4584-4602).
ctagcctcacaatcagatt

SEQ ID NO: 99625 - DNA, 19 bp, Homo sapiens
  siRNA target sequence for ROS1 (NM_002944.2,4588-4606).
cctcacaatcagattacct

SEQ ID NO: 99626 - DNA, 19 bp, Homo sapiens
  siRNA target sequence for ROS1 (NM_002944.2,4615-4633).
gacaaacctcacatggtat

SEQ ID NO: 99627 - DNA, 19 bp, Homo sapiens
  siRNA target sequence for ROS1 (NM_002944.2,4641-4659).
ccagccctactccaacata

SEQ ID NO: 99628 - DNA, 19 bp, Homo sapiens
  siRNA target sequence for ROS1 (NM_002944.2,4696-4714).
cagctctgacttgaaatat

SEQ ID NO: 99629 - DNA, 19 bp, Homo sapiens
  siRNA target sequence for ROS1 (NM_002944.2,4735-4753).
cagtatagctcttattgaa

SEQ ID NO: 99630 - DNA, 19 bp, Homo sapiens
  siRNA target sequence for ROS1 (NM_002944.2,4737-4755).
gtatagctcttattgaaga

SEQ ID NO: 99631 - DNA, 19 bp, Homo sapiens
  siRNA target sequence for ROS1 (NM_002944.2,4770-4788).
caacatacatgatacagat

SEQ ID NO: 99632 - DNA, 19 bp, Homo sapiens
  siRNA target sequence for ROS1 (NM_002944.2,4877-4895).
gcagtgcagctcattaata

SEQ ID NO: 99633 - DNA, 19 bp, Homo sapiens
  siRNA target sequence for ROS1 (NM_002944.2,4949-4967).
ccaaatggacctaaagaat

SEQ ID NO: 99634 - DNA, 19 bp, Homo sapiens
  siRNA target sequence for ROS1 (NM_002944.2,4964-4982).
gaatcagtccgttatcagt

SEQ ID NO: 99635 - DNA, 19 bp, Homo sapiens
  siRNA target sequence for ROS1 (NM_002944.2,4999-5017).
ggccctaattcctgaaact

SEQ ID NO: 99636 - DNA, 19 bp, Homo sapiens
  siRNA target sequence for ROS1 (NM_002944.2,5053-5071).
cactctccttgttactaga

SEQ ID NO: 99637 - DNA, 19 bp, Homo sapiens
  siRNA target sequence for ROS1 (NM_002944.2,5074-5092).
gtctggtggaaatatttat

SEQ ID NO: 99638 - DNA, 19 bp, Homo sapiens
  siRNA target sequence for ROS1 (NM_002944.2,5164-5182).
gtttaacacaccagagaaa

SEQ ID NO: 99639 - DNA, 19 bp, Homo sapiens
  siRNA target sequence for ROS1 (NM_002944.2,5195-5213).
gttccagagaacactagtt

SEQ ID NO: 99640 - DNA, 19 bp, Homo sapiens
  siRNA target sequence for ROS1 (NM_002944.2,5203-5221).
gaacactagtttgcaattt

SEQ ID NO: 99641 - DNA, 19 bp, Homo sapiens
  siRNA target sequence for ROS1 (NM_002944.2,5206-5224).
cactagtttgcaatttaat

SEQ ID NO: 99642 - DNA, 19 bp, Homo sapiens
  siRNA target sequence for ROS1 (NM_002944.2,5278-5296).
gtggaaatacaatgagttt

SEQ ID NO: 99643 - DNA, 19 bp, Homo sapiens
  siRNA target sequence for ROS1 (NM_002944.2,5325-5343).
gtcctgcttatgtctgtaa

SEQ ID NO: 99644 - DNA, 19 bp, Homo sapiens
  siRNA target sequence for ROS1 (NM_002944.2,5338-5356).
ctgtaatatcacaaatcta

SEQ ID NO: 99645 - DNA, 19 bp, Homo sapiens
  siRNA target sequence for ROS1 (NM_002944.2,5384-5402).
gtagtggtggtttataaga

SEQ ID NO: 99646 - DNA, 19 bp, Homo sapiens
  siRNA target sequence for ROS1 (NM_002944.2,5466-5484).
caggcattcccaaattact

SEQ ID NO: 99647 - DNA, 19 bp, Homo sapiens
  siRNA target sequence for ROS1 (NM_002944.2,5469-5487).
gcattcccaaattactaga

SEQ ID NO: 99648 - DNA, 19 bp, Homo sapiens
  siRNA target sequence for ROS1 (NM_002944.2,5525-5543).
gataatggatgtagaatta

SEQ ID NO: 99649 - DNA, 19 bp, Homo sapiens
  siRNA target sequence for ROS1 (NM_002944.2,5544-5562).
catactatatccttgagat

SEQ ID NO: 99650 - DNA, 19 bp, Homo sapiens
  siRNA target sequence for ROS1 (NM_002944.2,5643-5661).
gcacatggaagtccaaaaa

SEQ ID NO: 99651 - DNA, 19 bp, Homo sapiens
  siRNA target sequence for ROS1 (NM_002944.2,5646-5664).
catggaagtccaaaaacct

SEQ ID NO: 99652 - DNA, 19 bp, Homo sapiens
  siRNA target sequence for ROS1 (NM_002944.2,5705-5723).
ctagggtttggtgaatata

SEQ ID NO: 99653 - DNA, 19 bp, Homo sapiens
  siRNA target sequence for ROS1 (NM_002944.2,5733-5751).
gtgagaatattatattagt

SEQ ID NO: 99654 - DNA, 19 bp, Homo sapiens
  siRNA target sequence for ROS1 (NM_002944.2,5750-5768).
gttggagatgatttttgga

SEQ ID NO: 99655 - DNA, 19 bp, Homo sapiens
  siRNA target sequence for ROS1 (NM_002944.2,5772-5790).
cagaaacaagtttcatact

SEQ ID NO: 99656 - DNA, 19 bp, Homo sapiens
  siRNA target sequence for ROS1 (NM_002944.2,5785-5803).
catacttactattatagtt

SEQ ID NO: 99657 - DNA, 19 bp, Homo sapiens
  siRNA target sequence for ROS1 (NM_002944.2,5887-5905).
gacagtgcttataaacgaa

SEQ ID NO: 99658 - DNA, 19 bp, Homo sapiens
  siRNA target sequence for ROS1 (NM_002944.2,5954-5972).
gctaatgcctgctatgcaa

SEQ ID NO: 99659 - DNA, 19 bp, Homo sapiens
  siRNA target sequence for ROS1 (NM_002944.2,5960-5978).
gcctgctatgcaatacata

SEQ ID NO: 99660 - DNA, 19 bp, Homo sapiens
  siRNA target sequence for ROS1 (NM_002944.2,5962-5980).
ctgctatgcaatacatact

SEQ ID NO: 99661 - DNA, 19 bp, Homo sapiens
  siRNA target sequence for ROS1 (NM_002944.2,5964-5982).
gctatgcaatacatactct

SEQ ID NO: 99662 - DNA, 19 bp, Homo sapiens
  siRNA target sequence for ROS1 (NM_002944.2,5965-5983).
ctatgcaatacatactctt

SEQ ID NO: 99663 - DNA, 19 bp, Homo sapiens
  siRNA target sequence for ROS1 (NM_002944.2,6015-6033).
ccttccctcgggaaaaact

SEQ ID NO: 99664 - DNA, 19 bp, Homo sapiens
  siRNA target sequence for ROS1 (NM_002944.2,6251-6269).
ctgaatgaaccccaataca

SEQ ID NO: 99665 - DNA, 19 bp, Homo sapiens
  siRNA target sequence for ROS1 (NM_002944.2,6289-6307).
gggaggagaccttcttact

SEQ ID NO: 99666 - DNA, 19 bp, Homo sapiens
  siRNA target sequence for ROS1 (NM_002944.2,6291-6309).
gaggagaccttcttactta

SEQ ID NO: 99667 - DNA, 19 bp, Homo sapiens
  siRNA target sequence for ROS1 (NM_002944.2,6293-6311).
ggagaccttcttacttatt

SEQ ID NO: 99668 - DNA, 19 bp, Homo sapiens
  siRNA target sequence for ROS1 (NM_002944.2,6294-6312).
gagaccttcttacttattt

SEQ ID NO: 99669 - DNA, 19 bp, Homo sapiens
  siRNA target sequence for ROS1 (NM_002944.2,6320-6338).
gcccggatggcaacgtttt

SEQ ID NO: 99670 - DNA, 19 bp, Homo sapiens
  siRNA target sequence for ROS1 (NM_002944.2,6321-6339).
cccggatggcaacgtttta

SEQ ID NO: 99671 - DNA, 19 bp, Homo sapiens
  siRNA target sequence for ROS1 (NM_002944.2,6322-6340).
ccggatggcaacgttttat

SEQ ID NO: 99672 - DNA, 19 bp, Homo sapiens
  siRNA target sequence for ROS1 (NM_002944.2,6333-6351).
cgttttatggtcctttact

SEQ ID NO: 99673 - DNA, 19 bp, Homo sapiens
  siRNA target sequence for ROS1 (NM_002944.2,6368-6386).
gtagacctgtgtgtagata

SEQ ID NO: 99674 - DNA, 19 bp, Homo sapiens
  siRNA target sequence for ROS1 (NM_002944.2,6371-6389).
gacctgtgtgtagatattt

SEQ ID NO: 99675 - DNA, 19 bp, Homo sapiens
  siRNA target sequence for ROS1 (NM_002944.2,6409-6427).
ggaacggatgcatttcatt

SEQ ID NO: 99676 - DNA, 19 bp, Homo sapiens
  siRNA target sequence for ROS1 (NM_002944.2,6413-6431).
cggatgcatttcattcaca

SEQ ID NO: 99677 - DNA, 19 bp, Homo sapiens
  siRNA target sequence for ROS1 (NM_002944.2,6453-6471).
gccttgtttccgtgaaaga

SEQ ID NO: 99678 - DNA, 19 bp, Homo sapiens
  siRNA target sequence for ROS1 (NM_002944.2,6455-6473).
cttgtttccgtgaaagact

SEQ ID NO: 99679 - DNA, 19 bp, Homo sapiens
  siRNA target sequence for ROS1 (NM_002944.2,6458-6476).
gtttccgtgaaagactata

SEQ ID NO: 99680 - DNA, 19 bp, Homo sapiens
  siRNA target sequence for ROS1 (NM_002944.2,6477-6495).
ccagtccacggatagtgaa

SEQ ID NO: 99681 - DNA, 19 bp, Homo sapiens
  siRNA target sequence for ROS1 (NM_002944.2,6480-6498).
gtccacggatagtgaagat

SEQ ID NO: 99682 - DNA, 19 bp, Homo sapiens
  siRNA target sequence for ROS1 (NM_002944.2,6512-6530).
ctcgccagagacatctata

SEQ ID NO: 99683 - DNA, 19 bp, Homo sapiens
  siRNA target sequence for ROS1 (NM_002944.2,6579-6597).
ggatggctccagaaagttt

SEQ ID NO: 99684 - DNA, 19 bp, Homo sapiens
  siRNA target sequence for ROS1 (NM_002944.2,6610-6628).
cttcactactcaatctgat

SEQ ID NO: 99685 - DNA, 19 bp, Homo sapiens
  siRNA target sequence for ROS1 (NM_002944.2,6613-6631).
cactactcaatctgatgta

SEQ ID NO: 99686 - DNA, 19 bp, Homo sapiens
  siRNA target sequence for ROS1 (NM_002944.2,6649-6667).
gatttgggagattttaact

SEQ ID NO: 99687 - DNA, 19 bp, Homo sapiens
  siRNA target sequence for ROS1 (NM_002944.2,6761-6779).
gatgatctgtggaatttaa

SEQ ID NO: 99688 - DNA, 19 bp, Homo sapiens
  siRNA target sequence for ROS1 (NM_002944.2,6804-6822).
ccgaccaaagacctacttt

SEQ ID NO: 99689 - DNA, 19 bp, Homo sapiens
  siRNA target sequence for ROS1 (NM_002944.2,6805-6823).
cgaccaaagacctactttt

SEQ ID NO: 99690 - DNA, 19 bp, Homo sapiens
  siRNA target sequence for ROS1 (NM_002944.2,6909-6927).
gagtcataaatgaaagctt

SEQ ID NO: 99691 - DNA, 19 bp, Homo sapiens
  siRNA target sequence for ROS1 (NM_002944.2,6933-6951).
gtgaagatggcgatgtgat

SEQ ID NO: 99692 - DNA, 19 bp, Homo sapiens
  siRNA target sequence for ROS1 (NM_002944.2,6938-6956).
gatggcgatgtgatttgtt

SEQ ID NO: 99693 - DNA, 19 bp, Homo sapiens
  siRNA target sequence for ROS1 (NM_002944.2,6941-6959).
ggcgatgtgatttgtttga

SEQ ID NO: 99694 - DNA, 19 bp, Homo sapiens
  siRNA target sequence for ROS1 (NM_002944.2,6942-6960).
gcgatgtgatttgtttgaa

SEQ ID NO: 99695 - DNA, 19 bp, Homo sapiens
  siRNA target sequence for ROS1 (NM_002944.2,6943-6961).
cgatgtgatttgtttgaat

SEQ ID NO: 99696 - DNA, 19 bp, Homo sapiens
  siRNA target sequence for ROS1 (NM_002944.2,6970-6988).
cattatgccagttgcttta

SEQ ID NO: 99697 - DNA, 19 bp, Homo sapiens
  siRNA target sequence for ROS1 (NM_002944.2,7003-7021).
ccgagaagggttaaactat

SEQ ID NO: 99698 - DNA, 19 bp, Homo sapiens
  siRNA target sequence for ROS1 (NM_002944.2,7005-7023).
gagaagggttaaactatat

SEQ ID NO: 99699 - DNA, 19 bp, Homo sapiens
  siRNA target sequence for ROS1 (NM_002944.2,7120-7138).
ggaaccacatgcagacaaa

SEQ ID NO: 99700 - DNA, 19 bp, Homo sapiens
  siRNA target sequence for ROS1 (NM_002944.2,7124-7142).
ccacatgcagacaaagatt

SEQ ID NO: 99701 - DNA, 19 bp, Homo sapiens
  siRNA target sequence for RP2 (NM_006915.1,267-285).
gcgagaaggttgatccaaa

SEQ ID NO: 99702 - DNA, 19 bp, Homo sapiens
  siRNA target sequence for RP2 (NM_006915.1,268-286).
cgagaaggttgatccaaaa

SEQ ID NO: 99703 - DNA, 19 bp, Homo sapiens
  siRNA target sequence for RP2 (NM_006915.1,303-321).
gactgaaggatgaaacagt

SEQ ID NO: 99704 - DNA, 19 bp, Homo sapiens
  siRNA target sequence for RP2 (NM_006915.1,339-357).
cggtagcaggacaacagtt

SEQ ID NO: 99705 - DNA, 19 bp, Homo sapiens
  siRNA target sequence for RP2 (NM_006915.1,340-358).
ggtagcaggacaacagttt

SEQ ID NO: 99706 - DNA, 19 bp, Homo sapiens
  siRNA target sequence for RP2 (NM_006915.1,376-394).
gaactgtaacatctatatt

SEQ ID NO: 99707 - DNA, 19 bp, Homo sapiens
  siRNA target sequence for RP2 (NM_006915.1,398-416).
gatcactctgctacagtta

SEQ ID NO: 99708 - DNA, 19 bp, Homo sapiens
  siRNA target sequence for RP2 (NM_006915.1,403-421).
ctctgctacagttaccatt

SEQ ID NO: 99709 - DNA, 19 bp, Homo sapiens
  siRNA target sequence for RP2 (NM_006915.1,408-426).
ctacagttaccattgatga

SEQ ID NO: 99710 - DNA, 19 bp, Homo sapiens
  siRNA target sequence for RP2 (NM_006915.1,417-435).
ccattgatgactgtactaa

SEQ ID NO: 99711 - DNA, 19 bp, Homo sapiens
  siRNA target sequence for RP2 (NM_006915.1,470-488).
gtgtttttccggaattgca

SEQ ID NO: 99712 - DNA, 19 bp, Homo sapiens
  siRNA target sequence for RP2 (NM_006915.1,504-522).
cattagcctgccaacaatt

SEQ ID NO: 99713 - DNA, 19 bp, Homo sapiens
  siRNA target sequence for RP2 (NM_006915.1,524-542).
cgtgtgcgagattgtagaa

SEQ ID NO: 99714 - DNA, 19 bp, Homo sapiens
  siRNA target sequence for RP2 (NM_006915.1,525-543).
gtgtgcgagattgtagaaa

SEQ ID NO: 99715 - DNA, 19 bp, Homo sapiens
  siRNA target sequence for RP2 (NM_006915.1,544-562).
gctggaagtctttttgtgt

SEQ ID NO: 99716 - DNA, 19 bp, Homo sapiens
  siRNA target sequence for RP2 (NM_006915.1,545-563).
ctggaagtctttttgtgtt

SEQ ID NO: 99717 - DNA, 19 bp, Homo sapiens
  siRNA target sequence for RP2 (NM_006915.1,622-640).
gtactatcctgaattagct

SEQ ID NO: 99718 - DNA, 19 bp, Homo sapiens
  siRNA target sequence for RP2 (NM_006915.1,653-671).
gatgcagggctaagtatct

SEQ ID NO: 99719 - DNA, 19 bp, Homo sapiens
  siRNA target sequence for RP2 (NM_006915.1,750-768).
ctgtggttcaggactatgt

SEQ ID NO: 99720 - DNA, 19 bp, Homo sapiens
  siRNA target sequence for RP2 (NM_006915.1,761-779).
gactatgttcctataccta

SEQ ID NO: 99721 - DNA, 19 bp, Homo sapiens
  siRNA target sequence for RP2 (NM_006915.1,857-875).
cagaagagcagcgatgaat

SEQ ID NO: 99722 - DNA, 19 bp, Homo sapiens
  siRNA target sequence for RP2 (NM_006915.1,859-877).
gaagagcagcgatgaatca

SEQ ID NO: 99723 - DNA, 19 bp, Homo sapiens
  siRNA target sequence for RP2 (NM_006915.1,880-898).
cttagtggtattatttgct

SEQ ID NO: 99724 - DNA, 19 bp, Homo sapiens
  siRNA target sequence for RP2 (NM_006915.1,899-917).
ggtgattacactattgcaa

SEQ ID NO: 99725 - DNA, 19 bp, Homo sapiens
  siRNA target sequence for RP2 (NM_006915.1,1084-1102).
ggatggtgctgtagaagta

SEQ ID NO: 99726 - DNA, 19 bp, Homo sapiens
  siRNA target sequence for RP2 (NM_006915.1,1094-1112).
gtagaagtatgtcaactta

SEQ ID NO: 99727 - DNA, 19 bp, Homo sapiens
  siRNA target sequence for RP2 (NM_006915.1,1100-1118).
gtatgtcaacttattgtaa

SEQ ID NO: 99728 - DNA, 19 bp, Homo sapiens
  siRNA target sequence for RP2 (NM_006915.1,1104-1122).
gtcaacttattgtaaacga

SEQ ID NO: 99729 - DNA, 19 bp, Homo sapiens
  siRNA target sequence for RP2 (NM_006915.1,1109-1127).
cttattgtaaacgagatat

SEQ ID NO: 99730 - DNA, 19 bp, Homo sapiens
  siRNA target sequence for RP2 (NM_006915.1,1129-1147).
caatgggaccaagatgttt

SEQ ID NO: 99731 - DNA, 19 bp, Homo sapiens
  siRNA target sequence for RP2 (NM_006915.1,1165-1183).
gacggcatctggagatgta

SEQ ID NO: 99732 - DNA, 19 bp, Homo sapiens
  siRNA target sequence for RP2 (NM_006915.1,1167-1185).
cggcatctggagatgtaga

SEQ ID NO: 99733 - DNA, 19 bp, Homo sapiens
  siRNA target sequence for RP2 (NM_006915.1,1181-1199).
gtagacagcttctacaact

SEQ ID NO: 99734 - DNA, 19 bp, Homo sapiens
  siRNA target sequence for RP2 (NM_006915.1,1192-1210).
ctacaactttgctgatata

SEQ ID NO: 99735 - DNA, 19 bp, Homo sapiens
  siRNA target sequence for RPS6KA1 (NM_002953.2,326-344).
ctgatccatcccatttcga

SEQ ID NO: 99736 - DNA, 19 bp, Homo sapiens
  siRNA target sequence for RPS6KA1 (NM_002953.2,416-434).
gtgggcacctgtatgctat

SEQ ID NO: 99737 - DNA, 19 bp, Homo sapiens
  siRNA target sequence for RPS6KA1 (NM_002953.2,447-465).
gaaggcaacgctgaaagta

SEQ ID NO: 99738 - DNA, 19 bp, Homo sapiens
  siRNA target sequence for RPS6KA1 (NM_002953.2,498-516).
catcctggctgatgtaaat

SEQ ID NO: 99739 - DNA, 19 bp, Homo sapiens
  siRNA target sequence for RPS6KA1 (NM_002953.2,801-819).
cgagaagaaggcctattct

SEQ ID NO: 99740 - DNA, 19 bp, Homo sapiens
  siRNA target sequence for RPS6KA1 (NM_002953.2,893-911).
ggtcctatggggtgttgat

SEQ ID NO: 99741 - DNA, 19 bp, Homo sapiens
  siRNA target sequence for RPS6KA1 (NM_002953.2,1400-1418).
gtgacggctacgtggtaaa

SEQ ID NO: 99742 - DNA, 19 bp, Homo sapiens
  siRNA target sequence for RPS6KA1 (NM_002953.2,1410-1428).
cgtggtaaaggagacaatt

SEQ ID NO: 99743 - DNA, 19 bp, Homo sapiens
  siRNA target sequence for RPS6KA1 (NM_002953.2,1704-1722).
gcacaccattggcaaaact

SEQ ID NO: 99744 - DNA, 19 bp, Homo sapiens
  siRNA target sequence for RPS6KA1 (NM_002953.2,1769-1787).
ccagcaacatcctgtatgt

SEQ ID NO: 99745 - DNA, 19 bp, Homo sapiens
  siRNA target sequence for RPS6KA1 (NM_002953.2,1817-1835).
gcatctgtgactttggttt

SEQ ID NO: 99746 - DNA, 19 bp, Homo sapiens
  siRNA target sequence for RPS6KA1 (NM_002953.2,2062-2080).
ctcagtgggggaaattgga

SEQ ID NO: 99747 - DNA, 19 bp, Homo sapiens
  siRNA target sequence for RPS6KA2 (NM_021135.3,243-261).
gccgtgcgcaggttcttct

SEQ ID NO: 99748 - DNA, 19 bp, Homo sapiens
  siRNA target sequence for RPS6KA2 (NM_021135.3,500-518).
gaaagccaccctaaaagtt

SEQ ID NO: 99749 - DNA, 19 bp, Homo sapiens
  siRNA target sequence for RPS6KA2 (NM_021135.3,795-813).
gatgaagaggggcacatta

SEQ ID NO: 99750 - DNA, 19 bp, Homo sapiens
  siRNA target sequence for RPS6KA2 (NM_021135.3,877-895).
gcgggacgatcgagtacat

SEQ ID NO: 99751 - DNA, 19 bp, Homo sapiens
  siRNA target sequence for RPS6KA2 (NM_021135.3,1085-1103).
gctgcgagctctcttcaaa

SEQ ID NO: 99752 - DNA, 19 bp, Homo sapiens
  siRNA target sequence for RPS6KA2 (NM_021135.3,1158-1176).
cgccatcccttctttgtga

SEQ ID NO: 99753 - DNA, 19 bp, Homo sapiens
  siRNA target sequence for RPS6KA2 (NM_021135.3,1322-1340).
cgctcatcacctgtttaga

SEQ ID NO: 99754 - DNA, 19 bp, Homo sapiens
  siRNA target sequence for RPS6KA2 (NM_021135.3,1425-1443).
cagttacacgggaacaaca

SEQ ID NO: 99755 - DNA, 19 bp, Homo sapiens
  siRNA target sequence for RPS6KA2 (NM_021135.3,1453-1471).
ccgatggctacgagatcaa

SEQ ID NO: 99756 - DNA, 19 bp, Homo sapiens
  siRNA target sequence for RPS6KA2 (NM_021135.3,1504-1522).
gcaagcgatgtgtgcataa

SEQ ID NO: 99757 - DNA, 19 bp, Homo sapiens
  siRNA target sequence for RPS6KA2 (NM_021135.3,1505-1523).
caagcgatgtgtgcataaa

SEQ ID NO: 99758 - DNA, 19 bp, Homo sapiens
  siRNA target sequence for RPS6KA2 (NM_021135.3,1534-1552).
ccgagtatgccgtgaagat

SEQ ID NO: 99759 - DNA, 19 bp, Homo sapiens
  siRNA target sequence for RPS6KA2 (NM_021135.3,1713-1731).
ctccggcagagatacttct

SEQ ID NO: 99760 - DNA, 19 bp, Homo sapiens
  siRNA target sequence for RPS6KA2 (NM_021135.3,1930-1948).
cctgctacacggccaattt

SEQ ID NO: 99761 - DNA, 19 bp, Homo sapiens
  siRNA target sequence for RPS6KA2 (NM_021135.3,1933-1951).
gctacacggccaatttcgt

SEQ ID NO: 99762 - DNA, 19 bp, Homo sapiens
  siRNA target sequence for RPS6KA2 (NM_021135.3,1967-1985).
gaagcgtcaaggctatgat

SEQ ID NO: 99763 - DNA, 19 bp, Homo sapiens
  siRNA target sequence for RPS6KA2 (NM_021135.3,2124-2142).
ggaaactgggactcgatat

SEQ ID NO: 99764 - DNA, 19 bp, Homo sapiens
  siRNA target sequence for RPS6KA3 (NM_004586.1,20-38).
cggacccgtggcagaagat

SEQ ID NO: 99765 - DNA, 19 bp, Homo sapiens
  siRNA target sequence for RPS6KA3 (NM_004586.1,65-83).
ctgagaatggacagcaaat

SEQ ID NO: 99766 - DNA, 19 bp, Homo sapiens
  siRNA target sequence for RPS6KA3 (NM_004586.1,344-362).
caaaaatggaacgtgatat

SEQ ID NO: 99767 - DNA, 19 bp, Homo sapiens
  siRNA target sequence for RPS6KA3 (NM_004586.1,391-409).
gtcaagttgcattatgctt

SEQ ID NO: 99768 - DNA, 19 bp, Homo sapiens
  siRNA target sequence for RPS6KA3 (NM_004586.1,412-430).
caaactgaagggaagttgt

SEQ ID NO: 99769 - DNA, 19 bp, Homo sapiens
  siRNA target sequence for RPS6KA3 (NM_004586.1,486-504).
ggtgatgttcacagaagaa

SEQ ID NO: 99770 - DNA, 19 bp, Homo sapiens
  siRNA target sequence for RPS6KA3 (NM_004586.1,553-571).
catagcctgggaataattt

SEQ ID NO: 99771 - DNA, 19 bp, Homo sapiens
  siRNA target sequence for RPS6KA3 (NM_004586.1,587-605).
cagaaaatatacttcttga

SEQ ID NO: 99772 - DNA, 19 bp, Homo sapiens
  siRNA target sequence for RPS6KA3 (NM_004586.1,607-625).
gaagaaggtcacatcaagt

SEQ ID NO: 99773 - DNA, 19 bp, Homo sapiens
  siRNA target sequence for RPS6KA3 (NM_004586.1,638-656).
gcctaagtaaagagtctat

SEQ ID NO: 99774 - DNA, 19 bp, Homo sapiens
  siRNA target sequence for RPS6KA3 (NM_004586.1,639-657).
cctaagtaaagagtctatt

SEQ ID NO: 99775 - DNA, 19 bp, Homo sapiens
  siRNA target sequence for RPS6KA3 (NM_004586.1,649-667).
gagtctattgaccatgaaa

SEQ ID NO: 99776 - DNA, 19 bp, Homo sapiens
  siRNA target sequence for RPS6KA3 (NM_004586.1,653-671).
ctattgaccatgaaaagaa

SEQ ID NO: 99777 - DNA, 19 bp, Homo sapiens
  siRNA target sequence for RPS6KA3 (NM_004586.1,817-835).
cgaaaagaaacaatgacta

SEQ ID NO: 99778 - DNA, 19 bp, Homo sapiens
  siRNA target sequence for RPS6KA3 (NM_004586.1,883-901).
gcgcagagtcttttacgaa

SEQ ID NO: 99779 - DNA, 19 bp, Homo sapiens
  siRNA target sequence for RPS6KA3 (NM_004586.1,884-902).
cgcagagtcttttacgaat

SEQ ID NO: 99780 - DNA, 19 bp, Homo sapiens
  siRNA target sequence for RPS6KA3 (NM_004586.1,888-906).
gagtcttttacgaatgctt

SEQ ID NO: 99781 - DNA, 19 bp, Homo sapiens
  siRNA target sequence for RPS6KA3 (NM_004586.1,912-930).
gcgaaatcctgcaaacaga

SEQ ID NO: 99782 - DNA, 19 bp, Homo sapiens
  siRNA target sequence for RPS6KA3 (NM_004586.1,914-932).
gaaatcctgcaaacagatt

SEQ ID NO: 99783 - DNA, 19 bp, Homo sapiens
  siRNA target sequence for RPS6KA3 (NM_004586.1,991-1009).
gactggaataaactgtata

SEQ ID NO: 99784 - DNA, 19 bp, Homo sapiens
  siRNA target sequence for RPS6KA3 (NM_004586.1,1044-1062).
gggcaggcctgaagataca

SEQ ID NO: 99785 - DNA, 19 bp, Homo sapiens
  siRNA target sequence for RPS6KA3 (NM_004586.1,1127-1145).
ctaatgcacatcagctttt

SEQ ID NO: 99786 - DNA, 19 bp, Homo sapiens
  siRNA target sequence for RPS6KA3 (NM_004586.1,1141-1159).
ctttttcgggggtttagtt

SEQ ID NO: 99787 - DNA, 19 bp, Homo sapiens
  siRNA target sequence for RPS6KA3 (NM_004586.1,1198-1216).
cagacagttggtgtacatt

SEQ ID NO: 99788 - DNA, 19 bp, Homo sapiens
  siRNA target sequence for RPS6KA3 (NM_004586.1,1202-1220).
cagttggtgtacattcaat

SEQ ID NO: 99789 - DNA, 19 bp, Homo sapiens
  siRNA target sequence for RPS6KA3 (NM_004586.1,1307-1325).
gcaagagatgtatacataa

SEQ ID NO: 99790 - DNA, 19 bp, Homo sapiens
  siRNA target sequence for RPS6KA3 (NM_004586.1,1373-1391).
gagacccaacagaagaaat

SEQ ID NO: 99791 - DNA, 19 bp, Homo sapiens
  siRNA target sequence for RPS6KA3 (NM_004586.1,1416-1434).
gcatccaaacattatcact

SEQ ID NO: 99792 - DNA, 19 bp, Homo sapiens
  siRNA target sequence for RPS6KA3 (NM_004586.1,1420-1438).
ccaaacattatcactctaa

SEQ ID NO: 99793 - DNA, 19 bp, Homo sapiens
  siRNA target sequence for RPS6KA3 (NM_004586.1,1425-1443).
cattatcactctaaaggat

SEQ ID NO: 99794 - DNA, 19 bp, Homo sapiens
  siRNA target sequence for RPS6KA3 (NM_004586.1,1431-1449).
cactctaaaggatgtatat

SEQ ID NO: 99795 - DNA, 19 bp, Homo sapiens
  siRNA target sequence for RPS6KA3 (NM_004586.1,1467-1485).
gtatgtagtaacagaactt

SEQ ID NO: 99796 - DNA, 19 bp, Homo sapiens
  siRNA target sequence for RPS6KA3 (NM_004586.1,1493-1511).
gaggtgaattgctggataa

SEQ ID NO: 99797 - DNA, 19 bp, Homo sapiens
  siRNA target sequence for RPS6KA3 (NM_004586.1,1555-1573).
gtcctgttcactataacta

SEQ ID NO: 99798 - DNA, 19 bp, Homo sapiens
  siRNA target sequence for RPS6KA3 (NM_004586.1,1558-1576).
ctgttcactataactaaaa

SEQ ID NO: 99799 - DNA, 19 bp, Homo sapiens
  siRNA target sequence for RPS6KA3 (NM_004586.1,1652-1670).
ctggtaatccggaatctat

SEQ ID NO: 99800 - DNA, 19 bp, Homo sapiens
  siRNA target sequence for RPS6KA3 (NM_004586.1,1660-1678).
ccggaatctattcgaattt

SEQ ID NO: 99801 - DNA, 19 bp, Homo sapiens
  siRNA target sequence for RPS6KA3 (NM_004586.1,1662-1680).
ggaatctattcgaatttgt

SEQ ID NO: 99802 - DNA, 19 bp, Homo sapiens
  siRNA target sequence for RPS6KA3 (NM_004586.1,1667-1685).
ctattcgaatttgtgattt

SEQ ID NO: 99803 - DNA, 19 bp, Homo sapiens
  siRNA target sequence for RPS6KA3 (NM_004586.1,1701-1719).
gctgagagcggaaaatggt

SEQ ID NO: 99804 - DNA, 19 bp, Homo sapiens
  siRNA target sequence for RPS6KA3 (NM_004586.1,1709-1727).
cggaaaatggtcttctcat

SEQ ID NO: 99805 - DNA, 19 bp, Homo sapiens
  siRNA target sequence for RPS6KA3 (NM_004586.1,1732-1750).
ccttgttacactgcaaatt

SEQ ID NO: 99806 - DNA, 19 bp, Homo sapiens
  siRNA target sequence for RPS6KA3 (NM_004586.1,1733-1751).
cttgttacactgcaaattt

SEQ ID NO: 99807 - DNA, 19 bp, Homo sapiens
  siRNA target sequence for RPS6KA3 (NM_004586.1,1813-1831).
ggtgtcctactctatacaa

SEQ ID NO: 99808 - DNA, 19 bp, Homo sapiens
  siRNA target sequence for RPS6KA3 (NM_004586.1,1814-1832).
gtgtcctactctatacaat

SEQ ID NO: 99809 - DNA, 19 bp, Homo sapiens
  siRNA target sequence for RPS6KA3 (NM_004586.1,1819-1837).
ctactctatacaatgctta

SEQ ID NO: 99810 - DNA, 19 bp, Homo sapiens
  siRNA target sequence for RPS6KA3 (NM_004586.1,1839-1857).
cggttacactccatttgca

SEQ ID NO: 99811 - DNA, 19 bp, Homo sapiens
  siRNA target sequence for RPS6KA3 (NM_004586.1,1894-1912).
cgaataggtagcggaaaat

SEQ ID NO: 99812 - DNA, 19 bp, Homo sapiens
  siRNA target sequence for RPS6KA3 (NM_004586.1,1895-1913).
gaataggtagcggaaaatt

SEQ ID NO: 99813 - DNA, 19 bp, Homo sapiens
  siRNA target sequence for RPS6KA3 (NM_004586.1,1968-1986).
gtcaaagatgcttcatgta

SEQ ID NO: 99814 - DNA, 19 bp, Homo sapiens
  siRNA target sequence for RPS6KA3 (NM_004586.1,2079-2097).
ggatgcaccacatctagta

SEQ ID NO: 99815 - DNA, 19 bp, Homo sapiens
  siRNA target sequence for RPS6KA3 (NM_004586.1,2080-2098).
gatgcaccacatctagtaa

SEQ ID NO: 99816 - DNA, 19 bp, Homo sapiens
  siRNA target sequence for RPS6KA3 (NM_004586.1,2102-2120).
gtgccatggcagctacata

SEQ ID NO: 99817 - DNA, 19 bp, Homo sapiens
  siRNA target sequence for RPS6KA3 (NM_004586.1,2104-2122).
gccatggcagctacatatt

SEQ ID NO: 99818 - DNA, 19 bp, Homo sapiens
  siRNA target sequence for RPS6KA3 (NM_004586.1,2106-2124).
catggcagctacatattct

SEQ ID NO: 99819 - DNA, 19 bp, Homo sapiens
  siRNA target sequence for RPS6KA3 (NM_004586.1,2114-2132).
ctacatattctgctttgaa

SEQ ID NO: 99820 - DNA, 19 bp, Homo sapiens
  siRNA target sequence for RPS6KA3 (NM_004586.1,2123-2141).
ctgctttgaaccgtaatca

SEQ ID NO: 99821 - DNA, 19 bp, Homo sapiens
  siRNA target sequence for RPS6KA3 (NM_004586.1,2125-2143).
gctttgaaccgtaatcagt

SEQ ID NO: 99822 - DNA, 19 bp, Homo sapiens
  siRNA target sequence for RPS6KA3 (NM_004586.1,2179-2197).
gctcagcggagaggtatta

SEQ ID NO: 99823 - DNA, 19 bp, Homo sapiens
  siRNA target sequence for RPS6KA3 (NM_004586.1,2180-2198).
ctcagcggagaggtattaa

SEQ ID NO: 99824 - DNA, 19 bp, Homo sapiens
  siRNA target sequence for RPS6KA4 (NM_003942.1,521-539).
gcacaagctcggcatcatt

SEQ ID NO: 99825 - DNA, 19 bp, Homo sapiens
  siRNA target sequence for RPS6KA4 (NM_003942.1,522-540).
cacaagctcggcatcattt

SEQ ID NO: 99826 - DNA, 19 bp, Homo sapiens
  siRNA target sequence for RPS6KA4 (NM_003942.1,887-905).
gcggctgctttgtaaggat

SEQ ID NO: 99827 - DNA, 19 bp, Homo sapiens
  siRNA target sequence for RPS6KA4 (NM_003942.1,1114-1132).
ctggggacccccgaatctt

SEQ ID NO: 99828 - DNA, 19 bp, Homo sapiens
  siRNA target sequence for RPS6KA4 (NM_003942.1,1153-1171).
caccctccattctctttga

SEQ ID NO: 99829 - DNA, 19 bp, Homo sapiens
  siRNA target sequence for RPS6KA4 (NM_003942.1,1852-1870).
gcgtcattctgtacatgat

SEQ ID NO: 99830 - DNA, 19 bp, Homo sapiens
  siRNA target sequence for RPS6KA5 (NM_004755.2,305-323).
cgagctgcggactgctaat

SEQ ID NO: 99831 - DNA, 19 bp, Homo sapiens
  siRNA target sequence for RPS6KA5 (NM_004755.2,306-324).
gagctgcggactgctaatt

SEQ ID NO: 99832 - DNA, 19 bp, Homo sapiens
  siRNA target sequence for RPS6KA5 (NM_004755.2,311-329).
gcggactgctaatttgaca

SEQ ID NO: 99833 - DNA, 19 bp, Homo sapiens
  siRNA target sequence for RPS6KA5 (NM_004755.2,443-461).
gctgtatgccatgaaagtt

SEQ ID NO: 99834 - DNA, 19 bp, Homo sapiens
  siRNA target sequence for RPS6KA5 (NM_004755.2,520-538).
gacaagtcctggaacacat

SEQ ID NO: 99835 - DNA, 19 bp, Homo sapiens
  siRNA target sequence for RPS6KA5 (NM_004755.2,541-559).
ggcagtcgccatttttggt

SEQ ID NO: 99836 - DNA, 19 bp, Homo sapiens
  siRNA target sequence for RPS6KA5 (NM_004755.2,542-560).
gcagtcgccatttttggta

SEQ ID NO: 99837 - DNA, 19 bp, Homo sapiens
  siRNA target sequence for RPS6KA5 (NM_004755.2,543-561).
cagtcgccatttttggtaa

SEQ ID NO: 99838 - DNA, 19 bp, Homo sapiens
  siRNA target sequence for RPS6KA5 (NM_004755.2,547-565).
cgccatttttggtaacatt

SEQ ID NO: 99839 - DNA, 19 bp, Homo sapiens
  siRNA target sequence for RPS6KA5 (NM_004755.2,637-655).
ctcatctttctcaaagaga

SEQ ID NO: 99840 - DNA, 19 bp, Homo sapiens
  siRNA target sequence for RPS6KA5 (NM_004755.2,666-684).
gagcatgaggtgcagattt

SEQ ID NO: 99841 - DNA, 19 bp, Homo sapiens
  siRNA target sequence for RPS6KA5 (NM_004755.2,722-740).
caagttggggattatatat

SEQ ID NO: 99842 - DNA, 19 bp, Homo sapiens
  siRNA target sequence for RPS6KA5 (NM_004755.2,725-743).
gttggggattatatatcgt

SEQ ID NO: 99843 - DNA, 19 bp, Homo sapiens
  siRNA target sequence for RPS6KA5 (NM_004755.2,730-748).
ggattatatatcgtgatat

SEQ ID NO: 99844 - DNA, 19 bp, Homo sapiens
  siRNA target sequence for RPS6KA5 (NM_004755.2,731-749).
gattatatatcgtgatatt

SEQ ID NO: 99845 - DNA, 19 bp, Homo sapiens
  siRNA target sequence for RPS6KA5 (NM_004755.2,758-776).
gaatattctacttgattct

SEQ ID NO: 99846 - DNA, 19 bp, Homo sapiens
  siRNA target sequence for RPS6KA5 (NM_004755.2,929-947).
gtggagtttgggtgttcta

SEQ ID NO: 99847 - DNA, 19 bp, Homo sapiens
  siRNA target sequence for RPS6KA5 (NM_004755.2,934-952).
gtttgggtgttctaatgta

SEQ ID NO: 99848 - DNA, 19 bp, Homo sapiens
  siRNA target sequence for RPS6KA5 (NM_004755.2,938-956).
gggtgttctaatgtatgaa

SEQ ID NO: 99849 - DNA, 19 bp, Homo sapiens
  siRNA target sequence for RPS6KA5 (NM_004755.2,1013-1031).
gatatctaggagaatatta

SEQ ID NO: 99850 - DNA, 19 bp, Homo sapiens
  siRNA target sequence for RPS6KA5 (NM_004755.2,1041-1059).
cctccatatccccaagaaa

SEQ ID NO: 99851 - DNA, 19 bp, Homo sapiens
  siRNA target sequence for RPS6KA5 (NM_004755.2,1042-1060).
ctccatatccccaagaaat

SEQ ID NO: 99852 - DNA, 19 bp, Homo sapiens
  siRNA target sequence for RPS6KA5 (NM_004755.2,1052-1070).
ccaagaaatgagtgcttta

SEQ ID NO: 99853 - DNA, 19 bp, Homo sapiens
  siRNA target sequence for RPS6KA5 (NM_004755.2,1066-1084).
ctttagcgaaagacctaat

SEQ ID NO: 99854 - DNA, 19 bp, Homo sapiens
  siRNA target sequence for RPS6KA5 (NM_004755.2,1080-1098).
ctaattcagcgtcttttga

SEQ ID NO: 99855 - DNA, 19 bp, Homo sapiens
  siRNA target sequence for RPS6KA5 (NM_004755.2,1088-1106).
gcgtcttttgatgaaagat

SEQ ID NO: 99856 - DNA, 19 bp, Homo sapiens
  siRNA target sequence for RPS6KA5 (NM_004755.2,1155-1173).
gaacatctcttctttcaga

SEQ ID NO: 99857 - DNA, 19 bp, Homo sapiens
  siRNA target sequence for RPS6KA5 (NM_004755.2,1223-1241).
gccagtcattcgagatgaa

SEQ ID NO: 99858 - DNA, 19 bp, Homo sapiens
  siRNA target sequence for RPS6KA5 (NM_004755.2,1224-1242).
ccagtcattcgagatgaat

SEQ ID NO: 99859 - DNA, 19 bp, Homo sapiens
  siRNA target sequence for RPS6KA5 (NM_004755.2,1229-1247).
cattcgagatgaattagat

SEQ ID NO: 99860 - DNA, 19 bp, Homo sapiens
  siRNA target sequence for RPS6KA5 (NM_004755.2,1347-1365).
gttgctccttccatcctat

SEQ ID NO: 99861 - DNA, 19 bp, Homo sapiens
  siRNA target sequence for RPS6KA5 (NM_004755.2,1350-1368).
gctccttccatcctattca

SEQ ID NO: 99862 - DNA, 19 bp, Homo sapiens
  siRNA target sequence for RPS6KA5 (NM_004755.2,1351-1369).
ctccttccatcctattcaa

SEQ ID NO: 99863 - DNA, 19 bp, Homo sapiens
  siRNA target sequence for RPS6KA5 (NM_004755.2,1361-1379).
cctattcaagcgtaatgca

SEQ ID NO: 99864 - DNA, 19 bp, Homo sapiens
  siRNA target sequence for RPS6KA5 (NM_004755.2,1370-1388).
gcgtaatgcagctgtcata

SEQ ID NO: 99865 - DNA, 19 bp, Homo sapiens
  siRNA target sequence for RPS6KA5 (NM_004755.2,1372-1390).
gtaatgcagctgtcataga

SEQ ID NO: 99866 - DNA, 19 bp, Homo sapiens
  siRNA target sequence for RPS6KA5 (NM_004755.2,1420-1438).
gtcctggagtgacaaatgt

SEQ ID NO: 99867 - DNA, 19 bp, Homo sapiens
  siRNA target sequence for RPS6KA5 (NM_004755.2,1457-1475).
gaaggactctccattctat

SEQ ID NO: 99868 - DNA, 19 bp, Homo sapiens
  siRNA target sequence for RPS6KA5 (NM_004755.2,1460-1478).
ggactctccattctatcaa

SEQ ID NO: 99869 - DNA, 19 bp, Homo sapiens
  siRNA target sequence for RPS6KA5 (NM_004755.2,1465-1483).
ctccattctatcaacacta

SEQ ID NO: 99870 - DNA, 19 bp, Homo sapiens
  siRNA target sequence for RPS6KA5 (NM_004755.2,1468-1486).
cattctatcaacactatga

SEQ ID NO: 99871 - DNA, 19 bp, Homo sapiens
  siRNA target sequence for RPS6KA5 (NM_004755.2,1476-1494).
caacactatgacctagatt

SEQ ID NO: 99872 - DNA, 19 bp, Homo sapiens
  siRNA target sequence for RPS6KA5 (NM_004755.2,1479-1497).
cactatgacctagatttga

SEQ ID NO: 99873 - DNA, 19 bp, Homo sapiens
  siRNA target sequence for RPS6KA5 (NM_004755.2,1534-1552).
gtcgaaagtgtgtgcataa

SEQ ID NO: 99874 - DNA, 19 bp, Homo sapiens
  siRNA target sequence for RPS6KA5 (NM_004755.2,1594-1612).
ggatggaagccaatactca

SEQ ID NO: 99875 - DNA, 19 bp, Homo sapiens
  siRNA target sequence for RPS6KA5 (NM_004755.2,1595-1613).
gatggaagccaatactcaa

SEQ ID NO: 99876 - DNA, 19 bp, Homo sapiens
  siRNA target sequence for RPS6KA5 (NM_004755.2,1731-1749).
ctgtttgagcgcattaaga

SEQ ID NO: 99877 - DNA, 19 bp, Homo sapiens
  siRNA target sequence for RPS6KA5 (NM_004755.2,1733-1751).
gtttgagcgcattaagaaa

SEQ ID NO: 99878 - DNA, 19 bp, Homo sapiens
  siRNA target sequence for RPS6KA5 (NM_004755.2,1771-1789).
cggaagccagctacatcat

SEQ ID NO: 99879 - DNA, 19 bp, Homo sapiens
  siRNA target sequence for RPS6KA5 (NM_004755.2,1787-1805).
catgaggaagcttgtttca

SEQ ID NO: 99880 - DNA, 19 bp, Homo sapiens
  siRNA target sequence for RPS6KA5 (NM_004755.2,1835-1853).
ggtgcacagggatctgaaa

SEQ ID NO: 99881 - DNA, 19 bp, Homo sapiens
  siRNA target sequence for RPS6KA5 (NM_004755.2,1925-1943).
gctaaagccaccggataat

SEQ ID NO: 99882 - DNA, 19 bp, Homo sapiens
  siRNA target sequence for RPS6KA5 (NM_004755.2,2041-2059).
gcgtcattttgtacacaat

SEQ ID NO: 99883 - DNA, 19 bp, Homo sapiens
  siRNA target sequence for RPS6KA5 (NM_004755.2,2107-2125).
gtaccagcgcggtggaaat

SEQ ID NO: 99884 - DNA, 19 bp, Homo sapiens
  siRNA target sequence for RPS6KA5 (NM_004755.2,2144-2162).
gggagatttctcctttgaa

SEQ ID NO: 99885 - DNA, 19 bp, Homo sapiens
  siRNA target sequence for RPS6KA5 (NM_004755.2,2166-2184).
gaagcctggaagaatgtat

SEQ ID NO: 99886 - DNA, 19 bp, Homo sapiens
  siRNA target sequence for RPS6KA5 (NM_004755.2,2185-2203).
cccaagaggctaaagattt

SEQ ID NO: 99887 - DNA, 19 bp, Homo sapiens
  siRNA target sequence for RPS6KA5 (NM_004755.2,2249-2267).
gtctggcttgaggtacaat

SEQ ID NO: 99888 - DNA, 19 bp, Homo sapiens
  siRNA target sequence for RPS6KA5 (NM_004755.2,2253-2271).
ggcttgaggtacaatgaat

SEQ ID NO: 99889 - DNA, 19 bp, Homo sapiens
  siRNA target sequence for RPS6KA5 (NM_004755.2,2264-2282).
caatgaatggctacaagat

SEQ ID NO: 99890 - DNA, 19 bp, Homo sapiens
  siRNA target sequence for RPS6KA5 (NM_004755.2,2373-2391).
cacgcctttaacaaataca

SEQ ID NO: 99891 - DNA, 19 bp, Homo sapiens
  siRNA target sequence for RPS6KA5 (NM_004755.2,2399-2417).
ggggttttgccttcagaat

SEQ ID NO: 99892 - DNA, 19 bp, Homo sapiens
  siRNA target sequence for RPS6KA5 (NM_004755.2,2520-2538).
cattctcacggtaaaacta

SEQ ID NO: 99893 - DNA, 19 bp, Homo sapiens
  siRNA target sequence for RPS6KA6 (NM_014496.1,148-166).
cgagcagcggcgaggtaaa

SEQ ID NO: 99894 - DNA, 19 bp, Homo sapiens
  siRNA target sequence for RPS6KA6 (NM_014496.1,149-167).
gagcagcggcgaggtaaat

SEQ ID NO: 99895 - DNA, 19 bp, Homo sapiens
  siRNA target sequence for RPS6KA6 (NM_014496.1,152-170).
cagcggcgaggtaaatggt

SEQ ID NO: 99896 - DNA, 19 bp, Homo sapiens
  siRNA target sequence for RPS6KA6 (NM_014496.1,157-175).
gcgaggtaaatggtcttaa

SEQ ID NO: 99897 - DNA, 19 bp, Homo sapiens
  siRNA target sequence for RPS6KA6 (NM_014496.1,158-176).
cgaggtaaatggtcttaaa

SEQ ID NO: 99898 - DNA, 19 bp, Homo sapiens
  siRNA target sequence for RPS6KA6 (NM_014496.1,234-252).
gttaaagaaatccctatta

SEQ ID NO: 99899 - DNA, 19 bp, Homo sapiens
  siRNA target sequence for RPS6KA6 (NM_014496.1,245-263).
ccctattactcatcatgtt

SEQ ID NO: 99900 - DNA, 19 bp, Homo sapiens
  siRNA target sequence for RPS6KA6 (NM_014496.1,453-471).
gatatactggtggaagtaa

SEQ ID NO: 99901 - DNA, 19 bp, Homo sapiens
  siRNA target sequence for RPS6KA6 (NM_014496.1,464-482).
ggaagtaaatcatccattt

SEQ ID NO: 99902 - DNA, 19 bp, Homo sapiens
  siRNA target sequence for RPS6KA6 (NM_014496.1,548-566).
gggaggagatgttttcaca

SEQ ID NO: 99903 - DNA, 19 bp, Homo sapiens
  siRNA target sequence for RPS6KA6 (NM_014496.1,628-646).
cccttgctttggatcatct

SEQ ID NO: 99904 - DNA, 19 bp, Homo sapiens
  siRNA target sequence for RPS6KA6 (NM_014496.1,638-656).
ggatcatctgcaccaatta

SEQ ID NO: 99905 - DNA, 19 bp, Homo sapiens
  siRNA target sequence for RPS6KA6 (NM_014496.1,647-665).
gcaccaattaggaattgtt

SEQ ID NO: 99906 - DNA, 19 bp, Homo sapiens
  siRNA target sequence for RPS6KA6 (NM_014496.1,699-717).
gatgaaataggacatatca

SEQ ID NO: 99907 - DNA, 19 bp, Homo sapiens
  siRNA target sequence for RPS6KA6 (NM_014496.1,759-777).
gaaaagaaggcttactcat

SEQ ID NO: 99908 - DNA, 19 bp, Homo sapiens
  siRNA target sequence for RPS6KA6 (NM_014496.1,801-819).
gctcctgaagtagtaaata

SEQ ID NO: 99909 - DNA, 19 bp, Homo sapiens
  siRNA target sequence for RPS6KA6 (NM_014496.1,804-822).
cctgaagtagtaaatagga

SEQ ID NO: 99910 - DNA, 19 bp, Homo sapiens
  siRNA target sequence for RPS6KA6 (NM_014496.1,853-871).
catatggtgttcttatgtt

SEQ ID NO: 99911 - DNA, 19 bp, Homo sapiens
  siRNA target sequence for RPS6KA6 (NM_014496.1,920-938).
gaccatgaatatgatatta

SEQ ID NO: 99912 - DNA, 19 bp, Homo sapiens
  siRNA target sequence for RPS6KA6 (NM_014496.1,951-969).
ggaatgcctcaatttctta

SEQ ID NO: 99913 - DNA, 19 bp, Homo sapiens
  siRNA target sequence for RPS6KA6 (NM_014496.1,979-997).
cacaaagtcttctaaggat

SEQ ID NO: 99914 - DNA, 19 bp, Homo sapiens
  siRNA target sequence for RPS6KA6 (NM_014496.1,1057-1075).
gacatctgttttttgcaaa

SEQ ID NO: 99915 - DNA, 19 bp, Homo sapiens
  siRNA target sequence for RPS6KA6 (NM_014496.1,1235-1253).
caaaggattcagctttgtt

SEQ ID NO: 99916 - DNA, 19 bp, Homo sapiens
  siRNA target sequence for RPS6KA6 (NM_014496.1,1338-1356).
gcacaatttggtgaagtat

SEQ ID NO: 99917 - DNA, 19 bp, Homo sapiens
  siRNA target sequence for RPS6KA6 (NM_014496.1,1339-1357).
cacaatttggtgaagtata

SEQ ID NO: 99918 - DNA, 19 bp, Homo sapiens
  siRNA target sequence for RPS6KA6 (NM_014496.1,1493-1511).
gatgcgctatggacaacat

SEQ ID NO: 99919 - DNA, 19 bp, Homo sapiens
  siRNA target sequence for RPS6KA6 (NM_014496.1,1513-1531).
ccaacattattactttgaa

SEQ ID NO: 99920 - DNA, 19 bp, Homo sapiens
  siRNA target sequence for RPS6KA6 (NM_014496.1,1599-1617).
gaccgtattctcaaacaaa

SEQ ID NO: 99921 - DNA, 19 bp, Homo sapiens
  siRNA target sequence for RPS6KA6 (NM_014496.1,1602-1620).
cgtattctcaaacaaaaat

SEQ ID NO: 99922 - DNA, 19 bp, Homo sapiens
  siRNA target sequence for RPS6KA6 (NM_014496.1,1628-1646).
ggaacgggaggctagtgat

SEQ ID NO: 99923 - DNA, 19 bp, Homo sapiens
  siRNA target sequence for RPS6KA6 (NM_014496.1,1629-1647).
gaacgggaggctagtgata

SEQ ID NO: 99924 - DNA, 19 bp, Homo sapiens
  siRNA target sequence for RPS6KA6 (NM_014496.1,1633-1651).
gggaggctagtgatatact

SEQ ID NO: 99925 - DNA, 19 bp, Homo sapiens
  siRNA target sequence for RPS6KA6 (NM_014496.1,1705-1723).
gtgatcttaaacctagtaa

SEQ ID NO: 99926 - DNA, 19 bp, Homo sapiens
  siRNA target sequence for RPS6KA6 (NM_014496.1,1717-1735).
ctagtaatattttatacat

SEQ ID NO: 99927 - DNA, 19 bp, Homo sapiens
  siRNA target sequence for RPS6KA6 (NM_014496.1,1752-1770).
gcagattcaatcaggatat
